United States Patent Application Publication US 2015/0232836 A1 - sequence listing, part 35

SEQ ID NO: 1353996 - DNA, 15 bp, Homo sapiens
aattcctcacaattt

SEQ ID NO: 1353997 - DNA, 15 bp, Homo sapiens
taattcctcacaatt

SEQ ID NO: 1353998 - DNA, 15 bp, Homo sapiens
ctaattcctcacaat

SEQ ID NO: 1353999 - DNA, 15 bp, Homo sapiens
cctaattcctcacaa

SEQ ID NO: 1354000 - DNA, 15 bp, Homo sapiens
tcctaattcctcaca

SEQ ID NO: 1354001 - DNA, 15 bp, Homo sapiens
ctcctaattcctcac

SEQ ID NO: 1354002 - DNA, 15 bp, Homo sapiens
cctcctaattcctca

SEQ ID NO: 1354003 - DNA, 15 bp, Homo sapiens
ccctcctaattcctc

SEQ ID NO: 1354004 - DNA, 15 bp, Homo sapiens
accctcctaattcct

SEQ ID NO: 1354005 - DNA, 15 bp, Homo sapiens
gaccctcctaattcc

SEQ ID NO: 1354006 - DNA, 15 bp, Homo sapiens
agaccctcctaattc

SEQ ID NO: 1354007 - DNA, 15 bp, Homo sapiens
cagaccctcctaatt

SEQ ID NO: 1354008 - DNA, 15 bp, Homo sapiens
tcagaccctcctaat

SEQ ID NO: 1354009 - DNA, 15 bp, Homo sapiens
atcagaccctcctaa

SEQ ID NO: 1354010 - DNA, 15 bp, Homo sapiens
aatcagaccctccta

SEQ ID NO: 1354011 - DNA, 15 bp, Homo sapiens
caatcagaccctcct

SEQ ID NO: 1354012 - DNA, 15 bp, Homo sapiens
ccaatcagaccctcc

SEQ ID NO: 1354013 - DNA, 15 bp, Homo sapiens
accaatcagaccctc

SEQ ID NO: 1354014 - DNA, 15 bp, Homo sapiens
caccaatcagaccct

SEQ ID NO: 1354015 - DNA, 15 bp, Homo sapiens
ccaccaatcagaccc

SEQ ID NO: 1354016 - DNA, 15 bp, Homo sapiens
gccaccaatcagacc

SEQ ID NO: 1354017 - DNA, 15 bp, Homo sapiens
tgccaccaatcagac

SEQ ID NO: 1354018 - DNA, 15 bp, Homo sapiens
ttgccaccaatcaga

SEQ ID NO: 1354019 - DNA, 15 bp, Homo sapiens
attgccaccaatcag

SEQ ID NO: 1354020 - DNA, 15 bp, Homo sapiens
cattgccaccaatca

SEQ ID NO: 1354021 - DNA, 15 bp, Homo sapiens
gcattgccaccaatc

SEQ ID NO: 1354022 - DNA, 15 bp, Homo sapiens
cgcattgccaccaat

SEQ ID NO: 1354023 - DNA, 15 bp, Homo sapiens
ccgcattgccaccaa

SEQ ID NO: 1354024 - DNA, 15 bp, Homo sapiens
gccgcattgccacca

SEQ ID NO: 1354025 - DNA, 15 bp, Homo sapiens
cgccgcattgccacc

SEQ ID NO: 1354026 - DNA, 15 bp, Homo sapiens
tcgccgcattgccac

SEQ ID NO: 1354027 - DNA, 15 bp, Homo sapiens
ctcgccgcattgcca

SEQ ID NO: 1354028 - DNA, 15 bp, Homo sapiens
tctcgccgcattgcc

SEQ ID NO: 1354029 - DNA, 15 bp, Homo sapiens
ttctcgccgcattgc

SEQ ID NO: 1354030 - DNA, 15 bp, Homo sapiens
cttctcgccgcattg

SEQ ID NO: 1354031 - DNA, 15 bp, Homo sapiens
ccttctcgccgcatt

SEQ ID NO: 1354032 - DNA, 15 bp, Homo sapiens
tccttctcgccgcat

SEQ ID NO: 1354033 - DNA, 15 bp, Homo sapiens
ttccttctcgccgca

SEQ ID NO: 1354034 - DNA, 15 bp, Homo sapiens
attccttctcgccgc

SEQ ID NO: 1354035 - DNA, 15 bp, Homo sapiens
aattccttctcgccg

SEQ ID NO: 1354036 - DNA, 15 bp, Homo sapiens
gaattccttctcgcc

SEQ ID NO: 1354037 - DNA, 15 bp, Homo sapiens
ggaattccttctcgc

SEQ ID NO: 1354038 - DNA, 15 bp, Homo sapiens
tggaattccttctcg

SEQ ID NO: 1354039 - DNA, 15 bp, Homo sapiens
atggaattccttctc

SEQ ID NO: 1354040 - DNA, 15 bp, Homo sapiens
catggaattccttct

SEQ ID NO: 1354041 - DNA, 15 bp, Homo sapiens
ccatggaattccttc

SEQ ID NO: 1354042 - DNA, 15 bp, Homo sapiens
tccatggaattcctt

SEQ ID NO: 1354043 - DNA, 15 bp, Homo sapiens
ctccatggaattcct

SEQ ID NO: 1354044 - DNA, 15 bp, Homo sapiens
tctccatggaattcc

SEQ ID NO: 1354045 - DNA, 15 bp, Homo sapiens
ctctccatggaattc

SEQ ID NO: 1354046 - DNA, 15 bp, Homo sapiens
gctctccatggaatt

SEQ ID NO: 1354047 - DNA, 15 bp, Homo sapiens
cgctctccatggaat

SEQ ID NO: 1354048 - DNA, 15 bp, Homo sapiens
ccgctctccatggaa

SEQ ID NO: 1354049 - DNA, 15 bp, Homo sapiens
tccgctctccatgga

SEQ ID NO: 1354050 - DNA, 15 bp, Homo sapiens
gtccgctctccatgg

SEQ ID NO: 1354051 - DNA, 15 bp, Homo sapiens
agtccgctctccatg

SEQ ID NO: 1354052 - DNA, 15 bp, Homo sapiens
tagtccgctctccat

SEQ ID NO: 1354053 - DNA, 15 bp, Homo sapiens
ctagtccgctctcca

SEQ ID NO: 1354054 - DNA, 15 bp, Homo sapiens
cctagtccgctctcc

SEQ ID NO: 1354055 - DNA, 15 bp, Homo sapiens
ccctagtccgctctc

SEQ ID NO: 1354056 - DNA, 15 bp, Homo sapiens
gccctagtccgctct

SEQ ID NO: 1354057 - DNA, 15 bp, Homo sapiens
ggccctagtccgctc

SEQ ID NO: 1354058 - DNA, 15 bp, Homo sapiens
aggccctagtccgct

SEQ ID NO: 1354059 - DNA, 15 bp, Homo sapiens
caggccctagtccgc

SEQ ID NO: 1354060 - DNA, 15 bp, Homo sapiens
ccaggccctagtccg

SEQ ID NO: 1354061 - DNA, 15 bp, Homo sapiens
cccaggccctagtcc

SEQ ID NO: 1354062 - DNA, 15 bp, Homo sapiens
acccaggccctagtc

SEQ ID NO: 1354063 - DNA, 15 bp, Homo sapiens
tacccaggccctagt

SEQ ID NO: 1354064 - DNA, 15 bp, Homo sapiens
ttacccaggccctag

SEQ ID NO: 1354065 - DNA, 15 bp, Homo sapiens
tttacccaggcccta

SEQ ID NO: 1354066 - DNA, 15 bp, Homo sapiens
ctttacccaggccct

SEQ ID NO: 1354067 - DNA, 15 bp, Homo sapiens
cctttacccaggccc

SEQ ID NO: 1354068 - DNA, 15 bp, Homo sapiens
gcctttacccaggcc

SEQ ID NO: 1354069 - DNA, 15 bp, Homo sapiens
ggcctttacccaggc

SEQ ID NO: 1354070 - DNA, 15 bp, Homo sapiens
aggcctttacccagg

SEQ ID NO: 1354071 - DNA, 15 bp, Homo sapiens
caggcctttacccag

SEQ ID NO: 1354072 - DNA, 15 bp, Homo sapiens
ccaggcctttaccca

SEQ ID NO: 1354073 - DNA, 15 bp, Homo sapiens
cccaggcctttaccc

SEQ ID NO: 1354074 - DNA, 15 bp, Homo sapiens
gcccaggcctttacc

SEQ ID NO: 1354075 - DNA, 15 bp, Homo sapiens
agcccaggcctttac

SEQ ID NO: 1354076 - DNA, 15 bp, Homo sapiens
cagcccaggccttta

SEQ ID NO: 1354077 - DNA, 15 bp, Homo sapiens
ccagcccaggccttt

SEQ ID NO: 1354078 - DNA, 15 bp, Homo sapiens
tccagcccaggcctt

SEQ ID NO: 1354079 - DNA, 15 bp, Homo sapiens
ttccagcccaggcct

SEQ ID NO: 1354080 - DNA, 15 bp, Homo sapiens
tttccagcccaggcc

SEQ ID NO: 1354081 - DNA, 15 bp, Homo sapiens
ctttccagcccaggc

SEQ ID NO: 1354082 - DNA, 15 bp, Homo sapiens
gctttccagcccagg

SEQ ID NO: 1354083 - DNA, 15 bp, Homo sapiens
agctttccagcccag

SEQ ID NO: 1354084 - DNA, 15 bp, Homo sapiens
aagctttccagccca

SEQ ID NO: 1354085 - DNA, 15 bp, Homo sapiens
caagctttccagccc

SEQ ID NO: 1354086 - DNA, 15 bp, Homo sapiens
acaagctttccagcc

SEQ ID NO: 1354087 - DNA, 15 bp, Homo sapiens
tacaagctttccagc

SEQ ID NO: 1354088 - DNA, 15 bp, Homo sapiens
gtacaagctttccag

SEQ ID NO: 1354089 - DNA, 15 bp, Homo sapiens
cgtacaagctttcca

SEQ ID NO: 1354090 - DNA, 15 bp, Homo sapiens
ccgtacaagctttcc

SEQ ID NO: 1354091 - DNA, 15 bp, Homo sapiens
cccgtacaagctttc

SEQ ID NO: 1354092 - DNA, 15 bp, Homo sapiens
ccccgtacaagcttt

SEQ ID NO: 1354093 - DNA, 15 bp, Homo sapiens
tccccgtacaagctt

SEQ ID NO: 1354094 - DNA, 15 bp, Homo sapiens
ctccccgtacaagct

SEQ ID NO: 1354095 - DNA, 15 bp, Homo sapiens
gctccccgtacaagc

SEQ ID NO: 1354096 - DNA, 15 bp, Homo sapiens
tgctccccgtacaag

SEQ ID NO: 1354097 - DNA, 15 bp, Homo sapiens
ctgctccccgtacaa

SEQ ID NO: 1354098 - DNA, 15 bp, Homo sapiens
actgctccccgtaca

SEQ ID NO: 1354099 - DNA, 15 bp, Homo sapiens
cactgctccccgtac

SEQ ID NO: 1354100 - DNA, 15 bp, Homo sapiens
ccactgctccccgta

SEQ ID NO: 1354101 - DNA, 15 bp, Homo sapiens
cccactgctccccgt

SEQ ID NO: 1354102 - DNA, 15 bp, Homo sapiens
ccccactgctccccg

SEQ ID NO: 1354103 - DNA, 15 bp, Homo sapiens
tccccactgctcccc

SEQ ID NO: 1354104 - DNA, 15 bp, Homo sapiens
ctccccactgctccc

SEQ ID NO: 1354105 - DNA, 15 bp, Homo sapiens
cctccccactgctcc

SEQ ID NO: 1354106 - DNA, 15 bp, Homo sapiens
acctccccactgctc

SEQ ID NO: 1354107 - DNA, 15 bp, Homo sapiens
gacctccccactgct

SEQ ID NO: 1354108 - DNA, 15 bp, Homo sapiens
tgacctccccactgc

SEQ ID NO: 1354109 - DNA, 15 bp, Homo sapiens
atgacctccccactg

SEQ ID NO: 1354110 - DNA, 15 bp, Homo sapiens
catgacctccccact

SEQ ID NO: 1354111 - DNA, 15 bp, Homo sapiens
tcatgacctccccac

SEQ ID NO: 1354112 - DNA, 15 bp, Homo sapiens
gtcatgacctcccca

SEQ ID NO: 1354113 - DNA, 15 bp, Homo sapiens
cgtcatgacctcccc

SEQ ID NO: 1354114 - DNA, 15 bp, Homo sapiens
gcgtcatgacctccc

SEQ ID NO: 1354115 - DNA, 15 bp, Homo sapiens
agcgtcatgacctcc

SEQ ID NO: 1354116 - DNA, 15 bp, Homo sapiens
tagcgtcatgacctc

SEQ ID NO: 1354117 - DNA, 15 bp, Homo sapiens
ctagcgtcatgacct

SEQ ID NO: 1354118 - DNA, 15 bp, Homo sapiens
cctagcgtcatgacc

SEQ ID NO: 1354119 - DNA, 15 bp, Homo sapiens
ccctagcgtcatgac

SEQ ID NO: 1354120 - DNA, 15 bp, Homo sapiens
cccctagcgtcatga

SEQ ID NO: 1354121 - DNA, 15 bp, Homo sapiens
ccccctagcgtcatg

SEQ ID NO: 1354122 - DNA, 15 bp, Homo sapiens
gccccctagcgtcat

SEQ ID NO: 1354123 - DNA, 15 bp, Homo sapiens
tgccccctagcgtca

SEQ ID NO: 1354124 - DNA, 15 bp, Homo sapiens
ctgccccctagcgtc

SEQ ID NO: 1354125 - DNA, 15 bp, Homo sapiens
gctgccccctagcgt

SEQ ID NO: 1354126 - DNA, 15 bp, Homo sapiens
tgctgccccctagcg

SEQ ID NO: 1354127 - DNA, 15 bp, Homo sapiens
ctgctgccccctagc

SEQ ID NO: 1354128 - DNA, 15 bp, Homo sapiens
tctgctgccccctag

SEQ ID NO: 1354129 - DNA, 15 bp, Homo sapiens
ctctgctgcccccta

SEQ ID NO: 1354130 - DNA, 15 bp, Homo sapiens
tctctgctgccccct

SEQ ID NO: 1354131 - DNA, 15 bp, Homo sapiens
ctctctgctgccccc

SEQ ID NO: 1354132 - DNA, 15 bp, Homo sapiens
cctctctgctgcccc

SEQ ID NO: 1354133 - DNA, 15 bp, Homo sapiens
tcctctctgctgccc

SEQ ID NO: 1354134 - DNA, 15 bp, Homo sapiens
ttcctctctgctgcc

SEQ ID NO: 1354135 - DNA, 15 bp, Homo sapiens
tttcctctctgctgc

SEQ ID NO: 1354136 - DNA, 15 bp, Homo sapiens
ctttcctctctgctg

SEQ ID NO: 1354137 - DNA, 15 bp, Homo sapiens
cctttcctctctgct

SEQ ID NO: 1354138 - DNA, 15 bp, Homo sapiens
tcctttcctctctgc

SEQ ID NO: 1354139 - DNA, 15 bp, Homo sapiens
ctcctttcctctctg

SEQ ID NO: 1354140 - DNA, 15 bp, Homo sapiens
tctcctttcctctct

SEQ ID NO: 1354141 - DNA, 15 bp, Homo sapiens
ttctcctttcctctc

SEQ ID NO: 1354142 - DNA, 15 bp, Homo sapiens
cttctcctttcctct

SEQ ID NO: 1354143 - DNA, 15 bp, Homo sapiens
tcttctcctttcctc

SEQ ID NO: 1354144 - DNA, 15 bp, Homo sapiens
ctcttctcctttcct

SEQ ID NO: 1354145 - DNA, 15 bp, Homo sapiens
cctcttctcctttcc

SEQ ID NO: 1354146 - DNA, 15 bp, Homo sapiens
acctcttctcctttc

SEQ ID NO: 1354147 - DNA, 15 bp, Homo sapiens
cacctcttctccttt

SEQ ID NO: 1354148 - DNA, 15 bp, Homo sapiens
ccacctcttctcctt

SEQ ID NO: 1354149 - DNA, 15 bp, Homo sapiens
cccacctcttctcct

SEQ ID NO: 1354150 - DNA, 15 bp, Homo sapiens
acccacctcttctcc

SEQ ID NO: 1354151 - DNA, 15 bp, Homo sapiens
tacccacctcttctc

SEQ ID NO: 1354152 - DNA, 15 bp, Homo sapiens
gtacccacctcttct

SEQ ID NO: 1354153 - DNA, 15 bp, Homo sapiens
agtacccacctcttc

SEQ ID NO: 1354154 - DNA, 15 bp, Homo sapiens
cagtacccacctctt

SEQ ID NO: 1354155 - DNA, 15 bp, Homo sapiens
ccagtacccacctct

SEQ ID NO: 1354156 - DNA, 15 bp, Homo sapiens
tccagtacccacctc

SEQ ID NO: 1354157 - DNA, 15 bp, Homo sapiens
ttccagtacccacct

SEQ ID NO: 1354158 - DNA, 15 bp, Homo sapiens
attccagtacccacc

SEQ ID NO: 1354159 - DNA, 15 bp, Homo sapiens
cattccagtacccac

SEQ ID NO: 1354160 - DNA, 15 bp, Homo sapiens
tcattccagtaccca

SEQ ID NO: 1354161 - DNA, 15 bp, Homo sapiens
ttcattccagtaccc

SEQ ID NO: 1354162 - DNA, 15 bp, Homo sapiens
tttcattccagtacc

SEQ ID NO: 1354163 - DNA, 15 bp, Homo sapiens
ctttcattccagtac

SEQ ID NO: 1354164 - DNA, 15 bp, Homo sapiens
cctttcattccagta

SEQ ID NO: 1354165 - DNA, 15 bp, Homo sapiens
ccctttcattccagt

SEQ ID NO: 1354166 - DNA, 15 bp, Homo sapiens
accctttcattccag

SEQ ID NO: 1354167 - DNA, 15 bp, Homo sapiens
caccctttcattcca

SEQ ID NO: 1354168 - DNA, 15 bp, Homo sapiens
ccaccctttcattcc

SEQ ID NO: 1354169 - DNA, 15 bp, Homo sapiens
tccaccctttcattc

SEQ ID NO: 1354170 - DNA, 15 bp, Homo sapiens
atccaccctttcatt

SEQ ID NO: 1354171 - DNA, 15 bp, Homo sapiens
gatccaccctttcat

SEQ ID NO: 1354172 - DNA, 15 bp, Homo sapiens
agatccaccctttca

SEQ ID NO: 1354173 - DNA, 15 bp, Homo sapiens
aagatccaccctttc

SEQ ID NO: 1354174 - DNA, 15 bp, Homo sapiens
gaagatccacccttt

SEQ ID NO: 1354175 - DNA, 15 bp, Homo sapiens
tgaagatccaccctt

SEQ ID NO: 1354176 - DNA, 15 bp, Homo sapiens
ctgaagatccaccct

SEQ ID NO: 1354177 - DNA, 15 bp, Homo sapiens
gctgaagatccaccc

SEQ ID NO: 1354178 - DNA, 15 bp, Homo sapiens
ggctgaagatccacc

SEQ ID NO: 1354179 - DNA, 15 bp, Homo sapiens
tggctgaagatccac

SEQ ID NO: 1354180 - DNA, 15 bp, Homo sapiens
ttggctgaagatcca

SEQ ID NO: 1354181 - DNA, 15 bp, Homo sapiens
cttggctgaagatcc

SEQ ID NO: 1354182 - DNA, 15 bp, Homo sapiens
gcttggctgaagatc

SEQ ID NO: 1354183 - DNA, 15 bp, Homo sapiens
ggcttggctgaagat

SEQ ID NO: 1354184 - DNA, 15 bp, Homo sapiens
gggcttggctgaaga

SEQ ID NO: 1354185 - DNA, 15 bp, Homo sapiens
ggggcttggctgaag

SEQ ID NO: 1354186 - DNA, 15 bp, Homo sapiens
tggggcttggctgaa

SEQ ID NO: 1354187 - DNA, 15 bp, Homo sapiens
ctggggcttggctga

SEQ ID NO: 1354188 - DNA, 15 bp, Homo sapiens
cctggggcttggctg

SEQ ID NO: 1354189 - DNA, 15 bp, Homo sapiens
tcctggggcttggct

SEQ ID NO: 1354190 - DNA, 15 bp, Homo sapiens
ctcctggggcttggc

SEQ ID NO: 1354191 - DNA, 15 bp, Homo sapiens
tctcctggggcttgg

SEQ ID NO: 1354192 - DNA, 15 bp, Homo sapiens
gtctcctggggcttg

SEQ ID NO: 1354193 - DNA, 15 bp, Homo sapiens
tgtctcctggggctt

SEQ ID NO: 1354194 - DNA, 15 bp, Homo sapiens
ctgtctcctggggct

SEQ ID NO: 1354195 - DNA, 15 bp, Homo sapiens
tctgtctcctggggc

SEQ ID NO: 1354196 - DNA, 15 bp, Homo sapiens
ttctgtctcctgggg

SEQ ID NO: 1354197 - DNA, 15 bp, Homo sapiens
cttctgtctcctggg

SEQ ID NO: 1354198 - DNA, 15 bp, Homo sapiens
ccttctgtctcctgg

SEQ ID NO: 1354199 - DNA, 15 bp, Homo sapiens
gccttctgtctcctg

SEQ ID NO: 1354200 - DNA, 15 bp, Homo sapiens
agccttctgtctcct

SEQ ID NO: 1354201 - DNA, 15 bp, Homo sapiens
cagccttctgtctcc

SEQ ID NO: 1354202 - DNA, 15 bp, Homo sapiens
tcagccttctgtctc

SEQ ID NO: 1354203 - DNA, 15 bp, Homo sapiens
ttcagccttctgtct

SEQ ID NO: 1354204 - DNA, 15 bp, Homo sapiens
cttcagccttctgtc

SEQ ID NO: 1354205 - DNA, 15 bp, Homo sapiens
acttcagccttctgt

SEQ ID NO: 1354206 - DNA, 15 bp, Homo sapiens
aacttcagccttctg

SEQ ID NO: 1354207 - DNA, 15 bp, Homo sapiens
caacttcagccttct

SEQ ID NO: 1354208 - DNA, 15 bp, Homo sapiens
gcaacttcagccttc

SEQ ID NO: 1354209 - DNA, 15 bp, Homo sapiens
tgcaacttcagcctt

SEQ ID NO: 1354210 - DNA, 15 bp, Homo sapiens
ctgcaacttcagcct

SEQ ID NO: 1354211 - DNA, 15 bp, Homo sapiens
cctgcaacttcagcc

SEQ ID NO: 1354212 - DNA, 15 bp, Homo sapiens
ccctgcaacttcagc

SEQ ID NO: 1354213 - DNA, 15 bp, Homo sapiens
cccctgcaacttcag

SEQ ID NO: 1354214 - DNA, 15 bp, Homo sapiens
acccctgcaacttca

SEQ ID NO: 1354215 - DNA, 15 bp, Homo sapiens
cacccctgcaacttc

SEQ ID NO: 1354216 - DNA, 15 bp, Homo sapiens
acacccctgcaactt

SEQ ID NO: 1354217 - DNA, 15 bp, Homo sapiens
tacacccctgcaact

SEQ ID NO: 1354218 - DNA, 15 bp, Homo sapiens
atacacccctgcaac

SEQ ID NO: 1354219 - DNA, 15 bp, Homo sapiens
gatacacccctgcaa

SEQ ID NO: 1354220 - DNA, 15 bp, Homo sapiens
cgatacacccctgca

SEQ ID NO: 1354221 - DNA, 15 bp, Homo sapiens
ccgatacacccctgc

SEQ ID NO: 1354222 - DNA, 15 bp, Homo sapiens
cccgatacacccctg

SEQ ID NO: 1354223 - DNA, 15 bp, Homo sapiens
gcccgatacacccct

SEQ ID NO: 1354224 - DNA, 15 bp, Homo sapiens
tgcccgatacacccc

SEQ ID NO: 1354225 - DNA, 15 bp, Homo sapiens
atgcccgatacaccc

SEQ ID NO: 1354226 - DNA, 15 bp, Homo sapiens
gatgcccgatacacc

SEQ ID NO: 1354227 - DNA, 15 bp, Homo sapiens
agatgcccgatacac

SEQ ID NO: 1354228 - DNA, 15 bp, Homo sapiens
tagatgcccgataca

SEQ ID NO: 1354229 - DNA, 15 bp, Homo sapiens
ctagatgcccgatac

SEQ ID NO: 1354230 - DNA, 15 bp, Homo sapiens
cctagatgcccgata

SEQ ID NO: 1354231 - DNA, 15 bp, Homo sapiens
ccctagatgcccgat

SEQ ID NO: 1354232 - DNA, 15 bp, Homo sapiens
gccctagatgcccga

SEQ ID NO: 1354233 - DNA, 15 bp, Homo sapiens
ggccctagatgcccg

SEQ ID NO: 1354234 - DNA, 15 bp, Homo sapiens
aggccctagatgccc

SEQ ID NO: 1354235 - DNA, 15 bp, Homo sapiens
gaggccctagatgcc

SEQ ID NO: 1354236 - DNA, 15 bp, Homo sapiens
tgaggccctagatgc

SEQ ID NO: 1354237 - DNA, 15 bp, Homo sapiens
gtgaggccctagatg

SEQ ID NO: 1354238 - DNA, 15 bp, Homo sapiens
tgtgaggccctagat

SEQ ID NO: 1354239 - DNA, 15 bp, Homo sapiens
gtgtgaggccctaga

SEQ ID NO: 1354240 - DNA, 15 bp, Homo sapiens
agtgtgaggccctag

SEQ ID NO: 1354241 - DNA, 15 bp, Homo sapiens
gagtgtgaggcccta

SEQ ID NO: 1354242 - DNA, 15 bp, Homo sapiens
tgagtgtgaggccct

SEQ ID NO: 1354243 - DNA, 15 bp, Homo sapiens
gtgagtgtgaggccc

SEQ ID NO: 1354244 - DNA, 15 bp, Homo sapiens
ggtgagtgtgaggcc

SEQ ID NO: 1354245 - DNA, 15 bp, Homo sapiens
aggtgagtgtgaggc

SEQ ID NO: 1354246 - DNA, 15 bp, Homo sapiens
gaggtgagtgtgagg

SEQ ID NO: 1354247 - DNA, 15 bp, Homo sapiens
agaggtgagtgtgag

SEQ ID NO: 1354248 - DNA, 15 bp, Homo sapiens
cagaggtgagtgtga

SEQ ID NO: 1354249 - DNA, 15 bp, Homo sapiens
acagaggtgagtgtg

SEQ ID NO: 1354250 - DNA, 15 bp, Homo sapiens
gacagaggtgagtgt

SEQ ID NO: 1354251 - DNA, 15 bp, Homo sapiens
agacagaggtgagtg

SEQ ID NO: 1354252 - DNA, 15 bp, Homo sapiens
aagacagaggtgagt

SEQ ID NO: 1354253 - DNA, 15 bp, Homo sapiens
gaagacagaggtgag

SEQ ID NO: 1354254 - DNA, 15 bp, Homo sapiens
agaagacagaggtga

SEQ ID NO: 1354255 - DNA, 15 bp, Homo sapiens
aagaagacagaggtg

SEQ ID NO: 1354256 - DNA, 15 bp, Homo sapiens
taagaagacagaggt

SEQ ID NO: 1354257 - DNA, 15 bp, Homo sapiens
ttaagaagacagagg

SEQ ID NO: 1354258 - DNA, 15 bp, Homo sapiens
tttaagaagacagag

SEQ ID NO: 1354259 - DNA, 15 bp, Homo sapiens
atttaagaagacaga

SEQ ID NO: 1354260 - DNA, 15 bp, Homo sapiens
gatttaagaagacag

SEQ ID NO: 1354261 - DNA, 15 bp, Homo sapiens
cgatttaagaagaca

SEQ ID NO: 1354262 - DNA, 15 bp, Homo sapiens
gcgatttaagaagac

SEQ ID NO: 1354263 - DNA, 15 bp, Homo sapiens
cgcgatttaagaaga

SEQ ID NO: 1354264 - DNA, 15 bp, Homo sapiens
gcgcgatttaagaag

SEQ ID NO: 1354265 - DNA, 15 bp, Homo sapiens
ggcgcgatttaagaa

SEQ ID NO: 1354266 - DNA, 15 bp, Homo sapiens
gggcgcgatttaaga

SEQ ID NO: 1354267 - DNA, 15 bp, Homo sapiens
agggcgcgatttaag

SEQ ID NO: 1354268 - DNA, 15 bp, Homo sapiens
cagggcgcgatttaa

SEQ ID NO: 1354269 - DNA, 15 bp, Homo sapiens
tcagggcgcgattta

SEQ ID NO: 1354270 - DNA, 15 bp, Homo sapiens
ctcagggcgcgattt

SEQ ID NO: 1354271 - DNA, 15 bp, Homo sapiens
tctcagggcgcgatt

SEQ ID NO: 1354272 - DNA, 15 bp, Homo sapiens
ctctcagggcgcgat

SEQ ID NO: 1354273 - DNA, 15 bp, Homo sapiens
actctcagggcgcga

SEQ ID NO: 1354274 - DNA, 15 bp, Homo sapiens
gactctcagggcgcg

SEQ ID NO: 1354275 - DNA, 15 bp, Homo sapiens
agactctcagggcgc

SEQ ID NO: 1354276 - DNA, 15 bp, Homo sapiens
aagactctcagggcg

SEQ ID NO: 1354277 - DNA, 15 bp, Homo sapiens
gaagactctcagggc

SEQ ID NO: 1354278 - DNA, 15 bp, Homo sapiens
tgaagactctcaggg

SEQ ID NO: 1354279 - DNA, 15 bp, Homo sapiens
atgaagactctcagg

SEQ ID NO: 1354280 - DNA, 15 bp, Homo sapiens
tatgaagactctcag

SEQ ID NO: 1354281 - DNA, 15 bp, Homo sapiens
ctatgaagactctca

SEQ ID NO: 1354282 - DNA, 15 bp, Homo sapiens
actatgaagactctc

SEQ ID NO: 1354283 - DNA, 15 bp, Homo sapiens
aactatgaagactct

SEQ ID NO: 1354284 - DNA, 15 bp, Homo sapiens
caactatgaagactc

SEQ ID NO: 1354285 - DNA, 15 bp, Homo sapiens
ccaactatgaagact

SEQ ID NO: 1354286 - DNA, 15 bp, Homo sapiens
accaactatgaagac

SEQ ID NO: 1354287 - DNA, 15 bp, Homo sapiens
caccaactatgaaga

SEQ ID NO: 1354288 - DNA, 15 bp, Homo sapiens
gcaccaactatgaag

SEQ ID NO: 1354289 - DNA, 15 bp, Homo sapiens
ggcaccaactatgaa

SEQ ID NO: 1354290 - DNA, 15 bp, Homo sapiens
gggcaccaactatga

SEQ ID NO: 1354291 - DNA, 15 bp, Homo sapiens
agggcaccaactatg

SEQ ID NO: 1354292 - DNA, 15 bp, Homo sapiens
cagggcaccaactat

SEQ ID NO: 1354293 - DNA, 15 bp, Homo sapiens
acagggcaccaacta

SEQ ID NO: 1354294 - DNA, 15 bp, Homo sapiens
cacagggcaccaact

SEQ ID NO: 1354295 - DNA, 15 bp, Homo sapiens
acacagggcaccaac

SEQ ID NO: 1354296 - DNA, 15 bp, Homo sapiens
aacacagggcaccaa

SEQ ID NO: 1354297 - DNA, 15 bp, Homo sapiens
aaacacagggcacca

SEQ ID NO: 1354298 - DNA, 15 bp, Homo sapiens
gaaacacagggcacc

SEQ ID NO: 1354299 - DNA, 15 bp, Homo sapiens
agaaacacagggcac

SEQ ID NO: 1354300 - DNA, 15 bp, Homo sapiens
gagaaacacagggca

SEQ ID NO: 1354301 - DNA, 15 bp, Homo sapiens
ggagaaacacagggc

SEQ ID NO: 1354302 - DNA, 15 bp, Homo sapiens
aggagaaacacaggg

SEQ ID NO: 1354303 - DNA, 15 bp, Homo sapiens
gaggagaaacacagg

SEQ ID NO: 1354304 - DNA, 15 bp, Homo sapiens
agaggagaaacacag

SEQ ID NO: 1354305 - DNA, 15 bp, Homo sapiens
gagaggagaaacaca

SEQ ID NO: 1354306 - DNA, 15 bp, Homo sapiens
ggagaggagaaacac

SEQ ID NO: 1354307 - DNA, 15 bp, Homo sapiens
tggagaggagaaaca

SEQ ID NO: 1354308 - DNA, 15 bp, Homo sapiens
gtggagaggagaaac

SEQ ID NO: 1354309 - DNA, 15 bp, Homo sapiens
tgtggagaggagaaa

SEQ ID NO: 1354310 - DNA, 15 bp, Homo sapiens
ctgtggagaggagaa

SEQ ID NO: 1354311 - DNA, 15 bp, Homo sapiens
cctgtggagaggaga

SEQ ID NO: 1354312 - DNA, 15 bp, Homo sapiens
gcctgtggagaggag

SEQ ID NO: 1354313 - DNA, 15 bp, Homo sapiens
ggcctgtggagagga

SEQ ID NO: 1354314 - DNA, 15 bp, Homo sapiens
tggcctgtggagagg

SEQ ID NO: 1354315 - DNA, 15 bp, Homo sapiens
gtggcctgtggagag

SEQ ID NO: 1354316 - DNA, 15 bp, Homo sapiens
ggtggcctgtggaga

SEQ ID NO: 1354317 - DNA, 15 bp, Homo sapiens
aggtggcctgtggag

SEQ ID NO: 1354318 - DNA, 15 bp, Homo sapiens
caggtggcctgtgga

SEQ ID NO: 1354319 - DNA, 15 bp, Homo sapiens
tcaggtggcctgtgg

SEQ ID NO: 1354320 - DNA, 15 bp, Homo sapiens
ctcaggtggcctgtg

SEQ ID NO: 1354321 - DNA, 15 bp, Homo sapiens
cctcaggtggcctgt

SEQ ID NO: 1354322 - DNA, 15 bp, Homo sapiens
tcctcaggtggcctg

SEQ ID NO: 1354323 - DNA, 15 bp, Homo sapiens
ctcctcaggtggcct

SEQ ID NO: 1354324 - DNA, 15 bp, Homo sapiens
cctcctcaggtggcc

SEQ ID NO: 1354325 - DNA, 15 bp, Homo sapiens
ccctcctcaggtggc

SEQ ID NO: 1354326 - DNA, 15 bp, Homo sapiens
gccctcctcaggtgg

SEQ ID NO: 1354327 - DNA, 15 bp, Homo sapiens
tgccctcctcaggtg

SEQ ID NO: 1354328 - DNA, 15 bp, Homo sapiens
ttgccctcctcaggt

SEQ ID NO: 1354329 - DNA, 15 bp, Homo sapiens
cttgccctcctcagg

SEQ ID NO: 1354330 - DNA, 15 bp, Homo sapiens
ccttgccctcctcag

SEQ ID NO: 1354331 - DNA, 15 bp, Homo sapiens
cccttgccctcctca

SEQ ID NO: 1354332 - DNA, 15 bp, Homo sapiens
acccttgccctcctc

SEQ ID NO: 1354333 - DNA, 15 bp, Homo sapiens
cacccttgccctcct

SEQ ID NO: 1354334 - DNA, 15 bp, Homo sapiens
ccacccttgccctcc

SEQ ID NO: 1354335 - DNA, 15 bp, Homo sapiens
cccacccttgccctc

SEQ ID NO: 1354336 - DNA, 15 bp, Homo sapiens
ccccacccttgccct

SEQ ID NO: 1354337 - DNA, 15 bp, Homo sapiens
cccccacccttgccc

SEQ ID NO: 1354338 - DNA, 15 bp, Homo sapiens
acccccacccttgcc

SEQ ID NO: 1354339 - DNA, 15 bp, Homo sapiens
tacccccacccttgc

SEQ ID NO: 1354340 - DNA, 15 bp, Homo sapiens
ttacccccacccttg

SEQ ID NO: 1354341 - DNA, 15 bp, Homo sapiens
cttacccccaccctt

SEQ ID NO: 1354342 - DNA, 15 bp, Homo sapiens
ccttacccccaccct

SEQ ID NO: 1354343 - DNA, 15 bp, Homo sapiens
accttacccccaccc

SEQ ID NO: 1354344 - DNA, 15 bp, Homo sapiens
caccttacccccacc

SEQ ID NO: 1354345 - DNA, 15 bp, Homo sapiens
tcaccttacccccac

SEQ ID NO: 1354346 - DNA, 15 bp, Homo sapiens
ctcaccttaccccca

SEQ ID NO: 1354347 - DNA, 15 bp, Homo sapiens
cctcaccttaccccc

SEQ ID NO: 1354348 - DNA, 15 bp, Homo sapiens
ccctcaccttacccc

SEQ ID NO: 1354349 - DNA, 15 bp, Homo sapiens
tccctcaccttaccc

SEQ ID NO: 1354350 - DNA, 15 bp, Homo sapiens
gtccctcaccttacc

SEQ ID NO: 1354351 - DNA, 15 bp, Homo sapiens
tgtccctcaccttac

SEQ ID NO: 1354352 - DNA, 15 bp, Homo sapiens
gtgtccctcacctta

SEQ ID NO: 1354353 - DNA, 15 bp, Homo sapiens
ggtgtccctcacctt

SEQ ID NO: 1354354 - DNA, 15 bp, Homo sapiens
tggtgtccctcacct

SEQ ID NO: 1354355 - DNA, 15 bp, Homo sapiens
ctggtgtccctcacc

SEQ ID NO: 1354356 - DNA, 15 bp, Homo sapiens
actggtgtccctcac

SEQ ID NO: 1354357 - DNA, 15 bp, Homo sapiens
gactggtgtccctca

SEQ ID NO: 1354358 - DNA, 15 bp, Homo sapiens
ggactggtgtccctc

SEQ ID NO: 1354359 - DNA, 15 bp, Homo sapiens
aggactggtgtccct

SEQ ID NO: 1354360 - DNA, 15 bp, Homo sapiens
caggactggtgtccc

SEQ ID NO: 1354361 - DNA, 15 bp, Homo sapiens
ccaggactggtgtcc

SEQ ID NO: 1354362 - DNA, 15 bp, Homo sapiens
accaggactggtgtc

SEQ ID NO: 1354363 - DNA, 15 bp, Homo sapiens
caccaggactggtgt

SEQ ID NO: 1354364 - DNA, 15 bp, Homo sapiens
ccaccaggactggtg

SEQ ID NO: 1354365 - DNA, 15 bp, Homo sapiens
cccaccaggactggt

SEQ ID NO: 1354366 - DNA, 15 bp, Homo sapiens
gcccaccaggactgg

SEQ ID NO: 1354367 - DNA, 15 bp, Homo sapiens
cgcccaccaggactg

SEQ ID NO: 1354368 - DNA, 15 bp, Homo sapiens
ccgcccaccaggact

SEQ ID NO: 1354369 - DNA, 15 bp, Homo sapiens
gccgcccaccaggac

SEQ ID NO: 1354370 - DNA, 15 bp, Homo sapiens
tgccgcccaccagga

SEQ ID NO: 1354371 - DNA, 15 bp, Homo sapiens
ctgccgcccaccagg

SEQ ID NO: 1354372 - DNA, 15 bp, Homo sapiens
cctgccgcccaccag

SEQ ID NO: 1354373 - DNA, 15 bp, Homo sapiens
ccctgccgcccacca

SEQ ID NO: 1354374 - DNA, 15 bp, Homo sapiens
accctgccgcccacc

SEQ ID NO: 1354375 - DNA, 15 bp, Homo sapiens
gaccctgccgcccac

SEQ ID NO: 1354376 - DNA, 15 bp, Homo sapiens
ggaccctgccgccca

SEQ ID NO: 1354377 - DNA, 15 bp, Homo sapiens
cggaccctgccgccc

SEQ ID NO: 1354378 - DNA, 15 bp, Homo sapiens
acggaccctgccgcc

SEQ ID NO: 1354379 - DNA, 15 bp, Homo sapiens
aacggaccctgccgc

SEQ ID NO: 1354380 - DNA, 15 bp, Homo sapiens
caacggaccctgccg

SEQ ID NO: 1354381 - DNA, 15 bp, Homo sapiens
gcaacggaccctgcc

SEQ ID NO: 1354382 - DNA, 15 bp, Homo sapiens
ggcaacggaccctgc

SEQ ID NO: 1354383 - DNA, 15 bp, Homo sapiens
aggcaacggaccctg

SEQ ID NO: 1354384 - DNA, 15 bp, Homo sapiens
gaggcaacggaccct

SEQ ID NO: 1354385 - DNA, 15 bp, Homo sapiens
cgaggcaacggaccc

SEQ ID NO: 1354386 - DNA, 15 bp, Homo sapiens
gcgaggcaacggacc

SEQ ID NO: 1354387 - DNA, 15 bp, Homo sapiens
ggcgaggcaacggac

SEQ ID NO: 1354388 - DNA, 15 bp, Homo sapiens
gggcgaggcaacgga

SEQ ID NO: 1354389 - DNA, 15 bp, Homo sapiens
agggcgaggcaacgg

SEQ ID NO: 1354390 - DNA, 15 bp, Homo sapiens
gagggcgaggcaacg

SEQ ID NO: 1354391 - DNA, 15 bp, Homo sapiens
ggagggcgaggcaac

SEQ ID NO: 1354392 - DNA, 15 bp, Homo sapiens
aggagggcgaggcaa

SEQ ID NO: 1354393 - DNA, 15 bp, Homo sapiens
gaggagggcgaggca

SEQ ID NO: 1354394 - DNA, 15 bp, Homo sapiens
tgaggagggcgaggc

SEQ ID NO: 1354395 - DNA, 15 bp, Homo sapiens
ttgaggagggcgagg

SEQ ID NO: 1354396 - DNA, 15 bp, Homo sapiens
tttgaggagggcgag

SEQ ID NO: 1354397 - DNA, 15 bp, Homo sapiens
ttttgaggagggcga

SEQ ID NO: 1354398 - DNA, 15 bp, Homo sapiens
cttttgaggagggcg

SEQ ID NO: 1354399 - DNA, 15 bp, Homo sapiens
ccttttgaggagggc

SEQ ID NO: 1354400 - DNA, 15 bp, Homo sapiens
tccttttgaggaggg

SEQ ID NO: 1354401 - DNA, 15 bp, Homo sapiens
gtccttttgaggagg

SEQ ID NO: 1354402 - DNA, 15 bp, Homo sapiens
ggtccttttgaggag

SEQ ID NO: 1354403 - DNA, 15 bp, Homo sapiens
cggtccttttgagga

SEQ ID NO: 1354404 - DNA, 15 bp, Homo sapiens
gcggtccttttgagg

SEQ ID NO: 1354405 - DNA, 15 bp, Homo sapiens
agcggtccttttgag

SEQ ID NO: 1354406 - DNA, 15 bp, Homo sapiens
aagcggtccttttga

SEQ ID NO: 1354407 - DNA, 15 bp, Homo sapiens
gaagcggtccttttg

SEQ ID NO: 1354408 - DNA, 15 bp, Homo sapiens
ggaagcggtcctttt

SEQ ID NO: 1354409 - DNA, 15 bp, Homo sapiens
aggaagcggtccttt

SEQ ID NO: 1354410 - DNA, 15 bp, Homo sapiens
gaggaagcggtcctt

SEQ ID NO: 1354411 - DNA, 15 bp, Homo sapiens
ggaggaagcggtcct

SEQ ID NO: 1354412 - DNA, 15 bp, Homo sapiens
aggaggaagcggtcc

SEQ ID NO: 1354413 - DNA, 15 bp, Homo sapiens
aaggaggaagcggtc

SEQ ID NO: 1354414 - DNA, 15 bp, Homo sapiens
gaaggaggaagcggt

SEQ ID NO: 1354415 - DNA, 15 bp, Homo sapiens
ggaaggaggaagcgg

SEQ ID NO: 1354416 - DNA, 15 bp, Homo sapiens
aggaaggaggaagcg

SEQ ID NO: 1354417 - DNA, 15 bp, Homo sapiens
caggaaggaggaagc

SEQ ID NO: 1354418 - DNA, 15 bp, Homo sapiens
tcaggaaggaggaag

SEQ ID NO: 1354419 - DNA, 15 bp, Homo sapiens
gtcaggaaggaggaa

SEQ ID NO: 1354420 - DNA, 15 bp, Homo sapiens
ggtcaggaaggagga

SEQ ID NO: 1354421 - DNA, 15 bp, Homo sapiens
tggtcaggaaggagg

SEQ ID NO: 1354422 - DNA, 15 bp, Homo sapiens
ctggtcaggaaggag

SEQ ID NO: 1354423 - DNA, 15 bp, Homo sapiens
actggtcaggaagga

SEQ ID NO: 1354424 - DNA, 15 bp, Homo sapiens
gactggtcaggaagg

SEQ ID NO: 1354425 - DNA, 15 bp, Homo sapiens
ggactggtcaggaag

SEQ ID NO: 1354426 - DNA, 15 bp, Homo sapiens
aggactggtcaggaa

SEQ ID NO: 1354427 - DNA, 15 bp, Homo sapiens
caggactggtcagga

SEQ ID NO: 1354428 - DNA, 15 bp, Homo sapiens
ccaggactggtcagg

SEQ ID NO: 1354429 - DNA, 15 bp, Homo sapiens
gccaggactggtcag

SEQ ID NO: 1354430 - DNA, 15 bp, Homo sapiens
ggccaggactggtca

SEQ ID NO: 1354431 - DNA, 15 bp, Homo sapiens
gggccaggactggtc

SEQ ID NO: 1354432 - DNA, 15 bp, Homo sapiens
ggggccaggactggt

SEQ ID NO: 1354433 - DNA, 15 bp, Homo sapiens
aggggccaggactgg

SEQ ID NO: 1354434 - DNA, 15 bp, Homo sapiens
taggggccaggactg

SEQ ID NO: 1354435 - DNA, 15 bp, Homo sapiens
ctaggggccaggact

SEQ ID NO: 1354436 - DNA, 15 bp, Homo sapiens
tctaggggccaggac

SEQ ID NO: 1354437 - DNA, 15 bp, Homo sapiens
ctctaggggccagga

SEQ ID NO: 1354438 - DNA, 15 bp, Homo sapiens
gctctaggggccagg

SEQ ID NO: 1354439 - DNA, 15 bp, Homo sapiens
tgctctaggggccag

SEQ ID NO: 1354440 - DNA, 15 bp, Homo sapiens
ttgctctaggggcca

SEQ ID NO: 1354441 - DNA, 15 bp, Homo sapiens
cttgctctaggggcc

SEQ ID NO: 1354442 - DNA, 15 bp, Homo sapiens
tcttgctctaggggc

SEQ ID NO: 1354443 - DNA, 15 bp, Homo sapiens
gtcttgctctagggg

SEQ ID NO: 1354444 - DNA, 15 bp, Homo sapiens
tgtcttgctctaggg

SEQ ID NO: 1354445 - DNA, 15 bp, Homo sapiens
gtgtcttgctctagg

SEQ ID NO: 1354446 - DNA, 15 bp, Homo sapiens
tgtgtcttgctctag

SEQ ID NO: 1354447 - DNA, 15 bp, Homo sapiens
ctgtgtcttgctcta

SEQ ID NO: 1354448 - DNA, 15 bp, Homo sapiens
tctgtgtcttgctct

SEQ ID NO: 1354449 - DNA, 15 bp, Homo sapiens
gtctgtgtcttgctc

SEQ ID NO: 1354450 - DNA, 15 bp, Homo sapiens
ggtctgtgtcttgct

SEQ ID NO: 1354451 - DNA, 15 bp, Homo sapiens
aggtctgtgtcttgc

SEQ ID NO: 1354452 - DNA, 15 bp, Homo sapiens
caggtctgtgtcttg

SEQ ID NO: 1354453 - DNA, 15 bp, Homo sapiens
gcaggtctgtgtctt

SEQ ID NO: 1354454 - DNA, 15 bp, Homo sapiens
agcaggtctgtgtct

SEQ ID NO: 1354455 - DNA, 15 bp, Homo sapiens
gagcaggtctgtgtc

SEQ ID NO: 1354456 - DNA, 15 bp, Homo sapiens
agagcaggtctgtgt

SEQ ID NO: 1354457 - DNA, 15 bp, Homo sapiens
tagagcaggtctgtg

SEQ ID NO: 1354458 - DNA, 15 bp, Homo sapiens
atagagcaggtctgt

SEQ ID NO: 1354459 - DNA, 15 bp, Homo sapiens
gatagagcaggtctg

SEQ ID NO: 1354460 - DNA, 15 bp, Homo sapiens
agatagagcaggtct

SEQ ID NO: 1354461 - DNA, 15 bp, Homo sapiens
gagatagagcaggtc

SEQ ID NO: 1354462 - DNA, 15 bp, Homo sapiens
ggagatagagcaggt

SEQ ID NO: 1354463 - DNA, 15 bp, Homo sapiens
aggagatagagcagg

SEQ ID NO: 1354464 - DNA, 15 bp, Homo sapiens
taggagatagagcag

SEQ ID NO: 1354465 - DNA, 15 bp, Homo sapiens
gtaggagatagagca

SEQ ID NO: 1354466 - DNA, 15 bp, Homo sapiens
ggtaggagatagagc

SEQ ID NO: 1354467 - DNA, 15 bp, Homo sapiens
aggtaggagatagag

SEQ ID NO: 1354468 - DNA, 15 bp, Homo sapiens
caggtaggagataga

SEQ ID NO: 1354469 - DNA, 15 bp, Homo sapiens
gcaggtaggagatag

SEQ ID NO: 1354470 - DNA, 15 bp, Homo sapiens
agcaggtaggagata

SEQ ID NO: 1354471 - DNA, 15 bp, Homo sapiens
cagcaggtaggagat

SEQ ID NO: 1354472 - DNA, 15 bp, Homo sapiens
acagcaggtaggaga

SEQ ID NO: 1354473 - DNA, 15 bp, Homo sapiens
cacagcaggtaggag

SEQ ID NO: 1354474 - DNA, 15 bp, Homo sapiens
acacagcaggtagga

SEQ ID NO: 1354475 - DNA, 15 bp, Homo sapiens
cacacagcaggtagg

SEQ ID NO: 1354476 - DNA, 15 bp, Homo sapiens
acacacagcaggtag

SEQ ID NO: 1354477 - DNA, 15 bp, Homo sapiens
gacacacagcaggta

SEQ ID NO: 1354478 - DNA, 15 bp, Homo sapiens
ggacacacagcaggt

SEQ ID NO: 1354479 - DNA, 15 bp, Homo sapiens
aggacacacagcagg

SEQ ID NO: 1354480 - DNA, 15 bp, Homo sapiens
aaggacacacagcag

SEQ ID NO: 1354481 - DNA, 15 bp, Homo sapiens
aaaggacacacagca

SEQ ID NO: 1354482 - DNA, 15 bp, Homo sapiens
caaaggacacacagc

SEQ ID NO: 1354483 - DNA, 15 bp, Homo sapiens
ccaaaggacacacag

SEQ ID NO: 1354484 - DNA, 15 bp, Homo sapiens
gccaaaggacacaca

SEQ ID NO: 1354485 - DNA, 15 bp, Homo sapiens
tgccaaaggacacac

SEQ ID NO: 1354486 - DNA, 15 bp, Homo sapiens
ctgccaaaggacaca

SEQ ID NO: 1354487 - DNA, 15 bp, Homo sapiens
actgccaaaggacac

SEQ ID NO: 1354488 - DNA, 15 bp, Homo sapiens
aactgccaaaggaca

SEQ ID NO: 1354489 - DNA, 15 bp, Homo sapiens
aaactgccaaaggac

SEQ ID NO: 1354490 - DNA, 15 bp, Homo sapiens
taaactgccaaagga

SEQ ID NO: 1354491 - DNA, 15 bp, Homo sapiens
gtaaactgccaaagg

SEQ ID NO: 1354492 - DNA, 15 bp, Homo sapiens
agtaaactgccaaag

SEQ ID NO: 1354493 - DNA, 15 bp, Homo sapiens
aagtaaactgccaaa

SEQ ID NO: 1354494 - DNA, 15 bp, Homo sapiens
caagtaaactgccaa

SEQ ID NO: 1354495 - DNA, 15 bp, Homo sapiens
gcaagtaaactgcca

SEQ ID NO: 1354496 - DNA, 15 bp, Homo sapiens
ggcaagtaaactgcc

SEQ ID NO: 1354497 - DNA, 15 bp, Homo sapiens
gggcaagtaaactgc

SEQ ID NO: 1354498 - DNA, 15 bp, Homo sapiens
agggcaagtaaactg

SEQ ID NO: 1354499 - DNA, 15 bp, Homo sapiens
gagggcaagtaaact

SEQ ID NO: 1354500 - DNA, 15 bp, Homo sapiens
agagggcaagtaaac

SEQ ID NO: 1354501 - DNA, 15 bp, Homo sapiens
gagagggcaagtaaa

SEQ ID NO: 1354502 - DNA, 15 bp, Homo sapiens
agagagggcaagtaa

SEQ ID NO: 1354503 - DNA, 15 bp, Homo sapiens
cagagagggcaagta

SEQ ID NO: 1354504 - DNA, 15 bp, Homo sapiens
acagagagggcaagt

SEQ ID NO: 1354505 - DNA, 15 bp, Homo sapiens
aacagagagggcaag

SEQ ID NO: 1354506 - DNA, 15 bp, Homo sapiens
aaacagagagggcaa

SEQ ID NO: 1354507 - DNA, 15 bp, Homo sapiens
aaaacagagagggca

SEQ ID NO: 1354508 - DNA, 15 bp, Homo sapiens
taaaacagagagggc

SEQ ID NO: 1354509 - DNA, 15 bp, Homo sapiens
gtaaaacagagaggg

SEQ ID NO: 1354510 - DNA, 15 bp, Homo sapiens
agtaaaacagagagg

SEQ ID NO: 1354511 - DNA, 15 bp, Homo sapiens
aagtaaaacagagag

SEQ ID NO: 1354512 - DNA, 15 bp, Homo sapiens
gaagtaaaacagaga

SEQ ID NO: 1354513 - DNA, 15 bp, Homo sapiens
ggaagtaaaacagag

SEQ ID NO: 1354514 - DNA, 15 bp, Homo sapiens
gggaagtaaaacaga

SEQ ID NO: 1354515 - DNA, 15 bp, Homo sapiens
agggaagtaaaacag

SEQ ID NO: 1354516 - DNA, 15 bp, Homo sapiens
gagggaagtaaaaca

SEQ ID NO: 1354517 - DNA, 15 bp, Homo sapiens
tgagggaagtaaaac

SEQ ID NO: 1354518 - DNA, 15 bp, Homo sapiens
atgagggaagtaaaa

SEQ ID NO: 1354519 - DNA, 15 bp, Homo sapiens
gatgagggaagtaaa

SEQ ID NO: 1354520 - DNA, 15 bp, Homo sapiens
agatgagggaagtaa

SEQ ID NO: 1354521 - DNA, 15 bp, Homo sapiens
tagatgagggaagta

SEQ ID NO: 1354522 - DNA, 15 bp, Homo sapiens
atagatgagggaagt

SEQ ID NO: 1354523 - DNA, 15 bp, Homo sapiens
tatagatgagggaag

SEQ ID NO: 1354524 - DNA, 15 bp, Homo sapiens
gtatagatgagggaa

SEQ ID NO: 1354525 - DNA, 15 bp, Homo sapiens
tgtatagatgaggga

SEQ ID NO: 1354526 - DNA, 15 bp, Homo sapiens
ctgtatagatgaggg

SEQ ID NO: 1354527 - DNA, 15 bp, Homo sapiens
actgtatagatgagg

SEQ ID NO: 1354528 - DNA, 15 bp, Homo sapiens
cactgtatagatgag

SEQ ID NO: 1354529 - DNA, 15 bp, Homo sapiens
tcactgtatagatga

SEQ ID NO: 1354530 - DNA, 15 bp, Homo sapiens
gtcactgtatagatg

SEQ ID NO: 1354531 - DNA, 15 bp, Homo sapiens
tgtcactgtatagat

SEQ ID NO: 1354532 - DNA, 15 bp, Homo sapiens
ctgtcactgtataga

SEQ ID NO: 1354533 - DNA, 15 bp, Homo sapiens
tctgtcactgtatag

SEQ ID NO: 1354534 - DNA, 15 bp, Homo sapiens
ttctgtcactgtata

SEQ ID NO: 1354535 - DNA, 15 bp, Homo sapiens
tttctgtcactgtat

SEQ ID NO: 1354536 - DNA, 15 bp, Homo sapiens
atttctgtcactgta

SEQ ID NO: 1354537 - DNA, 15 bp, Homo sapiens
catttctgtcactgt

SEQ ID NO: 1354538 - DNA, 15 bp, Homo sapiens
tcatttctgtcactg

SEQ ID NO: 1354539 - DNA, 15 bp, Homo sapiens
atcatttctgtcact

SEQ ID NO: 1354540 - DNA, 15 bp, Homo sapiens
gatcatttctgtcac

SEQ ID NO: 1354541 - DNA, 15 bp, Homo sapiens
ggatcatttctgtca

SEQ ID NO: 1354542 - DNA, 15 bp, Homo sapiens
aggatcatttctgtc

SEQ ID NO: 1354543 - DNA, 15 bp, Homo sapiens
aaggatcatttctgt

SEQ ID NO: 1354544 - DNA, 15 bp, Homo sapiens
aaaggatcatttctg

SEQ ID NO: 1354545 - DNA, 15 bp, Homo sapiens
gaaaggatcatttct

SEQ ID NO: 1354546 - DNA, 15 bp, Homo sapiens
agaaaggatcatttc

SEQ ID NO: 1354547 - DNA, 15 bp, Homo sapiens
aagaaaggatcattt

SEQ ID NO: 1354548 - DNA, 15 bp, Homo sapiens
caagaaaggatcatt

SEQ ID NO: 1354549 - DNA, 15 bp, Homo sapiens
tcaagaaaggatcat

SEQ ID NO: 1354550 - DNA, 15 bp, Homo sapiens
gtcaagaaaggatca

SEQ ID NO: 1354551 - DNA, 15 bp, Homo sapiens
ggtcaagaaaggatc

SEQ ID NO: 1354552 - DNA, 15 bp, Homo sapiens
tggtcaagaaaggat

SEQ ID NO: 1354553 - DNA, 15 bp, Homo sapiens
ttggtcaagaaagga

SEQ ID NO: 1354554 - DNA, 15 bp, Homo sapiens
gttggtcaagaaagg

SEQ ID NO: 1354555 - DNA, 15 bp, Homo sapiens
agttggtcaagaaag

SEQ ID NO: 1354556 - DNA, 15 bp, Homo sapiens
gagttggtcaagaaa

SEQ ID NO: 1354557 - DNA, 15 bp, Homo sapiens
tgagttggtcaagaa

SEQ ID NO: 1354558 - DNA, 15 bp, Homo sapiens
atgagttggtcaaga

SEQ ID NO: 1354559 - DNA, 15 bp, Homo sapiens
catgagttggtcaag

SEQ ID NO: 1354560 - DNA, 15 bp, Homo sapiens
ccatgagttggtcaa

SEQ ID NO: 1354561 - DNA, 15 bp, Homo sapiens
accatgagttggtca

SEQ ID NO: 1354562 - DNA, 15 bp, Homo sapiens
gaccatgagttggtc

SEQ ID NO: 1354563 - DNA, 15 bp, Homo sapiens
tgaccatgagttggt

SEQ ID NO: 1354564 - DNA, 15 bp, Homo sapiens
ctgaccatgagttgg

SEQ ID NO: 1354565 - DNA, 15 bp, Homo sapiens
actgaccatgagttg

SEQ ID NO: 1354566 - DNA, 15 bp, Homo sapiens
aactgaccatgagtt

SEQ ID NO: 1354567 - DNA, 15 bp, Homo sapiens
aaactgaccatgagt

SEQ ID NO: 1354568 - DNA, 15 bp, Homo sapiens
aaaactgaccatgag

SEQ ID NO: 1354569 - DNA, 15 bp, Homo sapiens
gaaaactgaccatga

SEQ ID NO: 1354570 - DNA, 15 bp, Homo sapiens
tgaaaactgaccatg

SEQ ID NO: 1354571 - DNA, 15 bp, Homo sapiens
ctgaaaactgaccat

SEQ ID NO: 1354572 - DNA, 15 bp, Homo sapiens
gctgaaaactgacca

SEQ ID NO: 1354573 - DNA, 15 bp, Homo sapiens
tgctgaaaactgacc

SEQ ID NO: 1354574 - DNA, 15 bp, Homo sapiens
atgctgaaaactgac

SEQ ID NO: 1354575 - DNA, 15 bp, Homo sapiens
catgctgaaaactga

SEQ ID NO: 1354576 - DNA, 15 bp, Homo sapiens
ccatgctgaaaactg

SEQ ID NO: 1354577 - DNA, 15 bp, Homo sapiens
accatgctgaaaact

SEQ ID NO: 1354578 - DNA, 15 bp, Homo sapiens
gaccatgctgaaaac

SEQ ID NO: 1354579 - DNA, 15 bp, Homo sapiens
ggaccatgctgaaaa

SEQ ID NO: 1354580 - DNA, 15 bp, Homo sapiens
gggaccatgctgaaa

SEQ ID NO: 1354581 - DNA, 15 bp, Homo sapiens
agggaccatgctgaa

SEQ ID NO: 1354582 - DNA, 15 bp, Homo sapiens
tagggaccatgctga

SEQ ID NO: 1354583 - DNA, 15 bp, Homo sapiens
gtagggaccatgctg

SEQ ID NO: 1354584 - DNA, 15 bp, Homo sapiens
tgtagggaccatgct

SEQ ID NO: 1354585 - DNA, 15 bp, Homo sapiens
gtgtagggaccatgc

SEQ ID NO: 1354586 - DNA, 15 bp, Homo sapiens
tgtgtagggaccatg

SEQ ID NO: 1354587 - DNA, 15 bp, Homo sapiens
ctgtgtagggaccat

SEQ ID NO: 1354588 - DNA, 15 bp, Homo sapiens
tctgtgtagggacca

SEQ ID NO: 1354589 - DNA, 15 bp, Homo sapiens
ctctgtgtagggacc

SEQ ID NO: 1354590 - DNA, 15 bp, Homo sapiens
gctctgtgtagggac

SEQ ID NO: 1354591 - DNA, 15 bp, Homo sapiens
ggctctgtgtaggga

SEQ ID NO: 1354592 - DNA, 15 bp, Homo sapiens
aggctctgtgtaggg

SEQ ID NO: 1354593 - DNA, 15 bp, Homo sapiens
caggctctgtgtagg

SEQ ID NO: 1354594 - DNA, 15 bp, Homo sapiens
ccaggctctgtgtag

SEQ ID NO: 1354595 - DNA, 15 bp, Homo sapiens
gccaggctctgtgta

SEQ ID NO: 1354596 - DNA, 15 bp, Homo sapiens
ggccaggctctgtgt

SEQ ID NO: 1354597 - DNA, 15 bp, Homo sapiens
tggccaggctctgtg

SEQ ID NO: 1354598 - DNA, 15 bp, Homo sapiens
ttggccaggctctgt

SEQ ID NO: 1354599 - DNA, 15 bp, Homo sapiens
tttggccaggctctg

SEQ ID NO: 1354600 - DNA, 15 bp, Homo sapiens
gtttggccaggctct

SEQ ID NO: 1354601 - DNA, 15 bp, Homo sapiens
tgtttggccaggctc

SEQ ID NO: 1354602 - DNA, 15 bp, Homo sapiens
atgtttggccaggct

SEQ ID NO: 1354603 - DNA, 15 bp, Homo sapiens
catgtttggccaggc

SEQ ID NO: 1354604 - DNA, 15 bp, Homo sapiens
tcatgtttggccagg

SEQ ID NO: 1354605 - DNA, 15 bp, Homo sapiens
ctcatgtttggccag

SEQ ID NO: 1354606 - DNA, 15 bp, Homo sapiens
cctcatgtttggcca

SEQ ID NO: 1354607 - DNA, 15 bp, Homo sapiens
ccctcatgtttggcc

SEQ ID NO: 1354608 - DNA, 15 bp, Homo sapiens
cccctcatgtttggc

SEQ ID NO: 1354609 - DNA, 15 bp, Homo sapiens
gcccctcatgtttgg

SEQ ID NO: 1354610 - DNA, 15 bp, Homo sapiens
agcccctcatgtttg

SEQ ID NO: 1354611 - DNA, 15 bp, Homo sapiens
aagcccctcatgttt

SEQ ID NO: 1354612 - DNA, 15 bp, Homo sapiens
gaagcccctcatgtt

SEQ ID NO: 1354613 - DNA, 15 bp, Homo sapiens
tgaagcccctcatgt

SEQ ID NO: 1354614 - DNA, 15 bp, Homo sapiens
atgaagcccctcatg

SEQ ID NO: 1354615 - DNA, 15 bp, Homo sapiens
tatgaagcccctcat

SEQ ID NO: 1354616 - DNA, 15 bp, Homo sapiens
ttatgaagcccctca

SEQ ID NO: 1354617 - DNA, 15 bp, Homo sapiens
tttatgaagcccctc

SEQ ID NO: 1354618 - DNA, 15 bp, Homo sapiens
atttatgaagcccct

SEQ ID NO: 1354619 - DNA, 15 bp, Homo sapiens
catttatgaagcccc

SEQ ID NO: 1354620 - DNA, 15 bp, Homo sapiens
gcatttatgaagccc

SEQ ID NO: 1354621 - DNA, 15 bp, Homo sapiens
tgcatttatgaagcc

SEQ ID NO: 1354622 - DNA, 15 bp, Homo sapiens
atgcatttatgaagc

SEQ ID NO: 1354623 - DNA, 15 bp, Homo sapiens
gatgcatttatgaag

SEQ ID NO: 1354624 - DNA, 15 bp, Homo sapiens
agatgcatttatgaa

SEQ ID NO: 1354625 - DNA, 15 bp, Homo sapiens
gagatgcatttatga

SEQ ID NO: 1354626 - DNA, 15 bp, Homo sapiens
tgagatgcatttatg

SEQ ID NO: 1354627 - DNA, 15 bp, Homo sapiens
gtgagatgcatttat

SEQ ID NO: 1354628 - DNA, 15 bp, Homo sapiens
agtgagatgcattta

SEQ ID NO: 1354629 - DNA, 15 bp, Homo sapiens
cagtgagatgcattt

SEQ ID NO: 1354630 - DNA, 15 bp, Homo sapiens
ccagtgagatgcatt

SEQ ID NO: 1354631 - DNA, 15 bp, Homo sapiens
accagtgagatgcat

SEQ ID NO: 1354632 - DNA, 15 bp, Homo sapiens
taccagtgagatgca

SEQ ID NO: 1354633 - DNA, 15 bp, Homo sapiens
ataccagtgagatgc

SEQ ID NO: 1354634 - DNA, 15 bp, Homo sapiens
aataccagtgagatg

SEQ ID NO: 1354635 - DNA, 15 bp, Homo sapiens
aaataccagtgagat

SEQ ID NO: 1354636 - DNA, 15 bp, Homo sapiens
gaaataccagtgaga

SEQ ID NO: 1354637 - DNA, 15 bp, Homo sapiens
ggaaataccagtgag

SEQ ID NO: 1354638 - DNA, 15 bp, Homo sapiens
aggaaataccagtga

SEQ ID NO: 1354639 - DNA, 15 bp, Homo sapiens
caggaaataccagtg

SEQ ID NO: 1354640 - DNA, 15 bp, Homo sapiens
gcaggaaataccagt

SEQ ID NO: 1354641 - DNA, 15 bp, Homo sapiens
cgcaggaaataccag

SEQ ID NO: 1354642 - DNA, 15 bp, Homo sapiens
ccgcaggaaatacca

SEQ ID NO: 1354643 - DNA, 15 bp, Homo sapiens
accgcaggaaatacc

SEQ ID NO: 1354644 - DNA, 15 bp, Homo sapiens
gaccgcaggaaatac

SEQ ID NO: 1354645 - DNA, 15 bp, Homo sapiens
ggaccgcaggaaata

SEQ ID NO: 1354646 - DNA, 15 bp, Homo sapiens
tggaccgcaggaaat

SEQ ID NO: 1354647 - DNA, 15 bp, Homo sapiens
ttggaccgcaggaaa

SEQ ID NO: 1354648 - DNA, 15 bp, Homo sapiens
tttggaccgcaggaa

SEQ ID NO: 1354649 - DNA, 15 bp, Homo sapiens
gtttggaccgcagga

SEQ ID NO: 1354650 - DNA, 15 bp, Homo sapiens
tgtttggaccgcagg

SEQ ID NO: 1354651 - DNA, 15 bp, Homo sapiens
ctgtttggaccgcag

SEQ ID NO: 1354652 - DNA, 15 bp, Homo sapiens
tctgtttggaccgca

SEQ ID NO: 1354653 - DNA, 15 bp, Homo sapiens
atctgtttggaccgc

SEQ ID NO: 1354654 - DNA, 15 bp, Homo sapiens
gatctgtttggaccg

SEQ ID NO: 1354655 - DNA, 15 bp, Homo sapiens
tgatctgtttggacc

SEQ ID NO: 1354656 - DNA, 15 bp, Homo sapiens
ttgatctgtttggac

SEQ ID NO: 1354657 - DNA, 15 bp, Homo sapiens
cttgatctgtttgga

SEQ ID NO: 1354658 - DNA, 15 bp, Homo sapiens
gcttgatctgtttgg

SEQ ID NO: 1354659 - DNA, 15 bp, Homo sapiens
ggcttgatctgtttg

SEQ ID NO: 1354660 - DNA, 15 bp, Homo sapiens
aggcttgatctgttt

SEQ ID NO: 1354661 - DNA, 15 bp, Homo sapiens
aaggcttgatctgtt

SEQ ID NO: 1354662 - DNA, 15 bp, Homo sapiens
aaaggcttgatctgt

SEQ ID NO: 1354663 - DNA, 15 bp, Homo sapiens
aaaaggcttgatctg

SEQ ID NO: 1354664 - DNA, 15 bp, Homo sapiens
gaaaaggcttgatct

SEQ ID NO: 1354665 - DNA, 15 bp, Homo sapiens
agaaaaggcttgatc

SEQ ID NO: 1354666 - DNA, 15 bp, Homo sapiens
accagaaaaggcttg

SEQ ID NO: 1354667 - DNA, 15 bp, Homo sapiens
gaccagaaaaggctt

SEQ ID NO: 1354668 - DNA, 15 bp, Homo sapiens
agaccagaaaaggct

SEQ ID NO: 1354669 - DNA, 15 bp, Homo sapiens
gagaccagaaaaggc

SEQ ID NO: 1354670 - DNA, 15 bp, Homo sapiens
ggagaccagaaaagg

SEQ ID NO: 1354671 - DNA, 15 bp, Homo sapiens
aggagaccagaaaag

SEQ ID NO: 1354672 - DNA, 15 bp, Homo sapiens
taggagaccagaaaa

SEQ ID NO: 1354673 - DNA, 15 bp, Homo sapiens
ttaggagaccagaaa

SEQ ID NO: 1354674 - DNA, 15 bp, Homo sapiens
gttaggagaccagaa

SEQ ID NO: 1354675 - DNA, 15 bp, Homo sapiens
agttaggagaccaga

SEQ ID NO: 1354676 - DNA, 15 bp, Homo sapiens
aagttaggagaccag

SEQ ID NO: 1354677 - DNA, 15 bp, Homo sapiens
aaagttaggagacca

SEQ ID NO: 1354678 - DNA, 15 bp, Homo sapiens
aaaagttaggagacc

SEQ ID NO: 1354679 - DNA, 15 bp, Homo sapiens
taaaagttaggagac

SEQ ID NO: 1354680 - DNA, 15 bp, Homo sapiens
gtaaaagttaggaga

SEQ ID NO: 1354681 - DNA, 15 bp, Homo sapiens
ggtaaaagttaggag

SEQ ID NO: 1354682 - DNA, 15 bp, Homo sapiens
aggtaaaagttagga

SEQ ID NO: 1354683 - DNA, 15 bp, Homo sapiens
caggtaaaagttagg

SEQ ID NO: 1354684 - DNA, 15 bp, Homo sapiens
acaggtaaaagttag

SEQ ID NO: 1354685 - DNA, 15 bp, Homo sapiens
cacaggtaaaagtta

SEQ ID NO: 1354686 - DNA, 15 bp, Homo sapiens
gcacaggtaaaagtt

SEQ ID NO: 1354687 - DNA, 15 bp, Homo sapiens
tgcacaggtaaaagt

SEQ ID NO: 1354688 - DNA, 15 bp, Homo sapiens
ctgcacaggtaaaag

SEQ ID NO: 1354689 - DNA, 15 bp, Homo sapiens
actgcacaggtaaaa

SEQ ID NO: 1354690 - DNA, 15 bp, Homo sapiens
aactgcacaggtaaa

SEQ ID NO: 1354691 - DNA, 15 bp, Homo sapiens
taactgcacaggtaa

SEQ ID NO: 1354692 - DNA, 15 bp, Homo sapiens
ataactgcacaggta

SEQ ID NO: 1354693 - DNA, 15 bp, Homo sapiens
aataactgcacaggt

SEQ ID NO: 1354694 - DNA, 15 bp, Homo sapiens
aaataactgcacagg

SEQ ID NO: 1354695 - DNA, 15 bp, Homo sapiens
gaaataactgcacag

SEQ ID NO: 1354696 - DNA, 15 bp, Homo sapiens
agaaataactgcaca

SEQ ID NO: 1354697 - DNA, 15 bp, Homo sapiens
cagaaataactgcac

SEQ ID NO: 1354698 - DNA, 15 bp, Homo sapiens
gcagaaataactgca

SEQ ID NO: 1354699 - DNA, 15 bp, Homo sapiens
ggcagaaataactgc

SEQ ID NO: 1354700 - DNA, 15 bp, Homo sapiens
aggcagaaataactg

SEQ ID NO: 1354701 - DNA, 15 bp, Homo sapiens
taggcagaaataact

SEQ ID NO: 1354702 - DNA, 15 bp, Homo sapiens
ctaggcagaaataac

SEQ ID NO: 1354703 - DNA, 15 bp, Homo sapiens
tctaggcagaaataa

SEQ ID NO: 1354704 - DNA, 15 bp, Homo sapiens
ttctaggcagaaata

SEQ ID NO: 1354705 - DNA, 15 bp, Homo sapiens
attctaggcagaaat

SEQ ID NO: 1354706 - DNA, 15 bp, Homo sapiens
cattctaggcagaaa

SEQ ID NO: 1354707 - DNA, 15 bp, Homo sapiens
ccattctaggcagaa

SEQ ID NO: 1354708 - DNA, 15 bp, Homo sapiens
accattctaggcaga

SEQ ID NO: 1354709 - DNA, 15 bp, Homo sapiens
aaccattctaggcag

SEQ ID NO: 1354710 - DNA, 15 bp, Homo sapiens
aaaccattctaggca

SEQ ID NO: 1354711 - DNA, 15 bp, Homo sapiens
gaaaccattctaggc

SEQ ID NO: 1354712 - DNA, 15 bp, Homo sapiens
agaaaccattctagg

SEQ ID NO: 1354713 - DNA, 15 bp, Homo sapiens
aagaaaccattctag

SEQ ID NO: 1354714 - DNA, 15 bp, Homo sapiens
aaagaaaccattcta

SEQ ID NO: 1354715 - DNA, 15 bp, Homo sapiens
aaaagaaaccattct

SEQ ID NO: 1354716 - DNA, 15 bp, Homo sapiens
aaaaagaaaccattc

SEQ ID NO: 1354717 - DNA, 15 bp, Homo sapiens
aaaaaagaaaccatt

SEQ ID NO: 1354718 - DNA, 15 bp, Homo sapiens
gaaaaaagaaaccat

SEQ ID NO: 1354719 - DNA, 15 bp, Homo sapiens
agaaaaaagaaacca

SEQ ID NO: 1354720 - DNA, 15 bp, Homo sapiens
aagaaaaaagaaacc

SEQ ID NO: 1354721 - DNA, 15 bp, Homo sapiens
gaagaaaaaagaaac

SEQ ID NO: 1354722 - DNA, 15 bp, Homo sapiens
agaagaaaaaagaaa

SEQ ID NO: 1354723 - DNA, 15 bp, Homo sapiens
gagaagaaaaaagaa

SEQ ID NO: 1354724 - DNA, 15 bp, Homo sapiens
agagaagaaaaaaga

SEQ ID NO: 1354725 - DNA, 15 bp, Homo sapiens
cagagaagaaaaaag

SEQ ID NO: 1354726 - DNA, 15 bp, Homo sapiens
tcagagaagaaaaaa

SEQ ID NO: 1354727 - DNA, 15 bp, Homo sapiens
ttcagagaagaaaaa

SEQ ID NO: 1354728 - DNA, 15 bp, Homo sapiens
gttcagagaagaaaa

SEQ ID NO: 1354729 - DNA, 15 bp, Homo sapiens
agttcagagaagaaa

SEQ ID NO: 1354730 - DNA, 15 bp, Homo sapiens
gagttcagagaagaa

SEQ ID NO: 1354731 - DNA, 15 bp, Homo sapiens
ggagttcagagaaga

SEQ ID NO: 1354732 - DNA, 15 bp, Homo sapiens
aggagttcagagaag

SEQ ID NO: 1354733 - DNA, 15 bp, Homo sapiens
taggagttcagagaa

SEQ ID NO: 1354734 - DNA, 15 bp, Homo sapiens
gtaggagttcagaga

SEQ ID NO: 1354735 - DNA, 15 bp, Homo sapiens
agtaggagttcagag

SEQ ID NO: 1354736 - DNA, 15 bp, Homo sapiens
gagtaggagttcaga

SEQ ID NO: 1354737 - DNA, 15 bp, Homo sapiens
tgagtaggagttcag

SEQ ID NO: 1354738 - DNA, 15 bp, Homo sapiens
atgagtaggagttca

SEQ ID NO: 1354739 - DNA, 15 bp, Homo sapiens
gatgagtaggagttc

SEQ ID NO: 1354740 - DNA, 15 bp, Homo sapiens
ggatgagtaggagtt

SEQ ID NO: 1354741 - DNA, 15 bp, Homo sapiens
aggatgagtaggagt

SEQ ID NO: 1354742 - DNA, 15 bp, Homo sapiens
aaggatgagtaggag

SEQ ID NO: 1354743 - DNA, 15 bp, Homo sapiens
gaaggatgagtagga

SEQ ID NO: 1354744 - DNA, 15 bp, Homo sapiens
tgaaggatgagtagg

SEQ ID NO: 1354745 - DNA, 15 bp, Homo sapiens
ttgaaggatgagtag

SEQ ID NO: 1354746 - DNA, 15 bp, Homo sapiens
tttgaaggatgagta

SEQ ID NO: 1354747 - DNA, 15 bp, Homo sapiens
ctttgaaggatgagt

SEQ ID NO: 1354748 - DNA, 15 bp, Homo sapiens
gctttgaaggatgag

SEQ ID NO: 1354749 - DNA, 15 bp, Homo sapiens
ggctttgaaggatga

SEQ ID NO: 1354750 - DNA, 15 bp, Homo sapiens
gggctttgaaggatg

SEQ ID NO: 1354751 - DNA, 15 bp, Homo sapiens
tgggctttgaaggat

SEQ ID NO: 1354752 - DNA, 15 bp, Homo sapiens
ctgggctttgaagga

SEQ ID NO: 1354753 - DNA, 15 bp, Homo sapiens
actgggctttgaagg

SEQ ID NO: 1354754 - DNA, 15 bp, Homo sapiens
aactgggctttgaag

SEQ ID NO: 1354755 - DNA, 15 bp, Homo sapiens
gaactgggctttgaa

SEQ ID NO: 1354756 - DNA, 15 bp, Homo sapiens
ggaactgggctttga

SEQ ID NO: 1354757 - DNA, 15 bp, Homo sapiens
tggaactgggctttg

SEQ ID NO: 1354758 - DNA, 15 bp, Homo sapiens
ttggaactgggcttt

SEQ ID NO: 1354759 - DNA, 15 bp, Homo sapiens
tttggaactgggctt

SEQ ID NO: 1354760 - DNA, 15 bp, Homo sapiens
ttttggaactgggct

SEQ ID NO: 1354761 - DNA, 15 bp, Homo sapiens
attttggaactgggc

SEQ ID NO: 1354762 - DNA, 15 bp, Homo sapiens
gattttggaactggg

SEQ ID NO: 1354763 - DNA, 15 bp, Homo sapiens
ggattttggaactgg

SEQ ID NO: 1354764 - DNA, 15 bp, Homo sapiens
gggattttggaactg

SEQ ID NO: 1354765 - DNA, 15 bp, Homo sapiens
agggattttggaact

SEQ ID NO: 1354766 - DNA, 15 bp, Homo sapiens
aagggattttggaac

SEQ ID NO: 1354767 - DNA, 15 bp, Homo sapiens
caagggattttggaa

SEQ ID NO: 1354768 - DNA, 15 bp, Homo sapiens
gcaagggattttgga

SEQ ID NO: 1354769 - DNA, 15 bp, Homo sapiens
agcaagggattttgg

SEQ ID NO: 1354770 - DNA, 15 bp, Homo sapiens
gagcaagggattttg

SEQ ID NO: 1354771 - DNA, 15 bp, Homo sapiens
agagcaagggatttt

SEQ ID NO: 1354772 - DNA, 15 bp, Homo sapiens
aagagcaagggattt

SEQ ID NO: 1354773 - DNA, 15 bp, Homo sapiens
taagagcaagggatt

SEQ ID NO: 1354774 - DNA, 15 bp, Homo sapiens
ataagagcaagggat

SEQ ID NO: 1354775 - DNA, 15 bp, Homo sapiens
gataagagcaaggga

SEQ ID NO: 1354776 - DNA, 15 bp, Homo sapiens
tgataagagcaaggg

SEQ ID NO: 1354777 - DNA, 15 bp, Homo sapiens
ctgataagagcaagg

SEQ ID NO: 1354778 - DNA, 15 bp, Homo sapiens
gctgataagagcaag

SEQ ID NO: 1354779 - DNA, 15 bp, Homo sapiens
agctgataagagcaa

SEQ ID NO: 1354780 - DNA, 15 bp, Homo sapiens
aagctgataagagca

SEQ ID NO: 1354781 - DNA, 15 bp, Homo sapiens
aaagctgataagagc

SEQ ID NO: 1354782 - DNA, 15 bp, Homo sapiens
caaagctgataagag

SEQ ID NO: 1354783 - DNA, 15 bp, Homo sapiens
gcaaagctgataaga

SEQ ID NO: 1354784 - DNA, 15 bp, Homo sapiens
ggcaaagctgataag

SEQ ID NO: 1354785 - DNA, 15 bp, Homo sapiens
aggcaaagctgataa

SEQ ID NO: 1354786 - DNA, 15 bp, Homo sapiens
gaggcaaagctgata

SEQ ID NO: 1354787 - DNA, 15 bp, Homo sapiens
agaggcaaagctgat

SEQ ID NO: 1354788 - DNA, 15 bp, Homo sapiens
aagaggcaaagctga

SEQ ID NO: 1354789 - DNA, 15 bp, Homo sapiens
caagaggcaaagctg

SEQ ID NO: 1354790 - DNA, 15 bp, Homo sapiens
acaagaggcaaagct

SEQ ID NO: 1354791 - DNA, 15 bp, Homo sapiens
aacaagaggcaaagc

SEQ ID NO: 1354792 - DNA, 15 bp, Homo sapiens
gaacaagaggcaaag

SEQ ID NO: 1354793 - DNA, 15 bp, Homo sapiens
ggaacaagaggcaaa

SEQ ID NO: 1354794 - DNA, 15 bp, Homo sapiens
gggaacaagaggcaa

SEQ ID NO: 1354795 - DNA, 15 bp, Homo sapiens
tgggaacaagaggca

SEQ ID NO: 1354796 - DNA, 15 bp, Homo sapiens
ttgggaacaagaggc

SEQ ID NO: 1354797 - DNA, 15 bp, Homo sapiens
cttgggaacaagagg

SEQ ID NO: 1354798 - DNA, 15 bp, Homo sapiens
gcttgggaacaagag

SEQ ID NO: 1354799 - DNA, 15 bp, Homo sapiens
tgcttgggaacaaga

SEQ ID NO: 1354800 - DNA, 15 bp, Homo sapiens
ctgcttgggaacaag

SEQ ID NO: 1354801 - DNA, 15 bp, Homo sapiens
tctgcttgggaacaa

SEQ ID NO: 1354802 - DNA, 15 bp, Homo sapiens
ctctgcttgggaaca

SEQ ID NO: 1354803 - DNA, 15 bp, Homo sapiens
tctctgcttgggaac

SEQ ID NO: 1354804 - DNA, 15 bp, Homo sapiens
atctctgcttgggaa

SEQ ID NO: 1354805 - DNA, 15 bp, Homo sapiens
gatctctgcttggga

SEQ ID NO: 1354806 - DNA, 15 bp, Homo sapiens
agatctctgcttggg

SEQ ID NO: 1354807 - DNA, 15 bp, Homo sapiens
tagatctctgcttgg

SEQ ID NO: 1354808 - DNA, 15 bp, Homo sapiens
ttagatctctgcttg

SEQ ID NO: 1354809 - DNA, 15 bp, Homo sapiens
gttagatctctgctt

SEQ ID NO: 1354810 - DNA, 15 bp, Homo sapiens
agttagatctctgct

SEQ ID NO: 1354811 - DNA, 15 bp, Homo sapiens
gagttagatctctgc

SEQ ID NO: 1354812 - DNA, 15 bp, Homo sapiens
ggagttagatctctg

SEQ ID NO: 1354813 - DNA, 15 bp, Homo sapiens
gggagttagatctct

SEQ ID NO: 1354814 - DNA, 15 bp, Homo sapiens
ggggagttagatctc

SEQ ID NO: 1354815 - DNA, 15 bp, Homo sapiens
tggggagttagatct

SEQ ID NO: 1354816 - DNA, 15 bp, Homo sapiens
ttggggagttagatc

SEQ ID NO: 1354817 - DNA, 15 bp, Homo sapiens
tttggggagttagat

SEQ ID NO: 1354818 - DNA, 15 bp, Homo sapiens
atttggggagttaga

SEQ ID NO: 1354819 - DNA, 15 bp, Homo sapiens
aatttggggagttag

SEQ ID NO: 1354820 - DNA, 15 bp, Homo sapiens
caatttggggagtta

SEQ ID NO: 1354821 - DNA, 15 bp, Homo sapiens
ccaatttggggagtt

SEQ ID NO: 1354822 - DNA, 15 bp, Homo sapiens
cccaatttggggagt

SEQ ID NO: 1354823 - DNA, 15 bp, Homo sapiens
acccaatttggggag

SEQ ID NO: 1354824 - DNA, 15 bp, Homo sapiens
aacccaatttgggga

SEQ ID NO: 1354825 - DNA, 15 bp, Homo sapiens
gaacccaatttgggg

SEQ ID NO: 1354826 - DNA, 15 bp, Homo sapiens
ggaacccaatttggg

SEQ ID NO: 1354827 - DNA, 15 bp, Homo sapiens
gggaacccaatttgg

SEQ ID NO: 1354828 - DNA, 15 bp, Homo sapiens
cgggaacccaatttg

SEQ ID NO: 1354829 - DNA, 15 bp, Homo sapiens
gcgggaacccaattt

SEQ ID NO: 1354830 - DNA, 15 bp, Homo sapiens
ggcgggaacccaatt

SEQ ID NO: 1354831 - DNA, 15 bp, Homo sapiens
aggcgggaacccaat

SEQ ID NO: 1354832 - DNA, 15 bp, Homo sapiens
taggcgggaacccaa

SEQ ID NO: 1354833 - DNA, 15 bp, Homo sapiens
gtaggcgggaaccca

SEQ ID NO: 1354834 - DNA, 15 bp, Homo sapiens
ggtaggcgggaaccc

SEQ ID NO: 1354835 - DNA, 15 bp, Homo sapiens
gggtaggcgggaacc

SEQ ID NO: 1354836 - DNA, 15 bp, Homo sapiens
agggtaggcgggaac

SEQ ID NO: 1354837 - DNA, 15 bp, Homo sapiens
cagggtaggcgggaa

SEQ ID NO: 1354838 - DNA, 15 bp, Homo sapiens
ccagggtaggcggga

SEQ ID NO: 1354839 - DNA, 15 bp, Homo sapiens
gccagggtaggcggg

SEQ ID NO: 1354840 - DNA, 15 bp, Homo sapiens
agccagggtaggcgg

SEQ ID NO: 1354841 - DNA, 15 bp, Homo sapiens
cagccagggtaggcg

SEQ ID NO: 1354842 - DNA, 15 bp, Homo sapiens
ccagccagggtaggc

SEQ ID NO: 1354843 - DNA, 15 bp, Homo sapiens
cccagccagggtagg

SEQ ID NO: 1354844 - DNA, 15 bp, Homo sapiens
acccagccagggtag

SEQ ID NO: 1354845 - DNA, 15 bp, Homo sapiens
gacccagccagggta

SEQ ID NO: 1354846 - DNA, 15 bp, Homo sapiens
agacccagccagggt

SEQ ID NO: 1354847 - DNA, 15 bp, Homo sapiens
gagacccagccaggg

SEQ ID NO: 1354848 - DNA, 15 bp, Homo sapiens
agagacccagccagg

SEQ ID NO: 1354849 - DNA, 15 bp, Homo sapiens
cagagacccagccag

SEQ ID NO: 1354850 - DNA, 15 bp, Homo sapiens
gcagagacccagcca

SEQ ID NO: 1354851 - DNA, 15 bp, Homo sapiens
ggcagagacccagcc

SEQ ID NO: 1354852 - DNA, 15 bp, Homo sapiens
aggcagagacccagc

SEQ ID NO: 1354853 - DNA, 15 bp, Homo sapiens
gaggcagagacccag

SEQ ID NO: 1354854 - DNA, 15 bp, Homo sapiens
agaggcagagaccca

SEQ ID NO: 1354855 - DNA, 15 bp, Homo sapiens
cagaggcagagaccc

SEQ ID NO: 1354856 - DNA, 15 bp, Homo sapiens
gcagaggcagagacc

SEQ ID NO: 1354857 - DNA, 15 bp, Homo sapiens
ggcagaggcagagac

SEQ ID NO: 1354858 - DNA, 15 bp, Homo sapiens
aggcagaggcagaga

SEQ ID NO: 1354859 - DNA, 15 bp, Homo sapiens
gaggcagaggcagag

SEQ ID NO: 1354860 - DNA, 15 bp, Homo sapiens
tgaggcagaggcaga

SEQ ID NO: 1354861 - DNA, 15 bp, Homo sapiens
gtgaggcagaggcag

SEQ ID NO: 1354862 - DNA, 15 bp, Homo sapiens
ggtgaggcagaggca

SEQ ID NO: 1354863 - DNA, 15 bp, Homo sapiens
gggtgaggcagaggc

SEQ ID NO: 1354864 - DNA, 15 bp, Homo sapiens
ggggtgaggcagagg

SEQ ID NO: 1354865 - DNA, 15 bp, Homo sapiens
aggggtgaggcagag

SEQ ID NO: 1354866 - DNA, 15 bp, Homo sapiens
caggggtgaggcaga

SEQ ID NO: 1354867 - DNA, 15 bp, Homo sapiens
ccaggggtgaggcag

SEQ ID NO: 1354868 - DNA, 15 bp, Homo sapiens
gccaggggtgaggca

SEQ ID NO: 1354869 - DNA, 15 bp, Homo sapiens
agccaggggtgaggc

SEQ ID NO: 1354870 - DNA, 15 bp, Homo sapiens
gagccaggggtgagg

SEQ ID NO: 1354871 - DNA, 15 bp, Homo sapiens
ggagccaggggtgag

SEQ ID NO: 1354872 - DNA, 15 bp, Homo sapiens
tggagccaggggtga

SEQ ID NO: 1354873 - DNA, 15 bp, Homo sapiens
atggagccaggggtg

SEQ ID NO: 1354874 - DNA, 15 bp, Homo sapiens
catggagccaggggt

SEQ ID NO: 1354875 - DNA, 15 bp, Homo sapiens
ccatggagccagggg

SEQ ID NO: 1354876 - DNA, 15 bp, Homo sapiens
cccatggagccaggg

SEQ ID NO: 1354877 - DNA, 15 bp, Homo sapiens
gcccatggagccagg

SEQ ID NO: 1354878 - DNA, 15 bp, Homo sapiens
agcccatggagccag

SEQ ID NO: 1354879 - DNA, 15 bp, Homo sapiens
cagcccatggagcca

SEQ ID NO: 1354880 - DNA, 15 bp, Homo sapiens
ccagcccatggagcc

SEQ ID NO: 1354881 - DNA, 15 bp, Homo sapiens
tccagcccatggagc

SEQ ID NO: 1354882 - DNA, 15 bp, Homo sapiens
ttccagcccatggag

SEQ ID NO: 1354883 - DNA, 15 bp, Homo sapiens
cttccagcccatgga

SEQ ID NO: 1354884 - DNA, 15 bp, Homo sapiens
ccttccagcccatgg

SEQ ID NO: 1354885 - DNA, 15 bp, Homo sapiens
cccttccagcccatg

SEQ ID NO: 1354886 - DNA, 15 bp, Homo sapiens
acccttccagcccat

SEQ ID NO: 1354887 - DNA, 15 bp, Homo sapiens
gacccttccagccca

SEQ ID NO: 1354888 - DNA, 15 bp, Homo sapiens
agacccttccagccc

SEQ ID NO: 1354889 - DNA, 15 bp, Homo sapiens
cagacccttccagcc

SEQ ID NO: 1354890 - DNA, 15 bp, Homo sapiens
ccagacccttccagc

SEQ ID NO: 1354891 - DNA, 15 bp, Homo sapiens
cccagacccttccag

SEQ ID NO: 1354892 - DNA, 15 bp, Homo sapiens
gcccagacccttcca

SEQ ID NO: 1354893 - DNA, 15 bp, Homo sapiens
agcccagacccttcc

SEQ ID NO: 1354894 - DNA, 15 bp, Homo sapiens
cagcccagacccttc

SEQ ID NO: 1354895 - DNA, 15 bp, Homo sapiens
tcagcccagaccctt

SEQ ID NO: 1354896 - DNA, 15 bp, Homo sapiens
atcagcccagaccct

SEQ ID NO: 1354897 - DNA, 15 bp, Homo sapiens
aatcagcccagaccc

SEQ ID NO: 1354898 - DNA, 15 bp, Homo sapiens
gaatcagcccagacc

SEQ ID NO: 1354899 - DNA, 15 bp, Homo sapiens
agaatcagcccagac

SEQ ID NO: 1354900 - DNA, 15 bp, Homo sapiens
cagaatcagcccaga

SEQ ID NO: 1354901 - DNA, 15 bp, Homo sapiens
acagaatcagcccag

SEQ ID NO: 1354902 - DNA, 15 bp, Homo sapiens
gacagaatcagccca

SEQ ID NO: 1354903 - DNA, 15 bp, Homo sapiens
ggacagaatcagccc

SEQ ID NO: 1354904 - DNA, 15 bp, Homo sapiens
aggacagaatcagcc

SEQ ID NO: 1354905 - DNA, 15 bp, Homo sapiens
aaggacagaatcagc

SEQ ID NO: 1354906 - DNA, 15 bp, Homo sapiens
aaaggacagaatcag

SEQ ID NO: 1354907 - DNA, 15 bp, Homo sapiens
aaaaggacagaatca

SEQ ID NO: 1354908 - DNA, 15 bp, Homo sapiens
gaaaaggacagaatc

SEQ ID NO: 1354909 - DNA, 15 bp, Homo sapiens
tgaaaaggacagaat

SEQ ID NO: 1354910 - DNA, 15 bp, Homo sapiens
ttgaaaaggacagaa

SEQ ID NO: 1354911 - DNA, 15 bp, Homo sapiens
gttgaaaaggacaga

SEQ ID NO: 1354912 - DNA, 15 bp, Homo sapiens
tgttgaaaaggacag

SEQ ID NO: 1354913 - DNA, 15 bp, Homo sapiens
ctgttgaaaaggaca

SEQ ID NO: 1354914 - DNA, 15 bp, Homo sapiens
actgttgaaaaggac

SEQ ID NO: 1354915 - DNA, 15 bp, Homo sapiens
gactgttgaaaagga

SEQ ID NO: 1354916 - DNA, 15 bp, Homo sapiens
tgactgttgaaaagg

SEQ ID NO: 1354917 - DNA, 15 bp, Homo sapiens
ctgactgttgaaaag

SEQ ID NO: 1354918 - DNA, 15 bp, Homo sapiens
cctgactgttgaaaa

SEQ ID NO: 1354919 - DNA, 15 bp, Homo sapiens
ccctgactgttgaaa

SEQ ID NO: 1354920 - DNA, 15 bp, Homo sapiens
cccctgactgttgaa

SEQ ID NO: 1354921 - DNA, 15 bp, Homo sapiens
gcccctgactgttga

SEQ ID NO: 1354922 - DNA, 15 bp, Homo sapiens
agcccctgactgttg

SEQ ID NO: 1354923 - DNA, 15 bp, Homo sapiens
gagcccctgactgtt

SEQ ID NO: 1354924 - DNA, 15 bp, Homo sapiens
ggagcccctgactgt

SEQ ID NO: 1354925 - DNA, 15 bp, Homo sapiens
gggagcccctgactg

SEQ ID NO: 1354926 - DNA, 15 bp, Homo sapiens
agggagcccctgact

SEQ ID NO: 1354927 - DNA, 15 bp, Homo sapiens
cagggagcccctgac

SEQ ID NO: 1354928 - DNA, 15 bp, Homo sapiens
ccagggagcccctga

SEQ ID NO: 1354929 - DNA, 15 bp, Homo sapiens
cccagggagcccctg

SEQ ID NO: 1354930 - DNA, 15 bp, Homo sapiens
ccccagggagcccct

SEQ ID NO: 1354931 - DNA, 15 bp, Homo sapiens
tccccagggagcccc

SEQ ID NO: 1354932 - DNA, 15 bp, Homo sapiens
gtccccagggagccc

SEQ ID NO: 1354933 - DNA, 15 bp, Homo sapiens
agtccccagggagcc

SEQ ID NO: 1354934 - DNA, 15 bp, Homo sapiens
cagtccccagggagc

SEQ ID NO: 1354935 - DNA, 15 bp, Homo sapiens
tcagtccccagggag

SEQ ID NO: 1354936 - DNA, 15 bp, Homo sapiens
ttcagtccccaggga

SEQ ID NO: 1354937 - DNA, 15 bp, Homo sapiens
cttcagtccccaggg

SEQ ID NO: 1354938 - DNA, 15 bp, Homo sapiens
gcttcagtccccagg

SEQ ID NO: 1354939 - DNA, 15 bp, Homo sapiens
ggcttcagtccccag

SEQ ID NO: 1354940 - DNA, 15 bp, Homo sapiens
tggcttcagtcccca

SEQ ID NO: 1354941 - DNA, 15 bp, Homo sapiens
ctggcttcagtcccc

SEQ ID NO: 1354942 - DNA, 15 bp, Homo sapiens
cctggcttcagtccc

SEQ ID NO: 1354943 - DNA, 15 bp, Homo sapiens
ccctggcttcagtcc

SEQ ID NO: 1354944 - DNA, 15 bp, Homo sapiens
gccctggcttcagtc

SEQ ID NO: 1354945 - DNA, 15 bp, Homo sapiens
agccctggcttcagt

SEQ ID NO: 1354946 - DNA, 15 bp, Homo sapiens
cagccctggcttcag

SEQ ID NO: 1354947 - DNA, 15 bp, Homo sapiens
tcagccctggcttca

SEQ ID NO: 1354948 - DNA, 15 bp, Homo sapiens
gtcagccctggcttc

SEQ ID NO: 1354949 - DNA, 15 bp, Homo sapiens
cgtcagccctggctt

SEQ ID NO: 1354950 - DNA, 15 bp, Homo sapiens
ccgtcagccctggct

SEQ ID NO: 1354951 - DNA, 15 bp, Homo sapiens
gccgtcagccctggc

SEQ ID NO: 1354952 - DNA, 15 bp, Homo sapiens
agccgtcagccctgg

SEQ ID NO: 1354953 - DNA, 15 bp, Homo sapiens
gagccgtcagccctg

SEQ ID NO: 1354954 - DNA, 15 bp, Homo sapiens
agagccgtcagccct

SEQ ID NO: 1354955 - DNA, 15 bp, Homo sapiens
gagagccgtcagccc

SEQ ID NO: 1354956 - DNA, 15 bp, Homo sapiens
tgagagccgtcagcc

SEQ ID NO: 1354957 - DNA, 15 bp, Homo sapiens
ctgagagccgtcagc

SEQ ID NO: 1354958 - DNA, 15 bp, Homo sapiens
gctgagagccgtcag

SEQ ID NO: 1354959 - DNA, 15 bp, Homo sapiens
tgctgagagccgtca

SEQ ID NO: 1354960 - DNA, 15 bp, Homo sapiens
gtgctgagagccgtc

SEQ ID NO: 1354961 - DNA, 15 bp, Homo sapiens
tgtgctgagagccgt

SEQ ID NO: 1354962 - DNA, 15 bp, Homo sapiens
ctgtgctgagagccg

SEQ ID NO: 1354963 - DNA, 15 bp, Homo sapiens
tctgtgctgagagcc

SEQ ID NO: 1354964 - DNA, 15 bp, Homo sapiens
ctctgtgctgagagc

SEQ ID NO: 1354965 - DNA, 15 bp, Homo sapiens
cctctgtgctgagag

SEQ ID NO: 1354966 - DNA, 15 bp, Homo sapiens
gcctctgtgctgaga

SEQ ID NO: 1354967 - DNA, 15 bp, Homo sapiens
tgcctctgtgctgag

SEQ ID NO: 1354968 - DNA, 15 bp, Homo sapiens
atgcctctgtgctga

SEQ ID NO: 1354969 - DNA, 15 bp, Homo sapiens
catgcctctgtgctg

SEQ ID NO: 1354970 - DNA, 15 bp, Homo sapiens
acatgcctctgtgct

SEQ ID NO: 1354971 - DNA, 15 bp, Homo sapiens
aacatgcctctgtgc

SEQ ID NO: 1354972 - DNA, 15 bp, Homo sapiens
aaacatgcctctgtg

SEQ ID NO: 1354973 - DNA, 15 bp, Homo sapiens
caaacatgcctctgt

SEQ ID NO: 1354974 - DNA, 15 bp, Homo sapiens
gcaaacatgcctctg

SEQ ID NO: 1354975 - DNA, 15 bp, Homo sapiens
agcaaacatgcctct

SEQ ID NO: 1354976 - DNA, 15 bp, Homo sapiens
tagcaaacatgcctc

SEQ ID NO: 1354977 - DNA, 15 bp, Homo sapiens
gtagcaaacatgcct

SEQ ID NO: 1354978 - DNA, 15 bp, Homo sapiens
tgtagcaaacatgcc

SEQ ID NO: 1354979 - DNA, 15 bp, Homo sapiens
atgtagcaaacatgc

SEQ ID NO: 1354980 - DNA, 15 bp, Homo sapiens
tatgtagcaaacatg

SEQ ID NO: 1354981 - DNA, 15 bp, Homo sapiens
ctatgtagcaaacat

SEQ ID NO: 1354982 - DNA, 15 bp, Homo sapiens
actatgtagcaaaca

SEQ ID NO: 1354983 - DNA, 15 bp, Homo sapiens
gactatgtagcaaac

SEQ ID NO: 1354984 - DNA, 15 bp, Homo sapiens
tgactatgtagcaaa

SEQ ID NO: 1354985 - DNA, 15 bp, Homo sapiens
ctgactatgtagcaa

SEQ ID NO: 1354986 - DNA, 15 bp, Homo sapiens
tctgactatgtagca

SEQ ID NO: 1354987 - DNA, 15 bp, Homo sapiens
ctctgactatgtagc

SEQ ID NO: 1354988 - DNA, 15 bp, Homo sapiens
cctctgactatgtag

SEQ ID NO: 1354989 - DNA, 15 bp, Homo sapiens
ccctctgactatgta

SEQ ID NO: 1354990 - DNA, 15 bp, Homo sapiens
tccctctgactatgt

SEQ ID NO: 1354991 - DNA, 15 bp, Homo sapiens
ttccctctgactatg

SEQ ID NO: 1354992 - DNA, 15 bp, Homo sapiens
gttccctctgactat

SEQ ID NO: 1354993 - DNA, 15 bp, Homo sapiens
ggttccctctgacta

SEQ ID NO: 1354994 - DNA, 15 bp, Homo sapiens
aggttccctctgact

SEQ ID NO: 1354995 - DNA, 15 bp, Homo sapiens
gaggttccctctgac

SEQ ID NO: 1354996 - DNA, 15 bp, Homo sapiens
ggaggttccctctga

SEQ ID NO: 1354997 - DNA, 15 bp, Homo sapiens
tggaggttccctctg

SEQ ID NO: 1354998 - DNA, 15 bp, Homo sapiens
atggaggttccctct

SEQ ID NO: 1354999 - DNA, 15 bp, Homo sapiens
catggaggttccctc

SEQ ID NO: 1355000 - DNA, 15 bp, Homo sapiens
acatggaggttccct

SEQ ID NO: 1355001 - DNA, 15 bp, Homo sapiens
cacatggaggttccc

SEQ ID NO: 1355002 - DNA, 15 bp, Homo sapiens
tcacatggaggttcc

SEQ ID NO: 1355003 - DNA, 15 bp, Homo sapiens
gtcacatggaggttc

SEQ ID NO: 1355004 - DNA, 15 bp, Homo sapiens
tgtcacatggaggtt

SEQ ID NO: 1355005 - DNA, 15 bp, Homo sapiens
ctgtcacatggaggt

SEQ ID NO: 1355006 - DNA, 15 bp, Homo sapiens
gctgtcacatggagg

SEQ ID NO: 1355007 - DNA, 15 bp, Homo sapiens
tgctgtcacatggag

SEQ ID NO: 1355008 - DNA, 15 bp, Homo sapiens
ttgctgtcacatgga

SEQ ID NO: 1355009 - DNA, 15 bp, Homo sapiens
attgctgtcacatgg

SEQ ID NO: 1355010 - DNA, 15 bp, Homo sapiens
aattgctgtcacatg

SEQ ID NO: 1355011 - DNA, 15 bp, Homo sapiens
gaattgctgtcacat

SEQ ID NO: 1355012 - DNA, 15 bp, Homo sapiens
tgaattgctgtcaca

SEQ ID NO: 1355013 - DNA, 15 bp, Homo sapiens
gtgaattgctgtcac

SEQ ID NO: 1355014 - DNA, 15 bp, Homo sapiens
ggtgaattgctgtca

SEQ ID NO: 1355015 - DNA, 15 bp, Homo sapiens
gggtgaattgctgtc

SEQ ID NO: 1355016 - DNA, 15 bp, Homo sapiens
tgggtgaattgctgt

SEQ ID NO: 1355017 - DNA, 15 bp, Homo sapiens
atgggtgaattgctg

SEQ ID NO: 1355018 - DNA, 15 bp, Homo sapiens
tatgggtgaattgct

SEQ ID NO: 1355019 - DNA, 15 bp, Homo sapiens
ctatgggtgaattgc

SEQ ID NO: 1355020 - DNA, 15 bp, Homo sapiens
actatgggtgaattg

SEQ ID NO: 1355021 - DNA, 15 bp, Homo sapiens
cactatgggtgaatt

SEQ ID NO: 1355022 - DNA, 15 bp, Homo sapiens
ccactatgggtgaat

SEQ ID NO: 1355023 - DNA, 15 bp, Homo sapiens
cccactatgggtgaa

SEQ ID NO: 1355024 - DNA, 15 bp, Homo sapiens
acccactatgggtga

SEQ ID NO: 1355025 - DNA, 15 bp, Homo sapiens
cacccactatgggtg

SEQ ID NO: 1355026 - DNA, 15 bp, Homo sapiens
ccacccactatgggt

SEQ ID NO: 1355027 - DNA, 15 bp, Homo sapiens
tccacccactatggg

SEQ ID NO: 1355028 - DNA, 15 bp, Homo sapiens
ctccacccactatgg

SEQ ID NO: 1355029 - DNA, 15 bp, Homo sapiens
cctccacccactatg

SEQ ID NO: 1355030 - DNA, 15 bp, Homo sapiens
acctccacccactat

SEQ ID NO: 1355031 - DNA, 15 bp, Homo sapiens
gacctccacccacta

SEQ ID NO: 1355032 - DNA, 15 bp, Homo sapiens
agacctccacccact

SEQ ID NO: 1355033 - DNA, 15 bp, Homo sapiens
cagacctccacccac

SEQ ID NO: 1355034 - DNA, 15 bp, Homo sapiens
ccagacctccaccca

SEQ ID NO: 1355035 - DNA, 15 bp, Homo sapiens
cccagacctccaccc

SEQ ID NO: 1355036 - DNA, 15 bp, Homo sapiens
ccccagacctccacc

SEQ ID NO: 1355037 - DNA, 15 bp, Homo sapiens
gccccagacctccac

SEQ ID NO: 1355038 - DNA, 15 bp, Homo sapiens
tgccccagacctcca

SEQ ID NO: 1355039 - DNA, 15 bp, Homo sapiens
ttgccccagacctcc

SEQ ID NO: 1355040 - DNA, 15 bp, Homo sapiens
attgccccagacctc

SEQ ID NO: 1355041 - DNA, 15 bp, Homo sapiens
cattgccccagacct

SEQ ID NO: 1355042 - DNA, 15 bp, Homo sapiens
ccattgccccagacc

SEQ ID NO: 1355043 - DNA, 15 bp, Homo sapiens
gccattgccccagac

SEQ ID NO: 1355044 - DNA, 15 bp, Homo sapiens
agccattgccccaga

SEQ ID NO: 1355045 - DNA, 15 bp, Homo sapiens
cagccattgccccag

SEQ ID NO: 1355046 - DNA, 15 bp, Homo sapiens
gcagccattgcccca

SEQ ID NO: 1355047 - DNA, 15 bp, Homo sapiens
tgcagccattgcccc

SEQ ID NO: 1355048 - DNA, 15 bp, Homo sapiens
atgcagccattgccc

SEQ ID NO: 1355049 - DNA, 15 bp, Homo sapiens
catgcagccattgcc

SEQ ID NO: 1355050 - DNA, 15 bp, Homo sapiens
gcatgcagccattgc

SEQ ID NO: 1355051 - DNA, 15 bp, Homo sapiens
tgcatgcagccattg

SEQ ID NO: 1355052 - DNA, 15 bp, Homo sapiens
atgcatgcagccatt

SEQ ID NO: 1355053 - DNA, 15 bp, Homo sapiens
catgcatgcagccat

SEQ ID NO: 1355054 - DNA, 15 bp, Homo sapiens
acatgcatgcagcca

SEQ ID NO: 1355055 - DNA, 15 bp, Homo sapiens
cacatgcatgcagcc

SEQ ID NO: 1355056 - DNA, 15 bp, Homo sapiens
acacatgcatgcagc

SEQ ID NO: 1355057 - DNA, 15 bp, Homo sapiens
cacacatgcatgcag

SEQ ID NO: 1355058 - DNA, 15 bp, Homo sapiens
acacacatgcatgca

SEQ ID NO: 1355059 - DNA, 15 bp, Homo sapiens
cacacacatgcatgc

SEQ ID NO: 1355060 - DNA, 15 bp, Homo sapiens
tcacacacatgcatg

SEQ ID NO: 1355061 - DNA, 15 bp, Homo sapiens
gtcacacacatgcat

SEQ ID NO: 1355062 - DNA, 15 bp, Homo sapiens
cgtcacacacatgca

SEQ ID NO: 1355063 - DNA, 15 bp, Homo sapiens
acgtcacacacatgc

SEQ ID NO: 1355064 - DNA, 15 bp, Homo sapiens
aacgtcacacacatg

SEQ ID NO: 1355065 - DNA, 15 bp, Homo sapiens
caacgtcacacacat

SEQ ID NO: 1355066 - DNA, 15 bp, Homo sapiens
tcaacgtcacacaca

SEQ ID NO: 1355067 - DNA, 15 bp, Homo sapiens
ctcaacgtcacacac

SEQ ID NO: 1355068 - DNA, 15 bp, Homo sapiens
actcaacgtcacaca

SEQ ID NO: 1355069 - DNA, 15 bp, Homo sapiens
cactcaacgtcacac

SEQ ID NO: 1355070 - DNA, 15 bp, Homo sapiens
acactcaacgtcaca

SEQ ID NO: 1355071 - DNA, 15 bp, Homo sapiens
cacactcaacgtcac

SEQ ID NO: 1355072 - DNA, 15 bp, Homo sapiens
ccacactcaacgtca

SEQ ID NO: 1355073 - DNA, 15 bp, Homo sapiens
cccacactcaacgtc

SEQ ID NO: 1355074 - DNA, 15 bp, Homo sapiens
ccccacactcaacgt

SEQ ID NO: 1355075 - DNA, 15 bp, Homo sapiens
gccccacactcaacg

SEQ ID NO: 1355076 - DNA, 15 bp, Homo sapiens
cgccccacactcaac

SEQ ID NO: 1355077 - DNA, 15 bp, Homo sapiens
acgccccacactcaa

SEQ ID NO: 1355078 - DNA, 15 bp, Homo sapiens
cacgccccacactca

SEQ ID NO: 1355079 - DNA, 15 bp, Homo sapiens
acacgccccacactc

SEQ ID NO: 1355080 - DNA, 15 bp, Homo sapiens
cacacgccccacact

SEQ ID NO: 1355081 - DNA, 15 bp, Homo sapiens
gcacacgccccacac

SEQ ID NO: 1355082 - DNA, 15 bp, Homo sapiens
tgcacacgccccaca

SEQ ID NO: 1355083 - DNA, 15 bp, Homo sapiens
gtgcacacgccccac

SEQ ID NO: 1355084 - DNA, 15 bp, Homo sapiens
tgtgcacacgcccca

SEQ ID NO: 1355085 - DNA, 15 bp, Homo sapiens
gtgtgcacacgcccc

SEQ ID NO: 1355086 - DNA, 15 bp, Homo sapiens
cgtgtgcacacgccc

SEQ ID NO: 1355087 - DNA, 15 bp, Homo sapiens
acgtgtgcacacgcc

SEQ ID NO: 1355088 - DNA, 15 bp, Homo sapiens
cacgtgtgcacacgc

SEQ ID NO: 1355089 - DNA, 15 bp, Homo sapiens
gcacgtgtgcacacg

SEQ ID NO: 1355090 - DNA, 15 bp, Homo sapiens
tgcacgtgtgcacac

SEQ ID NO: 1355091 - DNA, 15 bp, Homo sapiens
gtgcacgtgtgcaca

SEQ ID NO: 1355092 - DNA, 15 bp, Homo sapiens
agtgcacgtgtgcac

SEQ ID NO: 1355093 - DNA, 15 bp, Homo sapiens
aagtgcacgtgtgca

SEQ ID NO: 1355094 - DNA, 15 bp, Homo sapiens
gaagtgcacgtgtgc

SEQ ID NO: 1355095 - DNA, 15 bp, Homo sapiens
agaagtgcacgtgtg

SEQ ID NO: 1355096 - DNA, 15 bp, Homo sapiens
cagaagtgcacgtgt

SEQ ID NO: 1355097 - DNA, 15 bp, Homo sapiens
acagaagtgcacgtg

SEQ ID NO: 1355098 - DNA, 15 bp, Homo sapiens
gacagaagtgcacgt

SEQ ID NO: 1355099 - DNA, 15 bp, Homo sapiens
ggacagaagtgcacg

SEQ ID NO: 1355100 - DNA, 15 bp, Homo sapiens
tggacagaagtgcac

SEQ ID NO: 1355101 - DNA, 15 bp, Homo sapiens
gtggacagaagtgca

SEQ ID NO: 1355102 - DNA, 15 bp, Homo sapiens
ggtggacagaagtgc

SEQ ID NO: 1355103 - DNA, 15 bp, Homo sapiens
aggtggacagaagtg

SEQ ID NO: 1355104 - DNA, 15 bp, Homo sapiens
caggtggacagaagt

SEQ ID NO: 1355105 - DNA, 15 bp, Homo sapiens
ccaggtggacagaag

SEQ ID NO: 1355106 - DNA, 15 bp, Homo sapiens
cccaggtggacagaa

SEQ ID NO: 1355107 - DNA, 15 bp, Homo sapiens
gcccaggtggacaga

SEQ ID NO: 1355108 - DNA, 15 bp, Homo sapiens
ggcccaggtggacag

SEQ ID NO: 1355109 - DNA, 15 bp, Homo sapiens
aggcccaggtggaca

SEQ ID NO: 1355110 - DNA, 15 bp, Homo sapiens
caggcccaggtggac

SEQ ID NO: 1355111 - DNA, 15 bp, Homo sapiens
acaggcccaggtgga

SEQ ID NO: 1355112 - DNA, 15 bp, Homo sapiens
aacaggcccaggtgg

SEQ ID NO: 1355113 - DNA, 15 bp, Homo sapiens
gaacaggcccaggtg

SEQ ID NO: 1355114 - DNA, 15 bp, Homo sapiens
agaacaggcccaggt

SEQ ID NO: 1355115 - DNA, 15 bp, Homo sapiens
tagaacaggcccagg

SEQ ID NO: 1355116 - DNA, 15 bp, Homo sapiens
gtagaacaggcccag

SEQ ID NO: 1355117 - DNA, 15 bp, Homo sapiens
cgtagaacaggccca

SEQ ID NO: 1355118 - DNA, 15 bp, Homo sapiens
acgtagaacaggccc

SEQ ID NO: 1355119 - DNA, 15 bp, Homo sapiens
aacgtagaacaggcc

SEQ ID NO: 1355120 - DNA, 15 bp, Homo sapiens
gaacgtagaacaggc

SEQ ID NO: 1355121 - DNA, 15 bp, Homo sapiens
ggaacgtagaacagg

SEQ ID NO: 1355122 - DNA, 15 bp, Homo sapiens
cggaacgtagaacag

SEQ ID NO: 1355123 - DNA, 15 bp, Homo sapiens
gcggaacgtagaaca

SEQ ID NO: 1355124 - DNA, 15 bp, Homo sapiens
tgcggaacgtagaac

SEQ ID NO: 1355125 - DNA, 15 bp, Homo sapiens
atgcggaacgtagaa

SEQ ID NO: 1355126 - DNA, 15 bp, Homo sapiens
catgcggaacgtaga

SEQ ID NO: 1355127 - DNA, 15 bp, Homo sapiens
ccatgcggaacgtag

SEQ ID NO: 1355128 - DNA, 15 bp, Homo sapiens
cccatgcggaacgta

SEQ ID NO: 1355129 - DNA, 15 bp, Homo sapiens
gcccatgcggaacgt

SEQ ID NO: 1355130 - DNA, 15 bp, Homo sapiens
tgcccatgcggaacg

SEQ ID NO: 1355131 - DNA, 15 bp, Homo sapiens
ctgcccatgcggaac

SEQ ID NO: 1355132 - DNA, 15 bp, Homo sapiens
cctgcccatgcggaa

SEQ ID NO: 1355133 - DNA, 15 bp, Homo sapiens
gcctgcccatgcgga

SEQ ID NO: 1355134 - DNA, 15 bp, Homo sapiens
tgcctgcccatgcgg

SEQ ID NO: 1355135 - DNA, 15 bp, Homo sapiens
gtgcctgcccatgcg

SEQ ID NO: 1355136 - DNA, 15 bp, Homo sapiens
cgtgcctgcccatgc

SEQ ID NO: 1355137 - DNA, 15 bp, Homo sapiens
ccgtgcctgcccatg

SEQ ID NO: 1355138 - DNA, 15 bp, Homo sapiens
tccgtgcctgcccat

SEQ ID NO: 1355139 - DNA, 15 bp, Homo sapiens
ctccgtgcctgccca

SEQ ID NO: 1355140 - DNA, 15 bp, Homo sapiens
cctccgtgcctgccc

SEQ ID NO: 1355141 - DNA, 15 bp, Homo sapiens
acctccgtgcctgcc

SEQ ID NO: 1355142 - DNA, 15 bp, Homo sapiens
gacctccgtgcctgc

SEQ ID NO: 1355143 - DNA, 15 bp, Homo sapiens
tgacctccgtgcctg

SEQ ID NO: 1355144 - DNA, 15 bp, Homo sapiens
ctgacctccgtgcct

SEQ ID NO: 1355145 - DNA, 15 bp, Homo sapiens
cctgacctccgtgcc

SEQ ID NO: 1355146 - DNA, 15 bp, Homo sapiens
gcctgacctccgtgc

SEQ ID NO: 1355147 - DNA, 15 bp, Homo sapiens
tgcctgacctccgtg

SEQ ID NO: 1355148 - DNA, 15 bp, Homo sapiens
ctgcctgacctccgt

SEQ ID NO: 1355149 - DNA, 15 bp, Homo sapiens
cctgcctgacctccg

SEQ ID NO: 1355150 - DNA, 15 bp, Homo sapiens
gcctgcctgacctcc

SEQ ID NO: 1355151 - DNA, 15 bp, Homo sapiens
ggcctgcctgacctc

SEQ ID NO: 1355152 - DNA, 15 bp, Homo sapiens
aggcctgcctgacct

SEQ ID NO: 1355153 - DNA, 15 bp, Homo sapiens
taggcctgcctgacc

SEQ ID NO: 1355154 - DNA, 15 bp, Homo sapiens
ataggcctgcctgac

SEQ ID NO: 1355155 - DNA, 15 bp, Homo sapiens
gataggcctgcctga

SEQ ID NO: 1355156 - DNA, 15 bp, Homo sapiens
agataggcctgcctg

SEQ ID NO: 1355157 - DNA, 15 bp, Homo sapiens
aagataggcctgcct

SEQ ID NO: 1355158 - DNA, 15 bp, Homo sapiens
caagataggcctgcc

SEQ ID NO: 1355159 - DNA, 15 bp, Homo sapiens
tcaagataggcctgc

SEQ ID NO: 1355160 - DNA, 15 bp, Homo sapiens
ctcaagataggcctg

SEQ ID NO: 1355161 - DNA, 15 bp, Homo sapiens
cctcaagataggcct

SEQ ID NO: 1355162 - DNA, 15 bp, Homo sapiens
ccctcaagataggcc

SEQ ID NO: 1355163 - DNA, 15 bp, Homo sapiens
cccctcaagataggc

SEQ ID NO: 1355164 - DNA, 15 bp, Homo sapiens
ccccctcaagatagg

SEQ ID NO: 1355165 - DNA, 15 bp, Homo sapiens
accccctcaagatag

SEQ ID NO: 1355166 - DNA, 15 bp, Homo sapiens
caccccctcaagata

SEQ ID NO: 1355167 - DNA, 15 bp, Homo sapiens
acaccccctcaagat

SEQ ID NO: 1355168 - DNA, 15 bp, Homo sapiens
cacaccccctcaaga

SEQ ID NO: 1355169 - DNA, 15 bp, Homo sapiens
acacaccccctcaag

SEQ ID NO: 1355170 - DNA, 15 bp, Homo sapiens
aacacaccccctcaa

SEQ ID NO: 1355171 - DNA, 15 bp, Homo sapiens
aaacacaccccctca

SEQ ID NO: 1355172 - DNA, 15 bp, Homo sapiens
aaaacacaccccctc

SEQ ID NO: 1355173 - DNA, 15 bp, Homo sapiens
aaaaacacaccccct

SEQ ID NO: 1355174 - DNA, 15 bp, Homo sapiens
aaaaaacacaccccc

SEQ ID NO: 1355175 - DNA, 15 bp, Homo sapiens
caaaaaacacacccc

SEQ ID NO: 1355176 - DNA, 15 bp, Homo sapiens
tcaaaaaacacaccc

SEQ ID NO: 1355177 - DNA, 15 bp, Homo sapiens
ctcaaaaaacacacc

SEQ ID NO: 1355178 - DNA, 15 bp, Homo sapiens
cctcaaaaaacacac

SEQ ID NO: 1355179 - DNA, 15 bp, Homo sapiens
ccctcaaaaaacaca

SEQ ID NO: 1355180 - DNA, 15 bp, Homo sapiens
cccctcaaaaaacac

SEQ ID NO: 1355181 - DNA, 15 bp, Homo sapiens
acccctcaaaaaaca

SEQ ID NO: 1355182 - DNA, 15 bp, Homo sapiens
cacccctcaaaaaac

SEQ ID NO: 1355183 - DNA, 15 bp, Homo sapiens
acacccctcaaaaaa

SEQ ID NO: 1355184 - DNA, 15 bp, Homo sapiens
cacacccctcaaaaa

SEQ ID NO: 1355185 - DNA, 15 bp, Homo sapiens
tcacacccctcaaaa

SEQ ID NO: 1355186 - DNA, 15 bp, Homo sapiens
gtcacacccctcaaa

SEQ ID NO: 1355187 - DNA, 15 bp, Homo sapiens
agtcacacccctcaa

SEQ ID NO: 1355188 - DNA, 15 bp, Homo sapiens
cagtcacacccctca

SEQ ID NO: 1355189 - DNA, 15 bp, Homo sapiens
acagtcacacccctc

SEQ ID NO: 1355190 - DNA, 15 bp, Homo sapiens
cacagtcacacccct

SEQ ID NO: 1355191 - DNA, 15 bp, Homo sapiens
tcacagtcacacccc

SEQ ID NO: 1355192 - DNA, 15 bp, Homo sapiens
ctcacagtcacaccc

SEQ ID NO: 1355193 - DNA, 15 bp, Homo sapiens
cctcacagtcacacc

SEQ ID NO: 1355194 - DNA, 15 bp, Homo sapiens
gcctcacagtcacac

SEQ ID NO: 1355195 - DNA, 15 bp, Homo sapiens
ggcctcacagtcaca

SEQ ID NO: 1355196 - DNA, 15 bp, Homo sapiens
gggcctcacagtcac

SEQ ID NO: 1355197 - DNA, 15 bp, Homo sapiens
agggcctcacagtca

SEQ ID NO: 1355198 - DNA, 15 bp, Homo sapiens
tagggcctcacagtc

SEQ ID NO: 1355199 - DNA, 15 bp, Homo sapiens
atagggcctcacagt

SEQ ID NO: 1355200 - DNA, 15 bp, Homo sapiens
catagggcctcacag

SEQ ID NO: 1355201 - DNA, 15 bp, Homo sapiens
acatagggcctcaca

SEQ ID NO: 1355202 - DNA, 15 bp, Homo sapiens
cacatagggcctcac

SEQ ID NO: 1355203 - DNA, 15 bp, Homo sapiens
acacatagggcctca

SEQ ID NO: 1355204 - DNA, 15 bp, Homo sapiens
cacacatagggcctc

SEQ ID NO: 1355205 - DNA, 15 bp, Homo sapiens
tcacacatagggcct

SEQ ID NO: 1355206 - DNA, 15 bp, Homo sapiens
ttcacacatagggcc

SEQ ID NO: 1355207 - DNA, 15 bp, Homo sapiens
tttcacacatagggc

SEQ ID NO: 1355208 - DNA, 15 bp, Homo sapiens
ctttcacacataggg

SEQ ID NO: 1355209 - DNA, 15 bp, Homo sapiens
cctttcacacatagg

SEQ ID NO: 1355210 - DNA, 15 bp, Homo sapiens
ccctttcacacatag

SEQ ID NO: 1355211 - DNA, 15 bp, Homo sapiens
tccctttcacacata

SEQ ID NO: 1355212 - DNA, 15 bp, Homo sapiens
atccctttcacacat

SEQ ID NO: 1355213 - DNA, 15 bp, Homo sapiens
aatccctttcacaca

SEQ ID NO: 1355214 - DNA, 15 bp, Homo sapiens
aaatccctttcacac

SEQ ID NO: 1355215 - DNA, 15 bp, Homo sapiens
gaaatccctttcaca

SEQ ID NO: 1355216 - DNA, 15 bp, Homo sapiens
agaaatccctttcac

SEQ ID NO: 1355217 - DNA, 15 bp, Homo sapiens
cagaaatccctttca

SEQ ID NO: 1355218 - DNA, 15 bp, Homo sapiens
cacagaaatcccttt

SEQ ID NO: 1355219 - DNA, 15 bp, Homo sapiens
tcacagaaatccctt

SEQ ID NO: 1355220 - DNA, 15 bp, Homo sapiens
atcacagaaatccct

SEQ ID NO: 1355221 - DNA, 15 bp, Homo sapiens
catcacagaaatccc

SEQ ID NO: 1355222 - DNA, 15 bp, Homo sapiens
ccatcacagaaatcc

SEQ ID NO: 1355223 - DNA, 15 bp, Homo sapiens
tccatcacagaaatc

SEQ ID NO: 1355224 - DNA, 15 bp, Homo sapiens
ctccatcacagaaat

SEQ ID NO: 1355225 - DNA, 15 bp, Homo sapiens
tctccatcacagaaa

SEQ ID NO: 1355226 - DNA, 15 bp, Homo sapiens
ttctccatcacagaa

SEQ ID NO: 1355227 - DNA, 15 bp, Homo sapiens
attctccatcacaga

SEQ ID NO: 1355228 - DNA, 15 bp, Homo sapiens
gattctccatcacag

SEQ ID NO: 1355229 - DNA, 15 bp, Homo sapiens
agattctccatcaca

SEQ ID NO: 1355230 - DNA, 15 bp, Homo sapiens
cagattctccatcac

SEQ ID NO: 1355231 - DNA, 15 bp, Homo sapiens
acagattctccatca

SEQ ID NO: 1355232 - DNA, 15 bp, Homo sapiens
tacagattctccatc

SEQ ID NO: 1355233 - DNA, 15 bp, Homo sapiens
atacagattctccat

SEQ ID NO: 1355234 - DNA, 15 bp, Homo sapiens
aatacagattctcca

SEQ ID NO: 1355235 - DNA, 15 bp, Homo sapiens
aaatacagattctcc

SEQ ID NO: 1355236 - DNA, 15 bp, Homo sapiens
caaatacagattctc

SEQ ID NO: 1355237 - DNA, 15 bp, Homo sapiens
gcaaatacagattct

SEQ ID NO: 1355238 - DNA, 15 bp, Homo sapiens
ggcaaatacagattc

SEQ ID NO: 1355239 - DNA, 15 bp, Homo sapiens
aggcaaatacagatt

SEQ ID NO: 1355240 - DNA, 15 bp, Homo sapiens
gaggcaaatacagat

SEQ ID NO: 1355241 - DNA, 15 bp, Homo sapiens
agaggcaaatacaga

SEQ ID NO: 1355242 - DNA, 15 bp, Homo sapiens
aagaggcaaatacag

SEQ ID NO: 1355243 - DNA, 15 bp, Homo sapiens
taagaggcaaataca

SEQ ID NO: 1355244 - DNA, 15 bp, Homo sapiens
gtaagaggcaaatac

SEQ ID NO: 1355245 - DNA, 15 bp, Homo sapiens
ggtaagaggcaaata

SEQ ID NO: 1355246 - DNA, 15 bp, Homo sapiens
tggtaagaggcaaat

SEQ ID NO: 1355247 - DNA, 15 bp, Homo sapiens
ttggtaagaggcaaa

SEQ ID NO: 1355248 - DNA, 15 bp, Homo sapiens
cttggtaagaggcaa

SEQ ID NO: 1355249 - DNA, 15 bp, Homo sapiens
ccttggtaagaggca

SEQ ID NO: 1355250 - DNA, 15 bp, Homo sapiens
tccttggtaagaggc

SEQ ID NO: 1355251 - DNA, 15 bp, Homo sapiens
ctccttggtaagagg

SEQ ID NO: 1355252 - DNA, 15 bp, Homo sapiens
actccttggtaagag

SEQ ID NO: 1355253 - DNA, 15 bp, Homo sapiens
tactccttggtaaga

SEQ ID NO: 1355254 - DNA, 15 bp, Homo sapiens
ctactccttggtaag

SEQ ID NO: 1355255 - DNA, 15 bp, Homo sapiens
cctactccttggtaa

SEQ ID NO: 1355256 - DNA, 15 bp, Homo sapiens
ccctactccttggta

SEQ ID NO: 1355257 - DNA, 15 bp, Homo sapiens
cccctactccttggt

SEQ ID NO: 1355258 - DNA, 15 bp, Homo sapiens
acccctactccttgg

SEQ ID NO: 1355259 - DNA, 15 bp, Homo sapiens
aacccctactccttg

SEQ ID NO: 1355260 - DNA, 15 bp, Homo sapiens
caacccctactcctt

SEQ ID NO: 1355261 - DNA, 15 bp, Homo sapiens
ccaacccctactcct

SEQ ID NO: 1355262 - DNA, 15 bp, Homo sapiens
gccaacccctactcc

SEQ ID NO: 1355263 - DNA, 15 bp, Homo sapiens
tgccaacccctactc

SEQ ID NO: 1355264 - DNA, 15 bp, Homo sapiens
atgccaacccctact

SEQ ID NO: 1355265 - DNA, 15 bp, Homo sapiens
catgccaacccctac

SEQ ID NO: 1355266 - DNA, 15 bp, Homo sapiens
ccatgccaaccccta

SEQ ID NO: 1355267 - DNA, 15 bp, Homo sapiens
gccatgccaacccct

SEQ ID NO: 1355268 - DNA, 15 bp, Homo sapiens
ggccatgccaacccc

SEQ ID NO: 1355269 - DNA, 15 bp, Homo sapiens
aggccatgccaaccc

SEQ ID NO: 1355270 - DNA, 15 bp, Homo sapiens
gaggccatgccaacc

SEQ ID NO: 1355271 - DNA, 15 bp, Homo sapiens
agaggccatgccaac

SEQ ID NO: 1355272 - DNA, 15 bp, Homo sapiens
tagaggccatgccaa

SEQ ID NO: 1355273 - DNA, 15 bp, Homo sapiens
gtagaggccatgcca

SEQ ID NO: 1355274 - DNA, 15 bp, Homo sapiens
ggtagaggccatgcc

SEQ ID NO: 1355275 - DNA, 15 bp, Homo sapiens
aggtagaggccatgc

SEQ ID NO: 1355276 - DNA, 15 bp, Homo sapiens
caggtagaggccatg

SEQ ID NO: 1355277 - DNA, 15 bp, Homo sapiens
acaggtagaggccat

SEQ ID NO: 1355278 - DNA, 15 bp, Homo sapiens
gacaggtagaggcca

SEQ ID NO: 1355279 - DNA, 15 bp, Homo sapiens
ggacaggtagaggcc

SEQ ID NO: 1355280 - DNA, 15 bp, Homo sapiens
tggacaggtagaggc

SEQ ID NO: 1355281 - DNA, 15 bp, Homo sapiens
gtggacaggtagagg

SEQ ID NO: 1355282 - DNA, 15 bp, Homo sapiens
ggtggacaggtagag

SEQ ID NO: 1355283 - DNA, 15 bp, Homo sapiens
aggtggacaggtaga

SEQ ID NO: 1355284 - DNA, 15 bp, Homo sapiens
taggtggacaggtag

SEQ ID NO: 1355285 - DNA, 15 bp, Homo sapiens
ataggtggacaggta

SEQ ID NO: 1355286 - DNA, 15 bp, Homo sapiens
gataggtggacaggt

SEQ ID NO: 1355287 - DNA, 15 bp, Homo sapiens
agataggtggacagg

SEQ ID NO: 1355288 - DNA, 15 bp, Homo sapiens
tagataggtggacag

SEQ ID NO: 1355289 - DNA, 15 bp, Homo sapiens
gtagataggtggaca

SEQ ID NO: 1355290 - DNA, 15 bp, Homo sapiens
agtagataggtggac

SEQ ID NO: 1355291 - DNA, 15 bp, Homo sapiens
gagtagataggtgga

SEQ ID NO: 1355292 - DNA, 15 bp, Homo sapiens
cgagtagataggtgg

SEQ ID NO: 1355293 - DNA, 15 bp, Homo sapiens
acgagtagataggtg

SEQ ID NO: 1355294 - DNA, 15 bp, Homo sapiens
cacgagtagataggt

SEQ ID NO: 1355295 - DNA, 15 bp, Homo sapiens
tcacgagtagatagg

SEQ ID NO: 1355296 - DNA, 15 bp, Homo sapiens
ttcacgagtagatag

SEQ ID NO: 1355297 - DNA, 15 bp, Homo sapiens
attcacgagtagata

SEQ ID NO: 1355298 - DNA, 15 bp, Homo sapiens
aattcacgagtagat

SEQ ID NO: 1355299 - DNA, 15 bp, Homo sapiens
gaattcacgagtaga

SEQ ID NO: 1355300 - DNA, 15 bp, Homo sapiens
agaattcacgagtag

SEQ ID NO: 1355301 - DNA, 15 bp, Homo sapiens
gagaattcacgagta

SEQ ID NO: 1355302 - DNA, 15 bp, Homo sapiens
ggagaattcacgagt

SEQ ID NO: 1355303 - DNA, 15 bp, Homo sapiens
tggagaattcacgag

SEQ ID NO: 1355304 - DNA, 15 bp, Homo sapiens
ttggagaattcacga

SEQ ID NO: 1355305 - DNA, 15 bp, Homo sapiens
cttggagaattcacg

SEQ ID NO: 1355306 - DNA, 15 bp, Homo sapiens
gcttggagaattcac

SEQ ID NO: 1355307 - DNA, 15 bp, Homo sapiens
ggcttggagaattca

SEQ ID NO: 1355308 - DNA, 15 bp, Homo sapiens
tggcttggagaattc

SEQ ID NO: 1355309 - DNA, 15 bp, Homo sapiens
gtggcttggagaatt

SEQ ID NO: 1355310 - DNA, 15 bp, Homo sapiens
ggtggcttggagaat

SEQ ID NO: 1355311 - DNA, 15 bp, Homo sapiens
gggtggcttggagaa

SEQ ID NO: 1355312 - DNA, 15 bp, Homo sapiens
agggtggcttggaga

SEQ ID NO: 1355313 - DNA, 15 bp, Homo sapiens
aagggtggcttggag

SEQ ID NO: 1355314 - DNA, 15 bp, Homo sapiens
gaagggtggcttgga

SEQ ID NO: 1355315 - DNA, 15 bp, Homo sapiens
ggaagggtggcttgg

SEQ ID NO: 1355316 - DNA, 15 bp, Homo sapiens
tggaagggtggcttg

SEQ ID NO: 1355317 - DNA, 15 bp, Homo sapiens
gtggaagggtggctt

SEQ ID NO: 1355318 - DNA, 15 bp, Homo sapiens
cgtggaagggtggct

SEQ ID NO: 1355319 - DNA, 15 bp, Homo sapiens
gcgtggaagggtggc

SEQ ID NO: 1355320 - DNA, 15 bp, Homo sapiens
tgcgtggaagggtgg

SEQ ID NO: 1355321 - DNA, 15 bp, Homo sapiens
atgcgtggaagggtg

SEQ ID NO: 1355322 - DNA, 15 bp, Homo sapiens
aatgcgtggaagggt

SEQ ID NO: 1355323 - DNA, 15 bp, Homo sapiens
aaatgcgtggaaggg

SEQ ID NO: 1355324 - DNA, 15 bp, Homo sapiens
taaatgcgtggaagg

SEQ ID NO: 1355325 - DNA, 15 bp, Homo sapiens
gtaaatgcgtggaag

SEQ ID NO: 1355326 - DNA, 15 bp, Homo sapiens
ggtaaatgcgtggaa

SEQ ID NO: 1355327 - DNA, 15 bp, Homo sapiens
tggtaaatgcgtgga

SEQ ID NO: 1355328 - DNA, 15 bp, Homo sapiens
gtggtaaatgcgtgg

SEQ ID NO: 1355329 - DNA, 15 bp, Homo sapiens
ggtggtaaatgcgtg

SEQ ID NO: 1355330 - DNA, 15 bp, Homo sapiens
aggtggtaaatgcgt

SEQ ID NO: 1355331 - DNA, 15 bp, Homo sapiens
taggtggtaaatgcg

SEQ ID NO: 1355332 - DNA, 15 bp, Homo sapiens
ataggtggtaaatgc

SEQ ID NO: 1355333 - DNA, 15 bp, Homo sapiens
cataggtggtaaatg

SEQ ID NO: 1355334 - DNA, 15 bp, Homo sapiens
gcataggtggtaaat

SEQ ID NO: 1355335 - DNA, 15 bp, Homo sapiens
tgcataggtggtaaa

SEQ ID NO: 1355336 - DNA, 15 bp, Homo sapiens
gtgcataggtggtaa

SEQ ID NO: 1355337 - DNA, 15 bp, Homo sapiens
agtgcataggtggta

SEQ ID NO: 1355338 - DNA, 15 bp, Homo sapiens
gagtgcataggtggt

SEQ ID NO: 1355339 - DNA, 15 bp, Homo sapiens
tgagtgcataggtgg

SEQ ID NO: 1355340 - DNA, 15 bp, Homo sapiens
gtgagtgcataggtg

SEQ ID NO: 1355341 - DNA, 15 bp, Homo sapiens
ggtgagtgcataggt

SEQ ID NO: 1355342 - DNA, 15 bp, Homo sapiens
aggtgagtgcatagg

SEQ ID NO: 1355343 - DNA, 15 bp, Homo sapiens
caggtgagtgcatag

SEQ ID NO: 1355344 - DNA, 15 bp, Homo sapiens
ccaggtgagtgcata

SEQ ID NO: 1355345 - DNA, 15 bp, Homo sapiens
tccaggtgagtgcat

SEQ ID NO: 1355346 - DNA, 15 bp, Homo sapiens
gtccaggtgagtgca

SEQ ID NO: 1355347 - DNA, 15 bp, Homo sapiens
tgtccaggtgagtgc

SEQ ID NO: 1355348 - DNA, 15 bp, Homo sapiens
atgtccaggtgagtg

SEQ ID NO: 1355349 - DNA, 15 bp, Homo sapiens
gatgtccaggtgagt

SEQ ID NO: 1355350 - DNA, 15 bp, Homo sapiens
ggatgtccaggtgag

SEQ ID NO: 1355351 - DNA, 15 bp, Homo sapiens
tggatgtccaggtga

SEQ ID NO: 1355352 - DNA, 15 bp, Homo sapiens
atggatgtccaggtg

SEQ ID NO: 1355353 - DNA, 15 bp, Homo sapiens
gatggatgtccaggt

SEQ ID NO: 1355354 - DNA, 15 bp, Homo sapiens
ggatggatgtccagg

SEQ ID NO: 1355355 - DNA, 15 bp, Homo sapiens
aggatggatgtccag

SEQ ID NO: 1355356 - DNA, 15 bp, Homo sapiens
gaggatggatgtcca

SEQ ID NO: 1355357 - DNA, 15 bp, Homo sapiens
ggaggatggatgtcc

SEQ ID NO: 1355358 - DNA, 15 bp, Homo sapiens
gggaggatggatgtc

SEQ ID NO: 1355359 - DNA, 15 bp, Homo sapiens
tgggaggatggatgt

SEQ ID NO: 1355360 - DNA, 15 bp, Homo sapiens
gtgggaggatggatg

SEQ ID NO: 1355361 - DNA, 15 bp, Homo sapiens
ggtgggaggatggat

SEQ ID NO: 1355362 - DNA, 15 bp, Homo sapiens
aggtgggaggatgga

SEQ ID NO: 1355363 - DNA, 15 bp, Homo sapiens
taggtgggaggatgg

SEQ ID NO: 1355364 - DNA, 15 bp, Homo sapiens
ttaggtgggaggatg

SEQ ID NO: 1355365 - DNA, 15 bp, Homo sapiens
cttaggtgggaggat

SEQ ID NO: 1355366 - DNA, 15 bp, Homo sapiens
gcttaggtgggagga

SEQ ID NO: 1355367 - DNA, 15 bp, Homo sapiens
tgcttaggtgggagg

SEQ ID NO: 1355368 - DNA, 15 bp, Homo sapiens
gtgcttaggtgggag

SEQ ID NO: 1355369 - DNA, 15 bp, Homo sapiens
agtgcttaggtggga

SEQ ID NO: 1355370 - DNA, 15 bp, Homo sapiens
cagtgcttaggtggg

SEQ ID NO: 1355371 - DNA, 15 bp, Homo sapiens
acagtgcttaggtgg

SEQ ID NO: 1355372 - DNA, 15 bp, Homo sapiens
tacagtgcttaggtg

SEQ ID NO: 1355373 - DNA, 15 bp, Homo sapiens
atacagtgcttaggt

SEQ ID NO: 1355374 - DNA, 15 bp, Homo sapiens
tatacagtgcttagg

SEQ ID NO: 1355375 - DNA, 15 bp, Homo sapiens
ttatacagtgcttag

SEQ ID NO: 1355376 - DNA, 15 bp, Homo sapiens
gttatacagtgctta

SEQ ID NO: 1355377 - DNA, 15 bp, Homo sapiens
ggttatacagtgctt

SEQ ID NO: 1355378 - DNA, 15 bp, Homo sapiens
tggttatacagtgct

SEQ ID NO: 1355379 - DNA, 15 bp, Homo sapiens
gtggttatacagtgc

SEQ ID NO: 1355380 - DNA, 15 bp, Homo sapiens
ggtggttatacagtg

SEQ ID NO: 1355381 - DNA, 15 bp, Homo sapiens
gggtggttatacagt

SEQ ID NO: 1355382 - DNA, 15 bp, Homo sapiens
tgggtggttatacag

SEQ ID NO: 1355383 - DNA, 15 bp, Homo sapiens
gtgggtggttataca

SEQ ID NO: 1355384 - DNA, 15 bp, Homo sapiens
agtgggtggttatac

SEQ ID NO: 1355385 - DNA, 15 bp, Homo sapiens
cagtgggtggttata

SEQ ID NO: 1355386 - DNA, 15 bp, Homo sapiens
ccagtgggtggttat

SEQ ID NO: 1355387 - DNA, 15 bp, Homo sapiens
gccagtgggtggtta

SEQ ID NO: 1355388 - DNA, 15 bp, Homo sapiens
ggccagtgggtggtt

SEQ ID NO: 1355389 - DNA, 15 bp, Homo sapiens
tggccagtgggtggt

SEQ ID NO: 1355390 - DNA, 15 bp, Homo sapiens
gtggccagtgggtgg

SEQ ID NO: 1355391 - DNA, 15 bp, Homo sapiens
ggtggccagtgggtg

SEQ ID NO: 1355392 - DNA, 15 bp, Homo sapiens
tggtggccagtgggt

SEQ ID NO: 1355393 - DNA, 15 bp, Homo sapiens
gtggtggccagtggg

SEQ ID NO: 1355394 - DNA, 15 bp, Homo sapiens
ggtggtggccagtgg

SEQ ID NO: 1355395 - DNA, 15 bp, Homo sapiens
gggtggtggccagtg

SEQ ID NO: 1355396 - DNA, 15 bp, Homo sapiens
tgggtggtggccagt

SEQ ID NO: 1355397 - DNA, 15 bp, Homo sapiens
gtgggtggtggccag

SEQ ID NO: 1355398 - DNA, 15 bp, Homo sapiens
tgtgggtggtggcca

SEQ ID NO: 1355399 - DNA, 15 bp, Homo sapiens
ttgtgggtggtggcc

SEQ ID NO: 1355400 - DNA, 15 bp, Homo sapiens
tttgtgggtggtggc

SEQ ID NO: 1355401 - DNA, 15 bp, Homo sapiens
gtttgtgggtggtgg

SEQ ID NO: 1355402 - DNA, 15 bp, Homo sapiens
ggtttgtgggtggtg

SEQ ID NO: 1355403 - DNA, 15 bp, Homo sapiens
gggtttgtgggtggt

SEQ ID NO: 1355404 - DNA, 15 bp, Homo sapiens
tgggtttgtgggtgg

SEQ ID NO: 1355405 - DNA, 15 bp, Homo sapiens
gtgggtttgtgggtg

SEQ ID NO: 1355406 - DNA, 15 bp, Homo sapiens
ggtgggtttgtgggt

SEQ ID NO: 1355407 - DNA, 15 bp, Homo sapiens
gggtgggtttgtggg

SEQ ID NO: 1355408 - DNA, 15 bp, Homo sapiens
tgggtgggtttgtgg

SEQ ID NO: 1355409 - DNA, 15 bp, Homo sapiens
gtgggtgggtttgtg

SEQ ID NO: 1355410 - DNA, 15 bp, Homo sapiens
ggtgggtgggtttgt

SEQ ID NO: 1355411 - DNA, 15 bp, Homo sapiens
gggtgggtgggtttg

SEQ ID NO: 1355412 - DNA, 15 bp, Homo sapiens
tgggtgggtgggttt

SEQ ID NO: 1355413 - DNA, 15 bp, Homo sapiens
ttgggtgggtgggtt

SEQ ID NO: 1355414 - DNA, 15 bp, Homo sapiens
attgggtgggtgggt

SEQ ID NO: 1355415 - DNA, 15 bp, Homo sapiens
aattgggtgggtggg

SEQ ID NO: 1355416 - DNA, 15 bp, Homo sapiens
gaattgggtgggtgg

SEQ ID NO: 1355417 - DNA, 15 bp, Homo sapiens
tgaattgggtgggtg

SEQ ID NO: 1355418 - DNA, 15 bp, Homo sapiens
atgaattgggtgggt

SEQ ID NO: 1355419 - DNA, 15 bp, Homo sapiens
catgaattgggtggg

SEQ ID NO: 1355420 - DNA, 15 bp, Homo sapiens
acatgaattgggtgg

SEQ ID NO: 1355421 - DNA, 15 bp, Homo sapiens
aacatgaattgggtg

SEQ ID NO: 1355422 - DNA, 15 bp, Homo sapiens
gaacatgaattgggt

SEQ ID NO: 1355423 - DNA, 15 bp, Homo sapiens
agaacatgaattggg

SEQ ID NO: 1355424 - DNA, 15 bp, Homo sapiens
gagaacatgaattgg

SEQ ID NO: 1355425 - DNA, 15 bp, Homo sapiens
tgagaacatgaattg

SEQ ID NO: 1355426 - DNA, 15 bp, Homo sapiens
atgagaacatgaatt

SEQ ID NO: 1355427 - DNA, 15 bp, Homo sapiens
catgagaacatgaat

SEQ ID NO: 1355428 - DNA, 15 bp, Homo sapiens
ccatgagaacatgaa

SEQ ID NO: 1355429 - DNA, 15 bp, Homo sapiens
accatgagaacatga

SEQ ID NO: 1355430 - DNA, 15 bp, Homo sapiens
aaccatgagaacatg

SEQ ID NO: 1355431 - DNA, 15 bp, Homo sapiens
gaaccatgagaacat

SEQ ID NO: 1355432 - DNA, 15 bp, Homo sapiens
agaaccatgagaaca

SEQ ID NO: 1355433 - DNA, 15 bp, Homo sapiens
aagaaccatgagaac

SEQ ID NO: 1355434 - DNA, 15 bp, Homo sapiens
gaagaaccatgagaa

SEQ ID NO: 1355435 - DNA, 15 bp, Homo sapiens
tgaagaaccatgaga

SEQ ID NO: 1355436 - DNA, 15 bp, Homo sapiens
atgaagaaccatgag

SEQ ID NO: 1355437 - DNA, 15 bp, Homo sapiens
gatgaagaaccatga

SEQ ID NO: 1355438 - DNA, 15 bp, Homo sapiens
tgatgaagaaccatg

SEQ ID NO: 1355439 - DNA, 15 bp, Homo sapiens
gtgatgaagaaccat

SEQ ID NO: 1355440 - DNA, 15 bp, Homo sapiens
ggtgatgaagaacca

SEQ ID NO: 1355441 - DNA, 15 bp, Homo sapiens
gggtgatgaagaacc

SEQ ID NO: 1355442 - DNA, 15 bp, Homo sapiens
agggtgatgaagaac

SEQ ID NO: 1355443 - DNA, 15 bp, Homo sapiens
aagggtgatgaagaa

SEQ ID NO: 1355444 - DNA, 15 bp, Homo sapiens
aaagggtgatgaaga

SEQ ID NO: 1355445 - DNA, 15 bp, Homo sapiens
taaagggtgatgaag

SEQ ID NO: 1355446 - DNA, 15 bp, Homo sapiens
ttaaagggtgatgaa

SEQ ID NO: 1355447 - DNA, 15 bp, Homo sapiens
attaaagggtgatga

SEQ ID NO: 1355448 - DNA, 15 bp, Homo sapiens
gattaaagggtgatg

SEQ ID NO: 1355449 - DNA, 15 bp, Homo sapiens
tgattaaagggtgat

SEQ ID NO: 1355450 - DNA, 15 bp, Homo sapiens
ctgattaaagggtga

SEQ ID NO: 1355451 - DNA, 15 bp, Homo sapiens
tctgattaaagggtg

SEQ ID NO: 1355452 - DNA, 15 bp, Homo sapiens
atctgattaaagggt

SEQ ID NO: 1355453 - DNA, 15 bp, Homo sapiens
aatctgattaaaggg

SEQ ID NO: 1355454 - DNA, 15 bp, Homo sapiens
aaatctgattaaagg

SEQ ID NO: 1355455 - DNA, 15 bp, Homo sapiens
gaaatctgattaaag

SEQ ID NO: 1355456 - DNA, 15 bp, Homo sapiens
tgaaatctgattaaa

SEQ ID NO: 1355457 - DNA, 15 bp, Homo sapiens
gtgaaatctgattaa

SEQ ID NO: 1355458 - DNA, 15 bp, Homo sapiens
ggtgaaatctgatta

SEQ ID NO: 1355459 - DNA, 15 bp, Homo sapiens
gggtgaaatctgatt

SEQ ID NO: 1355460 - DNA, 15 bp, Homo sapiens
tgggtgaaatctgat

SEQ ID NO: 1355461 - DNA, 15 bp, Homo sapiens
gtgggtgaaatctga

SEQ ID NO: 1355462 - DNA, 15 bp, Homo sapiens
tgtgggtgaaatctg

SEQ ID NO: 1355463 - DNA, 15 bp, Homo sapiens
gtgtgggtgaaatct

SEQ ID NO: 1355464 - DNA, 15 bp, Homo sapiens
tgtgtgggtgaaatc

SEQ ID NO: 1355465 - DNA, 15 bp, Homo sapiens
atgtgtgggtgaaat

SEQ ID NO: 1355466 - DNA, 15 bp, Homo sapiens
gatgtgtgggtgaaa

SEQ ID NO: 1355467 - DNA, 15 bp, Homo sapiens
ggatgtgtgggtgaa

SEQ ID NO: 1355468 - DNA, 15 bp, Homo sapiens
tggatgtgtgggtga

SEQ ID NO: 1355469 - DNA, 15 bp, Homo sapiens
atggatgtgtgggtg

SEQ ID NO: 1355470 - DNA, 15 bp, Homo sapiens
gatggatgtgtgggt

SEQ ID NO: 1355471 - DNA, 15 bp, Homo sapiens
ggatggatgtgtggg

SEQ ID NO: 1355472 - DNA, 15 bp, Homo sapiens
tggatggatgtgtgg

SEQ ID NO: 1355473 - DNA, 15 bp, Homo sapiens
gtggatggatgtgtg

SEQ ID NO: 1355474 - DNA, 15 bp, Homo sapiens
ggtggatggatgtgt

SEQ ID NO: 1355475 - DNA, 15 bp, Homo sapiens
gggtggatggatgtg

SEQ ID NO: 1355476 - DNA, 15 bp, Homo sapiens
tgggtggatggatgt

SEQ ID NO: 1355477 - DNA, 15 bp, Homo sapiens
gtgggtggatggatg

SEQ ID NO: 1355478 - DNA, 15 bp, Homo sapiens
ggtgggtggatggat

SEQ ID NO: 1355479 - DNA, 15 bp, Homo sapiens
gggtgggtggatgga

SEQ ID NO: 1355480 - DNA, 15 bp, Homo sapiens
tgggtgggtggatgg

SEQ ID NO: 1355481 - DNA, 15 bp, Homo sapiens
ttgggtgggtggatg

SEQ ID NO: 1355482 - DNA, 15 bp, Homo sapiens
tttgggtgggtggat

SEQ ID NO: 1355483 - DNA, 15 bp, Homo sapiens
gtttgggtgggtgga

SEQ ID NO: 1355484 - DNA, 15 bp, Homo sapiens
tgtttgggtgggtgg

SEQ ID NO: 1355485 - DNA, 15 bp, Homo sapiens
gtgtttgggtgggtg

SEQ ID NO: 1355486 - DNA, 15 bp, Homo sapiens
ggtgtttgggtgggt

SEQ ID NO: 1355487 - DNA, 15 bp, Homo sapiens
aggtgtttgggtggg

SEQ ID NO: 1355488 - DNA, 15 bp, Homo sapiens
taggtgtttgggtgg

SEQ ID NO: 1355489 - DNA, 15 bp, Homo sapiens
gtaggtgtttgggtg

SEQ ID NO: 1355490 - DNA, 15 bp, Homo sapiens
ggtaggtgtttgggt

SEQ ID NO: 1355491 - DNA, 15 bp, Homo sapiens
tggtaggtgtttggg

SEQ ID NO: 1355492 - DNA, 15 bp, Homo sapiens
ttggtaggtgtttgg

SEQ ID NO: 1355493 - DNA, 15 bp, Homo sapiens
gttggtaggtgtttg

SEQ ID NO: 1355494 - DNA, 15 bp, Homo sapiens
agttggtaggtgttt

SEQ ID NO: 1355495 - DNA, 15 bp, Homo sapiens
gagttggtaggtgtt

SEQ ID NO: 1355496 - DNA, 15 bp, Homo sapiens
ggagttggtaggtgt

SEQ ID NO: 1355497 - DNA, 15 bp, Homo sapiens
gggagttggtaggtg

SEQ ID NO: 1355498 - DNA, 15 bp, Homo sapiens
tgggagttggtaggt

SEQ ID NO: 1355499 - DNA, 15 bp, Homo sapiens
gtgggagttggtagg

SEQ ID NO: 1355500 - DNA, 15 bp, Homo sapiens
ggtgggagttggtag

SEQ ID NO: 1355501 - DNA, 15 bp, Homo sapiens
tggtgggagttggta

SEQ ID NO: 1355502 - DNA, 15 bp, Homo sapiens
atggtgggagttggt

SEQ ID NO: 1355503 - DNA, 15 bp, Homo sapiens
aatggtgggagttgg

SEQ ID NO: 1355504 - DNA, 15 bp, Homo sapiens
gaatggtgggagttg

SEQ ID NO: 1355505 - DNA, 15 bp, Homo sapiens
tgaatggtgggagtt

SEQ ID NO: 1355506 - DNA, 15 bp, Homo sapiens
atgaatggtgggagt

SEQ ID NO: 1355507 - DNA, 15 bp, Homo sapiens
gatgaatggtgggag

SEQ ID NO: 1355508 - DNA, 15 bp, Homo sapiens
ggatgaatggtggga

SEQ ID NO: 1355509 - DNA, 15 bp, Homo sapiens
tggatgaatggtggg

SEQ ID NO: 1355510 - DNA, 15 bp, Homo sapiens
atggatgaatggtgg

SEQ ID NO: 1355511 - DNA, 15 bp, Homo sapiens
gatggatgaatggtg

SEQ ID NO: 1355512 - DNA, 15 bp, Homo sapiens
ggatggatgaatggt

SEQ ID NO: 1355513 - DNA, 15 bp, Homo sapiens
tggatggatgaatgg

SEQ ID NO: 1355514 - DNA, 15 bp, Homo sapiens
gtggatggatgaatg

SEQ ID NO: 1355515 - DNA, 15 bp, Homo sapiens
agtggatggatgaat

SEQ ID NO: 1355516 - DNA, 15 bp, Homo sapiens
gagtggatggatgaa

SEQ ID NO: 1355517 - DNA, 15 bp, Homo sapiens
tgagtggatggatga

SEQ ID NO: 1355518 - DNA, 15 bp, Homo sapiens
atgagtggatggatg

SEQ ID NO: 1355519 - DNA, 15 bp, Homo sapiens
gatgagtggatggat

SEQ ID NO: 1355520 - DNA, 15 bp, Homo sapiens
ggatgagtggatgga

SEQ ID NO: 1355521 - DNA, 15 bp, Homo sapiens
tggatgagtggatgg

SEQ ID NO: 1355522 - DNA, 15 bp, Homo sapiens
gtggatgagtggatg

SEQ ID NO: 1355523 - DNA, 15 bp, Homo sapiens
ggtggatgagtggat

SEQ ID NO: 1355524 - DNA, 15 bp, Homo sapiens
gggtggatgagtgga

SEQ ID NO: 1355525 - DNA, 15 bp, Homo sapiens
tgggtggatgagtgg

SEQ ID NO: 1355526 - DNA, 15 bp, Homo sapiens
atgggtggatgagtg

SEQ ID NO: 1355527 - DNA, 15 bp, Homo sapiens
gatgggtggatgagt

SEQ ID NO: 1355528 - DNA, 15 bp, Homo sapiens
ggatgggtggatgag

SEQ ID NO: 1355529 - DNA, 15 bp, Homo sapiens
tggatgggtggatga

SEQ ID NO: 1355530 - DNA, 15 bp, Homo sapiens
atggatgggtggatg

SEQ ID NO: 1355531 - DNA, 15 bp, Homo sapiens
gatggatgggtggat

SEQ ID NO: 1355532 - DNA, 15 bp, Homo sapiens
ggatggatgggtgga

SEQ ID NO: 1355533 - DNA, 15 bp, Homo sapiens
tggatggatgggtgg

SEQ ID NO: 1355534 - DNA, 15 bp, Homo sapiens
gtggatggatgggtg

SEQ ID NO: 1355535 - DNA, 15 bp, Homo sapiens
agtggatggatgggt

SEQ ID NO: 1355536 - DNA, 15 bp, Homo sapiens
aagtggatggatggg

SEQ ID NO: 1355537 - DNA, 15 bp, Homo sapiens
taagtggatggatgg

SEQ ID NO: 1355538 - DNA, 15 bp, Homo sapiens
ataagtggatggatg

SEQ ID NO: 1355539 - DNA, 15 bp, Homo sapiens
gataagtggatggat

SEQ ID NO: 1355540 - DNA, 15 bp, Homo sapiens
ggataagtggatgga

SEQ ID NO: 1355541 - DNA, 15 bp, Homo sapiens
tggataagtggatgg

SEQ ID NO: 1355542 - DNA, 15 bp, Homo sapiens
atggataagtggatg

SEQ ID NO: 1355543 - DNA, 15 bp, Homo sapiens
gatggataagtggat

SEQ ID NO: 1355544 - DNA, 15 bp, Homo sapiens
ggatggataagtgga

SEQ ID NO: 1355545 - DNA, 15 bp, Homo sapiens
gggatggataagtgg

SEQ ID NO: 1355546 - DNA, 15 bp, Homo sapiens
agggatggataagtg

SEQ ID NO: 1355547 - DNA, 15 bp, Homo sapiens
aagggatggataagt

SEQ ID NO: 1355548 - DNA, 15 bp, Homo sapiens
gaagggatggataag

SEQ ID NO: 1355549 - DNA, 15 bp, Homo sapiens
tgaagggatggataa

SEQ ID NO: 1355550 - DNA, 15 bp, Homo sapiens
atgaagggatggata

SEQ ID NO: 1355551 - DNA, 15 bp, Homo sapiens
gatgaagggatggat

SEQ ID NO: 1355552 - DNA, 15 bp, Homo sapiens
ggatgaagggatgga

SEQ ID NO: 1355553 - DNA, 15 bp, Homo sapiens
tggatgaagggatgg

SEQ ID NO: 1355554 - DNA, 15 bp, Homo sapiens
atggatgaagggatg

SEQ ID NO: 1355555 - DNA, 15 bp, Homo sapiens
gatggatgaagggat

SEQ ID NO: 1355556 - DNA, 15 bp, Homo sapiens
ggatggatgaaggga

SEQ ID NO: 1355557 - DNA, 15 bp, Homo sapiens
tggatggatgaaggg

SEQ ID NO: 1355558 - DNA, 15 bp, Homo sapiens
gtggatggatgaagg

SEQ ID NO: 1355559 - DNA, 15 bp, Homo sapiens
ggtggatggatgaag

SEQ ID NO: 1355560 - DNA, 15 bp, Homo sapiens
gggtggatggatgaa

SEQ ID NO: 1355561 - DNA, 15 bp, Homo sapiens
tgggtggatggatga

SEQ ID NO: 1355562 - DNA, 15 bp, Homo sapiens
ttgggtggatggatg

SEQ ID NO: 1355563 - DNA, 15 bp, Homo sapiens
gttgggtggatggat

SEQ ID NO: 1355564 - DNA, 15 bp, Homo sapiens
ggttgggtggatgga

SEQ ID NO: 1355565 - DNA, 15 bp, Homo sapiens
tggttgggtggatgg

SEQ ID NO: 1355566 - DNA, 15 bp, Homo sapiens
gtggttgggtggatg

SEQ ID NO: 1355567 - DNA, 15 bp, Homo sapiens
ggtggttgggtggat

SEQ ID NO: 1355568 - DNA, 15 bp, Homo sapiens
gggtggttgggtgga

SEQ ID NO: 1355569 - DNA, 15 bp, Homo sapiens
tgggtggttgggtgg

SEQ ID NO: 1355570 - DNA, 15 bp, Homo sapiens
atgggtggttgggtg

SEQ ID NO: 1355571 - DNA, 15 bp, Homo sapiens
gatgggtggttgggt

SEQ ID NO: 1355572 - DNA, 15 bp, Homo sapiens
ggatgggtggttggg

SEQ ID NO: 1355573 - DNA, 15 bp, Homo sapiens
tggatgggtggttgg

SEQ ID NO: 1355574 - DNA, 15 bp, Homo sapiens
atggatgggtggttg

SEQ ID NO: 1355575 - DNA, 15 bp, Homo sapiens
gatggatgggtggtt

SEQ ID NO: 1355576 - DNA, 15 bp, Homo sapiens
ggatggatgggtggt

SEQ ID NO: 1355577 - DNA, 15 bp, Homo sapiens
atggatggatgggtg

SEQ ID NO: 1355578 - DNA, 15 bp, Homo sapiens
gatggatggatgggt

SEQ ID NO: 1355579 - DNA, 15 bp, Homo sapiens
agatggatggatggg

SEQ ID NO: 1355580 - DNA, 15 bp, Homo sapiens
cagatggatggatgg

SEQ ID NO: 1355581 - DNA, 15 bp, Homo sapiens
gcagatggatggatg

SEQ ID NO: 1355582 - DNA, 15 bp, Homo sapiens
ggcagatggatggat

SEQ ID NO: 1355583 - DNA, 15 bp, Homo sapiens
gggcagatggatgga

SEQ ID NO: 1355584 - DNA, 15 bp, Homo sapiens
tgggcagatggatgg

SEQ ID NO: 1355585 - DNA, 15 bp, Homo sapiens
ttgggcagatggatg

SEQ ID NO: 1355586 - DNA, 15 bp, Homo sapiens
cttgggcagatggat

SEQ ID NO: 1355587 - DNA, 15 bp, Homo sapiens
gcttgggcagatgga

SEQ ID NO: 1355588 - DNA, 15 bp, Homo sapiens
tgcttgggcagatgg

SEQ ID NO: 1355589 - DNA, 15 bp, Homo sapiens
atgcttgggcagatg

SEQ ID NO: 1355590 - DNA, 15 bp, Homo sapiens
gatgcttgggcagat

SEQ ID NO: 1355591 - DNA, 15 bp, Homo sapiens
ggatgcttgggcaga

SEQ ID NO: 1355592 - DNA, 15 bp, Homo sapiens
tggatgcttgggcag

SEQ ID NO: 1355593 - DNA, 15 bp, Homo sapiens
atggatgcttgggca

SEQ ID NO: 1355594 - DNA, 15 bp, Homo sapiens
gatggatgcttgggc

SEQ ID NO: 1355595 - DNA, 15 bp, Homo sapiens
ggatggatgcttggg

SEQ ID NO: 1355596 - DNA, 15 bp, Homo sapiens
tggatggatgcttgg

SEQ ID NO: 1355597 - DNA, 15 bp, Homo sapiens
atggatggatgcttg

SEQ ID NO: 1355598 - DNA, 15 bp, Homo sapiens
gatggatggatgctt

SEQ ID NO: 1355599 - DNA, 15 bp, Homo sapiens
ggatggatggatgct

SEQ ID NO: 1355600 - DNA, 15 bp, Homo sapiens
tggatggatggatgc

SEQ ID NO: 1355601 - DNA, 15 bp, Homo sapiens
gtggatggatggatg

SEQ ID NO: 1355602 - DNA, 15 bp, Homo sapiens
ggtggatggatggat

SEQ ID NO: 1355603 - DNA, 15 bp, Homo sapiens
gggtggatggatgga

SEQ ID NO: 1355604 - DNA, 15 bp, Homo sapiens
tgggtggatggatgg

SEQ ID NO: 1355605 - DNA, 15 bp, Homo sapiens
atgggtggatggatg

SEQ ID NO: 1355606 - DNA, 15 bp, Homo sapiens
gatgggtggatggat

SEQ ID NO: 1355607 - DNA, 15 bp, Homo sapiens
agatgggtggatgga

SEQ ID NO: 1355608 - DNA, 15 bp, Homo sapiens
cagatgggtggatgg

SEQ ID NO: 1355609 - DNA, 15 bp, Homo sapiens
gcagatgggtggatg

SEQ ID NO: 1355610 - DNA, 15 bp, Homo sapiens
ggcagatgggtggat

SEQ ID NO: 1355611 - DNA, 15 bp, Homo sapiens
gggcagatgggtgga

SEQ ID NO: 1355612 - DNA, 15 bp, Homo sapiens
tgggcagatgggtgg

SEQ ID NO: 1355613 - DNA, 15 bp, Homo sapiens
gtgggcagatgggtg

SEQ ID NO: 1355614 - DNA, 15 bp, Homo sapiens
ggtgggcagatgggt

SEQ ID NO: 1355615 - DNA, 15 bp, Homo sapiens
gggtgggcagatggg

SEQ ID NO: 1355616 - DNA, 15 bp, Homo sapiens
tgggtgggcagatgg

SEQ ID NO: 1355617 - DNA, 15 bp, Homo sapiens
ttgggtgggcagatg

SEQ ID NO: 1355618 - DNA, 15 bp, Homo sapiens
attgggtgggcagat

SEQ ID NO: 1355619 - DNA, 15 bp, Homo sapiens
gattgggtgggcaga

SEQ ID NO: 1355620 - DNA, 15 bp, Homo sapiens
tgattgggtgggcag

SEQ ID NO: 1355621 - DNA, 15 bp, Homo sapiens
gtgattgggtgggca

SEQ ID NO: 1355622 - DNA, 15 bp, Homo sapiens
tgtgattgggtgggc

SEQ ID NO: 1355623 - DNA, 15 bp, Homo sapiens
gtgtgattgggtggg

SEQ ID NO: 1355624 - DNA, 15 bp, Homo sapiens
tgtgtgattgggtgg

SEQ ID NO: 1355625 - DNA, 15 bp, Homo sapiens
gtgtgtgattgggtg

SEQ ID NO: 1355626 - DNA, 15 bp, Homo sapiens
ggtgtgtgattgggt

SEQ ID NO: 1355627 - DNA, 15 bp, Homo sapiens
gggtgtgtgattggg

SEQ ID NO: 1355628 - DNA, 15 bp, Homo sapiens
tgggtgtgtgattgg

SEQ ID NO: 1355629 - DNA, 15 bp, Homo sapiens
atgggtgtgtgattg

SEQ ID NO: 1355630 - DNA, 15 bp, Homo sapiens
gatgggtgtgtgatt

SEQ ID NO: 1355631 - DNA, 15 bp, Homo sapiens
ggatgggtgtgtgat

SEQ ID NO: 1355632 - DNA, 15 bp, Homo sapiens
tggatgggtgtgtga

SEQ ID NO: 1355633 - DNA, 15 bp, Homo sapiens
gtggatgggtgtgtg

SEQ ID NO: 1355634 - DNA, 15 bp, Homo sapiens
ggtggatgggtgtgt

SEQ ID NO: 1355635 - DNA, 15 bp, Homo sapiens
gggtggatgggtgtg

SEQ ID NO: 1355636 - DNA, 15 bp, Homo sapiens
tgggtggatgggtgt

SEQ ID NO: 1355637 - DNA, 15 bp, Homo sapiens
atgggtggatgggtg

SEQ ID NO: 1355638 - DNA, 15 bp, Homo sapiens
gatgggtggatgggt

SEQ ID NO: 1355639 - DNA, 15 bp, Homo sapiens
ggatgggtggatggg

SEQ ID NO: 1355640 - DNA, 15 bp, Homo sapiens
tggatgggtggatgg

SEQ ID NO: 1355641 - DNA, 15 bp, Homo sapiens
gtggatgggtggatg

SEQ ID NO: 1355642 - DNA, 15 bp, Homo sapiens
ggtggatgggtggat

SEQ ID NO: 1355643 - DNA, 15 bp, Homo sapiens
gggtggatgggtgga

SEQ ID NO: 1355644 - DNA, 15 bp, Homo sapiens
tgggtggatgggtgg

SEQ ID NO: 1355645 - DNA, 15 bp, Homo sapiens
gtgggtggatgggtg

SEQ ID NO: 1355646 - DNA, 15 bp, Homo sapiens
ggtgggtggatgggt

SEQ ID NO: 1355647 - DNA, 15 bp, Homo sapiens
gggtgggtggatggg

SEQ ID NO: 1355648 - DNA, 15 bp, Homo sapiens
gtgggtgggtggatg

SEQ ID NO: 1355649 - DNA, 15 bp, Homo sapiens
ggtgggtgggtggat

SEQ ID NO: 1355650 - DNA, 15 bp, Homo sapiens
gggtgggtgggtgga

SEQ ID NO: 1355651 - DNA, 15 bp, Homo sapiens
tgggtgggtgggtgg

SEQ ID NO: 1355652 - DNA, 15 bp, Homo sapiens
atgggtgggtgggtg

SEQ ID NO: 1355653 - DNA, 15 bp, Homo sapiens
gatgggtgggtgggt

SEQ ID NO: 1355654 - DNA, 15 bp, Homo sapiens
ggatgggtgggtggg

SEQ ID NO: 1355655 - DNA, 15 bp, Homo sapiens
tggatgggtgggtgg

SEQ ID NO: 1355656 - DNA, 15 bp, Homo sapiens
gtggatgggtgggtg

SEQ ID NO: 1355657 - DNA, 15 bp, Homo sapiens
agtggatgggtgggt

SEQ ID NO: 1355658 - DNA, 15 bp, Homo sapiens
gagtggatgggtggg

SEQ ID NO: 1355659 - DNA, 15 bp, Homo sapiens
tgagtggatgggtgg

SEQ ID NO: 1355660 - DNA, 15 bp, Homo sapiens
atgagtggatgggtg

SEQ ID NO: 1355661 - DNA, 15 bp, Homo sapiens
gatgagtggatgggt

SEQ ID NO: 1355662 - DNA, 15 bp, Homo sapiens
ggatgagtggatggg

SEQ ID NO: 1355663 - DNA, 15 bp, Homo sapiens
atggatgagtggatg

SEQ ID NO: 1355664 - DNA, 15 bp, Homo sapiens
gatggatgagtggat

SEQ ID NO: 1355665 - DNA, 15 bp, Homo sapiens
ggatggatgagtgga

SEQ ID NO: 1355666 - DNA, 15 bp, Homo sapiens
tggatggatgagtgg

SEQ ID NO: 1355667 - DNA, 15 bp, Homo sapiens
gtggatggatgagtg

SEQ ID NO: 1355668 - DNA, 15 bp, Homo sapiens
agtggatggatgagt

SEQ ID NO: 1355669 - DNA, 15 bp, Homo sapiens
aagtggatggatgag

SEQ ID NO: 1355670 - DNA, 15 bp, Homo sapiens
taagtggatggatga

SEQ ID NO: 1355671 - DNA, 15 bp, Homo sapiens
gagggatggataagt

SEQ ID NO: 1355672 - DNA, 15 bp, Homo sapiens
ggagggatggataag

SEQ ID NO: 1355673 - DNA, 15 bp, Homo sapiens
tggagggatggataa

SEQ ID NO: 1355674 - DNA, 15 bp, Homo sapiens
atggagggatggata

SEQ ID NO: 1355675 - DNA, 15 bp, Homo sapiens
gatggagggatggat

SEQ ID NO: 1355676 - DNA, 15 bp, Homo sapiens
ggatggagggatgga

SEQ ID NO: 1355677 - DNA, 15 bp, Homo sapiens
tggatggagggatgg

SEQ ID NO: 1355678 - DNA, 15 bp, Homo sapiens
gtggatggagggatg

SEQ ID NO: 1355679 - DNA, 15 bp, Homo sapiens
ggtggatggagggat

SEQ ID NO: 1355680 - DNA, 15 bp, Homo sapiens
gggtggatggaggga

SEQ ID NO: 1355681 - DNA, 15 bp, Homo sapiens
tgggtggatggaggg

SEQ ID NO: 1355682 - DNA, 15 bp, Homo sapiens
gtgggtggatggagg

SEQ ID NO: 1355683 - DNA, 15 bp, Homo sapiens
ggtgggtggatggag

SEQ ID NO: 1355684 - DNA, 15 bp, Homo sapiens
gttgggtgggtggat

SEQ ID NO: 1355685 - DNA, 15 bp, Homo sapiens
ggttgggtgggtgga

SEQ ID NO: 1355686 - DNA, 15 bp, Homo sapiens
tggttgggtgggtgg

SEQ ID NO: 1355687 - DNA, 15 bp, Homo sapiens
gtggttgggtgggtg

SEQ ID NO: 1355688 - DNA, 15 bp, Homo sapiens
ggtggttgggtgggt

SEQ ID NO: 1355689 - DNA, 15 bp, Homo sapiens
tggtggttgggtggg

SEQ ID NO: 1355690 - DNA, 15 bp, Homo sapiens
ttggtggttgggtgg

SEQ ID NO: 1355691 - DNA, 15 bp, Homo sapiens
attggtggttgggtg

SEQ ID NO: 1355692 - DNA, 15 bp, Homo sapiens
gattggtggttgggt

SEQ ID NO: 1355693 - DNA, 15 bp, Homo sapiens
ggattggtggttggg

SEQ ID NO: 1355694 - DNA, 15 bp, Homo sapiens
tggattggtggttgg

SEQ ID NO: 1355695 - DNA, 15 bp, Homo sapiens
atggattggtggttg

SEQ ID NO: 1355696 - DNA, 15 bp, Homo sapiens
gatggattggtggtt

SEQ ID NO: 1355697 - DNA, 15 bp, Homo sapiens
ggatggattggtggt

SEQ ID NO: 1355698 - DNA, 15 bp, Homo sapiens
tggatggattggtgg

SEQ ID NO: 1355699 - DNA, 15 bp, Homo sapiens
atggatggattggtg

SEQ ID NO: 1355700 - DNA, 15 bp, Homo sapiens
gatggatggattggt

SEQ ID NO: 1355701 - DNA, 15 bp, Homo sapiens
ggatggatggattgg

SEQ ID NO: 1355702 - DNA, 15 bp, Homo sapiens
tggatggatggattg

SEQ ID NO: 1355703 - DNA, 15 bp, Homo sapiens
gtggatggatggatt

SEQ ID NO: 1355704 - DNA, 15 bp, Homo sapiens
gtgggtgggtgggtg

SEQ ID NO: 1355705 - DNA, 15 bp, Homo sapiens
ggtgggtgggtgggt

SEQ ID NO: 1355706 - DNA, 15 bp, Homo sapiens
tggtgggtgggtggg

SEQ ID NO: 1355707 - DNA, 15 bp, Homo sapiens
ctggtgggtgggtgg

SEQ ID NO: 1355708 - DNA, 15 bp, Homo sapiens
actggtgggtgggtg

SEQ ID NO: 1355709 - DNA, 15 bp, Homo sapiens
cactggtgggtgggt

SEQ ID NO: 1355710 - DNA, 15 bp, Homo sapiens
gcactggtgggtggg

SEQ ID NO: 1355711 - DNA, 15 bp, Homo sapiens
tgcactggtgggtgg

SEQ ID NO: 1355712 - DNA, 15 bp, Homo sapiens
atgcactggtgggtg

SEQ ID NO: 1355713 - DNA, 15 bp, Homo sapiens
gatgcactggtgggt

SEQ ID NO: 1355714 - DNA, 15 bp, Homo sapiens
ggatgcactggtggg

SEQ ID NO: 1355715 - DNA, 15 bp, Homo sapiens
tggatgcactggtgg

SEQ ID NO: 1355716 - DNA, 15 bp, Homo sapiens
atggatgcactggtg

SEQ ID NO: 1355717 - DNA, 15 bp, Homo sapiens
gatggatgcactggt

SEQ ID NO: 1355718 - DNA, 15 bp, Homo sapiens
ggatggatgcactgg

SEQ ID NO: 1355719 - DNA, 15 bp, Homo sapiens
tggatggatgcactg

SEQ ID NO: 1355720 - DNA, 15 bp, Homo sapiens
gtggatggatgcact

SEQ ID NO: 1355721 - DNA, 15 bp, Homo sapiens
ggtggatggatgcac

SEQ ID NO: 1355722 - DNA, 15 bp, Homo sapiens
gggtggatggatgca

SEQ ID NO: 1355723 - DNA, 15 bp, Homo sapiens
tgggtggatggatgc

SEQ ID NO: 1355724 - DNA, 15 bp, Homo sapiens
tggtgggtgggtgga

SEQ ID NO: 1355725 - DNA, 15 bp, Homo sapiens
gactggtgggtgggt

SEQ ID NO: 1355726 - DNA, 15 bp, Homo sapiens
ggactggtgggtggg

SEQ ID NO: 1355727 - DNA, 15 bp, Homo sapiens
tggactggtgggtgg

SEQ ID NO: 1355728 - DNA, 15 bp, Homo sapiens
atggactggtgggtg

SEQ ID NO: 1355729 - DNA, 15 bp, Homo sapiens
gatggactggtgggt

SEQ ID NO: 1355730 - DNA, 15 bp, Homo sapiens
ggatggactggtggg

SEQ ID NO: 1355731 - DNA, 15 bp, Homo sapiens
tggatggactggtgg

SEQ ID NO: 1355732 - DNA, 15 bp, Homo sapiens
atggatggactggtg

SEQ ID NO: 1355733 - DNA, 15 bp, Homo sapiens
catggatggactggt

SEQ ID NO: 1355734 - DNA, 15 bp, Homo sapiens
ccatggatggactgg

SEQ ID NO: 1355735 - DNA, 15 bp, Homo sapiens
tccatggatggactg

SEQ ID NO: 1355736 - DNA, 15 bp, Homo sapiens
atccatggatggact

SEQ ID NO: 1355737 - DNA, 15 bp, Homo sapiens
gatccatggatggac

SEQ ID NO: 1355738 - DNA, 15 bp, Homo sapiens
ggatccatggatgga

SEQ ID NO: 1355739 - DNA, 15 bp, Homo sapiens
aggatccatggatgg

SEQ ID NO: 1355740 - DNA, 15 bp, Homo sapiens
aaggatccatggatg

SEQ ID NO: 1355741 - DNA, 15 bp, Homo sapiens
gaaggatccatggat

SEQ ID NO: 1355742 - DNA, 15 bp, Homo sapiens
ggaaggatccatgga

SEQ ID NO: 1355743 - DNA, 15 bp, Homo sapiens
tggaaggatccatgg

SEQ ID NO: 1355744 - DNA, 15 bp, Homo sapiens
atggaaggatccatg

SEQ ID NO: 1355745 - DNA, 15 bp, Homo sapiens
gatggaaggatccat

SEQ ID NO: 1355746 - DNA, 15 bp, Homo sapiens
ggatggaaggatcca

SEQ ID NO: 1355747 - DNA, 15 bp, Homo sapiens
tggatggaaggatcc

SEQ ID NO: 1355748 - DNA, 15 bp, Homo sapiens
atggatggaaggatc

SEQ ID NO: 1355749 - DNA, 15 bp, Homo sapiens
gatggatggaaggat

SEQ ID NO: 1355750 - DNA, 15 bp, Homo sapiens
ggatggatggaagga

SEQ ID NO: 1355751 - DNA, 15 bp, Homo sapiens
tggatggatggaagg

SEQ ID NO: 1355752 - DNA, 15 bp, Homo sapiens
atggatggatggaag

SEQ ID NO: 1355753 - DNA, 15 bp, Homo sapiens
gatggatggatggaa

SEQ ID NO: 1355754 - DNA, 15 bp, Homo sapiens
ggatggatggatgga

SEQ ID NO: 1355755 - DNA, 15 bp, Homo sapiens
tggatggatggatgg

SEQ ID NO: 1355756 - DNA, 15 bp, Homo sapiens
atggatggatggatg

SEQ ID NO: 1355757 - DNA, 15 bp, Homo sapiens
gatggatggatggat

SEQ ID NO: 1355758 - DNA, 15 bp, Homo sapiens
agtggatggatggat

SEQ ID NO: 1355759 - DNA, 15 bp, Homo sapiens
aagtggatggatgga

SEQ ID NO: 1355760 - DNA, 15 bp, Homo sapiens
atggatggagggatg

SEQ ID NO: 1355761 - DNA, 15 bp, Homo sapiens
aatggatggagggat

SEQ ID NO: 1355762 - DNA, 15 bp, Homo sapiens
aaatggatggaggga

SEQ ID NO: 1355763 - DNA, 15 bp, Homo sapiens
caaatggatggaggg

SEQ ID NO: 1355764 - DNA, 15 bp, Homo sapiens
gcaaatggatggagg

SEQ ID NO: 1355765 - DNA, 15 bp, Homo sapiens
ggcaaatggatggag

SEQ ID NO: 1355766 - DNA, 15 bp, Homo sapiens
gggcaaatggatgga

SEQ ID NO: 1355767 - DNA, 15 bp, Homo sapiens
tgggcaaatggatgg

SEQ ID NO: 1355768 - DNA, 15 bp, Homo sapiens
ttgggcaaatggatg

SEQ ID NO: 1355769 - DNA, 15 bp, Homo sapiens
attgggcaaatggat

SEQ ID NO: 1355770 - DNA, 15 bp, Homo sapiens
gattgggcaaatgga

SEQ ID NO: 1355771 - DNA, 15 bp, Homo sapiens
tgattgggcaaatgg

SEQ ID NO: 1355772 - DNA, 15 bp, Homo sapiens
gtgattgggcaaatg

SEQ ID NO: 1355773 - DNA, 15 bp, Homo sapiens
ggtgattgggcaaat

SEQ ID NO: 1355774 - DNA, 15 bp, Homo sapiens
gggtgattgggcaaa

SEQ ID NO: 1355775 - DNA, 15 bp, Homo sapiens
tgggtgattgggcaa

SEQ ID NO: 1355776 - DNA, 15 bp, Homo sapiens
gtgggtgattgggca

SEQ ID NO: 1355777 - DNA, 15 bp, Homo sapiens
ggtgggtgattgggc

SEQ ID NO: 1355778 - DNA, 15 bp, Homo sapiens
gggtgggtgattggg

SEQ ID NO: 1355779 - DNA, 15 bp, Homo sapiens
tgggtgggtgattgg

SEQ ID NO: 1355780 - DNA, 15 bp, Homo sapiens
atgggtgggtgattg

SEQ ID NO: 1355781 - DNA, 15 bp, Homo sapiens
aatgggtgggtgatt

SEQ ID NO: 1355782 - DNA, 15 bp, Homo sapiens
gaatgggtgggtgat

SEQ ID NO: 1355783 - DNA, 15 bp, Homo sapiens
tgaatgggtgggtga

SEQ ID NO: 1355784 - DNA, 15 bp, Homo sapiens
atgaatgggtgggtg

SEQ ID NO: 1355785 - DNA, 15 bp, Homo sapiens
gatgaatgggtgggt

SEQ ID NO: 1355786 - DNA, 15 bp, Homo sapiens
ggatgaatgggtggg

SEQ ID NO: 1355787 - DNA, 15 bp, Homo sapiens
tggatgaatgggtgg

SEQ ID NO: 1355788 - DNA, 15 bp, Homo sapiens
atggatgaatgggtg

SEQ ID NO: 1355789 - DNA, 15 bp, Homo sapiens
gatggatgaatgggt

SEQ ID NO: 1355790 - DNA, 15 bp, Homo sapiens
ggatggatgaatggg

SEQ ID NO: 1355791 - DNA, 15 bp, Homo sapiens
ggtggatggatgaat

SEQ ID NO: 1355792 - DNA, 15 bp, Homo sapiens
ggatgggtggatgga

SEQ ID NO: 1355793 - DNA, 15 bp, Homo sapiens
tatggatggatgggt

SEQ ID NO: 1355794 - DNA, 15 bp, Homo sapiens
gtatggatggatggg

SEQ ID NO: 1355795 - DNA, 15 bp, Homo sapiens
tgtatggatggatgg

SEQ ID NO: 1355796 - DNA, 15 bp, Homo sapiens
atgtatggatggatg

SEQ ID NO: 1355797 - DNA, 15 bp, Homo sapiens
gatgtatggatggat

SEQ ID NO: 1355798 - DNA, 15 bp, Homo sapiens
agatgtatggatgga

SEQ ID NO: 1355799 - DNA, 15 bp, Homo sapiens
tagatgtatggatgg

SEQ ID NO: 1355800 - DNA, 15 bp, Homo sapiens
gtagatgtatggatg

SEQ ID NO: 1355801 - DNA, 15 bp, Homo sapiens
ggtagatgtatggat

SEQ ID NO: 1355802 - DNA, 15 bp, Homo sapiens
gggtagatgtatgga

SEQ ID NO: 1355803 - DNA, 15 bp, Homo sapiens
tgggtagatgtatgg

SEQ ID NO: 1355804 - DNA, 15 bp, Homo sapiens
atgggtagatgtatg

SEQ ID NO: 1355805 - DNA, 15 bp, Homo sapiens
aatgggtagatgtat

SEQ ID NO: 1355806 - DNA, 15 bp, Homo sapiens
gaatgggtagatgta

SEQ ID NO: 1355807 - DNA, 15 bp, Homo sapiens
tgaatgggtagatgt

SEQ ID NO: 1355808 - DNA, 15 bp, Homo sapiens
gtgaatgggtagatg

SEQ ID NO: 1355809 - DNA, 15 bp, Homo sapiens
ggtgaatgggtagat

SEQ ID NO: 1355810 - DNA, 15 bp, Homo sapiens
gggtgaatgggtaga

SEQ ID NO: 1355811 - DNA, 15 bp, Homo sapiens
tgggtgaatgggtag

SEQ ID NO: 1355812 - DNA, 15 bp, Homo sapiens
atgggtgaatgggta

SEQ ID NO: 1355813 - DNA, 15 bp, Homo sapiens
gatgggtgaatgggt

SEQ ID NO: 1355814 - DNA, 15 bp, Homo sapiens
agatgggtgaatggg

SEQ ID NO: 1355815 - DNA, 15 bp, Homo sapiens
tagatgggtgaatgg

SEQ ID NO: 1355816 - DNA, 15 bp, Homo sapiens
gtagatgggtgaatg

SEQ ID NO: 1355817 - DNA, 15 bp, Homo sapiens
ggtagatgggtgaat

SEQ ID NO: 1355818 - DNA, 15 bp, Homo sapiens
tggtagatgggtgaa

SEQ ID NO: 1355819 - DNA, 15 bp, Homo sapiens
ttggtagatgggtga

SEQ ID NO: 1355820 - DNA, 15 bp, Homo sapiens
tttggtagatgggtg

SEQ ID NO: 1355821 - DNA, 15 bp, Homo sapiens
gtttggtagatgggt

SEQ ID NO: 1355822 - DNA, 15 bp, Homo sapiens
ggtttggtagatggg

SEQ ID NO: 1355823 - DNA, 15 bp, Homo sapiens
tggtttggtagatgg

SEQ ID NO: 1355824 - DNA, 15 bp, Homo sapiens
gtggtttggtagatg

SEQ ID NO: 1355825 - DNA, 15 bp, Homo sapiens
ggtggtttggtagat

SEQ ID NO: 1355826 - DNA, 15 bp, Homo sapiens
tggtggtttggtaga

SEQ ID NO: 1355827 - DNA, 15 bp, Homo sapiens
ttggtggtttggtag

SEQ ID NO: 1355828 - DNA, 15 bp, Homo sapiens
attggtggtttggta

SEQ ID NO: 1355829 - DNA, 15 bp, Homo sapiens
gattggtggtttggt

SEQ ID NO: 1355830 - DNA, 15 bp, Homo sapiens
ggattggtggtttgg

SEQ ID NO: 1355831 - DNA, 15 bp, Homo sapiens
tggattggtggtttg

SEQ ID NO: 1355832 - DNA, 15 bp, Homo sapiens
gtggattggtggttt

SEQ ID NO: 1355833 - DNA, 15 bp, Homo sapiens
ggtggattggtggtt

SEQ ID NO: 1355834 - DNA, 15 bp, Homo sapiens
aggtggattggtggt

SEQ ID NO: 1355835 - DNA, 15 bp, Homo sapiens
taggtggattggtgg

SEQ ID NO: 1355836 - DNA, 15 bp, Homo sapiens
ataggtggattggtg

SEQ ID NO: 1355837 - DNA, 15 bp, Homo sapiens
aataggtggattggt

SEQ ID NO: 1355838 - DNA, 15 bp, Homo sapiens
gaataggtggattgg

SEQ ID NO: 1355839 - DNA, 15 bp, Homo sapiens
cgaataggtggattg

SEQ ID NO: 1355840 - DNA, 15 bp, Homo sapiens
gcgaataggtggatt

SEQ ID NO: 1355841 - DNA, 15 bp, Homo sapiens
ggcgaataggtggat

SEQ ID NO: 1355842 - DNA, 15 bp, Homo sapiens
gggcgaataggtgga

SEQ ID NO: 1355843 - DNA, 15 bp, Homo sapiens
ggggcgaataggtgg

SEQ ID NO: 1355844 - DNA, 15 bp, Homo sapiens
gggggcgaataggtg

SEQ ID NO: 1355845 - DNA, 15 bp, Homo sapiens
ggggggcgaataggt

SEQ ID NO: 1355846 - DNA, 15 bp, Homo sapiens
tggggggcgaatagg

SEQ ID NO: 1355847 - DNA, 15 bp, Homo sapiens
atggggggcgaatag

SEQ ID NO: 1355848 - DNA, 15 bp, Homo sapiens
gatggggggcgaata

SEQ ID NO: 1355849 - DNA, 15 bp, Homo sapiens
ggatggggggcgaat

SEQ ID NO: 1355850 - DNA, 15 bp, Homo sapiens
tggatggggggcgaa

SEQ ID NO: 1355851 - DNA, 15 bp, Homo sapiens
atggatggggggcga

SEQ ID NO: 1355852 - DNA, 15 bp, Homo sapiens
gatggatggggggcg

SEQ ID NO: 1355853 - DNA, 15 bp, Homo sapiens
ggatggatggggggc

SEQ ID NO: 1355854 - DNA, 15 bp, Homo sapiens
tggatggatgggggg

SEQ ID NO: 1355855 - DNA, 15 bp, Homo sapiens
gtggatggatggggg

SEQ ID NO: 1355856 - DNA, 15 bp, Homo sapiens
ggtggatggatgggg

SEQ ID NO: 1355857 - DNA, 15 bp, Homo sapiens
gggtggatggatggg

SEQ ID NO: 1355858 - DNA, 15 bp, Homo sapiens
atgggtgggtggatg

SEQ ID NO: 1355859 - DNA, 15 bp, Homo sapiens
gatgggtgggtggat

SEQ ID NO: 1355860 - DNA, 15 bp, Homo sapiens
ggatgggtgggtgga

SEQ ID NO: 1355861 - DNA, 15 bp, Homo sapiens
atggatgggtgggtg

SEQ ID NO: 1355862 - DNA, 15 bp, Homo sapiens
aatggatgggtgggt

SEQ ID NO: 1355863 - DNA, 15 bp, Homo sapiens
gaatggatgggtggg

SEQ ID NO: 1355864 - DNA, 15 bp, Homo sapiens
tgaatggatgggtgg

SEQ ID NO: 1355865 - DNA, 15 bp, Homo sapiens
atgaatggatgggtg

SEQ ID NO: 1355866 - DNA, 15 bp, Homo sapiens
gatgaatggatgggt

SEQ ID NO: 1355867 - DNA, 15 bp, Homo sapiens
agatgaatggatggg

SEQ ID NO: 1355868 - DNA, 15 bp, Homo sapiens
tagatgaatggatgg

SEQ ID NO: 1355869 - DNA, 15 bp, Homo sapiens
gtagatgaatggatg

SEQ ID NO: 1355870 - DNA, 15 bp, Homo sapiens
ggtagatgaatggat

SEQ ID NO: 1355871 - DNA, 15 bp, Homo sapiens
gggtagatgaatgga

SEQ ID NO: 1355872 - DNA, 15 bp, Homo sapiens
ggggtagatgaatgg

SEQ ID NO: 1355873 - DNA, 15 bp, Homo sapiens
aggggtagatgaatg

SEQ ID NO: 1355874 - DNA, 15 bp, Homo sapiens
gaggggtagatgaat

SEQ ID NO: 1355875 - DNA, 15 bp, Homo sapiens
ggaggggtagatgaa

SEQ ID NO: 1355876 - DNA, 15 bp, Homo sapiens
tggaggggtagatga

SEQ ID NO: 1355877 - DNA, 15 bp, Homo sapiens
gtggaggggtagatg

SEQ ID NO: 1355878 - DNA, 15 bp, Homo sapiens
ggtggaggggtagat

SEQ ID NO: 1355879 - DNA, 15 bp, Homo sapiens
cggtggaggggtaga

SEQ ID NO: 1355880 - DNA, 15 bp, Homo sapiens
ccggtggaggggtag

SEQ ID NO: 1355881 - DNA, 15 bp, Homo sapiens
accggtggaggggta

SEQ ID NO: 1355882 - DNA, 15 bp, Homo sapiens
caccggtggaggggt

SEQ ID NO: 1355883 - DNA, 15 bp, Homo sapiens
gcaccggtggagggg

SEQ ID NO: 1355884 - DNA, 15 bp, Homo sapiens
ggcaccggtggaggg

SEQ ID NO: 1355885 - DNA, 15 bp, Homo sapiens
gggcaccggtggagg

SEQ ID NO: 1355886 - DNA, 15 bp, Homo sapiens
tgggcaccggtggag

SEQ ID NO: 1355887 - DNA, 15 bp, Homo sapiens
atgggcaccggtgga

SEQ ID NO: 1355888 - DNA, 15 bp, Homo sapiens
aatgggcaccggtgg

SEQ ID NO: 1355889 - DNA, 15 bp, Homo sapiens
gaatgggcaccggtg

SEQ ID NO: 1355890 - DNA, 15 bp, Homo sapiens
tgaatgggcaccggt

SEQ ID NO: 1355891 - DNA, 15 bp, Homo sapiens
gtgaatgggcaccgg

SEQ ID NO: 1355892 - DNA, 15 bp, Homo sapiens
agtgaatgggcaccg

SEQ ID NO: 1355893 - DNA, 15 bp, Homo sapiens
gagtgaatgggcacc

SEQ ID NO: 1355894 - DNA, 15 bp, Homo sapiens
tgagtgaatgggcac

SEQ ID NO: 1355895 - DNA, 15 bp, Homo sapiens
gtgagtgaatgggca

SEQ ID NO: 1355896 - DNA, 15 bp, Homo sapiens
agtgagtgaatgggc

SEQ ID NO: 1355897 - DNA, 15 bp, Homo sapiens
tagtgagtgaatggg

SEQ ID NO: 1355898 - DNA, 15 bp, Homo sapiens
gtagtgagtgaatgg

SEQ ID NO: 1355899 - DNA, 15 bp, Homo sapiens
ggtagtgagtgaatg

SEQ ID NO: 1355900 - DNA, 15 bp, Homo sapiens
aggtagtgagtgaat

SEQ ID NO: 1355901 - DNA, 15 bp, Homo sapiens
taggtagtgagtgaa

SEQ ID NO: 1355902 - DNA, 15 bp, Homo sapiens
gtaggtagtgagtga

SEQ ID NO: 1355903 - DNA, 15 bp, Homo sapiens
ggtaggtagtgagtg

SEQ ID NO: 1355904 - DNA, 15 bp, Homo sapiens
gggtaggtagtgagt

SEQ ID NO: 1355905 - DNA, 15 bp, Homo sapiens
agggtaggtagtgag

SEQ ID NO: 1355906 - DNA, 15 bp, Homo sapiens
aagggtaggtagtga

SEQ ID NO: 1355907 - DNA, 15 bp, Homo sapiens
aaagggtaggtagtg

SEQ ID NO: 1355908 - DNA, 15 bp, Homo sapiens
aaaagggtaggtagt

SEQ ID NO: 1355909 - DNA, 15 bp, Homo sapiens
aaaaagggtaggtag

SEQ ID NO: 1355910 - DNA, 15 bp, Homo sapiens
aaaaaagggtaggta

SEQ ID NO: 1355911 - DNA, 15 bp, Homo sapiens
gaaaaaagggtaggt

SEQ ID NO: 1355912 - DNA, 15 bp, Homo sapiens
agaaaaaagggtagg

SEQ ID NO: 1355913 - DNA, 15 bp, Homo sapiens
aagaaaaaagggtag

SEQ ID NO: 1355914 - DNA, 15 bp, Homo sapiens
gaagaaaaaagggta

SEQ ID NO: 1355915 - DNA, 15 bp, Homo sapiens
agaagaaaaaagggt

SEQ ID NO: 1355916 - DNA, 15 bp, Homo sapiens
tagaagaaaaaaggg

SEQ ID NO: 1355917 - DNA, 15 bp, Homo sapiens
gtagaagaaaaaagg

SEQ ID NO: 1355918 - DNA, 15 bp, Homo sapiens
ggtagaagaaaaaag

SEQ ID NO: 1355919 - DNA, 15 bp, Homo sapiens
aggtagaagaaaaaa

SEQ ID NO: 1355920 - DNA, 15 bp, Homo sapiens
gaggtagaagaaaaa

SEQ ID NO: 1355921 - DNA, 15 bp, Homo sapiens
agaggtagaagaaaa

SEQ ID NO: 1355922 - DNA, 15 bp, Homo sapiens
cagaggtagaagaaa

SEQ ID NO: 1355923 - DNA, 15 bp, Homo sapiens
tcagaggtagaagaa

SEQ ID NO: 1355924 - DNA, 15 bp, Homo sapiens
gtcagaggtagaaga

SEQ ID NO: 1355925 - DNA, 15 bp, Homo sapiens
agtcagaggtagaag

SEQ ID NO: 1355926 - DNA, 15 bp, Homo sapiens
cagtcagaggtagaa

SEQ ID NO: 1355927 - DNA, 15 bp, Homo sapiens
ccagtcagaggtaga

SEQ ID NO: 1355928 - DNA, 15 bp, Homo sapiens
tccagtcagaggtag

SEQ ID NO: 1355929 - DNA, 15 bp, Homo sapiens
ctccagtcagaggta

SEQ ID NO: 1355930 - DNA, 15 bp, Homo sapiens
cctccagtcagaggt

SEQ ID NO: 1355931 - DNA, 15 bp, Homo sapiens
tcctccagtcagagg

SEQ ID NO: 1355932 - DNA, 15 bp, Homo sapiens
atcctccagtcagag

SEQ ID NO: 1355933 - DNA, 15 bp, Homo sapiens
aatcctccagtcaga

SEQ ID NO: 1355934 - DNA, 15 bp, Homo sapiens
gaatcctccagtcag

SEQ ID NO: 1355935 - DNA, 15 bp, Homo sapiens
tgaatcctccagtca

SEQ ID NO: 1355936 - DNA, 15 bp, Homo sapiens
ttgaatcctccagtc

SEQ ID NO: 1355937 - DNA, 15 bp, Homo sapiens
attgaatcctccagt

SEQ ID NO: 1355938 - DNA, 15 bp, Homo sapiens
gattgaatcctccag

SEQ ID NO: 1355939 - DNA, 15 bp, Homo sapiens
tgattgaatcctcca

SEQ ID NO: 1355940 - DNA, 15 bp, Homo sapiens
gtgattgaatcctcc

SEQ ID NO: 1355941 - DNA, 15 bp, Homo sapiens
tgtgattgaatcctc

SEQ ID NO: 1355942 - DNA, 15 bp, Homo sapiens
gtgtgattgaatcct

SEQ ID NO: 1355943 - DNA, 15 bp, Homo sapiens
ggtgtgattgaatcc

SEQ ID NO: 1355944 - DNA, 15 bp, Homo sapiens
gggtgtgattgaatc

SEQ ID NO: 1355945 - DNA, 15 bp, Homo sapiens
tgggtgtgattgaat

SEQ ID NO: 1355946 - DNA, 15 bp, Homo sapiens
ttgggtgtgattgaa

SEQ ID NO: 1355947 - DNA, 15 bp, Homo sapiens
tttgggtgtgattga

SEQ ID NO: 1355948 - DNA, 15 bp, Homo sapiens
ctttgggtgtgattg

SEQ ID NO: 1355949 - DNA, 15 bp, Homo sapiens
gctttgggtgtgatt

SEQ ID NO: 1355950 - DNA, 15 bp, Homo sapiens
tgctttgggtgtgat

SEQ ID NO: 1355951 - DNA, 15 bp, Homo sapiens
ctgctttgggtgtga

SEQ ID NO: 1355952 - DNA, 15 bp, Homo sapiens
cctgctttgggtgtg

SEQ ID NO: 1355953 - DNA, 15 bp, Homo sapiens
ccctgctttgggtgt

SEQ ID NO: 1355954 - DNA, 15 bp, Homo sapiens
cccctgctttgggtg

SEQ ID NO: 1355955 - DNA, 15 bp, Homo sapiens
ccccctgctttgggt

SEQ ID NO: 1355956 - DNA, 15 bp, Homo sapiens
accccctgctttggg

SEQ ID NO: 1355957 - DNA, 15 bp, Homo sapiens
taccccctgctttgg

SEQ ID NO: 1355958 - DNA, 15 bp, Homo sapiens
ttaccccctgctttg

SEQ ID NO: 1355959 - DNA, 15 bp, Homo sapiens
attaccccctgcttt

SEQ ID NO: 1355960 - DNA, 15 bp, Homo sapiens
tattaccccctgctt

SEQ ID NO: 1355961 - DNA, 15 bp, Homo sapiens
ttattaccccctgct

SEQ ID NO: 1355962 - DNA, 15 bp, Homo sapiens
cttattaccccctgc

SEQ ID NO: 1355963 - DNA, 15 bp, Homo sapiens
tcttattaccccctg

SEQ ID NO: 1355964 - DNA, 15 bp, Homo sapiens
gtcttattaccccct

SEQ ID NO: 1355965 - DNA, 15 bp, Homo sapiens
tgtcttattaccccc

SEQ ID NO: 1355966 - DNA, 15 bp, Homo sapiens
gtgtcttattacccc

SEQ ID NO: 1355967 - DNA, 15 bp, Homo sapiens
ggtgtcttattaccc

SEQ ID NO: 1355968 - DNA, 15 bp, Homo sapiens
gggtgtcttattacc

SEQ ID NO: 1355969 - DNA, 15 bp, Homo sapiens
tgggtgtcttattac

SEQ ID NO: 1355970 - DNA, 15 bp, Homo sapiens
ttgggtgtcttatta

SEQ ID NO: 1355971 - DNA, 15 bp, Homo sapiens
gttgggtgtcttatt

SEQ ID NO: 1355972 - DNA, 15 bp, Homo sapiens
tgttgggtgtcttat

SEQ ID NO: 1355973 - DNA, 15 bp, Homo sapiens
ctgttgggtgtctta

SEQ ID NO: 1355974 - DNA, 15 bp, Homo sapiens
tctgttgggtgtctt

SEQ ID NO: 1355975 - DNA, 15 bp, Homo sapiens
ctctgttgggtgtct

SEQ ID NO: 1355976 - DNA, 15 bp, Homo sapiens
cctctgttgggtgtc

SEQ ID NO: 1355977 - DNA, 15 bp, Homo sapiens
tcctctgttgggtgt

SEQ ID NO: 1355978 - DNA, 15 bp, Homo sapiens
ctcctctgttgggtg

SEQ ID NO: 1355979 - DNA, 15 bp, Homo sapiens
actcctctgttgggt

SEQ ID NO: 1355980 - DNA, 15 bp, Homo sapiens
aactcctctgttggg

SEQ ID NO: 1355981 - DNA, 15 bp, Homo sapiens
gaactcctctgttgg

SEQ ID NO: 1355982 - DNA, 15 bp, Homo sapiens
tgaactcctctgttg

SEQ ID NO: 1355983 - DNA, 15 bp, Homo sapiens
gtgaactcctctgtt

SEQ ID NO: 1355984 - DNA, 15 bp, Homo sapiens
tgtgaactcctctgt

SEQ ID NO: 1355985 - DNA, 15 bp, Homo sapiens
ctgtgaactcctctg

SEQ ID NO: 1355986 - DNA, 15 bp, Homo sapiens
cctgtgaactcctct

SEQ ID NO: 1355987 - DNA, 15 bp, Homo sapiens
gcctgtgaactcctc

SEQ ID NO: 1355988 - DNA, 15 bp, Homo sapiens
agcctgtgaactcct

SEQ ID NO: 1355989 - DNA, 15 bp, Homo sapiens
cagcctgtgaactcc

SEQ ID NO: 1355990 - DNA, 15 bp, Homo sapiens
gcagcctgtgaactc

SEQ ID NO: 1355991 - DNA, 15 bp, Homo sapiens
agcagcctgtgaact

SEQ ID NO: 1355992 - DNA, 15 bp, Homo sapiens
aagcagcctgtgaac

SEQ ID NO: 1355993 - DNA, 15 bp, Homo sapiens
caagcagcctgtgaa

SEQ ID NO: 1355994 - DNA, 15 bp, Homo sapiens
ccaagcagcctgtga

SEQ ID NO: 1355995 - DNA, 15 bp, Homo sapiens
cccaagcagcctgtg

SEQ ID NO: 1355996 - DNA, 15 bp, Homo sapiens
tcccaagcagcctgt

SEQ ID NO: 1355997 - DNA, 15 bp, Homo sapiens
ctcccaagcagcctg

SEQ ID NO: 1355998 - DNA, 15 bp, Homo sapiens
tctcccaagcagcct

SEQ ID NO: 1355999 - DNA, 15 bp, Homo sapiens
ttctcccaagcagcc

SEQ ID NO: 1356000 - DNA, 15 bp, Homo sapiens
cttctcccaagcagc

SEQ ID NO: 1356001 - DNA, 15 bp, Homo sapiens
tcttctcccaagcag

SEQ ID NO: 1356002 - DNA, 15 bp, Homo sapiens
gtcttctcccaagca

SEQ ID NO: 1356003 - DNA, 15 bp, Homo sapiens
tgtcttctcccaagc

SEQ ID NO: 1356004 - DNA, 15 bp, Homo sapiens
ttgtcttctcccaag

SEQ ID NO: 1356005 - DNA, 15 bp, Homo sapiens
attgtcttctcccaa

SEQ ID NO: 1356006 - DNA, 15 bp, Homo sapiens
gattgtcttctccca

SEQ ID NO: 1356007 - DNA, 15 bp, Homo sapiens
ggattgtcttctccc

SEQ ID NO: 1356008 - DNA, 15 bp, Homo sapiens
cggattgtcttctcc

SEQ ID NO: 1356009 - DNA, 15 bp, Homo sapiens
acggattgtcttctc

SEQ ID NO: 1356010 - DNA, 15 bp, Homo sapiens
cacggattgtcttct

SEQ ID NO: 1356011 - DNA, 15 bp, Homo sapiens
ccacggattgtcttc

SEQ ID NO: 1356012 - DNA, 15 bp, Homo sapiens
cccacggattgtctt

SEQ ID NO: 1356013 - DNA, 15 bp, Homo sapiens
gcccacggattgtct

SEQ ID NO: 1356014 - DNA, 15 bp, Homo sapiens
agcccacggattgtc

SEQ ID NO: 1356015 - DNA, 15 bp, Homo sapiens
aagcccacggattgt

SEQ ID NO: 1356016 - DNA, 15 bp, Homo sapiens
caagcccacggattg

SEQ ID NO: 1356017 - DNA, 15 bp, Homo sapiens
ccaagcccacggatt

SEQ ID NO: 1356018 - DNA, 15 bp, Homo sapiens
cccaagcccacggat

SEQ ID NO: 1356019 - DNA, 15 bp, Homo sapiens
ccccaagcccacgga

SEQ ID NO: 1356020 - DNA, 15 bp, Homo sapiens
cccccaagcccacgg

SEQ ID NO: 1356021 - DNA, 15 bp, Homo sapiens
tcccccaagcccacg

SEQ ID NO: 1356022 - DNA, 15 bp, Homo sapiens
ctcccccaagcccac

SEQ ID NO: 1356023 - DNA, 15 bp, Homo sapiens
cctcccccaagccca

SEQ ID NO: 1356024 - DNA, 15 bp, Homo sapiens
ccctcccccaagccc

SEQ ID NO: 1356025 - DNA, 15 bp, Homo sapiens
tccctcccccaagcc

SEQ ID NO: 1356026 - DNA, 15 bp, Homo sapiens
ctccctcccccaagc

SEQ ID NO: 1356027 - DNA, 15 bp, Homo sapiens
tctccctcccccaag

SEQ ID NO: 1356028 - DNA, 15 bp, Homo sapiens
ttctccctcccccaa

SEQ ID NO: 1356029 - DNA, 15 bp, Homo sapiens
tttctccctccccca

SEQ ID NO: 1356030 - DNA, 15 bp, Homo sapiens
gtttctccctccccc

SEQ ID NO: 1356031 - DNA, 15 bp, Homo sapiens
cgtttctccctcccc

SEQ ID NO: 1356032 - DNA, 15 bp, Homo sapiens
gcgtttctccctccc

SEQ ID NO: 1356033 - DNA, 15 bp, Homo sapiens
ggcgtttctccctcc

SEQ ID NO: 1356034 - DNA, 15 bp, Homo sapiens
aggcgtttctccctc

SEQ ID NO: 1356035 - DNA, 15 bp, Homo sapiens
caggcgtttctccct

SEQ ID NO: 1356036 - DNA, 15 bp, Homo sapiens
gcaggcgtttctccc

SEQ ID NO: 1356037 - DNA, 15 bp, Homo sapiens
agcaggcgtttctcc

SEQ ID NO: 1356038 - DNA, 15 bp, Homo sapiens
tagcaggcgtttctc

SEQ ID NO: 1356039 - DNA, 15 bp, Homo sapiens
ttagcaggcgtttct

SEQ ID NO: 1356040 - DNA, 15 bp, Homo sapiens
tttagcaggcgtttc

SEQ ID NO: 1356041 - DNA, 15 bp, Homo sapiens
atttagcaggcgttt

SEQ ID NO: 1356042 - DNA, 15 bp, Homo sapiens
aatttagcaggcgtt

SEQ ID NO: 1356043 - DNA, 15 bp, Homo sapiens
aaatttagcaggcgt

SEQ ID NO: 1356044 - DNA, 15 bp, Homo sapiens
taaatttagcaggcg

SEQ ID NO: 1356045 - DNA, 15 bp, Homo sapiens
ctaaatttagcaggc

SEQ ID NO: 1356046 - DNA, 15 bp, Homo sapiens
cctaaatttagcagg

SEQ ID NO: 1356047 - DNA, 15 bp, Homo sapiens
tcctaaatttagcag

SEQ ID NO: 1356048 - DNA, 15 bp, Homo sapiens
ttcctaaatttagca

SEQ ID NO: 1356049 - DNA, 15 bp, Homo sapiens
cttcctaaatttagc

SEQ ID NO: 1356050 - DNA, 15 bp, Homo sapiens
gcttcctaaatttag

SEQ ID NO: 1356051 - DNA, 15 bp, Homo sapiens
agcttcctaaattta

SEQ ID NO: 1356052 - DNA, 15 bp, Homo sapiens
cagcttcctaaattt

SEQ ID NO: 1356053 - DNA, 15 bp, Homo sapiens
gcagcttcctaaatt

SEQ ID NO: 1356054 - DNA, 15 bp, Homo sapiens
agcagcttcctaaat

SEQ ID NO: 1356055 - DNA, 15 bp, Homo sapiens
aagcagcttcctaaa

SEQ ID NO: 1356056 - DNA, 15 bp, Homo sapiens
caagcagcttcctaa

SEQ ID NO: 1356057 - DNA, 15 bp, Homo sapiens
gcaagcagcttccta

SEQ ID NO: 1356058 - DNA, 15 bp, Homo sapiens
agcaagcagcttcct

SEQ ID NO: 1356059 - DNA, 15 bp, Homo sapiens
cagcaagcagcttcc

SEQ ID NO: 1356060 - DNA, 15 bp, Homo sapiens
ccagcaagcagcttc

SEQ ID NO: 1356061 - DNA, 15 bp, Homo sapiens
tccagcaagcagctt

SEQ ID NO: 1356062 - DNA, 15 bp, Homo sapiens
ttccagcaagcagct

SEQ ID NO: 1356063 - DNA, 15 bp, Homo sapiens
cttccagcaagcagc

SEQ ID NO: 1356064 - DNA, 15 bp, Homo sapiens
tcttccagcaagcag

SEQ ID NO: 1356065 - DNA, 15 bp, Homo sapiens
ctcttccagcaagca

SEQ ID NO: 1356066 - DNA, 15 bp, Homo sapiens
cctcttccagcaagc

SEQ ID NO: 1356067 - DNA, 15 bp, Homo sapiens
acctcttccagcaag

SEQ ID NO: 1356068 - DNA, 15 bp, Homo sapiens
cacctcttccagcaa

SEQ ID NO: 1356069 - DNA, 15 bp, Homo sapiens
tcacctcttccagca

SEQ ID NO: 1356070 - DNA, 15 bp, Homo sapiens
atcacctcttccagc

SEQ ID NO: 1356071 - DNA, 15 bp, Homo sapiens
catcacctcttccag

SEQ ID NO: 1356072 - DNA, 15 bp, Homo sapiens
ccatcacctcttcca

SEQ ID NO: 1356073 - DNA, 15 bp, Homo sapiens
accatcacctcttcc

SEQ ID NO: 1356074 - DNA, 15 bp, Homo sapiens
taccatcacctcttc

SEQ ID NO: 1356075 - DNA, 15 bp, Homo sapiens
ttaccatcacctctt

SEQ ID NO: 1356076 - DNA, 15 bp, Homo sapiens
tttaccatcacctct

SEQ ID NO: 1356077 - DNA, 15 bp, Homo sapiens
atttaccatcacctc

SEQ ID NO: 1356078 - DNA, 15 bp, Homo sapiens
tatttaccatcacct

SEQ ID NO: 1356079 - DNA, 15 bp, Homo sapiens
ttatttaccatcacc

SEQ ID NO: 1356080 - DNA, 15 bp, Homo sapiens
cttatttaccatcac

SEQ ID NO: 1356081 - DNA, 15 bp, Homo sapiens
tcttatttaccatca

SEQ ID NO: 1356082 - DNA, 15 bp, Homo sapiens
ttcttatttaccatc

SEQ ID NO: 1356083 - DNA, 15 bp, Homo sapiens
cttcttatttaccat

SEQ ID NO: 1356084 - DNA, 15 bp, Homo sapiens
ccttcttatttacca

SEQ ID NO: 1356085 - DNA, 15 bp, Homo sapiens
cccttcttatttacc

SEQ ID NO: 1356086 - DNA, 15 bp, Homo sapiens
gcccttcttatttac

SEQ ID NO: 1356087 - DNA, 15 bp, Homo sapiens
ggcccttcttattta

SEQ ID NO: 1356088 - DNA, 15 bp, Homo sapiens
aggcccttcttattt

SEQ ID NO: 1356089 - DNA, 15 bp, Homo sapiens
caggcccttcttatt

SEQ ID NO: 1356090 - DNA, 15 bp, Homo sapiens
tcaggcccttcttat

SEQ ID NO: 1356091 - DNA, 15 bp, Homo sapiens
atcaggcccttctta

SEQ ID NO: 1356092 - DNA, 15 bp, Homo sapiens
catcaggcccttctt

SEQ ID NO: 1356093 - DNA, 15 bp, Homo sapiens
ccatcaggcccttct

SEQ ID NO: 1356094 - DNA, 15 bp, Homo sapiens
gccatcaggcccttc

SEQ ID NO: 1356095 - DNA, 15 bp, Homo sapiens
ggccatcaggccctt

SEQ ID NO: 1356096 - DNA, 15 bp, Homo sapiens
cggccatcaggccct

SEQ ID NO: 1356097 - DNA, 15 bp, Homo sapiens
ccggccatcaggccc

SEQ ID NO: 1356098 - DNA, 15 bp, Homo sapiens
cccggccatcaggcc

SEQ ID NO: 1356099 - DNA, 15 bp, Homo sapiens
acccggccatcaggc

SEQ ID NO: 1356100 - DNA, 15 bp, Homo sapiens
cacccggccatcagg

SEQ ID NO: 1356101 - DNA, 15 bp, Homo sapiens
ccacccggccatcag

SEQ ID NO: 1356102 - DNA, 15 bp, Homo sapiens
cccacccggccatca

SEQ ID NO: 1356103 - DNA, 15 bp, Homo sapiens
tcccacccggccatc

SEQ ID NO: 1356104 - DNA, 15 bp, Homo sapiens
atcccacccggccat

SEQ ID NO: 1356105 - DNA, 15 bp, Homo sapiens
catcccacccggcca

SEQ ID NO: 1356106 - DNA, 15 bp, Homo sapiens
acatcccacccggcc

SEQ ID NO: 1356107 - DNA, 15 bp, Homo sapiens
aacatcccacccggc

SEQ ID NO: 1356108 - DNA, 15 bp, Homo sapiens
caacatcccacccgg

SEQ ID NO: 1356109 - DNA, 15 bp, Homo sapiens
tcaacatcccacccg

SEQ ID NO: 1356110 - DNA, 15 bp, Homo sapiens
ctcaacatcccaccc

SEQ ID NO: 1356111 - DNA, 15 bp, Homo sapiens
gctcaacatcccacc

SEQ ID NO: 1356112 - DNA, 15 bp, Homo sapiens
tgctcaacatcccac

SEQ ID NO: 1356113 - DNA, 15 bp, Homo sapiens
gtgctcaacatccca

SEQ ID NO: 1356114 - DNA, 15 bp, Homo sapiens
ggtgctcaacatccc

SEQ ID NO: 1356115 - DNA, 15 bp, Homo sapiens
aggtgctcaacatcc

SEQ ID NO: 1356116 - DNA, 15 bp, Homo sapiens
caggtgctcaacatc

SEQ ID NO: 1356117 - DNA, 15 bp, Homo sapiens
gcaggtgctcaacat

SEQ ID NO: 1356118 - DNA, 15 bp, Homo sapiens
ggcaggtgctcaaca

SEQ ID NO: 1356119 - DNA, 15 bp, Homo sapiens
aggcaggtgctcaac

SEQ ID NO: 1356120 - DNA, 15 bp, Homo sapiens
aaggcaggtgctcaa

SEQ ID NO: 1356121 - DNA, 15 bp, Homo sapiens
caaggcaggtgctca

SEQ ID NO: 1356122 - DNA, 15 bp, Homo sapiens
ccaaggcaggtgctc

SEQ ID NO: 1356123 - DNA, 15 bp, Homo sapiens
tccaaggcaggtgct

SEQ ID NO: 1356124 - DNA, 15 bp, Homo sapiens
ctccaaggcaggtgc

SEQ ID NO: 1356125 - DNA, 15 bp, Homo sapiens
cctccaaggcaggtg

SEQ ID NO: 1356126 - DNA, 15 bp, Homo sapiens
tcctccaaggcaggt

SEQ ID NO: 1356127 - DNA, 15 bp, Homo sapiens
ttcctccaaggcagg

SEQ ID NO: 1356128 - DNA, 15 bp, Homo sapiens
cttcctccaaggcag

SEQ ID NO: 1356129 - DNA, 15 bp, Homo sapiens
gcttcctccaaggca

SEQ ID NO: 1356130 - DNA, 15 bp, Homo sapiens
agcttcctccaaggc

SEQ ID NO: 1356131 - DNA, 15 bp, Homo sapiens
tagcttcctccaagg

SEQ ID NO: 1356132 - DNA, 15 bp, Homo sapiens
ctagcttcctccaag

SEQ ID NO: 1356133 - DNA, 15 bp, Homo sapiens
cctagcttcctccaa

SEQ ID NO: 1356134 - DNA, 15 bp, Homo sapiens
gcctagcttcctcca

SEQ ID NO: 1356135 - DNA, 15 bp, Homo sapiens
tgcctagcttcctcc

SEQ ID NO: 1356136 - DNA, 15 bp, Homo sapiens
ctgcctagcttcctc

SEQ ID NO: 1356137 - DNA, 15 bp, Homo sapiens
cctgcctagcttcct

SEQ ID NO: 1356138 - DNA, 15 bp, Homo sapiens
ccctgcctagcttcc

SEQ ID NO: 1356139 - DNA, 15 bp, Homo sapiens
gccctgcctagcttc

SEQ ID NO: 1356140 - DNA, 15 bp, Homo sapiens
tgccctgcctagctt

SEQ ID NO: 1356141 - DNA, 15 bp, Homo sapiens
gtgccctgcctagct

SEQ ID NO: 1356142 - DNA, 15 bp, Homo sapiens
tgtgccctgcctagc

SEQ ID NO: 1356143 - DNA, 15 bp, Homo sapiens
ctgtgccctgcctag

SEQ ID NO: 1356144 - DNA, 15 bp, Homo sapiens
cctgtgccctgccta

SEQ ID NO: 1356145 - DNA, 15 bp, Homo sapiens
gcctgtgccctgcct

SEQ ID NO: 1356146 - DNA, 15 bp, Homo sapiens
ggcctgtgccctgcc

SEQ ID NO: 1356147 - DNA, 15 bp, Homo sapiens
cggcctgtgccctgc

SEQ ID NO: 1356148 - DNA, 15 bp, Homo sapiens
ccggcctgtgccctg

SEQ ID NO: 1356149 - DNA, 15 bp, Homo sapiens
gccggcctgtgccct

SEQ ID NO: 1356150 - DNA, 15 bp, Homo sapiens
tgccggcctgtgccc

SEQ ID NO: 1356151 - DNA, 15 bp, Homo sapiens
ttgccggcctgtgcc

SEQ ID NO: 1356152 - DNA, 15 bp, Homo sapiens
cttgccggcctgtgc

SEQ ID NO: 1356153 - DNA, 15 bp, Homo sapiens
acttgccggcctgtg

SEQ ID NO: 1356154 - DNA, 15 bp, Homo sapiens
cacttgccggcctgt

SEQ ID NO: 1356155 - DNA, 15 bp, Homo sapiens
ccacttgccggcctg

SEQ ID NO: 1356156 - DNA, 15 bp, Homo sapiens
cccacttgccggcct

SEQ ID NO: 1356157 - DNA, 15 bp, Homo sapiens
tcccacttgccggcc

SEQ ID NO: 1356158 - DNA, 15 bp, Homo sapiens
ttcccacttgccggc

SEQ ID NO: 1356159 - DNA, 15 bp, Homo sapiens
cttcccacttgccgg

SEQ ID NO: 1356160 - DNA, 15 bp, Homo sapiens
acttcccacttgccg

SEQ ID NO: 1356161 - DNA, 15 bp, Homo sapiens
cacttcccacttgcc

SEQ ID NO: 1356162 - DNA, 15 bp, Homo sapiens
gcacttcccacttgc

SEQ ID NO: 1356163 - DNA, 15 bp, Homo sapiens
cgcacttcccacttg

SEQ ID NO: 1356164 - DNA, 15 bp, Homo sapiens
acgcacttcccactt

SEQ ID NO: 1356165 - DNA, 15 bp, Homo sapiens
cacgcacttcccact

SEQ ID NO: 1356166 - DNA, 15 bp, Homo sapiens
ccacgcacttcccac

SEQ ID NO: 1356167 - DNA, 15 bp, Homo sapiens
cccacgcacttccca

SEQ ID NO: 1356168 - DNA, 15 bp, Homo sapiens
acccacgcacttccc

SEQ ID NO: 1356169 - DNA, 15 bp, Homo sapiens
cacccacgcacttcc

SEQ ID NO: 1356170 - DNA, 15 bp, Homo sapiens
tcacccacgcacttc

SEQ ID NO: 1356171 - DNA, 15 bp, Homo sapiens
ttcacccacgcactt

SEQ ID NO: 1356172 - DNA, 15 bp, Homo sapiens
gttcacccacgcact

SEQ ID NO: 1356173 - DNA, 15 bp, Homo sapiens
cgttcacccacgcac

SEQ ID NO: 1356174 - DNA, 15 bp, Homo sapiens
tcgttcacccacgca

SEQ ID NO: 1356175 - DNA, 15 bp, Homo sapiens
ctcgttcacccacgc

SEQ ID NO: 1356176 - DNA, 15 bp, Homo sapiens
actcgttcacccacg

SEQ ID NO: 1356177 - DNA, 15 bp, Homo sapiens
cactcgttcacccac

SEQ ID NO: 1356178 - DNA, 15 bp, Homo sapiens
gcactcgttcaccca

SEQ ID NO: 1356179 - DNA, 15 bp, Homo sapiens
tgcactcgttcaccc

SEQ ID NO: 1356180 - DNA, 15 bp, Homo sapiens
atgcactcgttcacc

SEQ ID NO: 1356181 - DNA, 15 bp, Homo sapiens
catgcactcgttcac

SEQ ID NO: 1356182 - DNA, 15 bp, Homo sapiens
acatgcactcgttca

SEQ ID NO: 1356183 - DNA, 15 bp, Homo sapiens
cacatgcactcgttc

SEQ ID NO: 1356184 - DNA, 15 bp, Homo sapiens
acacatgcactcgtt

SEQ ID NO: 1356185 - DNA, 15 bp, Homo sapiens
cacacatgcactcgt

SEQ ID NO: 1356186 - DNA, 15 bp, Homo sapiens
acacacatgcactcg

SEQ ID NO: 1356187 - DNA, 15 bp, Homo sapiens
cacacacatgcactc

SEQ ID NO: 1356188 - DNA, 15 bp, Homo sapiens
acacacacatgcact

SEQ ID NO: 1356189 - DNA, 15 bp, Homo sapiens
tgacacacacatgca

SEQ ID NO: 1356190 - DNA, 15 bp, Homo sapiens
ctgacacacacatgc

SEQ ID NO: 1356191 - DNA, 15 bp, Homo sapiens
cctgacacacacatg

SEQ ID NO: 1356192 - DNA, 15 bp, Homo sapiens
ccctgacacacacat

SEQ ID NO: 1356193 - DNA, 15 bp, Homo sapiens
accctgacacacaca

SEQ ID NO: 1356194 - DNA, 15 bp, Homo sapiens
taccctgacacacac

SEQ ID NO: 1356195 - DNA, 15 bp, Homo sapiens
gtaccctgacacaca

SEQ ID NO: 1356196 - DNA, 15 bp, Homo sapiens
ggtaccctgacacac

SEQ ID NO: 1356197 - DNA, 15 bp, Homo sapiens
aggtaccctgacaca

SEQ ID NO: 1356198 - DNA, 15 bp, Homo sapiens
caggtaccctgacac

SEQ ID NO: 1356199 - DNA, 15 bp, Homo sapiens
ccaggtaccctgaca

SEQ ID NO: 1356200 - DNA, 15 bp, Homo sapiens
cccaggtaccctgac

SEQ ID NO: 1356201 - DNA, 15 bp, Homo sapiens
acccaggtaccctga

SEQ ID NO: 1356202 - DNA, 15 bp, Homo sapiens
tacccaggtaccctg

SEQ ID NO: 1356203 - DNA, 15 bp, Homo sapiens
ctacccaggtaccct

SEQ ID NO: 1356204 - DNA, 15 bp, Homo sapiens
gctacccaggtaccc

SEQ ID NO: 1356205 - DNA, 15 bp, Homo sapiens
agctacccaggtacc

SEQ ID NO: 1356206 - DNA, 15 bp, Homo sapiens
gagctacccaggtac

SEQ ID NO: 1356207 - DNA, 15 bp, Homo sapiens
ggagctacccaggta

SEQ ID NO: 1356208 - DNA, 15 bp, Homo sapiens
cggagctacccaggt

SEQ ID NO: 1356209 - DNA, 15 bp, Homo sapiens
gcggagctacccagg

SEQ ID NO: 1356210 - DNA, 15 bp, Homo sapiens
tgcggagctacccag

SEQ ID NO: 1356211 - DNA, 15 bp, Homo sapiens
ctgcggagctaccca

SEQ ID NO: 1356212 - DNA, 15 bp, Homo sapiens
gctgcggagctaccc

SEQ ID NO: 1356213 - DNA, 15 bp, Homo sapiens
ggctgcggagctacc

SEQ ID NO: 1356214 - DNA, 15 bp, Homo sapiens
aggctgcggagctac

SEQ ID NO: 1356215 - DNA, 15 bp, Homo sapiens
caggctgcggagcta

SEQ ID NO: 1356216 - DNA, 15 bp, Homo sapiens
ccaggctgcggagct

SEQ ID NO: 1356217 - DNA, 15 bp, Homo sapiens
gccaggctgcggagc

SEQ ID NO: 1356218 - DNA, 15 bp, Homo sapiens
agccaggctgcggag

SEQ ID NO: 1356219 - DNA, 15 bp, Homo sapiens
tagccaggctgcgga

SEQ ID NO: 1356220 - DNA, 15 bp, Homo sapiens
ctagccaggctgcgg

SEQ ID NO: 1356221 - DNA, 15 bp, Homo sapiens
cctagccaggctgcg

SEQ ID NO: 1356222 - DNA, 15 bp, Homo sapiens
tcctagccaggctgc

SEQ ID NO: 1356223 - DNA, 15 bp, Homo sapiens
gtcctagccaggctg

SEQ ID NO: 1356224 - DNA, 15 bp, Homo sapiens
agtcctagccaggct

SEQ ID NO: 1356225 - DNA, 15 bp, Homo sapiens
gagtcctagccaggc

SEQ ID NO: 1356226 - DNA, 15 bp, Homo sapiens
tgagtcctagccagg

SEQ ID NO: 1356227 - DNA, 15 bp, Homo sapiens
ctgagtcctagccag

SEQ ID NO: 1356228 - DNA, 15 bp, Homo sapiens
gctgagtcctagcca

SEQ ID NO: 1356229 - DNA, 15 bp, Homo sapiens
tgctgagtcctagcc

SEQ ID NO: 1356230 - DNA, 15 bp, Homo sapiens
gtgctgagtcctagc

SEQ ID NO: 1356231 - DNA, 15 bp, Homo sapiens
cgtgctgagtcctag

SEQ ID NO: 1356232 - DNA, 15 bp, Homo sapiens
ccgtgctgagtccta

SEQ ID NO: 1356233 - DNA, 15 bp, Homo sapiens
gccgtgctgagtcct

SEQ ID NO: 1356234 - DNA, 15 bp, Homo sapiens
agccgtgctgagtcc

SEQ ID NO: 1356235 - DNA, 15 bp, Homo sapiens
aagccgtgctgagtc

SEQ ID NO: 1356236 - DNA, 15 bp, Homo sapiens
gaagccgtgctgagt

SEQ ID NO: 1356237 - DNA, 15 bp, Homo sapiens
agaagccgtgctgag

SEQ ID NO: 1356238 - DNA, 15 bp, Homo sapiens
aagaagccgtgctga

SEQ ID NO: 1356239 - DNA, 15 bp, Homo sapiens
aaagaagccgtgctg

SEQ ID NO: 1356240 - DNA, 15 bp, Homo sapiens
gaaagaagccgtgct

SEQ ID NO: 1356241 - DNA, 15 bp, Homo sapiens
agaaagaagccgtgc

SEQ ID NO: 1356242 - DNA, 15 bp, Homo sapiens
gagaaagaagccgtg

SEQ ID NO: 1356243 - DNA, 15 bp, Homo sapiens
ggagaaagaagccgt

SEQ ID NO: 1356244 - DNA, 15 bp, Homo sapiens
gggagaaagaagccg

SEQ ID NO: 1356245 - DNA, 15 bp, Homo sapiens
tgggagaaagaagcc

SEQ ID NO: 1356246 - DNA, 15 bp, Homo sapiens
gtgggagaaagaagc

SEQ ID NO: 1356247 - DNA, 15 bp, Homo sapiens
tgtgggagaaagaag

SEQ ID NO: 1356248 - DNA, 15 bp, Homo sapiens
atgtgggagaaagaa

SEQ ID NO: 1356249 - DNA, 15 bp, Homo sapiens
tatgtgggagaaaga

SEQ ID NO: 1356250 - DNA, 15 bp, Homo sapiens
gtatgtgggagaaag

SEQ ID NO: 1356251 - DNA, 15 bp, Homo sapiens
tgtatgtgggagaaa

SEQ ID NO: 1356252 - DNA, 15 bp, Homo sapiens
ttgtatgtgggagaa

SEQ ID NO: 1356253 - DNA, 15 bp, Homo sapiens
cttgtatgtgggaga

SEQ ID NO: 1356254 - DNA, 15 bp, Homo sapiens
ccttgtatgtgggag

SEQ ID NO: 1356255 - DNA, 15 bp, Homo sapiens
cccttgtatgtggga

SEQ ID NO: 1356256 - DNA, 15 bp, Homo sapiens
gcccttgtatgtggg

SEQ ID NO: 1356257 - DNA, 15 bp, Homo sapiens
agcccttgtatgtgg

SEQ ID NO: 1356258 - DNA, 15 bp, Homo sapiens
gagcccttgtatgtg

SEQ ID NO: 1356259 - DNA, 15 bp, Homo sapiens
tgagcccttgtatgt

SEQ ID NO: 1356260 - DNA, 15 bp, Homo sapiens
ctgagcccttgtatg

SEQ ID NO: 1356261 - DNA, 15 bp, Homo sapiens
cctgagcccttgtat

SEQ ID NO: 1356262 - DNA, 15 bp, Homo sapiens
ccctgagcccttgta

SEQ ID NO: 1356263 - DNA, 15 bp, Homo sapiens
cccctgagcccttgt

SEQ ID NO: 1356264 - DNA, 15 bp, Homo sapiens
gcccctgagcccttg

SEQ ID NO: 1356265 - DNA, 15 bp, Homo sapiens
ggcccctgagccctt

SEQ ID NO: 1356266 - DNA, 15 bp, Homo sapiens
aggcccctgagccct

SEQ ID NO: 1356267 - DNA, 15 bp, Homo sapiens
caggcccctgagccc

SEQ ID NO: 1356268 - DNA, 15 bp, Homo sapiens
ccaggcccctgagcc

SEQ ID NO: 1356269 - DNA, 15 bp, Homo sapiens
cccaggcccctgagc

SEQ ID NO: 1356270 - DNA, 15 bp, Homo sapiens
ccccaggcccctgag

SEQ ID NO: 1356271 - DNA, 15 bp, Homo sapiens
gccccaggcccctga

SEQ ID NO: 1356272 - DNA, 15 bp, Homo sapiens
ggccccaggcccctg

SEQ ID NO: 1356273 - DNA, 15 bp, Homo sapiens
tggccccaggcccct

SEQ ID NO: 1356274 - DNA, 15 bp, Homo sapiens
atggccccaggcccc

SEQ ID NO: 1356275 - DNA, 15 bp, Homo sapiens
tatggccccaggccc

SEQ ID NO: 1356276 - DNA, 15 bp, Homo sapiens
ttatggccccaggcc

SEQ ID NO: 1356277 - DNA, 15 bp, Homo sapiens
cttatggccccaggc

SEQ ID NO: 1356278 - DNA, 15 bp, Homo sapiens
ccttatggccccagg

SEQ ID NO: 1356279 - DNA, 15 bp, Homo sapiens
cccttatggccccag

SEQ ID NO: 1356280 - DNA, 15 bp, Homo sapiens
ccccttatggcccca

SEQ ID NO: 1356281 - DNA, 15 bp, Homo sapiens
tccccttatggcccc

SEQ ID NO: 1356282 - DNA, 15 bp, Homo sapiens
atccccttatggccc

SEQ ID NO: 1356283 - DNA, 15 bp, Homo sapiens
gatccccttatggcc

SEQ ID NO: 1356284 - DNA, 15 bp, Homo sapiens
ggatccccttatggc

SEQ ID NO: 1356285 - DNA, 15 bp, Homo sapiens
aggatccccttatgg

SEQ ID NO: 1356286 - DNA, 15 bp, Homo sapiens
gaggatccccttatg

SEQ ID NO: 1356287 - DNA, 15 bp, Homo sapiens
ggaggatccccttat

SEQ ID NO: 1356288 - DNA, 15 bp, Homo sapiens
cggaggatcccctta

SEQ ID NO: 1356289 - DNA, 15 bp, Homo sapiens
acggaggatcccctt

SEQ ID NO: 1356290 - DNA, 15 bp, Homo sapiens
gacggaggatcccct

SEQ ID NO: 1356291 - DNA, 15 bp, Homo sapiens
ggacggaggatcccc

SEQ ID NO: 1356292 - DNA, 15 bp, Homo sapiens
aggacggaggatccc

SEQ ID NO: 1356293 - DNA, 15 bp, Homo sapiens
caggacggaggatcc

SEQ ID NO: 1356294 - DNA, 15 bp, Homo sapiens
ccaggacggaggatc

SEQ ID NO: 1356295 - DNA, 15 bp, Homo sapiens
cccaggacggaggat

SEQ ID NO: 1356296 - DNA, 15 bp, Homo sapiens
gcccaggacggagga

SEQ ID NO: 1356297 - DNA, 15 bp, Homo sapiens
ggcccaggacggagg

SEQ ID NO: 1356298 - DNA, 15 bp, Homo sapiens
aggcccaggacggag

SEQ ID NO: 1356299 - DNA, 15 bp, Homo sapiens
gaggcccaggacgga

SEQ ID NO: 1356300 - DNA, 15 bp, Homo sapiens
agaggcccaggacgg

SEQ ID NO: 1356301 - DNA, 15 bp, Homo sapiens
gagaggcccaggacg

SEQ ID NO: 1356302 - DNA, 15 bp, Homo sapiens
ggagaggcccaggac

SEQ ID NO: 1356303 - DNA, 15 bp, Homo sapiens
gggagaggcccagga

SEQ ID NO: 1356304 - DNA, 15 bp, Homo sapiens
tgggagaggcccagg

SEQ ID NO: 1356305 - DNA, 15 bp, Homo sapiens
gtgggagaggcccag

SEQ ID NO: 1356306 - DNA, 15 bp, Homo sapiens
ggtgggagaggccca

SEQ ID NO: 1356307 - DNA, 15 bp, Homo sapiens
aggtgggagaggccc

SEQ ID NO: 1356308 - DNA, 15 bp, Homo sapiens
gaggtgggagaggcc

SEQ ID NO: 1356309 - DNA, 15 bp, Homo sapiens
ggaggtgggagaggc

SEQ ID NO: 1356310 - DNA, 15 bp, Homo sapiens
aggaggtgggagagg

SEQ ID NO: 1356311 - DNA, 15 bp, Homo sapiens
aaggaggtgggagag

SEQ ID NO: 1356312 - DNA, 15 bp, Homo sapiens
gaaggaggtgggaga

SEQ ID NO: 1356313 - DNA, 15 bp, Homo sapiens
ggaaggaggtgggag

SEQ ID NO: 1356314 - DNA, 15 bp, Homo sapiens
aggaaggaggtggga

SEQ ID NO: 1356315 - DNA, 15 bp, Homo sapiens
gaggaaggaggtggg

SEQ ID NO: 1356316 - DNA, 15 bp, Homo sapiens
ggaggaaggaggtgg

SEQ ID NO: 1356317 - DNA, 15 bp, Homo sapiens
gggaggaaggaggtg

SEQ ID NO: 1356318 - DNA, 15 bp, Homo sapiens
ggggaggaaggaggt

SEQ ID NO: 1356319 - DNA, 15 bp, Homo sapiens
taggggaggaaggag

SEQ ID NO: 1356320 - DNA, 15 bp, Homo sapiens
gtaggggaggaagga

SEQ ID NO: 1356321 - DNA, 15 bp, Homo sapiens
ggtaggggaggaagg

SEQ ID NO: 1356322 - DNA, 15 bp, Homo sapiens
aggtaggggaggaag

SEQ ID NO: 1356323 - DNA, 15 bp, Homo sapiens
gaggtaggggaggaa

SEQ ID NO: 1356324 - DNA, 15 bp, Homo sapiens
ggaggtaggggagga

SEQ ID NO: 1356325 - DNA, 15 bp, Homo sapiens
aggaggtaggggagg

SEQ ID NO: 1356326 - DNA, 15 bp, Homo sapiens
caggaggtaggggag

SEQ ID NO: 1356327 - DNA, 15 bp, Homo sapiens
gcaggaggtagggga

SEQ ID NO: 1356328 - DNA, 15 bp, Homo sapiens
tgcaggaggtagggg

SEQ ID NO: 1356329 - DNA, 15 bp, Homo sapiens
ctgcaggaggtaggg

SEQ ID NO: 1356330 - DNA, 15 bp, Homo sapiens
gctgcaggaggtagg

SEQ ID NO: 1356331 - DNA, 15 bp, Homo sapiens
agctgcaggaggtag

SEQ ID NO: 1356332 - DNA, 15 bp, Homo sapiens
gagctgcaggaggta

SEQ ID NO: 1356333 - DNA, 15 bp, Homo sapiens
ggagctgcaggaggt

SEQ ID NO: 1356334 - DNA, 15 bp, Homo sapiens
tggagctgcaggagg

SEQ ID NO: 1356335 - DNA, 15 bp, Homo sapiens
ctggagctgcaggag

SEQ ID NO: 1356336 - DNA, 15 bp, Homo sapiens
actggagctgcagga

SEQ ID NO: 1356337 - DNA, 15 bp, Homo sapiens
cactggagctgcagg

SEQ ID NO: 1356338 - DNA, 15 bp, Homo sapiens
gcactggagctgcag

SEQ ID NO: 1356339 - DNA, 15 bp, Homo sapiens
ggcactggagctgca

SEQ ID NO: 1356340 - DNA, 15 bp, Homo sapiens
gggcactggagctgc

SEQ ID NO: 1356341 - DNA, 15 bp, Homo sapiens
ggggcactggagctg

SEQ ID NO: 1356342 - DNA, 15 bp, Homo sapiens
cggggcactggagct

SEQ ID NO: 1356343 - DNA, 15 bp, Homo sapiens
tcggggcactggagc

SEQ ID NO: 1356344 - DNA, 15 bp, Homo sapiens
ctcggggcactggag

SEQ ID NO: 1356345 - DNA, 15 bp, Homo sapiens
gctcggggcactgga

SEQ ID NO: 1356346 - DNA, 15 bp, Homo sapiens
agctcggggcactgg

SEQ ID NO: 1356347 - DNA, 15 bp, Homo sapiens
gagctcggggcactg

SEQ ID NO: 1356348 - DNA, 15 bp, Homo sapiens
ggagctcggggcact

SEQ ID NO: 1356349 - DNA, 15 bp, Homo sapiens
gggagctcggggcac

SEQ ID NO: 1356350 - DNA, 15 bp, Homo sapiens
cgggagctcggggca

SEQ ID NO: 1356351 - DNA, 15 bp, Homo sapiens
ccgggagctcggggc

SEQ ID NO: 1356352 - DNA, 15 bp, Homo sapiens
gccgggagctcgggg

SEQ ID NO: 1356353 - DNA, 15 bp, Homo sapiens
ggccgggagctcggg

SEQ ID NO: 1356354 - DNA, 15 bp, Homo sapiens
tggccgggagctcgg

SEQ ID NO: 1356355 - DNA, 15 bp, Homo sapiens
gtggccgggagctcg

SEQ ID NO: 1356356 - DNA, 15 bp, Homo sapiens
tgtggccgggagctc

SEQ ID NO: 1356357 - DNA, 15 bp, Homo sapiens
ctgtggccgggagct

SEQ ID NO: 1356358 - DNA, 15 bp, Homo sapiens
actgtggccgggagc

SEQ ID NO: 1356359 - DNA, 15 bp, Homo sapiens
cactgtggccgggag

SEQ ID NO: 1356360 - DNA, 15 bp, Homo sapiens
gcactgtggccggga

SEQ ID NO: 1356361 - DNA, 15 bp, Homo sapiens
ggcactgtggccggg

SEQ ID NO: 1356362 - DNA, 15 bp, Homo sapiens
gggcactgtggccgg

SEQ ID NO: 1356363 - DNA, 15 bp, Homo sapiens
tgggcactgtggccg

SEQ ID NO: 1356364 - DNA, 15 bp, Homo sapiens
gtgggcactgtggcc

SEQ ID NO: 1356365 - DNA, 15 bp, Homo sapiens
agtgggcactgtggc

SEQ ID NO: 1356366 - DNA, 15 bp, Homo sapiens
cagtgggcactgtgg

SEQ ID NO: 1356367 - DNA, 15 bp, Homo sapiens
gcagtgggcactgtg

SEQ ID NO: 1356368 - DNA, 15 bp, Homo sapiens
ggcagtgggcactgt

SEQ ID NO: 1356369 - DNA, 15 bp, Homo sapiens
cggcagtgggcactg

SEQ ID NO: 1356370 - DNA, 15 bp, Homo sapiens
ccggcagtgggcact

SEQ ID NO: 1356371 - DNA, 15 bp, Homo sapiens
gccggcagtgggcac

SEQ ID NO: 1356372 - DNA, 15 bp, Homo sapiens
agccggcagtgggca

SEQ ID NO: 1356373 - DNA, 15 bp, Homo sapiens
gagccggcagtgggc

SEQ ID NO: 1356374 - DNA, 15 bp, Homo sapiens
ggagccggcagtggg

SEQ ID NO: 1356375 - DNA, 15 bp, Homo sapiens
cggagccggcagtgg

SEQ ID NO: 1356376 - DNA, 15 bp, Homo sapiens
ccggagccggcagtg

SEQ ID NO: 1356377 - DNA, 15 bp, Homo sapiens
accggagccggcagt

SEQ ID NO: 1356378 - DNA, 15 bp, Homo sapiens
aaccggagccggcag

SEQ ID NO: 1356379 - DNA, 15 bp, Homo sapiens
taaccggagccggca

SEQ ID NO: 1356380 - DNA, 15 bp, Homo sapiens
gtaaccggagccggc

SEQ ID NO: 1356381 - DNA, 15 bp, Homo sapiens
ggtaaccggagccgg

SEQ ID NO: 1356382 - DNA, 15 bp, Homo sapiens
gggtaaccggagccg

SEQ ID NO: 1356383 - DNA, 15 bp, Homo sapiens
tgggtaaccggagcc

SEQ ID NO: 1356384 - DNA, 15 bp, Homo sapiens
gtgggtaaccggagc

SEQ ID NO: 1356385 - DNA, 15 bp, Homo sapiens
agtgggtaaccggag

SEQ ID NO: 1356386 - DNA, 15 bp, Homo sapiens
gagtgggtaaccgga

SEQ ID NO: 1356387 - DNA, 15 bp, Homo sapiens
ggagtgggtaaccgg

SEQ ID NO: 1356388 - DNA, 15 bp, Homo sapiens
gggagtgggtaaccg

SEQ ID NO: 1356389 - DNA, 15 bp, Homo sapiens
tgggagtgggtaacc

SEQ ID NO: 1356390 - DNA, 15 bp, Homo sapiens
ctgggagtgggtaac

SEQ ID NO: 1356391 - DNA, 15 bp, Homo sapiens
gctgggagtgggtaa

SEQ ID NO: 1356392 - DNA, 15 bp, Homo sapiens
agctgggagtgggta

SEQ ID NO: 1356393 - DNA, 15 bp, Homo sapiens
cagctgggagtgggt

SEQ ID NO: 1356394 - DNA, 15 bp, Homo sapiens
ccagctgggagtggg

SEQ ID NO: 1356395 - DNA, 15 bp, Homo sapiens
cccagctgggagtgg

SEQ ID NO: 1356396 - DNA, 15 bp, Homo sapiens
gcccagctgggagtg

SEQ ID NO: 1356397 - DNA, 15 bp, Homo sapiens
ggcccagctgggagt

SEQ ID NO: 1356398 - DNA, 15 bp, Homo sapiens
tggcccagctgggag

SEQ ID NO: 1356399 - DNA, 15 bp, Homo sapiens
gtggcccagctggga

SEQ ID NO: 1356400 - DNA, 15 bp, Homo sapiens
cgtggcccagctggg

SEQ ID NO: 1356401 - DNA, 15 bp, Homo sapiens
tcgtggcccagctgg

SEQ ID NO: 1356402 - DNA, 15 bp, Homo sapiens
ctcgtggcccagctg

SEQ ID NO: 1356403 - DNA, 15 bp, Homo sapiens
gctcgtggcccagct

SEQ ID NO: 1356404 - DNA, 15 bp, Homo sapiens
tgctcgtggcccagc

SEQ ID NO: 1356405 - DNA, 15 bp, Homo sapiens
ctgctcgtggcccag

SEQ ID NO: 1356406 - DNA, 15 bp, Homo sapiens
gctgctcgtggccca

SEQ ID NO: 1356407 - DNA, 15 bp, Homo sapiens
agctgctcgtggccc

SEQ ID NO: 1356408 - DNA, 15 bp, Homo sapiens
gagctgctcgtggcc

SEQ ID NO: 1356409 - DNA, 15 bp, Homo sapiens
ggagctgctcgtggc

SEQ ID NO: 1356410 - DNA, 15 bp, Homo sapiens
tggagctgctcgtgg

SEQ ID NO: 1356411 - DNA, 15 bp, Homo sapiens
ctggagctgctcgtg

SEQ ID NO: 1356412 - DNA, 15 bp, Homo sapiens
gctggagctgctcgt

SEQ ID NO: 1356413 - DNA, 15 bp, Homo sapiens
ggctggagctgctcg

SEQ ID NO: 1356414 - DNA, 15 bp, Homo sapiens
cggctggagctgctc

SEQ ID NO: 1356415 - DNA, 15 bp, Homo sapiens
gcggctggagctgct

SEQ ID NO: 1356416 - DNA, 15 bp, Homo sapiens
agcggctggagctgc

SEQ ID NO: 1356417 - DNA, 15 bp, Homo sapiens
gagcggctggagctg

SEQ ID NO: 1356418 - DNA, 15 bp, Homo sapiens
ggagcggctggagct

SEQ ID NO: 1356419 - DNA, 15 bp, Homo sapiens
tggagcggctggagc

SEQ ID NO: 1356420 - DNA, 15 bp, Homo sapiens
gtggagcggctggag

SEQ ID NO: 1356421 - DNA, 15 bp, Homo sapiens
agtggagcggctgga

SEQ ID NO: 1356422 - DNA, 15 bp, Homo sapiens
gagtggagcggctgg

SEQ ID NO: 1356423 - DNA, 15 bp, Homo sapiens
agagtggagcggctg

SEQ ID NO: 1356424 - DNA, 15 bp, Homo sapiens
cagagtggagcggct

SEQ ID NO: 1356425 - DNA, 15 bp, Homo sapiens
tcagagtggagcggc

SEQ ID NO: 1356426 - DNA, 15 bp, Homo sapiens
gtcagagtggagcgg

SEQ ID NO: 1356427 - DNA, 15 bp, Homo sapiens
tgtcagagtggagcg

SEQ ID NO: 1356428 - DNA, 15 bp, Homo sapiens
gtgtcagagtggagc

SEQ ID NO: 1356429 - DNA, 15 bp, Homo sapiens
caggtgtcagagtgg

SEQ ID NO: 1356430 - DNA, 15 bp, Homo sapiens
tcaggtgtcagagtg

SEQ ID NO: 1356431 - DNA, 15 bp, Homo sapiens
atcaggtgtcagagt

SEQ ID NO: 1356432 - DNA, 15 bp, Homo sapiens
gatcaggtgtcagag

SEQ ID NO: 1356433 - DNA, 15 bp, Homo sapiens
acggaggggtcaaaa

SEQ ID NO: 1356434 - DNA, 15 bp, Homo sapiens
gacggaggggtcaaa

SEQ ID NO: 1356435 - DNA, 15 bp, Homo sapiens
agacggaggggtcaa

SEQ ID NO: 1356436 - DNA, 15 bp, Homo sapiens
cagacggaggggtca

SEQ ID NO: 1356437 - DNA, 15 bp, Homo sapiens
gcagacggaggggtc

SEQ ID NO: 1356438 - DNA, 15 bp, Homo sapiens
agcagacggaggggt

SEQ ID NO: 1356439 - DNA, 15 bp, Homo sapiens
gagcagacggagggg

SEQ ID NO: 1356440 - DNA, 15 bp, Homo sapiens
agagcagacggaggg

SEQ ID NO: 1356441 - DNA, 15 bp, Homo sapiens
gagagcagacggagg

SEQ ID NO: 1356442 - DNA, 15 bp, Homo sapiens
agagagcagacggag

SEQ ID NO: 1356443 - DNA, 15 bp, Homo sapiens
gagagagcagacgga

SEQ ID NO: 1356444 - DNA, 15 bp, Homo sapiens
ggagagagcagacgg

SEQ ID NO: 1356445 - DNA, 15 bp, Homo sapiens
gggagagagcagacg

SEQ ID NO: 1356446 - DNA, 15 bp, Homo sapiens
ggggagagagcagac

SEQ ID NO: 1356447 - DNA, 15 bp, Homo sapiens
gggggagagagcaga

SEQ ID NO: 1356448 - DNA, 15 bp, Homo sapiens
ggggggagagagcag

SEQ ID NO: 1356449 - DNA, 15 bp, Homo sapiens
tggggggagagagca

SEQ ID NO: 1356450 - DNA, 15 bp, Homo sapiens
gtggggggagagagc

SEQ ID NO: 1356451 - DNA, 15 bp, Homo sapiens
tgtggggggagagag

SEQ ID NO: 1356452 - DNA, 15 bp, Homo sapiens
ctgtggggggagaga

SEQ ID NO: 1356453 - DNA, 15 bp, Homo sapiens
tctgtggggggagag

SEQ ID NO: 1356454 - DNA, 15 bp, Homo sapiens
atctgtggggggaga

SEQ ID NO: 1356455 - DNA, 15 bp, Homo sapiens
gatctgtggggggag

SEQ ID NO: 1356456 - DNA, 15 bp, Homo sapiens
agatctgtgggggga

SEQ ID NO: 1356457 - DNA, 15 bp, Homo sapiens
aagatctgtgggggg

SEQ ID NO: 1356458 - DNA, 15 bp, Homo sapiens
gaagatctgtggggg

SEQ ID NO: 1356459 - DNA, 15 bp, Homo sapiens
cgaagatctgtgggg

SEQ ID NO: 1356460 - DNA, 15 bp, Homo sapiens
tcgaagatctgtggg

SEQ ID NO: 1356461 - DNA, 15 bp, Homo sapiens
gtcgaagatctgtgg

SEQ ID NO: 1356462 - DNA, 15 bp, Homo sapiens
ggtcgaagatctgtg

SEQ ID NO: 1356463 - DNA, 15 bp, Homo sapiens
gggtcgaagatctgt

SEQ ID NO: 1356464 - DNA, 15 bp, Homo sapiens
ggggtcgaagatctg

SEQ ID NO: 1356465 - DNA, 15 bp, Homo sapiens
gggggtcgaagatct

SEQ ID NO: 1356466 - DNA, 15 bp, Homo sapiens
ggggggtcgaagatc

SEQ ID NO: 1356467 - DNA, 15 bp, Homo sapiens
cggggggtcgaagat

SEQ ID NO: 1356468 - DNA, 15 bp, Homo sapiens
ccggggggtcgaaga

SEQ ID NO: 1356469 - DNA, 15 bp, Homo sapiens
tccggggggtcgaag

SEQ ID NO: 1356470 - DNA, 15 bp, Homo sapiens
ctccggggggtcgaa

SEQ ID NO: 1356471 - DNA, 15 bp, Homo sapiens
cctccggggggtcga

SEQ ID NO: 1356472 - DNA, 15 bp, Homo sapiens
tcctccggggggtcg

SEQ ID NO: 1356473 - DNA, 15 bp, Homo sapiens
ctcctccggggggtc

SEQ ID NO: 1356474 - DNA, 15 bp, Homo sapiens
gctcctccggggggt

SEQ ID NO: 1356475 - DNA, 15 bp, Homo sapiens
agctcctccgggggg

SEQ ID NO: 1356476 - DNA, 15 bp, Homo sapiens
cagctcctccggggg

SEQ ID NO: 1356477 - DNA, 15 bp, Homo sapiens
ccagctcctccgggg

SEQ ID NO: 1356478 - DNA, 15 bp, Homo sapiens
tccagctcctccggg

SEQ ID NO: 1356479 - DNA, 15 bp, Homo sapiens
ctccagctcctccgg

SEQ ID NO: 1356480 - DNA, 15 bp, Homo sapiens
gctccagctcctccg

SEQ ID NO: 1356481 - DNA, 15 bp, Homo sapiens
cgctccagctcctcc

SEQ ID NO: 1356482 - DNA, 15 bp, Homo sapiens
ccgctccagctcctc

SEQ ID NO: 1356483 - DNA, 15 bp, Homo sapiens
tccgctccagctcct

SEQ ID NO: 1356484 - DNA, 15 bp, Homo sapiens
ttccgctccagctcc

SEQ ID NO: 1356485 - DNA, 15 bp, Homo sapiens
cttccgctccagctc

SEQ ID NO: 1356486 - DNA, 15 bp, Homo sapiens
ccttccgctccagct

SEQ ID NO: 1356487 - DNA, 15 bp, Homo sapiens
accttccgctccagc

SEQ ID NO: 1356488 - DNA, 15 bp, Homo sapiens
caccttccgctccag

SEQ ID NO: 1356489 - DNA, 15 bp, Homo sapiens
acaccttccgctcca

SEQ ID NO: 1356490 - DNA, 15 bp, Homo sapiens
cacaccttccgctcc

SEQ ID NO: 1356491 - DNA, 15 bp, Homo sapiens
ccacaccttccgctc

SEQ ID NO: 1356492 - DNA, 15 bp, Homo sapiens
cccacaccttccgct

SEQ ID NO: 1356493 - DNA, 15 bp, Homo sapiens
tcccacaccttccgc

SEQ ID NO: 1356494 - DNA, 15 bp, Homo sapiens
ttcccacaccttccg

SEQ ID NO: 1356495 - DNA, 15 bp, Homo sapiens
gttcccacaccttcc

SEQ ID NO: 1356496 - DNA, 15 bp, Homo sapiens
agttcccacaccttc

SEQ ID NO: 1356497 - DNA, 15 bp, Homo sapiens
cagttcccacacctt

SEQ ID NO: 1356498 - DNA, 15 bp, Homo sapiens
ccagttcccacacct

SEQ ID NO: 1356499 - DNA, 15 bp, Homo sapiens
gccagttcccacacc

SEQ ID NO: 1356500 - DNA, 15 bp, Homo sapiens
cgccagttcccacac

SEQ ID NO: 1356501 - DNA, 15 bp, Homo sapiens
tcgccagttcccaca

SEQ ID NO: 1356502 - DNA, 15 bp, Homo sapiens
ctcgccagttcccac

SEQ ID NO: 1356503 - DNA, 15 bp, Homo sapiens
cctcgccagttccca

SEQ ID NO: 1356504 - DNA, 15 bp, Homo sapiens
gcctcgccagttccc

SEQ ID NO: 1356505 - DNA, 15 bp, Homo sapiens
agcctcgccagttcc

SEQ ID NO: 1356506 - DNA, 15 bp, Homo sapiens
cagcctcgccagttc

SEQ ID NO: 1356507 - DNA, 15 bp, Homo sapiens
ccagcctcgccagtt

SEQ ID NO: 1356508 - DNA, 15 bp, Homo sapiens
accagcctcgccagt

SEQ ID NO: 1356509 - DNA, 15 bp, Homo sapiens
gaccagcctcgccag

SEQ ID NO: 1356510 - DNA, 15 bp, Homo sapiens
agaccagcctcgcca

SEQ ID NO: 1356511 - DNA, 15 bp, Homo sapiens
cagaccagcctcgcc

SEQ ID NO: 1356512 - DNA, 15 bp, Homo sapiens
ccagaccagcctcgc

SEQ ID NO: 1356513 - DNA, 15 bp, Homo sapiens
gccagaccagcctcg

SEQ ID NO: 1356514 - DNA, 15 bp, Homo sapiens
tgccagaccagcctc

SEQ ID NO: 1356515 - DNA, 15 bp, Homo sapiens
ctgccagaccagcct

SEQ ID NO: 1356516 - DNA, 15 bp, Homo sapiens
actgccagaccagcc

SEQ ID NO: 1356517 - DNA, 15 bp, Homo sapiens
gactgccagaccagc

SEQ ID NO: 1356518 - DNA, 15 bp, Homo sapiens
agactgccagaccag

SEQ ID NO: 1356519 - DNA, 15 bp, Homo sapiens
aagactgccagacca

SEQ ID NO: 1356520 - DNA, 15 bp, Homo sapiens
gaagactgccagacc

SEQ ID NO: 1356521 - DNA, 15 bp, Homo sapiens
ggaagactgccagac

SEQ ID NO: 1356522 - DNA, 15 bp, Homo sapiens
tggaagactgccaga

SEQ ID NO: 1356523 - DNA, 15 bp, Homo sapiens
ctggaagactgccag

SEQ ID NO: 1356524 - DNA, 15 bp, Homo sapiens
actggaagactgcca

SEQ ID NO: 1356525 - DNA, 15 bp, Homo sapiens
cactggaagactgcc

SEQ ID NO: 1356526 - DNA, 15 bp, Homo sapiens
acactggaagactgc

SEQ ID NO: 1356527 - DNA, 15 bp, Homo sapiens
cacactggaagactg

SEQ ID NO: 1356528 - DNA, 15 bp, Homo sapiens
ccacactggaagact

SEQ ID NO: 1356529 - DNA, 15 bp, Homo sapiens
accacactggaagac

SEQ ID NO: 1356530 - DNA, 15 bp, Homo sapiens
caccacactggaaga

SEQ ID NO: 1356531 - DNA, 15 bp, Homo sapiens
acaccacactggaag

SEQ ID NO: 1356532 - DNA, 15 bp, Homo sapiens
aacaccacactggaa

SEQ ID NO: 1356533 - DNA, 15 bp, Homo sapiens
gaacaccacactgga

SEQ ID NO: 1356534 - DNA, 15 bp, Homo sapiens
ggaacaccacactgg

SEQ ID NO: 1356535 - DNA, 15 bp, Homo sapiens
tggaacaccacactg

SEQ ID NO: 1356536 - DNA, 15 bp, Homo sapiens
gtggaacaccacact

SEQ ID NO: 1356537 - DNA, 15 bp, Homo sapiens
tgtggaacaccacac

SEQ ID NO: 1356538 - DNA, 15 bp, Homo sapiens
gtgtggaacaccaca

SEQ ID NO: 1356539 - DNA, 15 bp, Homo sapiens
cgtgtggaacaccac

SEQ ID NO: 1356540 - DNA, 15 bp, Homo sapiens
ccgtgtggaacacca

SEQ ID NO: 1356541 - DNA, 15 bp, Homo sapiens
cccgtgtggaacacc

SEQ ID NO: 1356542 - DNA, 15 bp, Homo sapiens
acccgtgtggaacac

SEQ ID NO: 1356543 - DNA, 15 bp, Homo sapiens
cacccgtgtggaaca

SEQ ID NO: 1356544 - DNA, 15 bp, Homo sapiens
gcacccgtgtggaac

SEQ ID NO: 1356545 - DNA, 15 bp, Homo sapiens
ggcacccgtgtggaa

SEQ ID NO: 1356546 - DNA, 15 bp, Homo sapiens
cggcacccgtgtgga

SEQ ID NO: 1356547 - DNA, 15 bp, Homo sapiens
ccggcacccgtgtgg

SEQ ID NO: 1356548 - DNA, 15 bp, Homo sapiens
gccggcacccgtgtg

SEQ ID NO: 1356549 - DNA, 15 bp, Homo sapiens
tgccggcacccgtgt

SEQ ID NO: 1356550 - DNA, 15 bp, Homo sapiens
atgccggcacccgtg

SEQ ID NO: 1356551 - DNA, 15 bp, Homo sapiens
gatgccggcacccgt

SEQ ID NO: 1356552 - DNA, 15 bp, Homo sapiens
tgatgccggcacccg

SEQ ID NO: 1356553 - DNA, 15 bp, Homo sapiens
ctgatgccggcaccc

SEQ ID NO: 1356554 - DNA, 15 bp, Homo sapiens
gctgatgccggcacc

SEQ ID NO: 1356555 - DNA, 15 bp, Homo sapiens
tgctgatgccggcac

SEQ ID NO: 1356556 - DNA, 15 bp, Homo sapiens
gtgctgatgccggca

SEQ ID NO: 1356557 - DNA, 15 bp, Homo sapiens
agtgctgatgccggc

SEQ ID NO: 1356558 - DNA, 15 bp, Homo sapiens
cagtgctgatgccgg

SEQ ID NO: 1356559 - DNA, 15 bp, Homo sapiens
gcagtgctgatgccg

SEQ ID NO: 1356560 - DNA, 15 bp, Homo sapiens
ggcagtgctgatgcc

SEQ ID NO: 1356561 - DNA, 15 bp, Homo sapiens
aggcagtgctgatgc

SEQ ID NO: 1356562 - DNA, 15 bp, Homo sapiens
cagaggcagtgctga

SEQ ID NO: 1356563 - DNA, 15 bp, Homo sapiens
ccagaggcagtgctg

SEQ ID NO: 1356564 - DNA, 15 bp, Homo sapiens
gccagaggcagtgct

SEQ ID NO: 1356565 - DNA, 15 bp, Homo sapiens
tgccagaggcagtgc

SEQ ID NO: 1356566 - DNA, 15 bp, Homo sapiens
atgccagaggcagtg

SEQ ID NO: 1356567 - DNA, 15 bp, Homo sapiens
gatgccagaggcagt

SEQ ID NO: 1356568 - DNA, 15 bp, Homo sapiens
ggatgccagaggcag

SEQ ID NO: 1356569 - DNA, 15 bp, Homo sapiens
gggatgccagaggca

SEQ ID NO: 1356570 - DNA, 15 bp, Homo sapiens
ggggatgccagaggc

SEQ ID NO: 1356571 - DNA, 15 bp, Homo sapiens
cggggatgccagagg

SEQ ID NO: 1356572 - DNA, 15 bp, Homo sapiens
tcggggatgccagag

SEQ ID NO: 1356573 - DNA, 15 bp, Homo sapiens
gtcggggatgccaga

SEQ ID NO: 1356574 - DNA, 15 bp, Homo sapiens
agtcggggatgccag

SEQ ID NO: 1356575 - DNA, 15 bp, Homo sapiens
aagtcggggatgcca

SEQ ID NO: 1356576 - DNA, 15 bp, Homo sapiens
gaagtcggggatgcc

SEQ ID NO: 1356577 - DNA, 15 bp, Homo sapiens
tgaagtcggggatgc

SEQ ID NO: 1356578 - DNA, 15 bp, Homo sapiens
ctgaagtcggggatg

SEQ ID NO: 1356579 - DNA, 15 bp, Homo sapiens
cctgaagtcggggat

SEQ ID NO: 1356580 - DNA, 15 bp, Homo sapiens
acctgaagtcgggga

SEQ ID NO: 1356581 - DNA, 15 bp, Homo sapiens
gacctgaagtcgggg

SEQ ID NO: 1356582 - DNA, 15 bp, Homo sapiens
agacctgaagtcggg

SEQ ID NO: 1356583 - DNA, 15 bp, Homo sapiens
cagacctgaagtcgg

SEQ ID NO: 1356584 - DNA, 15 bp, Homo sapiens
acagacctgaagtcg

SEQ ID NO: 1356585 - DNA, 15 bp, Homo sapiens
cacagacctgaagtc

SEQ ID NO: 1356586 - DNA, 15 bp, Homo sapiens
tcacagacctgaagt

SEQ ID NO: 1356587 - DNA, 15 bp, Homo sapiens
atcacagacctgaag

SEQ ID NO: 1356588 - DNA, 15 bp, Homo sapiens
aatcacagacctgaa

SEQ ID NO: 1356589 - DNA, 15 bp, Homo sapiens
caatcacagacctga

SEQ ID NO: 1356590 - DNA, 15 bp, Homo sapiens
acaatcacagacctg

SEQ ID NO: 1356591 - DNA, 15 bp, Homo sapiens
cacaatcacagacct

SEQ ID NO: 1356592 - DNA, 15 bp, Homo sapiens
gcacaatcacagacc

SEQ ID NO: 1356593 - DNA, 15 bp, Homo sapiens
tgcacaatcacagac

SEQ ID NO: 1356594 - DNA, 15 bp, Homo sapiens
ctgcacaatcacaga

SEQ ID NO: 1356595 - DNA, 15 bp, Homo sapiens
cctgcacaatcacag

SEQ ID NO: 1356596 - DNA, 15 bp, Homo sapiens
ccctgcacaatcaca

SEQ ID NO: 1356597 - DNA, 15 bp, Homo sapiens
cccctgcacaatcac

SEQ ID NO: 1356598 - DNA, 15 bp, Homo sapiens
tcccctgcacaatca

SEQ ID NO: 1356599 - DNA, 15 bp, Homo sapiens
ttcccctgcacaatc

SEQ ID NO: 1356600 - DNA, 15 bp, Homo sapiens
cttcccctgcacaat

SEQ ID NO: 1356601 - DNA, 15 bp, Homo sapiens
acttcccctgcacaa

SEQ ID NO: 1356602 - DNA, 15 bp, Homo sapiens
gacttcccctgcaca

SEQ ID NO: 1356603 - DNA, 15 bp, Homo sapiens
cgacttcccctgcac

SEQ ID NO: 1356604 - DNA, 15 bp, Homo sapiens
tcgacttcccctgca

SEQ ID NO: 1356605 - DNA, 15 bp, Homo sapiens
ctcgacttcccctgc

SEQ ID NO: 1356606 - DNA, 15 bp, Homo sapiens
cctcgacttcccctg

SEQ ID NO: 1356607 - DNA, 15 bp, Homo sapiens
gcctcgacttcccct

SEQ ID NO: 1356608 - DNA, 15 bp, Homo sapiens
tgcctcgacttcccc

SEQ ID NO: 1356609 - DNA, 15 bp, Homo sapiens
ttgcctcgacttccc

SEQ ID NO: 1356610 - DNA, 15 bp, Homo sapiens
cttgcctcgacttcc

SEQ ID NO: 1356611 - DNA, 15 bp, Homo sapiens
ccttgcctcgacttc

SEQ ID NO: 1356612 - DNA, 15 bp, Homo sapiens
gccttgcctcgactt

SEQ ID NO: 1356613 - DNA, 15 bp, Homo sapiens
ggccttgcctcgact

SEQ ID NO: 1356614 - DNA, 15 bp, Homo sapiens
aggccttgcctcgac

SEQ ID NO: 1356615 - DNA, 15 bp, Homo sapiens
taggccttgcctcga

SEQ ID NO: 1356616 - DNA, 15 bp, Homo sapiens
gtaggccttgcctcg

SEQ ID NO: 1356617 - DNA, 15 bp, Homo sapiens
ggtaggccttgcctc

SEQ ID NO: 1356618 - DNA, 15 bp, Homo sapiens
tggtaggccttgcct

SEQ ID NO: 1356619 - DNA, 15 bp, Homo sapiens
ctggtaggccttgcc

SEQ ID NO: 1356620 - DNA, 15 bp, Homo sapiens
cctggtaggccttgc

SEQ ID NO: 1356621 - DNA, 15 bp, Homo sapiens
gcctggtaggccttg

SEQ ID NO: 1356622 - DNA, 15 bp, Homo sapiens
agcctggtaggcctt

SEQ ID NO: 1356623 - DNA, 15 bp, Homo sapiens
cagcctggtaggcct

SEQ ID NO: 1356624 - DNA, 15 bp, Homo sapiens
gcagcctggtaggcc

SEQ ID NO: 1356625 - DNA, 15 bp, Homo sapiens
ggcagcctggtaggc

SEQ ID NO: 1356626 - DNA, 15 bp, Homo sapiens
tggcagcctggtagg

SEQ ID NO: 1356627 - DNA, 15 bp, Homo sapiens
ctggcagcctggtag

SEQ ID NO: 1356628 - DNA, 15 bp, Homo sapiens
tctggcagcctggta

SEQ ID NO: 1356629 - DNA, 15 bp, Homo sapiens
ctctggcagcctggt

SEQ ID NO: 1356630 - DNA, 15 bp, Homo sapiens
cctctggcagcctgg

SEQ ID NO: 1356631 - DNA, 15 bp, Homo sapiens
gcctctggcagcctg

SEQ ID NO: 1356632 - DNA, 15 bp, Homo sapiens
agcctctggcagcct

SEQ ID NO: 1356633 - DNA, 15 bp, Homo sapiens
aagcctctggcagcc

SEQ ID NO: 1356634 - DNA, 15 bp, Homo sapiens
gaagcctctggcagc

SEQ ID NO: 1356635 - DNA, 15 bp, Homo sapiens
ggaagcctctggcag

SEQ ID NO: 1356636 - DNA, 15 bp, Homo sapiens
gggaagcctctggca

SEQ ID NO: 1356637 - DNA, 15 bp, Homo sapiens
agggaagcctctggc

SEQ ID NO: 1356638 - DNA, 15 bp, Homo sapiens
cagggaagcctctgg

SEQ ID NO: 1356639 - DNA, 15 bp, Homo sapiens
gcagggaagcctctg

SEQ ID NO: 1356640 - DNA, 15 bp, Homo sapiens
cgcagggaagcctct

SEQ ID NO: 1356641 - DNA, 15 bp, Homo sapiens
tcgcagggaagcctc

SEQ ID NO: 1356642 - DNA, 15 bp, Homo sapiens
ctcgcagggaagcct

SEQ ID NO: 1356643 - DNA, 15 bp, Homo sapiens
gctcgcagggaagcc

SEQ ID NO: 1356644 - DNA, 15 bp, Homo sapiens
ggctcgcagggaagc

SEQ ID NO: 1356645 - DNA, 15 bp, Homo sapiens
tggctcgcagggaag

SEQ ID NO: 1356646 - DNA, 15 bp, Homo sapiens
gtggctcgcagggaa

SEQ ID NO: 1356647 - DNA, 15 bp, Homo sapiens
tgtggctcgcaggga

SEQ ID NO: 1356648 - DNA, 15 bp, Homo sapiens
gtgtggctcgcaggg

SEQ ID NO: 1356649 - DNA, 15 bp, Homo sapiens
tgtgtggctcgcagg

SEQ ID NO: 1356650 - DNA, 15 bp, Homo sapiens
gtgtgtggctcgcag

SEQ ID NO: 1356651 - DNA, 15 bp, Homo sapiens
tgtgtgtggctcgca

SEQ ID NO: 1356652 - DNA, 15 bp, Homo sapiens
atgtgtgtggctcgc

SEQ ID NO: 1356653 - DNA, 15 bp, Homo sapiens
gatgtgtgtggctcg

SEQ ID NO: 1356654 - DNA, 15 bp, Homo sapiens
agatgtgtgtggctc

SEQ ID NO: 1356655 - DNA, 15 bp, Homo sapiens
cagatgtgtgtggct

SEQ ID NO: 1356656 - DNA, 15 bp, Homo sapiens
ccagatgtgtgtggc

SEQ ID NO: 1356657 - DNA, 15 bp, Homo sapiens
cccagatgtgtgtgg

SEQ ID NO: 1356658 - DNA, 15 bp, Homo sapiens
tcccagatgtgtgtg

SEQ ID NO: 1356659 - DNA, 15 bp, Homo sapiens
ttcccagatgtgtgt

SEQ ID NO: 1356660 - DNA, 15 bp, Homo sapiens
attcccagatgtgtg

SEQ ID NO: 1356661 - DNA, 15 bp, Homo sapiens
cattcccagatgtgt

SEQ ID NO: 1356662 - DNA, 15 bp, Homo sapiens
tcattcccagatgtg

SEQ ID NO: 1356663 - DNA, 15 bp, Homo sapiens
ctcattcccagatgt

SEQ ID NO: 1356664 - DNA, 15 bp, Homo sapiens
tctcattcccagatg

SEQ ID NO: 1356665 - DNA, 15 bp, Homo sapiens
ttctcattcccagat

SEQ ID NO: 1356666 - DNA, 15 bp, Homo sapiens
gttctcattcccaga

SEQ ID NO: 1356667 - DNA, 15 bp, Homo sapiens
tgttctcattcccag

SEQ ID NO: 1356668 - DNA, 15 bp, Homo sapiens
gtgttctcattccca

SEQ ID NO: 1356669 - DNA, 15 bp, Homo sapiens
tgtgttctcattccc

SEQ ID NO: 1356670 - DNA, 15 bp, Homo sapiens
atgtgttctcattcc

SEQ ID NO: 1356671 - DNA, 15 bp, Homo sapiens
gatgtgttctcattc

SEQ ID NO: 1356672 - DNA, 15 bp, Homo sapiens
ggatgtgttctcatt

SEQ ID NO: 1356673 - DNA, 15 bp, Homo sapiens
tggatgtgttctcat

SEQ ID NO: 1356674 - DNA, 15 bp, Homo sapiens
atggatgtgttctca

SEQ ID NO: 1356675 - DNA, 15 bp, Homo sapiens
gatggatgtgttctc

SEQ ID NO: 1356676 - DNA, 15 bp, Homo sapiens
agatggatgtgttct

SEQ ID NO: 1356677 - DNA, 15 bp, Homo sapiens
cagatggatgtgttc

SEQ ID NO: 1356678 - DNA, 15 bp, Homo sapiens
gcagatggatgtgtt

SEQ ID NO: 1356679 - DNA, 15 bp, Homo sapiens
agcagatggatgtgt

SEQ ID NO: 1356680 - DNA, 15 bp, Homo sapiens
aagcagatggatgtg

SEQ ID NO: 1356681 - DNA, 15 bp, Homo sapiens
aaagcagatggatgt

SEQ ID NO: 1356682 - DNA, 15 bp, Homo sapiens
gaaagcagatggatg

SEQ ID NO: 1356683 - DNA, 15 bp, Homo sapiens
ggaaagcagatggat

SEQ ID NO: 1356684 - DNA, 15 bp, Homo sapiens
aggaaagcagatgga

SEQ ID NO: 1356685 - DNA, 15 bp, Homo sapiens
gaggaaagcagatgg

SEQ ID NO: 1356686 - DNA, 15 bp, Homo sapiens
ggaggaaagcagatg

SEQ ID NO: 1356687 - DNA, 15 bp, Homo sapiens
aggaggaaagcagat

SEQ ID NO: 1356688 - DNA, 15 bp, Homo sapiens
caggaggaaagcaga

SEQ ID NO: 1356689 - DNA, 15 bp, Homo sapiens
ccaggaggaaagcag

SEQ ID NO: 1356690 - DNA, 15 bp, Homo sapiens
tccaggaggaaagca

SEQ ID NO: 1356691 - DNA, 15 bp, Homo sapiens
atccaggaggaaagc

SEQ ID NO: 1356692 - DNA, 15 bp, Homo sapiens
catccaggaggaaag

SEQ ID NO: 1356693 - DNA, 15 bp, Homo sapiens
acatccaggaggaaa

SEQ ID NO: 1356694 - DNA, 15 bp, Homo sapiens
cacatccaggaggaa

SEQ ID NO: 1356695 - DNA, 15 bp, Homo sapiens
acacatccaggagga

SEQ ID NO: 1356696 - DNA, 15 bp, Homo sapiens
gacacatccaggagg

SEQ ID NO: 1356697 - DNA, 15 bp, Homo sapiens
ggacacatccaggag

SEQ ID NO: 1356698 - DNA, 15 bp, Homo sapiens
aggacacatccagga

SEQ ID NO: 1356699 - DNA, 15 bp, Homo sapiens
caggacacatccagg

SEQ ID NO: 1356700 - DNA, 15 bp, Homo sapiens
ccaggacacatccag

SEQ ID NO: 1356701 - DNA, 15 bp, Homo sapiens
cccaggacacatcca

SEQ ID NO: 1356702 - DNA, 15 bp, Homo sapiens
acccaggacacatcc

SEQ ID NO: 1356703 - DNA, 15 bp, Homo sapiens
tacccaggacacatc

SEQ ID NO: 1356704 - DNA, 15 bp, Homo sapiens
gtacccaggacacat

SEQ ID NO: 1356705 - DNA, 15 bp, Homo sapiens
agtacccaggacaca

SEQ ID NO: 1356706 - DNA, 15 bp, Homo sapiens
gagtacccaggacac

SEQ ID NO: 1356707 - DNA, 15 bp, Homo sapiens
ggagtacccaggaca

SEQ ID NO: 1356708 - DNA, 15 bp, Homo sapiens
gggagtacccaggac

SEQ ID NO: 1356709 - DNA, 15 bp, Homo sapiens
agggagtacccagga

SEQ ID NO: 1356710 - DNA, 15 bp, Homo sapiens
aagggagtacccagg

SEQ ID NO: 1356711 - DNA, 15 bp, Homo sapiens
aaagggagtacccag

SEQ ID NO: 1356712 - DNA, 15 bp, Homo sapiens
taaagggagtaccca

SEQ ID NO: 1356713 - DNA, 15 bp, Homo sapiens
ttaaagggagtaccc

SEQ ID NO: 1356714 - DNA, 15 bp, Homo sapiens
cttaaagggagtacc

SEQ ID NO: 1356715 - DNA, 15 bp, Homo sapiens
tcttaaagggagtac

SEQ ID NO: 1356716 - DNA, 15 bp, Homo sapiens
atcttaaagggagta

SEQ ID NO: 1356717 - DNA, 15 bp, Homo sapiens
catcttaaagggagt

SEQ ID NO: 1356718 - DNA, 15 bp, Homo sapiens
acatcttaaagggag

SEQ ID NO: 1356719 - DNA, 15 bp, Homo sapiens
cacatcttaaaggga

SEQ ID NO: 1356720 - DNA, 15 bp, Homo sapiens
acacatcttaaaggg

SEQ ID NO: 1356721 - DNA, 15 bp, Homo sapiens
gacacatcttaaagg

SEQ ID NO: 1356722 - DNA, 15 bp, Homo sapiens
ggacacatcttaaag

SEQ ID NO: 1356723 - DNA, 15 bp, Homo sapiens
gggacacatcttaaa

SEQ ID NO: 1356724 - DNA, 15 bp, Homo sapiens
agggacacatcttaa

SEQ ID NO: 1356725 - DNA, 15 bp, Homo sapiens
aagggacacatctta

SEQ ID NO: 1356726 - DNA, 15 bp, Homo sapiens
caagggacacatctt

SEQ ID NO: 1356727 - DNA, 15 bp, Homo sapiens
ccaagggacacatct

SEQ ID NO: 1356728 - DNA, 15 bp, Homo sapiens
gccaagggacacatc

SEQ ID NO: 1356729 - DNA, 15 bp, Homo sapiens
agccaagggacacat

SEQ ID NO: 1356730 - DNA, 15 bp, Homo sapiens
cagccaagggacaca

SEQ ID NO: 1356731 - DNA, 15 bp, Homo sapiens
ccagccaagggacac

SEQ ID NO: 1356732 - DNA, 15 bp, Homo sapiens
cccagccaagggaca

SEQ ID NO: 1356733 - DNA, 15 bp, Homo sapiens
gcccagccaagggac

SEQ ID NO: 1356734 - DNA, 15 bp, Homo sapiens
tgcccagccaaggga

SEQ ID NO: 1356735 - DNA, 15 bp, Homo sapiens
atgcccagccaaggg

SEQ ID NO: 1356736 - DNA, 15 bp, Homo sapiens
catgcccagccaagg

SEQ ID NO: 1356737 - DNA, 15 bp, Homo sapiens
ccatgcccagccaag

SEQ ID NO: 1356738 - DNA, 15 bp, Homo sapiens
accatgcccagccaa

SEQ ID NO: 1356739 - DNA, 15 bp, Homo sapiens
caccatgcccagcca

SEQ ID NO: 1356740 - DNA, 15 bp, Homo sapiens
tccaccatgcccagc

SEQ ID NO: 1356741 - DNA, 15 bp, Homo sapiens
atccaccatgcccag

SEQ ID NO: 1356742 - DNA, 15 bp, Homo sapiens
gatccaccatgccca

SEQ ID NO: 1356743 - DNA, 15 bp, Homo sapiens
tgatccaccatgccc

SEQ ID NO: 1356744 - DNA, 15 bp, Homo sapiens
gtgatccaccatgcc

SEQ ID NO: 1356745 - DNA, 15 bp, Homo sapiens
tgtgatccaccatgc

SEQ ID NO: 1356746 - DNA, 15 bp, Homo sapiens
ttgtgatccaccatg

SEQ ID NO: 1356747 - DNA, 15 bp, Homo sapiens
cttgtgatccaccat

SEQ ID NO: 1356748 - DNA, 15 bp, Homo sapiens
ccttgtgatccacca

SEQ ID NO: 1356749 - DNA, 15 bp, Homo sapiens
ttgaccttgtgatcc

SEQ ID NO: 1356750 - DNA, 15 bp, Homo sapiens
cttgaccttgtgatc

SEQ ID NO: 1356751 - DNA, 15 bp, Homo sapiens
tcttgaccttgtgat

SEQ ID NO: 1356752 - DNA, 15 bp, Homo sapiens
ttcttgaccttgtga

SEQ ID NO: 1356753 - DNA, 15 bp, Homo sapiens
attcttgaccttgtg

SEQ ID NO: 1356754 - DNA, 15 bp, Homo sapiens
aattcttgaccttgt

SEQ ID NO: 1356755 - DNA, 15 bp, Homo sapiens
gaattcttgaccttg

SEQ ID NO: 1356756 - DNA, 15 bp, Homo sapiens
ggaattcttgacctt

SEQ ID NO: 1356757 - DNA, 15 bp, Homo sapiens
tggaattcttgacct

SEQ ID NO: 1356758 - DNA, 15 bp, Homo sapiens
ctggaattcttgacc

SEQ ID NO: 1356759 - DNA, 15 bp, Homo sapiens
tctggaattcttgac

SEQ ID NO: 1356760 - DNA, 15 bp, Homo sapiens
gtctggaattcttga

SEQ ID NO: 1356761 - DNA, 15 bp, Homo sapiens
ggtctggaattcttg

SEQ ID NO: 1356762 - DNA, 15 bp, Homo sapiens
tggtctggaattctt

SEQ ID NO: 1356763 - DNA, 15 bp, Homo sapiens
ctggtctggaattct

SEQ ID NO: 1356764 - DNA, 15 bp, Homo sapiens
gctggtctggaattc

SEQ ID NO: 1356765 - DNA, 15 bp, Homo sapiens
ggctggtctggaatt

SEQ ID NO: 1356766 - DNA, 15 bp, Homo sapiens
aggctggtctggaat

SEQ ID NO: 1356767 - DNA, 15 bp, Homo sapiens
ccaggctggtctgga

SEQ ID NO: 1356768 - DNA, 15 bp, Homo sapiens
gccaggctggtctgg

SEQ ID NO: 1356769 - DNA, 15 bp, Homo sapiens
ggccaggctggtctg

SEQ ID NO: 1356770 - DNA, 15 bp, Homo sapiens
attcaccatattggc

SEQ ID NO: 1356771 - DNA, 15 bp, Homo sapiens
gattcaccatattgg

SEQ ID NO: 1356772 - DNA, 15 bp, Homo sapiens
ggattcaccatattg

SEQ ID NO: 1356773 - DNA, 15 bp, Homo sapiens
gggattcaccatatt

SEQ ID NO: 1356774 - DNA, 15 bp, Homo sapiens
agggattcaccatat

SEQ ID NO: 1356775 - DNA, 15 bp, Homo sapiens
cagggattcaccata

SEQ ID NO: 1356776 - DNA, 15 bp, Homo sapiens
acagggattcaccat

SEQ ID NO: 1356777 - DNA, 15 bp, Homo sapiens
gacagggattcacca

SEQ ID NO: 1356778 - DNA, 15 bp, Homo sapiens
agacagggattcacc

SEQ ID NO: 1356779 - DNA, 15 bp, Homo sapiens
gagacagggattcac

SEQ ID NO: 1356780 - DNA, 15 bp, Homo sapiens
agagacagggattca

SEQ ID NO: 1356781 - DNA, 15 bp, Homo sapiens
tagagacagggattc

SEQ ID NO: 1356782 - DNA, 15 bp, Homo sapiens
gtagagacagggatt

SEQ ID NO: 1356783 - DNA, 15 bp, Homo sapiens
agtagagacagggat

SEQ ID NO: 1356784 - DNA, 15 bp, Homo sapiens
tagtagagacaggga

SEQ ID NO: 1356785 - DNA, 15 bp, Homo sapiens
gccaccacaactggc

SEQ ID NO: 1356786 - DNA, 15 bp, Homo sapiens
tgccaccacaactgg

SEQ ID NO: 1356787 - DNA, 15 bp, Homo sapiens
gtgccaccacaactg

SEQ ID NO: 1356788 - DNA, 15 bp, Homo sapiens
tgtgccaccacaact

SEQ ID NO: 1356789 - DNA, 15 bp, Homo sapiens
gtgtgccaccacaac

SEQ ID NO: 1356790 - DNA, 15 bp, Homo sapiens
tgtgtgccaccacaa

SEQ ID NO: 1356791 - DNA, 15 bp, Homo sapiens
atgtgtgccaccaca

SEQ ID NO: 1356792 - DNA, 15 bp, Homo sapiens
tgcctccacctccca

SEQ ID NO: 1356793 - DNA, 15 bp, Homo sapiens
ctgcctccacctccc

SEQ ID NO: 1356794 - DNA, 15 bp, Homo sapiens
actgcctccacctcc

SEQ ID NO: 1356795 - DNA, 15 bp, Homo sapiens
cactgcctccacctc

SEQ ID NO: 1356796 - DNA, 15 bp, Homo sapiens
tcactgcctccacct

SEQ ID NO: 1356797 - DNA, 15 bp, Homo sapiens
ctcactgcctccacc

SEQ ID NO: 1356798 - DNA, 15 bp, Homo sapiens
gctcactgcctccac

SEQ ID NO: 1356799 - DNA, 15 bp, Homo sapiens
ggctcactgcctcca

SEQ ID NO: 1356800 - DNA, 15 bp, Homo sapiens
cggctcactgcctcc

SEQ ID NO: 1356801 - DNA, 15 bp, Homo sapiens
tcggctcactgcctc

SEQ ID NO: 1356802 - DNA, 15 bp, Homo sapiens
ctcggctcactgcct

SEQ ID NO: 1356803 - DNA, 15 bp, Homo sapiens
tctcggctcactgcc

SEQ ID NO: 1356804 - DNA, 15 bp, Homo sapiens
cctcactctgtcgcc

SEQ ID NO: 1356805 - DNA, 15 bp, Homo sapiens
gcctcactctgtcgc

SEQ ID NO: 1356806 - DNA, 15 bp, Homo sapiens
agcctcactctgtcg

SEQ ID NO: 1356807 - DNA, 15 bp, Homo sapiens
gagcctcactctgtc

SEQ ID NO: 1356808 - DNA, 15 bp, Homo sapiens
ggagcctcactctgt

SEQ ID NO: 1356809 - DNA, 15 bp, Homo sapiens
cggagcctcactctg

SEQ ID NO: 1356810 - DNA, 15 bp, Homo sapiens
acggagcctcactct

SEQ ID NO: 1356811 - DNA, 15 bp, Homo sapiens
gacggagcctcactc

SEQ ID NO: 1356812 - DNA, 15 bp, Homo sapiens
agacggagcctcact

SEQ ID NO: 1356813 - DNA, 15 bp, Homo sapiens
tagacggagcctcac

SEQ ID NO: 1356814 - DNA, 15 bp, Homo sapiens
ttagacggagcctca

SEQ ID NO: 1356815 - DNA, 15 bp, Homo sapiens
tttagacggagcctc

SEQ ID NO: 1356816 - DNA, 15 bp, Homo sapiens
ttttagacggagcct

SEQ ID NO: 1356817 - DNA, 15 bp, Homo sapiens
tttttagacggagcc

SEQ ID NO: 1356818 - DNA, 15 bp, Homo sapiens
gtttttagacggagc

SEQ ID NO: 1356819 - DNA, 15 bp, Homo sapiens
tgtttttagacggag

SEQ ID NO: 1356820 - DNA, 15 bp, Homo sapiens
ttgtttttagacgga

SEQ ID NO: 1356821 - DNA, 15 bp, Homo sapiens
tttgtttttagacgg

SEQ ID NO: 1356822 - DNA, 15 bp, Homo sapiens
ttttgtttttagacg

SEQ ID NO: 1356823 - DNA, 15 bp, Homo sapiens
gttttgtttttagac

SEQ ID NO: 1356824 - DNA, 15 bp, Homo sapiens
tgttttgtttttaga

SEQ ID NO: 1356825 - DNA, 15 bp, Homo sapiens
ttgttttgtttttag

SEQ ID NO: 1356826 - DNA, 15 bp, Homo sapiens
tttgttttgttttta

SEQ ID NO: 1356827 - DNA, 15 bp, Homo sapiens
ctttttgttttgttt

SEQ ID NO: 1356828 - DNA, 15 bp, Homo sapiens
tctttttgttttgtt

SEQ ID NO: 1356829 - DNA, 15 bp, Homo sapiens
atctttttgttttgt

SEQ ID NO: 1356830 - DNA, 15 bp, Homo sapiens
catctttttgttttg

SEQ ID NO: 1356831 - DNA, 15 bp, Homo sapiens
acatctttttgtttt

SEQ ID NO: 1356832 - DNA, 15 bp, Homo sapiens
cacatctttttgttt

SEQ ID NO: 1356833 - DNA, 15 bp, Homo sapiens
acacatctttttgtt

SEQ ID NO: 1356834 - DNA, 15 bp, Homo sapiens
gacacatctttttgt

SEQ ID NO: 1356835 - DNA, 15 bp, Homo sapiens
ggacacatctttttg

SEQ ID NO: 1356836 - DNA, 15 bp, Homo sapiens
gggacacatcttttt

SEQ ID NO: 1356837 - DNA, 15 bp, Homo sapiens
agggacacatctttt

SEQ ID NO: 1356838 - DNA, 15 bp, Homo sapiens
aagggacacatcttt

SEQ ID NO: 1356839 - DNA, 15 bp, Homo sapiens
acaagggacacatct

SEQ ID NO: 1356840 - DNA, 15 bp, Homo sapiens
gacaagggacacatc

SEQ ID NO: 1356841 - DNA, 15 bp, Homo sapiens
tgacaagggacacat

SEQ ID NO: 1356842 - DNA, 15 bp, Homo sapiens
gtgacaagggacaca

SEQ ID NO: 1356843 - DNA, 15 bp, Homo sapiens
tgtgacaagggacac

SEQ ID NO: 1356844 - DNA, 15 bp, Homo sapiens
ttgtgacaagggaca

SEQ ID NO: 1356845 - DNA, 15 bp, Homo sapiens
gttgtgacaagggac

SEQ ID NO: 1356846 - DNA, 15 bp, Homo sapiens
ggttgtgacaaggga

SEQ ID NO: 1356847 - DNA, 15 bp, Homo sapiens
tggttgtgacaaggg

SEQ ID NO: 1356848 - DNA, 15 bp, Homo sapiens
ctggttgtgacaagg

SEQ ID NO: 1356849 - DNA, 15 bp, Homo sapiens
gctggttgtgacaag

SEQ ID NO: 1356850 - DNA, 15 bp, Homo sapiens
tgctggttgtgacaa

SEQ ID NO: 1356851 - DNA, 15 bp, Homo sapiens
atgctggttgtgaca

SEQ ID NO: 1356852 - DNA, 15 bp, Homo sapiens
aatgctggttgtgac

SEQ ID NO: 1356853 - DNA, 15 bp, Homo sapiens
gaatgctggttgtga

SEQ ID NO: 1356854 - DNA, 15 bp, Homo sapiens
ggaatgctggttgtg

SEQ ID NO: 1356855 - DNA, 15 bp, Homo sapiens
tggaatgctggttgt

SEQ ID NO: 1356856 - DNA, 15 bp, Homo sapiens
gtggaatgctggttg

SEQ ID NO: 1356857 - DNA, 15 bp, Homo sapiens
agtggaatgctggtt

SEQ ID NO: 1356858 - DNA, 15 bp, Homo sapiens
gagtggaatgctggt

SEQ ID NO: 1356859 - DNA, 15 bp, Homo sapiens
tgagtggaatgctgg

SEQ ID NO: 1356860 - DNA, 15 bp, Homo sapiens
gtgagtggaatgctg

SEQ ID NO: 1356861 - DNA, 15 bp, Homo sapiens
ggtgagtggaatgct

SEQ ID NO: 1356862 - DNA, 15 bp, Homo sapiens
aggtgagtggaatgc

SEQ ID NO: 1356863 - DNA, 15 bp, Homo sapiens
gaggtgagtggaatg

SEQ ID NO: 1356864 - DNA, 15 bp, Homo sapiens
tgaggtgagtggaat

SEQ ID NO: 1356865 - DNA, 15 bp, Homo sapiens
atgaggtgagtggaa

SEQ ID NO: 1356866 - DNA, 15 bp, Homo sapiens
aatgaggtgagtgga

SEQ ID NO: 1356867 - DNA, 15 bp, Homo sapiens
caatgaggtgagtgg

SEQ ID NO: 1356868 - DNA, 15 bp, Homo sapiens
ccaatgaggtgagtg

SEQ ID NO: 1356869 - DNA, 15 bp, Homo sapiens
gccaatgaggtgagt

SEQ ID NO: 1356870 - DNA, 15 bp, Homo sapiens
ggccaatgaggtgag

SEQ ID NO: 1356871 - DNA, 15 bp, Homo sapiens
tggccaatgaggtga

SEQ ID NO: 1356872 - DNA, 15 bp, Homo sapiens
ctggccaatgaggtg

SEQ ID NO: 1356873 - DNA, 15 bp, Homo sapiens
tctggccaatgaggt

SEQ ID NO: 1356874 - DNA, 15 bp, Homo sapiens
ttctggccaatgagg

SEQ ID NO: 1356875 - DNA, 15 bp, Homo sapiens
gttctggccaatgag

SEQ ID NO: 1356876 - DNA, 15 bp, Homo sapiens
tgttctggccaatga

SEQ ID NO: 1356877 - DNA, 15 bp, Homo sapiens
gtgttctggccaatg

SEQ ID NO: 1356878 - DNA, 15 bp, Homo sapiens
cgtgttctggccaat

SEQ ID NO: 1356879 - DNA, 15 bp, Homo sapiens
ccgtgttctggccaa

SEQ ID NO: 1356880 - DNA, 15 bp, Homo sapiens
accgtgttctggcca

SEQ ID NO: 1356881 - DNA, 15 bp, Homo sapiens
gaccgtgttctggcc

SEQ ID NO: 1356882 - DNA, 15 bp, Homo sapiens
tgaccgtgttctggc

SEQ ID NO: 1356883 - DNA, 15 bp, Homo sapiens
gtgaccgtgttctgg

SEQ ID NO: 1356884 - DNA, 15 bp, Homo sapiens
ggtgaccgtgttctg

SEQ ID NO: 1356885 - DNA, 15 bp, Homo sapiens
aggtgaccgtgttct

SEQ ID NO: 1356886 - DNA, 15 bp, Homo sapiens
caggtgaccgtgttc

SEQ ID NO: 1356887 - DNA, 15 bp, Homo sapiens
tcaggtgaccgtgtt

SEQ ID NO: 1356888 - DNA, 15 bp, Homo sapiens
atcaggtgaccgtgt

SEQ ID NO: 1356889 - DNA, 15 bp, Homo sapiens
gatcaggtgaccgtg

SEQ ID NO: 1356890 - DNA, 15 bp, Homo sapiens
tgatcaggtgaccgt

SEQ ID NO: 1356891 - DNA, 15 bp, Homo sapiens
gtgatcaggtgaccg

SEQ ID NO: 1356892 - DNA, 15 bp, Homo sapiens
tgtgatcaggtgacc

SEQ ID NO: 1356893 - DNA, 15 bp, Homo sapiens
gtgtgatcaggtgac

SEQ ID NO: 1356894 - DNA, 15 bp, Homo sapiens
ggtgtgatcaggtga

SEQ ID NO: 1356895 - DNA, 15 bp, Homo sapiens
aggtgtgatcaggtg

SEQ ID NO: 1356896 - DNA, 15 bp, Homo sapiens
caggtgtgatcaggt

SEQ ID NO: 1356897 - DNA, 15 bp, Homo sapiens
ccaggtgtgatcagg

SEQ ID NO: 1356898 - DNA, 15 bp, Homo sapiens
gccaggtgtgatcag

SEQ ID NO: 1356899 - DNA, 15 bp, Homo sapiens
agccaggtgtgatca

SEQ ID NO: 1356900 - DNA, 15 bp, Homo sapiens
cagccaggtgtgatc

SEQ ID NO: 1356901 - DNA, 15 bp, Homo sapiens
gcagccaggtgtgat

SEQ ID NO: 1356902 - DNA, 15 bp, Homo sapiens
tgcagccaggtgtga

SEQ ID NO: 1356903 - DNA, 15 bp, Homo sapiens
ttgcagccaggtgtg

SEQ ID NO: 1356904 - DNA, 15 bp, Homo sapiens
cttgcagccaggtgt

SEQ ID NO: 1356905 - DNA, 15 bp, Homo sapiens
ccttgcagccaggtg

SEQ ID NO: 1356906 - DNA, 15 bp, Homo sapiens
cccttgcagccaggt

SEQ ID NO: 1356907 - DNA, 15 bp, Homo sapiens
acccttgcagccagg

SEQ ID NO: 1356908 - DNA, 15 bp, Homo sapiens
aacccttgcagccag

SEQ ID NO: 1356909 - DNA, 15 bp, Homo sapiens
caacccttgcagcca

SEQ ID NO: 1356910 - DNA, 15 bp, Homo sapiens
gcaacccttgcagcc

SEQ ID NO: 1356911 - DNA, 15 bp, Homo sapiens
agcaacccttgcagc

SEQ ID NO: 1356912 - DNA, 15 bp, Homo sapiens
cagcaacccttgcag

SEQ ID NO: 1356913 - DNA, 15 bp, Homo sapiens
ccagcaacccttgca

SEQ ID NO: 1356914 - DNA, 15 bp, Homo sapiens
cccagcaacccttgc

SEQ ID NO: 1356915 - DNA, 15 bp, Homo sapiens
tcccagcaacccttg

SEQ ID NO: 1356916 - DNA, 15 bp, Homo sapiens
ttcccagcaaccctt

SEQ ID NO: 1356917 - DNA, 15 bp, Homo sapiens
tttcccagcaaccct

SEQ ID NO: 1356918 - DNA, 15 bp, Homo sapiens
atttcccagcaaccc

SEQ ID NO: 1356919 - DNA, 15 bp, Homo sapiens
catttcccagcaacc

SEQ ID NO: 1356920 - DNA, 15 bp, Homo sapiens
acatttcccagcaac

SEQ ID NO: 1356921 - DNA, 15 bp, Homo sapiens
tacatttcccagcaa

SEQ ID NO: 1356922 - DNA, 15 bp, Homo sapiens
ctacatttcccagca

SEQ ID NO: 1356923 - DNA, 15 bp, Homo sapiens
actacatttcccagc

SEQ ID NO: 1356924 - DNA, 15 bp, Homo sapiens
gactacatttcccag

SEQ ID NO: 1356925 - DNA, 15 bp, Homo sapiens
agactacatttccca

SEQ ID NO: 1356926 - DNA, 15 bp, Homo sapiens
aagactacatttccc

SEQ ID NO: 1356927 - DNA, 15 bp, Homo sapiens
aaagactacatttcc

SEQ ID NO: 1356928 - DNA, 15 bp, Homo sapiens
gaaagactacatttc

SEQ ID NO: 1356929 - DNA, 15 bp, Homo sapiens
tgaaagactacattt

SEQ ID NO: 1356930 - DNA, 15 bp, Homo sapiens
atgaaagactacatt

SEQ ID NO: 1356931 - DNA, 15 bp, Homo sapiens
tatgaaagactacat

SEQ ID NO: 1356932 - DNA, 15 bp, Homo sapiens
atatgaaagactaca

SEQ ID NO: 1356933 - DNA, 15 bp, Homo sapiens
aatatgaaagactac

SEQ ID NO: 1356934 - DNA, 15 bp, Homo sapiens
aaatatgaaagacta

SEQ ID NO: 1356935 - DNA, 15 bp, Homo sapiens
caaatatgaaagact

SEQ ID NO: 1356936 - DNA, 15 bp, Homo sapiens
gcaaatatgaaagac

SEQ ID NO: 1356937 - DNA, 15 bp, Homo sapiens
tgcaaatatgaaaga

SEQ ID NO: 1356938 - DNA, 15 bp, Homo sapiens
ttgcaaatatgaaag

SEQ ID NO: 1356939 - DNA, 15 bp, Homo sapiens
cttgcaaatatgaaa

SEQ ID NO: 1356940 - DNA, 15 bp, Homo sapiens
gcttgcaaatatgaa

SEQ ID NO: 1356941 - DNA, 15 bp, Homo sapiens
cgcttgcaaatatga

SEQ ID NO: 1356942 - DNA, 15 bp, Homo sapiens
acgcttgcaaatatg

SEQ ID NO: 1356943 - DNA, 15 bp, Homo sapiens
tacgcttgcaaatat

SEQ ID NO: 1356944 - DNA, 15 bp, Homo sapiens
ctacgcttgcaaata

SEQ ID NO: 1356945 - DNA, 15 bp, Homo sapiens
gctacgcttgcaaat

SEQ ID NO: 1356946 - DNA, 15 bp, Homo sapiens
ggctacgcttgcaaa

SEQ ID NO: 1356947 - DNA, 15 bp, Homo sapiens
tggctacgcttgcaa

SEQ ID NO: 1356948 - DNA, 15 bp, Homo sapiens
ctggctacgcttgca

SEQ ID NO: 1356949 - DNA, 15 bp, Homo sapiens
cctggctacgcttgc

SEQ ID NO: 1356950 - DNA, 15 bp, Homo sapiens
acctggctacgcttg

SEQ ID NO: 1356951 - DNA, 15 bp, Homo sapiens
cacctggctacgctt

SEQ ID NO: 1356952 - DNA, 15 bp, Homo sapiens
acacctggctacgct

SEQ ID NO: 1356953 - DNA, 15 bp, Homo sapiens
cacacctggctacgc

SEQ ID NO: 1356954 - DNA, 15 bp, Homo sapiens
ccacacctggctacg

SEQ ID NO: 1356955 - DNA, 15 bp, Homo sapiens
cgattacaggtgcct

SEQ ID NO: 1356956 - DNA, 15 bp, Homo sapiens
gcgattacaggtgcc

SEQ ID NO: 1356957 - DNA, 15 bp, Homo sapiens
tgcgattacaggtgc

SEQ ID NO: 1356958 - DNA, 15 bp, Homo sapiens
ctgcgattacaggtg

SEQ ID NO: 1356959 - DNA, 15 bp, Homo sapiens
gctgcgattacaggt

SEQ ID NO: 1356960 - DNA, 15 bp, Homo sapiens
agctgcgattacagg

SEQ ID NO: 1356961 - DNA, 15 bp, Homo sapiens
tagctgcgattacag

SEQ ID NO: 1356962 - DNA, 15 bp, Homo sapiens
gtagctgcgattaca

SEQ ID NO: 1356963 - DNA, 15 bp, Homo sapiens
agtagctgcgattac

SEQ ID NO: 1356964 - DNA, 15 bp, Homo sapiens
aagtagctgcgatta

SEQ ID NO: 1356965 - DNA, 15 bp, Homo sapiens
caagtagctgcgatt

SEQ ID NO: 1356966 - DNA, 15 bp, Homo sapiens
ccaagtagctgcgat

SEQ ID NO: 1356967 - DNA, 15 bp, Homo sapiens
tccaagtagctgcga

SEQ ID NO: 1356968 - DNA, 15 bp, Homo sapiens
ttccaagtagctgcg

SEQ ID NO: 1356969 - DNA, 15 bp, Homo sapiens
cttccaagtagctgc

SEQ ID NO: 1356970 - DNA, 15 bp, Homo sapiens
ccttccaagtagctg

SEQ ID NO: 1356971 - DNA, 15 bp, Homo sapiens
gccttccaagtagct

SEQ ID NO: 1356972 - DNA, 15 bp, Homo sapiens
ggccttccaagtagc

SEQ ID NO: 1356973 - DNA, 15 bp, Homo sapiens
cggccttccaagtag

SEQ ID NO: 1356974 - DNA, 15 bp, Homo sapiens
tcggccttccaagta

SEQ ID NO: 1356975 - DNA, 15 bp, Homo sapiens
ctcggccttccaagt

SEQ ID NO: 1356976 - DNA, 15 bp, Homo sapiens
cctcggccttccaag

SEQ ID NO: 1356977 - DNA, 15 bp, Homo sapiens
acctcggccttccaa

SEQ ID NO: 1356978 - DNA, 15 bp, Homo sapiens
cacctcggccttcca

SEQ ID NO: 1356979 - DNA, 15 bp, Homo sapiens
ccacctcggccttcc

SEQ ID NO: 1356980 - DNA, 15 bp, Homo sapiens
cccacctcggccttc

SEQ ID NO: 1356981 - DNA, 15 bp, Homo sapiens
tcccacctcggcctt

SEQ ID NO: 1356982 - DNA, 15 bp, Homo sapiens
ctcccacctcggcct

SEQ ID NO: 1356983 - DNA, 15 bp, Homo sapiens
tctcccacctcggcc

SEQ ID NO: 1356984 - DNA, 15 bp, Homo sapiens
tggctgactgcaacc

SEQ ID NO: 1356985 - DNA, 15 bp, Homo sapiens
ctggctgactgcaac

SEQ ID NO: 1356986 - DNA, 15 bp, Homo sapiens
cctggctgactgcaa

SEQ ID NO: 1356987 - DNA, 15 bp, Homo sapiens
tcctggctgactgca

SEQ ID NO: 1356988 - DNA, 15 bp, Homo sapiens
atcctggctgactgc

SEQ ID NO: 1356989 - DNA, 15 bp, Homo sapiens
gatcctggctgactg

SEQ ID NO: 1356990 - DNA, 15 bp, Homo sapiens
tgatcctggctgact

SEQ ID NO: 1356991 - DNA, 15 bp, Homo sapiens
atgatcctggctgac

SEQ ID NO: 1356992 - DNA, 15 bp, Homo sapiens
catgatcctggctga

SEQ ID NO: 1356993 - DNA, 15 bp, Homo sapiens
gcatgatcctggctg

SEQ ID NO: 1356994 - DNA, 15 bp, Homo sapiens
ggcatgatcctggct

SEQ ID NO: 1356995 - DNA, 15 bp, Homo sapiens
tggcatgatcctggc

SEQ ID NO: 1356996 - DNA, 15 bp, Homo sapiens
atggcatgatcctgg

SEQ ID NO: 1356997 - DNA, 15 bp, Homo sapiens
aatggcatgatcctg

SEQ ID NO: 1356998 - DNA, 15 bp, Homo sapiens
caatggcatgatcct

SEQ ID NO: 1356999 - DNA, 15 bp, Homo sapiens
acaatggcatgatcc

SEQ ID NO: 1357000 - DNA, 15 bp, Homo sapiens
ggctctgttgcccag

SEQ ID NO: 1357001 - DNA, 15 bp, Homo sapiens
tggctctgttgccca

SEQ ID NO: 1357002 - DNA, 15 bp, Homo sapiens
ctggctctgttgccc

SEQ ID NO: 1357003 - DNA, 15 bp, Homo sapiens
tctggctctgttgcc

SEQ ID NO: 1357004 - DNA, 15 bp, Homo sapiens
gtctggctctgttgc

SEQ ID NO: 1357005 - DNA, 15 bp, Homo sapiens
agtctggctctgttg

SEQ ID NO: 1357006 - DNA, 15 bp, Homo sapiens
gagtctggctctgtt

SEQ ID NO: 1357007 - DNA, 15 bp, Homo sapiens
ggctttttttttttt

SEQ ID NO: 1357008 - DNA, 15 bp, Homo sapiens
tggcttttttttttt

SEQ ID NO: 1357009 - DNA, 15 bp, Homo sapiens
ttggctttttttttt

SEQ ID NO: 1357010 - DNA, 15 bp, Homo sapiens
cttggcttttttttt

SEQ ID NO: 1357011 - DNA, 15 bp, Homo sapiens
ccttggctttttttt

SEQ ID NO: 1357012 - DNA, 15 bp, Homo sapiens
gccttggcttttttt

SEQ ID NO: 1357013 - DNA, 15 bp, Homo sapiens
cgccttggctttttt

SEQ ID NO: 1357014 - DNA, 15 bp, Homo sapiens
acgccttggcttttt

SEQ ID NO: 1357015 - DNA, 15 bp, Homo sapiens
cacgccttggctttt

SEQ ID NO: 1357016 - DNA, 15 bp, Homo sapiens
tcacgccttggcttt

SEQ ID NO: 1357017 - DNA, 15 bp, Homo sapiens
ttcacgccttggctt

SEQ ID NO: 1357018 - DNA, 15 bp, Homo sapiens
attcacgccttggct

SEQ ID NO: 1357019 - DNA, 15 bp, Homo sapiens
aattcacgccttggc

SEQ ID NO: 1357020 - DNA, 15 bp, Homo sapiens
aaattcacgccttgg

SEQ ID NO: 1357021 - DNA, 15 bp, Homo sapiens
gaaattcacgccttg

SEQ ID NO: 1357022 - DNA, 15 bp, Homo sapiens
agaaattcacgcctt

SEQ ID NO: 1357023 - DNA, 15 bp, Homo sapiens
gagaaattcacgcct

SEQ ID NO: 1357024 - DNA, 15 bp, Homo sapiens
ggagaaattcacgcc

SEQ ID NO: 1357025 - DNA, 15 bp, Homo sapiens
aggagaaattcacgc

SEQ ID NO: 1357026 - DNA, 15 bp, Homo sapiens
gaggagaaattcacg

SEQ ID NO: 1357027 - DNA, 15 bp, Homo sapiens
ggaggagaaattcac

SEQ ID NO: 1357028 - DNA, 15 bp, Homo sapiens
aggaggagaaattca

SEQ ID NO: 1357029 - DNA, 15 bp, Homo sapiens
aaggaggagaaattc

SEQ ID NO: 1357030 - DNA, 15 bp, Homo sapiens
gaaggaggagaaatt

SEQ ID NO: 1357031 - DNA, 15 bp, Homo sapiens
agaaggaggagaaat

SEQ ID NO: 1357032 - DNA, 15 bp, Homo sapiens
gagaaggaggagaaa

SEQ ID NO: 1357033 - DNA, 15 bp, Homo sapiens
ggagaaggaggagaa

SEQ ID NO: 1357034 - DNA, 15 bp, Homo sapiens
aggagaaggaggaga

SEQ ID NO: 1357035 - DNA, 15 bp, Homo sapiens
gaggagaaggaggag

SEQ ID NO: 1357036 - DNA, 15 bp, Homo sapiens
agaggagaaggagga

SEQ ID NO: 1357037 - DNA, 15 bp, Homo sapiens
aagaggagaaggagg

SEQ ID NO: 1357038 - DNA, 15 bp, Homo sapiens
gaagaggagaaggag

SEQ ID NO: 1357039 - DNA, 15 bp, Homo sapiens
ggaagaggagaagga

SEQ ID NO: 1357040 - DNA, 15 bp, Homo sapiens
tggaagaggagaagg

SEQ ID NO: 1357041 - DNA, 15 bp, Homo sapiens
atggaagaggagaag

SEQ ID NO: 1357042 - DNA, 15 bp, Homo sapiens
tatggaagaggagaa

SEQ ID NO: 1357043 - DNA, 15 bp, Homo sapiens
ttatggaagaggaga

SEQ ID NO: 1357044 - DNA, 15 bp, Homo sapiens
gttatggaagaggag

SEQ ID NO: 1357045 - DNA, 15 bp, Homo sapiens
ggttatggaagagga

SEQ ID NO: 1357046 - DNA, 15 bp, Homo sapiens
aggttatggaagagg

SEQ ID NO: 1357047 - DNA, 15 bp, Homo sapiens
caggttatggaagag

SEQ ID NO: 1357048 - DNA, 15 bp, Homo sapiens
gcaggttatggaaga

SEQ ID NO: 1357049 - DNA, 15 bp, Homo sapiens
agcaggttatggaag

SEQ ID NO: 1357050 - DNA, 15 bp, Homo sapiens
cagcaggttatggaa

SEQ ID NO: 1357051 - DNA, 15 bp, Homo sapiens
acagcaggttatgga

SEQ ID NO: 1357052 - DNA, 15 bp, Homo sapiens
cacagcaggttatgg

SEQ ID NO: 1357053 - DNA, 15 bp, Homo sapiens
ccacagcaggttatg

SEQ ID NO: 1357054 - DNA, 15 bp, Homo sapiens
gccacagcaggttat

SEQ ID NO: 1357055 - DNA, 15 bp, Homo sapiens
agccacagcaggtta

SEQ ID NO: 1357056 - DNA, 15 bp, Homo sapiens
gagccacagcaggtt

SEQ ID NO: 1357057 - DNA, 15 bp, Homo sapiens
ggagccacagcaggt

SEQ ID NO: 1357058 - DNA, 15 bp, Homo sapiens
gggagccacagcagg

SEQ ID NO: 1357059 - DNA, 15 bp, Homo sapiens
ggggagccacagcag

SEQ ID NO: 1357060 - DNA, 15 bp, Homo sapiens
tggggagccacagca

SEQ ID NO: 1357061 - DNA, 15 bp, Homo sapiens
atggggagccacagc

SEQ ID NO: 1357062 - DNA, 15 bp, Homo sapiens
aatggggagccacag

SEQ ID NO: 1357063 - DNA, 15 bp, Homo sapiens
caatggggagccaca

SEQ ID NO: 1357064 - DNA, 15 bp, Homo sapiens
gcaatggggagccac

SEQ ID NO: 1357065 - DNA, 15 bp, Homo sapiens
ggcaatggggagcca

SEQ ID NO: 1357066 - DNA, 15 bp, Homo sapiens
tggcaatggggagcc

SEQ ID NO: 1357067 - DNA, 15 bp, Homo sapiens
ctggcaatggggagc

SEQ ID NO: 1357068 - DNA, 15 bp, Homo sapiens
cctggcaatggggag

SEQ ID NO: 1357069 - DNA, 15 bp, Homo sapiens
gcctggcaatgggga

SEQ ID NO: 1357070 - DNA, 15 bp, Homo sapiens
tgcctggcaatgggg

SEQ ID NO: 1357071 - DNA, 15 bp, Homo sapiens
ctgcctggcaatggg

SEQ ID NO: 1357072 - DNA, 15 bp, Homo sapiens
actgcctggcaatgg

SEQ ID NO: 1357073 - DNA, 15 bp, Homo sapiens
cactgcctggcaatg

SEQ ID NO: 1357074 - DNA, 15 bp, Homo sapiens
acactgcctggcaat

SEQ ID NO: 1357075 - DNA, 15 bp, Homo sapiens
tacactgcctggcaa

SEQ ID NO: 1357076 - DNA, 15 bp, Homo sapiens
ctacactgcctggca

SEQ ID NO: 1357077 - DNA, 15 bp, Homo sapiens
tctacactgcctggc

SEQ ID NO: 1357078 - DNA, 15 bp, Homo sapiens
ctctacactgcctgg

SEQ ID NO: 1357079 - DNA, 15 bp, Homo sapiens
actctacactgcctg

SEQ ID NO: 1357080 - DNA, 15 bp, Homo sapiens
aactctacactgcct

SEQ ID NO: 1357081 - DNA, 15 bp, Homo sapiens
gaactctacactgcc

SEQ ID NO: 1357082 - DNA, 15 bp, Homo sapiens
agaactctacactgc

SEQ ID NO: 1357083 - DNA, 15 bp, Homo sapiens
cagaactctacactg

SEQ ID NO: 1357084 - DNA, 15 bp, Homo sapiens
tcagaactctacact

SEQ ID NO: 1357085 - DNA, 15 bp, Homo sapiens
ttcagaactctacac

SEQ ID NO: 1357086 - DNA, 15 bp, Homo sapiens
attcagaactctaca

SEQ ID NO: 1357087 - DNA, 15 bp, Homo sapiens
tattcagaactctac

SEQ ID NO: 1357088 - DNA, 15 bp, Homo sapiens
gtattcagaactcta

SEQ ID NO: 1357089 - DNA, 15 bp, Homo sapiens
ggtattcagaactct

SEQ ID NO: 1357090 - DNA, 15 bp, Homo sapiens
aggtattcagaactc

SEQ ID NO: 1357091 - DNA, 15 bp, Homo sapiens
aaggtattcagaact

SEQ ID NO: 1357092 - DNA, 15 bp, Homo sapiens
caaggtattcagaac

SEQ ID NO: 1357093 - DNA, 15 bp, Homo sapiens
acaaggtattcagaa

SEQ ID NO: 1357094 - DNA, 15 bp, Homo sapiens
cacaaggtattcaga

SEQ ID NO: 1357095 - DNA, 15 bp, Homo sapiens
gcacaaggtattcag

SEQ ID NO: 1357096 - DNA, 15 bp, Homo sapiens
agcacaaggtattca

SEQ ID NO: 1357097 - DNA, 15 bp, Homo sapiens
cagcacaaggtattc

SEQ ID NO: 1357098 - DNA, 15 bp, Homo sapiens
ccagcacaaggtatt

SEQ ID NO: 1357099 - DNA, 15 bp, Homo sapiens
tccagcacaaggtat

SEQ ID NO: 1357100 - DNA, 15 bp, Homo sapiens
ttccagcacaaggta

SEQ ID NO: 1357101 - DNA, 15 bp, Homo sapiens
cttccagcacaaggt

SEQ ID NO: 1357102 - DNA, 15 bp, Homo sapiens
gcttccagcacaagg

SEQ ID NO: 1357103 - DNA, 15 bp, Homo sapiens
agcttccagcacaag

SEQ ID NO: 1357104 - DNA, 15 bp, Homo sapiens
cagcttccagcacaa

SEQ ID NO: 1357105 - DNA, 15 bp, Homo sapiens
tcagcttccagcaca

SEQ ID NO: 1357106 - DNA, 15 bp, Homo sapiens
ttcagcttccagcac

SEQ ID NO: 1357107 - DNA, 15 bp, Homo sapiens
cttcagcttccagca

SEQ ID NO: 1357108 - DNA, 15 bp, Homo sapiens
gcttcagcttccagc

SEQ ID NO: 1357109 - DNA, 15 bp, Homo sapiens
ggcttcagcttccag

SEQ ID NO: 1357110 - DNA, 15 bp, Homo sapiens
gggcttcagcttcca

SEQ ID NO: 1357111 - DNA, 15 bp, Homo sapiens
agggcttcagcttcc

SEQ ID NO: 1357112 - DNA, 15 bp, Homo sapiens
aagggcttcagcttc

SEQ ID NO: 1357113 - DNA, 15 bp, Homo sapiens
gaagggcttcagctt

SEQ ID NO: 1357114 - DNA, 15 bp, Homo sapiens
ggaagggcttcagct

SEQ ID NO: 1357115 - DNA, 15 bp, Homo sapiens
aggaagggcttcagc

SEQ ID NO: 1357116 - DNA, 15 bp, Homo sapiens
caggaagggcttcag

SEQ ID NO: 1357117 - DNA, 15 bp, Homo sapiens
gcaggaagggcttca

SEQ ID NO: 1357118 - DNA, 15 bp, Homo sapiens
ggcaggaagggcttc

SEQ ID NO: 1357119 - DNA, 15 bp, Homo sapiens
gggcaggaagggctt

SEQ ID NO: 1357120 - DNA, 15 bp, Homo sapiens
ggggcaggaagggct

SEQ ID NO: 1357121 - DNA, 15 bp, Homo sapiens
tggggcaggaagggc

SEQ ID NO: 1357122 - DNA, 15 bp, Homo sapiens
ctggggcaggaaggg

SEQ ID NO: 1357123 - DNA, 15 bp, Homo sapiens
gctggggcaggaagg

SEQ ID NO: 1357124 - DNA, 15 bp, Homo sapiens
ggctggggcaggaag

SEQ ID NO: 1357125 - DNA, 15 bp, Homo sapiens
gggctggggcaggaa

SEQ ID NO: 1357126 - DNA, 15 bp, Homo sapiens
agggctggggcagga

SEQ ID NO: 1357127 - DNA, 15 bp, Homo sapiens
cagggctggggcagg

SEQ ID NO: 1357128 - DNA, 15 bp, Homo sapiens
tcagggctggggcag

SEQ ID NO: 1357129 - DNA, 15 bp, Homo sapiens
ttcagggctggggca

SEQ ID NO: 1357130 - DNA, 15 bp, Homo sapiens
attcagggctggggc

SEQ ID NO: 1357131 - DNA, 15 bp, Homo sapiens
gattcagggctgggg

SEQ ID NO: 1357132 - DNA, 15 bp, Homo sapiens
tgattcagggctggg

SEQ ID NO: 1357133 - DNA, 15 bp, Homo sapiens
gtgattcagggctgg

SEQ ID NO: 1357134 - DNA, 15 bp, Homo sapiens
ggtgattcagggctg

SEQ ID NO: 1357135 - DNA, 15 bp, Homo sapiens
aggtgattcagggct

SEQ ID NO: 1357136 - DNA, 15 bp, Homo sapiens
gaggtgattcagggc

SEQ ID NO: 1357137 - DNA, 15 bp, Homo sapiens
agaggtgattcaggg

SEQ ID NO: 1357138 - DNA, 15 bp, Homo sapiens
gagaggtgattcagg

SEQ ID NO: 1357139 - DNA, 15 bp, Homo sapiens
ggagaggtgattcag

SEQ ID NO: 1357140 - DNA, 15 bp, Homo sapiens
tggagaggtgattca

SEQ ID NO: 1357141 - DNA, 15 bp, Homo sapiens
ttggagaggtgattc

SEQ ID NO: 1357142 - DNA, 15 bp, Homo sapiens
gttggagaggtgatt

SEQ ID NO: 1357143 - DNA, 15 bp, Homo sapiens
agttggagaggtgat

SEQ ID NO: 1357144 - DNA, 15 bp, Homo sapiens
aagttggagaggtga

SEQ ID NO: 1357145 - DNA, 15 bp, Homo sapiens
gaagttggagaggtg

SEQ ID NO: 1357146 - DNA, 15 bp, Homo sapiens
tgaagttggagaggt

SEQ ID NO: 1357147 - DNA, 15 bp, Homo sapiens
ctgaagttggagagg

SEQ ID NO: 1357148 - DNA, 15 bp, Homo sapiens
gctgaagttggagag

SEQ ID NO: 1357149 - DNA, 15 bp, Homo sapiens
ggctgaagttggaga

SEQ ID NO: 1357150 - DNA, 15 bp, Homo sapiens
gggctgaagttggag

SEQ ID NO: 1357151 - DNA, 15 bp, Homo sapiens
ggggctgaagttgga

SEQ ID NO: 1357152 - DNA, 15 bp, Homo sapiens
aggggctgaagttgg

SEQ ID NO: 1357153 - DNA, 15 bp, Homo sapiens
gaggggctgaagttg

SEQ ID NO: 1357154 - DNA, 15 bp, Homo sapiens
ggaggggctgaagtt

SEQ ID NO: 1357155 - DNA, 15 bp, Homo sapiens
aggaggggctgaagt

SEQ ID NO: 1357156 - DNA, 15 bp, Homo sapiens
caggaggggctgaag

SEQ ID NO: 1357157 - DNA, 15 bp, Homo sapiens
gcaggaggggctgaa

SEQ ID NO: 1357158 - DNA, 15 bp, Homo sapiens
agcaggaggggctga

SEQ ID NO: 1357159 - DNA, 15 bp, Homo sapiens
gagcaggaggggctg

SEQ ID NO: 1357160 - DNA, 15 bp, Homo sapiens
ggagcaggaggggct

SEQ ID NO: 1357161 - DNA, 15 bp, Homo sapiens
aggagcaggaggggc

SEQ ID NO: 1357162 - DNA, 15 bp, Homo sapiens
caggagcaggagggg

SEQ ID NO: 1357163 - DNA, 15 bp, Homo sapiens
gcaggagcaggaggg

SEQ ID NO: 1357164 - DNA, 15 bp, Homo sapiens
agcaggagcaggagg

SEQ ID NO: 1357165 - DNA, 15 bp, Homo sapiens
cagcaggagcaggag

SEQ ID NO: 1357166 - DNA, 15 bp, Homo sapiens
gcagcaggagcagga

SEQ ID NO: 1357167 - DNA, 15 bp, Homo sapiens
tgcagcaggagcagg

SEQ ID NO: 1357168 - DNA, 15 bp, Homo sapiens
ctgcagcaggagcag

SEQ ID NO: 1357169 - DNA, 15 bp, Homo sapiens
gctgcagcaggagca

SEQ ID NO: 1357170 - DNA, 15 bp, Homo sapiens
ggctgcagcaggagc

SEQ ID NO: 1357171 - DNA, 15 bp, Homo sapiens
gggctgcagcaggag

SEQ ID NO: 1357172 - DNA, 15 bp, Homo sapiens
ggggctgcagcagga

SEQ ID NO: 1357173 - DNA, 15 bp, Homo sapiens
gggggctgcagcagg

SEQ ID NO: 1357174 - DNA, 15 bp, Homo sapiens
tgggggctgcagcag

SEQ ID NO: 1357175 - DNA, 15 bp, Homo sapiens
ttgggggctgcagca

SEQ ID NO: 1357176 - DNA, 15 bp, Homo sapiens
tttgggggctgcagc

SEQ ID NO: 1357177 - DNA, 15 bp, Homo sapiens
ttttgggggctgcag

SEQ ID NO: 1357178 - DNA, 15 bp, Homo sapiens
gttttgggggctgca

SEQ ID NO: 1357179 - DNA, 15 bp, Homo sapiens
tgttttgggggctgc

SEQ ID NO: 1357180 - DNA, 15 bp, Homo sapiens
gtgttttgggggctg

SEQ ID NO: 1357181 - DNA, 15 bp, Homo sapiens
agtgttttgggggct

SEQ ID NO: 1357182 - DNA, 15 bp, Homo sapiens
aagtgttttgggggc

SEQ ID NO: 1357183 - DNA, 15 bp, Homo sapiens
caagtgttttggggg

SEQ ID NO: 1357184 - DNA, 15 bp, Homo sapiens
gcaagtgttttgggg

SEQ ID NO: 1357185 - DNA, 15 bp, Homo sapiens
tgcaagtgttttggg

SEQ ID NO: 1357186 - DNA, 15 bp, Homo sapiens
atgcaagtgttttgg

SEQ ID NO: 1357187 - DNA, 15 bp, Homo sapiens
aatgcaagtgttttg

SEQ ID NO: 1357188 - DNA, 15 bp, Homo sapiens
aaatgcaagtgtttt

SEQ ID NO: 1357189 - DNA, 15 bp, Homo sapiens
aaaatgcaagtgttt

SEQ ID NO: 1357190 - DNA, 15 bp, Homo sapiens
gaaaatgcaagtgtt

SEQ ID NO: 1357191 - DNA, 15 bp, Homo sapiens
agaaaatgcaagtgt

SEQ ID NO: 1357192 - DNA, 15 bp, Homo sapiens
gagaaaatgcaagtg

SEQ ID NO: 1357193 - DNA, 15 bp, Homo sapiens
ggagaaaatgcaagt

SEQ ID NO: 1357194 - DNA, 15 bp, Homo sapiens
aggagaaaatgcaag

SEQ ID NO: 1357195 - DNA, 15 bp, Homo sapiens
taggagaaaatgcaa

SEQ ID NO: 1357196 - DNA, 15 bp, Homo sapiens
ttaggagaaaatgca

SEQ ID NO: 1357197 - DNA, 15 bp, Homo sapiens
tttaggagaaaatgc

SEQ ID NO: 1357198 - DNA, 15 bp, Homo sapiens
gtttaggagaaaatg

SEQ ID NO: 1357199 - DNA, 15 bp, Homo sapiens
agtttaggagaaaat

SEQ ID NO: 1357200 - DNA, 15 bp, Homo sapiens
gagtttaggagaaaa

SEQ ID NO: 1357201 - DNA, 15 bp, Homo sapiens
tgagtttaggagaaa

SEQ ID NO: 1357202 - DNA, 15 bp, Homo sapiens
atgagtttaggagaa

SEQ ID NO: 1357203 - DNA, 15 bp, Homo sapiens
catgagtttaggaga

SEQ ID NO: 1357204 - DNA, 15 bp, Homo sapiens
ccatgagtttaggag

SEQ ID NO: 1357205 - DNA, 15 bp, Homo sapiens
cccatgagtttagga

SEQ ID NO: 1357206 - DNA, 15 bp, Homo sapiens
gcccatgagtttagg

SEQ ID NO: 1357207 - DNA, 15 bp, Homo sapiens
agcccatgagtttag

SEQ ID NO: 1357208 - DNA, 15 bp, Homo sapiens
gagcccatgagttta

SEQ ID NO: 1357209 - DNA, 15 bp, Homo sapiens
agagcccatgagttt

SEQ ID NO: 1357210 - DNA, 15 bp, Homo sapiens
aagagcccatgagtt

SEQ ID NO: 1357211 - DNA, 15 bp, Homo sapiens
gaagagcccatgagt

SEQ ID NO: 1357212 - DNA, 15 bp, Homo sapiens
ggaagagcccatgag

SEQ ID NO: 1357213 - DNA, 15 bp, Homo sapiens
gggaagagcccatga

SEQ ID NO: 1357214 - DNA, 15 bp, Homo sapiens
tgggaagagcccatg

SEQ ID NO: 1357215 - DNA, 15 bp, Homo sapiens
ctgggaagagcccat

SEQ ID NO: 1357216 - DNA, 15 bp, Homo sapiens
gctgggaagagccca

SEQ ID NO: 1357217 - DNA, 15 bp, Homo sapiens
tgctgggaagagccc

SEQ ID NO: 1357218 - DNA, 15 bp, Homo sapiens
gtgctgggaagagcc

SEQ ID NO: 1357219 - DNA, 15 bp, Homo sapiens
ggtgctgggaagagc

SEQ ID NO: 1357220 - DNA, 15 bp, Homo sapiens
gggtgctgggaagag

SEQ ID NO: 1357221 - DNA, 15 bp, Homo sapiens
tgggtgctgggaaga

SEQ ID NO: 1357222 - DNA, 15 bp, Homo sapiens
ctgggtgctgggaag

SEQ ID NO: 1357223 - DNA, 15 bp, Homo sapiens
cctgggtgctgggaa

SEQ ID NO: 1357224 - DNA, 15 bp, Homo sapiens
gcctgggtgctggga

SEQ ID NO: 1357225 - DNA, 15 bp, Homo sapiens
ggcctgggtgctggg

SEQ ID NO: 1357226 - DNA, 15 bp, Homo sapiens
aggcctgggtgctgg

SEQ ID NO: 1357227 - DNA, 15 bp, Homo sapiens
aaggcctgggtgctg

SEQ ID NO: 1357228 - DNA, 15 bp, Homo sapiens
aaaggcctgggtgct

SEQ ID NO: 1357229 - DNA, 15 bp, Homo sapiens
caaaggcctgggtgc

SEQ ID NO: 1357230 - DNA, 15 bp, Homo sapiens
acaaaggcctgggtg

SEQ ID NO: 1357231 - DNA, 15 bp, Homo sapiens
aacaaaggcctgggt

SEQ ID NO: 1357232 - DNA, 15 bp, Homo sapiens
aaacaaaggcctggg

SEQ ID NO: 1357233 - DNA, 15 bp, Homo sapiens
taaacaaaggcctgg

SEQ ID NO: 1357234 - DNA, 15 bp, Homo sapiens
gtaaacaaaggcctg

SEQ ID NO: 1357235 - DNA, 15 bp, Homo sapiens
ggtaaacaaaggcct

SEQ ID NO: 1357236 - DNA, 15 bp, Homo sapiens
gggtaaacaaaggcc

SEQ ID NO: 1357237 - DNA, 15 bp, Homo sapiens
ggggtaaacaaaggc

SEQ ID NO: 1357238 - DNA, 15 bp, Homo sapiens
aggggtaaacaaagg

SEQ ID NO: 1357239 - DNA, 15 bp, Homo sapiens
aaggggtaaacaaag

SEQ ID NO: 1357240 - DNA, 15 bp, Homo sapiens
gaaggggtaaacaaa

SEQ ID NO: 1357241 - DNA, 15 bp, Homo sapiens
agaaggggtaaacaa

SEQ ID NO: 1357242 - DNA, 15 bp, Homo sapiens
cagaaggggtaaaca

SEQ ID NO: 1357243 - DNA, 15 bp, Homo sapiens
acagaaggggtaaac

SEQ ID NO: 1357244 - DNA, 15 bp, Homo sapiens
gacagaaggggtaaa

SEQ ID NO: 1357245 - DNA, 15 bp, Homo sapiens
agacagaaggggtaa

SEQ ID NO: 1357246 - DNA, 15 bp, Homo sapiens
cagacagaaggggta

SEQ ID NO: 1357247 - DNA, 15 bp, Homo sapiens
tcagacagaaggggt

SEQ ID NO: 1357248 - DNA, 15 bp, Homo sapiens
atcagacagaagggg

SEQ ID NO: 1357249 - DNA, 15 bp, Homo sapiens
gatcagacagaaggg

SEQ ID NO: 1357250 - DNA, 15 bp, Homo sapiens
agatcagacagaagg

SEQ ID NO: 1357251 - DNA, 15 bp, Homo sapiens
aagatcagacagaag

SEQ ID NO: 1357252 - DNA, 15 bp, Homo sapiens
gaagatcagacagaa

SEQ ID NO: 1357253 - DNA, 15 bp, Homo sapiens
ggaagatcagacaga

SEQ ID NO: 1357254 - DNA, 15 bp, Homo sapiens
gggaagatcagacag

SEQ ID NO: 1357255 - DNA, 15 bp, Homo sapiens
agggaagatcagaca

SEQ ID NO: 1357256 - DNA, 15 bp, Homo sapiens
gagggaagatcagac

SEQ ID NO: 1357257 - DNA, 15 bp, Homo sapiens
agagggaagatcaga

SEQ ID NO: 1357258 - DNA, 15 bp, Homo sapiens
gagagggaagatcag

SEQ ID NO: 1357259 - DNA, 15 bp, Homo sapiens
tgagagggaagatca

SEQ ID NO: 1357260 - DNA, 15 bp, Homo sapiens
gtgagagggaagatc

SEQ ID NO: 1357261 - DNA, 15 bp, Homo sapiens
ggtgagagggaagat

SEQ ID NO: 1357262 - DNA, 15 bp, Homo sapiens
gggtgagagggaaga

SEQ ID NO: 1357263 - DNA, 15 bp, Homo sapiens
agggtgagagggaag

SEQ ID NO: 1357264 - DNA, 15 bp, Homo sapiens
aagggtgagagggaa

SEQ ID NO: 1357265 - DNA, 15 bp, Homo sapiens
gaagggtgagaggga

SEQ ID NO: 1357266 - DNA, 15 bp, Homo sapiens
tgaagggtgagaggg

SEQ ID NO: 1357267 - DNA, 15 bp, Homo sapiens
ttgaagggtgagagg

SEQ ID NO: 1357268 - DNA, 15 bp, Homo sapiens
cttgaagggtgagag

SEQ ID NO: 1357269 - DNA, 15 bp, Homo sapiens
tcttgaagggtgaga

SEQ ID NO: 1357270 - DNA, 15 bp, Homo sapiens
ttcttgaagggtgag

SEQ ID NO: 1357271 - DNA, 15 bp, Homo sapiens
tttcttgaagggtga

SEQ ID NO: 1357272 - DNA, 15 bp, Homo sapiens
gtttcttgaagggtg

SEQ ID NO: 1357273 - DNA, 15 bp, Homo sapiens
agtttcttgaagggt

SEQ ID NO: 1357274 - DNA, 15 bp, Homo sapiens
cagtttcttgaaggg

SEQ ID NO: 1357275 - DNA, 15 bp, Homo sapiens
gcagtttcttgaagg

SEQ ID NO: 1357276 - DNA, 15 bp, Homo sapiens
agcagtttcttgaag

SEQ ID NO: 1357277 - DNA, 15 bp, Homo sapiens
aagcagtttcttgaa

SEQ ID NO: 1357278 - DNA, 15 bp, Homo sapiens
taagcagtttcttga

SEQ ID NO: 1357279 - DNA, 15 bp, Homo sapiens
ctaagcagtttcttg

SEQ ID NO: 1357280 - DNA, 15 bp, Homo sapiens
gctaagcagtttctt

SEQ ID NO: 1357281 - DNA, 15 bp, Homo sapiens
ggctaagcagtttct

SEQ ID NO: 1357282 - DNA, 15 bp, Homo sapiens
aggctaagcagtttc

SEQ ID NO: 1357283 - DNA, 15 bp, Homo sapiens
gaggctaagcagttt

SEQ ID NO: 1357284 - DNA, 15 bp, Homo sapiens
ggaggctaagcagtt

SEQ ID NO: 1357285 - DNA, 15 bp, Homo sapiens
aggaggctaagcagt

SEQ ID NO: 1357286 - DNA, 15 bp, Homo sapiens
gaggaggctaagcag

SEQ ID NO: 1357287 - DNA, 15 bp, Homo sapiens
ggaggaggctaagca

SEQ ID NO: 1357288 - DNA, 15 bp, Homo sapiens
tggaggaggctaagc

SEQ ID NO: 1357289 - DNA, 15 bp, Homo sapiens
ctggaggaggctaag

SEQ ID NO: 1357290 - DNA, 15 bp, Homo sapiens
cctggaggaggctaa

SEQ ID NO: 1357291 - DNA, 15 bp, Homo sapiens
tcctggaggaggcta

SEQ ID NO: 1357292 - DNA, 15 bp, Homo sapiens
ttcctggaggaggct

SEQ ID NO: 1357293 - DNA, 15 bp, Homo sapiens
cttcctggaggaggc

SEQ ID NO: 1357294 - DNA, 15 bp, Homo sapiens
aagggcttcctggag

SEQ ID NO: 1357295 - DNA, 15 bp, Homo sapiens
gaagggcttcctgga

SEQ ID NO: 1357296 - DNA, 15 bp, Homo sapiens
ggaagggcttcctgg

SEQ ID NO: 1357297 - DNA, 15 bp, Homo sapiens
tggaagggcttcctg

SEQ ID NO: 1357298 - DNA, 15 bp, Homo sapiens
gtggaagggcttcct

SEQ ID NO: 1357299 - DNA, 15 bp, Homo sapiens
cgtggaagggcttcc

SEQ ID NO: 1357300 - DNA, 15 bp, Homo sapiens
acgtggaagggcttc

SEQ ID NO: 1357301 - DNA, 15 bp, Homo sapiens
cacgtggaagggctt

SEQ ID NO: 1357302 - DNA, 15 bp, Homo sapiens
gcacgtggaagggct

SEQ ID NO: 1357303 - DNA, 15 bp, Homo sapiens
ggcacgtggaagggc

SEQ ID NO: 1357304 - DNA, 15 bp, Homo sapiens
gggcacgtggaaggg

SEQ ID NO: 1357305 - DNA, 15 bp, Homo sapiens
ggggcacgtggaagg

SEQ ID NO: 1357306 - DNA, 15 bp, Homo sapiens
tggggcacgtggaag

SEQ ID NO: 1357307 - DNA, 15 bp, Homo sapiens
ctggggcacgtggaa

SEQ ID NO: 1357308 - DNA, 15 bp, Homo sapiens
cctggggcacgtgga

SEQ ID NO: 1357309 - DNA, 15 bp, Homo sapiens
ccctggggcacgtgg

SEQ ID NO: 1357310 - DNA, 15 bp, Homo sapiens
gccctggggcacgtg

SEQ ID NO: 1357311 - DNA, 15 bp, Homo sapiens
ggccctggggcacgt

SEQ ID NO: 1357312 - DNA, 15 bp, Homo sapiens
gggccctggggcacg

SEQ ID NO: 1357313 - DNA, 15 bp, Homo sapiens
ggggccctggggcac

SEQ ID NO: 1357314 - DNA, 15 bp, Homo sapiens
gggggccctggggca

SEQ ID NO: 1357315 - DNA, 15 bp, Homo sapiens
tgggggccctggggc

SEQ ID NO: 1357316 - DNA, 15 bp, Homo sapiens
gtgggggccctgggg

SEQ ID NO: 1357317 - DNA, 15 bp, Homo sapiens
ggtgggggccctggg

SEQ ID NO: 1357318 - DNA, 15 bp, Homo sapiens
aggtgggggccctgg

SEQ ID NO: 1357319 - DNA, 15 bp, Homo sapiens
gaggtgggggccctg

SEQ ID NO: 1357320 - DNA, 15 bp, Homo sapiens
ggaggtgggggccct

SEQ ID NO: 1357321 - DNA, 15 bp, Homo sapiens
tggaggtgggggccc

SEQ ID NO: 1357322 - DNA, 15 bp, Homo sapiens
gtggaggtgggggcc

SEQ ID NO: 1357323 - DNA, 15 bp, Homo sapiens
cgtggaggtgggggc

SEQ ID NO: 1357324 - DNA, 15 bp, Homo sapiens
ccgtggaggtggggg

SEQ ID NO: 1357325 - DNA, 15 bp, Homo sapiens
cccgtggaggtgggg

SEQ ID NO: 1357326 - DNA, 15 bp, Homo sapiens
ccccgtggaggtggg

SEQ ID NO: 1357327 - DNA, 15 bp, Homo sapiens
gccccgtggaggtgg

SEQ ID NO: 1357328 - DNA, 15 bp, Homo sapiens
agccccgtggaggtg

SEQ ID NO: 1357329 - DNA, 15 bp, Homo sapiens
aagccccgtggaggt

SEQ ID NO: 1357330 - DNA, 15 bp, Homo sapiens
gaagccccgtggagg

SEQ ID NO: 1357331 - DNA, 15 bp, Homo sapiens
ggaagccccgtggag

SEQ ID NO: 1357332 - DNA, 15 bp, Homo sapiens
gggaagccccgtgga

SEQ ID NO: 1357333 - DNA, 15 bp, Homo sapiens
ggggaagccccgtgg

SEQ ID NO: 1357334 - DNA, 15 bp, Homo sapiens
tggggaagccccgtg

SEQ ID NO: 1357335 - DNA, 15 bp, Homo sapiens
ctggggaagccccgt

SEQ ID NO: 1357336 - DNA, 15 bp, Homo sapiens
cctggggaagccccg

SEQ ID NO: 1357337 - DNA, 15 bp, Homo sapiens
gcctggggaagcccc

SEQ ID NO: 1357338 - DNA, 15 bp, Homo sapiens
ggcctggggaagccc

SEQ ID NO: 1357339 - DNA, 15 bp, Homo sapiens
gggcctggggaagcc

SEQ ID NO: 1357340 - DNA, 15 bp, Homo sapiens
tgggcctggggaagc

SEQ ID NO: 1357341 - DNA, 15 bp, Homo sapiens
ctgggcctggggaag

SEQ ID NO: 1357342 - DNA, 15 bp, Homo sapiens
cctgggcctggggaa

SEQ ID NO: 1357343 - DNA, 15 bp, Homo sapiens
acctgggcctgggga

SEQ ID NO: 1357344 - DNA, 15 bp, Homo sapiens
tacctgggcctgggg

SEQ ID NO: 1357345 - DNA, 15 bp, Homo sapiens
gtacctgggcctggg

SEQ ID NO: 1357346 - DNA, 15 bp, Homo sapiens
ggtacctgggcctgg

SEQ ID NO: 1357347 - DNA, 15 bp, Homo sapiens
aggtacctgggcctg

SEQ ID NO: 1357348 - DNA, 15 bp, Homo sapiens
gaggtacctgggcct

SEQ ID NO: 1357349 - DNA, 15 bp, Homo sapiens
ggaggtacctgggcc

SEQ ID NO: 1357350 - DNA, 15 bp, Homo sapiens
aggaggtacctgggc

SEQ ID NO: 1357351 - DNA, 15 bp, Homo sapiens
gaggaggtacctggg

SEQ ID NO: 1357352 - DNA, 15 bp, Homo sapiens
agaggaggtacctgg

SEQ ID NO: 1357353 - DNA, 15 bp, Homo sapiens
cagaggaggtacctg

SEQ ID NO: 1357354 - DNA, 15 bp, Homo sapiens
tcagaggaggtacct

SEQ ID NO: 1357355 - DNA, 15 bp, Homo sapiens
atcagaggaggtacc

SEQ ID NO: 1357356 - DNA, 15 bp, Homo sapiens
gatcagaggaggtac

SEQ ID NO: 1357357 - DNA, 15 bp, Homo sapiens
ggatcagaggaggta

SEQ ID NO: 1357358 - DNA, 15 bp, Homo sapiens
tggatcagaggaggt

SEQ ID NO: 1357359 - DNA, 15 bp, Homo sapiens
ctggatcagaggagg

SEQ ID NO: 1357360 - DNA, 15 bp, Homo sapiens
cctggatcagaggag

SEQ ID NO: 1357361 - DNA, 15 bp, Homo sapiens
gcctggatcagagga

SEQ ID NO: 1357362 - DNA, 15 bp, Homo sapiens
agcctggatcagagg

SEQ ID NO: 1357363 - DNA, 15 bp, Homo sapiens
aagcctggatcagag

SEQ ID NO: 1357364 - DNA, 15 bp, Homo sapiens
caagcctggatcaga

SEQ ID NO: 1357365 - DNA, 15 bp, Homo sapiens
tcaagcctggatcag

SEQ ID NO: 1357366 - DNA, 15 bp, Homo sapiens
gtcaagcctggatca

SEQ ID NO: 1357367 - DNA, 15 bp, Homo sapiens
agtcaagcctggatc

SEQ ID NO: 1357368 - DNA, 15 bp, Homo sapiens
gagtcaagcctggat

SEQ ID NO: 1357369 - DNA, 15 bp, Homo sapiens
agagtcaagcctgga

SEQ ID NO: 1357370 - DNA, 15 bp, Homo sapiens
aagagtcaagcctgg

SEQ ID NO: 1357371 - DNA, 15 bp, Homo sapiens
caagagtcaagcctg

SEQ ID NO: 1357372 - DNA, 15 bp, Homo sapiens
ccaagagtcaagcct

SEQ ID NO: 1357373 - DNA, 15 bp, Homo sapiens
cccaagagtcaagcc

SEQ ID NO: 1357374 - DNA, 15 bp, Homo sapiens
ccccaagagtcaagc

SEQ ID NO: 1357375 - DNA, 15 bp, Homo sapiens
gccccaagagtcaag

SEQ ID NO: 1357376 - DNA, 15 bp, Homo sapiens
ggccccaagagtcaa

SEQ ID NO: 1357377 - DNA, 15 bp, Homo sapiens
tggccccaagagtca

SEQ ID NO: 1357378 - DNA, 15 bp, Homo sapiens
ctggccccaagagtc

SEQ ID NO: 1357379 - DNA, 15 bp, Homo sapiens
tctggccccaagagt

SEQ ID NO: 1357380 - DNA, 15 bp, Homo sapiens
ctctggccccaagag

SEQ ID NO: 1357381 - DNA, 15 bp, Homo sapiens
cctctggccccaaga

SEQ ID NO: 1357382 - DNA, 15 bp, Homo sapiens
tcctctggccccaag

SEQ ID NO: 1357383 - DNA, 15 bp, Homo sapiens
atcctctggccccaa

SEQ ID NO: 1357384 - DNA, 15 bp, Homo sapiens
gatcctctggcccca

SEQ ID NO: 1357385 - DNA, 15 bp, Homo sapiens
agatcctctggcccc

SEQ ID NO: 1357386 - DNA, 15 bp, Homo sapiens
cagatcctctggccc

SEQ ID NO: 1357387 - DNA, 15 bp, Homo sapiens
cacagatcctctggc

SEQ ID NO: 1357388 - DNA, 15 bp, Homo sapiens
acacagatcctctgg

SEQ ID NO: 1357389 - DNA, 15 bp, Homo sapiens
gacacagatcctctg

SEQ ID NO: 1357390 - DNA, 15 bp, Homo sapiens
ggacacagatcctct

SEQ ID NO: 1357391 - DNA, 15 bp, Homo sapiens
tggacacagatcctc

SEQ ID NO: 1357392 - DNA, 15 bp, Homo sapiens
gtggacacagatcct

SEQ ID NO: 1357393 - DNA, 15 bp, Homo sapiens
ggtggacacagatcc

SEQ ID NO: 1357394 - DNA, 15 bp, Homo sapiens
caggtggacacagat

SEQ ID NO: 1357395 - DNA, 15 bp, Homo sapiens
acaggtggacacaga

SEQ ID NO: 1357396 - DNA, 15 bp, Homo sapiens
gacaggtggacacag

SEQ ID NO: 1357397 - DNA, 15 bp, Homo sapiens
agacaggtggacaca

SEQ ID NO: 1357398 - DNA, 15 bp, Homo sapiens
gagacaggtggacac

SEQ ID NO: 1357399 - DNA, 15 bp, Homo sapiens
ggagacaggtggaca

SEQ ID NO: 1357400 - DNA, 15 bp, Homo sapiens
gggagacaggtggac

SEQ ID NO: 1357401 - DNA, 15 bp, Homo sapiens
ggggagacaggtgga

SEQ ID NO: 1357402 - DNA, 15 bp, Homo sapiens
gggggagacaggtgg

SEQ ID NO: 1357403 - DNA, 15 bp, Homo sapiens
tgggggagacaggtg

SEQ ID NO: 1357404 - DNA, 15 bp, Homo sapiens
ttgggggagacaggt

SEQ ID NO: 1357405 - DNA, 15 bp, Homo sapiens
cttgggggagacagg

SEQ ID NO: 1357406 - DNA, 15 bp, Homo sapiens
tcttgggggagacag

SEQ ID NO: 1357407 - DNA, 15 bp, Homo sapiens
atcttgggggagaca

SEQ ID NO: 1357408 - DNA, 15 bp, Homo sapiens
gatcttgggggagac

SEQ ID NO: 1357409 - DNA, 15 bp, Homo sapiens
tgatcttgggggaga

SEQ ID NO: 1357410 - DNA, 15 bp, Homo sapiens
ttgatcttgggggag

SEQ ID NO: 1357411 - DNA, 15 bp, Homo sapiens
cttgatcttggggga

SEQ ID NO: 1357412 - DNA, 15 bp, Homo sapiens
ccttgatcttggggg

SEQ ID NO: 1357413 - DNA, 15 bp, Homo sapiens
cccttgatcttgggg

SEQ ID NO: 1357414 - DNA, 15 bp, Homo sapiens
gcccttgatcttggg

SEQ ID NO: 1357415 - DNA, 15 bp, Homo sapiens
agcccttgatcttgg

SEQ ID NO: 1357416 - DNA, 15 bp, Homo sapiens
gaagcccttgatctt

SEQ ID NO: 1357417 - DNA, 15 bp, Homo sapiens
agaagcccttgatct

SEQ ID NO: 1357418 - DNA, 15 bp, Homo sapiens
cagaagcccttgatc

SEQ ID NO: 1357419 - DNA, 15 bp, Homo sapiens
ccagaagcccttgat

SEQ ID NO: 1357420 - DNA, 15 bp, Homo sapiens
tccagaagcccttga

SEQ ID NO: 1357421 - DNA, 15 bp, Homo sapiens
ctccagaagcccttg

SEQ ID NO: 1357422 - DNA, 15 bp, Homo sapiens
cctccagaagccctt

SEQ ID NO: 1357423 - DNA, 15 bp, Homo sapiens
ccctccagaagccct

SEQ ID NO: 1357424 - DNA, 15 bp, Homo sapiens
gccctccagaagccc

SEQ ID NO: 1357425 - DNA, 15 bp, Homo sapiens
tgccctccagaagcc

SEQ ID NO: 1357426 - DNA, 15 bp, Homo sapiens
ctgccctccagaagc

SEQ ID NO: 1357427 - DNA, 15 bp, Homo sapiens
cctgccctccagaag

SEQ ID NO: 1357428 - DNA, 15 bp, Homo sapiens
ccctgccctccagaa

SEQ ID NO: 1357429 - DNA, 15 bp, Homo sapiens
gccctgccctccaga

SEQ ID NO: 1357430 - DNA, 15 bp, Homo sapiens
agccctgccctccag

SEQ ID NO: 1357431 - DNA, 15 bp, Homo sapiens
caagccctgccctcc

SEQ ID NO: 1357432 - DNA, 15 bp, Homo sapiens
ccaagccctgccctc

SEQ ID NO: 1357433 - DNA, 15 bp, Homo sapiens
cccaagccctgccct

SEQ ID NO: 1357434 - DNA, 15 bp, Homo sapiens
gcccaagccctgccc

SEQ ID NO: 1357435 - DNA, 15 bp, Homo sapiens
ggcccaagccctgcc

SEQ ID NO: 1357436 - DNA, 15 bp, Homo sapiens
gggcccaagccctgc

SEQ ID NO: 1357437 - DNA, 15 bp, Homo sapiens
tgggcccaagccctg

SEQ ID NO: 1357438 - DNA, 15 bp, Homo sapiens
atgggcccaagccct

SEQ ID NO: 1357439 - DNA, 15 bp, Homo sapiens
catgggcccaagccc

SEQ ID NO: 1357440 - DNA, 15 bp, Homo sapiens
acatgggcccaagcc

SEQ ID NO: 1357441 - DNA, 15 bp, Homo sapiens
cacatgggcccaagc

SEQ ID NO: 1357442 - DNA, 15 bp, Homo sapiens
tcacatgggcccaag

SEQ ID NO: 1357443 - DNA, 15 bp, Homo sapiens
ctcacatgggcccaa

SEQ ID NO: 1357444 - DNA, 15 bp, Homo sapiens
gctcacatgggccca

SEQ ID NO: 1357445 - DNA, 15 bp, Homo sapiens
tgctcacatgggccc

SEQ ID NO: 1357446 - DNA, 15 bp, Homo sapiens
atgctcacatgggcc

SEQ ID NO: 1357447 - DNA, 15 bp, Homo sapiens
gatgctcacatgggc

SEQ ID NO: 1357448 - DNA, 15 bp, Homo sapiens
cgatgctcacatggg

SEQ ID NO: 1357449 - DNA, 15 bp, Homo sapiens
acgatgctcacatgg

SEQ ID NO: 1357450 - DNA, 15 bp, Homo sapiens
gacgatgctcacatg

SEQ ID NO: 1357451 - DNA, 15 bp, Homo sapiens
cgacgatgctcacat

SEQ ID NO: 1357452 - DNA, 15 bp, Homo sapiens
ccgacgatgctcaca

SEQ ID NO: 1357453 - DNA, 15 bp, Homo sapiens
cccgacgatgctcac

SEQ ID NO: 1357454 - DNA, 15 bp, Homo sapiens
gcccgacgatgctca

SEQ ID NO: 1357455 - DNA, 15 bp, Homo sapiens
agcccgacgatgctc

SEQ ID NO: 1357456 - DNA, 15 bp, Homo sapiens
gagcccgacgatgct

SEQ ID NO: 1357457 - DNA, 15 bp, Homo sapiens
tgagcccgacgatgc

SEQ ID NO: 1357458 - DNA, 15 bp, Homo sapiens
atgagcccgacgatg

SEQ ID NO: 1357459 - DNA, 15 bp, Homo sapiens
aatgagcccgacgat

SEQ ID NO: 1357460 - DNA, 15 bp, Homo sapiens
caatgagcccgacga

SEQ ID NO: 1357461 - DNA, 15 bp, Homo sapiens
gcaatgagcccgacg

SEQ ID NO: 1357462 - DNA, 15 bp, Homo sapiens
tgcaatgagcccgac

SEQ ID NO: 1357463 - DNA, 15 bp, Homo sapiens
ctgcaatgagcccga

SEQ ID NO: 1357464 - DNA, 15 bp, Homo sapiens
gctgcaatgagcccg

SEQ ID NO: 1357465 - DNA, 15 bp, Homo sapiens
tgctgcaatgagccc

SEQ ID NO: 1357466 - DNA, 15 bp, Homo sapiens
ctgctgcaatgagcc

SEQ ID NO: 1357467 - DNA, 15 bp, Homo sapiens
gctgctgcaatgagc

SEQ ID NO: 1357468 - DNA, 15 bp, Homo sapiens
tgctgctgcaatgag

SEQ ID NO: 1357469 - DNA, 15 bp, Homo sapiens
ctgctgctgcaatga

SEQ ID NO: 1357470 - DNA, 15 bp, Homo sapiens
actgctgctgcaatg

SEQ ID NO: 1357471 - DNA, 15 bp, Homo sapiens
cactgctgctgcaat

SEQ ID NO: 1357472 - DNA, 15 bp, Homo sapiens
acactgctgctgcaa

SEQ ID NO: 1357473 - DNA, 15 bp, Homo sapiens
aacactgctgctgca

SEQ ID NO: 1357474 - DNA, 15 bp, Homo sapiens
caacactgctgctgc

SEQ ID NO: 1357475 - DNA, 15 bp, Homo sapiens
ccaacactgctgctg

SEQ ID NO: 1357476 - DNA, 15 bp, Homo sapiens
accaacactgctgct

SEQ ID NO: 1357477 - DNA, 15 bp, Homo sapiens
aaccaacactgctgc

SEQ ID NO: 1357478 - DNA, 15 bp, Homo sapiens
caaccaacactgctg

SEQ ID NO: 1357479 - DNA, 15 bp, Homo sapiens
tcaaccaacactgct

SEQ ID NO: 1357480 - DNA, 15 bp, Homo sapiens
ttcaaccaacactgc

SEQ ID NO: 1357481 - DNA, 15 bp, Homo sapiens
attcaaccaacactg

SEQ ID NO: 1357482 - DNA, 15 bp, Homo sapiens
tattcaaccaacact

SEQ ID NO: 1357483 - DNA, 15 bp, Homo sapiens
ctattcaaccaacac

SEQ ID NO: 1357484 - DNA, 15 bp, Homo sapiens
tctattcaaccaaca

SEQ ID NO: 1357485 - DNA, 15 bp, Homo sapiens
ttctattcaaccaac

SEQ ID NO: 1357486 - DNA, 15 bp, Homo sapiens
attctattcaaccaa

SEQ ID NO: 1357487 - DNA, 15 bp, Homo sapiens
tattctattcaacca

SEQ ID NO: 1357488 - DNA, 15 bp, Homo sapiens
ttattctattcaacc

SEQ ID NO: 1357489 - DNA, 15 bp, Homo sapiens
cttattctattcaac

SEQ ID NO: 1357490 - DNA, 15 bp, Homo sapiens
acttattctattcaa

SEQ ID NO: 1357491 - DNA, 15 bp, Homo sapiens
gacttattctattca

SEQ ID NO: 1357492 - DNA, 15 bp, Homo sapiens
tgacttattctattc

SEQ ID NO: 1357493 - DNA, 15 bp, Homo sapiens
atgacttattctatt

SEQ ID NO: 1357494 - DNA, 15 bp, Homo sapiens
aatgacttattctat

SEQ ID NO: 1357495 - DNA, 15 bp, Homo sapiens
aaatgacttattcta

SEQ ID NO: 1357496 - DNA, 15 bp, Homo sapiens
aaaatgacttattct

SEQ ID NO: 1357497 - DNA, 15 bp, Homo sapiens
aaaaatgacttattc

SEQ ID NO: 1357498 - DNA, 15 bp, Homo sapiens
caaaaatgacttatt

SEQ ID NO: 1357499 - DNA, 15 bp, Homo sapiens
gcaaaaatgacttat

SEQ ID NO: 1357500 - DNA, 15 bp, Homo sapiens
ggcaaaaatgactta

SEQ ID NO: 1357501 - DNA, 15 bp, Homo sapiens
aggcaaaaatgactt

SEQ ID NO: 1357502 - DNA, 15 bp, Homo sapiens
aaggcaaaaatgact

SEQ ID NO: 1357503 - DNA, 15 bp, Homo sapiens
gaaggcaaaaatgac

SEQ ID NO: 1357504 - DNA, 15 bp, Homo sapiens
cgaaggcaaaaatga

SEQ ID NO: 1357505 - DNA, 15 bp, Homo sapiens
acgaaggcaaaaatg

SEQ ID NO: 1357506 - DNA, 15 bp, Homo sapiens
cacgaaggcaaaaat

SEQ ID NO: 1357507 - DNA, 15 bp, Homo sapiens
acacgaaggcaaaaa

SEQ ID NO: 1357508 - DNA, 15 bp, Homo sapiens
cacacgaaggcaaaa

SEQ ID NO: 1357509 - DNA, 15 bp, Homo sapiens
tcacacgaaggcaaa

SEQ ID NO: 1357510 - DNA, 15 bp, Homo sapiens
ttcacacgaaggcaa

SEQ ID NO: 1357511 - DNA, 15 bp, Homo sapiens
attcacacgaaggca

SEQ ID NO: 1357512 - DNA, 15 bp, Homo sapiens
aattcacacgaaggc

SEQ ID NO: 1357513 - DNA, 15 bp, Homo sapiens
gaattcacacgaagg

SEQ ID NO: 1357514 - DNA, 15 bp, Homo sapiens
tgaattcacacgaag

SEQ ID NO: 1357515 - DNA, 15 bp, Homo sapiens
atgaattcacacgaa

SEQ ID NO: 1357516 - DNA, 15 bp, Homo sapiens
gatgaattcacacga

SEQ ID NO: 1357517 - DNA, 15 bp, Homo sapiens
agatgaattcacacg

SEQ ID NO: 1357518 - DNA, 15 bp, Homo sapiens
gagatgaattcacac

SEQ ID NO: 1357519 - DNA, 15 bp, Homo sapiens
agagatgaattcaca

SEQ ID NO: 1357520 - DNA, 15 bp, Homo sapiens
gagagatgaattcac

SEQ ID NO: 1357521 - DNA, 15 bp, Homo sapiens
agagagatgaattca

SEQ ID NO: 1357522 - DNA, 15 bp, Homo sapiens
gagagagatgaattc

SEQ ID NO: 1357523 - DNA, 15 bp, Homo sapiens
agagagagatgaatt

SEQ ID NO: 1357524 - DNA, 15 bp, Homo sapiens
gagagagagatgaat

SEQ ID NO: 1357525 - DNA, 15 bp, Homo sapiens
agagagagagatgaa

SEQ ID NO: 1357526 - DNA, 15 bp, Homo sapiens
gagagagagagatga

SEQ ID NO: 1357527 - DNA, 15 bp, Homo sapiens
agagagagagagatg

SEQ ID NO: 1357528 - DNA, 15 bp, Homo sapiens
cagagagagagagat

SEQ ID NO: 1357529 - DNA, 15 bp, Homo sapiens
gcagagagagagaga

SEQ ID NO: 1357530 - DNA, 15 bp, Homo sapiens
ggcagagagagagag

SEQ ID NO: 1357531 - DNA, 15 bp, Homo sapiens
aggcagagagagaga

SEQ ID NO: 1357532 - DNA, 15 bp, Homo sapiens
gaggcagagagagag

SEQ ID NO: 1357533 - DNA, 15 bp, Homo sapiens
agaggcagagagaga

SEQ ID NO: 1357534 - DNA, 15 bp, Homo sapiens
gagaggcagagagag

SEQ ID NO: 1357535 - DNA, 15 bp, Homo sapiens
ggagaggcagagaga

SEQ ID NO: 1357536 - DNA, 15 bp, Homo sapiens
gggagaggcagagag

SEQ ID NO: 1357537 - DNA, 15 bp, Homo sapiens
agggagaggcagaga

SEQ ID NO: 1357538 - DNA, 15 bp, Homo sapiens
gagggagaggcagag

SEQ ID NO: 1357539 - DNA, 15 bp, Homo sapiens
agagggagaggcaga

SEQ ID NO: 1357540 - DNA, 15 bp, Homo sapiens
gagagggagaggcag

SEQ ID NO: 1357541 - DNA, 15 bp, Homo sapiens
agagagggagaggca

SEQ ID NO: 1357542 - DNA, 15 bp, Homo sapiens
gagagagggagaggc

SEQ ID NO: 1357543 - DNA, 15 bp, Homo sapiens
agagagagggagagg

SEQ ID NO: 1357544 - DNA, 15 bp, Homo sapiens
cagagagagggagag

SEQ ID NO: 1357545 - DNA, 15 bp, Homo sapiens
acagagagagggaga

SEQ ID NO: 1357546 - DNA, 15 bp, Homo sapiens
gacagagagagggag

SEQ ID NO: 1357547 - DNA, 15 bp, Homo sapiens
agacagagagaggga

SEQ ID NO: 1357548 - DNA, 15 bp, Homo sapiens
gagacagagagaggg

SEQ ID NO: 1357549 - DNA, 15 bp, Homo sapiens
agagacagagagagg

SEQ ID NO: 1357550 - DNA, 15 bp, Homo sapiens
ggagagagacagaga

SEQ ID NO: 1357551 - DNA, 15 bp, Homo sapiens
tggagagagacagag

SEQ ID NO: 1357552 - DNA, 15 bp, Homo sapiens
ttggagagagacaga

SEQ ID NO: 1357553 - DNA, 15 bp, Homo sapiens
attggagagagacag

SEQ ID NO: 1357554 - DNA, 15 bp, Homo sapiens
aattggagagagaca

SEQ ID NO: 1357555 - DNA, 15 bp, Homo sapiens
gaattggagagagac

SEQ ID NO: 1357556 - DNA, 15 bp, Homo sapiens
agaattggagagaga

SEQ ID NO: 1357557 - DNA, 15 bp, Homo sapiens
cagaattggagagag

SEQ ID NO: 1357558 - DNA, 15 bp, Homo sapiens
acagaattggagaga

SEQ ID NO: 1357559 - DNA, 15 bp, Homo sapiens
gacagaattggagag

SEQ ID NO: 1357560 - DNA, 15 bp, Homo sapiens
agacagaattggaga

SEQ ID NO: 1357561 - DNA, 15 bp, Homo sapiens
gagacagaattggag

SEQ ID NO: 1357562 - DNA, 15 bp, Homo sapiens
agagacagaattgga

SEQ ID NO: 1357563 - DNA, 15 bp, Homo sapiens
cagagacagaattgg

SEQ ID NO: 1357564 - DNA, 15 bp, Homo sapiens
tcagagacagaattg

SEQ ID NO: 1357565 - DNA, 15 bp, Homo sapiens
gtcagagacagaatt

SEQ ID NO: 1357566 - DNA, 15 bp, Homo sapiens
agtcagagacagaat

SEQ ID NO: 1357567 - DNA, 15 bp, Homo sapiens
aagtcagagacagaa

SEQ ID NO: 1357568 - DNA, 15 bp, Homo sapiens
caagtcagagacaga

SEQ ID NO: 1357569 - DNA, 15 bp, Homo sapiens
gcaagtcagagacag

SEQ ID NO: 1357570 - DNA, 15 bp, Homo sapiens
agcaagtcagagaca

SEQ ID NO: 1357571 - DNA, 15 bp, Homo sapiens
aagcaagtcagagac

SEQ ID NO: 1357572 - DNA, 15 bp, Homo sapiens
aaagcaagtcagaga

SEQ ID NO: 1357573 - DNA, 15 bp, Homo sapiens
caaagcaagtcagag

SEQ ID NO: 1357574 - DNA, 15 bp, Homo sapiens
acaaagcaagtcaga

SEQ ID NO: 1357575 - DNA, 15 bp, Homo sapiens
gacaaagcaagtcag

SEQ ID NO: 1357576 - DNA, 15 bp, Homo sapiens
agacaaagcaagtca

SEQ ID NO: 1357577 - DNA, 15 bp, Homo sapiens
aagacaaagcaagtc

SEQ ID NO: 1357578 - DNA, 15 bp, Homo sapiens
aaagacaaagcaagt

SEQ ID NO: 1357579 - DNA, 15 bp, Homo sapiens
taaagacaaagcaag

SEQ ID NO: 1357580 - DNA, 15 bp, Homo sapiens
ttaaagacaaagcaa

SEQ ID NO: 1357581 - DNA, 15 bp, Homo sapiens
gttaaagacaaagca

SEQ ID NO: 1357582 - DNA, 15 bp, Homo sapiens
agttaaagacaaagc

SEQ ID NO: 1357583 - DNA, 15 bp, Homo sapiens
gagttaaagacaaag

SEQ ID NO: 1357584 - DNA, 15 bp, Homo sapiens
agagttaaagacaaa

SEQ ID NO: 1357585 - DNA, 15 bp, Homo sapiens
aagagttaaagacaa

SEQ ID NO: 1357586 - DNA, 15 bp, Homo sapiens
aaagagttaaagaca

SEQ ID NO: 1357587 - DNA, 15 bp, Homo sapiens
taaagagttaaagac

SEQ ID NO: 1357588 - DNA, 15 bp, Homo sapiens
ataaagagttaaaga

SEQ ID NO: 1357589 - DNA, 15 bp, Homo sapiens
gataaagagttaaag

SEQ ID NO: 1357590 - DNA, 15 bp, Homo sapiens
agataaagagttaaa

SEQ ID NO: 1357591 - DNA, 15 bp, Homo sapiens
gagataaagagttaa

SEQ ID NO: 1357592 - DNA, 15 bp, Homo sapiens
agagataaagagtta

SEQ ID NO: 1357593 - DNA, 15 bp, Homo sapiens
gagagataaagagtt

SEQ ID NO: 1357594 - DNA, 15 bp, Homo sapiens
agagagataaagagt

SEQ ID NO: 1357595 - DNA, 15 bp, Homo sapiens
cagagagataaagag

SEQ ID NO: 1357596 - DNA, 15 bp, Homo sapiens
acagagagataaaga

SEQ ID NO: 1357597 - DNA, 15 bp, Homo sapiens
gacagagagataaag

SEQ ID NO: 1357598 - DNA, 15 bp, Homo sapiens
agacagagagataaa

SEQ ID NO: 1357599 - DNA, 15 bp, Homo sapiens
cagacagagagataa

SEQ ID NO: 1357600 - DNA, 15 bp, Homo sapiens
acagacagagagata

SEQ ID NO: 1357601 - DNA, 15 bp, Homo sapiens
cacagacagagagat

SEQ ID NO: 1357602 - DNA, 15 bp, Homo sapiens
acacagacagagaga

SEQ ID NO: 1357603 - DNA, 15 bp, Homo sapiens
gacacagacagagag

SEQ ID NO: 1357604 - DNA, 15 bp, Homo sapiens
agacacagacagaga

SEQ ID NO: 1357605 - DNA, 15 bp, Homo sapiens
aagacacagacagag

SEQ ID NO: 1357606 - DNA, 15 bp, Homo sapiens
caagacacagacaga

SEQ ID NO: 1357607 - DNA, 15 bp, Homo sapiens
acaagacacagacag

SEQ ID NO: 1357608 - DNA, 15 bp, Homo sapiens
aacaagacacagaca

SEQ ID NO: 1357609 - DNA, 15 bp, Homo sapiens
gaacaagacacagac

SEQ ID NO: 1357610 - DNA, 15 bp, Homo sapiens
agaacaagacacaga

SEQ ID NO: 1357611 - DNA, 15 bp, Homo sapiens
tagaacaagacacag

SEQ ID NO: 1357612 - DNA, 15 bp, Homo sapiens
atagaacaagacaca

SEQ ID NO: 1357613 - DNA, 15 bp, Homo sapiens
gatagaacaagacac

SEQ ID NO: 1357614 - DNA, 15 bp, Homo sapiens
ggatagaacaagaca

SEQ ID NO: 1357615 - DNA, 15 bp, Homo sapiens
gggatagaacaagac

SEQ ID NO: 1357616 - DNA, 15 bp, Homo sapiens
ggggatagaacaaga

SEQ ID NO: 1357617 - DNA, 15 bp, Homo sapiens
gggggatagaacaag

SEQ ID NO: 1357618 - DNA, 15 bp, Homo sapiens
agggggatagaacaa

SEQ ID NO: 1357619 - DNA, 15 bp, Homo sapiens
gagggggatagaaca

SEQ ID NO: 1357620 - DNA, 15 bp, Homo sapiens
agagggggatagaac

SEQ ID NO: 1357621 - DNA, 15 bp, Homo sapiens
gagagggggatagaa

SEQ ID NO: 1357622 - DNA, 15 bp, Homo sapiens
ggagagggggataga

SEQ ID NO: 1357623 - DNA, 15 bp, Homo sapiens
gggagagggggatag

SEQ ID NO: 1357624 - DNA, 15 bp, Homo sapiens
agggagagggggata

SEQ ID NO: 1357625 - DNA, 15 bp, Homo sapiens
cagggagagggggat

SEQ ID NO: 1357626 - DNA, 15 bp, Homo sapiens
acagggagaggggga

SEQ ID NO: 1357627 - DNA, 15 bp, Homo sapiens
aacagggagaggggg

SEQ ID NO: 1357628 - DNA, 15 bp, Homo sapiens
gaacagggagagggg

SEQ ID NO: 1357629 - DNA, 15 bp, Homo sapiens
agaacagggagaggg

SEQ ID NO: 1357630 - DNA, 15 bp, Homo sapiens
aagaacagggagagg

SEQ ID NO: 1357631 - DNA, 15 bp, Homo sapiens
caagaacagggagag

SEQ ID NO: 1357632 - DNA, 15 bp, Homo sapiens
gcaagaacagggaga

SEQ ID NO: 1357633 - DNA, 15 bp, Homo sapiens
tgcaagaacagggag

SEQ ID NO: 1357634 - DNA, 15 bp, Homo sapiens
ttgcaagaacaggga

SEQ ID NO: 1357635 - DNA, 15 bp, Homo sapiens
gttgcaagaacaggg

SEQ ID NO: 1357636 - DNA, 15 bp, Homo sapiens
agttgcaagaacagg

SEQ ID NO: 1357637 - DNA, 15 bp, Homo sapiens
gagttgcaagaacag

SEQ ID NO: 1357638 - DNA, 15 bp, Homo sapiens
tgagttgcaagaaca

SEQ ID NO: 1357639 - DNA, 15 bp, Homo sapiens
gtgagttgcaagaac

SEQ ID NO: 1357640 - DNA, 15 bp, Homo sapiens
ggtgagttgcaagaa

SEQ ID NO: 1357641 - DNA, 15 bp, Homo sapiens
gggtgagttgcaaga

SEQ ID NO: 1357642 - DNA, 15 bp, Homo sapiens
agggtgagttgcaag

SEQ ID NO: 1357643 - DNA, 15 bp, Homo sapiens
gagggtgagttgcaa

SEQ ID NO: 1357644 - DNA, 15 bp, Homo sapiens
agagggtgagttgca

SEQ ID NO: 1357645 - DNA, 15 bp, Homo sapiens
tagagggtgagttgc

SEQ ID NO: 1357646 - DNA, 15 bp, Homo sapiens
atagagggtgagttg

SEQ ID NO: 1357647 - DNA, 15 bp, Homo sapiens
aatagagggtgagtt

SEQ ID NO: 1357648 - DNA, 15 bp, Homo sapiens
aaatagagggtgagt

SEQ ID NO: 1357649 - DNA, 15 bp, Homo sapiens
gaaatagagggtgag

SEQ ID NO: 1357650 - DNA, 15 bp, Homo sapiens
agaaatagagggtga

SEQ ID NO: 1357651 - DNA, 15 bp, Homo sapiens
cagaaatagagggtg

SEQ ID NO: 1357652 - DNA, 15 bp, Homo sapiens
acagaaatagagggt

SEQ ID NO: 1357653 - DNA, 15 bp, Homo sapiens
aacagaaatagaggg

SEQ ID NO: 1357654 - DNA, 15 bp, Homo sapiens
aaacagaaatagagg

SEQ ID NO: 1357655 - DNA, 15 bp, Homo sapiens
gaaacagaaatagag

SEQ ID NO: 1357656 - DNA, 15 bp, Homo sapiens
agaaacagaaataga

SEQ ID NO: 1357657 - DNA, 15 bp, Homo sapiens
cagaaacagaaatag

SEQ ID NO: 1357658 - DNA, 15 bp, Homo sapiens
tcagaaacagaaata

SEQ ID NO: 1357659 - DNA, 15 bp, Homo sapiens
atcagaaacagaaat

SEQ ID NO: 1357660 - DNA, 15 bp, Homo sapiens
aatcagaaacagaaa

SEQ ID NO: 1357661 - DNA, 15 bp, Homo sapiens
gaatcagaaacagaa

SEQ ID NO: 1357662 - DNA, 15 bp, Homo sapiens
ggaatcagaaacaga

SEQ ID NO: 1357663 - DNA, 15 bp, Homo sapiens
gggaatcagaaacag

SEQ ID NO: 1357664 - DNA, 15 bp, Homo sapiens
agggaatcagaaaca

SEQ ID NO: 1357665 - DNA, 15 bp, Homo sapiens
gagggaatcagaaac

SEQ ID NO: 1357666 - DNA, 15 bp, Homo sapiens
agagggaatcagaaa

SEQ ID NO: 1357667 - DNA, 15 bp, Homo sapiens
gagagggaatcagaa

SEQ ID NO: 1357668 - DNA, 15 bp, Homo sapiens
agagagggaatcaga

SEQ ID NO: 1357669 - DNA, 15 bp, Homo sapiens
gagagagggaatcag

SEQ ID NO: 1357670 - DNA, 15 bp, Homo sapiens
agagagagggaatca

SEQ ID NO: 1357671 - DNA, 15 bp, Homo sapiens
cagagagagggaatc

SEQ ID NO: 1357672 - DNA, 15 bp, Homo sapiens
acagagagagggaat

SEQ ID NO: 1357673 - DNA, 15 bp, Homo sapiens
gacagagagagggaa

SEQ ID NO: 1357674 - DNA, 15 bp, Homo sapiens
ggagacagagagagg

SEQ ID NO: 1357675 - DNA, 15 bp, Homo sapiens
gggagacagagagag

SEQ ID NO: 1357676 - DNA, 15 bp, Homo sapiens
agggagacagagaga

SEQ ID NO: 1357677 - DNA, 15 bp, Homo sapiens
cagggagacagagag

SEQ ID NO: 1357678 - DNA, 15 bp, Homo sapiens
acagggagacagaga

SEQ ID NO: 1357679 - DNA, 15 bp, Homo sapiens
gacagggagacagag

SEQ ID NO: 1357680 - DNA, 15 bp, Homo sapiens
agacagggagacaga

SEQ ID NO: 1357681 - DNA, 15 bp, Homo sapiens
gagacagggagacag

SEQ ID NO: 1357682 - DNA, 15 bp, Homo sapiens
agagacagggagaca

SEQ ID NO: 1357683 - DNA, 15 bp, Homo sapiens
gagagacagggagac

SEQ ID NO: 1357684 - DNA, 15 bp, Homo sapiens
agagagacagggaga

SEQ ID NO: 1357685 - DNA, 15 bp, Homo sapiens
gagagagacagggag

SEQ ID NO: 1357686 - DNA, 15 bp, Homo sapiens
agagagagacaggga

SEQ ID NO: 1357687 - DNA, 15 bp, Homo sapiens
cagagagagacaggg

SEQ ID NO: 1357688 - DNA, 15 bp, Homo sapiens
acagagagagacagg

SEQ ID NO: 1357689 - DNA, 15 bp, Homo sapiens
gacagagagagacag

SEQ ID NO: 1357690 - DNA, 15 bp, Homo sapiens
agacagagagagaca

SEQ ID NO: 1357691 - DNA, 15 bp, Homo sapiens
gagacagagagagac

SEQ ID NO: 1357692 - DNA, 15 bp, Homo sapiens
ggagacagagagaga

SEQ ID NO: 1357693 - DNA, 15 bp, Homo sapiens
aggagacagagagag

SEQ ID NO: 1357694 - DNA, 15 bp, Homo sapiens
caggagacagagaga

SEQ ID NO: 1357695 - DNA, 15 bp, Homo sapiens
tcaggagacagagag

SEQ ID NO: 1357696 - DNA, 15 bp, Homo sapiens
atcaggagacagaga

SEQ ID NO: 1357697 - DNA, 15 bp, Homo sapiens
aatcaggagacagag

SEQ ID NO: 1357698 - DNA, 15 bp, Homo sapiens
aaatcaggagacaga

SEQ ID NO: 1357699 - DNA, 15 bp, Homo sapiens
aaaatcaggagacag

SEQ ID NO: 1357700 - DNA, 15 bp, Homo sapiens
gaaaatcaggagaca

SEQ ID NO: 1357701 - DNA, 15 bp, Homo sapiens
agaaaatcaggagac

SEQ ID NO: 1357702 - DNA, 15 bp, Homo sapiens
gagaaaatcaggaga

SEQ ID NO: 1357703 - DNA, 15 bp, Homo sapiens
agagaaaatcaggag

SEQ ID NO: 1357704 - DNA, 15 bp, Homo sapiens
gagagaaaatcagga

SEQ ID NO: 1357705 - DNA, 15 bp, Homo sapiens
agagagaaaatcagg

SEQ ID NO: 1357706 - DNA, 15 bp, Homo sapiens
gagagagaaaatcag

SEQ ID NO: 1357707 - DNA, 15 bp, Homo sapiens
agagagagaaaatca

SEQ ID NO: 1357708 - DNA, 15 bp, Homo sapiens
gagagagagaaaatc

SEQ ID NO: 1357709 - DNA, 15 bp, Homo sapiens
ggagagagagaaaat

SEQ ID NO: 1357710 - DNA, 15 bp, Homo sapiens
tggagagagagaaaa

SEQ ID NO: 1357711 - DNA, 15 bp, Homo sapiens
ttggagagagagaaa

SEQ ID NO: 1357712 - DNA, 15 bp, Homo sapiens
gttggagagagagaa

SEQ ID NO: 1357713 - DNA, 15 bp, Homo sapiens
agttggagagagaga

SEQ ID NO: 1357714 - DNA, 15 bp, Homo sapiens
aagttggagagagag

SEQ ID NO: 1357715 - DNA, 15 bp, Homo sapiens
aaagttggagagaga

SEQ ID NO: 1357716 - DNA, 15 bp, Homo sapiens
gaaagttggagagag

SEQ ID NO: 1357717 - DNA, 15 bp, Homo sapiens
agaaagttggagaga

SEQ ID NO: 1357718 - DNA, 15 bp, Homo sapiens
gagaaagttggagag

SEQ ID NO: 1357719 - DNA, 15 bp, Homo sapiens
agagaaagttggaga

SEQ ID NO: 1357720 - DNA, 15 bp, Homo sapiens
gagagaaagttggag

SEQ ID NO: 1357721 - DNA, 15 bp, Homo sapiens
agagagaaagttgga

SEQ ID NO: 1357722 - DNA, 15 bp, Homo sapiens
tagagagaaagttgg

SEQ ID NO: 1357723 - DNA, 15 bp, Homo sapiens
atagagagaaagttg

SEQ ID NO: 1357724 - DNA, 15 bp, Homo sapiens
tatagagagaaagtt

SEQ ID NO: 1357725 - DNA, 15 bp, Homo sapiens
gtatagagagaaagt

SEQ ID NO: 1357726 - DNA, 15 bp, Homo sapiens
ggtatagagagaaag

SEQ ID NO: 1357727 - DNA, 15 bp, Homo sapiens
aggtatagagagaaa

SEQ ID NO: 1357728 - DNA, 15 bp, Homo sapiens
gaggtatagagagaa

SEQ ID NO: 1357729 - DNA, 15 bp, Homo sapiens
agaggtatagagaga

SEQ ID NO: 1357730 - DNA, 15 bp, Homo sapiens
gagaggtatagagag

SEQ ID NO: 1357731 - DNA, 15 bp, Homo sapiens
agagaggtatagaga

SEQ ID NO: 1357732 - DNA, 15 bp, Homo sapiens
cagagaggtatagag

SEQ ID NO: 1357733 - DNA, 15 bp, Homo sapiens
tcagagaggtataga

SEQ ID NO: 1357734 - DNA, 15 bp, Homo sapiens
atcagagaggtatag

SEQ ID NO: 1357735 - DNA, 15 bp, Homo sapiens
aatcagagaggtata

SEQ ID NO: 1357736 - DNA, 15 bp, Homo sapiens
gaatcagagaggtat

SEQ ID NO: 1357737 - DNA, 15 bp, Homo sapiens
agaatcagagaggta

SEQ ID NO: 1357738 - DNA, 15 bp, Homo sapiens
gagaatcagagaggt

SEQ ID NO: 1357739 - DNA, 15 bp, Homo sapiens
gggagaatcagagag

SEQ ID NO: 1357740 - DNA, 15 bp, Homo sapiens
agggagaatcagaga

SEQ ID NO: 1357741 - DNA, 15 bp, Homo sapiens
gagggagaatcagag

SEQ ID NO: 1357742 - DNA, 15 bp, Homo sapiens
agagggagaatcaga

SEQ ID NO: 1357743 - DNA, 15 bp, Homo sapiens
cagagggagaatcag

SEQ ID NO: 1357744 - DNA, 15 bp, Homo sapiens
acagagggagaatca

SEQ ID NO: 1357745 - DNA, 15 bp, Homo sapiens
gacagagggagaatc

SEQ ID NO: 1357746 - DNA, 15 bp, Homo sapiens
agacagagggagaat

SEQ ID NO: 1357747 - DNA, 15 bp, Homo sapiens
gagacagagggagaa

SEQ ID NO: 1357748 - DNA, 15 bp, Homo sapiens
agagacagagggaga

SEQ ID NO: 1357749 - DNA, 15 bp, Homo sapiens
aagagacagagggag

SEQ ID NO: 1357750 - DNA, 15 bp, Homo sapiens
aaagagacagaggga

SEQ ID NO: 1357751 - DNA, 15 bp, Homo sapiens
aaaagagacagaggg

SEQ ID NO: 1357752 - DNA, 15 bp, Homo sapiens
gaaaaagagacagag

SEQ ID NO: 1357753 - DNA, 15 bp, Homo sapiens
agaaaaagagacaga

SEQ ID NO: 1357754 - DNA, 15 bp, Homo sapiens
cagaaaaagagacag

SEQ ID NO: 1357755 - DNA, 15 bp, Homo sapiens
acagaaaaagagaca

SEQ ID NO: 1357756 - DNA, 15 bp, Homo sapiens
aacagaaaaagagac

SEQ ID NO: 1357757 - DNA, 15 bp, Homo sapiens
gaacagaaaaagaga

SEQ ID NO: 1357758 - DNA, 15 bp, Homo sapiens
ggaacagaaaaagag

SEQ ID NO: 1357759 - DNA, 15 bp, Homo sapiens
gggaacagaaaaaga

SEQ ID NO: 1357760 - DNA, 15 bp, Homo sapiens
ggggaacagaaaaag

SEQ ID NO: 1357761 - DNA, 15 bp, Homo sapiens
aggggaacagaaaaa

SEQ ID NO: 1357762 - DNA, 15 bp, Homo sapiens
gaggggaacagaaaa

SEQ ID NO: 1357763 - DNA, 15 bp, Homo sapiens
agaggggaacagaaa

SEQ ID NO: 1357764 - DNA, 15 bp, Homo sapiens
gagaggggaacagaa

SEQ ID NO: 1357765 - DNA, 15 bp, Homo sapiens
ggagaggggaacaga

SEQ ID NO: 1357766 - DNA, 15 bp, Homo sapiens
gggagaggggaacag

SEQ ID NO: 1357767 - DNA, 15 bp, Homo sapiens
ggggagaggggaaca

SEQ ID NO: 1357768 - DNA, 15 bp, Homo sapiens
cggggagaggggaac

SEQ ID NO: 1357769 - DNA, 15 bp, Homo sapiens
acggggagaggggaa

SEQ ID NO: 1357770 - DNA, 15 bp, Homo sapiens
gacggggagagggga

SEQ ID NO: 1357771 - DNA, 15 bp, Homo sapiens
ggacggggagagggg

SEQ ID NO: 1357772 - DNA, 15 bp, Homo sapiens
tggacggggagaggg

SEQ ID NO: 1357773 - DNA, 15 bp, Homo sapiens
atggacggggagagg

SEQ ID NO: 1357774 - DNA, 15 bp, Homo sapiens
gatggacggggagag

SEQ ID NO: 1357775 - DNA, 15 bp, Homo sapiens
agatggacggggaga

SEQ ID NO: 1357776 - DNA, 15 bp, Homo sapiens
gagatggacggggag

SEQ ID NO: 1357777 - DNA, 15 bp, Homo sapiens
agagatggacgggga

SEQ ID NO: 1357778 - DNA, 15 bp, Homo sapiens
gagagatggacgggg

SEQ ID NO: 1357779 - DNA, 15 bp, Homo sapiens
ggagagatggacggg

SEQ ID NO: 1357780 - DNA, 15 bp, Homo sapiens
gggagagatggacgg

SEQ ID NO: 1357781 - DNA, 15 bp, Homo sapiens
cgggagagatggacg

SEQ ID NO: 1357782 - DNA, 15 bp, Homo sapiens
ccgggagagatggac

SEQ ID NO: 1357783 - DNA, 15 bp, Homo sapiens
gccgggagagatgga

SEQ ID NO: 1357784 - DNA, 15 bp, Homo sapiens
ggccgggagagatgg

SEQ ID NO: 1357785 - DNA, 15 bp, Homo sapiens
aggccgggagagatg

SEQ ID NO: 1357786 - DNA, 15 bp, Homo sapiens
caggccgggagagat

SEQ ID NO: 1357787 - DNA, 15 bp, Homo sapiens
gcaggccgggagaga

SEQ ID NO: 1357788 - DNA, 15 bp, Homo sapiens
ggcaggccgggagag

SEQ ID NO: 1357789 - DNA, 15 bp, Homo sapiens
tggcaggccgggaga

SEQ ID NO: 1357790 - DNA, 15 bp, Homo sapiens
gtggcaggccgggag

SEQ ID NO: 1357791 - DNA, 15 bp, Homo sapiens
ggtggcaggccggga

SEQ ID NO: 1357792 - DNA, 15 bp, Homo sapiens
aggtggcaggccggg

SEQ ID NO: 1357793 - DNA, 15 bp, Homo sapiens
aaggtggcaggccgg

SEQ ID NO: 1357794 - DNA, 15 bp, Homo sapiens
gaaggtggcaggccg

SEQ ID NO: 1357795 - DNA, 15 bp, Homo sapiens
tgaaggtggcaggcc

SEQ ID NO: 1357796 - DNA, 15 bp, Homo sapiens
ctgaaggtggcaggc

SEQ ID NO: 1357797 - DNA, 15 bp, Homo sapiens
cctgaaggtggcagg

SEQ ID NO: 1357798 - DNA, 15 bp, Homo sapiens
ccctgaaggtggcag

SEQ ID NO: 1357799 - DNA, 15 bp, Homo sapiens
cccctgaaggtggca

SEQ ID NO: 1357800 - DNA, 15 bp, Homo sapiens
acccctgaaggtggc

SEQ ID NO: 1357801 - DNA, 15 bp, Homo sapiens
gacccctgaaggtgg

SEQ ID NO: 1357802 - DNA, 15 bp, Homo sapiens
ggacccctgaaggtg

SEQ ID NO: 1357803 - DNA, 15 bp, Homo sapiens
gggacccctgaaggt

SEQ ID NO: 1357804 - DNA, 15 bp, Homo sapiens
ggggacccctgaagg

SEQ ID NO: 1357805 - DNA, 15 bp, Homo sapiens
tggggacccctgaag

SEQ ID NO: 1357806 - DNA, 15 bp, Homo sapiens
gtggggacccctgaa

SEQ ID NO: 1357807 - DNA, 15 bp, Homo sapiens
cgtggggacccctga

SEQ ID NO: 1357808 - DNA, 15 bp, Homo sapiens
ccgtggggacccctg

SEQ ID NO: 1357809 - DNA, 15 bp, Homo sapiens
tccgtggggacccct

SEQ ID NO: 1357810 - DNA, 15 bp, Homo sapiens
ctccgtggggacccc

SEQ ID NO: 1357811 - DNA, 15 bp, Homo sapiens
actccgtggggaccc

SEQ ID NO: 1357812 - DNA, 15 bp, Homo sapiens
gactccgtggggacc

SEQ ID NO: 1357813 - DNA, 15 bp, Homo sapiens
agactccgtggggac

SEQ ID NO: 1357814 - DNA, 15 bp, Homo sapiens
cagactccgtgggga

SEQ ID NO: 1357815 - DNA, 15 bp, Homo sapiens
ccagactccgtgggg

SEQ ID NO: 1357816 - DNA, 15 bp, Homo sapiens
tccagactccgtggg

SEQ ID NO: 1357817 - DNA, 15 bp, Homo sapiens
gtccagactccgtgg

SEQ ID NO: 1357818 - DNA, 15 bp, Homo sapiens
ggtccagactccgtg

SEQ ID NO: 1357819 - DNA, 15 bp, Homo sapiens
tggtccagactccgt

SEQ ID NO: 1357820 - DNA, 15 bp, Homo sapiens
atggtccagactccg

SEQ ID NO: 1357821 - DNA, 15 bp, Homo sapiens
catggtccagactcc

SEQ ID NO: 1357822 - DNA, 15 bp, Homo sapiens
ccatggtccagactc

SEQ ID NO: 1357823 - DNA, 15 bp, Homo sapiens
tccatggtccagact

SEQ ID NO: 1357824 - DNA, 15 bp, Homo sapiens
ctccatggtccagac

SEQ ID NO: 1357825 - DNA, 15 bp, Homo sapiens
cctccatggtccaga

SEQ ID NO: 1357826 - DNA, 15 bp, Homo sapiens
gctcctccatggtcc

SEQ ID NO: 1357827 - DNA, 15 bp, Homo sapiens
cgctcctccatggtc

SEQ ID NO: 1357828 - DNA, 15 bp, Homo sapiens
tcgctcctccatggt

SEQ ID NO: 1357829 - DNA, 15 bp, Homo sapiens
ctcgctcctccatgg

SEQ ID NO: 1357830 - DNA, 15 bp, Homo sapiens
cctcgctcctccatg

SEQ ID NO: 1357831 - DNA, 15 bp, Homo sapiens
acctcgctcctccat

SEQ ID NO: 1357832 - DNA, 15 bp, Homo sapiens
gacctcgctcctcca

SEQ ID NO: 1357833 - DNA, 15 bp, Homo sapiens
agacctcgctcctcc

SEQ ID NO: 1357834 - DNA, 15 bp, Homo sapiens
cagacctcgctcctc

SEQ ID NO: 1357835 - DNA, 15 bp, Homo sapiens
ccagacctcgctcct

SEQ ID NO: 1357836 - DNA, 15 bp, Homo sapiens
gccagacctcgctcc

SEQ ID NO: 1357837 - DNA, 15 bp, Homo sapiens
ggccagacctcgctc

SEQ ID NO: 1357838 - DNA, 15 bp, Homo sapiens
gggccagacctcgct

SEQ ID NO: 1357839 - DNA, 15 bp, Homo sapiens
ggggccagacctcgc

SEQ ID NO: 1357840 - DNA, 15 bp, Homo sapiens
gggggccagacctcg

SEQ ID NO: 1357841 - DNA, 15 bp, Homo sapiens
tgggggccagacctc

SEQ ID NO: 1357842 - DNA, 15 bp, Homo sapiens
ttgggggccagacct

SEQ ID NO: 1357843 - DNA, 15 bp, Homo sapiens
cttgggggccagacc

SEQ ID NO: 1357844 - DNA, 15 bp, Homo sapiens
acttgggggccagac

SEQ ID NO: 1357845 - DNA, 15 bp, Homo sapiens
aacttgggggccaga

SEQ ID NO: 1357846 - DNA, 15 bp, Homo sapiens
gaacttgggggccag

SEQ ID NO: 1357847 - DNA, 15 bp, Homo sapiens
cgaacttgggggcca

SEQ ID NO: 1357848 - DNA, 15 bp, Homo sapiens
tcgaacttgggggcc

SEQ ID NO: 1357849 - DNA, 15 bp, Homo sapiens
gtcgaacttgggggc

SEQ ID NO: 1357850 - DNA, 15 bp, Homo sapiens
tgtcgaacttggggg

SEQ ID NO: 1357851 - DNA, 15 bp, Homo sapiens
gtgtcgaacttgggg

SEQ ID NO: 1357852 - DNA, 15 bp, Homo sapiens
ggtgtcgaacttggg

SEQ ID NO: 1357853 - DNA, 15 bp, Homo sapiens
tggtgtcgaacttgg

SEQ ID NO: 1357854 - DNA, 15 bp, Homo sapiens
gtggtgtcgaacttg

SEQ ID NO: 1357855 - DNA, 15 bp, Homo sapiens
ggtggtgtcgaactt

SEQ ID NO: 1357856 - DNA, 15 bp, Homo sapiens
aggtggtgtcgaact

SEQ ID NO: 1357857 - DNA, 15 bp, Homo sapiens
aaggtggtgtcgaac

SEQ ID NO: 1357858 - DNA, 15 bp, Homo sapiens
aaaggtggtgtcgaa

SEQ ID NO: 1357859 - DNA, 15 bp, Homo sapiens
caaaggtggtgtcga

SEQ ID NO: 1357860 - DNA, 15 bp, Homo sapiens
tcaaaggtggtgtcg

SEQ ID NO: 1357861 - DNA, 15 bp, Homo sapiens
ctcaaaggtggtgtc

SEQ ID NO: 1357862 - DNA, 15 bp, Homo sapiens
tctcaaaggtggtgt

SEQ ID NO: 1357863 - DNA, 15 bp, Homo sapiens
ctctcaaaggtggtg

SEQ ID NO: 1357864 - DNA, 15 bp, Homo sapiens
gctctcaaaggtggt

SEQ ID NO: 1357865 - DNA, 15 bp, Homo sapiens
cgctctcaaaggtgg

SEQ ID NO: 1357866 - DNA, 15 bp, Homo sapiens
gcgctctcaaaggtg

SEQ ID NO: 1357867 - DNA, 15 bp, Homo sapiens
cgcgctctcaaaggt

SEQ ID NO: 1357868 - DNA, 15 bp, Homo sapiens
gcgcgctctcaaagg

SEQ ID NO: 1357869 - DNA, 15 bp, Homo sapiens
cgcgcgctctcaaag

SEQ ID NO: 1357870 - DNA, 15 bp, Homo sapiens
ccgcgcgctctcaaa

SEQ ID NO: 1357871 - DNA, 15 bp, Homo sapiens
gccgcgcgctctcaa

SEQ ID NO: 1357872 - DNA, 15 bp, Homo sapiens
ggccgcgcgctctca

SEQ ID NO: 1357873 - DNA, 15 bp, Homo sapiens
gggccgcgcgctctc

SEQ ID NO: 1357874 - DNA, 15 bp, Homo sapiens
tgggccgcgcgctct

SEQ ID NO: 1357875 - DNA, 15 bp, Homo sapiens
gtgggccgcgcgctc

SEQ ID NO: 1357876 - DNA, 15 bp, Homo sapiens
cgtgggccgcgcgct

SEQ ID NO: 1357877 - DNA, 15 bp, Homo sapiens
gcgtgggccgcgcgc

SEQ ID NO: 1357878 - DNA, 15 bp, Homo sapiens
tgcgtgggccgcgcg

SEQ ID NO: 1357879 - DNA, 15 bp, Homo sapiens
ctgcgtgggccgcgc

SEQ ID NO: 1357880 - DNA, 15 bp, Homo sapiens
tctgcgtgggccgcg

SEQ ID NO: 1357881 - DNA, 15 bp, Homo sapiens
gtctgcgtgggccgc

SEQ ID NO: 1357882 - DNA, 15 bp, Homo sapiens
ggtctgcgtgggccg

SEQ ID NO: 1357883 - DNA, 15 bp, Homo sapiens
gggtctgcgtgggcc

SEQ ID NO: 1357884 - DNA, 15 bp, Homo sapiens
tgggtctgcgtgggc

SEQ ID NO: 1357885 - DNA, 15 bp, Homo sapiens
gtgggtctgcgtggg

SEQ ID NO: 1357886 - DNA, 15 bp, Homo sapiens
tgtgggtctgcgtgg

SEQ ID NO: 1357887 - DNA, 15 bp, Homo sapiens
atgtgggtctgcgtg

SEQ ID NO: 1357888 - DNA, 15 bp, Homo sapiens
catgtgggtctgcgt

SEQ ID NO: 1357889 - DNA, 15 bp, Homo sapiens
ccatgtgggtctgcg

SEQ ID NO: 1357890 - DNA, 15 bp, Homo sapiens
gccatgtgggtctgc

SEQ ID NO: 1357891 - DNA, 15 bp, Homo sapiens
cgccatgtgggtctg

SEQ ID NO: 1357892 - DNA, 15 bp, Homo sapiens
gcgccatgtgggtct

SEQ ID NO: 1357893 - DNA, 15 bp, Homo sapiens
agcgccatgtgggtc

SEQ ID NO: 1357894 - DNA, 15 bp, Homo sapiens
cagcgccatgtgggt

SEQ ID NO: 1357895 - DNA, 15 bp, Homo sapiens
ccagcgccatgtggg

SEQ ID NO: 1357896 - DNA, 15 bp, Homo sapiens
accagcgccatgtgg

SEQ ID NO: 1357897 - DNA, 15 bp, Homo sapiens
caccagcgccatgtg

SEQ ID NO: 1357898 - DNA, 15 bp, Homo sapiens
gcaccagcgccatgt

SEQ ID NO: 1357899 - DNA, 15 bp, Homo sapiens
tgcaccagcgccatg

SEQ ID NO: 1357900 - DNA, 15 bp, Homo sapiens
ctgcaccagcgccat

SEQ ID NO: 1357901 - DNA, 15 bp, Homo sapiens
gctgcaccagcgcca

SEQ ID NO: 1357902 - DNA, 15 bp, Homo sapiens
agctgcaccagcgcc

SEQ ID NO: 1357903 - DNA, 15 bp, Homo sapiens
cagctgcaccagcgc

SEQ ID NO: 1357904 - DNA, 15 bp, Homo sapiens
ccagctgcaccagcg

SEQ ID NO: 1357905 - DNA, 15 bp, Homo sapiens
tccagctgcaccagc

SEQ ID NO: 1357906 - DNA, 15 bp, Homo sapiens
ctccagctgcaccag

SEQ ID NO: 1357907 - DNA, 15 bp, Homo sapiens
gctccagctgcacca

SEQ ID NO: 1357908 - DNA, 15 bp, Homo sapiens
cgctccagctgcacc

SEQ ID NO: 1357909 - DNA, 15 bp, Homo sapiens
gcgctccagctgcac

SEQ ID NO: 1357910 - DNA, 15 bp, Homo sapiens
cgcgctccagctgca

SEQ ID NO: 1357911 - DNA, 15 bp, Homo sapiens
acgcgctccagctgc

SEQ ID NO: 1357912 - DNA, 15 bp, Homo sapiens
cacgcgctccagctg

SEQ ID NO: 1357913 - DNA, 15 bp, Homo sapiens
ccacgcgctccagct

SEQ ID NO: 1357914 - DNA, 15 bp, Homo sapiens
cccacgcgctccagc

SEQ ID NO: 1357915 - DNA, 15 bp, Homo sapiens
gcccacgcgctccag

SEQ ID NO: 1357916 - DNA, 15 bp, Homo sapiens
ggcccacgcgctcca

SEQ ID NO: 1357917 - DNA, 15 bp, Homo sapiens
aggcccacgcgctcc

SEQ ID NO: 1357918 - DNA, 15 bp, Homo sapiens
gaggcccacgcgctc

SEQ ID NO: 1357919 - DNA, 15 bp, Homo sapiens
ggaggcccacgcgct

SEQ ID NO: 1357920 - DNA, 15 bp, Homo sapiens
aggaggcccacgcgc

SEQ ID NO: 1357921 - DNA, 15 bp, Homo sapiens
gaggaggcccacgcg

SEQ ID NO: 1357922 - DNA, 15 bp, Homo sapiens
ggaggaggcccacgc

SEQ ID NO: 1357923 - DNA, 15 bp, Homo sapiens
cggaggaggcccacg

SEQ ID NO: 1357924 - DNA, 15 bp, Homo sapiens
gcggaggaggcccac

SEQ ID NO: 1357925 - DNA, 15 bp, Homo sapiens
agcggaggaggccca

SEQ ID NO: 1357926 - DNA, 15 bp, Homo sapiens
aagcggaggaggccc

SEQ ID NO: 1357927 - DNA, 15 bp, Homo sapiens
gaagcggaggaggcc

SEQ ID NO: 1357928 - DNA, 15 bp, Homo sapiens
ggaagcggaggaggc

SEQ ID NO: 1357929 - DNA, 15 bp, Homo sapiens
aggaagcggaggagg

SEQ ID NO: 1357930 - DNA, 15 bp, Homo sapiens
caggaagcggaggag

SEQ ID NO: 1357931 - DNA, 15 bp, Homo sapiens
ccaggaagcggagga

SEQ ID NO: 1357932 - DNA, 15 bp, Homo sapiens
accaggaagcggagg

SEQ ID NO: 1357933 - DNA, 15 bp, Homo sapiens
gaccaggaagcggag

SEQ ID NO: 1357934 - DNA, 15 bp, Homo sapiens
tgaccaggaagcgga

SEQ ID NO: 1357935 - DNA, 15 bp, Homo sapiens
ctgaccaggaagcgg

SEQ ID NO: 1357936 - DNA, 15 bp, Homo sapiens
gctgaccaggaagcg

SEQ ID NO: 1357937 - DNA, 15 bp, Homo sapiens
ggctgaccaggaagc

SEQ ID NO: 1357938 - DNA, 15 bp, Homo sapiens
tggctgaccaggaag

SEQ ID NO: 1357939 - DNA, 15 bp, Homo sapiens
ctggctgaccaggaa

SEQ ID NO: 1357940 - DNA, 15 bp, Homo sapiens
tctggctgaccagga

SEQ ID NO: 1357941 - DNA, 15 bp, Homo sapiens
ttctggctgaccagg

SEQ ID NO: 1357942 - DNA, 15 bp, Homo sapiens
gttctggctgaccag

SEQ ID NO: 1357943 - DNA, 15 bp, Homo sapiens
cgttctggctgacca

SEQ ID NO: 1357944 - DNA, 15 bp, Homo sapiens
acgttctggctgacc

SEQ ID NO: 1357945 - DNA, 15 bp, Homo sapiens
cacgttctggctgac

SEQ ID NO: 1357946 - DNA, 15 bp, Homo sapiens
ccacgttctggctga

SEQ ID NO: 1357947 - DNA, 15 bp, Homo sapiens
tccacgttctggctg

SEQ ID NO: 1357948 - DNA, 15 bp, Homo sapiens
gtccacgttctggct

SEQ ID NO: 1357949 - DNA, 15 bp, Homo sapiens
cgtccacgttctggc

SEQ ID NO: 1357950 - DNA, 15 bp, Homo sapiens
ccgtccacgttctgg

SEQ ID NO: 1357951 - DNA, 15 bp, Homo sapiens
ttgcatctcgagaag

SEQ ID NO: 1357952 - DNA, 15 bp, Homo sapiens
cttgcatctcgagaa

SEQ ID NO: 1357953 - DNA, 15 bp, Homo sapiens
tcttgcatctcgaga

SEQ ID NO: 1357954 - DNA, 15 bp, Homo sapiens
gtcttgcatctcgag

SEQ ID NO: 1357955 - DNA, 15 bp, Homo sapiens
agtcttgcatctcga

SEQ ID NO: 1357956 - DNA, 15 bp, Homo sapiens
aagtcttgcatctcg

SEQ ID NO: 1357957 - DNA, 15 bp, Homo sapiens
aaagtcttgcatctc

SEQ ID NO: 1357958 - DNA, 15 bp, Homo sapiens
gaaagtcttgcatct

SEQ ID NO: 1357959 - DNA, 15 bp, Homo sapiens
ggaaagtcttgcatc

SEQ ID NO: 1357960 - DNA, 15 bp, Homo sapiens
aggaaagtcttgcat

SEQ ID NO: 1357961 - DNA, 15 bp, Homo sapiens
gaggaaagtcttgca

SEQ ID NO: 1357962 - DNA, 15 bp, Homo sapiens
agaggaaagtcttgc

SEQ ID NO: 1357963 - DNA, 15 bp, Homo sapiens
cagaggaaagtcttg

SEQ ID NO: 1357964 - DNA, 15 bp, Homo sapiens
acagaggaaagtctt

SEQ ID NO: 1357965 - DNA, 15 bp, Homo sapiens
tacagaggaaagtct

SEQ ID NO: 1357966 - DNA, 15 bp, Homo sapiens
ttacagaggaaagtc

SEQ ID NO: 1357967 - DNA, 15 bp, Homo sapiens
gttacagaggaaagt

SEQ ID NO: 1357968 - DNA, 15 bp, Homo sapiens
agttacagaggaaag

SEQ ID NO: 1357969 - DNA, 15 bp, Homo sapiens
gagttacagaggaaa

SEQ ID NO: 1357970 - DNA, 15 bp, Homo sapiens
ggagttacagaggaa

SEQ ID NO: 1357971 - DNA, 15 bp, Homo sapiens
aggagttacagagga

SEQ ID NO: 1357972 - DNA, 15 bp, Homo sapiens
caggagttacagagg

SEQ ID NO: 1357973 - DNA, 15 bp, Homo sapiens
tcaggagttacagag

SEQ ID NO: 1357974 - DNA, 15 bp, Homo sapiens
atcaggagttacaga

SEQ ID NO: 1357975 - DNA, 15 bp, Homo sapiens
aatcaggagttacag

SEQ ID NO: 1357976 - DNA, 15 bp, Homo sapiens
gaatcaggagttaca

SEQ ID NO: 1357977 - DNA, 15 bp, Homo sapiens
agaatcaggagttac

SEQ ID NO: 1357978 - DNA, 15 bp, Homo sapiens
cagaatcaggagtta

SEQ ID NO: 1357979 - DNA, 15 bp, Homo sapiens
tcagaatcaggagtt

SEQ ID NO: 1357980 - DNA, 15 bp, Homo sapiens
ctcagaatcaggagt

SEQ ID NO: 1357981 - DNA, 15 bp, Homo sapiens
gctcagaatcaggag

SEQ ID NO: 1357982 - DNA, 15 bp, Homo sapiens
tgctcagaatcagga

SEQ ID NO: 1357983 - DNA, 15 bp, Homo sapiens
ctgctcagaatcagg

SEQ ID NO: 1357984 - DNA, 15 bp, Homo sapiens
actgctcagaatcag

SEQ ID NO: 1357985 - DNA, 15 bp, Homo sapiens
cactgctcagaatca

SEQ ID NO: 1357986 - DNA, 15 bp, Homo sapiens
gcactgctcagaatc

SEQ ID NO: 1357987 - DNA, 15 bp, Homo sapiens
tgcactgctcagaat

SEQ ID NO: 1357988 - DNA, 15 bp, Homo sapiens
ttgcactgctcagaa

SEQ ID NO: 1357989 - DNA, 15 bp, Homo sapiens
cttgcactgctcaga

SEQ ID NO: 1357990 - DNA, 15 bp, Homo sapiens
gcttgcactgctcag

SEQ ID NO: 1357991 - DNA, 15 bp, Homo sapiens
agcttgcactgctca

SEQ ID NO: 1357992 - DNA, 15 bp, Homo sapiens
cagcttgcactgctc

SEQ ID NO: 1357993 - DNA, 15 bp, Homo sapiens
tcagcttgcactgct

SEQ ID NO: 1357994 - DNA, 15 bp, Homo sapiens
gtcagcttgcactgc

SEQ ID NO: 1357995 - DNA, 15 bp, Homo sapiens
tgtcagcttgcactg

SEQ ID NO: 1357996 - DNA, 15 bp, Homo sapiens
atgtcagcttgcact

SEQ ID NO: 1357997 - DNA, 15 bp, Homo sapiens
gatgtcagcttgcac

SEQ ID NO: 1357998 - DNA, 15 bp, Homo sapiens
ggatgtcagcttgca

SEQ ID NO: 1357999 - DNA, 15 bp, Homo sapiens
aggatgtcagcttgc

SEQ ID NO: 1358000 - DNA, 15 bp, Homo sapiens
caggatgtcagcttg

SEQ ID NO: 1358001 - DNA, 15 bp, Homo sapiens
tcaggatgtcagctt

SEQ ID NO: 1358002 - DNA, 15 bp, Homo sapiens
ttcaggatgtcagct

SEQ ID NO: 1358003 - DNA, 15 bp, Homo sapiens
tttcaggatgtcagc

SEQ ID NO: 1358004 - DNA, 15 bp, Homo sapiens
ctttcaggatgtcag

SEQ ID NO: 1358005 - DNA, 15 bp, Homo sapiens
cctttcaggatgtca

SEQ ID NO: 1358006 - DNA, 15 bp, Homo sapiens
tcctttcaggatgtc

SEQ ID NO: 1358007 - DNA, 15 bp, Homo sapiens
ctcctttcaggatgt

SEQ ID NO: 1358008 - DNA, 15 bp, Homo sapiens
cctcctttcaggatg

SEQ ID NO: 1358009 - DNA, 15 bp, Homo sapiens
tcctcctttcaggat

SEQ ID NO: 1358010 - DNA, 15 bp, Homo sapiens
ttcctcctttcagga

SEQ ID NO: 1358011 - DNA, 15 bp, Homo sapiens
cttcctcctttcagg

SEQ ID NO: 1358012 - DNA, 15 bp, Homo sapiens
tcttcctcctttcag

SEQ ID NO: 1358013 - DNA, 15 bp, Homo sapiens
gtcttcctcctttca

SEQ ID NO: 1358014 - DNA, 15 bp, Homo sapiens
cgtcttcctcctttc

SEQ ID NO: 1358015 - DNA, 15 bp, Homo sapiens
gcgtcttcctccttt

SEQ ID NO: 1358016 - DNA, 15 bp, Homo sapiens
tgcgtcttcctcctt

SEQ ID NO: 1358017 - DNA, 15 bp, Homo sapiens
atgcgtcttcctcct

SEQ ID NO: 1358018 - DNA, 15 bp, Homo sapiens
gatgcgtcttcctcc

SEQ ID NO: 1358019 - DNA, 15 bp, Homo sapiens
cgatgcgtcttcctc

SEQ ID NO: 1358020 - DNA, 15 bp, Homo sapiens
tcgatgcgtcttcct

SEQ ID NO: 1358021 - DNA, 15 bp, Homo sapiens
gtcgatgcgtcttcc

SEQ ID NO: 1358022 - DNA, 15 bp, Homo sapiens
tgtcgatgcgtcttc

SEQ ID NO: 1358023 - DNA, 15 bp, Homo sapiens
atgtcgatgcgtctt

SEQ ID NO: 1358024 - DNA, 15 bp, Homo sapiens
aatgtcgatgcgtct

SEQ ID NO: 1358025 - DNA, 15 bp, Homo sapiens
gaatgtcgatgcgtc

SEQ ID NO: 1358026 - DNA, 15 bp, Homo sapiens
tgaatgtcgatgcgt

SEQ ID NO: 1358027 - DNA, 15 bp, Homo sapiens
ctgaatgtcgatgcg

SEQ ID NO: 1358028 - DNA, 15 bp, Homo sapiens
gctgaatgtcgatgc

SEQ ID NO: 1358029 - DNA, 15 bp, Homo sapiens
tgctgaatgtcgatg

SEQ ID NO: 1358030 - DNA, 15 bp, Homo sapiens
atgctgaatgtcgat

SEQ ID NO: 1358031 - DNA, 15 bp, Homo sapiens
tatgctgaatgtcga

SEQ ID NO: 1358032 - DNA, 15 bp, Homo sapiens
atatgctgaatgtcg

SEQ ID NO: 1358033 - DNA, 15 bp, Homo sapiens
catatgctgaatgtc

SEQ ID NO: 1358034 - DNA, 15 bp, Homo sapiens
gcatatgctgaatgt

SEQ ID NO: 1358035 - DNA, 15 bp, Homo sapiens
ggcatatgctgaatg

SEQ ID NO: 1358036 - DNA, 15 bp, Homo sapiens
tggcatatgctgaat

SEQ ID NO: 1358037 - DNA, 15 bp, Homo sapiens
ctggcatatgctgaa

SEQ ID NO: 1358038 - DNA, 15 bp, Homo sapiens
actggcatatgctga

SEQ ID NO: 1358039 - DNA, 15 bp, Homo sapiens
gactggcatatgctg

SEQ ID NO: 1358040 - DNA, 15 bp, Homo sapiens
tgactggcatatgct

SEQ ID NO: 1358041 - DNA, 15 bp, Homo sapiens
gtgactggcatatgc

SEQ ID NO: 1358042 - DNA, 15 bp, Homo sapiens
ggtgactggcatatg

SEQ ID NO: 1358043 - DNA, 15 bp, Homo sapiens
tggtgactggcatat

SEQ ID NO: 1358044 - DNA, 15 bp, Homo sapiens
ctggtgactggcata

SEQ ID NO: 1358045 - DNA, 15 bp, Homo sapiens
gctggtgactggcat

SEQ ID NO: 1358046 - DNA, 15 bp, Homo sapiens
agctggtgactggca

SEQ ID NO: 1358047 - DNA, 15 bp, Homo sapiens
cagctggtgactggc

SEQ ID NO: 1358048 - DNA, 15 bp, Homo sapiens
ccagctggtgactgg

SEQ ID NO: 1358049 - DNA, 15 bp, Homo sapiens
gccagctggtgactg

SEQ ID NO: 1358050 - DNA, 15 bp, Homo sapiens
ggccagctggtgact

SEQ ID NO: 1358051 - DNA, 15 bp, Homo sapiens
gggccagctggtgac

SEQ ID NO: 1358052 - DNA, 15 bp, Homo sapiens
ggggccagctggtga

SEQ ID NO: 1358053 - DNA, 15 bp, Homo sapiens
tggggccagctggtg

SEQ ID NO: 1358054 - DNA, 15 bp, Homo sapiens
gtggggccagctggt

SEQ ID NO: 1358055 - DNA, 15 bp, Homo sapiens
agtggggccagctgg

SEQ ID NO: 1358056 - DNA, 15 bp, Homo sapiens
cagtggggccagctg

SEQ ID NO: 1358057 - DNA, 15 bp, Homo sapiens
tcagtggggccagct

SEQ ID NO: 1358058 - DNA, 15 bp, Homo sapiens
gtcagtggggccagc

SEQ ID NO: 1358059 - DNA, 15 bp, Homo sapiens
tgtcagtggggccag

SEQ ID NO: 1358060 - DNA, 15 bp, Homo sapiens
atgtcagtggggcca

SEQ ID NO: 1358061 - DNA, 15 bp, Homo sapiens
gatgtcagtggggcc

SEQ ID NO: 1358062 - DNA, 15 bp, Homo sapiens
agatgtcagtggggc

SEQ ID NO: 1358063 - DNA, 15 bp, Homo sapiens
gagatgtcagtgggg

SEQ ID NO: 1358064 - DNA, 15 bp, Homo sapiens
ggagatgtcagtggg

SEQ ID NO: 1358065 - DNA, 15 bp, Homo sapiens
gggagatgtcagtgg

SEQ ID NO: 1358066 - DNA, 15 bp, Homo sapiens
ggggagatgtcagtg

SEQ ID NO: 1358067 - DNA, 15 bp, Homo sapiens
gggggagatgtcagt

SEQ ID NO: 1358068 - DNA, 15 bp, Homo sapiens
tgggggagatgtcag

SEQ ID NO: 1358069 - DNA, 15 bp, Homo sapiens
ctgggggagatgtca

SEQ ID NO: 1358070 - DNA, 15 bp, Homo sapiens
tctgggggagatgtc

SEQ ID NO: 1358071 - DNA, 15 bp, Homo sapiens
ctctgggggagatgt

SEQ ID NO: 1358072 - DNA, 15 bp, Homo sapiens
cctctgggggagatg

SEQ ID NO: 1358073 - DNA, 15 bp, Homo sapiens
gcctctgggggagat

SEQ ID NO: 1358074 - DNA, 15 bp, Homo sapiens
ggcctctgggggaga

SEQ ID NO: 1358075 - DNA, 15 bp, Homo sapiens
aggcctctgggggag

SEQ ID NO: 1358076 - DNA, 15 bp, Homo sapiens
gaggcctctggggga

SEQ ID NO: 1358077 - DNA, 15 bp, Homo sapiens
tgaggcctctggggg

SEQ ID NO: 1358078 - DNA, 15 bp, Homo sapiens
gtgaggcctctgggg

SEQ ID NO: 1358079 - DNA, 15 bp, Homo sapiens
cgtgaggcctctggg

SEQ ID NO: 1358080 - DNA, 15 bp, Homo sapiens
acgtgaggcctctgg

SEQ ID NO: 1358081 - DNA, 15 bp, Homo sapiens
aacgtgaggcctctg

SEQ ID NO: 1358082 - DNA, 15 bp, Homo sapiens
taacgtgaggcctct

SEQ ID NO: 1358083 - DNA, 15 bp, Homo sapiens
gtaacgtgaggcctc

SEQ ID NO: 1358084 - DNA, 15 bp, Homo sapiens
tgtaacgtgaggcct

SEQ ID NO: 1358085 - DNA, 15 bp, Homo sapiens
ttgtaacgtgaggcc

SEQ ID NO: 1358086 - DNA, 15 bp, Homo sapiens
cttgtaacgtgaggc

SEQ ID NO: 1358087 - DNA, 15 bp, Homo sapiens
gcttgtaacgtgagg

SEQ ID NO: 1358088 - DNA, 15 bp, Homo sapiens
ggcttgtaacgtgag

SEQ ID NO: 1358089 - DNA, 15 bp, Homo sapiens
tggcttgtaacgtga

SEQ ID NO: 1358090 - DNA, 15 bp, Homo sapiens
ttggcttgtaacgtg

SEQ ID NO: 1358091 - DNA, 15 bp, Homo sapiens
cttggcttgtaacgt

SEQ ID NO: 1358092 - DNA, 15 bp, Homo sapiens
tcttggcttgtaacg

SEQ ID NO: 1358093 - DNA, 15 bp, Homo sapiens
ctcttggcttgtaac

SEQ ID NO: 1358094 - DNA, 15 bp, Homo sapiens
tctcttggcttgtaa

SEQ ID NO: 1358095 - DNA, 15 bp, Homo sapiens
ttctcttggcttgta

SEQ ID NO: 1358096 - DNA, 15 bp, Homo sapiens
gttctcttggcttgt

SEQ ID NO: 1358097 - DNA, 15 bp, Homo sapiens
ggttctcttggcttg

SEQ ID NO: 1358098 - DNA, 15 bp, Homo sapiens
gggttctcttggctt

SEQ ID NO: 1358099 - DNA, 15 bp, Homo sapiens
tgggttctcttggct

SEQ ID NO: 1358100 - DNA, 15 bp, Homo sapiens
ttgggttctcttggc

SEQ ID NO: 1358101 - DNA, 15 bp, Homo sapiens
cttgggttctcttgg

SEQ ID NO: 1358102 - DNA, 15 bp, Homo sapiens
ccttgggttctcttg

SEQ ID NO: 1358103 - DNA, 15 bp, Homo sapiens
gccttgggttctctt

SEQ ID NO: 1358104 - DNA, 15 bp, Homo sapiens
ggccttgggttctct

SEQ ID NO: 1358105 - DNA, 15 bp, Homo sapiens
tggccttgggttctc

SEQ ID NO: 1358106 - DNA, 15 bp, Homo sapiens
ctggccttgggttct

SEQ ID NO: 1358107 - DNA, 15 bp, Homo sapiens
tctggccttgggttc

SEQ ID NO: 1358108 - DNA, 15 bp, Homo sapiens
ctctggccttgggtt

SEQ ID NO: 1358109 - DNA, 15 bp, Homo sapiens
tctctggccttgggt

SEQ ID NO: 1358110 - DNA, 15 bp, Homo sapiens
ctctctggccttggg

SEQ ID NO: 1358111 - DNA, 15 bp, Homo sapiens
ccctctctggccttg

SEQ ID NO: 1358112 - DNA, 15 bp, Homo sapiens
cccctctctggcctt

SEQ ID NO: 1358113 - DNA, 15 bp, Homo sapiens
tcccctctctggcct

SEQ ID NO: 1358114 - DNA, 15 bp, Homo sapiens
ttcccctctctggcc

SEQ ID NO: 1358115 - DNA, 15 bp, Homo sapiens
cttcccctctctggc

SEQ ID NO: 1358116 - DNA, 15 bp, Homo sapiens
acttcccctctctgg

SEQ ID NO: 1358117 - DNA, 15 bp, Homo sapiens
gacttcccctctctg

SEQ ID NO: 1358118 - DNA, 15 bp, Homo sapiens
tgacttcccctctct

SEQ ID NO: 1358119 - DNA, 15 bp, Homo sapiens
atgacttcccctctc

SEQ ID NO: 1358120 - DNA, 15 bp, Homo sapiens
aatgacttcccctct

SEQ ID NO: 1358121 - DNA, 15 bp, Homo sapiens
gaatgacttcccctc

SEQ ID NO: 1358122 - DNA, 15 bp, Homo sapiens
tgaatgacttcccct

SEQ ID NO: 1358123 - DNA, 15 bp, Homo sapiens
atgaatgacttcccc

SEQ ID NO: 1358124 - DNA, 15 bp, Homo sapiens
gatgaatgacttccc

SEQ ID NO: 1358125 - DNA, 15 bp, Homo sapiens
ggatgaatgacttcc

SEQ ID NO: 1358126 - DNA, 15 bp, Homo sapiens
tggatgaatgacttc

SEQ ID NO: 1358127 - DNA, 15 bp, Homo sapiens
ttggatgaatgactt

SEQ ID NO: 1358128 - DNA, 15 bp, Homo sapiens
cttggatgaatgact

SEQ ID NO: 1358129 - DNA, 15 bp, Homo sapiens
ccttggatgaatgac

SEQ ID NO: 1358130 - DNA, 15 bp, Homo sapiens
accttggatgaatga

SEQ ID NO: 1358131 - DNA, 15 bp, Homo sapiens
aaccttggatgaatg

SEQ ID NO: 1358132 - DNA, 15 bp, Homo sapiens
taaccttggatgaat

SEQ ID NO: 1358133 - DNA, 15 bp, Homo sapiens
gtaaccttggatgaa

SEQ ID NO: 1358134 - DNA, 15 bp, Homo sapiens
agtaaccttggatga

SEQ ID NO: 1358135 - DNA, 15 bp, Homo sapiens
gagtaaccttggatg

SEQ ID NO: 1358136 - DNA, 15 bp, Homo sapiens
cgagtaaccttggat

SEQ ID NO: 1358137 - DNA, 15 bp, Homo sapiens
ccgagtaaccttgga

SEQ ID NO: 1358138 - DNA, 15 bp, Homo sapiens
gccgagtaaccttgg

SEQ ID NO: 1358139 - DNA, 15 bp, Homo sapiens
tgccgagtaaccttg

SEQ ID NO: 1358140 - DNA, 15 bp, Homo sapiens
ctgccgagtaacctt

SEQ ID NO: 1358141 - DNA, 15 bp, Homo sapiens
cctgccgagtaacct

SEQ ID NO: 1358142 - DNA, 15 bp, Homo sapiens
acctgccgagtaacc

SEQ ID NO: 1358143 - DNA, 15 bp, Homo sapiens
gacctgccgagtaac

SEQ ID NO: 1358144 - DNA, 15 bp, Homo sapiens
tgacctgccgagtaa

SEQ ID NO: 1358145 - DNA, 15 bp, Homo sapiens
ctgacctgccgagta

SEQ ID NO: 1358146 - DNA, 15 bp, Homo sapiens
tctgacctgccgagt

SEQ ID NO: 1358147 - DNA, 15 bp, Homo sapiens
gtctgacctgccgag

SEQ ID NO: 1358148 - DNA, 15 bp, Homo sapiens
tgtctgacctgccga

SEQ ID NO: 1358149 - DNA, 15 bp, Homo sapiens
ctgtctgacctgccg

SEQ ID NO: 1358150 - DNA, 15 bp, Homo sapiens
cctgtctgacctgcc

SEQ ID NO: 1358151 - DNA, 15 bp, Homo sapiens
ccctgtctgacctgc

SEQ ID NO: 1358152 - DNA, 15 bp, Homo sapiens
gccctgtctgacctg

SEQ ID NO: 1358153 - DNA, 15 bp, Homo sapiens
agccctgtctgacct

SEQ ID NO: 1358154 - DNA, 15 bp, Homo sapiens
cagccctgtctgacc

SEQ ID NO: 1358155 - DNA, 15 bp, Homo sapiens
ccagccctgtctgac

SEQ ID NO: 1358156 - DNA, 15 bp, Homo sapiens
cccagccctgtctga

SEQ ID NO: 1358157 - DNA, 15 bp, Homo sapiens
tcccagccctgtctg

SEQ ID NO: 1358158 - DNA, 15 bp, Homo sapiens
atcccagccctgtct

SEQ ID NO: 1358159 - DNA, 15 bp, Homo sapiens
aatcccagccctgtc

SEQ ID NO: 1358160 - DNA, 15 bp, Homo sapiens
aaatcccagccctgt

SEQ ID NO: 1358161 - DNA, 15 bp, Homo sapiens
caaatcccagccctg

SEQ ID NO: 1358162 - DNA, 15 bp, Homo sapiens
tcaaatcccagccct

SEQ ID NO: 1358163 - DNA, 15 bp, Homo sapiens
ttcaaatcccagccc

SEQ ID NO: 1358164 - DNA, 15 bp, Homo sapiens
gttcaaatcccagcc

SEQ ID NO: 1358165 - DNA, 15 bp, Homo sapiens
ggttcaaatcccagc

SEQ ID NO: 1358166 - DNA, 15 bp, Homo sapiens
gggttcaaatcccag

SEQ ID NO: 1358167 - DNA, 15 bp, Homo sapiens
tgggttcaaatccca

SEQ ID NO: 1358168 - DNA, 15 bp, Homo sapiens
gtgggttcaaatccc

SEQ ID NO: 1358169 - DNA, 15 bp, Homo sapiens
tgtgggttcaaatcc

SEQ ID NO: 1358170 - DNA, 15 bp, Homo sapiens
atgtgggttcaaatc

SEQ ID NO: 1358171 - DNA, 15 bp, Homo sapiens
gatgtgggttcaaat

SEQ ID NO: 1358172 - DNA, 15 bp, Homo sapiens
agatgtgggttcaaa

SEQ ID NO: 1358173 - DNA, 15 bp, Homo sapiens
cagatgtgggttcaa

SEQ ID NO: 1358174 - DNA, 15 bp, Homo sapiens
gcagatgtgggttca

SEQ ID NO: 1358175 - DNA, 15 bp, Homo sapiens
ggcagatgtgggttc

SEQ ID NO: 1358176 - DNA, 15 bp, Homo sapiens
aggcagatgtgggtt

SEQ ID NO: 1358177 - DNA, 15 bp, Homo sapiens
caggcagatgtgggt

SEQ ID NO: 1358178 - DNA, 15 bp, Homo sapiens
ccaggcagatgtggg

SEQ ID NO: 1358179 - DNA, 15 bp, Homo sapiens
accaggcagatgtgg

SEQ ID NO: 1358180 - DNA, 15 bp, Homo sapiens
aaccaggcagatgtg

SEQ ID NO: 1358181 - DNA, 15 bp, Homo sapiens
gaaccaggcagatgt

SEQ ID NO: 1358182 - DNA, 15 bp, Homo sapiens
ggaaccaggcagatg

SEQ ID NO: 1358183 - DNA, 15 bp, Homo sapiens
aggaaccaggcagat

SEQ ID NO: 1358184 - DNA, 15 bp, Homo sapiens
taggaaccaggcaga

SEQ ID NO: 1358185 - DNA, 15 bp, Homo sapiens
ctaggaaccaggcag

SEQ ID NO: 1358186 - DNA, 15 bp, Homo sapiens
cctaggaaccaggca

SEQ ID NO: 1358187 - DNA, 15 bp, Homo sapiens
acctaggaaccaggc

SEQ ID NO: 1358188 - DNA, 15 bp, Homo sapiens
gacctaggaaccagg

SEQ ID NO: 1358189 - DNA, 15 bp, Homo sapiens
ggacctaggaaccag

SEQ ID NO: 1358190 - DNA, 15 bp, Homo sapiens
gggacctaggaacca

SEQ ID NO: 1358191 - DNA, 15 bp, Homo sapiens
tgggacctaggaacc

SEQ ID NO: 1358192 - DNA, 15 bp, Homo sapiens
atgggacctaggaac

SEQ ID NO: 1358193 - DNA, 15 bp, Homo sapiens
aatgggacctaggaa

SEQ ID NO: 1358194 - DNA, 15 bp, Homo sapiens
aaatgggacctagga

SEQ ID NO: 1358195 - DNA, 15 bp, Homo sapiens
gaaatgggacctagg

SEQ ID NO: 1358196 - DNA, 15 bp, Homo sapiens
agaaatgggacctag

SEQ ID NO: 1358197 - DNA, 15 bp, Homo sapiens
cagaaatgggaccta

SEQ ID NO: 1358198 - DNA, 15 bp, Homo sapiens
gcagaaatgggacct

SEQ ID NO: 1358199 - DNA, 15 bp, Homo sapiens
tgcagaaatgggacc

SEQ ID NO: 1358200 - DNA, 15 bp, Homo sapiens
atgcagaaatgggac

SEQ ID NO: 1358201 - DNA, 15 bp, Homo sapiens
aatgcagaaatggga

SEQ ID NO: 1358202 - DNA, 15 bp, Homo sapiens
taatgcagaaatggg

SEQ ID NO: 1358203 - DNA, 15 bp, Homo sapiens
ttaatgcagaaatgg

SEQ ID NO: 1358204 - DNA, 15 bp, Homo sapiens
attaatgcagaaatg

SEQ ID NO: 1358205 - DNA, 15 bp, Homo sapiens
tattaatgcagaaat

SEQ ID NO: 1358206 - DNA, 15 bp, Homo sapiens
atattaatgcagaaa

SEQ ID NO: 1358207 - DNA, 15 bp, Homo sapiens
catattaatgcagaa

SEQ ID NO: 1358208 - DNA, 15 bp, Homo sapiens
ccatattaatgcaga

SEQ ID NO: 1358209 - DNA, 15 bp, Homo sapiens
tccatattaatgcag

SEQ ID NO: 1358210 - DNA, 15 bp, Homo sapiens
ctccatattaatgca

SEQ ID NO: 1358211 - DNA, 15 bp, Homo sapiens
cctccatattaatgc

SEQ ID NO: 1358212 - DNA, 15 bp, Homo sapiens
ccctccatattaatg

SEQ ID NO: 1358213 - DNA, 15 bp, Homo sapiens
cccctccatattaat

SEQ ID NO: 1358214 - DNA, 15 bp, Homo sapiens
ccccctccatattaa

SEQ ID NO: 1358215 - DNA, 15 bp, Homo sapiens
gccccctccatatta

SEQ ID NO: 1358216 - DNA, 15 bp, Homo sapiens
agccccctccatatt

SEQ ID NO: 1358217 - DNA, 15 bp, Homo sapiens
aagccccctccatat

SEQ ID NO: 1358218 - DNA, 15 bp, Homo sapiens
gaagccccctccata

SEQ ID NO: 1358219 - DNA, 15 bp, Homo sapiens
tgaagccccctccat

SEQ ID NO: 1358220 - DNA, 15 bp, Homo sapiens
atgaagccccctcca

SEQ ID NO: 1358221 - DNA, 15 bp, Homo sapiens
aatgaagccccctcc

SEQ ID NO: 1358222 - DNA, 15 bp, Homo sapiens
gaatgaagccccctc

SEQ ID NO: 1358223 - DNA, 15 bp, Homo sapiens
tgaatgaagccccct

SEQ ID NO: 1358224 - DNA, 15 bp, Homo sapiens
ttgaatgaagccccc

SEQ ID NO: 1358225 - DNA, 15 bp, Homo sapiens
tttgaatgaagcccc

SEQ ID NO: 1358226 - DNA, 15 bp, Homo sapiens
ctttgaatgaagccc

SEQ ID NO: 1358227 - DNA, 15 bp, Homo sapiens
gctttgaatgaagcc

SEQ ID NO: 1358228 - DNA, 15 bp, Homo sapiens
agctttgaatgaagc

SEQ ID NO: 1358229 - DNA, 15 bp, Homo sapiens
cagctttgaatgaag

SEQ ID NO: 1358230 - DNA, 15 bp, Homo sapiens
tcagctttgaatgaa

SEQ ID NO: 1358231 - DNA, 15 bp, Homo sapiens
ctcagctttgaatga

SEQ ID NO: 1358232 - DNA, 15 bp, Homo sapiens
gctcagctttgaatg

SEQ ID NO: 1358233 - DNA, 15 bp, Homo sapiens
ggctcagctttgaat

SEQ ID NO: 1358234 - DNA, 15 bp, Homo sapiens
gggctcagctttgaa

SEQ ID NO: 1358235 - DNA, 15 bp, Homo sapiens
ggggctcagctttga

SEQ ID NO: 1358236 - DNA, 15 bp, Homo sapiens
gggggctcagctttg

SEQ ID NO: 1358237 - DNA, 15 bp, Homo sapiens
agggggctcagcttt

SEQ ID NO: 1358238 - DNA, 15 bp, Homo sapiens
cagggggctcagctt

SEQ ID NO: 1358239 - DNA, 15 bp, Homo sapiens
ccagggggctcagct

SEQ ID NO: 1358240 - DNA, 15 bp, Homo sapiens
tccagggggctcagc

SEQ ID NO: 1358241 - DNA, 15 bp, Homo sapiens
atccagggggctcag

SEQ ID NO: 1358242 - DNA, 15 bp, Homo sapiens
catccagggggctca

SEQ ID NO: 1358243 - DNA, 15 bp, Homo sapiens
ccatccagggggctc

SEQ ID NO: 1358244 - DNA, 15 bp, Homo sapiens
cccatccagggggct

SEQ ID NO: 1358245 - DNA, 15 bp, Homo sapiens
acccatccagggggc

SEQ ID NO: 1358246 - DNA, 15 bp, Homo sapiens
cacccatccaggggg

SEQ ID NO: 1358247 - DNA, 15 bp, Homo sapiens
acacccatccagggg

SEQ ID NO: 1358248 - DNA, 15 bp, Homo sapiens
cacacccatccaggg

SEQ ID NO: 1358249 - DNA, 15 bp, Homo sapiens
ccacacccatccagg

SEQ ID NO: 1358250 - DNA, 15 bp, Homo sapiens
accacacccatccag

SEQ ID NO: 1358251 - DNA, 15 bp, Homo sapiens
caccacacccatcca

SEQ ID NO: 1358252 - DNA, 15 bp, Homo sapiens
ccaccacacccatcc

SEQ ID NO: 1358253 - DNA, 15 bp, Homo sapiens
accaccacacccatc

SEQ ID NO: 1358254 - DNA, 15 bp, Homo sapiens
aaccaccacacccat

SEQ ID NO: 1358255 - DNA, 15 bp, Homo sapiens
gaaccaccacaccca

SEQ ID NO: 1358256 - DNA, 15 bp, Homo sapiens
tgaaccaccacaccc

SEQ ID NO: 1358257 - DNA, 15 bp, Homo sapiens
gtgaaccaccacacc

SEQ ID NO: 1358258 - DNA, 15 bp, Homo sapiens
tgtgaaccaccacac

SEQ ID NO: 1358259 - DNA, 15 bp, Homo sapiens
gtgtgaaccaccaca

SEQ ID NO: 1358260 - DNA, 15 bp, Homo sapiens
ggtgtgaaccaccac

SEQ ID NO: 1358261 - DNA, 15 bp, Homo sapiens
aggtgtgaaccacca

SEQ ID NO: 1358262 - DNA, 15 bp, Homo sapiens
acggcctcccaaagt

SEQ ID NO: 1358263 - DNA, 15 bp, Homo sapiens
cacggcctcccaaag

SEQ ID NO: 1358264 - DNA, 15 bp, Homo sapiens
ccacggcctcccaaa

SEQ ID NO: 1358265 - DNA, 15 bp, Homo sapiens
accacggcctcccaa

SEQ ID NO: 1358266 - DNA, 15 bp, Homo sapiens
caccacggcctccca

SEQ ID NO: 1358267 - DNA, 15 bp, Homo sapiens
ccaccacggcctccc

SEQ ID NO: 1358268 - DNA, 15 bp, Homo sapiens
cccaccacggcctcc

SEQ ID NO: 1358269 - DNA, 15 bp, Homo sapiens
gcccaccacggcctc

SEQ ID NO: 1358270 - DNA, 15 bp, Homo sapiens
cgcccaccacggcct

SEQ ID NO: 1358271 - DNA, 15 bp, Homo sapiens
ccgcccaccacggcc

SEQ ID NO: 1358272 - DNA, 15 bp, Homo sapiens
tccgcccaccacggc

SEQ ID NO: 1358273 - DNA, 15 bp, Homo sapiens
atccgcccaccacgg

SEQ ID NO: 1358274 - DNA, 15 bp, Homo sapiens
gatccgcccaccacg

SEQ ID NO: 1358275 - DNA, 15 bp, Homo sapiens
tgatccgcccaccac

SEQ ID NO: 1358276 - DNA, 15 bp, Homo sapiens
gtgatccgcccacca

SEQ ID NO: 1358277 - DNA, 15 bp, Homo sapiens
gcagggtttcaccat

SEQ ID NO: 1358278 - DNA, 15 bp, Homo sapiens
ggcagggtttcacca

SEQ ID NO: 1358279 - DNA, 15 bp, Homo sapiens
aggcagggtttcacc

SEQ ID NO: 1358280 - DNA, 15 bp, Homo sapiens
caggcagggtttcac

SEQ ID NO: 1358281 - DNA, 15 bp, Homo sapiens
acaggcagggtttca

SEQ ID NO: 1358282 - DNA, 15 bp, Homo sapiens
tacaggcagggtttc

SEQ ID NO: 1358283 - DNA, 15 bp, Homo sapiens
gtacaggcagggttt

SEQ ID NO: 1358284 - DNA, 15 bp, Homo sapiens
agtacaggcagggtt

SEQ ID NO: 1358285 - DNA, 15 bp, Homo sapiens
tagtacaggcagggt

SEQ ID NO: 1358286 - DNA, 15 bp, Homo sapiens
ttagtacaggcaggg

SEQ ID NO: 1358287 - DNA, 15 bp, Homo sapiens
tttagtacaggcagg

SEQ ID NO: 1358288 - DNA, 15 bp, Homo sapiens
ttttagtacaggcag

SEQ ID NO: 1358289 - DNA, 15 bp, Homo sapiens
tttttagtacaggca

SEQ ID NO: 1358290 - DNA, 15 bp, Homo sapiens
atttttagtacaggc

SEQ ID NO: 1358291 - DNA, 15 bp, Homo sapiens
catttttagtacagg

SEQ ID NO: 1358292 - DNA, 15 bp, Homo sapiens
gcatttttagtacag

SEQ ID NO: 1358293 - DNA, 15 bp, Homo sapiens
tgcatttttagtaca

SEQ ID NO: 1358294 - DNA, 15 bp, Homo sapiens
ttgcatttttagtac

SEQ ID NO: 1358295 - DNA, 15 bp, Homo sapiens
attttgcatttttag

SEQ ID NO: 1358296 - DNA, 15 bp, Homo sapiens
aattttgcattttta

SEQ ID NO: 1358297 - DNA, 15 bp, Homo sapiens
taattttgcattttt

SEQ ID NO: 1358298 - DNA, 15 bp, Homo sapiens
ctaattttgcatttt

SEQ ID NO: 1358299 - DNA, 15 bp, Homo sapiens
gctaattttgcattt

SEQ ID NO: 1358300 - DNA, 15 bp, Homo sapiens
ggctaattttgcatt

SEQ ID NO: 1358301 - DNA, 15 bp, Homo sapiens
tggctaattttgcat

SEQ ID NO: 1358302 - DNA, 15 bp, Homo sapiens
ctggctaattttgca

SEQ ID NO: 1358303 - DNA, 15 bp, Homo sapiens
cctggctaattttgc

SEQ ID NO: 1358304 - DNA, 15 bp, Homo sapiens
cgcccaccaccacac

SEQ ID NO: 1358305 - DNA, 15 bp, Homo sapiens
gcgcccaccaccaca

SEQ ID NO: 1358306 - DNA, 15 bp, Homo sapiens
taggcgcccaccacc

SEQ ID NO: 1358307 - DNA, 15 bp, Homo sapiens
ataggcgcccaccac

SEQ ID NO: 1358308 - DNA, 15 bp, Homo sapiens
tataggcgcccacca

SEQ ID NO: 1358309 - DNA, 15 bp, Homo sapiens
ttataggcgcccacc

SEQ ID NO: 1358310 - DNA, 15 bp, Homo sapiens
attataggcgcccac

SEQ ID NO: 1358311 - DNA, 15 bp, Homo sapiens
aattataggcgccca

SEQ ID NO: 1358312 - DNA, 15 bp, Homo sapiens
gaattataggcgccc

SEQ ID NO: 1358313 - DNA, 15 bp, Homo sapiens
ggaattataggcgcc

SEQ ID NO: 1358314 - DNA, 15 bp, Homo sapiens
tggaattataggcgc

SEQ ID NO: 1358315 - DNA, 15 bp, Homo sapiens
ctggaattataggcg

SEQ ID NO: 1358316 - DNA, 15 bp, Homo sapiens
agttcccaagtagct

SEQ ID NO: 1358317 - DNA, 15 bp, Homo sapiens
aagttcccaagtagc

SEQ ID NO: 1358318 - DNA, 15 bp, Homo sapiens
caagttcccaagtag

SEQ ID NO: 1358319 - DNA, 15 bp, Homo sapiens
ccaagttcccaagta

SEQ ID NO: 1358320 - DNA, 15 bp, Homo sapiens
cccaagttcccaagt

SEQ ID NO: 1358321 - DNA, 15 bp, Homo sapiens
tcccaagttcccaag

SEQ ID NO: 1358322 - DNA, 15 bp, Homo sapiens
ctcccaagttcccaa

SEQ ID NO: 1358323 - DNA, 15 bp, Homo sapiens
cctcccaagttccca

SEQ ID NO: 1358324 - DNA, 15 bp, Homo sapiens
gcctcccaagttccc

SEQ ID NO: 1358325 - DNA, 15 bp, Homo sapiens
agcctcccaagttcc

SEQ ID NO: 1358326 - DNA, 15 bp, Homo sapiens
tagcctcccaagttc

SEQ ID NO: 1358327 - DNA, 15 bp, Homo sapiens
ttagcctcccaagtt

SEQ ID NO: 1358328 - DNA, 15 bp, Homo sapiens
tcgattctcctgcct

SEQ ID NO: 1358329 - DNA, 15 bp, Homo sapiens
atcgattctcctgcc

SEQ ID NO: 1358330 - DNA, 15 bp, Homo sapiens
aatcgattctcctgc

SEQ ID NO: 1358331 - DNA, 15 bp, Homo sapiens
caatcgattctcctg

SEQ ID NO: 1358332 - DNA, 15 bp, Homo sapiens
tcaatcgattctcct

SEQ ID NO: 1358333 - DNA, 15 bp, Homo sapiens
ttcaatcgattctcc

SEQ ID NO: 1358334 - DNA, 15 bp, Homo sapiens
gttcaatcgattctc

SEQ ID NO: 1358335 - DNA, 15 bp, Homo sapiens
ggttcaatcgattct

SEQ ID NO: 1358336 - DNA, 15 bp, Homo sapiens
gggttcaatcgattc

SEQ ID NO: 1358337 - DNA, 15 bp, Homo sapiens
cgggttcaatcgatt

SEQ ID NO: 1358338 - DNA, 15 bp, Homo sapiens
ccgggttcaatcgat

SEQ ID NO: 1358339 - DNA, 15 bp, Homo sapiens
cccgggttcaatcga

SEQ ID NO: 1358340 - DNA, 15 bp, Homo sapiens
tcccgggttcaatcg

SEQ ID NO: 1358341 - DNA, 15 bp, Homo sapiens
ttcccgggttcaatc

SEQ ID NO: 1358342 - DNA, 15 bp, Homo sapiens
cttcccgggttcaat

SEQ ID NO: 1358343 - DNA, 15 bp, Homo sapiens
tgactcactgcaacc

SEQ ID NO: 1358344 - DNA, 15 bp, Homo sapiens
ttgactcactgcaac

SEQ ID NO: 1358345 - DNA, 15 bp, Homo sapiens
cttgactcactgcaa

SEQ ID NO: 1358346 - DNA, 15 bp, Homo sapiens
tcttgactcactgca

SEQ ID NO: 1358347 - DNA, 15 bp, Homo sapiens
atcttgactcactgc

SEQ ID NO: 1358348 - DNA, 15 bp, Homo sapiens
gatcttgactcactg

SEQ ID NO: 1358349 - DNA, 15 bp, Homo sapiens
cgatcttgactcact

SEQ ID NO: 1358350 - DNA, 15 bp, Homo sapiens
gcgatcttgactcac

SEQ ID NO: 1358351 - DNA, 15 bp, Homo sapiens
tgcgatcttgactca

SEQ ID NO: 1358352 - DNA, 15 bp, Homo sapiens
gtgcgatcttgactc

SEQ ID NO: 1358353 - DNA, 15 bp, Homo sapiens
ggtgcgatcttgact

SEQ ID NO: 1358354 - DNA, 15 bp, Homo sapiens
tggtgcgatcttgac

SEQ ID NO: 1358355 - DNA, 15 bp, Homo sapiens
atggtgcgatcttga

SEQ ID NO: 1358356 - DNA, 15 bp, Homo sapiens
aatggtgcgatcttg

SEQ ID NO: 1358357 - DNA, 15 bp, Homo sapiens
caatggtgcgatctt

SEQ ID NO: 1358358 - DNA, 15 bp, Homo sapiens
gcaatggtgcgatct

SEQ ID NO: 1358359 - DNA, 15 bp, Homo sapiens
tgcaatggtgcgatc

SEQ ID NO: 1358360 - DNA, 15 bp, Homo sapiens
gtgcaatggtgcgat

SEQ ID NO: 1358361 - DNA, 15 bp, Homo sapiens
agtgcaatggtgcga

SEQ ID NO: 1358362 - DNA, 15 bp, Homo sapiens
gagtgcaatggtgcg

SEQ ID NO: 1358363 - DNA, 15 bp, Homo sapiens
agagtttcattcttg

SEQ ID NO: 1358364 - DNA, 15 bp, Homo sapiens
cagagtttcattctt

SEQ ID NO: 1358365 - DNA, 15 bp, Homo sapiens
acagagtttcattct

SEQ ID NO: 1358366 - DNA, 15 bp, Homo sapiens
cacagagtttcattc

SEQ ID NO: 1358367 - DNA, 15 bp, Homo sapiens
acacagagtttcatt

SEQ ID NO: 1358368 - DNA, 15 bp, Homo sapiens
gacacagagtttcat

SEQ ID NO: 1358369 - DNA, 15 bp, Homo sapiens
tgacacagagtttca

SEQ ID NO: 1358370 - DNA, 15 bp, Homo sapiens
ttgacacagagtttc

SEQ ID NO: 1358371 - DNA, 15 bp, Homo sapiens
tttgacacagagttt

SEQ ID NO: 1358372 - DNA, 15 bp, Homo sapiens
ttttgacacagagtt

SEQ ID NO: 1358373 - DNA, 15 bp, Homo sapiens
tttttgacacagagt

SEQ ID NO: 1358374 - DNA, 15 bp, Homo sapiens
ttttttgacacagag

SEQ ID NO: 1358375 - DNA, 15 bp, Homo sapiens
tttttttgacacaga

SEQ ID NO: 1358376 - DNA, 15 bp, Homo sapiens
ttttttttgacacag

SEQ ID NO: 1358377 - DNA, 15 bp, Homo sapiens
tttttttttgacaca

SEQ ID NO: 1358378 - DNA, 15 bp, Homo sapiens
ttttttttttgacac

SEQ ID NO: 1358379 - DNA, 15 bp, Homo sapiens
cagcttttttttttt

SEQ ID NO: 1358380 - DNA, 15 bp, Homo sapiens
tcagctttttttttt

SEQ ID NO: 1358381 - DNA, 15 bp, Homo sapiens
ctcagcttttttttt

SEQ ID NO: 1358382 - DNA, 15 bp, Homo sapiens
gctcagctttttttt

SEQ ID NO: 1358383 - DNA, 15 bp, Homo sapiens
ggctcagcttttttt

SEQ ID NO: 1358384 - DNA, 15 bp, Homo sapiens
aggctcagctttttt

SEQ ID NO: 1358385 - DNA, 15 bp, Homo sapiens
gaggctcagcttttt

SEQ ID NO: 1358386 - DNA, 15 bp, Homo sapiens
ggaggctcagctttt

SEQ ID NO: 1358387 - DNA, 15 bp, Homo sapiens
aggaggctcagcttt

SEQ ID NO: 1358388 - DNA, 15 bp, Homo sapiens
taggaggctcagctt

SEQ ID NO: 1358389 - DNA, 15 bp, Homo sapiens
ctaggaggctcagct

SEQ ID NO: 1358390 - DNA, 15 bp, Homo sapiens
tctaggaggctcagc

SEQ ID NO: 1358391 - DNA, 15 bp, Homo sapiens
atctaggaggctcag

SEQ ID NO: 1358392 - DNA, 15 bp, Homo sapiens
aatctaggaggctca

SEQ ID NO: 1358393 - DNA, 15 bp, Homo sapiens
gaatctaggaggctc

SEQ ID NO: 1358394 - DNA, 15 bp, Homo sapiens
tgaatctaggaggct

SEQ ID NO: 1358395 - DNA, 15 bp, Homo sapiens
ctgaatctaggaggc

SEQ ID NO: 1358396 - DNA, 15 bp, Homo sapiens
cctgaatctaggagg

SEQ ID NO: 1358397 - DNA, 15 bp, Homo sapiens
gcctgaatctaggag

SEQ ID NO: 1358398 - DNA, 15 bp, Homo sapiens
tgcctgaatctagga

SEQ ID NO: 1358399 - DNA, 15 bp, Homo sapiens
ctgcctgaatctagg

SEQ ID NO: 1358400 - DNA, 15 bp, Homo sapiens
actgcctgaatctag

SEQ ID NO: 1358401 - DNA, 15 bp, Homo sapiens
cactgcctgaatcta

SEQ ID NO: 1358402 - DNA, 15 bp, Homo sapiens
tcactgcctgaatct

SEQ ID NO: 1358403 - DNA, 15 bp, Homo sapiens
atcactgcctgaatc

SEQ ID NO: 1358404 - DNA, 15 bp, Homo sapiens
catcactgcctgaat

SEQ ID NO: 1358405 - DNA, 15 bp, Homo sapiens
acatcactgcctgaa

SEQ ID NO: 1358406 - DNA, 15 bp, Homo sapiens
aacatcactgcctga

SEQ ID NO: 1358407 - DNA, 15 bp, Homo sapiens
aaacatcactgcctg

SEQ ID NO: 1358408 - DNA, 15 bp, Homo sapiens
gaaacatcactgcct

SEQ ID NO: 1358409 - DNA, 15 bp, Homo sapiens
ggaaacatcactgcc

SEQ ID NO: 1358410 - DNA, 15 bp, Homo sapiens
tggaaacatcactgc

SEQ ID NO: 1358411 - DNA, 15 bp, Homo sapiens
ctggaaacatcactg

SEQ ID NO: 1358412 - DNA, 15 bp, Homo sapiens
tctggaaacatcact

SEQ ID NO: 1358413 - DNA, 15 bp, Homo sapiens
ttctggaaacatcac

SEQ ID NO: 1358414 - DNA, 15 bp, Homo sapiens
cttctggaaacatca

SEQ ID NO: 1358415 - DNA, 15 bp, Homo sapiens
tcttctggaaacatc

SEQ ID NO: 1358416 - DNA, 15 bp, Homo sapiens
atcttctggaaacat

SEQ ID NO: 1358417 - DNA, 15 bp, Homo sapiens
catcttctggaaaca

SEQ ID NO: 1358418 - DNA, 15 bp, Homo sapiens
tcatcttctggaaac

SEQ ID NO: 1358419 - DNA, 15 bp, Homo sapiens
ttcatcttctggaaa

SEQ ID NO: 1358420 - DNA, 15 bp, Homo sapiens
tttcatcttctggaa

SEQ ID NO: 1358421 - DNA, 15 bp, Homo sapiens
tatttcatcttctgg

SEQ ID NO: 1358422 - DNA, 15 bp, Homo sapiens
atatttcatcttctg

SEQ ID NO: 1358423 - DNA, 15 bp, Homo sapiens
gatatttcatcttct

SEQ ID NO: 1358424 - DNA, 15 bp, Homo sapiens
tgatatttcatcttc

SEQ ID NO: 1358425 - DNA, 15 bp, Homo sapiens
ctgatatttcatctt

SEQ ID NO: 1358426 - DNA, 15 bp, Homo sapiens
cctgatatttcatct

SEQ ID NO: 1358427 - DNA, 15 bp, Homo sapiens
tcctgatatttcatc

SEQ ID NO: 1358428 - DNA, 15 bp, Homo sapiens
gtcctgatatttcat

SEQ ID NO: 1358429 - DNA, 15 bp, Homo sapiens
tgtcctgatatttca

SEQ ID NO: 1358430 - DNA, 15 bp, Homo sapiens
ttgtcctgatatttc

SEQ ID NO: 1358431 - DNA, 15 bp, Homo sapiens
gttgtcctgatattt

SEQ ID NO: 1358432 - DNA, 15 bp, Homo sapiens
ggttgtcctgatatt

SEQ ID NO: 1358433 - DNA, 15 bp, Homo sapiens
tggttgtcctgatat

SEQ ID NO: 1358434 - DNA, 15 bp, Homo sapiens
ctggttgtcctgata

SEQ ID NO: 1358435 - DNA, 15 bp, Homo sapiens
cctggttgtcctgat

SEQ ID NO: 1358436 - DNA, 15 bp, Homo sapiens
gcctggttgtcctga

SEQ ID NO: 1358437 - DNA, 15 bp, Homo sapiens
tgcctggttgtcctg

SEQ ID NO: 1358438 - DNA, 15 bp, Homo sapiens
atgcctggttgtcct

SEQ ID NO: 1358439 - DNA, 15 bp, Homo sapiens
gatgcctggttgtcc

SEQ ID NO: 1358440 - DNA, 15 bp, Homo sapiens
ggatgcctggttgtc

SEQ ID NO: 1358441 - DNA, 15 bp, Homo sapiens
aggatgcctggttgt

SEQ ID NO: 1358442 - DNA, 15 bp, Homo sapiens
caggatgcctggttg

SEQ ID NO: 1358443 - DNA, 15 bp, Homo sapiens
ccaggatgcctggtt

SEQ ID NO: 1358444 - DNA, 15 bp, Homo sapiens
cccaggatgcctggt

SEQ ID NO: 1358445 - DNA, 15 bp, Homo sapiens
tcccaggatgcctgg

SEQ ID NO: 1358446 - DNA, 15 bp, Homo sapiens
ctcccaggatgcctg

SEQ ID NO: 1358447 - DNA, 15 bp, Homo sapiens
tctcccaggatgcct

SEQ ID NO: 1358448 - DNA, 15 bp, Homo sapiens
gtctcccaggatgcc

SEQ ID NO: 1358449 - DNA, 15 bp, Homo sapiens
agtctcccaggatgc

SEQ ID NO: 1358450 - DNA, 15 bp, Homo sapiens
gagtctcccaggatg

SEQ ID NO: 1358451 - DNA, 15 bp, Homo sapiens
tgagtctcccaggat

SEQ ID NO: 1358452 - DNA, 15 bp, Homo sapiens
ttgagtctcccagga

SEQ ID NO: 1358453 - DNA, 15 bp, Homo sapiens
cttgagtctcccagg

SEQ ID NO: 1358454 - DNA, 15 bp, Homo sapiens
acttgagtctcccag

SEQ ID NO: 1358455 - DNA, 15 bp, Homo sapiens
aacttgagtctccca

SEQ ID NO: 1358456 - DNA, 15 bp, Homo sapiens
aaacttgagtctccc

SEQ ID NO: 1358457 - DNA, 15 bp, Homo sapiens
gaaacttgagtctcc

SEQ ID NO: 1358458 - DNA, 15 bp, Homo sapiens
agaaacttgagtctc

SEQ ID NO: 1358459 - DNA, 15 bp, Homo sapiens
aagaaacttgagtct

SEQ ID NO: 1358460 - DNA, 15 bp, Homo sapiens
aaagaaacttgagtc

SEQ ID NO: 1358461 - DNA, 15 bp, Homo sapiens
aaaagaaacttgagt

SEQ ID NO: 1358462 - DNA, 15 bp, Homo sapiens
aaaaagaaacttgag

SEQ ID NO: 1358463 - DNA, 15 bp, Homo sapiens
aaaaaagaaacttga

SEQ ID NO: 1358464 - DNA, 15 bp, Homo sapiens
aaaaaaagaaacttg

SEQ ID NO: 1358465 - DNA, 15 bp, Homo sapiens
caaaaaaagaaactt

SEQ ID NO: 1358466 - DNA, 15 bp, Homo sapiens
acaaaaaaagaaact

SEQ ID NO: 1358467 - DNA, 15 bp, Homo sapiens
aacaaaaaaagaaac

SEQ ID NO: 1358468 - DNA, 15 bp, Homo sapiens
caaacaaaaaaagaa

SEQ ID NO: 1358469 - DNA, 15 bp, Homo sapiens
acaaacaaaaaaaga

SEQ ID NO: 1358470 - DNA, 15 bp, Homo sapiens
atctcaaaaaacaaa

SEQ ID NO: 1358471 - DNA, 15 bp, Homo sapiens
tgtgccactgcattc

SEQ ID NO: 1358472 - DNA, 15 bp, Homo sapiens
ttgtgccactgcatt

SEQ ID NO: 1358473 - DNA, 15 bp, Homo sapiens
attgtgccactgcat

SEQ ID NO: 1358474 - DNA, 15 bp, Homo sapiens
tcgagattgtgccac

SEQ ID NO: 1358475 - DNA, 15 bp, Homo sapiens
gtcgagattgtgcca

SEQ ID NO: 1358476 - DNA, 15 bp, Homo sapiens
agtcgagattgtgcc

SEQ ID NO: 1358477 - DNA, 15 bp, Homo sapiens
gagtcgagattgtgc

SEQ ID NO: 1358478 - DNA, 15 bp, Homo sapiens
tgagtcgagattgtg

SEQ ID NO: 1358479 - DNA, 15 bp, Homo sapiens
gtgagtcgagattgt

SEQ ID NO: 1358480 - DNA, 15 bp, Homo sapiens
agtgagtcgagattg

SEQ ID NO: 1358481 - DNA, 15 bp, Homo sapiens
cagtgagtcgagatt

SEQ ID NO: 1358482 - DNA, 15 bp, Homo sapiens
gcagtgagtcgagat

SEQ ID NO: 1358483 - DNA, 15 bp, Homo sapiens
tgcagtgagtcgaga

SEQ ID NO: 1358484 - DNA, 15 bp, Homo sapiens
ttgcagtgagtcgag

SEQ ID NO: 1358485 - DNA, 15 bp, Homo sapiens
cttgcagtgagtcga

SEQ ID NO: 1358486 - DNA, 15 bp, Homo sapiens
gcttgcagtgagtcg

SEQ ID NO: 1358487 - DNA, 15 bp, Homo sapiens
agcttgcagtgagtc

SEQ ID NO: 1358488 - DNA, 15 bp, Homo sapiens
gagcttgcagtgagt

SEQ ID NO: 1358489 - DNA, 15 bp, Homo sapiens
agaaggcagagcttg

SEQ ID NO: 1358490 - DNA, 15 bp, Homo sapiens
cagaaggcagagctt

SEQ ID NO: 1358491 - DNA, 15 bp, Homo sapiens
ccagaaggcagagct

SEQ ID NO: 1358492 - DNA, 15 bp, Homo sapiens
cccagaaggcagagc

SEQ ID NO: 1358493 - DNA, 15 bp, Homo sapiens
acccagaaggcagag

SEQ ID NO: 1358494 - DNA, 15 bp, Homo sapiens
aacccagaaggcaga

SEQ ID NO: 1358495 - DNA, 15 bp, Homo sapiens
gaacccagaaggcag

SEQ ID NO: 1358496 - DNA, 15 bp, Homo sapiens
tgaacccagaaggca

SEQ ID NO: 1358497 - DNA, 15 bp, Homo sapiens
gtgaacccagaaggc

SEQ ID NO: 1358498 - DNA, 15 bp, Homo sapiens
cgtgaacccagaagg

SEQ ID NO: 1358499 - DNA, 15 bp, Homo sapiens
gcgtgaacccagaag

SEQ ID NO: 1358500 - DNA, 15 bp, Homo sapiens
ggcgtgaacccagaa

SEQ ID NO: 1358501 - DNA, 15 bp, Homo sapiens
tggcgtgaacccaga

SEQ ID NO: 1358502 - DNA, 15 bp, Homo sapiens
atggcgtgaacccag

SEQ ID NO: 1358503 - DNA, 15 bp, Homo sapiens
aatggcgtgaaccca

SEQ ID NO: 1358504 - DNA, 15 bp, Homo sapiens
ttggtggcgggtgcc

SEQ ID NO: 1358505 - DNA, 15 bp, Homo sapiens
cttggtggcgggtgc

SEQ ID NO: 1358506 - DNA, 15 bp, Homo sapiens
gcttggtggcgggtg

SEQ ID NO: 1358507 - DNA, 15 bp, Homo sapiens
ggcttggtggcgggt

SEQ ID NO: 1358508 - DNA, 15 bp, Homo sapiens
gggcttggtggcggg

SEQ ID NO: 1358509 - DNA, 15 bp, Homo sapiens
tgggcttggtggcgg

SEQ ID NO: 1358510 - DNA, 15 bp, Homo sapiens
ctgggcttggtggcg

SEQ ID NO: 1358511 - DNA, 15 bp, Homo sapiens
actgggcttggtggc

SEQ ID NO: 1358512 - DNA, 15 bp, Homo sapiens
aactgggcttggtgg

SEQ ID NO: 1358513 - DNA, 15 bp, Homo sapiens
taactgggcttggtg

SEQ ID NO: 1358514 - DNA, 15 bp, Homo sapiens
ttaactgggcttggt

SEQ ID NO: 1358515 - DNA, 15 bp, Homo sapiens
attaactgggcttgg

SEQ ID NO: 1358516 - DNA, 15 bp, Homo sapiens
aattaactgggcttg

SEQ ID NO: 1358517 - DNA, 15 bp, Homo sapiens
aaattaactgggctt

SEQ ID NO: 1358518 - DNA, 15 bp, Homo sapiens
aaaattaactgggct

SEQ ID NO: 1358519 - DNA, 15 bp, Homo sapiens
aaaaattaactgggc

SEQ ID NO: 1358520 - DNA, 15 bp, Homo sapiens
aaaaaattaactggg

SEQ ID NO: 1358521 - DNA, 15 bp, Homo sapiens
aaaaaaattaactgg

SEQ ID NO: 1358522 - DNA, 15 bp, Homo sapiens
caaaaaaattaactg

SEQ ID NO: 1358523 - DNA, 15 bp, Homo sapiens
ccaaaaaaattaact

SEQ ID NO: 1358524 - DNA, 15 bp, Homo sapiens
tccaaaaaaattaac

SEQ ID NO: 1358525 - DNA, 15 bp, Homo sapiens
atccaaaaaaattaa

SEQ ID NO: 1358526 - DNA, 15 bp, Homo sapiens
aatccaaaaaaatta

SEQ ID NO: 1358527 - DNA, 15 bp, Homo sapiens
aaatccaaaaaaatt

SEQ ID NO: 1358528 - DNA, 15 bp, Homo sapiens
aaaatccaaaaaaat

SEQ ID NO: 1358529 - DNA, 15 bp, Homo sapiens
aaaaatccaaaaaaa

SEQ ID NO: 1358530 - DNA, 15 bp, Homo sapiens
aaaaaatccaaaaaa

SEQ ID NO: 1358531 - DNA, 15 bp, Homo sapiens
ttacaaaaaatccaa

SEQ ID NO: 1358532 - DNA, 15 bp, Homo sapiens
tttacaaaaaatcca

SEQ ID NO: 1358533 - DNA, 15 bp, Homo sapiens
ctttacaaaaaatcc

SEQ ID NO: 1358534 - DNA, 15 bp, Homo sapiens
tctttacaaaaaatc

SEQ ID NO: 1358535 - DNA, 15 bp, Homo sapiens
gtctttacaaaaaat

SEQ ID NO: 1358536 - DNA, 15 bp, Homo sapiens
tgtctttacaaaaaa

SEQ ID NO: 1358537 - DNA, 15 bp, Homo sapiens
ctgtctttacaaaaa

SEQ ID NO: 1358538 - DNA, 15 bp, Homo sapiens
tctgtctttacaaaa

SEQ ID NO: 1358539 - DNA, 15 bp, Homo sapiens
ctctgtctttacaaa

SEQ ID NO: 1358540 - DNA, 15 bp, Homo sapiens
actctgtctttacaa

SEQ ID NO: 1358541 - DNA, 15 bp, Homo sapiens
aactctgtctttaca

SEQ ID NO: 1358542 - DNA, 15 bp, Homo sapiens
aaactctgtctttac

SEQ ID NO: 1358543 - DNA, 15 bp, Homo sapiens
gaaactctgtcttta

SEQ ID NO: 1358544 - DNA, 15 bp, Homo sapiens
tgaaactctgtcttt

SEQ ID NO: 1358545 - DNA, 15 bp, Homo sapiens
gtgaaactctgtctt

SEQ ID NO: 1358546 - DNA, 15 bp, Homo sapiens
cggtgaaactctgtc

SEQ ID NO: 1358547 - DNA, 15 bp, Homo sapiens
acggtgaaactctgt

SEQ ID NO: 1358548 - DNA, 15 bp, Homo sapiens
cacggtgaaactctg

SEQ ID NO: 1358549 - DNA, 15 bp, Homo sapiens
ccacggtgaaactct

SEQ ID NO: 1358550 - DNA, 15 bp, Homo sapiens
accacggtgaaactc

SEQ ID NO: 1358551 - DNA, 15 bp, Homo sapiens
gaccacggtgaaact

SEQ ID NO: 1358552 - DNA, 15 bp, Homo sapiens
ttcaggagatcgaga

SEQ ID NO: 1358553 - DNA, 15 bp, Homo sapiens
gttcaggagatcgag

SEQ ID NO: 1358554 - DNA, 15 bp, Homo sapiens
agttcaggagatcga

SEQ ID NO: 1358555 - DNA, 15 bp, Homo sapiens
gagttcaggagatcg

SEQ ID NO: 1358556 - DNA, 15 bp, Homo sapiens
cgagttcaggagatc

SEQ ID NO: 1358557 - DNA, 15 bp, Homo sapiens
acgagttcaggagat

SEQ ID NO: 1358558 - DNA, 15 bp, Homo sapiens
cacgagttcaggaga

SEQ ID NO: 1358559 - DNA, 15 bp, Homo sapiens
tcacgagttcaggag

SEQ ID NO: 1358560 - DNA, 15 bp, Homo sapiens
atcacgagttcagga

SEQ ID NO: 1358561 - DNA, 15 bp, Homo sapiens
gatcacgagttcagg

SEQ ID NO: 1358562 - DNA, 15 bp, Homo sapiens
ggatcacgagttcag

SEQ ID NO: 1358563 - DNA, 15 bp, Homo sapiens
cggatcacgagttca

SEQ ID NO: 1358564 - DNA, 15 bp, Homo sapiens
gcggatcacgagttc

SEQ ID NO: 1358565 - DNA, 15 bp, Homo sapiens
ggcggatcacgagtt

SEQ ID NO: 1358566 - DNA, 15 bp, Homo sapiens
aggcggatcacgagt

SEQ ID NO: 1358567 - DNA, 15 bp, Homo sapiens
caggcggatcacgag

SEQ ID NO: 1358568 - DNA, 15 bp, Homo sapiens
gcaatctgctaagct

SEQ ID NO: 1358569 - DNA, 15 bp, Homo sapiens
tgcaatctgctaagc

SEQ ID NO: 1358570 - DNA, 15 bp, Homo sapiens
atgcaatctgctaag

SEQ ID NO: 1358571 - DNA, 15 bp, Homo sapiens
aatgcaatctgctaa

SEQ ID NO: 1358572 - DNA, 15 bp, Homo sapiens
aaatgcaatctgcta

SEQ ID NO: 1358573 - DNA, 15 bp, Homo sapiens
taaatgcaatctgct

SEQ ID NO: 1358574 - DNA, 15 bp, Homo sapiens
ttaaatgcaatctgc

SEQ ID NO: 1358575 - DNA, 15 bp, Homo sapiens
cttaaatgcaatctg

SEQ ID NO: 1358576 - DNA, 15 bp, Homo sapiens
tcttaaatgcaatct

SEQ ID NO: 1358577 - DNA, 15 bp, Homo sapiens
ttcttaaatgcaatc

SEQ ID NO: 1358578 - DNA, 15 bp, Homo sapiens
tttcttaaatgcaat

SEQ ID NO: 1358579 - DNA, 15 bp, Homo sapiens
ctttcttaaatgcaa

SEQ ID NO: 1358580 - DNA, 15 bp, Homo sapiens
cctttcttaaatgca

SEQ ID NO: 1358581 - DNA, 15 bp, Homo sapiens
ccctttcttaaatgc

SEQ ID NO: 1358582 - DNA, 15 bp, Homo sapiens
cccctttcttaaatg

SEQ ID NO: 1358583 - DNA, 15 bp, Homo sapiens
tcccctttcttaaat

SEQ ID NO: 1358584 - DNA, 15 bp, Homo sapiens
ctcccctttcttaaa

SEQ ID NO: 1358585 - DNA, 15 bp, Homo sapiens
tctcccctttcttaa

SEQ ID NO: 1358586 - DNA, 15 bp, Homo sapiens
ctctcccctttctta

SEQ ID NO: 1358587 - DNA, 15 bp, Homo sapiens
tctctcccctttctt

SEQ ID NO: 1358588 - DNA, 15 bp, Homo sapiens
gtctctcccctttct

SEQ ID NO: 1358589 - DNA, 15 bp, Homo sapiens
ggtctctcccctttc

SEQ ID NO: 1358590 - DNA, 15 bp, Homo sapiens
tggtctctccccttt

SEQ ID NO: 1358591 - DNA, 15 bp, Homo sapiens
ctggtctctcccctt

SEQ ID NO: 1358592 - DNA, 15 bp, Homo sapiens
cctggtctctcccct

SEQ ID NO: 1358593 - DNA, 15 bp, Homo sapiens
gcctggtctctcccc

SEQ ID NO: 1358594 - DNA, 15 bp, Homo sapiens
cgcctggtctctccc

SEQ ID NO: 1358595 - DNA, 15 bp, Homo sapiens
gcgcctggtctctcc

SEQ ID NO: 1358596 - DNA, 15 bp, Homo sapiens
tgcgcctggtctctc

SEQ ID NO: 1358597 - DNA, 15 bp, Homo sapiens
ctgcgcctggtctct

SEQ ID NO: 1358598 - DNA, 15 bp, Homo sapiens
actgcgcctggtctc

SEQ ID NO: 1358599 - DNA, 15 bp, Homo sapiens
cactgcgcctggtct

SEQ ID NO: 1358600 - DNA, 15 bp, Homo sapiens
ccactgcgcctggtc

SEQ ID NO: 1358601 - DNA, 15 bp, Homo sapiens
gccactgcgcctggt

SEQ ID NO: 1358602 - DNA, 15 bp, Homo sapiens
gccgcctcagcctcc

SEQ ID NO: 1358603 - DNA, 15 bp, Homo sapiens
ggccgcctcagcctc

SEQ ID NO: 1358604 - DNA, 15 bp, Homo sapiens
tggccgcctcagcct

SEQ ID NO: 1358605 - DNA, 15 bp, Homo sapiens
ctggccgcctcagcc

SEQ ID NO: 1358606 - DNA, 15 bp, Homo sapiens
tctggccgcctcagc

SEQ ID NO: 1358607 - DNA, 15 bp, Homo sapiens
atctggccgcctcag

SEQ ID NO: 1358608 - DNA, 15 bp, Homo sapiens
gatctggccgcctca

SEQ ID NO: 1358609 - DNA, 15 bp, Homo sapiens
tgatctggccgcctc

SEQ ID NO: 1358610 - DNA, 15 bp, Homo sapiens
gtgatctggccgcct

SEQ ID NO: 1358611 - DNA, 15 bp, Homo sapiens
ggtgatctggccgcc

SEQ ID NO: 1358612 - DNA, 15 bp, Homo sapiens
aggtgatctggccgc

SEQ ID NO: 1358613 - DNA, 15 bp, Homo sapiens
caggtgatctggccg

SEQ ID NO: 1358614 - DNA, 15 bp, Homo sapiens
tcaggtgatctggcc

SEQ ID NO: 1358615 - DNA, 15 bp, Homo sapiens
ctcaggtgatctggc

SEQ ID NO: 1358616 - DNA, 15 bp, Homo sapiens
cctcaggtgatctgg

SEQ ID NO: 1358617 - DNA, 15 bp, Homo sapiens
gtgttgcccaggcta

SEQ ID NO: 1358618 - DNA, 15 bp, Homo sapiens
tttcactgtgttgcc

SEQ ID NO: 1358619 - DNA, 15 bp, Homo sapiens
gtttcactgtgttgc

SEQ ID NO: 1358620 - DNA, 15 bp, Homo sapiens
ctttgtatttttggt

SEQ ID NO: 1358621 - DNA, 15 bp, Homo sapiens
tctttgtatttttgg

SEQ ID NO: 1358622 - DNA, 15 bp, Homo sapiens
ttctttgtatttttg

SEQ ID NO: 1358623 - DNA, 15 bp, Homo sapiens
tttctttgtattttt

SEQ ID NO: 1358624 - DNA, 15 bp, Homo sapiens
atttctttgtatttt

SEQ ID NO: 1358625 - DNA, 15 bp, Homo sapiens
aatttctttgtattt

SEQ ID NO: 1358626 - DNA, 15 bp, Homo sapiens
taatttctttgtatt

SEQ ID NO: 1358627 - DNA, 15 bp, Homo sapiens
ctaatttctttgtat

SEQ ID NO: 1358628 - DNA, 15 bp, Homo sapiens
gctaatttctttgta

SEQ ID NO: 1358629 - DNA, 15 bp, Homo sapiens
agctaatttctttgt

SEQ ID NO: 1358630 - DNA, 15 bp, Homo sapiens
cagctaatttctttg

SEQ ID NO: 1358631 - DNA, 15 bp, Homo sapiens
ccagctaatttcttt

SEQ ID NO: 1358632 - DNA, 15 bp, Homo sapiens
cccagctaatttctt

SEQ ID NO: 1358633 - DNA, 15 bp, Homo sapiens
cgcccagctaatttc

SEQ ID NO: 1358634 - DNA, 15 bp, Homo sapiens
atggccaccacgccc

SEQ ID NO: 1358635 - DNA, 15 bp, Homo sapiens
catggccaccacgcc

SEQ ID NO: 1358636 - DNA, 15 bp, Homo sapiens
gcatggccaccacgc

SEQ ID NO: 1358637 - DNA, 15 bp, Homo sapiens
tgcatggccaccacg

SEQ ID NO: 1358638 - DNA, 15 bp, Homo sapiens
gtgcatggccaccac

SEQ ID NO: 1358639 - DNA, 15 bp, Homo sapiens
ggtgcatggccacca

SEQ ID NO: 1358640 - DNA, 15 bp, Homo sapiens
aggtgcatggccacc

SEQ ID NO: 1358641 - DNA, 15 bp, Homo sapiens
caggtgcatggccac

SEQ ID NO: 1358642 - DNA, 15 bp, Homo sapiens
acaggtgcatggcca

SEQ ID NO: 1358643 - DNA, 15 bp, Homo sapiens
tacaggtgcatggcc

SEQ ID NO: 1358644 - DNA, 15 bp, Homo sapiens
ttacaggtgcatggc

SEQ ID NO: 1358645 - DNA, 15 bp, Homo sapiens
attacaggtgcatgg

SEQ ID NO: 1358646 - DNA, 15 bp, Homo sapiens
gattacaggtgcatg

SEQ ID NO: 1358647 - DNA, 15 bp, Homo sapiens
ggattacaggtgcat

SEQ ID NO: 1358648 - DNA, 15 bp, Homo sapiens
aagctgggattacag

SEQ ID NO: 1358649 - DNA, 15 bp, Homo sapiens
gaagctgggattaca

SEQ ID NO: 1358650 - DNA, 15 bp, Homo sapiens
agaagctgggattac

SEQ ID NO: 1358651 - DNA, 15 bp, Homo sapiens
cagaagctgggatta

SEQ ID NO: 1358652 - DNA, 15 bp, Homo sapiens
ccagaagctgggatt

SEQ ID NO: 1358653 - DNA, 15 bp, Homo sapiens
tccagaagctgggat

SEQ ID NO: 1358654 - DNA, 15 bp, Homo sapiens
ctccagaagctggga

SEQ ID NO: 1358655 - DNA, 15 bp, Homo sapiens
tctccagaagctggg

SEQ ID NO: 1358656 - DNA, 15 bp, Homo sapiens
ctctccagaagctgg

SEQ ID NO: 1358657 - DNA, 15 bp, Homo sapiens
cctctccagaagctg

SEQ ID NO: 1358658 - DNA, 15 bp, Homo sapiens
gcctctccagaagct

SEQ ID NO: 1358659 - DNA, 15 bp, Homo sapiens
agcctctccagaagc

SEQ ID NO: 1358660 - DNA, 15 bp, Homo sapiens
cagcctctccagaag

SEQ ID NO: 1358661 - DNA, 15 bp, Homo sapiens
tcagcctctccagaa

SEQ ID NO: 1358662 - DNA, 15 bp, Homo sapiens
ctcagcctctccaga

SEQ ID NO: 1358663 - DNA, 15 bp, Homo sapiens
cctcagcctctccag

SEQ ID NO: 1358664 - DNA, 15 bp, Homo sapiens
gcctcagcctctcca

SEQ ID NO: 1358665 - DNA, 15 bp, Homo sapiens
tgcctcagcctctcc

SEQ ID NO: 1358666 - DNA, 15 bp, Homo sapiens
tgcgatcttggctca

SEQ ID NO: 1358667 - DNA, 15 bp, Homo sapiens
gtgcgatcttggctc

SEQ ID NO: 1358668 - DNA, 15 bp, Homo sapiens
atcacccaggctgga

SEQ ID NO: 1358669 - DNA, 15 bp, Homo sapiens
tatcacccaggctgg

SEQ ID NO: 1358670 - DNA, 15 bp, Homo sapiens
ctatcacccaggctg

SEQ ID NO: 1358671 - DNA, 15 bp, Homo sapiens
tctatcacccaggct

SEQ ID NO: 1358672 - DNA, 15 bp, Homo sapiens
ttctatcacccaggc

SEQ ID NO: 1358673 - DNA, 15 bp, Homo sapiens
cttctatcacccagg

SEQ ID NO: 1358674 - DNA, 15 bp, Homo sapiens
ccttctatcacccag

SEQ ID NO: 1358675 - DNA, 15 bp, Homo sapiens
tccttctatcaccca

SEQ ID NO: 1358676 - DNA, 15 bp, Homo sapiens
ctccttctatcaccc

SEQ ID NO: 1358677 - DNA, 15 bp, Homo sapiens
tctccttctatcacc

SEQ ID NO: 1358678 - DNA, 15 bp, Homo sapiens
gtctccttctatcac

SEQ ID NO: 1358679 - DNA, 15 bp, Homo sapiens
ggtctccttctatca

SEQ ID NO: 1358680 - DNA, 15 bp, Homo sapiens
gggtctccttctatc

SEQ ID NO: 1358681 - DNA, 15 bp, Homo sapiens
agggtctccttctat

SEQ ID NO: 1358682 - DNA, 15 bp, Homo sapiens
aagggtctccttcta

SEQ ID NO: 1358683 - DNA, 15 bp, Homo sapiens
gaagggtctccttct

SEQ ID NO: 1358684 - DNA, 15 bp, Homo sapiens
ggaagggtctccttc

SEQ ID NO: 1358685 - DNA, 15 bp, Homo sapiens
tggaagggtctcctt

SEQ ID NO: 1358686 - DNA, 15 bp, Homo sapiens
gtggaagggtctcct

SEQ ID NO: 1358687 - DNA, 15 bp, Homo sapiens
tgtggaagggtctcc

SEQ ID NO: 1358688 - DNA, 15 bp, Homo sapiens
gtgtggaagggtctc

SEQ ID NO: 1358689 - DNA, 15 bp, Homo sapiens
tgtgtggaagggtct

SEQ ID NO: 1358690 - DNA, 15 bp, Homo sapiens
gtgtgtggaagggtc

SEQ ID NO: 1358691 - DNA, 15 bp, Homo sapiens
tgtgtgtggaagggt

SEQ ID NO: 1358692 - DNA, 15 bp, Homo sapiens
gtgtgtgtggaaggg

SEQ ID NO: 1358693 - DNA, 15 bp, Homo sapiens
tgtgtgtgtggaagg

SEQ ID NO: 1358694 - DNA, 15 bp, Homo sapiens
ttgtgtgtgtggaag

SEQ ID NO: 1358695 - DNA, 15 bp, Homo sapiens
tttgtgtgtgtggaa

SEQ ID NO: 1358696 - DNA, 15 bp, Homo sapiens
ttttgtgtgtgtgga

SEQ ID NO: 1358697 - DNA, 15 bp, Homo sapiens
tttttgtgtgtgtgg

SEQ ID NO: 1358698 - DNA, 15 bp, Homo sapiens
ctttttgtgtgtgtg

SEQ ID NO: 1358699 - DNA, 15 bp, Homo sapiens
cctttttgtgtgtgt

SEQ ID NO: 1358700 - DNA, 15 bp, Homo sapiens
tcctttttgtgtgtg

SEQ ID NO: 1358701 - DNA, 15 bp, Homo sapiens
ttcctttttgtgtgt

SEQ ID NO: 1358702 - DNA, 15 bp, Homo sapiens
cttcctttttgtgtg

SEQ ID NO: 1358703 - DNA, 15 bp, Homo sapiens
acttcctttttgtgt

SEQ ID NO: 1358704 - DNA, 15 bp, Homo sapiens
cacttcctttttgtg

SEQ ID NO: 1358705 - DNA, 15 bp, Homo sapiens
acacttcctttttgt

SEQ ID NO: 1358706 - DNA, 15 bp, Homo sapiens
gacacttcctttttg

SEQ ID NO: 1358707 - DNA, 15 bp, Homo sapiens
agacacttccttttt

SEQ ID NO: 1358708 - DNA, 15 bp, Homo sapiens
tagacacttcctttt

SEQ ID NO: 1358709 - DNA, 15 bp, Homo sapiens
atagacacttccttt

SEQ ID NO: 1358710 - DNA, 15 bp, Homo sapiens
gatagacacttcctt

SEQ ID NO: 1358711 - DNA, 15 bp, Homo sapiens
agatagacacttcct

SEQ ID NO: 1358712 - DNA, 15 bp, Homo sapiens
aagatagacacttcc

SEQ ID NO: 1358713 - DNA, 15 bp, Homo sapiens
gaagatagacacttc

SEQ ID NO: 1358714 - DNA, 15 bp, Homo sapiens
tgaagatagacactt

SEQ ID NO: 1358715 - DNA, 15 bp, Homo sapiens
ctgaagatagacact

SEQ ID NO: 1358716 - DNA, 15 bp, Homo sapiens
cctgaagatagacac

SEQ ID NO: 1358717 - DNA, 15 bp, Homo sapiens
gcctgaagatagaca

SEQ ID NO: 1358718 - DNA, 15 bp, Homo sapiens
tgcctgaagatagac

SEQ ID NO: 1358719 - DNA, 15 bp, Homo sapiens
ctgcctgaagataga

SEQ ID NO: 1358720 - DNA, 15 bp, Homo sapiens
tctgcctgaagatag

SEQ ID NO: 1358721 - DNA, 15 bp, Homo sapiens
ctctgcctgaagata

SEQ ID NO: 1358722 - DNA, 15 bp, Homo sapiens
cctctgcctgaagat

SEQ ID NO: 1358723 - DNA, 15 bp, Homo sapiens
ccctctgcctgaaga

SEQ ID NO: 1358724 - DNA, 15 bp, Homo sapiens
accctctgcctgaag

SEQ ID NO: 1358725 - DNA, 15 bp, Homo sapiens
gaccctctgcctgaa

SEQ ID NO: 1358726 - DNA, 15 bp, Homo sapiens
tgaccctctgcctga

SEQ ID NO: 1358727 - DNA, 15 bp, Homo sapiens
ctgaccctctgcctg

SEQ ID NO: 1358728 - DNA, 15 bp, Homo sapiens
tctgaccctctgcct

SEQ ID NO: 1358729 - DNA, 15 bp, Homo sapiens
ttctgaccctctgcc

SEQ ID NO: 1358730 - DNA, 15 bp, Homo sapiens
attctgaccctctgc

SEQ ID NO: 1358731 - DNA, 15 bp, Homo sapiens
tattctgaccctctg

SEQ ID NO: 1358732 - DNA, 15 bp, Homo sapiens
ctattctgaccctct

SEQ ID NO: 1358733 - DNA, 15 bp, Homo sapiens
cctattctgaccctc

SEQ ID NO: 1358734 - DNA, 15 bp, Homo sapiens
tcctattctgaccct

SEQ ID NO: 1358735 - DNA, 15 bp, Homo sapiens
atcctattctgaccc

SEQ ID NO: 1358736 - DNA, 15 bp, Homo sapiens
catcctattctgacc

SEQ ID NO: 1358737 - DNA, 15 bp, Homo sapiens
ccatcctattctgac

SEQ ID NO: 1358738 - DNA, 15 bp, Homo sapiens
cccatcctattctga

SEQ ID NO: 1358739 - DNA, 15 bp, Homo sapiens
acccatcctattctg

SEQ ID NO: 1358740 - DNA, 15 bp, Homo sapiens
gacccatcctattct

SEQ ID NO: 1358741 - DNA, 15 bp, Homo sapiens
tgacccatcctattc

SEQ ID NO: 1358742 - DNA, 15 bp, Homo sapiens
gtgacccatcctatt

SEQ ID NO: 1358743 - DNA, 15 bp, Homo sapiens
tgtgacccatcctat

SEQ ID NO: 1358744 - DNA, 15 bp, Homo sapiens
gtgtgacccatccta

SEQ ID NO: 1358745 - DNA, 15 bp, Homo sapiens
agtgtgacccatcct

SEQ ID NO: 1358746 - DNA, 15 bp, Homo sapiens
aagtgtgacccatcc

SEQ ID NO: 1358747 - DNA, 15 bp, Homo sapiens
aaagtgtgacccatc

SEQ ID NO: 1358748 - DNA, 15 bp, Homo sapiens
caaagtgtgacccat

SEQ ID NO: 1358749 - DNA, 15 bp, Homo sapiens
acaaagtgtgaccca

SEQ ID NO: 1358750 - DNA, 15 bp, Homo sapiens
gacaaagtgtgaccc

SEQ ID NO: 1358751 - DNA, 15 bp, Homo sapiens
ggacaaagtgtgacc

SEQ ID NO: 1358752 - DNA, 15 bp, Homo sapiens
aggacaaagtgtgac

SEQ ID NO: 1358753 - DNA, 15 bp, Homo sapiens
aaggacaaagtgtga

SEQ ID NO: 1358754 - DNA, 15 bp, Homo sapiens
aaaggacaaagtgtg

SEQ ID NO: 1358755 - DNA, 15 bp, Homo sapiens
aaaaggacaaagtgt

SEQ ID NO: 1358756 - DNA, 15 bp, Homo sapiens
aaaaaggacaaagtg

SEQ ID NO: 1358757 - DNA, 15 bp, Homo sapiens
gaaaaaggacaaagt

SEQ ID NO: 1358758 - DNA, 15 bp, Homo sapiens
ggaaaaaggacaaag

SEQ ID NO: 1358759 - DNA, 15 bp, Homo sapiens
cggaaaaaggacaaa

SEQ ID NO: 1358760 - DNA, 15 bp, Homo sapiens
gcggaaaaaggacaa

SEQ ID NO: 1358761 - DNA, 15 bp, Homo sapiens
tgcggaaaaaggaca

SEQ ID NO: 1358762 - DNA, 15 bp, Homo sapiens
gtgcggaaaaaggac

SEQ ID NO: 1358763 - DNA, 15 bp, Homo sapiens
tgtgcggaaaaagga

SEQ ID NO: 1358764 - DNA, 15 bp, Homo sapiens
gtgtgcggaaaaagg

SEQ ID NO: 1358765 - DNA, 15 bp, Homo sapiens
ggtgtgcggaaaaag

SEQ ID NO: 1358766 - DNA, 15 bp, Homo sapiens
aggtgtgcggaaaaa

SEQ ID NO: 1358767 - DNA, 15 bp, Homo sapiens
aaggtgtgcggaaaa

SEQ ID NO: 1358768 - DNA, 15 bp, Homo sapiens
gaaggtgtgcggaaa

SEQ ID NO: 1358769 - DNA, 15 bp, Homo sapiens
agaaggtgtgcggaa

SEQ ID NO: 1358770 - DNA, 15 bp, Homo sapiens
tagaaggtgtgcgga

SEQ ID NO: 1358771 - DNA, 15 bp, Homo sapiens
ctagaaggtgtgcgg

SEQ ID NO: 1358772 - DNA, 15 bp, Homo sapiens
cctagaaggtgtgcg

SEQ ID NO: 1358773 - DNA, 15 bp, Homo sapiens
ccctagaaggtgtgc

SEQ ID NO: 1358774 - DNA, 15 bp, Homo sapiens
cccctagaaggtgtg

SEQ ID NO: 1358775 - DNA, 15 bp, Homo sapiens
ccccctagaaggtgt

SEQ ID NO: 1358776 - DNA, 15 bp, Homo sapiens
gccccctagaaggtg

SEQ ID NO: 1358777 - DNA, 15 bp, Homo sapiens
tgccccctagaaggt

SEQ ID NO: 1358778 - DNA, 15 bp, Homo sapiens
ttgccccctagaagg

SEQ ID NO: 1358779 - DNA, 15 bp, Homo sapiens
tttgccccctagaag

SEQ ID NO: 1358780 - DNA, 15 bp, Homo sapiens
ctttgccccctagaa

SEQ ID NO: 1358781 - DNA, 15 bp, Homo sapiens
cctttgccccctaga

SEQ ID NO: 1358782 - DNA, 15 bp, Homo sapiens
ccctttgccccctag

SEQ ID NO: 1358783 - DNA, 15 bp, Homo sapiens
accctttgcccccta

SEQ ID NO: 1358784 - DNA, 15 bp, Homo sapiens
gaccctttgccccct

SEQ ID NO: 1358785 - DNA, 15 bp, Homo sapiens
ggaccctttgccccc

SEQ ID NO: 1358786 - DNA, 15 bp, Homo sapiens
gggaccctttgcccc

SEQ ID NO: 1358787 - DNA, 15 bp, Homo sapiens
ggggaccctttgccc

SEQ ID NO: 1358788 - DNA, 15 bp, Homo sapiens
gggggaccctttgcc

SEQ ID NO: 1358789 - DNA, 15 bp, Homo sapiens
tgggggaccctttgc

SEQ ID NO: 1358790 - DNA, 15 bp, Homo sapiens
ttgggggaccctttg

SEQ ID NO: 1358791 - DNA, 15 bp, Homo sapiens
tttgggggacccttt

SEQ ID NO: 1358792 - DNA, 15 bp, Homo sapiens
gtttgggggaccctt

SEQ ID NO: 1358793 - DNA, 15 bp, Homo sapiens
ggtttgggggaccct

SEQ ID NO: 1358794 - DNA, 15 bp, Homo sapiens
gggtttgggggaccc

SEQ ID NO: 1358795 - DNA, 15 bp, Homo sapiens
agggtttgggggacc

SEQ ID NO: 1358796 - DNA, 15 bp, Homo sapiens
aagggtttgggggac

SEQ ID NO: 1358797 - DNA, 15 bp, Homo sapiens
caagggtttggggga

SEQ ID NO: 1358798 - DNA, 15 bp, Homo sapiens
acaagggtttggggg

SEQ ID NO: 1358799 - DNA, 15 bp, Homo sapiens
gacaagggtttgggg

SEQ ID NO: 1358800 - DNA, 15 bp, Homo sapiens
ggacaagggtttggg

SEQ ID NO: 1358801 - DNA, 15 bp, Homo sapiens
aggacaagggtttgg

SEQ ID NO: 1358802 - DNA, 15 bp, Homo sapiens
taggacaagggtttg

SEQ ID NO: 1358803 - DNA, 15 bp, Homo sapiens
gtaggacaagggttt

SEQ ID NO: 1358804 - DNA, 15 bp, Homo sapiens
tgtaggacaagggtt

SEQ ID NO: 1358805 - DNA, 15 bp, Homo sapiens
gtgtaggacaagggt

SEQ ID NO: 1358806 - DNA, 15 bp, Homo sapiens
ggtgtaggacaaggg

SEQ ID NO: 1358807 - DNA, 15 bp, Homo sapiens
tggtgtaggacaagg

SEQ ID NO: 1358808 - DNA, 15 bp, Homo sapiens
atggtgtaggacaag

SEQ ID NO: 1358809 - DNA, 15 bp, Homo sapiens
gatggtgtaggacaa

SEQ ID NO: 1358810 - DNA, 15 bp, Homo sapiens
tgatggtgtaggaca

SEQ ID NO: 1358811 - DNA, 15 bp, Homo sapiens
gtgatggtgtaggac

SEQ ID NO: 1358812 - DNA, 15 bp, Homo sapiens
agtgatggtgtagga

SEQ ID NO: 1358813 - DNA, 15 bp, Homo sapiens
tagtgatggtgtagg

SEQ ID NO: 1358814 - DNA, 15 bp, Homo sapiens
ctagtgatggtgtag

SEQ ID NO: 1358815 - DNA, 15 bp, Homo sapiens
cctagtgatggtgta

SEQ ID NO: 1358816 - DNA, 15 bp, Homo sapiens
gcctagtgatggtgt

SEQ ID NO: 1358817 - DNA, 15 bp, Homo sapiens
tgcctagtgatggtg

SEQ ID NO: 1358818 - DNA, 15 bp, Homo sapiens
atgcctagtgatggt

SEQ ID NO: 1358819 - DNA, 15 bp, Homo sapiens
gatgcctagtgatgg

SEQ ID NO: 1358820 - DNA, 15 bp, Homo sapiens
agatgcctagtgatg

SEQ ID NO: 1358821 - DNA, 15 bp, Homo sapiens
aagatgcctagtgat

SEQ ID NO: 1358822 - DNA, 15 bp, Homo sapiens
aaagatgcctagtga

SEQ ID NO: 1358823 - DNA, 15 bp, Homo sapiens
gaaagatgcctagtg

SEQ ID NO: 1358824 - DNA, 15 bp, Homo sapiens
ggaaagatgcctagt

SEQ ID NO: 1358825 - DNA, 15 bp, Homo sapiens
tggaaagatgcctag

SEQ ID NO: 1358826 - DNA, 15 bp, Homo sapiens
atggaaagatgccta

SEQ ID NO: 1358827 - DNA, 15 bp, Homo sapiens
gatggaaagatgcct

SEQ ID NO: 1358828 - DNA, 15 bp, Homo sapiens
ggatggaaagatgcc

SEQ ID NO: 1358829 - DNA, 15 bp, Homo sapiens
gggatggaaagatgc

SEQ ID NO: 1358830 - DNA, 15 bp, Homo sapiens
agggatggaaagatg

SEQ ID NO: 1358831 - DNA, 15 bp, Homo sapiens
cagggatggaaagat

SEQ ID NO: 1358832 - DNA, 15 bp, Homo sapiens
gcagggatggaaaga

SEQ ID NO: 1358833 - DNA, 15 bp, Homo sapiens
tgcagggatggaaag

SEQ ID NO: 1358834 - DNA, 15 bp, Homo sapiens
ttgcagggatggaaa

SEQ ID NO: 1358835 - DNA, 15 bp, Homo sapiens
attgcagggatggaa

SEQ ID NO: 1358836 - DNA, 15 bp, Homo sapiens
gattgcagggatgga

SEQ ID NO: 1358837 - DNA, 15 bp, Homo sapiens
tgattgcagggatgg

SEQ ID NO: 1358838 - DNA, 15 bp, Homo sapiens
ctgattgcagggatg

SEQ ID NO: 1358839 - DNA, 15 bp, Homo sapiens
actgattgcagggat

SEQ ID NO: 1358840 - DNA, 15 bp, Homo sapiens
tactgattgcaggga

SEQ ID NO: 1358841 - DNA, 15 bp, Homo sapiens
ttactgattgcaggg

SEQ ID NO: 1358842 - DNA, 15 bp, Homo sapiens
cttactgattgcagg

SEQ ID NO: 1358843 - DNA, 15 bp, Homo sapiens
tcttactgattgcag

SEQ ID NO: 1358844 - DNA, 15 bp, Homo sapiens
ttcttactgattgca

SEQ ID NO: 1358845 - DNA, 15 bp, Homo sapiens
cttcttactgattgc

SEQ ID NO: 1358846 - DNA, 15 bp, Homo sapiens
gcttcttactgattg

SEQ ID NO: 1358847 - DNA, 15 bp, Homo sapiens
tgcttcttactgatt

SEQ ID NO: 1358848 - DNA, 15 bp, Homo sapiens
atgcttcttactgat

SEQ ID NO: 1358849 - DNA, 15 bp, Homo sapiens
catgcttcttactga

SEQ ID NO: 1358850 - DNA, 15 bp, Homo sapiens
tcatgcttcttactg

SEQ ID NO: 1358851 - DNA, 15 bp, Homo sapiens
atcatgcttcttact

SEQ ID NO: 1358852 - DNA, 15 bp, Homo sapiens
gatcatgcttcttac

SEQ ID NO: 1358853 - DNA, 15 bp, Homo sapiens
agatcatgcttctta

SEQ ID NO: 1358854 - DNA, 15 bp, Homo sapiens
gagatcatgcttctt

SEQ ID NO: 1358855 - DNA, 15 bp, Homo sapiens
agagatcatgcttct

SEQ ID NO: 1358856 - DNA, 15 bp, Homo sapiens
gagagatcatgcttc

SEQ ID NO: 1358857 - DNA, 15 bp, Homo sapiens
ggagagatcatgctt

SEQ ID NO: 1358858 - DNA, 15 bp, Homo sapiens
gggagagatcatgct

SEQ ID NO: 1358859 - DNA, 15 bp, Homo sapiens
tgggagagatcatgc

SEQ ID NO: 1358860 - DNA, 15 bp, Homo sapiens
ctgggagagatcatg

SEQ ID NO: 1358861 - DNA, 15 bp, Homo sapiens
tctgggagagatcat

SEQ ID NO: 1358862 - DNA, 15 bp, Homo sapiens
ctctgggagagatca

SEQ ID NO: 1358863 - DNA, 15 bp, Homo sapiens
tctctgggagagatc

SEQ ID NO: 1358864 - DNA, 15 bp, Homo sapiens
ctctctgggagagat

SEQ ID NO: 1358865 - DNA, 15 bp, Homo sapiens
cctctctgggagaga

SEQ ID NO: 1358866 - DNA, 15 bp, Homo sapiens
tcctctctgggagag

SEQ ID NO: 1358867 - DNA, 15 bp, Homo sapiens
ctcctctctgggaga

SEQ ID NO: 1358868 - DNA, 15 bp, Homo sapiens
tctcctctctgggag

SEQ ID NO: 1358869 - DNA, 15 bp, Homo sapiens
ttctcctctctggga

SEQ ID NO: 1358870 - DNA, 15 bp, Homo sapiens
attctcctctctggg

SEQ ID NO: 1358871 - DNA, 15 bp, Homo sapiens
gattctcctctctgg

SEQ ID NO: 1358872 - DNA, 15 bp, Homo sapiens
tgattctcctctctg

SEQ ID NO: 1358873 - DNA, 15 bp, Homo sapiens
gtgattctcctctct

SEQ ID NO: 1358874 - DNA, 15 bp, Homo sapiens
ggtgattctcctctc

SEQ ID NO: 1358875 - DNA, 15 bp, Homo sapiens
aggtgattctcctct

SEQ ID NO: 1358876 - DNA, 15 bp, Homo sapiens
gaggtgattctcctc

SEQ ID NO: 1358877 - DNA, 15 bp, Homo sapiens
ggaggtgattctcct

SEQ ID NO: 1358878 - DNA, 15 bp, Homo sapiens
tggaggtgattctcc

SEQ ID NO: 1358879 - DNA, 15 bp, Homo sapiens
ttggaggtgattctc

SEQ ID NO: 1358880 - DNA, 15 bp, Homo sapiens
attggaggtgattct

SEQ ID NO: 1358881 - DNA, 15 bp, Homo sapiens
aattggaggtgattc

SEQ ID NO: 1358882 - DNA, 15 bp, Homo sapiens
aaattggaggtgatt

SEQ ID NO: 1358883 - DNA, 15 bp, Homo sapiens
aaaattggaggtgat

SEQ ID NO: 1358884 - DNA, 15 bp, Homo sapiens
caaaattggaggtga

SEQ ID NO: 1358885 - DNA, 15 bp, Homo sapiens
acaaaattggaggtg

SEQ ID NO: 1358886 - DNA, 15 bp, Homo sapiens
gacaaaattggaggt

SEQ ID NO: 1358887 - DNA, 15 bp, Homo sapiens
tgacaaaattggagg

SEQ ID NO: 1358888 - DNA, 15 bp, Homo sapiens
ctgacaaaattggag

SEQ ID NO: 1358889 - DNA, 15 bp, Homo sapiens
tctgacaaaattgga

SEQ ID NO: 1358890 - DNA, 15 bp, Homo sapiens
gtctgacaaaattgg

SEQ ID NO: 1358891 - DNA, 15 bp, Homo sapiens
agtctgacaaaattg

SEQ ID NO: 1358892 - DNA, 15 bp, Homo sapiens
gagtctgacaaaatt

SEQ ID NO: 1358893 - DNA, 15 bp, Homo sapiens
agagtctgacaaaat

SEQ ID NO: 1358894 - DNA, 15 bp, Homo sapiens
tagagtctgacaaaa

SEQ ID NO: 1358895 - DNA, 15 bp, Homo sapiens
ttagagtctgacaaa

SEQ ID NO: 1358896 - DNA, 15 bp, Homo sapiens
cttagagtctgacaa

SEQ ID NO: 1358897 - DNA, 15 bp, Homo sapiens
gcttagagtctgaca

SEQ ID NO: 1358898 - DNA, 15 bp, Homo sapiens
agcttagagtctgac

SEQ ID NO: 1358899 - DNA, 15 bp, Homo sapiens
cagcttagagtctga

SEQ ID NO: 1358900 - DNA, 15 bp, Homo sapiens
acagcttagagtctg

SEQ ID NO: 1358901 - DNA, 15 bp, Homo sapiens
cacagcttagagtct

SEQ ID NO: 1358902 - DNA, 15 bp, Homo sapiens
acacagcttagagtc

SEQ ID NO: 1358903 - DNA, 15 bp, Homo sapiens
cacacagcttagagt

SEQ ID NO: 1358904 - DNA, 15 bp, Homo sapiens
ccacacagcttagag

SEQ ID NO: 1358905 - DNA, 15 bp, Homo sapiens
gccacacagcttaga

SEQ ID NO: 1358906 - DNA, 15 bp, Homo sapiens
ggccacacagcttag

SEQ ID NO: 1358907 - DNA, 15 bp, Homo sapiens
aggccacacagctta

SEQ ID NO: 1358908 - DNA, 15 bp, Homo sapiens
aaggccacacagctt

SEQ ID NO: 1358909 - DNA, 15 bp, Homo sapiens
taaggccacacagct

SEQ ID NO: 1358910 - DNA, 15 bp, Homo sapiens
ctaaggccacacagc

SEQ ID NO: 1358911 - DNA, 15 bp, Homo sapiens
gctaaggccacacag

SEQ ID NO: 1358912 - DNA, 15 bp, Homo sapiens
ggctaaggccacaca

SEQ ID NO: 1358913 - DNA, 15 bp, Homo sapiens
tggctaaggccacac

SEQ ID NO: 1358914 - DNA, 15 bp, Homo sapiens
gtggctaaggccaca

SEQ ID NO: 1358915 - DNA, 15 bp, Homo sapiens
tgtggctaaggccac

SEQ ID NO: 1358916 - DNA, 15 bp, Homo sapiens
atgtggctaaggcca

SEQ ID NO: 1358917 - DNA, 15 bp, Homo sapiens
gatgtggctaaggcc

SEQ ID NO: 1358918 - DNA, 15 bp, Homo sapiens
agatgtggctaaggc

SEQ ID NO: 1358919 - DNA, 15 bp, Homo sapiens
gagatgtggctaagg

SEQ ID NO: 1358920 - DNA, 15 bp, Homo sapiens
ggagatgtggctaag

SEQ ID NO: 1358921 - DNA, 15 bp, Homo sapiens
aggagatgtggctaa

SEQ ID NO: 1358922 - DNA, 15 bp, Homo sapiens
aaggagatgtggcta

SEQ ID NO: 1358923 - DNA, 15 bp, Homo sapiens
gaaggagatgtggct

SEQ ID NO: 1358924 - DNA, 15 bp, Homo sapiens
agaaggagatgtggc

SEQ ID NO: 1358925 - DNA, 15 bp, Homo sapiens
gagaaggagatgtgg

SEQ ID NO: 1358926 - DNA, 15 bp, Homo sapiens
agagaaggagatgtg

SEQ ID NO: 1358927 - DNA, 15 bp, Homo sapiens
gagagaaggagatgt

SEQ ID NO: 1358928 - DNA, 15 bp, Homo sapiens
agagagaaggagatg

SEQ ID NO: 1358929 - DNA, 15 bp, Homo sapiens
cagagagaaggagat

SEQ ID NO: 1358930 - DNA, 15 bp, Homo sapiens
ccagagagaaggaga

SEQ ID NO: 1358931 - DNA, 15 bp, Homo sapiens
cccagagagaaggag

SEQ ID NO: 1358932 - DNA, 15 bp, Homo sapiens
gcccagagagaagga

SEQ ID NO: 1358933 - DNA, 15 bp, Homo sapiens
ggcccagagagaagg

SEQ ID NO: 1358934 - DNA, 15 bp, Homo sapiens
aggcccagagagaag

SEQ ID NO: 1358935 - DNA, 15 bp, Homo sapiens
gaggcccagagagaa

SEQ ID NO: 1358936 - DNA, 15 bp, Homo sapiens
tgaggcccagagaga

SEQ ID NO: 1358937 - DNA, 15 bp, Homo sapiens
ctgaggcccagagag

SEQ ID NO: 1358938 - DNA, 15 bp, Homo sapiens
actgaggcccagaga

SEQ ID NO: 1358939 - DNA, 15 bp, Homo sapiens
aactgaggcccagag

SEQ ID NO: 1358940 - DNA, 15 bp, Homo sapiens
gaaactgaggcccag

SEQ ID NO: 1358941 - DNA, 15 bp, Homo sapiens
ggaaactgaggccca

SEQ ID NO: 1358942 - DNA, 15 bp, Homo sapiens
aggaaactgaggccc

SEQ ID NO: 1358943 - DNA, 15 bp, Homo sapiens
gaggaaactgaggcc

SEQ ID NO: 1358944 - DNA, 15 bp, Homo sapiens
ggaggaaactgaggc

SEQ ID NO: 1358945 - DNA, 15 bp, Homo sapiens
tggaggaaactgagg

SEQ ID NO: 1358946 - DNA, 15 bp, Homo sapiens
gtggaggaaactgag

SEQ ID NO: 1358947 - DNA, 15 bp, Homo sapiens
cgtggaggaaactga

SEQ ID NO: 1358948 - DNA, 15 bp, Homo sapiens
tcgtggaggaaactg

SEQ ID NO: 1358949 - DNA, 15 bp, Homo sapiens
ctcgtggaggaaact

SEQ ID NO: 1358950 - DNA, 15 bp, Homo sapiens
actcgtggaggaaac

SEQ ID NO: 1358951 - DNA, 15 bp, Homo sapiens
cactcgtggaggaaa

SEQ ID NO: 1358952 - DNA, 15 bp, Homo sapiens
acactcgtggaggaa

SEQ ID NO: 1358953 - DNA, 15 bp, Homo sapiens
tacactcgtggagga

SEQ ID NO: 1358954 - DNA, 15 bp, Homo sapiens
ctacactcgtggagg

SEQ ID NO: 1358955 - DNA, 15 bp, Homo sapiens
tctacactcgtggag

SEQ ID NO: 1358956 - DNA, 15 bp, Homo sapiens
ctctacactcgtgga

SEQ ID NO: 1358957 - DNA, 15 bp, Homo sapiens
actctacactcgtgg

SEQ ID NO: 1358958 - DNA, 15 bp, Homo sapiens
gactctacactcgtg

SEQ ID NO: 1358959 - DNA, 15 bp, Homo sapiens
agactctacactcgt

SEQ ID NO: 1358960 - DNA, 15 bp, Homo sapiens
cagactctacactcg

SEQ ID NO: 1358961 - DNA, 15 bp, Homo sapiens
ccagactctacactc

SEQ ID NO: 1358962 - DNA, 15 bp, Homo sapiens
cccagactctacact

SEQ ID NO: 1358963 - DNA, 15 bp, Homo sapiens
acccagactctacac

SEQ ID NO: 1358964 - DNA, 15 bp, Homo sapiens
gacccagactctaca

SEQ ID NO: 1358965 - DNA, 15 bp, Homo sapiens
ggacccagactctac

SEQ ID NO: 1358966 - DNA, 15 bp, Homo sapiens
tggacccagactcta

SEQ ID NO: 1358967 - DNA, 15 bp, Homo sapiens
ctggacccagactct

SEQ ID NO: 1358968 - DNA, 15 bp, Homo sapiens
gctggacccagactc

SEQ ID NO: 1358969 - DNA, 15 bp, Homo sapiens
tgctggacccagact

SEQ ID NO: 1358970 - DNA, 15 bp, Homo sapiens
gtgctggacccagac

SEQ ID NO: 1358971 - DNA, 15 bp, Homo sapiens
agtgctggacccaga

SEQ ID NO: 1358972 - DNA, 15 bp, Homo sapiens
tagtgctggacccag

SEQ ID NO: 1358973 - DNA, 15 bp, Homo sapiens
gtagtgctggaccca

SEQ ID NO: 1358974 - DNA, 15 bp, Homo sapiens
ggtagtgctggaccc

SEQ ID NO: 1358975 - DNA, 15 bp, Homo sapiens
gggtagtgctggacc

SEQ ID NO: 1358976 - DNA, 15 bp, Homo sapiens
tgggtagtgctggac

SEQ ID NO: 1358977 - DNA, 15 bp, Homo sapiens
gtgggtagtgctgga

SEQ ID NO: 1358978 - DNA, 15 bp, Homo sapiens
ggtgggtagtgctgg

SEQ ID NO: 1358979 - DNA, 15 bp, Homo sapiens
cggtgggtagtgctg

SEQ ID NO: 1358980 - DNA, 15 bp, Homo sapiens
tcggtgggtagtgct

SEQ ID NO: 1358981 - DNA, 15 bp, Homo sapiens
ctcggtgggtagtgc

SEQ ID NO: 1358982 - DNA, 15 bp, Homo sapiens
actcggtgggtagtg

SEQ ID NO: 1358983 - DNA, 15 bp, Homo sapiens
gactcggtgggtagt

SEQ ID NO: 1358984 - DNA, 15 bp, Homo sapiens
agactcggtgggtag

SEQ ID NO: 1358985 - DNA, 15 bp, Homo sapiens
gagactcggtgggta

SEQ ID NO: 1358986 - DNA, 15 bp, Homo sapiens
ggagactcggtgggt

SEQ ID NO: 1358987 - DNA, 15 bp, Homo sapiens
tggagactcggtggg

SEQ ID NO: 1358988 - DNA, 15 bp, Homo sapiens
ctggagactcggtgg

SEQ ID NO: 1358989 - DNA, 15 bp, Homo sapiens
cctggagactcggtg

SEQ ID NO: 1358990 - DNA, 15 bp, Homo sapiens
gcctggagactcggt

SEQ ID NO: 1358991 - DNA, 15 bp, Homo sapiens
ggcctggagactcgg

SEQ ID NO: 1358992 - DNA, 15 bp, Homo sapiens
tggcctggagactcg

SEQ ID NO: 1358993 - DNA, 15 bp, Homo sapiens
atggcctggagactc

SEQ ID NO: 1358994 - DNA, 15 bp, Homo sapiens
gatggcctggagact

SEQ ID NO: 1358995 - DNA, 15 bp, Homo sapiens
cgatggcctggagac

SEQ ID NO: 1358996 - DNA, 15 bp, Homo sapiens
tcgatggcctggaga

SEQ ID NO: 1358997 - DNA, 15 bp, Homo sapiens
atcgatggcctggag

SEQ ID NO: 1358998 - DNA, 15 bp, Homo sapiens
tatcgatggcctgga

SEQ ID NO: 1358999 - DNA, 15 bp, Homo sapiens
atatcgatggcctgg

SEQ ID NO: 1359000 - DNA, 15 bp, Homo sapiens
tatatcgatggcctg

SEQ ID NO: 1359001 - DNA, 15 bp, Homo sapiens
atatatcgatggcct

SEQ ID NO: 1359002 - DNA, 15 bp, Homo sapiens
aatatatcgatggcc

SEQ ID NO: 1359003 - DNA, 15 bp, Homo sapiens
gaatatatcgatggc

SEQ ID NO: 1359004 - DNA, 15 bp, Homo sapiens
ggaatatatcgatgg

SEQ ID NO: 1359005 - DNA, 15 bp, Homo sapiens
aggaatatatcgatg

SEQ ID NO: 1359006 - DNA, 15 bp, Homo sapiens
aaggaatatatcgat

SEQ ID NO: 1359007 - DNA, 15 bp, Homo sapiens
gaaggaatatatcga

SEQ ID NO: 1359008 - DNA, 15 bp, Homo sapiens
agaaggaatatatcg

SEQ ID NO: 1359009 - DNA, 15 bp, Homo sapiens
aagaaggaatatatc

SEQ ID NO: 1359010 - DNA, 15 bp, Homo sapiens
gaagaaggaatatat

SEQ ID NO: 1359011 - DNA, 15 bp, Homo sapiens
agaagaaggaatata

SEQ ID NO: 1359012 - DNA, 15 bp, Homo sapiens
aagaagaaggaatat

SEQ ID NO: 1359013 - DNA, 15 bp, Homo sapiens
gaagaagaaggaata

SEQ ID NO: 1359014 - DNA, 15 bp, Homo sapiens
agaagaagaaggaat

SEQ ID NO: 1359015 - DNA, 15 bp, Homo sapiens
aagaagaagaaggaa

SEQ ID NO: 1359016 - DNA, 15 bp, Homo sapiens
ggaagaagaagaagg

SEQ ID NO: 1359017 - DNA, 15 bp, Homo sapiens
aggaagaagaagaag

SEQ ID NO: 1359018 - DNA, 15 bp, Homo sapiens
caggaagaagaagaa

SEQ ID NO: 1359019 - DNA, 15 bp, Homo sapiens
gcaggaagaagaaga

SEQ ID NO: 1359020 - DNA, 15 bp, Homo sapiens
agcaggaagaagaag

SEQ ID NO: 1359021 - DNA, 15 bp, Homo sapiens
aagcaggaagaagaa

SEQ ID NO: 1359022 - DNA, 15 bp, Homo sapiens
aaagcaggaagaaga

SEQ ID NO: 1359023 - DNA, 15 bp, Homo sapiens
gaaagcaggaagaag

SEQ ID NO: 1359024 - DNA, 15 bp, Homo sapiens
agaaagcaggaagaa

SEQ ID NO: 1359025 - DNA, 15 bp, Homo sapiens
aagaaagcaggaaga

SEQ ID NO: 1359026 - DNA, 15 bp, Homo sapiens
caagaaagcaggaag

SEQ ID NO: 1359027 - DNA, 15 bp, Homo sapiens
gcaagaaagcaggaa

SEQ ID NO: 1359028 - DNA, 15 bp, Homo sapiens
cgcaagaaagcagga

SEQ ID NO: 1359029 - DNA, 15 bp, Homo sapiens
gcgcaagaaagcagg

SEQ ID NO: 1359030 - DNA, 15 bp, Homo sapiens
ggcgcaagaaagcag

SEQ ID NO: 1359031 - DNA, 15 bp, Homo sapiens
cggcgcaagaaagca

SEQ ID NO: 1359032 - DNA, 15 bp, Homo sapiens
tcggcgcaagaaagc

SEQ ID NO: 1359033 - DNA, 15 bp, Homo sapiens
gtcggcgcaagaaag

SEQ ID NO: 1359034 - DNA, 15 bp, Homo sapiens
agtcggcgcaagaaa

SEQ ID NO: 1359035 - DNA, 15 bp, Homo sapiens
cagtcggcgcaagaa

SEQ ID NO: 1359036 - DNA, 15 bp, Homo sapiens
gcagtcggcgcaaga

SEQ ID NO: 1359037 - DNA, 15 bp, Homo sapiens
agcagtcggcgcaag

SEQ ID NO: 1359038 - DNA, 15 bp, Homo sapiens
aagcagtcggcgcaa

SEQ ID NO: 1359039 - DNA, 15 bp, Homo sapiens
caagcagtcggcgca

SEQ ID NO: 1359040 - DNA, 15 bp, Homo sapiens
acaagcagtcggcgc

SEQ ID NO: 1359041 - DNA, 15 bp, Homo sapiens
aacaagcagtcggcg

SEQ ID NO: 1359042 - DNA, 15 bp, Homo sapiens
gaacaagcagtcggc

SEQ ID NO: 1359043 - DNA, 15 bp, Homo sapiens
ggaacaagcagtcgg

SEQ ID NO: 1359044 - DNA, 15 bp, Homo sapiens
cggaacaagcagtcg

SEQ ID NO: 1359045 - DNA, 15 bp, Homo sapiens
ccggaacaagcagtc

SEQ ID NO: 1359046 - DNA, 15 bp, Homo sapiens
tccggaacaagcagt

SEQ ID NO: 1359047 - DNA, 15 bp, Homo sapiens
atccggaacaagcag

SEQ ID NO: 1359048 - DNA, 15 bp, Homo sapiens
aatccggaacaagca

SEQ ID NO: 1359049 - DNA, 15 bp, Homo sapiens
aaatccggaacaagc

SEQ ID NO: 1359050 - DNA, 15 bp, Homo sapiens
aaaatccggaacaag

SEQ ID NO: 1359051 - DNA, 15 bp, Homo sapiens
gaaaatccggaacaa

SEQ ID NO: 1359052 - DNA, 15 bp, Homo sapiens
ggaaaatccggaaca

SEQ ID NO: 1359053 - DNA, 15 bp, Homo sapiens
cggaaaatccggaac

SEQ ID NO: 1359054 - DNA, 15 bp, Homo sapiens
ccggaaaatccggaa

SEQ ID NO: 1359055 - DNA, 15 bp, Homo sapiens
gccggaaaatccgga

SEQ ID NO: 1359056 - DNA, 15 bp, Homo sapiens
cgccggaaaatccgg

SEQ ID NO: 1359057 - DNA, 15 bp, Homo sapiens
ccgccggaaaatccg

SEQ ID NO: 1359058 - DNA, 15 bp, Homo sapiens
tccgccggaaaatcc

SEQ ID NO: 1359059 - DNA, 15 bp, Homo sapiens
atccgccggaaaatc

SEQ ID NO: 1359060 - DNA, 15 bp, Homo sapiens
aatccgccggaaaat

SEQ ID NO: 1359061 - DNA, 15 bp, Homo sapiens
aaatccgccggaaaa

SEQ ID NO: 1359062 - DNA, 15 bp, Homo sapiens
aaaatccgccggaaa

SEQ ID NO: 1359063 - DNA, 15 bp, Homo sapiens
aaaaatccgccggaa

SEQ ID NO: 1359064 - DNA, 15 bp, Homo sapiens
aaaaaatccgccgga

SEQ ID NO: 1359065 - DNA, 15 bp, Homo sapiens
aaaaaaatccgccgg

SEQ ID NO: 1359066 - DNA, 15 bp, Homo sapiens
gaaaaaaatccgccg

SEQ ID NO: 1359067 - DNA, 15 bp, Homo sapiens
tgaaaaaaatccgcc

SEQ ID NO: 1359068 - DNA, 15 bp, Homo sapiens
ctgaaaaaaatccgc

SEQ ID NO: 1359069 - DNA, 15 bp, Homo sapiens
gctgaaaaaaatccg

SEQ ID NO: 1359070 - DNA, 15 bp, Homo sapiens
tgctgaaaaaaatcc

SEQ ID NO: 1359071 - DNA, 15 bp, Homo sapiens
gtgctgaaaaaaatc

SEQ ID NO: 1359072 - DNA, 15 bp, Homo sapiens
agtgctgaaaaaaat

SEQ ID NO: 1359073 - DNA, 15 bp, Homo sapiens
gagtgctgaaaaaaa

SEQ ID NO: 1359074 - DNA, 15 bp, Homo sapiens
cgagtgctgaaaaaa

SEQ ID NO: 1359075 - DNA, 15 bp, Homo sapiens
gcgagtgctgaaaaa

SEQ ID NO: 1359076 - DNA, 15 bp, Homo sapiens
agcgagtgctgaaaa

SEQ ID NO: 1359077 - DNA, 15 bp, Homo sapiens
gagcgagtgctgaaa

SEQ ID NO: 1359078 - DNA, 15 bp, Homo sapiens
ggagcgagtgctgaa

SEQ ID NO: 1359079 - DNA, 15 bp, Homo sapiens
aggagcgagtgctga

SEQ ID NO: 1359080 - DNA, 15 bp, Homo sapiens
gaggagcgagtgctg

SEQ ID NO: 1359081 - DNA, 15 bp, Homo sapiens
cgaggagcgagtgct

SEQ ID NO: 1359082 - DNA, 15 bp, Homo sapiens
acgaggagcgagtgc

SEQ ID NO: 1359083 - DNA, 15 bp, Homo sapiens
tacgaggagcgagtg

SEQ ID NO: 1359084 - DNA, 15 bp, Homo sapiens
gtacgaggagcgagt

SEQ ID NO: 1359085 - DNA, 15 bp, Homo sapiens
agtacgaggagcgag

SEQ ID NO: 1359086 - DNA, 15 bp, Homo sapiens
cagtacgaggagcga

SEQ ID NO: 1359087 - DNA, 15 bp, Homo sapiens
gcagtacgaggagcg

SEQ ID NO: 1359088 - DNA, 15 bp, Homo sapiens
ggcagtacgaggagc

SEQ ID NO: 1359089 - DNA, 15 bp, Homo sapiens
tggcagtacgaggag

SEQ ID NO: 1359090 - DNA, 15 bp, Homo sapiens
ttggcagtacgagga

SEQ ID NO: 1359091 - DNA, 15 bp, Homo sapiens
cttggcagtacgagg

SEQ ID NO: 1359092 - DNA, 15 bp, Homo sapiens
acttggcagtacgag

SEQ ID NO: 1359093 - DNA, 15 bp, Homo sapiens
cacttggcagtacga

SEQ ID NO: 1359094 - DNA, 15 bp, Homo sapiens
tcacttggcagtacg

SEQ ID NO: 1359095 - DNA, 15 bp, Homo sapiens
ttcacttggcagtac

SEQ ID NO: 1359096 - DNA, 15 bp, Homo sapiens
tttcacttggcagta

SEQ ID NO: 1359097 - DNA, 15 bp, Homo sapiens
atttcacttggcagt

SEQ ID NO: 1359098 - DNA, 15 bp, Homo sapiens
catttcacttggcag

SEQ ID NO: 1359099 - DNA, 15 bp, Homo sapiens
ccatttcacttggca

SEQ ID NO: 1359100 - DNA, 15 bp, Homo sapiens
cccatttcacttggc

SEQ ID NO: 1359101 - DNA, 15 bp, Homo sapiens
ccccatttcacttgg

SEQ ID NO: 1359102 - DNA, 15 bp, Homo sapiens
tccccatttcacttg

SEQ ID NO: 1359103 - DNA, 15 bp, Homo sapiens
ctccccatttcactt

SEQ ID NO: 1359104 - DNA, 15 bp, Homo sapiens
cctccccatttcact

SEQ ID NO: 1359105 - DNA, 15 bp, Homo sapiens
tcctccccatttcac

SEQ ID NO: 1359106 - DNA, 15 bp, Homo sapiens
ctcctccccatttca

SEQ ID NO: 1359107 - DNA, 15 bp, Homo sapiens
cctcctccccatttc

SEQ ID NO: 1359108 - DNA, 15 bp, Homo sapiens
ccctcctccccattt

SEQ ID NO: 1359109 - DNA, 15 bp, Homo sapiens
accctcctccccatt

SEQ ID NO: 1359110 - DNA, 15 bp, Homo sapiens
aaccctcctccccat

SEQ ID NO: 1359111 - DNA, 15 bp, Homo sapiens
aaaccctcctcccca

SEQ ID NO: 1359112 - DNA, 15 bp, Homo sapiens
gaaaccctcctcccc

SEQ ID NO: 1359113 - DNA, 15 bp, Homo sapiens
tgaaaccctcctccc

SEQ ID NO: 1359114 - DNA, 15 bp, Homo sapiens
ctgaaaccctcctcc

SEQ ID NO: 1359115 - DNA, 15 bp, Homo sapiens
cctgaaaccctcctc

SEQ ID NO: 1359116 - DNA, 15 bp, Homo sapiens
gcctgaaaccctcct

SEQ ID NO: 1359117 - DNA, 15 bp, Homo sapiens
ggcctgaaaccctcc

SEQ ID NO: 1359118 - DNA, 15 bp, Homo sapiens
tggcctgaaaccctc

SEQ ID NO: 1359119 - DNA, 15 bp, Homo sapiens
ctggcctgaaaccct

SEQ ID NO: 1359120 - DNA, 15 bp, Homo sapiens
tctggcctgaaaccc

SEQ ID NO: 1359121 - DNA, 15 bp, Homo sapiens
ttctggcctgaaacc

SEQ ID NO: 1359122 - DNA, 15 bp, Homo sapiens
tttctggcctgaaac

SEQ ID NO: 1359123 - DNA, 15 bp, Homo sapiens
ctttctggcctgaaa

SEQ ID NO: 1359124 - DNA, 15 bp, Homo sapiens
actttctggcctgaa

SEQ ID NO: 1359125 - DNA, 15 bp, Homo sapiens
gactttctggcctga

SEQ ID NO: 1359126 - DNA, 15 bp, Homo sapiens
ggactttctggcctg

SEQ ID NO: 1359127 - DNA, 15 bp, Homo sapiens
gggactttctggcct

SEQ ID NO: 1359128 - DNA, 15 bp, Homo sapiens
ggggactttctggcc

SEQ ID NO: 1359129 - DNA, 15 bp, Homo sapiens
tggggactttctggc

SEQ ID NO: 1359130 - DNA, 15 bp, Homo sapiens
gtggggactttctgg

SEQ ID NO: 1359131 - DNA, 15 bp, Homo sapiens
agtggggactttctg

SEQ ID NO: 1359132 - DNA, 15 bp, Homo sapiens
aagtggggactttct

SEQ ID NO: 1359133 - DNA, 15 bp, Homo sapiens
caagtggggactttc

SEQ ID NO: 1359134 - DNA, 15 bp, Homo sapiens
ccaagtggggacttt

SEQ ID NO: 1359135 - DNA, 15 bp, Homo sapiens
tccaagtggggactt

SEQ ID NO: 1359136 - DNA, 15 bp, Homo sapiens
ctccaagtggggact

SEQ ID NO: 1359137 - DNA, 15 bp, Homo sapiens
actccaagtggggac

SEQ ID NO: 1359138 - DNA, 15 bp, Homo sapiens
gactccaagtgggga

SEQ ID NO: 1359139 - DNA, 15 bp, Homo sapiens
ggactccaagtgggg

SEQ ID NO: 1359140 - DNA, 15 bp, Homo sapiens
cggactccaagtggg

SEQ ID NO: 1359141 - DNA, 15 bp, Homo sapiens
ccggactccaagtgg

SEQ ID NO: 1359142 - DNA, 15 bp, Homo sapiens
cccggactccaagtg

SEQ ID NO: 1359143 - DNA, 15 bp, Homo sapiens
ccccggactccaagt

SEQ ID NO: 1359144 - DNA, 15 bp, Homo sapiens
cccccggactccaag

SEQ ID NO: 1359145 - DNA, 15 bp, Homo sapiens
gcccccggactccaa

SEQ ID NO: 1359146 - DNA, 15 bp, Homo sapiens
tgcccccggactcca

SEQ ID NO: 1359147 - DNA, 15 bp, Homo sapiens
ctgcccccggactcc

SEQ ID NO: 1359148 - DNA, 15 bp, Homo sapiens
actgcccccggactc

SEQ ID NO: 1359149 - DNA, 15 bp, Homo sapiens
tactgcccccggact

SEQ ID NO: 1359150 - DNA, 15 bp, Homo sapiens
ctactgcccccggac

SEQ ID NO: 1359151 - DNA, 15 bp, Homo sapiens
gctactgcccccgga

SEQ ID NO: 1359152 - DNA, 15 bp, Homo sapiens
agctactgcccccgg

SEQ ID NO: 1359153 - DNA, 15 bp, Homo sapiens
gagctactgcccccg

SEQ ID NO: 1359154 - DNA, 15 bp, Homo sapiens
agagctactgccccc

SEQ ID NO: 1359155 - DNA, 15 bp, Homo sapiens
gagagctactgcccc

SEQ ID NO: 1359156 - DNA, 15 bp, Homo sapiens
cgagagctactgccc

SEQ ID NO: 1359157 - DNA, 15 bp, Homo sapiens
gcgagagctactgcc

SEQ ID NO: 1359158 - DNA, 15 bp, Homo sapiens
ggcgagagctactgc

SEQ ID NO: 1359159 - DNA, 15 bp, Homo sapiens
aggcgagagctactg

SEQ ID NO: 1359160 - DNA, 15 bp, Homo sapiens
caggcgagagctact

SEQ ID NO: 1359161 - DNA, 15 bp, Homo sapiens
acaggcgagagctac

SEQ ID NO: 1359162 - DNA, 15 bp, Homo sapiens
tacaggcgagagcta

SEQ ID NO: 1359163 - DNA, 15 bp, Homo sapiens
ttacaggcgagagct

SEQ ID NO: 1359164 - DNA, 15 bp, Homo sapiens
acgcctgcctcggcc

SEQ ID NO: 1359165 - DNA, 15 bp, Homo sapiens
tacgcctgcctcggc

SEQ ID NO: 1359166 - DNA, 15 bp, Homo sapiens
atacgcctgcctcgg

SEQ ID NO: 1359167 - DNA, 15 bp, Homo sapiens
gatacgcctgcctcg

SEQ ID NO: 1359168 - DNA, 15 bp, Homo sapiens
tgatacgcctgcctc

SEQ ID NO: 1359169 - DNA, 15 bp, Homo sapiens
gtgatacgcctgcct

SEQ ID NO: 1359170 - DNA, 15 bp, Homo sapiens
ggtgatacgcctgcc

SEQ ID NO: 1359171 - DNA, 15 bp, Homo sapiens
aggtgatacgcctgc

SEQ ID NO: 1359172 - DNA, 15 bp, Homo sapiens
caggtgatacgcctg

SEQ ID NO: 1359173 - DNA, 15 bp, Homo sapiens
tcaggtgatacgcct

SEQ ID NO: 1359174 - DNA, 15 bp, Homo sapiens
tgtttcaccatgttg

SEQ ID NO: 1359175 - DNA, 15 bp, Homo sapiens
gtgtttcaccatgtt

SEQ ID NO: 1359176 - DNA, 15 bp, Homo sapiens
ggtgtttcaccatgt

SEQ ID NO: 1359177 - DNA, 15 bp, Homo sapiens
cggtgtttcaccatg

SEQ ID NO: 1359178 - DNA, 15 bp, Homo sapiens
acggtgtttcaccat

SEQ ID NO: 1359179 - DNA, 15 bp, Homo sapiens
gacggtgtttcacca

SEQ ID NO: 1359180 - DNA, 15 bp, Homo sapiens
agacggtgtttcacc

SEQ ID NO: 1359181 - DNA, 15 bp, Homo sapiens
gagacggtgtttcac

SEQ ID NO: 1359182 - DNA, 15 bp, Homo sapiens
agagacggtgtttca

SEQ ID NO: 1359183 - DNA, 15 bp, Homo sapiens
tagagacggtgtttc

SEQ ID NO: 1359184 - DNA, 15 bp, Homo sapiens
gtagagacggtgttt

SEQ ID NO: 1359185 - DNA, 15 bp, Homo sapiens
agtagagacggtgtt

SEQ ID NO: 1359186 - DNA, 15 bp, Homo sapiens
tagtagagacggtgt

SEQ ID NO: 1359187 - DNA, 15 bp, Homo sapiens
ttagtagagacggtg

SEQ ID NO: 1359188 - DNA, 15 bp, Homo sapiens
cgggttcatgccatt

SEQ ID NO: 1359189 - DNA, 15 bp, Homo sapiens
ccgggttcatgccat

SEQ ID NO: 1359190 - DNA, 15 bp, Homo sapiens
cccgggttcatgcca

SEQ ID NO: 1359191 - DNA, 15 bp, Homo sapiens
tcccgggttcatgcc

SEQ ID NO: 1359192 - DNA, 15 bp, Homo sapiens
ctcccgggttcatgc

SEQ ID NO: 1359193 - DNA, 15 bp, Homo sapiens
cctcccgggttcatg

SEQ ID NO: 1359194 - DNA, 15 bp, Homo sapiens
gcctcccgggttcat

SEQ ID NO: 1359195 - DNA, 15 bp, Homo sapiens
ttgcaatggcacgat

SEQ ID NO: 1359196 - DNA, 15 bp, Homo sapiens
attgcaatggcacga

SEQ ID NO: 1359197 - DNA, 15 bp, Homo sapiens
gattgcaatggcacg

SEQ ID NO: 1359198 - DNA, 15 bp, Homo sapiens
ggattgcaatggcac

SEQ ID NO: 1359199 - DNA, 15 bp, Homo sapiens
tggattgcaatggca

SEQ ID NO: 1359200 - DNA, 15 bp, Homo sapiens
ctggattgcaatggc

SEQ ID NO: 1359201 - DNA, 15 bp, Homo sapiens
gctggattgcaatgg

SEQ ID NO: 1359202 - DNA, 15 bp, Homo sapiens
ggctggattgcaatg

SEQ ID NO: 1359203 - DNA, 15 bp, Homo sapiens
aggctggattgcaat

SEQ ID NO: 1359204 - DNA, 15 bp, Homo sapiens
caggctggattgcaa

SEQ ID NO: 1359205 - DNA, 15 bp, Homo sapiens
ccaggctggattgca

SEQ ID NO: 1359206 - DNA, 15 bp, Homo sapiens
cccaggctggattgc

SEQ ID NO: 1359207 - DNA, 15 bp, Homo sapiens
gcccaggctggattg

SEQ ID NO: 1359208 - DNA, 15 bp, Homo sapiens
tgcccaggctggatt

SEQ ID NO: 1359209 - DNA, 15 bp, Homo sapiens
ttgcccaggctggat

SEQ ID NO: 1359210 - DNA, 15 bp, Homo sapiens
attgagatggagttt

SEQ ID NO: 1359211 - DNA, 15 bp, Homo sapiens
tattgagatggagtt

SEQ ID NO: 1359212 - DNA, 15 bp, Homo sapiens
ttattgagatggagt

SEQ ID NO: 1359213 - DNA, 15 bp, Homo sapiens
tttattgagatggag

SEQ ID NO: 1359214 - DNA, 15 bp, Homo sapiens
atttattgagatgga

SEQ ID NO: 1359215 - DNA, 15 bp, Homo sapiens
tatttattgagatgg

SEQ ID NO: 1359216 - DNA, 15 bp, Homo sapiens
ttatttattgagatg

SEQ ID NO: 1359217 - DNA, 15 bp, Homo sapiens
tttatttattgagat

SEQ ID NO: 1359218 - DNA, 15 bp, Homo sapiens
atttatttattgaga

SEQ ID NO: 1359219 - DNA, 15 bp, Homo sapiens
tatttatttattgag

SEQ ID NO: 1359220 - DNA, 15 bp, Homo sapiens
ctatttatttattga

SEQ ID NO: 1359221 - DNA, 15 bp, Homo sapiens
tctatttatttattg

SEQ ID NO: 1359222 - DNA, 15 bp, Homo sapiens
atctatttatttatt

SEQ ID NO: 1359223 - DNA, 15 bp, Homo sapiens
tatctatttatttat

SEQ ID NO: 1359224 - DNA, 15 bp, Homo sapiens
ttatctatttattta

SEQ ID NO: 1359225 - DNA, 15 bp, Homo sapiens
tttatctatttattt

SEQ ID NO: 1359226 - DNA, 15 bp, Homo sapiens
atttatctatttatt

SEQ ID NO: 1359227 - DNA, 15 bp, Homo sapiens
tatttatctatttat

SEQ ID NO: 1359228 - DNA, 15 bp, Homo sapiens
ttatttatctattta

SEQ ID NO: 1359229 - DNA, 15 bp, Homo sapiens
tttatttatctattt

SEQ ID NO: 1359230 - DNA, 15 bp, Homo sapiens
atttatttatctatt

SEQ ID NO: 1359231 - DNA, 15 bp, Homo sapiens
tatttatttatctat

SEQ ID NO: 1359232 - DNA, 15 bp, Homo sapiens
ttatttatttatcta

SEQ ID NO: 1359233 - DNA, 15 bp, Homo sapiens
tttatttatttatct

SEQ ID NO: 1359234 - DNA, 15 bp, Homo sapiens
atttatttatttatc

SEQ ID NO: 1359235 - DNA, 15 bp, Homo sapiens
attattttatttatt

SEQ ID NO: 1359236 - DNA, 15 bp, Homo sapiens
ttaattattttattt

SEQ ID NO: 1359237 - DNA, 15 bp, Homo sapiens
tttaattattttatt

SEQ ID NO: 1359238 - DNA, 15 bp, Homo sapiens
ttttaattattttat

SEQ ID NO: 1359239 - DNA, 15 bp, Homo sapiens
attttaattatttta

SEQ ID NO: 1359240 - DNA, 15 bp, Homo sapiens
aattttaattatttt

SEQ ID NO: 1359241 - DNA, 15 bp, Homo sapiens
taattttaattattt

SEQ ID NO: 1359242 - DNA, 15 bp, Homo sapiens
ttaattttaattatt

SEQ ID NO: 1359243 - DNA, 15 bp, Homo sapiens
tttaattttaattat

SEQ ID NO: 1359244 - DNA, 15 bp, Homo sapiens
ttttaattttaatta

SEQ ID NO: 1359245 - DNA, 15 bp, Homo sapiens
tttttaattttaatt

SEQ ID NO: 1359246 - DNA, 15 bp, Homo sapiens
ttttttaattttaat

SEQ ID NO: 1359247 - DNA, 15 bp, Homo sapiens
attttttaattttaa

SEQ ID NO: 1359248 - DNA, 15 bp, Homo sapiens
aattttttaatttta

SEQ ID NO: 1359249 - DNA, 15 bp, Homo sapiens
taattttttaatttt

SEQ ID NO: 1359250 - DNA, 15 bp, Homo sapiens
ttaattttttaattt

SEQ ID NO: 1359251 - DNA, 15 bp, Homo sapiens
tttaattttttaatt

SEQ ID NO: 1359252 - DNA, 15 bp, Homo sapiens
ctttaattttttaat

SEQ ID NO: 1359253 - DNA, 15 bp, Homo sapiens
actttaattttttaa

SEQ ID NO: 1359254 - DNA, 15 bp, Homo sapiens
gactttaatttttta

SEQ ID NO: 1359255 - DNA, 15 bp, Homo sapiens
agactttaatttttt

SEQ ID NO: 1359256 - DNA, 15 bp, Homo sapiens
aagactttaattttt

SEQ ID NO: 1359257 - DNA, 15 bp, Homo sapiens
gaagactttaatttt

SEQ ID NO: 1359258 - DNA, 15 bp, Homo sapiens
tgaagactttaattt

SEQ ID NO: 1359259 - DNA, 15 bp, Homo sapiens
gtgaagactttaatt

SEQ ID NO: 1359260 - DNA, 15 bp, Homo sapiens
agtgaagactttaat

SEQ ID NO: 1359261 - DNA, 15 bp, Homo sapiens
aagtgaagactttaa

SEQ ID NO: 1359262 - DNA, 15 bp, Homo sapiens
aaagtgaagacttta

SEQ ID NO: 1359263 - DNA, 15 bp, Homo sapiens
caaagtgaagacttt

SEQ ID NO: 1359264 - DNA, 15 bp, Homo sapiens
ccaaagtgaagactt

SEQ ID NO: 1359265 - DNA, 15 bp, Homo sapiens
cccaaagtgaagact

SEQ ID NO: 1359266 - DNA, 15 bp, Homo sapiens
ccccaaagtgaagac

SEQ ID NO: 1359267 - DNA, 15 bp, Homo sapiens
tccccaaagtgaaga

SEQ ID NO: 1359268 - DNA, 15 bp, Homo sapiens
atccccaaagtgaag

SEQ ID NO: 1359269 - DNA, 15 bp, Homo sapiens
catccccaaagtgaa

SEQ ID NO: 1359270 - DNA, 15 bp, Homo sapiens
ccatccccaaagtga

SEQ ID NO: 1359271 - DNA, 15 bp, Homo sapiens
accatccccaaagtg

SEQ ID NO: 1359272 - DNA, 15 bp, Homo sapiens
caccatccccaaagt

SEQ ID NO: 1359273 - DNA, 15 bp, Homo sapiens
gcaccatccccaaag

SEQ ID NO: 1359274 - DNA, 15 bp, Homo sapiens
cgcaccatccccaaa

SEQ ID NO: 1359275 - DNA, 15 bp, Homo sapiens
tcgcaccatccccaa

SEQ ID NO: 1359276 - DNA, 15 bp, Homo sapiens
gtcgcaccatcccca

SEQ ID NO: 1359277 - DNA, 15 bp, Homo sapiens
tgtcgcaccatcccc

SEQ ID NO: 1359278 - DNA, 15 bp, Homo sapiens
ctgtcgcaccatccc

SEQ ID NO: 1359279 - DNA, 15 bp, Homo sapiens
actgtcgcaccatcc

SEQ ID NO: 1359280 - DNA, 15 bp, Homo sapiens
gactgtcgcaccatc

SEQ ID NO: 1359281 - DNA, 15 bp, Homo sapiens
ggactgtcgcaccat

SEQ ID NO: 1359282 - DNA, 15 bp, Homo sapiens
gggactgtcgcacca

SEQ ID NO: 1359283 - DNA, 15 bp, Homo sapiens
ggggactgtcgcacc

SEQ ID NO: 1359284 - DNA, 15 bp, Homo sapiens
tggggactgtcgcac

SEQ ID NO: 1359285 - DNA, 15 bp, Homo sapiens
gtggggactgtcgca

SEQ ID NO: 1359286 - DNA, 15 bp, Homo sapiens
agtggggactgtcgc

SEQ ID NO: 1359287 - DNA, 15 bp, Homo sapiens
cagtggggactgtcg

SEQ ID NO: 1359288 - DNA, 15 bp, Homo sapiens
acagtggggactgtc

SEQ ID NO: 1359289 - DNA, 15 bp, Homo sapiens
gacagtggggactgt

SEQ ID NO: 1359290 - DNA, 15 bp, Homo sapiens
ggacagtggggactg

SEQ ID NO: 1359291 - DNA, 15 bp, Homo sapiens
aggacagtggggact

SEQ ID NO: 1359292 - DNA, 15 bp, Homo sapiens
caggacagtggggac

SEQ ID NO: 1359293 - DNA, 15 bp, Homo sapiens
tcaggacagtgggga

SEQ ID NO: 1359294 - DNA, 15 bp, Homo sapiens
gtcaggacagtgggg

SEQ ID NO: 1359295 - DNA, 15 bp, Homo sapiens
ggtcaggacagtggg

SEQ ID NO: 1359296 - DNA, 15 bp, Homo sapiens
gggtcaggacagtgg

SEQ ID NO: 1359297 - DNA, 15 bp, Homo sapiens
ggggtcaggacagtg

SEQ ID NO: 1359298 - DNA, 15 bp, Homo sapiens
tggggtcaggacagt

SEQ ID NO: 1359299 - DNA, 15 bp, Homo sapiens
gtggggtcaggacag

SEQ ID NO: 1359300 - DNA, 15 bp, Homo sapiens
agtggggtcaggaca

SEQ ID NO: 1359301 - DNA, 15 bp, Homo sapiens
aagtggggtcaggac

SEQ ID NO: 1359302 - DNA, 15 bp, Homo sapiens
gaagtggggtcagga

SEQ ID NO: 1359303 - DNA, 15 bp, Homo sapiens
tgaagtggggtcagg

SEQ ID NO: 1359304 - DNA, 15 bp, Homo sapiens
gtgaagtggggtcag

SEQ ID NO: 1359305 - DNA, 15 bp, Homo sapiens
ggtgaagtggggtca

SEQ ID NO: 1359306 - DNA, 15 bp, Homo sapiens
aggtgaagtggggtc

SEQ ID NO: 1359307 - DNA, 15 bp, Homo sapiens
taggtgaagtggggt

SEQ ID NO: 1359308 - DNA, 15 bp, Homo sapiens
ttaggtgaagtgggg

SEQ ID NO: 1359309 - DNA, 15 bp, Homo sapiens
gttaggtgaagtggg

SEQ ID NO: 1359310 - DNA, 15 bp, Homo sapiens
ggttaggtgaagtgg

SEQ ID NO: 1359311 - DNA, 15 bp, Homo sapiens
aggttaggtgaagtg

SEQ ID NO: 1359312 - DNA, 15 bp, Homo sapiens
gaggttaggtgaagt

SEQ ID NO: 1359313 - DNA, 15 bp, Homo sapiens
cgaggttaggtgaag

SEQ ID NO: 1359314 - DNA, 15 bp, Homo sapiens
tcgaggttaggtgaa

SEQ ID NO: 1359315 - DNA, 15 bp, Homo sapiens
gtcgaggttaggtga

SEQ ID NO: 1359316 - DNA, 15 bp, Homo sapiens
ggtcgaggttaggtg

SEQ ID NO: 1359317 - DNA, 15 bp, Homo sapiens
gggtcgaggttaggt

SEQ ID NO: 1359318 - DNA, 15 bp, Homo sapiens
ggggtcgaggttagg

SEQ ID NO: 1359319 - DNA, 15 bp, Homo sapiens
tggggtcgaggttag

SEQ ID NO: 1359320 - DNA, 15 bp, Homo sapiens
gtggggtcgaggtta

SEQ ID NO: 1359321 - DNA, 15 bp, Homo sapiens
tgtggggtcgaggtt

SEQ ID NO: 1359322 - DNA, 15 bp, Homo sapiens
ttgtggggtcgaggt

SEQ ID NO: 1359323 - DNA, 15 bp, Homo sapiens
gttgtggggtcgagg

SEQ ID NO: 1359324 - DNA, 15 bp, Homo sapiens
agttgtggggtcgag

SEQ ID NO: 1359325 - DNA, 15 bp, Homo sapiens
aagttgtggggtcga

SEQ ID NO: 1359326 - DNA, 15 bp, Homo sapiens
gaagttgtggggtcg

SEQ ID NO: 1359327 - DNA, 15 bp, Homo sapiens
tgaagttgtggggtc

SEQ ID NO: 1359328 - DNA, 15 bp, Homo sapiens
gtgaagttgtggggt

SEQ ID NO: 1359329 - DNA, 15 bp, Homo sapiens
ggtgaagttgtgggg

SEQ ID NO: 1359330 - DNA, 15 bp, Homo sapiens
gggtgaagttgtggg

SEQ ID NO: 1359331 - DNA, 15 bp, Homo sapiens
ggggtgaagttgtgg

SEQ ID NO: 1359332 - DNA, 15 bp, Homo sapiens
tggggtgaagttgtg

SEQ ID NO: 1359333 - DNA, 15 bp, Homo sapiens
atggggtgaagttgt

SEQ ID NO: 1359334 - DNA, 15 bp, Homo sapiens
gatggggtgaagttg

SEQ ID NO: 1359335 - DNA, 15 bp, Homo sapiens
ggatggggtgaagtt

SEQ ID NO: 1359336 - DNA, 15 bp, Homo sapiens
aggatggggtgaagt

SEQ ID NO: 1359337 - DNA, 15 bp, Homo sapiens
gaggatggggtgaag

SEQ ID NO: 1359338 - DNA, 15 bp, Homo sapiens
agaggatggggtgaa

SEQ ID NO: 1359339 - DNA, 15 bp, Homo sapiens
aagaggatggggtga

SEQ ID NO: 1359340 - DNA, 15 bp, Homo sapiens
aaagaggatggggtg

SEQ ID NO: 1359341 - DNA, 15 bp, Homo sapiens
caaagaggatggggt

SEQ ID NO: 1359342 - DNA, 15 bp, Homo sapiens
gcaaagaggatgggg

SEQ ID NO: 1359343 - DNA, 15 bp, Homo sapiens
tgcaaagaggatggg

SEQ ID NO: 1359344 - DNA, 15 bp, Homo sapiens
atgcaaagaggatgg

SEQ ID NO: 1359345 - DNA, 15 bp, Homo sapiens
tatgcaaagaggatg

SEQ ID NO: 1359346 - DNA, 15 bp, Homo sapiens
gtatgcaaagaggat

SEQ ID NO: 1359347 - DNA, 15 bp, Homo sapiens
tgtatgcaaagagga

SEQ ID NO: 1359348 - DNA, 15 bp, Homo sapiens
ttgtatgcaaagagg

SEQ ID NO: 1359349 - DNA, 15 bp, Homo sapiens
cttgtatgcaaagag

SEQ ID NO: 1359350 - DNA, 15 bp, Homo sapiens
tcttgtatgcaaaga

SEQ ID NO: 1359351 - DNA, 15 bp, Homo sapiens
gtcttgtatgcaaag

SEQ ID NO: 1359352 - DNA, 15 bp, Homo sapiens
tgtcttgtatgcaaa

SEQ ID NO: 1359353 - DNA, 15 bp, Homo sapiens
atgtcttgtatgcaa

SEQ ID NO: 1359354 - DNA, 15 bp, Homo sapiens
gatgtcttgtatgca

SEQ ID NO: 1359355 - DNA, 15 bp, Homo sapiens
ggatgtcttgtatgc

SEQ ID NO: 1359356 - DNA, 15 bp, Homo sapiens
gggatgtcttgtatg

SEQ ID NO: 1359357 - DNA, 15 bp, Homo sapiens
cgggatgtcttgtat

SEQ ID NO: 1359358 - DNA, 15 bp, Homo sapiens
ccgggatgtcttgta

SEQ ID NO: 1359359 - DNA, 15 bp, Homo sapiens
tccgggatgtcttgt

SEQ ID NO: 1359360 - DNA, 15 bp, Homo sapiens
ctccgggatgtcttg

SEQ ID NO: 1359361 - DNA, 15 bp, Homo sapiens
gctccgggatgtctt

SEQ ID NO: 1359362 - DNA, 15 bp, Homo sapiens
ggctccgggatgtct

SEQ ID NO: 1359363 - DNA, 15 bp, Homo sapiens
tggctccgggatgtc

SEQ ID NO: 1359364 - DNA, 15 bp, Homo sapiens
ttggctccgggatgt

SEQ ID NO: 1359365 - DNA, 15 bp, Homo sapiens
cttggctccgggatg

SEQ ID NO: 1359366 - DNA, 15 bp, Homo sapiens
ccttggctccgggat

SEQ ID NO: 1359367 - DNA, 15 bp, Homo sapiens
tccttggctccggga

SEQ ID NO: 1359368 - DNA, 15 bp, Homo sapiens
gtccttggctccggg

SEQ ID NO: 1359369 - DNA, 15 bp, Homo sapiens
ggtccttggctccgg

SEQ ID NO: 1359370 - DNA, 15 bp, Homo sapiens
gggtccttggctccg

SEQ ID NO: 1359371 - DNA, 15 bp, Homo sapiens
tgggtccttggctcc

SEQ ID NO: 1359372 - DNA, 15 bp, Homo sapiens
ctgggtccttggctc

SEQ ID NO: 1359373 - DNA, 15 bp, Homo sapiens
tctgggtccttggct

SEQ ID NO: 1359374 - DNA, 15 bp, Homo sapiens
ctctgggtccttggc

SEQ ID NO: 1359375 - DNA, 15 bp, Homo sapiens
cctctgggtccttgg

SEQ ID NO: 1359376 - DNA, 15 bp, Homo sapiens
gcctctgggtccttg

SEQ ID NO: 1359377 - DNA, 15 bp, Homo sapiens
tgcctctgggtcctt

SEQ ID NO: 1359378 - DNA, 15 bp, Homo sapiens
ctgcctctgggtcct

SEQ ID NO: 1359379 - DNA, 15 bp, Homo sapiens
tctgcctctgggtcc

SEQ ID NO: 1359380 - DNA, 15 bp, Homo sapiens
atctgcctctgggtc

SEQ ID NO: 1359381 - DNA, 15 bp, Homo sapiens
aatctgcctctgggt

SEQ ID NO: 1359382 - DNA, 15 bp, Homo sapiens
gaatctgcctctggg

SEQ ID NO: 1359383 - DNA, 15 bp, Homo sapiens
ggaatctgcctctgg

SEQ ID NO: 1359384 - DNA, 15 bp, Homo sapiens
aggaatctgcctctg

SEQ ID NO: 1359385 - DNA, 15 bp, Homo sapiens
taggaatctgcctct

SEQ ID NO: 1359386 - DNA, 15 bp, Homo sapiens
ttaggaatctgcctc

SEQ ID NO: 1359387 - DNA, 15 bp, Homo sapiens
attaggaatctgcct

SEQ ID NO: 1359388 - DNA, 15 bp, Homo sapiens
cattaggaatctgcc

SEQ ID NO: 1359389 - DNA, 15 bp, Homo sapiens
tcattaggaatctgc

SEQ ID NO: 1359390 - DNA, 15 bp, Homo sapiens
gtcattaggaatctg

SEQ ID NO: 1359391 - DNA, 15 bp, Homo sapiens
agtcattaggaatct

SEQ ID NO: 1359392 - DNA, 15 bp, Homo sapiens
aagtcattaggaatc

SEQ ID NO: 1359393 - DNA, 15 bp, Homo sapiens
caagtcattaggaat

SEQ ID NO: 1359394 - DNA, 15 bp, Homo sapiens
tcaagtcattaggaa

SEQ ID NO: 1359395 - DNA, 15 bp, Homo sapiens
ttcaagtcattagga

SEQ ID NO: 1359396 - DNA, 15 bp, Homo sapiens
cttcaagtcattagg

SEQ ID NO: 1359397 - DNA, 15 bp, Homo sapiens
gcttcaagtcattag

SEQ ID NO: 1359398 - DNA, 15 bp, Homo sapiens
agcttcaagtcatta

SEQ ID NO: 1359399 - DNA, 15 bp, Homo sapiens
tagcttcaagtcatt

SEQ ID NO: 1359400 - DNA, 15 bp, Homo sapiens
gtagcttcaagtcat

SEQ ID NO: 1359401 - DNA, 15 bp, Homo sapiens
ggtagcttcaagtca

SEQ ID NO: 1359402 - DNA, 15 bp, Homo sapiens
gggtagcttcaagtc

SEQ ID NO: 1359403 - DNA, 15 bp, Homo sapiens
agggtagcttcaagt

SEQ ID NO: 1359404 - DNA, 15 bp, Homo sapiens
aagggtagcttcaag

SEQ ID NO: 1359405 - DNA, 15 bp, Homo sapiens
aaagggtagcttcaa

SEQ ID NO: 1359406 - DNA, 15 bp, Homo sapiens
caaagggtagcttca

SEQ ID NO: 1359407 - DNA, 15 bp, Homo sapiens
gcaaagggtagcttc

SEQ ID NO: 1359408 - DNA, 15 bp, Homo sapiens
ggcaaagggtagctt

SEQ ID NO: 1359409 - DNA, 15 bp, Homo sapiens
gggcaaagggtagct

SEQ ID NO: 1359410 - DNA, 15 bp, Homo sapiens
tgggcaaagggtagc

SEQ ID NO: 1359411 - DNA, 15 bp, Homo sapiens
ttgggcaaagggtag

SEQ ID NO: 1359412 - DNA, 15 bp, Homo sapiens
tttgggcaaagggta

SEQ ID NO: 1359413 - DNA, 15 bp, Homo sapiens
gtttgggcaaagggt

SEQ ID NO: 1359414 - DNA, 15 bp, Homo sapiens
ggtttgggcaaaggg

SEQ ID NO: 1359415 - DNA, 15 bp, Homo sapiens
gggtttgggcaaagg

SEQ ID NO: 1359416 - DNA, 15 bp, Homo sapiens
agggtttgggcaaag

SEQ ID NO: 1359417 - DNA, 15 bp, Homo sapiens
gagggtttgggcaaa

SEQ ID NO: 1359418 - DNA, 15 bp, Homo sapiens
tgagggtttgggcaa

SEQ ID NO: 1359419 - DNA, 15 bp, Homo sapiens
gtgagggtttgggca

SEQ ID NO: 1359420 - DNA, 15 bp, Homo sapiens
tgtgagggtttgggc

SEQ ID NO: 1359421 - DNA, 15 bp, Homo sapiens
ctgtgagggtttggg

SEQ ID NO: 1359422 - DNA, 15 bp, Homo sapiens
tctgtgagggtttgg

SEQ ID NO: 1359423 - DNA, 15 bp, Homo sapiens
ctctgtgagggtttg

SEQ ID NO: 1359424 - DNA, 15 bp, Homo sapiens
actctgtgagggttt

SEQ ID NO: 1359425 - DNA, 15 bp, Homo sapiens
gactctgtgagggtt

SEQ ID NO: 1359426 - DNA, 15 bp, Homo sapiens
agactctgtgagggt

SEQ ID NO: 1359427 - DNA, 15 bp, Homo sapiens
gagactctgtgaggg

SEQ ID NO: 1359428 - DNA, 15 bp, Homo sapiens
agagactctgtgagg

SEQ ID NO: 1359429 - DNA, 15 bp, Homo sapiens
cagagactctgtgag

SEQ ID NO: 1359430 - DNA, 15 bp, Homo sapiens
ccagagactctgtga

SEQ ID NO: 1359431 - DNA, 15 bp, Homo sapiens
cccagagactctgtg

SEQ ID NO: 1359432 - DNA, 15 bp, Homo sapiens
tcccagagactctgt

SEQ ID NO: 1359433 - DNA, 15 bp, Homo sapiens
ctcccagagactctg

SEQ ID NO: 1359434 - DNA, 15 bp, Homo sapiens
cctcccagagactct

SEQ ID NO: 1359435 - DNA, 15 bp, Homo sapiens
acctcccagagactc

SEQ ID NO: 1359436 - DNA, 15 bp, Homo sapiens
cacctcccagagact

SEQ ID NO: 1359437 - DNA, 15 bp, Homo sapiens
gcacctcccagagac

SEQ ID NO: 1359438 - DNA, 15 bp, Homo sapiens
ggcacctcccagaga

SEQ ID NO: 1359439 - DNA, 15 bp, Homo sapiens
aggcacctcccagag

SEQ ID NO: 1359440 - DNA, 15 bp, Homo sapiens
caggcacctcccaga

SEQ ID NO: 1359441 - DNA, 15 bp, Homo sapiens
ccaggcacctcccag

SEQ ID NO: 1359442 - DNA, 15 bp, Homo sapiens
cccaggcacctccca

SEQ ID NO: 1359443 - DNA, 15 bp, Homo sapiens
acccaggcacctccc

SEQ ID NO: 1359444 - DNA, 15 bp, Homo sapiens
aacccaggcacctcc

SEQ ID NO: 1359445 - DNA, 15 bp, Homo sapiens
gaacccaggcacctc

SEQ ID NO: 1359446 - DNA, 15 bp, Homo sapiens
agaacccaggcacct

SEQ ID NO: 1359447 - DNA, 15 bp, Homo sapiens
cagaacccaggcacc

SEQ ID NO: 1359448 - DNA, 15 bp, Homo sapiens
tcagaacccaggcac

SEQ ID NO: 1359449 - DNA, 15 bp, Homo sapiens
ctcagaacccaggca

SEQ ID NO: 1359450 - DNA, 15 bp, Homo sapiens
cctcagaacccaggc

SEQ ID NO: 1359451 - DNA, 15 bp, Homo sapiens
ccctcagaacccagg

SEQ ID NO: 1359452 - DNA, 15 bp, Homo sapiens
accctcagaacccag

SEQ ID NO: 1359453 - DNA, 15 bp, Homo sapiens
gaccctcagaaccca

SEQ ID NO: 1359454 - DNA, 15 bp, Homo sapiens
agaccctcagaaccc

SEQ ID NO: 1359455 - DNA, 15 bp, Homo sapiens
aagaccctcagaacc

SEQ ID NO: 1359456 - DNA, 15 bp, Homo sapiens
aaagaccctcagaac

SEQ ID NO: 1359457 - DNA, 15 bp, Homo sapiens
aaaagaccctcagaa

SEQ ID NO: 1359458 - DNA, 15 bp, Homo sapiens
gaaaagaccctcaga

SEQ ID NO: 1359459 - DNA, 15 bp, Homo sapiens
ggaaaagaccctcag

SEQ ID NO: 1359460 - DNA, 15 bp, Homo sapiens
gggaaaagaccctca

SEQ ID NO: 1359461 - DNA, 15 bp, Homo sapiens
tgggaaaagaccctc

SEQ ID NO: 1359462 - DNA, 15 bp, Homo sapiens
ctgggaaaagaccct

SEQ ID NO: 1359463 - DNA, 15 bp, Homo sapiens
gctgggaaaagaccc

SEQ ID NO: 1359464 - DNA, 15 bp, Homo sapiens
agctgggaaaagacc

SEQ ID NO: 1359465 - DNA, 15 bp, Homo sapiens
gagctgggaaaagac

SEQ ID NO: 1359466 - DNA, 15 bp, Homo sapiens
ggagctgggaaaaga

SEQ ID NO: 1359467 - DNA, 15 bp, Homo sapiens
gggagctgggaaaag

SEQ ID NO: 1359468 - DNA, 15 bp, Homo sapiens
tgggagctgggaaaa

SEQ ID NO: 1359469 - DNA, 15 bp, Homo sapiens
ttgggagctgggaaa

SEQ ID NO: 1359470 - DNA, 15 bp, Homo sapiens
attgggagctgggaa

SEQ ID NO: 1359471 - DNA, 15 bp, Homo sapiens
tattgggagctggga

SEQ ID NO: 1359472 - DNA, 15 bp, Homo sapiens
gtattgggagctggg

SEQ ID NO: 1359473 - DNA, 15 bp, Homo sapiens
agtattgggagctgg

SEQ ID NO: 1359474 - DNA, 15 bp, Homo sapiens
cagtattgggagctg

SEQ ID NO: 1359475 - DNA, 15 bp, Homo sapiens
acagtattgggagct

SEQ ID NO: 1359476 - DNA, 15 bp, Homo sapiens
tacagtattgggagc

SEQ ID NO: 1359477 - DNA, 15 bp, Homo sapiens
ttacagtattgggag

SEQ ID NO: 1359478 - DNA, 15 bp, Homo sapiens
tttacagtattggga

SEQ ID NO: 1359479 - DNA, 15 bp, Homo sapiens
ttttacagtattggg

SEQ ID NO: 1359480 - DNA, 15 bp, Homo sapiens
attttacagtattgg

SEQ ID NO: 1359481 - DNA, 15 bp, Homo sapiens
cattttacagtattg

SEQ ID NO: 1359482 - DNA, 15 bp, Homo sapiens
ccattttacagtatt

SEQ ID NO: 1359483 - DNA, 15 bp, Homo sapiens
cccattttacagtat

SEQ ID NO: 1359484 - DNA, 15 bp, Homo sapiens
gcccattttacagta

SEQ ID NO: 1359485 - DNA, 15 bp, Homo sapiens
tgcccattttacagt

SEQ ID NO: 1359486 - DNA, 15 bp, Homo sapiens
ttgcccattttacag

SEQ ID NO: 1359487 - DNA, 15 bp, Homo sapiens
gttgcccattttaca

SEQ ID NO: 1359488 - DNA, 15 bp, Homo sapiens
agttgcccattttac

SEQ ID NO: 1359489 - DNA, 15 bp, Homo sapiens
cagttgcccatttta

SEQ ID NO: 1359490 - DNA, 15 bp, Homo sapiens
gcagttgcccatttt

SEQ ID NO: 1359491 - DNA, 15 bp, Homo sapiens
ggcagttgcccattt

SEQ ID NO: 1359492 - DNA, 15 bp, Homo sapiens
gggcagttgcccatt

SEQ ID NO: 1359493 - DNA, 15 bp, Homo sapiens
tgggcagttgcccat

SEQ ID NO: 1359494 - DNA, 15 bp, Homo sapiens
gtgggcagttgccca

SEQ ID NO: 1359495 - DNA, 15 bp, Homo sapiens
ggtgggcagttgccc

SEQ ID NO: 1359496 - DNA, 15 bp, Homo sapiens
tggtgggcagttgcc

SEQ ID NO: 1359497 - DNA, 15 bp, Homo sapiens
ctggtgggcagttgc

SEQ ID NO: 1359498 - DNA, 15 bp, Homo sapiens
tctggtgggcagttg

SEQ ID NO: 1359499 - DNA, 15 bp, Homo sapiens
gtctggtgggcagtt

SEQ ID NO: 1359500 - DNA, 15 bp, Homo sapiens
agtctggtgggcagt

SEQ ID NO: 1359501 - DNA, 15 bp, Homo sapiens
aagtctggtgggcag

SEQ ID NO: 1359502 - DNA, 15 bp, Homo sapiens
aaagtctggtgggca

SEQ ID NO: 1359503 - DNA, 15 bp, Homo sapiens
caaagtctggtgggc

SEQ ID NO: 1359504 - DNA, 15 bp, Homo sapiens
ccaaagtctggtggg

SEQ ID NO: 1359505 - DNA, 15 bp, Homo sapiens
cccaaagtctggtgg

SEQ ID NO: 1359506 - DNA, 15 bp, Homo sapiens
gcccaaagtctggtg

SEQ ID NO: 1359507 - DNA, 15 bp, Homo sapiens
tgcccaaagtctggt

SEQ ID NO: 1359508 - DNA, 15 bp, Homo sapiens
atgcccaaagtctgg

SEQ ID NO: 1359509 - DNA, 15 bp, Homo sapiens
catgcccaaagtctg

SEQ ID NO: 1359510 - DNA, 15 bp, Homo sapiens
ccatgcccaaagtct

SEQ ID NO: 1359511 - DNA, 15 bp, Homo sapiens
cccatgcccaaagtc

SEQ ID NO: 1359512 - DNA, 15 bp, Homo sapiens
acccatgcccaaagt

SEQ ID NO: 1359513 - DNA, 15 bp, Homo sapiens
tacccatgcccaaag

SEQ ID NO: 1359514 - DNA, 15 bp, Homo sapiens
gtacccatgcccaaa

SEQ ID NO: 1359515 - DNA, 15 bp, Homo sapiens
ggtacccatgcccaa

SEQ ID NO: 1359516 - DNA, 15 bp, Homo sapiens
tggtacccatgccca

SEQ ID NO: 1359517 - DNA, 15 bp, Homo sapiens
gtggtacccatgccc

SEQ ID NO: 1359518 - DNA, 15 bp, Homo sapiens
agtggtacccatgcc

SEQ ID NO: 1359519 - DNA, 15 bp, Homo sapiens
gagtggtacccatgc

SEQ ID NO: 1359520 - DNA, 15 bp, Homo sapiens
ggagtggtacccatg

SEQ ID NO: 1359521 - DNA, 15 bp, Homo sapiens
tggagtggtacccat

SEQ ID NO: 1359522 - DNA, 15 bp, Homo sapiens
gtggagtggtaccca

SEQ ID NO: 1359523 - DNA, 15 bp, Homo sapiens
ggtggagtggtaccc

SEQ ID NO: 1359524 - DNA, 15 bp, Homo sapiens
tggtggagtggtacc

SEQ ID NO: 1359525 - DNA, 15 bp, Homo sapiens
gtggtggagtggtac

SEQ ID NO: 1359526 - DNA, 15 bp, Homo sapiens
ggtggtggagtggta

SEQ ID NO: 1359527 - DNA, 15 bp, Homo sapiens
aggtggtggagtggt

SEQ ID NO: 1359528 - DNA, 15 bp, Homo sapiens
aaggtggtggagtgg

SEQ ID NO: 1359529 - DNA, 15 bp, Homo sapiens
caaggtggtggagtg

SEQ ID NO: 1359530 - DNA, 15 bp, Homo sapiens
acaaggtggtggagt

SEQ ID NO: 1359531 - DNA, 15 bp, Homo sapiens
cacaaggtggtggag

SEQ ID NO: 1359532 - DNA, 15 bp, Homo sapiens
ccacaaggtggtgga

SEQ ID NO: 1359533 - DNA, 15 bp, Homo sapiens
gccacaaggtggtgg

SEQ ID NO: 1359534 - DNA, 15 bp, Homo sapiens
ggccacaaggtggtg

SEQ ID NO: 1359535 - DNA, 15 bp, Homo sapiens
tggccacaaggtggt

SEQ ID NO: 1359536 - DNA, 15 bp, Homo sapiens
atggccacaaggtgg

SEQ ID NO: 1359537 - DNA, 15 bp, Homo sapiens
gatggccacaaggtg

SEQ ID NO: 1359538 - DNA, 15 bp, Homo sapiens
ggatggccacaaggt

SEQ ID NO: 1359539 - DNA, 15 bp, Homo sapiens
gggatggccacaagg

SEQ ID NO: 1359540 - DNA, 15 bp, Homo sapiens
agggatggccacaag

SEQ ID NO: 1359541 - DNA, 15 bp, Homo sapiens
cagggatggccacaa

SEQ ID NO: 1359542 - DNA, 15 bp, Homo sapiens
ccagggatggccaca

SEQ ID NO: 1359543 - DNA, 15 bp, Homo sapiens
tccagggatggccac

SEQ ID NO: 1359544 - DNA, 15 bp, Homo sapiens
ttccagggatggcca

SEQ ID NO: 1359545 - DNA, 15 bp, Homo sapiens
tttccagggatggcc

SEQ ID NO: 1359546 - DNA, 15 bp, Homo sapiens
gtttccagggatggc

SEQ ID NO: 1359547 - DNA, 15 bp, Homo sapiens
tgtttccagggatgg

SEQ ID NO: 1359548 - DNA, 15 bp, Homo sapiens
atgtttccagggatg

SEQ ID NO: 1359549 - DNA, 15 bp, Homo sapiens
gatgtttccagggat

SEQ ID NO: 1359550 - DNA, 15 bp, Homo sapiens
tgatgtttccaggga

SEQ ID NO: 1359551 - DNA, 15 bp, Homo sapiens
gtgatgtttccaggg

SEQ ID NO: 1359552 - DNA, 15 bp, Homo sapiens
ggtgatgtttccagg

SEQ ID NO: 1359553 - DNA, 15 bp, Homo sapiens
aggtgatgtttccag

SEQ ID NO: 1359554 - DNA, 15 bp, Homo sapiens
aaggtgatgtttcca

SEQ ID NO: 1359555 - DNA, 15 bp, Homo sapiens
aaaggtgatgtttcc

SEQ ID NO: 1359556 - DNA, 15 bp, Homo sapiens
gaaaggtgatgtttc

SEQ ID NO: 1359557 - DNA, 15 bp, Homo sapiens
ggaaaggtgatgttt

SEQ ID NO: 1359558 - DNA, 15 bp, Homo sapiens
gggaaaggtgatgtt

SEQ ID NO: 1359559 - DNA, 15 bp, Homo sapiens
agggaaaggtgatgt

SEQ ID NO: 1359560 - DNA, 15 bp, Homo sapiens
cagggaaaggtgatg

SEQ ID NO: 1359561 - DNA, 15 bp, Homo sapiens
ccagggaaaggtgat

SEQ ID NO: 1359562 - DNA, 15 bp, Homo sapiens
gccagggaaaggtga

SEQ ID NO: 1359563 - DNA, 15 bp, Homo sapiens
cgccagggaaaggtg

SEQ ID NO: 1359564 - DNA, 15 bp, Homo sapiens
tcgccagggaaaggt

SEQ ID NO: 1359565 - DNA, 15 bp, Homo sapiens
gtcgccagggaaagg

SEQ ID NO: 1359566 - DNA, 15 bp, Homo sapiens
tgtcgccagggaaag

SEQ ID NO: 1359567 - DNA, 15 bp, Homo sapiens
ctgtcgccagggaaa

SEQ ID NO: 1359568 - DNA, 15 bp, Homo sapiens
gctgtcgccagggaa

SEQ ID NO: 1359569 - DNA, 15 bp, Homo sapiens
tgctgtcgccaggga

SEQ ID NO: 1359570 - DNA, 15 bp, Homo sapiens
ttgctgtcgccaggg

SEQ ID NO: 1359571 - DNA, 15 bp, Homo sapiens
cttgctgtcgccagg

SEQ ID NO: 1359572 - DNA, 15 bp, Homo sapiens
acttgctgtcgccag

SEQ ID NO: 1359573 - DNA, 15 bp, Homo sapiens
cacttgctgtcgcca

SEQ ID NO: 1359574 - DNA, 15 bp, Homo sapiens
acacttgctgtcgcc

SEQ ID NO: 1359575 - DNA, 15 bp, Homo sapiens
aacacttgctgtcgc

SEQ ID NO: 1359576 - DNA, 15 bp, Homo sapiens
aaacacttgctgtcg

SEQ ID NO: 1359577 - DNA, 15 bp, Homo sapiens
aaaacacttgctgtc

SEQ ID NO: 1359578 - DNA, 15 bp, Homo sapiens
taaaacacttgctgt

SEQ ID NO: 1359579 - DNA, 15 bp, Homo sapiens
ttaaaacacttgctg

SEQ ID NO: 1359580 - DNA, 15 bp, Homo sapiens
cttaaaacacttgct

SEQ ID NO: 1359581 - DNA, 15 bp, Homo sapiens
tcttaaaacacttgc

SEQ ID NO: 1359582 - DNA, 15 bp, Homo sapiens
gtcttaaaacacttg

SEQ ID NO: 1359583 - DNA, 15 bp, Homo sapiens
agtcttaaaacactt

SEQ ID NO: 1359584 - DNA, 15 bp, Homo sapiens
tagtcttaaaacact

SEQ ID NO: 1359585 - DNA, 15 bp, Homo sapiens
ttagtcttaaaacac

SEQ ID NO: 1359586 - DNA, 15 bp, Homo sapiens
attagtcttaaaaca

SEQ ID NO: 1359587 - DNA, 15 bp, Homo sapiens
aattagtcttaaaac

SEQ ID NO: 1359588 - DNA, 15 bp, Homo sapiens
taattagtcttaaaa

SEQ ID NO: 1359589 - DNA, 15 bp, Homo sapiens
ttaattagtcttaaa

SEQ ID NO: 1359590 - DNA, 15 bp, Homo sapiens
attaattagtcttaa

SEQ ID NO: 1359591 - DNA, 15 bp, Homo sapiens
tattaattagtctta

SEQ ID NO: 1359592 - DNA, 15 bp, Homo sapiens
ttattaattagtctt

SEQ ID NO: 1359593 - DNA, 15 bp, Homo sapiens
attattaattagtct

SEQ ID NO: 1359594 - DNA, 15 bp, Homo sapiens
aattattaattagtc

SEQ ID NO: 1359595 - DNA, 15 bp, Homo sapiens
aaattattaattagt

SEQ ID NO: 1359596 - DNA, 15 bp, Homo sapiens
aaaattattaattag

SEQ ID NO: 1359597 - DNA, 15 bp, Homo sapiens
aaaaattattaatta

SEQ ID NO: 1359598 - DNA, 15 bp, Homo sapiens
aaaaaattattaatt

SEQ ID NO: 1359599 - DNA, 15 bp, Homo sapiens
aaaaaaattattaat

SEQ ID NO: 1359600 - DNA, 15 bp, Homo sapiens
gaaaaaaattattaa

SEQ ID NO: 1359601 - DNA, 15 bp, Homo sapiens
aagaaaaaaattatt

SEQ ID NO: 1359602 - DNA, 15 bp, Homo sapiens
gaagaaaaaaattat

SEQ ID NO: 1359603 - DNA, 15 bp, Homo sapiens
agaagaaaaaaatta

SEQ ID NO: 1359604 - DNA, 15 bp, Homo sapiens
aagaagaaaaaaatt

SEQ ID NO: 1359605 - DNA, 15 bp, Homo sapiens
aaagaagaaaaaaat

SEQ ID NO: 1359606 - DNA, 15 bp, Homo sapiens
gaaagaagaaaaaaa

SEQ ID NO: 1359607 - DNA, 15 bp, Homo sapiens
agaaagaagaaaaaa

SEQ ID NO: 1359608 - DNA, 15 bp, Homo sapiens
aagaaagaagaaaaa

SEQ ID NO: 1359609 - DNA, 15 bp, Homo sapiens
taagaaagaagaaaa

SEQ ID NO: 1359610 - DNA, 15 bp, Homo sapiens
gtaagaaagaagaaa

SEQ ID NO: 1359611 - DNA, 15 bp, Homo sapiens
cgtaagaaagaagaa

SEQ ID NO: 1359612 - DNA, 15 bp, Homo sapiens
acgtaagaaagaaga

SEQ ID NO: 1359613 - DNA, 15 bp, Homo sapiens
aacgtaagaaagaag

SEQ ID NO: 1359614 - DNA, 15 bp, Homo sapiens
aaacgtaagaaagaa

SEQ ID NO: 1359615 - DNA, 15 bp, Homo sapiens
gaaacgtaagaaaga

SEQ ID NO: 1359616 - DNA, 15 bp, Homo sapiens
agaaacgtaagaaag

SEQ ID NO: 1359617 - DNA, 15 bp, Homo sapiens
aagaaacgtaagaaa

SEQ ID NO: 1359618 - DNA, 15 bp, Homo sapiens
aaagaaacgtaagaa

SEQ ID NO: 1359619 - DNA, 15 bp, Homo sapiens
gaaagaaacgtaaga

SEQ ID NO: 1359620 - DNA, 15 bp, Homo sapiens
agaaagaaacgtaag

SEQ ID NO: 1359621 - DNA, 15 bp, Homo sapiens
aagaaagaaacgtaa

SEQ ID NO: 1359622 - DNA, 15 bp, Homo sapiens
aaagaaagaaacgta

SEQ ID NO: 1359623 - DNA, 15 bp, Homo sapiens
aaaagaaagaaacgt

SEQ ID NO: 1359624 - DNA, 15 bp, Homo sapiens
gaaaagaaagaaacg

SEQ ID NO: 1359625 - DNA, 15 bp, Homo sapiens
gaaagaaaagaaaga

SEQ ID NO: 1359626 - DNA, 15 bp, Homo sapiens
ggaaagaaaagaaag

SEQ ID NO: 1359627 - DNA, 15 bp, Homo sapiens
aggaaagaaaagaaa

SEQ ID NO: 1359628 - DNA, 15 bp, Homo sapiens
aaggaaagaaaagaa

SEQ ID NO: 1359629 - DNA, 15 bp, Homo sapiens
aaaggaaagaaaaga

SEQ ID NO: 1359630 - DNA, 15 bp, Homo sapiens
aaaagaaaggaaaga

SEQ ID NO: 1359631 - DNA, 15 bp, Homo sapiens
gaaaagaaaggaaag

SEQ ID NO: 1359632 - DNA, 15 bp, Homo sapiens
ggaaaagaaaggaaa

SEQ ID NO: 1359633 - DNA, 15 bp, Homo sapiens
gggaaaagaaaggaa

SEQ ID NO: 1359634 - DNA, 15 bp, Homo sapiens
ggggaaaagaaagga

SEQ ID NO: 1359635 - DNA, 15 bp, Homo sapiens
aggggaaaagaaagg

SEQ ID NO: 1359636 - DNA, 15 bp, Homo sapiens
gaggggaaaagaaag

SEQ ID NO: 1359637 - DNA, 15 bp, Homo sapiens
ggaggggaaaagaaa

SEQ ID NO: 1359638 - DNA, 15 bp, Homo sapiens
gggaggggaaaagaa

SEQ ID NO: 1359639 - DNA, 15 bp, Homo sapiens
agggaggggaaaaga

SEQ ID NO: 1359640 - DNA, 15 bp, Homo sapiens
gagggaggggaaaag

SEQ ID NO: 1359641 - DNA, 15 bp, Homo sapiens
ggagggaggggaaaa

SEQ ID NO: 1359642 - DNA, 15 bp, Homo sapiens
gggagggaggggaaa

SEQ ID NO: 1359643 - DNA, 15 bp, Homo sapiens
agggagggaggggaa

SEQ ID NO: 1359644 - DNA, 15 bp, Homo sapiens
aggaagggagggagg

SEQ ID NO: 1359645 - DNA, 15 bp, Homo sapiens
aaggaagggagggag

SEQ ID NO: 1359646 - DNA, 15 bp, Homo sapiens
aaaggaaggaaggga

SEQ ID NO: 1359647 - DNA, 15 bp, Homo sapiens
gaaaggaaggaaggg

SEQ ID NO: 1359648 - DNA, 15 bp, Homo sapiens
agaaaggaaggaagg

SEQ ID NO: 1359649 - DNA, 15 bp, Homo sapiens
gagaaaggaaggaag

SEQ ID NO: 1359650 - DNA, 15 bp, Homo sapiens
ggagaaaggaaggaa

SEQ ID NO: 1359651 - DNA, 15 bp, Homo sapiens
gggagaaaggaagga

SEQ ID NO: 1359652 - DNA, 15 bp, Homo sapiens
agggagaaaggaagg

SEQ ID NO: 1359653 - DNA, 15 bp, Homo sapiens
aagggagaaaggaag

SEQ ID NO: 1359654 - DNA, 15 bp, Homo sapiens
aaagggagaaaggaa

SEQ ID NO: 1359655 - DNA, 15 bp, Homo sapiens
gaaagggagaaagga

SEQ ID NO: 1359656 - DNA, 15 bp, Homo sapiens
agaaagggagaaagg

SEQ ID NO: 1359657 - DNA, 15 bp, Homo sapiens
gagaaagggagaaag

SEQ ID NO: 1359658 - DNA, 15 bp, Homo sapiens
agagaaagggagaaa

SEQ ID NO: 1359659 - DNA, 15 bp, Homo sapiens
gagagaaagggagaa

SEQ ID NO: 1359660 - DNA, 15 bp, Homo sapiens
agagagaaagggaga

SEQ ID NO: 1359661 - DNA, 15 bp, Homo sapiens
aagagagaaagggag

SEQ ID NO: 1359662 - DNA, 15 bp, Homo sapiens
aaagagagaaaggga

SEQ ID NO: 1359663 - DNA, 15 bp, Homo sapiens
gaaagagagaaaggg

SEQ ID NO: 1359664 - DNA, 15 bp, Homo sapiens
agaaagagagaaagg

SEQ ID NO: 1359665 - DNA, 15 bp, Homo sapiens
gagaaagagagaaag

SEQ ID NO: 1359666 - DNA, 15 bp, Homo sapiens
agagaaagagagaaa

SEQ ID NO: 1359667 - DNA, 15 bp, Homo sapiens
gagagaaagagagaa

SEQ ID NO: 1359668 - DNA, 15 bp, Homo sapiens
aagagagaaagagag

SEQ ID NO: 1359669 - DNA, 15 bp, Homo sapiens
aaagagagaaagaga

SEQ ID NO: 1359670 - DNA, 15 bp, Homo sapiens
gaaagagagaaagag

SEQ ID NO: 1359671 - DNA, 15 bp, Homo sapiens
agaaagagagaaaga

SEQ ID NO: 1359672 - DNA, 15 bp, Homo sapiens
aagagaaagagagaa

SEQ ID NO: 1359673 - DNA, 15 bp, Homo sapiens
aaagagaaagagaga

SEQ ID NO: 1359674 - DNA, 15 bp, Homo sapiens
gaaagagaaagagag

SEQ ID NO: 1359675 - DNA, 15 bp, Homo sapiens
agaaagagaaagaga

SEQ ID NO: 1359676 - DNA, 15 bp, Homo sapiens
gagaaagagaaagag

SEQ ID NO: 1359677 - DNA, 15 bp, Homo sapiens
agagaaagagaaaga

SEQ ID NO: 1359678 - DNA, 15 bp, Homo sapiens
aagagaaagagaaag

SEQ ID NO: 1359679 - DNA, 15 bp, Homo sapiens
aaagagaaagagaaa

SEQ ID NO: 1359680 - DNA, 15 bp, Homo sapiens
gaaagagaaagagaa

SEQ ID NO: 1359681 - DNA, 15 bp, Homo sapiens
gagagaaagagaaag

SEQ ID NO: 1359682 - DNA, 15 bp, Homo sapiens
agagagaaagagaaa

SEQ ID NO: 1359683 - DNA, 15 bp, Homo sapiens
aagagagaaagagaa

SEQ ID NO: 1359684 - DNA, 15 bp, Homo sapiens
aagaaagagagaaag

SEQ ID NO: 1359685 - DNA, 15 bp, Homo sapiens
aaagaaagagagaaa

SEQ ID NO: 1359686 - DNA, 15 bp, Homo sapiens
gaaagaaagagagaa

SEQ ID NO: 1359687 - DNA, 15 bp, Homo sapiens
ggaaagaaagagaga

SEQ ID NO: 1359688 - DNA, 15 bp, Homo sapiens
aggaaagaaagagag

SEQ ID NO: 1359689 - DNA, 15 bp, Homo sapiens
aaggaaagaaagaga

SEQ ID NO: 1359690 - DNA, 15 bp, Homo sapiens
aaaggaaagaaagag

SEQ ID NO: 1359691 - DNA, 15 bp, Homo sapiens
aaaaggaaagaaaga

SEQ ID NO: 1359692 - DNA, 15 bp, Homo sapiens
aggaagaaaaggaaa

SEQ ID NO: 1359693 - DNA, 15 bp, Homo sapiens
aaggaagaaaaggaa

SEQ ID NO: 1359694 - DNA, 15 bp, Homo sapiens
aaaggaagaaaagga

SEQ ID NO: 1359695 - DNA, 15 bp, Homo sapiens
gaaaggaagaaaagg

SEQ ID NO: 1359696 - DNA, 15 bp, Homo sapiens
agaaaggaagaaaag

SEQ ID NO: 1359697 - DNA, 15 bp, Homo sapiens
aagaaaggaagaaaa

SEQ ID NO: 1359698 - DNA, 15 bp, Homo sapiens
agaaggaaagaaagg

SEQ ID NO: 1359699 - DNA, 15 bp, Homo sapiens
aagaaggaaagaaag

SEQ ID NO: 1359700 - DNA, 15 bp, Homo sapiens
aaagaaggaaagaaa

SEQ ID NO: 1359701 - DNA, 15 bp, Homo sapiens
aaaagaaggaaagaa

SEQ ID NO: 1359702 - DNA, 15 bp, Homo sapiens
gaaaagaaggaaaga

SEQ ID NO: 1359703 - DNA, 15 bp, Homo sapiens
agaaaagaaggaaag

SEQ ID NO: 1359704 - DNA, 15 bp, Homo sapiens
gaagaaaagaaggaa

SEQ ID NO: 1359705 - DNA, 15 bp, Homo sapiens
ggaagaaaagaagga

SEQ ID NO: 1359706 - DNA, 15 bp, Homo sapiens
aggaagaaaagaagg

SEQ ID NO: 1359707 - DNA, 15 bp, Homo sapiens
aaggaagaaaagaag

SEQ ID NO: 1359708 - DNA, 15 bp, Homo sapiens
aaaggaagaaaagaa

SEQ ID NO: 1359709 - DNA, 15 bp, Homo sapiens
gaaaggaagaaaaga

SEQ ID NO: 1359710 - DNA, 15 bp, Homo sapiens
agaaagaaaggaaga

SEQ ID NO: 1359711 - DNA, 15 bp, Homo sapiens
aagaaagaaaggaag

SEQ ID NO: 1359712 - DNA, 15 bp, Homo sapiens
aaagaaagaaaggaa

SEQ ID NO: 1359713 - DNA, 15 bp, Homo sapiens
gaaagaaagaaagga

SEQ ID NO: 1359714 - DNA, 15 bp, Homo sapiens
ggaaagaaagaaagg

SEQ ID NO: 1359715 - DNA, 15 bp, Homo sapiens
aggaaagaaagaaag

SEQ ID NO: 1359716 - DNA, 15 bp, Homo sapiens
agaaagaaagaaagg

SEQ ID NO: 1359717 - DNA, 15 bp, Homo sapiens
agaaagaaaagaaag

SEQ ID NO: 1359718 - DNA, 15 bp, Homo sapiens
aaaagaaagaaaaga

SEQ ID NO: 1359719 - DNA, 15 bp, Homo sapiens
gaaaagaaagaaaag

SEQ ID NO: 1359720 - DNA, 15 bp, Homo sapiens
ggaaaagaaagaaaa

SEQ ID NO: 1359721 - DNA, 15 bp, Homo sapiens
aggaaaagaaagaaa

SEQ ID NO: 1359722 - DNA, 15 bp, Homo sapiens
aaggaaaagaaagaa

SEQ ID NO: 1359723 - DNA, 15 bp, Homo sapiens
gaaggaaagaaaaga

SEQ ID NO: 1359724 - DNA, 15 bp, Homo sapiens
ggaaggaaagaaaag

SEQ ID NO: 1359725 - DNA, 15 bp, Homo sapiens
aggaaggaaagaaaa

SEQ ID NO: 1359726 - DNA, 15 bp, Homo sapiens
aaggaaggaaagaaa

SEQ ID NO: 1359727 - DNA, 15 bp, Homo sapiens
aaaggaaggaaagaa

SEQ ID NO: 1359728 - DNA, 15 bp, Homo sapiens
aaaaggaaggaaaga

SEQ ID NO: 1359729 - DNA, 15 bp, Homo sapiens
gaaaaggaaggaaag

SEQ ID NO: 1359730 - DNA, 15 bp, Homo sapiens
agaaaaggaaggaaa

SEQ ID NO: 1359731 - DNA, 15 bp, Homo sapiens
gagaaaaggaaggaa

SEQ ID NO: 1359732 - DNA, 15 bp, Homo sapiens
agagaaaaggaagga

SEQ ID NO: 1359733 - DNA, 15 bp, Homo sapiens
gagagaaaaggaagg

SEQ ID NO: 1359734 - DNA, 15 bp, Homo sapiens
agagagaaaaggaag

SEQ ID NO: 1359735 - DNA, 15 bp, Homo sapiens
gagagagaaaaggaa

SEQ ID NO: 1359736 - DNA, 15 bp, Homo sapiens
agagagagaaaagga

SEQ ID NO: 1359737 - DNA, 15 bp, Homo sapiens
gagagagagaaaagg

SEQ ID NO: 1359738 - DNA, 15 bp, Homo sapiens
gagagagagagaaaa

SEQ ID NO: 1359739 - DNA, 15 bp, Homo sapiens
aagaaagagagagag

SEQ ID NO: 1359740 - DNA, 15 bp, Homo sapiens
aagaaagaaagagag

SEQ ID NO: 1359741 - DNA, 15 bp, Homo sapiens
aaagaaagaaagaga

SEQ ID NO: 1359742 - DNA, 15 bp, Homo sapiens
gaaagaaagaaagag

SEQ ID NO: 1359743 - DNA, 15 bp, Homo sapiens
caagaaagaaagaaa

SEQ ID NO: 1359744 - DNA, 15 bp, Homo sapiens
acaagaaagaaagaa

SEQ ID NO: 1359745 - DNA, 15 bp, Homo sapiens
aacaagaaagaaaga

SEQ ID NO: 1359746 - DNA, 15 bp, Homo sapiens
gaaacaagaaagaaa

SEQ ID NO: 1359747 - DNA, 15 bp, Homo sapiens
cgaaacaagaaagaa

SEQ ID NO: 1359748 - DNA, 15 bp, Homo sapiens
gcgaaacaagaaaga

SEQ ID NO: 1359749 - DNA, 15 bp, Homo sapiens
agcgaaacaagaaag

SEQ ID NO: 1359750 - DNA, 15 bp, Homo sapiens
gagcgaaacaagaaa

SEQ ID NO: 1359751 - DNA, 15 bp, Homo sapiens
agagcgaaacaagaa

SEQ ID NO: 1359752 - DNA, 15 bp, Homo sapiens
aagagcgaaacaaga

SEQ ID NO: 1359753 - DNA, 15 bp, Homo sapiens
caagagcgaaacaag

SEQ ID NO: 1359754 - DNA, 15 bp, Homo sapiens
acaagagcgaaacaa

SEQ ID NO: 1359755 - DNA, 15 bp, Homo sapiens
gacaagagcgaaaca

SEQ ID NO: 1359756 - DNA, 15 bp, Homo sapiens
ttgccactgcactcc

SEQ ID NO: 1359757 - DNA, 15 bp, Homo sapiens
cttgccactgcactc

SEQ ID NO: 1359758 - DNA, 15 bp, Homo sapiens
tcttgccactgcact

SEQ ID NO: 1359759 - DNA, 15 bp, Homo sapiens
atcttgccactgcac

SEQ ID NO: 1359760 - DNA, 15 bp, Homo sapiens
gatcttgccactgca

SEQ ID NO: 1359761 - DNA, 15 bp, Homo sapiens
agatcttgccactgc

SEQ ID NO: 1359762 - DNA, 15 bp, Homo sapiens
gagatcttgccactg

SEQ ID NO: 1359763 - DNA, 15 bp, Homo sapiens
tgagatcttgccact

SEQ ID NO: 1359764 - DNA, 15 bp, Homo sapiens
ctgagatcttgccac

SEQ ID NO: 1359765 - DNA, 15 bp, Homo sapiens
gctgagatcttgcca

SEQ ID NO: 1359766 - DNA, 15 bp, Homo sapiens
agctgagatcttgcc

SEQ ID NO: 1359767 - DNA, 15 bp, Homo sapiens
gagctgagatcttgc

SEQ ID NO: 1359768 - DNA, 15 bp, Homo sapiens
tgagctgagatcttg

SEQ ID NO: 1359769 - DNA, 15 bp, Homo sapiens
gtgagctgagatctt

SEQ ID NO: 1359770 - DNA, 15 bp, Homo sapiens
agtgagctgagatct

SEQ ID NO: 1359771 - DNA, 15 bp, Homo sapiens
gggtggaggttgcag

SEQ ID NO: 1359772 - DNA, 15 bp, Homo sapiens
ggggtggaggttgca

SEQ ID NO: 1359773 - DNA, 15 bp, Homo sapiens
gggggtggaggttgc

SEQ ID NO: 1359774 - DNA, 15 bp, Homo sapiens
tgggggtggaggttg

SEQ ID NO: 1359775 - DNA, 15 bp, Homo sapiens
ctgggggtggaggtt

SEQ ID NO: 1359776 - DNA, 15 bp, Homo sapiens
cctgggggtggaggt

SEQ ID NO: 1359777 - DNA, 15 bp, Homo sapiens
ccctgggggtggagg

SEQ ID NO: 1359778 - DNA, 15 bp, Homo sapiens
accctgggggtggag

SEQ ID NO: 1359779 - DNA, 15 bp, Homo sapiens
aaccctgggggtgga

SEQ ID NO: 1359780 - DNA, 15 bp, Homo sapiens
gaaccctgggggtgg

SEQ ID NO: 1359781 - DNA, 15 bp, Homo sapiens
tgaaccctgggggtg

SEQ ID NO: 1359782 - DNA, 15 bp, Homo sapiens
ttgaaccctgggggt

SEQ ID NO: 1359783 - DNA, 15 bp, Homo sapiens
cttgaaccctggggg

SEQ ID NO: 1359784 - DNA, 15 bp, Homo sapiens
acttgaaccctgggg

SEQ ID NO: 1359785 - DNA, 15 bp, Homo sapiens
cacttgaaccctggg

SEQ ID NO: 1359786 - DNA, 15 bp, Homo sapiens
tcacttgaaccctgg

SEQ ID NO: 1359787 - DNA, 15 bp, Homo sapiens
atcacttgaaccctg

SEQ ID NO: 1359788 - DNA, 15 bp, Homo sapiens
aatcacttgaaccct

SEQ ID NO: 1359789 - DNA, 15 bp, Homo sapiens
gggtgggagaatcac

SEQ ID NO: 1359790 - DNA, 15 bp, Homo sapiens
ggggtgggagaatca

SEQ ID NO: 1359791 - DNA, 15 bp, Homo sapiens
tggggtgggagaatc

SEQ ID NO: 1359792 - DNA, 15 bp, Homo sapiens
ctggggtgggagaat

SEQ ID NO: 1359793 - DNA, 15 bp, Homo sapiens
gctggggtgggagaa

SEQ ID NO: 1359794 - DNA, 15 bp, Homo sapiens
agctggggtgggaga

SEQ ID NO: 1359795 - DNA, 15 bp, Homo sapiens
aagctggggtgggag

SEQ ID NO: 1359796 - DNA, 15 bp, Homo sapiens
gaagctggggtggga

SEQ ID NO: 1359797 - DNA, 15 bp, Homo sapiens
ggaagctggggtggg

SEQ ID NO: 1359798 - DNA, 15 bp, Homo sapiens
gggaagctggggtgg

SEQ ID NO: 1359799 - DNA, 15 bp, Homo sapiens
tgggaagctggggtg

SEQ ID NO: 1359800 - DNA, 15 bp, Homo sapiens
ttgggaagctggggt

SEQ ID NO: 1359801 - DNA, 15 bp, Homo sapiens
cttgggaagctgggg

SEQ ID NO: 1359802 - DNA, 15 bp, Homo sapiens
acttgggaagctggg

SEQ ID NO: 1359803 - DNA, 15 bp, Homo sapiens
tacttgggaagctgg

SEQ ID NO: 1359804 - DNA, 15 bp, Homo sapiens
ctacttgggaagctg

SEQ ID NO: 1359805 - DNA, 15 bp, Homo sapiens
gctacttgggaagct

SEQ ID NO: 1359806 - DNA, 15 bp, Homo sapiens
agctacttgggaagc

SEQ ID NO: 1359807 - DNA, 15 bp, Homo sapiens
cagctacttgggaag

SEQ ID NO: 1359808 - DNA, 15 bp, Homo sapiens
tgcacctgtaatccc

SEQ ID NO: 1359809 - DNA, 15 bp, Homo sapiens
gtgcacctgtaatcc

SEQ ID NO: 1359810 - DNA, 15 bp, Homo sapiens
tgtgcacctgtaatc

SEQ ID NO: 1359811 - DNA, 15 bp, Homo sapiens
ttgtgcacctgtaat

SEQ ID NO: 1359812 - DNA, 15 bp, Homo sapiens
gttgtgcacctgtaa

SEQ ID NO: 1359813 - DNA, 15 bp, Homo sapiens
tgttgtgcacctgta

SEQ ID NO: 1359814 - DNA, 15 bp, Homo sapiens
gtgttgtgcacctgt

SEQ ID NO: 1359815 - DNA, 15 bp, Homo sapiens
ggtgttgtgcacctg

SEQ ID NO: 1359816 - DNA, 15 bp, Homo sapiens
tggtgttgtgcacct

SEQ ID NO: 1359817 - DNA, 15 bp, Homo sapiens
atggtgttgtgcacc

SEQ ID NO: 1359818 - DNA, 15 bp, Homo sapiens
catggtgttgtgcac

SEQ ID NO: 1359819 - DNA, 15 bp, Homo sapiens
gcatggtgttgtgca

SEQ ID NO: 1359820 - DNA, 15 bp, Homo sapiens
ggcatggtgttgtgc

SEQ ID NO: 1359821 - DNA, 15 bp, Homo sapiens
aggcatggtgttgtg

SEQ ID NO: 1359822 - DNA, 15 bp, Homo sapiens
caggcatggtgttgt

SEQ ID NO: 1359823 - DNA, 15 bp, Homo sapiens
ccaggcatggtgttg

SEQ ID NO: 1359824 - DNA, 15 bp, Homo sapiens
gccaggcatggtgtt

SEQ ID NO: 1359825 - DNA, 15 bp, Homo sapiens
atgggcggatcacct

SEQ ID NO: 1359826 - DNA, 15 bp, Homo sapiens
gatgggcggatcacc

SEQ ID NO: 1359827 - DNA, 15 bp, Homo sapiens
agatgggcggatcac

SEQ ID NO: 1359828 - DNA, 15 bp, Homo sapiens
aagatgggcggatca

SEQ ID NO: 1359829 - DNA, 15 bp, Homo sapiens
aaagatgggcggatc

SEQ ID NO: 1359830 - DNA, 15 bp, Homo sapiens
caaagatgggcggat

SEQ ID NO: 1359831 - DNA, 15 bp, Homo sapiens
gcaaagatgggcgga

SEQ ID NO: 1359832 - DNA, 15 bp, Homo sapiens
ggcaaagatgggcgg

SEQ ID NO: 1359833 - DNA, 15 bp, Homo sapiens
aggcaaagatgggcg

SEQ ID NO: 1359834 - DNA, 15 bp, Homo sapiens
gaggcaaagatgggc

SEQ ID NO: 1359835 - DNA, 15 bp, Homo sapiens
ggaggcaaagatggg

SEQ ID NO: 1359836 - DNA, 15 bp, Homo sapiens
gggaggcaaagatgg

SEQ ID NO: 1359837 - DNA, 15 bp, Homo sapiens
tgggaggcaaagatg

SEQ ID NO: 1359838 - DNA, 15 bp, Homo sapiens
ttgggaggcaaagat

SEQ ID NO: 1359839 - DNA, 15 bp, Homo sapiens
tttgggaggcaaaga

SEQ ID NO: 1359840 - DNA, 15 bp, Homo sapiens
ctttgggaggcaaag

SEQ ID NO: 1359841 - DNA, 15 bp, Homo sapiens
tctttgggaggcaaa

SEQ ID NO: 1359842 - DNA, 15 bp, Homo sapiens
ctctttgggaggcaa

SEQ ID NO: 1359843 - DNA, 15 bp, Homo sapiens
gctctttgggaggca

SEQ ID NO: 1359844 - DNA, 15 bp, Homo sapiens
agctctttgggaggc

SEQ ID NO: 1359845 - DNA, 15 bp, Homo sapiens
cagctctttgggagg

SEQ ID NO: 1359846 - DNA, 15 bp, Homo sapiens
ccagctctttgggag

SEQ ID NO: 1359847 - DNA, 15 bp, Homo sapiens
cccagctctttggga

SEQ ID NO: 1359848 - DNA, 15 bp, Homo sapiens
tcccagctctttggg

SEQ ID NO: 1359849 - DNA, 15 bp, Homo sapiens
atcccagctctttgg

SEQ ID NO: 1359850 - DNA, 15 bp, Homo sapiens
aatcccagctctttg

SEQ ID NO: 1359851 - DNA, 15 bp, Homo sapiens
taatcccagctcttt

SEQ ID NO: 1359852 - DNA, 15 bp, Homo sapiens
gtaatcccagctctt

SEQ ID NO: 1359853 - DNA, 15 bp, Homo sapiens
tgtaatcccagctct

SEQ ID NO: 1359854 - DNA, 15 bp, Homo sapiens
ctgtaatcccagctc

SEQ ID NO: 1359855 - DNA, 15 bp, Homo sapiens
tggtgtctcatgcct

SEQ ID NO: 1359856 - DNA, 15 bp, Homo sapiens
gtggtgtctcatgcc

SEQ ID NO: 1359857 - DNA, 15 bp, Homo sapiens
tgtggtgtctcatgc

SEQ ID NO: 1359858 - DNA, 15 bp, Homo sapiens
gtgtggtgtctcatg

SEQ ID NO: 1359859 - DNA, 15 bp, Homo sapiens
ggtgtggtgtctcat

SEQ ID NO: 1359860 - DNA, 15 bp, Homo sapiens
gggtgtggtgtctca

SEQ ID NO: 1359861 - DNA, 15 bp, Homo sapiens
cgggtgtggtgtctc

SEQ ID NO: 1359862 - DNA, 15 bp, Homo sapiens
ccgggtgtggtgtct

SEQ ID NO: 1359863 - DNA, 15 bp, Homo sapiens
gccgggtgtggtgtc

SEQ ID NO: 1359864 - DNA, 15 bp, Homo sapiens
ggccgggtgtggtgt

SEQ ID NO: 1359865 - DNA, 15 bp, Homo sapiens
ttggccgggtgtggt

SEQ ID NO: 1359866 - DNA, 15 bp, Homo sapiens
attggccgggtgtgg

SEQ ID NO: 1359867 - DNA, 15 bp, Homo sapiens
tattggccgggtgtg

SEQ ID NO: 1359868 - DNA, 15 bp, Homo sapiens
ttattggccgggtgt

SEQ ID NO: 1359869 - DNA, 15 bp, Homo sapiens
cttattggccgggtg

SEQ ID NO: 1359870 - DNA, 15 bp, Homo sapiens
acttattggccgggt

SEQ ID NO: 1359871 - DNA, 15 bp, Homo sapiens
cacttattggccggg

SEQ ID NO: 1359872 - DNA, 15 bp, Homo sapiens
acacttattggccgg

SEQ ID NO: 1359873 - DNA, 15 bp, Homo sapiens
gacacttattggccg

SEQ ID NO: 1359874 - DNA, 15 bp, Homo sapiens
agacacttattggcc

SEQ ID NO: 1359875 - DNA, 15 bp, Homo sapiens
aagacacttattggc

SEQ ID NO: 1359876 - DNA, 15 bp, Homo sapiens
gaagacacttattgg

SEQ ID NO: 1359877 - DNA, 15 bp, Homo sapiens
tgaagacacttattg

SEQ ID NO: 1359878 - DNA, 15 bp, Homo sapiens
ttgaagacacttatt

SEQ ID NO: 1359879 - DNA, 15 bp, Homo sapiens
tttgaagacacttat

SEQ ID NO: 1359880 - DNA, 15 bp, Homo sapiens
atttgaagacactta

SEQ ID NO: 1359881 - DNA, 15 bp, Homo sapiens
catttgaagacactt

SEQ ID NO: 1359882 - DNA, 15 bp, Homo sapiens
ccatttgaagacact

SEQ ID NO: 1359883 - DNA, 15 bp, Homo sapiens
cccatttgaagacac

SEQ ID NO: 1359884 - DNA, 15 bp, Homo sapiens
tcccatttgaagaca

SEQ ID NO: 1359885 - DNA, 15 bp, Homo sapiens
ttcccatttgaagac

SEQ ID NO: 1359886 - DNA, 15 bp, Homo sapiens
attcccatttgaaga

SEQ ID NO: 1359887 - DNA, 15 bp, Homo sapiens
cattcccatttgaag

SEQ ID NO: 1359888 - DNA, 15 bp, Homo sapiens
acattcccatttgaa

SEQ ID NO: 1359889 - DNA, 15 bp, Homo sapiens
gacattcccatttga

SEQ ID NO: 1359890 - DNA, 15 bp, Homo sapiens
tgacattcccatttg

SEQ ID NO: 1359891 - DNA, 15 bp, Homo sapiens
ctgacattcccattt

SEQ ID NO: 1359892 - DNA, 15 bp, Homo sapiens
cctgacattcccatt

SEQ ID NO: 1359893 - DNA, 15 bp, Homo sapiens
gcctgacattcccat

SEQ ID NO: 1359894 - DNA, 15 bp, Homo sapiens
agcctgacattccca

SEQ ID NO: 1359895 - DNA, 15 bp, Homo sapiens
cagcctgacattccc

SEQ ID NO: 1359896 - DNA, 15 bp, Homo sapiens
ccagcctgacattcc

SEQ ID NO: 1359897 - DNA, 15 bp, Homo sapiens
cccagcctgacattc

SEQ ID NO: 1359898 - DNA, 15 bp, Homo sapiens
gcccagcctgacatt

SEQ ID NO: 1359899 - DNA, 15 bp, Homo sapiens
cgcccagcctgacat

SEQ ID NO: 1359900 - DNA, 15 bp, Homo sapiens
gcgcccagcctgaca

SEQ ID NO: 1359901 - DNA, 15 bp, Homo sapiens
cgcgcccagcctgac

SEQ ID NO: 1359902 - DNA, 15 bp, Homo sapiens
ccgcgcccagcctga

SEQ ID NO: 1359903 - DNA, 15 bp, Homo sapiens
accaccgcgcccagc

SEQ ID NO: 1359904 - DNA, 15 bp, Homo sapiens
aaccaccgcgcccag

SEQ ID NO: 1359905 - DNA, 15 bp, Homo sapiens
gaaccaccgcgccca

SEQ ID NO: 1359906 - DNA, 15 bp, Homo sapiens
tgaaccaccgcgccc

SEQ ID NO: 1359907 - DNA, 15 bp, Homo sapiens
gtgaaccaccgcgcc

SEQ ID NO: 1359908 - DNA, 15 bp, Homo sapiens
tgtgaaccaccgcgc

SEQ ID NO: 1359909 - DNA, 15 bp, Homo sapiens
ctgtgaaccaccgcg

SEQ ID NO: 1359910 - DNA, 15 bp, Homo sapiens
actgtgaaccaccgc

SEQ ID NO: 1359911 - DNA, 15 bp, Homo sapiens
cactgtgaaccaccg

SEQ ID NO: 1359912 - DNA, 15 bp, Homo sapiens
gcactgtgaaccacc

SEQ ID NO: 1359913 - DNA, 15 bp, Homo sapiens
agcactgtgaaccac

SEQ ID NO: 1359914 - DNA, 15 bp, Homo sapiens
cagcactgtgaacca

SEQ ID NO: 1359915 - DNA, 15 bp, Homo sapiens
acagcactgtgaacc

SEQ ID NO: 1359916 - DNA, 15 bp, Homo sapiens
tacagcactgtgaac

SEQ ID NO: 1359917 - DNA, 15 bp, Homo sapiens
ttacagcactgtgaa

SEQ ID NO: 1359918 - DNA, 15 bp, Homo sapiens
attacagcactgtga

SEQ ID NO: 1359919 - DNA, 15 bp, Homo sapiens
gattacagcactgtg

SEQ ID NO: 1359920 - DNA, 15 bp, Homo sapiens
ggattacagcactgt

SEQ ID NO: 1359921 - DNA, 15 bp, Homo sapiens
gggattacagcactg

SEQ ID NO: 1359922 - DNA, 15 bp, Homo sapiens
tgggattacagcact

SEQ ID NO: 1359923 - DNA, 15 bp, Homo sapiens
ctgggattacagcac

SEQ ID NO: 1359924 - DNA, 15 bp, Homo sapiens
gctgggattacagca

SEQ ID NO: 1359925 - DNA, 15 bp, Homo sapiens
atcctcttgccttgg

SEQ ID NO: 1359926 - DNA, 15 bp, Homo sapiens
gatcctcttgccttg

SEQ ID NO: 1359927 - DNA, 15 bp, Homo sapiens
cgatcctcttgcctt

SEQ ID NO: 1359928 - DNA, 15 bp, Homo sapiens
gcgatcctcttgcct

SEQ ID NO: 1359929 - DNA, 15 bp, Homo sapiens
tgcgatcctcttgcc

SEQ ID NO: 1359930 - DNA, 15 bp, Homo sapiens
atgcgatcctcttgc

SEQ ID NO: 1359931 - DNA, 15 bp, Homo sapiens
tatgcgatcctcttg

SEQ ID NO: 1359932 - DNA, 15 bp, Homo sapiens
ttatgcgatcctctt

SEQ ID NO: 1359933 - DNA, 15 bp, Homo sapiens
cttatgcgatcctct

SEQ ID NO: 1359934 - DNA, 15 bp, Homo sapiens
acttatgcgatcctc

SEQ ID NO: 1359935 - DNA, 15 bp, Homo sapiens
gacttatgcgatcct

SEQ ID NO: 1359936 - DNA, 15 bp, Homo sapiens
ggacttatgcgatcc

SEQ ID NO: 1359937 - DNA, 15 bp, Homo sapiens
tggacttatgcgatc

SEQ ID NO: 1359938 - DNA, 15 bp, Homo sapiens
ctggacttatgcgat

SEQ ID NO: 1359939 - DNA, 15 bp, Homo sapiens
cctggacttatgcga

SEQ ID NO: 1359940 - DNA, 15 bp, Homo sapiens
tcctggacttatgcg

SEQ ID NO: 1359941 - DNA, 15 bp, Homo sapiens
ctcctggacttatgc

SEQ ID NO: 1359942 - DNA, 15 bp, Homo sapiens
actcctggacttatg

SEQ ID NO: 1359943 - DNA, 15 bp, Homo sapiens
aactcctggacttat

SEQ ID NO: 1359944 - DNA, 15 bp, Homo sapiens
gaactcctggactta

SEQ ID NO: 1359945 - DNA, 15 bp, Homo sapiens
tgaactcctggactt

SEQ ID NO: 1359946 - DNA, 15 bp, Homo sapiens
tcttgaactcctgga

SEQ ID NO: 1359947 - DNA, 15 bp, Homo sapiens
agtcttgaactcctg

SEQ ID NO: 1359948 - DNA, 15 bp, Homo sapiens
tagtcttgaactcct

SEQ ID NO: 1359949 - DNA, 15 bp, Homo sapiens
tctagtcttgaactc

SEQ ID NO: 1359950 - DNA, 15 bp, Homo sapiens
gtctagtcttgaact

SEQ ID NO: 1359951 - DNA, 15 bp, Homo sapiens
agtctagtcttgaac

SEQ ID NO: 1359952 - DNA, 15 bp, Homo sapiens
cagtctagtcttgaa

SEQ ID NO: 1359953 - DNA, 15 bp, Homo sapiens
ccagtctagtcttga

SEQ ID NO: 1359954 - DNA, 15 bp, Homo sapiens
cccagtctagtcttg

SEQ ID NO: 1359955 - DNA, 15 bp, Homo sapiens
gcccagtctagtctt

SEQ ID NO: 1359956 - DNA, 15 bp, Homo sapiens
tgcccagtctagtct

SEQ ID NO: 1359957 - DNA, 15 bp, Homo sapiens
ttgcccagtctagtc

SEQ ID NO: 1359958 - DNA, 15 bp, Homo sapiens
gttgcccagtctagt

SEQ ID NO: 1359959 - DNA, 15 bp, Homo sapiens
tgttgcccagtctag

SEQ ID NO: 1359960 - DNA, 15 bp, Homo sapiens
atgttgcccagtcta

SEQ ID NO: 1359961 - DNA, 15 bp, Homo sapiens
aatgttgcccagtct

SEQ ID NO: 1359962 - DNA, 15 bp, Homo sapiens
aaatgttgcccagtc

SEQ ID NO: 1359963 - DNA, 15 bp, Homo sapiens
taaatgttgcccagt

SEQ ID NO: 1359964 - DNA, 15 bp, Homo sapiens
ctaaatgttgcccag

SEQ ID NO: 1359965 - DNA, 15 bp, Homo sapiens
actaaatgttgccca

SEQ ID NO: 1359966 - DNA, 15 bp, Homo sapiens
tactaaatgttgccc

SEQ ID NO: 1359967 - DNA, 15 bp, Homo sapiens
ttactaaatgttgcc

SEQ ID NO: 1359968 - DNA, 15 bp, Homo sapiens
tttactaaatgttgc

SEQ ID NO: 1359969 - DNA, 15 bp, Homo sapiens
ctttactaaatgttg

SEQ ID NO: 1359970 - DNA, 15 bp, Homo sapiens
tctttactaaatgtt

SEQ ID NO: 1359971 - DNA, 15 bp, Homo sapiens
gtctttactaaatgt

SEQ ID NO: 1359972 - DNA, 15 bp, Homo sapiens
ggtctttactaaatg

SEQ ID NO: 1359973 - DNA, 15 bp, Homo sapiens
gggtctttactaaat

SEQ ID NO: 1359974 - DNA, 15 bp, Homo sapiens
agggtctttactaaa

SEQ ID NO: 1359975 - DNA, 15 bp, Homo sapiens
cagggtctttactaa

SEQ ID NO: 1359976 - DNA, 15 bp, Homo sapiens
acagggtctttacta

SEQ ID NO: 1359977 - DNA, 15 bp, Homo sapiens
gacagggtctttact

SEQ ID NO: 1359978 - DNA, 15 bp, Homo sapiens
agacagggtctttac

SEQ ID NO: 1359979 - DNA, 15 bp, Homo sapiens
gagacagggtcttta

SEQ ID NO: 1359980 - DNA, 15 bp, Homo sapiens
agagacagggtcttt

SEQ ID NO: 1359981 - DNA, 15 bp, Homo sapiens
agtagagacagggtc

SEQ ID NO: 1359982 - DNA, 15 bp, Homo sapiens
gttttagtagagaca

SEQ ID NO: 1359983 - DNA, 15 bp, Homo sapiens
tgttttagtagagac

SEQ ID NO: 1359984 - DNA, 15 bp, Homo sapiens
ttgttttagtagaga

SEQ ID NO: 1359985 - DNA, 15 bp, Homo sapiens
tttgttttagtagag

SEQ ID NO: 1359986 - DNA, 15 bp, Homo sapiens
ttttgttttagtaga

SEQ ID NO: 1359987 - DNA, 15 bp, Homo sapiens
gttttgttttagtag

SEQ ID NO: 1359988 - DNA, 15 bp, Homo sapiens
tgttttgttttagta

SEQ ID NO: 1359989 - DNA, 15 bp, Homo sapiens
ttgttttgttttagt

SEQ ID NO: 1359990 - DNA, 15 bp, Homo sapiens
gttgttttgttttag

SEQ ID NO: 1359991 - DNA, 15 bp, Homo sapiens
tgttgttttgtttta

SEQ ID NO: 1359992 - DNA, 15 bp, Homo sapiens
ttgttgttttgtttt

SEQ ID NO: 1359993 - DNA, 15 bp, Homo sapiens
gttgttgttttgttt

SEQ ID NO: 1359994 - DNA, 15 bp, Homo sapiens
ggttgttgttttgtt

SEQ ID NO: 1359995 - DNA, 15 bp, Homo sapiens
tggttgttgttttgt

SEQ ID NO: 1359996 - DNA, 15 bp, Homo sapiens
gtggttgttgttttg

SEQ ID NO: 1359997 - DNA, 15 bp, Homo sapiens
tgtggttgttgtttt

SEQ ID NO: 1359998 - DNA, 15 bp, Homo sapiens
ttgtggttgttgttt

SEQ ID NO: 1359999 - DNA, 15 bp, Homo sapiens
tttgtggttgttgtt

SEQ ID NO: 1360000 - DNA, 15 bp, Homo sapiens
ttttgtggttgttgt

SEQ ID NO: 1360001 - DNA, 15 bp, Homo sapiens
attttgtggttgttg

SEQ ID NO: 1360002 - DNA, 15 bp, Homo sapiens
gattttgtggttgtt

SEQ ID NO: 1360003 - DNA, 15 bp, Homo sapiens
tgattttgtggttgt

SEQ ID NO: 1360004 - DNA, 15 bp, Homo sapiens
ctgattttgtggttg

SEQ ID NO: 1360005 - DNA, 15 bp, Homo sapiens
gctgattttgtggtt

SEQ ID NO: 1360006 - DNA, 15 bp, Homo sapiens
agctgattttgtggt

SEQ ID NO: 1360007 - DNA, 15 bp, Homo sapiens
cagctgattttgtgg

SEQ ID NO: 1360008 - DNA, 15 bp, Homo sapiens
ccagctgattttgtg

SEQ ID NO: 1360009 - DNA, 15 bp, Homo sapiens
cccagctgattttgt

SEQ ID NO: 1360010 - DNA, 15 bp, Homo sapiens
acccagctgattttg

SEQ ID NO: 1360011 - DNA, 15 bp, Homo sapiens
cacccagctgatttt

SEQ ID NO: 1360012 - DNA, 15 bp, Homo sapiens
acacccagctgattt

SEQ ID NO: 1360013 - DNA, 15 bp, Homo sapiens
cacacccagctgatt

SEQ ID NO: 1360014 - DNA, 15 bp, Homo sapiens
ccacacccagctgat

SEQ ID NO: 1360015 - DNA, 15 bp, Homo sapiens
accacacccagctga

SEQ ID NO: 1360016 - DNA, 15 bp, Homo sapiens
caccacacccagctg

SEQ ID NO: 1360017 - DNA, 15 bp, Homo sapiens
ctataggcatgcacc

SEQ ID NO: 1360018 - DNA, 15 bp, Homo sapiens
actataggcatgcac

SEQ ID NO: 1360019 - DNA, 15 bp, Homo sapiens
gactataggcatgca

SEQ ID NO: 1360020 - DNA, 15 bp, Homo sapiens
ggactataggcatgc

SEQ ID NO: 1360021 - DNA, 15 bp, Homo sapiens
gggactataggcatg

SEQ ID NO: 1360022 - DNA, 15 bp, Homo sapiens
tgggactataggcat

SEQ ID NO: 1360023 - DNA, 15 bp, Homo sapiens
ggatcctcctgcctc

SEQ ID NO: 1360024 - DNA, 15 bp, Homo sapiens
gggatcctcctgcct

SEQ ID NO: 1360025 - DNA, 15 bp, Homo sapiens
agggatcctcctgcc

SEQ ID NO: 1360026 - DNA, 15 bp, Homo sapiens
aagggatcctcctgc

SEQ ID NO: 1360027 - DNA, 15 bp, Homo sapiens
caagggatcctcctg

SEQ ID NO: 1360028 - DNA, 15 bp, Homo sapiens
tcaagggatcctcct

SEQ ID NO: 1360029 - DNA, 15 bp, Homo sapiens
tctcaagggatcctc

SEQ ID NO: 1360030 - DNA, 15 bp, Homo sapiens
gtctcaagggatcct

SEQ ID NO: 1360031 - DNA, 15 bp, Homo sapiens
ggtctcaagggatcc

SEQ ID NO: 1360032 - DNA, 15 bp, Homo sapiens
tggtctcaagggatc

SEQ ID NO: 1360033 - DNA, 15 bp, Homo sapiens
ctggtctcaagggat

SEQ ID NO: 1360034 - DNA, 15 bp, Homo sapiens
cctggtctcaaggga

SEQ ID NO: 1360035 - DNA, 15 bp, Homo sapiens
tcctggtctcaaggg

SEQ ID NO: 1360036 - DNA, 15 bp, Homo sapiens
ctcctggtctcaagg

SEQ ID NO: 1360037 - DNA, 15 bp, Homo sapiens
gaactcctggtctca

SEQ ID NO: 1360038 - DNA, 15 bp, Homo sapiens
tgaactcctggtctc

SEQ ID NO: 1360039 - DNA, 15 bp, Homo sapiens
ttgaactcctggtct

SEQ ID NO: 1360040 - DNA, 15 bp, Homo sapiens
cttgaactcctggtc

SEQ ID NO: 1360041 - DNA, 15 bp, Homo sapiens
ccttgaactcctggt

SEQ ID NO: 1360042 - DNA, 15 bp, Homo sapiens
accttgaactcctgg

SEQ ID NO: 1360043 - DNA, 15 bp, Homo sapiens
aaccttgaactcctg

SEQ ID NO: 1360044 - DNA, 15 bp, Homo sapiens
caaccttgaactcct

SEQ ID NO: 1360045 - DNA, 15 bp, Homo sapiens
gcaaccttgaactcc

SEQ ID NO: 1360046 - DNA, 15 bp, Homo sapiens
tgcaaccttgaactc

SEQ ID NO: 1360047 - DNA, 15 bp, Homo sapiens
ctgcaaccttgaact

SEQ ID NO: 1360048 - DNA, 15 bp, Homo sapiens
actgcaaccttgaac

SEQ ID NO: 1360049 - DNA, 15 bp, Homo sapiens
aactgcaaccttgaa

SEQ ID NO: 1360050 - DNA, 15 bp, Homo sapiens
taactgcaaccttga

SEQ ID NO: 1360051 - DNA, 15 bp, Homo sapiens
ctaactgcaaccttg

SEQ ID NO: 1360052 - DNA, 15 bp, Homo sapiens
gctaactgcaacctt

SEQ ID NO: 1360053 - DNA, 15 bp, Homo sapiens
agctaactgcaacct

SEQ ID NO: 1360054 - DNA, 15 bp, Homo sapiens
cagctaactgcaacc

SEQ ID NO: 1360055 - DNA, 15 bp, Homo sapiens
gcagctaactgcaac

SEQ ID NO: 1360056 - DNA, 15 bp, Homo sapiens
agcagctaactgcaa

SEQ ID NO: 1360057 - DNA, 15 bp, Homo sapiens
tagcagctaactgca

SEQ ID NO: 1360058 - DNA, 15 bp, Homo sapiens
gtagcagctaactgc

SEQ ID NO: 1360059 - DNA, 15 bp, Homo sapiens
ggtagcagctaactg

SEQ ID NO: 1360060 - DNA, 15 bp, Homo sapiens
aggtagcagctaact

SEQ ID NO: 1360061 - DNA, 15 bp, Homo sapiens
caggtagcagctaac

SEQ ID NO: 1360062 - DNA, 15 bp, Homo sapiens
gcaggtagcagctaa

SEQ ID NO: 1360063 - DNA, 15 bp, Homo sapiens
tgcaggtagcagcta

SEQ ID NO: 1360064 - DNA, 15 bp, Homo sapiens
ctgcaggtagcagct

SEQ ID NO: 1360065 - DNA, 15 bp, Homo sapiens
tctgcaggtagcagc

SEQ ID NO: 1360066 - DNA, 15 bp, Homo sapiens
atctgcaggtagcag

SEQ ID NO: 1360067 - DNA, 15 bp, Homo sapiens
aatctgcaggtagca

SEQ ID NO: 1360068 - DNA, 15 bp, Homo sapiens
caatctgcaggtagc

SEQ ID NO: 1360069 - DNA, 15 bp, Homo sapiens
acaatctgcaggtag

SEQ ID NO: 1360070 - DNA, 15 bp, Homo sapiens
tacaatctgcaggta

SEQ ID NO: 1360071 - DNA, 15 bp, Homo sapiens
gtacaatctgcaggt

SEQ ID NO: 1360072 - DNA, 15 bp, Homo sapiens
ggtacaatctgcagg

SEQ ID NO: 1360073 - DNA, 15 bp, Homo sapiens
tggtacaatctgcag

SEQ ID NO: 1360074 - DNA, 15 bp, Homo sapiens
gtggtacaatctgca

SEQ ID NO: 1360075 - DNA, 15 bp, Homo sapiens
agtggtacaatctgc

SEQ ID NO: 1360076 - DNA, 15 bp, Homo sapiens
cagtggtacaatctg

SEQ ID NO: 1360077 - DNA, 15 bp, Homo sapiens
gcagtggtacaatct

SEQ ID NO: 1360078 - DNA, 15 bp, Homo sapiens
ttgtcgctcaggctg

SEQ ID NO: 1360079 - DNA, 15 bp, Homo sapiens
tttgtcgctcaggct

SEQ ID NO: 1360080 - DNA, 15 bp, Homo sapiens
ctttgtcgctcaggc

SEQ ID NO: 1360081 - DNA, 15 bp, Homo sapiens
actttgtcgctcagg

SEQ ID NO: 1360082 - DNA, 15 bp, Homo sapiens
cactttgtcgctcag

SEQ ID NO: 1360083 - DNA, 15 bp, Homo sapiens
tcactttgtcgctca

SEQ ID NO: 1360084 - DNA, 15 bp, Homo sapiens
ctcactttgtcgctc

SEQ ID NO: 1360085 - DNA, 15 bp, Homo sapiens
tctcactttgtcgct

SEQ ID NO: 1360086 - DNA, 15 bp, Homo sapiens
atctcactttgtcgc

SEQ ID NO: 1360087 - DNA, 15 bp, Homo sapiens
gatctcactttgtcg

SEQ ID NO: 1360088 - DNA, 15 bp, Homo sapiens
ggatctcactttgtc

SEQ ID NO: 1360089 - DNA, 15 bp, Homo sapiens
aggatctcactttgt

SEQ ID NO: 1360090 - DNA, 15 bp, Homo sapiens
taggatctcactttg

SEQ ID NO: 1360091 - DNA, 15 bp, Homo sapiens
ataggatctcacttt

SEQ ID NO: 1360092 - DNA, 15 bp, Homo sapiens
gataggatctcactt

SEQ ID NO: 1360093 - DNA, 15 bp, Homo sapiens
agataggatctcact

SEQ ID NO: 1360094 - DNA, 15 bp, Homo sapiens
gagataggatctcac

SEQ ID NO: 1360095 - DNA, 15 bp, Homo sapiens
tgagataggatctca

SEQ ID NO: 1360096 - DNA, 15 bp, Homo sapiens
ttgagataggatctc

SEQ ID NO: 1360097 - DNA, 15 bp, Homo sapiens
tttgagataggatct

SEQ ID NO: 1360098 - DNA, 15 bp, Homo sapiens
ttttgagataggatc

SEQ ID NO: 1360099 - DNA, 15 bp, Homo sapiens
gttttgagataggat

SEQ ID NO: 1360100 - DNA, 15 bp, Homo sapiens
tgttttgagatagga

SEQ ID NO: 1360101 - DNA, 15 bp, Homo sapiens
ttgttttgagatagg

SEQ ID NO: 1360102 - DNA, 15 bp, Homo sapiens
tttgttttgagatag

SEQ ID NO: 1360103 - DNA, 15 bp, Homo sapiens
gtttgttttgagata

SEQ ID NO: 1360104 - DNA, 15 bp, Homo sapiens
gttgtttgttttgag

SEQ ID NO: 1360105 - DNA, 15 bp, Homo sapiens
tgttgtttgttttga

SEQ ID NO: 1360106 - DNA, 15 bp, Homo sapiens
ttgttgtttgttttg

SEQ ID NO: 1360107 - DNA, 15 bp, Homo sapiens
gttgttgtttgtttt

SEQ ID NO: 1360108 - DNA, 15 bp, Homo sapiens
tgttgttgtttgttt

SEQ ID NO: 1360109 - DNA, 15 bp, Homo sapiens
ttgttgttgtttgtt

SEQ ID NO: 1360110 - DNA, 15 bp, Homo sapiens
gttgttgttgtttgt

SEQ ID NO: 1360111 - DNA, 15 bp, Homo sapiens
ctattgttgttgttg

SEQ ID NO: 1360112 - DNA, 15 bp, Homo sapiens
tctattgttgttgtt

SEQ ID NO: 1360113 - DNA, 15 bp, Homo sapiens
ttctattgttgttgt

SEQ ID NO: 1360114 - DNA, 15 bp, Homo sapiens
tttctattgttgttg

SEQ ID NO: 1360115 - DNA, 15 bp, Homo sapiens
gtttctattgttgtt

SEQ ID NO: 1360116 - DNA, 15 bp, Homo sapiens
tgtttctattgttgt

SEQ ID NO: 1360117 - DNA, 15 bp, Homo sapiens
ctgtttctattgttg

SEQ ID NO: 1360118 - DNA, 15 bp, Homo sapiens
tctgtttctattgtt

SEQ ID NO: 1360119 - DNA, 15 bp, Homo sapiens
atctgtttctattgt

SEQ ID NO: 1360120 - DNA, 15 bp, Homo sapiens
catctgtttctattg

SEQ ID NO: 1360121 - DNA, 15 bp, Homo sapiens
ccatctgtttctatt

SEQ ID NO: 1360122 - DNA, 15 bp, Homo sapiens
cccatctgtttctat

SEQ ID NO: 1360123 - DNA, 15 bp, Homo sapiens
ccccatctgtttcta

SEQ ID NO: 1360124 - DNA, 15 bp, Homo sapiens
gccccatctgtttct

SEQ ID NO: 1360125 - DNA, 15 bp, Homo sapiens
ggccccatctgtttc

SEQ ID NO: 1360126 - DNA, 15 bp, Homo sapiens
tggccccatctgttt

SEQ ID NO: 1360127 - DNA, 15 bp, Homo sapiens
ctggccccatctgtt

SEQ ID NO: 1360128 - DNA, 15 bp, Homo sapiens
cctggccccatctgt

SEQ ID NO: 1360129 - DNA, 15 bp, Homo sapiens
gcctggccccatctg

SEQ ID NO: 1360130 - DNA, 15 bp, Homo sapiens
tgcctggccccatct

SEQ ID NO: 1360131 - DNA, 15 bp, Homo sapiens
gtgcctggccccatc

SEQ ID NO: 1360132 - DNA, 15 bp, Homo sapiens
cgtgcctggccccat

SEQ ID NO: 1360133 - DNA, 15 bp, Homo sapiens
ccgtgcctggcccca

SEQ ID NO: 1360134 - DNA, 15 bp, Homo sapiens
gtgagccaccgtgcc

SEQ ID NO: 1360135 - DNA, 15 bp, Homo sapiens
ttaagattacaggtg

SEQ ID NO: 1360136 - DNA, 15 bp, Homo sapiens
gttaagattacaggt

SEQ ID NO: 1360137 - DNA, 15 bp, Homo sapiens
tgttaagattacagg

SEQ ID NO: 1360138 - DNA, 15 bp, Homo sapiens
gtgttaagattacag

SEQ ID NO: 1360139 - DNA, 15 bp, Homo sapiens
agtgttaagattaca

SEQ ID NO: 1360140 - DNA, 15 bp, Homo sapiens
aagtgttaagattac

SEQ ID NO: 1360141 - DNA, 15 bp, Homo sapiens
aaagtgttaagatta

SEQ ID NO: 1360142 - DNA, 15 bp, Homo sapiens
caaagtgttaagatt

SEQ ID NO: 1360143 - DNA, 15 bp, Homo sapiens
ccaaagtgttaagat

SEQ ID NO: 1360144 - DNA, 15 bp, Homo sapiens
cccaaagtgttaaga

SEQ ID NO: 1360145 - DNA, 15 bp, Homo sapiens
tcccaaagtgttaag

SEQ ID NO: 1360146 - DNA, 15 bp, Homo sapiens
ctcccaaagtgttaa

SEQ ID NO: 1360147 - DNA, 15 bp, Homo sapiens
cctcccaaagtgtta

SEQ ID NO: 1360148 - DNA, 15 bp, Homo sapiens
gaccttggcctccca

SEQ ID NO: 1360149 - DNA, 15 bp, Homo sapiens
tgaccttggcctccc

SEQ ID NO: 1360150 - DNA, 15 bp, Homo sapiens
ctgaccttggcctcc

SEQ ID NO: 1360151 - DNA, 15 bp, Homo sapiens
tctgaccttggcctc

SEQ ID NO: 1360152 - DNA, 15 bp, Homo sapiens
ctctgaccttggcct

SEQ ID NO: 1360153 - DNA, 15 bp, Homo sapiens
cctctgaccttggcc

SEQ ID NO: 1360154 - DNA, 15 bp, Homo sapiens
tcctctgaccttggc

SEQ ID NO: 1360155 - DNA, 15 bp, Homo sapiens
gtcctctgaccttgg

SEQ ID NO: 1360156 - DNA, 15 bp, Homo sapiens
agtcctctgaccttg

SEQ ID NO: 1360157 - DNA, 15 bp, Homo sapiens
cagtcctctgacctt

SEQ ID NO: 1360158 - DNA, 15 bp, Homo sapiens
gcagtcctctgacct

SEQ ID NO: 1360159 - DNA, 15 bp, Homo sapiens
agcagtcctctgacc

SEQ ID NO: 1360160 - DNA, 15 bp, Homo sapiens
aagcagtcctctgac

SEQ ID NO: 1360161 - DNA, 15 bp, Homo sapiens
caagcagtcctctga

SEQ ID NO: 1360162 - DNA, 15 bp, Homo sapiens
tcaagcagtcctctg

SEQ ID NO: 1360163 - DNA, 15 bp, Homo sapiens
ctcaagcagtcctct

SEQ ID NO: 1360164 - DNA, 15 bp, Homo sapiens
cctcaagcagtcctc

SEQ ID NO: 1360165 - DNA, 15 bp, Homo sapiens
gcctcaagcagtcct

SEQ ID NO: 1360166 - DNA, 15 bp, Homo sapiens
ggcctcaagcagtcc

SEQ ID NO: 1360167 - DNA, 15 bp, Homo sapiens
tggcctcaagcagtc

SEQ ID NO: 1360168 - DNA, 15 bp, Homo sapiens
ctggcctcaagcagt

SEQ ID NO: 1360169 - DNA, 15 bp, Homo sapiens
cctggcctcaagcag

SEQ ID NO: 1360170 - DNA, 15 bp, Homo sapiens
cagggtcttgctatg

SEQ ID NO: 1360171 - DNA, 15 bp, Homo sapiens
acagggtcttgctat

SEQ ID NO: 1360172 - DNA, 15 bp, Homo sapiens
gacagggtcttgcta

SEQ ID NO: 1360173 - DNA, 15 bp, Homo sapiens
cttagagacagggtc

SEQ ID NO: 1360174 - DNA, 15 bp, Homo sapiens
ccttagagacagggt

SEQ ID NO: 1360175 - DNA, 15 bp, Homo sapiens
tccttagagacaggg

SEQ ID NO: 1360176 - DNA, 15 bp, Homo sapiens
ttccttagagacagg

SEQ ID NO: 1360177 - DNA, 15 bp, Homo sapiens
tttccttagagacag

SEQ ID NO: 1360178 - DNA, 15 bp, Homo sapiens
ttttccttagagaca

SEQ ID NO: 1360179 - DNA, 15 bp, Homo sapiens
tttttccttagagac

SEQ ID NO: 1360180 - DNA, 15 bp, Homo sapiens
ttttttccttagaga

SEQ ID NO: 1360181 - DNA, 15 bp, Homo sapiens
tttttttccttagag

SEQ ID NO: 1360182 - DNA, 15 bp, Homo sapiens
ttttttttccttaga

SEQ ID NO: 1360183 - DNA, 15 bp, Homo sapiens
tttttttttccttag

SEQ ID NO: 1360184 - DNA, 15 bp, Homo sapiens
ttttttttttcctta

SEQ ID NO: 1360185 - DNA, 15 bp, Homo sapiens
tttttttttttcctt

SEQ ID NO: 1360186 - DNA, 15 bp, Homo sapiens
atttttttttttcct

SEQ ID NO: 1360187 - DNA, 15 bp, Homo sapiens
catttttttttttcc

SEQ ID NO: 1360188 - DNA, 15 bp, Homo sapiens
gcatttttttttttc

SEQ ID NO: 1360189 - DNA, 15 bp, Homo sapiens
agcattttttttttt

SEQ ID NO: 1360190 - DNA, 15 bp, Homo sapiens
cagcatttttttttt

SEQ ID NO: 1360191 - DNA, 15 bp, Homo sapiens
ccagcattttttttt

SEQ ID NO: 1360192 - DNA, 15 bp, Homo sapiens
cccagcatttttttt

SEQ ID NO: 1360193 - DNA, 15 bp, Homo sapiens
gcccagcattttttt

SEQ ID NO: 1360194 - DNA, 15 bp, Homo sapiens
cgcccagcatttttt

SEQ ID NO: 1360195 - DNA, 15 bp, Homo sapiens
gcgcccagcattttt

SEQ ID NO: 1360196 - DNA, 15 bp, Homo sapiens
tgcgcccagcatttt

SEQ ID NO: 1360197 - DNA, 15 bp, Homo sapiens
ctgcgcccagcattt

SEQ ID NO: 1360198 - DNA, 15 bp, Homo sapiens
actgcgcccagcatt

SEQ ID NO: 1360199 - DNA, 15 bp, Homo sapiens
cactgcgcccagcat

SEQ ID NO: 1360200 - DNA, 15 bp, Homo sapiens
ccactgcgcccagca

SEQ ID NO: 1360201 - DNA, 15 bp, Homo sapiens
cccagctcagcctcc

SEQ ID NO: 1360202 - DNA, 15 bp, Homo sapiens
gcccagctcagcctc

SEQ ID NO: 1360203 - DNA, 15 bp, Homo sapiens
tgcccagctcagcct

SEQ ID NO: 1360204 - DNA, 15 bp, Homo sapiens
ctgcccagctcagcc

SEQ ID NO: 1360205 - DNA, 15 bp, Homo sapiens
tctgcccagctcagc

SEQ ID NO: 1360206 - DNA, 15 bp, Homo sapiens
atctgcccagctcag

SEQ ID NO: 1360207 - DNA, 15 bp, Homo sapiens
gatctgcccagctca

SEQ ID NO: 1360208 - DNA, 15 bp, Homo sapiens
tgatctgcccagctc

SEQ ID NO: 1360209 - DNA, 15 bp, Homo sapiens
gtgatctgcccagct

SEQ ID NO: 1360210 - DNA, 15 bp, Homo sapiens
tgtgatctgcccagc

SEQ ID NO: 1360211 - DNA, 15 bp, Homo sapiens
ttgtgatctgcccag

SEQ ID NO: 1360212 - DNA, 15 bp, Homo sapiens
cttgtgatctgccca

SEQ ID NO: 1360213 - DNA, 15 bp, Homo sapiens
ttgaccttgtgatct

SEQ ID NO: 1360214 - DNA, 15 bp, Homo sapiens
ctcttgaccttgtga

SEQ ID NO: 1360215 - DNA, 15 bp, Homo sapiens
tctcttgaccttgtg

SEQ ID NO: 1360216 - DNA, 15 bp, Homo sapiens
atctcttgaccttgt

SEQ ID NO: 1360217 - DNA, 15 bp, Homo sapiens
gatctcttgaccttg

SEQ ID NO: 1360218 - DNA, 15 bp, Homo sapiens
cgatctcttgacctt

SEQ ID NO: 1360219 - DNA, 15 bp, Homo sapiens
tgttggccaggatgg

SEQ ID NO: 1360220 - DNA, 15 bp, Homo sapiens
atgttggccaggatg

SEQ ID NO: 1360221 - DNA, 15 bp, Homo sapiens
catgttggccaggat

SEQ ID NO: 1360222 - DNA, 15 bp, Homo sapiens
agagacagagtttca

SEQ ID NO: 1360223 - DNA, 15 bp, Homo sapiens
gagtagagacagagt

SEQ ID NO: 1360224 - DNA, 15 bp, Homo sapiens
tgagtagagacagag

SEQ ID NO: 1360225 - DNA, 15 bp, Homo sapiens
ttgagtagagacaga

SEQ ID NO: 1360226 - DNA, 15 bp, Homo sapiens
tttgagtagagacag

SEQ ID NO: 1360227 - DNA, 15 bp, Homo sapiens
ttttgagtagagaca

SEQ ID NO: 1360228 - DNA, 15 bp, Homo sapiens
tttttgagtagagac

SEQ ID NO: 1360229 - DNA, 15 bp, Homo sapiens
ttttttgagtagaga

SEQ ID NO: 1360230 - DNA, 15 bp, Homo sapiens
tttttttgagtagag

SEQ ID NO: 1360231 - DNA, 15 bp, Homo sapiens
ttttttttgagtaga

SEQ ID NO: 1360232 - DNA, 15 bp, Homo sapiens
tttttttttgagtag

SEQ ID NO: 1360233 - DNA, 15 bp, Homo sapiens
ttttttttttgagta

SEQ ID NO: 1360234 - DNA, 15 bp, Homo sapiens
ggctaattttttttt

SEQ ID NO: 1360235 - DNA, 15 bp, Homo sapiens
gcgccaccacgcctg

SEQ ID NO: 1360236 - DNA, 15 bp, Homo sapiens
cgcgccaccacgcct

SEQ ID NO: 1360237 - DNA, 15 bp, Homo sapiens
acgcgccaccacgcc

SEQ ID NO: 1360238 - DNA, 15 bp, Homo sapiens
caggcacgcgccacc

SEQ ID NO: 1360239 - DNA, 15 bp, Homo sapiens
acaggcacgcgccac

SEQ ID NO: 1360240 - DNA, 15 bp, Homo sapiens
tacaggcacgcgcca

SEQ ID NO: 1360241 - DNA, 15 bp, Homo sapiens
ttacaggcacgcgcc

SEQ ID NO: 1360242 - DNA, 15 bp, Homo sapiens
attacaggcacgcgc

SEQ ID NO: 1360243 - DNA, 15 bp, Homo sapiens
ttcccaggttcaagt

SEQ ID NO: 1360244 - DNA, 15 bp, Homo sapiens
cttcccaggttcaag

SEQ ID NO: 1360245 - DNA, 15 bp, Homo sapiens
gcttcccaggttcaa

SEQ ID NO: 1360246 - DNA, 15 bp, Homo sapiens
cgcttcccaggttca

SEQ ID NO: 1360247 - DNA, 15 bp, Homo sapiens
ccgcttcccaggttc

SEQ ID NO: 1360248 - DNA, 15 bp, Homo sapiens
tccgcttcccaggtt

SEQ ID NO: 1360249 - DNA, 15 bp, Homo sapiens
ctccgcttcccaggt

SEQ ID NO: 1360250 - DNA, 15 bp, Homo sapiens
cctccgcttcccagg

SEQ ID NO: 1360251 - DNA, 15 bp, Homo sapiens
acctccgcttcccag

SEQ ID NO: 1360252 - DNA, 15 bp, Homo sapiens
aacctccgcttccca

SEQ ID NO: 1360253 - DNA, 15 bp, Homo sapiens
gtggcgcgatctcgg

SEQ ID NO: 1360254 - DNA, 15 bp, Homo sapiens
agtggcgcgatctcg

SEQ ID NO: 1360255 - DNA, 15 bp, Homo sapiens
cttttgttgcccagg

SEQ ID NO: 1360256 - DNA, 15 bp, Homo sapiens
gcttttgttgcccag

SEQ ID NO: 1360257 - DNA, 15 bp, Homo sapiens
cgcttttgttgccca

SEQ ID NO: 1360258 - DNA, 15 bp, Homo sapiens
tcgcttttgttgccc

SEQ ID NO: 1360259 - DNA, 15 bp, Homo sapiens
ttcgcttttgttgcc

SEQ ID NO: 1360260 - DNA, 15 bp, Homo sapiens
tttcgcttttgttgc

SEQ ID NO: 1360261 - DNA, 15 bp, Homo sapiens
gtttcgcttttgttg

SEQ ID NO: 1360262 - DNA, 15 bp, Homo sapiens
agtttcgcttttgtt

SEQ ID NO: 1360263 - DNA, 15 bp, Homo sapiens
gagtttcgcttttgt

SEQ ID NO: 1360264 - DNA, 15 bp, Homo sapiens
ggagtttcgcttttg

SEQ ID NO: 1360265 - DNA, 15 bp, Homo sapiens
cggagtttcgctttt

SEQ ID NO: 1360266 - DNA, 15 bp, Homo sapiens
acggagtttcgcttt

SEQ ID NO: 1360267 - DNA, 15 bp, Homo sapiens
gacggagtttcgctt

SEQ ID NO: 1360268 - DNA, 15 bp, Homo sapiens
ctgagacggagtttc

SEQ ID NO: 1360269 - DNA, 15 bp, Homo sapiens
cctgagacggagttt

SEQ ID NO: 1360270 - DNA, 15 bp, Homo sapiens
tcctgagacggagtt

SEQ ID NO: 1360271 - DNA, 15 bp, Homo sapiens
ttcctgagacggagt

SEQ ID NO: 1360272 - DNA, 15 bp, Homo sapiens
tttcctgagacggag

SEQ ID NO: 1360273 - DNA, 15 bp, Homo sapiens
ttttcctgagacgga

SEQ ID NO: 1360274 - DNA, 15 bp, Homo sapiens
tttttcctgagacgg

SEQ ID NO: 1360275 - DNA, 15 bp, Homo sapiens
ttttttcctgagacg

SEQ ID NO: 1360276 - DNA, 15 bp, Homo sapiens
tttttttcctgagac

SEQ ID NO: 1360277 - DNA, 15 bp, Homo sapiens
ttttttttcctgaga

SEQ ID NO: 1360278 - DNA, 15 bp, Homo sapiens
tttttttttcctgag

SEQ ID NO: 1360279 - DNA, 15 bp, Homo sapiens
ttttttttttcctga

SEQ ID NO: 1360280 - DNA, 15 bp, Homo sapiens
tttttttttttcctg

SEQ ID NO: 1360281 - DNA, 15 bp, Homo sapiens
atttttttttttttc

SEQ ID NO: 1360282 - DNA, 15 bp, Homo sapiens
tatgcctagctaatt

SEQ ID NO: 1360283 - DNA, 15 bp, Homo sapiens
ttatgcctagctaat

SEQ ID NO: 1360284 - DNA, 15 bp, Homo sapiens
attatgcctagctaa

SEQ ID NO: 1360285 - DNA, 15 bp, Homo sapiens
cattatgcctagcta

SEQ ID NO: 1360286 - DNA, 15 bp, Homo sapiens
ccattatgcctagct

SEQ ID NO: 1360287 - DNA, 15 bp, Homo sapiens
gccattatgcctagc

SEQ ID NO: 1360288 - DNA, 15 bp, Homo sapiens
tgccattatgcctag

SEQ ID NO: 1360289 - DNA, 15 bp, Homo sapiens
atgccattatgccta

SEQ ID NO: 1360290 - DNA, 15 bp, Homo sapiens
tatgccattatgcct

SEQ ID NO: 1360291 - DNA, 15 bp, Homo sapiens
gtatgccattatgcc

SEQ ID NO: 1360292 - DNA, 15 bp, Homo sapiens
tgtatgccattatgc

SEQ ID NO: 1360293 - DNA, 15 bp, Homo sapiens
gtgtatgccattatg

SEQ ID NO: 1360294 - DNA, 15 bp, Homo sapiens
ggtgtatgccattat

SEQ ID NO: 1360295 - DNA, 15 bp, Homo sapiens
aggtgtatgccatta

SEQ ID NO: 1360296 - DNA, 15 bp, Homo sapiens
caggtgtatgccatt

SEQ ID NO: 1360297 - DNA, 15 bp, Homo sapiens
acaggtgtatgccat

SEQ ID NO: 1360298 - DNA, 15 bp, Homo sapiens
tacaggtgtatgcca

SEQ ID NO: 1360299 - DNA, 15 bp, Homo sapiens
ctacaggtgtatgcc

SEQ ID NO: 1360300 - DNA, 15 bp, Homo sapiens
actacaggtgtatgc

SEQ ID NO: 1360301 - DNA, 15 bp, Homo sapiens
gactacaggtgtatg

SEQ ID NO: 1360302 - DNA, 15 bp, Homo sapiens
ggactacaggtgtat

SEQ ID NO: 1360303 - DNA, 15 bp, Homo sapiens
gggactacaggtgta

SEQ ID NO: 1360304 - DNA, 15 bp, Homo sapiens
ctagcagctgggact

SEQ ID NO: 1360305 - DNA, 15 bp, Homo sapiens
cctagcagctgggac

SEQ ID NO: 1360306 - DNA, 15 bp, Homo sapiens
ccctagcagctggga

SEQ ID NO: 1360307 - DNA, 15 bp, Homo sapiens
tccctagcagctggg

SEQ ID NO: 1360308 - DNA, 15 bp, Homo sapiens
ctccctagcagctgg

SEQ ID NO: 1360309 - DNA, 15 bp, Homo sapiens
cctccctagcagctg

SEQ ID NO: 1360310 - DNA, 15 bp, Homo sapiens
gcctccctagcagct

SEQ ID NO: 1360311 - DNA, 15 bp, Homo sapiens
agcctccctagcagc

SEQ ID NO: 1360312 - DNA, 15 bp, Homo sapiens
cagcctccctagcag

SEQ ID NO: 1360313 - DNA, 15 bp, Homo sapiens
tcagcctccctagca

SEQ ID NO: 1360314 - DNA, 15 bp, Homo sapiens
atcagcctccctagc

SEQ ID NO: 1360315 - DNA, 15 bp, Homo sapiens
catcagcctccctag

SEQ ID NO: 1360316 - DNA, 15 bp, Homo sapiens
acatcagcctcccta

SEQ ID NO: 1360317 - DNA, 15 bp, Homo sapiens
cacatcagcctccct

SEQ ID NO: 1360318 - DNA, 15 bp, Homo sapiens
ccacatcagcctccc

SEQ ID NO: 1360319 - DNA, 15 bp, Homo sapiens
cccacatcagcctcc

SEQ ID NO: 1360320 - DNA, 15 bp, Homo sapiens
tcccacatcagcctc

SEQ ID NO: 1360321 - DNA, 15 bp, Homo sapiens
ctcccacatcagcct

SEQ ID NO: 1360322 - DNA, 15 bp, Homo sapiens
tctcccacatcagcc

SEQ ID NO: 1360323 - DNA, 15 bp, Homo sapiens
ttctcccacatcagc

SEQ ID NO: 1360324 - DNA, 15 bp, Homo sapiens
attctcccacatcag

SEQ ID NO: 1360325 - DNA, 15 bp, Homo sapiens
gattctcccacatca

SEQ ID NO: 1360326 - DNA, 15 bp, Homo sapiens
tgattctcccacatc

SEQ ID NO: 1360327 - DNA, 15 bp, Homo sapiens
gtgattctcccacat

SEQ ID NO: 1360328 - DNA, 15 bp, Homo sapiens
agtgattctcccaca

SEQ ID NO: 1360329 - DNA, 15 bp, Homo sapiens
acaagtgattctccc

SEQ ID NO: 1360330 - DNA, 15 bp, Homo sapiens
tacaagtgattctcc

SEQ ID NO: 1360331 - DNA, 15 bp, Homo sapiens
gtacaagtgattctc

SEQ ID NO: 1360332 - DNA, 15 bp, Homo sapiens
agtacaagtgattct

SEQ ID NO: 1360333 - DNA, 15 bp, Homo sapiens
gagtacaagtgattc

SEQ ID NO: 1360334 - DNA, 15 bp, Homo sapiens
ggagtacaagtgatt

SEQ ID NO: 1360335 - DNA, 15 bp, Homo sapiens
tggagtacaagtgat

SEQ ID NO: 1360336 - DNA, 15 bp, Homo sapiens
ctggagtacaagtga

SEQ ID NO: 1360337 - DNA, 15 bp, Homo sapiens
tctggagtacaagtg

SEQ ID NO: 1360338 - DNA, 15 bp, Homo sapiens
ctctggagtacaagt

SEQ ID NO: 1360339 - DNA, 15 bp, Homo sapiens
cctctggagtacaag

SEQ ID NO: 1360340 - DNA, 15 bp, Homo sapiens
ccctctggagtacaa

SEQ ID NO: 1360341 - DNA, 15 bp, Homo sapiens
cccctctggagtaca

SEQ ID NO: 1360342 - DNA, 15 bp, Homo sapiens
ccccctctggagtac

SEQ ID NO: 1360343 - DNA, 15 bp, Homo sapiens
tccccctctggagta

SEQ ID NO: 1360344 - DNA, 15 bp, Homo sapiens
ttccccctctggagt

SEQ ID NO: 1360345 - DNA, 15 bp, Homo sapiens
cttccccctctggag

SEQ ID NO: 1360346 - DNA, 15 bp, Homo sapiens
acttccccctctgga

SEQ ID NO: 1360347 - DNA, 15 bp, Homo sapiens
aacttccccctctgg

SEQ ID NO: 1360348 - DNA, 15 bp, Homo sapiens
caacttccccctctg

SEQ ID NO: 1360349 - DNA, 15 bp, Homo sapiens
ccaacttccccctct

SEQ ID NO: 1360350 - DNA, 15 bp, Homo sapiens
tccaacttccccctc

SEQ ID NO: 1360351 - DNA, 15 bp, Homo sapiens
ctccaacttccccct

SEQ ID NO: 1360352 - DNA, 15 bp, Homo sapiens
actccaacttccccc

SEQ ID NO: 1360353 - DNA, 15 bp, Homo sapiens
cactccaacttcccc

SEQ ID NO: 1360354 - DNA, 15 bp, Homo sapiens
tcactccaacttccc

SEQ ID NO: 1360355 - DNA, 15 bp, Homo sapiens
ctcactccaacttcc

SEQ ID NO: 1360356 - DNA, 15 bp, Homo sapiens
gctcactccaacttc

SEQ ID NO: 1360357 - DNA, 15 bp, Homo sapiens
ggctcactccaactt

SEQ ID NO: 1360358 - DNA, 15 bp, Homo sapiens
tggctcactccaact

SEQ ID NO: 1360359 - DNA, 15 bp, Homo sapiens
ttggctcactccaac

SEQ ID NO: 1360360 - DNA, 15 bp, Homo sapiens
cttggctcactccaa

SEQ ID NO: 1360361 - DNA, 15 bp, Homo sapiens
tcttggctcactcca

SEQ ID NO: 1360362 - DNA, 15 bp, Homo sapiens
atcttggctcactcc

SEQ ID NO: 1360363 - DNA, 15 bp, Homo sapiens
gatcttggctcactc

SEQ ID NO: 1360364 - DNA, 15 bp, Homo sapiens
ggtgatcttggctca

SEQ ID NO: 1360365 - DNA, 15 bp, Homo sapiens
aggtgatcttggctc

SEQ ID NO: 1360366 - DNA, 15 bp, Homo sapiens
gaggtgatcttggct

SEQ ID NO: 1360367 - DNA, 15 bp, Homo sapiens
tgaggtgatcttggc

SEQ ID NO: 1360368 - DNA, 15 bp, Homo sapiens
gtgaggtgatcttgg

SEQ ID NO: 1360369 - DNA, 15 bp, Homo sapiens
agtgaggtgatcttg

SEQ ID NO: 1360370 - DNA, 15 bp, Homo sapiens
gagtgaggtgatctt

SEQ ID NO: 1360371 - DNA, 15 bp, Homo sapiens
ggagtgaggtgatct

SEQ ID NO: 1360372 - DNA, 15 bp, Homo sapiens
tggagtgaggtgatc

SEQ ID NO: 1360373 - DNA, 15 bp, Homo sapiens
gtggagtgaggtgat

SEQ ID NO: 1360374 - DNA, 15 bp, Homo sapiens
agtggagtgaggtga

SEQ ID NO: 1360375 - DNA, 15 bp, Homo sapiens
gagtggagtgaggtg

SEQ ID NO: 1360376 - DNA, 15 bp, Homo sapiens
ggagtggagtgaggt

SEQ ID NO: 1360377 - DNA, 15 bp, Homo sapiens
tggagtggagtgagg

SEQ ID NO: 1360378 - DNA, 15 bp, Homo sapiens
ctggagtggagtgag

SEQ ID NO: 1360379 - DNA, 15 bp, Homo sapiens
gctggagtggagtga

SEQ ID NO: 1360380 - DNA, 15 bp, Homo sapiens
ggctggagtggagtg

SEQ ID NO: 1360381 - DNA, 15 bp, Homo sapiens
aggctggagtggagt

SEQ ID NO: 1360382 - DNA, 15 bp, Homo sapiens
caggctggagtggag

SEQ ID NO: 1360383 - DNA, 15 bp, Homo sapiens
ccaggctggagtgga

SEQ ID NO: 1360384 - DNA, 15 bp, Homo sapiens
cccaggctggagtgg

SEQ ID NO: 1360385 - DNA, 15 bp, Homo sapiens
gactctgttgcccag

SEQ ID NO: 1360386 - DNA, 15 bp, Homo sapiens
tgactctgttgccca

SEQ ID NO: 1360387 - DNA, 15 bp, Homo sapiens
ctgactctgttgccc

SEQ ID NO: 1360388 - DNA, 15 bp, Homo sapiens
tctgactctgttgcc

SEQ ID NO: 1360389 - DNA, 15 bp, Homo sapiens
ttctgactctgttgc

SEQ ID NO: 1360390 - DNA, 15 bp, Homo sapiens
gttctgactctgttg

SEQ ID NO: 1360391 - DNA, 15 bp, Homo sapiens
ggttctgactctgtt

SEQ ID NO: 1360392 - DNA, 15 bp, Homo sapiens
aggttctgactctgt

SEQ ID NO: 1360393 - DNA, 15 bp, Homo sapiens
caggttctgactctg

SEQ ID NO: 1360394 - DNA, 15 bp, Homo sapiens
acaggttctgactct

SEQ ID NO: 1360395 - DNA, 15 bp, Homo sapiens
gacaggttctgactc

SEQ ID NO: 1360396 - DNA, 15 bp, Homo sapiens
agacaggttctgact

SEQ ID NO: 1360397 - DNA, 15 bp, Homo sapiens
gagacaggttctgac

SEQ ID NO: 1360398 - DNA, 15 bp, Homo sapiens
tgagacaggttctga

SEQ ID NO: 1360399 - DNA, 15 bp, Homo sapiens
ttgagacaggttctg

SEQ ID NO: 1360400 - DNA, 15 bp, Homo sapiens
attgagacaggttct

SEQ ID NO: 1360401 - DNA, 15 bp, Homo sapiens
tattgagacaggttc

SEQ ID NO: 1360402 - DNA, 15 bp, Homo sapiens
ctattgagacaggtt

SEQ ID NO: 1360403 - DNA, 15 bp, Homo sapiens
tctattgagacaggt

SEQ ID NO: 1360404 - DNA, 15 bp, Homo sapiens
ttctattgagacagg

SEQ ID NO: 1360405 - DNA, 15 bp, Homo sapiens
tttctattgagacag

SEQ ID NO: 1360406 - DNA, 15 bp, Homo sapiens
ttttctattgagaca

SEQ ID NO: 1360407 - DNA, 15 bp, Homo sapiens
tttttctattgagac

SEQ ID NO: 1360408 - DNA, 15 bp, Homo sapiens
ttttttctattgaga

SEQ ID NO: 1360409 - DNA, 15 bp, Homo sapiens
tttttttctattgag

SEQ ID NO: 1360410 - DNA, 15 bp, Homo sapiens
ttttttttctattga

SEQ ID NO: 1360411 - DNA, 15 bp, Homo sapiens
tttttttttctattg

SEQ ID NO: 1360412 - DNA, 15 bp, Homo sapiens
ttttttttttctatt

SEQ ID NO: 1360413 - DNA, 15 bp, Homo sapiens
tttttttttttctat

SEQ ID NO: 1360414 - DNA, 15 bp, Homo sapiens
ttttttttttttcta

SEQ ID NO: 1360415 - DNA, 15 bp, Homo sapiens
tctgttttttttttt

SEQ ID NO: 1360416 - DNA, 15 bp, Homo sapiens
atctgtttttttttt

SEQ ID NO: 1360417 - DNA, 15 bp, Homo sapiens
catctgttttttttt

SEQ ID NO: 1360418 - DNA, 15 bp, Homo sapiens
tcatctgtttttttt

SEQ ID NO: 1360419 - DNA, 15 bp, Homo sapiens
ctcatctgttttttt

SEQ ID NO: 1360420 - DNA, 15 bp, Homo sapiens
tctcatctgtttttt

SEQ ID NO: 1360421 - DNA, 15 bp, Homo sapiens
ttctcatctgttttt

SEQ ID NO: 1360422 - DNA, 15 bp, Homo sapiens
attctcatctgtttt

SEQ ID NO: 1360423 - DNA, 15 bp, Homo sapiens
tattctcatctgttt

SEQ ID NO: 1360424 - DNA, 15 bp, Homo sapiens
atattctcatctgtt

SEQ ID NO: 1360425 - DNA, 15 bp, Homo sapiens
gatattctcatctgt

SEQ ID NO: 1360426 - DNA, 15 bp, Homo sapiens
tgatattctcatctg

SEQ ID NO: 1360427 - DNA, 15 bp, Homo sapiens
ttgatattctcatct

SEQ ID NO: 1360428 - DNA, 15 bp, Homo sapiens
tttgatattctcatc

SEQ ID NO: 1360429 - DNA, 15 bp, Homo sapiens
gtttgatattctcat

SEQ ID NO: 1360430 - DNA, 15 bp, Homo sapiens
agtttgatattctca

SEQ ID NO: 1360431 - DNA, 15 bp, Homo sapiens
gagtttgatattctc

SEQ ID NO: 1360432 - DNA, 15 bp, Homo sapiens
tgagtttgatattct

SEQ ID NO: 1360433 - DNA, 15 bp, Homo sapiens
ctgagtttgatattc

SEQ ID NO: 1360434 - DNA, 15 bp, Homo sapiens
cctgagtttgatatt

SEQ ID NO: 1360435 - DNA, 15 bp, Homo sapiens
gcctgagtttgatat

SEQ ID NO: 1360436 - DNA, 15 bp, Homo sapiens
tgcctgagtttgata

SEQ ID NO: 1360437 - DNA, 15 bp, Homo sapiens
atgcctgagtttgat

SEQ ID NO: 1360438 - DNA, 15 bp, Homo sapiens
aatgcctgagtttga

SEQ ID NO: 1360439 - DNA, 15 bp, Homo sapiens
caatgcctgagtttg

SEQ ID NO: 1360440 - DNA, 15 bp, Homo sapiens
tcaatgcctgagttt

SEQ ID NO: 1360441 - DNA, 15 bp, Homo sapiens
atcaatgcctgagtt

SEQ ID NO: 1360442 - DNA, 15 bp, Homo sapiens
tatcaatgcctgagt

SEQ ID NO: 1360443 - DNA, 15 bp, Homo sapiens
gtatcaatgcctgag

SEQ ID NO: 1360444 - DNA, 15 bp, Homo sapiens
agtatcaatgcctga

SEQ ID NO: 1360445 - DNA, 15 bp, Homo sapiens
cagtatcaatgcctg

SEQ ID NO: 1360446 - DNA, 15 bp, Homo sapiens
tcagtatcaatgcct

SEQ ID NO: 1360447 - DNA, 15 bp, Homo sapiens
ctcagtatcaatgcc

SEQ ID NO: 1360448 - DNA, 15 bp, Homo sapiens
actcagtatcaatgc

SEQ ID NO: 1360449 - DNA, 15 bp, Homo sapiens
cactcagtatcaatg

SEQ ID NO: 1360450 - DNA, 15 bp, Homo sapiens
gcactcagtatcaat

SEQ ID NO: 1360451 - DNA, 15 bp, Homo sapiens
tgcactcagtatcaa

SEQ ID NO: 1360452 - DNA, 15 bp, Homo sapiens
ctgcactcagtatca

SEQ ID NO: 1360453 - DNA, 15 bp, Homo sapiens
gctgcactcagtatc

SEQ ID NO: 1360454 - DNA, 15 bp, Homo sapiens
tgctgcactcagtat

SEQ ID NO: 1360455 - DNA, 15 bp, Homo sapiens
ctgctgcactcagta

SEQ ID NO: 1360456 - DNA, 15 bp, Homo sapiens
cctgctgcactcagt

SEQ ID NO: 1360457 - DNA, 15 bp, Homo sapiens
gcctgctgcactcag

SEQ ID NO: 1360458 - DNA, 15 bp, Homo sapiens
agcctgctgcactca

SEQ ID NO: 1360459 - DNA, 15 bp, Homo sapiens
cagcctgctgcactc

SEQ ID NO: 1360460 - DNA, 15 bp, Homo sapiens
ccagcctgctgcact

SEQ ID NO: 1360461 - DNA, 15 bp, Homo sapiens
cccagcctgctgcac

SEQ ID NO: 1360462 - DNA, 15 bp, Homo sapiens
acccagcctgctgca

SEQ ID NO: 1360463 - DNA, 15 bp, Homo sapiens
cacccagcctgctgc

SEQ ID NO: 1360464 - DNA, 15 bp, Homo sapiens
ccacccagcctgctg

SEQ ID NO: 1360465 - DNA, 15 bp, Homo sapiens
cccacccagcctgct

SEQ ID NO: 1360466 - DNA, 15 bp, Homo sapiens
ccccacccagcctgc

SEQ ID NO: 1360467 - DNA, 15 bp, Homo sapiens
tccccacccagcctg

SEQ ID NO: 1360468 - DNA, 15 bp, Homo sapiens
gtccccacccagcct

SEQ ID NO: 1360469 - DNA, 15 bp, Homo sapiens
agtccccacccagcc

SEQ ID NO: 1360470 - DNA, 15 bp, Homo sapiens
acagtccccacccag

SEQ ID NO: 1360471 - DNA, 15 bp, Homo sapiens
cacagtccccaccca

SEQ ID NO: 1360472 - DNA, 15 bp, Homo sapiens
ccacagtccccaccc

SEQ ID NO: 1360473 - DNA, 15 bp, Homo sapiens
accacagtccccacc

SEQ ID NO: 1360474 - DNA, 15 bp, Homo sapiens
aaccacagtccccac

SEQ ID NO: 1360475 - DNA, 15 bp, Homo sapiens
taaccacagtcccca

SEQ ID NO: 1360476 - DNA, 15 bp, Homo sapiens
ctaaccacagtcccc

SEQ ID NO: 1360477 - DNA, 15 bp, Homo sapiens
gctaaccacagtccc

SEQ ID NO: 1360478 - DNA, 15 bp, Homo sapiens
agctaaccacagtcc

SEQ ID NO: 1360479 - DNA, 15 bp, Homo sapiens
tagctaaccacagtc

SEQ ID NO: 1360480 - DNA, 15 bp, Homo sapiens
ctagctaaccacagt

SEQ ID NO: 1360481 - DNA, 15 bp, Homo sapiens
tctagctaaccacag

SEQ ID NO: 1360482 - DNA, 15 bp, Homo sapiens
ctctagctaaccaca

SEQ ID NO: 1360483 - DNA, 15 bp, Homo sapiens
tctctagctaaccac

SEQ ID NO: 1360484 - DNA, 15 bp, Homo sapiens
ttctctagctaacca

SEQ ID NO: 1360485 - DNA, 15 bp, Homo sapiens
gttctctagctaacc

SEQ ID NO: 1360486 - DNA, 15 bp, Homo sapiens
ggttctctagctaac

SEQ ID NO: 1360487 - DNA, 15 bp, Homo sapiens
gggttctctagctaa

SEQ ID NO: 1360488 - DNA, 15 bp, Homo sapiens
tgggttctctagcta

SEQ ID NO: 1360489 - DNA, 15 bp, Homo sapiens
ttgggttctctagct

SEQ ID NO: 1360490 - DNA, 15 bp, Homo sapiens
tttgggttctctagc

SEQ ID NO: 1360491 - DNA, 15 bp, Homo sapiens
gtttgggttctctag

SEQ ID NO: 1360492 - DNA, 15 bp, Homo sapiens
tgtttgggttctcta

SEQ ID NO: 1360493 - DNA, 15 bp, Homo sapiens
ctgtttgggttctct

SEQ ID NO: 1360494 - DNA, 15 bp, Homo sapiens
gctgtttgggttctc

SEQ ID NO: 1360495 - DNA, 15 bp, Homo sapiens
agctgtttgggttct

SEQ ID NO: 1360496 - DNA, 15 bp, Homo sapiens
tagctgtttgggttc

SEQ ID NO: 1360497 - DNA, 15 bp, Homo sapiens
gtagctgtttgggtt

SEQ ID NO: 1360498 - DNA, 15 bp, Homo sapiens
ggtagctgtttgggt

SEQ ID NO: 1360499 - DNA, 15 bp, Homo sapiens
gggtagctgtttggg

SEQ ID NO: 1360500 - DNA, 15 bp, Homo sapiens
tgggtagctgtttgg

SEQ ID NO: 1360501 - DNA, 15 bp, Homo sapiens
ctgggtagctgtttg

SEQ ID NO: 1360502 - DNA, 15 bp, Homo sapiens
gctgggtagctgttt

SEQ ID NO: 1360503 - DNA, 15 bp, Homo sapiens
ggctgggtagctgtt

SEQ ID NO: 1360504 - DNA, 15 bp, Homo sapiens
tggctgggtagctgt

SEQ ID NO: 1360505 - DNA, 15 bp, Homo sapiens
atggctgggtagctg

SEQ ID NO: 1360506 - DNA, 15 bp, Homo sapiens
aatggctgggtagct

SEQ ID NO: 1360507 - DNA, 15 bp, Homo sapiens
caatggctgggtagc

SEQ ID NO: 1360508 - DNA, 15 bp, Homo sapiens
tcaatggctgggtag

SEQ ID NO: 1360509 - DNA, 15 bp, Homo sapiens
gtcaatggctgggta

SEQ ID NO: 1360510 - DNA, 15 bp, Homo sapiens
agtcaatggctgggt

SEQ ID NO: 1360511 - DNA, 15 bp, Homo sapiens
cagtcaatggctggg

SEQ ID NO: 1360512 - DNA, 15 bp, Homo sapiens
ccagtcaatggctgg

SEQ ID NO: 1360513 - DNA, 15 bp, Homo sapiens
accagtcaatggctg

SEQ ID NO: 1360514 - DNA, 15 bp, Homo sapiens
caccagtcaatggct

SEQ ID NO: 1360515 - DNA, 15 bp, Homo sapiens
gcaccagtcaatggc

SEQ ID NO: 1360516 - DNA, 15 bp, Homo sapiens
tgcaccagtcaatgg

SEQ ID NO: 1360517 - DNA, 15 bp, Homo sapiens
atgcaccagtcaatg

SEQ ID NO: 1360518 - DNA, 15 bp, Homo sapiens
tatgcaccagtcaat

SEQ ID NO: 1360519 - DNA, 15 bp, Homo sapiens
atatgcaccagtcaa

SEQ ID NO: 1360520 - DNA, 15 bp, Homo sapiens
catatgcaccagtca

SEQ ID NO: 1360521 - DNA, 15 bp, Homo sapiens
ccatatgcaccagtc

SEQ ID NO: 1360522 - DNA, 15 bp, Homo sapiens
tccatatgcaccagt

SEQ ID NO: 1360523 - DNA, 15 bp, Homo sapiens
ctccatatgcaccag

SEQ ID NO: 1360524 - DNA, 15 bp, Homo sapiens
cctccatatgcacca

SEQ ID NO: 1360525 - DNA, 15 bp, Homo sapiens
acctccatatgcacc

SEQ ID NO: 1360526 - DNA, 15 bp, Homo sapiens
aacctccatatgcac

SEQ ID NO: 1360527 - DNA, 15 bp, Homo sapiens
aaacctccatatgca

SEQ ID NO: 1360528 - DNA, 15 bp, Homo sapiens
caaacctccatatgc

SEQ ID NO: 1360529 - DNA, 15 bp, Homo sapiens
tcaaacctccatatg

SEQ ID NO: 1360530 - DNA, 15 bp, Homo sapiens
ctcaaacctccatat

SEQ ID NO: 1360531 - DNA, 15 bp, Homo sapiens
tctcaaacctccata

SEQ ID NO: 1360532 - DNA, 15 bp, Homo sapiens
ttctcaaacctccat

SEQ ID NO: 1360533 - DNA, 15 bp, Homo sapiens
attctcaaacctcca

SEQ ID NO: 1360534 - DNA, 15 bp, Homo sapiens
tattctcaaacctcc

SEQ ID NO: 1360535 - DNA, 15 bp, Homo sapiens
atattctcaaacctc

SEQ ID NO: 1360536 - DNA, 15 bp, Homo sapiens
catattctcaaacct

SEQ ID NO: 1360537 - DNA, 15 bp, Homo sapiens
tcatattctcaaacc

SEQ ID NO: 1360538 - DNA, 15 bp, Homo sapiens
ttcatattctcaaac

SEQ ID NO: 1360539 - DNA, 15 bp, Homo sapiens
tttcatattctcaaa

SEQ ID NO: 1360540 - DNA, 15 bp, Homo sapiens
gtttcatattctcaa

SEQ ID NO: 1360541 - DNA, 15 bp, Homo sapiens
tgtttcatattctca

SEQ ID NO: 1360542 - DNA, 15 bp, Homo sapiens
ctgtttcatattctc

SEQ ID NO: 1360543 - DNA, 15 bp, Homo sapiens
tctgtttcatattct

SEQ ID NO: 1360544 - DNA, 15 bp, Homo sapiens
ctctgtttcatattc

SEQ ID NO: 1360545 - DNA, 15 bp, Homo sapiens
cctctgtttcatatt

SEQ ID NO: 1360546 - DNA, 15 bp, Homo sapiens
tcctctgtttcatat

SEQ ID NO: 1360547 - DNA, 15 bp, Homo sapiens
gtcctctgtttcata

SEQ ID NO: 1360548 - DNA, 15 bp, Homo sapiens
tgtcctctgtttcat

SEQ ID NO: 1360549 - DNA, 15 bp, Homo sapiens
atgtcctctgtttca

SEQ ID NO: 1360550 - DNA, 15 bp, Homo sapiens
aatgtcctctgtttc

SEQ ID NO: 1360551 - DNA, 15 bp, Homo sapiens
gaatgtcctctgttt

SEQ ID NO: 1360552 - DNA, 15 bp, Homo sapiens
tgaatgtcctctgtt

SEQ ID NO: 1360553 - DNA, 15 bp, Homo sapiens
ttgaatgtcctctgt

SEQ ID NO: 1360554 - DNA, 15 bp, Homo sapiens
cttgaatgtcctctg

SEQ ID NO: 1360555 - DNA, 15 bp, Homo sapiens
acttgaatgtcctct

SEQ ID NO: 1360556 - DNA, 15 bp, Homo sapiens
tacttgaatgtcctc

SEQ ID NO: 1360557 - DNA, 15 bp, Homo sapiens
ttacttgaatgtcct

SEQ ID NO: 1360558 - DNA, 15 bp, Homo sapiens
attacttgaatgtcc

SEQ ID NO: 1360559 - DNA, 15 bp, Homo sapiens
aattacttgaatgtc

SEQ ID NO: 1360560 - DNA, 15 bp, Homo sapiens
caattacttgaatgt

SEQ ID NO: 1360561 - DNA, 15 bp, Homo sapiens
tcaattacttgaatg

SEQ ID NO: 1360562 - DNA, 15 bp, Homo sapiens
ctcaattacttgaat

SEQ ID NO: 1360563 - DNA, 15 bp, Homo sapiens
actcaattacttgaa

SEQ ID NO: 1360564 - DNA, 15 bp, Homo sapiens
aactcaattacttga

SEQ ID NO: 1360565 - DNA, 15 bp, Homo sapiens
caactcaattacttg

SEQ ID NO: 1360566 - DNA, 15 bp, Homo sapiens
ccaactcaattactt

SEQ ID NO: 1360567 - DNA, 15 bp, Homo sapiens
accaactcaattact

SEQ ID NO: 1360568 - DNA, 15 bp, Homo sapiens
aaccaactcaattac

SEQ ID NO: 1360569 - DNA, 15 bp, Homo sapiens
aaaccaactcaatta

SEQ ID NO: 1360570 - DNA, 15 bp, Homo sapiens
aaaaccaactcaatt

SEQ ID NO: 1360571 - DNA, 15 bp, Homo sapiens
aaaaaccaactcaat

SEQ ID NO: 1360572 - DNA, 15 bp, Homo sapiens
aaaaaaccaactcaa

SEQ ID NO: 1360573 - DNA, 15 bp, Homo sapiens
caaaaaaccaactca

SEQ ID NO: 1360574 - DNA, 15 bp, Homo sapiens
ccaaaaaaccaactc

SEQ ID NO: 1360575 - DNA, 15 bp, Homo sapiens
tccaaaaaaccaact

SEQ ID NO: 1360576 - DNA, 15 bp, Homo sapiens
atccaaaaaaccaac

SEQ ID NO: 1360577 - DNA, 15 bp, Homo sapiens
aatccaaaaaaccaa

SEQ ID NO: 1360578 - DNA, 15 bp, Homo sapiens
aaatccaaaaaacca

SEQ ID NO: 1360579 - DNA, 15 bp, Homo sapiens
aaaatccaaaaaacc

SEQ ID NO: 1360580 - DNA, 15 bp, Homo sapiens
caaaatccaaaaaac

SEQ ID NO: 1360581 - DNA, 15 bp, Homo sapiens
acaaaatccaaaaaa

SEQ ID NO: 1360582 - DNA, 15 bp, Homo sapiens
aacaaaatccaaaaa

SEQ ID NO: 1360583 - DNA, 15 bp, Homo sapiens
aaacaaaatccaaaa

SEQ ID NO: 1360584 - DNA, 15 bp, Homo sapiens
aaaacaaaatccaaa

SEQ ID NO: 1360585 - DNA, 15 bp, Homo sapiens
caaaacaaaatccaa

SEQ ID NO: 1360586 - DNA, 15 bp, Homo sapiens
acaaaacaaaatcca

SEQ ID NO: 1360587 - DNA, 15 bp, Homo sapiens
aacaaaacaaaatcc

SEQ ID NO: 1360588 - DNA, 15 bp, Homo sapiens
aaacaaaacaaaatc

SEQ ID NO: 1360589 - DNA, 15 bp, Homo sapiens
taaacaaaacaaaat

SEQ ID NO: 1360590 - DNA, 15 bp, Homo sapiens
cataaacaaaacaaa

SEQ ID NO: 1360591 - DNA, 15 bp, Homo sapiens
acataaacaaaacaa

SEQ ID NO: 1360592 - DNA, 15 bp, Homo sapiens
aacataaacaaaaca

SEQ ID NO: 1360593 - DNA, 15 bp, Homo sapiens
aaacataaacaaaac

SEQ ID NO: 1360594 - DNA, 15 bp, Homo sapiens
aaaacataaacaaaa

SEQ ID NO: 1360595 - DNA, 15 bp, Homo sapiens
aaaaacataaacaaa

SEQ ID NO: 1360596 - DNA, 15 bp, Homo sapiens
taaaaacataaacaa

SEQ ID NO: 1360597 - DNA, 15 bp, Homo sapiens
ctaaaaacataaaca

SEQ ID NO: 1360598 - DNA, 15 bp, Homo sapiens
actaaaaacataaac

SEQ ID NO: 1360599 - DNA, 15 bp, Homo sapiens
aactaaaaacataaa

SEQ ID NO: 1360600 - DNA, 15 bp, Homo sapiens
aaactaaaaacataa

SEQ ID NO: 1360601 - DNA, 15 bp, Homo sapiens
aaaactaaaaacata

SEQ ID NO: 1360602 - DNA, 15 bp, Homo sapiens
aaaaactaaaaacat

SEQ ID NO: 1360603 - DNA, 15 bp, Homo sapiens
aaaaaactaaaaaca

SEQ ID NO: 1360604 - DNA, 15 bp, Homo sapiens
aaaaaaactaaaaac

SEQ ID NO: 1360605 - DNA, 15 bp, Homo sapiens
caaaaaaactaaaaa

SEQ ID NO: 1360606 - DNA, 15 bp, Homo sapiens
acaaaaaaactaaaa

SEQ ID NO: 1360607 - DNA, 15 bp, Homo sapiens
aacaaaaaaactaaa

SEQ ID NO: 1360608 - DNA, 15 bp, Homo sapiens
aaacaaaaaaactaa

SEQ ID NO: 1360609 - DNA, 15 bp, Homo sapiens
aaaacaaaaaaacta

SEQ ID NO: 1360610 - DNA, 15 bp, Homo sapiens
aaaaacaaaaaaact

SEQ ID NO: 1360611 - DNA, 15 bp, Homo sapiens
caaaaacaaaaaaac

SEQ ID NO: 1360612 - DNA, 15 bp, Homo sapiens
gtcaaaacaaaaaca

SEQ ID NO: 1360613 - DNA, 15 bp, Homo sapiens
tgtcaaaacaaaaac

SEQ ID NO: 1360614 - DNA, 15 bp, Homo sapiens
ctgtcaaaacaaaaa

SEQ ID NO: 1360615 - DNA, 15 bp, Homo sapiens
tctgtcaaaacaaaa

SEQ ID NO: 1360616 - DNA, 15 bp, Homo sapiens
ctctgtcaaaacaaa

SEQ ID NO: 1360617 - DNA, 15 bp, Homo sapiens
actctgtcaaaacaa

SEQ ID NO: 1360618 - DNA, 15 bp, Homo sapiens
aactctgtcaaaaca

SEQ ID NO: 1360619 - DNA, 15 bp, Homo sapiens
aaactctgtcaaaac

SEQ ID NO: 1360620 - DNA, 15 bp, Homo sapiens
gaaactctgtcaaaa

SEQ ID NO: 1360621 - DNA, 15 bp, Homo sapiens
cgaaactctgtcaaa

SEQ ID NO: 1360622 - DNA, 15 bp, Homo sapiens
gcgaaactctgtcaa

SEQ ID NO: 1360623 - DNA, 15 bp, Homo sapiens
agcgaaactctgtca

SEQ ID NO: 1360624 - DNA, 15 bp, Homo sapiens
gagcgaaactctgtc

SEQ ID NO: 1360625 - DNA, 15 bp, Homo sapiens
agagcgaaactctgt

SEQ ID NO: 1360626 - DNA, 15 bp, Homo sapiens
aagagcgaaactctg

SEQ ID NO: 1360627 - DNA, 15 bp, Homo sapiens
caagagcgaaactct

SEQ ID NO: 1360628 - DNA, 15 bp, Homo sapiens
ggtaccactgcactc

SEQ ID NO: 1360629 - DNA, 15 bp, Homo sapiens
tggtaccactgcact

SEQ ID NO: 1360630 - DNA, 15 bp, Homo sapiens
atggtaccactgcac

SEQ ID NO: 1360631 - DNA, 15 bp, Homo sapiens
gatggtaccactgca

SEQ ID NO: 1360632 - DNA, 15 bp, Homo sapiens
agatggtaccactgc

SEQ ID NO: 1360633 - DNA, 15 bp, Homo sapiens
gagatggtaccactg

SEQ ID NO: 1360634 - DNA, 15 bp, Homo sapiens
cgagatggtaccact

SEQ ID NO: 1360635 - DNA, 15 bp, Homo sapiens
ccgagatggtaccac

SEQ ID NO: 1360636 - DNA, 15 bp, Homo sapiens
gccgagatggtacca

SEQ ID NO: 1360637 - DNA, 15 bp, Homo sapiens
agccgagatggtacc

SEQ ID NO: 1360638 - DNA, 15 bp, Homo sapiens
gagccgagatggtac

SEQ ID NO: 1360639 - DNA, 15 bp, Homo sapiens
tgagccgagatggta

SEQ ID NO: 1360640 - DNA, 15 bp, Homo sapiens
ccttgaacccgggag

SEQ ID NO: 1360641 - DNA, 15 bp, Homo sapiens
cccttgaacccggga

SEQ ID NO: 1360642 - DNA, 15 bp, Homo sapiens
tcccttgaacccggg

SEQ ID NO: 1360643 - DNA, 15 bp, Homo sapiens
ctcccttgaacccgg

SEQ ID NO: 1360644 - DNA, 15 bp, Homo sapiens
tctcccttgaacccg

SEQ ID NO: 1360645 - DNA, 15 bp, Homo sapiens
atctcccttgaaccc

SEQ ID NO: 1360646 - DNA, 15 bp, Homo sapiens
gatctcccttgaacc

SEQ ID NO: 1360647 - DNA, 15 bp, Homo sapiens
ggatctcccttgaac

SEQ ID NO: 1360648 - DNA, 15 bp, Homo sapiens
aggatctcccttgaa

SEQ ID NO: 1360649 - DNA, 15 bp, Homo sapiens
gaggatctcccttga

SEQ ID NO: 1360650 - DNA, 15 bp, Homo sapiens
ggaggatctcccttg

SEQ ID NO: 1360651 - DNA, 15 bp, Homo sapiens
aggaggatctccctt

SEQ ID NO: 1360652 - DNA, 15 bp, Homo sapiens
caggaggatctccct

SEQ ID NO: 1360653 - DNA, 15 bp, Homo sapiens
gcaggaggatctccc

SEQ ID NO: 1360654 - DNA, 15 bp, Homo sapiens
ggcaggaggatctcc

SEQ ID NO: 1360655 - DNA, 15 bp, Homo sapiens
ctcccagcttctcag

SEQ ID NO: 1360656 - DNA, 15 bp, Homo sapiens
cctcccagcttctca

SEQ ID NO: 1360657 - DNA, 15 bp, Homo sapiens
gcctcccagcttctc

SEQ ID NO: 1360658 - DNA, 15 bp, Homo sapiens
agcctcccagcttct

SEQ ID NO: 1360659 - DNA, 15 bp, Homo sapiens
cagcctcccagcttc

SEQ ID NO: 1360660 - DNA, 15 bp, Homo sapiens
tcagcctcccagctt

SEQ ID NO: 1360661 - DNA, 15 bp, Homo sapiens
ctcagcctcccagct

SEQ ID NO: 1360662 - DNA, 15 bp, Homo sapiens
tctcagcctcccagc

SEQ ID NO: 1360663 - DNA, 15 bp, Homo sapiens
ttctcagcctcccag

SEQ ID NO: 1360664 - DNA, 15 bp, Homo sapiens
cttctcagcctccca

SEQ ID NO: 1360665 - DNA, 15 bp, Homo sapiens
gcttctcagcctccc

SEQ ID NO: 1360666 - DNA, 15 bp, Homo sapiens
tgcttctcagcctcc

SEQ ID NO: 1360667 - DNA, 15 bp, Homo sapiens
gtgcttctcagcctc

SEQ ID NO: 1360668 - DNA, 15 bp, Homo sapiens
ggtgcttctcagcct

SEQ ID NO: 1360669 - DNA, 15 bp, Homo sapiens
aggtgcttctcagcc

SEQ ID NO: 1360670 - DNA, 15 bp, Homo sapiens
aaggtgcttctcagc

SEQ ID NO: 1360671 - DNA, 15 bp, Homo sapiens
taaggtgcttctcag

SEQ ID NO: 1360672 - DNA, 15 bp, Homo sapiens
gtaaggtgcttctca

SEQ ID NO: 1360673 - DNA, 15 bp, Homo sapiens
tgtaaggtgcttctc

SEQ ID NO: 1360674 - DNA, 15 bp, Homo sapiens
ctgtaaggtgcttct

SEQ ID NO: 1360675 - DNA, 15 bp, Homo sapiens
actgtaaggtgcttc

SEQ ID NO: 1360676 - DNA, 15 bp, Homo sapiens
aactgtaaggtgctt

SEQ ID NO: 1360677 - DNA, 15 bp, Homo sapiens
caactgtaaggtgct

SEQ ID NO: 1360678 - DNA, 15 bp, Homo sapiens
gcaactgtaaggtgc

SEQ ID NO: 1360679 - DNA, 15 bp, Homo sapiens
ggcaactgtaaggtg

SEQ ID NO: 1360680 - DNA, 15 bp, Homo sapiens
gggcaactgtaaggt

SEQ ID NO: 1360681 - DNA, 15 bp, Homo sapiens
tgggcaactgtaagg

SEQ ID NO: 1360682 - DNA, 15 bp, Homo sapiens
gtgggcaactgtaag

SEQ ID NO: 1360683 - DNA, 15 bp, Homo sapiens
ggtgggcaactgtaa

SEQ ID NO: 1360684 - DNA, 15 bp, Homo sapiens
tggtgggcaactgta

SEQ ID NO: 1360685 - DNA, 15 bp, Homo sapiens
gtggtgggcaactgt

SEQ ID NO: 1360686 - DNA, 15 bp, Homo sapiens
ggtggtgggcaactg

SEQ ID NO: 1360687 - DNA, 15 bp, Homo sapiens
tggtggtgggcaact

SEQ ID NO: 1360688 - DNA, 15 bp, Homo sapiens
ctggtggtgggcaac

SEQ ID NO: 1360689 - DNA, 15 bp, Homo sapiens
cctggtggtgggcaa

SEQ ID NO: 1360690 - DNA, 15 bp, Homo sapiens
gcctggtggtgggca

SEQ ID NO: 1360691 - DNA, 15 bp, Homo sapiens
tgcctggtggtgggc

SEQ ID NO: 1360692 - DNA, 15 bp, Homo sapiens
gtgcctggtggtggg

SEQ ID NO: 1360693 - DNA, 15 bp, Homo sapiens
tgtgcctggtggtgg

SEQ ID NO: 1360694 - DNA, 15 bp, Homo sapiens
ctgtgcctggtggtg

SEQ ID NO: 1360695 - DNA, 15 bp, Homo sapiens
gctgtgcctggtggt

SEQ ID NO: 1360696 - DNA, 15 bp, Homo sapiens
agctgtgcctggtgg

SEQ ID NO: 1360697 - DNA, 15 bp, Homo sapiens
tagctgtgcctggtg

SEQ ID NO: 1360698 - DNA, 15 bp, Homo sapiens
ttagctgtgcctggt

SEQ ID NO: 1360699 - DNA, 15 bp, Homo sapiens
attagctgtgcctgg

SEQ ID NO: 1360700 - DNA, 15 bp, Homo sapiens
aattagctgtgcctg

SEQ ID NO: 1360701 - DNA, 15 bp, Homo sapiens
aaattagctgtgcct

SEQ ID NO: 1360702 - DNA, 15 bp, Homo sapiens
aaaattagctgtgcc

SEQ ID NO: 1360703 - DNA, 15 bp, Homo sapiens
aaaaattagctgtgc

SEQ ID NO: 1360704 - DNA, 15 bp, Homo sapiens
caaaaattagctgtg

SEQ ID NO: 1360705 - DNA, 15 bp, Homo sapiens
acaaaaattagctgt

SEQ ID NO: 1360706 - DNA, 15 bp, Homo sapiens
ttacaaaaattagct

SEQ ID NO: 1360707 - DNA, 15 bp, Homo sapiens
tctctactaaaatta

SEQ ID NO: 1360708 - DNA, 15 bp, Homo sapiens
gtctctactaaaatt

SEQ ID NO: 1360709 - DNA, 15 bp, Homo sapiens
cgtctctactaaaat

SEQ ID NO: 1360710 - DNA, 15 bp, Homo sapiens
gagactagcctggcc

SEQ ID NO: 1360711 - DNA, 15 bp, Homo sapiens
cgagactagcctggc

SEQ ID NO: 1360712 - DNA, 15 bp, Homo sapiens
cagaggatcacttga

SEQ ID NO: 1360713 - DNA, 15 bp, Homo sapiens
gcagaggatcacttg

SEQ ID NO: 1360714 - DNA, 15 bp, Homo sapiens
ggcagaggatcactt

SEQ ID NO: 1360715 - DNA, 15 bp, Homo sapiens
aggcagaggatcact

SEQ ID NO: 1360716 - DNA, 15 bp, Homo sapiens
gaggcagaggatcac

SEQ ID NO: 1360717 - DNA, 15 bp, Homo sapiens
tgaggcagaggatca

SEQ ID NO: 1360718 - DNA, 15 bp, Homo sapiens
ctgaggcagaggatc

SEQ ID NO: 1360719 - DNA, 15 bp, Homo sapiens
gctgaggcagaggat

SEQ ID NO: 1360720 - DNA, 15 bp, Homo sapiens
ggctgaggcagagga

SEQ ID NO: 1360721 - DNA, 15 bp, Homo sapiens
aggctgaggcagagg

SEQ ID NO: 1360722 - DNA, 15 bp, Homo sapiens
gaggctgaggcagag

SEQ ID NO: 1360723 - DNA, 15 bp, Homo sapiens
gtgggaggctgaggc

SEQ ID NO: 1360724 - DNA, 15 bp, Homo sapiens
tgtgggaggctgagg

SEQ ID NO: 1360725 - DNA, 15 bp, Homo sapiens
ctgtgggaggctgag

SEQ ID NO: 1360726 - DNA, 15 bp, Homo sapiens
actgtgggaggctga

SEQ ID NO: 1360727 - DNA, 15 bp, Homo sapiens
cactgtgggaggctg

SEQ ID NO: 1360728 - DNA, 15 bp, Homo sapiens
gcactgtgggaggct

SEQ ID NO: 1360729 - DNA, 15 bp, Homo sapiens
aggctgggcacggtg

SEQ ID NO: 1360730 - DNA, 15 bp, Homo sapiens
gaggctgggcacggt

SEQ ID NO: 1360731 - DNA, 15 bp, Homo sapiens
tgaggctgggcacgg

SEQ ID NO: 1360732 - DNA, 15 bp, Homo sapiens
ttgaggctgggcacg

SEQ ID NO: 1360733 - DNA, 15 bp, Homo sapiens
cttgaggctgggcac

SEQ ID NO: 1360734 - DNA, 15 bp, Homo sapiens
acttgaggctgggca

SEQ ID NO: 1360735 - DNA, 15 bp, Homo sapiens
gacttgaggctgggc

SEQ ID NO: 1360736 - DNA, 15 bp, Homo sapiens
tgacttgaggctggg

SEQ ID NO: 1360737 - DNA, 15 bp, Homo sapiens
gtgacttgaggctgg

SEQ ID NO: 1360738 - DNA, 15 bp, Homo sapiens
agtgacttgaggctg

SEQ ID NO: 1360739 - DNA, 15 bp, Homo sapiens
cagtgacttgaggct

SEQ ID NO: 1360740 - DNA, 15 bp, Homo sapiens
tcagtgacttgaggc

SEQ ID NO: 1360741 - DNA, 15 bp, Homo sapiens
ctcagtgacttgagg

SEQ ID NO: 1360742 - DNA, 15 bp, Homo sapiens
actcagtgacttgag

SEQ ID NO: 1360743 - DNA, 15 bp, Homo sapiens
aactcagtgacttga

SEQ ID NO: 1360744 - DNA, 15 bp, Homo sapiens
gaactcagtgacttg

SEQ ID NO: 1360745 - DNA, 15 bp, Homo sapiens
agaactcagtgactt

SEQ ID NO: 1360746 - DNA, 15 bp, Homo sapiens
gagaactcagtgact

SEQ ID NO: 1360747 - DNA, 15 bp, Homo sapiens
agagaactcagtgac

SEQ ID NO: 1360748 - DNA, 15 bp, Homo sapiens
aagagaactcagtga

SEQ ID NO: 1360749 - DNA, 15 bp, Homo sapiens
caagagaactcagtg

SEQ ID NO: 1360750 - DNA, 15 bp, Homo sapiens
acaagagaactcagt

SEQ ID NO: 1360751 - DNA, 15 bp, Homo sapiens
tacaagagaactcag

SEQ ID NO: 1360752 - DNA, 15 bp, Homo sapiens
ttacaagagaactca

SEQ ID NO: 1360753 - DNA, 15 bp, Homo sapiens
tttacaagagaactc

SEQ ID NO: 1360754 - DNA, 15 bp, Homo sapiens
ttttacaagagaact

SEQ ID NO: 1360755 - DNA, 15 bp, Homo sapiens
attttacaagagaac

SEQ ID NO: 1360756 - DNA, 15 bp, Homo sapiens
gattttacaagagaa

SEQ ID NO: 1360757 - DNA, 15 bp, Homo sapiens
agattttacaagaga

SEQ ID NO: 1360758 - DNA, 15 bp, Homo sapiens
tagattttacaagag

SEQ ID NO: 1360759 - DNA, 15 bp, Homo sapiens
gtagattttacaaga

SEQ ID NO: 1360760 - DNA, 15 bp, Homo sapiens
ggtagattttacaag

SEQ ID NO: 1360761 - DNA, 15 bp, Homo sapiens
cggtagattttacaa

SEQ ID NO: 1360762 - DNA, 15 bp, Homo sapiens
ccggtagattttaca

SEQ ID NO: 1360763 - DNA, 15 bp, Homo sapiens
accggtagattttac

SEQ ID NO: 1360764 - DNA, 15 bp, Homo sapiens
gaccggtagatttta

SEQ ID NO: 1360765 - DNA, 15 bp, Homo sapiens
tgaccggtagatttt

SEQ ID NO: 1360766 - DNA, 15 bp, Homo sapiens
ctgaccggtagattt

SEQ ID NO: 1360767 - DNA, 15 bp, Homo sapiens
tctgaccggtagatt

SEQ ID NO: 1360768 - DNA, 15 bp, Homo sapiens
ttctgaccggtagat

SEQ ID NO: 1360769 - DNA, 15 bp, Homo sapiens
tttctgaccggtaga

SEQ ID NO: 1360770 - DNA, 15 bp, Homo sapiens
ttttctgaccggtag

SEQ ID NO: 1360771 - DNA, 15 bp, Homo sapiens
tttttctgaccggta

SEQ ID NO: 1360772 - DNA, 15 bp, Homo sapiens
gtttttctgaccggt

SEQ ID NO: 1360773 - DNA, 15 bp, Homo sapiens
tgtttttctgaccgg

SEQ ID NO: 1360774 - DNA, 15 bp, Homo sapiens
atgtttttctgaccg

SEQ ID NO: 1360775 - DNA, 15 bp, Homo sapiens
aatgtttttctgacc

SEQ ID NO: 1360776 - DNA, 15 bp, Homo sapiens
taatgtttttctgac

SEQ ID NO: 1360777 - DNA, 15 bp, Homo sapiens
ataatgtttttctga

SEQ ID NO: 1360778 - DNA, 15 bp, Homo sapiens
gataatgtttttctg

SEQ ID NO: 1360779 - DNA, 15 bp, Homo sapiens
tgataatgtttttct

SEQ ID NO: 1360780 - DNA, 15 bp, Homo sapiens
ttgataatgtttttc

SEQ ID NO: 1360781 - DNA, 15 bp, Homo sapiens
cttgataatgttttt

SEQ ID NO: 1360782 - DNA, 15 bp, Homo sapiens
gcttgataatgtttt

SEQ ID NO: 1360783 - DNA, 15 bp, Homo sapiens
tgcttgataatgttt

SEQ ID NO: 1360784 - DNA, 15 bp, Homo sapiens
ttgcttgataatgtt

SEQ ID NO: 1360785 - DNA, 15 bp, Homo sapiens
attgcttgataatgt

SEQ ID NO: 1360786 - DNA, 15 bp, Homo sapiens
aattgcttgataatg

SEQ ID NO: 1360787 - DNA, 15 bp, Homo sapiens
gaattgcttgataat

SEQ ID NO: 1360788 - DNA, 15 bp, Homo sapiens
tgaattgcttgataa

SEQ ID NO: 1360789 - DNA, 15 bp, Homo sapiens
ttgaattgcttgata

SEQ ID NO: 1360790 - DNA, 15 bp, Homo sapiens
tttgaattgcttgat

SEQ ID NO: 1360791 - DNA, 15 bp, Homo sapiens
ttttgaattgcttga

SEQ ID NO: 1360792 - DNA, 15 bp, Homo sapiens
tttttgaattgcttg

SEQ ID NO: 1360793 - DNA, 15 bp, Homo sapiens
atttttgaattgctt

SEQ ID NO: 1360794 - DNA, 15 bp, Homo sapiens
catttttgaattgct

SEQ ID NO: 1360795 - DNA, 15 bp, Homo sapiens
acatttttgaattgc

SEQ ID NO: 1360796 - DNA, 15 bp, Homo sapiens
tacatttttgaattg

SEQ ID NO: 1360797 - DNA, 15 bp, Homo sapiens
atacatttttgaatt

SEQ ID NO: 1360798 - DNA, 15 bp, Homo sapiens
tatacatttttgaat

SEQ ID NO: 1360799 - DNA, 15 bp, Homo sapiens
ttatacatttttgaa

SEQ ID NO: 1360800 - DNA, 15 bp, Homo sapiens
tttatacatttttga

SEQ ID NO: 1360801 - DNA, 15 bp, Homo sapiens
ttttatacatttttg

SEQ ID NO: 1360802 - DNA, 15 bp, Homo sapiens
attttatacattttt

SEQ ID NO: 1360803 - DNA, 15 bp, Homo sapiens
cattttatacatttt

SEQ ID NO: 1360804 - DNA, 15 bp, Homo sapiens
gcattttatacattt

SEQ ID NO: 1360805 - DNA, 15 bp, Homo sapiens
tgcattttatacatt

SEQ ID NO: 1360806 - DNA, 15 bp, Homo sapiens
ctgcattttatacat

SEQ ID NO: 1360807 - DNA, 15 bp, Homo sapiens
actgcattttataca

SEQ ID NO: 1360808 - DNA, 15 bp, Homo sapiens
tactgcattttatac

SEQ ID NO: 1360809 - DNA, 15 bp, Homo sapiens
gtactgcattttata

SEQ ID NO: 1360810 - DNA, 15 bp, Homo sapiens
tgtactgcattttat

SEQ ID NO: 1360811 - DNA, 15 bp, Homo sapiens
ctgtactgcatttta

SEQ ID NO: 1360812 - DNA, 15 bp, Homo sapiens
actgtactgcatttt

SEQ ID NO: 1360813 - DNA, 15 bp, Homo sapiens
gactgtactgcattt

SEQ ID NO: 1360814 - DNA, 15 bp, Homo sapiens
ggactgtactgcatt

SEQ ID NO: 1360815 - DNA, 15 bp, Homo sapiens
tggactgtactgcat

SEQ ID NO: 1360816 - DNA, 15 bp, Homo sapiens
ttggactgtactgca

SEQ ID NO: 1360817 - DNA, 15 bp, Homo sapiens
attggactgtactgc

SEQ ID NO: 1360818 - DNA, 15 bp, Homo sapiens
gattggactgtactg

SEQ ID NO: 1360819 - DNA, 15 bp, Homo sapiens
tgattggactgtact

SEQ ID NO: 1360820 - DNA, 15 bp, Homo sapiens
ttgattggactgtac

SEQ ID NO: 1360821 - DNA, 15 bp, Homo sapiens
tttgattggactgta

SEQ ID NO: 1360822 - DNA, 15 bp, Homo sapiens
ttttgattggactgt

SEQ ID NO: 1360823 - DNA, 15 bp, Homo sapiens
gttttgattggactg

SEQ ID NO: 1360824 - DNA, 15 bp, Homo sapiens
tgttttgattggact

SEQ ID NO: 1360825 - DNA, 15 bp, Homo sapiens
atgttttgattggac

SEQ ID NO: 1360826 - DNA, 15 bp, Homo sapiens
catgttttgattgga

SEQ ID NO: 1360827 - DNA, 15 bp, Homo sapiens
acatgttttgattgg

SEQ ID NO: 1360828 - DNA, 15 bp, Homo sapiens
gacatgttttgattg

SEQ ID NO: 1360829 - DNA, 15 bp, Homo sapiens
agacatgttttgatt

SEQ ID NO: 1360830 - DNA, 15 bp, Homo sapiens
cagacatgttttgat

SEQ ID NO: 1360831 - DNA, 15 bp, Homo sapiens
gcagacatgttttga

SEQ ID NO: 1360832 - DNA, 15 bp, Homo sapiens
tgcagacatgttttg

SEQ ID NO: 1360833 - DNA, 15 bp, Homo sapiens
ctgcagacatgtttt

SEQ ID NO: 1360834 - DNA, 15 bp, Homo sapiens
cctgcagacatgttt

SEQ ID NO: 1360835 - DNA, 15 bp, Homo sapiens
ccctgcagacatgtt

SEQ ID NO: 1360836 - DNA, 15 bp, Homo sapiens
gccctgcagacatgt

SEQ ID NO: 1360837 - DNA, 15 bp, Homo sapiens
ggccctgcagacatg

SEQ ID NO: 1360838 - DNA, 15 bp, Homo sapiens
tggccctgcagacat

SEQ ID NO: 1360839 - DNA, 15 bp, Homo sapiens
ctggccctgcagaca

SEQ ID NO: 1360840 - DNA, 15 bp, Homo sapiens
cctggccctgcagac

SEQ ID NO: 1360841 - DNA, 15 bp, Homo sapiens
gcctggccctgcaga

SEQ ID NO: 1360842 - DNA, 15 bp, Homo sapiens
tgcctggccctgcag

SEQ ID NO: 1360843 - DNA, 15 bp, Homo sapiens
atgcctggccctgca

SEQ ID NO: 1360844 - DNA, 15 bp, Homo sapiens
catgcctggccctgc

SEQ ID NO: 1360845 - DNA, 15 bp, Homo sapiens
tcatgcctggccctg

SEQ ID NO: 1360846 - DNA, 15 bp, Homo sapiens
atcatgcctggccct

SEQ ID NO: 1360847 - DNA, 15 bp, Homo sapiens
catcatgcctggccc

SEQ ID NO: 1360848 - DNA, 15 bp, Homo sapiens
ccatcatgcctggcc

SEQ ID NO: 1360849 - DNA, 15 bp, Homo sapiens
gccatcatgcctggc

SEQ ID NO: 1360850 - DNA, 15 bp, Homo sapiens
agccatcatgcctgg

SEQ ID NO: 1360851 - DNA, 15 bp, Homo sapiens
gagccatcatgcctg

SEQ ID NO: 1360852 - DNA, 15 bp, Homo sapiens
tgagccatcatgcct

SEQ ID NO: 1360853 - DNA, 15 bp, Homo sapiens
atgagccatcatgcc

SEQ ID NO: 1360854 - DNA, 15 bp, Homo sapiens
catgagccatcatgc

SEQ ID NO: 1360855 - DNA, 15 bp, Homo sapiens
gcatgagccatcatg

SEQ ID NO: 1360856 - DNA, 15 bp, Homo sapiens
ggcatgagccatcat

SEQ ID NO: 1360857 - DNA, 15 bp, Homo sapiens
tgattctcccacctt

SEQ ID NO: 1360858 - DNA, 15 bp, Homo sapiens
ggactcctgggttca

SEQ ID NO: 1360859 - DNA, 15 bp, Homo sapiens
gggactcctgggttc

SEQ ID NO: 1360860 - DNA, 15 bp, Homo sapiens
tgggactcctgggtt

SEQ ID NO: 1360861 - DNA, 15 bp, Homo sapiens
ctgggactcctgggt

SEQ ID NO: 1360862 - DNA, 15 bp, Homo sapiens
gctgggactcctggg

SEQ ID NO: 1360863 - DNA, 15 bp, Homo sapiens
ggctgggactcctgg

SEQ ID NO: 1360864 - DNA, 15 bp, Homo sapiens
gggctgggactcctg

SEQ ID NO: 1360865 - DNA, 15 bp, Homo sapiens
tgggctgggactcct

SEQ ID NO: 1360866 - DNA, 15 bp, Homo sapiens
ctgggctgggactcc

SEQ ID NO: 1360867 - DNA, 15 bp, Homo sapiens
gctgggctgggactc

SEQ ID NO: 1360868 - DNA, 15 bp, Homo sapiens
ggctgggctgggact

SEQ ID NO: 1360869 - DNA, 15 bp, Homo sapiens
aggctgggctgggac

SEQ ID NO: 1360870 - DNA, 15 bp, Homo sapiens
ccaggctgggctggg

SEQ ID NO: 1360871 - DNA, 15 bp, Homo sapiens
cccaggctgggctgg

SEQ ID NO: 1360872 - DNA, 15 bp, Homo sapiens
gcccaggctgggctg

SEQ ID NO: 1360873 - DNA, 15 bp, Homo sapiens
tgcccaggctgggct

SEQ ID NO: 1360874 - DNA, 15 bp, Homo sapiens
ttgcccaggctgggc

SEQ ID NO: 1360875 - DNA, 15 bp, Homo sapiens
gttgcccaggctggg

SEQ ID NO: 1360876 - DNA, 15 bp, Homo sapiens
gttatgttgcccagg

SEQ ID NO: 1360877 - DNA, 15 bp, Homo sapiens
tgttatgttgcccag

SEQ ID NO: 1360878 - DNA, 15 bp, Homo sapiens
ttgttatgttgccca

SEQ ID NO: 1360879 - DNA, 15 bp, Homo sapiens
cttgttatgttgccc

SEQ ID NO: 1360880 - DNA, 15 bp, Homo sapiens
tcttgttatgttgcc

SEQ ID NO: 1360881 - DNA, 15 bp, Homo sapiens
gtcttgttatgttgc

SEQ ID NO: 1360882 - DNA, 15 bp, Homo sapiens
ggtcttgttatgttg

SEQ ID NO: 1360883 - DNA, 15 bp, Homo sapiens
gggtcttgttatgtt

SEQ ID NO: 1360884 - DNA, 15 bp, Homo sapiens
ggggtcttgttatgt

SEQ ID NO: 1360885 - DNA, 15 bp, Homo sapiens
tggggtcttgttatg

SEQ ID NO: 1360886 - DNA, 15 bp, Homo sapiens
atggggtcttgttat

SEQ ID NO: 1360887 - DNA, 15 bp, Homo sapiens
aatggggtcttgtta

SEQ ID NO: 1360888 - DNA, 15 bp, Homo sapiens
aaatggggtcttgtt

SEQ ID NO: 1360889 - DNA, 15 bp, Homo sapiens
gaaatggggtcttgt

SEQ ID NO: 1360890 - DNA, 15 bp, Homo sapiens
agaaatggggtcttg

SEQ ID NO: 1360891 - DNA, 15 bp, Homo sapiens
tagaaatggggtctt

SEQ ID NO: 1360892 - DNA, 15 bp, Homo sapiens
gtagaaatggggtct

SEQ ID NO: 1360893 - DNA, 15 bp, Homo sapiens
tgtagaaatggggtc

SEQ ID NO: 1360894 - DNA, 15 bp, Homo sapiens
ttgtagaaatggggt

SEQ ID NO: 1360895 - DNA, 15 bp, Homo sapiens
tttgtagaaatgggg

SEQ ID NO: 1360896 - DNA, 15 bp, Homo sapiens
ttttgtagaaatggg

SEQ ID NO: 1360897 - DNA, 15 bp, Homo sapiens
tttttgtagaaatgg

SEQ ID NO: 1360898 - DNA, 15 bp, Homo sapiens
ttttttgtagaaatg

SEQ ID NO: 1360899 - DNA, 15 bp, Homo sapiens
tttttttgtagaaat

SEQ ID NO: 1360900 - DNA, 15 bp, Homo sapiens
ttttttttgtagaaa

SEQ ID NO: 1360901 - DNA, 15 bp, Homo sapiens
tttttttttgtagaa

SEQ ID NO: 1360902 - DNA, 15 bp, Homo sapiens
aatttaatttttttt

SEQ ID NO: 1360903 - DNA, 15 bp, Homo sapiens
taatttaattttttt

SEQ ID NO: 1360904 - DNA, 15 bp, Homo sapiens
ctaatttaatttttt

SEQ ID NO: 1360905 - DNA, 15 bp, Homo sapiens
gctaatttaattttt

SEQ ID NO: 1360906 - DNA, 15 bp, Homo sapiens
ggctaatttaatttt

SEQ ID NO: 1360907 - DNA, 15 bp, Homo sapiens
tggctaatttaattt

SEQ ID NO: 1360908 - DNA, 15 bp, Homo sapiens
ttggctaatttaatt

SEQ ID NO: 1360909 - DNA, 15 bp, Homo sapiens
cttggctaatttaat

SEQ ID NO: 1360910 - DNA, 15 bp, Homo sapiens
acttggctaatttaa

SEQ ID NO: 1360911 - DNA, 15 bp, Homo sapiens
cacttggctaattta

SEQ ID NO: 1360912 - DNA, 15 bp, Homo sapiens
acacttggctaattt

SEQ ID NO: 1360913 - DNA, 15 bp, Homo sapiens
tacacttggctaatt

SEQ ID NO: 1360914 - DNA, 15 bp, Homo sapiens
ctacacttggctaat

SEQ ID NO: 1360915 - DNA, 15 bp, Homo sapiens
actacacttggctaa

SEQ ID NO: 1360916 - DNA, 15 bp, Homo sapiens
cactacacttggcta

SEQ ID NO: 1360917 - DNA, 15 bp, Homo sapiens
ccactacacttggct

SEQ ID NO: 1360918 - DNA, 15 bp, Homo sapiens
gccactacacttggc

SEQ ID NO: 1360919 - DNA, 15 bp, Homo sapiens
cgccactacacttgg

SEQ ID NO: 1360920 - DNA, 15 bp, Homo sapiens
acgccactacacttg

SEQ ID NO: 1360921 - DNA, 15 bp, Homo sapiens
cacgccactacactt

SEQ ID NO: 1360922 - DNA, 15 bp, Homo sapiens
gcacgccactacact

SEQ ID NO: 1360923 - DNA, 15 bp, Homo sapiens
tgcacgccactacac

SEQ ID NO: 1360924 - DNA, 15 bp, Homo sapiens
gtgcacgccactaca

SEQ ID NO: 1360925 - DNA, 15 bp, Homo sapiens
ggtgcacgccactac

SEQ ID NO: 1360926 - DNA, 15 bp, Homo sapiens
aggtgcacgccacta

SEQ ID NO: 1360927 - DNA, 15 bp, Homo sapiens
caggtgcacgccact

SEQ ID NO: 1360928 - DNA, 15 bp, Homo sapiens
gacaggtgcacgcca

SEQ ID NO: 1360929 - DNA, 15 bp, Homo sapiens
tgacaggtgcacgcc

SEQ ID NO: 1360930 - DNA, 15 bp, Homo sapiens
atgacaggtgcacgc

SEQ ID NO: 1360931 - DNA, 15 bp, Homo sapiens
gatgacaggtgcacg

SEQ ID NO: 1360932 - DNA, 15 bp, Homo sapiens
ggatgacaggtgcac

SEQ ID NO: 1360933 - DNA, 15 bp, Homo sapiens
aggatgacaggtgca

SEQ ID NO: 1360934 - DNA, 15 bp, Homo sapiens
taggatgacaggtgc

SEQ ID NO: 1360935 - DNA, 15 bp, Homo sapiens
ctaggatgacaggtg

SEQ ID NO: 1360936 - DNA, 15 bp, Homo sapiens
gctaggatgacaggt

SEQ ID NO: 1360937 - DNA, 15 bp, Homo sapiens
agctaggatgacagg

SEQ ID NO: 1360938 - DNA, 15 bp, Homo sapiens
tagctaggatgacag

SEQ ID NO: 1360939 - DNA, 15 bp, Homo sapiens
gtagctaggatgaca

SEQ ID NO: 1360940 - DNA, 15 bp, Homo sapiens
agtagctaggatgac

SEQ ID NO: 1360941 - DNA, 15 bp, Homo sapiens
aagtagctaggatga

SEQ ID NO: 1360942 - DNA, 15 bp, Homo sapiens
caagtagctaggatg

SEQ ID NO: 1360943 - DNA, 15 bp, Homo sapiens
tcaagtagctaggat

SEQ ID NO: 1360944 - DNA, 15 bp, Homo sapiens
ctcaagtagctagga

SEQ ID NO: 1360945 - DNA, 15 bp, Homo sapiens
tctcaagtagctagg

SEQ ID NO: 1360946 - DNA, 15 bp, Homo sapiens
ctctcaagtagctag

SEQ ID NO: 1360947 - DNA, 15 bp, Homo sapiens
cctctcaagtagcta

SEQ ID NO: 1360948 - DNA, 15 bp, Homo sapiens
cgcctcagcctctca

SEQ ID NO: 1360949 - DNA, 15 bp, Homo sapiens
ccgcctcagcctctc

SEQ ID NO: 1360950 - DNA, 15 bp, Homo sapiens
cccgcctcagcctct

SEQ ID NO: 1360951 - DNA, 15 bp, Homo sapiens
tcagccttgacctcc

SEQ ID NO: 1360952 - DNA, 15 bp, Homo sapiens
ttcagccttgacctc

SEQ ID NO: 1360953 - DNA, 15 bp, Homo sapiens
cttcagccttgacct

SEQ ID NO: 1360954 - DNA, 15 bp, Homo sapiens
acttcagccttgacc

SEQ ID NO: 1360955 - DNA, 15 bp, Homo sapiens
cacttcagccttgac

SEQ ID NO: 1360956 - DNA, 15 bp, Homo sapiens
tcacttcagccttga

SEQ ID NO: 1360957 - DNA, 15 bp, Homo sapiens
ctcacttcagccttg

SEQ ID NO: 1360958 - DNA, 15 bp, Homo sapiens
gctcacttcagcctt

SEQ ID NO: 1360959 - DNA, 15 bp, Homo sapiens
agctcacttcagcct

SEQ ID NO: 1360960 - DNA, 15 bp, Homo sapiens
tagctcacttcagcc

SEQ ID NO: 1360961 - DNA, 15 bp, Homo sapiens
atagctcacttcagc

SEQ ID NO: 1360962 - DNA, 15 bp, Homo sapiens
catagctcacttcag

SEQ ID NO: 1360963 - DNA, 15 bp, Homo sapiens
tcatagctcacttca

SEQ ID NO: 1360964 - DNA, 15 bp, Homo sapiens
atcatagctcacttc

SEQ ID NO: 1360965 - DNA, 15 bp, Homo sapiens
catcatagctcactt

SEQ ID NO: 1360966 - DNA, 15 bp, Homo sapiens
ccatcatagctcact

SEQ ID NO: 1360967 - DNA, 15 bp, Homo sapiens
gccatcatagctcac

SEQ ID NO: 1360968 - DNA, 15 bp, Homo sapiens
tgccatcatagctca

SEQ ID NO: 1360969 - DNA, 15 bp, Homo sapiens
gtgccatcatagctc

SEQ ID NO: 1360970 - DNA, 15 bp, Homo sapiens
ggtgccatcatagct

SEQ ID NO: 1360971 - DNA, 15 bp, Homo sapiens
tggtgccatcatagc

SEQ ID NO: 1360972 - DNA, 15 bp, Homo sapiens
cgctggagtgcagtg

SEQ ID NO: 1360973 - DNA, 15 bp, Homo sapiens
ccgctggagtgcagt

SEQ ID NO: 1360974 - DNA, 15 bp, Homo sapiens
cccgctggagtgcag

SEQ ID NO: 1360975 - DNA, 15 bp, Homo sapiens
tcccgctggagtgca

SEQ ID NO: 1360976 - DNA, 15 bp, Homo sapiens
gtcccgctggagtgc

SEQ ID NO: 1360977 - DNA, 15 bp, Homo sapiens
tgtcccgctggagtg

SEQ ID NO: 1360978 - DNA, 15 bp, Homo sapiens
gtgtcccgctggagt

SEQ ID NO: 1360979 - DNA, 15 bp, Homo sapiens
tgtgtcccgctggag

SEQ ID NO: 1360980 - DNA, 15 bp, Homo sapiens
ctgtgtcccgctgga

SEQ ID NO: 1360981 - DNA, 15 bp, Homo sapiens
gctgtgtcccgctgg

SEQ ID NO: 1360982 - DNA, 15 bp, Homo sapiens
tgctgtgtcccgctg

SEQ ID NO: 1360983 - DNA, 15 bp, Homo sapiens
ttgctgtgtcccgct

SEQ ID NO: 1360984 - DNA, 15 bp, Homo sapiens
cttgctgtgtcccgc

SEQ ID NO: 1360985 - DNA, 15 bp, Homo sapiens
tcttgctgtgtcccg

SEQ ID NO: 1360986 - DNA, 15 bp, Homo sapiens
gtcttgctgtgtccc

SEQ ID NO: 1360987 - DNA, 15 bp, Homo sapiens
ggtcttgctgtgtcc

SEQ ID NO: 1360988 - DNA, 15 bp, Homo sapiens
gggtcttgctgtgtc

SEQ ID NO: 1360989 - DNA, 15 bp, Homo sapiens
agggtcttgctgtgt

SEQ ID NO: 1360990 - DNA, 15 bp, Homo sapiens
tagggtcttgctgtg

SEQ ID NO: 1360991 - DNA, 15 bp, Homo sapiens
atagggtcttgctgt

SEQ ID NO: 1360992 - DNA, 15 bp, Homo sapiens
gatagggtcttgctg

SEQ ID NO: 1360993 - DNA, 15 bp, Homo sapiens
ggagatagggtcttg

SEQ ID NO: 1360994 - DNA, 15 bp, Homo sapiens
tggagatagggtctt

SEQ ID NO: 1360995 - DNA, 15 bp, Homo sapiens
ttggagatagggtct

SEQ ID NO: 1360996 - DNA, 15 bp, Homo sapiens
tttggagatagggtc

SEQ ID NO: 1360997 - DNA, 15 bp, Homo sapiens
ttttggagatagggt

SEQ ID NO: 1360998 - DNA, 15 bp, Homo sapiens
tttttggagataggg

SEQ ID NO: 1360999 - DNA, 15 bp, Homo sapiens
ttttttggagatagg

SEQ ID NO: 1361000 - DNA, 15 bp, Homo sapiens
tttttttggagatag

SEQ ID NO: 1361001 - DNA, 15 bp, Homo sapiens
ttttttttggagata

SEQ ID NO: 1361002 - DNA, 15 bp, Homo sapiens
tttttttttggagat

SEQ ID NO: 1361003 - DNA, 15 bp, Homo sapiens
gcaaacttttttttt

SEQ ID NO: 1361004 - DNA, 15 bp, Homo sapiens
agcaaactttttttt

SEQ ID NO: 1361005 - DNA, 15 bp, Homo sapiens
cagcaaacttttttt

SEQ ID NO: 1361006 - DNA, 15 bp, Homo sapiens
gcagcaaactttttt

SEQ ID NO: 1361007 - DNA, 15 bp, Homo sapiens
tgcagcaaacttttt

SEQ ID NO: 1361008 - DNA, 15 bp, Homo sapiens
gtgcagcaaactttt

SEQ ID NO: 1361009 - DNA, 15 bp, Homo sapiens
ggtgcagcaaacttt

SEQ ID NO: 1361010 - DNA, 15 bp, Homo sapiens
gggtgcagcaaactt

SEQ ID NO: 1361011 - DNA, 15 bp, Homo sapiens
tgggtgcagcaaact

SEQ ID NO: 1361012 - DNA, 15 bp, Homo sapiens
ttgggtgcagcaaac

SEQ ID NO: 1361013 - DNA, 15 bp, Homo sapiens
tttgggtgcagcaaa

SEQ ID NO: 1361014 - DNA, 15 bp, Homo sapiens
atttgggtgcagcaa

SEQ ID NO: 1361015 - DNA, 15 bp, Homo sapiens
aatttgggtgcagca

SEQ ID NO: 1361016 - DNA, 15 bp, Homo sapiens
caatttgggtgcagc

SEQ ID NO: 1361017 - DNA, 15 bp, Homo sapiens
gcaatttgggtgcag

SEQ ID NO: 1361018 - DNA, 15 bp, Homo sapiens
agcaatttgggtgca

SEQ ID NO: 1361019 - DNA, 15 bp, Homo sapiens
cagcaatttgggtgc

SEQ ID NO: 1361020 - DNA, 15 bp, Homo sapiens
gcagcaatttgggtg

SEQ ID NO: 1361021 - DNA, 15 bp, Homo sapiens
ggcagcaatttgggt

SEQ ID NO: 1361022 - DNA, 15 bp, Homo sapiens
tggcagcaatttggg

SEQ ID NO: 1361023 - DNA, 15 bp, Homo sapiens
gtggcagcaatttgg

SEQ ID NO: 1361024 - DNA, 15 bp, Homo sapiens
ggtggcagcaatttg

SEQ ID NO: 1361025 - DNA, 15 bp, Homo sapiens
aggtggcagcaattt

SEQ ID NO: 1361026 - DNA, 15 bp, Homo sapiens
caggtggcagcaatt

SEQ ID NO: 1361027 - DNA, 15 bp, Homo sapiens
ccaggtggcagcaat

SEQ ID NO: 1361028 - DNA, 15 bp, Homo sapiens
tccaggtggcagcaa

SEQ ID NO: 1361029 - DNA, 15 bp, Homo sapiens
ctccaggtggcagca

SEQ ID NO: 1361030 - DNA, 15 bp, Homo sapiens
actccaggtggcagc

SEQ ID NO: 1361031 - DNA, 15 bp, Homo sapiens
gactccaggtggcag

SEQ ID NO: 1361032 - DNA, 15 bp, Homo sapiens
ggactccaggtggca

SEQ ID NO: 1361033 - DNA, 15 bp, Homo sapiens
cggactccaggtggc

SEQ ID NO: 1361034 - DNA, 15 bp, Homo sapiens
gcggactccaggtgg

SEQ ID NO: 1361035 - DNA, 15 bp, Homo sapiens
ggcggactccaggtg

SEQ ID NO: 1361036 - DNA, 15 bp, Homo sapiens
tggcggactccaggt

SEQ ID NO: 1361037 - DNA, 15 bp, Homo sapiens
atggcggactccagg

SEQ ID NO: 1361038 - DNA, 15 bp, Homo sapiens
aatggcggactccag

SEQ ID NO: 1361039 - DNA, 15 bp, Homo sapiens
gaatggcggactcca

SEQ ID NO: 1361040 - DNA, 15 bp, Homo sapiens
tgaatggcggactcc

SEQ ID NO: 1361041 - DNA, 15 bp, Homo sapiens
atgaatggcggactc

SEQ ID NO: 1361042 - DNA, 15 bp, Homo sapiens
aatgaatggcggact

SEQ ID NO: 1361043 - DNA, 15 bp, Homo sapiens
gaatgaatggcggac

SEQ ID NO: 1361044 - DNA, 15 bp, Homo sapiens
ggaatgaatggcgga

SEQ ID NO: 1361045 - DNA, 15 bp, Homo sapiens
aggaatgaatggcgg

SEQ ID NO: 1361046 - DNA, 15 bp, Homo sapiens
caggaatgaatggcg

SEQ ID NO: 1361047 - DNA, 15 bp, Homo sapiens
ccaggaatgaatggc

SEQ ID NO: 1361048 - DNA, 15 bp, Homo sapiens
tccaggaatgaatgg

SEQ ID NO: 1361049 - DNA, 15 bp, Homo sapiens
atccaggaatgaatg

SEQ ID NO: 1361050 - DNA, 15 bp, Homo sapiens
catccaggaatgaat

SEQ ID NO: 1361051 - DNA, 15 bp, Homo sapiens
acatccaggaatgaa

SEQ ID NO: 1361052 - DNA, 15 bp, Homo sapiens
aacatccaggaatga

SEQ ID NO: 1361053 - DNA, 15 bp, Homo sapiens
caacatccaggaatg

SEQ ID NO: 1361054 - DNA, 15 bp, Homo sapiens
tcaacatccaggaat

SEQ ID NO: 1361055 - DNA, 15 bp, Homo sapiens
atcaacatccaggaa

SEQ ID NO: 1361056 - DNA, 15 bp, Homo sapiens
tatcaacatccagga

SEQ ID NO: 1361057 - DNA, 15 bp, Homo sapiens
ttatcaacatccagg

SEQ ID NO: 1361058 - DNA, 15 bp, Homo sapiens
attatcaacatccag

SEQ ID NO: 1361059 - DNA, 15 bp, Homo sapiens
aattatcaacatcca

SEQ ID NO: 1361060 - DNA, 15 bp, Homo sapiens
taattatcaacatcc

SEQ ID NO: 1361061 - DNA, 15 bp, Homo sapiens
gtaattatcaacatc

SEQ ID NO: 1361062 - DNA, 15 bp, Homo sapiens
ggtaattatcaacat

SEQ ID NO: 1361063 - DNA, 15 bp, Homo sapiens
gggtaattatcaaca

SEQ ID NO: 1361064 - DNA, 15 bp, Homo sapiens
agggtaattatcaac

SEQ ID NO: 1361065 - DNA, 15 bp, Homo sapiens
gagggtaattatcaa

SEQ ID NO: 1361066 - DNA, 15 bp, Homo sapiens
agagggtaattatca

SEQ ID NO: 1361067 - DNA, 15 bp, Homo sapiens
cagagggtaattatc

SEQ ID NO: 1361068 - DNA, 15 bp, Homo sapiens
tcagagggtaattat

SEQ ID NO: 1361069 - DNA, 15 bp, Homo sapiens
ctcagagggtaatta

SEQ ID NO: 1361070 - DNA, 15 bp, Homo sapiens
actcagagggtaatt

SEQ ID NO: 1361071 - DNA, 15 bp, Homo sapiens
aactcagagggtaat

SEQ ID NO: 1361072 - DNA, 15 bp, Homo sapiens
caactcagagggtaa

SEQ ID NO: 1361073 - DNA, 15 bp, Homo sapiens
tcaactcagagggta

SEQ ID NO: 1361074 - DNA, 15 bp, Homo sapiens
ttcaactcagagggt

SEQ ID NO: 1361075 - DNA, 15 bp, Homo sapiens
attcaactcagaggg

SEQ ID NO: 1361076 - DNA, 15 bp, Homo sapiens
aattcaactcagagg

SEQ ID NO: 1361077 - DNA, 15 bp, Homo sapiens
aaattcaactcagag

SEQ ID NO: 1361078 - DNA, 15 bp, Homo sapiens
taaattcaactcaga

SEQ ID NO: 1361079 - DNA, 15 bp, Homo sapiens
gtaaattcaactcag

SEQ ID NO: 1361080 - DNA, 15 bp, Homo sapiens
tgtaaattcaactca

SEQ ID NO: 1361081 - DNA, 15 bp, Homo sapiens
ttgtaaattcaactc

SEQ ID NO: 1361082 - DNA, 15 bp, Homo sapiens
attgtaaattcaact

SEQ ID NO: 1361083 - DNA, 15 bp, Homo sapiens
cattgtaaattcaac

SEQ ID NO: 1361084 - DNA, 15 bp, Homo sapiens
ccattgtaaattcaa

SEQ ID NO: 1361085 - DNA, 15 bp, Homo sapiens
cccattgtaaattca

SEQ ID NO: 1361086 - DNA, 15 bp, Homo sapiens
ccccattgtaaattc

SEQ ID NO: 1361087 - DNA, 15 bp, Homo sapiens
gccccattgtaaatt

SEQ ID NO: 1361088 - DNA, 15 bp, Homo sapiens
agccccattgtaaat

SEQ ID NO: 1361089 - DNA, 15 bp, Homo sapiens
aagccccattgtaaa

SEQ ID NO: 1361090 - DNA, 15 bp, Homo sapiens
gaagccccattgtaa

SEQ ID NO: 1361091 - DNA, 15 bp, Homo sapiens
agaagccccattgta

SEQ ID NO: 1361092 - DNA, 15 bp, Homo sapiens
cagaagccccattgt

SEQ ID NO: 1361093 - DNA, 15 bp, Homo sapiens
tcagaagccccattg

SEQ ID NO: 1361094 - DNA, 15 bp, Homo sapiens
gtcagaagccccatt

SEQ ID NO: 1361095 - DNA, 15 bp, Homo sapiens
agtcagaagccccat

SEQ ID NO: 1361096 - DNA, 15 bp, Homo sapiens
cagtcagaagcccca

SEQ ID NO: 1361097 - DNA, 15 bp, Homo sapiens
tcagtcagaagcccc

SEQ ID NO: 1361098 - DNA, 15 bp, Homo sapiens
atcagtcagaagccc

SEQ ID NO: 1361099 - DNA, 15 bp, Homo sapiens
aatcagtcagaagcc

SEQ ID NO: 1361100 - DNA, 15 bp, Homo sapiens
caatcagtcagaagc

SEQ ID NO: 1361101 - DNA, 15 bp, Homo sapiens
acaatcagtcagaag

SEQ ID NO: 1361102 - DNA, 15 bp, Homo sapiens
aacaatcagtcagaa

SEQ ID NO: 1361103 - DNA, 15 bp, Homo sapiens
aaacaatcagtcaga

SEQ ID NO: 1361104 - DNA, 15 bp, Homo sapiens
aaaacaatcagtcag

SEQ ID NO: 1361105 - DNA, 15 bp, Homo sapiens
caaaacaatcagtca

SEQ ID NO: 1361106 - DNA, 15 bp, Homo sapiens
ccaaaacaatcagtc

SEQ ID NO: 1361107 - DNA, 15 bp, Homo sapiens
gccaaaacaatcagt

SEQ ID NO: 1361108 - DNA, 15 bp, Homo sapiens
agccaaaacaatcag

SEQ ID NO: 1361109 - DNA, 15 bp, Homo sapiens
gagccaaaacaatca

SEQ ID NO: 1361110 - DNA, 15 bp, Homo sapiens
agagccaaaacaatc

SEQ ID NO: 1361111 - DNA, 15 bp, Homo sapiens
cagagccaaaacaat

SEQ ID NO: 1361112 - DNA, 15 bp, Homo sapiens
ccagagccaaaacaa

SEQ ID NO: 1361113 - DNA, 15 bp, Homo sapiens
accagagccaaaaca

SEQ ID NO: 1361114 - DNA, 15 bp, Homo sapiens
caccagagccaaaac

SEQ ID NO: 1361115 - DNA, 15 bp, Homo sapiens
tcaccagagccaaaa

SEQ ID NO: 1361116 - DNA, 15 bp, Homo sapiens
gtcaccagagccaaa

SEQ ID NO: 1361117 - DNA, 15 bp, Homo sapiens
tgtcaccagagccaa

SEQ ID NO: 1361118 - DNA, 15 bp, Homo sapiens
ctgtcaccagagcca

SEQ ID NO: 1361119 - DNA, 15 bp, Homo sapiens
tctgtcaccagagcc

SEQ ID NO: 1361120 - DNA, 15 bp, Homo sapiens
gtctgtcaccagagc

SEQ ID NO: 1361121 - DNA, 15 bp, Homo sapiens
tgtctgtcaccagag

SEQ ID NO: 1361122 - DNA, 15 bp, Homo sapiens
gtgtctgtcaccaga

SEQ ID NO: 1361123 - DNA, 15 bp, Homo sapiens
tgtgtctgtcaccag

SEQ ID NO: 1361124 - DNA, 15 bp, Homo sapiens
ctgtgtctgtcacca

SEQ ID NO: 1361125 - DNA, 15 bp, Homo sapiens
gctgtgtctgtcacc

SEQ ID NO: 1361126 - DNA, 15 bp, Homo sapiens
tgctgtgtctgtcac

SEQ ID NO: 1361127 - DNA, 15 bp, Homo sapiens
atgctgtgtctgtca

SEQ ID NO: 1361128 - DNA, 15 bp, Homo sapiens
tatgctgtgtctgtc

SEQ ID NO: 1361129 - DNA, 15 bp, Homo sapiens
ctatgctgtgtctgt

SEQ ID NO: 1361130 - DNA, 15 bp, Homo sapiens
gctatgctgtgtctg

SEQ ID NO: 1361131 - DNA, 15 bp, Homo sapiens
tgctatgctgtgtct

SEQ ID NO: 1361132 - DNA, 15 bp, Homo sapiens
atgctatgctgtgtc

SEQ ID NO: 1361133 - DNA, 15 bp, Homo sapiens
aatgctatgctgtgt

SEQ ID NO: 1361134 - DNA, 15 bp, Homo sapiens
gaatgctatgctgtg

SEQ ID NO: 1361135 - DNA, 15 bp, Homo sapiens
agaatgctatgctgt

SEQ ID NO: 1361136 - DNA, 15 bp, Homo sapiens
tagaatgctatgctg

SEQ ID NO: 1361137 - DNA, 15 bp, Homo sapiens
ctagaatgctatgct

SEQ ID NO: 1361138 - DNA, 15 bp, Homo sapiens
actagaatgctatgc

SEQ ID NO: 1361139 - DNA, 15 bp, Homo sapiens
tactagaatgctatg

SEQ ID NO: 1361140 - DNA, 15 bp, Homo sapiens
gtactagaatgctat

SEQ ID NO: 1361141 - DNA, 15 bp, Homo sapiens
cgtactagaatgcta

SEQ ID NO: 1361142 - DNA, 15 bp, Homo sapiens
ccgtactagaatgct

SEQ ID NO: 1361143 - DNA, 15 bp, Homo sapiens
cccgtactagaatgc

SEQ ID NO: 1361144 - DNA, 15 bp, Homo sapiens
acccgtactagaatg

SEQ ID NO: 1361145 - DNA, 15 bp, Homo sapiens
cacccgtactagaat

SEQ ID NO: 1361146 - DNA, 15 bp, Homo sapiens
acacccgtactagaa

SEQ ID NO: 1361147 - DNA, 15 bp, Homo sapiens
aacacccgtactaga

SEQ ID NO: 1361148 - DNA, 15 bp, Homo sapiens
gaacacccgtactag

SEQ ID NO: 1361149 - DNA, 15 bp, Homo sapiens
agaacacccgtacta

SEQ ID NO: 1361150 - DNA, 15 bp, Homo sapiens
tagaacacccgtact

SEQ ID NO: 1361151 - DNA, 15 bp, Homo sapiens
ttagaacacccgtac

SEQ ID NO: 1361152 - DNA, 15 bp, Homo sapiens
tttagaacacccgta

SEQ ID NO: 1361153 - DNA, 15 bp, Homo sapiens
ctttagaacacccgt

SEQ ID NO: 1361154 - DNA, 15 bp, Homo sapiens
cctttagaacacccg

SEQ ID NO: 1361155 - DNA, 15 bp, Homo sapiens
acctttagaacaccc

SEQ ID NO: 1361156 - DNA, 15 bp, Homo sapiens
cacctttagaacacc

SEQ ID NO: 1361157 - DNA, 15 bp, Homo sapiens
tcacctttagaacac

SEQ ID NO: 1361158 - DNA, 15 bp, Homo sapiens
ctcacctttagaaca

SEQ ID NO: 1361159 - DNA, 15 bp, Homo sapiens
tctcacctttagaac

SEQ ID NO: 1361160 - DNA, 15 bp, Homo sapiens
gtctcacctttagaa

SEQ ID NO: 1361161 - DNA, 15 bp, Homo sapiens
tgtctcacctttaga

SEQ ID NO: 1361162 - DNA, 15 bp, Homo sapiens
gtgtctcacctttag

SEQ ID NO: 1361163 - DNA, 15 bp, Homo sapiens
tgtgtctcaccttta

SEQ ID NO: 1361164 - DNA, 15 bp, Homo sapiens
atgtgtctcaccttt

SEQ ID NO: 1361165 - DNA, 15 bp, Homo sapiens
tatgtgtctcacctt

SEQ ID NO: 1361166 - DNA, 15 bp, Homo sapiens
ctatgtgtctcacct

SEQ ID NO: 1361167 - DNA, 15 bp, Homo sapiens
gctatgtgtctcacc

SEQ ID NO: 1361168 - DNA, 15 bp, Homo sapiens
ggctatgtgtctcac

SEQ ID NO: 1361169 - DNA, 15 bp, Homo sapiens
tggctatgtgtctca

SEQ ID NO: 1361170 - DNA, 15 bp, Homo sapiens
ctggctatgtgtctc

SEQ ID NO: 1361171 - DNA, 15 bp, Homo sapiens
actggctatgtgtct

SEQ ID NO: 1361172 - DNA, 15 bp, Homo sapiens
cactggctatgtgtc

SEQ ID NO: 1361173 - DNA, 15 bp, Homo sapiens
gcactggctatgtgt

SEQ ID NO: 1361174 - DNA, 15 bp, Homo sapiens
cgcactggctatgtg

SEQ ID NO: 1361175 - DNA, 15 bp, Homo sapiens
ccgcactggctatgt

SEQ ID NO: 1361176 - DNA, 15 bp, Homo sapiens
accgcactggctatg

SEQ ID NO: 1361177 - DNA, 15 bp, Homo sapiens
caccgcactggctat

SEQ ID NO: 1361178 - DNA, 15 bp, Homo sapiens
ccaccgcactggcta

SEQ ID NO: 1361179 - DNA, 15 bp, Homo sapiens
gccaccgcactggct

SEQ ID NO: 1361180 - DNA, 15 bp, Homo sapiens
agccaccgcactggc

SEQ ID NO: 1361181 - DNA, 15 bp, Homo sapiens
gagccaccgcactgg

SEQ ID NO: 1361182 - DNA, 15 bp, Homo sapiens
tgagccaccgcactg

SEQ ID NO: 1361183 - DNA, 15 bp, Homo sapiens
ccaggcgtgagccac

SEQ ID NO: 1361184 - DNA, 15 bp, Homo sapiens
tccaggcgtgagcca

SEQ ID NO: 1361185 - DNA, 15 bp, Homo sapiens
ttccaggcgtgagcc

SEQ ID NO: 1361186 - DNA, 15 bp, Homo sapiens
attccaggcgtgagc

SEQ ID NO: 1361187 - DNA, 15 bp, Homo sapiens
gattccaggcgtgag

SEQ ID NO: 1361188 - DNA, 15 bp, Homo sapiens
ggattccaggcgtga

SEQ ID NO: 1361189 - DNA, 15 bp, Homo sapiens
gggattccaggcgtg

SEQ ID NO: 1361190 - DNA, 15 bp, Homo sapiens
tgggattccaggcgt

SEQ ID NO: 1361191 - DNA, 15 bp, Homo sapiens
ctgggattccaggcg

SEQ ID NO: 1361192 - DNA, 15 bp, Homo sapiens
tcctgcctcggtctc

SEQ ID NO: 1361193 - DNA, 15 bp, Homo sapiens
ctcctgcctcggtct

SEQ ID NO: 1361194 - DNA, 15 bp, Homo sapiens
cctcctgcctcggtc

SEQ ID NO: 1361195 - DNA, 15 bp, Homo sapiens
tcctcctgcctcggt

SEQ ID NO: 1361196 - DNA, 15 bp, Homo sapiens
gctcctgacctcatg

SEQ ID NO: 1361197 - DNA, 15 bp, Homo sapiens
agctcctgacctcat

SEQ ID NO: 1361198 - DNA, 15 bp, Homo sapiens
gagctcctgacctca

SEQ ID NO: 1361199 - DNA, 15 bp, Homo sapiens
cgagctcctgacctc

SEQ ID NO: 1361200 - DNA, 15 bp, Homo sapiens
tcgagctcctgacct

SEQ ID NO: 1361201 - DNA, 15 bp, Homo sapiens
ctcgagctcctgacc

SEQ ID NO: 1361202 - DNA, 15 bp, Homo sapiens
tctcgagctcctgac

SEQ ID NO: 1361203 - DNA, 15 bp, Homo sapiens
gtctcgagctcctga

SEQ ID NO: 1361204 - DNA, 15 bp, Homo sapiens
ggtctcgagctcctg

SEQ ID NO: 1361205 - DNA, 15 bp, Homo sapiens
tggtctcgagctcct

SEQ ID NO: 1361206 - DNA, 15 bp, Homo sapiens
ctggtctcgagctcc

SEQ ID NO: 1361207 - DNA, 15 bp, Homo sapiens
gctggtctcgagctc

SEQ ID NO: 1361208 - DNA, 15 bp, Homo sapiens
atttttgtatcttta

SEQ ID NO: 1361209 - DNA, 15 bp, Homo sapiens
aatttttgtatcttt

SEQ ID NO: 1361210 - DNA, 15 bp, Homo sapiens
taatttttgtatctt

SEQ ID NO: 1361211 - DNA, 15 bp, Homo sapiens
ctaatttttgtatct

SEQ ID NO: 1361212 - DNA, 15 bp, Homo sapiens
gctaatttttgtatc

SEQ ID NO: 1361213 - DNA, 15 bp, Homo sapiens
ccatgcgccaccacg

SEQ ID NO: 1361214 - DNA, 15 bp, Homo sapiens
gccatgcgccaccac

SEQ ID NO: 1361215 - DNA, 15 bp, Homo sapiens
agccatgcgccacca

SEQ ID NO: 1361216 - DNA, 15 bp, Homo sapiens
cagccatgcgccacc

SEQ ID NO: 1361217 - DNA, 15 bp, Homo sapiens
acagccatgcgccac

SEQ ID NO: 1361218 - DNA, 15 bp, Homo sapiens
tacagccatgcgcca

SEQ ID NO: 1361219 - DNA, 15 bp, Homo sapiens
ttacagccatgcgcc

SEQ ID NO: 1361220 - DNA, 15 bp, Homo sapiens
attacagccatgcgc

SEQ ID NO: 1361221 - DNA, 15 bp, Homo sapiens
gattacagccatgcg

SEQ ID NO: 1361222 - DNA, 15 bp, Homo sapiens
ggattacagccatgc

SEQ ID NO: 1361223 - DNA, 15 bp, Homo sapiens
agctgggattacagc

SEQ ID NO: 1361224 - DNA, 15 bp, Homo sapiens
cgcctcagcctcctg

SEQ ID NO: 1361225 - DNA, 15 bp, Homo sapiens
ccgcctcagcctcct

SEQ ID NO: 1361226 - DNA, 15 bp, Homo sapiens
cagcgattctcccgc

SEQ ID NO: 1361227 - DNA, 15 bp, Homo sapiens
ccagcgattctcccg

SEQ ID NO: 1361228 - DNA, 15 bp, Homo sapiens
tccagcgattctccc

SEQ ID NO: 1361229 - DNA, 15 bp, Homo sapiens
ttccagcgattctcc

SEQ ID NO: 1361230 - DNA, 15 bp, Homo sapiens
attccagcgattctc

SEQ ID NO: 1361231 - DNA, 15 bp, Homo sapiens
gattccagcgattct

SEQ ID NO: 1361232 - DNA, 15 bp, Homo sapiens
agattccagcgattc

SEQ ID NO: 1361233 - DNA, 15 bp, Homo sapiens
cagattccagcgatt

SEQ ID NO: 1361234 - DNA, 15 bp, Homo sapiens
tcagattccagcgat

SEQ ID NO: 1361235 - DNA, 15 bp, Homo sapiens
ctcagattccagcga

SEQ ID NO: 1361236 - DNA, 15 bp, Homo sapiens
tctcagattccagcg

SEQ ID NO: 1361237 - DNA, 15 bp, Homo sapiens
ctctcagattccagc

SEQ ID NO: 1361238 - DNA, 15 bp, Homo sapiens
cctctcagattccag

SEQ ID NO: 1361239 - DNA, 15 bp, Homo sapiens
gcctctcagattcca

SEQ ID NO: 1361240 - DNA, 15 bp, Homo sapiens
tgcctctcagattcc

SEQ ID NO: 1361241 - DNA, 15 bp, Homo sapiens
ctgcctctcagattc

SEQ ID NO: 1361242 - DNA, 15 bp, Homo sapiens
tctgcctctcagatt

SEQ ID NO: 1361243 - DNA, 15 bp, Homo sapiens
ctctgcctctcagat

SEQ ID NO: 1361244 - DNA, 15 bp, Homo sapiens
cctctgcctctcaga

SEQ ID NO: 1361245 - DNA, 15 bp, Homo sapiens
acctctgcctctcag

SEQ ID NO: 1361246 - DNA, 15 bp, Homo sapiens
aacctctgcctctca

SEQ ID NO: 1361247 - DNA, 15 bp, Homo sapiens
tgctgcaacctctgc

SEQ ID NO: 1361248 - DNA, 15 bp, Homo sapiens
ttgctgcaacctctg

SEQ ID NO: 1361249 - DNA, 15 bp, Homo sapiens
cttgctgcaacctct

SEQ ID NO: 1361250 - DNA, 15 bp, Homo sapiens
gcttgctgcaacctc

SEQ ID NO: 1361251 - DNA, 15 bp, Homo sapiens
agcttgctgcaacct

SEQ ID NO: 1361252 - DNA, 15 bp, Homo sapiens
cagcttgctgcaacc

SEQ ID NO: 1361253 - DNA, 15 bp, Homo sapiens
tcagcttgctgcaac

SEQ ID NO: 1361254 - DNA, 15 bp, Homo sapiens
ctcagcttgctgcaa

SEQ ID NO: 1361255 - DNA, 15 bp, Homo sapiens
tctcagcttgctgca

SEQ ID NO: 1361256 - DNA, 15 bp, Homo sapiens
atctcagcttgctgc

SEQ ID NO: 1361257 - DNA, 15 bp, Homo sapiens
gatctcagcttgctg

SEQ ID NO: 1361258 - DNA, 15 bp, Homo sapiens
cgatctcagcttgct

SEQ ID NO: 1361259 - DNA, 15 bp, Homo sapiens
acgatctcagcttgc

SEQ ID NO: 1361260 - DNA, 15 bp, Homo sapiens
cacgatctcagcttg

SEQ ID NO: 1361261 - DNA, 15 bp, Homo sapiens
gcacgatctcagctt

SEQ ID NO: 1361262 - DNA, 15 bp, Homo sapiens
gatgcagtggcacga

SEQ ID NO: 1361263 - DNA, 15 bp, Homo sapiens
ggatgcagtggcacg

SEQ ID NO: 1361264 - DNA, 15 bp, Homo sapiens
gggatgcagtggcac

SEQ ID NO: 1361265 - DNA, 15 bp, Homo sapiens
tgggatgcagtggca

SEQ ID NO: 1361266 - DNA, 15 bp, Homo sapiens
ctgggatgcagtggc

SEQ ID NO: 1361267 - DNA, 15 bp, Homo sapiens
gctgggatgcagtgg

SEQ ID NO: 1361268 - DNA, 15 bp, Homo sapiens
ggctgggatgcagtg

SEQ ID NO: 1361269 - DNA, 15 bp, Homo sapiens
aggctgggatgcagt

SEQ ID NO: 1361270 - DNA, 15 bp, Homo sapiens
gaggctgggatgcag

SEQ ID NO: 1361271 - DNA, 15 bp, Homo sapiens
tgaggctgggatgca

SEQ ID NO: 1361272 - DNA, 15 bp, Homo sapiens
ctgaggctgggatgc

SEQ ID NO: 1361273 - DNA, 15 bp, Homo sapiens
actgaggctgggatg

SEQ ID NO: 1361274 - DNA, 15 bp, Homo sapiens
cactgaggctgggat

SEQ ID NO: 1361275 - DNA, 15 bp, Homo sapiens
tcactgaggctggga

SEQ ID NO: 1361276 - DNA, 15 bp, Homo sapiens
gtcactgaggctggg

SEQ ID NO: 1361277 - DNA, 15 bp, Homo sapiens
tctctgtcactgagg

SEQ ID NO: 1361278 - DNA, 15 bp, Homo sapiens
ttctctgtcactgag

SEQ ID NO: 1361279 - DNA, 15 bp, Homo sapiens
tttctctgtcactga

SEQ ID NO: 1361280 - DNA, 15 bp, Homo sapiens
ctttctctgtcactg

SEQ ID NO: 1361281 - DNA, 15 bp, Homo sapiens
tctttctctgtcact

SEQ ID NO: 1361282 - DNA, 15 bp, Homo sapiens
gtctttctctgtcac

SEQ ID NO: 1361283 - DNA, 15 bp, Homo sapiens
agtctttctctgtca

SEQ ID NO: 1361284 - DNA, 15 bp, Homo sapiens
gagtctttctctgtc

SEQ ID NO: 1361285 - DNA, 15 bp, Homo sapiens
tagagtctttctctg

SEQ ID NO: 1361286 - DNA, 15 bp, Homo sapiens
gtagagtctttctct

SEQ ID NO: 1361287 - DNA, 15 bp, Homo sapiens
agtagagtctttctc

SEQ ID NO: 1361288 - DNA, 15 bp, Homo sapiens
gagtagagtctttct

SEQ ID NO: 1361289 - DNA, 15 bp, Homo sapiens
agagtagagtctttc

SEQ ID NO: 1361290 - DNA, 15 bp, Homo sapiens
tagagtagagtcttt

SEQ ID NO: 1361291 - DNA, 15 bp, Homo sapiens
ttagagtagagtctt

SEQ ID NO: 1361292 - DNA, 15 bp, Homo sapiens
tttagagtagagtct

SEQ ID NO: 1361293 - DNA, 15 bp, Homo sapiens
atttagagtagagtc

SEQ ID NO: 1361294 - DNA, 15 bp, Homo sapiens
tatttagagtagagt

SEQ ID NO: 1361295 - DNA, 15 bp, Homo sapiens
ttatttagagtagag

SEQ ID NO: 1361296 - DNA, 15 bp, Homo sapiens
tttatttagagtaga

SEQ ID NO: 1361297 - DNA, 15 bp, Homo sapiens
atttatttagagtag

SEQ ID NO: 1361298 - DNA, 15 bp, Homo sapiens
tatttatttagagta

SEQ ID NO: 1361299 - DNA, 15 bp, Homo sapiens
ttatttatttagagt

SEQ ID NO: 1361300 - DNA, 15 bp, Homo sapiens
tttatttatttagag

SEQ ID NO: 1361301 - DNA, 15 bp, Homo sapiens
atttatttatttaga

SEQ ID NO: 1361302 - DNA, 15 bp, Homo sapiens
tatttatttatttag

SEQ ID NO: 1361303 - DNA, 15 bp, Homo sapiens
ctttatttatttatt

SEQ ID NO: 1361304 - DNA, 15 bp, Homo sapiens
cctttatttatttat

SEQ ID NO: 1361305 - DNA, 15 bp, Homo sapiens
acctttatttattta

SEQ ID NO: 1361306 - DNA, 15 bp, Homo sapiens
cacctttatttattt

SEQ ID NO: 1361307 - DNA, 15 bp, Homo sapiens
ccacctttatttatt

SEQ ID NO: 1361308 - DNA, 15 bp, Homo sapiens
cccacctttatttat

SEQ ID NO: 1361309 - DNA, 15 bp, Homo sapiens
tcccacctttattta

SEQ ID NO: 1361310 - DNA, 15 bp, Homo sapiens
gtcccacctttattt

SEQ ID NO: 1361311 - DNA, 15 bp, Homo sapiens
tgtcccacctttatt

SEQ ID NO: 1361312 - DNA, 15 bp, Homo sapiens
gtgtcccacctttat

SEQ ID NO: 1361313 - DNA, 15 bp, Homo sapiens
tgtgtcccaccttta

SEQ ID NO: 1361314 - DNA, 15 bp, Homo sapiens
gtgtgtcccaccttt

SEQ ID NO: 1361315 - DNA, 15 bp, Homo sapiens
tgtgtgtcccacctt

SEQ ID NO: 1361316 - DNA, 15 bp, Homo sapiens
atgtgtgtcccacct

SEQ ID NO: 1361317 - DNA, 15 bp, Homo sapiens
catgtgtgtcccacc

SEQ ID NO: 1361318 - DNA, 15 bp, Homo sapiens
gcatgtgtgtcccac

SEQ ID NO: 1361319 - DNA, 15 bp, Homo sapiens
tgcatgtgtgtccca

SEQ ID NO: 1361320 - DNA, 15 bp, Homo sapiens
ctgcatgtgtgtccc

SEQ ID NO: 1361321 - DNA, 15 bp, Homo sapiens
cctgcatgtgtgtcc

SEQ ID NO: 1361322 - DNA, 15 bp, Homo sapiens
acctgcatgtgtgtc

SEQ ID NO: 1361323 - DNA, 15 bp, Homo sapiens
tacctgcatgtgtgt

SEQ ID NO: 1361324 - DNA, 15 bp, Homo sapiens
ttacctgcatgtgtg

SEQ ID NO: 1361325 - DNA, 15 bp, Homo sapiens
cttacctgcatgtgt

SEQ ID NO: 1361326 - DNA, 15 bp, Homo sapiens
acttacctgcatgtg

SEQ ID NO: 1361327 - DNA, 15 bp, Homo sapiens
cacttacctgcatgt

SEQ ID NO: 1361328 - DNA, 15 bp, Homo sapiens
gcacttacctgcatg

SEQ ID NO: 1361329 - DNA, 15 bp, Homo sapiens
tgcacttacctgcat

SEQ ID NO: 1361330 - DNA, 15 bp, Homo sapiens
gtgcacttacctgca

SEQ ID NO: 1361331 - DNA, 15 bp, Homo sapiens
cgtgcacttacctgc

SEQ ID NO: 1361332 - DNA, 15 bp, Homo sapiens
tcgtgcacttacctg

SEQ ID NO: 1361333 - DNA, 15 bp, Homo sapiens
ttcgtgcacttacct

SEQ ID NO: 1361334 - DNA, 15 bp, Homo sapiens
cttcgtgcacttacc

SEQ ID NO: 1361335 - DNA, 15 bp, Homo sapiens
ccttcgtgcacttac

SEQ ID NO: 1361336 - DNA, 15 bp, Homo sapiens
cccttcgtgcactta

SEQ ID NO: 1361337 - DNA, 15 bp, Homo sapiens
ccccttcgtgcactt

SEQ ID NO: 1361338 - DNA, 15 bp, Homo sapiens
tccccttcgtgcact

SEQ ID NO: 1361339 - DNA, 15 bp, Homo sapiens
ctccccttcgtgcac

SEQ ID NO: 1361340 - DNA, 15 bp, Homo sapiens
tctccccttcgtgca

SEQ ID NO: 1361341 - DNA, 15 bp, Homo sapiens
atctccccttcgtgc

SEQ ID NO: 1361342 - DNA, 15 bp, Homo sapiens
catctccccttcgtg

SEQ ID NO: 1361343 - DNA, 15 bp, Homo sapiens
ccatctccccttcgt

SEQ ID NO: 1361344 - DNA, 15 bp, Homo sapiens
tccatctccccttcg

SEQ ID NO: 1361345 - DNA, 15 bp, Homo sapiens
atccatctccccttc

SEQ ID NO: 1361346 - DNA, 15 bp, Homo sapiens
gatccatctcccctt

SEQ ID NO: 1361347 - DNA, 15 bp, Homo sapiens
ggatccatctcccct

SEQ ID NO: 1361348 - DNA, 15 bp, Homo sapiens
tggatccatctcccc

SEQ ID NO: 1361349 - DNA, 15 bp, Homo sapiens
ctggatccatctccc

SEQ ID NO: 1361350 - DNA, 15 bp, Homo sapiens
cctggatccatctcc

SEQ ID NO: 1361351 - DNA, 15 bp, Homo sapiens
ccctggatccatctc

SEQ ID NO: 1361352 - DNA, 15 bp, Homo sapiens
gccctggatccatct

SEQ ID NO: 1361353 - DNA, 15 bp, Homo sapiens
agccctggatccatc

SEQ ID NO: 1361354 - DNA, 15 bp, Homo sapiens
cagccctggatccat

SEQ ID NO: 1361355 - DNA, 15 bp, Homo sapiens
ccagccctggatcca

SEQ ID NO: 1361356 - DNA, 15 bp, Homo sapiens
tccagccctggatcc

SEQ ID NO: 1361357 - DNA, 15 bp, Homo sapiens
ttccagccctggatc

SEQ ID NO: 1361358 - DNA, 15 bp, Homo sapiens
cttccagccctggat

SEQ ID NO: 1361359 - DNA, 15 bp, Homo sapiens
acttccagccctgga

SEQ ID NO: 1361360 - DNA, 15 bp, Homo sapiens
gacttccagccctgg

SEQ ID NO: 1361361 - DNA, 15 bp, Homo sapiens
ggacttccagccctg

SEQ ID NO: 1361362 - DNA, 15 bp, Homo sapiens
gggacttccagccct

SEQ ID NO: 1361363 - DNA, 15 bp, Homo sapiens
ggggacttccagccc

SEQ ID NO: 1361364 - DNA, 15 bp, Homo sapiens
gggggacttccagcc

SEQ ID NO: 1361365 - DNA, 15 bp, Homo sapiens
ggggggacttccagc

SEQ ID NO: 1361366 - DNA, 15 bp, Homo sapiens
tggggggacttccag

SEQ ID NO: 1361367 - DNA, 15 bp, Homo sapiens
ctggggggacttcca

SEQ ID NO: 1361368 - DNA, 15 bp, Homo sapiens
tctggggggacttcc

SEQ ID NO: 1361369 - DNA, 15 bp, Homo sapiens
gtctggggggacttc

SEQ ID NO: 1361370 - DNA, 15 bp, Homo sapiens
agtctggggggactt

SEQ ID NO: 1361371 - DNA, 15 bp, Homo sapiens
gagtctggggggact

SEQ ID NO: 1361372 - DNA, 15 bp, Homo sapiens
tgagtctggggggac

SEQ ID NO: 1361373 - DNA, 15 bp, Homo sapiens
gtgagtctgggggga

SEQ ID NO: 1361374 - DNA, 15 bp, Homo sapiens
ggtgagtctgggggg

SEQ ID NO: 1361375 - DNA, 15 bp, Homo sapiens
aggtgagtctggggg

SEQ ID NO: 1361376 - DNA, 15 bp, Homo sapiens
aaggtgagtctgggg

SEQ ID NO: 1361377 - DNA, 15 bp, Homo sapiens
taaggtgagtctggg

SEQ ID NO: 1361378 - DNA, 15 bp, Homo sapiens
ctaaggtgagtctgg

SEQ ID NO: 1361379 - DNA, 15 bp, Homo sapiens
actaaggtgagtctg

SEQ ID NO: 1361380 - DNA, 15 bp, Homo sapiens
cactaaggtgagtct

SEQ ID NO: 1361381 - DNA, 15 bp, Homo sapiens
tcactaaggtgagtc

SEQ ID NO: 1361382 - DNA, 15 bp, Homo sapiens
ctcactaaggtgagt

SEQ ID NO: 1361383 - DNA, 15 bp, Homo sapiens
cctcactaaggtgag

SEQ ID NO: 1361384 - DNA, 15 bp, Homo sapiens
ccctcactaaggtga

SEQ ID NO: 1361385 - DNA, 15 bp, Homo sapiens
cccctcactaaggtg

SEQ ID NO: 1361386 - DNA, 15 bp, Homo sapiens
gcccctcactaaggt

SEQ ID NO: 1361387 - DNA, 15 bp, Homo sapiens
tgcccctcactaagg

SEQ ID NO: 1361388 - DNA, 15 bp, Homo sapiens
ctgcccctcactaag

SEQ ID NO: 1361389 - DNA, 15 bp, Homo sapiens
gctgcccctcactaa

SEQ ID NO: 1361390 - DNA, 15 bp, Homo sapiens
agctgcccctcacta

SEQ ID NO: 1361391 - DNA, 15 bp, Homo sapiens
cagctgcccctcact

SEQ ID NO: 1361392 - DNA, 15 bp, Homo sapiens
tcagctgcccctcac

SEQ ID NO: 1361393 - DNA, 15 bp, Homo sapiens
ctcagctgcccctca

SEQ ID NO: 1361394 - DNA, 15 bp, Homo sapiens
actcagctgcccctc

SEQ ID NO: 1361395 - DNA, 15 bp, Homo sapiens
cactcagctgcccct

SEQ ID NO: 1361396 - DNA, 15 bp, Homo sapiens
ccactcagctgcccc

SEQ ID NO: 1361397 - DNA, 15 bp, Homo sapiens
cccactcagctgccc

SEQ ID NO: 1361398 - DNA, 15 bp, Homo sapiens
gcccactcagctgcc

SEQ ID NO: 1361399 - DNA, 15 bp, Homo sapiens
tgcccactcagctgc

SEQ ID NO: 1361400 - DNA, 15 bp, Homo sapiens
ctgcccactcagctg

SEQ ID NO: 1361401 - DNA, 15 bp, Homo sapiens
cctgcccactcagct

SEQ ID NO: 1361402 - DNA, 15 bp, Homo sapiens
ccctgcccactcagc

SEQ ID NO: 1361403 - DNA, 15 bp, Homo sapiens
accctgcccactcag

SEQ ID NO: 1361404 - DNA, 15 bp, Homo sapiens
caccctgcccactca

SEQ ID NO: 1361405 - DNA, 15 bp, Homo sapiens
tcaccctgcccactc

SEQ ID NO: 1361406 - DNA, 15 bp, Homo sapiens
atcaccctgcccact

SEQ ID NO: 1361407 - DNA, 15 bp, Homo sapiens
catcaccctgcccac

SEQ ID NO: 1361408 - DNA, 15 bp, Homo sapiens
gcatcaccctgccca

SEQ ID NO: 1361409 - DNA, 15 bp, Homo sapiens
ggcatcaccctgccc

SEQ ID NO: 1361410 - DNA, 15 bp, Homo sapiens
aggcatcaccctgcc

SEQ ID NO: 1361411 - DNA, 15 bp, Homo sapiens
aaggcatcaccctgc

SEQ ID NO: 1361412 - DNA, 15 bp, Homo sapiens
gaaggcatcaccctg

SEQ ID NO: 1361413 - DNA, 15 bp, Homo sapiens
agaaggcatcaccct

SEQ ID NO: 1361414 - DNA, 15 bp, Homo sapiens
aagaaggcatcaccc

SEQ ID NO: 1361415 - DNA, 15 bp, Homo sapiens
aaagaaggcatcacc

SEQ ID NO: 1361416 - DNA, 15 bp, Homo sapiens
taaagaaggcatcac

SEQ ID NO: 1361417 - DNA, 15 bp, Homo sapiens
ctaaagaaggcatca

SEQ ID NO: 1361418 - DNA, 15 bp, Homo sapiens
gctaaagaaggcatc

SEQ ID NO: 1361419 - DNA, 15 bp, Homo sapiens
ggctaaagaaggcat

SEQ ID NO: 1361420 - DNA, 15 bp, Homo sapiens
tggctaaagaaggca

SEQ ID NO: 1361421 - DNA, 15 bp, Homo sapiens
ctggctaaagaaggc

SEQ ID NO: 1361422 - DNA, 15 bp, Homo sapiens
gctggctaaagaagg

SEQ ID NO: 1361423 - DNA, 15 bp, Homo sapiens
tgctggctaaagaag

SEQ ID NO: 1361424 - DNA, 15 bp, Homo sapiens
ctgctggctaaagaa

SEQ ID NO: 1361425 - DNA, 15 bp, Homo sapiens
gctgctggctaaaga

SEQ ID NO: 1361426 - DNA, 15 bp, Homo sapiens
agctgctggctaaag

SEQ ID NO: 1361427 - DNA, 15 bp, Homo sapiens
aagctgctggctaaa

SEQ ID NO: 1361428 - DNA, 15 bp, Homo sapiens
gaagctgctggctaa

SEQ ID NO: 1361429 - DNA, 15 bp, Homo sapiens
agaagctgctggcta

SEQ ID NO: 1361430 - DNA, 15 bp, Homo sapiens
aagaagctgctggct

SEQ ID NO: 1361431 - DNA, 15 bp, Homo sapiens
gaagaagctgctggc

SEQ ID NO: 1361432 - DNA, 15 bp, Homo sapiens
tgagaagaagctgct

SEQ ID NO: 1361433 - DNA, 15 bp, Homo sapiens
atgagaagaagctgc

SEQ ID NO: 1361434 - DNA, 15 bp, Homo sapiens
gatgagaagaagctg

SEQ ID NO: 1361435 - DNA, 15 bp, Homo sapiens
ggatgagaagaagct

SEQ ID NO: 1361436 - DNA, 15 bp, Homo sapiens
aggatgagaagaagc

SEQ ID NO: 1361437 - DNA, 15 bp, Homo sapiens
gaggatgagaagaag

SEQ ID NO: 1361438 - DNA, 15 bp, Homo sapiens
cgaggatgagaagaa

SEQ ID NO: 1361439 - DNA, 15 bp, Homo sapiens
ccgaggatgagaaga

SEQ ID NO: 1361440 - DNA, 15 bp, Homo sapiens
accgaggatgagaag

SEQ ID NO: 1361441 - DNA, 15 bp, Homo sapiens
caccgaggatgagaa

SEQ ID NO: 1361442 - DNA, 15 bp, Homo sapiens
tcaccgaggatgaga

SEQ ID NO: 1361443 - DNA, 15 bp, Homo sapiens
ctcaccgaggatgag

SEQ ID NO: 1361444 - DNA, 15 bp, Homo sapiens
gctcaccgaggatga

SEQ ID NO: 1361445 - DNA, 15 bp, Homo sapiens
tgctcaccgaggatg

SEQ ID NO: 1361446 - DNA, 15 bp, Homo sapiens
gtgctcaccgaggat

SEQ ID NO: 1361447 - DNA, 15 bp, Homo sapiens
ggtgctcaccgagga

SEQ ID NO: 1361448 - DNA, 15 bp, Homo sapiens
tggtgctcaccgagg

SEQ ID NO: 1361449 - DNA, 15 bp, Homo sapiens
ctggtgctcaccgag

SEQ ID NO: 1361450 - DNA, 15 bp, Homo sapiens
gctggtgctcaccga

SEQ ID NO: 1361451 - DNA, 15 bp, Homo sapiens
agctggtgctcaccg

SEQ ID NO: 1361452 - DNA, 15 bp, Homo sapiens
gagctggtgctcacc

SEQ ID NO: 1361453 - DNA, 15 bp, Homo sapiens
ggagctggtgctcac

SEQ ID NO: 1361454 - DNA, 15 bp, Homo sapiens
aggagctggtgctca

SEQ ID NO: 1361455 - DNA, 15 bp, Homo sapiens
caggagctggtgctc

SEQ ID NO: 1361456 - DNA, 15 bp, Homo sapiens
tcaggagctggtgct

SEQ ID NO: 1361457 - DNA, 15 bp, Homo sapiens
gtcaggagctggtgc

SEQ ID NO: 1361458 - DNA, 15 bp, Homo sapiens
tgtcaggagctggtg

SEQ ID NO: 1361459 - DNA, 15 bp, Homo sapiens
ctgtcaggagctggt

SEQ ID NO: 1361460 - DNA, 15 bp, Homo sapiens
actgtcaggagctgg

SEQ ID NO: 1361461 - DNA, 15 bp, Homo sapiens
cactgtcaggagctg

SEQ ID NO: 1361462 - DNA, 15 bp, Homo sapiens
gcactgtcaggagct

SEQ ID NO: 1361463 - DNA, 15 bp, Homo sapiens
ggcactgtcaggagc

SEQ ID NO: 1361464 - DNA, 15 bp, Homo sapiens
gggcactgtcaggag

SEQ ID NO: 1361465 - DNA, 15 bp, Homo sapiens
tgggcactgtcagga

SEQ ID NO: 1361466 - DNA, 15 bp, Homo sapiens
ctgggcactgtcagg

SEQ ID NO: 1361467 - DNA, 15 bp, Homo sapiens
gctgggcactgtcag

SEQ ID NO: 1361468 - DNA, 15 bp, Homo sapiens
ggctgggcactgtca

SEQ ID NO: 1361469 - DNA, 15 bp, Homo sapiens
gggctgggcactgtc

SEQ ID NO: 1361470 - DNA, 15 bp, Homo sapiens
ggggctgggcactgt

SEQ ID NO: 1361471 - DNA, 15 bp, Homo sapiens
tggggctgggcactg

SEQ ID NO: 1361472 - DNA, 15 bp, Homo sapiens
ctggggctgggcact

SEQ ID NO: 1361473 - DNA, 15 bp, Homo sapiens
cctggggctgggcac

SEQ ID NO: 1361474 - DNA, 15 bp, Homo sapiens
acctggggctgggca

SEQ ID NO: 1361475 - DNA, 15 bp, Homo sapiens
gacctggggctgggc

SEQ ID NO: 1361476 - DNA, 15 bp, Homo sapiens
cgacctggggctggg

SEQ ID NO: 1361477 - DNA, 15 bp, Homo sapiens
gcgacctggggctgg

SEQ ID NO: 1361478 - DNA, 15 bp, Homo sapiens
tgcgacctggggctg

SEQ ID NO: 1361479 - DNA, 15 bp, Homo sapiens
ctgcgacctggggct

SEQ ID NO: 1361480 - DNA, 15 bp, Homo sapiens
cctgcgacctggggc

SEQ ID NO: 1361481 - DNA, 15 bp, Homo sapiens
tcctgcgacctgggg

SEQ ID NO: 1361482 - DNA, 15 bp, Homo sapiens
ctcctgcgacctggg

SEQ ID NO: 1361483 - DNA, 15 bp, Homo sapiens
cctcctgcgacctgg

SEQ ID NO: 1361484 - DNA, 15 bp, Homo sapiens
acctcctgcgacctg

SEQ ID NO: 1361485 - DNA, 15 bp, Homo sapiens
tacctcctgcgacct

SEQ ID NO: 1361486 - DNA, 15 bp, Homo sapiens
ctacctcctgcgacc

SEQ ID NO: 1361487 - DNA, 15 bp, Homo sapiens
cctacctcctgcgac

SEQ ID NO: 1361488 - DNA, 15 bp, Homo sapiens
tcctacctcctgcga

SEQ ID NO: 1361489 - DNA, 15 bp, Homo sapiens
ctcctacctcctgcg

SEQ ID NO: 1361490 - DNA, 15 bp, Homo sapiens
cctcctacctcctgc

SEQ ID NO: 1361491 - DNA, 15 bp, Homo sapiens
gcctcctacctcctg

SEQ ID NO: 1361492 - DNA, 15 bp, Homo sapiens
ggcctcctacctcct

SEQ ID NO: 1361493 - DNA, 15 bp, Homo sapiens
gggcctcctacctcc

SEQ ID NO: 1361494 - DNA, 15 bp, Homo sapiens
ggggcctcctacctc

SEQ ID NO: 1361495 - DNA, 15 bp, Homo sapiens
gggggcctcctacct

SEQ ID NO: 1361496 - DNA, 15 bp, Homo sapiens
tgggggcctcctacc

SEQ ID NO: 1361497 - DNA, 15 bp, Homo sapiens
ctgggggcctcctac

SEQ ID NO: 1361498 - DNA, 15 bp, Homo sapiens
cctgggggcctccta

SEQ ID NO: 1361499 - DNA, 15 bp, Homo sapiens
acctgggggcctcct

SEQ ID NO: 1361500 - DNA, 15 bp, Homo sapiens
cacctgggggcctcc

SEQ ID NO: 1361501 - DNA, 15 bp, Homo sapiens
tcacctgggggcctc

SEQ ID NO: 1361502 - DNA, 15 bp, Homo sapiens
atcacctgggggcct

SEQ ID NO: 1361503 - DNA, 15 bp, Homo sapiens
catcacctgggggcc

SEQ ID NO: 1361504 - DNA, 15 bp, Homo sapiens
gcatcacctgggggc

SEQ ID NO: 1361505 - DNA, 15 bp, Homo sapiens
agcatcacctggggg

SEQ ID NO: 1361506 - DNA, 15 bp, Homo sapiens
cagcatcacctgggg

SEQ ID NO: 1361507 - DNA, 15 bp, Homo sapiens
acagcatcacctggg

SEQ ID NO: 1361508 - DNA, 15 bp, Homo sapiens
aacagcatcacctgg

SEQ ID NO: 1361509 - DNA, 15 bp, Homo sapiens
caacagcatcacctg

SEQ ID NO: 1361510 - DNA, 15 bp, Homo sapiens
gcaacagcatcacct

SEQ ID NO: 1361511 - DNA, 15 bp, Homo sapiens
agcaacagcatcacc

SEQ ID NO: 1361512 - DNA, 15 bp, Homo sapiens
tagcaacagcatcac

SEQ ID NO: 1361513 - DNA, 15 bp, Homo sapiens
gtagcaacagcatca

SEQ ID NO: 1361514 - DNA, 15 bp, Homo sapiens
cgtagcaacagcatc

SEQ ID NO: 1361515 - DNA, 15 bp, Homo sapiens
ccgtagcaacagcat

SEQ ID NO: 1361516 - DNA, 15 bp, Homo sapiens
tccgtagcaacagca

SEQ ID NO: 1361517 - DNA, 15 bp, Homo sapiens
ttccgtagcaacagc

SEQ ID NO: 1361518 - DNA, 15 bp, Homo sapiens
tttccgtagcaacag

SEQ ID NO: 1361519 - DNA, 15 bp, Homo sapiens
ttttccgtagcaaca

SEQ ID NO: 1361520 - DNA, 15 bp, Homo sapiens
tttttccgtagcaac

SEQ ID NO: 1361521 - DNA, 15 bp, Homo sapiens
ttttttccgtagcaa

SEQ ID NO: 1361522 - DNA, 15 bp, Homo sapiens
attttttccgtagca

SEQ ID NO: 1361523 - DNA, 15 bp, Homo sapiens
gattttttccgtagc

SEQ ID NO: 1361524 - DNA, 15 bp, Homo sapiens
tgattttttccgtag

SEQ ID NO: 1361525 - DNA, 15 bp, Homo sapiens
ctgattttttccgta

SEQ ID NO: 1361526 - DNA, 15 bp, Homo sapiens
tctgattttttccgt

SEQ ID NO: 1361527 - DNA, 15 bp, Homo sapiens
ctctgattttttccg

SEQ ID NO: 1361528 - DNA, 15 bp, Homo sapiens
cctctgattttttcc

SEQ ID NO: 1361529 - DNA, 15 bp, Homo sapiens
tcctctgattttttc

SEQ ID NO: 1361530 - DNA, 15 bp, Homo sapiens
ttcctctgatttttt

SEQ ID NO: 1361531 - DNA, 15 bp, Homo sapiens
attcctctgattttt

SEQ ID NO: 1361532 - DNA, 15 bp, Homo sapiens
cattcctctgatttt

SEQ ID NO: 1361533 - DNA, 15 bp, Homo sapiens
tcattcctctgattt

SEQ ID NO: 1361534 - DNA, 15 bp, Homo sapiens
gtcattcctctgatt

SEQ ID NO: 1361535 - DNA, 15 bp, Homo sapiens
cgtcattcctctgat

SEQ ID NO: 1361536 - DNA, 15 bp, Homo sapiens
ccgtcattcctctga

SEQ ID NO: 1361537 - DNA, 15 bp, Homo sapiens
gccgtcattcctctg

SEQ ID NO: 1361538 - DNA, 15 bp, Homo sapiens
cgccgtcattcctct

SEQ ID NO: 1361539 - DNA, 15 bp, Homo sapiens
ccgccgtcattcctc

SEQ ID NO: 1361540 - DNA, 15 bp, Homo sapiens
cccgccgtcattcct

SEQ ID NO: 1361541 - DNA, 15 bp, Homo sapiens
acccgccgtcattcc

SEQ ID NO: 1361542 - DNA, 15 bp, Homo sapiens
cacccgccgtcattc

SEQ ID NO: 1361543 - DNA, 15 bp, Homo sapiens
gcacccgccgtcatt

SEQ ID NO: 1361544 - DNA, 15 bp, Homo sapiens
tgcacccgccgtcat

SEQ ID NO: 1361545 - DNA, 15 bp, Homo sapiens
ctgcacccgccgtca

SEQ ID NO: 1361546 - DNA, 15 bp, Homo sapiens
cctgcacccgccgtc

SEQ ID NO: 1361547 - DNA, 15 bp, Homo sapiens
ccctgcacccgccgt

SEQ ID NO: 1361548 - DNA, 15 bp, Homo sapiens
tccctgcacccgccg

SEQ ID NO: 1361549 - DNA, 15 bp, Homo sapiens
gtccctgcacccgcc

SEQ ID NO: 1361550 - DNA, 15 bp, Homo sapiens
cgtccctgcacccgc

SEQ ID NO: 1361551 - DNA, 15 bp, Homo sapiens
gcgtccctgcacccg

SEQ ID NO: 1361552 - DNA, 15 bp, Homo sapiens
ggcgtccctgcaccc

SEQ ID NO: 1361553 - DNA, 15 bp, Homo sapiens
tggcgtccctgcacc

SEQ ID NO: 1361554 - DNA, 15 bp, Homo sapiens
ttggcgtccctgcac

SEQ ID NO: 1361555 - DNA, 15 bp, Homo sapiens
gttggcgtccctgca

SEQ ID NO: 1361556 - DNA, 15 bp, Homo sapiens
agttggcgtccctgc

SEQ ID NO: 1361557 - DNA, 15 bp, Homo sapiens
cagttggcgtccctg

SEQ ID NO: 1361558 - DNA, 15 bp, Homo sapiens
gcagttggcgtccct

SEQ ID NO: 1361559 - DNA, 15 bp, Homo sapiens
ggcagttggcgtccc

SEQ ID NO: 1361560 - DNA, 15 bp, Homo sapiens
aggcagttggcgtcc

SEQ ID NO: 1361561 - DNA, 15 bp, Homo sapiens
aaggcagttggcgtc

SEQ ID NO: 1361562 - DNA, 15 bp, Homo sapiens
gaaggcagttggcgt

SEQ ID NO: 1361563 - DNA, 15 bp, Homo sapiens
tgaaggcagttggcg

SEQ ID NO: 1361564 - DNA, 15 bp, Homo sapiens
ctgaaggcagttggc

SEQ ID NO: 1361565 - DNA, 15 bp, Homo sapiens
cctgaaggcagttgg

SEQ ID NO: 1361566 - DNA, 15 bp, Homo sapiens
tcctgaaggcagttg

SEQ ID NO: 1361567 - DNA, 15 bp, Homo sapiens
ttcctgaaggcagtt

SEQ ID NO: 1361568 - DNA, 15 bp, Homo sapiens
tttcctgaaggcagt

SEQ ID NO: 1361569 - DNA, 15 bp, Homo sapiens
atttcctgaaggcag

SEQ ID NO: 1361570 - DNA, 15 bp, Homo sapiens
catttcctgaaggca

SEQ ID NO: 1361571 - DNA, 15 bp, Homo sapiens
tcatttcctgaaggc

SEQ ID NO: 1361572 - DNA, 15 bp, Homo sapiens
ttcatttcctgaagg

SEQ ID NO: 1361573 - DNA, 15 bp, Homo sapiens
tttcatttcctgaag

SEQ ID NO: 1361574 - DNA, 15 bp, Homo sapiens
ctttcatttcctgaa

SEQ ID NO: 1361575 - DNA, 15 bp, Homo sapiens
tctttcatttcctga

SEQ ID NO: 1361576 - DNA, 15 bp, Homo sapiens
ctctttcatttcctg

SEQ ID NO: 1361577 - DNA, 15 bp, Homo sapiens
cctctttcatttcct

SEQ ID NO: 1361578 - DNA, 15 bp, Homo sapiens
acctctttcatttcc

SEQ ID NO: 1361579 - DNA, 15 bp, Homo sapiens
tacctctttcatttc

SEQ ID NO: 1361580 - DNA, 15 bp, Homo sapiens
atacctctttcattt

SEQ ID NO: 1361581 - DNA, 15 bp, Homo sapiens
gatacctctttcatt

SEQ ID NO: 1361582 - DNA, 15 bp, Homo sapiens
tgatacctctttcat

SEQ ID NO: 1361583 - DNA, 15 bp, Homo sapiens
ctgatacctctttca

SEQ ID NO: 1361584 - DNA, 15 bp, Homo sapiens
tctgatacctctttc

SEQ ID NO: 1361585 - DNA, 15 bp, Homo sapiens
atctgatacctcttt

SEQ ID NO: 1361586 - DNA, 15 bp, Homo sapiens
gatctgatacctctt

SEQ ID NO: 1361587 - DNA, 15 bp, Homo sapiens
cgatctgatacctct

SEQ ID NO: 1361588 - DNA, 15 bp, Homo sapiens
tcgatctgatacctc

SEQ ID NO: 1361589 - DNA, 15 bp, Homo sapiens
ttcgatctgatacct

SEQ ID NO: 1361590 - DNA, 15 bp, Homo sapiens
tttcgatctgatacc

SEQ ID NO: 1361591 - DNA, 15 bp, Homo sapiens
ttttcgatctgatac

SEQ ID NO: 1361592 - DNA, 15 bp, Homo sapiens
gttttcgatctgata

SEQ ID NO: 1361593 - DNA, 15 bp, Homo sapiens
tgttttcgatctgat

SEQ ID NO: 1361594 - DNA, 15 bp, Homo sapiens
gtgttttcgatctga

SEQ ID NO: 1361595 - DNA, 15 bp, Homo sapiens
agtgttttcgatctg

SEQ ID NO: 1361596 - DNA, 15 bp, Homo sapiens
tagtgttttcgatct

SEQ ID NO: 1361597 - DNA, 15 bp, Homo sapiens
atagtgttttcgatc

SEQ ID NO: 1361598 - DNA, 15 bp, Homo sapiens
gatagtgttttcgat

SEQ ID NO: 1361599 - DNA, 15 bp, Homo sapiens
tgatagtgttttcga

SEQ ID NO: 1361600 - DNA, 15 bp, Homo sapiens
gtgatagtgttttcg

SEQ ID NO: 1361601 - DNA, 15 bp, Homo sapiens
ggtgatagtgttttc

SEQ ID NO: 1361602 - DNA, 15 bp, Homo sapiens
gggtgatagtgtttt

SEQ ID NO: 1361603 - DNA, 15 bp, Homo sapiens
ggggtgatagtgttt

SEQ ID NO: 1361604 - DNA, 15 bp, Homo sapiens
tggggtgatagtgtt

SEQ ID NO: 1361605 - DNA, 15 bp, Homo sapiens
ctggggtgatagtgt

SEQ ID NO: 1361606 - DNA, 15 bp, Homo sapiens
cctggggtgatagtg

SEQ ID NO: 1361607 - DNA, 15 bp, Homo sapiens
gcctggggtgatagt

SEQ ID NO: 1361608 - DNA, 15 bp, Homo sapiens
agcctggggtgatag

SEQ ID NO: 1361609 - DNA, 15 bp, Homo sapiens
cagcctggggtgata

SEQ ID NO: 1361610 - DNA, 15 bp, Homo sapiens
ccagcctggggtgat

SEQ ID NO: 1361611 - DNA, 15 bp, Homo sapiens
cccagcctggggtga

SEQ ID NO: 1361612 - DNA, 15 bp, Homo sapiens
acccagcctggggtg

SEQ ID NO: 1361613 - DNA, 15 bp, Homo sapiens
cacccagcctggggt

SEQ ID NO: 1361614 - DNA, 15 bp, Homo sapiens
acacccagcctgggg

SEQ ID NO: 1361615 - DNA, 15 bp, Homo sapiens
cacacccagcctggg

SEQ ID NO: 1361616 - DNA, 15 bp, Homo sapiens
ccacacccagcctgg

SEQ ID NO: 1361617 - DNA, 15 bp, Homo sapiens
accacacccagcctg

SEQ ID NO: 1361618 - DNA, 15 bp, Homo sapiens
gacaggcgtgagcca

SEQ ID NO: 1361619 - DNA, 15 bp, Homo sapiens
tgacaggcgtgagcc

SEQ ID NO: 1361620 - DNA, 15 bp, Homo sapiens
atgacaggcgtgagc

SEQ ID NO: 1361621 - DNA, 15 bp, Homo sapiens
gatgacaggcgtgag

SEQ ID NO: 1361622 - DNA, 15 bp, Homo sapiens
ggatgacaggcgtga

SEQ ID NO: 1361623 - DNA, 15 bp, Homo sapiens
gggatgacaggcgtg

SEQ ID NO: 1361624 - DNA, 15 bp, Homo sapiens
tgggatgacaggcgt

SEQ ID NO: 1361625 - DNA, 15 bp, Homo sapiens
ctgggatgacaggcg

SEQ ID NO: 1361626 - DNA, 15 bp, Homo sapiens
tgctgggatgacagg

SEQ ID NO: 1361627 - DNA, 15 bp, Homo sapiens
gtgctgggatgacag

SEQ ID NO: 1361628 - DNA, 15 bp, Homo sapiens
agtgctgggatgaca

SEQ ID NO: 1361629 - DNA, 15 bp, Homo sapiens
aagtgctgggatgac

SEQ ID NO: 1361630 - DNA, 15 bp, Homo sapiens
taagtgctgggatga

SEQ ID NO: 1361631 - DNA, 15 bp, Homo sapiens
ctaagtgctgggatg

SEQ ID NO: 1361632 - DNA, 15 bp, Homo sapiens
tctaagtgctgggat

SEQ ID NO: 1361633 - DNA, 15 bp, Homo sapiens
ctctaagtgctggga

SEQ ID NO: 1361634 - DNA, 15 bp, Homo sapiens
tctctaagtgctggg

SEQ ID NO: 1361635 - DNA, 15 bp, Homo sapiens
ctctctaagtgctgg

SEQ ID NO: 1361636 - DNA, 15 bp, Homo sapiens
cctctctaagtgctg

SEQ ID NO: 1361637 - DNA, 15 bp, Homo sapiens
gcctctctaagtgct

SEQ ID NO: 1361638 - DNA, 15 bp, Homo sapiens
agcctctctaagtgc

SEQ ID NO: 1361639 - DNA, 15 bp, Homo sapiens
cagcctctctaagtg

SEQ ID NO: 1361640 - DNA, 15 bp, Homo sapiens
tcagcctctctaagt

SEQ ID NO: 1361641 - DNA, 15 bp, Homo sapiens
ctcagcctctctaag

SEQ ID NO: 1361642 - DNA, 15 bp, Homo sapiens
cctcagcctctctaa

SEQ ID NO: 1361643 - DNA, 15 bp, Homo sapiens
gcctcagcctctcta

SEQ ID NO: 1361644 - DNA, 15 bp, Homo sapiens
tgcctcagcctctct

SEQ ID NO: 1361645 - DNA, 15 bp, Homo sapiens
atgcctcagcctctc

SEQ ID NO: 1361646 - DNA, 15 bp, Homo sapiens
acatgcctcagcctc

SEQ ID NO: 1361647 - DNA, 15 bp, Homo sapiens
cacatgcctcagcct

SEQ ID NO: 1361648 - DNA, 15 bp, Homo sapiens
ccacatgcctcagcc

SEQ ID NO: 1361649 - DNA, 15 bp, Homo sapiens
tccacatgcctcagc

SEQ ID NO: 1361650 - DNA, 15 bp, Homo sapiens
atccacatgcctcag

SEQ ID NO: 1361651 - DNA, 15 bp, Homo sapiens
gatccacatgcctca

SEQ ID NO: 1361652 - DNA, 15 bp, Homo sapiens
tgatccacatgcctc

SEQ ID NO: 1361653 - DNA, 15 bp, Homo sapiens
gtgatccacatgcct

SEQ ID NO: 1361654 - DNA, 15 bp, Homo sapiens
agtgatccacatgcc

SEQ ID NO: 1361655 - DNA, 15 bp, Homo sapiens
aagtgatccacatgc

SEQ ID NO: 1361656 - DNA, 15 bp, Homo sapiens
caagtgatccacatg

SEQ ID NO: 1361657 - DNA, 15 bp, Homo sapiens
tcaagtgatccacat

SEQ ID NO: 1361658 - DNA, 15 bp, Homo sapiens
ctcaagtgatccaca

SEQ ID NO: 1361659 - DNA, 15 bp, Homo sapiens
gctcaagtgatccac

SEQ ID NO: 1361660 - DNA, 15 bp, Homo sapiens
tctcctgagctcaag

SEQ ID NO: 1361661 - DNA, 15 bp, Homo sapiens
atctcctgagctcaa

SEQ ID NO: 1361662 - DNA, 15 bp, Homo sapiens
gatctcctgagctca

SEQ ID NO: 1361663 - DNA, 15 bp, Homo sapiens
acccaggctggtctc

SEQ ID NO: 1361664 - DNA, 15 bp, Homo sapiens
tacccaggctggtct

SEQ ID NO: 1361665 - DNA, 15 bp, Homo sapiens
ttacccaggctggtc

SEQ ID NO: 1361666 - DNA, 15 bp, Homo sapiens
gttacccaggctggt

SEQ ID NO: 1361667 - DNA, 15 bp, Homo sapiens
atgttacccaggctg

SEQ ID NO: 1361668 - DNA, 15 bp, Homo sapiens
catgttacccaggct

SEQ ID NO: 1361669 - DNA, 15 bp, Homo sapiens
tcatgttacccaggc

SEQ ID NO: 1361670 - DNA, 15 bp, Homo sapiens
atcatgttacccagg

SEQ ID NO: 1361671 - DNA, 15 bp, Homo sapiens
catcatgttacccag

SEQ ID NO: 1361672 - DNA, 15 bp, Homo sapiens
tcatcatgttaccca

SEQ ID NO: 1361673 - DNA, 15 bp, Homo sapiens
ttcatcatgttaccc

SEQ ID NO: 1361674 - DNA, 15 bp, Homo sapiens
tttcatcatgttacc

SEQ ID NO: 1361675 - DNA, 15 bp, Homo sapiens
gtttcatcatgttac

SEQ ID NO: 1361676 - DNA, 15 bp, Homo sapiens
ggtttcatcatgtta

SEQ ID NO: 1361677 - DNA, 15 bp, Homo sapiens
aggtttcatcatgtt

SEQ ID NO: 1361678 - DNA, 15 bp, Homo sapiens
gaggtttcatcatgt

SEQ ID NO: 1361679 - DNA, 15 bp, Homo sapiens
cgaggtttcatcatg

SEQ ID NO: 1361680 - DNA, 15 bp, Homo sapiens
acgaggtttcatcat

SEQ ID NO: 1361681 - DNA, 15 bp, Homo sapiens
gacgaggtttcatca

SEQ ID NO: 1361682 - DNA, 15 bp, Homo sapiens
agacgaggtttcatc

SEQ ID NO: 1361683 - DNA, 15 bp, Homo sapiens
gagacgaggtttcat

SEQ ID NO: 1361684 - DNA, 15 bp, Homo sapiens
gcaatttttgtattt

SEQ ID NO: 1361685 - DNA, 15 bp, Homo sapiens
ggcaatttttgtatt

SEQ ID NO: 1361686 - DNA, 15 bp, Homo sapiens
gggcaatttttgtat

SEQ ID NO: 1361687 - DNA, 15 bp, Homo sapiens
tgggcaatttttgta

SEQ ID NO: 1361688 - DNA, 15 bp, Homo sapiens
ctgggcaatttttgt

SEQ ID NO: 1361689 - DNA, 15 bp, Homo sapiens
cctgggcaatttttg

SEQ ID NO: 1361690 - DNA, 15 bp, Homo sapiens
acctgggcaattttt

SEQ ID NO: 1361691 - DNA, 15 bp, Homo sapiens
cacctgggcaatttt

SEQ ID NO: 1361692 - DNA, 15 bp, Homo sapiens
gcacctgggcaattt

SEQ ID NO: 1361693 - DNA, 15 bp, Homo sapiens
cgcacctgggcaatt

SEQ ID NO: 1361694 - DNA, 15 bp, Homo sapiens
ccgcacctgggcaat

SEQ ID NO: 1361695 - DNA, 15 bp, Homo sapiens
accgcacctgggcaa

SEQ ID NO: 1361696 - DNA, 15 bp, Homo sapiens
caccgcacctgggca

SEQ ID NO: 1361697 - DNA, 15 bp, Homo sapiens
ccaccgcacctgggc

SEQ ID NO: 1361698 - DNA, 15 bp, Homo sapiens
gccaccgcacctggg

SEQ ID NO: 1361699 - DNA, 15 bp, Homo sapiens
ttgcccacctcggcc

SEQ ID NO: 1361700 - DNA, 15 bp, Homo sapiens
tttgcccacctcggc

SEQ ID NO: 1361701 - DNA, 15 bp, Homo sapiens
atttgcccacctcgg

SEQ ID NO: 1361702 - DNA, 15 bp, Homo sapiens
gatttgcccacctcg

SEQ ID NO: 1361703 - DNA, 15 bp, Homo sapiens
agtgatttgcccacc

SEQ ID NO: 1361704 - DNA, 15 bp, Homo sapiens
tagtgatttgcccac

SEQ ID NO: 1361705 - DNA, 15 bp, Homo sapiens
ctagtgatttgccca

SEQ ID NO: 1361706 - DNA, 15 bp, Homo sapiens
cctagtgatttgccc

SEQ ID NO: 1361707 - DNA, 15 bp, Homo sapiens
acctagtgatttgcc

SEQ ID NO: 1361708 - DNA, 15 bp, Homo sapiens
gacctagtgatttgc

SEQ ID NO: 1361709 - DNA, 15 bp, Homo sapiens
tgacctagtgatttg

SEQ ID NO: 1361710 - DNA, 15 bp, Homo sapiens
ctgacctagtgattt

SEQ ID NO: 1361711 - DNA, 15 bp, Homo sapiens
cctgacctagtgatt

SEQ ID NO: 1361712 - DNA, 15 bp, Homo sapiens
tcctgacctagtgat

SEQ ID NO: 1361713 - DNA, 15 bp, Homo sapiens
ctcctgacctagtga

SEQ ID NO: 1361714 - DNA, 15 bp, Homo sapiens
actcctgacctagtg

SEQ ID NO: 1361715 - DNA, 15 bp, Homo sapiens
aactcctgacctagt

SEQ ID NO: 1361716 - DNA, 15 bp, Homo sapiens
aaactcctgacctag

SEQ ID NO: 1361717 - DNA, 15 bp, Homo sapiens
caaactcctgaccta

SEQ ID NO: 1361718 - DNA, 15 bp, Homo sapiens
accaggatggtctca

SEQ ID NO: 1361719 - DNA, 15 bp, Homo sapiens
gaccaggatggtctc

SEQ ID NO: 1361720 - DNA, 15 bp, Homo sapiens
tgaccaggatggtct

SEQ ID NO: 1361721 - DNA, 15 bp, Homo sapiens
ttgaccaggatggtc

SEQ ID NO: 1361722 - DNA, 15 bp, Homo sapiens
gttgaccaggatggt

SEQ ID NO: 1361723 - DNA, 15 bp, Homo sapiens
tgttgaccaggatgg

SEQ ID NO: 1361724 - DNA, 15 bp, Homo sapiens
atgttgaccaggatg

SEQ ID NO: 1361725 - DNA, 15 bp, Homo sapiens
catgttgaccaggat

SEQ ID NO: 1361726 - DNA, 15 bp, Homo sapiens
ccatgttgaccagga

SEQ ID NO: 1361727 - DNA, 15 bp, Homo sapiens
ctttttgtattttta

SEQ ID NO: 1361728 - DNA, 15 bp, Homo sapiens
actttttgtattttt

SEQ ID NO: 1361729 - DNA, 15 bp, Homo sapiens
aactttttgtatttt

SEQ ID NO: 1361730 - DNA, 15 bp, Homo sapiens
taactttttgtattt

SEQ ID NO: 1361731 - DNA, 15 bp, Homo sapiens
ctaactttttgtatt

SEQ ID NO: 1361732 - DNA, 15 bp, Homo sapiens
gctaactttttgtat

SEQ ID NO: 1361733 - DNA, 15 bp, Homo sapiens
agctaactttttgta

SEQ ID NO: 1361734 - DNA, 15 bp, Homo sapiens
cagctaactttttgt

SEQ ID NO: 1361735 - DNA, 15 bp, Homo sapiens
ccagctaactttttg

SEQ ID NO: 1361736 - DNA, 15 bp, Homo sapiens
gcccagctaactttt

SEQ ID NO: 1361737 - DNA, 15 bp, Homo sapiens
cgcccagctaacttt

SEQ ID NO: 1361738 - DNA, 15 bp, Homo sapiens
acgcccagctaactt

SEQ ID NO: 1361739 - DNA, 15 bp, Homo sapiens
tacgcccagctaact

SEQ ID NO: 1361740 - DNA, 15 bp, Homo sapiens
ctacgcccagctaac

SEQ ID NO: 1361741 - DNA, 15 bp, Homo sapiens
gccactacgcccagc

SEQ ID NO: 1361742 - DNA, 15 bp, Homo sapiens
cgccactacgcccag

SEQ ID NO: 1361743 - DNA, 15 bp, Homo sapiens
ccgccactacgccca

SEQ ID NO: 1361744 - DNA, 15 bp, Homo sapiens
tattacaggcacccg

SEQ ID NO: 1361745 - DNA, 15 bp, Homo sapiens
gtattacaggcaccc

SEQ ID NO: 1361746 - DNA, 15 bp, Homo sapiens
ggtattacaggcacc

SEQ ID NO: 1361747 - DNA, 15 bp, Homo sapiens
tggtattacaggcac

SEQ ID NO: 1361748 - DNA, 15 bp, Homo sapiens
ctggtattacaggca

SEQ ID NO: 1361749 - DNA, 15 bp, Homo sapiens
agctggtattacagg

SEQ ID NO: 1361750 - DNA, 15 bp, Homo sapiens
tagctggtattacag

SEQ ID NO: 1361751 - DNA, 15 bp, Homo sapiens
gtagctggtattaca

SEQ ID NO: 1361752 - DNA, 15 bp, Homo sapiens
agtagctggtattac

SEQ ID NO: 1361753 - DNA, 15 bp, Homo sapiens
aagtagctggtatta

SEQ ID NO: 1361754 - DNA, 15 bp, Homo sapiens
caagtagctggtatt

SEQ ID NO: 1361755 - DNA, 15 bp, Homo sapiens
gcaagtagctggtat

SEQ ID NO: 1361756 - DNA, 15 bp, Homo sapiens
cgcaagtagctggta

SEQ ID NO: 1361757 - DNA, 15 bp, Homo sapiens
tcgcaagtagctggt

SEQ ID NO: 1361758 - DNA, 15 bp, Homo sapiens
ctcgcaagtagctgg

SEQ ID NO: 1361759 - DNA, 15 bp, Homo sapiens
cctcgcaagtagctg

SEQ ID NO: 1361760 - DNA, 15 bp, Homo sapiens
gcctcgcaagtagct

SEQ ID NO: 1361761 - DNA, 15 bp, Homo sapiens
agcctcgcaagtagc

SEQ ID NO: 1361762 - DNA, 15 bp, Homo sapiens
cagcctcgcaagtag

SEQ ID NO: 1361763 - DNA, 15 bp, Homo sapiens
tcagcctcgcaagta

SEQ ID NO: 1361764 - DNA, 15 bp, Homo sapiens
ctcagcctcgcaagt

SEQ ID NO: 1361765 - DNA, 15 bp, Homo sapiens
cctcagcctcgcaag

SEQ ID NO: 1361766 - DNA, 15 bp, Homo sapiens
gcctcagcctcgcaa

SEQ ID NO: 1361767 - DNA, 15 bp, Homo sapiens
tgcctcagcctcgca

SEQ ID NO: 1361768 - DNA, 15 bp, Homo sapiens
ctgcctcagcctcgc

SEQ ID NO: 1361769 - DNA, 15 bp, Homo sapiens
tctgggttcaagcga

SEQ ID NO: 1361770 - DNA, 15 bp, Homo sapiens
ttctgggttcaagcg

SEQ ID NO: 1361771 - DNA, 15 bp, Homo sapiens
acttctgggttcaag

SEQ ID NO: 1361772 - DNA, 15 bp, Homo sapiens
gacttctgggttcaa

SEQ ID NO: 1361773 - DNA, 15 bp, Homo sapiens
tgacttctgggttca

SEQ ID NO: 1361774 - DNA, 15 bp, Homo sapiens
ctgacttctgggttc

SEQ ID NO: 1361775 - DNA, 15 bp, Homo sapiens
tctgacttctgggtt

SEQ ID NO: 1361776 - DNA, 15 bp, Homo sapiens
ctctgacttctgggt

SEQ ID NO: 1361777 - DNA, 15 bp, Homo sapiens
cctctgacttctggg

SEQ ID NO: 1361778 - DNA, 15 bp, Homo sapiens
acctctgacttctgg

SEQ ID NO: 1361779 - DNA, 15 bp, Homo sapiens
aacctctgacttctg

SEQ ID NO: 1361780 - DNA, 15 bp, Homo sapiens
caacctctgacttct

SEQ ID NO: 1361781 - DNA, 15 bp, Homo sapiens
gcaacctctgacttc

SEQ ID NO: 1361782 - DNA, 15 bp, Homo sapiens
tgcaacctctgactt

SEQ ID NO: 1361783 - DNA, 15 bp, Homo sapiens
ctgcaacctctgact

SEQ ID NO: 1361784 - DNA, 15 bp, Homo sapiens
actgcaacctctgac

SEQ ID NO: 1361785 - DNA, 15 bp, Homo sapiens
cactgcaacctctga

SEQ ID NO: 1361786 - DNA, 15 bp, Homo sapiens
agggctggagtgcag

SEQ ID NO: 1361787 - DNA, 15 bp, Homo sapiens
tagggctggagtgca

SEQ ID NO: 1361788 - DNA, 15 bp, Homo sapiens
ctagggctggagtgc

SEQ ID NO: 1361789 - DNA, 15 bp, Homo sapiens
actagggctggagtg

SEQ ID NO: 1361790 - DNA, 15 bp, Homo sapiens
cactagggctggagt

SEQ ID NO: 1361791 - DNA, 15 bp, Homo sapiens
tcactagggctggag

SEQ ID NO: 1361792 - DNA, 15 bp, Homo sapiens
gtcactagggctgga

SEQ ID NO: 1361793 - DNA, 15 bp, Homo sapiens
tgtcactagggctgg

SEQ ID NO: 1361794 - DNA, 15 bp, Homo sapiens
ctgtcactagggctg

SEQ ID NO: 1361795 - DNA, 15 bp, Homo sapiens
actgtcactagggct

SEQ ID NO: 1361796 - DNA, 15 bp, Homo sapiens
tactgtcactagggc

SEQ ID NO: 1361797 - DNA, 15 bp, Homo sapiens
atactgtcactaggg

SEQ ID NO: 1361798 - DNA, 15 bp, Homo sapiens
catactgtcactagg

SEQ ID NO: 1361799 - DNA, 15 bp, Homo sapiens
tcatactgtcactag

SEQ ID NO: 1361800 - DNA, 15 bp, Homo sapiens
ctcatactgtcacta

SEQ ID NO: 1361801 - DNA, 15 bp, Homo sapiens
tctcatactgtcact

SEQ ID NO: 1361802 - DNA, 15 bp, Homo sapiens
gtctcatactgtcac

SEQ ID NO: 1361803 - DNA, 15 bp, Homo sapiens
agtctcatactgtca

SEQ ID NO: 1361804 - DNA, 15 bp, Homo sapiens
gagtctcatactgtc

SEQ ID NO: 1361805 - DNA, 15 bp, Homo sapiens
ggagtctcatactgt

SEQ ID NO: 1361806 - DNA, 15 bp, Homo sapiens
cggagtctcatactg

SEQ ID NO: 1361807 - DNA, 15 bp, Homo sapiens
acggagtctcatact

SEQ ID NO: 1361808 - DNA, 15 bp, Homo sapiens
gacggagtctcatac

SEQ ID NO: 1361809 - DNA, 15 bp, Homo sapiens
agacggagtctcata

SEQ ID NO: 1361810 - DNA, 15 bp, Homo sapiens
ggtaatttttttttt

SEQ ID NO: 1361811 - DNA, 15 bp, Homo sapiens
gggtaattttttttt

SEQ ID NO: 1361812 - DNA, 15 bp, Homo sapiens
cgggtaatttttttt

SEQ ID NO: 1361813 - DNA, 15 bp, Homo sapiens
tcgggtaattttttt

SEQ ID NO: 1361814 - DNA, 15 bp, Homo sapiens
gtcgggtaatttttt

SEQ ID NO: 1361815 - DNA, 15 bp, Homo sapiens
ggtcgggtaattttt

SEQ ID NO: 1361816 - DNA, 15 bp, Homo sapiens
tggtcgggtaatttt

SEQ ID NO: 1361817 - DNA, 15 bp, Homo sapiens
atggtcgggtaattt

SEQ ID NO: 1361818 - DNA, 15 bp, Homo sapiens
catggtcgggtaatt

SEQ ID NO: 1361819 - DNA, 15 bp, Homo sapiens
ccatggtcgggtaat

SEQ ID NO: 1361820 - DNA, 15 bp, Homo sapiens
accatggtcgggtaa

SEQ ID NO: 1361821 - DNA, 15 bp, Homo sapiens
caccatggtcgggta

SEQ ID NO: 1361822 - DNA, 15 bp, Homo sapiens
ccaccatggtcgggt

SEQ ID NO: 1361823 - DNA, 15 bp, Homo sapiens
gccaccatggtcggg

SEQ ID NO: 1361824 - DNA, 15 bp, Homo sapiens
cgccaccatggtcgg

SEQ ID NO: 1361825 - DNA, 15 bp, Homo sapiens
ccgccaccatggtcg

SEQ ID NO: 1361826 - DNA, 15 bp, Homo sapiens
gccgccaccatggtc

SEQ ID NO: 1361827 - DNA, 15 bp, Homo sapiens
cgccgccaccatggt

SEQ ID NO: 1361828 - DNA, 15 bp, Homo sapiens
gcgccgccaccatgg

SEQ ID NO: 1361829 - DNA, 15 bp, Homo sapiens
ggcgccgccaccatg

SEQ ID NO: 1361830 - DNA, 15 bp, Homo sapiens
aggcgccgccaccat

SEQ ID NO: 1361831 - DNA, 15 bp, Homo sapiens
caggcgccgccacca

SEQ ID NO: 1361832 - DNA, 15 bp, Homo sapiens
acaggcgccgccacc

SEQ ID NO: 1361833 - DNA, 15 bp, Homo sapiens
tacaggcgccgccac

SEQ ID NO: 1361834 - DNA, 15 bp, Homo sapiens
ttacaggcgccgcca

SEQ ID NO: 1361835 - DNA, 15 bp, Homo sapiens
attacaggcgccgcc

SEQ ID NO: 1361836 - DNA, 15 bp, Homo sapiens
gattacaggcgccgc

SEQ ID NO: 1361837 - DNA, 15 bp, Homo sapiens
ggattacaggcgccg

SEQ ID NO: 1361838 - DNA, 15 bp, Homo sapiens
gttcaagcagttctc

SEQ ID NO: 1361839 - DNA, 15 bp, Homo sapiens
ggttcaagcagttct

SEQ ID NO: 1361840 - DNA, 15 bp, Homo sapiens
gggttcaagcagttc

SEQ ID NO: 1361841 - DNA, 15 bp, Homo sapiens
cgggttcaagcagtt

SEQ ID NO: 1361842 - DNA, 15 bp, Homo sapiens
ccgggttcaagcagt

SEQ ID NO: 1361843 - DNA, 15 bp, Homo sapiens
cccgggttcaagcag

SEQ ID NO: 1361844 - DNA, 15 bp, Homo sapiens
ttcccgggttcaagc

SEQ ID NO: 1361845 - DNA, 15 bp, Homo sapiens
tgcttcccgggttca

SEQ ID NO: 1361846 - DNA, 15 bp, Homo sapiens
ctgcttcccgggttc

SEQ ID NO: 1361847 - DNA, 15 bp, Homo sapiens
tctgcttcccgggtt

SEQ ID NO: 1361848 - DNA, 15 bp, Homo sapiens
ctctgcttcccgggt

SEQ ID NO: 1361849 - DNA, 15 bp, Homo sapiens
cctctgcttcccggg

SEQ ID NO: 1361850 - DNA, 15 bp, Homo sapiens
acctctgcttcccgg

SEQ ID NO: 1361851 - DNA, 15 bp, Homo sapiens
aacctctgcttcccg

SEQ ID NO: 1361852 - DNA, 15 bp, Homo sapiens
gaacctctgcttccc

SEQ ID NO: 1361853 - DNA, 15 bp, Homo sapiens
ggaacctctgcttcc

SEQ ID NO: 1361854 - DNA, 15 bp, Homo sapiens
tggaacctctgcttc

SEQ ID NO: 1361855 - DNA, 15 bp, Homo sapiens
ctggaacctctgctt

SEQ ID NO: 1361856 - DNA, 15 bp, Homo sapiens
actggaacctctgct

SEQ ID NO: 1361857 - DNA, 15 bp, Homo sapiens
cactggaacctctgc

SEQ ID NO: 1361858 - DNA, 15 bp, Homo sapiens
tcactggaacctctg

SEQ ID NO: 1361859 - DNA, 15 bp, Homo sapiens
ctcactggaacctct

SEQ ID NO: 1361860 - DNA, 15 bp, Homo sapiens
gctcactggaacctc

SEQ ID NO: 1361861 - DNA, 15 bp, Homo sapiens
ggctcactggaacct

SEQ ID NO: 1361862 - DNA, 15 bp, Homo sapiens
gggctcactggaacc

SEQ ID NO: 1361863 - DNA, 15 bp, Homo sapiens
tgggctcactggaac

SEQ ID NO: 1361864 - DNA, 15 bp, Homo sapiens
ctgggctcactggaa

SEQ ID NO: 1361865 - DNA, 15 bp, Homo sapiens
tctgggctcactgga

SEQ ID NO: 1361866 - DNA, 15 bp, Homo sapiens
atctgggctcactgg

SEQ ID NO: 1361867 - DNA, 15 bp, Homo sapiens
ggtgtgatctgggct

SEQ ID NO: 1361868 - DNA, 15 bp, Homo sapiens
tggtgtgatctgggc

SEQ ID NO: 1361869 - DNA, 15 bp, Homo sapiens
gtggtgtgatctggg

SEQ ID NO: 1361870 - DNA, 15 bp, Homo sapiens
agtggtgtgatctgg

SEQ ID NO: 1361871 - DNA, 15 bp, Homo sapiens
cagtggtgtgatctg

SEQ ID NO: 1361872 - DNA, 15 bp, Homo sapiens
tctcaggctggagtg

SEQ ID NO: 1361873 - DNA, 15 bp, Homo sapiens
ctctcaggctggagt

SEQ ID NO: 1361874 - DNA, 15 bp, Homo sapiens
tctctcaggctggag

SEQ ID NO: 1361875 - DNA, 15 bp, Homo sapiens
gtctctcaggctgga

SEQ ID NO: 1361876 - DNA, 15 bp, Homo sapiens
tgtctctcaggctgg

SEQ ID NO: 1361877 - DNA, 15 bp, Homo sapiens
ctgtctctcaggctg

SEQ ID NO: 1361878 - DNA, 15 bp, Homo sapiens
tctgtctctcaggct

SEQ ID NO: 1361879 - DNA, 15 bp, Homo sapiens
ctctgtctctcaggc

SEQ ID NO: 1361880 - DNA, 15 bp, Homo sapiens
actctgtctctcagg

SEQ ID NO: 1361881 - DNA, 15 bp, Homo sapiens
tactctgtctctcag

SEQ ID NO: 1361882 - DNA, 15 bp, Homo sapiens
ttactctgtctctca

SEQ ID NO: 1361883 - DNA, 15 bp, Homo sapiens
cttactctgtctctc

SEQ ID NO: 1361884 - DNA, 15 bp, Homo sapiens
tcttactctgtctct

SEQ ID NO: 1361885 - DNA, 15 bp, Homo sapiens
gtcttactctgtctc

SEQ ID NO: 1361886 - DNA, 15 bp, Homo sapiens
agtcttactctgtct

SEQ ID NO: 1361887 - DNA, 15 bp, Homo sapiens
gagtcttactctgtc

SEQ ID NO: 1361888 - DNA, 15 bp, Homo sapiens
cagagtcttactctg

SEQ ID NO: 1361889 - DNA, 15 bp, Homo sapiens
acagagtcttactct

SEQ ID NO: 1361890 - DNA, 15 bp, Homo sapiens
accttttcttttttt

SEQ ID NO: 1361891 - DNA, 15 bp, Homo sapiens
caccttttctttttt

SEQ ID NO: 1361892 - DNA, 15 bp, Homo sapiens
ccaccttttcttttt

SEQ ID NO: 1361893 - DNA, 15 bp, Homo sapiens
gccaccttttctttt

SEQ ID NO: 1361894 - DNA, 15 bp, Homo sapiens
agccaccttttcttt

SEQ ID NO: 1361895 - DNA, 15 bp, Homo sapiens
gagccaccttttctt

SEQ ID NO: 1361896 - DNA, 15 bp, Homo sapiens
tgagccaccttttct

SEQ ID NO: 1361897 - DNA, 15 bp, Homo sapiens
gtgagccaccttttc

SEQ ID NO: 1361898 - DNA, 15 bp, Homo sapiens
cgtgagccacctttt

SEQ ID NO: 1361899 - DNA, 15 bp, Homo sapiens
acgtgagccaccttt

SEQ ID NO: 1361900 - DNA, 15 bp, Homo sapiens
gacgtgagccacctt

SEQ ID NO: 1361901 - DNA, 15 bp, Homo sapiens
agacgtgagccacct

SEQ ID NO: 1361902 - DNA, 15 bp, Homo sapiens
ctacagacgtgagcc

SEQ ID NO: 1361903 - DNA, 15 bp, Homo sapiens
actacagacgtgagc

SEQ ID NO: 1361904 - DNA, 15 bp, Homo sapiens
gactacagacgtgag

SEQ ID NO: 1361905 - DNA, 15 bp, Homo sapiens
ggactacagacgtga

SEQ ID NO: 1361906 - DNA, 15 bp, Homo sapiens
gggactacagacgtg

SEQ ID NO: 1361907 - DNA, 15 bp, Homo sapiens
tgggactacagacgt

SEQ ID NO: 1361908 - DNA, 15 bp, Homo sapiens
tgctgggactacaga

SEQ ID NO: 1361909 - DNA, 15 bp, Homo sapiens
ggagacagggtttca

SEQ ID NO: 1361910 - DNA, 15 bp, Homo sapiens
tggagacagggtttc

SEQ ID NO: 1361911 - DNA, 15 bp, Homo sapiens
atggagacagggttt

SEQ ID NO: 1361912 - DNA, 15 bp, Homo sapiens
aatggagacagggtt

SEQ ID NO: 1361913 - DNA, 15 bp, Homo sapiens
taatggagacagggt

SEQ ID NO: 1361914 - DNA, 15 bp, Homo sapiens
ttaatggagacaggg

SEQ ID NO: 1361915 - DNA, 15 bp, Homo sapiens
tttaatggagacagg

SEQ ID NO: 1361916 - DNA, 15 bp, Homo sapiens
ttttaatggagacag

SEQ ID NO: 1361917 - DNA, 15 bp, Homo sapiens
tttttaatggagaca

SEQ ID NO: 1361918 - DNA, 15 bp, Homo sapiens
atttttaatggagac

SEQ ID NO: 1361919 - DNA, 15 bp, Homo sapiens
tatttttaatggaga

SEQ ID NO: 1361920 - DNA, 15 bp, Homo sapiens
gtatttttaatggag

SEQ ID NO: 1361921 - DNA, 15 bp, Homo sapiens
tgtatttttaatgga

SEQ ID NO: 1361922 - DNA, 15 bp, Homo sapiens
ttgtatttttaatgg

SEQ ID NO: 1361923 - DNA, 15 bp, Homo sapiens
tttgtatttttaatg

SEQ ID NO: 1361924 - DNA, 15 bp, Homo sapiens
gatttttgtattttt

SEQ ID NO: 1361925 - DNA, 15 bp, Homo sapiens
tgatttttgtatttt

SEQ ID NO: 1361926 - DNA, 15 bp, Homo sapiens
ctgatttttgtattt

SEQ ID NO: 1361927 - DNA, 15 bp, Homo sapiens
gctgatttttgtatt

SEQ ID NO: 1361928 - DNA, 15 bp, Homo sapiens
ggctgatttttgtat

SEQ ID NO: 1361929 - DNA, 15 bp, Homo sapiens
aggctgatttttgta

SEQ ID NO: 1361930 - DNA, 15 bp, Homo sapiens
caggctgatttttgt

SEQ ID NO: 1361931 - DNA, 15 bp, Homo sapiens
ccaggctgatttttg

SEQ ID NO: 1361932 - DNA, 15 bp, Homo sapiens
accaggctgattttt

SEQ ID NO: 1361933 - DNA, 15 bp, Homo sapiens
caccaggctgatttt

SEQ ID NO: 1361934 - DNA, 15 bp, Homo sapiens
acaccaggctgattt

SEQ ID NO: 1361935 - DNA, 15 bp, Homo sapiens
cacaccaggctgatt

SEQ ID NO: 1361936 - DNA, 15 bp, Homo sapiens
ccacaccaggctgat

SEQ ID NO: 1361937 - DNA, 15 bp, Homo sapiens
accacaccaggctga

SEQ ID NO: 1361938 - DNA, 15 bp, Homo sapiens
caccacaccaggctg

SEQ ID NO: 1361939 - DNA, 15 bp, Homo sapiens
tgccaccacaccagg

SEQ ID NO: 1361940 - DNA, 15 bp, Homo sapiens
gtgccaccacaccag

SEQ ID NO: 1361941 - DNA, 15 bp, Homo sapiens
cgtgccaccacacca

SEQ ID NO: 1361942 - DNA, 15 bp, Homo sapiens
gcaggcacgtgccac

SEQ ID NO: 1361943 - DNA, 15 bp, Homo sapiens
tgcaggcacgtgcca

SEQ ID NO: 1361944 - DNA, 15 bp, Homo sapiens
ttgcaggcacgtgcc

SEQ ID NO: 1361945 - DNA, 15 bp, Homo sapiens
attgcaggcacgtgc

SEQ ID NO: 1361946 - DNA, 15 bp, Homo sapiens
gattgcaggcacgtg

SEQ ID NO: 1361947 - DNA, 15 bp, Homo sapiens
ggattgcaggcacgt

SEQ ID NO: 1361948 - DNA, 15 bp, Homo sapiens
gggattgcaggcacg

SEQ ID NO: 1361949 - DNA, 15 bp, Homo sapiens
tgggattgcaggcac

SEQ ID NO: 1361950 - DNA, 15 bp, Homo sapiens
ctgggattgcaggca

SEQ ID NO: 1361951 - DNA, 15 bp, Homo sapiens
gctgggattgcaggc

SEQ ID NO: 1361952 - DNA, 15 bp, Homo sapiens
agctgggattgcagg

SEQ ID NO: 1361953 - DNA, 15 bp, Homo sapiens
gagtagctgggattg

SEQ ID NO: 1361954 - DNA, 15 bp, Homo sapiens
gttcttctgcctcag

SEQ ID NO: 1361955 - DNA, 15 bp, Homo sapiens
ggttcttctgcctca

SEQ ID NO: 1361956 - DNA, 15 bp, Homo sapiens
cggttcttctgcctc

SEQ ID NO: 1361957 - DNA, 15 bp, Homo sapiens
gcggttcttctgcct

SEQ ID NO: 1361958 - DNA, 15 bp, Homo sapiens
agcggttcttctgcc

SEQ ID NO: 1361959 - DNA, 15 bp, Homo sapiens
aagcggttcttctgc

SEQ ID NO: 1361960 - DNA, 15 bp, Homo sapiens
caagcggttcttctg

SEQ ID NO: 1361961 - DNA, 15 bp, Homo sapiens
tcaagcggttcttct

SEQ ID NO: 1361962 - DNA, 15 bp, Homo sapiens
ttcaagcggttcttc

SEQ ID NO: 1361963 - DNA, 15 bp, Homo sapiens
gttcaagcggttctt

SEQ ID NO: 1361964 - DNA, 15 bp, Homo sapiens
ggttcaagcggttct

SEQ ID NO: 1361965 - DNA, 15 bp, Homo sapiens
gggttcaagcggttc

SEQ ID NO: 1361966 - DNA, 15 bp, Homo sapiens
cgggttcaagcggtt

SEQ ID NO: 1361967 - DNA, 15 bp, Homo sapiens
ccgggttcaagcggt

SEQ ID NO: 1361968 - DNA, 15 bp, Homo sapiens
cccgggttcaagcgg

SEQ ID NO: 1361969 - DNA, 15 bp, Homo sapiens
cctgcctcccgggtt

SEQ ID NO: 1361970 - DNA, 15 bp, Homo sapiens
ccctgcctcccgggt

SEQ ID NO: 1361971 - DNA, 15 bp, Homo sapiens
cccctgcctcccggg

SEQ ID NO: 1361972 - DNA, 15 bp, Homo sapiens
acccctgcctcccgg

SEQ ID NO: 1361973 - DNA, 15 bp, Homo sapiens
aacccctgcctcccg

SEQ ID NO: 1361974 - DNA, 15 bp, Homo sapiens
gcaacccctgcctcc

SEQ ID NO: 1361975 - DNA, 15 bp, Homo sapiens
tgcaacccctgcctc

SEQ ID NO: 1361976 - DNA, 15 bp, Homo sapiens
ctgcaacccctgcct

SEQ ID NO: 1361977 - DNA, 15 bp, Homo sapiens
actgcaacccctgcc

SEQ ID NO: 1361978 - DNA, 15 bp, Homo sapiens
cactgcaacccctgc

SEQ ID NO: 1361979 - DNA, 15 bp, Homo sapiens
tcactgcaacccctg

SEQ ID NO: 1361980 - DNA, 15 bp, Homo sapiens
atcactgcaacccct

SEQ ID NO: 1361981 - DNA, 15 bp, Homo sapiens
gatcactgcaacccc

SEQ ID NO: 1361982 - DNA, 15 bp, Homo sapiens
agatcactgcaaccc

SEQ ID NO: 1361983 - DNA, 15 bp, Homo sapiens
cagatcactgcaacc

SEQ ID NO: 1361984 - DNA, 15 bp, Homo sapiens
tcagatcactgcaac

SEQ ID NO: 1361985 - DNA, 15 bp, Homo sapiens
ctcagatcactgcaa

SEQ ID NO: 1361986 - DNA, 15 bp, Homo sapiens
tctcagatcactgca

SEQ ID NO: 1361987 - DNA, 15 bp, Homo sapiens
atctcagatcactgc

SEQ ID NO: 1361988 - DNA, 15 bp, Homo sapiens
gatctcagatcactg

SEQ ID NO: 1361989 - DNA, 15 bp, Homo sapiens
ggatctcagatcact

SEQ ID NO: 1361990 - DNA, 15 bp, Homo sapiens
tggatctcagatcac

SEQ ID NO: 1361991 - DNA, 15 bp, Homo sapiens
ctggatctcagatca

SEQ ID NO: 1361992 - DNA, 15 bp, Homo sapiens
gctggatctcagatc

SEQ ID NO: 1361993 - DNA, 15 bp, Homo sapiens
ggctggatctcagat

SEQ ID NO: 1361994 - DNA, 15 bp, Homo sapiens
aggctggatctcaga

SEQ ID NO: 1361995 - DNA, 15 bp, Homo sapiens
caggctggatctcag

SEQ ID NO: 1361996 - DNA, 15 bp, Homo sapiens
ccaggctggatctca

SEQ ID NO: 1361997 - DNA, 15 bp, Homo sapiens
cccaggctggatctc

SEQ ID NO: 1361998 - DNA, 15 bp, Homo sapiens
gcccaggctggatct

SEQ ID NO: 1361999 - DNA, 15 bp, Homo sapiens
cgcccaggctggatc

SEQ ID NO: 1362000 - DNA, 15 bp, Homo sapiens
tcgcccaggctggat

SEQ ID NO: 1362001 - DNA, 15 bp, Homo sapiens
ttctgtcgcccaggc

SEQ ID NO: 1362002 - DNA, 15 bp, Homo sapiens
tttctgtcgcccagg

SEQ ID NO: 1362003 - DNA, 15 bp, Homo sapiens
atttctgtcgcccag

SEQ ID NO: 1362004 - DNA, 15 bp, Homo sapiens
aatttctgtcgccca

SEQ ID NO: 1362005 - DNA, 15 bp, Homo sapiens
gaatttctgtcgccc

SEQ ID NO: 1362006 - DNA, 15 bp, Homo sapiens
agaatttctgtcgcc

SEQ ID NO: 1362007 - DNA, 15 bp, Homo sapiens
cagaatttctgtcgc

SEQ ID NO: 1362008 - DNA, 15 bp, Homo sapiens
acagaatttctgtcg

SEQ ID NO: 1362009 - DNA, 15 bp, Homo sapiens
gacagaatttctgtc

SEQ ID NO: 1362010 - DNA, 15 bp, Homo sapiens
agacagaatttctgt

SEQ ID NO: 1362011 - DNA, 15 bp, Homo sapiens
gagacagaatttctg

SEQ ID NO: 1362012 - DNA, 15 bp, Homo sapiens
tgagacagaatttct

SEQ ID NO: 1362013 - DNA, 15 bp, Homo sapiens
ttgagacagaatttc

SEQ ID NO: 1362014 - DNA, 15 bp, Homo sapiens
tttgagacagaattt

SEQ ID NO: 1362015 - DNA, 15 bp, Homo sapiens
ttttgagacagaatt

SEQ ID NO: 1362016 - DNA, 15 bp, Homo sapiens
gttttgagacagaat

SEQ ID NO: 1362017 - DNA, 15 bp, Homo sapiens
tgttttgagacagaa

SEQ ID NO: 1362018 - DNA, 15 bp, Homo sapiens
ctgttttgagacaga

SEQ ID NO: 1362019 - DNA, 15 bp, Homo sapiens
gctgttttgagacag

SEQ ID NO: 1362020 - DNA, 15 bp, Homo sapiens
tgctgttttgagaca

SEQ ID NO: 1362021 - DNA, 15 bp, Homo sapiens
ttgctgttttgagac

SEQ ID NO: 1362022 - DNA, 15 bp, Homo sapiens
gttgctgttttgaga

SEQ ID NO: 1362023 - DNA, 15 bp, Homo sapiens
tgttgctgttttgag

SEQ ID NO: 1362024 - DNA, 15 bp, Homo sapiens
ttgttgctgttttga

SEQ ID NO: 1362025 - DNA, 15 bp, Homo sapiens
gttgttgctgttttg

SEQ ID NO: 1362026 - DNA, 15 bp, Homo sapiens
tgttgttgctgtttt

SEQ ID NO: 1362027 - DNA, 15 bp, Homo sapiens
ttgttgttgctgttt

SEQ ID NO: 1362028 - DNA, 15 bp, Homo sapiens
tttgttgttgctgtt

SEQ ID NO: 1362029 - DNA, 15 bp, Homo sapiens
ttttgttgttgctgt

SEQ ID NO: 1362030 - DNA, 15 bp, Homo sapiens
tttttgttgttgctg

SEQ ID NO: 1362031 - DNA, 15 bp, Homo sapiens
gtttttgttgttgct

SEQ ID NO: 1362032 - DNA, 15 bp, Homo sapiens
agtttttgttgttgc

SEQ ID NO: 1362033 - DNA, 15 bp, Homo sapiens
atagtttttgttgtt

SEQ ID NO: 1362034 - DNA, 15 bp, Homo sapiens
gatagtttttgttgt

SEQ ID NO: 1362035 - DNA, 15 bp, Homo sapiens
tgatagtttttgttg

SEQ ID NO: 1362036 - DNA, 15 bp, Homo sapiens
gtgatagtttttgtt

SEQ ID NO: 1362037 - DNA, 15 bp, Homo sapiens
agtgatagtttttgt

SEQ ID NO: 1362038 - DNA, 15 bp, Homo sapiens
gagtgatagtttttg

SEQ ID NO: 1362039 - DNA, 15 bp, Homo sapiens
ggagtgatagttttt

SEQ ID NO: 1362040 - DNA, 15 bp, Homo sapiens
aggagtgatagtttt

SEQ ID NO: 1362041 - DNA, 15 bp, Homo sapiens
caggagtgatagttt

SEQ ID NO: 1362042 - DNA, 15 bp, Homo sapiens
gcaggagtgatagtt

SEQ ID NO: 1362043 - DNA, 15 bp, Homo sapiens
ggcaggagtgatagt

SEQ ID NO: 1362044 - DNA, 15 bp, Homo sapiens
tggcaggagtgatag

SEQ ID NO: 1362045 - DNA, 15 bp, Homo sapiens
gtggcaggagtgata

SEQ ID NO: 1362046 - DNA, 15 bp, Homo sapiens
ggtggcaggagtgat

SEQ ID NO: 1362047 - DNA, 15 bp, Homo sapiens
tggtggcaggagtga

SEQ ID NO: 1362048 - DNA, 15 bp, Homo sapiens
gtggtggcaggagtg

SEQ ID NO: 1362049 - DNA, 15 bp, Homo sapiens
tgtggtggcaggagt

SEQ ID NO: 1362050 - DNA, 15 bp, Homo sapiens
ctgtggtggcaggag

SEQ ID NO: 1362051 - DNA, 15 bp, Homo sapiens
tctgtggtggcagga

SEQ ID NO: 1362052 - DNA, 15 bp, Homo sapiens
ttctgtggtggcagg

SEQ ID NO: 1362053 - DNA, 15 bp, Homo sapiens
attctgtggtggcag

SEQ ID NO: 1362054 - DNA, 15 bp, Homo sapiens
gattctgtggtggca

SEQ ID NO: 1362055 - DNA, 15 bp, Homo sapiens
agattctgtggtggc

SEQ ID NO: 1362056 - DNA, 15 bp, Homo sapiens
gagattctgtggtgg

SEQ ID NO: 1362057 - DNA, 15 bp, Homo sapiens
ggagattctgtggtg

SEQ ID NO: 1362058 - DNA, 15 bp, Homo sapiens
gggagattctgtggt

SEQ ID NO: 1362059 - DNA, 15 bp, Homo sapiens
agggagattctgtgg

SEQ ID NO: 1362060 - DNA, 15 bp, Homo sapiens
aagggagattctgtg

SEQ ID NO: 1362061 - DNA, 15 bp, Homo sapiens
caagggagattctgt

SEQ ID NO: 1362062 - DNA, 15 bp, Homo sapiens
ccaagggagattctg

SEQ ID NO: 1362063 - DNA, 15 bp, Homo sapiens
gccaagggagattct

SEQ ID NO: 1362064 - DNA, 15 bp, Homo sapiens
tgccaagggagattc

SEQ ID NO: 1362065 - DNA, 15 bp, Homo sapiens
ctgccaagggagatt

SEQ ID NO: 1362066 - DNA, 15 bp, Homo sapiens
gctgccaagggagat

SEQ ID NO: 1362067 - DNA, 15 bp, Homo sapiens
tgctgccaagggaga

SEQ ID NO: 1362068 - DNA, 15 bp, Homo sapiens
ctgctgccaagggag

SEQ ID NO: 1362069 - DNA, 15 bp, Homo sapiens
cctgctgccaaggga

SEQ ID NO: 1362070 - DNA, 15 bp, Homo sapiens
ccctgctgccaaggg

SEQ ID NO: 1362071 - DNA, 15 bp, Homo sapiens
gccctgctgccaagg

SEQ ID NO: 1362072 - DNA, 15 bp, Homo sapiens
agccctgctgccaag

SEQ ID NO: 1362073 - DNA, 15 bp, Homo sapiens
gagccctgctgccaa

SEQ ID NO: 1362074 - DNA, 15 bp, Homo sapiens
cgagccctgctgcca

SEQ ID NO: 1362075 - DNA, 15 bp, Homo sapiens
tcgagccctgctgcc

SEQ ID NO: 1362076 - DNA, 15 bp, Homo sapiens
ttcgagccctgctgc

SEQ ID NO: 1362077 - DNA, 15 bp, Homo sapiens
tttcgagccctgctg

SEQ ID NO: 1362078 - DNA, 15 bp, Homo sapiens
atttcgagccctgct

SEQ ID NO: 1362079 - DNA, 15 bp, Homo sapiens
tatttcgagccctgc

SEQ ID NO: 1362080 - DNA, 15 bp, Homo sapiens
ttatttcgagccctg

SEQ ID NO: 1362081 - DNA, 15 bp, Homo sapiens
gttatttcgagccct

SEQ ID NO: 1362082 - DNA, 15 bp, Homo sapiens
ggttatttcgagccc

SEQ ID NO: 1362083 - DNA, 15 bp, Homo sapiens
tggttatttcgagcc

SEQ ID NO: 1362084 - DNA, 15 bp, Homo sapiens
ttggttatttcgagc

SEQ ID NO: 1362085 - DNA, 15 bp, Homo sapiens
gttggttatttcgag

SEQ ID NO: 1362086 - DNA, 15 bp, Homo sapiens
tgttggttatttcga

SEQ ID NO: 1362087 - DNA, 15 bp, Homo sapiens
gtgttggttatttcg

SEQ ID NO: 1362088 - DNA, 15 bp, Homo sapiens
tgtgttggttatttc

SEQ ID NO: 1362089 - DNA, 15 bp, Homo sapiens
gtgtgttggttattt

SEQ ID NO: 1362090 - DNA, 15 bp, Homo sapiens
cgtgtgttggttatt

SEQ ID NO: 1362091 - DNA, 15 bp, Homo sapiens
ccgtgtgttggttat

SEQ ID NO: 1362092 - DNA, 15 bp, Homo sapiens
accgtgtgttggtta

SEQ ID NO: 1362093 - DNA, 15 bp, Homo sapiens
gaccgtgtgttggtt

SEQ ID NO: 1362094 - DNA, 15 bp, Homo sapiens
ggaccgtgtgttggt

SEQ ID NO: 1362095 - DNA, 15 bp, Homo sapiens
aggaccgtgtgttgg

SEQ ID NO: 1362096 - DNA, 15 bp, Homo sapiens
aaggaccgtgtgttg

SEQ ID NO: 1362097 - DNA, 15 bp, Homo sapiens
aaaggaccgtgtgtt

SEQ ID NO: 1362098 - DNA, 15 bp, Homo sapiens
caaaggaccgtgtgt

SEQ ID NO: 1362099 - DNA, 15 bp, Homo sapiens
tcaaaggaccgtgtg

SEQ ID NO: 1362100 - DNA, 15 bp, Homo sapiens
gtcaaaggaccgtgt

SEQ ID NO: 1362101 - DNA, 15 bp, Homo sapiens
ggtcaaaggaccgtg

SEQ ID NO: 1362102 - DNA, 15 bp, Homo sapiens
cggtcaaaggaccgt

SEQ ID NO: 1362103 - DNA, 15 bp, Homo sapiens
ccggtcaaaggaccg

SEQ ID NO: 1362104 - DNA, 15 bp, Homo sapiens
cccggtcaaaggacc

SEQ ID NO: 1362105 - DNA, 15 bp, Homo sapiens
acccggtcaaaggac

SEQ ID NO: 1362106 - DNA, 15 bp, Homo sapiens
gacccggtcaaagga

SEQ ID NO: 1362107 - DNA, 15 bp, Homo sapiens
tgacccggtcaaagg

SEQ ID NO: 1362108 - DNA, 15 bp, Homo sapiens
atgacccggtcaaag

SEQ ID NO: 1362109 - DNA, 15 bp, Homo sapiens
aatgacccggtcaaa

SEQ ID NO: 1362110 - DNA, 15 bp, Homo sapiens
gaatgacccggtcaa

SEQ ID NO: 1362111 - DNA, 15 bp, Homo sapiens
agaatgacccggtca

SEQ ID NO: 1362112 - DNA, 15 bp, Homo sapiens
tagaatgacccggtc

SEQ ID NO: 1362113 - DNA, 15 bp, Homo sapiens
gtagaatgacccggt

SEQ ID NO: 1362114 - DNA, 15 bp, Homo sapiens
ggtagaatgacccgg

SEQ ID NO: 1362115 - DNA, 15 bp, Homo sapiens
aggtagaatgacccg

SEQ ID NO: 1362116 - DNA, 15 bp, Homo sapiens
aaggtagaatgaccc

SEQ ID NO: 1362117 - DNA, 15 bp, Homo sapiens
gaaggtagaatgacc

SEQ ID NO: 1362118 - DNA, 15 bp, Homo sapiens
tgaaggtagaatgac

SEQ ID NO: 1362119 - DNA, 15 bp, Homo sapiens
ctgaaggtagaatga

SEQ ID NO: 1362120 - DNA, 15 bp, Homo sapiens
tctgaaggtagaatg

SEQ ID NO: 1362121 - DNA, 15 bp, Homo sapiens
ttctgaaggtagaat

SEQ ID NO: 1362122 - DNA, 15 bp, Homo sapiens
tttctgaaggtagaa

SEQ ID NO: 1362123 - DNA, 15 bp, Homo sapiens
atttctgaaggtaga

SEQ ID NO: 1362124 - DNA, 15 bp, Homo sapiens
gatttctgaaggtag

SEQ ID NO: 1362125 - DNA, 15 bp, Homo sapiens
tgatttctgaaggta

SEQ ID NO: 1362126 - DNA, 15 bp, Homo sapiens
ctgatttctgaaggt

SEQ ID NO: 1362127 - DNA, 15 bp, Homo sapiens
actgatttctgaagg

SEQ ID NO: 1362128 - DNA, 15 bp, Homo sapiens
gactgatttctgaag

SEQ ID NO: 1362129 - DNA, 15 bp, Homo sapiens
ggactgatttctgaa

SEQ ID NO: 1362130 - DNA, 15 bp, Homo sapiens
aggactgatttctga

SEQ ID NO: 1362131 - DNA, 15 bp, Homo sapiens
taggactgatttctg

SEQ ID NO: 1362132 - DNA, 15 bp, Homo sapiens
gtaggactgatttct

SEQ ID NO: 1362133 - DNA, 15 bp, Homo sapiens
tgtaggactgatttc

SEQ ID NO: 1362134 - DNA, 15 bp, Homo sapiens
ctgtaggactgattt

SEQ ID NO: 1362135 - DNA, 15 bp, Homo sapiens
tctgtaggactgatt

SEQ ID NO: 1362136 - DNA, 15 bp, Homo sapiens
atctgtaggactgat

SEQ ID NO: 1362137 - DNA, 15 bp, Homo sapiens
tatctgtaggactga

SEQ ID NO: 1362138 - DNA, 15 bp, Homo sapiens
atatctgtaggactg

SEQ ID NO: 1362139 - DNA, 15 bp, Homo sapiens
gatatctgtaggact

SEQ ID NO: 1362140 - DNA, 15 bp, Homo sapiens
ggatatctgtaggac

SEQ ID NO: 1362141 - DNA, 15 bp, Homo sapiens
aggatatctgtagga

SEQ ID NO: 1362142 - DNA, 15 bp, Homo sapiens
gaggatatctgtagg

SEQ ID NO: 1362143 - DNA, 15 bp, Homo sapiens
tgaggatatctgtag

SEQ ID NO: 1362144 - DNA, 15 bp, Homo sapiens
gtgaggatatctgta

SEQ ID NO: 1362145 - DNA, 15 bp, Homo sapiens
tgtgaggatatctgt

SEQ ID NO: 1362146 - DNA, 15 bp, Homo sapiens
gtgtgaggatatctg

SEQ ID NO: 1362147 - DNA, 15 bp, Homo sapiens
tgtgtgaggatatct

SEQ ID NO: 1362148 - DNA, 15 bp, Homo sapiens
gtgtgtgaggatatc

SEQ ID NO: 1362149 - DNA, 15 bp, Homo sapiens
cgtgtgtgaggatat

SEQ ID NO: 1362150 - DNA, 15 bp, Homo sapiens
gcgtgtgtgaggata

SEQ ID NO: 1362151 - DNA, 15 bp, Homo sapiens
cgcgtgtgtgaggat

SEQ ID NO: 1362152 - DNA, 15 bp, Homo sapiens
gcgcgtgtgtgagga

SEQ ID NO: 1362153 - DNA, 15 bp, Homo sapiens
tgcgcgtgtgtgagg

SEQ ID NO: 1362154 - DNA, 15 bp, Homo sapiens
ttgcgcgtgtgtgag

SEQ ID NO: 1362155 - DNA, 15 bp, Homo sapiens
tttgcgcgtgtgtga

SEQ ID NO: 1362156 - DNA, 15 bp, Homo sapiens
ttttgcgcgtgtgtg

SEQ ID NO: 1362157 - DNA, 15 bp, Homo sapiens
attttgcgcgtgtgt

SEQ ID NO: 1362158 - DNA, 15 bp, Homo sapiens
cattttgcgcgtgtg

SEQ ID NO: 1362159 - DNA, 15 bp, Homo sapiens
ccattttgcgcgtgt

SEQ ID NO: 1362160 - DNA, 15 bp, Homo sapiens
gccattttgcgcgtg

SEQ ID NO: 1362161 - DNA, 15 bp, Homo sapiens
tgccattttgcgcgt

SEQ ID NO: 1362162 - DNA, 15 bp, Homo sapiens
atgccattttgcgcg

SEQ ID NO: 1362163 - DNA, 15 bp, Homo sapiens
tatgccattttgcgc

SEQ ID NO: 1362164 - DNA, 15 bp, Homo sapiens
atatgccattttgcg

SEQ ID NO: 1362165 - DNA, 15 bp, Homo sapiens
catatgccattttgc

SEQ ID NO: 1362166 - DNA, 15 bp, Homo sapiens
ccatatgccattttg

SEQ ID NO: 1362167 - DNA, 15 bp, Homo sapiens
tccatatgccatttt

SEQ ID NO: 1362168 - DNA, 15 bp, Homo sapiens
gtccatatgccattt

SEQ ID NO: 1362169 - DNA, 15 bp, Homo sapiens
tgtccatatgccatt

SEQ ID NO: 1362170 - DNA, 15 bp, Homo sapiens
ctgtccatatgccat

SEQ ID NO: 1362171 - DNA, 15 bp, Homo sapiens
cctgtccatatgcca

SEQ ID NO: 1362172 - DNA, 15 bp, Homo sapiens
ccctgtccatatgcc

SEQ ID NO: 1362173 - DNA, 15 bp, Homo sapiens
accctgtccatatgc

SEQ ID NO: 1362174 - DNA, 15 bp, Homo sapiens
aaccctgtccatatg

SEQ ID NO: 1362175 - DNA, 15 bp, Homo sapiens
gaaccctgtccatat

SEQ ID NO: 1362176 - DNA, 15 bp, Homo sapiens
agaaccctgtccata

SEQ ID NO: 1362177 - DNA, 15 bp, Homo sapiens
aagaaccctgtccat

SEQ ID NO: 1362178 - DNA, 15 bp, Homo sapiens
aaagaaccctgtcca

SEQ ID NO: 1362179 - DNA, 15 bp, Homo sapiens
gaaagaaccctgtcc

SEQ ID NO: 1362180 - DNA, 15 bp, Homo sapiens
agaaagaaccctgtc

SEQ ID NO: 1362181 - DNA, 15 bp, Homo sapiens
aagaaagaaccctgt

SEQ ID NO: 1362182 - DNA, 15 bp, Homo sapiens
aaagaaagaaccctg

SEQ ID NO: 1362183 - DNA, 15 bp, Homo sapiens
gaaagaaagaaccct

SEQ ID NO: 1362184 - DNA, 15 bp, Homo sapiens
agaaagaaagaaccc

SEQ ID NO: 1362185 - DNA, 15 bp, Homo sapiens
aagaaagaaagaacc

SEQ ID NO: 1362186 - DNA, 15 bp, Homo sapiens
aaagaaagaaagaac

SEQ ID NO: 1362187 - DNA, 15 bp, Homo sapiens
ggaaagaaagaaaga

SEQ ID NO: 1362188 - DNA, 15 bp, Homo sapiens
gaaggaaagaaagaa

SEQ ID NO: 1362189 - DNA, 15 bp, Homo sapiens
ggaaggaaagaaaga

SEQ ID NO: 1362190 - DNA, 15 bp, Homo sapiens
agaaagaaggaagga

SEQ ID NO: 1362191 - DNA, 15 bp, Homo sapiens
aagaaagaaggaagg

SEQ ID NO: 1362192 - DNA, 15 bp, Homo sapiens
aaagaaagaaggaag

SEQ ID NO: 1362193 - DNA, 15 bp, Homo sapiens
agaaagaaagaagga

SEQ ID NO: 1362194 - DNA, 15 bp, Homo sapiens
aagaaagaaagaagg

SEQ ID NO: 1362195 - DNA, 15 bp, Homo sapiens
gaagaaagaaaagaa

SEQ ID NO: 1362196 - DNA, 15 bp, Homo sapiens
agaagaaagaaaaga

SEQ ID NO: 1362197 - DNA, 15 bp, Homo sapiens
aagaagaaagaaaag

SEQ ID NO: 1362198 - DNA, 15 bp, Homo sapiens
aaagaagaaagaaaa

SEQ ID NO: 1362199 - DNA, 15 bp, Homo sapiens
gaaagaagaaagaaa

SEQ ID NO: 1362200 - DNA, 15 bp, Homo sapiens
agaaagaagaaagaa

SEQ ID NO: 1362201 - DNA, 15 bp, Homo sapiens
aagaaagaagaaaga

SEQ ID NO: 1362202 - DNA, 15 bp, Homo sapiens
aaagaaagaagaaag

SEQ ID NO: 1362203 - DNA, 15 bp, Homo sapiens
gaaagaaagaagaaa

SEQ ID NO: 1362204 - DNA, 15 bp, Homo sapiens
agaaagaaagaagaa

SEQ ID NO: 1362205 - DNA, 15 bp, Homo sapiens
taagaaagaaagaaa

SEQ ID NO: 1362206 - DNA, 15 bp, Homo sapiens
ctaagaaagaaagaa

SEQ ID NO: 1362207 - DNA, 15 bp, Homo sapiens
tctaagaaagaaaga

SEQ ID NO: 1362208 - DNA, 15 bp, Homo sapiens
gtctaagaaagaaag

SEQ ID NO: 1362209 - DNA, 15 bp, Homo sapiens
cgtctaagaaagaaa

SEQ ID NO: 1362210 - DNA, 15 bp, Homo sapiens
tcgtctaagaaagaa

SEQ ID NO: 1362211 - DNA, 15 bp, Homo sapiens
ctcgtctaagaaaga

SEQ ID NO: 1362212 - DNA, 15 bp, Homo sapiens
actcgtctaagaaag

SEQ ID NO: 1362213 - DNA, 15 bp, Homo sapiens
gactcgtctaagaaa

SEQ ID NO: 1362214 - DNA, 15 bp, Homo sapiens
agactcgtctaagaa

SEQ ID NO: 1362215 - DNA, 15 bp, Homo sapiens
gagactcgtctaaga

SEQ ID NO: 1362216 - DNA, 15 bp, Homo sapiens
cgagactcgtctaag

SEQ ID NO: 1362217 - DNA, 15 bp, Homo sapiens
gcgagactcgtctaa

SEQ ID NO: 1362218 - DNA, 15 bp, Homo sapiens
agcgagactcgtcta

SEQ ID NO: 1362219 - DNA, 15 bp, Homo sapiens
cagagcgagactcgt

SEQ ID NO: 1362220 - DNA, 15 bp, Homo sapiens
acagagcgagactcg

SEQ ID NO: 1362221 - DNA, 15 bp, Homo sapiens
gggaagcagagcttg

SEQ ID NO: 1362222 - DNA, 15 bp, Homo sapiens
cgggaagcagagctt

SEQ ID NO: 1362223 - DNA, 15 bp, Homo sapiens
ccgggaagcagagct

SEQ ID NO: 1362224 - DNA, 15 bp, Homo sapiens
cccgggaagcagagc

SEQ ID NO: 1362225 - DNA, 15 bp, Homo sapiens
acccgggaagcagag

SEQ ID NO: 1362226 - DNA, 15 bp, Homo sapiens
aacccgggaagcaga

SEQ ID NO: 1362227 - DNA, 15 bp, Homo sapiens
gaacccgggaagcag

SEQ ID NO: 1362228 - DNA, 15 bp, Homo sapiens
tgaacccgggaagca

SEQ ID NO: 1362229 - DNA, 15 bp, Homo sapiens
gtgaacccgggaagc

SEQ ID NO: 1362230 - DNA, 15 bp, Homo sapiens
cgtgaacccgggaag

SEQ ID NO: 1362231 - DNA, 15 bp, Homo sapiens
gcgtgaacccgggaa

SEQ ID NO: 1362232 - DNA, 15 bp, Homo sapiens
aacaaaaaattagcc

SEQ ID NO: 1362233 - DNA, 15 bp, Homo sapiens
taacaaaaaattagc

SEQ ID NO: 1362234 - DNA, 15 bp, Homo sapiens
ataacaaaaaattag

SEQ ID NO: 1362235 - DNA, 15 bp, Homo sapiens
aataacaaaaaatta

SEQ ID NO: 1362236 - DNA, 15 bp, Homo sapiens
aaataacaaaaaatt

SEQ ID NO: 1362237 - DNA, 15 bp, Homo sapiens
aaaataacaaaaaat

SEQ ID NO: 1362238 - DNA, 15 bp, Homo sapiens
aaaaataacaaaaaa

SEQ ID NO: 1362239 - DNA, 15 bp, Homo sapiens
taaaaataacaaaaa

SEQ ID NO: 1362240 - DNA, 15 bp, Homo sapiens
ctaaaaataacaaaa

SEQ ID NO: 1362241 - DNA, 15 bp, Homo sapiens
actaaaaataacaaa

SEQ ID NO: 1362242 - DNA, 15 bp, Homo sapiens
tactaaaaataacaa

SEQ ID NO: 1362243 - DNA, 15 bp, Homo sapiens
ctactaaaaataaca

SEQ ID NO: 1362244 - DNA, 15 bp, Homo sapiens
tctactaaaaataac

SEQ ID NO: 1362245 - DNA, 15 bp, Homo sapiens
ttcctggctaacacg

SEQ ID NO: 1362246 - DNA, 15 bp, Homo sapiens
cttcctggctaacac

SEQ ID NO: 1362247 - DNA, 15 bp, Homo sapiens
ccttcctggctaaca

SEQ ID NO: 1362248 - DNA, 15 bp, Homo sapiens
accttcctggctaac

SEQ ID NO: 1362249 - DNA, 15 bp, Homo sapiens
gaccttcctggctaa

SEQ ID NO: 1362250 - DNA, 15 bp, Homo sapiens
agaccttcctggcta

SEQ ID NO: 1362251 - DNA, 15 bp, Homo sapiens
gagaccttcctggct

SEQ ID NO: 1362252 - DNA, 15 bp, Homo sapiens
cgagaccttcctggc

SEQ ID NO: 1362253 - DNA, 15 bp, Homo sapiens
tcgagaccttcctgg

SEQ ID NO: 1362254 - DNA, 15 bp, Homo sapiens
atcgagaccttcctg

SEQ ID NO: 1362255 - DNA, 15 bp, Homo sapiens
gatcgagaccttcct

SEQ ID NO: 1362256 - DNA, 15 bp, Homo sapiens
agatcgagaccttcc

SEQ ID NO: 1362257 - DNA, 15 bp, Homo sapiens
gagatcgagaccttc

SEQ ID NO: 1362258 - DNA, 15 bp, Homo sapiens
ggagatcgagacctt

SEQ ID NO: 1362259 - DNA, 15 bp, Homo sapiens
aggagatcgagacct

SEQ ID NO: 1362260 - DNA, 15 bp, Homo sapiens
cgaggcgggcagatc

SEQ ID NO: 1362261 - DNA, 15 bp, Homo sapiens
ccgaggcgggcagat

SEQ ID NO: 1362262 - DNA, 15 bp, Homo sapiens
gccgaggcgggcaga

SEQ ID NO: 1362263 - DNA, 15 bp, Homo sapiens
ggccgaggcgggcag

SEQ ID NO: 1362264 - DNA, 15 bp, Homo sapiens
aggccgaggcgggca

SEQ ID NO: 1362265 - DNA, 15 bp, Homo sapiens
gcctgtgatcccagc

SEQ ID NO: 1362266 - DNA, 15 bp, Homo sapiens
cgcctgtgatcccag

SEQ ID NO: 1362267 - DNA, 15 bp, Homo sapiens
acgcctgtgatccca

SEQ ID NO: 1362268 - DNA, 15 bp, Homo sapiens
cacgcctgtgatccc

SEQ ID NO: 1362269 - DNA, 15 bp, Homo sapiens
tcacgcctgtgatcc

SEQ ID NO: 1362270 - DNA, 15 bp, Homo sapiens
ctcacgcctgtgatc

SEQ ID NO: 1362271 - DNA, 15 bp, Homo sapiens
gctcacgcctgtgat

SEQ ID NO: 1362272 - DNA, 15 bp, Homo sapiens
ggctcacgcctgtga

SEQ ID NO: 1362273 - DNA, 15 bp, Homo sapiens
tggctcacgcctgtg

SEQ ID NO: 1362274 - DNA, 15 bp, Homo sapiens
caaaagggccgggcg

SEQ ID NO: 1362275 - DNA, 15 bp, Homo sapiens
tcaaaagggccgggc

SEQ ID NO: 1362276 - DNA, 15 bp, Homo sapiens
gtcaaaagggccggg

SEQ ID NO: 1362277 - DNA, 15 bp, Homo sapiens
tgtcaaaagggccgg

SEQ ID NO: 1362278 - DNA, 15 bp, Homo sapiens
ctgtcaaaagggccg

SEQ ID NO: 1362279 - DNA, 15 bp, Homo sapiens
gctgtcaaaagggcc

SEQ ID NO: 1362280 - DNA, 15 bp, Homo sapiens
agctgtcaaaagggc

SEQ ID NO: 1362281 - DNA, 15 bp, Homo sapiens
aagctgtcaaaaggg

SEQ ID NO: 1362282 - DNA, 15 bp, Homo sapiens
aaagctgtcaaaagg

SEQ ID NO: 1362283 - DNA, 15 bp, Homo sapiens
gaaagctgtcaaaag

SEQ ID NO: 1362284 - DNA, 15 bp, Homo sapiens
agaaagctgtcaaaa

SEQ ID NO: 1362285 - DNA, 15 bp, Homo sapiens
aagaaagctgtcaaa

SEQ ID NO: 1362286 - DNA, 15 bp, Homo sapiens
gaagaaagctgtcaa

SEQ ID NO: 1362287 - DNA, 15 bp, Homo sapiens
agaagaaagctgtca

SEQ ID NO: 1362288 - DNA, 15 bp, Homo sapiens
aagaagaaagctgtc

SEQ ID NO: 1362289 - DNA, 15 bp, Homo sapiens
aaagaagaaagctgt

SEQ ID NO: 1362290 - DNA, 15 bp, Homo sapiens
aaaagaagaaagctg

SEQ ID NO: 1362291 - DNA, 15 bp, Homo sapiens
gaaaagaagaaagct

SEQ ID NO: 1362292 - DNA, 15 bp, Homo sapiens
tgaaaagaagaaagc

SEQ ID NO: 1362293 - DNA, 15 bp, Homo sapiens
atgaaaagaagaaag

SEQ ID NO: 1362294 - DNA, 15 bp, Homo sapiens
aatgaaaagaagaaa

SEQ ID NO: 1362295 - DNA, 15 bp, Homo sapiens
caatgaaaagaagaa

SEQ ID NO: 1362296 - DNA, 15 bp, Homo sapiens
acaatgaaaagaaga

SEQ ID NO: 1362297 - DNA, 15 bp, Homo sapiens
tacaatgaaaagaag

SEQ ID NO: 1362298 - DNA, 15 bp, Homo sapiens
atacaatgaaaagaa

SEQ ID NO: 1362299 - DNA, 15 bp, Homo sapiens
aatacaatgaaaaga

SEQ ID NO: 1362300 - DNA, 15 bp, Homo sapiens
taatacaatgaaaag

SEQ ID NO: 1362301 - DNA, 15 bp, Homo sapiens
ataatacaatgaaaa

SEQ ID NO: 1362302 - DNA, 15 bp, Homo sapiens
aataatacaatgaaa

SEQ ID NO: 1362303 - DNA, 15 bp, Homo sapiens
taataatacaatgaa

SEQ ID NO: 1362304 - DNA, 15 bp, Homo sapiens
gtaataatacaatga

SEQ ID NO: 1362305 - DNA, 15 bp, Homo sapiens
agtaataatacaatg

SEQ ID NO: 1362306 - DNA, 15 bp, Homo sapiens
tagtaataatacaat

SEQ ID NO: 1362307 - DNA, 15 bp, Homo sapiens
atagtaataatacaa

SEQ ID NO: 1362308 - DNA, 15 bp, Homo sapiens
aatagtaataataca

SEQ ID NO: 1362309 - DNA, 15 bp, Homo sapiens
taatagtaataatac

SEQ ID NO: 1362310 - DNA, 15 bp, Homo sapiens
ataatagtaataata

SEQ ID NO: 1362311 - DNA, 15 bp, Homo sapiens
aataatagtaataat

SEQ ID NO: 1362312 - DNA, 15 bp, Homo sapiens
taataatagtaataa

SEQ ID NO: 1362313 - DNA, 15 bp, Homo sapiens
ataataatagtaata

SEQ ID NO: 1362314 - DNA, 15 bp, Homo sapiens
aaataataatagtaa

SEQ ID NO: 1362315 - DNA, 15 bp, Homo sapiens
aaaataataatagta

SEQ ID NO: 1362316 - DNA, 15 bp, Homo sapiens
aaaaataataatagt

SEQ ID NO: 1362317 - DNA, 15 bp, Homo sapiens
caaaaataataatag

SEQ ID NO: 1362318 - DNA, 15 bp, Homo sapiens
ttcaaaaataataat

SEQ ID NO: 1362319 - DNA, 15 bp, Homo sapiens
tttcaaaaataataa

SEQ ID NO: 1362320 - DNA, 15 bp, Homo sapiens
atttcaaaaataata

SEQ ID NO: 1362321 - DNA, 15 bp, Homo sapiens
tatttcaaaaataat

SEQ ID NO: 1362322 - DNA, 15 bp, Homo sapiens
ctatttcaaaaataa

SEQ ID NO: 1362323 - DNA, 15 bp, Homo sapiens
cctatttcaaaaata

SEQ ID NO: 1362324 - DNA, 15 bp, Homo sapiens
ccctatttcaaaaat

SEQ ID NO: 1362325 - DNA, 15 bp, Homo sapiens
accctatttcaaaaa

SEQ ID NO: 1362326 - DNA, 15 bp, Homo sapiens
gaccctatttcaaaa

SEQ ID NO: 1362327 - DNA, 15 bp, Homo sapiens
agaccctatttcaaa

SEQ ID NO: 1362328 - DNA, 15 bp, Homo sapiens
aagaccctatttcaa

SEQ ID NO: 1362329 - DNA, 15 bp, Homo sapiens
caagaccctatttca

SEQ ID NO: 1362330 - DNA, 15 bp, Homo sapiens
gcaagaccctatttc

SEQ ID NO: 1362331 - DNA, 15 bp, Homo sapiens
agcaagaccctattt

SEQ ID NO: 1362332 - DNA, 15 bp, Homo sapiens
tagcaagaccctatt

SEQ ID NO: 1362333 - DNA, 15 bp, Homo sapiens
gtagcaagaccctat

SEQ ID NO: 1362334 - DNA, 15 bp, Homo sapiens
agtagcaagacccta

SEQ ID NO: 1362335 - DNA, 15 bp, Homo sapiens
aagtagcaagaccct

SEQ ID NO: 1362336 - DNA, 15 bp, Homo sapiens
gaagtagcaagaccc

SEQ ID NO: 1362337 - DNA, 15 bp, Homo sapiens
tgaagtagcaagacc

SEQ ID NO: 1362338 - DNA, 15 bp, Homo sapiens
gtgaagtagcaagac

SEQ ID NO: 1362339 - DNA, 15 bp, Homo sapiens
ggtgaagtagcaaga

SEQ ID NO: 1362340 - DNA, 15 bp, Homo sapiens
gggtgaagtagcaag

SEQ ID NO: 1362341 - DNA, 15 bp, Homo sapiens
cgggtgaagtagcaa

SEQ ID NO: 1362342 - DNA, 15 bp, Homo sapiens
ccgggtgaagtagca

SEQ ID NO: 1362343 - DNA, 15 bp, Homo sapiens
cccgggtgaagtagc

SEQ ID NO: 1362344 - DNA, 15 bp, Homo sapiens
acccgggtgaagtag

SEQ ID NO: 1362345 - DNA, 15 bp, Homo sapiens
aacccgggtgaagta

SEQ ID NO: 1362346 - DNA, 15 bp, Homo sapiens
caacccgggtgaagt

SEQ ID NO: 1362347 - DNA, 15 bp, Homo sapiens
ccaacccgggtgaag

SEQ ID NO: 1362348 - DNA, 15 bp, Homo sapiens
tccaacccgggtgaa

SEQ ID NO: 1362349 - DNA, 15 bp, Homo sapiens
ctccaacccgggtga

SEQ ID NO: 1362350 - DNA, 15 bp, Homo sapiens
actccaacccgggtg

SEQ ID NO: 1362351 - DNA, 15 bp, Homo sapiens
cactccaacccgggt

SEQ ID NO: 1362352 - DNA, 15 bp, Homo sapiens
gcactccaacccggg

SEQ ID NO: 1362353 - DNA, 15 bp, Homo sapiens
ggcactccaacccgg

SEQ ID NO: 1362354 - DNA, 15 bp, Homo sapiens
cggcactccaacccg

SEQ ID NO: 1362355 - DNA, 15 bp, Homo sapiens
acggcactccaaccc

SEQ ID NO: 1362356 - DNA, 15 bp, Homo sapiens
cacggcactccaacc

SEQ ID NO: 1362357 - DNA, 15 bp, Homo sapiens
ccacggcactccaac

SEQ ID NO: 1362358 - DNA, 15 bp, Homo sapiens
accacggcactccaa

SEQ ID NO: 1362359 - DNA, 15 bp, Homo sapiens
caccacggcactcca

SEQ ID NO: 1362360 - DNA, 15 bp, Homo sapiens
gcaccacggcactcc

SEQ ID NO: 1362361 - DNA, 15 bp, Homo sapiens
agcaccacggcactc

SEQ ID NO: 1362362 - DNA, 15 bp, Homo sapiens
gagcaccacggcact

SEQ ID NO: 1362363 - DNA, 15 bp, Homo sapiens
agagcaccacggcac

SEQ ID NO: 1362364 - DNA, 15 bp, Homo sapiens
gagagcaccacggca

SEQ ID NO: 1362365 - DNA, 15 bp, Homo sapiens
agagagcaccacggc

SEQ ID NO: 1362366 - DNA, 15 bp, Homo sapiens
aagagagcaccacgg

SEQ ID NO: 1362367 - DNA, 15 bp, Homo sapiens
caagagagcaccacg

SEQ ID NO: 1362368 - DNA, 15 bp, Homo sapiens
ccaagagagcaccac

SEQ ID NO: 1362369 - DNA, 15 bp, Homo sapiens
gccaagagagcacca

SEQ ID NO: 1362370 - DNA, 15 bp, Homo sapiens
agccaagagagcacc

SEQ ID NO: 1362371 - DNA, 15 bp, Homo sapiens
gagccaagagagcac

SEQ ID NO: 1362372 - DNA, 15 bp, Homo sapiens
tgagccaagagagca

SEQ ID NO: 1362373 - DNA, 15 bp, Homo sapiens
gtgagccaagagagc

SEQ ID NO: 1362374 - DNA, 15 bp, Homo sapiens
agtgagccaagagag

SEQ ID NO: 1362375 - DNA, 15 bp, Homo sapiens
cagtgagccaagaga

SEQ ID NO: 1362376 - DNA, 15 bp, Homo sapiens
gcagtgagccaagag

SEQ ID NO: 1362377 - DNA, 15 bp, Homo sapiens
gcccgggaggcggag

SEQ ID NO: 1362378 - DNA, 15 bp, Homo sapiens
agcccgggaggcgga

SEQ ID NO: 1362379 - DNA, 15 bp, Homo sapiens
gagcccgggaggcgg

SEQ ID NO: 1362380 - DNA, 15 bp, Homo sapiens
tgagcccgggaggcg

SEQ ID NO: 1362381 - DNA, 15 bp, Homo sapiens
aatcgcttgagcccg

SEQ ID NO: 1362382 - DNA, 15 bp, Homo sapiens
gaatcgcttgagccc

SEQ ID NO: 1362383 - DNA, 15 bp, Homo sapiens
agaatcgcttgagcc

SEQ ID NO: 1362384 - DNA, 15 bp, Homo sapiens
gagaatcgcttgagc

SEQ ID NO: 1362385 - DNA, 15 bp, Homo sapiens
ggagaatcgcttgag

SEQ ID NO: 1362386 - DNA, 15 bp, Homo sapiens
tggagaatcgcttga

SEQ ID NO: 1362387 - DNA, 15 bp, Homo sapiens
ctggagaatcgcttg

SEQ ID NO: 1362388 - DNA, 15 bp, Homo sapiens
gctggagaatcgctt

SEQ ID NO: 1362389 - DNA, 15 bp, Homo sapiens
agctggagaatcgct

SEQ ID NO: 1362390 - DNA, 15 bp, Homo sapiens
aagctggagaatcgc

SEQ ID NO: 1362391 - DNA, 15 bp, Homo sapiens
gaagctggagaatcg

SEQ ID NO: 1362392 - DNA, 15 bp, Homo sapiens
tgaagctggagaatc

SEQ ID NO: 1362393 - DNA, 15 bp, Homo sapiens
ctgaagctggagaat

SEQ ID NO: 1362394 - DNA, 15 bp, Homo sapiens
gctgaagctggagaa

SEQ ID NO: 1362395 - DNA, 15 bp, Homo sapiens
agctgaagctggaga

SEQ ID NO: 1362396 - DNA, 15 bp, Homo sapiens
gaagctgaagctgga

SEQ ID NO: 1362397 - DNA, 15 bp, Homo sapiens
ggaagctgaagctgg

SEQ ID NO: 1362398 - DNA, 15 bp, Homo sapiens
gggaagctgaagctg

SEQ ID NO: 1362399 - DNA, 15 bp, Homo sapiens
cgggaagctgaagct

SEQ ID NO: 1362400 - DNA, 15 bp, Homo sapiens
tcgggaagctgaagc

SEQ ID NO: 1362401 - DNA, 15 bp, Homo sapiens
ctcgggaagctgaag

SEQ ID NO: 1362402 - DNA, 15 bp, Homo sapiens
actcgggaagctgaa

SEQ ID NO: 1362403 - DNA, 15 bp, Homo sapiens
gttccagctactcgg

SEQ ID NO: 1362404 - DNA, 15 bp, Homo sapiens
ggttccagctactcg

SEQ ID NO: 1362405 - DNA, 15 bp, Homo sapiens
tggttccagctactc

SEQ ID NO: 1362406 - DNA, 15 bp, Homo sapiens
gtggttccagctact

SEQ ID NO: 1362407 - DNA, 15 bp, Homo sapiens
tgtggttccagctac

SEQ ID NO: 1362408 - DNA, 15 bp, Homo sapiens
ctgtggttccagcta

SEQ ID NO: 1362409 - DNA, 15 bp, Homo sapiens
tctgtggttccagct

SEQ ID NO: 1362410 - DNA, 15 bp, Homo sapiens
ctctgtggttccagc

SEQ ID NO: 1362411 - DNA, 15 bp, Homo sapiens
gctctgtggttccag

SEQ ID NO: 1362412 - DNA, 15 bp, Homo sapiens
cgctctgtggttcca

SEQ ID NO: 1362413 - DNA, 15 bp, Homo sapiens
acgctctgtggttcc

SEQ ID NO: 1362414 - DNA, 15 bp, Homo sapiens
tacgctctgtggttc

SEQ ID NO: 1362415 - DNA, 15 bp, Homo sapiens
gtacgctctgtggtt

SEQ ID NO: 1362416 - DNA, 15 bp, Homo sapiens
ggtacgctctgtggt

SEQ ID NO: 1362417 - DNA, 15 bp, Homo sapiens
cggtacgctctgtgg

SEQ ID NO: 1362418 - DNA, 15 bp, Homo sapiens
gcggtacgctctgtg

SEQ ID NO: 1362419 - DNA, 15 bp, Homo sapiens
ggcggtacgctctgt

SEQ ID NO: 1362420 - DNA, 15 bp, Homo sapiens
tggcggtacgctctg

SEQ ID NO: 1362421 - DNA, 15 bp, Homo sapiens
atggcggtacgctct

SEQ ID NO: 1362422 - DNA, 15 bp, Homo sapiens
catggcggtacgctc

SEQ ID NO: 1362423 - DNA, 15 bp, Homo sapiens
gcatggcggtacgct

SEQ ID NO: 1362424 - DNA, 15 bp, Homo sapiens
agcatggcggtacgc

SEQ ID NO: 1362425 - DNA, 15 bp, Homo sapiens
aagcatggcggtacg

SEQ ID NO: 1362426 - DNA, 15 bp, Homo sapiens
caagcatggcggtac

SEQ ID NO: 1362427 - DNA, 15 bp, Homo sapiens
ccaagcatggcggta

SEQ ID NO: 1362428 - DNA, 15 bp, Homo sapiens
gccaagcatggcggt

SEQ ID NO: 1362429 - DNA, 15 bp, Homo sapiens
agccaagcatggcgg

SEQ ID NO: 1362430 - DNA, 15 bp, Homo sapiens
tagccaagcatggcg

SEQ ID NO: 1362431 - DNA, 15 bp, Homo sapiens
ttagccaagcatggc

SEQ ID NO: 1362432 - DNA, 15 bp, Homo sapiens
attagccaagcatgg

SEQ ID NO: 1362433 - DNA, 15 bp, Homo sapiens
caaaattagccaagc

SEQ ID NO: 1362434 - DNA, 15 bp, Homo sapiens
tcaaaattagccaag

SEQ ID NO: 1362435 - DNA, 15 bp, Homo sapiens
ttcaaaattagccaa

SEQ ID NO: 1362436 - DNA, 15 bp, Homo sapiens
attcaaaattagcca

SEQ ID NO: 1362437 - DNA, 15 bp, Homo sapiens
aattcaaaattagcc

SEQ ID NO: 1362438 - DNA, 15 bp, Homo sapiens
aaattcaaaattagc

SEQ ID NO: 1362439 - DNA, 15 bp, Homo sapiens
aaaattcaaaattag

SEQ ID NO: 1362440 - DNA, 15 bp, Homo sapiens
aaaaattcaaaatta

SEQ ID NO: 1362441 - DNA, 15 bp, Homo sapiens
aaaaaattcaaaatt

SEQ ID NO: 1362442 - DNA, 15 bp, Homo sapiens
caaaaaattcaaaat

SEQ ID NO: 1362443 - DNA, 15 bp, Homo sapiens
acaaaaaattcaaaa

SEQ ID NO: 1362444 - DNA, 15 bp, Homo sapiens
tacaaaaaattcaaa

SEQ ID NO: 1362445 - DNA, 15 bp, Homo sapiens
ctacaaaaaattcaa

SEQ ID NO: 1362446 - DNA, 15 bp, Homo sapiens
tctacaaaaaattca

SEQ ID NO: 1362447 - DNA, 15 bp, Homo sapiens
ctctacaaaaaattc

SEQ ID NO: 1362448 - DNA, 15 bp, Homo sapiens
gagtgaaaccccatc

SEQ ID NO: 1362449 - DNA, 15 bp, Homo sapiens
agagtgaaaccccat

SEQ ID NO: 1362450 - DNA, 15 bp, Homo sapiens
cagagtgaaacccca

SEQ ID NO: 1362451 - DNA, 15 bp, Homo sapiens
acagagtgaaacccc

SEQ ID NO: 1362452 - DNA, 15 bp, Homo sapiens
aacagagtgaaaccc

SEQ ID NO: 1362453 - DNA, 15 bp, Homo sapiens
caacagagtgaaacc

SEQ ID NO: 1362454 - DNA, 15 bp, Homo sapiens
acagattgcttgagc

SEQ ID NO: 1362455 - DNA, 15 bp, Homo sapiens
gacagattgcttgag

SEQ ID NO: 1362456 - DNA, 15 bp, Homo sapiens
ggacagattgcttga

SEQ ID NO: 1362457 - DNA, 15 bp, Homo sapiens
tggacagattgcttg

SEQ ID NO: 1362458 - DNA, 15 bp, Homo sapiens
gtggacagattgctt

SEQ ID NO: 1362459 - DNA, 15 bp, Homo sapiens
agtggacagattgct

SEQ ID NO: 1362460 - DNA, 15 bp, Homo sapiens
aagtggacagattgc

SEQ ID NO: 1362461 - DNA, 15 bp, Homo sapiens
gaagtggacagattg

SEQ ID NO: 1362462 - DNA, 15 bp, Homo sapiens
tgaagtggacagatt

SEQ ID NO: 1362463 - DNA, 15 bp, Homo sapiens
ctgaagtggacagat

SEQ ID NO: 1362464 - DNA, 15 bp, Homo sapiens
gctgaagtggacaga

SEQ ID NO: 1362465 - DNA, 15 bp, Homo sapiens
ggctgaagtggacag

SEQ ID NO: 1362466 - DNA, 15 bp, Homo sapiens
aggctgaagtggaca

SEQ ID NO: 1362467 - DNA, 15 bp, Homo sapiens
gaggctgaagtggac

SEQ ID NO: 1362468 - DNA, 15 bp, Homo sapiens
ggaggctgaagtgga

SEQ ID NO: 1362469 - DNA, 15 bp, Homo sapiens
atttgggaggctgaa

SEQ ID NO: 1362470 - DNA, 15 bp, Homo sapiens
aatttgggaggctga

SEQ ID NO: 1362471 - DNA, 15 bp, Homo sapiens
gaatttgggaggctg

SEQ ID NO: 1362472 - DNA, 15 bp, Homo sapiens
ggaatttgggaggct

SEQ ID NO: 1362473 - DNA, 15 bp, Homo sapiens
aggaatttgggaggc

SEQ ID NO: 1362474 - DNA, 15 bp, Homo sapiens
caggaatttgggagg

SEQ ID NO: 1362475 - DNA, 15 bp, Homo sapiens
ccaggaatttgggag

SEQ ID NO: 1362476 - DNA, 15 bp, Homo sapiens
cccaggaatttggga

SEQ ID NO: 1362477 - DNA, 15 bp, Homo sapiens
tcccaggaatttggg

SEQ ID NO: 1362478 - DNA, 15 bp, Homo sapiens
atcccaggaatttgg

SEQ ID NO: 1362479 - DNA, 15 bp, Homo sapiens
aatcccaggaatttg

SEQ ID NO: 1362480 - DNA, 15 bp, Homo sapiens
taatcccaggaattt

SEQ ID NO: 1362481 - DNA, 15 bp, Homo sapiens
gtaatcccaggaatt

SEQ ID NO: 1362482 - DNA, 15 bp, Homo sapiens
tgtaatcccaggaat

SEQ ID NO: 1362483 - DNA, 15 bp, Homo sapiens
ctgtaatcccaggaa

SEQ ID NO: 1362484 - DNA, 15 bp, Homo sapiens
atgggtgtggtggct

SEQ ID NO: 1362485 - DNA, 15 bp, Homo sapiens
gatgggtgtggtggc

SEQ ID NO: 1362486 - DNA, 15 bp, Homo sapiens
agatgggtgtggtgg

SEQ ID NO: 1362487 - DNA, 15 bp, Homo sapiens
aagatgggtgtggtg

SEQ ID NO: 1362488 - DNA, 15 bp, Homo sapiens
aaagatgggtgtggt

SEQ ID NO: 1362489 - DNA, 15 bp, Homo sapiens
aaaagatgggtgtgg

SEQ ID NO: 1362490 - DNA, 15 bp, Homo sapiens
gaaaagatgggtgtg

SEQ ID NO: 1362491 - DNA, 15 bp, Homo sapiens
agaaaagatgggtgt

SEQ ID NO: 1362492 - DNA, 15 bp, Homo sapiens
aagaaaagatgggtg

SEQ ID NO: 1362493 - DNA, 15 bp, Homo sapiens
gaagaaaagatgggt

SEQ ID NO: 1362494 - DNA, 15 bp, Homo sapiens
agaagaaaagatggg

SEQ ID NO: 1362495 - DNA, 15 bp, Homo sapiens
aagaagaaaagatgg

SEQ ID NO: 1362496 - DNA, 15 bp, Homo sapiens
aaagaagaaaagatg

SEQ ID NO: 1362497 - DNA, 15 bp, Homo sapiens
aaaagaagaaaagat

SEQ ID NO: 1362498 - DNA, 15 bp, Homo sapiens
ttaaaagaagaaaag

SEQ ID NO: 1362499 - DNA, 15 bp, Homo sapiens
cttaaaagaagaaaa

SEQ ID NO: 1362500 - DNA, 15 bp, Homo sapiens
tcttaaaagaagaaa

SEQ ID NO: 1362501 - DNA, 15 bp, Homo sapiens
atcttaaaagaagaa

SEQ ID NO: 1362502 - DNA, 15 bp, Homo sapiens
catcttaaaagaaga

SEQ ID NO: 1362503 - DNA, 15 bp, Homo sapiens
gcatcttaaaagaag

SEQ ID NO: 1362504 - DNA, 15 bp, Homo sapiens
tgcatcttaaaagaa

SEQ ID NO: 1362505 - DNA, 15 bp, Homo sapiens
ttgcatcttaaaaga

SEQ ID NO: 1362506 - DNA, 15 bp, Homo sapiens
cttgcatcttaaaag

SEQ ID NO: 1362507 - DNA, 15 bp, Homo sapiens
tcttgcatcttaaaa

SEQ ID NO: 1362508 - DNA, 15 bp, Homo sapiens
atcttgcatcttaaa

SEQ ID NO: 1362509 - DNA, 15 bp, Homo sapiens
catcttgcatcttaa

SEQ ID NO: 1362510 - DNA, 15 bp, Homo sapiens
acatcttgcatctta

SEQ ID NO: 1362511 - DNA, 15 bp, Homo sapiens
gacatcttgcatctt

SEQ ID NO: 1362512 - DNA, 15 bp, Homo sapiens
tgacatcttgcatct

SEQ ID NO: 1362513 - DNA, 15 bp, Homo sapiens
gtgacatcttgcatc

SEQ ID NO: 1362514 - DNA, 15 bp, Homo sapiens
agtgacatcttgcat

SEQ ID NO: 1362515 - DNA, 15 bp, Homo sapiens
cagtgacatcttgca

SEQ ID NO: 1362516 - DNA, 15 bp, Homo sapiens
acagtgacatcttgc

SEQ ID NO: 1362517 - DNA, 15 bp, Homo sapiens
cacagtgacatcttg

SEQ ID NO: 1362518 - DNA, 15 bp, Homo sapiens
acacagtgacatctt

SEQ ID NO: 1362519 - DNA, 15 bp, Homo sapiens
gacacagtgacatct

SEQ ID NO: 1362520 - DNA, 15 bp, Homo sapiens
tgacacagtgacatc

SEQ ID NO: 1362521 - DNA, 15 bp, Homo sapiens
gtgacacagtgacat

SEQ ID NO: 1362522 - DNA, 15 bp, Homo sapiens
ggtgacacagtgaca

SEQ ID NO: 1362523 - DNA, 15 bp, Homo sapiens
gggtgacacagtgac

SEQ ID NO: 1362524 - DNA, 15 bp, Homo sapiens
tgggtgacacagtga

SEQ ID NO: 1362525 - DNA, 15 bp, Homo sapiens
ctgggtgacacagtg

SEQ ID NO: 1362526 - DNA, 15 bp, Homo sapiens
cagcctgggtgacac

SEQ ID NO: 1362527 - DNA, 15 bp, Homo sapiens
gactgcactccagcc

SEQ ID NO: 1362528 - DNA, 15 bp, Homo sapiens
cgactgcactccagc

SEQ ID NO: 1362529 - DNA, 15 bp, Homo sapiens
acgactgcactccag

SEQ ID NO: 1362530 - DNA, 15 bp, Homo sapiens
cacgactgcactcca

SEQ ID NO: 1362531 - DNA, 15 bp, Homo sapiens
acacgactgcactcc

SEQ ID NO: 1362532 - DNA, 15 bp, Homo sapiens
cacacgactgcactc

SEQ ID NO: 1362533 - DNA, 15 bp, Homo sapiens
tcacacgactgcact

SEQ ID NO: 1362534 - DNA, 15 bp, Homo sapiens
atcacacgactgcac

SEQ ID NO: 1362535 - DNA, 15 bp, Homo sapiens
gatcacacgactgca

SEQ ID NO: 1362536 - DNA, 15 bp, Homo sapiens
tgatcacacgactgc

SEQ ID NO: 1362537 - DNA, 15 bp, Homo sapiens
atgatcacacgactg

SEQ ID NO: 1362538 - DNA, 15 bp, Homo sapiens
tatgatcacacgact

SEQ ID NO: 1362539 - DNA, 15 bp, Homo sapiens
ctatgatcacacgac

SEQ ID NO: 1362540 - DNA, 15 bp, Homo sapiens
gctatgatcacacga

SEQ ID NO: 1362541 - DNA, 15 bp, Homo sapiens
agctatgatcacacg

SEQ ID NO: 1362542 - DNA, 15 bp, Homo sapiens
tagctatgatcacac

SEQ ID NO: 1362543 - DNA, 15 bp, Homo sapiens
ttagctatgatcaca

SEQ ID NO: 1362544 - DNA, 15 bp, Homo sapiens
gttagctatgatcac

SEQ ID NO: 1362545 - DNA, 15 bp, Homo sapiens
agttagctatgatca

SEQ ID NO: 1362546 - DNA, 15 bp, Homo sapiens
cagttagctatgatc

SEQ ID NO: 1362547 - DNA, 15 bp, Homo sapiens
gcagttagctatgat

SEQ ID NO: 1362548 - DNA, 15 bp, Homo sapiens
tgcagttagctatga

SEQ ID NO: 1362549 - DNA, 15 bp, Homo sapiens
ctgcagttagctatg

SEQ ID NO: 1362550 - DNA, 15 bp, Homo sapiens
gctgcagttagctat

SEQ ID NO: 1362551 - DNA, 15 bp, Homo sapiens
ggctgcagttagcta

SEQ ID NO: 1362552 - DNA, 15 bp, Homo sapiens
aggctgcagttagct

SEQ ID NO: 1362553 - DNA, 15 bp, Homo sapiens
aaggctgcagttagc

SEQ ID NO: 1362554 - DNA, 15 bp, Homo sapiens
caaggctgcagttag

SEQ ID NO: 1362555 - DNA, 15 bp, Homo sapiens
tcaaggctgcagtta

SEQ ID NO: 1362556 - DNA, 15 bp, Homo sapiens
gtcaaggctgcagtt

SEQ ID NO: 1362557 - DNA, 15 bp, Homo sapiens
ctcaggaggtcaagg

SEQ ID NO: 1362558 - DNA, 15 bp, Homo sapiens
gctcaggaggtcaag

SEQ ID NO: 1362559 - DNA, 15 bp, Homo sapiens
agctcaggaggtcaa

SEQ ID NO: 1362560 - DNA, 15 bp, Homo sapiens
gagctcaggaggtca

SEQ ID NO: 1362561 - DNA, 15 bp, Homo sapiens
tgagctcaggaggtc

SEQ ID NO: 1362562 - DNA, 15 bp, Homo sapiens
ttgagctcaggaggt

SEQ ID NO: 1362563 - DNA, 15 bp, Homo sapiens
cttgagctcaggagg

SEQ ID NO: 1362564 - DNA, 15 bp, Homo sapiens
acttgagctcaggag

SEQ ID NO: 1362565 - DNA, 15 bp, Homo sapiens
cacttgagctcagga

SEQ ID NO: 1362566 - DNA, 15 bp, Homo sapiens
tcacttgagctcagg

SEQ ID NO: 1362567 - DNA, 15 bp, Homo sapiens
atcacttgagctcag

SEQ ID NO: 1362568 - DNA, 15 bp, Homo sapiens
aggatcacttgagct

SEQ ID NO: 1362569 - DNA, 15 bp, Homo sapiens
gaggcaggaggatca

SEQ ID NO: 1362570 - DNA, 15 bp, Homo sapiens
agaggcaggaggatc

SEQ ID NO: 1362571 - DNA, 15 bp, Homo sapiens
cagaggcaggaggat

SEQ ID NO: 1362572 - DNA, 15 bp, Homo sapiens
gcagaggcaggagga

SEQ ID NO: 1362573 - DNA, 15 bp, Homo sapiens
ggcagaggcaggagg

SEQ ID NO: 1362574 - DNA, 15 bp, Homo sapiens
tgtggtggcgcacac

SEQ ID NO: 1362575 - DNA, 15 bp, Homo sapiens
gtgtggtggcgcaca

SEQ ID NO: 1362576 - DNA, 15 bp, Homo sapiens
agtgtggtggcgcac

SEQ ID NO: 1362577 - DNA, 15 bp, Homo sapiens
gagtgtggtggcgca

SEQ ID NO: 1362578 - DNA, 15 bp, Homo sapiens
tgagtgtggtggcgc

SEQ ID NO: 1362579 - DNA, 15 bp, Homo sapiens
ctgagtgtggtggcg

SEQ ID NO: 1362580 - DNA, 15 bp, Homo sapiens
gctgagtgtggtggc

SEQ ID NO: 1362581 - DNA, 15 bp, Homo sapiens
agctgagtgtggtgg

SEQ ID NO: 1362582 - DNA, 15 bp, Homo sapiens
tagctgagtgtggtg

SEQ ID NO: 1362583 - DNA, 15 bp, Homo sapiens
ttagctgagtgtggt

SEQ ID NO: 1362584 - DNA, 15 bp, Homo sapiens
attagctgagtgtgg

SEQ ID NO: 1362585 - DNA, 15 bp, Homo sapiens
aattagctgagtgtg

SEQ ID NO: 1362586 - DNA, 15 bp, Homo sapiens
aaattagctgagtgt

SEQ ID NO: 1362587 - DNA, 15 bp, Homo sapiens
aaaattagctgagtg

SEQ ID NO: 1362588 - DNA, 15 bp, Homo sapiens
aaaaattagctgagt

SEQ ID NO: 1362589 - DNA, 15 bp, Homo sapiens
aaaaaattagctgag

SEQ ID NO: 1362590 - DNA, 15 bp, Homo sapiens
aaaaaaattagctga

SEQ ID NO: 1362591 - DNA, 15 bp, Homo sapiens
ctacaaaaaaaaaaa

SEQ ID NO: 1362592 - DNA, 15 bp, Homo sapiens
tctacaaaaaaaaaa

SEQ ID NO: 1362593 - DNA, 15 bp, Homo sapiens
ctctacaaaaaaaaa

SEQ ID NO: 1362594 - DNA, 15 bp, Homo sapiens
tctctacaaaaaaaa

SEQ ID NO: 1362595 - DNA, 15 bp, Homo sapiens
gtctctacaaaaaaa

SEQ ID NO: 1362596 - DNA, 15 bp, Homo sapiens
cgtctctacaaaaaa

SEQ ID NO: 1362597 - DNA, 15 bp, Homo sapiens
tcgtctctacaaaaa

SEQ ID NO: 1362598 - DNA, 15 bp, Homo sapiens
ctcgtctctacaaaa

SEQ ID NO: 1362599 - DNA, 15 bp, Homo sapiens
cctcgtctctacaaa

SEQ ID NO: 1362600 - DNA, 15 bp, Homo sapiens
acctcgtctctacaa

SEQ ID NO: 1362601 - DNA, 15 bp, Homo sapiens
gacctcgtctctaca

SEQ ID NO: 1362602 - DNA, 15 bp, Homo sapiens
agacctcgtctctac

SEQ ID NO: 1362603 - DNA, 15 bp, Homo sapiens
aagacctcgtctcta

SEQ ID NO: 1362604 - DNA, 15 bp, Homo sapiens
caagacctcgtctct

SEQ ID NO: 1362605 - DNA, 15 bp, Homo sapiens
gcaagacctcgtctc

SEQ ID NO: 1362606 - DNA, 15 bp, Homo sapiens
agcaagacctcgtct

SEQ ID NO: 1362607 - DNA, 15 bp, Homo sapiens
tagcaagacctcgtc

SEQ ID NO: 1362608 - DNA, 15 bp, Homo sapiens
atagcaagacctcgt

SEQ ID NO: 1362609 - DNA, 15 bp, Homo sapiens
catagcaagacctcg

SEQ ID NO: 1362610 - DNA, 15 bp, Homo sapiens
gaagaccagcctggg

SEQ ID NO: 1362611 - DNA, 15 bp, Homo sapiens
tgaagaccagcctgg

SEQ ID NO: 1362612 - DNA, 15 bp, Homo sapiens
ttgaagaccagcctg

SEQ ID NO: 1362613 - DNA, 15 bp, Homo sapiens
gttgaagaccagcct

SEQ ID NO: 1362614 - DNA, 15 bp, Homo sapiens
agttgaagaccagcc

SEQ ID NO: 1362615 - DNA, 15 bp, Homo sapiens
cagttgaagaccagc

SEQ ID NO: 1362616 - DNA, 15 bp, Homo sapiens
gcagttgaagaccag

SEQ ID NO: 1362617 - DNA, 15 bp, Homo sapiens
agcagttgaagacca

SEQ ID NO: 1362618 - DNA, 15 bp, Homo sapiens
cagcagttgaagacc

SEQ ID NO: 1362619 - DNA, 15 bp, Homo sapiens
tcagcagttgaagac

SEQ ID NO: 1362620 - DNA, 15 bp, Homo sapiens
atcagcagttgaaga

SEQ ID NO: 1362621 - DNA, 15 bp, Homo sapiens
tatcagcagttgaag

SEQ ID NO: 1362622 - DNA, 15 bp, Homo sapiens
ttatcagcagttgaa

SEQ ID NO: 1362623 - DNA, 15 bp, Homo sapiens
gttatcagcagttga

SEQ ID NO: 1362624 - DNA, 15 bp, Homo sapiens
agttatcagcagttg

SEQ ID NO: 1362625 - DNA, 15 bp, Homo sapiens
tagttatcagcagtt

SEQ ID NO: 1362626 - DNA, 15 bp, Homo sapiens
ctagttatcagcagt

SEQ ID NO: 1362627 - DNA, 15 bp, Homo sapiens
gctagttatcagcag

SEQ ID NO: 1362628 - DNA, 15 bp, Homo sapiens
tgctagttatcagca

SEQ ID NO: 1362629 - DNA, 15 bp, Homo sapiens
atgctagttatcagc

SEQ ID NO: 1362630 - DNA, 15 bp, Homo sapiens
aatgctagttatcag

SEQ ID NO: 1362631 - DNA, 15 bp, Homo sapiens
aaatgctagttatca

SEQ ID NO: 1362632 - DNA, 15 bp, Homo sapiens
taaatgctagttatc

SEQ ID NO: 1362633 - DNA, 15 bp, Homo sapiens
ataaatgctagttat

SEQ ID NO: 1362634 - DNA, 15 bp, Homo sapiens
tataaatgctagtta

SEQ ID NO: 1362635 - DNA, 15 bp, Homo sapiens
ttataaatgctagtt

SEQ ID NO: 1362636 - DNA, 15 bp, Homo sapiens
tttataaatgctagt

SEQ ID NO: 1362637 - DNA, 15 bp, Homo sapiens
atttataaatgctag

SEQ ID NO: 1362638 - DNA, 15 bp, Homo sapiens
catttataaatgcta

SEQ ID NO: 1362639 - DNA, 15 bp, Homo sapiens
gcatttataaatgct

SEQ ID NO: 1362640 - DNA, 15 bp, Homo sapiens
tgcatttataaatgc

SEQ ID NO: 1362641 - DNA, 15 bp, Homo sapiens
atgcatttataaatg

SEQ ID NO: 1362642 - DNA, 15 bp, Homo sapiens
gatgcatttataaat

SEQ ID NO: 1362643 - DNA, 15 bp, Homo sapiens
tgatgcatttataaa

SEQ ID NO: 1362644 - DNA, 15 bp, Homo sapiens
atgatgcatttataa

SEQ ID NO: 1362645 - DNA, 15 bp, Homo sapiens
aatgatgcatttata

SEQ ID NO: 1362646 - DNA, 15 bp, Homo sapiens
aaatgatgcatttat

SEQ ID NO: 1362647 - DNA, 15 bp, Homo sapiens
aaaatgatgcattta

SEQ ID NO: 1362648 - DNA, 15 bp, Homo sapiens
aaaaatgatgcattt

SEQ ID NO: 1362649 - DNA, 15 bp, Homo sapiens
aaaaaatgatgcatt

SEQ ID NO: 1362650 - DNA, 15 bp, Homo sapiens
aaaaaaatgatgcat

SEQ ID NO: 1362651 - DNA, 15 bp, Homo sapiens
aaaaaaaatgatgca

SEQ ID NO: 1362652 - DNA, 15 bp, Homo sapiens
aaaaaaaaatgatgc

SEQ ID NO: 1362653 - DNA, 15 bp, Homo sapiens
caaaaaaaaatgatg

SEQ ID NO: 1362654 - DNA, 15 bp, Homo sapiens
acaaaaaaaaatgat

SEQ ID NO: 1362655 - DNA, 15 bp, Homo sapiens
tacaaaaaaaaatga

SEQ ID NO: 1362656 - DNA, 15 bp, Homo sapiens
atacaaaaaaaaatg

SEQ ID NO: 1362657 - DNA, 15 bp, Homo sapiens
gatacaaaaaaaaat

SEQ ID NO: 1362658 - DNA, 15 bp, Homo sapiens
cgatacaaaaaaaaa

SEQ ID NO: 1362659 - DNA, 15 bp, Homo sapiens
acgatacaaaaaaaa

SEQ ID NO: 1362660 - DNA, 15 bp, Homo sapiens
aacgatacaaaaaaa

SEQ ID NO: 1362661 - DNA, 15 bp, Homo sapiens
caacgatacaaaaaa

SEQ ID NO: 1362662 - DNA, 15 bp, Homo sapiens
acaacgatacaaaaa

SEQ ID NO: 1362663 - DNA, 15 bp, Homo sapiens
aacaacgatacaaaa

SEQ ID NO: 1362664 - DNA, 15 bp, Homo sapiens
gaacaacgatacaaa

SEQ ID NO: 1362665 - DNA, 15 bp, Homo sapiens
agaacaacgatacaa

SEQ ID NO: 1362666 - DNA, 15 bp, Homo sapiens
cagaacaacgataca

SEQ ID NO: 1362667 - DNA, 15 bp, Homo sapiens
acagaacaacgatac

SEQ ID NO: 1362668 - DNA, 15 bp, Homo sapiens
tacagaacaacgata

SEQ ID NO: 1362669 - DNA, 15 bp, Homo sapiens
atacagaacaacgat

SEQ ID NO: 1362670 - DNA, 15 bp, Homo sapiens
catacagaacaacga

SEQ ID NO: 1362671 - DNA, 15 bp, Homo sapiens
acatacagaacaacg

SEQ ID NO: 1362672 - DNA, 15 bp, Homo sapiens
gacatacagaacaac

SEQ ID NO: 1362673 - DNA, 15 bp, Homo sapiens
tgacatacagaacaa

SEQ ID NO: 1362674 - DNA, 15 bp, Homo sapiens
ctgacatacagaaca

SEQ ID NO: 1362675 - DNA, 15 bp, Homo sapiens
gctgacatacagaac

SEQ ID NO: 1362676 - DNA, 15 bp, Homo sapiens
agctgacatacagaa

SEQ ID NO: 1362677 - DNA, 15 bp, Homo sapiens
tagctgacatacaga

SEQ ID NO: 1362678 - DNA, 15 bp, Homo sapiens
atagctgacatacag

SEQ ID NO: 1362679 - DNA, 15 bp, Homo sapiens
tatagctgacataca

SEQ ID NO: 1362680 - DNA, 15 bp, Homo sapiens
gtatagctgacatac

SEQ ID NO: 1362681 - DNA, 15 bp, Homo sapiens
tgtatagctgacata

SEQ ID NO: 1362682 - DNA, 15 bp, Homo sapiens
ttgtatagctgacat

SEQ ID NO: 1362683 - DNA, 15 bp, Homo sapiens
tttgtatagctgaca

SEQ ID NO: 1362684 - DNA, 15 bp, Homo sapiens
ttttgtatagctgac

SEQ ID NO: 1362685 - DNA, 15 bp, Homo sapiens
tttttgtatagctga

SEQ ID NO: 1362686 - DNA, 15 bp, Homo sapiens
ttttttgtatagctg

SEQ ID NO: 1362687 - DNA, 15 bp, Homo sapiens
tttttttgtatagct

SEQ ID NO: 1362688 - DNA, 15 bp, Homo sapiens
ttttttttgtatagc

SEQ ID NO: 1362689 - DNA, 15 bp, Homo sapiens
attttttttgtatag

SEQ ID NO: 1362690 - DNA, 15 bp, Homo sapiens
cattttttttgtata

SEQ ID NO: 1362691 - DNA, 15 bp, Homo sapiens
ccattttttttgtat

SEQ ID NO: 1362692 - DNA, 15 bp, Homo sapiens
cccattttttttgta

SEQ ID NO: 1362693 - DNA, 15 bp, Homo sapiens
tcccattttttttgt

SEQ ID NO: 1362694 - DNA, 15 bp, Homo sapiens
ctcccattttttttg

SEQ ID NO: 1362695 - DNA, 15 bp, Homo sapiens
cctcccatttttttt

SEQ ID NO: 1362696 - DNA, 15 bp, Homo sapiens
acctcccattttttt

SEQ ID NO: 1362697 - DNA, 15 bp, Homo sapiens
gacctcccatttttt

SEQ ID NO: 1362698 - DNA, 15 bp, Homo sapiens
cgacctcccattttt

SEQ ID NO: 1362699 - DNA, 15 bp, Homo sapiens
tcgacctcccatttt

SEQ ID NO: 1362700 - DNA, 15 bp, Homo sapiens
ctcgacctcccattt

SEQ ID NO: 1362701 - DNA, 15 bp, Homo sapiens
cctcgacctcccatt

SEQ ID NO: 1362702 - DNA, 15 bp, Homo sapiens
gcctcgacctcccat

SEQ ID NO: 1362703 - DNA, 15 bp, Homo sapiens
tgcctcgacctccca

SEQ ID NO: 1362704 - DNA, 15 bp, Homo sapiens
cctgcctcgacctcc

SEQ ID NO: 1362705 - DNA, 15 bp, Homo sapiens
tcctgcctcgacctc

SEQ ID NO: 1362706 - DNA, 15 bp, Homo sapiens
ctcctgcctcgacct

SEQ ID NO: 1362707 - DNA, 15 bp, Homo sapiens
cctcctgcctcgacc

SEQ ID NO: 1362708 - DNA, 15 bp, Homo sapiens
tcctcctgcctcgac

SEQ ID NO: 1362709 - DNA, 15 bp, Homo sapiens
atcctcctgcctcga

SEQ ID NO: 1362710 - DNA, 15 bp, Homo sapiens
aagctcaagtgatcc

SEQ ID NO: 1362711 - DNA, 15 bp, Homo sapiens
taagctcaagtgatc

SEQ ID NO: 1362712 - DNA, 15 bp, Homo sapiens
ctaagctcaagtgat

SEQ ID NO: 1362713 - DNA, 15 bp, Homo sapiens
cctaagctcaagtga

SEQ ID NO: 1362714 - DNA, 15 bp, Homo sapiens
tcctaagctcaagtg

SEQ ID NO: 1362715 - DNA, 15 bp, Homo sapiens
ttcctaagctcaagt

SEQ ID NO: 1362716 - DNA, 15 bp, Homo sapiens
attcctaagctcaag

SEQ ID NO: 1362717 - DNA, 15 bp, Homo sapiens
aattcctaagctcaa

SEQ ID NO: 1362718 - DNA, 15 bp, Homo sapiens
aaattcctaagctca

SEQ ID NO: 1362719 - DNA, 15 bp, Homo sapiens
caaattcctaagctc

SEQ ID NO: 1362720 - DNA, 15 bp, Homo sapiens
tcaaattcctaagct

SEQ ID NO: 1362721 - DNA, 15 bp, Homo sapiens
ctcaaattcctaagc

SEQ ID NO: 1362722 - DNA, 15 bp, Homo sapiens
cctcaaattcctaag

SEQ ID NO: 1362723 - DNA, 15 bp, Homo sapiens
gcctcaaattcctaa

SEQ ID NO: 1362724 - DNA, 15 bp, Homo sapiens
tgcctcaaattccta

SEQ ID NO: 1362725 - DNA, 15 bp, Homo sapiens
ctgcctcaaattcct

SEQ ID NO: 1362726 - DNA, 15 bp, Homo sapiens
actgcctcaaattcc

SEQ ID NO: 1362727 - DNA, 15 bp, Homo sapiens
aactgcctcaaattc

SEQ ID NO: 1362728 - DNA, 15 bp, Homo sapiens
caactgcctcaaatt

SEQ ID NO: 1362729 - DNA, 15 bp, Homo sapiens
acaactgcctcaaat

SEQ ID NO: 1362730 - DNA, 15 bp, Homo sapiens
cacaactgcctcaaa

SEQ ID NO: 1362731 - DNA, 15 bp, Homo sapiens
ccacaactgcctcaa

SEQ ID NO: 1362732 - DNA, 15 bp, Homo sapiens
accacaactgcctca

SEQ ID NO: 1362733 - DNA, 15 bp, Homo sapiens
caccacaactgcctc

SEQ ID NO: 1362734 - DNA, 15 bp, Homo sapiens
tcaccacaactgcct

SEQ ID NO: 1362735 - DNA, 15 bp, Homo sapiens
gtcaccacaactgcc

SEQ ID NO: 1362736 - DNA, 15 bp, Homo sapiens
tgtcaccacaactgc

SEQ ID NO: 1362737 - DNA, 15 bp, Homo sapiens
ctgtcaccacaactg

SEQ ID NO: 1362738 - DNA, 15 bp, Homo sapiens
tctgtcaccacaact

SEQ ID NO: 1362739 - DNA, 15 bp, Homo sapiens
ctctgtcaccacaac

SEQ ID NO: 1362740 - DNA, 15 bp, Homo sapiens
cctctgtcaccacaa

SEQ ID NO: 1362741 - DNA, 15 bp, Homo sapiens
ccctctgtcaccaca

SEQ ID NO: 1362742 - DNA, 15 bp, Homo sapiens
tccctctgtcaccac

SEQ ID NO: 1362743 - DNA, 15 bp, Homo sapiens
ttccctctgtcacca

SEQ ID NO: 1362744 - DNA, 15 bp, Homo sapiens
gtttccctctgtcac

SEQ ID NO: 1362745 - DNA, 15 bp, Homo sapiens
ggtttccctctgtca

SEQ ID NO: 1362746 - DNA, 15 bp, Homo sapiens
aggtttccctctgtc

SEQ ID NO: 1362747 - DNA, 15 bp, Homo sapiens
aaggtttccctctgt

SEQ ID NO: 1362748 - DNA, 15 bp, Homo sapiens
caaggtttccctctg

SEQ ID NO: 1362749 - DNA, 15 bp, Homo sapiens
tcaaggtttccctct

SEQ ID NO: 1362750 - DNA, 15 bp, Homo sapiens
gtcaaggtttccctc

SEQ ID NO: 1362751 - DNA, 15 bp, Homo sapiens
agtcaaggtttccct

SEQ ID NO: 1362752 - DNA, 15 bp, Homo sapiens
aagtcaaggtttccc

SEQ ID NO: 1362753 - DNA, 15 bp, Homo sapiens
aaagtcaaggtttcc

SEQ ID NO: 1362754 - DNA, 15 bp, Homo sapiens
taaagtcaaggtttc

SEQ ID NO: 1362755 - DNA, 15 bp, Homo sapiens
ttaaagtcaaggttt

SEQ ID NO: 1362756 - DNA, 15 bp, Homo sapiens
tttaaagtcaaggtt

SEQ ID NO: 1362757 - DNA, 15 bp, Homo sapiens
atttaaagtcaaggt

SEQ ID NO: 1362758 - DNA, 15 bp, Homo sapiens
tatttaaagtcaagg

SEQ ID NO: 1362759 - DNA, 15 bp, Homo sapiens
ttatttaaagtcaag

SEQ ID NO: 1362760 - DNA, 15 bp, Homo sapiens
tttatttaaagtcaa

SEQ ID NO: 1362761 - DNA, 15 bp, Homo sapiens
ttttatttaaagtca

SEQ ID NO: 1362762 - DNA, 15 bp, Homo sapiens
attttatttaaagtc

SEQ ID NO: 1362763 - DNA, 15 bp, Homo sapiens
tattttatttaaagt

SEQ ID NO: 1362764 - DNA, 15 bp, Homo sapiens
ttattttatttaaag

SEQ ID NO: 1362765 - DNA, 15 bp, Homo sapiens
attttattttattta

SEQ ID NO: 1362766 - DNA, 15 bp, Homo sapiens
cttattttattttat

SEQ ID NO: 1362767 - DNA, 15 bp, Homo sapiens
ccttattttatttta

SEQ ID NO: 1362768 - DNA, 15 bp, Homo sapiens
gccttattttatttt

SEQ ID NO: 1362769 - DNA, 15 bp, Homo sapiens
ggccttattttattt

SEQ ID NO: 1362770 - DNA, 15 bp, Homo sapiens
tggccttattttatt

SEQ ID NO: 1362771 - DNA, 15 bp, Homo sapiens
ctggccttattttat

SEQ ID NO: 1362772 - DNA, 15 bp, Homo sapiens
cctggccttatttta

SEQ ID NO: 1362773 - DNA, 15 bp, Homo sapiens
gcctggccttatttt

SEQ ID NO: 1362774 - DNA, 15 bp, Homo sapiens
tgcctggccttattt

SEQ ID NO: 1362775 - DNA, 15 bp, Homo sapiens
gtgcctggccttatt

SEQ ID NO: 1362776 - DNA, 15 bp, Homo sapiens
tgtgcctggccttat

SEQ ID NO: 1362777 - DNA, 15 bp, Homo sapiens
ctgtgcctggcctta

SEQ ID NO: 1362778 - DNA, 15 bp, Homo sapiens
actgtgcctggcctt

SEQ ID NO: 1362779 - DNA, 15 bp, Homo sapiens
cactgtgcctggcct

SEQ ID NO: 1362780 - DNA, 15 bp, Homo sapiens
atcaggtgatccacc

SEQ ID NO: 1362781 - DNA, 15 bp, Homo sapiens
catcaggtgatccac

SEQ ID NO: 1362782 - DNA, 15 bp, Homo sapiens
tctcctgacatcagg

SEQ ID NO: 1362783 - DNA, 15 bp, Homo sapiens
atctcctgacatcag

SEQ ID NO: 1362784 - DNA, 15 bp, Homo sapiens
gatctcctgacatca

SEQ ID NO: 1362785 - DNA, 15 bp, Homo sapiens
cgatctcctgacatc

SEQ ID NO: 1362786 - DNA, 15 bp, Homo sapiens
tcgatctcctgacat

SEQ ID NO: 1362787 - DNA, 15 bp, Homo sapiens
ctcgatctcctgaca

SEQ ID NO: 1362788 - DNA, 15 bp, Homo sapiens
caccatgcccgacta

SEQ ID NO: 1362789 - DNA, 15 bp, Homo sapiens
ccaccatgcccgact

SEQ ID NO: 1362790 - DNA, 15 bp, Homo sapiens
tgccaccatgcccga

SEQ ID NO: 1362791 - DNA, 15 bp, Homo sapiens
aggactacaggtgcc

SEQ ID NO: 1362792 - DNA, 15 bp, Homo sapiens
taggactacaggtgc

SEQ ID NO: 1362793 - DNA, 15 bp, Homo sapiens
ctaggactacaggtg

SEQ ID NO: 1362794 - DNA, 15 bp, Homo sapiens
gctaggactacaggt

SEQ ID NO: 1362795 - DNA, 15 bp, Homo sapiens
agctaggactacagg

SEQ ID NO: 1362796 - DNA, 15 bp, Homo sapiens
tagctaggactacag

SEQ ID NO: 1362797 - DNA, 15 bp, Homo sapiens
gtagctaggactaca

SEQ ID NO: 1362798 - DNA, 15 bp, Homo sapiens
ggtagctaggactac

SEQ ID NO: 1362799 - DNA, 15 bp, Homo sapiens
aggtagctaggacta

SEQ ID NO: 1362800 - DNA, 15 bp, Homo sapiens
caggtagctaggact

SEQ ID NO: 1362801 - DNA, 15 bp, Homo sapiens
ccaggtagctaggac

SEQ ID NO: 1362802 - DNA, 15 bp, Homo sapiens
cccaggtagctagga

SEQ ID NO: 1362803 - DNA, 15 bp, Homo sapiens
ccccaggtagctagg

SEQ ID NO: 1362804 - DNA, 15 bp, Homo sapiens
cccccaggtagctag

SEQ ID NO: 1362805 - DNA, 15 bp, Homo sapiens
gcccccaggtagcta

SEQ ID NO: 1362806 - DNA, 15 bp, Homo sapiens
agcccccaggtagct

SEQ ID NO: 1362807 - DNA, 15 bp, Homo sapiens
cagcccccaggtagc

SEQ ID NO: 1362808 - DNA, 15 bp, Homo sapiens
tcagcccccaggtag

SEQ ID NO: 1362809 - DNA, 15 bp, Homo sapiens
ctcagcccccaggta

SEQ ID NO: 1362810 - DNA, 15 bp, Homo sapiens
cctcagcccccaggt

SEQ ID NO: 1362811 - DNA, 15 bp, Homo sapiens
acctcagcccccagg

SEQ ID NO: 1362812 - DNA, 15 bp, Homo sapiens
tacctcagcccccag

SEQ ID NO: 1362813 - DNA, 15 bp, Homo sapiens
atacctcagccccca

SEQ ID NO: 1362814 - DNA, 15 bp, Homo sapiens
catacctcagccccc

SEQ ID NO: 1362815 - DNA, 15 bp, Homo sapiens
tcatacctcagcccc

SEQ ID NO: 1362816 - DNA, 15 bp, Homo sapiens
ctcatacctcagccc

SEQ ID NO: 1362817 - DNA, 15 bp, Homo sapiens
tctcatacctcagcc

SEQ ID NO: 1362818 - DNA, 15 bp, Homo sapiens
ttctcatacctcagc

SEQ ID NO: 1362819 - DNA, 15 bp, Homo sapiens
attctcatacctcag

SEQ ID NO: 1362820 - DNA, 15 bp, Homo sapiens
gattctcatacctca

SEQ ID NO: 1362821 - DNA, 15 bp, Homo sapiens
tgattctcatacctc

SEQ ID NO: 1362822 - DNA, 15 bp, Homo sapiens
gggactggtccacac

SEQ ID NO: 1362823 - DNA, 15 bp, Homo sapiens
cgggactggtccaca

SEQ ID NO: 1362824 - DNA, 15 bp, Homo sapiens
ccgggactggtccac

SEQ ID NO: 1362825 - DNA, 15 bp, Homo sapiens
tccgggactggtcca

SEQ ID NO: 1362826 - DNA, 15 bp, Homo sapiens
gtccgggactggtcc

SEQ ID NO: 1362827 - DNA, 15 bp, Homo sapiens
tgtccgggactggtc

SEQ ID NO: 1362828 - DNA, 15 bp, Homo sapiens
ctgtccgggactggt

SEQ ID NO: 1362829 - DNA, 15 bp, Homo sapiens
tctgtccgggactgg

SEQ ID NO: 1362830 - DNA, 15 bp, Homo sapiens
atctgtccgggactg

SEQ ID NO: 1362831 - DNA, 15 bp, Homo sapiens
catctgtccgggact

SEQ ID NO: 1362832 - DNA, 15 bp, Homo sapiens
gcatctgtccgggac

SEQ ID NO: 1362833 - DNA, 15 bp, Homo sapiens
agcatctgtccggga

SEQ ID NO: 1362834 - DNA, 15 bp, Homo sapiens
cagcatctgtccggg

SEQ ID NO: 1362835 - DNA, 15 bp, Homo sapiens
ccagcatctgtccgg

SEQ ID NO: 1362836 - DNA, 15 bp, Homo sapiens
cccagcatctgtccg

SEQ ID NO: 1362837 - DNA, 15 bp, Homo sapiens
acccagcatctgtcc

SEQ ID NO: 1362838 - DNA, 15 bp, Homo sapiens
cacccagcatctgtc

SEQ ID NO: 1362839 - DNA, 15 bp, Homo sapiens
ccacccagcatctgt

SEQ ID NO: 1362840 - DNA, 15 bp, Homo sapiens
accacccagcatctg

SEQ ID NO: 1362841 - DNA, 15 bp, Homo sapiens
aaccacccagcatct

SEQ ID NO: 1362842 - DNA, 15 bp, Homo sapiens
caaccacccagcatc

SEQ ID NO: 1362843 - DNA, 15 bp, Homo sapiens
acaaccacccagcat

SEQ ID NO: 1362844 - DNA, 15 bp, Homo sapiens
cacaaccacccagca

SEQ ID NO: 1362845 - DNA, 15 bp, Homo sapiens
ccacaaccacccagc

SEQ ID NO: 1362846 - DNA, 15 bp, Homo sapiens
accacaaccacccag

SEQ ID NO: 1362847 - DNA, 15 bp, Homo sapiens
caccacaaccaccca

SEQ ID NO: 1362848 - DNA, 15 bp, Homo sapiens
ccaccacaaccaccc

SEQ ID NO: 1362849 - DNA, 15 bp, Homo sapiens
cccaccacaaccacc

SEQ ID NO: 1362850 - DNA, 15 bp, Homo sapiens
acccaccacaaccac

SEQ ID NO: 1362851 - DNA, 15 bp, Homo sapiens
cacccaccacaacca

SEQ ID NO: 1362852 - DNA, 15 bp, Homo sapiens
tcacccaccacaacc

SEQ ID NO: 1362853 - DNA, 15 bp, Homo sapiens
ctcacccaccacaac

SEQ ID NO: 1362854 - DNA, 15 bp, Homo sapiens
tctcacccaccacaa

SEQ ID NO: 1362855 - DNA, 15 bp, Homo sapiens
gtctcacccaccaca

SEQ ID NO: 1362856 - DNA, 15 bp, Homo sapiens
agtctcacccaccac

SEQ ID NO: 1362857 - DNA, 15 bp, Homo sapiens
cagtctcacccacca

SEQ ID NO: 1362858 - DNA, 15 bp, Homo sapiens
ccagtctcacccacc

SEQ ID NO: 1362859 - DNA, 15 bp, Homo sapiens
tccagtctcacccac

SEQ ID NO: 1362860 - DNA, 15 bp, Homo sapiens
ctccagtctcaccca

SEQ ID NO: 1362861 - DNA, 15 bp, Homo sapiens
tctccagtctcaccc

SEQ ID NO: 1362862 - DNA, 15 bp, Homo sapiens
ttctccagtctcacc

SEQ ID NO: 1362863 - DNA, 15 bp, Homo sapiens
tttctccagtctcac

SEQ ID NO: 1362864 - DNA, 15 bp, Homo sapiens
ttttctccagtctca

SEQ ID NO: 1362865 - DNA, 15 bp, Homo sapiens
cttttctccagtctc

SEQ ID NO: 1362866 - DNA, 15 bp, Homo sapiens
gcttttctccagtct

SEQ ID NO: 1362867 - DNA, 15 bp, Homo sapiens
tgcttttctccagtc

SEQ ID NO: 1362868 - DNA, 15 bp, Homo sapiens
ctgcttttctccagt

SEQ ID NO: 1362869 - DNA, 15 bp, Homo sapiens
tctgcttttctccag

SEQ ID NO: 1362870 - DNA, 15 bp, Homo sapiens
atctgcttttctcca

SEQ ID NO: 1362871 - DNA, 15 bp, Homo sapiens
tatctgcttttctcc

SEQ ID NO: 1362872 - DNA, 15 bp, Homo sapiens
ttatctgcttttctc

SEQ ID NO: 1362873 - DNA, 15 bp, Homo sapiens
cttatctgcttttct

SEQ ID NO: 1362874 - DNA, 15 bp, Homo sapiens
acttatctgcttttc

SEQ ID NO: 1362875 - DNA, 15 bp, Homo sapiens
cacttatctgctttt

SEQ ID NO: 1362876 - DNA, 15 bp, Homo sapiens
ccacttatctgcttt

SEQ ID NO: 1362877 - DNA, 15 bp, Homo sapiens
tccacttatctgctt

SEQ ID NO: 1362878 - DNA, 15 bp, Homo sapiens
ctccacttatctgct

SEQ ID NO: 1362879 - DNA, 15 bp, Homo sapiens
tctccacttatctgc

SEQ ID NO: 1362880 - DNA, 15 bp, Homo sapiens
ctctccacttatctg

SEQ ID NO: 1362881 - DNA, 15 bp, Homo sapiens
cctctccacttatct

SEQ ID NO: 1362882 - DNA, 15 bp, Homo sapiens
gcctctccacttatc

SEQ ID NO: 1362883 - DNA, 15 bp, Homo sapiens
tgcctctccacttat

SEQ ID NO: 1362884 - DNA, 15 bp, Homo sapiens
atgcctctccactta

SEQ ID NO: 1362885 - DNA, 15 bp, Homo sapiens
aatgcctctccactt

SEQ ID NO: 1362886 - DNA, 15 bp, Homo sapiens
aaatgcctctccact

SEQ ID NO: 1362887 - DNA, 15 bp, Homo sapiens
aaaatgcctctccac

SEQ ID NO: 1362888 - DNA, 15 bp, Homo sapiens
caaaatgcctctcca

SEQ ID NO: 1362889 - DNA, 15 bp, Homo sapiens
ccaaaatgcctctcc

SEQ ID NO: 1362890 - DNA, 15 bp, Homo sapiens
tccaaaatgcctctc

SEQ ID NO: 1362891 - DNA, 15 bp, Homo sapiens
ctccaaaatgcctct

SEQ ID NO: 1362892 - DNA, 15 bp, Homo sapiens
tctccaaaatgcctc

SEQ ID NO: 1362893 - DNA, 15 bp, Homo sapiens
atctccaaaatgcct

SEQ ID NO: 1362894 - DNA, 15 bp, Homo sapiens
tatctccaaaatgcc

SEQ ID NO: 1362895 - DNA, 15 bp, Homo sapiens
ttatctccaaaatgc

SEQ ID NO: 1362896 - DNA, 15 bp, Homo sapiens
tttatctccaaaatg

SEQ ID NO: 1362897 - DNA, 15 bp, Homo sapiens
ttttatctccaaaat

SEQ ID NO: 1362898 - DNA, 15 bp, Homo sapiens
attttatctccaaaa

SEQ ID NO: 1362899 - DNA, 15 bp, Homo sapiens
cattttatctccaaa

SEQ ID NO: 1362900 - DNA, 15 bp, Homo sapiens
ccattttatctccaa

SEQ ID NO: 1362901 - DNA, 15 bp, Homo sapiens
tccattttatctcca

SEQ ID NO: 1362902 - DNA, 15 bp, Homo sapiens
atccattttatctcc

SEQ ID NO: 1362903 - DNA, 15 bp, Homo sapiens
tatccattttatctc

SEQ ID NO: 1362904 - DNA, 15 bp, Homo sapiens
ctatccattttatct

SEQ ID NO: 1362905 - DNA, 15 bp, Homo sapiens
cctatccattttatc

SEQ ID NO: 1362906 - DNA, 15 bp, Homo sapiens
gcctatccattttat

SEQ ID NO: 1362907 - DNA, 15 bp, Homo sapiens
agcctatccatttta

SEQ ID NO: 1362908 - DNA, 15 bp, Homo sapiens
aagcctatccatttt

SEQ ID NO: 1362909 - DNA, 15 bp, Homo sapiens
aaagcctatccattt

SEQ ID NO: 1362910 - DNA, 15 bp, Homo sapiens
caaagcctatccatt

SEQ ID NO: 1362911 - DNA, 15 bp, Homo sapiens
ccaaagcctatccat

SEQ ID NO: 1362912 - DNA, 15 bp, Homo sapiens
cccaaagcctatcca

SEQ ID NO: 1362913 - DNA, 15 bp, Homo sapiens
ccccaaagcctatcc

SEQ ID NO: 1362914 - DNA, 15 bp, Homo sapiens
gccccaaagcctatc

SEQ ID NO: 1362915 - DNA, 15 bp, Homo sapiens
agccccaaagcctat

SEQ ID NO: 1362916 - DNA, 15 bp, Homo sapiens
cagccccaaagccta

SEQ ID NO: 1362917 - DNA, 15 bp, Homo sapiens
ccagccccaaagcct

SEQ ID NO: 1362918 - DNA, 15 bp, Homo sapiens
accagccccaaagcc

SEQ ID NO: 1362919 - DNA, 15 bp, Homo sapiens
taccagccccaaagc

SEQ ID NO: 1362920 - DNA, 15 bp, Homo sapiens
ctaccagccccaaag

SEQ ID NO: 1362921 - DNA, 15 bp, Homo sapiens
cctaccagccccaaa

SEQ ID NO: 1362922 - DNA, 15 bp, Homo sapiens
tcctaccagccccaa

SEQ ID NO: 1362923 - DNA, 15 bp, Homo sapiens
atcctaccagcccca

SEQ ID NO: 1362924 - DNA, 15 bp, Homo sapiens
tatcctaccagcccc

SEQ ID NO: 1362925 - DNA, 15 bp, Homo sapiens
ttatcctaccagccc

SEQ ID NO: 1362926 - DNA, 15 bp, Homo sapiens
cttatcctaccagcc

SEQ ID NO: 1362927 - DNA, 15 bp, Homo sapiens
ccttatcctaccagc

SEQ ID NO: 1362928 - DNA, 15 bp, Homo sapiens
cccttatcctaccag

SEQ ID NO: 1362929 - DNA, 15 bp, Homo sapiens
ccccttatcctacca

SEQ ID NO: 1362930 - DNA, 15 bp, Homo sapiens
accccttatcctacc

SEQ ID NO: 1362931 - DNA, 15 bp, Homo sapiens
taccccttatcctac

SEQ ID NO: 1362932 - DNA, 15 bp, Homo sapiens
ttaccccttatccta

SEQ ID NO: 1362933 - DNA, 15 bp, Homo sapiens
cttaccccttatcct

SEQ ID NO: 1362934 - DNA, 15 bp, Homo sapiens
ccttaccccttatcc

SEQ ID NO: 1362935 - DNA, 15 bp, Homo sapiens
cccttaccccttatc

SEQ ID NO: 1362936 - DNA, 15 bp, Homo sapiens
tcccttaccccttat

SEQ ID NO: 1362937 - DNA, 15 bp, Homo sapiens
ctcccttacccctta

SEQ ID NO: 1362938 - DNA, 15 bp, Homo sapiens
tctcccttacccctt

SEQ ID NO: 1362939 - DNA, 15 bp, Homo sapiens
ctctcccttacccct

SEQ ID NO: 1362940 - DNA, 15 bp, Homo sapiens
cctctcccttacccc

SEQ ID NO: 1362941 - DNA, 15 bp, Homo sapiens
acctctcccttaccc

SEQ ID NO: 1362942 - DNA, 15 bp, Homo sapiens
aacctctcccttacc

SEQ ID NO: 1362943 - DNA, 15 bp, Homo sapiens
aaacctctcccttac

SEQ ID NO: 1362944 - DNA, 15 bp, Homo sapiens
caaacctctccctta

SEQ ID NO: 1362945 - DNA, 15 bp, Homo sapiens
acaaacctctccctt

SEQ ID NO: 1362946 - DNA, 15 bp, Homo sapiens
aacaaacctctccct

SEQ ID NO: 1362947 - DNA, 15 bp, Homo sapiens
caacaaacctctccc

SEQ ID NO: 1362948 - DNA, 15 bp, Homo sapiens
acaacaaacctctcc

SEQ ID NO: 1362949 - DNA, 15 bp, Homo sapiens
gacaacaaacctctc

SEQ ID NO: 1362950 - DNA, 15 bp, Homo sapiens
ggacaacaaacctct

SEQ ID NO: 1362951 - DNA, 15 bp, Homo sapiens
aggacaacaaacctc

SEQ ID NO: 1362952 - DNA, 15 bp, Homo sapiens
aaggacaacaaacct

SEQ ID NO: 1362953 - DNA, 15 bp, Homo sapiens
caaggacaacaaacc

SEQ ID NO: 1362954 - DNA, 15 bp, Homo sapiens
ccaaggacaacaaac

SEQ ID NO: 1362955 - DNA, 15 bp, Homo sapiens
accaaggacaacaaa

SEQ ID NO: 1362956 - DNA, 15 bp, Homo sapiens
aaccaaggacaacaa

SEQ ID NO: 1362957 - DNA, 15 bp, Homo sapiens
aaaccaaggacaaca

SEQ ID NO: 1362958 - DNA, 15 bp, Homo sapiens
gaaaccaaggacaac

SEQ ID NO: 1362959 - DNA, 15 bp, Homo sapiens
agaaaccaaggacaa

SEQ ID NO: 1362960 - DNA, 15 bp, Homo sapiens
cagaaaccaaggaca

SEQ ID NO: 1362961 - DNA, 15 bp, Homo sapiens
ccagaaaccaaggac

SEQ ID NO: 1362962 - DNA, 15 bp, Homo sapiens
accagaaaccaagga

SEQ ID NO: 1362963 - DNA, 15 bp, Homo sapiens
aaccagaaaccaagg

SEQ ID NO: 1362964 - DNA, 15 bp, Homo sapiens
caaccagaaaccaag

SEQ ID NO: 1362965 - DNA, 15 bp, Homo sapiens
acaaccagaaaccaa

SEQ ID NO: 1362966 - DNA, 15 bp, Homo sapiens
cacaaccagaaacca

SEQ ID NO: 1362967 - DNA, 15 bp, Homo sapiens
tcacaaccagaaacc

SEQ ID NO: 1362968 - DNA, 15 bp, Homo sapiens
atcacaaccagaaac

SEQ ID NO: 1362969 - DNA, 15 bp, Homo sapiens
gatcacaaccagaaa

SEQ ID NO: 1362970 - DNA, 15 bp, Homo sapiens
tgatcacaaccagaa

SEQ ID NO: 1362971 - DNA, 15 bp, Homo sapiens
gtgatcacaaccaga

SEQ ID NO: 1362972 - DNA, 15 bp, Homo sapiens
agtgatcacaaccag

SEQ ID NO: 1362973 - DNA, 15 bp, Homo sapiens
cagtgatcacaacca

SEQ ID NO: 1362974 - DNA, 15 bp, Homo sapiens
ccagtgatcacaacc

SEQ ID NO: 1362975 - DNA, 15 bp, Homo sapiens
tccagtgatcacaac

SEQ ID NO: 1362976 - DNA, 15 bp, Homo sapiens
atccagtgatcacaa

SEQ ID NO: 1362977 - DNA, 15 bp, Homo sapiens
catccagtgatcaca

SEQ ID NO: 1362978 - DNA, 15 bp, Homo sapiens
ccatccagtgatcac

SEQ ID NO: 1362979 - DNA, 15 bp, Homo sapiens
accatccagtgatca

SEQ ID NO: 1362980 - DNA, 15 bp, Homo sapiens
caccatccagtgatc

SEQ ID NO: 1362981 - DNA, 15 bp, Homo sapiens
tcaccatccagtgat

SEQ ID NO: 1362982 - DNA, 15 bp, Homo sapiens
ctcaccatccagtga

SEQ ID NO: 1362983 - DNA, 15 bp, Homo sapiens
cctcaccatccagtg

SEQ ID NO: 1362984 - DNA, 15 bp, Homo sapiens
tcctcaccatccagt

SEQ ID NO: 1362985 - DNA, 15 bp, Homo sapiens
ctcctcaccatccag

SEQ ID NO: 1362986 - DNA, 15 bp, Homo sapiens
actcctcaccatcca

SEQ ID NO: 1362987 - DNA, 15 bp, Homo sapiens
cactcctcaccatcc

SEQ ID NO: 1362988 - DNA, 15 bp, Homo sapiens
tcactcctcaccatc

SEQ ID NO: 1362989 - DNA, 15 bp, Homo sapiens
ctcactcctcaccat

SEQ ID NO: 1362990 - DNA, 15 bp, Homo sapiens
gctcactcctcacca

SEQ ID NO: 1362991 - DNA, 15 bp, Homo sapiens
agctcactcctcacc

SEQ ID NO: 1362992 - DNA, 15 bp, Homo sapiens
aagctcactcctcac

SEQ ID NO: 1362993 - DNA, 15 bp, Homo sapiens
aaagctcactcctca

SEQ ID NO: 1362994 - DNA, 15 bp, Homo sapiens
gaaagctcactcctc

SEQ ID NO: 1362995 - DNA, 15 bp, Homo sapiens
agaaagctcactcct

SEQ ID NO: 1362996 - DNA, 15 bp, Homo sapiens
cagaaagctcactcc

SEQ ID NO: 1362997 - DNA, 15 bp, Homo sapiens
tcagaaagctcactc

SEQ ID NO: 1362998 - DNA, 15 bp, Homo sapiens
ctcagaaagctcact

SEQ ID NO: 1362999 - DNA, 15 bp, Homo sapiens
gctcagaaagctcac

SEQ ID NO: 1363000 - DNA, 15 bp, Homo sapiens
cgctcagaaagctca

SEQ ID NO: 1363001 - DNA, 15 bp, Homo sapiens
acgctcagaaagctc

SEQ ID NO: 1363002 - DNA, 15 bp, Homo sapiens
cacgctcagaaagct

SEQ ID NO: 1363003 - DNA, 15 bp, Homo sapiens
ccacgctcagaaagc

SEQ ID NO: 1363004 - DNA, 15 bp, Homo sapiens
tccacgctcagaaag

SEQ ID NO: 1363005 - DNA, 15 bp, Homo sapiens
ctccacgctcagaaa

SEQ ID NO: 1363006 - DNA, 15 bp, Homo sapiens
gctccacgctcagaa

SEQ ID NO: 1363007 - DNA, 15 bp, Homo sapiens
agctccacgctcaga

SEQ ID NO: 1363008 - DNA, 15 bp, Homo sapiens
gagctccacgctcag

SEQ ID NO: 1363009 - DNA, 15 bp, Homo sapiens
agagctccacgctca

SEQ ID NO: 1363010 - DNA, 15 bp, Homo sapiens
cagagctccacgctc

SEQ ID NO: 1363011 - DNA, 15 bp, Homo sapiens
ccagagctccacgct

SEQ ID NO: 1363012 - DNA, 15 bp, Homo sapiens
tccagagctccacgc

SEQ ID NO: 1363013 - DNA, 15 bp, Homo sapiens
ctccagagctccacg

SEQ ID NO: 1363014 - DNA, 15 bp, Homo sapiens
cctccagagctccac

SEQ ID NO: 1363015 - DNA, 15 bp, Homo sapiens
tcctccagagctcca

SEQ ID NO: 1363016 - DNA, 15 bp, Homo sapiens
ttcctccagagctcc

SEQ ID NO: 1363017 - DNA, 15 bp, Homo sapiens
tttcctccagagctc

SEQ ID NO: 1363018 - DNA, 15 bp, Homo sapiens
ttttcctccagagct

SEQ ID NO: 1363019 - DNA, 15 bp, Homo sapiens
cttttcctccagagc

SEQ ID NO: 1363020 - DNA, 15 bp, Homo sapiens
gcttttcctccagag

SEQ ID NO: 1363021 - DNA, 15 bp, Homo sapiens
ggcttttcctccaga

SEQ ID NO: 1363022 - DNA, 15 bp, Homo sapiens
aggcttttcctccag

SEQ ID NO: 1363023 - DNA, 15 bp, Homo sapiens
caggcttttcctcca

SEQ ID NO: 1363024 - DNA, 15 bp, Homo sapiens
acaggcttttcctcc

SEQ ID NO: 1363025 - DNA, 15 bp, Homo sapiens
aacaggcttttcctc

SEQ ID NO: 1363026 - DNA, 15 bp, Homo sapiens
aaacaggcttttcct

SEQ ID NO: 1363027 - DNA, 15 bp, Homo sapiens
caaacaggcttttcc

SEQ ID NO: 1363028 - DNA, 15 bp, Homo sapiens
ccaaacaggcttttc

SEQ ID NO: 1363029 - DNA, 15 bp, Homo sapiens
cccaaacaggctttt

SEQ ID NO: 1363030 - DNA, 15 bp, Homo sapiens
tcccaaacaggcttt

SEQ ID NO: 1363031 - DNA, 15 bp, Homo sapiens
ctcccaaacaggctt

SEQ ID NO: 1363032 - DNA, 15 bp, Homo sapiens
actcccaaacaggct

SEQ ID NO: 1363033 - DNA, 15 bp, Homo sapiens
cactcccaaacaggc

SEQ ID NO: 1363034 - DNA, 15 bp, Homo sapiens
acactcccaaacagg

SEQ ID NO: 1363035 - DNA, 15 bp, Homo sapiens
aacactcccaaacag

SEQ ID NO: 1363036 - DNA, 15 bp, Homo sapiens
taacactcccaaaca

SEQ ID NO: 1363037 - DNA, 15 bp, Homo sapiens
ctaacactcccaaac

SEQ ID NO: 1363038 - DNA, 15 bp, Homo sapiens
tctaacactcccaaa

SEQ ID NO: 1363039 - DNA, 15 bp, Homo sapiens
ctctaacactcccaa

SEQ ID NO: 1363040 - DNA, 15 bp, Homo sapiens
cctctaacactccca

SEQ ID NO: 1363041 - DNA, 15 bp, Homo sapiens
tcctctaacactccc

SEQ ID NO: 1363042 - DNA, 15 bp, Homo sapiens
ctcctctaacactcc

SEQ ID NO: 1363043 - DNA, 15 bp, Homo sapiens
actcctctaacactc

SEQ ID NO: 1363044 - DNA, 15 bp, Homo sapiens
aactcctctaacact

SEQ ID NO: 1363045 - DNA, 15 bp, Homo sapiens
aaactcctctaacac

SEQ ID NO: 1363046 - DNA, 15 bp, Homo sapiens
caaactcctctaaca

SEQ ID NO: 1363047 - DNA, 15 bp, Homo sapiens
tcaaactcctctaac

SEQ ID NO: 1363048 - DNA, 15 bp, Homo sapiens
ttcaaactcctctaa

SEQ ID NO: 1363049 - DNA, 15 bp, Homo sapiens
gttcaaactcctcta

SEQ ID NO: 1363050 - DNA, 15 bp, Homo sapiens
ggttcaaactcctct

SEQ ID NO: 1363051 - DNA, 15 bp, Homo sapiens
tggttcaaactcctc

SEQ ID NO: 1363052 - DNA, 15 bp, Homo sapiens
ctggttcaaactcct

SEQ ID NO: 1363053 - DNA, 15 bp, Homo sapiens
tctggttcaaactcc

SEQ ID NO: 1363054 - DNA, 15 bp, Homo sapiens
ctctggttcaaactc

SEQ ID NO: 1363055 - DNA, 15 bp, Homo sapiens
gctctggttcaaact

SEQ ID NO: 1363056 - DNA, 15 bp, Homo sapiens
tgctctggttcaaac

SEQ ID NO: 1363057 - DNA, 15 bp, Homo sapiens
ttgctctggttcaaa

SEQ ID NO: 1363058 - DNA, 15 bp, Homo sapiens
gttgctctggttcaa

SEQ ID NO: 1363059 - DNA, 15 bp, Homo sapiens
agttgctctggttca

SEQ ID NO: 1363060 - DNA, 15 bp, Homo sapiens
gagttgctctggttc

SEQ ID NO: 1363061 - DNA, 15 bp, Homo sapiens
ggagttgctctggtt

SEQ ID NO: 1363062 - DNA, 15 bp, Homo sapiens
tggagttgctctggt

SEQ ID NO: 1363063 - DNA, 15 bp, Homo sapiens
atggagttgctctgg

SEQ ID NO: 1363064 - DNA, 15 bp, Homo sapiens
gatggagttgctctg

SEQ ID NO: 1363065 - DNA, 15 bp, Homo sapiens
agatggagttgctct

SEQ ID NO: 1363066 - DNA, 15 bp, Homo sapiens
aagatggagttgctc

SEQ ID NO: 1363067 - DNA, 15 bp, Homo sapiens
caagatggagttgct

SEQ ID NO: 1363068 - DNA, 15 bp, Homo sapiens
tcaagatggagttgc

SEQ ID NO: 1363069 - DNA, 15 bp, Homo sapiens
cattttacccagccc

SEQ ID NO: 1363070 - DNA, 15 bp, Homo sapiens
tcattttacccagcc

SEQ ID NO: 1363071 - DNA, 15 bp, Homo sapiens
ctcattttacccagc

SEQ ID NO: 1363072 - DNA, 15 bp, Homo sapiens
cctcattttacccag

SEQ ID NO: 1363073 - DNA, 15 bp, Homo sapiens
gcctcattttaccca

SEQ ID NO: 1363074 - DNA, 15 bp, Homo sapiens
agcctcattttaccc

SEQ ID NO: 1363075 - DNA, 15 bp, Homo sapiens
cagcctcattttacc

SEQ ID NO: 1363076 - DNA, 15 bp, Homo sapiens
tcagcctcattttac

SEQ ID NO: 1363077 - DNA, 15 bp, Homo sapiens
ctcagcctcatttta

SEQ ID NO: 1363078 - DNA, 15 bp, Homo sapiens
tctcagcctcatttt

SEQ ID NO: 1363079 - DNA, 15 bp, Homo sapiens
gtctcagcctcattt

SEQ ID NO: 1363080 - DNA, 15 bp, Homo sapiens
ggtctcagcctcatt

SEQ ID NO: 1363081 - DNA, 15 bp, Homo sapiens
aggtctcagcctcat

SEQ ID NO: 1363082 - DNA, 15 bp, Homo sapiens
taggtctcagcctca

SEQ ID NO: 1363083 - DNA, 15 bp, Homo sapiens
gtaggtctcagcctc

SEQ ID NO: 1363084 - DNA, 15 bp, Homo sapiens
agtaggtctcagcct

SEQ ID NO: 1363085 - DNA, 15 bp, Homo sapiens
cagtaggtctcagcc

SEQ ID NO: 1363086 - DNA, 15 bp, Homo sapiens
ccagtaggtctcagc

SEQ ID NO: 1363087 - DNA, 15 bp, Homo sapiens
gccagtaggtctcag

SEQ ID NO: 1363088 - DNA, 15 bp, Homo sapiens
agccagtaggtctca

SEQ ID NO: 1363089 - DNA, 15 bp, Homo sapiens
cagccagtaggtctc

SEQ ID NO: 1363090 - DNA, 15 bp, Homo sapiens
gcagccagtaggtct

SEQ ID NO: 1363091 - DNA, 15 bp, Homo sapiens
tgcagccagtaggtc

SEQ ID NO: 1363092 - DNA, 15 bp, Homo sapiens
atgcagccagtaggt

SEQ ID NO: 1363093 - DNA, 15 bp, Homo sapiens
aatgcagccagtagg

SEQ ID NO: 1363094 - DNA, 15 bp, Homo sapiens
gaatgcagccagtag

SEQ ID NO: 1363095 - DNA, 15 bp, Homo sapiens
ggaatgcagccagta

SEQ ID NO: 1363096 - DNA, 15 bp, Homo sapiens
gggaatgcagccagt

SEQ ID NO: 1363097 - DNA, 15 bp, Homo sapiens
tgggaatgcagccag

SEQ ID NO: 1363098 - DNA, 15 bp, Homo sapiens
ctgggaatgcagcca

SEQ ID NO: 1363099 - DNA, 15 bp, Homo sapiens
tctgggaatgcagcc

SEQ ID NO: 1363100 - DNA, 15 bp, Homo sapiens
ctctgggaatgcagc

SEQ ID NO: 1363101 - DNA, 15 bp, Homo sapiens
cctctgggaatgcag

SEQ ID NO: 1363102 - DNA, 15 bp, Homo sapiens
ccctctgggaatgca

SEQ ID NO: 1363103 - DNA, 15 bp, Homo sapiens
accctctgggaatgc

SEQ ID NO: 1363104 - DNA, 15 bp, Homo sapiens
aaccctctgggaatg

SEQ ID NO: 1363105 - DNA, 15 bp, Homo sapiens
taaccctctgggaat

SEQ ID NO: 1363106 - DNA, 15 bp, Homo sapiens
ttaaccctctgggaa

SEQ ID NO: 1363107 - DNA, 15 bp, Homo sapiens
cttaaccctctggga

SEQ ID NO: 1363108 - DNA, 15 bp, Homo sapiens
ccttaaccctctggg

SEQ ID NO: 1363109 - DNA, 15 bp, Homo sapiens
gccttaaccctctgg

SEQ ID NO: 1363110 - DNA, 15 bp, Homo sapiens
tgccttaaccctctg

SEQ ID NO: 1363111 - DNA, 15 bp, Homo sapiens
atgccttaaccctct

SEQ ID NO: 1363112 - DNA, 15 bp, Homo sapiens
aatgccttaaccctc

SEQ ID NO: 1363113 - DNA, 15 bp, Homo sapiens
gaatgccttaaccct

SEQ ID NO: 1363114 - DNA, 15 bp, Homo sapiens
agaatgccttaaccc

SEQ ID NO: 1363115 - DNA, 15 bp, Homo sapiens
tagaatgccttaacc

SEQ ID NO: 1363116 - DNA, 15 bp, Homo sapiens
ttagaatgccttaac

SEQ ID NO: 1363117 - DNA, 15 bp, Homo sapiens
cttagaatgccttaa

SEQ ID NO: 1363118 - DNA, 15 bp, Homo sapiens
acttagaatgcctta

SEQ ID NO: 1363119 - DNA, 15 bp, Homo sapiens
gacttagaatgcctt

SEQ ID NO: 1363120 - DNA, 15 bp, Homo sapiens
tgacttagaatgcct

SEQ ID NO: 1363121 - DNA, 15 bp, Homo sapiens
gtgacttagaatgcc

SEQ ID NO: 1363122 - DNA, 15 bp, Homo sapiens
tgtgacttagaatgc

SEQ ID NO: 1363123 - DNA, 15 bp, Homo sapiens
gacctcctatctcat

SEQ ID NO: 1363124 - DNA, 15 bp, Homo sapiens
cgacctcctatctca

SEQ ID NO: 1363125 - DNA, 15 bp, Homo sapiens
ccgacctcctatctc

SEQ ID NO: 1363126 - DNA, 15 bp, Homo sapiens
gccgacctcctatct

SEQ ID NO: 1363127 - DNA, 15 bp, Homo sapiens
tgccgacctcctatc

SEQ ID NO: 1363128 - DNA, 15 bp, Homo sapiens
gtgccgacctcctat

SEQ ID NO: 1363129 - DNA, 15 bp, Homo sapiens
tgtgccgacctccta

SEQ ID NO: 1363130 - DNA, 15 bp, Homo sapiens
ttgtgccgacctcct

SEQ ID NO: 1363131 - DNA, 15 bp, Homo sapiens
cttgtgccgacctcc

SEQ ID NO: 1363132 - DNA, 15 bp, Homo sapiens
tcttgtgccgacctc

SEQ ID NO: 1363133 - DNA, 15 bp, Homo sapiens
atcttgtgccgacct

SEQ ID NO: 1363134 - DNA, 15 bp, Homo sapiens
tatcttgtgccgacc

SEQ ID NO: 1363135 - DNA, 15 bp, Homo sapiens
gtatcttgtgccgac

SEQ ID NO: 1363136 - DNA, 15 bp, Homo sapiens
tgtatcttgtgccga

SEQ ID NO: 1363137 - DNA, 15 bp, Homo sapiens
ctgtatcttgtgccg

SEQ ID NO: 1363138 - DNA, 15 bp, Homo sapiens
cctgtatcttgtgcc

SEQ ID NO: 1363139 - DNA, 15 bp, Homo sapiens
acctgtatcttgtgc

SEQ ID NO: 1363140 - DNA, 15 bp, Homo sapiens
gacctgtatcttgtg

SEQ ID NO: 1363141 - DNA, 15 bp, Homo sapiens
tgacctgtatcttgt

SEQ ID NO: 1363142 - DNA, 15 bp, Homo sapiens
ttgacctgtatcttg

SEQ ID NO: 1363143 - DNA, 15 bp, Homo sapiens
tttgacctgtatctt

SEQ ID NO: 1363144 - DNA, 15 bp, Homo sapiens
ttttgacctgtatct

SEQ ID NO: 1363145 - DNA, 15 bp, Homo sapiens
tttttgacctgtatc

SEQ ID NO: 1363146 - DNA, 15 bp, Homo sapiens
atttttgacctgtat

SEQ ID NO: 1363147 - DNA, 15 bp, Homo sapiens
tatttttgacctgta

SEQ ID NO: 1363148 - DNA, 15 bp, Homo sapiens
gtatttttgacctgt

SEQ ID NO: 1363149 - DNA, 15 bp, Homo sapiens
ggtatttttgacctg

SEQ ID NO: 1363150 - DNA, 15 bp, Homo sapiens
aggtatttttgacct

SEQ ID NO: 1363151 - DNA, 15 bp, Homo sapiens
aaggtatttttgacc

SEQ ID NO: 1363152 - DNA, 15 bp, Homo sapiens
caaggtatttttgac

SEQ ID NO: 1363153 - DNA, 15 bp, Homo sapiens
gcaaggtatttttga

SEQ ID NO: 1363154 - DNA, 15 bp, Homo sapiens
agcaaggtatttttg

SEQ ID NO: 1363155 - DNA, 15 bp, Homo sapiens
cagcaaggtattttt

SEQ ID NO: 1363156 - DNA, 15 bp, Homo sapiens
tcagcaaggtatttt

SEQ ID NO: 1363157 - DNA, 15 bp, Homo sapiens
atcagcaaggtattt

SEQ ID NO: 1363158 - DNA, 15 bp, Homo sapiens
tatcagcaaggtatt

SEQ ID NO: 1363159 - DNA, 15 bp, Homo sapiens
ttatcagcaaggtat

SEQ ID NO: 1363160 - DNA, 15 bp, Homo sapiens
tttatcagcaaggta

SEQ ID NO: 1363161 - DNA, 15 bp, Homo sapiens
ttttatcagcaaggt

SEQ ID NO: 1363162 - DNA, 15 bp, Homo sapiens
gttttatcagcaagg

SEQ ID NO: 1363163 - DNA, 15 bp, Homo sapiens
tgttttatcagcaag

SEQ ID NO: 1363164 - DNA, 15 bp, Homo sapiens
cctgttttatcagca

SEQ ID NO: 1363165 - DNA, 15 bp, Homo sapiens
acctgttttatcagc

SEQ ID NO: 1363166 - DNA, 15 bp, Homo sapiens
aacctgttttatcag

SEQ ID NO: 1363167 - DNA, 15 bp, Homo sapiens
caacctgttttatca

SEQ ID NO: 1363168 - DNA, 15 bp, Homo sapiens
gcaacctgttttatc

SEQ ID NO: 1363169 - DNA, 15 bp, Homo sapiens
tgcaacctgttttat

SEQ ID NO: 1363170 - DNA, 15 bp, Homo sapiens
ctgcaacctgtttta

SEQ ID NO: 1363171 - DNA, 15 bp, Homo sapiens
actgcaacctgtttt

SEQ ID NO: 1363172 - DNA, 15 bp, Homo sapiens
tactgcaacctgttt

SEQ ID NO: 1363173 - DNA, 15 bp, Homo sapiens
ctactgcaacctgtt

SEQ ID NO: 1363174 - DNA, 15 bp, Homo sapiens
tctactgcaacctgt

SEQ ID NO: 1363175 - DNA, 15 bp, Homo sapiens
ctctactgcaacctg

SEQ ID NO: 1363176 - DNA, 15 bp, Homo sapiens
tctctactgcaacct

SEQ ID NO: 1363177 - DNA, 15 bp, Homo sapiens
ttctctactgcaacc

SEQ ID NO: 1363178 - DNA, 15 bp, Homo sapiens
cttctctactgcaac

SEQ ID NO: 1363179 - DNA, 15 bp, Homo sapiens
gcttctctactgcaa

SEQ ID NO: 1363180 - DNA, 15 bp, Homo sapiens
agcttctctactgca

SEQ ID NO: 1363181 - DNA, 15 bp, Homo sapiens
cagcttctctactgc

SEQ ID NO: 1363182 - DNA, 15 bp, Homo sapiens
ccagcttctctactg

SEQ ID NO: 1363183 - DNA, 15 bp, Homo sapiens
gccagcttctctact

SEQ ID NO: 1363184 - DNA, 15 bp, Homo sapiens
ggccagcttctctac

SEQ ID NO: 1363185 - DNA, 15 bp, Homo sapiens
tggccagcttctcta

SEQ ID NO: 1363186 - DNA, 15 bp, Homo sapiens
ttggccagcttctct

SEQ ID NO: 1363187 - DNA, 15 bp, Homo sapiens
tttggccagcttctc

SEQ ID NO: 1363188 - DNA, 15 bp, Homo sapiens
ttttggccagcttct

SEQ ID NO: 1363189 - DNA, 15 bp, Homo sapiens
attttggccagcttc

SEQ ID NO: 1363190 - DNA, 15 bp, Homo sapiens
gattttggccagctt

SEQ ID NO: 1363191 - DNA, 15 bp, Homo sapiens
ggattttggccagct

SEQ ID NO: 1363192 - DNA, 15 bp, Homo sapiens
tggattttggccagc

SEQ ID NO: 1363193 - DNA, 15 bp, Homo sapiens
gtggattttggccag

SEQ ID NO: 1363194 - DNA, 15 bp, Homo sapiens
ggtggattttggcca

SEQ ID NO: 1363195 - DNA, 15 bp, Homo sapiens
tggtggattttggcc

SEQ ID NO: 1363196 - DNA, 15 bp, Homo sapiens
ttggtggattttggc

SEQ ID NO: 1363197 - DNA, 15 bp, Homo sapiens
cttggtggattttgg

SEQ ID NO: 1363198 - DNA, 15 bp, Homo sapiens
tcttggtggattttg

SEQ ID NO: 1363199 - DNA, 15 bp, Homo sapiens
atcttggtggatttt

SEQ ID NO: 1363200 - DNA, 15 bp, Homo sapiens
catcttggtggattt

SEQ ID NO: 1363201 - DNA, 15 bp, Homo sapiens
ccatcttggtggatt

SEQ ID NO: 1363202 - DNA, 15 bp, Homo sapiens
gccatcttggtggat

SEQ ID NO: 1363203 - DNA, 15 bp, Homo sapiens
cgccatcttggtgga

SEQ ID NO: 1363204 - DNA, 15 bp, Homo sapiens
tcgccatcttggtgg

SEQ ID NO: 1363205 - DNA, 15 bp, Homo sapiens
gtcgccatcttggtg

SEQ ID NO: 1363206 - DNA, 15 bp, Homo sapiens
tgtcgccatcttggt

SEQ ID NO: 1363207 - DNA, 15 bp, Homo sapiens
ttgtcgccatcttgg

SEQ ID NO: 1363208 - DNA, 15 bp, Homo sapiens
cttgtcgccatcttg

SEQ ID NO: 1363209 - DNA, 15 bp, Homo sapiens
tcttgtcgccatctt

SEQ ID NO: 1363210 - DNA, 15 bp, Homo sapiens
ctcttgtcgccatct

SEQ ID NO: 1363211 - DNA, 15 bp, Homo sapiens
actcttgtcgccatc

SEQ ID NO: 1363212 - DNA, 15 bp, Homo sapiens
cactcttgtcgccat

SEQ ID NO: 1363213 - DNA, 15 bp, Homo sapiens
tcactcttgtcgcca

SEQ ID NO: 1363214 - DNA, 15 bp, Homo sapiens
gtcactcttgtcgcc

SEQ ID NO: 1363215 - DNA, 15 bp, Homo sapiens
ggtcactcttgtcgc

SEQ ID NO: 1363216 - DNA, 15 bp, Homo sapiens
aggtcactcttgtcg

SEQ ID NO: 1363217 - DNA, 15 bp, Homo sapiens
gaggtcactcttgtc

SEQ ID NO: 1363218 - DNA, 15 bp, Homo sapiens
agaggtcactcttgt

SEQ ID NO: 1363219 - DNA, 15 bp, Homo sapiens
cagaggtcactcttg

SEQ ID NO: 1363220 - DNA, 15 bp, Homo sapiens
ccagaggtcactctt

SEQ ID NO: 1363221 - DNA, 15 bp, Homo sapiens
accagaggtcactct

SEQ ID NO: 1363222 - DNA, 15 bp, Homo sapiens
gaccagaggtcactc

SEQ ID NO: 1363223 - DNA, 15 bp, Homo sapiens
tgaccagaggtcact

SEQ ID NO: 1363224 - DNA, 15 bp, Homo sapiens
atgaccagaggtcac

SEQ ID NO: 1363225 - DNA, 15 bp, Homo sapiens
gatgaccagaggtca

SEQ ID NO: 1363226 - DNA, 15 bp, Homo sapiens
ggatgaccagaggtc

SEQ ID NO: 1363227 - DNA, 15 bp, Homo sapiens
aggatgaccagaggt

SEQ ID NO: 1363228 - DNA, 15 bp, Homo sapiens
gaggatgaccagagg

SEQ ID NO: 1363229 - DNA, 15 bp, Homo sapiens
tgaggatgaccagag

SEQ ID NO: 1363230 - DNA, 15 bp, Homo sapiens
gtgaggatgaccaga

SEQ ID NO: 1363231 - DNA, 15 bp, Homo sapiens
agtgaggatgaccag

SEQ ID NO: 1363232 - DNA, 15 bp, Homo sapiens
cagtgaggatgacca

SEQ ID NO: 1363233 - DNA, 15 bp, Homo sapiens
acagtgaggatgacc

SEQ ID NO: 1363234 - DNA, 15 bp, Homo sapiens
aacagtgaggatgac

SEQ ID NO: 1363235 - DNA, 15 bp, Homo sapiens
taacagtgaggatga

SEQ ID NO: 1363236 - DNA, 15 bp, Homo sapiens
gtaacagtgaggatg

SEQ ID NO: 1363237 - DNA, 15 bp, Homo sapiens
tgtaacagtgaggat

SEQ ID NO: 1363238 - DNA, 15 bp, Homo sapiens
gtgtaacagtgagga

SEQ ID NO: 1363239 - DNA, 15 bp, Homo sapiens
agtgtaacagtgagg

SEQ ID NO: 1363240 - DNA, 15 bp, Homo sapiens
gagtgtaacagtgag

SEQ ID NO: 1363241 - DNA, 15 bp, Homo sapiens
ggagtgtaacagtga

SEQ ID NO: 1363242 - DNA, 15 bp, Homo sapiens
gggagtgtaacagtg

SEQ ID NO: 1363243 - DNA, 15 bp, Homo sapiens
tgggagtgtaacagt

SEQ ID NO: 1363244 - DNA, 15 bp, Homo sapiens
gtgggagtgtaacag

SEQ ID NO: 1363245 - DNA, 15 bp, Homo sapiens
ggtgggagtgtaaca

SEQ ID NO: 1363246 - DNA, 15 bp, Homo sapiens
tggtgggagtgtaac

SEQ ID NO: 1363247 - DNA, 15 bp, Homo sapiens
ctggtgggagtgtaa

SEQ ID NO: 1363248 - DNA, 15 bp, Homo sapiens
gctggtgggagtgta

SEQ ID NO: 1363249 - DNA, 15 bp, Homo sapiens
cgctggtgggagtgt

SEQ ID NO: 1363250 - DNA, 15 bp, Homo sapiens
gcgctggtgggagtg

SEQ ID NO: 1363251 - DNA, 15 bp, Homo sapiens
ggcgctggtgggagt

SEQ ID NO: 1363252 - DNA, 15 bp, Homo sapiens
tggcgctggtgggag

SEQ ID NO: 1363253 - DNA, 15 bp, Homo sapiens
atggcgctggtggga

SEQ ID NO: 1363254 - DNA, 15 bp, Homo sapiens
catggcgctggtggg

SEQ ID NO: 1363255 - DNA, 15 bp, Homo sapiens
tcatggcgctggtgg

SEQ ID NO: 1363256 - DNA, 15 bp, Homo sapiens
gtcatggcgctggtg

SEQ ID NO: 1363257 - DNA, 15 bp, Homo sapiens
tgtcatggcgctggt

SEQ ID NO: 1363258 - DNA, 15 bp, Homo sapiens
ctgtcatggcgctgg

SEQ ID NO: 1363259 - DNA, 15 bp, Homo sapiens
actgtcatggcgctg

SEQ ID NO: 1363260 - DNA, 15 bp, Homo sapiens
aactgtcatggcgct

SEQ ID NO: 1363261 - DNA, 15 bp, Homo sapiens
aaactgtcatggcgc

SEQ ID NO: 1363262 - DNA, 15 bp, Homo sapiens
caaactgtcatggcg

SEQ ID NO: 1363263 - DNA, 15 bp, Homo sapiens
gcaaactgtcatggc

SEQ ID NO: 1363264 - DNA, 15 bp, Homo sapiens
tgcaaactgtcatgg

SEQ ID NO: 1363265 - DNA, 15 bp, Homo sapiens
ctgcaaactgtcatg

SEQ ID NO: 1363266 - DNA, 15 bp, Homo sapiens
tctgcaaactgtcat

SEQ ID NO: 1363267 - DNA, 15 bp, Homo sapiens
atctgcaaactgtca

SEQ ID NO: 1363268 - DNA, 15 bp, Homo sapiens
aatctgcaaactgtc

SEQ ID NO: 1363269 - DNA, 15 bp, Homo sapiens
gaatctgcaaactgt

SEQ ID NO: 1363270 - DNA, 15 bp, Homo sapiens
ggaatctgcaaactg

SEQ ID NO: 1363271 - DNA, 15 bp, Homo sapiens
tggaatctgcaaact

SEQ ID NO: 1363272 - DNA, 15 bp, Homo sapiens
ctggaatctgcaaac

SEQ ID NO: 1363273 - DNA, 15 bp, Homo sapiens
cctggaatctgcaaa

SEQ ID NO: 1363274 - DNA, 15 bp, Homo sapiens
acctggaatctgcaa

SEQ ID NO: 1363275 - DNA, 15 bp, Homo sapiens
tacctggaatctgca

SEQ ID NO: 1363276 - DNA, 15 bp, Homo sapiens
ttacctggaatctgc

SEQ ID NO: 1363277 - DNA, 15 bp, Homo sapiens
attacctggaatctg

SEQ ID NO: 1363278 - DNA, 15 bp, Homo sapiens
cattacctggaatct

SEQ ID NO: 1363279 - DNA, 15 bp, Homo sapiens
acattacctggaatc

SEQ ID NO: 1363280 - DNA, 15 bp, Homo sapiens
gacattacctggaat

SEQ ID NO: 1363281 - DNA, 15 bp, Homo sapiens
tgacattacctggaa

SEQ ID NO: 1363282 - DNA, 15 bp, Homo sapiens
ctgacattacctgga

SEQ ID NO: 1363283 - DNA, 15 bp, Homo sapiens
cctgacattacctgg

SEQ ID NO: 1363284 - DNA, 15 bp, Homo sapiens
tcctgacattacctg

SEQ ID NO: 1363285 - DNA, 15 bp, Homo sapiens
ttcctgacattacct

SEQ ID NO: 1363286 - DNA, 15 bp, Homo sapiens
tttcctgacattacc

SEQ ID NO: 1363287 - DNA, 15 bp, Homo sapiens
atttcctgacattac

SEQ ID NO: 1363288 - DNA, 15 bp, Homo sapiens
aatttcctgacatta

SEQ ID NO: 1363289 - DNA, 15 bp, Homo sapiens
taatttcctgacatt

SEQ ID NO: 1363290 - DNA, 15 bp, Homo sapiens
gtaatttcctgacat

SEQ ID NO: 1363291 - DNA, 15 bp, Homo sapiens
ggtaatttcctgaca

SEQ ID NO: 1363292 - DNA, 15 bp, Homo sapiens
gggtaatttcctgac

SEQ ID NO: 1363293 - DNA, 15 bp, Homo sapiens
agggtaatttcctga

SEQ ID NO: 1363294 - DNA, 15 bp, Homo sapiens
tagggtaatttcctg

SEQ ID NO: 1363295 - DNA, 15 bp, Homo sapiens
atagggtaatttcct

SEQ ID NO: 1363296 - DNA, 15 bp, Homo sapiens
tatagggtaatttcc

SEQ ID NO: 1363297 - DNA, 15 bp, Homo sapiens
atatagggtaatttc

SEQ ID NO: 1363298 - DNA, 15 bp, Homo sapiens
catatagggtaattt

SEQ ID NO: 1363299 - DNA, 15 bp, Homo sapiens
ccatatagggtaatt

SEQ ID NO: 1363300 - DNA, 15 bp, Homo sapiens
accatatagggtaat

SEQ ID NO: 1363301 - DNA, 15 bp, Homo sapiens
gaccatatagggtaa

SEQ ID NO: 1363302 - DNA, 15 bp, Homo sapiens
agaccatatagggta

SEQ ID NO: 1363303 - DNA, 15 bp, Homo sapiens
tagaccatatagggt

SEQ ID NO: 1363304 - DNA, 15 bp, Homo sapiens
ttagaccatataggg

SEQ ID NO: 1363305 - DNA, 15 bp, Homo sapiens
tttagaccatatagg

SEQ ID NO: 1363306 - DNA, 15 bp, Homo sapiens
ttttagaccatatag

SEQ ID NO: 1363307 - DNA, 15 bp, Homo sapiens
tttttagaccatata

SEQ ID NO: 1363308 - DNA, 15 bp, Homo sapiens
ttttttagaccatat

SEQ ID NO: 1363309 - DNA, 15 bp, Homo sapiens
tttttttagaccata

SEQ ID NO: 1363310 - DNA, 15 bp, Homo sapiens
ctttttttagaccat

SEQ ID NO: 1363311 - DNA, 15 bp, Homo sapiens
cctttttttagacca

SEQ ID NO: 1363312 - DNA, 15 bp, Homo sapiens
ccctttttttagacc

SEQ ID NO: 1363313 - DNA, 15 bp, Homo sapiens
cccctttttttagac

SEQ ID NO: 1363314 - DNA, 15 bp, Homo sapiens
tcccctttttttaga

SEQ ID NO: 1363315 - DNA, 15 bp, Homo sapiens
gtcccctttttttag

SEQ ID NO: 1363316 - DNA, 15 bp, Homo sapiens
tgtccccttttttta

SEQ ID NO: 1363317 - DNA, 15 bp, Homo sapiens
gtgtccccttttttt

SEQ ID NO: 1363318 - DNA, 15 bp, Homo sapiens
tgtgtcccctttttt

SEQ ID NO: 1363319 - DNA, 15 bp, Homo sapiens
atgtgtccccttttt

SEQ ID NO: 1363320 - DNA, 15 bp, Homo sapiens
catgtgtcccctttt

SEQ ID NO: 1363321 - DNA, 15 bp, Homo sapiens
tcatgtgtccccttt

SEQ ID NO: 1363322 - DNA, 15 bp, Homo sapiens
ttcatgtgtcccctt

SEQ ID NO: 1363323 - DNA, 15 bp, Homo sapiens
attcatgtgtcccct

SEQ ID NO: 1363324 - DNA, 15 bp, Homo sapiens
tattcatgtgtcccc

SEQ ID NO: 1363325 - DNA, 15 bp, Homo sapiens
ttattcatgtgtccc

SEQ ID NO: 1363326 - DNA, 15 bp, Homo sapiens
attattcatgtgtcc

SEQ ID NO: 1363327 - DNA, 15 bp, Homo sapiens
gattattcatgtgtc

SEQ ID NO: 1363328 - DNA, 15 bp, Homo sapiens
ggattattcatgtgt

SEQ ID NO: 1363329 - DNA, 15 bp, Homo sapiens
tggattattcatgtg

SEQ ID NO: 1363330 - DNA, 15 bp, Homo sapiens
gtggattattcatgt

SEQ ID NO: 1363331 - DNA, 15 bp, Homo sapiens
cgtggattattcatg

SEQ ID NO: 1363332 - DNA, 15 bp, Homo sapiens
gcgtggattattcat

SEQ ID NO: 1363333 - DNA, 15 bp, Homo sapiens
ggcgtggattattca

SEQ ID NO: 1363334 - DNA, 15 bp, Homo sapiens
aggcgtggattattc

SEQ ID NO: 1363335 - DNA, 15 bp, Homo sapiens
aaggcgtggattatt

SEQ ID NO: 1363336 - DNA, 15 bp, Homo sapiens
caaggcgtggattat

SEQ ID NO: 1363337 - DNA, 15 bp, Homo sapiens
acaaggcgtggatta

SEQ ID NO: 1363338 - DNA, 15 bp, Homo sapiens
aacaaggcgtggatt

SEQ ID NO: 1363339 - DNA, 15 bp, Homo sapiens
aaacaaggcgtggat

SEQ ID NO: 1363340 - DNA, 15 bp, Homo sapiens
taaacaaggcgtgga

SEQ ID NO: 1363341 - DNA, 15 bp, Homo sapiens
ctaaacaaggcgtgg

SEQ ID NO: 1363342 - DNA, 15 bp, Homo sapiens
gctaaacaaggcgtg

SEQ ID NO: 1363343 - DNA, 15 bp, Homo sapiens
tgctaaacaaggcgt

SEQ ID NO: 1363344 - DNA, 15 bp, Homo sapiens
atgctaaacaaggcg

SEQ ID NO: 1363345 - DNA, 15 bp, Homo sapiens
catgctaaacaaggc

SEQ ID NO: 1363346 - DNA, 15 bp, Homo sapiens
acatgctaaacaagg

SEQ ID NO: 1363347 - DNA, 15 bp, Homo sapiens
gacatgctaaacaag

SEQ ID NO: 1363348 - DNA, 15 bp, Homo sapiens
tgacatgctaaacaa

SEQ ID NO: 1363349 - DNA, 15 bp, Homo sapiens
atgacatgctaaaca

SEQ ID NO: 1363350 - DNA, 15 bp, Homo sapiens
aatgacatgctaaac

SEQ ID NO: 1363351 - DNA, 15 bp, Homo sapiens
taatgacatgctaaa

SEQ ID NO: 1363352 - DNA, 15 bp, Homo sapiens
ttaatgacatgctaa

SEQ ID NO: 1363353 - DNA, 15 bp, Homo sapiens
cttaatgacatgcta

SEQ ID NO: 1363354 - DNA, 15 bp, Homo sapiens
tcttaatgacatgct

SEQ ID NO: 1363355 - DNA, 15 bp, Homo sapiens
ttcttaatgacatgc

SEQ ID NO: 1363356 - DNA, 15 bp, Homo sapiens
tttcttaatgacatg

SEQ ID NO: 1363357 - DNA, 15 bp, Homo sapiens
atttcttaatgacat

SEQ ID NO: 1363358 - DNA, 15 bp, Homo sapiens
tatttcttaatgaca

SEQ ID NO: 1363359 - DNA, 15 bp, Homo sapiens
ttatttcttaatgac

SEQ ID NO: 1363360 - DNA, 15 bp, Homo sapiens
gttatttcttaatga

SEQ ID NO: 1363361 - DNA, 15 bp, Homo sapiens
ggttatttcttaatg

SEQ ID NO: 1363362 - DNA, 15 bp, Homo sapiens
tggttatttcttaat

SEQ ID NO: 1363363 - DNA, 15 bp, Homo sapiens
atggttatttcttaa

SEQ ID NO: 1363364 - DNA, 15 bp, Homo sapiens
tatggttatttctta

SEQ ID NO: 1363365 - DNA, 15 bp, Homo sapiens
ttatggttatttctt

SEQ ID NO: 1363366 - DNA, 15 bp, Homo sapiens
tttatggttatttct

SEQ ID NO: 1363367 - DNA, 15 bp, Homo sapiens
ttttatggttatttc

SEQ ID NO: 1363368 - DNA, 15 bp, Homo sapiens
tttttatggttattt

SEQ ID NO: 1363369 - DNA, 15 bp, Homo sapiens
atttttatggttatt

SEQ ID NO: 1363370 - DNA, 15 bp, Homo sapiens
catttttatggttat

SEQ ID NO: 1363371 - DNA, 15 bp, Homo sapiens
ccatttttatggtta

SEQ ID NO: 1363372 - DNA, 15 bp, Homo sapiens
cccatttttatggtt

SEQ ID NO: 1363373 - DNA, 15 bp, Homo sapiens
gcccatttttatggt

SEQ ID NO: 1363374 - DNA, 15 bp, Homo sapiens
tgcccatttttatgg

SEQ ID NO: 1363375 - DNA, 15 bp, Homo sapiens
ttgcccatttttatg

SEQ ID NO: 1363376 - DNA, 15 bp, Homo sapiens
gttgcccatttttat

SEQ ID NO: 1363377 - DNA, 15 bp, Homo sapiens
ggttgcccattttta

SEQ ID NO: 1363378 - DNA, 15 bp, Homo sapiens
tggttgcccattttt

SEQ ID NO: 1363379 - DNA, 15 bp, Homo sapiens
ctggttgcccatttt

SEQ ID NO: 1363380 - DNA, 15 bp, Homo sapiens
gctggttgcccattt

SEQ ID NO: 1363381 - DNA, 15 bp, Homo sapiens
tgctggttgcccatt

SEQ ID NO: 1363382 - DNA, 15 bp, Homo sapiens
ctgctggttgcccat

SEQ ID NO: 1363383 - DNA, 15 bp, Homo sapiens
gctgctggttgccca

SEQ ID NO: 1363384 - DNA, 15 bp, Homo sapiens
ggctgctggttgccc

SEQ ID NO: 1363385 - DNA, 15 bp, Homo sapiens
gggctgctggttgcc

SEQ ID NO: 1363386 - DNA, 15 bp, Homo sapiens
agggctgctggttgc

SEQ ID NO: 1363387 - DNA, 15 bp, Homo sapiens
aagggctgctggttg

SEQ ID NO: 1363388 - DNA, 15 bp, Homo sapiens
caagggctgctggtt

SEQ ID NO: 1363389 - DNA, 15 bp, Homo sapiens
ccaagggctgctggt

SEQ ID NO: 1363390 - DNA, 15 bp, Homo sapiens
cccaagggctgctgg

SEQ ID NO: 1363391 - DNA, 15 bp, Homo sapiens
ccccaagggctgctg

SEQ ID NO: 1363392 - DNA, 15 bp, Homo sapiens
gccccaagggctgct

SEQ ID NO: 1363393 - DNA, 15 bp, Homo sapiens
agccccaagggctgc

SEQ ID NO: 1363394 - DNA, 15 bp, Homo sapiens
cagccccaagggctg

SEQ ID NO: 1363395 - DNA, 15 bp, Homo sapiens
gcagccccaagggct

SEQ ID NO: 1363396 - DNA, 15 bp, Homo sapiens
agcagccccaagggc

SEQ ID NO: 1363397 - DNA, 15 bp, Homo sapiens
gagcagccccaaggg

SEQ ID NO: 1363398 - DNA, 15 bp, Homo sapiens
agagcagccccaagg

SEQ ID NO: 1363399 - DNA, 15 bp, Homo sapiens
cagagcagccccaag

SEQ ID NO: 1363400 - DNA, 15 bp, Homo sapiens
acagagcagccccaa

SEQ ID NO: 1363401 - DNA, 15 bp, Homo sapiens
gacagagcagcccca

SEQ ID NO: 1363402 - DNA, 15 bp, Homo sapiens
agacagagcagcccc

SEQ ID NO: 1363403 - DNA, 15 bp, Homo sapiens
tagacagagcagccc

SEQ ID NO: 1363404 - DNA, 15 bp, Homo sapiens
atagacagagcagcc

SEQ ID NO: 1363405 - DNA, 15 bp, Homo sapiens
catagacagagcagc

SEQ ID NO: 1363406 - DNA, 15 bp, Homo sapiens
ccatagacagagcag

SEQ ID NO: 1363407 - DNA, 15 bp, Homo sapiens
tccatagacagagca

SEQ ID NO: 1363408 - DNA, 15 bp, Homo sapiens
ctccatagacagagc

SEQ ID NO: 1363409 - DNA, 15 bp, Homo sapiens
actccatagacagag

SEQ ID NO: 1363410 - DNA, 15 bp, Homo sapiens
tactccatagacaga

SEQ ID NO: 1363411 - DNA, 15 bp, Homo sapiens
ctactccatagacag

SEQ ID NO: 1363412 - DNA, 15 bp, Homo sapiens
gctactccatagaca

SEQ ID NO: 1363413 - DNA, 15 bp, Homo sapiens
agctactccatagac

SEQ ID NO: 1363414 - DNA, 15 bp, Homo sapiens
cagctactccataga

SEQ ID NO: 1363415 - DNA, 15 bp, Homo sapiens
acagctactccatag

SEQ ID NO: 1363416 - DNA, 15 bp, Homo sapiens
aacagctactccata

SEQ ID NO: 1363417 - DNA, 15 bp, Homo sapiens
gaacagctactccat

SEQ ID NO: 1363418 - DNA, 15 bp, Homo sapiens
agaacagctactcca

SEQ ID NO: 1363419 - DNA, 15 bp, Homo sapiens
aagaacagctactcc

SEQ ID NO: 1363420 - DNA, 15 bp, Homo sapiens
aaagaacagctactc

SEQ ID NO: 1363421 - DNA, 15 bp, Homo sapiens
aaaagaacagctact

SEQ ID NO: 1363422 - DNA, 15 bp, Homo sapiens
taaaagaacagctac

SEQ ID NO: 1363423 - DNA, 15 bp, Homo sapiens
ataaaagaacagcta

SEQ ID NO: 1363424 - DNA, 15 bp, Homo sapiens
aataaaagaacagct

SEQ ID NO: 1363425 - DNA, 15 bp, Homo sapiens
gaataaaagaacagc

SEQ ID NO: 1363426 - DNA, 15 bp, Homo sapiens
ggaataaaagaacag

SEQ ID NO: 1363427 - DNA, 15 bp, Homo sapiens
aggaataaaagaaca

SEQ ID NO: 1363428 - DNA, 15 bp, Homo sapiens
aaggaataaaagaac

SEQ ID NO: 1363429 - DNA, 15 bp, Homo sapiens
aaaggaataaaagaa

SEQ ID NO: 1363430 - DNA, 15 bp, Homo sapiens
taaaggaataaaaga

SEQ ID NO: 1363431 - DNA, 15 bp, Homo sapiens
gtaaaggaataaaag

SEQ ID NO: 1363432 - DNA, 15 bp, Homo sapiens
agtaaaggaataaaa

SEQ ID NO: 1363433 - DNA, 15 bp, Homo sapiens
aagtaaaggaataaa

SEQ ID NO: 1363434 - DNA, 15 bp, Homo sapiens
taagtaaaggaataa

SEQ ID NO: 1363435 - DNA, 15 bp, Homo sapiens
gtaagtaaaggaata

SEQ ID NO: 1363436 - DNA, 15 bp, Homo sapiens
agtaagtaaaggaat

SEQ ID NO: 1363437 - DNA, 15 bp, Homo sapiens
aagtaagtaaaggaa

SEQ ID NO: 1363438 - DNA, 15 bp, Homo sapiens
aaagtaagtaaagga

SEQ ID NO: 1363439 - DNA, 15 bp, Homo sapiens
aaaagtaagtaaagg

SEQ ID NO: 1363440 - DNA, 15 bp, Homo sapiens
aaaaagtaagtaaag

SEQ ID NO: 1363441 - DNA, 15 bp, Homo sapiens
aaaaaagtaagtaaa

SEQ ID NO: 1363442 - DNA, 15 bp, Homo sapiens
aaaaaaagtaagtaa

SEQ ID NO: 1363443 - DNA, 15 bp, Homo sapiens
aaaaaaaagtaagta

SEQ ID NO: 1363444 - DNA, 15 bp, Homo sapiens
aaaaaaaaagtaagt

SEQ ID NO: 1363445 - DNA, 15 bp, Homo sapiens
aaaaaaaaaagtaag

SEQ ID NO: 1363446 - DNA, 15 bp, Homo sapiens
tggcagaggttgcag

SEQ ID NO: 1363447 - DNA, 15 bp, Homo sapiens
gtggcagaggttgca

SEQ ID NO: 1363448 - DNA, 15 bp, Homo sapiens
ggtggcagaggttgc

SEQ ID NO: 1363449 - DNA, 15 bp, Homo sapiens
gggtggcagaggttg

SEQ ID NO: 1363450 - DNA, 15 bp, Homo sapiens
tgggtggcagaggtt

SEQ ID NO: 1363451 - DNA, 15 bp, Homo sapiens
ctgggtggcagaggt

SEQ ID NO: 1363452 - DNA, 15 bp, Homo sapiens
cctgggtggcagagg

SEQ ID NO: 1363453 - DNA, 15 bp, Homo sapiens
acctgggtggcagag

SEQ ID NO: 1363454 - DNA, 15 bp, Homo sapiens
aacctgggtggcaga

SEQ ID NO: 1363455 - DNA, 15 bp, Homo sapiens
gaacctgggtggcag

SEQ ID NO: 1363456 - DNA, 15 bp, Homo sapiens
tgaacctgggtggca

SEQ ID NO: 1363457 - DNA, 15 bp, Homo sapiens
ttgaacctgggtggc

SEQ ID NO: 1363458 - DNA, 15 bp, Homo sapiens
cttgaacctgggtgg

SEQ ID NO: 1363459 - DNA, 15 bp, Homo sapiens
gcttgaacctgggtg

SEQ ID NO: 1363460 - DNA, 15 bp, Homo sapiens
cgcttgaacctgggt

SEQ ID NO: 1363461 - DNA, 15 bp, Homo sapiens
cgcctgcagtcccag

SEQ ID NO: 1363462 - DNA, 15 bp, Homo sapiens
acgcctgcagtccca

SEQ ID NO: 1363463 - DNA, 15 bp, Homo sapiens
cacgcctgcagtccc

SEQ ID NO: 1363464 - DNA, 15 bp, Homo sapiens
acacgcctgcagtcc

SEQ ID NO: 1363465 - DNA, 15 bp, Homo sapiens
cacacgcctgcagtc

SEQ ID NO: 1363466 - DNA, 15 bp, Homo sapiens
gcacacgcctgcagt

SEQ ID NO: 1363467 - DNA, 15 bp, Homo sapiens
ggcacacgcctgcag

SEQ ID NO: 1363468 - DNA, 15 bp, Homo sapiens
tggcacacgcctgca

SEQ ID NO: 1363469 - DNA, 15 bp, Homo sapiens
gtggcacacgcctgc

SEQ ID NO: 1363470 - DNA, 15 bp, Homo sapiens
gcgggcatggtggca

SEQ ID NO: 1363471 - DNA, 15 bp, Homo sapiens
ggcgggcatggtggc

SEQ ID NO: 1363472 - DNA, 15 bp, Homo sapiens
aggcgggcatggtgg

SEQ ID NO: 1363473 - DNA, 15 bp, Homo sapiens
taggcgggcatggtg

SEQ ID NO: 1363474 - DNA, 15 bp, Homo sapiens
ctaggcgggcatggt

SEQ ID NO: 1363475 - DNA, 15 bp, Homo sapiens
actaggcgggcatgg

SEQ ID NO: 1363476 - DNA, 15 bp, Homo sapiens
aactaggcgggcatg

SEQ ID NO: 1363477 - DNA, 15 bp, Homo sapiens
aaactaggcgggcat

SEQ ID NO: 1363478 - DNA, 15 bp, Homo sapiens
aaaactaggcgggca

SEQ ID NO: 1363479 - DNA, 15 bp, Homo sapiens
aaaaactaggcgggc

SEQ ID NO: 1363480 - DNA, 15 bp, Homo sapiens
gaaaaactaggcggg

SEQ ID NO: 1363481 - DNA, 15 bp, Homo sapiens
tgaaaaactaggcgg

SEQ ID NO: 1363482 - DNA, 15 bp, Homo sapiens
atgaaaaactaggcg

SEQ ID NO: 1363483 - DNA, 15 bp, Homo sapiens
aatgaaaaactaggc

SEQ ID NO: 1363484 - DNA, 15 bp, Homo sapiens
aaatgaaaaactagg

SEQ ID NO: 1363485 - DNA, 15 bp, Homo sapiens
aaaatgaaaaactag

SEQ ID NO: 1363486 - DNA, 15 bp, Homo sapiens
gaaaatgaaaaacta

SEQ ID NO: 1363487 - DNA, 15 bp, Homo sapiens
agaaaatgaaaaact

SEQ ID NO: 1363488 - DNA, 15 bp, Homo sapiens
aagaaaatgaaaaac

SEQ ID NO: 1363489 - DNA, 15 bp, Homo sapiens
aaagaaaatgaaaaa

SEQ ID NO: 1363490 - DNA, 15 bp, Homo sapiens
aaaagaaaatgaaaa

SEQ ID NO: 1363491 - DNA, 15 bp, Homo sapiens
aaaaagaaaatgaaa

SEQ ID NO: 1363492 - DNA, 15 bp, Homo sapiens
taaaaagaaaatgaa

SEQ ID NO: 1363493 - DNA, 15 bp, Homo sapiens
ctaaaaagaaaatga

SEQ ID NO: 1363494 - DNA, 15 bp, Homo sapiens
actaaaaagaaaatg

SEQ ID NO: 1363495 - DNA, 15 bp, Homo sapiens
tactaaaaagaaaat

SEQ ID NO: 1363496 - DNA, 15 bp, Homo sapiens
ctactaaaaagaaaa

SEQ ID NO: 1363497 - DNA, 15 bp, Homo sapiens
tctactaaaaagaaa

SEQ ID NO: 1363498 - DNA, 15 bp, Homo sapiens
ctctactaaaaagaa

SEQ ID NO: 1363499 - DNA, 15 bp, Homo sapiens
tctctactaaaaaga

SEQ ID NO: 1363500 - DNA, 15 bp, Homo sapiens
gtctctactaaaaag

SEQ ID NO: 1363501 - DNA, 15 bp, Homo sapiens
caccctgtctctact

SEQ ID NO: 1363502 - DNA, 15 bp, Homo sapiens
acaccctgtctctac

SEQ ID NO: 1363503 - DNA, 15 bp, Homo sapiens
gacaccctgtctcta

SEQ ID NO: 1363504 - DNA, 15 bp, Homo sapiens
ggtgacaccctgtct

SEQ ID NO: 1363505 - DNA, 15 bp, Homo sapiens
cggtgacaccctgtc

SEQ ID NO: 1363506 - DNA, 15 bp, Homo sapiens
acggtgacaccctgt

SEQ ID NO: 1363507 - DNA, 15 bp, Homo sapiens
cacggtgacaccctg

SEQ ID NO: 1363508 - DNA, 15 bp, Homo sapiens
acacggtgacaccct

SEQ ID NO: 1363509 - DNA, 15 bp, Homo sapiens
aacacggtgacaccc

SEQ ID NO: 1363510 - DNA, 15 bp, Homo sapiens
taacacggtgacacc

SEQ ID NO: 1363511 - DNA, 15 bp, Homo sapiens
ctaacacggtgacac

SEQ ID NO: 1363512 - DNA, 15 bp, Homo sapiens
gctaacacggtgaca

SEQ ID NO: 1363513 - DNA, 15 bp, Homo sapiens
agctaacacggtgac

SEQ ID NO: 1363514 - DNA, 15 bp, Homo sapiens
tagctaacacggtga

SEQ ID NO: 1363515 - DNA, 15 bp, Homo sapiens
ctagctaacacggtg

SEQ ID NO: 1363516 - DNA, 15 bp, Homo sapiens
cctagctaacacggt

SEQ ID NO: 1363517 - DNA, 15 bp, Homo sapiens
tcctagctaacacgg

SEQ ID NO: 1363518 - DNA, 15 bp, Homo sapiens
atcctagctaacacg

SEQ ID NO: 1363519 - DNA, 15 bp, Homo sapiens
catcctagctaacac

SEQ ID NO: 1363520 - DNA, 15 bp, Homo sapiens
ccatcctagctaaca

SEQ ID NO: 1363521 - DNA, 15 bp, Homo sapiens
accatcctagctaac

SEQ ID NO: 1363522 - DNA, 15 bp, Homo sapiens
gaccatcctagctaa

SEQ ID NO: 1363523 - DNA, 15 bp, Homo sapiens
agaccatcctagcta

SEQ ID NO: 1363524 - DNA, 15 bp, Homo sapiens
gagaccatcctagct

SEQ ID NO: 1363525 - DNA, 15 bp, Homo sapiens
ggagaccatcctagc

SEQ ID NO: 1363526 - DNA, 15 bp, Homo sapiens
tggagaccatcctag

SEQ ID NO: 1363527 - DNA, 15 bp, Homo sapiens
atggagaccatccta

SEQ ID NO: 1363528 - DNA, 15 bp, Homo sapiens
caggtcaggagatgg

SEQ ID NO: 1363529 - DNA, 15 bp, Homo sapiens
ccaggtcaggagatg

SEQ ID NO: 1363530 - DNA, 15 bp, Homo sapiens
accaggtcaggagat

SEQ ID NO: 1363531 - DNA, 15 bp, Homo sapiens
caccaggtcaggaga

SEQ ID NO: 1363532 - DNA, 15 bp, Homo sapiens
tcaccaggtcaggag

SEQ ID NO: 1363533 - DNA, 15 bp, Homo sapiens
atcaccaggtcagga

SEQ ID NO: 1363534 - DNA, 15 bp, Homo sapiens
gatcaccaggtcagg

SEQ ID NO: 1363535 - DNA, 15 bp, Homo sapiens
ggatcaccaggtcag

SEQ ID NO: 1363536 - DNA, 15 bp, Homo sapiens
cggatcaccaggtca

SEQ ID NO: 1363537 - DNA, 15 bp, Homo sapiens
gcggatcaccaggtc

SEQ ID NO: 1363538 - DNA, 15 bp, Homo sapiens
ggcggatcaccaggt

SEQ ID NO: 1363539 - DNA, 15 bp, Homo sapiens
gggcggatcaccagg

SEQ ID NO: 1363540 - DNA, 15 bp, Homo sapiens
cgggcggatcaccag

SEQ ID NO: 1363541 - DNA, 15 bp, Homo sapiens
gcgggcggatcacca

SEQ ID NO: 1363542 - DNA, 15 bp, Homo sapiens
ggaggcgggcggatc

SEQ ID NO: 1363543 - DNA, 15 bp, Homo sapiens
cggaggcgggcggat

SEQ ID NO: 1363544 - DNA, 15 bp, Homo sapiens
gcggaggcgggcgga

SEQ ID NO: 1363545 - DNA, 15 bp, Homo sapiens
ggcggaggcgggcgg

SEQ ID NO: 1363546 - DNA, 15 bp, Homo sapiens
aggcggaggcgggcg

SEQ ID NO: 1363547 - DNA, 15 bp, Homo sapiens
gaggcggaggcgggc

SEQ ID NO: 1363548 - DNA, 15 bp, Homo sapiens
ggaggcggaggcggg

SEQ ID NO: 1363549 - DNA, 15 bp, Homo sapiens
gggaggcggaggcgg

SEQ ID NO: 1363550 - DNA, 15 bp, Homo sapiens
tgggaggcggaggcg

SEQ ID NO: 1363551 - DNA, 15 bp, Homo sapiens
ctgttatcccagcac

SEQ ID NO: 1363552 - DNA, 15 bp, Homo sapiens
tctgttatcccagca

SEQ ID NO: 1363553 - DNA, 15 bp, Homo sapiens
gtctgttatcccagc

SEQ ID NO: 1363554 - DNA, 15 bp, Homo sapiens
cgtctgttatcccag

SEQ ID NO: 1363555 - DNA, 15 bp, Homo sapiens
acgtctgttatccca

SEQ ID NO: 1363556 - DNA, 15 bp, Homo sapiens
cacgtctgttatccc

SEQ ID NO: 1363557 - DNA, 15 bp, Homo sapiens
tcacgtctgttatcc

SEQ ID NO: 1363558 - DNA, 15 bp, Homo sapiens
ctcacgtctgttatc

SEQ ID NO: 1363559 - DNA, 15 bp, Homo sapiens
actcacgtctgttat

SEQ ID NO: 1363560 - DNA, 15 bp, Homo sapiens
gactcacgtctgtta

SEQ ID NO: 1363561 - DNA, 15 bp, Homo sapiens
tgactcacgtctgtt

SEQ ID NO: 1363562 - DNA, 15 bp, Homo sapiens
atgactcacgtctgt

SEQ ID NO: 1363563 - DNA, 15 bp, Homo sapiens
gatgactcacgtctg

SEQ ID NO: 1363564 - DNA, 15 bp, Homo sapiens
cgatgactcacgtct

SEQ ID NO: 1363565 - DNA, 15 bp, Homo sapiens
acgatgactcacgtc

SEQ ID NO: 1363566 - DNA, 15 bp, Homo sapiens
cacgatgactcacgt

SEQ ID NO: 1363567 - DNA, 15 bp, Homo sapiens
gcacgatgactcacg

SEQ ID NO: 1363568 - DNA, 15 bp, Homo sapiens
ggcacgatgactcac

SEQ ID NO: 1363569 - DNA, 15 bp, Homo sapiens
gggcacgatgactca

SEQ ID NO: 1363570 - DNA, 15 bp, Homo sapiens
agggcacgatgactc

SEQ ID NO: 1363571 - DNA, 15 bp, Homo sapiens
cagggcacgatgact

SEQ ID NO: 1363572 - DNA, 15 bp, Homo sapiens
gcagggcacgatgac

SEQ ID NO: 1363573 - DNA, 15 bp, Homo sapiens
ggcagggcacgatga

SEQ ID NO: 1363574 - DNA, 15 bp, Homo sapiens
tggcagggcacgatg

SEQ ID NO: 1363575 - DNA, 15 bp, Homo sapiens
atggcagggcacgat

SEQ ID NO: 1363576 - DNA, 15 bp, Homo sapiens
aatggcagggcacga

SEQ ID NO: 1363577 - DNA, 15 bp, Homo sapiens
aaatggcagggcacg

SEQ ID NO: 1363578 - DNA, 15 bp, Homo sapiens
gaaatggcagggcac

SEQ ID NO: 1363579 - DNA, 15 bp, Homo sapiens
agaaatggcagggca

SEQ ID NO: 1363580 - DNA, 15 bp, Homo sapiens
aagaaatggcagggc

SEQ ID NO: 1363581 - DNA, 15 bp, Homo sapiens
aaagaaatggcaggg

SEQ ID NO: 1363582 - DNA, 15 bp, Homo sapiens
taaagaaatggcagg

SEQ ID NO: 1363583 - DNA, 15 bp, Homo sapiens
gtaaagaaatggcag

SEQ ID NO: 1363584 - DNA, 15 bp, Homo sapiens
agtaaagaaatggca

SEQ ID NO: 1363585 - DNA, 15 bp, Homo sapiens
aagtaaagaaatggc

SEQ ID NO: 1363586 - DNA, 15 bp, Homo sapiens
aaagtaaagaaatgg

SEQ ID NO: 1363587 - DNA, 15 bp, Homo sapiens
gaaagtaaagaaatg

SEQ ID NO: 1363588 - DNA, 15 bp, Homo sapiens
agaaagtaaagaaat

SEQ ID NO: 1363589 - DNA, 15 bp, Homo sapiens
aagaaagtaaagaaa

SEQ ID NO: 1363590 - DNA, 15 bp, Homo sapiens
taagaaagtaaagaa

SEQ ID NO: 1363591 - DNA, 15 bp, Homo sapiens
ttaagaaagtaaaga

SEQ ID NO: 1363592 - DNA, 15 bp, Homo sapiens
attaagaaagtaaag

SEQ ID NO: 1363593 - DNA, 15 bp, Homo sapiens
tattaagaaagtaaa

SEQ ID NO: 1363594 - DNA, 15 bp, Homo sapiens
ttattaagaaagtaa

SEQ ID NO: 1363595 - DNA, 15 bp, Homo sapiens
tttattaagaaagta

SEQ ID NO: 1363596 - DNA, 15 bp, Homo sapiens
gtttattaagaaagt

SEQ ID NO: 1363597 - DNA, 15 bp, Homo sapiens
agtttattaagaaag

SEQ ID NO: 1363598 - DNA, 15 bp, Homo sapiens
aagtttattaagaaa

SEQ ID NO: 1363599 - DNA, 15 bp, Homo sapiens
caagtttattaagaa

SEQ ID NO: 1363600 - DNA, 15 bp, Homo sapiens
gcaagtttattaaga

SEQ ID NO: 1363601 - DNA, 15 bp, Homo sapiens
agcaagtttattaag

SEQ ID NO: 1363602 - DNA, 15 bp, Homo sapiens
aagcaagtttattaa

SEQ ID NO: 1363603 - DNA, 15 bp, Homo sapiens
aaagcaagtttatta

SEQ ID NO: 1363604 - DNA, 15 bp, Homo sapiens
gaaagcaagtttatt

SEQ ID NO: 1363605 - DNA, 15 bp, Homo sapiens
tgaaagcaagtttat

SEQ ID NO: 1363606 - DNA, 15 bp, Homo sapiens
gtgaaagcaagttta

SEQ ID NO: 1363607 - DNA, 15 bp, Homo sapiens
agtgaaagcaagttt

SEQ ID NO: 1363608 - DNA, 15 bp, Homo sapiens
aagtgaaagcaagtt

SEQ ID NO: 1363609 - DNA, 15 bp, Homo sapiens
aaagtgaaagcaagt

SEQ ID NO: 1363610 - DNA, 15 bp, Homo sapiens
caaagtgaaagcaag

SEQ ID NO: 1363611 - DNA, 15 bp, Homo sapiens
gcaaagtgaaagcaa

SEQ ID NO: 1363612 - DNA, 15 bp, Homo sapiens
tgcaaagtgaaagca

SEQ ID NO: 1363613 - DNA, 15 bp, Homo sapiens
gtgcaaagtgaaagc

SEQ ID NO: 1363614 - DNA, 15 bp, Homo sapiens
agtgcaaagtgaaag

SEQ ID NO: 1363615 - DNA, 15 bp, Homo sapiens
cagtgcaaagtgaaa

SEQ ID NO: 1363616 - DNA, 15 bp, Homo sapiens
acagtgcaaagtgaa

SEQ ID NO: 1363617 - DNA, 15 bp, Homo sapiens
cacagtgcaaagtga

SEQ ID NO: 1363618 - DNA, 15 bp, Homo sapiens
ccacagtgcaaagtg

SEQ ID NO: 1363619 - DNA, 15 bp, Homo sapiens
tccacagtgcaaagt

SEQ ID NO: 1363620 - DNA, 15 bp, Homo sapiens
gtccacagtgcaaag

SEQ ID NO: 1363621 - DNA, 15 bp, Homo sapiens
agtccacagtgcaaa

SEQ ID NO: 1363622 - DNA, 15 bp, Homo sapiens
aagtccacagtgcaa

SEQ ID NO: 1363623 - DNA, 15 bp, Homo sapiens
caagtccacagtgca

SEQ ID NO: 1363624 - DNA, 15 bp, Homo sapiens
gcaagtccacagtgc

SEQ ID NO: 1363625 - DNA, 15 bp, Homo sapiens
ggcaagtccacagtg

SEQ ID NO: 1363626 - DNA, 15 bp, Homo sapiens
gggcaagtccacagt

SEQ ID NO: 1363627 - DNA, 15 bp, Homo sapiens
agggcaagtccacag

SEQ ID NO: 1363628 - DNA, 15 bp, Homo sapiens
cagggcaagtccaca

SEQ ID NO: 1363629 - DNA, 15 bp, Homo sapiens
tcagggcaagtccac

SEQ ID NO: 1363630 - DNA, 15 bp, Homo sapiens
ttcagggcaagtcca

SEQ ID NO: 1363631 - DNA, 15 bp, Homo sapiens
attcagggcaagtcc

SEQ ID NO: 1363632 - DNA, 15 bp, Homo sapiens
aattcagggcaagtc

SEQ ID NO: 1363633 - DNA, 15 bp, Homo sapiens
gaattcagggcaagt

SEQ ID NO: 1363634 - DNA, 15 bp, Homo sapiens
agaattcagggcaag

SEQ ID NO: 1363635 - DNA, 15 bp, Homo sapiens
aagaattcagggcaa

SEQ ID NO: 1363636 - DNA, 15 bp, Homo sapiens
aaagaattcagggca

SEQ ID NO: 1363637 - DNA, 15 bp, Homo sapiens
gaaagaattcagggc

SEQ ID NO: 1363638 - DNA, 15 bp, Homo sapiens
agaaagaattcaggg

SEQ ID NO: 1363639 - DNA, 15 bp, Homo sapiens
aagaaagaattcagg

SEQ ID NO: 1363640 - DNA, 15 bp, Homo sapiens
taagaaagaattcag

SEQ ID NO: 1363641 - DNA, 15 bp, Homo sapiens
ataagaaagaattca

SEQ ID NO: 1363642 - DNA, 15 bp, Homo sapiens
cataagaaagaattc

SEQ ID NO: 1363643 - DNA, 15 bp, Homo sapiens
gcataagaaagaatt

SEQ ID NO: 1363644 - DNA, 15 bp, Homo sapiens
cgcataagaaagaat

SEQ ID NO: 1363645 - DNA, 15 bp, Homo sapiens
tcgcataagaaagaa

SEQ ID NO: 1363646 - DNA, 15 bp, Homo sapiens
ctcgcataagaaaga

SEQ ID NO: 1363647 - DNA, 15 bp, Homo sapiens
tctcgcataagaaag

SEQ ID NO: 1363648 - DNA, 15 bp, Homo sapiens
atctcgcataagaaa

SEQ ID NO: 1363649 - DNA, 15 bp, Homo sapiens
gatctcgcataagaa

SEQ ID NO: 1363650 - DNA, 15 bp, Homo sapiens
ggatctcgcataaga

SEQ ID NO: 1363651 - DNA, 15 bp, Homo sapiens
tggatctcgcataag

SEQ ID NO: 1363652 - DNA, 15 bp, Homo sapiens
ttggatctcgcataa

SEQ ID NO: 1363653 - DNA, 15 bp, Homo sapiens
tttggatctcgcata

SEQ ID NO: 1363654 - DNA, 15 bp, Homo sapiens
ctttggatctcgcat

SEQ ID NO: 1363655 - DNA, 15 bp, Homo sapiens
tctttggatctcgca

SEQ ID NO: 1363656 - DNA, 15 bp, Homo sapiens
ttctttggatctcgc

SEQ ID NO: 1363657 - DNA, 15 bp, Homo sapiens
gttctttggatctcg

SEQ ID NO: 1363658 - DNA, 15 bp, Homo sapiens
agttctttggatctc

SEQ ID NO: 1363659 - DNA, 15 bp, Homo sapiens
gagttctttggatct

SEQ ID NO: 1363660 - DNA, 15 bp, Homo sapiens
agagttctttggatc

SEQ ID NO: 1363661 - DNA, 15 bp, Homo sapiens
gagagttctttggat

SEQ ID NO: 1363662 - DNA, 15 bp, Homo sapiens
agagagttctttgga

SEQ ID NO: 1363663 - DNA, 15 bp, Homo sapiens
gagagagttctttgg

SEQ ID NO: 1363664 - DNA, 15 bp, Homo sapiens
agagagagttctttg

SEQ ID NO: 1363665 - DNA, 15 bp, Homo sapiens
aagagagagttcttt

SEQ ID NO: 1363666 - DNA, 15 bp, Homo sapiens
caagagagagttctt

SEQ ID NO: 1363667 - DNA, 15 bp, Homo sapiens
acaagagagagttct

SEQ ID NO: 1363668 - DNA, 15 bp, Homo sapiens
cacaagagagagttc

SEQ ID NO: 1363669 - DNA, 15 bp, Homo sapiens
ccacaagagagagtt

SEQ ID NO: 1363670 - DNA, 15 bp, Homo sapiens
accacaagagagagt

SEQ ID NO: 1363671 - DNA, 15 bp, Homo sapiens
gaccacaagagagag

SEQ ID NO: 1363672 - DNA, 15 bp, Homo sapiens
ccagaccacaagaga

SEQ ID NO: 1363673 - DNA, 15 bp, Homo sapiens
gccagaccacaagag

SEQ ID NO: 1363674 - DNA, 15 bp, Homo sapiens
agccagaccacaaga

SEQ ID NO: 1363675 - DNA, 15 bp, Homo sapiens
gagccagaccacaag

SEQ ID NO: 1363676 - DNA, 15 bp, Homo sapiens
cgagccagaccacaa

SEQ ID NO: 1363677 - DNA, 15 bp, Homo sapiens
ccgagccagaccaca

SEQ ID NO: 1363678 - DNA, 15 bp, Homo sapiens
cccgagccagaccac

SEQ ID NO: 1363679 - DNA, 15 bp, Homo sapiens
tcccgagccagacca

SEQ ID NO: 1363680 - DNA, 15 bp, Homo sapiens
gtcccgagccagacc

SEQ ID NO: 1363681 - DNA, 15 bp, Homo sapiens
ggtcccgagccagac

SEQ ID NO: 1363682 - DNA, 15 bp, Homo sapiens
tggtcccgagccaga

SEQ ID NO: 1363683 - DNA, 15 bp, Homo sapiens
gtggtcccgagccag

SEQ ID NO: 1363684 - DNA, 15 bp, Homo sapiens
agtggtcccgagcca

SEQ ID NO: 1363685 - DNA, 15 bp, Homo sapiens
aagtggtcccgagcc

SEQ ID NO: 1363686 - DNA, 15 bp, Homo sapiens
aaagtggtcccgagc

SEQ ID NO: 1363687 - DNA, 15 bp, Homo sapiens
gaaagtggtcccgag

SEQ ID NO: 1363688 - DNA, 15 bp, Homo sapiens
agaaagtggtcccga

SEQ ID NO: 1363689 - DNA, 15 bp, Homo sapiens
aagaaagtggtcccg

SEQ ID NO: 1363690 - DNA, 15 bp, Homo sapiens
caagaaagtggtccc

SEQ ID NO: 1363691 - DNA, 15 bp, Homo sapiens
acaagaaagtggtcc

SEQ ID NO: 1363692 - DNA, 15 bp, Homo sapiens
tacaagaaagtggtc

SEQ ID NO: 1363693 - DNA, 15 bp, Homo sapiens
ttacaagaaagtggt

SEQ ID NO: 1363694 - DNA, 15 bp, Homo sapiens
gttacaagaaagtgg

SEQ ID NO: 1363695 - DNA, 15 bp, Homo sapiens
tgttacaagaaagtg

SEQ ID NO: 1363696 - DNA, 15 bp, Homo sapiens
ctgttacaagaaagt

SEQ ID NO: 1363697 - DNA, 15 bp, Homo sapiens
cctgttacaagaaag

SEQ ID NO: 1363698 - DNA, 15 bp, Homo sapiens
tcctgttacaagaaa

SEQ ID NO: 1363699 - DNA, 15 bp, Homo sapiens
ctcctgttacaagaa

SEQ ID NO: 1363700 - DNA, 15 bp, Homo sapiens
cctcctgttacaaga

SEQ ID NO: 1363701 - DNA, 15 bp, Homo sapiens
tcctcctgttacaag

SEQ ID NO: 1363702 - DNA, 15 bp, Homo sapiens
ttcctcctgttacaa

SEQ ID NO: 1363703 - DNA, 15 bp, Homo sapiens
cttcctcctgttaca

SEQ ID NO: 1363704 - DNA, 15 bp, Homo sapiens
tcttcctcctgttac

SEQ ID NO: 1363705 - DNA, 15 bp, Homo sapiens
atcttcctcctgtta

SEQ ID NO: 1363706 - DNA, 15 bp, Homo sapiens
catcttcctcctgtt

SEQ ID NO: 1363707 - DNA, 15 bp, Homo sapiens
ccatcttcctcctgt

SEQ ID NO: 1363708 - DNA, 15 bp, Homo sapiens
gccatcttcctcctg

SEQ ID NO: 1363709 - DNA, 15 bp, Homo sapiens
ggccatcttcctcct

SEQ ID NO: 1363710 - DNA, 15 bp, Homo sapiens
aggccatcttcctcc

SEQ ID NO: 1363711 - DNA, 15 bp, Homo sapiens
taggccatcttcctc

SEQ ID NO: 1363712 - DNA, 15 bp, Homo sapiens
ataggccatcttcct

SEQ ID NO: 1363713 - DNA, 15 bp, Homo sapiens
gataggccatcttcc

SEQ ID NO: 1363714 - DNA, 15 bp, Homo sapiens
agataggccatcttc

SEQ ID NO: 1363715 - DNA, 15 bp, Homo sapiens
cagataggccatctt

SEQ ID NO: 1363716 - DNA, 15 bp, Homo sapiens
ccagataggccatct

SEQ ID NO: 1363717 - DNA, 15 bp, Homo sapiens
cccagataggccatc

SEQ ID NO: 1363718 - DNA, 15 bp, Homo sapiens
tcccagataggccat

SEQ ID NO: 1363719 - DNA, 15 bp, Homo sapiens
gtcccagataggcca

SEQ ID NO: 1363720 - DNA, 15 bp, Homo sapiens
ggtcccagataggcc

SEQ ID NO: 1363721 - DNA, 15 bp, Homo sapiens
aggtcccagataggc

SEQ ID NO: 1363722 - DNA, 15 bp, Homo sapiens
taggtcccagatagg

SEQ ID NO: 1363723 - DNA, 15 bp, Homo sapiens
ttaggtcccagatag

SEQ ID NO: 1363724 - DNA, 15 bp, Homo sapiens
attaggtcccagata

SEQ ID NO: 1363725 - DNA, 15 bp, Homo sapiens
cattaggtcccagat

SEQ ID NO: 1363726 - DNA, 15 bp, Homo sapiens
tcattaggtcccaga

SEQ ID NO: 1363727 - DNA, 15 bp, Homo sapiens
ctcattaggtcccag

SEQ ID NO: 1363728 - DNA, 15 bp, Homo sapiens
gctcattaggtccca

SEQ ID NO: 1363729 - DNA, 15 bp, Homo sapiens
agctcattaggtccc

SEQ ID NO: 1363730 - DNA, 15 bp, Homo sapiens
gagctcattaggtcc

SEQ ID NO: 1363731 - DNA, 15 bp, Homo sapiens
tgagctcattaggtc

SEQ ID NO: 1363732 - DNA, 15 bp, Homo sapiens
ctgagctcattaggt

SEQ ID NO: 1363733 - DNA, 15 bp, Homo sapiens
cctgagctcattagg

SEQ ID NO: 1363734 - DNA, 15 bp, Homo sapiens
ccctgagctcattag

SEQ ID NO: 1363735 - DNA, 15 bp, Homo sapiens
accctgagctcatta

SEQ ID NO: 1363736 - DNA, 15 bp, Homo sapiens
caccctgagctcatt

SEQ ID NO: 1363737 - DNA, 15 bp, Homo sapiens
gcaccctgagctcat

SEQ ID NO: 1363738 - DNA, 15 bp, Homo sapiens
ggcaccctgagctca

SEQ ID NO: 1363739 - DNA, 15 bp, Homo sapiens
aggcaccctgagctc

SEQ ID NO: 1363740 - DNA, 15 bp, Homo sapiens
aaggcaccctgagct

SEQ ID NO: 1363741 - DNA, 15 bp, Homo sapiens
aaaggcaccctgagc

SEQ ID NO: 1363742 - DNA, 15 bp, Homo sapiens
caaaggcaccctgag

SEQ ID NO: 1363743 - DNA, 15 bp, Homo sapiens
tcaaaggcaccctga

SEQ ID NO: 1363744 - DNA, 15 bp, Homo sapiens
ctcaaaggcaccctg

SEQ ID NO: 1363745 - DNA, 15 bp, Homo sapiens
tctcaaaggcaccct

SEQ ID NO: 1363746 - DNA, 15 bp, Homo sapiens
atctcaaaggcaccc

SEQ ID NO: 1363747 - DNA, 15 bp, Homo sapiens
tatctcaaaggcacc

SEQ ID NO: 1363748 - DNA, 15 bp, Homo sapiens
atatctcaaaggcac

SEQ ID NO: 1363749 - DNA, 15 bp, Homo sapiens
aatatctcaaaggca

SEQ ID NO: 1363750 - DNA, 15 bp, Homo sapiens
caatatctcaaaggc

SEQ ID NO: 1363751 - DNA, 15 bp, Homo sapiens
tcaatatctcaaagg

SEQ ID NO: 1363752 - DNA, 15 bp, Homo sapiens
gtcaatatctcaaag

SEQ ID NO: 1363753 - DNA, 15 bp, Homo sapiens
ggtcaatatctcaaa

SEQ ID NO: 1363754 - DNA, 15 bp, Homo sapiens
tggtcaatatctcaa

SEQ ID NO: 1363755 - DNA, 15 bp, Homo sapiens
ctggtcaatatctca

SEQ ID NO: 1363756 - DNA, 15 bp, Homo sapiens
cctggtcaatatctc

SEQ ID NO: 1363757 - DNA, 15 bp, Homo sapiens
gcctggtcaatatct

SEQ ID NO: 1363758 - DNA, 15 bp, Homo sapiens
tgcctggtcaatatc

SEQ ID NO: 1363759 - DNA, 15 bp, Homo sapiens
ttgcctggtcaatat

SEQ ID NO: 1363760 - DNA, 15 bp, Homo sapiens
cttgcctggtcaata

SEQ ID NO: 1363761 - DNA, 15 bp, Homo sapiens
acttgcctggtcaat

SEQ ID NO: 1363762 - DNA, 15 bp, Homo sapiens
cacttgcctggtcaa

SEQ ID NO: 1363763 - DNA, 15 bp, Homo sapiens
ccacttgcctggtca

SEQ ID NO: 1363764 - DNA, 15 bp, Homo sapiens
cccacttgcctggtc

SEQ ID NO: 1363765 - DNA, 15 bp, Homo sapiens
tcccacttgcctggt

SEQ ID NO: 1363766 - DNA, 15 bp, Homo sapiens
gtcccacttgcctgg

SEQ ID NO: 1363767 - DNA, 15 bp, Homo sapiens
agtcccacttgcctg

SEQ ID NO: 1363768 - DNA, 15 bp, Homo sapiens
cagtcccacttgcct

SEQ ID NO: 1363769 - DNA, 15 bp, Homo sapiens
ccagtcccacttgcc

SEQ ID NO: 1363770 - DNA, 15 bp, Homo sapiens
tccagtcccacttgc

SEQ ID NO: 1363771 - DNA, 15 bp, Homo sapiens
ctccagtcccacttg

SEQ ID NO: 1363772 - DNA, 15 bp, Homo sapiens
tctccagtcccactt

SEQ ID NO: 1363773 - DNA, 15 bp, Homo sapiens
ctctccagtcccact

SEQ ID NO: 1363774 - DNA, 15 bp, Homo sapiens
gctctccagtcccac

SEQ ID NO: 1363775 - DNA, 15 bp, Homo sapiens
tgctctccagtccca

SEQ ID NO: 1363776 - DNA, 15 bp, Homo sapiens
ttgctctccagtccc

SEQ ID NO: 1363777 - DNA, 15 bp, Homo sapiens
tttgctctccagtcc

SEQ ID NO: 1363778 - DNA, 15 bp, Homo sapiens
ctttgctctccagtc

SEQ ID NO: 1363779 - DNA, 15 bp, Homo sapiens
gctttgctctccagt

SEQ ID NO: 1363780 - DNA, 15 bp, Homo sapiens
tgctttgctctccag

SEQ ID NO: 1363781 - DNA, 15 bp, Homo sapiens
ctgctttgctctcca

SEQ ID NO: 1363782 - DNA, 15 bp, Homo sapiens
tctgctttgctctcc

SEQ ID NO: 1363783 - DNA, 15 bp, Homo sapiens
ctctgctttgctctc

SEQ ID NO: 1363784 - DNA, 15 bp, Homo sapiens
tctctgctttgctct

SEQ ID NO: 1363785 - DNA, 15 bp, Homo sapiens
gtctctgctttgctc

SEQ ID NO: 1363786 - DNA, 15 bp, Homo sapiens
ggtctctgctttgct

SEQ ID NO: 1363787 - DNA, 15 bp, Homo sapiens
aggtctctgctttgc

SEQ ID NO: 1363788 - DNA, 15 bp, Homo sapiens
taggtctctgctttg

SEQ ID NO: 1363789 - DNA, 15 bp, Homo sapiens
ttaggtctctgcttt

SEQ ID NO: 1363790 - DNA, 15 bp, Homo sapiens
attaggtctctgctt

SEQ ID NO: 1363791 - DNA, 15 bp, Homo sapiens
aattaggtctctgct

SEQ ID NO: 1363792 - DNA, 15 bp, Homo sapiens
aaattaggtctctgc

SEQ ID NO: 1363793 - DNA, 15 bp, Homo sapiens
aaaattaggtctctg

SEQ ID NO: 1363794 - DNA, 15 bp, Homo sapiens
aaaaattaggtctct

SEQ ID NO: 1363795 - DNA, 15 bp, Homo sapiens
aaaaaattaggtctc

SEQ ID NO: 1363796 - DNA, 15 bp, Homo sapiens
aaaaaaattaggtct

SEQ ID NO: 1363797 - DNA, 15 bp, Homo sapiens
aaaaaaaattaggtc

SEQ ID NO: 1363798 - DNA, 15 bp, Homo sapiens
cgtgcctgtagtccc

SEQ ID NO: 1363799 - DNA, 15 bp, Homo sapiens
acgtgcctgtagtcc

SEQ ID NO: 1363800 - DNA, 15 bp, Homo sapiens
cacgtgcctgtagtc

SEQ ID NO: 1363801 - DNA, 15 bp, Homo sapiens
gcacgtgcctgtagt

SEQ ID NO: 1363802 - DNA, 15 bp, Homo sapiens
agcacgtgcctgtag

SEQ ID NO: 1363803 - DNA, 15 bp, Homo sapiens
tagcacgtgcctgta

SEQ ID NO: 1363804 - DNA, 15 bp, Homo sapiens
gtagcacgtgcctgt

SEQ ID NO: 1363805 - DNA, 15 bp, Homo sapiens
ggtagcacgtgcctg

SEQ ID NO: 1363806 - DNA, 15 bp, Homo sapiens
tggtagcacgtgcct

SEQ ID NO: 1363807 - DNA, 15 bp, Homo sapiens
gtggtagcacgtgcc

SEQ ID NO: 1363808 - DNA, 15 bp, Homo sapiens
tgtggtagcacgtgc

SEQ ID NO: 1363809 - DNA, 15 bp, Homo sapiens
gtgtggtagcacgtg

SEQ ID NO: 1363810 - DNA, 15 bp, Homo sapiens
ggtgtggtagcacgt

SEQ ID NO: 1363811 - DNA, 15 bp, Homo sapiens
caaattagctgggtg

SEQ ID NO: 1363812 - DNA, 15 bp, Homo sapiens
acaaattagctgggt

SEQ ID NO: 1363813 - DNA, 15 bp, Homo sapiens
aacaaattagctggg

SEQ ID NO: 1363814 - DNA, 15 bp, Homo sapiens
caacaaattagctgg

SEQ ID NO: 1363815 - DNA, 15 bp, Homo sapiens
acaacaaattagctg

SEQ ID NO: 1363816 - DNA, 15 bp, Homo sapiens
tacaacaaattagct

SEQ ID NO: 1363817 - DNA, 15 bp, Homo sapiens
atacaacaaattagc

SEQ ID NO: 1363818 - DNA, 15 bp, Homo sapiens
aatacaacaaattag

SEQ ID NO: 1363819 - DNA, 15 bp, Homo sapiens
aaatacaacaaatta

SEQ ID NO: 1363820 - DNA, 15 bp, Homo sapiens
aaaatacaacaaatt

SEQ ID NO: 1363821 - DNA, 15 bp, Homo sapiens
taaaaatacaacaaa

SEQ ID NO: 1363822 - DNA, 15 bp, Homo sapiens
ctaaaaatacaacaa

SEQ ID NO: 1363823 - DNA, 15 bp, Homo sapiens
actaaaaatacaaca

SEQ ID NO: 1363824 - DNA, 15 bp, Homo sapiens
tactaaaaatacaac

SEQ ID NO: 1363825 - DNA, 15 bp, Homo sapiens
gccatctctactaaa

SEQ ID NO: 1363826 - DNA, 15 bp, Homo sapiens
cgccatctctactaa

SEQ ID NO: 1363827 - DNA, 15 bp, Homo sapiens
acgccatctctacta

SEQ ID NO: 1363828 - DNA, 15 bp, Homo sapiens
aacgccatctctact

SEQ ID NO: 1363829 - DNA, 15 bp, Homo sapiens
aaacgccatctctac

SEQ ID NO: 1363830 - DNA, 15 bp, Homo sapiens
gaaacgccatctcta

SEQ ID NO: 1363831 - DNA, 15 bp, Homo sapiens
tgaaacgccatctct

SEQ ID NO: 1363832 - DNA, 15 bp, Homo sapiens
gtgaaacgccatctc

SEQ ID NO: 1363833 - DNA, 15 bp, Homo sapiens
ggtgaaacgccatct

SEQ ID NO: 1363834 - DNA, 15 bp, Homo sapiens
tggtgaaacgccatc

SEQ ID NO: 1363835 - DNA, 15 bp, Homo sapiens
atggtgaaacgccat

SEQ ID NO: 1363836 - DNA, 15 bp, Homo sapiens
catggtgaaacgcca

SEQ ID NO: 1363837 - DNA, 15 bp, Homo sapiens
acatggtgaaacgcc

SEQ ID NO: 1363838 - DNA, 15 bp, Homo sapiens
aacatggtgaaacgc

SEQ ID NO: 1363839 - DNA, 15 bp, Homo sapiens
caacatggtgaaacg

SEQ ID NO: 1363840 - DNA, 15 bp, Homo sapiens
gggtcaggagatcga

SEQ ID NO: 1363841 - DNA, 15 bp, Homo sapiens
agggtcaggagatcg

SEQ ID NO: 1363842 - DNA, 15 bp, Homo sapiens
cagggtcaggagatc

SEQ ID NO: 1363843 - DNA, 15 bp, Homo sapiens
catcacagggtcagg

SEQ ID NO: 1363844 - DNA, 15 bp, Homo sapiens
gcatcacagggtcag

SEQ ID NO: 1363845 - DNA, 15 bp, Homo sapiens
agcatcacagggtca

SEQ ID NO: 1363846 - DNA, 15 bp, Homo sapiens
gagcatcacagggtc

SEQ ID NO: 1363847 - DNA, 15 bp, Homo sapiens
ggagcatcacagggt

SEQ ID NO: 1363848 - DNA, 15 bp, Homo sapiens
aggagcatcacaggg

SEQ ID NO: 1363849 - DNA, 15 bp, Homo sapiens
caggagcatcacagg

SEQ ID NO: 1363850 - DNA, 15 bp, Homo sapiens
gcaggagcatcacag

SEQ ID NO: 1363851 - DNA, 15 bp, Homo sapiens
ggcaggagcatcaca

SEQ ID NO: 1363852 - DNA, 15 bp, Homo sapiens
aggcaggagcatcac

SEQ ID NO: 1363853 - DNA, 15 bp, Homo sapiens
gaggcaggagcatca

SEQ ID NO: 1363854 - DNA, 15 bp, Homo sapiens
cgaggcaggagcatc

SEQ ID NO: 1363855 - DNA, 15 bp, Homo sapiens
ccgaggcaggagcat

SEQ ID NO: 1363856 - DNA, 15 bp, Homo sapiens
gccgaggcaggagca

SEQ ID NO: 1363857 - DNA, 15 bp, Homo sapiens
ggccgaggcaggagc

SEQ ID NO: 1363858 - DNA, 15 bp, Homo sapiens
atggctcacgcctgt

SEQ ID NO: 1363859 - DNA, 15 bp, Homo sapiens
gatggctcacgcctg

SEQ ID NO: 1363860 - DNA, 15 bp, Homo sapiens
cgatggctcacgcct

SEQ ID NO: 1363861 - DNA, 15 bp, Homo sapiens
gcgatggctcacgcc

SEQ ID NO: 1363862 - DNA, 15 bp, Homo sapiens
cgcgatggctcacgc

SEQ ID NO: 1363863 - DNA, 15 bp, Homo sapiens
gcgcgatggctcacg

SEQ ID NO: 1363864 - DNA, 15 bp, Homo sapiens
cggcgcgatggctca

SEQ ID NO: 1363865 - DNA, 15 bp, Homo sapiens
tcggcgcgatggctc

SEQ ID NO: 1363866 - DNA, 15 bp, Homo sapiens
ctcggcgcgatggct

SEQ ID NO: 1363867 - DNA, 15 bp, Homo sapiens
gctcggcgcgatggc

SEQ ID NO: 1363868 - DNA, 15 bp, Homo sapiens
ggctcggcgcgatgg

SEQ ID NO: 1363869 - DNA, 15 bp, Homo sapiens
cggctcggcgcgatg

SEQ ID NO: 1363870 - DNA, 15 bp, Homo sapiens
tcggctcggcgcgat

SEQ ID NO: 1363871 - DNA, 15 bp, Homo sapiens
ctcggctcggcgcga

SEQ ID NO: 1363872 - DNA, 15 bp, Homo sapiens
cctcggctcggcgcg

SEQ ID NO: 1363873 - DNA, 15 bp, Homo sapiens
gcctcggctcggcgc

SEQ ID NO: 1363874 - DNA, 15 bp, Homo sapiens
ggcctcggctcggcg

SEQ ID NO: 1363875 - DNA, 15 bp, Homo sapiens
aggcctcggctcggc

SEQ ID NO: 1363876 - DNA, 15 bp, Homo sapiens
caggcctcggctcgg

SEQ ID NO: 1363877 - DNA, 15 bp, Homo sapiens
acaggcctcggctcg

SEQ ID NO: 1363878 - DNA, 15 bp, Homo sapiens
aacaggcctcggctc

SEQ ID NO: 1363879 - DNA, 15 bp, Homo sapiens
gaacaggcctcggct

SEQ ID NO: 1363880 - DNA, 15 bp, Homo sapiens
tgaacaggcctcggc

SEQ ID NO: 1363881 - DNA, 15 bp, Homo sapiens
atgaacaggcctcgg

SEQ ID NO: 1363882 - DNA, 15 bp, Homo sapiens
catgaacaggcctcg

SEQ ID NO: 1363883 - DNA, 15 bp, Homo sapiens
acatgaacaggcctc

SEQ ID NO: 1363884 - DNA, 15 bp, Homo sapiens
aacatgaacaggcct

SEQ ID NO: 1363885 - DNA, 15 bp, Homo sapiens
gaacatgaacaggcc

SEQ ID NO: 1363886 - DNA, 15 bp, Homo sapiens
agaacatgaacaggc

SEQ ID NO: 1363887 - DNA, 15 bp, Homo sapiens
cagaacatgaacagg

SEQ ID NO: 1363888 - DNA, 15 bp, Homo sapiens
gcagaacatgaacag

SEQ ID NO: 1363889 - DNA, 15 bp, Homo sapiens
ggcagaacatgaaca

SEQ ID NO: 1363890 - DNA, 15 bp, Homo sapiens
aggcagaacatgaac

SEQ ID NO: 1363891 - DNA, 15 bp, Homo sapiens
gaggcagaacatgaa

SEQ ID NO: 1363892 - DNA, 15 bp, Homo sapiens
agaggcagaacatga

SEQ ID NO: 1363893 - DNA, 15 bp, Homo sapiens
aagaggcagaacatg

SEQ ID NO: 1363894 - DNA, 15 bp, Homo sapiens
aaagaggcagaacat

SEQ ID NO: 1363895 - DNA, 15 bp, Homo sapiens
caaagaggcagaaca

SEQ ID NO: 1363896 - DNA, 15 bp, Homo sapiens
ccaaagaggcagaac

SEQ ID NO: 1363897 - DNA, 15 bp, Homo sapiens
gccaaagaggcagaa

SEQ ID NO: 1363898 - DNA, 15 bp, Homo sapiens
agccaaagaggcaga

SEQ ID NO: 1363899 - DNA, 15 bp, Homo sapiens
cagccaaagaggcag

SEQ ID NO: 1363900 - DNA, 15 bp, Homo sapiens
acagccaaagaggca

SEQ ID NO: 1363901 - DNA, 15 bp, Homo sapiens
tacagccaaagaggc

SEQ ID NO: 1363902 - DNA, 15 bp, Homo sapiens
ttacagccaaagagg

SEQ ID NO: 1363903 - DNA, 15 bp, Homo sapiens
attacagccaaagag

SEQ ID NO: 1363904 - DNA, 15 bp, Homo sapiens
cattacagccaaaga

SEQ ID NO: 1363905 - DNA, 15 bp, Homo sapiens
ccattacagccaaag

SEQ ID NO: 1363906 - DNA, 15 bp, Homo sapiens
accattacagccaaa

SEQ ID NO: 1363907 - DNA, 15 bp, Homo sapiens
caccattacagccaa

SEQ ID NO: 1363908 - DNA, 15 bp, Homo sapiens
ccaccattacagcca

SEQ ID NO: 1363909 - DNA, 15 bp, Homo sapiens
gccaccattacagcc

SEQ ID NO: 1363910 - DNA, 15 bp, Homo sapiens
agccaccattacagc

SEQ ID NO: 1363911 - DNA, 15 bp, Homo sapiens
cagccaccattacag

SEQ ID NO: 1363912 - DNA, 15 bp, Homo sapiens
gcagccaccattaca

SEQ ID NO: 1363913 - DNA, 15 bp, Homo sapiens
ggcagccaccattac

SEQ ID NO: 1363914 - DNA, 15 bp, Homo sapiens
aggcagccaccatta

SEQ ID NO: 1363915 - DNA, 15 bp, Homo sapiens
taggcagccaccatt

SEQ ID NO: 1363916 - DNA, 15 bp, Homo sapiens
ataggcagccaccat

SEQ ID NO: 1363917 - DNA, 15 bp, Homo sapiens
cataggcagccacca

SEQ ID NO: 1363918 - DNA, 15 bp, Homo sapiens
tcataggcagccacc

SEQ ID NO: 1363919 - DNA, 15 bp, Homo sapiens
ctcataggcagccac

SEQ ID NO: 1363920 - DNA, 15 bp, Homo sapiens
tctcataggcagcca

SEQ ID NO: 1363921 - DNA, 15 bp, Homo sapiens
ctctcataggcagcc

SEQ ID NO: 1363922 - DNA, 15 bp, Homo sapiens
cctctcataggcagc

SEQ ID NO: 1363923 - DNA, 15 bp, Homo sapiens
gcctctcataggcag

SEQ ID NO: 1363924 - DNA, 15 bp, Homo sapiens
tgcctctcataggca

SEQ ID NO: 1363925 - DNA, 15 bp, Homo sapiens
atgcctctcataggc

SEQ ID NO: 1363926 - DNA, 15 bp, Homo sapiens
catgcctctcatagg

SEQ ID NO: 1363927 - DNA, 15 bp, Homo sapiens
ccatgcctctcatag

SEQ ID NO: 1363928 - DNA, 15 bp, Homo sapiens
cccatgcctctcata

SEQ ID NO: 1363929 - DNA, 15 bp, Homo sapiens
acccatgcctctcat

SEQ ID NO: 1363930 - DNA, 15 bp, Homo sapiens
cacccatgcctctca

SEQ ID NO: 1363931 - DNA, 15 bp, Homo sapiens
ccacccatgcctctc

SEQ ID NO: 1363932 - DNA, 15 bp, Homo sapiens
gccacccatgcctct

SEQ ID NO: 1363933 - DNA, 15 bp, Homo sapiens
agccacccatgcctc

SEQ ID NO: 1363934 - DNA, 15 bp, Homo sapiens
cagccacccatgcct

SEQ ID NO: 1363935 - DNA, 15 bp, Homo sapiens
ccagccacccatgcc

SEQ ID NO: 1363936 - DNA, 15 bp, Homo sapiens
gccagccacccatgc

SEQ ID NO: 1363937 - DNA, 15 bp, Homo sapiens
tgccagccacccatg

SEQ ID NO: 1363938 - DNA, 15 bp, Homo sapiens
ctgccagccacccat

SEQ ID NO: 1363939 - DNA, 15 bp, Homo sapiens
gctgccagccaccca

SEQ ID NO: 1363940 - DNA, 15 bp, Homo sapiens
ggctgccagccaccc

SEQ ID NO: 1363941 - DNA, 15 bp, Homo sapiens
gggctgccagccacc

SEQ ID NO: 1363942 - DNA, 15 bp, Homo sapiens
tgggctgccagccac

SEQ ID NO: 1363943 - DNA, 15 bp, Homo sapiens
ctgggctgccagcca

SEQ ID NO: 1363944 - DNA, 15 bp, Homo sapiens
acctgggctgccagc

SEQ ID NO: 1363945 - DNA, 15 bp, Homo sapiens
tacctgggctgccag

SEQ ID NO: 1363946 - DNA, 15 bp, Homo sapiens
ctacctgggctgcca

SEQ ID NO: 1363947 - DNA, 15 bp, Homo sapiens
tctacctgggctgcc

SEQ ID NO: 1363948 - DNA, 15 bp, Homo sapiens
ttctacctgggctgc

SEQ ID NO: 1363949 - DNA, 15 bp, Homo sapiens
cttctacctgggctg

SEQ ID NO: 1363950 - DNA, 15 bp, Homo sapiens
ccttctacctgggct

SEQ ID NO: 1363951 - DNA, 15 bp, Homo sapiens
tccttctacctgggc

SEQ ID NO: 1363952 - DNA, 15 bp, Homo sapiens
ttccttctacctggg

SEQ ID NO: 1363953 - DNA, 15 bp, Homo sapiens
cttccttctacctgg

SEQ ID NO: 1363954 - DNA, 15 bp, Homo sapiens
gcttccttctacctg

SEQ ID NO: 1363955 - DNA, 15 bp, Homo sapiens
ggcttccttctacct

SEQ ID NO: 1363956 - DNA, 15 bp, Homo sapiens
aggcttccttctacc

SEQ ID NO: 1363957 - DNA, 15 bp, Homo sapiens
aaggcttccttctac

SEQ ID NO: 1363958 - DNA, 15 bp, Homo sapiens
taaggcttccttcta

SEQ ID NO: 1363959 - DNA, 15 bp, Homo sapiens
ataaggcttccttct

SEQ ID NO: 1363960 - DNA, 15 bp, Homo sapiens
gataaggcttccttc

SEQ ID NO: 1363961 - DNA, 15 bp, Homo sapiens
agataaggcttcctt

SEQ ID NO: 1363962 - DNA, 15 bp, Homo sapiens
aagataaggcttcct

SEQ ID NO: 1363963 - DNA, 15 bp, Homo sapiens
aaagataaggcttcc

SEQ ID NO: 1363964 - DNA, 15 bp, Homo sapiens
aaaagataaggcttc

SEQ ID NO: 1363965 - DNA, 15 bp, Homo sapiens
aaaaagataaggctt

SEQ ID NO: 1363966 - DNA, 15 bp, Homo sapiens
gaaaaagataaggct

SEQ ID NO: 1363967 - DNA, 15 bp, Homo sapiens
agaaaaagataaggc

SEQ ID NO: 1363968 - DNA, 15 bp, Homo sapiens
aagaaaaagataagg

SEQ ID NO: 1363969 - DNA, 15 bp, Homo sapiens
gaagaaaaagataag

SEQ ID NO: 1363970 - DNA, 15 bp, Homo sapiens
ggaagaaaaagataa

SEQ ID NO: 1363971 - DNA, 15 bp, Homo sapiens
aggaagaaaaagata

SEQ ID NO: 1363972 - DNA, 15 bp, Homo sapiens
gaggaagaaaaagat

SEQ ID NO: 1363973 - DNA, 15 bp, Homo sapiens
ggaggaagaaaaaga

SEQ ID NO: 1363974 - DNA, 15 bp, Homo sapiens
gggaggaagaaaaag

SEQ ID NO: 1363975 - DNA, 15 bp, Homo sapiens
ggggaggaagaaaaa

SEQ ID NO: 1363976 - DNA, 15 bp, Homo sapiens
aggggaggaagaaaa

SEQ ID NO: 1363977 - DNA, 15 bp, Homo sapiens
aaggggaggaagaaa

SEQ ID NO: 1363978 - DNA, 15 bp, Homo sapiens
aaaggggaggaagaa

SEQ ID NO: 1363979 - DNA, 15 bp, Homo sapiens
aaaaggggaggaaga

SEQ ID NO: 1363980 - DNA, 15 bp, Homo sapiens
caaaaggggaggaag

SEQ ID NO: 1363981 - DNA, 15 bp, Homo sapiens
acaaaaggggaggaa

SEQ ID NO: 1363982 - DNA, 15 bp, Homo sapiens
tacaaaaggggagga

SEQ ID NO: 1363983 - DNA, 15 bp, Homo sapiens
atacaaaaggggagg

SEQ ID NO: 1363984 - DNA, 15 bp, Homo sapiens
aatacaaaaggggag

SEQ ID NO: 1363985 - DNA, 15 bp, Homo sapiens
gaatacaaaagggga

SEQ ID NO: 1363986 - DNA, 15 bp, Homo sapiens
agaatacaaaagggg

SEQ ID NO: 1363987 - DNA, 15 bp, Homo sapiens
aagaatacaaaaggg

SEQ ID NO: 1363988 - DNA, 15 bp, Homo sapiens
caagaatacaaaagg

SEQ ID NO: 1363989 - DNA, 15 bp, Homo sapiens
ccaagaatacaaaag

SEQ ID NO: 1363990 - DNA, 15 bp, Homo sapiens
tccaagaatacaaaa

SEQ ID NO: 1363991 - DNA, 15 bp, Homo sapiens
ttccaagaatacaaa

SEQ ID NO: 1363992 - DNA, 15 bp, Homo sapiens
attccaagaatacaa

SEQ ID NO: 1363993 - DNA, 15 bp, Homo sapiens
aattccaagaataca

SEQ ID NO: 1363994 - DNA, 15 bp, Homo sapiens
caattccaagaatac

SEQ ID NO: 1363995 - DNA, 15 bp, Homo sapiens
acaattccaagaata

SEQ ID NO: 1363996 - DNA, 15 bp, Homo sapiens
cacaattccaagaat

SEQ ID NO: 1363997 - DNA, 15 bp, Homo sapiens
acacaattccaagaa

SEQ ID NO: 1363998 - DNA, 15 bp, Homo sapiens
tacacaattccaaga

SEQ ID NO: 1363999 - DNA, 15 bp, Homo sapiens
gtacacaattccaag

SEQ ID NO: 1364000 - DNA, 15 bp, Homo sapiens
ggtacacaattccaa

SEQ ID NO: 1364001 - DNA, 15 bp, Homo sapiens
tggtacacaattcca

SEQ ID NO: 1364002 - DNA, 15 bp, Homo sapiens
atggtacacaattcc

SEQ ID NO: 1364003 - DNA, 15 bp, Homo sapiens
aatggtacacaattc

SEQ ID NO: 1364004 - DNA, 15 bp, Homo sapiens
caatggtacacaatt

SEQ ID NO: 1364005 - DNA, 15 bp, Homo sapiens
acaatggtacacaat

SEQ ID NO: 1364006 - DNA, 15 bp, Homo sapiens
cacaatggtacacaa

SEQ ID NO: 1364007 - DNA, 15 bp, Homo sapiens
gcacaatggtacaca

SEQ ID NO: 1364008 - DNA, 15 bp, Homo sapiens
tgcacaatggtacac

SEQ ID NO: 1364009 - DNA, 15 bp, Homo sapiens
atgcacaatggtaca

SEQ ID NO: 1364010 - DNA, 15 bp, Homo sapiens
catgcacaatggtac

SEQ ID NO: 1364011 - DNA, 15 bp, Homo sapiens
gcatgcacaatggta

SEQ ID NO: 1364012 - DNA, 15 bp, Homo sapiens
tgcatgcacaatggt

SEQ ID NO: 1364013 - DNA, 15 bp, Homo sapiens
atgcatgcacaatgg

SEQ ID NO: 1364014 - DNA, 15 bp, Homo sapiens
aatgcatgcacaatg

SEQ ID NO: 1364015 - DNA, 15 bp, Homo sapiens
caatgcatgcacaat

SEQ ID NO: 1364016 - DNA, 15 bp, Homo sapiens
gcaatgcatgcacaa

SEQ ID NO: 1364017 - DNA, 15 bp, Homo sapiens
ggcaatgcatgcaca

SEQ ID NO: 1364018 - DNA, 15 bp, Homo sapiens
aggcaatgcatgcac

SEQ ID NO: 1364019 - DNA, 15 bp, Homo sapiens
taggcaatgcatgca

SEQ ID NO: 1364020 - DNA, 15 bp, Homo sapiens
ataggcaatgcatgc

SEQ ID NO: 1364021 - DNA, 15 bp, Homo sapiens
aataggcaatgcatg

SEQ ID NO: 1364022 - DNA, 15 bp, Homo sapiens
gaataggcaatgcat

SEQ ID NO: 1364023 - DNA, 15 bp, Homo sapiens
tgaataggcaatgca

SEQ ID NO: 1364024 - DNA, 15 bp, Homo sapiens
ttgaataggcaatgc

SEQ ID NO: 1364025 - DNA, 15 bp, Homo sapiens
tttgaataggcaatg

SEQ ID NO: 1364026 - DNA, 15 bp, Homo sapiens
ttttgaataggcaat

SEQ ID NO: 1364027 - DNA, 15 bp, Homo sapiens
tttttgaataggcaa

SEQ ID NO: 1364028 - DNA, 15 bp, Homo sapiens
atttttgaataggca

SEQ ID NO: 1364029 - DNA, 15 bp, Homo sapiens
gatttttgaataggc

SEQ ID NO: 1364030 - DNA, 15 bp, Homo sapiens
tgatttttgaatagg

SEQ ID NO: 1364031 - DNA, 15 bp, Homo sapiens
ttgatttttgaatag

SEQ ID NO: 1364032 - DNA, 15 bp, Homo sapiens
attgatttttgaata

SEQ ID NO: 1364033 - DNA, 15 bp, Homo sapiens
tattgatttttgaat

SEQ ID NO: 1364034 - DNA, 15 bp, Homo sapiens
ttattgatttttgaa

SEQ ID NO: 1364035 - DNA, 15 bp, Homo sapiens
tttattgatttttga

SEQ ID NO: 1364036 - DNA, 15 bp, Homo sapiens
ttttattgatttttg

SEQ ID NO: 1364037 - DNA, 15 bp, Homo sapiens
attttattgattttt

SEQ ID NO: 1364038 - DNA, 15 bp, Homo sapiens
tattttattgatttt

SEQ ID NO: 1364039 - DNA, 15 bp, Homo sapiens
ctattttattgattt

SEQ ID NO: 1364040 - DNA, 15 bp, Homo sapiens
tctattttattgatt

SEQ ID NO: 1364041 - DNA, 15 bp, Homo sapiens
ttctattttattgat

SEQ ID NO: 1364042 - DNA, 15 bp, Homo sapiens
tttctattttattga

SEQ ID NO: 1364043 - DNA, 15 bp, Homo sapiens
ttttctattttattg

SEQ ID NO: 1364044 - DNA, 15 bp, Homo sapiens
tttttctattttatt

SEQ ID NO: 1364045 - DNA, 15 bp, Homo sapiens
ctttttctattttat

SEQ ID NO: 1364046 - DNA, 15 bp, Homo sapiens
gctttttctatttta

SEQ ID NO: 1364047 - DNA, 15 bp, Homo sapiens
tgctttttctatttt

SEQ ID NO: 1364048 - DNA, 15 bp, Homo sapiens
ttgctttttctattt

SEQ ID NO: 1364049 - DNA, 15 bp, Homo sapiens
tttgctttttctatt

SEQ ID NO: 1364050 - DNA, 15 bp, Homo sapiens
ctttgctttttctat

SEQ ID NO: 1364051 - DNA, 15 bp, Homo sapiens
tctttgctttttcta

SEQ ID NO: 1364052 - DNA, 15 bp, Homo sapiens
ttctttgctttttct

SEQ ID NO: 1364053 - DNA, 15 bp, Homo sapiens
tttctttgctttttc

SEQ ID NO: 1364054 - DNA, 15 bp, Homo sapiens
ttttctttgcttttt

SEQ ID NO: 1364055 - DNA, 15 bp, Homo sapiens
tttttctttgctttt

SEQ ID NO: 1364056 - DNA, 15 bp, Homo sapiens
ctttttctttgcttt

SEQ ID NO: 1364057 - DNA, 15 bp, Homo sapiens
actttttctttgctt

SEQ ID NO: 1364058 - DNA, 15 bp, Homo sapiens
tactttttctttgct

SEQ ID NO: 1364059 - DNA, 15 bp, Homo sapiens
gtactttttctttgc

SEQ ID NO: 1364060 - DNA, 15 bp, Homo sapiens
ggtactttttctttg

SEQ ID NO: 1364061 - DNA, 15 bp, Homo sapiens
tggtactttttcttt

SEQ ID NO: 1364062 - DNA, 15 bp, Homo sapiens
ttggtactttttctt

SEQ ID NO: 1364063 - DNA, 15 bp, Homo sapiens
tttggtactttttct

SEQ ID NO: 1364064 - DNA, 15 bp, Homo sapiens
atttggtactttttc

SEQ ID NO: 1364065 - DNA, 15 bp, Homo sapiens
tatttggtacttttt

SEQ ID NO: 1364066 - DNA, 15 bp, Homo sapiens
ttatttggtactttt

SEQ ID NO: 1364067 - DNA, 15 bp, Homo sapiens
cttatttggtacttt

SEQ ID NO: 1364068 - DNA, 15 bp, Homo sapiens
tcttatttggtactt

SEQ ID NO: 1364069 - DNA, 15 bp, Homo sapiens
atcttatttggtact

SEQ ID NO: 1364070 - DNA, 15 bp, Homo sapiens
catcttatttggtac

SEQ ID NO: 1364071 - DNA, 15 bp, Homo sapiens
ccatcttatttggta

SEQ ID NO: 1364072 - DNA, 15 bp, Homo sapiens
tccatcttatttggt

SEQ ID NO: 1364073 - DNA, 15 bp, Homo sapiens
gtccatcttatttgg

SEQ ID NO: 1364074 - DNA, 15 bp, Homo sapiens
agtccatcttatttg

SEQ ID NO: 1364075 - DNA, 15 bp, Homo sapiens
cagtccatcttattt

SEQ ID NO: 1364076 - DNA, 15 bp, Homo sapiens
tcagtccatcttatt

SEQ ID NO: 1364077 - DNA, 15 bp, Homo sapiens
ttcagtccatcttat

SEQ ID NO: 1364078 - DNA, 15 bp, Homo sapiens
cttcagtccatctta

SEQ ID NO: 1364079 - DNA, 15 bp, Homo sapiens
tcttcagtccatctt

SEQ ID NO: 1364080 - DNA, 15 bp, Homo sapiens
atcttcagtccatct

SEQ ID NO: 1364081 - DNA, 15 bp, Homo sapiens
catcttcagtccatc

SEQ ID NO: 1364082 - DNA, 15 bp, Homo sapiens
ccatcttcagtccat

SEQ ID NO: 1364083 - DNA, 15 bp, Homo sapiens
tccatcttcagtcca

SEQ ID NO: 1364084 - DNA, 15 bp, Homo sapiens
ctccatcttcagtcc

SEQ ID NO: 1364085 - DNA, 15 bp, Homo sapiens
tctccatcttcagtc

SEQ ID NO: 1364086 - DNA, 15 bp, Homo sapiens
gtctccatcttcagt

SEQ ID NO: 1364087 - DNA, 15 bp, Homo sapiens
agtctccatcttcag

SEQ ID NO: 1364088 - DNA, 15 bp, Homo sapiens
gagtctccatcttca

SEQ ID NO: 1364089 - DNA, 15 bp, Homo sapiens
agagtctccatcttc

SEQ ID NO: 1364090 - DNA, 15 bp, Homo sapiens
gagagtctccatctt

SEQ ID NO: 1364091 - DNA, 15 bp, Homo sapiens
agagagtctccatct

SEQ ID NO: 1364092 - DNA, 15 bp, Homo sapiens
cagagagtctccatc

SEQ ID NO: 1364093 - DNA, 15 bp, Homo sapiens
ccagagagtctccat

SEQ ID NO: 1364094 - DNA, 15 bp, Homo sapiens
cccagagagtctcca

SEQ ID NO: 1364095 - DNA, 15 bp, Homo sapiens
gcccagagagtctcc

SEQ ID NO: 1364096 - DNA, 15 bp, Homo sapiens
agcccagagagtctc

SEQ ID NO: 1364097 - DNA, 15 bp, Homo sapiens
tagcccagagagtct

SEQ ID NO: 1364098 - DNA, 15 bp, Homo sapiens
atagcccagagagtc

SEQ ID NO: 1364099 - DNA, 15 bp, Homo sapiens
catagcccagagagt

SEQ ID NO: 1364100 - DNA, 15 bp, Homo sapiens
acatagcccagagag

SEQ ID NO: 1364101 - DNA, 15 bp, Homo sapiens
tacatagcccagaga

SEQ ID NO: 1364102 - DNA, 15 bp, Homo sapiens
ttacatagcccagag

SEQ ID NO: 1364103 - DNA, 15 bp, Homo sapiens
gttacatagcccaga

SEQ ID NO: 1364104 - DNA, 15 bp, Homo sapiens
cgttacatagcccag

SEQ ID NO: 1364105 - DNA, 15 bp, Homo sapiens
acgttacatagccca

SEQ ID NO: 1364106 - DNA, 15 bp, Homo sapiens
aacgttacatagccc

SEQ ID NO: 1364107 - DNA, 15 bp, Homo sapiens
aaacgttacatagcc

SEQ ID NO: 1364108 - DNA, 15 bp, Homo sapiens
taaacgttacatagc

SEQ ID NO: 1364109 - DNA, 15 bp, Homo sapiens
ataaacgttacatag

SEQ ID NO: 1364110 - DNA, 15 bp, Homo sapiens
tataaacgttacata

SEQ ID NO: 1364111 - DNA, 15 bp, Homo sapiens
ttataaacgttacat

SEQ ID NO: 1364112 - DNA, 15 bp, Homo sapiens
attataaacgttaca

SEQ ID NO: 1364113 - DNA, 15 bp, Homo sapiens
gattataaacgttac

SEQ ID NO: 1364114 - DNA, 15 bp, Homo sapiens
ggattataaacgtta

SEQ ID NO: 1364115 - DNA, 15 bp, Homo sapiens
gggattataaacgtt

SEQ ID NO: 1364116 - DNA, 15 bp, Homo sapiens
agggattataaacgt

SEQ ID NO: 1364117 - DNA, 15 bp, Homo sapiens
aagggattataaacg

SEQ ID NO: 1364118 - DNA, 15 bp, Homo sapiens
gaagggattataaac

SEQ ID NO: 1364119 - DNA, 15 bp, Homo sapiens
agaagggattataaa

SEQ ID NO: 1364120 - DNA, 15 bp, Homo sapiens
cagaagggattataa

SEQ ID NO: 1364121 - DNA, 15 bp, Homo sapiens
ccagaagggattata

SEQ ID NO: 1364122 - DNA, 15 bp, Homo sapiens
gccagaagggattat

SEQ ID NO: 1364123 - DNA, 15 bp, Homo sapiens
agccagaagggatta

SEQ ID NO: 1364124 - DNA, 15 bp, Homo sapiens
aagccagaagggatt

SEQ ID NO: 1364125 - DNA, 15 bp, Homo sapiens
caagccagaagggat

SEQ ID NO: 1364126 - DNA, 15 bp, Homo sapiens
tcaagccagaaggga

SEQ ID NO: 1364127 - DNA, 15 bp, Homo sapiens
ttcaagccagaaggg

SEQ ID NO: 1364128 - DNA, 15 bp, Homo sapiens
gttcaagccagaagg

SEQ ID NO: 1364129 - DNA, 15 bp, Homo sapiens
ggttcaagccagaag

SEQ ID NO: 1364130 - DNA, 15 bp, Homo sapiens
aggttcaagccagaa

SEQ ID NO: 1364131 - DNA, 15 bp, Homo sapiens
gaggttcaagccaga

SEQ ID NO: 1364132 - DNA, 15 bp, Homo sapiens
tgaggttcaagccag

SEQ ID NO: 1364133 - DNA, 15 bp, Homo sapiens
atgaggttcaagcca

SEQ ID NO: 1364134 - DNA, 15 bp, Homo sapiens
aatgaggttcaagcc

SEQ ID NO: 1364135 - DNA, 15 bp, Homo sapiens
aaatgaggttcaagc

SEQ ID NO: 1364136 - DNA, 15 bp, Homo sapiens
aaaatgaggttcaag

SEQ ID NO: 1364137 - DNA, 15 bp, Homo sapiens
taaaatgaggttcaa

SEQ ID NO: 1364138 - DNA, 15 bp, Homo sapiens
gtaaaatgaggttca

SEQ ID NO: 1364139 - DNA, 15 bp, Homo sapiens
agtaaaatgaggttc

SEQ ID NO: 1364140 - DNA, 15 bp, Homo sapiens
cagtaaaatgaggtt

SEQ ID NO: 1364141 - DNA, 15 bp, Homo sapiens
gcagtaaaatgaggt

SEQ ID NO: 1364142 - DNA, 15 bp, Homo sapiens
tgcagtaaaatgagg

SEQ ID NO: 1364143 - DNA, 15 bp, Homo sapiens
atgcagtaaaatgag

SEQ ID NO: 1364144 - DNA, 15 bp, Homo sapiens
aatgcagtaaaatga

SEQ ID NO: 1364145 - DNA, 15 bp, Homo sapiens
aaatgcagtaaaatg

SEQ ID NO: 1364146 - DNA, 15 bp, Homo sapiens
gaaatgcagtaaaat

SEQ ID NO: 1364147 - DNA, 15 bp, Homo sapiens
agaaatgcagtaaaa

SEQ ID NO: 1364148 - DNA, 15 bp, Homo sapiens
gagaaatgcagtaaa

SEQ ID NO: 1364149 - DNA, 15 bp, Homo sapiens
ggagaaatgcagtaa

SEQ ID NO: 1364150 - DNA, 15 bp, Homo sapiens
tggagaaatgcagta

SEQ ID NO: 1364151 - DNA, 15 bp, Homo sapiens
ctggagaaatgcagt

SEQ ID NO: 1364152 - DNA, 15 bp, Homo sapiens
tctggagaaatgcag

SEQ ID NO: 1364153 - DNA, 15 bp, Homo sapiens
atctggagaaatgca

SEQ ID NO: 1364154 - DNA, 15 bp, Homo sapiens
aatctggagaaatgc

SEQ ID NO: 1364155 - DNA, 15 bp, Homo sapiens
aaatctggagaaatg

SEQ ID NO: 1364156 - DNA, 15 bp, Homo sapiens
aaaatctggagaaat

SEQ ID NO: 1364157 - DNA, 15 bp, Homo sapiens
aaaaatctggagaaa

SEQ ID NO: 1364158 - DNA, 15 bp, Homo sapiens
gaaaaatctggagaa

SEQ ID NO: 1364159 - DNA, 15 bp, Homo sapiens
ggaaaaatctggaga

SEQ ID NO: 1364160 - DNA, 15 bp, Homo sapiens
aggaaaaatctggag

SEQ ID NO: 1364161 - DNA, 15 bp, Homo sapiens
aaggaaaaatctgga

SEQ ID NO: 1364162 - DNA, 15 bp, Homo sapiens
aaaggaaaaatctgg

SEQ ID NO: 1364163 - DNA, 15 bp, Homo sapiens
taaaggaaaaatctg

SEQ ID NO: 1364164 - DNA, 15 bp, Homo sapiens
ataaaggaaaaatct

SEQ ID NO: 1364165 - DNA, 15 bp, Homo sapiens
cataaaggaaaaatc

SEQ ID NO: 1364166 - DNA, 15 bp, Homo sapiens
ccataaaggaaaaat

SEQ ID NO: 1364167 - DNA, 15 bp, Homo sapiens
accataaaggaaaaa

SEQ ID NO: 1364168 - DNA, 15 bp, Homo sapiens
gaccataaaggaaaa

SEQ ID NO: 1364169 - DNA, 15 bp, Homo sapiens
agaccataaaggaaa

SEQ ID NO: 1364170 - DNA, 15 bp, Homo sapiens
tagaccataaaggaa

SEQ ID NO: 1364171 - DNA, 15 bp, Homo sapiens
gtagaccataaagga

SEQ ID NO: 1364172 - DNA, 15 bp, Homo sapiens
ggtagaccataaagg

SEQ ID NO: 1364173 - DNA, 15 bp, Homo sapiens
tggtagaccataaag

SEQ ID NO: 1364174 - DNA, 15 bp, Homo sapiens
ctggtagaccataaa

SEQ ID NO: 1364175 - DNA, 15 bp, Homo sapiens
tctggtagaccataa

SEQ ID NO: 1364176 - DNA, 15 bp, Homo sapiens
gtctggtagaccata

SEQ ID NO: 1364177 - DNA, 15 bp, Homo sapiens
agtctggtagaccat

SEQ ID NO: 1364178 - DNA, 15 bp, Homo sapiens
gagtctggtagacca

SEQ ID NO: 1364179 - DNA, 15 bp, Homo sapiens
agagtctggtagacc

SEQ ID NO: 1364180 - DNA, 15 bp, Homo sapiens
tagagtctggtagac

SEQ ID NO: 1364181 - DNA, 15 bp, Homo sapiens
ttagagtctggtaga

SEQ ID NO: 1364182 - DNA, 15 bp, Homo sapiens
gttagagtctggtag

SEQ ID NO: 1364183 - DNA, 15 bp, Homo sapiens
tgttagagtctggta

SEQ ID NO: 1364184 - DNA, 15 bp, Homo sapiens
ttgttagagtctggt

SEQ ID NO: 1364185 - DNA, 15 bp, Homo sapiens
attgttagagtctgg

SEQ ID NO: 1364186 - DNA, 15 bp, Homo sapiens
cattgttagagtctg

SEQ ID NO: 1364187 - DNA, 15 bp, Homo sapiens
gcattgttagagtct

SEQ ID NO: 1364188 - DNA, 15 bp, Homo sapiens
agcattgttagagtc

SEQ ID NO: 1364189 - DNA, 15 bp, Homo sapiens
tagcattgttagagt

SEQ ID NO: 1364190 - DNA, 15 bp, Homo sapiens
ttagcattgttagag

SEQ ID NO: 1364191 - DNA, 15 bp, Homo sapiens
tttagcattgttaga

SEQ ID NO: 1364192 - DNA, 15 bp, Homo sapiens
atttagcattgttag

SEQ ID NO: 1364193 - DNA, 15 bp, Homo sapiens
tatttagcattgtta

SEQ ID NO: 1364194 - DNA, 15 bp, Homo sapiens
ttatttagcattgtt

SEQ ID NO: 1364195 - DNA, 15 bp, Homo sapiens
gttatttagcattgt

SEQ ID NO: 1364196 - DNA, 15 bp, Homo sapiens
tgttatttagcattg

SEQ ID NO: 1364197 - DNA, 15 bp, Homo sapiens
atgttatttagcatt

SEQ ID NO: 1364198 - DNA, 15 bp, Homo sapiens
gatgttatttagcat

SEQ ID NO: 1364199 - DNA, 15 bp, Homo sapiens
tgatgttatttagca

SEQ ID NO: 1364200 - DNA, 15 bp, Homo sapiens
atgatgttatttagc

SEQ ID NO: 1364201 - DNA, 15 bp, Homo sapiens
gatgatgttatttag

SEQ ID NO: 1364202 - DNA, 15 bp, Homo sapiens
agatgatgttattta

SEQ ID NO: 1364203 - DNA, 15 bp, Homo sapiens
aagatgatgttattt

SEQ ID NO: 1364204 - DNA, 15 bp, Homo sapiens
gaagatgatgttatt

SEQ ID NO: 1364205 - DNA, 15 bp, Homo sapiens
ggaagatgatgttat

SEQ ID NO: 1364206 - DNA, 15 bp, Homo sapiens
gggaagatgatgtta

SEQ ID NO: 1364207 - DNA, 15 bp, Homo sapiens
ggggaagatgatgtt

SEQ ID NO: 1364208 - DNA, 15 bp, Homo sapiens
gggggaagatgatgt

SEQ ID NO: 1364209 - DNA, 15 bp, Homo sapiens
tgggggaagatgatg

SEQ ID NO: 1364210 - DNA, 15 bp, Homo sapiens
ttgggggaagatgat

SEQ ID NO: 1364211 - DNA, 15 bp, Homo sapiens
gttgggggaagatga

SEQ ID NO: 1364212 - DNA, 15 bp, Homo sapiens
agttgggggaagatg

SEQ ID NO: 1364213 - DNA, 15 bp, Homo sapiens
aagttgggggaagat

SEQ ID NO: 1364214 - DNA, 15 bp, Homo sapiens
aaagttgggggaaga

SEQ ID NO: 1364215 - DNA, 15 bp, Homo sapiens
caaagttgggggaag

SEQ ID NO: 1364216 - DNA, 15 bp, Homo sapiens
tcaaagttgggggaa

SEQ ID NO: 1364217 - DNA, 15 bp, Homo sapiens
ttcaaagttggggga

SEQ ID NO: 1364218 - DNA, 15 bp, Homo sapiens
tttcaaagttggggg

SEQ ID NO: 1364219 - DNA, 15 bp, Homo sapiens
ctttcaaagttgggg

SEQ ID NO: 1364220 - DNA, 15 bp, Homo sapiens
gctttcaaagttggg

SEQ ID NO: 1364221 - DNA, 15 bp, Homo sapiens
ggctttcaaagttgg

SEQ ID NO: 1364222 - DNA, 15 bp, Homo sapiens
aggctttcaaagttg

SEQ ID NO: 1364223 - DNA, 15 bp, Homo sapiens
aaggctttcaaagtt

SEQ ID NO: 1364224 - DNA, 15 bp, Homo sapiens
gaaggctttcaaagt

SEQ ID NO: 1364225 - DNA, 15 bp, Homo sapiens
tgaaggctttcaaag

SEQ ID NO: 1364226 - DNA, 15 bp, Homo sapiens
ttgaaggctttcaaa

SEQ ID NO: 1364227 - DNA, 15 bp, Homo sapiens
tttgaaggctttcaa

SEQ ID NO: 1364228 - DNA, 15 bp, Homo sapiens
ttttgaaggctttca

SEQ ID NO: 1364229 - DNA, 15 bp, Homo sapiens
cttttgaaggctttc

SEQ ID NO: 1364230 - DNA, 15 bp, Homo sapiens
tcttttgaaggcttt

SEQ ID NO: 1364231 - DNA, 15 bp, Homo sapiens
ttcttttgaaggctt

SEQ ID NO: 1364232 - DNA, 15 bp, Homo sapiens
tttcttttgaaggct

SEQ ID NO: 1364233 - DNA, 15 bp, Homo sapiens
atttcttttgaaggc

SEQ ID NO: 1364234 - DNA, 15 bp, Homo sapiens
catttcttttgaagg

SEQ ID NO: 1364235 - DNA, 15 bp, Homo sapiens
acatttcttttgaag

SEQ ID NO: 1364236 - DNA, 15 bp, Homo sapiens
aacatttcttttgaa

SEQ ID NO: 1364237 - DNA, 15 bp, Homo sapiens
aaacatttcttttga

SEQ ID NO: 1364238 - DNA, 15 bp, Homo sapiens
taaacatttcttttg

SEQ ID NO: 1364239 - DNA, 15 bp, Homo sapiens
ataaacatttctttt

SEQ ID NO: 1364240 - DNA, 15 bp, Homo sapiens
cataaacatttcttt

SEQ ID NO: 1364241 - DNA, 15 bp, Homo sapiens
ccataaacatttctt

SEQ ID NO: 1364242 - DNA, 15 bp, Homo sapiens
cccataaacatttct

SEQ ID NO: 1364243 - DNA, 15 bp, Homo sapiens
tcccataaacatttc

SEQ ID NO: 1364244 - DNA, 15 bp, Homo sapiens
atcccataaacattt

SEQ ID NO: 1364245 - DNA, 15 bp, Homo sapiens
tatcccataaacatt

SEQ ID NO: 1364246 - DNA, 15 bp, Homo sapiens
ctatcccataaacat

SEQ ID NO: 1364247 - DNA, 15 bp, Homo sapiens
tctatcccataaaca

SEQ ID NO: 1364248 - DNA, 15 bp, Homo sapiens
ctctatcccataaac

SEQ ID NO: 1364249 - DNA, 15 bp, Homo sapiens
cctctatcccataaa

SEQ ID NO: 1364250 - DNA, 15 bp, Homo sapiens
ccctctatcccataa

SEQ ID NO: 1364251 - DNA, 15 bp, Homo sapiens
cccctctatcccata

SEQ ID NO: 1364252 - DNA, 15 bp, Homo sapiens
ccccctctatcccat

SEQ ID NO: 1364253 - DNA, 15 bp, Homo sapiens
tccccctctatccca

SEQ ID NO: 1364254 - DNA, 15 bp, Homo sapiens
atccccctctatccc

SEQ ID NO: 1364255 - DNA, 15 bp, Homo sapiens
gatccccctctatcc

SEQ ID NO: 1364256 - DNA, 15 bp, Homo sapiens
tgatccccctctatc

SEQ ID NO: 1364257 - DNA, 15 bp, Homo sapiens
ttgatccccctctat

SEQ ID NO: 1364258 - DNA, 15 bp, Homo sapiens
tttgatccccctcta

SEQ ID NO: 1364259 - DNA, 15 bp, Homo sapiens
ttttgatccccctct

SEQ ID NO: 1364260 - DNA, 15 bp, Homo sapiens
gttttgatccccctc

SEQ ID NO: 1364261 - DNA, 15 bp, Homo sapiens
agttttgatccccct

SEQ ID NO: 1364262 - DNA, 15 bp, Homo sapiens
tagttttgatccccc

SEQ ID NO: 1364263 - DNA, 15 bp, Homo sapiens
ttagttttgatcccc

SEQ ID NO: 1364264 - DNA, 15 bp, Homo sapiens
tttagttttgatccc

SEQ ID NO: 1364265 - DNA, 15 bp, Homo sapiens
atttagttttgatcc

SEQ ID NO: 1364266 - DNA, 15 bp, Homo sapiens
aatttagttttgatc

SEQ ID NO: 1364267 - DNA, 15 bp, Homo sapiens
caatttagttttgat

SEQ ID NO: 1364268 - DNA, 15 bp, Homo sapiens
ccaatttagttttga

SEQ ID NO: 1364269 - DNA, 15 bp, Homo sapiens
cccaatttagttttg

SEQ ID NO: 1364270 - DNA, 15 bp, Homo sapiens
gcccaatttagtttt

SEQ ID NO: 1364271 - DNA, 15 bp, Homo sapiens
tgcccaatttagttt

SEQ ID NO: 1364272 - DNA, 15 bp, Homo sapiens
gtgcccaatttagtt

SEQ ID NO: 1364273 - DNA, 15 bp, Homo sapiens
tgtgcccaatttagt

SEQ ID NO: 1364274 - DNA, 15 bp, Homo sapiens
ctgtgcccaatttag

SEQ ID NO: 1364275 - DNA, 15 bp, Homo sapiens
gctgtgcccaattta

SEQ ID NO: 1364276 - DNA, 15 bp, Homo sapiens
tgctgtgcccaattt

SEQ ID NO: 1364277 - DNA, 15 bp, Homo sapiens
ctgctgtgcccaatt

SEQ ID NO: 1364278 - DNA, 15 bp, Homo sapiens
tctgctgtgcccaat

SEQ ID NO: 1364279 - DNA, 15 bp, Homo sapiens
ttctgctgtgcccaa

SEQ ID NO: 1364280 - DNA, 15 bp, Homo sapiens
attctgctgtgccca

SEQ ID NO: 1364281 - DNA, 15 bp, Homo sapiens
gattctgctgtgccc

SEQ ID NO: 1364282 - DNA, 15 bp, Homo sapiens
ggattctgctgtgcc

SEQ ID NO: 1364283 - DNA, 15 bp, Homo sapiens
aggattctgctgtgc

SEQ ID NO: 1364284 - DNA, 15 bp, Homo sapiens
caggattctgctgtg

SEQ ID NO: 1364285 - DNA, 15 bp, Homo sapiens
gcaggattctgctgt

SEQ ID NO: 1364286 - DNA, 15 bp, Homo sapiens
ggcaggattctgctg

SEQ ID NO: 1364287 - DNA, 15 bp, Homo sapiens
gggcaggattctgct

SEQ ID NO: 1364288 - DNA, 15 bp, Homo sapiens
tgggcaggattctgc

SEQ ID NO: 1364289 - DNA, 15 bp, Homo sapiens
gtgggcaggattctg

SEQ ID NO: 1364290 - DNA, 15 bp, Homo sapiens
agtgggcaggattct

SEQ ID NO: 1364291 - DNA, 15 bp, Homo sapiens
cagtgggcaggattc

SEQ ID NO: 1364292 - DNA, 15 bp, Homo sapiens
ccagtgggcaggatt

SEQ ID NO: 1364293 - DNA, 15 bp, Homo sapiens
cccagtgggcaggat

SEQ ID NO: 1364294 - DNA, 15 bp, Homo sapiens
acccagtgggcagga

SEQ ID NO: 1364295 - DNA, 15 bp, Homo sapiens
tacccagtgggcagg

SEQ ID NO: 1364296 - DNA, 15 bp, Homo sapiens
ttacccagtgggcag

SEQ ID NO: 1364297 - DNA, 15 bp, Homo sapiens
gttacccagtgggca

SEQ ID NO: 1364298 - DNA, 15 bp, Homo sapiens
agttacccagtgggc

SEQ ID NO: 1364299 - DNA, 15 bp, Homo sapiens
gagttacccagtggg

SEQ ID NO: 1364300 - DNA, 15 bp, Homo sapiens
ggagttacccagtgg

SEQ ID NO: 1364301 - DNA, 15 bp, Homo sapiens
aggagttacccagtg

SEQ ID NO: 1364302 - DNA, 15 bp, Homo sapiens
gaggagttacccagt

SEQ ID NO: 1364303 - DNA, 15 bp, Homo sapiens
agaggagttacccag

SEQ ID NO: 1364304 - DNA, 15 bp, Homo sapiens
gagaggagttaccca

SEQ ID NO: 1364305 - DNA, 15 bp, Homo sapiens
ggagaggagttaccc

SEQ ID NO: 1364306 - DNA, 15 bp, Homo sapiens
tggagaggagttacc

SEQ ID NO: 1364307 - DNA, 15 bp, Homo sapiens
atggagaggagttac

SEQ ID NO: 1364308 - DNA, 15 bp, Homo sapiens
catggagaggagtta

SEQ ID NO: 1364309 - DNA, 15 bp, Homo sapiens
tcatggagaggagtt

SEQ ID NO: 1364310 - DNA, 15 bp, Homo sapiens
ttcatggagaggagt

SEQ ID NO: 1364311 - DNA, 15 bp, Homo sapiens
tttcatggagaggag

SEQ ID NO: 1364312 - DNA, 15 bp, Homo sapiens
ttttcatggagagga

SEQ ID NO: 1364313 - DNA, 15 bp, Homo sapiens
attttcatggagagg

SEQ ID NO: 1364314 - DNA, 15 bp, Homo sapiens
cattttcatggagag

SEQ ID NO: 1364315 - DNA, 15 bp, Homo sapiens
tcattttcatggaga

SEQ ID NO: 1364316 - DNA, 15 bp, Homo sapiens
ttcattttcatggag

SEQ ID NO: 1364317 - DNA, 15 bp, Homo sapiens
attcattttcatgga

SEQ ID NO: 1364318 - DNA, 15 bp, Homo sapiens
gattcattttcatgg

SEQ ID NO: 1364319 - DNA, 15 bp, Homo sapiens
ggattcattttcatg

SEQ ID NO: 1364320 - DNA, 15 bp, Homo sapiens
gggattcattttcat

SEQ ID NO: 1364321 - DNA, 15 bp, Homo sapiens
agggattcattttca

SEQ ID NO: 1364322 - DNA, 15 bp, Homo sapiens
gagggattcattttc

SEQ ID NO: 1364323 - DNA, 15 bp, Homo sapiens
agagggattcatttt

SEQ ID NO: 1364324 - DNA, 15 bp, Homo sapiens
aagagggattcattt

SEQ ID NO: 1364325 - DNA, 15 bp, Homo sapiens
gaagagggattcatt

SEQ ID NO: 1364326 - DNA, 15 bp, Homo sapiens
tgaagagggattcat

SEQ ID NO: 1364327 - DNA, 15 bp, Homo sapiens
gtgaagagggattca

SEQ ID NO: 1364328 - DNA, 15 bp, Homo sapiens
agtgaagagggattc

SEQ ID NO: 1364329 - DNA, 15 bp, Homo sapiens
aagtgaagagggatt

SEQ ID NO: 1364330 - DNA, 15 bp, Homo sapiens
gaagtgaagagggat

SEQ ID NO: 1364331 - DNA, 15 bp, Homo sapiens
ggaagtgaagaggga

SEQ ID NO: 1364332 - DNA, 15 bp, Homo sapiens
aggaagtgaagaggg

SEQ ID NO: 1364333 - DNA, 15 bp, Homo sapiens
gaggaagtgaagagg

SEQ ID NO: 1364334 - DNA, 15 bp, Homo sapiens
ggaggaagtgaagag

SEQ ID NO: 1364335 - DNA, 15 bp, Homo sapiens
aggaggaagtgaaga

SEQ ID NO: 1364336 - DNA, 15 bp, Homo sapiens
aaggaggaagtgaag

SEQ ID NO: 1364337 - DNA, 15 bp, Homo sapiens
caaggaggaagtgaa

SEQ ID NO: 1364338 - DNA, 15 bp, Homo sapiens
acaaggaggaagtga

SEQ ID NO: 1364339 - DNA, 15 bp, Homo sapiens
tacaaggaggaagtg

SEQ ID NO: 1364340 - DNA, 15 bp, Homo sapiens
atacaaggaggaagt

SEQ ID NO: 1364341 - DNA, 15 bp, Homo sapiens
gatacaaggaggaag

SEQ ID NO: 1364342 - DNA, 15 bp, Homo sapiens
agatacaaggaggaa

SEQ ID NO: 1364343 - DNA, 15 bp, Homo sapiens
gagatacaaggagga

SEQ ID NO: 1364344 - DNA, 15 bp, Homo sapiens
tgagatacaaggagg

SEQ ID NO: 1364345 - DNA, 15 bp, Homo sapiens
atgagatacaaggag

SEQ ID NO: 1364346 - DNA, 15 bp, Homo sapiens
tatgagatacaagga

SEQ ID NO: 1364347 - DNA, 15 bp, Homo sapiens
ttatgagatacaagg

SEQ ID NO: 1364348 - DNA, 15 bp, Homo sapiens
attatgagatacaag

SEQ ID NO: 1364349 - DNA, 15 bp, Homo sapiens
aattatgagatacaa

SEQ ID NO: 1364350 - DNA, 15 bp, Homo sapiens
taattatgagataca

SEQ ID NO: 1364351 - DNA, 15 bp, Homo sapiens
gtaattatgagatac

SEQ ID NO: 1364352 - DNA, 15 bp, Homo sapiens
ggtaattatgagata

SEQ ID NO: 1364353 - DNA, 15 bp, Homo sapiens
tggtaattatgagat

SEQ ID NO: 1364354 - DNA, 15 bp, Homo sapiens
ctggtaattatgaga

SEQ ID NO: 1364355 - DNA, 15 bp, Homo sapiens
cctggtaattatgag

SEQ ID NO: 1364356 - DNA, 15 bp, Homo sapiens
ccctggtaattatga

SEQ ID NO: 1364357 - DNA, 15 bp, Homo sapiens
cccctggtaattatg

SEQ ID NO: 1364358 - DNA, 15 bp, Homo sapiens
tcccctggtaattat

SEQ ID NO: 1364359 - DNA, 15 bp, Homo sapiens
ctcccctggtaatta

SEQ ID NO: 1364360 - DNA, 15 bp, Homo sapiens
tctcccctggtaatt

SEQ ID NO: 1364361 - DNA, 15 bp, Homo sapiens
atctcccctggtaat

SEQ ID NO: 1364362 - DNA, 15 bp, Homo sapiens
tatctcccctggtaa

SEQ ID NO: 1364363 - DNA, 15 bp, Homo sapiens
atatctcccctggta

SEQ ID NO: 1364364 - DNA, 15 bp, Homo sapiens
gatatctcccctggt

SEQ ID NO: 1364365 - DNA, 15 bp, Homo sapiens
agatatctcccctgg

SEQ ID NO: 1364366 - DNA, 15 bp, Homo sapiens
gagatatctcccctg

SEQ ID NO: 1364367 - DNA, 15 bp, Homo sapiens
ggagatatctcccct

SEQ ID NO: 1364368 - DNA, 15 bp, Homo sapiens
tggagatatctcccc

SEQ ID NO: 1364369 - DNA, 15 bp, Homo sapiens
ctggagatatctccc

SEQ ID NO: 1364370 - DNA, 15 bp, Homo sapiens
cctggagatatctcc

SEQ ID NO: 1364371 - DNA, 15 bp, Homo sapiens
tcctggagatatctc

SEQ ID NO: 1364372 - DNA, 15 bp, Homo sapiens
gtcctggagatatct

SEQ ID NO: 1364373 - DNA, 15 bp, Homo sapiens
tgtcctggagatatc

SEQ ID NO: 1364374 - DNA, 15 bp, Homo sapiens
gtgtcctggagatat

SEQ ID NO: 1364375 - DNA, 15 bp, Homo sapiens
tgtgtcctggagata

SEQ ID NO: 1364376 - DNA, 15 bp, Homo sapiens
ctgtgtcctggagat

SEQ ID NO: 1364377 - DNA, 15 bp, Homo sapiens
cctgtgtcctggaga

SEQ ID NO: 1364378 - DNA, 15 bp, Homo sapiens
tcctgtgtcctggag

SEQ ID NO: 1364379 - DNA, 15 bp, Homo sapiens
ttcctgtgtcctgga

SEQ ID NO: 1364380 - DNA, 15 bp, Homo sapiens
tttcctgtgtcctgg

SEQ ID NO: 1364381 - DNA, 15 bp, Homo sapiens
ttttcctgtgtcctg

SEQ ID NO: 1364382 - DNA, 15 bp, Homo sapiens
attttcctgtgtcct

SEQ ID NO: 1364383 - DNA, 15 bp, Homo sapiens
tattttcctgtgtcc

SEQ ID NO: 1364384 - DNA, 15 bp, Homo sapiens
atattttcctgtgtc

SEQ ID NO: 1364385 - DNA, 15 bp, Homo sapiens
catattttcctgtgt

SEQ ID NO: 1364386 - DNA, 15 bp, Homo sapiens
acatattttcctgtg

SEQ ID NO: 1364387 - DNA, 15 bp, Homo sapiens
tacatattttcctgt

SEQ ID NO: 1364388 - DNA, 15 bp, Homo sapiens
atacatattttcctg

SEQ ID NO: 1364389 - DNA, 15 bp, Homo sapiens
catacatattttcct

SEQ ID NO: 1364390 - DNA, 15 bp, Homo sapiens
tcatacatattttcc

SEQ ID NO: 1364391 - DNA, 15 bp, Homo sapiens
gtcatacatattttc

SEQ ID NO: 1364392 - DNA, 15 bp, Homo sapiens
agtcatacatatttt

SEQ ID NO: 1364393 - DNA, 15 bp, Homo sapiens
gagtcatacatattt

SEQ ID NO: 1364394 - DNA, 15 bp, Homo sapiens
tgagtcatacatatt

SEQ ID NO: 1364395 - DNA, 15 bp, Homo sapiens
atgagtcatacatat

SEQ ID NO: 1364396 - DNA, 15 bp, Homo sapiens
tatgagtcatacata

SEQ ID NO: 1364397 - DNA, 15 bp, Homo sapiens
ctatgagtcatacat

SEQ ID NO: 1364398 - DNA, 15 bp, Homo sapiens
actatgagtcataca

SEQ ID NO: 1364399 - DNA, 15 bp, Homo sapiens
tactatgagtcatac

SEQ ID NO: 1364400 - DNA, 15 bp, Homo sapiens
ctactatgagtcata

SEQ ID NO: 1364401 - DNA, 15 bp, Homo sapiens
actactatgagtcat

SEQ ID NO: 1364402 - DNA, 15 bp, Homo sapiens
tactactatgagtca

SEQ ID NO: 1364403 - DNA, 15 bp, Homo sapiens
gtactactatgagtc

SEQ ID NO: 1364404 - DNA, 15 bp, Homo sapiens
agtactactatgagt

SEQ ID NO: 1364405 - DNA, 15 bp, Homo sapiens
tagtactactatgag

SEQ ID NO: 1364406 - DNA, 15 bp, Homo sapiens
ctagtactactatga

SEQ ID NO: 1364407 - DNA, 15 bp, Homo sapiens
tctagtactactatg

SEQ ID NO: 1364408 - DNA, 15 bp, Homo sapiens
ttctagtactactat

SEQ ID NO: 1364409 - DNA, 15 bp, Homo sapiens
tttctagtactacta

SEQ ID NO: 1364410 - DNA, 15 bp, Homo sapiens
ttttctagtactact

SEQ ID NO: 1364411 - DNA, 15 bp, Homo sapiens
cttttctagtactac

SEQ ID NO: 1364412 - DNA, 15 bp, Homo sapiens
tcttttctagtacta

SEQ ID NO: 1364413 - DNA, 15 bp, Homo sapiens
ttcttttctagtact

SEQ ID NO: 1364414 - DNA, 15 bp, Homo sapiens
gttcttttctagtac

SEQ ID NO: 1364415 - DNA, 15 bp, Homo sapiens
agttcttttctagta

SEQ ID NO: 1364416 - DNA, 15 bp, Homo sapiens
tagttcttttctagt

SEQ ID NO: 1364417 - DNA, 15 bp, Homo sapiens
ttagttcttttctag

SEQ ID NO: 1364418 - DNA, 15 bp, Homo sapiens
tttagttcttttcta

SEQ ID NO: 1364419 - DNA, 15 bp, Homo sapiens
ttttagttcttttct

SEQ ID NO: 1364420 - DNA, 15 bp, Homo sapiens
tttttagttcttttc

SEQ ID NO: 1364421 - DNA, 15 bp, Homo sapiens
gtttttagttctttt

SEQ ID NO: 1364422 - DNA, 15 bp, Homo sapiens
tgtttttagttcttt

SEQ ID NO: 1364423 - DNA, 15 bp, Homo sapiens
gtgtttttagttctt

SEQ ID NO: 1364424 - DNA, 15 bp, Homo sapiens
agtgtttttagttct

SEQ ID NO: 1364425 - DNA, 15 bp, Homo sapiens
aagtgtttttagttc

SEQ ID NO: 1364426 - DNA, 15 bp, Homo sapiens
taagtgtttttagtt

SEQ ID NO: 1364427 - DNA, 15 bp, Homo sapiens
gtaagtgtttttagt

SEQ ID NO: 1364428 - DNA, 15 bp, Homo sapiens
tgtaagtgtttttag

SEQ ID NO: 1364429 - DNA, 15 bp, Homo sapiens
atgtaagtgttttta

SEQ ID NO: 1364430 - DNA, 15 bp, Homo sapiens
aatgtaagtgttttt

SEQ ID NO: 1364431 - DNA, 15 bp, Homo sapiens
caatgtaagtgtttt

SEQ ID NO: 1364432 - DNA, 15 bp, Homo sapiens
acaatgtaagtgttt

SEQ ID NO: 1364433 - DNA, 15 bp, Homo sapiens
aacaatgtaagtgtt

SEQ ID NO: 1364434 - DNA, 15 bp, Homo sapiens
aaacaatgtaagtgt

SEQ ID NO: 1364435 - DNA, 15 bp, Homo sapiens
gaaacaatgtaagtg

SEQ ID NO: 1364436 - DNA, 15 bp, Homo sapiens
ggaaacaatgtaagt

SEQ ID NO: 1364437 - DNA, 15 bp, Homo sapiens
aggaaacaatgtaag

SEQ ID NO: 1364438 - DNA, 15 bp, Homo sapiens
gaggaaacaatgtaa

SEQ ID NO: 1364439 - DNA, 15 bp, Homo sapiens
tgaggaaacaatgta

SEQ ID NO: 1364440 - DNA, 15 bp, Homo sapiens
gtgaggaaacaatgt

SEQ ID NO: 1364441 - DNA, 15 bp, Homo sapiens
agtgaggaaacaatg

SEQ ID NO: 1364442 - DNA, 15 bp, Homo sapiens
aagtgaggaaacaat

SEQ ID NO: 1364443 - DNA, 15 bp, Homo sapiens
taagtgaggaaacaa

SEQ ID NO: 1364444 - DNA, 15 bp, Homo sapiens
ataagtgaggaaaca

SEQ ID NO: 1364445 - DNA, 15 bp, Homo sapiens
gataagtgaggaaac

SEQ ID NO: 1364446 - DNA, 15 bp, Homo sapiens
ggataagtgaggaaa

SEQ ID NO: 1364447 - DNA, 15 bp, Homo sapiens
gggataagtgaggaa

SEQ ID NO: 1364448 - DNA, 15 bp, Homo sapiens
agggataagtgagga

SEQ ID NO: 1364449 - DNA, 15 bp, Homo sapiens
gagggataagtgagg

SEQ ID NO: 1364450 - DNA, 15 bp, Homo sapiens
agagggataagtgag

SEQ ID NO: 1364451 - DNA, 15 bp, Homo sapiens
gagagggataagtga

SEQ ID NO: 1364452 - DNA, 15 bp, Homo sapiens
agagagggataagtg

SEQ ID NO: 1364453 - DNA, 15 bp, Homo sapiens
aagagagggataagt

SEQ ID NO: 1364454 - DNA, 15 bp, Homo sapiens
taagagagggataag

SEQ ID NO: 1364455 - DNA, 15 bp, Homo sapiens
ataagagagggataa

SEQ ID NO: 1364456 - DNA, 15 bp, Homo sapiens
aataagagagggata

SEQ ID NO: 1364457 - DNA, 15 bp, Homo sapiens
gaataagagagggat

SEQ ID NO: 1364458 - DNA, 15 bp, Homo sapiens
ggaataagagaggga

SEQ ID NO: 1364459 - DNA, 15 bp, Homo sapiens
tggaataagagaggg

SEQ ID NO: 1364460 - DNA, 15 bp, Homo sapiens
ttggaataagagagg

SEQ ID NO: 1364461 - DNA, 15 bp, Homo sapiens
gttggaataagagag

SEQ ID NO: 1364462 - DNA, 15 bp, Homo sapiens
tgttggaataagaga

SEQ ID NO: 1364463 - DNA, 15 bp, Homo sapiens
ctgttggaataagag

SEQ ID NO: 1364464 - DNA, 15 bp, Homo sapiens
cctgttggaataaga

SEQ ID NO: 1364465 - DNA, 15 bp, Homo sapiens
ccctgttggaataag

SEQ ID NO: 1364466 - DNA, 15 bp, Homo sapiens
tccctgttggaataa

SEQ ID NO: 1364467 - DNA, 15 bp, Homo sapiens
ttccctgttggaata

SEQ ID NO: 1364468 - DNA, 15 bp, Homo sapiens
tttccctgttggaat

SEQ ID NO: 1364469 - DNA, 15 bp, Homo sapiens
ttttccctgttggaa

SEQ ID NO: 1364470 - DNA, 15 bp, Homo sapiens
cttttccctgttgga

SEQ ID NO: 1364471 - DNA, 15 bp, Homo sapiens
tcttttccctgttgg

SEQ ID NO: 1364472 - DNA, 15 bp, Homo sapiens
atcttttccctgttg

SEQ ID NO: 1364473 - DNA, 15 bp, Homo sapiens
aatcttttccctgtt

SEQ ID NO: 1364474 - DNA, 15 bp, Homo sapiens
aaatcttttccctgt

SEQ ID NO: 1364475 - DNA, 15 bp, Homo sapiens
gaaatcttttccctg

SEQ ID NO: 1364476 - DNA, 15 bp, Homo sapiens
ggaaatcttttccct

SEQ ID NO: 1364477 - DNA, 15 bp, Homo sapiens
gggaaatcttttccc

SEQ ID NO: 1364478 - DNA, 15 bp, Homo sapiens
agggaaatcttttcc

SEQ ID NO: 1364479 - DNA, 15 bp, Homo sapiens
tagggaaatcttttc

SEQ ID NO: 1364480 - DNA, 15 bp, Homo sapiens
ctagggaaatctttt

SEQ ID NO: 1364481 - DNA, 15 bp, Homo sapiens
cctagggaaatcttt

SEQ ID NO: 1364482 - DNA, 15 bp, Homo sapiens
acctagggaaatctt

SEQ ID NO: 1364483 - DNA, 15 bp, Homo sapiens
aacctagggaaatct

SEQ ID NO: 1364484 - DNA, 15 bp, Homo sapiens
aaacctagggaaatc

SEQ ID NO: 1364485 - DNA, 15 bp, Homo sapiens
taaacctagggaaat

SEQ ID NO: 1364486 - DNA, 15 bp, Homo sapiens
ataaacctagggaaa

SEQ ID NO: 1364487 - DNA, 15 bp, Homo sapiens
aataaacctagggaa

SEQ ID NO: 1364488 - DNA, 15 bp, Homo sapiens
aaataaacctaggga

SEQ ID NO: 1364489 - DNA, 15 bp, Homo sapiens
caaataaacctaggg

SEQ ID NO: 1364490 - DNA, 15 bp, Homo sapiens
acaaataaacctagg

SEQ ID NO: 1364491 - DNA, 15 bp, Homo sapiens
aacaaataaacctag

SEQ ID NO: 1364492 - DNA, 15 bp, Homo sapiens
aaacaaataaaccta

SEQ ID NO: 1364493 - DNA, 15 bp, Homo sapiens
caaacaaataaacct

SEQ ID NO: 1364494 - DNA, 15 bp, Homo sapiens
acaaacaaataaacc

SEQ ID NO: 1364495 - DNA, 15 bp, Homo sapiens
aacaaacaaataaac

SEQ ID NO: 1364496 - DNA, 15 bp, Homo sapiens
aaacaaacaaataaa

SEQ ID NO: 1364497 - DNA, 15 bp, Homo sapiens
aaaacaaacaaataa

SEQ ID NO: 1364498 - DNA, 15 bp, Homo sapiens
aaaaacaaacaaata

SEQ ID NO: 1364499 - DNA, 15 bp, Homo sapiens
taaaaacaaacaaat

SEQ ID NO: 1364500 - DNA, 15 bp, Homo sapiens
gtttaaaaacaaaca

SEQ ID NO: 1364501 - DNA, 15 bp, Homo sapiens
agtttaaaaacaaac

SEQ ID NO: 1364502 - DNA, 15 bp, Homo sapiens
gagtttaaaaacaaa

SEQ ID NO: 1364503 - DNA, 15 bp, Homo sapiens
tgagtttaaaaacaa

SEQ ID NO: 1364504 - DNA, 15 bp, Homo sapiens
ctgagtttaaaaaca

SEQ ID NO: 1364505 - DNA, 15 bp, Homo sapiens
tctgagtttaaaaac

SEQ ID NO: 1364506 - DNA, 15 bp, Homo sapiens
gtctgagtttaaaaa

SEQ ID NO: 1364507 - DNA, 15 bp, Homo sapiens
cgtctgagtttaaaa

SEQ ID NO: 1364508 - DNA, 15 bp, Homo sapiens
gcgtctgagtttaaa

SEQ ID NO: 1364509 - DNA, 15 bp, Homo sapiens
agcgtctgagtttaa

SEQ ID NO: 1364510 - DNA, 15 bp, Homo sapiens
tagcgtctgagttta

SEQ ID NO: 1364511 - DNA, 15 bp, Homo sapiens
ctagcgtctgagttt

SEQ ID NO: 1364512 - DNA, 15 bp, Homo sapiens
gctagcgtctgagtt

SEQ ID NO: 1364513 - DNA, 15 bp, Homo sapiens
ggctagcgtctgagt

SEQ ID NO: 1364514 - DNA, 15 bp, Homo sapiens
aggctagcgtctgag

SEQ ID NO: 1364515 - DNA, 15 bp, Homo sapiens
aaggctagcgtctga

SEQ ID NO: 1364516 - DNA, 15 bp, Homo sapiens
taaggctagcgtctg

SEQ ID NO: 1364517 - DNA, 15 bp, Homo sapiens
gtaaggctagcgtct

SEQ ID NO: 1364518 - DNA, 15 bp, Homo sapiens
ggtaaggctagcgtc

SEQ ID NO: 1364519 - DNA, 15 bp, Homo sapiens
aggtaaggctagcgt

SEQ ID NO: 1364520 - DNA, 15 bp, Homo sapiens
gaggtaaggctagcg

SEQ ID NO: 1364521 - DNA, 15 bp, Homo sapiens
agaggtaaggctagc

SEQ ID NO: 1364522 - DNA, 15 bp, Homo sapiens
aagaggtaaggctag

SEQ ID NO: 1364523 - DNA, 15 bp, Homo sapiens
aaagaggtaaggcta

SEQ ID NO: 1364524 - DNA, 15 bp, Homo sapiens
caaagaggtaaggct

SEQ ID NO: 1364525 - DNA, 15 bp, Homo sapiens
tcaaagaggtaaggc

SEQ ID NO: 1364526 - DNA, 15 bp, Homo sapiens
gtcaaagaggtaagg

SEQ ID NO: 1364527 - DNA, 15 bp, Homo sapiens
tgtcaaagaggtaag

SEQ ID NO: 1364528 - DNA, 15 bp, Homo sapiens
ctgtcaaagaggtaa

SEQ ID NO: 1364529 - DNA, 15 bp, Homo sapiens
tctgtcaaagaggta

SEQ ID NO: 1364530 - DNA, 15 bp, Homo sapiens
ctctgtcaaagaggt

SEQ ID NO: 1364531 - DNA, 15 bp, Homo sapiens
actctgtcaaagagg

SEQ ID NO: 1364532 - DNA, 15 bp, Homo sapiens
aactctgtcaaagag

SEQ ID NO: 1364533 - DNA, 15 bp, Homo sapiens
gaactctgtcaaaga

SEQ ID NO: 1364534 - DNA, 15 bp, Homo sapiens
agaactctgtcaaag

SEQ ID NO: 1364535 - DNA, 15 bp, Homo sapiens
tagaactctgtcaaa

SEQ ID NO: 1364536 - DNA, 15 bp, Homo sapiens
ttagaactctgtcaa

SEQ ID NO: 1364537 - DNA, 15 bp, Homo sapiens
gttagaactctgtca

SEQ ID NO: 1364538 - DNA, 15 bp, Homo sapiens
agttagaactctgtc

SEQ ID NO: 1364539 - DNA, 15 bp, Homo sapiens
cagttagaactctgt

SEQ ID NO: 1364540 - DNA, 15 bp, Homo sapiens
ccagttagaactctg

SEQ ID NO: 1364541 - DNA, 15 bp, Homo sapiens
accagttagaactct

SEQ ID NO: 1364542 - DNA, 15 bp, Homo sapiens
gaccagttagaactc

SEQ ID NO: 1364543 - DNA, 15 bp, Homo sapiens
ggaccagttagaact

SEQ ID NO: 1364544 - DNA, 15 bp, Homo sapiens
aggaccagttagaac

SEQ ID NO: 1364545 - DNA, 15 bp, Homo sapiens
aaggaccagttagaa

SEQ ID NO: 1364546 - DNA, 15 bp, Homo sapiens
taaggaccagttaga

SEQ ID NO: 1364547 - DNA, 15 bp, Homo sapiens
ataaggaccagttag

SEQ ID NO: 1364548 - DNA, 15 bp, Homo sapiens
tataaggaccagtta

SEQ ID NO: 1364549 - DNA, 15 bp, Homo sapiens
ttataaggaccagtt

SEQ ID NO: 1364550 - DNA, 15 bp, Homo sapiens
tttataaggaccagt

SEQ ID NO: 1364551 - DNA, 15 bp, Homo sapiens
ttttataaggaccag

SEQ ID NO: 1364552 - DNA, 15 bp, Homo sapiens
gttttataaggacca

SEQ ID NO: 1364553 - DNA, 15 bp, Homo sapiens
ggttttataaggacc

SEQ ID NO: 1364554 - DNA, 15 bp, Homo sapiens
gggttttataaggac

SEQ ID NO: 1364555 - DNA, 15 bp, Homo sapiens
tgggttttataagga

SEQ ID NO: 1364556 - DNA, 15 bp, Homo sapiens
gtgggttttataagg

SEQ ID NO: 1364557 - DNA, 15 bp, Homo sapiens
tgtgggttttataag

SEQ ID NO: 1364558 - DNA, 15 bp, Homo sapiens
gtgtgggttttataa

SEQ ID NO: 1364559 - DNA, 15 bp, Homo sapiens
tgtgtgggttttata

SEQ ID NO: 1364560 - DNA, 15 bp, Homo sapiens
ttgtgtgggttttat

SEQ ID NO: 1364561 - DNA, 15 bp, Homo sapiens
cttgtgtgggtttta

SEQ ID NO: 1364562 - DNA, 15 bp, Homo sapiens
ccttgtgtgggtttt

SEQ ID NO: 1364563 - DNA, 15 bp, Homo sapiens
cccttgtgtgggttt

SEQ ID NO: 1364564 - DNA, 15 bp, Homo sapiens
ccccttgtgtgggtt

SEQ ID NO: 1364565 - DNA, 15 bp, Homo sapiens
gccccttgtgtgggt

SEQ ID NO: 1364566 - DNA, 15 bp, Homo sapiens
ggccccttgtgtggg

SEQ ID NO: 1364567 - DNA, 15 bp, Homo sapiens
cggccccttgtgtgg

SEQ ID NO: 1364568 - DNA, 15 bp, Homo sapiens
ccggccccttgtgtg

SEQ ID NO: 1364569 - DNA, 15 bp, Homo sapiens
cccggccccttgtgt

SEQ ID NO: 1364570 - DNA, 15 bp, Homo sapiens
gcccggccccttgtg

SEQ ID NO: 1364571 - DNA, 15 bp, Homo sapiens
tgcccggccccttgt

SEQ ID NO: 1364572 - DNA, 15 bp, Homo sapiens
atgcccggccccttg

SEQ ID NO: 1364573 - DNA, 15 bp, Homo sapiens
catgcccggcccctt

SEQ ID NO: 1364574 - DNA, 15 bp, Homo sapiens
caccatgcccggccc

SEQ ID NO: 1364575 - DNA, 15 bp, Homo sapiens
ccatgagccaccatg

SEQ ID NO: 1364576 - DNA, 15 bp, Homo sapiens
gccatgagccaccat

SEQ ID NO: 1364577 - DNA, 15 bp, Homo sapiens
atgggattacagcca

SEQ ID NO: 1364578 - DNA, 15 bp, Homo sapiens
gatgggattacagcc

SEQ ID NO: 1364579 - DNA, 15 bp, Homo sapiens
tgatgggattacagc

SEQ ID NO: 1364580 - DNA, 15 bp, Homo sapiens
tctcccaaagtgatg

SEQ ID NO: 1364581 - DNA, 15 bp, Homo sapiens
gtctcccaaagtgat

SEQ ID NO: 1364582 - DNA, 15 bp, Homo sapiens
ggtctcccaaagtga

SEQ ID NO: 1364583 - DNA, 15 bp, Homo sapiens
ccgcccgcctcggtc

SEQ ID NO: 1364584 - DNA, 15 bp, Homo sapiens
tccgcccgcctcggt

SEQ ID NO: 1364585 - DNA, 15 bp, Homo sapiens
gtgacctcaagtgat

SEQ ID NO: 1364586 - DNA, 15 bp, Homo sapiens
agtgacctcaagtga

SEQ ID NO: 1364587 - DNA, 15 bp, Homo sapiens
aagtgacctcaagtg

SEQ ID NO: 1364588 - DNA, 15 bp, Homo sapiens
caagtgacctcaagt

SEQ ID NO: 1364589 - DNA, 15 bp, Homo sapiens
tcaagtgacctcaag

SEQ ID NO: 1364590 - DNA, 15 bp, Homo sapiens
ctcaagtgacctcaa

SEQ ID NO: 1364591 - DNA, 15 bp, Homo sapiens
cctcaagtgacctca

SEQ ID NO: 1364592 - DNA, 15 bp, Homo sapiens
acctcaagtgacctc

SEQ ID NO: 1364593 - DNA, 15 bp, Homo sapiens
aacctcaagtgacct

SEQ ID NO: 1364594 - DNA, 15 bp, Homo sapiens
gaacctcaagtgacc

SEQ ID NO: 1364595 - DNA, 15 bp, Homo sapiens
cgaacctcaagtgac

SEQ ID NO: 1364596 - DNA, 15 bp, Homo sapiens
tcgaacctcaagtga

SEQ ID NO: 1364597 - DNA, 15 bp, Homo sapiens
ctcgaacctcaagtg

SEQ ID NO: 1364598 - DNA, 15 bp, Homo sapiens
tctcgaacctcaagt

SEQ ID NO: 1364599 - DNA, 15 bp, Homo sapiens
gtctcgaacctcaag

SEQ ID NO: 1364600 - DNA, 15 bp, Homo sapiens
ggtctcgaacctcaa

SEQ ID NO: 1364601 - DNA, 15 bp, Homo sapiens
tggtctcgaacctca

SEQ ID NO: 1364602 - DNA, 15 bp, Homo sapiens
ttggtctcgaacctc

SEQ ID NO: 1364603 - DNA, 15 bp, Homo sapiens
gttggtctcgaacct

SEQ ID NO: 1364604 - DNA, 15 bp, Homo sapiens
agttggtctcgaacc

SEQ ID NO: 1364605 - DNA, 15 bp, Homo sapiens
aagttggtctcgaac

SEQ ID NO: 1364606 - DNA, 15 bp, Homo sapiens
caagttggtctcgaa

SEQ ID NO: 1364607 - DNA, 15 bp, Homo sapiens
tcaagttggtctcga

SEQ ID NO: 1364608 - DNA, 15 bp, Homo sapiens
gtcaagttggtctcg

SEQ ID NO: 1364609 - DNA, 15 bp, Homo sapiens
ggtcaagttggtctc

SEQ ID NO: 1364610 - DNA, 15 bp, Homo sapiens
tggtcaagttggtct

SEQ ID NO: 1364611 - DNA, 15 bp, Homo sapiens
ctggtcaagttggtc

SEQ ID NO: 1364612 - DNA, 15 bp, Homo sapiens
gctggtcaagttggt

SEQ ID NO: 1364613 - DNA, 15 bp, Homo sapiens
tgctggtcaagttgg

SEQ ID NO: 1364614 - DNA, 15 bp, Homo sapiens
atgctggtcaagttg

SEQ ID NO: 1364615 - DNA, 15 bp, Homo sapiens
catgctggtcaagtt

SEQ ID NO: 1364616 - DNA, 15 bp, Homo sapiens
ccatgctggtcaagt

SEQ ID NO: 1364617 - DNA, 15 bp, Homo sapiens
accatgctggtcaag

SEQ ID NO: 1364618 - DNA, 15 bp, Homo sapiens
caccatgctggtcaa

SEQ ID NO: 1364619 - DNA, 15 bp, Homo sapiens
tcaccatgctggtca

SEQ ID NO: 1364620 - DNA, 15 bp, Homo sapiens
ttcaccatgctggtc

SEQ ID NO: 1364621 - DNA, 15 bp, Homo sapiens
tttcaccatgctggt

SEQ ID NO: 1364622 - DNA, 15 bp, Homo sapiens
aacggggtttcacca

SEQ ID NO: 1364623 - DNA, 15 bp, Homo sapiens
aaacggggtttcacc

SEQ ID NO: 1364624 - DNA, 15 bp, Homo sapiens
gaaacggggtttcac

SEQ ID NO: 1364625 - DNA, 15 bp, Homo sapiens
agaaacggggtttca

SEQ ID NO: 1364626 - DNA, 15 bp, Homo sapiens
acttggctaattttt

SEQ ID NO: 1364627 - DNA, 15 bp, Homo sapiens
cacttggctaatttt

SEQ ID NO: 1364628 - DNA, 15 bp, Homo sapiens
acacttggctaattt

SEQ ID NO: 1364629 - DNA, 15 bp, Homo sapiens
cacacttggctaatt

SEQ ID NO: 1364630 - DNA, 15 bp, Homo sapiens
ccacacttggctaat

SEQ ID NO: 1364631 - DNA, 15 bp, Homo sapiens
accacacttggctaa

SEQ ID NO: 1364632 - DNA, 15 bp, Homo sapiens
caccacacttggcta

SEQ ID NO: 1364633 - DNA, 15 bp, Homo sapiens
ccaccacacttggct

SEQ ID NO: 1364634 - DNA, 15 bp, Homo sapiens
accaccacacttggc

SEQ ID NO: 1364635 - DNA, 15 bp, Homo sapiens
caccaccacacttgg

SEQ ID NO: 1364636 - DNA, 15 bp, Homo sapiens
gcaccaccacacttg

SEQ ID NO: 1364637 - DNA, 15 bp, Homo sapiens
tgcaccaccacactt

SEQ ID NO: 1364638 - DNA, 15 bp, Homo sapiens
gtgcaccaccacact

SEQ ID NO: 1364639 - DNA, 15 bp, Homo sapiens
agtgtgcaccaccac

SEQ ID NO: 1364640 - DNA, 15 bp, Homo sapiens
cagtgtgcaccacca

SEQ ID NO: 1364641 - DNA, 15 bp, Homo sapiens
acagtgtgcaccacc

SEQ ID NO: 1364642 - DNA, 15 bp, Homo sapiens
tacagtgtgcaccac

SEQ ID NO: 1364643 - DNA, 15 bp, Homo sapiens
ttacagtgtgcacca

SEQ ID NO: 1364644 - DNA, 15 bp, Homo sapiens
attacagtgtgcacc

SEQ ID NO: 1364645 - DNA, 15 bp, Homo sapiens
gattacagtgtgcac

SEQ ID NO: 1364646 - DNA, 15 bp, Homo sapiens
ggattacagtgtgca

SEQ ID NO: 1364647 - DNA, 15 bp, Homo sapiens
gggattacagtgtgc

SEQ ID NO: 1364648 - DNA, 15 bp, Homo sapiens
tgggattacagtgtg

SEQ ID NO: 1364649 - DNA, 15 bp, Homo sapiens
ctgggattacagtgt

SEQ ID NO: 1364650 - DNA, 15 bp, Homo sapiens
gctgggattacagtg

SEQ ID NO: 1364651 - DNA, 15 bp, Homo sapiens
ggctgggattacagt

SEQ ID NO: 1364652 - DNA, 15 bp, Homo sapiens
tggctgggattacag

SEQ ID NO: 1364653 - DNA, 15 bp, Homo sapiens
gtggctgggattaca

SEQ ID NO: 1364654 - DNA, 15 bp, Homo sapiens
agtggctgggattac

SEQ ID NO: 1364655 - DNA, 15 bp, Homo sapiens
gagtggctgggatta

SEQ ID NO: 1364656 - DNA, 15 bp, Homo sapiens
tgagtggctgggatt

SEQ ID NO: 1364657 - DNA, 15 bp, Homo sapiens
ctgagtggctgggat

SEQ ID NO: 1364658 - DNA, 15 bp, Homo sapiens
cctgagtggctggga

SEQ ID NO: 1364659 - DNA, 15 bp, Homo sapiens
tcctgagtggctggg

SEQ ID NO: 1364660 - DNA, 15 bp, Homo sapiens
ctcctgagtggctgg

SEQ ID NO: 1364661 - DNA, 15 bp, Homo sapiens
cctcctgagtggctg

SEQ ID NO: 1364662 - DNA, 15 bp, Homo sapiens
gcctcctgagtggct

SEQ ID NO: 1364663 - DNA, 15 bp, Homo sapiens
agcctcctgagtggc

SEQ ID NO: 1364664 - DNA, 15 bp, Homo sapiens
cagcctcctgagtgg

SEQ ID NO: 1364665 - DNA, 15 bp, Homo sapiens
tcagcctcctgagtg

SEQ ID NO: 1364666 - DNA, 15 bp, Homo sapiens
agattcaagcgattc

SEQ ID NO: 1364667 - DNA, 15 bp, Homo sapiens
cagattcaagcgatt

SEQ ID NO: 1364668 - DNA, 15 bp, Homo sapiens
ccagattcaagcgat

SEQ ID NO: 1364669 - DNA, 15 bp, Homo sapiens
cccagattcaagcga

SEQ ID NO: 1364670 - DNA, 15 bp, Homo sapiens
tcccagattcaagcg

SEQ ID NO: 1364671 - DNA, 15 bp, Homo sapiens
cgcctcccagattca

SEQ ID NO: 1364672 - DNA, 15 bp, Homo sapiens
ccgcctcccagattc

SEQ ID NO: 1364673 - DNA, 15 bp, Homo sapiens
tccgcctcccagatt

SEQ ID NO: 1364674 - DNA, 15 bp, Homo sapiens
ctccgcctcccagat

SEQ ID NO: 1364675 - DNA, 15 bp, Homo sapiens
cctccgcctcccaga

SEQ ID NO: 1364676 - DNA, 15 bp, Homo sapiens
actcaccgcaacctc

SEQ ID NO: 1364677 - DNA, 15 bp, Homo sapiens
gactcaccgcaacct

SEQ ID NO: 1364678 - DNA, 15 bp, Homo sapiens
tgactcaccgcaacc

SEQ ID NO: 1364679 - DNA, 15 bp, Homo sapiens
gtgactcaccgcaac

SEQ ID NO: 1364680 - DNA, 15 bp, Homo sapiens
cgtgactcaccgcaa

SEQ ID NO: 1364681 - DNA, 15 bp, Homo sapiens
tcgtgactcaccgca

SEQ ID NO: 1364682 - DNA, 15 bp, Homo sapiens
atcgtgactcaccgc

SEQ ID NO: 1364683 - DNA, 15 bp, Homo sapiens
gatcgtgactcaccg

SEQ ID NO: 1364684 - DNA, 15 bp, Homo sapiens
ggatcgtgactcacc

SEQ ID NO: 1364685 - DNA, 15 bp, Homo sapiens
aggatcgtgactcac

SEQ ID NO: 1364686 - DNA, 15 bp, Homo sapiens
caggatcgtgactca

SEQ ID NO: 1364687 - DNA, 15 bp, Homo sapiens
gcaggatcgtgactc

SEQ ID NO: 1364688 - DNA, 15 bp, Homo sapiens
ggcaggatcgtgact

SEQ ID NO: 1364689 - DNA, 15 bp, Homo sapiens
tggcaggatcgtgac

SEQ ID NO: 1364690 - DNA, 15 bp, Homo sapiens
gtggcaggatcgtga

SEQ ID NO: 1364691 - DNA, 15 bp, Homo sapiens
tgtggcaggatcgtg

SEQ ID NO: 1364692 - DNA, 15 bp, Homo sapiens
ctgtggcaggatcgt

SEQ ID NO: 1364693 - DNA, 15 bp, Homo sapiens
gctgtggcaggatcg

SEQ ID NO: 1364694 - DNA, 15 bp, Homo sapiens
tgctgtggcaggatc

SEQ ID NO: 1364695 - DNA, 15 bp, Homo sapiens
gtgctgtggcaggat

SEQ ID NO: 1364696 - DNA, 15 bp, Homo sapiens
agtgctgtggcagga

SEQ ID NO: 1364697 - DNA, 15 bp, Homo sapiens
gagtgctgtggcagg

SEQ ID NO: 1364698 - DNA, 15 bp, Homo sapiens
ggagtgctgtggcag

SEQ ID NO: 1364699 - DNA, 15 bp, Homo sapiens
tggagtgctgtggca

SEQ ID NO: 1364700 - DNA, 15 bp, Homo sapiens
ctggagtgctgtggc

SEQ ID NO: 1364701 - DNA, 15 bp, Homo sapiens
ggctggagtgctgtg

SEQ ID NO: 1364702 - DNA, 15 bp, Homo sapiens
aggctggagtgctgt

SEQ ID NO: 1364703 - DNA, 15 bp, Homo sapiens
caggctggagtgctg

SEQ ID NO: 1364704 - DNA, 15 bp, Homo sapiens
gcaggctggagtgct

SEQ ID NO: 1364705 - DNA, 15 bp, Homo sapiens
cgcaggctggagtgc

SEQ ID NO: 1364706 - DNA, 15 bp, Homo sapiens
acgcaggctggagtg

SEQ ID NO: 1364707 - DNA, 15 bp, Homo sapiens
cacgcaggctggagt

SEQ ID NO: 1364708 - DNA, 15 bp, Homo sapiens
tcacgcaggctggag

SEQ ID NO: 1364709 - DNA, 15 bp, Homo sapiens
gtcacgcaggctgga

SEQ ID NO: 1364710 - DNA, 15 bp, Homo sapiens
tgtcacgcaggctgg

SEQ ID NO: 1364711 - DNA, 15 bp, Homo sapiens
ctgtcacgcaggctg

SEQ ID NO: 1364712 - DNA, 15 bp, Homo sapiens
tctgtcacgcaggct

SEQ ID NO: 1364713 - DNA, 15 bp, Homo sapiens
ctctgtcacgcaggc

SEQ ID NO: 1364714 - DNA, 15 bp, Homo sapiens
gctctgtcacgcagg

SEQ ID NO: 1364715 - DNA, 15 bp, Homo sapiens
cgctctgtcacgcag

SEQ ID NO: 1364716 - DNA, 15 bp, Homo sapiens
tcgctctgtcacgca

SEQ ID NO: 1364717 - DNA, 15 bp, Homo sapiens
ctcgctctgtcacgc

SEQ ID NO: 1364718 - DNA, 15 bp, Homo sapiens
tctcgctctgtcacg

SEQ ID NO: 1364719 - DNA, 15 bp, Homo sapiens
agttttttgagacag

SEQ ID NO: 1364720 - DNA, 15 bp, Homo sapiens
cagttttttgagaca

SEQ ID NO: 1364721 - DNA, 15 bp, Homo sapiens
tcagttttttgagac

SEQ ID NO: 1364722 - DNA, 15 bp, Homo sapiens
ttcagttttttgaga

SEQ ID NO: 1364723 - DNA, 15 bp, Homo sapiens
tttcagttttttgag

SEQ ID NO: 1364724 - DNA, 15 bp, Homo sapiens
ttttcagttttttga

SEQ ID NO: 1364725 - DNA, 15 bp, Homo sapiens
gttttcagttttttg

SEQ ID NO: 1364726 - DNA, 15 bp, Homo sapiens
tgttttcagtttttt

SEQ ID NO: 1364727 - DNA, 15 bp, Homo sapiens
ttgttttcagttttt

SEQ ID NO: 1364728 - DNA, 15 bp, Homo sapiens
tttgttttcagtttt

SEQ ID NO: 1364729 - DNA, 15 bp, Homo sapiens
ttttgttttcagttt

SEQ ID NO: 1364730 - DNA, 15 bp, Homo sapiens
tttttgttttcagtt

SEQ ID NO: 1364731 - DNA, 15 bp, Homo sapiens
ttttttgttttcagt

SEQ ID NO: 1364732 - DNA, 15 bp, Homo sapiens
gttttttgttttcag

SEQ ID NO: 1364733 - DNA, 15 bp, Homo sapiens
ggttttttgttttca

SEQ ID NO: 1364734 - DNA, 15 bp, Homo sapiens
gggttttttgttttc

SEQ ID NO: 1364735 - DNA, 15 bp, Homo sapiens
ggggttttttgtttt

SEQ ID NO: 1364736 - DNA, 15 bp, Homo sapiens
gggggttttttgttt

SEQ ID NO: 1364737 - DNA, 15 bp, Homo sapiens
tgggggttttttgtt

SEQ ID NO: 1364738 - DNA, 15 bp, Homo sapiens
gtgggggttttttgt

SEQ ID NO: 1364739 - DNA, 15 bp, Homo sapiens
tgtgggggttttttg

SEQ ID NO: 1364740 - DNA, 15 bp, Homo sapiens
gtgtgggggtttttt

SEQ ID NO: 1364741 - DNA, 15 bp, Homo sapiens
tgtgtgggggttttt

SEQ ID NO: 1364742 - DNA, 15 bp, Homo sapiens
ttgtgtgggggtttt

SEQ ID NO: 1364743 - DNA, 15 bp, Homo sapiens
tttgtgtgggggttt

SEQ ID NO: 1364744 - DNA, 15 bp, Homo sapiens
gtttgtgtgggggtt

SEQ ID NO: 1364745 - DNA, 15 bp, Homo sapiens
tgtttgtgtgggggt

SEQ ID NO: 1364746 - DNA, 15 bp, Homo sapiens
ttgtttgtgtggggg

SEQ ID NO: 1364747 - DNA, 15 bp, Homo sapiens
tttgtttgtgtgggg

SEQ ID NO: 1364748 - DNA, 15 bp, Homo sapiens
ttttgtttgtgtggg

SEQ ID NO: 1364749 - DNA, 15 bp, Homo sapiens
attttgtttgtgtgg

SEQ ID NO: 1364750 - DNA, 15 bp, Homo sapiens
gattttgtttgtgtg

SEQ ID NO: 1364751 - DNA, 15 bp, Homo sapiens
ggattttgtttgtgt

SEQ ID NO: 1364752 - DNA, 15 bp, Homo sapiens
gggattttgtttgtg

SEQ ID NO: 1364753 - DNA, 15 bp, Homo sapiens
tgggattttgtttgt

SEQ ID NO: 1364754 - DNA, 15 bp, Homo sapiens
ctgggattttgtttg

SEQ ID NO: 1364755 - DNA, 15 bp, Homo sapiens
gctgggattttgttt

SEQ ID NO: 1364756 - DNA, 15 bp, Homo sapiens
ggctgggattttgtt

SEQ ID NO: 1364757 - DNA, 15 bp, Homo sapiens
tggctgggattttgt

SEQ ID NO: 1364758 - DNA, 15 bp, Homo sapiens
gtggctgggattttg

SEQ ID NO: 1364759 - DNA, 15 bp, Homo sapiens
agtggctgggatttt

SEQ ID NO: 1364760 - DNA, 15 bp, Homo sapiens
tagtggctgggattt

SEQ ID NO: 1364761 - DNA, 15 bp, Homo sapiens
ctagtggctgggatt

SEQ ID NO: 1364762 - DNA, 15 bp, Homo sapiens
tctagtggctgggat

SEQ ID NO: 1364763 - DNA, 15 bp, Homo sapiens
ttctagtggctggga

SEQ ID NO: 1364764 - DNA, 15 bp, Homo sapiens
tttctagtggctggg

SEQ ID NO: 1364765 - DNA, 15 bp, Homo sapiens
ttttctagtggctgg

SEQ ID NO: 1364766 - DNA, 15 bp, Homo sapiens
tttttctagtggctg

SEQ ID NO: 1364767 - DNA, 15 bp, Homo sapiens
ctttttctagtggct

SEQ ID NO: 1364768 - DNA, 15 bp, Homo sapiens
actttttctagtggc

SEQ ID NO: 1364769 - DNA, 15 bp, Homo sapiens
tactttttctagtgg

SEQ ID NO: 1364770 - DNA, 15 bp, Homo sapiens
ctactttttctagtg

SEQ ID NO: 1364771 - DNA, 15 bp, Homo sapiens
gctactttttctagt

SEQ ID NO: 1364772 - DNA, 15 bp, Homo sapiens
agctactttttctag

SEQ ID NO: 1364773 - DNA, 15 bp, Homo sapiens
aagctactttttcta

SEQ ID NO: 1364774 - DNA, 15 bp, Homo sapiens
gaagctactttttct

SEQ ID NO: 1364775 - DNA, 15 bp, Homo sapiens
ggaagctactttttc

SEQ ID NO: 1364776 - DNA, 15 bp, Homo sapiens
aggaagctacttttt

SEQ ID NO: 1364777 - DNA, 15 bp, Homo sapiens
aaggaagctactttt

SEQ ID NO: 1364778 - DNA, 15 bp, Homo sapiens
gaaggaagctacttt

SEQ ID NO: 1364779 - DNA, 15 bp, Homo sapiens
agaaggaagctactt

SEQ ID NO: 1364780 - DNA, 15 bp, Homo sapiens
aagaaggaagctact

SEQ ID NO: 1364781 - DNA, 15 bp, Homo sapiens
gaagaaggaagctac

SEQ ID NO: 1364782 - DNA, 15 bp, Homo sapiens
tgaagaaggaagcta

SEQ ID NO: 1364783 - DNA, 15 bp, Homo sapiens
atgaagaaggaagct

SEQ ID NO: 1364784 - DNA, 15 bp, Homo sapiens
aatgaagaaggaagc

SEQ ID NO: 1364785 - DNA, 15 bp, Homo sapiens
taatgaagaaggaag

SEQ ID NO: 1364786 - DNA, 15 bp, Homo sapiens
gtaatgaagaaggaa

SEQ ID NO: 1364787 - DNA, 15 bp, Homo sapiens
ggtaatgaagaagga

SEQ ID NO: 1364788 - DNA, 15 bp, Homo sapiens
gggtaatgaagaagg

SEQ ID NO: 1364789 - DNA, 15 bp, Homo sapiens
agggtaatgaagaag

SEQ ID NO: 1364790 - DNA, 15 bp, Homo sapiens
tagggtaatgaagaa

SEQ ID NO: 1364791 - DNA, 15 bp, Homo sapiens
atagggtaatgaaga

SEQ ID NO: 1364792 - DNA, 15 bp, Homo sapiens
gatagggtaatgaag

SEQ ID NO: 1364793 - DNA, 15 bp, Homo sapiens
tgatagggtaatgaa

SEQ ID NO: 1364794 - DNA, 15 bp, Homo sapiens
gtgatagggtaatga

SEQ ID NO: 1364795 - DNA, 15 bp, Homo sapiens
agtgatagggtaatg

SEQ ID NO: 1364796 - DNA, 15 bp, Homo sapiens
aagtgatagggtaat

SEQ ID NO: 1364797 - DNA, 15 bp, Homo sapiens
caagtgatagggtaa

SEQ ID NO: 1364798 - DNA, 15 bp, Homo sapiens
ccaagtgatagggta

SEQ ID NO: 1364799 - DNA, 15 bp, Homo sapiens
tccaagtgatagggt

SEQ ID NO: 1364800 - DNA, 15 bp, Homo sapiens
gtccaagtgataggg

SEQ ID NO: 1364801 - DNA, 15 bp, Homo sapiens
tgtccaagtgatagg

SEQ ID NO: 1364802 - DNA, 15 bp, Homo sapiens
ttgtccaagtgatag

SEQ ID NO: 1364803 - DNA, 15 bp, Homo sapiens
attgtccaagtgata

SEQ ID NO: 1364804 - DNA, 15 bp, Homo sapiens
aattgtccaagtgat

SEQ ID NO: 1364805 - DNA, 15 bp, Homo sapiens
taattgtccaagtga

SEQ ID NO: 1364806 - DNA, 15 bp, Homo sapiens
ataattgtccaagtg

SEQ ID NO: 1364807 - DNA, 15 bp, Homo sapiens
gataattgtccaagt

SEQ ID NO: 1364808 - DNA, 15 bp, Homo sapiens
agataattgtccaag

SEQ ID NO: 1364809 - DNA, 15 bp, Homo sapiens
gagataattgtccaa

SEQ ID NO: 1364810 - DNA, 15 bp, Homo sapiens
ggagataattgtcca

SEQ ID NO: 1364811 - DNA, 15 bp, Homo sapiens
aggagataattgtcc

SEQ ID NO: 1364812 - DNA, 15 bp, Homo sapiens
gaggagataattgtc

SEQ ID NO: 1364813 - DNA, 15 bp, Homo sapiens
agaggagataattgt

SEQ ID NO: 1364814 - DNA, 15 bp, Homo sapiens
tagaggagataattg

SEQ ID NO: 1364815 - DNA, 15 bp, Homo sapiens
ttagaggagataatt

SEQ ID NO: 1364816 - DNA, 15 bp, Homo sapiens
tttagaggagataat

SEQ ID NO: 1364817 - DNA, 15 bp, Homo sapiens
ttttagaggagataa

SEQ ID NO: 1364818 - DNA, 15 bp, Homo sapiens
tttttagaggagata

SEQ ID NO: 1364819 - DNA, 15 bp, Homo sapiens
atttttagaggagat

SEQ ID NO: 1364820 - DNA, 15 bp, Homo sapiens
aatttttagaggaga

SEQ ID NO: 1364821 - DNA, 15 bp, Homo sapiens
gaatttttagaggag

SEQ ID NO: 1364822 - DNA, 15 bp, Homo sapiens
tgaatttttagagga

SEQ ID NO: 1364823 - DNA, 15 bp, Homo sapiens
atgaatttttagagg

SEQ ID NO: 1364824 - DNA, 15 bp, Homo sapiens
aatgaatttttagag

SEQ ID NO: 1364825 - DNA, 15 bp, Homo sapiens
aaatgaatttttaga

SEQ ID NO: 1364826 - DNA, 15 bp, Homo sapiens
gaaatgaatttttag

SEQ ID NO: 1364827 - DNA, 15 bp, Homo sapiens
ggaaatgaattttta

SEQ ID NO: 1364828 - DNA, 15 bp, Homo sapiens
aggaaatgaattttt

SEQ ID NO: 1364829 - DNA, 15 bp, Homo sapiens
taggaaatgaatttt

SEQ ID NO: 1364830 - DNA, 15 bp, Homo sapiens
ctaggaaatgaattt

SEQ ID NO: 1364831 - DNA, 15 bp, Homo sapiens
cctaggaaatgaatt

SEQ ID NO: 1364832 - DNA, 15 bp, Homo sapiens
gcctaggaaatgaat

SEQ ID NO: 1364833 - DNA, 15 bp, Homo sapiens
tgcctaggaaatgaa

SEQ ID NO: 1364834 - DNA, 15 bp, Homo sapiens
gtgcctaggaaatga

SEQ ID NO: 1364835 - DNA, 15 bp, Homo sapiens
cgtgcctaggaaatg

SEQ ID NO: 1364836 - DNA, 15 bp, Homo sapiens
ccgtgcctaggaaat

SEQ ID NO: 1364837 - DNA, 15 bp, Homo sapiens
tccgtgcctaggaaa

SEQ ID NO: 1364838 - DNA, 15 bp, Homo sapiens
ttccgtgcctaggaa

SEQ ID NO: 1364839 - DNA, 15 bp, Homo sapiens
cttccgtgcctagga

SEQ ID NO: 1364840 - DNA, 15 bp, Homo sapiens
tcttccgtgcctagg

SEQ ID NO: 1364841 - DNA, 15 bp, Homo sapiens
atcttccgtgcctag

SEQ ID NO: 1364842 - DNA, 15 bp, Homo sapiens
aatcttccgtgccta

SEQ ID NO: 1364843 - DNA, 15 bp, Homo sapiens
taatcttccgtgcct

SEQ ID NO: 1364844 - DNA, 15 bp, Homo sapiens
ctaatcttccgtgcc

SEQ ID NO: 1364845 - DNA, 15 bp, Homo sapiens
cctaatcttccgtgc

SEQ ID NO: 1364846 - DNA, 15 bp, Homo sapiens
gcctaatcttccgtg

SEQ ID NO: 1364847 - DNA, 15 bp, Homo sapiens
tgcctaatcttccgt

SEQ ID NO: 1364848 - DNA, 15 bp, Homo sapiens
ttgcctaatcttccg

SEQ ID NO: 1364849 - DNA, 15 bp, Homo sapiens
tttgcctaatcttcc

SEQ ID NO: 1364850 - DNA, 15 bp, Homo sapiens
ttttgcctaatcttc

SEQ ID NO: 1364851 - DNA, 15 bp, Homo sapiens
attttgcctaatctt

SEQ ID NO: 1364852 - DNA, 15 bp, Homo sapiens
cattttgcctaatct

SEQ ID NO: 1364853 - DNA, 15 bp, Homo sapiens
acattttgcctaatc

SEQ ID NO: 1364854 - DNA, 15 bp, Homo sapiens
cacattttgcctaat

SEQ ID NO: 1364855 - DNA, 15 bp, Homo sapiens
gcacattttgcctaa

SEQ ID NO: 1364856 - DNA, 15 bp, Homo sapiens
agcacattttgccta

SEQ ID NO: 1364857 - DNA, 15 bp, Homo sapiens
aagcacattttgcct

SEQ ID NO: 1364858 - DNA, 15 bp, Homo sapiens
taagcacattttgcc

SEQ ID NO: 1364859 - DNA, 15 bp, Homo sapiens
ataagcacattttgc

SEQ ID NO: 1364860 - DNA, 15 bp, Homo sapiens
aataagcacattttg

SEQ ID NO: 1364861 - DNA, 15 bp, Homo sapiens
caataagcacatttt

SEQ ID NO: 1364862 - DNA, 15 bp, Homo sapiens
ccaataagcacattt

SEQ ID NO: 1364863 - DNA, 15 bp, Homo sapiens
cccaataagcacatt

SEQ ID NO: 1364864 - DNA, 15 bp, Homo sapiens
gcccaataagcacat

SEQ ID NO: 1364865 - DNA, 15 bp, Homo sapiens
tgcccaataagcaca

SEQ ID NO: 1364866 - DNA, 15 bp, Homo sapiens
ctgcccaataagcac

SEQ ID NO: 1364867 - DNA, 15 bp, Homo sapiens
gctgcccaataagca

SEQ ID NO: 1364868 - DNA, 15 bp, Homo sapiens
agctgcccaataagc

SEQ ID NO: 1364869 - DNA, 15 bp, Homo sapiens
tagctgcccaataag

SEQ ID NO: 1364870 - DNA, 15 bp, Homo sapiens
ctagctgcccaataa

SEQ ID NO: 1364871 - DNA, 15 bp, Homo sapiens
cctagctgcccaata

SEQ ID NO: 1364872 - DNA, 15 bp, Homo sapiens
tcctagctgcccaat

SEQ ID NO: 1364873 - DNA, 15 bp, Homo sapiens
gtcctagctgcccaa

SEQ ID NO: 1364874 - DNA, 15 bp, Homo sapiens
ggtcctagctgccca

SEQ ID NO: 1364875 - DNA, 15 bp, Homo sapiens
aggtcctagctgccc

SEQ ID NO: 1364876 - DNA, 15 bp, Homo sapiens
gaggtcctagctgcc

SEQ ID NO: 1364877 - DNA, 15 bp, Homo sapiens
tgaggtcctagctgc

SEQ ID NO: 1364878 - DNA, 15 bp, Homo sapiens
ctgaggtcctagctg

SEQ ID NO: 1364879 - DNA, 15 bp, Homo sapiens
tctgaggtcctagct

SEQ ID NO: 1364880 - DNA, 15 bp, Homo sapiens
ttctgaggtcctagc

SEQ ID NO: 1364881 - DNA, 15 bp, Homo sapiens
attctgaggtcctag

SEQ ID NO: 1364882 - DNA, 15 bp, Homo sapiens
gattctgaggtccta

SEQ ID NO: 1364883 - DNA, 15 bp, Homo sapiens
ggattctgaggtcct

SEQ ID NO: 1364884 - DNA, 15 bp, Homo sapiens
tggattctgaggtcc

SEQ ID NO: 1364885 - DNA, 15 bp, Homo sapiens
atggattctgaggtc

SEQ ID NO: 1364886 - DNA, 15 bp, Homo sapiens
catggattctgaggt

SEQ ID NO: 1364887 - DNA, 15 bp, Homo sapiens
tcatggattctgagg

SEQ ID NO: 1364888 - DNA, 15 bp, Homo sapiens
atcatggattctgag

SEQ ID NO: 1364889 - DNA, 15 bp, Homo sapiens
tatcatggattctga

SEQ ID NO: 1364890 - DNA, 15 bp, Homo sapiens
ttatcatggattctg

SEQ ID NO: 1364891 - DNA, 15 bp, Homo sapiens
attatcatggattct

SEQ ID NO: 1364892 - DNA, 15 bp, Homo sapiens
tattatcatggattc

SEQ ID NO: 1364893 - DNA, 15 bp, Homo sapiens
atattatcatggatt

SEQ ID NO: 1364894 - DNA, 15 bp, Homo sapiens
catattatcatggat

SEQ ID NO: 1364895 - DNA, 15 bp, Homo sapiens
tcatattatcatgga

SEQ ID NO: 1364896 - DNA, 15 bp, Homo sapiens
atcatattatcatgg

SEQ ID NO: 1364897 - DNA, 15 bp, Homo sapiens
tatcatattatcatg

SEQ ID NO: 1364898 - DNA, 15 bp, Homo sapiens
ttatcatattatcat

SEQ ID NO: 1364899 - DNA, 15 bp, Homo sapiens
attatcatattatca

SEQ ID NO: 1364900 - DNA, 15 bp, Homo sapiens
aattatcatattatc

SEQ ID NO: 1364901 - DNA, 15 bp, Homo sapiens
taattatcatattat

SEQ ID NO: 1364902 - DNA, 15 bp, Homo sapiens
ctaattatcatatta

SEQ ID NO: 1364903 - DNA, 15 bp, Homo sapiens
gctaattatcatatt

SEQ ID NO: 1364904 - DNA, 15 bp, Homo sapiens
tgctaattatcatat

SEQ ID NO: 1364905 - DNA, 15 bp, Homo sapiens
atgctaattatcata

SEQ ID NO: 1364906 - DNA, 15 bp, Homo sapiens
gatgctaattatcat

SEQ ID NO: 1364907 - DNA, 15 bp, Homo sapiens
agatgctaattatca

SEQ ID NO: 1364908 - DNA, 15 bp, Homo sapiens
cagatgctaattatc

SEQ ID NO: 1364909 - DNA, 15 bp, Homo sapiens
acagatgctaattat

SEQ ID NO: 1364910 - DNA, 15 bp, Homo sapiens
tacagatgctaatta

SEQ ID NO: 1364911 - DNA, 15 bp, Homo sapiens
atacagatgctaatt

SEQ ID NO: 1364912 - DNA, 15 bp, Homo sapiens
tatacagatgctaat

SEQ ID NO: 1364913 - DNA, 15 bp, Homo sapiens
gtatacagatgctaa

SEQ ID NO: 1364914 - DNA, 15 bp, Homo sapiens
ggtatacagatgcta

SEQ ID NO: 1364915 - DNA, 15 bp, Homo sapiens
tggtatacagatgct

SEQ ID NO: 1364916 - DNA, 15 bp, Homo sapiens
gtggtatacagatgc

SEQ ID NO: 1364917 - DNA, 15 bp, Homo sapiens
agtggtatacagatg

SEQ ID NO: 1364918 - DNA, 15 bp, Homo sapiens
aagtggtatacagat

SEQ ID NO: 1364919 - DNA, 15 bp, Homo sapiens
caagtggtatacaga

SEQ ID NO: 1364920 - DNA, 15 bp, Homo sapiens
ccaagtggtatacag

SEQ ID NO: 1364921 - DNA, 15 bp, Homo sapiens
accaagtggtataca

SEQ ID NO: 1364922 - DNA, 15 bp, Homo sapiens
aaccaagtggtatac

SEQ ID NO: 1364923 - DNA, 15 bp, Homo sapiens
aaaccaagtggtata

SEQ ID NO: 1364924 - DNA, 15 bp, Homo sapiens
taaaccaagtggtat

SEQ ID NO: 1364925 - DNA, 15 bp, Homo sapiens
gtaaaccaagtggta

SEQ ID NO: 1364926 - DNA, 15 bp, Homo sapiens
tgtaaaccaagtggt

SEQ ID NO: 1364927 - DNA, 15 bp, Homo sapiens
atgtaaaccaagtgg

SEQ ID NO: 1364928 - DNA, 15 bp, Homo sapiens
tatgtaaaccaagtg

SEQ ID NO: 1364929 - DNA, 15 bp, Homo sapiens
ctatgtaaaccaagt

SEQ ID NO: 1364930 - DNA, 15 bp, Homo sapiens
gctatgtaaaccaag

SEQ ID NO: 1364931 - DNA, 15 bp, Homo sapiens
gtgctatgtaaacca

SEQ ID NO: 1364932 - DNA, 15 bp, Homo sapiens
agtgctatgtaaacc

SEQ ID NO: 1364933 - DNA, 15 bp, Homo sapiens
cagtgctatgtaaac

SEQ ID NO: 1364934 - DNA, 15 bp, Homo sapiens
ccagtgctatgtaaa

SEQ ID NO: 1364935 - DNA, 15 bp, Homo sapiens
cccagtgctatgtaa

SEQ ID NO: 1364936 - DNA, 15 bp, Homo sapiens
ccccagtgctatgta

SEQ ID NO: 1364937 - DNA, 15 bp, Homo sapiens
gccccagtgctatgt

SEQ ID NO: 1364938 - DNA, 15 bp, Homo sapiens
agccccagtgctatg

SEQ ID NO: 1364939 - DNA, 15 bp, Homo sapiens
gagccccagtgctat

SEQ ID NO: 1364940 - DNA, 15 bp, Homo sapiens
agagccccagtgcta

SEQ ID NO: 1364941 - DNA, 15 bp, Homo sapiens
aagagccccagtgct

SEQ ID NO: 1364942 - DNA, 15 bp, Homo sapiens
caagagccccagtgc

SEQ ID NO: 1364943 - DNA, 15 bp, Homo sapiens
acaagagccccagtg

SEQ ID NO: 1364944 - DNA, 15 bp, Homo sapiens
cacaagagccccagt

SEQ ID NO: 1364945 - DNA, 15 bp, Homo sapiens
ccacaagagccccag

SEQ ID NO: 1364946 - DNA, 15 bp, Homo sapiens
accacaagagcccca

SEQ ID NO: 1364947 - DNA, 15 bp, Homo sapiens
caccacaagagcccc

SEQ ID NO: 1364948 - DNA, 15 bp, Homo sapiens
acaccacaagagccc

SEQ ID NO: 1364949 - DNA, 15 bp, Homo sapiens
cacaccacaagagcc

SEQ ID NO: 1364950 - DNA, 15 bp, Homo sapiens
tcacaccacaagagc

SEQ ID NO: 1364951 - DNA, 15 bp, Homo sapiens
ttcacaccacaagag

SEQ ID NO: 1364952 - DNA, 15 bp, Homo sapiens
gttcacaccacaaga

SEQ ID NO: 1364953 - DNA, 15 bp, Homo sapiens
cgttcacaccacaag

SEQ ID NO: 1364954 - DNA, 15 bp, Homo sapiens
acgttcacaccacaa

SEQ ID NO: 1364955 - DNA, 15 bp, Homo sapiens
gacgttcacaccaca

SEQ ID NO: 1364956 - DNA, 15 bp, Homo sapiens
agacgttcacaccac

SEQ ID NO: 1364957 - DNA, 15 bp, Homo sapiens
gagacgttcacacca

SEQ ID NO: 1364958 - DNA, 15 bp, Homo sapiens
ggagacgttcacacc

SEQ ID NO: 1364959 - DNA, 15 bp, Homo sapiens
aggagacgttcacac

SEQ ID NO: 1364960 - DNA, 15 bp, Homo sapiens
gaggagacgttcaca

SEQ ID NO: 1364961 - DNA, 15 bp, Homo sapiens
ggaggagacgttcac

SEQ ID NO: 1364962 - DNA, 15 bp, Homo sapiens
gggaggagacgttca

SEQ ID NO: 1364963 - DNA, 15 bp, Homo sapiens
tgggaggagacgttc

SEQ ID NO: 1364964 - DNA, 15 bp, Homo sapiens
ctgggaggagacgtt

SEQ ID NO: 1364965 - DNA, 15 bp, Homo sapiens
gctgggaggagacgt

SEQ ID NO: 1364966 - DNA, 15 bp, Homo sapiens
tgctgggaggagacg

SEQ ID NO: 1364967 - DNA, 15 bp, Homo sapiens
ttgctgggaggagac

SEQ ID NO: 1364968 - DNA, 15 bp, Homo sapiens
gttgctgggaggaga

SEQ ID NO: 1364969 - DNA, 15 bp, Homo sapiens
ggttgctgggaggag

SEQ ID NO: 1364970 - DNA, 15 bp, Homo sapiens
gggttgctgggagga

SEQ ID NO: 1364971 - DNA, 15 bp, Homo sapiens
ggggttgctgggagg

SEQ ID NO: 1364972 - DNA, 15 bp, Homo sapiens
tggggttgctgggag

SEQ ID NO: 1364973 - DNA, 15 bp, Homo sapiens
gtggggttgctggga

SEQ ID NO: 1364974 - DNA, 15 bp, Homo sapiens
ggtggggttgctggg

SEQ ID NO: 1364975 - DNA, 15 bp, Homo sapiens
cggtggggttgctgg

SEQ ID NO: 1364976 - DNA, 15 bp, Homo sapiens
acggtggggttgctg

SEQ ID NO: 1364977 - DNA, 15 bp, Homo sapiens
cacggtggggttgct

SEQ ID NO: 1364978 - DNA, 15 bp, Homo sapiens
tcacggtggggttgc

SEQ ID NO: 1364979 - DNA, 15 bp, Homo sapiens
ctcacggtggggttg

SEQ ID NO: 1364980 - DNA, 15 bp, Homo sapiens
cctcacggtggggtt

SEQ ID NO: 1364981 - DNA, 15 bp, Homo sapiens
tcctcacggtggggt

SEQ ID NO: 1364982 - DNA, 15 bp, Homo sapiens
gtcctcacggtgggg

SEQ ID NO: 1364983 - DNA, 15 bp, Homo sapiens
agtcctcacggtggg

SEQ ID NO: 1364984 - DNA, 15 bp, Homo sapiens
aagtcctcacggtgg

SEQ ID NO: 1364985 - DNA, 15 bp, Homo sapiens
aaagtcctcacggtg

SEQ ID NO: 1364986 - DNA, 15 bp, Homo sapiens
caaagtcctcacggt

SEQ ID NO: 1364987 - DNA, 15 bp, Homo sapiens
acaaagtcctcacgg

SEQ ID NO: 1364988 - DNA, 15 bp, Homo sapiens
aacaaagtcctcacg

SEQ ID NO: 1364989 - DNA, 15 bp, Homo sapiens
gaacaaagtcctcac

SEQ ID NO: 1364990 - DNA, 15 bp, Homo sapiens
agaacaaagtcctca

SEQ ID NO: 1364991 - DNA, 15 bp, Homo sapiens
aagaacaaagtcctc

SEQ ID NO: 1364992 - DNA, 15 bp, Homo sapiens
caagaacaaagtcct

SEQ ID NO: 1364993 - DNA, 15 bp, Homo sapiens
ccaagaacaaagtcc

SEQ ID NO: 1364994 - DNA, 15 bp, Homo sapiens
tccaagaacaaagtc

SEQ ID NO: 1364995 - DNA, 15 bp, Homo sapiens
ctccaagaacaaagt

SEQ ID NO: 1364996 - DNA, 15 bp, Homo sapiens
gctccaagaacaaag

SEQ ID NO: 1364997 - DNA, 15 bp, Homo sapiens
ggctccaagaacaaa

SEQ ID NO: 1364998 - DNA, 15 bp, Homo sapiens
aggctccaagaacaa

SEQ ID NO: 1364999 - DNA, 15 bp, Homo sapiens
gaggctccaagaaca

SEQ ID NO: 1365000 - DNA, 15 bp, Homo sapiens
tgaggctccaagaac

SEQ ID NO: 1365001 - DNA, 15 bp, Homo sapiens
gtgaggctccaagaa

SEQ ID NO: 1365002 - DNA, 15 bp, Homo sapiens
cgtgaggctccaaga

SEQ ID NO: 1365003 - DNA, 15 bp, Homo sapiens
gcgtgaggctccaag

SEQ ID NO: 1365004 - DNA, 15 bp, Homo sapiens
agcgtgaggctccaa

SEQ ID NO: 1365005 - DNA, 15 bp, Homo sapiens
cagcgtgaggctcca

SEQ ID NO: 1365006 - DNA, 15 bp, Homo sapiens
tcagcgtgaggctcc

SEQ ID NO: 1365007 - DNA, 15 bp, Homo sapiens
ctcagcgtgaggctc

SEQ ID NO: 1365008 - DNA, 15 bp, Homo sapiens
actcagcgtgaggct

SEQ ID NO: 1365009 - DNA, 15 bp, Homo sapiens
gactcagcgtgaggc

SEQ ID NO: 1365010 - DNA, 15 bp, Homo sapiens
agactcagcgtgagg

SEQ ID NO: 1365011 - DNA, 15 bp, Homo sapiens
cagactcagcgtgag

SEQ ID NO: 1365012 - DNA, 15 bp, Homo sapiens
ccagactcagcgtga

SEQ ID NO: 1365013 - DNA, 15 bp, Homo sapiens
gccagactcagcgtg

SEQ ID NO: 1365014 - DNA, 15 bp, Homo sapiens
tgccagactcagcgt

SEQ ID NO: 1365015 - DNA, 15 bp, Homo sapiens
gtgccagactcagcg

SEQ ID NO: 1365016 - DNA, 15 bp, Homo sapiens
tgtgccagactcagc

SEQ ID NO: 1365017 - DNA, 15 bp, Homo sapiens
gtgtgccagactcag

SEQ ID NO: 1365018 - DNA, 15 bp, Homo sapiens
tgtgtgccagactca

SEQ ID NO: 1365019 - DNA, 15 bp, Homo sapiens
ctgtgtgccagactc

SEQ ID NO: 1365020 - DNA, 15 bp, Homo sapiens
tctgtgtgccagact

SEQ ID NO: 1365021 - DNA, 15 bp, Homo sapiens
ttctgtgtgccagac

SEQ ID NO: 1365022 - DNA, 15 bp, Homo sapiens
cttctgtgtgccaga

SEQ ID NO: 1365023 - DNA, 15 bp, Homo sapiens
tcttctgtgtgccag

SEQ ID NO: 1365024 - DNA, 15 bp, Homo sapiens
gtcttctgtgtgcca

SEQ ID NO: 1365025 - DNA, 15 bp, Homo sapiens
tgtcttctgtgtgcc

SEQ ID NO: 1365026 - DNA, 15 bp, Homo sapiens
gtgtcttctgtgtgc

SEQ ID NO: 1365027 - DNA, 15 bp, Homo sapiens
tgtgtcttctgtgtg

SEQ ID NO: 1365028 - DNA, 15 bp, Homo sapiens
ttgtgtcttctgtgt

SEQ ID NO: 1365029 - DNA, 15 bp, Homo sapiens
cttgtgtcttctgtg

SEQ ID NO: 1365030 - DNA, 15 bp, Homo sapiens
tcttgtgtcttctgt

SEQ ID NO: 1365031 - DNA, 15 bp, Homo sapiens
gtcttgtgtcttctg

SEQ ID NO: 1365032 - DNA, 15 bp, Homo sapiens
tgtcttgtgtcttct

SEQ ID NO: 1365033 - DNA, 15 bp, Homo sapiens
atgtcttgtgtcttc

SEQ ID NO: 1365034 - DNA, 15 bp, Homo sapiens
aatgtcttgtgtctt

SEQ ID NO: 1365035 - DNA, 15 bp, Homo sapiens
caatgtcttgtgtct

SEQ ID NO: 1365036 - DNA, 15 bp, Homo sapiens
acaatgtcttgtgtc

SEQ ID NO: 1365037 - DNA, 15 bp, Homo sapiens
aacaatgtcttgtgt

SEQ ID NO: 1365038 - DNA, 15 bp, Homo sapiens
taacaatgtcttgtg

SEQ ID NO: 1365039 - DNA, 15 bp, Homo sapiens
ttaacaatgtcttgt

SEQ ID NO: 1365040 - DNA, 15 bp, Homo sapiens
attaacaatgtcttg

SEQ ID NO: 1365041 - DNA, 15 bp, Homo sapiens
aattaacaatgtctt

SEQ ID NO: 1365042 - DNA, 15 bp, Homo sapiens
gaattaacaatgtct

SEQ ID NO: 1365043 - DNA, 15 bp, Homo sapiens
tgaattaacaatgtc

SEQ ID NO: 1365044 - DNA, 15 bp, Homo sapiens
ctgaattaacaatgt

SEQ ID NO: 1365045 - DNA, 15 bp, Homo sapiens
actgaattaacaatg

SEQ ID NO: 1365046 - DNA, 15 bp, Homo sapiens
cactgaattaacaat

SEQ ID NO: 1365047 - DNA, 15 bp, Homo sapiens
acactgaattaacaa

SEQ ID NO: 1365048 - DNA, 15 bp, Homo sapiens
aacactgaattaaca

SEQ ID NO: 1365049 - DNA, 15 bp, Homo sapiens
aaacactgaattaac

SEQ ID NO: 1365050 - DNA, 15 bp, Homo sapiens
caaacactgaattaa

SEQ ID NO: 1365051 - DNA, 15 bp, Homo sapiens
acaaacactgaatta

SEQ ID NO: 1365052 - DNA, 15 bp, Homo sapiens
aacaaacactgaatt

SEQ ID NO: 1365053 - DNA, 15 bp, Homo sapiens
caacaaacactgaat

SEQ ID NO: 1365054 - DNA, 15 bp, Homo sapiens
acaacaaacactgaa

SEQ ID NO: 1365055 - DNA, 15 bp, Homo sapiens
tacaacaaacactga

SEQ ID NO: 1365056 - DNA, 15 bp, Homo sapiens
atacaacaaacactg

SEQ ID NO: 1365057 - DNA, 15 bp, Homo sapiens
catacaacaaacact

SEQ ID NO: 1365058 - DNA, 15 bp, Homo sapiens
tcatacaacaaacac

SEQ ID NO: 1365059 - DNA, 15 bp, Homo sapiens
ctcatacaacaaaca

SEQ ID NO: 1365060 - DNA, 15 bp, Homo sapiens
cctcatacaacaaac

SEQ ID NO: 1365061 - DNA, 15 bp, Homo sapiens
tcctcatacaacaaa

SEQ ID NO: 1365062 - DNA, 15 bp, Homo sapiens
ttcctcatacaacaa

SEQ ID NO: 1365063 - DNA, 15 bp, Homo sapiens
cttcctcatacaaca

SEQ ID NO: 1365064 - DNA, 15 bp, Homo sapiens
ccttcctcatacaac

SEQ ID NO: 1365065 - DNA, 15 bp, Homo sapiens
accttcctcatacaa

SEQ ID NO: 1365066 - DNA, 15 bp, Homo sapiens
taccttcctcataca

SEQ ID NO: 1365067 - DNA, 15 bp, Homo sapiens
ctaccttcctcatac

SEQ ID NO: 1365068 - DNA, 15 bp, Homo sapiens
tctaccttcctcata

SEQ ID NO: 1365069 - DNA, 15 bp, Homo sapiens
gtctaccttcctcat

SEQ ID NO: 1365070 - DNA, 15 bp, Homo sapiens
tgtctaccttcctca

SEQ ID NO: 1365071 - DNA, 15 bp, Homo sapiens
ctgtctaccttcctc

SEQ ID NO: 1365072 - DNA, 15 bp, Homo sapiens
tctgtctaccttcct

SEQ ID NO: 1365073 - DNA, 15 bp, Homo sapiens
gtctgtctaccttcc

SEQ ID NO: 1365074 - DNA, 15 bp, Homo sapiens
agtctgtctaccttc

SEQ ID NO: 1365075 - DNA, 15 bp, Homo sapiens
cagtctgtctacctt

SEQ ID NO: 1365076 - DNA, 15 bp, Homo sapiens
ccagtctgtctacct

SEQ ID NO: 1365077 - DNA, 15 bp, Homo sapiens
tccagtctgtctacc

SEQ ID NO: 1365078 - DNA, 15 bp, Homo sapiens
ttccagtctgtctac

SEQ ID NO: 1365079 - DNA, 15 bp, Homo sapiens
tttccagtctgtcta

SEQ ID NO: 1365080 - DNA, 15 bp, Homo sapiens
gtttccagtctgtct

SEQ ID NO: 1365081 - DNA, 15 bp, Homo sapiens
tgtttccagtctgtc

SEQ ID NO: 1365082 - DNA, 15 bp, Homo sapiens
ctgtttccagtctgt

SEQ ID NO: 1365083 - DNA, 15 bp, Homo sapiens
tctgtttccagtctg

SEQ ID NO: 1365084 - DNA, 15 bp, Homo sapiens
gtctgtttccagtct

SEQ ID NO: 1365085 - DNA, 15 bp, Homo sapiens
agtctgtttccagtc

SEQ ID NO: 1365086 - DNA, 15 bp, Homo sapiens
aagtctgtttccagt

SEQ ID NO: 1365087 - DNA, 15 bp, Homo sapiens
gaagtctgtttccag

SEQ ID NO: 1365088 - DNA, 15 bp, Homo sapiens
ggaagtctgtttcca

SEQ ID NO: 1365089 - DNA, 15 bp, Homo sapiens
gggaagtctgtttcc

SEQ ID NO: 1365090 - DNA, 15 bp, Homo sapiens
agggaagtctgtttc

SEQ ID NO: 1365091 - DNA, 15 bp, Homo sapiens
tagggaagtctgttt

SEQ ID NO: 1365092 - DNA, 15 bp, Homo sapiens
ttagggaagtctgtt

SEQ ID NO: 1365093 - DNA, 15 bp, Homo sapiens
cttagggaagtctgt

SEQ ID NO: 1365094 - DNA, 15 bp, Homo sapiens
ccttagggaagtctg

SEQ ID NO: 1365095 - DNA, 15 bp, Homo sapiens
accttagggaagtct

SEQ ID NO: 1365096 - DNA, 15 bp, Homo sapiens
gaccttagggaagtc

SEQ ID NO: 1365097 - DNA, 15 bp, Homo sapiens
agaccttagggaagt

SEQ ID NO: 1365098 - DNA, 15 bp, Homo sapiens
aagaccttagggaag

SEQ ID NO: 1365099 - DNA, 15 bp, Homo sapiens
taagaccttagggaa

SEQ ID NO: 1365100 - DNA, 15 bp, Homo sapiens
ataagaccttaggga

SEQ ID NO: 1365101 - DNA, 15 bp, Homo sapiens
tataagaccttaggg

SEQ ID NO: 1365102 - DNA, 15 bp, Homo sapiens
ctataagaccttagg

SEQ ID NO: 1365103 - DNA, 15 bp, Homo sapiens
gctataagaccttag

SEQ ID NO: 1365104 - DNA, 15 bp, Homo sapiens
agctataagacctta

SEQ ID NO: 1365105 - DNA, 15 bp, Homo sapiens
tagctataagacctt

SEQ ID NO: 1365106 - DNA, 15 bp, Homo sapiens
ctagctataagacct

SEQ ID NO: 1365107 - DNA, 15 bp, Homo sapiens
gctagctataagacc

SEQ ID NO: 1365108 - DNA, 15 bp, Homo sapiens
tgctagctataagac

SEQ ID NO: 1365109 - DNA, 15 bp, Homo sapiens
ttgctagctataaga

SEQ ID NO: 1365110 - DNA, 15 bp, Homo sapiens
attgctagctataag

SEQ ID NO: 1365111 - DNA, 15 bp, Homo sapiens
cattgctagctataa

SEQ ID NO: 1365112 - DNA, 15 bp, Homo sapiens
ccattgctagctata

SEQ ID NO: 1365113 - DNA, 15 bp, Homo sapiens
gccattgctagctat

SEQ ID NO: 1365114 - DNA, 15 bp, Homo sapiens
tgccattgctagcta

SEQ ID NO: 1365115 - DNA, 15 bp, Homo sapiens
ctgccattgctagct

SEQ ID NO: 1365116 - DNA, 15 bp, Homo sapiens
tctgccattgctagc

SEQ ID NO: 1365117 - DNA, 15 bp, Homo sapiens
ttctgccattgctag

SEQ ID NO: 1365118 - DNA, 15 bp, Homo sapiens
tttctgccattgcta

SEQ ID NO: 1365119 - DNA, 15 bp, Homo sapiens
ttttctgccattgct

SEQ ID NO: 1365120 - DNA, 15 bp, Homo sapiens
cttttctgccattgc

SEQ ID NO: 1365121 - DNA, 15 bp, Homo sapiens
acttttctgccattg

SEQ ID NO: 1365122 - DNA, 15 bp, Homo sapiens
gacttttctgccatt

SEQ ID NO: 1365123 - DNA, 15 bp, Homo sapiens
agacttttctgccat

SEQ ID NO: 1365124 - DNA, 15 bp, Homo sapiens
tagacttttctgcca

SEQ ID NO: 1365125 - DNA, 15 bp, Homo sapiens
atagacttttctgcc

SEQ ID NO: 1365126 - DNA, 15 bp, Homo sapiens
aatagacttttctgc

SEQ ID NO: 1365127 - DNA, 15 bp, Homo sapiens
caatagacttttctg

SEQ ID NO: 1365128 - DNA, 15 bp, Homo sapiens
tcaatagacttttct

SEQ ID NO: 1365129 - DNA, 15 bp, Homo sapiens
ttcaatagacttttc

SEQ ID NO: 1365130 - DNA, 15 bp, Homo sapiens
attcaatagactttt

SEQ ID NO: 1365131 - DNA, 15 bp, Homo sapiens
gattcaatagacttt

SEQ ID NO: 1365132 - DNA, 15 bp, Homo sapiens
ggattcaatagactt

SEQ ID NO: 1365133 - DNA, 15 bp, Homo sapiens
aggattcaatagact

SEQ ID NO: 1365134 - DNA, 15 bp, Homo sapiens
taggattcaatagac

SEQ ID NO: 1365135 - DNA, 15 bp, Homo sapiens
ttaggattcaataga

SEQ ID NO: 1365136 - DNA, 15 bp, Homo sapiens
tttaggattcaatag

SEQ ID NO: 1365137 - DNA, 15 bp, Homo sapiens
ctttaggattcaata

SEQ ID NO: 1365138 - DNA, 15 bp, Homo sapiens
gctttaggattcaat

SEQ ID NO: 1365139 - DNA, 15 bp, Homo sapiens
ggctttaggattcaa

SEQ ID NO: 1365140 - DNA, 15 bp, Homo sapiens
cggctttaggattca

SEQ ID NO: 1365141 - DNA, 15 bp, Homo sapiens
tcggctttaggattc

SEQ ID NO: 1365142 - DNA, 15 bp, Homo sapiens
ctcggctttaggatt

SEQ ID NO: 1365143 - DNA, 15 bp, Homo sapiens
gctcggctttaggat

SEQ ID NO: 1365144 - DNA, 15 bp, Homo sapiens
agctcggctttagga

SEQ ID NO: 1365145 - DNA, 15 bp, Homo sapiens
cagctcggctttagg

SEQ ID NO: 1365146 - DNA, 15 bp, Homo sapiens
tcagctcggctttag

SEQ ID NO: 1365147 - DNA, 15 bp, Homo sapiens
ctcagctcggcttta

SEQ ID NO: 1365148 - DNA, 15 bp, Homo sapiens
cctcagctcggcttt

SEQ ID NO: 1365149 - DNA, 15 bp, Homo sapiens
ccctcagctcggctt

SEQ ID NO: 1365150 - DNA, 15 bp, Homo sapiens
gccctcagctcggct

SEQ ID NO: 1365151 - DNA, 15 bp, Homo sapiens
ggccctcagctcggc

SEQ ID NO: 1365152 - DNA, 15 bp, Homo sapiens
aggccctcagctcgg

SEQ ID NO: 1365153 - DNA, 15 bp, Homo sapiens
aaggccctcagctcg

SEQ ID NO: 1365154 - DNA, 15 bp, Homo sapiens
aaaggccctcagctc

SEQ ID NO: 1365155 - DNA, 15 bp, Homo sapiens
gaaaggccctcagct

SEQ ID NO: 1365156 - DNA, 15 bp, Homo sapiens
agaaaggccctcagc

SEQ ID NO: 1365157 - DNA, 15 bp, Homo sapiens
tagaaaggccctcag

SEQ ID NO: 1365158 - DNA, 15 bp, Homo sapiens
atagaaaggccctca

SEQ ID NO: 1365159 - DNA, 15 bp, Homo sapiens
aatagaaaggccctc

SEQ ID NO: 1365160 - DNA, 15 bp, Homo sapiens
gaatagaaaggccct

SEQ ID NO: 1365161 - DNA, 15 bp, Homo sapiens
agaatagaaaggccc

SEQ ID NO: 1365162 - DNA, 15 bp, Homo sapiens
gagaatagaaaggcc

SEQ ID NO: 1365163 - DNA, 15 bp, Homo sapiens
ggagaatagaaaggc

SEQ ID NO: 1365164 - DNA, 15 bp, Homo sapiens
aggagaatagaaagg

SEQ ID NO: 1365165 - DNA, 15 bp, Homo sapiens
taggagaatagaaag

SEQ ID NO: 1365166 - DNA, 15 bp, Homo sapiens
ctaggagaatagaaa

SEQ ID NO: 1365167 - DNA, 15 bp, Homo sapiens
cctaggagaatagaa

SEQ ID NO: 1365168 - DNA, 15 bp, Homo sapiens
acctaggagaataga

SEQ ID NO: 1365169 - DNA, 15 bp, Homo sapiens
gacctaggagaatag

SEQ ID NO: 1365170 - DNA, 15 bp, Homo sapiens
agacctaggagaata

SEQ ID NO: 1365171 - DNA, 15 bp, Homo sapiens
cagacctaggagaat

SEQ ID NO: 1365172 - DNA, 15 bp, Homo sapiens
gcagacctaggagaa

SEQ ID NO: 1365173 - DNA, 15 bp, Homo sapiens
cgcagacctaggaga

SEQ ID NO: 1365174 - DNA, 15 bp, Homo sapiens
acgcagacctaggag

SEQ ID NO: 1365175 - DNA, 15 bp, Homo sapiens
aacgcagacctagga

SEQ ID NO: 1365176 - DNA, 15 bp, Homo sapiens
caacgcagacctagg

SEQ ID NO: 1365177 - DNA, 15 bp, Homo sapiens
ccaacgcagacctag

SEQ ID NO: 1365178 - DNA, 15 bp, Homo sapiens
cccaacgcagaccta

SEQ ID NO: 1365179 - DNA, 15 bp, Homo sapiens
tcccaacgcagacct

SEQ ID NO: 1365180 - DNA, 15 bp, Homo sapiens
ctcccaacgcagacc

SEQ ID NO: 1365181 - DNA, 15 bp, Homo sapiens
tctcccaacgcagac

SEQ ID NO: 1365182 - DNA, 15 bp, Homo sapiens
ttctcccaacgcaga

SEQ ID NO: 1365183 - DNA, 15 bp, Homo sapiens
attctcccaacgcag

SEQ ID NO: 1365184 - DNA, 15 bp, Homo sapiens
cattctcccaacgca

SEQ ID NO: 1365185 - DNA, 15 bp, Homo sapiens
tcattctcccaacgc

SEQ ID NO: 1365186 - DNA, 15 bp, Homo sapiens
ctcattctcccaacg

SEQ ID NO: 1365187 - DNA, 15 bp, Homo sapiens
gctcattctcccaac

SEQ ID NO: 1365188 - DNA, 15 bp, Homo sapiens
tgctcattctcccaa

SEQ ID NO: 1365189 - DNA, 15 bp, Homo sapiens
ttgctcattctccca

SEQ ID NO: 1365190 - DNA, 15 bp, Homo sapiens
cttgctcattctccc

SEQ ID NO: 1365191 - DNA, 15 bp, Homo sapiens
tcttgctcattctcc

SEQ ID NO: 1365192 - DNA, 15 bp, Homo sapiens
atcttgctcattctc

SEQ ID NO: 1365193 - DNA, 15 bp, Homo sapiens
catcttgctcattct

SEQ ID NO: 1365194 - DNA, 15 bp, Homo sapiens
gcatcttgctcattc

SEQ ID NO: 1365195 - DNA, 15 bp, Homo sapiens
ggcatcttgctcatt

SEQ ID NO: 1365196 - DNA, 15 bp, Homo sapiens
aggcatcttgctcat

SEQ ID NO: 1365197 - DNA, 15 bp, Homo sapiens
aaggcatcttgctca

SEQ ID NO: 1365198 - DNA, 15 bp, Homo sapiens
caaggcatcttgctc

SEQ ID NO: 1365199 - DNA, 15 bp, Homo sapiens
ccaaggcatcttgct

SEQ ID NO: 1365200 - DNA, 15 bp, Homo sapiens
gccaaggcatcttgc

SEQ ID NO: 1365201 - DNA, 15 bp, Homo sapiens
ggccaaggcatcttg

SEQ ID NO: 1365202 - DNA, 15 bp, Homo sapiens
gggccaaggcatctt

SEQ ID NO: 1365203 - DNA, 15 bp, Homo sapiens
agggccaaggcatct

SEQ ID NO: 1365204 - DNA, 15 bp, Homo sapiens
gagggccaaggcatc

SEQ ID NO: 1365205 - DNA, 15 bp, Homo sapiens
tgagggccaaggcat

SEQ ID NO: 1365206 - DNA, 15 bp, Homo sapiens
gtgagggccaaggca

SEQ ID NO: 1365207 - DNA, 15 bp, Homo sapiens
agtgagggccaaggc

SEQ ID NO: 1365208 - DNA, 15 bp, Homo sapiens
gagtgagggccaagg

SEQ ID NO: 1365209 - DNA, 15 bp, Homo sapiens
ggagtgagggccaag

SEQ ID NO: 1365210 - DNA, 15 bp, Homo sapiens
aggagtgagggccaa

SEQ ID NO: 1365211 - DNA, 15 bp, Homo sapiens
aaggagtgagggcca

SEQ ID NO: 1365212 - DNA, 15 bp, Homo sapiens
gaaggagtgagggcc

SEQ ID NO: 1365213 - DNA, 15 bp, Homo sapiens
cgaaggagtgagggc

SEQ ID NO: 1365214 - DNA, 15 bp, Homo sapiens
ccgaaggagtgaggg

SEQ ID NO: 1365215 - DNA, 15 bp, Homo sapiens
accgaaggagtgagg

SEQ ID NO: 1365216 - DNA, 15 bp, Homo sapiens
caccgaaggagtgag

SEQ ID NO: 1365217 - DNA, 15 bp, Homo sapiens
ccaccgaaggagtga

SEQ ID NO: 1365218 - DNA, 15 bp, Homo sapiens
cccaccgaaggagtg

SEQ ID NO: 1365219 - DNA, 15 bp, Homo sapiens
acccaccgaaggagt

SEQ ID NO: 1365220 - DNA, 15 bp, Homo sapiens
gacccaccgaaggag

SEQ ID NO: 1365221 - DNA, 15 bp, Homo sapiens
ggacccaccgaagga

SEQ ID NO: 1365222 - DNA, 15 bp, Homo sapiens
gggacccaccgaagg

SEQ ID NO: 1365223 - DNA, 15 bp, Homo sapiens
tgggacccaccgaag

SEQ ID NO: 1365224 - DNA, 15 bp, Homo sapiens
ctgggacccaccgaa

SEQ ID NO: 1365225 - DNA, 15 bp, Homo sapiens
gctgggacccaccga

SEQ ID NO: 1365226 - DNA, 15 bp, Homo sapiens
tgctgggacccaccg

SEQ ID NO: 1365227 - DNA, 15 bp, Homo sapiens
gtgctgggacccacc

SEQ ID NO: 1365228 - DNA, 15 bp, Homo sapiens
cgtgctgggacccac

SEQ ID NO: 1365229 - DNA, 15 bp, Homo sapiens
acgtgctgggaccca

SEQ ID NO: 1365230 - DNA, 15 bp, Homo sapiens
cacgtgctgggaccc

SEQ ID NO: 1365231 - DNA, 15 bp, Homo sapiens
gcacgtgctgggacc

SEQ ID NO: 1365232 - DNA, 15 bp, Homo sapiens
ggcacgtgctgggac

SEQ ID NO: 1365233 - DNA, 15 bp, Homo sapiens
tggcacgtgctggga

SEQ ID NO: 1365234 - DNA, 15 bp, Homo sapiens
ctggcacgtgctggg

SEQ ID NO: 1365235 - DNA, 15 bp, Homo sapiens
cctggcacgtgctgg

SEQ ID NO: 1365236 - DNA, 15 bp, Homo sapiens
ccctggcacgtgctg

SEQ ID NO: 1365237 - DNA, 15 bp, Homo sapiens
cccctggcacgtgct

SEQ ID NO: 1365238 - DNA, 15 bp, Homo sapiens
gcccctggcacgtgc

SEQ ID NO: 1365239 - DNA, 15 bp, Homo sapiens
tgcccctggcacgtg

SEQ ID NO: 1365240 - DNA, 15 bp, Homo sapiens
ctgcccctggcacgt

SEQ ID NO: 1365241 - DNA, 15 bp, Homo sapiens
gctgcccctggcacg

SEQ ID NO: 1365242 - DNA, 15 bp, Homo sapiens
tgctgcccctggcac

SEQ ID NO: 1365243 - DNA, 15 bp, Homo sapiens
atgctgcccctggca

SEQ ID NO: 1365244 - DNA, 15 bp, Homo sapiens
catgctgcccctggc

SEQ ID NO: 1365245 - DNA, 15 bp, Homo sapiens
acatgctgcccctgg

SEQ ID NO: 1365246 - DNA, 15 bp, Homo sapiens
cacatgctgcccctg

SEQ ID NO: 1365247 - DNA, 15 bp, Homo sapiens
gcacatgctgcccct

SEQ ID NO: 1365248 - DNA, 15 bp, Homo sapiens
cgcacatgctgcccc

SEQ ID NO: 1365249 - DNA, 15 bp, Homo sapiens
ccgcacatgctgccc

SEQ ID NO: 1365250 - DNA, 15 bp, Homo sapiens
accgcacatgctgcc

SEQ ID NO: 1365251 - DNA, 15 bp, Homo sapiens
gaccgcacatgctgc

SEQ ID NO: 1365252 - DNA, 15 bp, Homo sapiens
tgaccgcacatgctg

SEQ ID NO: 1365253 - DNA, 15 bp, Homo sapiens
gtgaccgcacatgct

SEQ ID NO: 1365254 - DNA, 15 bp, Homo sapiens
ggtgaccgcacatgc

SEQ ID NO: 1365255 - DNA, 15 bp, Homo sapiens
aggtgaccgcacatg

SEQ ID NO: 1365256 - DNA, 15 bp, Homo sapiens
caggtgaccgcacat

SEQ ID NO: 1365257 - DNA, 15 bp, Homo sapiens
acaggtgaccgcaca

SEQ ID NO: 1365258 - DNA, 15 bp, Homo sapiens
tacaggtgaccgcac

SEQ ID NO: 1365259 - DNA, 15 bp, Homo sapiens
atacaggtgaccgca

SEQ ID NO: 1365260 - DNA, 15 bp, Homo sapiens
catacaggtgaccgc

SEQ ID NO: 1365261 - DNA, 15 bp, Homo sapiens
tcatacaggtgaccg

SEQ ID NO: 1365262 - DNA, 15 bp, Homo sapiens
gtcatacaggtgacc

SEQ ID NO: 1365263 - DNA, 15 bp, Homo sapiens
ggtcatacaggtgac

SEQ ID NO: 1365264 - DNA, 15 bp, Homo sapiens
gggtcatacaggtga

SEQ ID NO: 1365265 - DNA, 15 bp, Homo sapiens
ggggtcatacaggtg

SEQ ID NO: 1365266 - DNA, 15 bp, Homo sapiens
aggggtcatacaggt

SEQ ID NO: 1365267 - DNA, 15 bp, Homo sapiens
aaggggtcatacagg

SEQ ID NO: 1365268 - DNA, 15 bp, Homo sapiens
aaaggggtcatacag

SEQ ID NO: 1365269 - DNA, 15 bp, Homo sapiens
caaaggggtcataca

SEQ ID NO: 1365270 - DNA, 15 bp, Homo sapiens
gcaaaggggtcatac

SEQ ID NO: 1365271 - DNA, 15 bp, Homo sapiens
agcaaaggggtcata

SEQ ID NO: 1365272 - DNA, 15 bp, Homo sapiens
gagcaaaggggtcat

SEQ ID NO: 1365273 - DNA, 15 bp, Homo sapiens
agagcaaaggggtca

SEQ ID NO: 1365274 - DNA, 15 bp, Homo sapiens
tagagcaaaggggtc

SEQ ID NO: 1365275 - DNA, 15 bp, Homo sapiens
ctagagcaaaggggt

SEQ ID NO: 1365276 - DNA, 15 bp, Homo sapiens
actagagcaaagggg

SEQ ID NO: 1365277 - DNA, 15 bp, Homo sapiens
gactagagcaaaggg

SEQ ID NO: 1365278 - DNA, 15 bp, Homo sapiens
ggactagagcaaagg

SEQ ID NO: 1365279 - DNA, 15 bp, Homo sapiens
gggactagagcaaag

SEQ ID NO: 1365280 - DNA, 15 bp, Homo sapiens
tgggactagagcaaa

SEQ ID NO: 1365281 - DNA, 15 bp, Homo sapiens
ttgggactagagcaa

SEQ ID NO: 1365282 - DNA, 15 bp, Homo sapiens
attgggactagagca

SEQ ID NO: 1365283 - DNA, 15 bp, Homo sapiens
aattgggactagagc

SEQ ID NO: 1365284 - DNA, 15 bp, Homo sapiens
gaattgggactagag

SEQ ID NO: 1365285 - DNA, 15 bp, Homo sapiens
ggaattgggactaga

SEQ ID NO: 1365286 - DNA, 15 bp, Homo sapiens
gggaattgggactag

SEQ ID NO: 1365287 - DNA, 15 bp, Homo sapiens
agggaattgggacta

SEQ ID NO: 1365288 - DNA, 15 bp, Homo sapiens
tagggaattgggact

SEQ ID NO: 1365289 - DNA, 15 bp, Homo sapiens
gtagggaattgggac

SEQ ID NO: 1365290 - DNA, 15 bp, Homo sapiens
agtagggaattggga

SEQ ID NO: 1365291 - DNA, 15 bp, Homo sapiens
tagtagggaattggg

SEQ ID NO: 1365292 - DNA, 15 bp, Homo sapiens
gtagtagggaattgg

SEQ ID NO: 1365293 - DNA, 15 bp, Homo sapiens
tgtagtagggaattg

SEQ ID NO: 1365294 - DNA, 15 bp, Homo sapiens
ctgtagtagggaatt

SEQ ID NO: 1365295 - DNA, 15 bp, Homo sapiens
tctgtagtagggaat

SEQ ID NO: 1365296 - DNA, 15 bp, Homo sapiens
atctgtagtagggaa

SEQ ID NO: 1365297 - DNA, 15 bp, Homo sapiens
tatctgtagtaggga

SEQ ID NO: 1365298 - DNA, 15 bp, Homo sapiens
ttatctgtagtaggg

SEQ ID NO: 1365299 - DNA, 15 bp, Homo sapiens
tttatctgtagtagg

SEQ ID NO: 1365300 - DNA, 15 bp, Homo sapiens
ttttatctgtagtag

SEQ ID NO: 1365301 - DNA, 15 bp, Homo sapiens
gttttatctgtagta

SEQ ID NO: 1365302 - DNA, 15 bp, Homo sapiens
tgttttatctgtagt

SEQ ID NO: 1365303 - DNA, 15 bp, Homo sapiens
atgttttatctgtag

SEQ ID NO: 1365304 - DNA, 15 bp, Homo sapiens
gatgttttatctgta

SEQ ID NO: 1365305 - DNA, 15 bp, Homo sapiens
tgatgttttatctgt

SEQ ID NO: 1365306 - DNA, 15 bp, Homo sapiens
atgatgttttatctg

SEQ ID NO: 1365307 - DNA, 15 bp, Homo sapiens
aatgatgttttatct

SEQ ID NO: 1365308 - DNA, 15 bp, Homo sapiens
gaatgatgttttatc

SEQ ID NO: 1365309 - DNA, 15 bp, Homo sapiens
tgaatgatgttttat

SEQ ID NO: 1365310 - DNA, 15 bp, Homo sapiens
gtgaatgatgtttta

SEQ ID NO: 1365311 - DNA, 15 bp, Homo sapiens
ggtgaatgatgtttt

SEQ ID NO: 1365312 - DNA, 15 bp, Homo sapiens
gggtgaatgatgttt

SEQ ID NO: 1365313 - DNA, 15 bp, Homo sapiens
ggggtgaatgatgtt

SEQ ID NO: 1365314 - DNA, 15 bp, Homo sapiens
aggggtgaatgatgt

SEQ ID NO: 1365315 - DNA, 15 bp, Homo sapiens
gaggggtgaatgatg

SEQ ID NO: 1365316 - DNA, 15 bp, Homo sapiens
ggaggggtgaatgat

SEQ ID NO: 1365317 - DNA, 15 bp, Homo sapiens
cggaggggtgaatga

SEQ ID NO: 1365318 - DNA, 15 bp, Homo sapiens
gcggaggggtgaatg

SEQ ID NO: 1365319 - DNA, 15 bp, Homo sapiens
tgcggaggggtgaat

SEQ ID NO: 1365320 - DNA, 15 bp, Homo sapiens
ctgcggaggggtgaa

SEQ ID NO: 1365321 - DNA, 15 bp, Homo sapiens
cctgcggaggggtga

SEQ ID NO: 1365322 - DNA, 15 bp, Homo sapiens
gcctgcggaggggtg

SEQ ID NO: 1365323 - DNA, 15 bp, Homo sapiens
agcctgcggaggggt

SEQ ID NO: 1365324 - DNA, 15 bp, Homo sapiens
aagcctgcggagggg

SEQ ID NO: 1365325 - DNA, 15 bp, Homo sapiens
aaagcctgcggaggg

SEQ ID NO: 1365326 - DNA, 15 bp, Homo sapiens
gaaagcctgcggagg

SEQ ID NO: 1365327 - DNA, 15 bp, Homo sapiens
agaaagcctgcggag

SEQ ID NO: 1365328 - DNA, 15 bp, Homo sapiens
cagaaagcctgcgga

SEQ ID NO: 1365329 - DNA, 15 bp, Homo sapiens
acagaaagcctgcgg

SEQ ID NO: 1365330 - DNA, 15 bp, Homo sapiens
aacagaaagcctgcg

SEQ ID NO: 1365331 - DNA, 15 bp, Homo sapiens
gaacagaaagcctgc

SEQ ID NO: 1365332 - DNA, 15 bp, Homo sapiens
agaacagaaagcctg

SEQ ID NO: 1365333 - DNA, 15 bp, Homo sapiens
cagaacagaaagcct

SEQ ID NO: 1365334 - DNA, 15 bp, Homo sapiens
tcagaacagaaagcc

SEQ ID NO: 1365335 - DNA, 15 bp, Homo sapiens
ttcagaacagaaagc

SEQ ID NO: 1365336 - DNA, 15 bp, Homo sapiens
attcagaacagaaag

SEQ ID NO: 1365337 - DNA, 15 bp, Homo sapiens
gattcagaacagaaa

SEQ ID NO: 1365338 - DNA, 15 bp, Homo sapiens
tgattcagaacagaa

SEQ ID NO: 1365339 - DNA, 15 bp, Homo sapiens
gtgattcagaacaga

SEQ ID NO: 1365340 - DNA, 15 bp, Homo sapiens
cgtgattcagaacag

SEQ ID NO: 1365341 - DNA, 15 bp, Homo sapiens
tcgtgattcagaaca

SEQ ID NO: 1365342 - DNA, 15 bp, Homo sapiens
atcgtgattcagaac

SEQ ID NO: 1365343 - DNA, 15 bp, Homo sapiens
aatcgtgattcagaa

SEQ ID NO: 1365344 - DNA, 15 bp, Homo sapiens
taatcgtgattcaga

SEQ ID NO: 1365345 - DNA, 15 bp, Homo sapiens
gtaatcgtgattcag

SEQ ID NO: 1365346 - DNA, 15 bp, Homo sapiens
ggtaatcgtgattca

SEQ ID NO: 1365347 - DNA, 15 bp, Homo sapiens
tggtaatcgtgattc

SEQ ID NO: 1365348 - DNA, 15 bp, Homo sapiens
ctggtaatcgtgatt

SEQ ID NO: 1365349 - DNA, 15 bp, Homo sapiens
gctggtaatcgtgat

SEQ ID NO: 1365350 - DNA, 15 bp, Homo sapiens
tgctggtaatcgtga

SEQ ID NO: 1365351 - DNA, 15 bp, Homo sapiens
atgctggtaatcgtg

SEQ ID NO: 1365352 - DNA, 15 bp, Homo sapiens
catgctggtaatcgt

SEQ ID NO: 1365353 - DNA, 15 bp, Homo sapiens
acatgctggtaatcg

SEQ ID NO: 1365354 - DNA, 15 bp, Homo sapiens
gacatgctggtaatc

SEQ ID NO: 1365355 - DNA, 15 bp, Homo sapiens
agacatgctggtaat

SEQ ID NO: 1365356 - DNA, 15 bp, Homo sapiens
gagacatgctggtaa

SEQ ID NO: 1365357 - DNA, 15 bp, Homo sapiens
tgagacatgctggta

SEQ ID NO: 1365358 - DNA, 15 bp, Homo sapiens
atgagacatgctggt

SEQ ID NO: 1365359 - DNA, 15 bp, Homo sapiens
tatgagacatgctgg

SEQ ID NO: 1365360 - DNA, 15 bp, Homo sapiens
ctatgagacatgctg

SEQ ID NO: 1365361 - DNA, 15 bp, Homo sapiens
gctatgagacatgct

SEQ ID NO: 1365362 - DNA, 15 bp, Homo sapiens
agctatgagacatgc

SEQ ID NO: 1365363 - DNA, 15 bp, Homo sapiens
gagctatgagacatg

SEQ ID NO: 1365364 - DNA, 15 bp, Homo sapiens
tgagctatgagacat

SEQ ID NO: 1365365 - DNA, 15 bp, Homo sapiens
ctgagctatgagaca

SEQ ID NO: 1365366 - DNA, 15 bp, Homo sapiens
tctgagctatgagac

SEQ ID NO: 1365367 - DNA, 15 bp, Homo sapiens
atctgagctatgaga

SEQ ID NO: 1365368 - DNA, 15 bp, Homo sapiens
gatctgagctatgag

SEQ ID NO: 1365369 - DNA, 15 bp, Homo sapiens
ggatctgagctatga

SEQ ID NO: 1365370 - DNA, 15 bp, Homo sapiens
aggatctgagctatg

SEQ ID NO: 1365371 - DNA, 15 bp, Homo sapiens
taggatctgagctat

SEQ ID NO: 1365372 - DNA, 15 bp, Homo sapiens
ttaggatctgagcta

SEQ ID NO: 1365373 - DNA, 15 bp, Homo sapiens
gttaggatctgagct

SEQ ID NO: 1365374 - DNA, 15 bp, Homo sapiens
ggttaggatctgagc

SEQ ID NO: 1365375 - DNA, 15 bp, Homo sapiens
tggttaggatctgag

SEQ ID NO: 1365376 - DNA, 15 bp, Homo sapiens
ctggttaggatctga

SEQ ID NO: 1365377 - DNA, 15 bp, Homo sapiens
gctggttaggatctg

SEQ ID NO: 1365378 - DNA, 15 bp, Homo sapiens
tgctggttaggatct

SEQ ID NO: 1365379 - DNA, 15 bp, Homo sapiens
gtgctggttaggatc

SEQ ID NO: 1365380 - DNA, 15 bp, Homo sapiens
agtgctggttaggat

SEQ ID NO: 1365381 - DNA, 15 bp, Homo sapiens
aagtgctggttagga

SEQ ID NO: 1365382 - DNA, 15 bp, Homo sapiens
taagtgctggttagg

SEQ ID NO: 1365383 - DNA, 15 bp, Homo sapiens
gtaagtgctggttag

SEQ ID NO: 1365384 - DNA, 15 bp, Homo sapiens
agtaagtgctggtta

SEQ ID NO: 1365385 - DNA, 15 bp, Homo sapiens
tagtaagtgctggtt

SEQ ID NO: 1365386 - DNA, 15 bp, Homo sapiens
ctagtaagtgctggt

SEQ ID NO: 1365387 - DNA, 15 bp, Homo sapiens
cctagtaagtgctgg

SEQ ID NO: 1365388 - DNA, 15 bp, Homo sapiens
gcctagtaagtgctg

SEQ ID NO: 1365389 - DNA, 15 bp, Homo sapiens
tgcctagtaagtgct

SEQ ID NO: 1365390 - DNA, 15 bp, Homo sapiens
ctgcctagtaagtgc

SEQ ID NO: 1365391 - DNA, 15 bp, Homo sapiens
tctgcctagtaagtg

SEQ ID NO: 1365392 - DNA, 15 bp, Homo sapiens
ttctgcctagtaagt

SEQ ID NO: 1365393 - DNA, 15 bp, Homo sapiens
attctgcctagtaag

SEQ ID NO: 1365394 - DNA, 15 bp, Homo sapiens
aattctgcctagtaa

SEQ ID NO: 1365395 - DNA, 15 bp, Homo sapiens
gaattctgcctagta

SEQ ID NO: 1365396 - DNA, 15 bp, Homo sapiens
tgaattctgcctagt

SEQ ID NO: 1365397 - DNA, 15 bp, Homo sapiens
ctgaattctgcctag

SEQ ID NO: 1365398 - DNA, 15 bp, Homo sapiens
gctgaattctgccta

SEQ ID NO: 1365399 - DNA, 15 bp, Homo sapiens
tgctgaattctgcct

SEQ ID NO: 1365400 - DNA, 15 bp, Homo sapiens
gtgctgaattctgcc

SEQ ID NO: 1365401 - DNA, 15 bp, Homo sapiens
agtgctgaattctgc

SEQ ID NO: 1365402 - DNA, 15 bp, Homo sapiens
aagtgctgaattctg

SEQ ID NO: 1365403 - DNA, 15 bp, Homo sapiens
taagtgctgaattct

SEQ ID NO: 1365404 - DNA, 15 bp, Homo sapiens
ttaagtgctgaattc

SEQ ID NO: 1365405 - DNA, 15 bp, Homo sapiens
cttaagtgctgaatt

SEQ ID NO: 1365406 - DNA, 15 bp, Homo sapiens
acttaagtgctgaat

SEQ ID NO: 1365407 - DNA, 15 bp, Homo sapiens
cacttaagtgctgaa

SEQ ID NO: 1365408 - DNA, 15 bp, Homo sapiens
tcacttaagtgctga

SEQ ID NO: 1365409 - DNA, 15 bp, Homo sapiens
gtcacttaagtgctg

SEQ ID NO: 1365410 - DNA, 15 bp, Homo sapiens
ggtcacttaagtgct

SEQ ID NO: 1365411 - DNA, 15 bp, Homo sapiens
gggtcacttaagtgc

SEQ ID NO: 1365412 - DNA, 15 bp, Homo sapiens
tgggtcacttaagtg

SEQ ID NO: 1365413 - DNA, 15 bp, Homo sapiens
atgggtcacttaagt

SEQ ID NO: 1365414 - DNA, 15 bp, Homo sapiens
aatgggtcacttaag

SEQ ID NO: 1365415 - DNA, 15 bp, Homo sapiens
taatgggtcacttaa

SEQ ID NO: 1365416 - DNA, 15 bp, Homo sapiens
ttaatgggtcactta

SEQ ID NO: 1365417 - DNA, 15 bp, Homo sapiens
cttaatgggtcactt

SEQ ID NO: 1365418 - DNA, 15 bp, Homo sapiens
ccttaatgggtcact

SEQ ID NO: 1365419 - DNA, 15 bp, Homo sapiens
tccttaatgggtcac

SEQ ID NO: 1365420 - DNA, 15 bp, Homo sapiens
gtccttaatgggtca

SEQ ID NO: 1365421 - DNA, 15 bp, Homo sapiens
agtccttaatgggtc

SEQ ID NO: 1365422 - DNA, 15 bp, Homo sapiens
aagtccttaatgggt

SEQ ID NO: 1365423 - DNA, 15 bp, Homo sapiens
aaagtccttaatggg

SEQ ID NO: 1365424 - DNA, 15 bp, Homo sapiens
aaaagtccttaatgg

SEQ ID NO: 1365425 - DNA, 15 bp, Homo sapiens
caaaagtccttaatg

SEQ ID NO: 1365426 - DNA, 15 bp, Homo sapiens
ccaaaagtccttaat

SEQ ID NO: 1365427 - DNA, 15 bp, Homo sapiens
gccaaaagtccttaa

SEQ ID NO: 1365428 - DNA, 15 bp, Homo sapiens
tgccaaaagtcctta

SEQ ID NO: 1365429 - DNA, 15 bp, Homo sapiens
ctgccaaaagtcctt

SEQ ID NO: 1365430 - DNA, 15 bp, Homo sapiens
tctgccaaaagtcct

SEQ ID NO: 1365431 - DNA, 15 bp, Homo sapiens
ctctgccaaaagtcc

SEQ ID NO: 1365432 - DNA, 15 bp, Homo sapiens
cctctgccaaaagtc

SEQ ID NO: 1365433 - DNA, 15 bp, Homo sapiens
tcctctgccaaaagt

SEQ ID NO: 1365434 - DNA, 15 bp, Homo sapiens
ttcctctgccaaaag

SEQ ID NO: 1365435 - DNA, 15 bp, Homo sapiens
attcctctgccaaaa

SEQ ID NO: 1365436 - DNA, 15 bp, Homo sapiens
cattcctctgccaaa

SEQ ID NO: 1365437 - DNA, 15 bp, Homo sapiens
ccattcctctgccaa

SEQ ID NO: 1365438 - DNA, 15 bp, Homo sapiens
cccattcctctgcca

SEQ ID NO: 1365439 - DNA, 15 bp, Homo sapiens
tcccattcctctgcc

SEQ ID NO: 1365440 - DNA, 15 bp, Homo sapiens
ttcccattcctctgc

SEQ ID NO: 1365441 - DNA, 15 bp, Homo sapiens
tttcccattcctctg

SEQ ID NO: 1365442 - DNA, 15 bp, Homo sapiens
ctttcccattcctct

SEQ ID NO: 1365443 - DNA, 15 bp, Homo sapiens
tctttcccattcctc

SEQ ID NO: 1365444 - DNA, 15 bp, Homo sapiens
atctttcccattcct

SEQ ID NO: 1365445 - DNA, 15 bp, Homo sapiens
tatctttcccattcc

SEQ ID NO: 1365446 - DNA, 15 bp, Homo sapiens
ttatctttcccattc

SEQ ID NO: 1365447 - DNA, 15 bp, Homo sapiens
tttatctttcccatt

SEQ ID NO: 1365448 - DNA, 15 bp, Homo sapiens
ttttatctttcccat

SEQ ID NO: 1365449 - DNA, 15 bp, Homo sapiens
tttttatctttccca

SEQ ID NO: 1365450 - DNA, 15 bp, Homo sapiens
atttttatctttccc

SEQ ID NO: 1365451 - DNA, 15 bp, Homo sapiens
tatttttatctttcc

SEQ ID NO: 1365452 - DNA, 15 bp, Homo sapiens
ctatttttatctttc

SEQ ID NO: 1365453 - DNA, 15 bp, Homo sapiens
cctatttttatcttt

SEQ ID NO: 1365454 - DNA, 15 bp, Homo sapiens
tcctatttttatctt

SEQ ID NO: 1365455 - DNA, 15 bp, Homo sapiens
ttcctatttttatct

SEQ ID NO: 1365456 - DNA, 15 bp, Homo sapiens
tttttcctattttta

SEQ ID NO: 1365457 - DNA, 15 bp, Homo sapiens
ttttttcctattttt

SEQ ID NO: 1365458 - DNA, 15 bp, Homo sapiens
tttttttcctatttt

SEQ ID NO: 1365459 - DNA, 15 bp, Homo sapiens
atttttttcctattt

SEQ ID NO: 1365460 - DNA, 15 bp, Homo sapiens
gatttttttcctatt

SEQ ID NO: 1365461 - DNA, 15 bp, Homo sapiens
tgatttttttcctat

SEQ ID NO: 1365462 - DNA, 15 bp, Homo sapiens
ctgatttttttccta

SEQ ID NO: 1365463 - DNA, 15 bp, Homo sapiens
tctgatttttttcct

SEQ ID NO: 1365464 - DNA, 15 bp, Homo sapiens
tttctgatttttttc

SEQ ID NO: 1365465 - DNA, 15 bp, Homo sapiens
ttttctgattttttt

SEQ ID NO: 1365466 - DNA, 15 bp, Homo sapiens
gttttctgatttttt

SEQ ID NO: 1365467 - DNA, 15 bp, Homo sapiens
tgttttctgattttt

SEQ ID NO: 1365468 - DNA, 15 bp, Homo sapiens
ctgttttctgatttt

SEQ ID NO: 1365469 - DNA, 15 bp, Homo sapiens
tctgttttctgattt

SEQ ID NO: 1365470 - DNA, 15 bp, Homo sapiens
tttctgttttctgat

SEQ ID NO: 1365471 - DNA, 15 bp, Homo sapiens
ttttctgttttctga

SEQ ID NO: 1365472 - DNA, 15 bp, Homo sapiens
cttttctgttttctg

SEQ ID NO: 1365473 - DNA, 15 bp, Homo sapiens
ccttttctgttttct

SEQ ID NO: 1365474 - DNA, 15 bp, Homo sapiens
tccttttctgttttc

SEQ ID NO: 1365475 - DNA, 15 bp, Homo sapiens
atccttttctgtttt

SEQ ID NO: 1365476 - DNA, 15 bp, Homo sapiens
tatccttttctgttt

SEQ ID NO: 1365477 - DNA, 15 bp, Homo sapiens
ttatccttttctgtt

SEQ ID NO: 1365478 - DNA, 15 bp, Homo sapiens
attatccttttctgt

SEQ ID NO: 1365479 - DNA, 15 bp, Homo sapiens
aattatccttttctg

SEQ ID NO: 1365480 - DNA, 15 bp, Homo sapiens
aaattatccttttct

SEQ ID NO: 1365481 - DNA, 15 bp, Homo sapiens
caaattatccttttc

SEQ ID NO: 1365482 - DNA, 15 bp, Homo sapiens
ccaaattatcctttt

SEQ ID NO: 1365483 - DNA, 15 bp, Homo sapiens
accaaattatccttt

SEQ ID NO: 1365484 - DNA, 15 bp, Homo sapiens
taccaaattatcctt

SEQ ID NO: 1365485 - DNA, 15 bp, Homo sapiens
ctaccaaattatcct

SEQ ID NO: 1365486 - DNA, 15 bp, Homo sapiens
gctaccaaattatcc

SEQ ID NO: 1365487 - DNA, 15 bp, Homo sapiens
ggctaccaaattatc

SEQ ID NO: 1365488 - DNA, 15 bp, Homo sapiens
gggctaccaaattat

SEQ ID NO: 1365489 - DNA, 15 bp, Homo sapiens
tgggctaccaaatta

SEQ ID NO: 1365490 - DNA, 15 bp, Homo sapiens
ttgggctaccaaatt

SEQ ID NO: 1365491 - DNA, 15 bp, Homo sapiens
attgggctaccaaat

SEQ ID NO: 1365492 - DNA, 15 bp, Homo sapiens
cattgggctaccaaa

SEQ ID NO: 1365493 - DNA, 15 bp, Homo sapiens
acattgggctaccaa

SEQ ID NO: 1365494 - DNA, 15 bp, Homo sapiens
cacattgggctacca

SEQ ID NO: 1365495 - DNA, 15 bp, Homo sapiens
tcacattgggctacc

SEQ ID NO: 1365496 - DNA, 15 bp, Homo sapiens
gtcacattgggctac

SEQ ID NO: 1365497 - DNA, 15 bp, Homo sapiens
ggtcacattgggcta

SEQ ID NO: 1365498 - DNA, 15 bp, Homo sapiens
tggtcacattgggct

SEQ ID NO: 1365499 - DNA, 15 bp, Homo sapiens
ctggtcacattgggc

SEQ ID NO: 1365500 - DNA, 15 bp, Homo sapiens
cctggtcacattggg

SEQ ID NO: 1365501 - DNA, 15 bp, Homo sapiens
tcctggtcacattgg

SEQ ID NO: 1365502 - DNA, 15 bp, Homo sapiens
ttcctggtcacattg

SEQ ID NO: 1365503 - DNA, 15 bp, Homo sapiens
gttcctggtcacatt

SEQ ID NO: 1365504 - DNA, 15 bp, Homo sapiens
agttcctggtcacat

SEQ ID NO: 1365505 - DNA, 15 bp, Homo sapiens
aagttcctggtcaca

SEQ ID NO: 1365506 - DNA, 15 bp, Homo sapiens
caagttcctggtcac

SEQ ID NO: 1365507 - DNA, 15 bp, Homo sapiens
ccaagttcctggtca

SEQ ID NO: 1365508 - DNA, 15 bp, Homo sapiens
tccaagttcctggtc

SEQ ID NO: 1365509 - DNA, 15 bp, Homo sapiens
ctccaagttcctggt

SEQ ID NO: 1365510 - DNA, 15 bp, Homo sapiens
gctccaagttcctgg

SEQ ID NO: 1365511 - DNA, 15 bp, Homo sapiens
agctccaagttcctg

SEQ ID NO: 1365512 - DNA, 15 bp, Homo sapiens
cagctccaagttcct

SEQ ID NO: 1365513 - DNA, 15 bp, Homo sapiens
gcagctccaagttcc

SEQ ID NO: 1365514 - DNA, 15 bp, Homo sapiens
ggcagctccaagttc

SEQ ID NO: 1365515 - DNA, 15 bp, Homo sapiens
gggcagctccaagtt

SEQ ID NO: 1365516 - DNA, 15 bp, Homo sapiens
tgggcagctccaagt

SEQ ID NO: 1365517 - DNA, 15 bp, Homo sapiens
ctgggcagctccaag

SEQ ID NO: 1365518 - DNA, 15 bp, Homo sapiens
actgggcagctccaa

SEQ ID NO: 1365519 - DNA, 15 bp, Homo sapiens
aactgggcagctcca

SEQ ID NO: 1365520 - DNA, 15 bp, Homo sapiens
caactgggcagctcc

SEQ ID NO: 1365521 - DNA, 15 bp, Homo sapiens
tcaactgggcagctc

SEQ ID NO: 1365522 - DNA, 15 bp, Homo sapiens
ctcaactgggcagct

SEQ ID NO: 1365523 - DNA, 15 bp, Homo sapiens
actcaactgggcagc

SEQ ID NO: 1365524 - DNA, 15 bp, Homo sapiens
cactcaactgggcag

SEQ ID NO: 1365525 - DNA, 15 bp, Homo sapiens
ccactcaactgggca

SEQ ID NO: 1365526 - DNA, 15 bp, Homo sapiens
gccactcaactgggc

SEQ ID NO: 1365527 - DNA, 15 bp, Homo sapiens
agccactcaactggg

SEQ ID NO: 1365528 - DNA, 15 bp, Homo sapiens
cagccactcaactgg

SEQ ID NO: 1365529 - DNA, 15 bp, Homo sapiens
ccagccactcaactg

SEQ ID NO: 1365530 - DNA, 15 bp, Homo sapiens
tccagccactcaact

SEQ ID NO: 1365531 - DNA, 15 bp, Homo sapiens
ttccagccactcaac

SEQ ID NO: 1365532 - DNA, 15 bp, Homo sapiens
cttccagccactcaa

SEQ ID NO: 1365533 - DNA, 15 bp, Homo sapiens
gcttccagccactca

SEQ ID NO: 1365534 - DNA, 15 bp, Homo sapiens
agcttccagccactc

SEQ ID NO: 1365535 - DNA, 15 bp, Homo sapiens
cagcttccagccact

SEQ ID NO: 1365536 - DNA, 15 bp, Homo sapiens
ccagcttccagccac

SEQ ID NO: 1365537 - DNA, 15 bp, Homo sapiens
tccagcttccagcca

SEQ ID NO: 1365538 - DNA, 15 bp, Homo sapiens
ttccagcttccagcc

SEQ ID NO: 1365539 - DNA, 15 bp, Homo sapiens
attccagcttccagc

SEQ ID NO: 1365540 - DNA, 15 bp, Homo sapiens
cattccagcttccag

SEQ ID NO: 1365541 - DNA, 15 bp, Homo sapiens
tcattccagcttcca

SEQ ID NO: 1365542 - DNA, 15 bp, Homo sapiens
ttcattccagcttcc

SEQ ID NO: 1365543 - DNA, 15 bp, Homo sapiens
cttcattccagcttc

SEQ ID NO: 1365544 - DNA, 15 bp, Homo sapiens
tcttcattccagctt

SEQ ID NO: 1365545 - DNA, 15 bp, Homo sapiens
ttcttcattccagct

SEQ ID NO: 1365546 - DNA, 15 bp, Homo sapiens
gttcttcattccagc

SEQ ID NO: 1365547 - DNA, 15 bp, Homo sapiens
agttcttcattccag

SEQ ID NO: 1365548 - DNA, 15 bp, Homo sapiens
aagttcttcattcca

SEQ ID NO: 1365549 - DNA, 15 bp, Homo sapiens
caagttcttcattcc

SEQ ID NO: 1365550 - DNA, 15 bp, Homo sapiens
acaagttcttcattc

SEQ ID NO: 1365551 - DNA, 15 bp, Homo sapiens
gacaagttcttcatt

SEQ ID NO: 1365552 - DNA, 15 bp, Homo sapiens
agacaagttcttcat

SEQ ID NO: 1365553 - DNA, 15 bp, Homo sapiens
cagacaagttcttca

SEQ ID NO: 1365554 - DNA, 15 bp, Homo sapiens
gcagacaagttcttc

SEQ ID NO: 1365555 - DNA, 15 bp, Homo sapiens
tgcagacaagttctt

SEQ ID NO: 1365556 - DNA, 15 bp, Homo sapiens
ttgcagacaagttct

SEQ ID NO: 1365557 - DNA, 15 bp, Homo sapiens
gttgcagacaagttc

SEQ ID NO: 1365558 - DNA, 15 bp, Homo sapiens
tgttgcagacaagtt

SEQ ID NO: 1365559 - DNA, 15 bp, Homo sapiens
atgttgcagacaagt

SEQ ID NO: 1365560 - DNA, 15 bp, Homo sapiens
catgttgcagacaag

SEQ ID NO: 1365561 - DNA, 15 bp, Homo sapiens
ccatgttgcagacaa

SEQ ID NO: 1365562 - DNA, 15 bp, Homo sapiens
gccatgttgcagaca

SEQ ID NO: 1365563 - DNA, 15 bp, Homo sapiens
ggccatgttgcagac

SEQ ID NO: 1365564 - DNA, 15 bp, Homo sapiens
tggccatgttgcaga

SEQ ID NO: 1365565 - DNA, 15 bp, Homo sapiens
ctggccatgttgcag

SEQ ID NO: 1365566 - DNA, 15 bp, Homo sapiens
actggccatgttgca

SEQ ID NO: 1365567 - DNA, 15 bp, Homo sapiens
cactggccatgttgc

SEQ ID NO: 1365568 - DNA, 15 bp, Homo sapiens
tcactggccatgttg

SEQ ID NO: 1365569 - DNA, 15 bp, Homo sapiens
ttctcactggccatg

SEQ ID NO: 1365570 - DNA, 15 bp, Homo sapiens
tttctcactggccat

SEQ ID NO: 1365571 - DNA, 15 bp, Homo sapiens
atttctcactggcca

SEQ ID NO: 1365572 - DNA, 15 bp, Homo sapiens
tatttctcactggcc

SEQ ID NO: 1365573 - DNA, 15 bp, Homo sapiens
ttatttctcactggc

SEQ ID NO: 1365574 - DNA, 15 bp, Homo sapiens
gttatttctcactgg

SEQ ID NO: 1365575 - DNA, 15 bp, Homo sapiens
tgttatttctcactg

SEQ ID NO: 1365576 - DNA, 15 bp, Homo sapiens
gtgttatttctcact

SEQ ID NO: 1365577 - DNA, 15 bp, Homo sapiens
ggtgttatttctcac

SEQ ID NO: 1365578 - DNA, 15 bp, Homo sapiens
tggtgttatttctca

SEQ ID NO: 1365579 - DNA, 15 bp, Homo sapiens
ctggtgttatttctc

SEQ ID NO: 1365580 - DNA, 15 bp, Homo sapiens
cctggtgttatttct

SEQ ID NO: 1365581 - DNA, 15 bp, Homo sapiens
tcctggtgttatttc

SEQ ID NO: 1365582 - DNA, 15 bp, Homo sapiens
gtcctggtgttattt

SEQ ID NO: 1365583 - DNA, 15 bp, Homo sapiens
ggtcctggtgttatt

SEQ ID NO: 1365584 - DNA, 15 bp, Homo sapiens
gggtcctggtgttat

SEQ ID NO: 1365585 - DNA, 15 bp, Homo sapiens
tgggtcctggtgtta

SEQ ID NO: 1365586 - DNA, 15 bp, Homo sapiens
atgggtcctggtgtt

SEQ ID NO: 1365587 - DNA, 15 bp, Homo sapiens
gatgggtcctggtgt

SEQ ID NO: 1365588 - DNA, 15 bp, Homo sapiens
tgatgggtcctggtg

SEQ ID NO: 1365589 - DNA, 15 bp, Homo sapiens
ctgatgggtcctggt

SEQ ID NO: 1365590 - DNA, 15 bp, Homo sapiens
cctgatgggtcctgg

SEQ ID NO: 1365591 - DNA, 15 bp, Homo sapiens
ccctgatgggtcctg

SEQ ID NO: 1365592 - DNA, 15 bp, Homo sapiens
accctgatgggtcct

SEQ ID NO: 1365593 - DNA, 15 bp, Homo sapiens
gaccctgatgggtcc

SEQ ID NO: 1365594 - DNA, 15 bp, Homo sapiens
ggaccctgatgggtc

SEQ ID NO: 1365595 - DNA, 15 bp, Homo sapiens
tggaccctgatgggt

SEQ ID NO: 1365596 - DNA, 15 bp, Homo sapiens
atggaccctgatggg

SEQ ID NO: 1365597 - DNA, 15 bp, Homo sapiens
gatggaccctgatgg

SEQ ID NO: 1365598 - DNA, 15 bp, Homo sapiens
agatggaccctgatg

SEQ ID NO: 1365599 - DNA, 15 bp, Homo sapiens
cagatggaccctgat

SEQ ID NO: 1365600 - DNA, 15 bp, Homo sapiens
ccagatggaccctga

SEQ ID NO: 1365601 - DNA, 15 bp, Homo sapiens
cccagatggaccctg

SEQ ID NO: 1365602 - DNA, 15 bp, Homo sapiens
acccagatggaccct

SEQ ID NO: 1365603 - DNA, 15 bp, Homo sapiens
aacccagatggaccc

SEQ ID NO: 1365604 - DNA, 15 bp, Homo sapiens
taacccagatggacc

SEQ ID NO: 1365605 - DNA, 15 bp, Homo sapiens
ctaacccagatggac

SEQ ID NO: 1365606 - DNA, 15 bp, Homo sapiens
cctaacccagatgga

SEQ ID NO: 1365607 - DNA, 15 bp, Homo sapiens
gcctaacccagatgg

SEQ ID NO: 1365608 - DNA, 15 bp, Homo sapiens
agcctaacccagatg

SEQ ID NO: 1365609 - DNA, 15 bp, Homo sapiens
gagcctaacccagat

SEQ ID NO: 1365610 - DNA, 15 bp, Homo sapiens
tgagcctaacccaga

SEQ ID NO: 1365611 - DNA, 15 bp, Homo sapiens
ttgagcctaacccag

SEQ ID NO: 1365612 - DNA, 15 bp, Homo sapiens
gttgagcctaaccca

SEQ ID NO: 1365613 - DNA, 15 bp, Homo sapiens
tgttgagcctaaccc

SEQ ID NO: 1365614 - DNA, 15 bp, Homo sapiens
gtgttgagcctaacc

SEQ ID NO: 1365615 - DNA, 15 bp, Homo sapiens
agtgttgagcctaac

SEQ ID NO: 1365616 - DNA, 15 bp, Homo sapiens
cagtgttgagcctaa

SEQ ID NO: 1365617 - DNA, 15 bp, Homo sapiens
tcagtgttgagccta

SEQ ID NO: 1365618 - DNA, 15 bp, Homo sapiens
atcagtgttgagcct

SEQ ID NO: 1365619 - DNA, 15 bp, Homo sapiens
aatcagtgttgagcc

SEQ ID NO: 1365620 - DNA, 15 bp, Homo sapiens
aaatcagtgttgagc

SEQ ID NO: 1365621 - DNA, 15 bp, Homo sapiens
gaaatcagtgttgag

SEQ ID NO: 1365622 - DNA, 15 bp, Homo sapiens
ggaaatcagtgttga

SEQ ID NO: 1365623 - DNA, 15 bp, Homo sapiens
aggaaatcagtgttg

SEQ ID NO: 1365624 - DNA, 15 bp, Homo sapiens
aaggaaatcagtgtt

SEQ ID NO: 1365625 - DNA, 15 bp, Homo sapiens
caaggaaatcagtgt

SEQ ID NO: 1365626 - DNA, 15 bp, Homo sapiens
gcaaggaaatcagtg

SEQ ID NO: 1365627 - DNA, 15 bp, Homo sapiens
agcaaggaaatcagt

SEQ ID NO: 1365628 - DNA, 15 bp, Homo sapiens
aagcaaggaaatcag

SEQ ID NO: 1365629 - DNA, 15 bp, Homo sapiens
aaagcaaggaaatca

SEQ ID NO: 1365630 - DNA, 15 bp, Homo sapiens
caaagcaaggaaatc

SEQ ID NO: 1365631 - DNA, 15 bp, Homo sapiens
gcaaagcaaggaaat

SEQ ID NO: 1365632 - DNA, 15 bp, Homo sapiens
agcaaagcaaggaaa

SEQ ID NO: 1365633 - DNA, 15 bp, Homo sapiens
cagcaaagcaaggaa

SEQ ID NO: 1365634 - DNA, 15 bp, Homo sapiens
acagcaaagcaagga

SEQ ID NO: 1365635 - DNA, 15 bp, Homo sapiens
gacagcaaagcaagg

SEQ ID NO: 1365636 - DNA, 15 bp, Homo sapiens
agacagcaaagcaag

SEQ ID NO: 1365637 - DNA, 15 bp, Homo sapiens
aagacagcaaagcaa

SEQ ID NO: 1365638 - DNA, 15 bp, Homo sapiens
aaagacagcaaagca

SEQ ID NO: 1365639 - DNA, 15 bp, Homo sapiens
taaagacagcaaagc

SEQ ID NO: 1365640 - DNA, 15 bp, Homo sapiens
ttaaagacagcaaag

SEQ ID NO: 1365641 - DNA, 15 bp, Homo sapiens
tttaaagacagcaaa

SEQ ID NO: 1365642 - DNA, 15 bp, Homo sapiens
ttttaaagacagcaa

SEQ ID NO: 1365643 - DNA, 15 bp, Homo sapiens
attttaaagacagca

SEQ ID NO: 1365644 - DNA, 15 bp, Homo sapiens
gattttaaagacagc

SEQ ID NO: 1365645 - DNA, 15 bp, Homo sapiens
tgattttaaagacag

SEQ ID NO: 1365646 - DNA, 15 bp, Homo sapiens
ttgattttaaagaca

SEQ ID NO: 1365647 - DNA, 15 bp, Homo sapiens
attgattttaaagac

SEQ ID NO: 1365648 - DNA, 15 bp, Homo sapiens
aattgattttaaaga

SEQ ID NO: 1365649 - DNA, 15 bp, Homo sapiens
aaattgattttaaag

SEQ ID NO: 1365650 - DNA, 15 bp, Homo sapiens
aaaattgattttaaa

SEQ ID NO: 1365651 - DNA, 15 bp, Homo sapiens
aaaaattgattttaa

SEQ ID NO: 1365652 - DNA, 15 bp, Homo sapiens
aaaaaattgatttta

SEQ ID NO: 1365653 - DNA, 15 bp, Homo sapiens
taaaaaattgatttt

SEQ ID NO: 1365654 - DNA, 15 bp, Homo sapiens
ctaaaaaattgattt

SEQ ID NO: 1365655 - DNA, 15 bp, Homo sapiens
actaaaaaattgatt

SEQ ID NO: 1365656 - DNA, 15 bp, Homo sapiens
tactaaaaaattgat

SEQ ID NO: 1365657 - DNA, 15 bp, Homo sapiens
gtactaaaaaattga

SEQ ID NO: 1365658 - DNA, 15 bp, Homo sapiens
ggtactaaaaaattg

SEQ ID NO: 1365659 - DNA, 15 bp, Homo sapiens
aggtactaaaaaatt

SEQ ID NO: 1365660 - DNA, 15 bp, Homo sapiens
caggtactaaaaaat

SEQ ID NO: 1365661 - DNA, 15 bp, Homo sapiens
acaggtactaaaaaa

SEQ ID NO: 1365662 - DNA, 15 bp, Homo sapiens
tacaggtactaaaaa

SEQ ID NO: 1365663 - DNA, 15 bp, Homo sapiens
ctacaggtactaaaa

SEQ ID NO: 1365664 - DNA, 15 bp, Homo sapiens
cctacaggtactaaa

SEQ ID NO: 1365665 - DNA, 15 bp, Homo sapiens
ccctacaggtactaa

SEQ ID NO: 1365666 - DNA, 15 bp, Homo sapiens
tccctacaggtacta

SEQ ID NO: 1365667 - DNA, 15 bp, Homo sapiens
atccctacaggtact

SEQ ID NO: 1365668 - DNA, 15 bp, Homo sapiens
gatccctacaggtac

SEQ ID NO: 1365669 - DNA, 15 bp, Homo sapiens
tgatccctacaggta

SEQ ID NO: 1365670 - DNA, 15 bp, Homo sapiens
ctgatccctacaggt

SEQ ID NO: 1365671 - DNA, 15 bp, Homo sapiens
gctgatccctacagg

SEQ ID NO: 1365672 - DNA, 15 bp, Homo sapiens
ggctgatccctacag

SEQ ID NO: 1365673 - DNA, 15 bp, Homo sapiens
tggctgatccctaca

SEQ ID NO: 1365674 - DNA, 15 bp, Homo sapiens
ttggctgatccctac

SEQ ID NO: 1365675 - DNA, 15 bp, Homo sapiens
gttggctgatcccta

SEQ ID NO: 1365676 - DNA, 15 bp, Homo sapiens
agttggctgatccct

SEQ ID NO: 1365677 - DNA, 15 bp, Homo sapiens
cagttggctgatccc

SEQ ID NO: 1365678 - DNA, 15 bp, Homo sapiens
acagttggctgatcc

SEQ ID NO: 1365679 - DNA, 15 bp, Homo sapiens
tacagttggctgatc

SEQ ID NO: 1365680 - DNA, 15 bp, Homo sapiens
atacagttggctgat

SEQ ID NO: 1365681 - DNA, 15 bp, Homo sapiens
catacagttggctga

SEQ ID NO: 1365682 - DNA, 15 bp, Homo sapiens
acatacagttggctg

SEQ ID NO: 1365683 - DNA, 15 bp, Homo sapiens
gacatacagttggct

SEQ ID NO: 1365684 - DNA, 15 bp, Homo sapiens
agacatacagttggc

SEQ ID NO: 1365685 - DNA, 15 bp, Homo sapiens
gagacatacagttgg

SEQ ID NO: 1365686 - DNA, 15 bp, Homo sapiens
tgagacatacagttg

SEQ ID NO: 1365687 - DNA, 15 bp, Homo sapiens
gtgagacatacagtt

SEQ ID NO: 1365688 - DNA, 15 bp, Homo sapiens
ggtgagacatacagt

SEQ ID NO: 1365689 - DNA, 15 bp, Homo sapiens
cggtgagacatacag

SEQ ID NO: 1365690 - DNA, 15 bp, Homo sapiens
acggtgagacataca

SEQ ID NO: 1365691 - DNA, 15 bp, Homo sapiens
gacggtgagacatac

SEQ ID NO: 1365692 - DNA, 15 bp, Homo sapiens
agacggtgagacata

SEQ ID NO: 1365693 - DNA, 15 bp, Homo sapiens
tagacggtgagacat

SEQ ID NO: 1365694 - DNA, 15 bp, Homo sapiens
atagacggtgagaca

SEQ ID NO: 1365695 - DNA, 15 bp, Homo sapiens
tatagacggtgagac

SEQ ID NO: 1365696 - DNA, 15 bp, Homo sapiens
gtatagacggtgaga

SEQ ID NO: 1365697 - DNA, 15 bp, Homo sapiens
cgtatagacggtgag

SEQ ID NO: 1365698 - DNA, 15 bp, Homo sapiens
tcgtatagacggtga

SEQ ID NO: 1365699 - DNA, 15 bp, Homo sapiens
atcgtatagacggtg

SEQ ID NO: 1365700 - DNA, 15 bp, Homo sapiens
tatcgtatagacggt

SEQ ID NO: 1365701 - DNA, 15 bp, Homo sapiens
ttatcgtatagacgg

SEQ ID NO: 1365702 - DNA, 15 bp, Homo sapiens
attatcgtatagacg

SEQ ID NO: 1365703 - DNA, 15 bp, Homo sapiens
cattatcgtatagac

SEQ ID NO: 1365704 - DNA, 15 bp, Homo sapiens
ccattatcgtataga

SEQ ID NO: 1365705 - DNA, 15 bp, Homo sapiens
gccattatcgtatag

SEQ ID NO: 1365706 - DNA, 15 bp, Homo sapiens
tgccattatcgtata

SEQ ID NO: 1365707 - DNA, 15 bp, Homo sapiens
ttgccattatcgtat

SEQ ID NO: 1365708 - DNA, 15 bp, Homo sapiens
tttgccattatcgta

SEQ ID NO: 1365709 - DNA, 15 bp, Homo sapiens
atttgccattatcgt

SEQ ID NO: 1365710 - DNA, 15 bp, Homo sapiens
tatttgccattatcg

SEQ ID NO: 1365711 - DNA, 15 bp, Homo sapiens
ttatttgccattatc

SEQ ID NO: 1365712 - DNA, 15 bp, Homo sapiens
attatttgccattat

SEQ ID NO: 1365713 - DNA, 15 bp, Homo sapiens
tattatttgccatta

SEQ ID NO: 1365714 - DNA, 15 bp, Homo sapiens
ttattatttgccatt

SEQ ID NO: 1365715 - DNA, 15 bp, Homo sapiens
attattatttgccat

SEQ ID NO: 1365716 - DNA, 15 bp, Homo sapiens
aattattatttgcca

SEQ ID NO: 1365717 - DNA, 15 bp, Homo sapiens
aaattattatttgcc

SEQ ID NO: 1365718 - DNA, 15 bp, Homo sapiens
aaaattattatttgc

SEQ ID NO: 1365719 - DNA, 15 bp, Homo sapiens
aaaaattattatttg

SEQ ID NO: 1365720 - DNA, 15 bp, Homo sapiens
aaaaaattattattt

SEQ ID NO: 1365721 - DNA, 15 bp, Homo sapiens
caaaaaattattatt

SEQ ID NO: 1365722 - DNA, 15 bp, Homo sapiens
acaaaaaattattat

SEQ ID NO: 1365723 - DNA, 15 bp, Homo sapiens
aacaaaaaattatta

SEQ ID NO: 1365724 - DNA, 15 bp, Homo sapiens
caacaaaaaattatt

SEQ ID NO: 1365725 - DNA, 15 bp, Homo sapiens
acaacaaaaaattat

SEQ ID NO: 1365726 - DNA, 15 bp, Homo sapiens
aacaacaaaaaatta

SEQ ID NO: 1365727 - DNA, 15 bp, Homo sapiens
caacaacaaaaaatt

SEQ ID NO: 1365728 - DNA, 15 bp, Homo sapiens
ccaacaacaaaaaat

SEQ ID NO: 1365729 - DNA, 15 bp, Homo sapiens
gccaacaacaaaaaa

SEQ ID NO: 1365730 - DNA, 15 bp, Homo sapiens
tgccaacaacaaaaa

SEQ ID NO: 1365731 - DNA, 15 bp, Homo sapiens
atgccaacaacaaaa

SEQ ID NO: 1365732 - DNA, 15 bp, Homo sapiens
aatgccaacaacaaa

SEQ ID NO: 1365733 - DNA, 15 bp, Homo sapiens
aaatgccaacaacaa

SEQ ID NO: 1365734 - DNA, 15 bp, Homo sapiens
caaatgccaacaaca

SEQ ID NO: 1365735 - DNA, 15 bp, Homo sapiens
tcaaatgccaacaac

SEQ ID NO: 1365736 - DNA, 15 bp, Homo sapiens
ctcaaatgccaacaa

SEQ ID NO: 1365737 - DNA, 15 bp, Homo sapiens
tctcaaatgccaaca

SEQ ID NO: 1365738 - DNA, 15 bp, Homo sapiens
ctctcaaatgccaac

SEQ ID NO: 1365739 - DNA, 15 bp, Homo sapiens
gctctcaaatgccaa

SEQ ID NO: 1365740 - DNA, 15 bp, Homo sapiens
tgctctcaaatgcca

SEQ ID NO: 1365741 - DNA, 15 bp, Homo sapiens
atgctctcaaatgcc

SEQ ID NO: 1365742 - DNA, 15 bp, Homo sapiens
aatgctctcaaatgc

SEQ ID NO: 1365743 - DNA, 15 bp, Homo sapiens
taatgctctcaaatg

SEQ ID NO: 1365744 - DNA, 15 bp, Homo sapiens
ataatgctctcaaat

SEQ ID NO: 1365745 - DNA, 15 bp, Homo sapiens
aataatgctctcaaa

SEQ ID NO: 1365746 - DNA, 15 bp, Homo sapiens
aaataatgctctcaa

SEQ ID NO: 1365747 - DNA, 15 bp, Homo sapiens
taaataatgctctca

SEQ ID NO: 1365748 - DNA, 15 bp, Homo sapiens
ttaaataatgctctc

SEQ ID NO: 1365749 - DNA, 15 bp, Homo sapiens
cttaaataatgctct

SEQ ID NO: 1365750 - DNA, 15 bp, Homo sapiens
acttaaataatgctc

SEQ ID NO: 1365751 - DNA, 15 bp, Homo sapiens
tacttaaataatgct

SEQ ID NO: 1365752 - DNA, 15 bp, Homo sapiens
gtacttaaataatgc

SEQ ID NO: 1365753 - DNA, 15 bp, Homo sapiens
ggtacttaaataatg

SEQ ID NO: 1365754 - DNA, 15 bp, Homo sapiens
gggtacttaaataat

SEQ ID NO: 1365755 - DNA, 15 bp, Homo sapiens
ggggtacttaaataa

SEQ ID NO: 1365756 - DNA, 15 bp, Homo sapiens
gggggtacttaaata

SEQ ID NO: 1365757 - DNA, 15 bp, Homo sapiens
tgggggtacttaaat

SEQ ID NO: 1365758 - DNA, 15 bp, Homo sapiens
atgggggtacttaaa

SEQ ID NO: 1365759 - DNA, 15 bp, Homo sapiens
aatgggggtacttaa

SEQ ID NO: 1365760 - DNA, 15 bp, Homo sapiens
taatgggggtactta

SEQ ID NO: 1365761 - DNA, 15 bp, Homo sapiens
gtaatgggggtactt

SEQ ID NO: 1365762 - DNA, 15 bp, Homo sapiens
agtaatgggggtact

SEQ ID NO: 1365763 - DNA, 15 bp, Homo sapiens
cagtaatgggggtac

SEQ ID NO: 1365764 - DNA, 15 bp, Homo sapiens
tcagtaatgggggta

SEQ ID NO: 1365765 - DNA, 15 bp, Homo sapiens
ctcagtaatgggggt

SEQ ID NO: 1365766 - DNA, 15 bp, Homo sapiens
cctcagtaatggggg

SEQ ID NO: 1365767 - DNA, 15 bp, Homo sapiens
tgcctcagtaatggg

SEQ ID NO: 1365768 - DNA, 15 bp, Homo sapiens
atgcctcagtaatgg

SEQ ID NO: 1365769 - DNA, 15 bp, Homo sapiens
gatgcctcagtaatg

SEQ ID NO: 1365770 - DNA, 15 bp, Homo sapiens
agatgcctcagtaat

SEQ ID NO: 1365771 - DNA, 15 bp, Homo sapiens
gagatgcctcagtaa

SEQ ID NO: 1365772 - DNA, 15 bp, Homo sapiens
tgagatgcctcagta

SEQ ID NO: 1365773 - DNA, 15 bp, Homo sapiens
ctgagatgcctcagt

SEQ ID NO: 1365774 - DNA, 15 bp, Homo sapiens
gctgagatgcctcag

SEQ ID NO: 1365775 - DNA, 15 bp, Homo sapiens
ggctgagatgcctca

SEQ ID NO: 1365776 - DNA, 15 bp, Homo sapiens
tggctgagatgcctc

SEQ ID NO: 1365777 - DNA, 15 bp, Homo sapiens
ttggctgagatgcct

SEQ ID NO: 1365778 - DNA, 15 bp, Homo sapiens
gttggctgagatgcc

SEQ ID NO: 1365779 - DNA, 15 bp, Homo sapiens
agttggctgagatgc

SEQ ID NO: 1365780 - DNA, 15 bp, Homo sapiens
aagttggctgagatg

SEQ ID NO: 1365781 - DNA, 15 bp, Homo sapiens
gaagttggctgagat

SEQ ID NO: 1365782 - DNA, 15 bp, Homo sapiens
ggaagttggctgaga

SEQ ID NO: 1365783 - DNA, 15 bp, Homo sapiens
gggaagttggctgag

SEQ ID NO: 1365784 - DNA, 15 bp, Homo sapiens
agggaagttggctga

SEQ ID NO: 1365785 - DNA, 15 bp, Homo sapiens
cagggaagttggctg

SEQ ID NO: 1365786 - DNA, 15 bp, Homo sapiens
gcagggaagttggct

SEQ ID NO: 1365787 - DNA, 15 bp, Homo sapiens
agcagggaagttggc

SEQ ID NO: 1365788 - DNA, 15 bp, Homo sapiens
cagcagggaagttgg

SEQ ID NO: 1365789 - DNA, 15 bp, Homo sapiens
tcagcagggaagttg

SEQ ID NO: 1365790 - DNA, 15 bp, Homo sapiens
ctcagcagggaagtt

SEQ ID NO: 1365791 - DNA, 15 bp, Homo sapiens
cctcagcagggaagt

SEQ ID NO: 1365792 - DNA, 15 bp, Homo sapiens
ccctcagcagggaag

SEQ ID NO: 1365793 - DNA, 15 bp, Homo sapiens
accctcagcagggaa

SEQ ID NO: 1365794 - DNA, 15 bp, Homo sapiens
taccctcagcaggga

SEQ ID NO: 1365795 - DNA, 15 bp, Homo sapiens
gtaccctcagcaggg

SEQ ID NO: 1365796 - DNA, 15 bp, Homo sapiens
agtaccctcagcagg

SEQ ID NO: 1365797 - DNA, 15 bp, Homo sapiens
aagtaccctcagcag

SEQ ID NO: 1365798 - DNA, 15 bp, Homo sapiens
gaagtaccctcagca

SEQ ID NO: 1365799 - DNA, 15 bp, Homo sapiens
ggaagtaccctcagc

SEQ ID NO: 1365800 - DNA, 15 bp, Homo sapiens
gggaagtaccctcag

SEQ ID NO: 1365801 - DNA, 15 bp, Homo sapiens
agggaagtaccctca

SEQ ID NO: 1365802 - DNA, 15 bp, Homo sapiens
aagggaagtaccctc

SEQ ID NO: 1365803 - DNA, 15 bp, Homo sapiens
gaagggaagtaccct

SEQ ID NO: 1365804 - DNA, 15 bp, Homo sapiens
ggaagggaagtaccc

SEQ ID NO: 1365805 - DNA, 15 bp, Homo sapiens
tggaagggaagtacc

SEQ ID NO: 1365806 - DNA, 15 bp, Homo sapiens
gtggaagggaagtac

SEQ ID NO: 1365807 - DNA, 15 bp, Homo sapiens
agtggaagggaagta

SEQ ID NO: 1365808 - DNA, 15 bp, Homo sapiens
aagtggaagggaagt

SEQ ID NO: 1365809 - DNA, 15 bp, Homo sapiens
caagtggaagggaag

SEQ ID NO: 1365810 - DNA, 15 bp, Homo sapiens
acaagtggaagggaa

SEQ ID NO: 1365811 - DNA, 15 bp, Homo sapiens
gacaagtggaaggga

SEQ ID NO: 1365812 - DNA, 15 bp, Homo sapiens
agacaagtggaaggg

SEQ ID NO: 1365813 - DNA, 15 bp, Homo sapiens
aagacaagtggaagg

SEQ ID NO: 1365814 - DNA, 15 bp, Homo sapiens
taagacaagtggaag

SEQ ID NO: 1365815 - DNA, 15 bp, Homo sapiens
ttaagacaagtggaa

SEQ ID NO: 1365816 - DNA, 15 bp, Homo sapiens
tttaagacaagtgga

SEQ ID NO: 1365817 - DNA, 15 bp, Homo sapiens
ttttaagacaagtgg

SEQ ID NO: 1365818 - DNA, 15 bp, Homo sapiens
gttttaagacaagtg

SEQ ID NO: 1365819 - DNA, 15 bp, Homo sapiens
agttttaagacaagt

SEQ ID NO: 1365820 - DNA, 15 bp, Homo sapiens
cagttttaagacaag

SEQ ID NO: 1365821 - DNA, 15 bp, Homo sapiens
ccagttttaagacaa

SEQ ID NO: 1365822 - DNA, 15 bp, Homo sapiens
gccagttttaagaca

SEQ ID NO: 1365823 - DNA, 15 bp, Homo sapiens
tgccagttttaagac

SEQ ID NO: 1365824 - DNA, 15 bp, Homo sapiens
gtgccagttttaaga

SEQ ID NO: 1365825 - DNA, 15 bp, Homo sapiens
tgtgccagttttaag

SEQ ID NO: 1365826 - DNA, 15 bp, Homo sapiens
ttgtgccagttttaa

SEQ ID NO: 1365827 - DNA, 15 bp, Homo sapiens
gttgtgccagtttta

SEQ ID NO: 1365828 - DNA, 15 bp, Homo sapiens
agttgtgccagtttt

SEQ ID NO: 1365829 - DNA, 15 bp, Homo sapiens
aagttgtgccagttt

SEQ ID NO: 1365830 - DNA, 15 bp, Homo sapiens
gaagttgtgccagtt

SEQ ID NO: 1365831 - DNA, 15 bp, Homo sapiens
ggaagttgtgccagt

SEQ ID NO: 1365832 - DNA, 15 bp, Homo sapiens
aggaagttgtgccag

SEQ ID NO: 1365833 - DNA, 15 bp, Homo sapiens
taggaagttgtgcca

SEQ ID NO: 1365834 - DNA, 15 bp, Homo sapiens
ttaggaagttgtgcc

SEQ ID NO: 1365835 - DNA, 15 bp, Homo sapiens
gttaggaagttgtgc

SEQ ID NO: 1365836 - DNA, 15 bp, Homo sapiens
tgttaggaagttgtg

SEQ ID NO: 1365837 - DNA, 15 bp, Homo sapiens
atgttaggaagttgt

SEQ ID NO: 1365838 - DNA, 15 bp, Homo sapiens
catgttaggaagttg

SEQ ID NO: 1365839 - DNA, 15 bp, Homo sapiens
tcatgttaggaagtt

SEQ ID NO: 1365840 - DNA, 15 bp, Homo sapiens
ttcatgttaggaagt

SEQ ID NO: 1365841 - DNA, 15 bp, Homo sapiens
gttcatgttaggaag

SEQ ID NO: 1365842 - DNA, 15 bp, Homo sapiens
ggttcatgttaggaa

SEQ ID NO: 1365843 - DNA, 15 bp, Homo sapiens
tggttcatgttagga

SEQ ID NO: 1365844 - DNA, 15 bp, Homo sapiens
ctggttcatgttagg

SEQ ID NO: 1365845 - DNA, 15 bp, Homo sapiens
actggttcatgttag

SEQ ID NO: 1365846 - DNA, 15 bp, Homo sapiens
aactggttcatgtta

SEQ ID NO: 1365847 - DNA, 15 bp, Homo sapiens
aaactggttcatgtt

SEQ ID NO: 1365848 - DNA, 15 bp, Homo sapiens
caaactggttcatgt

SEQ ID NO: 1365849 - DNA, 15 bp, Homo sapiens
tcaaactggttcatg

SEQ ID NO: 1365850 - DNA, 15 bp, Homo sapiens
gtcaaactggttcat

SEQ ID NO: 1365851 - DNA, 15 bp, Homo sapiens
agtcaaactggttca

SEQ ID NO: 1365852 - DNA, 15 bp, Homo sapiens
gagtcaaactggttc

SEQ ID NO: 1365853 - DNA, 15 bp, Homo sapiens
tgagtcaaactggtt

SEQ ID NO: 1365854 - DNA, 15 bp, Homo sapiens
ttgagtcaaactggt

SEQ ID NO: 1365855 - DNA, 15 bp, Homo sapiens
cttgagtcaaactgg

SEQ ID NO: 1365856 - DNA, 15 bp, Homo sapiens
acttgagtcaaactg

SEQ ID NO: 1365857 - DNA, 15 bp, Homo sapiens
tacttgagtcaaact

SEQ ID NO: 1365858 - DNA, 15 bp, Homo sapiens
ttacttgagtcaaac

SEQ ID NO: 1365859 - DNA, 15 bp, Homo sapiens
cttacttgagtcaaa

SEQ ID NO: 1365860 - DNA, 15 bp, Homo sapiens
ccttacttgagtcaa

SEQ ID NO: 1365861 - DNA, 15 bp, Homo sapiens
gccttacttgagtca

SEQ ID NO: 1365862 - DNA, 15 bp, Homo sapiens
ggccttacttgagtc

SEQ ID NO: 1365863 - DNA, 15 bp, Homo sapiens
aggccttacttgagt

SEQ ID NO: 1365864 - DNA, 15 bp, Homo sapiens
caggccttacttgag

SEQ ID NO: 1365865 - DNA, 15 bp, Homo sapiens
gcaggccttacttga

SEQ ID NO: 1365866 - DNA, 15 bp, Homo sapiens
agcaggccttacttg

SEQ ID NO: 1365867 - DNA, 15 bp, Homo sapiens
gagcaggccttactt

SEQ ID NO: 1365868 - DNA, 15 bp, Homo sapiens
agagcaggccttact

SEQ ID NO: 1365869 - DNA, 15 bp, Homo sapiens
aagagcaggccttac

SEQ ID NO: 1365870 - DNA, 15 bp, Homo sapiens
caagagcaggcctta

SEQ ID NO: 1365871 - DNA, 15 bp, Homo sapiens
tcaagagcaggcctt

SEQ ID NO: 1365872 - DNA, 15 bp, Homo sapiens
atcaagagcaggcct

SEQ ID NO: 1365873 - DNA, 15 bp, Homo sapiens
gatcaagagcaggcc

SEQ ID NO: 1365874 - DNA, 15 bp, Homo sapiens
agatcaagagcaggc

SEQ ID NO: 1365875 - DNA, 15 bp, Homo sapiens
cagatcaagagcagg

SEQ ID NO: 1365876 - DNA, 15 bp, Homo sapiens
tcagatcaagagcag

SEQ ID NO: 1365877 - DNA, 15 bp, Homo sapiens
ctcagatcaagagca

SEQ ID NO: 1365878 - DNA, 15 bp, Homo sapiens
cctcagatcaagagc

SEQ ID NO: 1365879 - DNA, 15 bp, Homo sapiens
ccctcagatcaagag

SEQ ID NO: 1365880 - DNA, 15 bp, Homo sapiens
cccctcagatcaaga

SEQ ID NO: 1365881 - DNA, 15 bp, Homo sapiens
acccctcagatcaag

SEQ ID NO: 1365882 - DNA, 15 bp, Homo sapiens
cacccctcagatcaa

SEQ ID NO: 1365883 - DNA, 15 bp, Homo sapiens
ccacccctcagatca

SEQ ID NO: 1365884 - DNA, 15 bp, Homo sapiens
tccacccctcagatc

SEQ ID NO: 1365885 - DNA, 15 bp, Homo sapiens
ctccacccctcagat

SEQ ID NO: 1365886 - DNA, 15 bp, Homo sapiens
tctccacccctcaga

SEQ ID NO: 1365887 - DNA, 15 bp, Homo sapiens
atctccacccctcag

SEQ ID NO: 1365888 - DNA, 15 bp, Homo sapiens
gatctccacccctca

SEQ ID NO: 1365889 - DNA, 15 bp, Homo sapiens
cgatctccacccctc

SEQ ID NO: 1365890 - DNA, 15 bp, Homo sapiens
acgatctccacccct

SEQ ID NO: 1365891 - DNA, 15 bp, Homo sapiens
cacgatctccacccc

SEQ ID NO: 1365892 - DNA, 15 bp, Homo sapiens
ccacgatctccaccc

SEQ ID NO: 1365893 - DNA, 15 bp, Homo sapiens
gccacgatctccacc

SEQ ID NO: 1365894 - DNA, 15 bp, Homo sapiens
cgccacgatctccac

SEQ ID NO: 1365895 - DNA, 15 bp, Homo sapiens
tcgccacgatctcca

SEQ ID NO: 1365896 - DNA, 15 bp, Homo sapiens
atcgccacgatctcc

SEQ ID NO: 1365897 - DNA, 15 bp, Homo sapiens
gatcgccacgatctc

SEQ ID NO: 1365898 - DNA, 15 bp, Homo sapiens
agatcgccacgatct

SEQ ID NO: 1365899 - DNA, 15 bp, Homo sapiens
gagatcgccacgatc

SEQ ID NO: 1365900 - DNA, 15 bp, Homo sapiens
agagatcgccacgat

SEQ ID NO: 1365901 - DNA, 15 bp, Homo sapiens
tagagatcgccacga

SEQ ID NO: 1365902 - DNA, 15 bp, Homo sapiens
atagagatcgccacg

SEQ ID NO: 1365903 - DNA, 15 bp, Homo sapiens
tatagagatcgccac

SEQ ID NO: 1365904 - DNA, 15 bp, Homo sapiens
ctatagagatcgcca

SEQ ID NO: 1365905 - DNA, 15 bp, Homo sapiens
actatagagatcgcc

SEQ ID NO: 1365906 - DNA, 15 bp, Homo sapiens
aactatagagatcgc

SEQ ID NO: 1365907 - DNA, 15 bp, Homo sapiens
taactatagagatcg

SEQ ID NO: 1365908 - DNA, 15 bp, Homo sapiens
ataactatagagatc

SEQ ID NO: 1365909 - DNA, 15 bp, Homo sapiens
aataactatagagat

SEQ ID NO: 1365910 - DNA, 15 bp, Homo sapiens
aaataactatagaga

SEQ ID NO: 1365911 - DNA, 15 bp, Homo sapiens
caaataactatagag

SEQ ID NO: 1365912 - DNA, 15 bp, Homo sapiens
tcaaataactataga

SEQ ID NO: 1365913 - DNA, 15 bp, Homo sapiens
ctcaaataactatag

SEQ ID NO: 1365914 - DNA, 15 bp, Homo sapiens
cctcaaataactata

SEQ ID NO: 1365915 - DNA, 15 bp, Homo sapiens
tcctcaaataactat

SEQ ID NO: 1365916 - DNA, 15 bp, Homo sapiens
ctcctcaaataacta

SEQ ID NO: 1365917 - DNA, 15 bp, Homo sapiens
tctcctcaaataact

SEQ ID NO: 1365918 - DNA, 15 bp, Homo sapiens
ttctcctcaaataac

SEQ ID NO: 1365919 - DNA, 15 bp, Homo sapiens
tttctcctcaaataa

SEQ ID NO: 1365920 - DNA, 15 bp, Homo sapiens
gtttctcctcaaata

SEQ ID NO: 1365921 - DNA, 15 bp, Homo sapiens
agtttctcctcaaat

SEQ ID NO: 1365922 - DNA, 15 bp, Homo sapiens
aagtttctcctcaaa

SEQ ID NO: 1365923 - DNA, 15 bp, Homo sapiens
gaagtttctcctcaa

SEQ ID NO: 1365924 - DNA, 15 bp, Homo sapiens
agaagtttctcctca

SEQ ID NO: 1365925 - DNA, 15 bp, Homo sapiens
gagaagtttctcctc

SEQ ID NO: 1365926 - DNA, 15 bp, Homo sapiens
agagaagtttctcct

SEQ ID NO: 1365927 - DNA, 15 bp, Homo sapiens
cagagaagtttctcc

SEQ ID NO: 1365928 - DNA, 15 bp, Homo sapiens
acagagaagtttctc

SEQ ID NO: 1365929 - DNA, 15 bp, Homo sapiens
tacagagaagtttct

SEQ ID NO: 1365930 - DNA, 15 bp, Homo sapiens
ttacagagaagtttc

SEQ ID NO: 1365931 - DNA, 15 bp, Homo sapiens
gttacagagaagttt

SEQ ID NO: 1365932 - DNA, 15 bp, Homo sapiens
ggttacagagaagtt

SEQ ID NO: 1365933 - DNA, 15 bp, Homo sapiens
cggttacagagaagt

SEQ ID NO: 1365934 - DNA, 15 bp, Homo sapiens
acggttacagagaag

SEQ ID NO: 1365935 - DNA, 15 bp, Homo sapiens
tacggttacagagaa

SEQ ID NO: 1365936 - DNA, 15 bp, Homo sapiens
ctacggttacagaga

SEQ ID NO: 1365937 - DNA, 15 bp, Homo sapiens
tctacggttacagag

SEQ ID NO: 1365938 - DNA, 15 bp, Homo sapiens
gtctacggttacaga

SEQ ID NO: 1365939 - DNA, 15 bp, Homo sapiens
cgtctacggttacag

SEQ ID NO: 1365940 - DNA, 15 bp, Homo sapiens
tcgtctacggttaca

SEQ ID NO: 1365941 - DNA, 15 bp, Homo sapiens
atcgtctacggttac

SEQ ID NO: 1365942 - DNA, 15 bp, Homo sapiens
gatcgtctacggtta

SEQ ID NO: 1365943 - DNA, 15 bp, Homo sapiens
agatcgtctacggtt

SEQ ID NO: 1365944 - DNA, 15 bp, Homo sapiens
tagatcgtctacggt

SEQ ID NO: 1365945 - DNA, 15 bp, Homo sapiens
ctagatcgtctacgg

SEQ ID NO: 1365946 - DNA, 15 bp, Homo sapiens
actagatcgtctacg

SEQ ID NO: 1365947 - DNA, 15 bp, Homo sapiens
cactagatcgtctac

SEQ ID NO: 1365948 - DNA, 15 bp, Homo sapiens
acactagatcgtcta

SEQ ID NO: 1365949 - DNA, 15 bp, Homo sapiens
aacactagatcgtct

SEQ ID NO: 1365950 - DNA, 15 bp, Homo sapiens
aaacactagatcgtc

SEQ ID NO: 1365951 - DNA, 15 bp, Homo sapiens
aaaacactagatcgt

SEQ ID NO: 1365952 - DNA, 15 bp, Homo sapiens
aaaaacactagatcg

SEQ ID NO: 1365953 - DNA, 15 bp, Homo sapiens
gaaaaacactagatc

SEQ ID NO: 1365954 - DNA, 15 bp, Homo sapiens
ggaaaaacactagat

SEQ ID NO: 1365955 - DNA, 15 bp, Homo sapiens
aggaaaaacactaga

SEQ ID NO: 1365956 - DNA, 15 bp, Homo sapiens
gaggaaaaacactag

SEQ ID NO: 1365957 - DNA, 15 bp, Homo sapiens
ggaggaaaaacacta

SEQ ID NO: 1365958 - DNA, 15 bp, Homo sapiens
tggaggaaaaacact

SEQ ID NO: 1365959 - DNA, 15 bp, Homo sapiens
ttggaggaaaaacac

SEQ ID NO: 1365960 - DNA, 15 bp, Homo sapiens
attggaggaaaaaca

SEQ ID NO: 1365961 - DNA, 15 bp, Homo sapiens
cattggaggaaaaac

SEQ ID NO: 1365962 - DNA, 15 bp, Homo sapiens
acattggaggaaaaa

SEQ ID NO: 1365963 - DNA, 15 bp, Homo sapiens
aacattggaggaaaa

SEQ ID NO: 1365964 - DNA, 15 bp, Homo sapiens
aaacattggaggaaa

SEQ ID NO: 1365965 - DNA, 15 bp, Homo sapiens
aaaacattggaggaa

SEQ ID NO: 1365966 - DNA, 15 bp, Homo sapiens
gaaaacattggagga

SEQ ID NO: 1365967 - DNA, 15 bp, Homo sapiens
agaaaacattggagg

SEQ ID NO: 1365968 - DNA, 15 bp, Homo sapiens
tagaaaacattggag

SEQ ID NO: 1365969 - DNA, 15 bp, Homo sapiens
gtagaaaacattgga

SEQ ID NO: 1365970 - DNA, 15 bp, Homo sapiens
tgtagaaaacattgg

SEQ ID NO: 1365971 - DNA, 15 bp, Homo sapiens
ctgtagaaaacattg

SEQ ID NO: 1365972 - DNA, 15 bp, Homo sapiens
tctgtagaaaacatt

SEQ ID NO: 1365973 - DNA, 15 bp, Homo sapiens
ctctgtagaaaacat

SEQ ID NO: 1365974 - DNA, 15 bp, Homo sapiens
tctctgtagaaaaca

SEQ ID NO: 1365975 - DNA, 15 bp, Homo sapiens
ttctctgtagaaaac

SEQ ID NO: 1365976 - DNA, 15 bp, Homo sapiens
tttctctgtagaaaa

SEQ ID NO: 1365977 - DNA, 15 bp, Homo sapiens
ttttctctgtagaaa

SEQ ID NO: 1365978 - DNA, 15 bp, Homo sapiens
gttttctctgtagaa

SEQ ID NO: 1365979 - DNA, 15 bp, Homo sapiens
agttttctctgtaga

SEQ ID NO: 1365980 - DNA, 15 bp, Homo sapiens
cagttttctctgtag

SEQ ID NO: 1365981 - DNA, 15 bp, Homo sapiens
gcagttttctctgta

SEQ ID NO: 1365982 - DNA, 15 bp, Homo sapiens
ggcagttttctctgt

SEQ ID NO: 1365983 - DNA, 15 bp, Homo sapiens
aggcagttttctctg

SEQ ID NO: 1365984 - DNA, 15 bp, Homo sapiens
agaaggcagttttct

SEQ ID NO: 1365985 - DNA, 15 bp, Homo sapiens
cagaaggcagttttc

SEQ ID NO: 1365986 - DNA, 15 bp, Homo sapiens
tcagaaggcagtttt

SEQ ID NO: 1365987 - DNA, 15 bp, Homo sapiens
ctcagaaggcagttt

SEQ ID NO: 1365988 - DNA, 15 bp, Homo sapiens
cctcagaaggcagtt

SEQ ID NO: 1365989 - DNA, 15 bp, Homo sapiens
ccctcagaaggcagt

SEQ ID NO: 1365990 - DNA, 15 bp, Homo sapiens
tccctcagaaggcag

SEQ ID NO: 1365991 - DNA, 15 bp, Homo sapiens
ctccctcagaaggca

SEQ ID NO: 1365992 - DNA, 15 bp, Homo sapiens
tctccctcagaaggc

SEQ ID NO: 1365993 - DNA, 15 bp, Homo sapiens
atctccctcagaagg

SEQ ID NO: 1365994 - DNA, 15 bp, Homo sapiens
catctccctcagaag

SEQ ID NO: 1365995 - DNA, 15 bp, Homo sapiens
gggcatctccctcag

SEQ ID NO: 1365996 - DNA, 15 bp, Homo sapiens
agggcatctccctca

SEQ ID NO: 1365997 - DNA, 15 bp, Homo sapiens
gagggcatctccctc

SEQ ID NO: 1365998 - DNA, 15 bp, Homo sapiens
ggagggcatctccct

SEQ ID NO: 1365999 - DNA, 15 bp, Homo sapiens
gggagggcatctccc

SEQ ID NO: 1366000 - DNA, 15 bp, Homo sapiens
tgggagggcatctcc

SEQ ID NO: 1366001 - DNA, 15 bp, Homo sapiens
ctgggagggcatctc

SEQ ID NO: 1366002 - DNA, 15 bp, Homo sapiens
tctgggagggcatct

SEQ ID NO: 1366003 - DNA, 15 bp, Homo sapiens
gtctgggagggcatc

SEQ ID NO: 1366004 - DNA, 15 bp, Homo sapiens
ggtctgggagggcat

SEQ ID NO: 1366005 - DNA, 15 bp, Homo sapiens
tggtctgggagggca

SEQ ID NO: 1366006 - DNA, 15 bp, Homo sapiens
gtggtctgggagggc

SEQ ID NO: 1366007 - DNA, 15 bp, Homo sapiens
ggtggtctgggaggg

SEQ ID NO: 1366008 - DNA, 15 bp, Homo sapiens
gggtggtctgggagg

SEQ ID NO: 1366009 - DNA, 15 bp, Homo sapiens
tgggtggtctgggag

SEQ ID NO: 1366010 - DNA, 15 bp, Homo sapiens
gtgggtggtctggga

SEQ ID NO: 1366011 - DNA, 15 bp, Homo sapiens
agtgggtggtctggg

SEQ ID NO: 1366012 - DNA, 15 bp, Homo sapiens
cagtgggtggtctgg

SEQ ID NO: 1366013 - DNA, 15 bp, Homo sapiens
gcagtgggtggtctg

SEQ ID NO: 1366014 - DNA, 15 bp, Homo sapiens
tgcagtgggtggtct

SEQ ID NO: 1366015 - DNA, 15 bp, Homo sapiens
ctgcagtgggtggtc

SEQ ID NO: 1366016 - DNA, 15 bp, Homo sapiens
cctgcagtgggtggt

SEQ ID NO: 1366017 - DNA, 15 bp, Homo sapiens
ccctgcagtgggtgg

SEQ ID NO: 1366018 - DNA, 15 bp, Homo sapiens
tccctgcagtgggtg

SEQ ID NO: 1366019 - DNA, 15 bp, Homo sapiens
gtccctgcagtgggt

SEQ ID NO: 1366020 - DNA, 15 bp, Homo sapiens
ggtccctgcagtggg

SEQ ID NO: 1366021 - DNA, 15 bp, Homo sapiens
aggtccctgcagtgg

SEQ ID NO: 1366022 - DNA, 15 bp, Homo sapiens
gaggtccctgcagtg

SEQ ID NO: 1366023 - DNA, 15 bp, Homo sapiens
tgaggtccctgcagt

SEQ ID NO: 1366024 - DNA, 15 bp, Homo sapiens
gtgaggtccctgcag

SEQ ID NO: 1366025 - DNA, 15 bp, Homo sapiens
agtgaggtccctgca

SEQ ID NO: 1366026 - DNA, 15 bp, Homo sapiens
aagtgaggtccctgc

SEQ ID NO: 1366027 - DNA, 15 bp, Homo sapiens
aaagtgaggtccctg

SEQ ID NO: 1366028 - DNA, 15 bp, Homo sapiens
gaaagtgaggtccct

SEQ ID NO: 1366029 - DNA, 15 bp, Homo sapiens
tgaaagtgaggtccc

SEQ ID NO: 1366030 - DNA, 15 bp, Homo sapiens
atgaaagtgaggtcc

SEQ ID NO: 1366031 - DNA, 15 bp, Homo sapiens
gatgaaagtgaggtc

SEQ ID NO: 1366032 - DNA, 15 bp, Homo sapiens
tgatgaaagtgaggt

SEQ ID NO: 1366033 - DNA, 15 bp, Homo sapiens
gtgatgaaagtgagg

SEQ ID NO: 1366034 - DNA, 15 bp, Homo sapiens
agtgatgaaagtgag

SEQ ID NO: 1366035 - DNA, 15 bp, Homo sapiens
cagtgatgaaagtga

SEQ ID NO: 1366036 - DNA, 15 bp, Homo sapiens
tcagtgatgaaagtg

SEQ ID NO: 1366037 - DNA, 15 bp, Homo sapiens
gtcagtgatgaaagt

SEQ ID NO: 1366038 - DNA, 15 bp, Homo sapiens
agtcagtgatgaaag

SEQ ID NO: 1366039 - DNA, 15 bp, Homo sapiens
aagtcagtgatgaaa

SEQ ID NO: 1366040 - DNA, 15 bp, Homo sapiens
gaagtcagtgatgaa

SEQ ID NO: 1366041 - DNA, 15 bp, Homo sapiens
ggaagtcagtgatga

SEQ ID NO: 1366042 - DNA, 15 bp, Homo sapiens
aggaagtcagtgatg

SEQ ID NO: 1366043 - DNA, 15 bp, Homo sapiens
taggaagtcagtgat

SEQ ID NO: 1366044 - DNA, 15 bp, Homo sapiens
ataggaagtcagtga

SEQ ID NO: 1366045 - DNA, 15 bp, Homo sapiens
cataggaagtcagtg

SEQ ID NO: 1366046 - DNA, 15 bp, Homo sapiens
ccataggaagtcagt

SEQ ID NO: 1366047 - DNA, 15 bp, Homo sapiens
gccataggaagtcag

SEQ ID NO: 1366048 - DNA, 15 bp, Homo sapiens
agccataggaagtca

SEQ ID NO: 1366049 - DNA, 15 bp, Homo sapiens
aagccataggaagtc

SEQ ID NO: 1366050 - DNA, 15 bp, Homo sapiens
caagccataggaagt

SEQ ID NO: 1366051 - DNA, 15 bp, Homo sapiens
ccaagccataggaag

SEQ ID NO: 1366052 - DNA, 15 bp, Homo sapiens
cccaagccataggaa

SEQ ID NO: 1366053 - DNA, 15 bp, Homo sapiens
tcccaagccatagga

SEQ ID NO: 1366054 - DNA, 15 bp, Homo sapiens
ctcccaagccatagg

SEQ ID NO: 1366055 - DNA, 15 bp, Homo sapiens
actcccaagccatag

SEQ ID NO: 1366056 - DNA, 15 bp, Homo sapiens
cactcccaagccata

SEQ ID NO: 1366057 - DNA, 15 bp, Homo sapiens
acactcccaagccat

SEQ ID NO: 1366058 - DNA, 15 bp, Homo sapiens
aacactcccaagcca

SEQ ID NO: 1366059 - DNA, 15 bp, Homo sapiens
aaacactcccaagcc

SEQ ID NO: 1366060 - DNA, 15 bp, Homo sapiens
taaacactcccaagc

SEQ ID NO: 1366061 - DNA, 15 bp, Homo sapiens
ataaacactcccaag

SEQ ID NO: 1366062 - DNA, 15 bp, Homo sapiens
tataaacactcccaa

SEQ ID NO: 1366063 - DNA, 15 bp, Homo sapiens
ttataaacactccca

SEQ ID NO: 1366064 - DNA, 15 bp, Homo sapiens
tttataaacactccc

SEQ ID NO: 1366065 - DNA, 15 bp, Homo sapiens
ctttataaacactcc

SEQ ID NO: 1366066 - DNA, 15 bp, Homo sapiens
actttataaacactc

SEQ ID NO: 1366067 - DNA, 15 bp, Homo sapiens
aactttataaacact

SEQ ID NO: 1366068 - DNA, 15 bp, Homo sapiens
taactttataaacac

SEQ ID NO: 1366069 - DNA, 15 bp, Homo sapiens
ataactttataaaca

SEQ ID NO: 1366070 - DNA, 15 bp, Homo sapiens
tataactttataaac

SEQ ID NO: 1366071 - DNA, 15 bp, Homo sapiens
gtataactttataaa

SEQ ID NO: 1366072 - DNA, 15 bp, Homo sapiens
tgtataactttataa

SEQ ID NO: 1366073 - DNA, 15 bp, Homo sapiens
gtgtataactttata

SEQ ID NO: 1366074 - DNA, 15 bp, Homo sapiens
agtgtataactttat

SEQ ID NO: 1366075 - DNA, 15 bp, Homo sapiens
aagtgtataacttta

SEQ ID NO: 1366076 - DNA, 15 bp, Homo sapiens
taagtgtataacttt

SEQ ID NO: 1366077 - DNA, 15 bp, Homo sapiens
ttaagtgtataactt

SEQ ID NO: 1366078 - DNA, 15 bp, Homo sapiens
cttaagtgtataact

SEQ ID NO: 1366079 - DNA, 15 bp, Homo sapiens
acttaagtgtataac

SEQ ID NO: 1366080 - DNA, 15 bp, Homo sapiens
cacttaagtgtataa

SEQ ID NO: 1366081 - DNA, 15 bp, Homo sapiens
tcacttaagtgtata

SEQ ID NO: 1366082 - DNA, 15 bp, Homo sapiens
atcacttaagtgtat

SEQ ID NO: 1366083 - DNA, 15 bp, Homo sapiens
tatcacttaagtgta

SEQ ID NO: 1366084 - DNA, 15 bp, Homo sapiens
ttatcacttaagtgt

SEQ ID NO: 1366085 - DNA, 15 bp, Homo sapiens
cttatcacttaagtg

SEQ ID NO: 1366086 - DNA, 15 bp, Homo sapiens
acttatcacttaagt

SEQ ID NO: 1366087 - DNA, 15 bp, Homo sapiens
cacttatcacttaag

SEQ ID NO: 1366088 - DNA, 15 bp, Homo sapiens
acacttatcacttaa

SEQ ID NO: 1366089 - DNA, 15 bp, Homo sapiens
cacacttatcactta

SEQ ID NO: 1366090 - DNA, 15 bp, Homo sapiens
ccacacttatcactt

SEQ ID NO: 1366091 - DNA, 15 bp, Homo sapiens
gccacacttatcact

SEQ ID NO: 1366092 - DNA, 15 bp, Homo sapiens
agccacacttatcac

SEQ ID NO: 1366093 - DNA, 15 bp, Homo sapiens
aagccacacttatca

SEQ ID NO: 1366094 - DNA, 15 bp, Homo sapiens
caagccacacttatc

SEQ ID NO: 1366095 - DNA, 15 bp, Homo sapiens
ccaagccacacttat

SEQ ID NO: 1366096 - DNA, 15 bp, Homo sapiens
cccaagccacactta

SEQ ID NO: 1366097 - DNA, 15 bp, Homo sapiens
acccaagccacactt

SEQ ID NO: 1366098 - DNA, 15 bp, Homo sapiens
tacccaagccacact

SEQ ID NO: 1366099 - DNA, 15 bp, Homo sapiens
atacccaagccacac

SEQ ID NO: 1366100 - DNA, 15 bp, Homo sapiens
aatacccaagccaca

SEQ ID NO: 1366101 - DNA, 15 bp, Homo sapiens
caatacccaagccac

SEQ ID NO: 1366102 - DNA, 15 bp, Homo sapiens
tcaatacccaagcca

SEQ ID NO: 1366103 - DNA, 15 bp, Homo sapiens
ttcaatacccaagcc

SEQ ID NO: 1366104 - DNA, 15 bp, Homo sapiens
tttcaatacccaagc

SEQ ID NO: 1366105 - DNA, 15 bp, Homo sapiens
ttttcaatacccaag

SEQ ID NO: 1366106 - DNA, 15 bp, Homo sapiens
cttttcaatacccaa

SEQ ID NO: 1366107 - DNA, 15 bp, Homo sapiens
acttttcaataccca

SEQ ID NO: 1366108 - DNA, 15 bp, Homo sapiens
aacttttcaataccc

SEQ ID NO: 1366109 - DNA, 15 bp, Homo sapiens
taacttttcaatacc

SEQ ID NO: 1366110 - DNA, 15 bp, Homo sapiens
ctaacttttcaatac

SEQ ID NO: 1366111 - DNA, 15 bp, Homo sapiens
gctaacttttcaata

SEQ ID NO: 1366112 - DNA, 15 bp, Homo sapiens
agctaacttttcaat

SEQ ID NO: 1366113 - DNA, 15 bp, Homo sapiens
gagctaacttttcaa

SEQ ID NO: 1366114 - DNA, 15 bp, Homo sapiens
tgagctaacttttca

SEQ ID NO: 1366115 - DNA, 15 bp, Homo sapiens
ttgagctaacttttc

SEQ ID NO: 1366116 - DNA, 15 bp, Homo sapiens
tttgagctaactttt

SEQ ID NO: 1366117 - DNA, 15 bp, Homo sapiens
ctttgagctaacttt

SEQ ID NO: 1366118 - DNA, 15 bp, Homo sapiens
tctttgagctaactt

SEQ ID NO: 1366119 - DNA, 15 bp, Homo sapiens
ttctttgagctaact

SEQ ID NO: 1366120 - DNA, 15 bp, Homo sapiens
tttctttgagctaac

SEQ ID NO: 1366121 - DNA, 15 bp, Homo sapiens
ttttctttgagctaa

SEQ ID NO: 1366122 - DNA, 15 bp, Homo sapiens
gttttctttgagcta

SEQ ID NO: 1366123 - DNA, 15 bp, Homo sapiens
tgttttctttgagct

SEQ ID NO: 1366124 - DNA, 15 bp, Homo sapiens
ttgttttctttgagc

SEQ ID NO: 1366125 - DNA, 15 bp, Homo sapiens
tttgttttctttgag

SEQ ID NO: 1366126 - DNA, 15 bp, Homo sapiens
ttttgttttctttga

SEQ ID NO: 1366127 - DNA, 15 bp, Homo sapiens
attttgttttctttg

SEQ ID NO: 1366128 - DNA, 15 bp, Homo sapiens
aattttgttttcttt

SEQ ID NO: 1366129 - DNA, 15 bp, Homo sapiens
aaattttgttttctt

SEQ ID NO: 1366130 - DNA, 15 bp, Homo sapiens
cgaaattttgttttc

SEQ ID NO: 1366131 - DNA, 15 bp, Homo sapiens
acgaaattttgtttt

SEQ ID NO: 1366132 - DNA, 15 bp, Homo sapiens
aacgaaattttgttt

SEQ ID NO: 1366133 - DNA, 15 bp, Homo sapiens
gaacgaaattttgtt

SEQ ID NO: 1366134 - DNA, 15 bp, Homo sapiens
ctaagaagcaacctg

SEQ ID NO: 1366135 - DNA, 15 bp, Homo sapiens
tctaagaagcaacct

SEQ ID NO: 1366136 - DNA, 15 bp, Homo sapiens
ttctaagaagcaacc

SEQ ID NO: 1366137 - DNA, 15 bp, Homo sapiens
attctaagaagcaac

SEQ ID NO: 1366138 - DNA, 15 bp, Homo sapiens
cattctaagaagcaa

SEQ ID NO: 1366139 - DNA, 15 bp, Homo sapiens
acattctaagaagca

SEQ ID NO: 1366140 - DNA, 15 bp, Homo sapiens
aacattctaagaagc

SEQ ID NO: 1366141 - DNA, 15 bp, Homo sapiens
aaacattctaagaag

SEQ ID NO: 1366142 - DNA, 15 bp, Homo sapiens
aaaacattctaagaa

SEQ ID NO: 1366143 - DNA, 15 bp, Homo sapiens
aaaaacattctaaga

SEQ ID NO: 1366144 - DNA, 15 bp, Homo sapiens
aaaaaacattctaag

SEQ ID NO: 1366145 - DNA, 15 bp, Homo sapiens
aaaaaaacattctaa

SEQ ID NO: 1366146 - DNA, 15 bp, Homo sapiens
taaaaaaacattcta

SEQ ID NO: 1366147 - DNA, 15 bp, Homo sapiens
ttaaaaaaacattct

SEQ ID NO: 1366148 - DNA, 15 bp, Homo sapiens
attaaaaaaacattc

SEQ ID NO: 1366149 - DNA, 15 bp, Homo sapiens
tattaaaaaaacatt

SEQ ID NO: 1366150 - DNA, 15 bp, Homo sapiens
gtattaaaaaaacat

SEQ ID NO: 1366151 - DNA, 15 bp, Homo sapiens
tgtattaaaaaaaca

SEQ ID NO: 1366152 - DNA, 15 bp, Homo sapiens
gtgtattaaaaaaac

SEQ ID NO: 1366153 - DNA, 15 bp, Homo sapiens
tgtgtattaaaaaaa

SEQ ID NO: 1366154 - DNA, 15 bp, Homo sapiens
gtgtgtattaaaaaa

SEQ ID NO: 1366155 - DNA, 15 bp, Homo sapiens
tgtgtgtattaaaaa

SEQ ID NO: 1366156 - DNA, 15 bp, Homo sapiens
gtgtgtgtattaaaa

SEQ ID NO: 1366157 - DNA, 15 bp, Homo sapiens
tgtgtgtgtattaaa

SEQ ID NO: 1366158 - DNA, 15 bp, Homo sapiens
ttgtgtgtgtattaa

SEQ ID NO: 1366159 - DNA, 15 bp, Homo sapiens
cttgtgtgtgtatta

SEQ ID NO: 1366160 - DNA, 15 bp, Homo sapiens
ccttgtgtgtgtatt

SEQ ID NO: 1366161 - DNA, 15 bp, Homo sapiens
accttgtgtgtgtat

SEQ ID NO: 1366162 - DNA, 15 bp, Homo sapiens
aaccttgtgtgtgta

SEQ ID NO: 1366163 - DNA, 15 bp, Homo sapiens
aaaccttgtgtgtgt

SEQ ID NO: 1366164 - DNA, 15 bp, Homo sapiens
gaaaccttgtgtgtg

SEQ ID NO: 1366165 - DNA, 15 bp, Homo sapiens
tgaaaccttgtgtgt

SEQ ID NO: 1366166 - DNA, 15 bp, Homo sapiens
ttgaaaccttgtgtg

SEQ ID NO: 1366167 - DNA, 15 bp, Homo sapiens
attgaaaccttgtgt

SEQ ID NO: 1366168 - DNA, 15 bp, Homo sapiens
cattgaaaccttgtg

SEQ ID NO: 1366169 - DNA, 15 bp, Homo sapiens
gcattgaaaccttgt

SEQ ID NO: 1366170 - DNA, 15 bp, Homo sapiens
ggcattgaaaccttg

SEQ ID NO: 1366171 - DNA, 15 bp, Homo sapiens
gggcattgaaacctt

SEQ ID NO: 1366172 - DNA, 15 bp, Homo sapiens
agggcattgaaacct

SEQ ID NO: 1366173 - DNA, 15 bp, Homo sapiens
aagggcattgaaacc

SEQ ID NO: 1366174 - DNA, 15 bp, Homo sapiens
aaagggcattgaaac

SEQ ID NO: 1366175 - DNA, 15 bp, Homo sapiens
aaaagggcattgaaa

SEQ ID NO: 1366176 - DNA, 15 bp, Homo sapiens
taaaagggcattgaa

SEQ ID NO: 1366177 - DNA, 15 bp, Homo sapiens
ataaaagggcattga

SEQ ID NO: 1366178 - DNA, 15 bp, Homo sapiens
tataaaagggcattg

SEQ ID NO: 1366179 - DNA, 15 bp, Homo sapiens
gtataaaagggcatt

SEQ ID NO: 1366180 - DNA, 15 bp, Homo sapiens
ttgtataaaagggca

SEQ ID NO: 1366181 - DNA, 15 bp, Homo sapiens
cttgtataaaagggc

SEQ ID NO: 1366182 - DNA, 15 bp, Homo sapiens
gcttgtataaaaggg

SEQ ID NO: 1366183 - DNA, 15 bp, Homo sapiens
ggcttgtataaaagg

SEQ ID NO: 1366184 - DNA, 15 bp, Homo sapiens
tggcttgtataaaag

SEQ ID NO: 1366185 - DNA, 15 bp, Homo sapiens
atggcttgtataaaa

SEQ ID NO: 1366186 - DNA, 15 bp, Homo sapiens
tatggcttgtataaa

SEQ ID NO: 1366187 - DNA, 15 bp, Homo sapiens
atatggcttgtataa

SEQ ID NO: 1366188 - DNA, 15 bp, Homo sapiens
aatatggcttgtata

SEQ ID NO: 1366189 - DNA, 15 bp, Homo sapiens
aaatatggcttgtat

SEQ ID NO: 1366190 - DNA, 15 bp, Homo sapiens
aaaatatggcttgta

SEQ ID NO: 1366191 - DNA, 15 bp, Homo sapiens
taaaatatggcttgt

SEQ ID NO: 1366192 - DNA, 15 bp, Homo sapiens
ttaaaatatggcttg

SEQ ID NO: 1366193 - DNA, 15 bp, Homo sapiens
attaaaatatggctt

SEQ ID NO: 1366194 - DNA, 15 bp, Homo sapiens
aattaaaatatggct

SEQ ID NO: 1366195 - DNA, 15 bp, Homo sapiens
aaattaaaatatggc

SEQ ID NO: 1366196 - DNA, 15 bp, Homo sapiens
taaattaaaatatgg

SEQ ID NO: 1366197 - DNA, 15 bp, Homo sapiens
gtaaattaaaatatg

SEQ ID NO: 1366198 - DNA, 15 bp, Homo sapiens
tgtaaattaaaatat

SEQ ID NO: 1366199 - DNA, 15 bp, Homo sapiens
ttgtaaattaaaata

SEQ ID NO: 1366200 - DNA, 15 bp, Homo sapiens
gttgtaaattaaaat

SEQ ID NO: 1366201 - DNA, 15 bp, Homo sapiens
tgttgtaaattaaaa

SEQ ID NO: 1366202 - DNA, 15 bp, Homo sapiens
ttgttgtaaattaaa

SEQ ID NO: 1366203 - DNA, 15 bp, Homo sapiens
tttgttgtaaattaa

SEQ ID NO: 1366204 - DNA, 15 bp, Homo sapiens
ttttgttgtaaatta

SEQ ID NO: 1366205 - DNA, 15 bp, Homo sapiens
attttgttgtaaatt

SEQ ID NO: 1366206 - DNA, 15 bp, Homo sapiens
aattttgttgtaaat

SEQ ID NO: 1366207 - DNA, 15 bp, Homo sapiens
taattttgttgtaaa

SEQ ID NO: 1366208 - DNA, 15 bp, Homo sapiens
ataattttgttgtaa

SEQ ID NO: 1366209 - DNA, 15 bp, Homo sapiens
cataattttgttgta

SEQ ID NO: 1366210 - DNA, 15 bp, Homo sapiens
tcataattttgttgt

SEQ ID NO: 1366211 - DNA, 15 bp, Homo sapiens
atcataattttgttg

SEQ ID NO: 1366212 - DNA, 15 bp, Homo sapiens
catcataattttgtt

SEQ ID NO: 1366213 - DNA, 15 bp, Homo sapiens
acatcataattttgt

SEQ ID NO: 1366214 - DNA, 15 bp, Homo sapiens
aacatcataattttg

SEQ ID NO: 1366215 - DNA, 15 bp, Homo sapiens
taacatcataatttt

SEQ ID NO: 1366216 - DNA, 15 bp, Homo sapiens
ataacatcataattt

SEQ ID NO: 1366217 - DNA, 15 bp, Homo sapiens
tataacatcataatt

SEQ ID NO: 1366218 - DNA, 15 bp, Homo sapiens
gtataacatcataat

SEQ ID NO: 1366219 - DNA, 15 bp, Homo sapiens
tgtataacatcataa

SEQ ID NO: 1366220 - DNA, 15 bp, Homo sapiens
ttgtataacatcata

SEQ ID NO: 1366221 - DNA, 15 bp, Homo sapiens
gttgtataacatcat

SEQ ID NO: 1366222 - DNA, 15 bp, Homo sapiens
agttgtataacatca

SEQ ID NO: 1366223 - DNA, 15 bp, Homo sapiens
cagttgtataacatc

SEQ ID NO: 1366224 - DNA, 15 bp, Homo sapiens
gcagttgtataacat

SEQ ID NO: 1366225 - DNA, 15 bp, Homo sapiens
tgcagttgtataaca

SEQ ID NO: 1366226 - DNA, 15 bp, Homo sapiens
ctgcagttgtataac

SEQ ID NO: 1366227 - DNA, 15 bp, Homo sapiens
gctgcagttgtataa

SEQ ID NO: 1366228 - DNA, 15 bp, Homo sapiens
agctgcagttgtata

SEQ ID NO: 1366229 - DNA, 15 bp, Homo sapiens
aagctgcagttgtat

SEQ ID NO: 1366230 - DNA, 15 bp, Homo sapiens
taagctgcagttgta

SEQ ID NO: 1366231 - DNA, 15 bp, Homo sapiens
ataagctgcagttgt

SEQ ID NO: 1366232 - DNA, 15 bp, Homo sapiens
cataagctgcagttg

SEQ ID NO: 1366233 - DNA, 15 bp, Homo sapiens
acataagctgcagtt

SEQ ID NO: 1366234 - DNA, 15 bp, Homo sapiens
cacataagctgcagt

SEQ ID NO: 1366235 - DNA, 15 bp, Homo sapiens
ccacataagctgcag

SEQ ID NO: 1366236 - DNA, 15 bp, Homo sapiens
gccacataagctgca

SEQ ID NO: 1366237 - DNA, 15 bp, Homo sapiens
ggccacataagctgc

SEQ ID NO: 1366238 - DNA, 15 bp, Homo sapiens
aggccacataagctg

SEQ ID NO: 1366239 - DNA, 15 bp, Homo sapiens
aaggccacataagct

SEQ ID NO: 1366240 - DNA, 15 bp, Homo sapiens
taaggccacataagc

SEQ ID NO: 1366241 - DNA, 15 bp, Homo sapiens
gtaaggccacataag

SEQ ID NO: 1366242 - DNA, 15 bp, Homo sapiens
tgtaaggccacataa

SEQ ID NO: 1366243 - DNA, 15 bp, Homo sapiens
gtgtaaggccacata

SEQ ID NO: 1366244 - DNA, 15 bp, Homo sapiens
tgtgtaaggccacat

SEQ ID NO: 1366245 - DNA, 15 bp, Homo sapiens
ctgtgtaaggccaca

SEQ ID NO: 1366246 - DNA, 15 bp, Homo sapiens
actgtgtaaggccac

SEQ ID NO: 1366247 - DNA, 15 bp, Homo sapiens
tactgtgtaaggcca

SEQ ID NO: 1366248 - DNA, 15 bp, Homo sapiens
ttactgtgtaaggcc

SEQ ID NO: 1366249 - DNA, 15 bp, Homo sapiens
tttactgtgtaaggc

SEQ ID NO: 1366250 - DNA, 15 bp, Homo sapiens
atttactgtgtaagg

SEQ ID NO: 1366251 - DNA, 15 bp, Homo sapiens
catttactgtgtaag

SEQ ID NO: 1366252 - DNA, 15 bp, Homo sapiens
acatttactgtgtaa

SEQ ID NO: 1366253 - DNA, 15 bp, Homo sapiens
aacatttactgtgta

SEQ ID NO: 1366254 - DNA, 15 bp, Homo sapiens
gaacatttactgtgt

SEQ ID NO: 1366255 - DNA, 15 bp, Homo sapiens
tgaacatttactgtg

SEQ ID NO: 1366256 - DNA, 15 bp, Homo sapiens
ctgaacatttactgt

SEQ ID NO: 1366257 - DNA, 15 bp, Homo sapiens
tctgaacatttactg

SEQ ID NO: 1366258 - DNA, 15 bp, Homo sapiens
ttctgaacatttact

SEQ ID NO: 1366259 - DNA, 15 bp, Homo sapiens
attctgaacatttac

SEQ ID NO: 1366260 - DNA, 15 bp, Homo sapiens
cattctgaacattta

SEQ ID NO: 1366261 - DNA, 15 bp, Homo sapiens
ccattctgaacattt

SEQ ID NO: 1366262 - DNA, 15 bp, Homo sapiens
gccattctgaacatt

SEQ ID NO: 1366263 - DNA, 15 bp, Homo sapiens
tgccattctgaacat

SEQ ID NO: 1366264 - DNA, 15 bp, Homo sapiens
ctgccattctgaaca

SEQ ID NO: 1366265 - DNA, 15 bp, Homo sapiens
gctgccattctgaac

SEQ ID NO: 1366266 - DNA, 15 bp, Homo sapiens
agctgccattctgaa

SEQ ID NO: 1366267 - DNA, 15 bp, Homo sapiens
aagctgccattctga

SEQ ID NO: 1366268 - DNA, 15 bp, Homo sapiens
gaagctgccattctg

SEQ ID NO: 1366269 - DNA, 15 bp, Homo sapiens
agaagctgccattct

SEQ ID NO: 1366270 - DNA, 15 bp, Homo sapiens
cagaagctgccattc

SEQ ID NO: 1366271 - DNA, 15 bp, Homo sapiens
acagaagctgccatt

SEQ ID NO: 1366272 - DNA, 15 bp, Homo sapiens
gacagaagctgccat

SEQ ID NO: 1366273 - DNA, 15 bp, Homo sapiens
ggacagaagctgcca

SEQ ID NO: 1366274 - DNA, 15 bp, Homo sapiens
cggacagaagctgcc

SEQ ID NO: 1366275 - DNA, 15 bp, Homo sapiens
acggacagaagctgc

SEQ ID NO: 1366276 - DNA, 15 bp, Homo sapiens
gacggacagaagctg

SEQ ID NO: 1366277 - DNA, 15 bp, Homo sapiens
ggacggacagaagct

SEQ ID NO: 1366278 - DNA, 15 bp, Homo sapiens
tggacggacagaagc

SEQ ID NO: 1366279 - DNA, 15 bp, Homo sapiens
ctggacggacagaag

SEQ ID NO: 1366280 - DNA, 15 bp, Homo sapiens
actggacggacagaa

SEQ ID NO: 1366281 - DNA, 15 bp, Homo sapiens
tactggacggacaga

SEQ ID NO: 1366282 - DNA, 15 bp, Homo sapiens
ctactggacggacag

SEQ ID NO: 1366283 - DNA, 15 bp, Homo sapiens
cctactggacggaca

SEQ ID NO: 1366284 - DNA, 15 bp, Homo sapiens
ccctactggacggac

SEQ ID NO: 1366285 - DNA, 15 bp, Homo sapiens
accctactggacgga

SEQ ID NO: 1366286 - DNA, 15 bp, Homo sapiens
aaccctactggacgg

SEQ ID NO: 1366287 - DNA, 15 bp, Homo sapiens
gaaccctactggacg

SEQ ID NO: 1366288 - DNA, 15 bp, Homo sapiens
agaaccctactggac

SEQ ID NO: 1366289 - DNA, 15 bp, Homo sapiens
cagaaccctactgga

SEQ ID NO: 1366290 - DNA, 15 bp, Homo sapiens
gcagaaccctactgg

SEQ ID NO: 1366291 - DNA, 15 bp, Homo sapiens
tgcagaaccctactg

SEQ ID NO: 1366292 - DNA, 15 bp, Homo sapiens
gtgcagaaccctact

SEQ ID NO: 1366293 - DNA, 15 bp, Homo sapiens
agtgcagaaccctac

SEQ ID NO: 1366294 - DNA, 15 bp, Homo sapiens
cagtgcagaacccta

SEQ ID NO: 1366295 - DNA, 15 bp, Homo sapiens
gcagtgcagaaccct

SEQ ID NO: 1366296 - DNA, 15 bp, Homo sapiens
agcagtgcagaaccc

SEQ ID NO: 1366297 - DNA, 15 bp, Homo sapiens
aagcagtgcagaacc

SEQ ID NO: 1366298 - DNA, 15 bp, Homo sapiens
caagcagtgcagaac

SEQ ID NO: 1366299 - DNA, 15 bp, Homo sapiens
ccaagcagtgcagaa

SEQ ID NO: 1366300 - DNA, 15 bp, Homo sapiens
gccaagcagtgcaga

SEQ ID NO: 1366301 - DNA, 15 bp, Homo sapiens
tgccaagcagtgcag

SEQ ID NO: 1366302 - DNA, 15 bp, Homo sapiens
atgccaagcagtgca

SEQ ID NO: 1366303 - DNA, 15 bp, Homo sapiens
gatgccaagcagtgc

SEQ ID NO: 1366304 - DNA, 15 bp, Homo sapiens
ggatgccaagcagtg

SEQ ID NO: 1366305 - DNA, 15 bp, Homo sapiens
aggatgccaagcagt

SEQ ID NO: 1366306 - DNA, 15 bp, Homo sapiens
taggatgccaagcag

SEQ ID NO: 1366307 - DNA, 15 bp, Homo sapiens
gtaggatgccaagca

SEQ ID NO: 1366308 - DNA, 15 bp, Homo sapiens
agtaggatgccaagc

SEQ ID NO: 1366309 - DNA, 15 bp, Homo sapiens
tagtaggatgccaag

SEQ ID NO: 1366310 - DNA, 15 bp, Homo sapiens
atagtaggatgccaa

SEQ ID NO: 1366311 - DNA, 15 bp, Homo sapiens
gatagtaggatgcca

SEQ ID NO: 1366312 - DNA, 15 bp, Homo sapiens
agatagtaggatgcc

SEQ ID NO: 1366313 - DNA, 15 bp, Homo sapiens
aagatagtaggatgc

SEQ ID NO: 1366314 - DNA, 15 bp, Homo sapiens
gaagatagtaggatg

SEQ ID NO: 1366315 - DNA, 15 bp, Homo sapiens
ggaagatagtaggat

SEQ ID NO: 1366316 - DNA, 15 bp, Homo sapiens
tggaagatagtagga

SEQ ID NO: 1366317 - DNA, 15 bp, Homo sapiens
ttggaagatagtagg

SEQ ID NO: 1366318 - DNA, 15 bp, Homo sapiens
cttggaagatagtag

SEQ ID NO: 1366319 - DNA, 15 bp, Homo sapiens
acttggaagatagta

SEQ ID NO: 1366320 - DNA, 15 bp, Homo sapiens
gacttggaagatagt

SEQ ID NO: 1366321 - DNA, 15 bp, Homo sapiens
tgacttggaagatag

SEQ ID NO: 1366322 - DNA, 15 bp, Homo sapiens
ttgacttggaagata

SEQ ID NO: 1366323 - DNA, 15 bp, Homo sapiens
attgacttggaagat

SEQ ID NO: 1366324 - DNA, 15 bp, Homo sapiens
tattgacttggaaga

SEQ ID NO: 1366325 - DNA, 15 bp, Homo sapiens
ttattgacttggaag

SEQ ID NO: 1366326 - DNA, 15 bp, Homo sapiens
cttattgacttggaa

SEQ ID NO: 1366327 - DNA, 15 bp, Homo sapiens
acttattgacttgga

SEQ ID NO: 1366328 - DNA, 15 bp, Homo sapiens
cacttattgacttgg

SEQ ID NO: 1366329 - DNA, 15 bp, Homo sapiens
acacttattgacttg

SEQ ID NO: 1366330 - DNA, 15 bp, Homo sapiens
aacacttattgactt

SEQ ID NO: 1366331 - DNA, 15 bp, Homo sapiens
taacacttattgact

SEQ ID NO: 1366332 - DNA, 15 bp, Homo sapiens
ctaacacttattgac

SEQ ID NO: 1366333 - DNA, 15 bp, Homo sapiens
cctaacacttattga

SEQ ID NO: 1366334 - DNA, 15 bp, Homo sapiens
tcctaacacttattg

SEQ ID NO: 1366335 - DNA, 15 bp, Homo sapiens
atcctaacacttatt

SEQ ID NO: 1366336 - DNA, 15 bp, Homo sapiens
gatcctaacacttat

SEQ ID NO: 1366337 - DNA, 15 bp, Homo sapiens
agatcctaacactta

SEQ ID NO: 1366338 - DNA, 15 bp, Homo sapiens
gagatcctaacactt

SEQ ID NO: 1366339 - DNA, 15 bp, Homo sapiens
ggagatcctaacact

SEQ ID NO: 1366340 - DNA, 15 bp, Homo sapiens
aggagatcctaacac

SEQ ID NO: 1366341 - DNA, 15 bp, Homo sapiens
aaggagatcctaaca

SEQ ID NO: 1366342 - DNA, 15 bp, Homo sapiens
caaggagatcctaac

SEQ ID NO: 1366343 - DNA, 15 bp, Homo sapiens
gcaaggagatcctaa

SEQ ID NO: 1366344 - DNA, 15 bp, Homo sapiens
ggcaaggagatccta

SEQ ID NO: 1366345 - DNA, 15 bp, Homo sapiens
aggcaaggagatcct

SEQ ID NO: 1366346 - DNA, 15 bp, Homo sapiens
caggcaaggagatcc

SEQ ID NO: 1366347 - DNA, 15 bp, Homo sapiens
ccaggcaaggagatc

SEQ ID NO: 1366348 - DNA, 15 bp, Homo sapiens
tccaggcaaggagat

SEQ ID NO: 1366349 - DNA, 15 bp, Homo sapiens
ttccaggcaaggaga

SEQ ID NO: 1366350 - DNA, 15 bp, Homo sapiens
tttccaggcaaggag

SEQ ID NO: 1366351 - DNA, 15 bp, Homo sapiens
atttccaggcaagga

SEQ ID NO: 1366352 - DNA, 15 bp, Homo sapiens
catttccaggcaagg

SEQ ID NO: 1366353 - DNA, 15 bp, Homo sapiens
tcatttccaggcaag

SEQ ID NO: 1366354 - DNA, 15 bp, Homo sapiens
atcatttccaggcaa

SEQ ID NO: 1366355 - DNA, 15 bp, Homo sapiens
gatcatttccaggca

SEQ ID NO: 1366356 - DNA, 15 bp, Homo sapiens
tgatcatttccaggc

SEQ ID NO: 1366357 - DNA, 15 bp, Homo sapiens
atgatcatttccagg

SEQ ID NO: 1366358 - DNA, 15 bp, Homo sapiens
catgatcatttccag

SEQ ID NO: 1366359 - DNA, 15 bp, Homo sapiens
acatgatcatttcca

SEQ ID NO: 1366360 - DNA, 15 bp, Homo sapiens
tacatgatcatttcc

SEQ ID NO: 1366361 - DNA, 15 bp, Homo sapiens
ttacatgatcatttc

SEQ ID NO: 1366362 - DNA, 15 bp, Homo sapiens
cttacatgatcattt

SEQ ID NO: 1366363 - DNA, 15 bp, Homo sapiens
gcttacatgatcatt

SEQ ID NO: 1366364 - DNA, 15 bp, Homo sapiens
tgcttacatgatcat

SEQ ID NO: 1366365 - DNA, 15 bp, Homo sapiens
ttgcttacatgatca

SEQ ID NO: 1366366 - DNA, 15 bp, Homo sapiens
attgcttacatgatc

SEQ ID NO: 1366367 - DNA, 15 bp, Homo sapiens
cattgcttacatgat

SEQ ID NO: 1366368 - DNA, 15 bp, Homo sapiens
acattgcttacatga

SEQ ID NO: 1366369 - DNA, 15 bp, Homo sapiens
aacattgcttacatg

SEQ ID NO: 1366370 - DNA, 15 bp, Homo sapiens
caacattgcttacat

SEQ ID NO: 1366371 - DNA, 15 bp, Homo sapiens
gcaacattgcttaca

SEQ ID NO: 1366372 - DNA, 15 bp, Homo sapiens
agcaacattgcttac

SEQ ID NO: 1366373 - DNA, 15 bp, Homo sapiens
cagcaacattgctta

SEQ ID NO: 1366374 - DNA, 15 bp, Homo sapiens
tcagcaacattgctt

SEQ ID NO: 1366375 - DNA, 15 bp, Homo sapiens
atcagcaacattgct

SEQ ID NO: 1366376 - DNA, 15 bp, Homo sapiens
aatcagcaacattgc

SEQ ID NO: 1366377 - DNA, 15 bp, Homo sapiens
aaatcagcaacattg

SEQ ID NO: 1366378 - DNA, 15 bp, Homo sapiens
gaaatcagcaacatt

SEQ ID NO: 1366379 - DNA, 15 bp, Homo sapiens
ggaaatcagcaacat

SEQ ID NO: 1366380 - DNA, 15 bp, Homo sapiens
aggaaatcagcaaca

SEQ ID NO: 1366381 - DNA, 15 bp, Homo sapiens
gaggaaatcagcaac

SEQ ID NO: 1366382 - DNA, 15 bp, Homo sapiens
agaggaaatcagcaa

SEQ ID NO: 1366383 - DNA, 15 bp, Homo sapiens
aagaggaaatcagca

SEQ ID NO: 1366384 - DNA, 15 bp, Homo sapiens
caagaggaaatcagc

SEQ ID NO: 1366385 - DNA, 15 bp, Homo sapiens
tcaagaggaaatcag

SEQ ID NO: 1366386 - DNA, 15 bp, Homo sapiens
ttcaagaggaaatca

SEQ ID NO: 1366387 - DNA, 15 bp, Homo sapiens
attcaagaggaaatc

SEQ ID NO: 1366388 - DNA, 15 bp, Homo sapiens
aattcaagaggaaat

SEQ ID NO: 1366389 - DNA, 15 bp, Homo sapiens
aaattcaagaggaaa

SEQ ID NO: 1366390 - DNA, 15 bp, Homo sapiens
taaattcaagaggaa

SEQ ID NO: 1366391 - DNA, 15 bp, Homo sapiens
ataaattcaagagga

SEQ ID NO: 1366392 - DNA, 15 bp, Homo sapiens
tataaattcaagagg

SEQ ID NO: 1366393 - DNA, 15 bp, Homo sapiens
atataaattcaagag

SEQ ID NO: 1366394 - DNA, 15 bp, Homo sapiens
aatataaattcaaga

SEQ ID NO: 1366395 - DNA, 15 bp, Homo sapiens
taatataaattcaag

SEQ ID NO: 1366396 - DNA, 15 bp, Homo sapiens
gtaatataaattcaa

SEQ ID NO: 1366397 - DNA, 15 bp, Homo sapiens
ggtaatataaattca

SEQ ID NO: 1366398 - DNA, 15 bp, Homo sapiens
tggtaatataaattc

SEQ ID NO: 1366399 - DNA, 15 bp, Homo sapiens
ttggtaatataaatt

SEQ ID NO: 1366400 - DNA, 15 bp, Homo sapiens
tttggtaatataaat

SEQ ID NO: 1366401 - DNA, 15 bp, Homo sapiens
ctttggtaatataaa

SEQ ID NO: 1366402 - DNA, 15 bp, Homo sapiens
cctttggtaatataa

SEQ ID NO: 1366403 - DNA, 15 bp, Homo sapiens
acctttggtaatata

SEQ ID NO: 1366404 - DNA, 15 bp, Homo sapiens
tacctttggtaatat

SEQ ID NO: 1366405 - DNA, 15 bp, Homo sapiens
gtacctttggtaata

SEQ ID NO: 1366406 - DNA, 15 bp, Homo sapiens
agtacctttggtaat

SEQ ID NO: 1366407 - DNA, 15 bp, Homo sapiens
aagtacctttggtaa

SEQ ID NO: 1366408 - DNA, 15 bp, Homo sapiens
aaagtacctttggta

SEQ ID NO: 1366409 - DNA, 15 bp, Homo sapiens
aaaagtacctttggt

SEQ ID NO: 1366410 - DNA, 15 bp, Homo sapiens
caaaagtacctttgg

SEQ ID NO: 1366411 - DNA, 15 bp, Homo sapiens
ccaaaagtacctttg

SEQ ID NO: 1366412 - DNA, 15 bp, Homo sapiens
accaaaagtaccttt

SEQ ID NO: 1366413 - DNA, 15 bp, Homo sapiens
caccaaaagtacctt

SEQ ID NO: 1366414 - DNA, 15 bp, Homo sapiens
ccaccaaaagtacct

SEQ ID NO: 1366415 - DNA, 15 bp, Homo sapiens
cccaccaaaagtacc

SEQ ID NO: 1366416 - DNA, 15 bp, Homo sapiens
ccccaccaaaagtac

SEQ ID NO: 1366417 - DNA, 15 bp, Homo sapiens
accccaccaaaagta

SEQ ID NO: 1366418 - DNA, 15 bp, Homo sapiens
caccccaccaaaagt

SEQ ID NO: 1366419 - DNA, 15 bp, Homo sapiens
ccaccccaccaaaag

SEQ ID NO: 1366420 - DNA, 15 bp, Homo sapiens
tccaccccaccaaaa

SEQ ID NO: 1366421 - DNA, 15 bp, Homo sapiens
ctccaccccaccaaa

SEQ ID NO: 1366422 - DNA, 15 bp, Homo sapiens
cctccaccccaccaa

SEQ ID NO: 1366423 - DNA, 15 bp, Homo sapiens
tcctccaccccacca

SEQ ID NO: 1366424 - DNA, 15 bp, Homo sapiens
ttcctccaccccacc

SEQ ID NO: 1366425 - DNA, 15 bp, Homo sapiens
cttcctccaccccac

SEQ ID NO: 1366426 - DNA, 15 bp, Homo sapiens
ccttcctccacccca

SEQ ID NO: 1366427 - DNA, 15 bp, Homo sapiens
cccttcctccacccc

SEQ ID NO: 1366428 - DNA, 15 bp, Homo sapiens
acccttcctccaccc

SEQ ID NO: 1366429 - DNA, 15 bp, Homo sapiens
gacccttcctccacc

SEQ ID NO: 1366430 - DNA, 15 bp, Homo sapiens
ggacccttcctccac

SEQ ID NO: 1366431 - DNA, 15 bp, Homo sapiens
tggacccttcctcca

SEQ ID NO: 1366432 - DNA, 15 bp, Homo sapiens
ttggacccttcctcc

SEQ ID NO: 1366433 - DNA, 15 bp, Homo sapiens
tttggacccttcctc

SEQ ID NO: 1366434 - DNA, 15 bp, Homo sapiens
atttggacccttcct

SEQ ID NO: 1366435 - DNA, 15 bp, Homo sapiens
catttggacccttcc

SEQ ID NO: 1366436 - DNA, 15 bp, Homo sapiens
gcatttggacccttc

SEQ ID NO: 1366437 - DNA, 15 bp, Homo sapiens
ggcatttggaccctt

SEQ ID NO: 1366438 - DNA, 15 bp, Homo sapiens
gggcatttggaccct

SEQ ID NO: 1366439 - DNA, 15 bp, Homo sapiens
ggggcatttggaccc

SEQ ID NO: 1366440 - DNA, 15 bp, Homo sapiens
aggggcatttggacc

SEQ ID NO: 1366441 - DNA, 15 bp, Homo sapiens
aaggggcatttggac

SEQ ID NO: 1366442 - DNA, 15 bp, Homo sapiens
taaggggcatttgga

SEQ ID NO: 1366443 - DNA, 15 bp, Homo sapiens
ttaaggggcatttgg

SEQ ID NO: 1366444 - DNA, 15 bp, Homo sapiens
cttaaggggcatttg

SEQ ID NO: 1366445 - DNA, 15 bp, Homo sapiens
gcttaaggggcattt

SEQ ID NO: 1366446 - DNA, 15 bp, Homo sapiens
ggcttaaggggcatt

SEQ ID NO: 1366447 - DNA, 15 bp, Homo sapiens
gggcttaaggggcat

SEQ ID NO: 1366448 - DNA, 15 bp, Homo sapiens
agggcttaaggggca

SEQ ID NO: 1366449 - DNA, 15 bp, Homo sapiens
tagggcttaaggggc

SEQ ID NO: 1366450 - DNA, 15 bp, Homo sapiens
ttagggcttaagggg

SEQ ID NO: 1366451 - DNA, 15 bp, Homo sapiens
cttagggcttaaggg

SEQ ID NO: 1366452 - DNA, 15 bp, Homo sapiens
acttagggcttaagg

SEQ ID NO: 1366453 - DNA, 15 bp, Homo sapiens
cacttagggcttaag

SEQ ID NO: 1366454 - DNA, 15 bp, Homo sapiens
acacttagggcttaa

SEQ ID NO: 1366455 - DNA, 15 bp, Homo sapiens
aacacttagggctta

SEQ ID NO: 1366456 - DNA, 15 bp, Homo sapiens
caacacttagggctt

SEQ ID NO: 1366457 - DNA, 15 bp, Homo sapiens
tcaacacttagggct

SEQ ID NO: 1366458 - DNA, 15 bp, Homo sapiens
atcaacacttagggc

SEQ ID NO: 1366459 - DNA, 15 bp, Homo sapiens
aatcaacacttaggg

SEQ ID NO: 1366460 - DNA, 15 bp, Homo sapiens
aaatcaacacttagg

SEQ ID NO: 1366461 - DNA, 15 bp, Homo sapiens
gaaatcaacacttag

SEQ ID NO: 1366462 - DNA, 15 bp, Homo sapiens
agaaatcaacactta

SEQ ID NO: 1366463 - DNA, 15 bp, Homo sapiens
tagaaatcaacactt

SEQ ID NO: 1366464 - DNA, 15 bp, Homo sapiens
ttagaaatcaacact

SEQ ID NO: 1366465 - DNA, 15 bp, Homo sapiens
tttagaaatcaacac

SEQ ID NO: 1366466 - DNA, 15 bp, Homo sapiens
atttagaaatcaaca

SEQ ID NO: 1366467 - DNA, 15 bp, Homo sapiens
tatttagaaatcaac

SEQ ID NO: 1366468 - DNA, 15 bp, Homo sapiens
atatttagaaatcaa

SEQ ID NO: 1366469 - DNA, 15 bp, Homo sapiens
aatatttagaaatca

SEQ ID NO: 1366470 - DNA, 15 bp, Homo sapiens
aaatatttagaaatc

SEQ ID NO: 1366471 - DNA, 15 bp, Homo sapiens
taaatatttagaaat

SEQ ID NO: 1366472 - DNA, 15 bp, Homo sapiens
ataaatatttagaaa

SEQ ID NO: 1366473 - DNA, 15 bp, Homo sapiens
aataaatatttagaa

SEQ ID NO: 1366474 - DNA, 15 bp, Homo sapiens
taataaatatttaga

SEQ ID NO: 1366475 - DNA, 15 bp, Homo sapiens
ttaataaatatttag

SEQ ID NO: 1366476 - DNA, 15 bp, Homo sapiens
cttaataaatattta

SEQ ID NO: 1366477 - DNA, 15 bp, Homo sapiens
gcttaataaatattt

SEQ ID NO: 1366478 - DNA, 15 bp, Homo sapiens
tgcttaataaatatt

SEQ ID NO: 1366479 - DNA, 15 bp, Homo sapiens
atgcttaataaatat

SEQ ID NO: 1366480 - DNA, 15 bp, Homo sapiens
gatgcttaataaata

SEQ ID NO: 1366481 - DNA, 15 bp, Homo sapiens
agatgcttaataaat

SEQ ID NO: 1366482 - DNA, 15 bp, Homo sapiens
tagatgcttaataaa

SEQ ID NO: 1366483 - DNA, 15 bp, Homo sapiens
gtagatgcttaataa

SEQ ID NO: 1366484 - DNA, 15 bp, Homo sapiens
agtagatgcttaata

SEQ ID NO: 1366485 - DNA, 15 bp, Homo sapiens
tagtagatgcttaat

SEQ ID NO: 1366486 - DNA, 15 bp, Homo sapiens
atagtagatgcttaa

SEQ ID NO: 1366487 - DNA, 15 bp, Homo sapiens
aatagtagatgctta

SEQ ID NO: 1366488 - DNA, 15 bp, Homo sapiens
caatagtagatgctt

SEQ ID NO: 1366489 - DNA, 15 bp, Homo sapiens
acaatagtagatgct

SEQ ID NO: 1366490 - DNA, 15 bp, Homo sapiens
tacaatagtagatgc

SEQ ID NO: 1366491 - DNA, 15 bp, Homo sapiens
gtacaatagtagatg

SEQ ID NO: 1366492 - DNA, 15 bp, Homo sapiens
agtacaatagtagat

SEQ ID NO: 1366493 - DNA, 15 bp, Homo sapiens
tagtacaatagtaga

SEQ ID NO: 1366494 - DNA, 15 bp, Homo sapiens
ttagtacaatagtag

SEQ ID NO: 1366495 - DNA, 15 bp, Homo sapiens
attagtacaatagta

SEQ ID NO: 1366496 - DNA, 15 bp, Homo sapiens
tattagtacaatagt

SEQ ID NO: 1366497 - DNA, 15 bp, Homo sapiens
atattagtacaatag

SEQ ID NO: 1366498 - DNA, 15 bp, Homo sapiens
catattagtacaata

SEQ ID NO: 1366499 - DNA, 15 bp, Homo sapiens
acatattagtacaat

SEQ ID NO: 1366500 - DNA, 15 bp, Homo sapiens
aacatattagtacaa

SEQ ID NO: 1366501 - DNA, 15 bp, Homo sapiens
taacatattagtaca

SEQ ID NO: 1366502 - DNA, 15 bp, Homo sapiens
ctaacatattagtac

SEQ ID NO: 1366503 - DNA, 15 bp, Homo sapiens
tctaacatattagta

SEQ ID NO: 1366504 - DNA, 15 bp, Homo sapiens
ttctaacatattagt

SEQ ID NO: 1366505 - DNA, 15 bp, Homo sapiens
tttctaacatattag

SEQ ID NO: 1366506 - DNA, 15 bp, Homo sapiens
atttctaacatatta

SEQ ID NO: 1366507 - DNA, 15 bp, Homo sapiens
gatttctaacatatt

SEQ ID NO: 1366508 - DNA, 15 bp, Homo sapiens
agatttctaacatat

SEQ ID NO: 1366509 - DNA, 15 bp, Homo sapiens
aagatttctaacata

SEQ ID NO: 1366510 - DNA, 15 bp, Homo sapiens
aaagatttctaacat

SEQ ID NO: 1366511 - DNA, 15 bp, Homo sapiens
aaaagatttctaaca

SEQ ID NO: 1366512 - DNA, 15 bp, Homo sapiens
aaaaagatttctaac

SEQ ID NO: 1366513 - DNA, 15 bp, Homo sapiens
taaaaagatttctaa

SEQ ID NO: 1366514 - DNA, 15 bp, Homo sapiens
ttaaaaagatttcta

SEQ ID NO: 1366515 - DNA, 15 bp, Homo sapiens
attaaaaagatttct

SEQ ID NO: 1366516 - DNA, 15 bp, Homo sapiens
aattaaaaagatttc

SEQ ID NO: 1366517 - DNA, 15 bp, Homo sapiens
caattaaaaagattt

SEQ ID NO: 1366518 - DNA, 15 bp, Homo sapiens
gcaattaaaaagatt

SEQ ID NO: 1366519 - DNA, 15 bp, Homo sapiens
agcaattaaaaagat

SEQ ID NO: 1366520 - DNA, 15 bp, Homo sapiens
tagcaattaaaaaga

SEQ ID NO: 1366521 - DNA, 15 bp, Homo sapiens
ctagcaattaaaaag

SEQ ID NO: 1366522 - DNA, 15 bp, Homo sapiens
tctagcaattaaaaa

SEQ ID NO: 1366523 - DNA, 15 bp, Homo sapiens
ctctagcaattaaaa

SEQ ID NO: 1366524 - DNA, 15 bp, Homo sapiens
cctctagcaattaaa

SEQ ID NO: 1366525 - DNA, 15 bp, Homo sapiens
ccctctagcaattaa

SEQ ID NO: 1366526 - DNA, 15 bp, Homo sapiens
cccctctagcaatta

SEQ ID NO: 1366527 - DNA, 15 bp, Homo sapiens
ccccctctagcaatt

SEQ ID NO: 1366528 - DNA, 15 bp, Homo sapiens
tccccctctagcaat

SEQ ID NO: 1366529 - DNA, 15 bp, Homo sapiens
ctccccctctagcaa

SEQ ID NO: 1366530 - DNA, 15 bp, Homo sapiens
tctccccctctagca

SEQ ID NO: 1366531 - DNA, 15 bp, Homo sapiens
ctctccccctctagc

SEQ ID NO: 1366532 - DNA, 15 bp, Homo sapiens
cctctccccctctag

SEQ ID NO: 1366533 - DNA, 15 bp, Homo sapiens
tcctctccccctcta

SEQ ID NO: 1366534 - DNA, 15 bp, Homo sapiens
gtcctctccccctct

SEQ ID NO: 1366535 - DNA, 15 bp, Homo sapiens
agtcctctccccctc

SEQ ID NO: 1366536 - DNA, 15 bp, Homo sapiens
aagtcctctccccct

SEQ ID NO: 1366537 - DNA, 15 bp, Homo sapiens
caagtcctctccccc

SEQ ID NO: 1366538 - DNA, 15 bp, Homo sapiens
tcaagtcctctcccc

SEQ ID NO: 1366539 - DNA, 15 bp, Homo sapiens
ctcaagtcctctccc

SEQ ID NO: 1366540 - DNA, 15 bp, Homo sapiens
gctcaagtcctctcc

SEQ ID NO: 1366541 - DNA, 15 bp, Homo sapiens
agctcaagtcctctc

SEQ ID NO: 1366542 - DNA, 15 bp, Homo sapiens
gagctcaagtcctct

SEQ ID NO: 1366543 - DNA, 15 bp, Homo sapiens
agagctcaagtcctc

SEQ ID NO: 1366544 - DNA, 15 bp, Homo sapiens
tagagctcaagtcct

SEQ ID NO: 1366545 - DNA, 15 bp, Homo sapiens
ttagagctcaagtcc

SEQ ID NO: 1366546 - DNA, 15 bp, Homo sapiens
tttagagctcaagtc

SEQ ID NO: 1366547 - DNA, 15 bp, Homo sapiens
ctttagagctcaagt

SEQ ID NO: 1366548 - DNA, 15 bp, Homo sapiens
cctttagagctcaag

SEQ ID NO: 1366549 - DNA, 15 bp, Homo sapiens
gcctttagagctcaa

SEQ ID NO: 1366550 - DNA, 15 bp, Homo sapiens
cgcctttagagctca

SEQ ID NO: 1366551 - DNA, 15 bp, Homo sapiens
ccgcctttagagctc

SEQ ID NO: 1366552 - DNA, 15 bp, Homo sapiens
gccgcctttagagct

SEQ ID NO: 1366553 - DNA, 15 bp, Homo sapiens
agccgcctttagagc

SEQ ID NO: 1366554 - DNA, 15 bp, Homo sapiens
tagccgcctttagag

SEQ ID NO: 1366555 - DNA, 15 bp, Homo sapiens
ttagccgcctttaga

SEQ ID NO: 1366556 - DNA, 15 bp, Homo sapiens
cttagccgcctttag

SEQ ID NO: 1366557 - DNA, 15 bp, Homo sapiens
tcttagccgccttta

SEQ ID NO: 1366558 - DNA, 15 bp, Homo sapiens
atcttagccgccttt

SEQ ID NO: 1366559 - DNA, 15 bp, Homo sapiens
aatcttagccgcctt

SEQ ID NO: 1366560 - DNA, 15 bp, Homo sapiens
gaatcttagccgcct

SEQ ID NO: 1366561 - DNA, 15 bp, Homo sapiens
tgaatcttagccgcc

SEQ ID NO: 1366562 - DNA, 15 bp, Homo sapiens
atgaatcttagccgc

SEQ ID NO: 1366563 - DNA, 15 bp, Homo sapiens
aatgaatcttagccg

SEQ ID NO: 1366564 - DNA, 15 bp, Homo sapiens
gaatgaatcttagcc

SEQ ID NO: 1366565 - DNA, 15 bp, Homo sapiens
ggaatgaatcttagc

SEQ ID NO: 1366566 - DNA, 15 bp, Homo sapiens
aggaatgaatcttag

SEQ ID NO: 1366567 - DNA, 15 bp, Homo sapiens
caggaatgaatctta

SEQ ID NO: 1366568 - DNA, 15 bp, Homo sapiens
gcaggaatgaatctt

SEQ ID NO: 1366569 - DNA, 15 bp, Homo sapiens
ggcaggaatgaatct

SEQ ID NO: 1366570 - DNA, 15 bp, Homo sapiens
aggcaggaatgaatc

SEQ ID NO: 1366571 - DNA, 15 bp, Homo sapiens
aaggcaggaatgaat

SEQ ID NO: 1366572 - DNA, 15 bp, Homo sapiens
aaaggcaggaatgaa

SEQ ID NO: 1366573 - DNA, 15 bp, Homo sapiens
aaaaggcaggaatga

SEQ ID NO: 1366574 - DNA, 15 bp, Homo sapiens
gaaaaggcaggaatg

SEQ ID NO: 1366575 - DNA, 15 bp, Homo sapiens
ggaaaaggcaggaat

SEQ ID NO: 1366576 - DNA, 15 bp, Homo sapiens
aaggaaaaggcagga

SEQ ID NO: 1366577 - DNA, 15 bp, Homo sapiens
aaaggaaaaggcagg

SEQ ID NO: 1366578 - DNA, 15 bp, Homo sapiens
aaaaggaaaaggcag

SEQ ID NO: 1366579 - DNA, 15 bp, Homo sapiens
taaaaggaaaaggca

SEQ ID NO: 1366580 - DNA, 15 bp, Homo sapiens
ttaaaaggaaaaggc

SEQ ID NO: 1366581 - DNA, 15 bp, Homo sapiens
cttaaaaggaaaagg

SEQ ID NO: 1366582 - DNA, 15 bp, Homo sapiens
tcttaaaaggaaaag

SEQ ID NO: 1366583 - DNA, 15 bp, Homo sapiens
ttcttaaaaggaaaa

SEQ ID NO: 1366584 - DNA, 15 bp, Homo sapiens
gttcttaaaaggaaa

SEQ ID NO: 1366585 - DNA, 15 bp, Homo sapiens
tgttcttaaaaggaa

SEQ ID NO: 1366586 - DNA, 15 bp, Homo sapiens
atgttcttaaaagga

SEQ ID NO: 1366587 - DNA, 15 bp, Homo sapiens
tatgttcttaaaagg

SEQ ID NO: 1366588 - DNA, 15 bp, Homo sapiens
atatgttcttaaaag

SEQ ID NO: 1366589 - DNA, 15 bp, Homo sapiens
tatatgttcttaaaa

SEQ ID NO: 1366590 - DNA, 15 bp, Homo sapiens
ttatatgttcttaaa

SEQ ID NO: 1366591 - DNA, 15 bp, Homo sapiens
attatatgttcttaa

SEQ ID NO: 1366592 - DNA, 15 bp, Homo sapiens
aattatatgttctta

SEQ ID NO: 1366593 - DNA, 15 bp, Homo sapiens
aaattatatgttctt

SEQ ID NO: 1366594 - DNA, 15 bp, Homo sapiens
taaattatatgttct

SEQ ID NO: 1366595 - DNA, 15 bp, Homo sapiens
ctaaattatatgttc

SEQ ID NO: 1366596 - DNA, 15 bp, Homo sapiens
gctaaattatatgtt

SEQ ID NO: 1366597 - DNA, 15 bp, Homo sapiens
ggctaaattatatgt

SEQ ID NO: 1366598 - DNA, 15 bp, Homo sapiens
cggctaaattatatg

SEQ ID NO: 1366599 - DNA, 15 bp, Homo sapiens
ccggctaaattatat

SEQ ID NO: 1366600 - DNA, 15 bp, Homo sapiens
gccggctaaattata

SEQ ID NO: 1366601 - DNA, 15 bp, Homo sapiens
tgccggctaaattat

SEQ ID NO: 1366602 - DNA, 15 bp, Homo sapiens
ttgccggctaaatta

SEQ ID NO: 1366603 - DNA, 15 bp, Homo sapiens
cttgccggctaaatt

SEQ ID NO: 1366604 - DNA, 15 bp, Homo sapiens
tcttgccggctaaat

SEQ ID NO: 1366605 - DNA, 15 bp, Homo sapiens
atcttgccggctaaa

SEQ ID NO: 1366606 - DNA, 15 bp, Homo sapiens
catcttgccggctaa

SEQ ID NO: 1366607 - DNA, 15 bp, Homo sapiens
acatcttgccggcta

SEQ ID NO: 1366608 - DNA, 15 bp, Homo sapiens
tacatcttgccggct

SEQ ID NO: 1366609 - DNA, 15 bp, Homo sapiens
gtacatcttgccggc

SEQ ID NO: 1366610 - DNA, 15 bp, Homo sapiens
tgtacatcttgccgg

SEQ ID NO: 1366611 - DNA, 15 bp, Homo sapiens
atgtacatcttgccg

SEQ ID NO: 1366612 - DNA, 15 bp, Homo sapiens
aatgtacatcttgcc

SEQ ID NO: 1366613 - DNA, 15 bp, Homo sapiens
aaatgtacatcttgc

SEQ ID NO: 1366614 - DNA, 15 bp, Homo sapiens
gaaatgtacatcttg

SEQ ID NO: 1366615 - DNA, 15 bp, Homo sapiens
tgaaatgtacatctt

SEQ ID NO: 1366616 - DNA, 15 bp, Homo sapiens
atgaaatgtacatct

SEQ ID NO: 1366617 - DNA, 15 bp, Homo sapiens
gatgaaatgtacatc

SEQ ID NO: 1366618 - DNA, 15 bp, Homo sapiens
agatgaaatgtacat

SEQ ID NO: 1366619 - DNA, 15 bp, Homo sapiens
aagatgaaatgtaca

SEQ ID NO: 1366620 - DNA, 15 bp, Homo sapiens
aaagatgaaatgtac

SEQ ID NO: 1366621 - DNA, 15 bp, Homo sapiens
taaagatgaaatgta

SEQ ID NO: 1366622 - DNA, 15 bp, Homo sapiens
gtaaagatgaaatgt

SEQ ID NO: 1366623 - DNA, 15 bp, Homo sapiens
agtaaagatgaaatg

SEQ ID NO: 1366624 - DNA, 15 bp, Homo sapiens
aagtaaagatgaaat

SEQ ID NO: 1366625 - DNA, 15 bp, Homo sapiens
aaagtaaagatgaaa

SEQ ID NO: 1366626 - DNA, 15 bp, Homo sapiens
aaaagtaaagatgaa

SEQ ID NO: 1366627 - DNA, 15 bp, Homo sapiens
gaaaagtaaagatga

SEQ ID NO: 1366628 - DNA, 15 bp, Homo sapiens
agaaaagtaaagatg

SEQ ID NO: 1366629 - DNA, 15 bp, Homo sapiens
aagaaaagtaaagat

SEQ ID NO: 1366630 - DNA, 15 bp, Homo sapiens
aaagaaaagtaaaga

SEQ ID NO: 1366631 - DNA, 15 bp, Homo sapiens
aaaagaaaagtaaag

SEQ ID NO: 1366632 - DNA, 15 bp, Homo sapiens
aaaaagaaaagtaaa

SEQ ID NO: 1366633 - DNA, 15 bp, Homo sapiens
aaaaaagaaaagtaa

SEQ ID NO: 1366634 - DNA, 15 bp, Homo sapiens
aaaaaaagaaaagta

SEQ ID NO: 1366635 - DNA, 15 bp, Homo sapiens
gaaaaaaagaaaagt

SEQ ID NO: 1366636 - DNA, 15 bp, Homo sapiens
agaaaaaaagaaaag

SEQ ID NO: 1366637 - DNA, 15 bp, Homo sapiens
gaaaagaaaaaaaga

SEQ ID NO: 1366638 - DNA, 15 bp, Homo sapiens
agaaaagaaaaaaag

SEQ ID NO: 1366639 - DNA, 15 bp, Homo sapiens
caaaaaaagaaaaga

SEQ ID NO: 1366640 - DNA, 15 bp, Homo sapiens
tcaaaaaaagaaaag

SEQ ID NO: 1366641 - DNA, 15 bp, Homo sapiens
ctcaaaaaaagaaaa

SEQ ID NO: 1366642 - DNA, 15 bp, Homo sapiens
tctcaaaaaaagaaa

SEQ ID NO: 1366643 - DNA, 15 bp, Homo sapiens
gtctcaaaaaaagaa

SEQ ID NO: 1366644 - DNA, 15 bp, Homo sapiens
tgtctcaaaaaaaga

SEQ ID NO: 1366645 - DNA, 15 bp, Homo sapiens
ctgtctcaaaaaaag

SEQ ID NO: 1366646 - DNA, 15 bp, Homo sapiens
tcctgggcaacagag

SEQ ID NO: 1366647 - DNA, 15 bp, Homo sapiens
atcctgggcaacaga

SEQ ID NO: 1366648 - DNA, 15 bp, Homo sapiens
catcctgggcaacag

SEQ ID NO: 1366649 - DNA, 15 bp, Homo sapiens
acggaggttgcagtg

SEQ ID NO: 1366650 - DNA, 15 bp, Homo sapiens
gacggaggttgcagt

SEQ ID NO: 1366651 - DNA, 15 bp, Homo sapiens
agacggaggttgcag

SEQ ID NO: 1366652 - DNA, 15 bp, Homo sapiens
gagacggaggttgca

SEQ ID NO: 1366653 - DNA, 15 bp, Homo sapiens
cgggagacggaggtt

SEQ ID NO: 1366654 - DNA, 15 bp, Homo sapiens
ccgggagacggaggt

SEQ ID NO: 1366655 - DNA, 15 bp, Homo sapiens
cccgggagacggagg

SEQ ID NO: 1366656 - DNA, 15 bp, Homo sapiens
ttgaacccgggagac

SEQ ID NO: 1366657 - DNA, 15 bp, Homo sapiens
cttgaacccgggaga

SEQ ID NO: 1366658 - DNA, 15 bp, Homo sapiens
tgcttgaacccggga

SEQ ID NO: 1366659 - DNA, 15 bp, Homo sapiens
ttgcttgaacccggg

SEQ ID NO: 1366660 - DNA, 15 bp, Homo sapiens
attgcttgaacccgg

SEQ ID NO: 1366661 - DNA, 15 bp, Homo sapiens
agctgagacaggaga

SEQ ID NO: 1366662 - DNA, 15 bp, Homo sapiens
cagctgagacaggag

SEQ ID NO: 1366663 - DNA, 15 bp, Homo sapiens
ccagctgagacagga

SEQ ID NO: 1366664 - DNA, 15 bp, Homo sapiens
cccagctgagacagg

SEQ ID NO: 1366665 - DNA, 15 bp, Homo sapiens
tcccagctgagacag

SEQ ID NO: 1366666 - DNA, 15 bp, Homo sapiens
atcccagctgagaca

SEQ ID NO: 1366667 - DNA, 15 bp, Homo sapiens
aatcccagctgagac

SEQ ID NO: 1366668 - DNA, 15 bp, Homo sapiens
taatcccagctgaga

SEQ ID NO: 1366669 - DNA, 15 bp, Homo sapiens
gtaatcccagctgag

SEQ ID NO: 1366670 - DNA, 15 bp, Homo sapiens
agtaatcccagctga

SEQ ID NO: 1366671 - DNA, 15 bp, Homo sapiens
cagtaatcccagctg

SEQ ID NO: 1366672 - DNA, 15 bp, Homo sapiens
ccagtaatcccagct

SEQ ID NO: 1366673 - DNA, 15 bp, Homo sapiens
gcgccagtaatccca

SEQ ID NO: 1366674 - DNA, 15 bp, Homo sapiens
cgcgccagtaatccc

SEQ ID NO: 1366675 - DNA, 15 bp, Homo sapiens
gcgcgccagtaatcc

SEQ ID NO: 1366676 - DNA, 15 bp, Homo sapiens
cgcgcgccagtaatc

SEQ ID NO: 1366677 - DNA, 15 bp, Homo sapiens
gcgcgcgccagtaat

SEQ ID NO: 1366678 - DNA, 15 bp, Homo sapiens
ggcgcgcgccagtaa

SEQ ID NO: 1366679 - DNA, 15 bp, Homo sapiens
tggcgcgcgccagta

SEQ ID NO: 1366680 - DNA, 15 bp, Homo sapiens
gtggcgcgcgccagt

SEQ ID NO: 1366681 - DNA, 15 bp, Homo sapiens
ggtggcgcgcgccag

SEQ ID NO: 1366682 - DNA, 15 bp, Homo sapiens
gggtggcgcgcgcca

SEQ ID NO: 1366683 - DNA, 15 bp, Homo sapiens
cgggtggcgcgcgcc

SEQ ID NO: 1366684 - DNA, 15 bp, Homo sapiens
gcgggtggcgcgcgc

SEQ ID NO: 1366685 - DNA, 15 bp, Homo sapiens
ggcgggtggcgcgcg

SEQ ID NO: 1366686 - DNA, 15 bp, Homo sapiens
aggcgggtggcgcgc

SEQ ID NO: 1366687 - DNA, 15 bp, Homo sapiens
caggcgggtggcgcg

SEQ ID NO: 1366688 - DNA, 15 bp, Homo sapiens
ccaggcgggtggcgc

SEQ ID NO: 1366689 - DNA, 15 bp, Homo sapiens
gccaggcgggtggcg

SEQ ID NO: 1366690 - DNA, 15 bp, Homo sapiens
agccaggcgggtggc

SEQ ID NO: 1366691 - DNA, 15 bp, Homo sapiens
tagccaggcgggtgg

SEQ ID NO: 1366692 - DNA, 15 bp, Homo sapiens
ttagccaggcgggtg

SEQ ID NO: 1366693 - DNA, 15 bp, Homo sapiens
attagccaggcgggt

SEQ ID NO: 1366694 - DNA, 15 bp, Homo sapiens
aattagccaggcggg

SEQ ID NO: 1366695 - DNA, 15 bp, Homo sapiens
aaattagccaggcgg

SEQ ID NO: 1366696 - DNA, 15 bp, Homo sapiens
gaaacccgtctctac

SEQ ID NO: 1366697 - DNA, 15 bp, Homo sapiens
tgaaacccgtctcta

SEQ ID NO: 1366698 - DNA, 15 bp, Homo sapiens
gtgaaacccgtctct

SEQ ID NO: 1366699 - DNA, 15 bp, Homo sapiens
ggtgaaacccgtctc

SEQ ID NO: 1366700 - DNA, 15 bp, Homo sapiens
tggtgaaacccgtct

SEQ ID NO: 1366701 - DNA, 15 bp, Homo sapiens
atggtgaaacccgtc

SEQ ID NO: 1366702 - DNA, 15 bp, Homo sapiens
catggtgaaacccgt

SEQ ID NO: 1366703 - DNA, 15 bp, Homo sapiens
acatggtgaaacccg

SEQ ID NO: 1366704 - DNA, 15 bp, Homo sapiens
aagagtttgagacca

SEQ ID NO: 1366705 - DNA, 15 bp, Homo sapiens
caagagtttgagacc

SEQ ID NO: 1366706 - DNA, 15 bp, Homo sapiens
tcaagagtttgagac

SEQ ID NO: 1366707 - DNA, 15 bp, Homo sapiens
gtcaagagtttgaga

SEQ ID NO: 1366708 - DNA, 15 bp, Homo sapiens
ggtcaagagtttgag

SEQ ID NO: 1366709 - DNA, 15 bp, Homo sapiens
aggtcaagagtttga

SEQ ID NO: 1366710 - DNA, 15 bp, Homo sapiens
gaggtcaagagtttg

SEQ ID NO: 1366711 - DNA, 15 bp, Homo sapiens
tgaggtcaagagttt

SEQ ID NO: 1366712 - DNA, 15 bp, Homo sapiens
cgcttgtaatcccag

SEQ ID NO: 1366713 - DNA, 15 bp, Homo sapiens
acgcttgtaatccca

SEQ ID NO: 1366714 - DNA, 15 bp, Homo sapiens
cacgcttgtaatccc

SEQ ID NO: 1366715 - DNA, 15 bp, Homo sapiens
atggctcacgcttgt

SEQ ID NO: 1366716 - DNA, 15 bp, Homo sapiens
gatggctcacgcttg

SEQ ID NO: 1366717 - DNA, 15 bp, Homo sapiens
cgatggctcacgctt

SEQ ID NO: 1366718 - DNA, 15 bp, Homo sapiens
gcgatggctcacgct

SEQ ID NO: 1366719 - DNA, 15 bp, Homo sapiens
tgcgatggctcacgc

SEQ ID NO: 1366720 - DNA, 15 bp, Homo sapiens
gtgcgatggctcacg

SEQ ID NO: 1366721 - DNA, 15 bp, Homo sapiens
ggtgcgatggctcac

SEQ ID NO: 1366722 - DNA, 15 bp, Homo sapiens
aggtgcgatggctca

SEQ ID NO: 1366723 - DNA, 15 bp, Homo sapiens
caggtgcgatggctc

SEQ ID NO: 1366724 - DNA, 15 bp, Homo sapiens
ccaggtgcgatggct

SEQ ID NO: 1366725 - DNA, 15 bp, Homo sapiens
cccaggtgcgatggc

SEQ ID NO: 1366726 - DNA, 15 bp, Homo sapiens
gcccaggtgcgatgg

SEQ ID NO: 1366727 - DNA, 15 bp, Homo sapiens
tgcccaggtgcgatg

SEQ ID NO: 1366728 - DNA, 15 bp, Homo sapiens
gtgcccaggtgcgat

SEQ ID NO: 1366729 - DNA, 15 bp, Homo sapiens
tgtgcccaggtgcga

SEQ ID NO: 1366730 - DNA, 15 bp, Homo sapiens
atgtgcccaggtgcg

SEQ ID NO: 1366731 - DNA, 15 bp, Homo sapiens
aatgtgcccaggtgc

SEQ ID NO: 1366732 - DNA, 15 bp, Homo sapiens
aaatgtgcccaggtg

SEQ ID NO: 1366733 - DNA, 15 bp, Homo sapiens
gaaatgtgcccaggt

SEQ ID NO: 1366734 - DNA, 15 bp, Homo sapiens
tgaaatgtgcccagg

SEQ ID NO: 1366735 - DNA, 15 bp, Homo sapiens
gtgaaatgtgcccag

SEQ ID NO: 1366736 - DNA, 15 bp, Homo sapiens
ggtgaaatgtgccca

SEQ ID NO: 1366737 - DNA, 15 bp, Homo sapiens
aggtgaaatgtgccc

SEQ ID NO: 1366738 - DNA, 15 bp, Homo sapiens
aaggtgaaatgtgcc

SEQ ID NO: 1366739 - DNA, 15 bp, Homo sapiens
aaaggtgaaatgtgc

SEQ ID NO: 1366740 - DNA, 15 bp, Homo sapiens
aaaaggtgaaatgtg

SEQ ID NO: 1366741 - DNA, 15 bp, Homo sapiens
gaaaaggtgaaatgt

SEQ ID NO: 1366742 - DNA, 15 bp, Homo sapiens
agaaaaggtgaaatg

SEQ ID NO: 1366743 - DNA, 15 bp, Homo sapiens
tagaaaaggtgaaat

SEQ ID NO: 1366744 - DNA, 15 bp, Homo sapiens
ttagaaaaggtgaaa

SEQ ID NO: 1366745 - DNA, 15 bp, Homo sapiens
tttagaaaaggtgaa

SEQ ID NO: 1366746 - DNA, 15 bp, Homo sapiens
ctttagaaaaggtga

SEQ ID NO: 1366747 - DNA, 15 bp, Homo sapiens
tctttagaaaaggtg

SEQ ID NO: 1366748 - DNA, 15 bp, Homo sapiens
atctttagaaaaggt

SEQ ID NO: 1366749 - DNA, 15 bp, Homo sapiens
aatctttagaaaagg

SEQ ID NO: 1366750 - DNA, 15 bp, Homo sapiens
taatctttagaaaag

SEQ ID NO: 1366751 - DNA, 15 bp, Homo sapiens
ataatctttagaaaa

SEQ ID NO: 1366752 - DNA, 15 bp, Homo sapiens
aataatctttagaaa

SEQ ID NO: 1366753 - DNA, 15 bp, Homo sapiens
aaataatctttagaa

SEQ ID NO: 1366754 - DNA, 15 bp, Homo sapiens
aaaataatctttaga

SEQ ID NO: 1366755 - DNA, 15 bp, Homo sapiens
taaaataatctttag

SEQ ID NO: 1366756 - DNA, 15 bp, Homo sapiens
ttaaaataatcttta

SEQ ID NO: 1366757 - DNA, 15 bp, Homo sapiens
cttaaaataatcttt

SEQ ID NO: 1366758 - DNA, 15 bp, Homo sapiens
ccttaaaataatctt

SEQ ID NO: 1366759 - DNA, 15 bp, Homo sapiens
gccttaaaataatct

SEQ ID NO: 1366760 - DNA, 15 bp, Homo sapiens
ggccttaaaataatc

SEQ ID NO: 1366761 - DNA, 15 bp, Homo sapiens
tggccttaaaataat

SEQ ID NO: 1366762 - DNA, 15 bp, Homo sapiens
ctggccttaaaataa

SEQ ID NO: 1366763 - DNA, 15 bp, Homo sapiens
cctggccttaaaata

SEQ ID NO: 1366764 - DNA, 15 bp, Homo sapiens
acctggccttaaaat

SEQ ID NO: 1366765 - DNA, 15 bp, Homo sapiens
cacctggccttaaaa

SEQ ID NO: 1366766 - DNA, 15 bp, Homo sapiens
gcacctggccttaaa

SEQ ID NO: 1366767 - DNA, 15 bp, Homo sapiens
tgcacctggccttaa

SEQ ID NO: 1366768 - DNA, 15 bp, Homo sapiens
ctgcacctggcctta

SEQ ID NO: 1366769 - DNA, 15 bp, Homo sapiens
gggagtacaggcgtg

SEQ ID NO: 1366770 - DNA, 15 bp, Homo sapiens
tgggagtacaggcgt

SEQ ID NO: 1366771 - DNA, 15 bp, Homo sapiens
ctgggagtacaggcg

SEQ ID NO: 1366772 - DNA, 15 bp, Homo sapiens
actgggagtacaggc

SEQ ID NO: 1366773 - DNA, 15 bp, Homo sapiens
tactgggagtacagg

SEQ ID NO: 1366774 - DNA, 15 bp, Homo sapiens
gtactgggagtacag

SEQ ID NO: 1366775 - DNA, 15 bp, Homo sapiens
agtactgggagtaca

SEQ ID NO: 1366776 - DNA, 15 bp, Homo sapiens
aagtactgggagtac

SEQ ID NO: 1366777 - DNA, 15 bp, Homo sapiens
aaagtactgggagta

SEQ ID NO: 1366778 - DNA, 15 bp, Homo sapiens
caaagtactgggagt

SEQ ID NO: 1366779 - DNA, 15 bp, Homo sapiens
tcaaagtactgggag

SEQ ID NO: 1366780 - DNA, 15 bp, Homo sapiens
ctctcaaagtactgg

SEQ ID NO: 1366781 - DNA, 15 bp, Homo sapiens
cctctcaaagtactg

SEQ ID NO: 1366782 - DNA, 15 bp, Homo sapiens
gcctctcaaagtact

SEQ ID NO: 1366783 - DNA, 15 bp, Homo sapiens
agcctctcaaagtac

SEQ ID NO: 1366784 - DNA, 15 bp, Homo sapiens
cagcctctcaaagta

SEQ ID NO: 1366785 - DNA, 15 bp, Homo sapiens
tcagcctctcaaagt

SEQ ID NO: 1366786 - DNA, 15 bp, Homo sapiens
tacctgcctcagcct

SEQ ID NO: 1366787 - DNA, 15 bp, Homo sapiens
ctacctgcctcagcc

SEQ ID NO: 1366788 - DNA, 15 bp, Homo sapiens
tctacctgcctcagc

SEQ ID NO: 1366789 - DNA, 15 bp, Homo sapiens
atctacctgcctcag

SEQ ID NO: 1366790 - DNA, 15 bp, Homo sapiens
gatctacctgcctca

SEQ ID NO: 1366791 - DNA, 15 bp, Homo sapiens
tgatctacctgcctc

SEQ ID NO: 1366792 - DNA, 15 bp, Homo sapiens
gtgatctacctgcct

SEQ ID NO: 1366793 - DNA, 15 bp, Homo sapiens
agtgatctacctgcc

SEQ ID NO: 1366794 - DNA, 15 bp, Homo sapiens
aagtgatctacctgc

SEQ ID NO: 1366795 - DNA, 15 bp, Homo sapiens
caagtgatctacctg

SEQ ID NO: 1366796 - DNA, 15 bp, Homo sapiens
tcaagtgatctacct

SEQ ID NO: 1366797 - DNA, 15 bp, Homo sapiens
cctcaagtgatctac

SEQ ID NO: 1366798 - DNA, 15 bp, Homo sapiens
acctcaagtgatcta

SEQ ID NO: 1366799 - DNA, 15 bp, Homo sapiens
gtggaactcctgacc

SEQ ID NO: 1366800 - DNA, 15 bp, Homo sapiens
tgtggaactcctgac

SEQ ID NO: 1366801 - DNA, 15 bp, Homo sapiens
atgtggaactcctga

SEQ ID NO: 1366802 - DNA, 15 bp, Homo sapiens
gatgtggaactcctg

SEQ ID NO: 1366803 - DNA, 15 bp, Homo sapiens
tgatgtggaactcct

SEQ ID NO: 1366804 - DNA, 15 bp, Homo sapiens
ctgatgtggaactcc

SEQ ID NO: 1366805 - DNA, 15 bp, Homo sapiens
gctgatgtggaactc

SEQ ID NO: 1366806 - DNA, 15 bp, Homo sapiens
ggctgatgtggaact

SEQ ID NO: 1366807 - DNA, 15 bp, Homo sapiens
aggctgatgtggaac

SEQ ID NO: 1366808 - DNA, 15 bp, Homo sapiens
caggctgatgtggaa

SEQ ID NO: 1366809 - DNA, 15 bp, Homo sapiens
ccaggctgatgtgga

SEQ ID NO: 1366810 - DNA, 15 bp, Homo sapiens
gccaggctgatgtgg

SEQ ID NO: 1366811 - DNA, 15 bp, Homo sapiens
ggccaggctgatgtg

SEQ ID NO: 1366812 - DNA, 15 bp, Homo sapiens
tggccaggctgatgt

SEQ ID NO: 1366813 - DNA, 15 bp, Homo sapiens
ttggccaggctgatg

SEQ ID NO: 1366814 - DNA, 15 bp, Homo sapiens
aaccatgttggccag

SEQ ID NO: 1366815 - DNA, 15 bp, Homo sapiens
taaccatgttggcca

SEQ ID NO: 1366816 - DNA, 15 bp, Homo sapiens
ttaaccatgttggcc

SEQ ID NO: 1366817 - DNA, 15 bp, Homo sapiens
tttaaccatgttggc

SEQ ID NO: 1366818 - DNA, 15 bp, Homo sapiens
gtttaaccatgttgg

SEQ ID NO: 1366819 - DNA, 15 bp, Homo sapiens
ggtttaaccatgttg

SEQ ID NO: 1366820 - DNA, 15 bp, Homo sapiens
cggtttaaccatgtt

SEQ ID NO: 1366821 - DNA, 15 bp, Homo sapiens
gcggtttaaccatgt

SEQ ID NO: 1366822 - DNA, 15 bp, Homo sapiens
cgcggtttaaccatg

SEQ ID NO: 1366823 - DNA, 15 bp, Homo sapiens
acgcggtttaaccat

SEQ ID NO: 1366824 - DNA, 15 bp, Homo sapiens
gacgcggtttaacca

SEQ ID NO: 1366825 - DNA, 15 bp, Homo sapiens
tgacgcggtttaacc

SEQ ID NO: 1366826 - DNA, 15 bp, Homo sapiens
gtgacgcggtttaac

SEQ ID NO: 1366827 - DNA, 15 bp, Homo sapiens
agtgacgcggtttaa

SEQ ID NO: 1366828 - DNA, 15 bp, Homo sapiens
tagtgacgcggttta

SEQ ID NO: 1366829 - DNA, 15 bp, Homo sapiens
gtagtgacgcggttt

SEQ ID NO: 1366830 - DNA, 15 bp, Homo sapiens
ggtagtgacgcggtt

SEQ ID NO: 1366831 - DNA, 15 bp, Homo sapiens
tggtagtgacgcggt

SEQ ID NO: 1366832 - DNA, 15 bp, Homo sapiens
ttggtagtgacgcgg

SEQ ID NO: 1366833 - DNA, 15 bp, Homo sapiens
tttggtagtgacgcg

SEQ ID NO: 1366834 - DNA, 15 bp, Homo sapiens
ttttggtagtgacgc

SEQ ID NO: 1366835 - DNA, 15 bp, Homo sapiens
tttttggtagtgacg

SEQ ID NO: 1366836 - DNA, 15 bp, Homo sapiens
ttttttggtagtgac

SEQ ID NO: 1366837 - DNA, 15 bp, Homo sapiens
attttttggtagtga

SEQ ID NO: 1366838 - DNA, 15 bp, Homo sapiens
tattttttggtagtg

SEQ ID NO: 1366839 - DNA, 15 bp, Homo sapiens
gtattttttggtagt

SEQ ID NO: 1366840 - DNA, 15 bp, Homo sapiens
tgtattttttggtag

SEQ ID NO: 1366841 - DNA, 15 bp, Homo sapiens
ttgtattttttggta

SEQ ID NO: 1366842 - DNA, 15 bp, Homo sapiens
tttgtattttttggt

SEQ ID NO: 1366843 - DNA, 15 bp, Homo sapiens
ttttgtattttttgg

SEQ ID NO: 1366844 - DNA, 15 bp, Homo sapiens
tctggctaatttttg

SEQ ID NO: 1366845 - DNA, 15 bp, Homo sapiens
atctggctaattttt

SEQ ID NO: 1366846 - DNA, 15 bp, Homo sapiens
catctggctaatttt

SEQ ID NO: 1366847 - DNA, 15 bp, Homo sapiens
acatctggctaattt

SEQ ID NO: 1366848 - DNA, 15 bp, Homo sapiens
cacatctggctaatt

SEQ ID NO: 1366849 - DNA, 15 bp, Homo sapiens
ccacatctggctaat

SEQ ID NO: 1366850 - DNA, 15 bp, Homo sapiens
accacatctggctaa

SEQ ID NO: 1366851 - DNA, 15 bp, Homo sapiens
caccacatctggcta

SEQ ID NO: 1366852 - DNA, 15 bp, Homo sapiens
ccaccacatctggct

SEQ ID NO: 1366853 - DNA, 15 bp, Homo sapiens
gccaccacatctggc

SEQ ID NO: 1366854 - DNA, 15 bp, Homo sapiens
cgccaccacatctgg

SEQ ID NO: 1366855 - DNA, 15 bp, Homo sapiens
gcgccaccacatctg

SEQ ID NO: 1366856 - DNA, 15 bp, Homo sapiens
cgcgccaccacatct

SEQ ID NO: 1366857 - DNA, 15 bp, Homo sapiens
gcgcgccaccacatc

SEQ ID NO: 1366858 - DNA, 15 bp, Homo sapiens
cgcgcgccaccacat

SEQ ID NO: 1366859 - DNA, 15 bp, Homo sapiens
gcgcgcgccaccaca

SEQ ID NO: 1366860 - DNA, 15 bp, Homo sapiens
ctacaggcgcgcgcc

SEQ ID NO: 1366861 - DNA, 15 bp, Homo sapiens
actacaggcgcgcgc

SEQ ID NO: 1366862 - DNA, 15 bp, Homo sapiens
gactacaggcgcgcg

SEQ ID NO: 1366863 - DNA, 15 bp, Homo sapiens
ggactacaggcgcgc

SEQ ID NO: 1366864 - DNA, 15 bp, Homo sapiens
ggagtagctgggact

SEQ ID NO: 1366865 - DNA, 15 bp, Homo sapiens
cggagtagctgggac

SEQ ID NO: 1366866 - DNA, 15 bp, Homo sapiens
ccggagtagctggga

SEQ ID NO: 1366867 - DNA, 15 bp, Homo sapiens
tccggagtagctggg

SEQ ID NO: 1366868 - DNA, 15 bp, Homo sapiens
ctccggagtagctgg

SEQ ID NO: 1366869 - DNA, 15 bp, Homo sapiens
cctccggagtagctg

SEQ ID NO: 1366870 - DNA, 15 bp, Homo sapiens
gcctccggagtagct

SEQ ID NO: 1366871 - DNA, 15 bp, Homo sapiens
agcctccggagtagc

SEQ ID NO: 1366872 - DNA, 15 bp, Homo sapiens
cagcctccggagtag

SEQ ID NO: 1366873 - DNA, 15 bp, Homo sapiens
tcagcctccggagta

SEQ ID NO: 1366874 - DNA, 15 bp, Homo sapiens
ctcagcctccggagt

SEQ ID NO: 1366875 - DNA, 15 bp, Homo sapiens
cctcagcctccggag

SEQ ID NO: 1366876 - DNA, 15 bp, Homo sapiens
acctcagcctccgga

SEQ ID NO: 1366877 - DNA, 15 bp, Homo sapiens
cacctcagcctccgg

SEQ ID NO: 1366878 - DNA, 15 bp, Homo sapiens
ccacctcagcctccg

SEQ ID NO: 1366879 - DNA, 15 bp, Homo sapiens
acgattctcccacct

SEQ ID NO: 1366880 - DNA, 15 bp, Homo sapiens
aacgattctcccacc

SEQ ID NO: 1366881 - DNA, 15 bp, Homo sapiens
aaacgattctcccac

SEQ ID NO: 1366882 - DNA, 15 bp, Homo sapiens
caaacgattctccca

SEQ ID NO: 1366883 - DNA, 15 bp, Homo sapiens
tcaaacgattctccc

SEQ ID NO: 1366884 - DNA, 15 bp, Homo sapiens
atcaaacgattctcc

SEQ ID NO: 1366885 - DNA, 15 bp, Homo sapiens
gatcaaacgattctc

SEQ ID NO: 1366886 - DNA, 15 bp, Homo sapiens
agatcaaacgattct

SEQ ID NO: 1366887 - DNA, 15 bp, Homo sapiens
cagatcaaacgattc

SEQ ID NO: 1366888 - DNA, 15 bp, Homo sapiens
ccagatcaaacgatt

SEQ ID NO: 1366889 - DNA, 15 bp, Homo sapiens
cccagatcaaacgat

SEQ ID NO: 1366890 - DNA, 15 bp, Homo sapiens
ccccagatcaaacga

SEQ ID NO: 1366891 - DNA, 15 bp, Homo sapiens
tccccagatcaaacg

SEQ ID NO: 1366892 - DNA, 15 bp, Homo sapiens
ctccccagatcaaac

SEQ ID NO: 1366893 - DNA, 15 bp, Homo sapiens
cctccccagatcaaa

SEQ ID NO: 1366894 - DNA, 15 bp, Homo sapiens
gcctccccagatcaa

SEQ ID NO: 1366895 - DNA, 15 bp, Homo sapiens
tgcctccccagatca

SEQ ID NO: 1366896 - DNA, 15 bp, Homo sapiens
ctgcctccccagatc

SEQ ID NO: 1366897 - DNA, 15 bp, Homo sapiens
tctgcctccccagat

SEQ ID NO: 1366898 - DNA, 15 bp, Homo sapiens
ctctgcctccccaga

SEQ ID NO: 1366899 - DNA, 15 bp, Homo sapiens
cctctgcctccccag

SEQ ID NO: 1366900 - DNA, 15 bp, Homo sapiens
gcctctgcctcccca

SEQ ID NO: 1366901 - DNA, 15 bp, Homo sapiens
agcctctgcctcccc

SEQ ID NO: 1366902 - DNA, 15 bp, Homo sapiens
ctgcagcctctgcct

SEQ ID NO: 1366903 - DNA, 15 bp, Homo sapiens
actgcagcctctgcc

SEQ ID NO: 1366904 - DNA, 15 bp, Homo sapiens
cactgcagcctctgc

SEQ ID NO: 1366905 - DNA, 15 bp, Homo sapiens
tcactgcagcctctg

SEQ ID NO: 1366906 - DNA, 15 bp, Homo sapiens
ttcggctcactgcag

SEQ ID NO: 1366907 - DNA, 15 bp, Homo sapiens
tttcggctcactgca

SEQ ID NO: 1366908 - DNA, 15 bp, Homo sapiens
atttcggctcactgc

SEQ ID NO: 1366909 - DNA, 15 bp, Homo sapiens
gatttcggctcactg

SEQ ID NO: 1366910 - DNA, 15 bp, Homo sapiens
cgatttcggctcact

SEQ ID NO: 1366911 - DNA, 15 bp, Homo sapiens
tcgatttcggctcac

SEQ ID NO: 1366912 - DNA, 15 bp, Homo sapiens
ctcgatttcggctca

SEQ ID NO: 1366913 - DNA, 15 bp, Homo sapiens
gctcgatttcggctc

SEQ ID NO: 1366914 - DNA, 15 bp, Homo sapiens
ggctcgatttcggct

SEQ ID NO: 1366915 - DNA, 15 bp, Homo sapiens
tggctcgatttcggc

SEQ ID NO: 1366916 - DNA, 15 bp, Homo sapiens
gtggctcgatttcgg

SEQ ID NO: 1366917 - DNA, 15 bp, Homo sapiens
agtggctcgatttcg

SEQ ID NO: 1366918 - DNA, 15 bp, Homo sapiens
cagtggctcgatttc

SEQ ID NO: 1366919 - DNA, 15 bp, Homo sapiens
ccagtggctcgattt

SEQ ID NO: 1366920 - DNA, 15 bp, Homo sapiens
tccagtggctcgatt

SEQ ID NO: 1366921 - DNA, 15 bp, Homo sapiens
gtccagtggctcgat

SEQ ID NO: 1366922 - DNA, 15 bp, Homo sapiens
agtccagtggctcga

SEQ ID NO: 1366923 - DNA, 15 bp, Homo sapiens
gagtccagtggctcg

SEQ ID NO: 1366924 - DNA, 15 bp, Homo sapiens
agagtccagtggctc

SEQ ID NO: 1366925 - DNA, 15 bp, Homo sapiens
tagagtccagtggct

SEQ ID NO: 1366926 - DNA, 15 bp, Homo sapiens
ctagagtccagtggc

SEQ ID NO: 1366927 - DNA, 15 bp, Homo sapiens
gctagagtccagtgg

SEQ ID NO: 1366928 - DNA, 15 bp, Homo sapiens
ggctagagtccagtg

SEQ ID NO: 1366929 - DNA, 15 bp, Homo sapiens
gggctagagtccagt

SEQ ID NO: 1366930 - DNA, 15 bp, Homo sapiens
cgggctagagtccag

SEQ ID NO: 1366931 - DNA, 15 bp, Homo sapiens
ccgggctagagtcca

SEQ ID NO: 1366932 - DNA, 15 bp, Homo sapiens
cccgggctagagtcc

SEQ ID NO: 1366933 - DNA, 15 bp, Homo sapiens
acccgggctagagtc

SEQ ID NO: 1366934 - DNA, 15 bp, Homo sapiens
cacccgggctagagt

SEQ ID NO: 1366935 - DNA, 15 bp, Homo sapiens
tcacccgggctagag

SEQ ID NO: 1366936 - DNA, 15 bp, Homo sapiens
ttcacccgggctaga

SEQ ID NO: 1366937 - DNA, 15 bp, Homo sapiens
cttcacccgggctag

SEQ ID NO: 1366938 - DNA, 15 bp, Homo sapiens
tcttcacccgggcta

SEQ ID NO: 1366939 - DNA, 15 bp, Homo sapiens
ctcttcacccgggct

SEQ ID NO: 1366940 - DNA, 15 bp, Homo sapiens
actcttcacccgggc

SEQ ID NO: 1366941 - DNA, 15 bp, Homo sapiens
cactcttcacccggg

SEQ ID NO: 1366942 - DNA, 15 bp, Homo sapiens
tcactcttcacccgg

SEQ ID NO: 1366943 - DNA, 15 bp, Homo sapiens
ctcactcttcacccg

SEQ ID NO: 1366944 - DNA, 15 bp, Homo sapiens
tctcactcttcaccc

SEQ ID NO: 1366945 - DNA, 15 bp, Homo sapiens
gtctcactcttcacc

SEQ ID NO: 1366946 - DNA, 15 bp, Homo sapiens
agtctcactcttcac

SEQ ID NO: 1366947 - DNA, 15 bp, Homo sapiens
gagtctcactcttca

SEQ ID NO: 1366948 - DNA, 15 bp, Homo sapiens
ccgtgcgccgagcag

SEQ ID NO: 1366949 - DNA, 15 bp, Homo sapiens
tccgtgcgccgagca

SEQ ID NO: 1366950 - DNA, 15 bp, Homo sapiens
ttccgtgcgccgagc

SEQ ID NO: 1366951 - DNA, 15 bp, Homo sapiens
cttccgtgcgccgag

SEQ ID NO: 1366952 - DNA, 15 bp, Homo sapiens
tcttccgtgcgccga

SEQ ID NO: 1366953 - DNA, 15 bp, Homo sapiens
atcttccgtgcgccg

SEQ ID NO: 1366954 - DNA, 15 bp, Homo sapiens
gatcttccgtgcgcc

SEQ ID NO: 1366955 - DNA, 15 bp, Homo sapiens
ggatcttccgtgcgc

SEQ ID NO: 1366956 - DNA, 15 bp, Homo sapiens
aggatcttccgtgcg

SEQ ID NO: 1366957 - DNA, 15 bp, Homo sapiens
caggatcttccgtgc

SEQ ID NO: 1366958 - DNA, 15 bp, Homo sapiens
acaggatcttccgtg

SEQ ID NO: 1366959 - DNA, 15 bp, Homo sapiens
gacaggatcttccgt

SEQ ID NO: 1366960 - DNA, 15 bp, Homo sapiens
ggacaggatcttccg

SEQ ID NO: 1366961 - DNA, 15 bp, Homo sapiens
gggacaggatcttcc

SEQ ID NO: 1366962 - DNA, 15 bp, Homo sapiens
ggggacaggatcttc

SEQ ID NO: 1366963 - DNA, 15 bp, Homo sapiens
cggggacaggatctt

SEQ ID NO: 1366964 - DNA, 15 bp, Homo sapiens
tcggggacaggatct

SEQ ID NO: 1366965 - DNA, 15 bp, Homo sapiens
ctcggggacaggatc

SEQ ID NO: 1366966 - DNA, 15 bp, Homo sapiens
gctcggggacaggat

SEQ ID NO: 1366967 - DNA, 15 bp, Homo sapiens
ggctcggggacagga

SEQ ID NO: 1366968 - DNA, 15 bp, Homo sapiens
cggctcggggacagg

SEQ ID NO: 1366969 - DNA, 15 bp, Homo sapiens
gcggctcggggacag

SEQ ID NO: 1366970 - DNA, 15 bp, Homo sapiens
cgcggctcggggaca

SEQ ID NO: 1366971 - DNA, 15 bp, Homo sapiens
gcgcggctcggggac

SEQ ID NO: 1366972 - DNA, 15 bp, Homo sapiens
ggcgcggctcgggga

SEQ ID NO: 1366973 - DNA, 15 bp, Homo sapiens
tggcgcggctcgggg

SEQ ID NO: 1366974 - DNA, 15 bp, Homo sapiens
ctggcgcggctcggg

SEQ ID NO: 1366975 - DNA, 15 bp, Homo sapiens
gctggcgcggctcgg

SEQ ID NO: 1366976 - DNA, 15 bp, Homo sapiens
ggctggcgcggctcg

SEQ ID NO: 1366977 - DNA, 15 bp, Homo sapiens
cggctggcgcggctc

SEQ ID NO: 1366978 - DNA, 15 bp, Homo sapiens
tcggctggcgcggct

SEQ ID NO: 1366979 - DNA, 15 bp, Homo sapiens
ctcggctggcgcggc

SEQ ID NO: 1366980 - DNA, 15 bp, Homo sapiens
gctcggctggcgcgg

SEQ ID NO: 1366981 - DNA, 15 bp, Homo sapiens
ggctcggctggcgcg

SEQ ID NO: 1366982 - DNA, 15 bp, Homo sapiens
tggctcggctggcgc

SEQ ID NO: 1366983 - DNA, 15 bp, Homo sapiens
ctggctcggctggcg

SEQ ID NO: 1366984 - DNA, 15 bp, Homo sapiens
gctggctcggctggc

SEQ ID NO: 1366985 - DNA, 15 bp, Homo sapiens
ggctggctcggctgg

SEQ ID NO: 1366986 - DNA, 15 bp, Homo sapiens
cggctggctcggctg

SEQ ID NO: 1366987 - DNA, 15 bp, Homo sapiens
ccggctggctcggct

SEQ ID NO: 1366988 - DNA, 15 bp, Homo sapiens
cccggctggctcggc

SEQ ID NO: 1366989 - DNA, 15 bp, Homo sapiens
gcccggctggctcgg

SEQ ID NO: 1366990 - DNA, 15 bp, Homo sapiens
cgcccggctggctcg

SEQ ID NO: 1366991 - DNA, 15 bp, Homo sapiens
gcgcccggctggctc

SEQ ID NO: 1366992 - DNA, 15 bp, Homo sapiens
ggcgcccggctggct

SEQ ID NO: 1366993 - DNA, 15 bp, Homo sapiens
cggcgcccggctggc

SEQ ID NO: 1366994 - DNA, 15 bp, Homo sapiens
acggcgcccggctgg

SEQ ID NO: 1366995 - DNA, 15 bp, Homo sapiens
cacggcgcccggctg

SEQ ID NO: 1366996 - DNA, 15 bp, Homo sapiens
gcacggcgcccggct

SEQ ID NO: 1366997 - DNA, 15 bp, Homo sapiens
agcacggcgcccggc

SEQ ID NO: 1366998 - DNA, 15 bp, Homo sapiens
gagcacggcgcccgg

SEQ ID NO: 1366999 - DNA, 15 bp, Homo sapiens
cgagcacggcgcccg

SEQ ID NO: 1367000 - DNA, 15 bp, Homo sapiens
ccgagcacggcgccc

SEQ ID NO: 1367001 - DNA, 15 bp, Homo sapiens
accgagcacggcgcc

SEQ ID NO: 1367002 - DNA, 15 bp, Homo sapiens
gaccgagcacggcgc

SEQ ID NO: 1367003 - DNA, 15 bp, Homo sapiens
ggaccgagcacggcg

SEQ ID NO: 1367004 - DNA, 15 bp, Homo sapiens
cggaccgagcacggc

SEQ ID NO: 1367005 - DNA, 15 bp, Homo sapiens
gcggaccgagcacgg

SEQ ID NO: 1367006 - DNA, 15 bp, Homo sapiens
agcggaccgagcacg

SEQ ID NO: 1367007 - DNA, 15 bp, Homo sapiens
gagcggaccgagcac

SEQ ID NO: 1367008 - DNA, 15 bp, Homo sapiens
cgagcggaccgagca

SEQ ID NO: 1367009 - DNA, 15 bp, Homo sapiens
gcgagcggaccgagc

SEQ ID NO: 1367010 - DNA, 15 bp, Homo sapiens
ggcgagcggaccgag

SEQ ID NO: 1367011 - DNA, 15 bp, Homo sapiens
cggcgagcggaccga

SEQ ID NO: 1367012 - DNA, 15 bp, Homo sapiens
gcggcgagcggaccg

SEQ ID NO: 1367013 - DNA, 15 bp, Homo sapiens
cgcggcgagcggacc

SEQ ID NO: 1367014 - DNA, 15 bp, Homo sapiens
gcgcggcgagcggac

SEQ ID NO: 1367015 - DNA, 15 bp, Homo sapiens
cgcgcggcgagcgga

SEQ ID NO: 1367016 - DNA, 15 bp, Homo sapiens
ccgcgcggcgagcgg

SEQ ID NO: 1367017 - DNA, 15 bp, Homo sapiens
cccgcgcggcgagcg

SEQ ID NO: 1367018 - DNA, 15 bp, Homo sapiens
tcccgcgcggcgagc

SEQ ID NO: 1367019 - DNA, 15 bp, Homo sapiens
ctcccgcgcggcgag

SEQ ID NO: 1367020 - DNA, 15 bp, Homo sapiens
tctcccgcgcggcga

SEQ ID NO: 1367021 - DNA, 15 bp, Homo sapiens
ctctcccgcgcggcg

SEQ ID NO: 1367022 - DNA, 15 bp, Homo sapiens
tctctcccgcgcggc

SEQ ID NO: 1367023 - DNA, 15 bp, Homo sapiens
ctctctcccgcgcgg

SEQ ID NO: 1367024 - DNA, 15 bp, Homo sapiens
gctctctcccgcgcg

SEQ ID NO: 1367025 - DNA, 15 bp, Homo sapiens
agctctctcccgcgc

SEQ ID NO: 1367026 - DNA, 15 bp, Homo sapiens
cagctctctcccgcg

SEQ ID NO: 1367027 - DNA, 15 bp, Homo sapiens
gcagctctctcccgc

SEQ ID NO: 1367028 - DNA, 15 bp, Homo sapiens
ggcagctctctcccg

SEQ ID NO: 1367029 - DNA, 15 bp, Homo sapiens
gggcagctctctccc

SEQ ID NO: 1367030 - DNA, 15 bp, Homo sapiens
cgggcagctctctcc

SEQ ID NO: 1367031 - DNA, 15 bp, Homo sapiens
tcgggcagctctctc

SEQ ID NO: 1367032 - DNA, 15 bp, Homo sapiens
ctcgggcagctctct

SEQ ID NO: 1367033 - DNA, 15 bp, Homo sapiens
tctcgggcagctctc

SEQ ID NO: 1367034 - DNA, 15 bp, Homo sapiens
gtctcgggcagctct

SEQ ID NO: 1367035 - DNA, 15 bp, Homo sapiens
tgtctcgggcagctc

SEQ ID NO: 1367036 - DNA, 15 bp, Homo sapiens
ctgtctcgggcagct

SEQ ID NO: 1367037 - DNA, 15 bp, Homo sapiens
tctgtctcgggcagc

SEQ ID NO: 1367038 - DNA, 15 bp, Homo sapiens
ctctgtctcgggcag

SEQ ID NO: 1367039 - DNA, 15 bp, Homo sapiens
gctctgtctcgggca

SEQ ID NO: 1367040 - DNA, 15 bp, Homo sapiens
ggctctgtctcgggc

SEQ ID NO: 1367041 - DNA, 15 bp, Homo sapiens
tggctctgtctcggg

SEQ ID NO: 1367042 - DNA, 15 bp, Homo sapiens
ctggctctgtctcgg

SEQ ID NO: 1367043 - DNA, 15 bp, Homo sapiens
actggctctgtctcg

SEQ ID NO: 1367044 - DNA, 15 bp, Homo sapiens
gactggctctgtctc

SEQ ID NO: 1367045 - DNA, 15 bp, Homo sapiens
ggactggctctgtct

SEQ ID NO: 1367046 - DNA, 15 bp, Homo sapiens
cggactggctctgtc

SEQ ID NO: 1367047 - DNA, 15 bp, Homo sapiens
acggactggctctgt

SEQ ID NO: 1367048 - DNA, 15 bp, Homo sapiens
gacggactggctctg

SEQ ID NO: 1367049 - DNA, 15 bp, Homo sapiens
cgacggactggctct

SEQ ID NO: 1367050 - DNA, 15 bp, Homo sapiens
ccgacggactggctc

SEQ ID NO: 1367051 - DNA, 15 bp, Homo sapiens
gccgacggactggct

SEQ ID NO: 1367052 - DNA, 15 bp, Homo sapiens
cgccgacggactggc

SEQ ID NO: 1367053 - DNA, 15 bp, Homo sapiens
gcgccgacggactgg

SEQ ID NO: 1367054 - DNA, 15 bp, Homo sapiens
ggcgccgacggactg

SEQ ID NO: 1367055 - DNA, 15 bp, Homo sapiens
cggcgccgacggact

SEQ ID NO: 1367056 - DNA, 15 bp, Homo sapiens
tcggcgccgacggac

SEQ ID NO: 1367057 - DNA, 15 bp, Homo sapiens
ctcggcgccgacgga

SEQ ID NO: 1367058 - DNA, 15 bp, Homo sapiens
gctcggcgccgacgg

SEQ ID NO: 1367059 - DNA, 15 bp, Homo sapiens
ggctcggcgccgacg

SEQ ID NO: 1367060 - DNA, 15 bp, Homo sapiens
cggctcggcgccgac

SEQ ID NO: 1367061 - DNA, 15 bp, Homo sapiens
gcggctcggcgccga

SEQ ID NO: 1367062 - DNA, 15 bp, Homo sapiens
ggcggctcggcgccg

SEQ ID NO: 1367063 - DNA, 15 bp, Homo sapiens
cggcggctcggcgcc

SEQ ID NO: 1367064 - DNA, 15 bp, Homo sapiens
tcggcggctcggcgc

SEQ ID NO: 1367065 - DNA, 15 bp, Homo sapiens
ctcggcggctcggcg

SEQ ID NO: 1367066 - DNA, 15 bp, Homo sapiens
gctcggcggctcggc

SEQ ID NO: 1367067 - DNA, 15 bp, Homo sapiens
cgctcggcggctcgg

SEQ ID NO: 1367068 - DNA, 15 bp, Homo sapiens
gcgctcggcggctcg

SEQ ID NO: 1367069 - DNA, 15 bp, Homo sapiens
ggcgctcggcggctc

SEQ ID NO: 1367070 - DNA, 15 bp, Homo sapiens
gggcgctcggcggct

SEQ ID NO: 1367071 - DNA, 15 bp, Homo sapiens
cgggcgctcggcggc

SEQ ID NO: 1367072 - DNA, 15 bp, Homo sapiens
ccgggcgctcggcgg

SEQ ID NO: 1367073 - DNA, 15 bp, Homo sapiens
gccgggcgctcggcg

SEQ ID NO: 1367074 - DNA, 15 bp, Homo sapiens
ggccgggcgctcggc

SEQ ID NO: 1367075 - DNA, 15 bp, Homo sapiens
gggccgggcgctcgg

SEQ ID NO: 1367076 - DNA, 15 bp, Homo sapiens
ggggccgggcgctcg

SEQ ID NO: 1367077 - DNA, 15 bp, Homo sapiens
aggggccgggcgctc

SEQ ID NO: 1367078 - DNA, 15 bp, Homo sapiens
caggggccgggcgct

SEQ ID NO: 1367079 - DNA, 15 bp, Homo sapiens
ctcaggggccgggcg

SEQ ID NO: 1367080 - DNA, 15 bp, Homo sapiens
gctcaggggccgggc

SEQ ID NO: 1367081 - DNA, 15 bp, Homo sapiens
ggctcaggggccggg

SEQ ID NO: 1367082 - DNA, 15 bp, Homo sapiens
gggctcaggggccgg

SEQ ID NO: 1367083 - DNA, 15 bp, Homo sapiens
ggggctcaggggccg

SEQ ID NO: 1367084 - DNA, 15 bp, Homo sapiens
aggggctcaggggcc

SEQ ID NO: 1367085 - DNA, 15 bp, Homo sapiens
caggggctcaggggc

SEQ ID NO: 1367086 - DNA, 15 bp, Homo sapiens
tcaggggctcagggg

SEQ ID NO: 1367087 - DNA, 15 bp, Homo sapiens
ctcaggggctcaggg

SEQ ID NO: 1367088 - DNA, 15 bp, Homo sapiens
actcaggggctcagg

SEQ ID NO: 1367089 - DNA, 15 bp, Homo sapiens
cactcaggggctcag

SEQ ID NO: 1367090 - DNA, 15 bp, Homo sapiens
gcactcaggggctca

SEQ ID NO: 1367091 - DNA, 15 bp, Homo sapiens
cgcactcaggggctc

SEQ ID NO: 1367092 - DNA, 15 bp, Homo sapiens
ccgcactcaggggct

SEQ ID NO: 1367093 - DNA, 15 bp, Homo sapiens
gccgcactcaggggc

SEQ ID NO: 1367094 - DNA, 15 bp, Homo sapiens
cgccgcactcagggg

SEQ ID NO: 1367095 - DNA, 15 bp, Homo sapiens
gcgccgcactcaggg

SEQ ID NO: 1367096 - DNA, 15 bp, Homo sapiens
cgcgccgcactcagg

SEQ ID NO: 1367097 - DNA, 15 bp, Homo sapiens
ccgcgccgcactcag

SEQ ID NO: 1367098 - DNA, 15 bp, Homo sapiens
gccgcgccgcactca

SEQ ID NO: 1367099 - DNA, 15 bp, Homo sapiens
cgccgcgccgcactc

SEQ ID NO: 1367100 - DNA, 15 bp, Homo sapiens
tcgccgcgccgcact

SEQ ID NO: 1367101 - DNA, 15 bp, Homo sapiens
ctcgccgcgccgcac

SEQ ID NO: 1367102 - DNA, 15 bp, Homo sapiens
gctcgccgcgccgca

SEQ ID NO: 1367103 - DNA, 15 bp, Homo sapiens
ggctcgccgcgccgc

SEQ ID NO: 1367104 - DNA, 15 bp, Homo sapiens
gggctcgccgcgccg

SEQ ID NO: 1367105 - DNA, 15 bp, Homo sapiens
ggggctcgccgcgcc

SEQ ID NO: 1367106 - DNA, 15 bp, Homo sapiens
aggggctcgccgcgc

SEQ ID NO: 1367107 - DNA, 15 bp, Homo sapiens
caggggctcgccgcg

SEQ ID NO: 1367108 - DNA, 15 bp, Homo sapiens
ccaggggctcgccgc

SEQ ID NO: 1367109 - DNA, 15 bp, Homo sapiens
gccaggggctcgccg

SEQ ID NO: 1367110 - DNA, 15 bp, Homo sapiens
cgccaggggctcgcc

SEQ ID NO: 1367111 - DNA, 15 bp, Homo sapiens
ccgccaggggctcgc

SEQ ID NO: 1367112 - DNA, 15 bp, Homo sapiens
gccgccaggggctcg

SEQ ID NO: 1367113 - DNA, 15 bp, Homo sapiens
cgccgccaggggctc

SEQ ID NO: 1367114 - DNA, 15 bp, Homo sapiens
ccgccgccaggggct

SEQ ID NO: 1367115 - DNA, 15 bp, Homo sapiens
gccgccgccaggggc

SEQ ID NO: 1367116 - DNA, 15 bp, Homo sapiens
tgccgccgccagggg

SEQ ID NO: 1367117 - DNA, 15 bp, Homo sapiens
ctgccgccgccaggg

SEQ ID NO: 1367118 - DNA, 15 bp, Homo sapiens
tctgccgccgccagg

SEQ ID NO: 1367119 - DNA, 15 bp, Homo sapiens
ttctgccgccgccag

SEQ ID NO: 1367120 - DNA, 15 bp, Homo sapiens
cttctgccgccgcca

SEQ ID NO: 1367121 - DNA, 15 bp, Homo sapiens
ccttctgccgccgcc

SEQ ID NO: 1367122 - DNA, 15 bp, Homo sapiens
tccttctgccgccgc

SEQ ID NO: 1367123 - DNA, 15 bp, Homo sapiens
gtccttctgccgccg

SEQ ID NO: 1367124 - DNA, 15 bp, Homo sapiens
ggtccttctgccgcc

SEQ ID NO: 1367125 - DNA, 15 bp, Homo sapiens
cggtccttctgccgc

SEQ ID NO: 1367126 - DNA, 15 bp, Homo sapiens
ccggtccttctgccg

SEQ ID NO: 1367127 - DNA, 15 bp, Homo sapiens
tccggtccttctgcc

SEQ ID NO: 1367128 - DNA, 15 bp, Homo sapiens
ctccggtccttctgc

SEQ ID NO: 1367129 - DNA, 15 bp, Homo sapiens
gctccggtccttctg

SEQ ID NO: 1367130 - DNA, 15 bp, Homo sapiens
cgctccggtccttct

SEQ ID NO: 1367131 - DNA, 15 bp, Homo sapiens
gcgctccggtccttc

SEQ ID NO: 1367132 - DNA, 15 bp, Homo sapiens
ggcgctccggtcctt

SEQ ID NO: 1367133 - DNA, 15 bp, Homo sapiens
tggcgctccggtcct

SEQ ID NO: 1367134 - DNA, 15 bp, Homo sapiens
ctggcgctccggtcc

SEQ ID NO: 1367135 - DNA, 15 bp, Homo sapiens
cctggcgctccggtc

SEQ ID NO: 1367136 - DNA, 15 bp, Homo sapiens
tcctggcgctccggt

SEQ ID NO: 1367137 - DNA, 15 bp, Homo sapiens
ctcctggcgctccgg

SEQ ID NO: 1367138 - DNA, 15 bp, Homo sapiens
tctcctggcgctccg

SEQ ID NO: 1367139 - DNA, 15 bp, Homo sapiens
ctctcctggcgctcc

SEQ ID NO: 1367140 - DNA, 15 bp, Homo sapiens
cctctcctggcgctc

SEQ ID NO: 1367141 - DNA, 15 bp, Homo sapiens
ccctctcctggcgct

SEQ ID NO: 1367142 - DNA, 15 bp, Homo sapiens
gccctctcctggcgc

SEQ ID NO: 1367143 - DNA, 15 bp, Homo sapiens
cgccctctcctggcg

SEQ ID NO: 1367144 - DNA, 15 bp, Homo sapiens
ccgccctctcctggc

SEQ ID NO: 1367145 - DNA, 15 bp, Homo sapiens
tccgccctctcctgg

SEQ ID NO: 1367146 - DNA, 15 bp, Homo sapiens
gtccgccctctcctg

SEQ ID NO: 1367147 - DNA, 15 bp, Homo sapiens
ggtccgccctctcct

SEQ ID NO: 1367148 - DNA, 15 bp, Homo sapiens
cggtccgccctctcc

SEQ ID NO: 1367149 - DNA, 15 bp, Homo sapiens
ccggtccgccctctc

SEQ ID NO: 1367150 - DNA, 15 bp, Homo sapiens
cccggtccgccctct

SEQ ID NO: 1367151 - DNA, 15 bp, Homo sapiens
ccccggtccgccctc

SEQ ID NO: 1367152 - DNA, 15 bp, Homo sapiens
tccccggtccgccct

SEQ ID NO: 1367153 - DNA, 15 bp, Homo sapiens
gtccccggtccgccc

SEQ ID NO: 1367154 - DNA, 15 bp, Homo sapiens
tgtccccggtccgcc

SEQ ID NO: 1367155 - DNA, 15 bp, Homo sapiens
ttgtccccggtccgc

SEQ ID NO: 1367156 - DNA, 15 bp, Homo sapiens
cttgtccccggtccg

SEQ ID NO: 1367157 - DNA, 15 bp, Homo sapiens
ccttgtccccggtcc

SEQ ID NO: 1367158 - DNA, 15 bp, Homo sapiens
tccttgtccccggtc

SEQ ID NO: 1367159 - DNA, 15 bp, Homo sapiens
ctccttgtccccggt

SEQ ID NO: 1367160 - DNA, 15 bp, Homo sapiens
cctccttgtccccgg

SEQ ID NO: 1367161 - DNA, 15 bp, Homo sapiens
gcctccttgtccccg

SEQ ID NO: 1367162 - DNA, 15 bp, Homo sapiens
agcctccttgtcccc

SEQ ID NO: 1367163 - DNA, 15 bp, Homo sapiens
gagcctccttgtccc

SEQ ID NO: 1367164 - DNA, 15 bp, Homo sapiens
ggagcctccttgtcc

SEQ ID NO: 1367165 - DNA, 15 bp, Homo sapiens
gggagcctccttgtc

SEQ ID NO: 1367166 - DNA, 15 bp, Homo sapiens
cgggagcctccttgt

SEQ ID NO: 1367167 - DNA, 15 bp, Homo sapiens
ccgggagcctccttg

SEQ ID NO: 1367168 - DNA, 15 bp, Homo sapiens
cccgggagcctcctt

SEQ ID NO: 1367169 - DNA, 15 bp, Homo sapiens
gcccgggagcctcct

SEQ ID NO: 1367170 - DNA, 15 bp, Homo sapiens
cgcccgggagcctcc

SEQ ID NO: 1367171 - DNA, 15 bp, Homo sapiens
gcgcccgggagcctc

SEQ ID NO: 1367172 - DNA, 15 bp, Homo sapiens
cgcgcccgggagcct

SEQ ID NO: 1367173 - DNA, 15 bp, Homo sapiens
tcgcgcccgggagcc

SEQ ID NO: 1367174 - DNA, 15 bp, Homo sapiens
gtcgcgcccgggagc

SEQ ID NO: 1367175 - DNA, 15 bp, Homo sapiens
cgtcgcgcccgggag

SEQ ID NO: 1367176 - DNA, 15 bp, Homo sapiens
tcgtcgcgcccggga

SEQ ID NO: 1367177 - DNA, 15 bp, Homo sapiens
ctcgtcgcgcccggg

SEQ ID NO: 1367178 - DNA, 15 bp, Homo sapiens
cctcgtcgcgcccgg

SEQ ID NO: 1367179 - DNA, 15 bp, Homo sapiens
tcctcgtcgcgcccg

SEQ ID NO: 1367180 - DNA, 15 bp, Homo sapiens
ctcctcgtcgcgccc

SEQ ID NO: 1367181 - DNA, 15 bp, Homo sapiens
tctcctcgtcgcgcc

SEQ ID NO: 1367182 - DNA, 15 bp, Homo sapiens
ctctcctcgtcgcgc

SEQ ID NO: 1367183 - DNA, 15 bp, Homo sapiens
actctcctcgtcgcg

SEQ ID NO: 1367184 - DNA, 15 bp, Homo sapiens
gactctcctcgtcgc

SEQ ID NO: 1367185 - DNA, 15 bp, Homo sapiens
agactctcctcgtcg

SEQ ID NO: 1367186 - DNA, 15 bp, Homo sapiens
gagactctcctcgtc

SEQ ID NO: 1367187 - DNA, 15 bp, Homo sapiens
cgagactctcctcgt

SEQ ID NO: 1367188 - DNA, 15 bp, Homo sapiens
ccgagactctcctcg

SEQ ID NO: 1367189 - DNA, 15 bp, Homo sapiens
tccgagactctcctc

SEQ ID NO: 1367190 - DNA, 15 bp, Homo sapiens
ctccgagactctcct

SEQ ID NO: 1367191 - DNA, 15 bp, Homo sapiens
cctccgagactctcc

SEQ ID NO: 1367192 - DNA, 15 bp, Homo sapiens
tcctccgagactctc

SEQ ID NO: 1367193 - DNA, 15 bp, Homo sapiens
ctcctccgagactct

SEQ ID NO: 1367194 - DNA, 15 bp, Homo sapiens
cctcctccgagactc

SEQ ID NO: 1367195 - DNA, 15 bp, Homo sapiens
tcctcctccgagact

SEQ ID NO: 1367196 - DNA, 15 bp, Homo sapiens
ctcctcctccgagac

SEQ ID NO: 1367197 - DNA, 15 bp, Homo sapiens
cctcctcctccgaga

SEQ ID NO: 1367198 - DNA, 15 bp, Homo sapiens
gcctcctcctccgag

SEQ ID NO: 1367199 - DNA, 15 bp, Homo sapiens
cgcctcctcctccga

SEQ ID NO: 1367200 - DNA, 15 bp, Homo sapiens
gcgcctcctcctccg

SEQ ID NO: 1367201 - DNA, 15 bp, Homo sapiens
ggcgcctcctcctcc

SEQ ID NO: 1367202 - DNA, 15 bp, Homo sapiens
cggcgcctcctcctc

SEQ ID NO: 1367203 - DNA, 15 bp, Homo sapiens
tcggcgcctcctcct

SEQ ID NO: 1367204 - DNA, 15 bp, Homo sapiens
ctcggcgcctcctcc

SEQ ID NO: 1367205 - DNA, 15 bp, Homo sapiens
tctcggcgcctcctc

SEQ ID NO: 1367206 - DNA, 15 bp, Homo sapiens
ctctcggcgcctcct

SEQ ID NO: 1367207 - DNA, 15 bp, Homo sapiens
cctctcggcgcctcc

SEQ ID NO: 1367208 - DNA, 15 bp, Homo sapiens
tcctctcggcgcctc

SEQ ID NO: 1367209 - DNA, 15 bp, Homo sapiens
gtcctctcggcgcct

SEQ ID NO: 1367210 - DNA, 15 bp, Homo sapiens
tgtcctctcggcgcc

SEQ ID NO: 1367211 - DNA, 15 bp, Homo sapiens
gtgtcctctcggcgc

SEQ ID NO: 1367212 - DNA, 15 bp, Homo sapiens
ggtgtcctctcggcg

SEQ ID NO: 1367213 - DNA, 15 bp, Homo sapiens
cggtgtcctctcggc

SEQ ID NO: 1367214 - DNA, 15 bp, Homo sapiens
ccggtgtcctctcgg

SEQ ID NO: 1367215 - DNA, 15 bp, Homo sapiens
cccggtgtcctctcg

SEQ ID NO: 1367216 - DNA, 15 bp, Homo sapiens
ccccggtgtcctctc

SEQ ID NO: 1367217 - DNA, 15 bp, Homo sapiens
gccccggtgtcctct

SEQ ID NO: 1367218 - DNA, 15 bp, Homo sapiens
ggccccggtgtcctc

SEQ ID NO: 1367219 - DNA, 15 bp, Homo sapiens
aggccccggtgtcct

SEQ ID NO: 1367220 - DNA, 15 bp, Homo sapiens
gaggccccggtgtcc

SEQ ID NO: 1367221 - DNA, 15 bp, Homo sapiens
ggaggccccggtgtc

SEQ ID NO: 1367222 - DNA, 15 bp, Homo sapiens
aggaggccccggtgt

SEQ ID NO: 1367223 - DNA, 15 bp, Homo sapiens
caggaggccccggtg

SEQ ID NO: 1367224 - DNA, 15 bp, Homo sapiens
gcaggaggccccggt

SEQ ID NO: 1367225 - DNA, 15 bp, Homo sapiens
ggcaggaggccccgg

SEQ ID NO: 1367226 - DNA, 15 bp, Homo sapiens
cggcaggaggccccg

SEQ ID NO: 1367227 - DNA, 15 bp, Homo sapiens
gcggcaggaggcccc

SEQ ID NO: 1367228 - DNA, 15 bp, Homo sapiens
ggcggcaggaggccc

SEQ ID NO: 1367229 - DNA, 15 bp, Homo sapiens
cggcggcaggaggcc

SEQ ID NO: 1367230 - DNA, 15 bp, Homo sapiens
gcggcggcaggaggc

SEQ ID NO: 1367231 - DNA, 15 bp, Homo sapiens
tgcggcggcaggagg

SEQ ID NO: 1367232 - DNA, 15 bp, Homo sapiens
ctgcggcggcaggag

SEQ ID NO: 1367233 - DNA, 15 bp, Homo sapiens
gctgcggcggcagga

SEQ ID NO: 1367234 - DNA, 15 bp, Homo sapiens
agctgcggcggcagg

SEQ ID NO: 1367235 - DNA, 15 bp, Homo sapiens
cagctgcggcggcag

SEQ ID NO: 1367236 - DNA, 15 bp, Homo sapiens
ccagctgcggcggca

SEQ ID NO: 1367237 - DNA, 15 bp, Homo sapiens
cccagctgcggcggc

SEQ ID NO: 1367238 - DNA, 15 bp, Homo sapiens
acccagctgcggcgg

SEQ ID NO: 1367239 - DNA, 15 bp, Homo sapiens
gacccagctgcggcg

SEQ ID NO: 1367240 - DNA, 15 bp, Homo sapiens
cgacccagctgcggc

SEQ ID NO: 1367241 - DNA, 15 bp, Homo sapiens
tcgacccagctgcgg

SEQ ID NO: 1367242 - DNA, 15 bp, Homo sapiens
ctcgacccagctgcg

SEQ ID NO: 1367243 - DNA, 15 bp, Homo sapiens
cctcgacccagctgc

SEQ ID NO: 1367244 - DNA, 15 bp, Homo sapiens
gcctcgacccagctg

SEQ ID NO: 1367245 - DNA, 15 bp, Homo sapiens
cgcctcgacccagct

SEQ ID NO: 1367246 - DNA, 15 bp, Homo sapiens
tcgcctcgacccagc

SEQ ID NO: 1367247 - DNA, 15 bp, Homo sapiens
ctcgcctcgacccag

SEQ ID NO: 1367248 - DNA, 15 bp, Homo sapiens
gctcgcctcgaccca

SEQ ID NO: 1367249 - DNA, 15 bp, Homo sapiens
tgctcgcctcgaccc

SEQ ID NO: 1367250 - DNA, 15 bp, Homo sapiens
ctgctcgcctcgacc

SEQ ID NO: 1367251 - DNA, 15 bp, Homo sapiens
gctgctcgcctcgac

SEQ ID NO: 1367252 - DNA, 15 bp, Homo sapiens
ggctgctcgcctcga

SEQ ID NO: 1367253 - DNA, 15 bp, Homo sapiens
gggctgctcgcctcg

SEQ ID NO: 1367254 - DNA, 15 bp, Homo sapiens
tgggctgctcgcctc

SEQ ID NO: 1367255 - DNA, 15 bp, Homo sapiens
atgggctgctcgcct

SEQ ID NO: 1367256 - DNA, 15 bp, Homo sapiens
catgggctgctcgcc

SEQ ID NO: 1367257 - DNA, 15 bp, Homo sapiens
gcatgggctgctcgc

SEQ ID NO: 1367258 - DNA, 15 bp, Homo sapiens
cgcatgggctgctcg

SEQ ID NO: 1367259 - DNA, 15 bp, Homo sapiens
ccgcatgggctgctc

SEQ ID NO: 1367260 - DNA, 15 bp, Homo sapiens
cccgcatgggctgct

SEQ ID NO: 1367261 - DNA, 15 bp, Homo sapiens
ccccgcatgggctgc

SEQ ID NO: 1367262 - DNA, 15 bp, Homo sapiens
tccccgcatgggctg

SEQ ID NO: 1367263 - DNA, 15 bp, Homo sapiens
ctccccgcatgggct

SEQ ID NO: 1367264 - DNA, 15 bp, Homo sapiens
gctccccgcatgggc

SEQ ID NO: 1367265 - DNA, 15 bp, Homo sapiens
ggctccccgcatggg

SEQ ID NO: 1367266 - DNA, 15 bp, Homo sapiens
aggctccccgcatgg

SEQ ID NO: 1367267 - DNA, 15 bp, Homo sapiens
gaggctccccgcatg

SEQ ID NO: 1367268 - DNA, 15 bp, Homo sapiens
cgaggctccccgcat

SEQ ID NO: 1367269 - DNA, 15 bp, Homo sapiens
ccgaggctccccgca

SEQ ID NO: 1367270 - DNA, 15 bp, Homo sapiens
gccgaggctccccgc

SEQ ID NO: 1367271 - DNA, 15 bp, Homo sapiens
cgccgaggctccccg

SEQ ID NO: 1367272 - DNA, 15 bp, Homo sapiens
ccgccgaggctcccc

SEQ ID NO: 1367273 - DNA, 15 bp, Homo sapiens
gccgccgaggctccc

SEQ ID NO: 1367274 - DNA, 15 bp, Homo sapiens
ggccgccgaggctcc

SEQ ID NO: 1367275 - DNA, 15 bp, Homo sapiens
tggccgccgaggctc

SEQ ID NO: 1367276 - DNA, 15 bp, Homo sapiens
ctggccgccgaggct

SEQ ID NO: 1367277 - DNA, 15 bp, Homo sapiens
gctggccgccgaggc

SEQ ID NO: 1367278 - DNA, 15 bp, Homo sapiens
ggctggccgccgagg

SEQ ID NO: 1367279 - DNA, 15 bp, Homo sapiens
cggctggccgccgag

SEQ ID NO: 1367280 - DNA, 15 bp, Homo sapiens
gcggctggccgccga

SEQ ID NO: 1367281 - DNA, 15 bp, Homo sapiens
cgcggctggccgccg

SEQ ID NO: 1367282 - DNA, 15 bp, Homo sapiens
ccgcggctggccgcc

SEQ ID NO: 1367283 - DNA, 15 bp, Homo sapiens
gccgcggctggccgc

SEQ ID NO: 1367284 - DNA, 15 bp, Homo sapiens
ggccgcggctggccg

SEQ ID NO: 1367285 - DNA, 15 bp, Homo sapiens
tggccgcggctggcc

SEQ ID NO: 1367286 - DNA, 15 bp, Homo sapiens
ctggccgcggctggc

SEQ ID NO: 1367287 - DNA, 15 bp, Homo sapiens
cctggccgcggctgg

SEQ ID NO: 1367288 - DNA, 15 bp, Homo sapiens
ccctggccgcggctg

SEQ ID NO: 1367289 - DNA, 15 bp, Homo sapiens
cccctggccgcggct

SEQ ID NO: 1367290 - DNA, 15 bp, Homo sapiens
tcccctggccgcggc

SEQ ID NO: 1367291 - DNA, 15 bp, Homo sapiens
ttcccctggccgcgg

SEQ ID NO: 1367292 - DNA, 15 bp, Homo sapiens
cttcccctggccgcg

SEQ ID NO: 1367293 - DNA, 15 bp, Homo sapiens
ccttcccctggccgc

SEQ ID NO: 1367294 - DNA, 15 bp, Homo sapiens
cccttcccctggccg

SEQ ID NO: 1367295 - DNA, 15 bp, Homo sapiens
tcccttcccctggcc

SEQ ID NO: 1367296 - DNA, 15 bp, Homo sapiens
gtcccttcccctggc

SEQ ID NO: 1367297 - DNA, 15 bp, Homo sapiens
tgtcccttcccctgg

SEQ ID NO: 1367298 - DNA, 15 bp, Homo sapiens
atgtcccttcccctg

SEQ ID NO: 1367299 - DNA, 15 bp, Homo sapiens
gatgtcccttcccct

SEQ ID NO: 1367300 - DNA, 15 bp, Homo sapiens
cgatgtcccttcccc

SEQ ID NO: 1367301 - DNA, 15 bp, Homo sapiens
ccgatgtcccttccc

SEQ ID NO: 1367302 - DNA, 15 bp, Homo sapiens
gccgatgtcccttcc

SEQ ID NO: 1367303 - DNA, 15 bp, Homo sapiens
cgccgatgtcccttc

SEQ ID NO: 1367304 - DNA, 15 bp, Homo sapiens
ccgccgatgtccctt

SEQ ID NO: 1367305 - DNA, 15 bp, Homo sapiens
gccgccgatgtccct

SEQ ID NO: 1367306 - DNA, 15 bp, Homo sapiens
ggccgccgatgtccc

SEQ ID NO: 1367307 - DNA, 15 bp, Homo sapiens
gggccgccgatgtcc

SEQ ID NO: 1367308 - DNA, 15 bp, Homo sapiens
ggggccgccgatgtc

SEQ ID NO: 1367309 - DNA, 15 bp, Homo sapiens
aggggccgccgatgt

SEQ ID NO: 1367310 - DNA, 15 bp, Homo sapiens
caggggccgccgatg

SEQ ID NO: 1367311 - DNA, 15 bp, Homo sapiens
gcaggggccgccgat

SEQ ID NO: 1367312 - DNA, 15 bp, Homo sapiens
tgcaggggccgccga

SEQ ID NO: 1367313 - DNA, 15 bp, Homo sapiens
gtgcaggggccgccg

SEQ ID NO: 1367314 - DNA, 15 bp, Homo sapiens
agtgcaggggccgcc

SEQ ID NO: 1367315 - DNA, 15 bp, Homo sapiens
tagtgcaggggccgc

SEQ ID NO: 1367316 - DNA, 15 bp, Homo sapiens
ctagtgcaggggccg

SEQ ID NO: 1367317 - DNA, 15 bp, Homo sapiens
gctagtgcaggggcc

SEQ ID NO: 1367318 - DNA, 15 bp, Homo sapiens
tgctagtgcaggggc

SEQ ID NO: 1367319 - DNA, 15 bp, Homo sapiens
ttgctagtgcagggg

SEQ ID NO: 1367320 - DNA, 15 bp, Homo sapiens
cttgctagtgcaggg

SEQ ID NO: 1367321 - DNA, 15 bp, Homo sapiens
gcttgctagtgcagg

SEQ ID NO: 1367322 - DNA, 15 bp, Homo sapiens
tgcttgctagtgcag

SEQ ID NO: 1367323 - DNA, 15 bp, Homo sapiens
ctgcttgctagtgca

SEQ ID NO: 1367324 - DNA, 15 bp, Homo sapiens
gctgcttgctagtgc

SEQ ID NO: 1367325 - DNA, 15 bp, Homo sapiens
agctgcttgctagtg

SEQ ID NO: 1367326 - DNA, 15 bp, Homo sapiens
aagctgcttgctagt

SEQ ID NO: 1367327 - DNA, 15 bp, Homo sapiens
caagctgcttgctag

SEQ ID NO: 1367328 - DNA, 15 bp, Homo sapiens
acaagctgcttgcta

SEQ ID NO: 1367329 - DNA, 15 bp, Homo sapiens
cacaagctgcttgct

SEQ ID NO: 1367330 - DNA, 15 bp, Homo sapiens
gcacaagctgcttgc

SEQ ID NO: 1367331 - DNA, 15 bp, Homo sapiens
ggcacaagctgcttg

SEQ ID NO: 1367332 - DNA, 15 bp, Homo sapiens
gggcacaagctgctt

SEQ ID NO: 1367333 - DNA, 15 bp, Homo sapiens
cgggcacaagctgct

SEQ ID NO: 1367334 - DNA, 15 bp, Homo sapiens
ccgggcacaagctgc

SEQ ID NO: 1367335 - DNA, 15 bp, Homo sapiens
cccgggcacaagctg

SEQ ID NO: 1367336 - DNA, 15 bp, Homo sapiens
ccccgggcacaagct

SEQ ID NO: 1367337 - DNA, 15 bp, Homo sapiens
cccccgggcacaagc

SEQ ID NO: 1367338 - DNA, 15 bp, Homo sapiens
ccccccgggcacaag

SEQ ID NO: 1367339 - DNA, 15 bp, Homo sapiens
cccccccgggcacaa

SEQ ID NO: 1367340 - DNA, 15 bp, Homo sapiens
ccccccccgggcaca

SEQ ID NO: 1367341 - DNA, 15 bp, Homo sapiens
gccccccccgggcac

SEQ ID NO: 1367342 - DNA, 15 bp, Homo sapiens
cgccccccccgggca

SEQ ID NO: 1367343 - DNA, 15 bp, Homo sapiens
tcgccccccccgggc

SEQ ID NO: 1367344 - DNA, 15 bp, Homo sapiens
ctcgccccccccggg

SEQ ID NO: 1367345 - DNA, 15 bp, Homo sapiens
tctcgccccccccgg

SEQ ID NO: 1367346 - DNA, 15 bp, Homo sapiens
ttctcgccccccccg

SEQ ID NO: 1367347 - DNA, 15 bp, Homo sapiens
gttctcgcccccccc

SEQ ID NO: 1367348 - DNA, 15 bp, Homo sapiens
cgttctcgccccccc

SEQ ID NO: 1367349 - DNA, 15 bp, Homo sapiens
gcgttctcgcccccc

SEQ ID NO: 1367350 - DNA, 15 bp, Homo sapiens
cgcgttctcgccccc

SEQ ID NO: 1367351 - DNA, 15 bp, Homo sapiens
gcgcgttctcgcccc

SEQ ID NO: 1367352 - DNA, 15 bp, Homo sapiens
cgcgcgttctcgccc

SEQ ID NO: 1367353 - DNA, 15 bp, Homo sapiens
tcgcgcgttctcgcc

SEQ ID NO: 1367354 - DNA, 15 bp, Homo sapiens
gtcgcgcgttctcgc

SEQ ID NO: 1367355 - DNA, 15 bp, Homo sapiens
ggtcgcgcgttctcg

SEQ ID NO: 1367356 - DNA, 15 bp, Homo sapiens
gggtcgcgcgttctc

SEQ ID NO: 1367357 - DNA, 15 bp, Homo sapiens
cgggtcgcgcgttct

SEQ ID NO: 1367358 - DNA, 15 bp, Homo sapiens
acgggtcgcgcgttc

SEQ ID NO: 1367359 - DNA, 15 bp, Homo sapiens
gacgggtcgcgcgtt

SEQ ID NO: 1367360 - DNA, 15 bp, Homo sapiens
agacgggtcgcgcgt

SEQ ID NO: 1367361 - DNA, 15 bp, Homo sapiens
cagacgggtcgcgcg

SEQ ID NO: 1367362 - DNA, 15 bp, Homo sapiens
ccagacgggtcgcgc

SEQ ID NO: 1367363 - DNA, 15 bp, Homo sapiens
cccagacgggtcgcg

SEQ ID NO: 1367364 - DNA, 15 bp, Homo sapiens
ccccagacgggtcgc

SEQ ID NO: 1367365 - DNA, 15 bp, Homo sapiens
gccccagacgggtcg

SEQ ID NO: 1367366 - DNA, 15 bp, Homo sapiens
ggccccagacgggtc

SEQ ID NO: 1367367 - DNA, 15 bp, Homo sapiens
gggccccagacgggt

SEQ ID NO: 1367368 - DNA, 15 bp, Homo sapiens
agggccccagacggg

SEQ ID NO: 1367369 - DNA, 15 bp, Homo sapiens
gagggccccagacgg

SEQ ID NO: 1367370 - DNA, 15 bp, Homo sapiens
ggagggccccagacg

SEQ ID NO: 1367371 - DNA, 15 bp, Homo sapiens
cggagggccccagac

SEQ ID NO: 1367372 - DNA, 15 bp, Homo sapiens
gcggagggccccaga

SEQ ID NO: 1367373 - DNA, 15 bp, Homo sapiens
ggcggagggccccag

SEQ ID NO: 1367374 - DNA, 15 bp, Homo sapiens
cggcggagggcccca

SEQ ID NO: 1367375 - DNA, 15 bp, Homo sapiens
gcggcggagggcccc

SEQ ID NO: 1367376 - DNA, 15 bp, Homo sapiens
ggcggcggagggccc

SEQ ID NO: 1367377 - DNA, 15 bp, Homo sapiens
cggcggcggagggcc

SEQ ID NO: 1367378 - DNA, 15 bp, Homo sapiens
gcggcggcggagggc

SEQ ID NO: 1367379 - DNA, 15 bp, Homo sapiens
ggcggcggcggaggg

SEQ ID NO: 1367380 - DNA, 15 bp, Homo sapiens
cgcggcggcggcgga

SEQ ID NO: 1367381 - DNA, 15 bp, Homo sapiens
ggcgcggcggcggcg

SEQ ID NO: 1367382 - DNA, 15 bp, Homo sapiens
tggcgcggcggcggc

SEQ ID NO: 1367383 - DNA, 15 bp, Homo sapiens
gtggcgcggcggcgg

SEQ ID NO: 1367384 - DNA, 15 bp, Homo sapiens
ggtggcgcggcggcg

SEQ ID NO: 1367385 - DNA, 15 bp, Homo sapiens
gggtggcgcggcggc

SEQ ID NO: 1367386 - DNA, 15 bp, Homo sapiens
agggtggcgcggcgg

SEQ ID NO: 1367387 - DNA, 15 bp, Homo sapiens
gagggtggcgcggcg

SEQ ID NO: 1367388 - DNA, 15 bp, Homo sapiens
ggagggtggcgcggc

SEQ ID NO: 1367389 - DNA, 15 bp, Homo sapiens
gggagggtggcgcgg

SEQ ID NO: 1367390 - DNA, 15 bp, Homo sapiens
ggggagggtggcgcg

SEQ ID NO: 1367391 - DNA, 15 bp, Homo sapiens
gggggagggtggcgc

SEQ ID NO: 1367392 - DNA, 15 bp, Homo sapiens
cgggggagggtggcg

SEQ ID NO: 1367393 - DNA, 15 bp, Homo sapiens
gcgggggagggtggc

SEQ ID NO: 1367394 - DNA, 15 bp, Homo sapiens
cgcgggggagggtgg

SEQ ID NO: 1367395 - DNA, 15 bp, Homo sapiens
gcgcgggggagggtg

SEQ ID NO: 1367396 - DNA, 15 bp, Homo sapiens
agcgcgggggagggt

SEQ ID NO: 1367397 - DNA, 15 bp, Homo sapiens
cagcgcgggggaggg

SEQ ID NO: 1367398 - DNA, 15 bp, Homo sapiens
acagcgcgggggagg

SEQ ID NO: 1367399 - DNA, 15 bp, Homo sapiens
gacagcgcgggggag

SEQ ID NO: 1367400 - DNA, 15 bp, Homo sapiens
tgacagcgcggggga

SEQ ID NO: 1367401 - DNA, 15 bp, Homo sapiens
ctgacagcgcggggg

SEQ ID NO: 1367402 - DNA, 15 bp, Homo sapiens
gctgacagcgcgggg

SEQ ID NO: 1367403 - DNA, 15 bp, Homo sapiens
ggctgacagcgcggg

SEQ ID NO: 1367404 - DNA, 15 bp, Homo sapiens
gggctgacagcgcgg

SEQ ID NO: 1367405 - DNA, 15 bp, Homo sapiens
ggggctgacagcgcg

SEQ ID NO: 1367406 - DNA, 15 bp, Homo sapiens
cggggctgacagcgc

SEQ ID NO: 1367407 - DNA, 15 bp, Homo sapiens
gcggggctgacagcg

SEQ ID NO: 1367408 - DNA, 15 bp, Homo sapiens
ggcggggctgacagc

SEQ ID NO: 1367409 - DNA, 15 bp, Homo sapiens
cggcggggctgacag

SEQ ID NO: 1367410 - DNA, 15 bp, Homo sapiens
ccggcggggctgaca

SEQ ID NO: 1367411 - DNA, 15 bp, Homo sapiens
cccggcggggctgac

SEQ ID NO: 1367412 - DNA, 15 bp, Homo sapiens
gcccggcggggctga

SEQ ID NO: 1367413 - DNA, 15 bp, Homo sapiens
agcccggcggggctg

SEQ ID NO: 1367414 - DNA, 15 bp, Homo sapiens
gagcccggcggggct

SEQ ID NO: 1367415 - DNA, 15 bp, Homo sapiens
tgagcccggcggggc

SEQ ID NO: 1367416 - DNA, 15 bp, Homo sapiens
ctgagcccggcgggg

SEQ ID NO: 1367417 - DNA, 15 bp, Homo sapiens
gctgagcccggcggg

SEQ ID NO: 1367418 - DNA, 15 bp, Homo sapiens
ggctgagcccggcgg

SEQ ID NO: 1367419 - DNA, 15 bp, Homo sapiens
cggctgagcccggcg

SEQ ID NO: 1367420 - DNA, 15 bp, Homo sapiens
gcggctgagcccggc

SEQ ID NO: 1367421 - DNA, 15 bp, Homo sapiens
ggcggctgagcccgg

SEQ ID NO: 1367422 - DNA, 15 bp, Homo sapiens
cggcggctgagcccg

SEQ ID NO: 1367423 - DNA, 15 bp, Homo sapiens
gcggcggctgagccc

SEQ ID NO: 1367424 - DNA, 15 bp, Homo sapiens
ggcggcggctgagcc

SEQ ID NO: 1367425 - DNA, 15 bp, Homo sapiens
cggcggcggctgagc

SEQ ID NO: 1367426 - DNA, 15 bp, Homo sapiens
gcggcggcggctgag

SEQ ID NO: 1367427 - DNA, 15 bp, Homo sapiens
tgcggcggcggctga

SEQ ID NO: 1367428 - DNA, 15 bp, Homo sapiens
ctgcggcggcggctg

SEQ ID NO: 1367429 - DNA, 15 bp, Homo sapiens
gctgcggcggcggct

SEQ ID NO: 1367430 - DNA, 15 bp, Homo sapiens
tgctgcggcggcggc

SEQ ID NO: 1367431 - DNA, 15 bp, Homo sapiens
atgctgcggcggcgg

SEQ ID NO: 1367432 - DNA, 15 bp, Homo sapiens
gatgctgcggcggcg

SEQ ID NO: 1367433 - DNA, 15 bp, Homo sapiens
agatgctgcggcggc

SEQ ID NO: 1367434 - DNA, 15 bp, Homo sapiens
aagatgctgcggcgg

SEQ ID NO: 1367435 - DNA, 15 bp, Homo sapiens
gaagatgctgcggcg

SEQ ID NO: 1367436 - DNA, 15 bp, Homo sapiens
agaagatgctgcggc

SEQ ID NO: 1367437 - DNA, 15 bp, Homo sapiens
cagaagatgctgcgg

SEQ ID NO: 1367438 - DNA, 15 bp, Homo sapiens
gcagaagatgctgcg

SEQ ID NO: 1367439 - DNA, 15 bp, Homo sapiens
ggcagaagatgctgc

SEQ ID NO: 1367440 - DNA, 15 bp, Homo sapiens
gggcagaagatgctg

SEQ ID NO: 1367441 - DNA, 15 bp, Homo sapiens
ggggcagaagatgct

SEQ ID NO: 1367442 - DNA, 15 bp, Homo sapiens
aggggcagaagatgc

SEQ ID NO: 1367443 - DNA, 15 bp, Homo sapiens
caggggcagaagatg

SEQ ID NO: 1367444 - DNA, 15 bp, Homo sapiens
gcaggggcagaagat

SEQ ID NO: 1367445 - DNA, 15 bp, Homo sapiens
cgcaggggcagaaga

SEQ ID NO: 1367446 - DNA, 15 bp, Homo sapiens
gcgcaggggcagaag

SEQ ID NO: 1367447 - DNA, 15 bp, Homo sapiens
ggcgcaggggcagaa

SEQ ID NO: 1367448 - DNA, 15 bp, Homo sapiens
gggcgcaggggcaga

SEQ ID NO: 1367449 - DNA, 15 bp, Homo sapiens
cgggcgcaggggcag

SEQ ID NO: 1367450 - DNA, 15 bp, Homo sapiens
gcgggcgcaggggca

SEQ ID NO: 1367451 - DNA, 15 bp, Homo sapiens
cgcgggcgcaggggc

SEQ ID NO: 1367452 - DNA, 15 bp, Homo sapiens
gcgcgggcgcagggg

SEQ ID NO: 1367453 - DNA, 15 bp, Homo sapiens
ggcgcgggcgcaggg

SEQ ID NO: 1367454 - DNA, 15 bp, Homo sapiens
tggcgcgggcgcagg

SEQ ID NO: 1367455 - DNA, 15 bp, Homo sapiens
ctggcgcgggcgcag

SEQ ID NO: 1367456 - DNA, 15 bp, Homo sapiens
gctggcgcgggcgca

SEQ ID NO: 1367457 - DNA, 15 bp, Homo sapiens
ggctggcgcgggcgc

SEQ ID NO: 1367458 - DNA, 15 bp, Homo sapiens
aggctggcgcgggcg

SEQ ID NO: 1367459 - DNA, 15 bp, Homo sapiens
gaggctggcgcgggc

SEQ ID NO: 1367460 - DNA, 15 bp, Homo sapiens
cgaggctggcgcggg

SEQ ID NO: 1367461 - DNA, 15 bp, Homo sapiens
tcgaggctggcgcgg

SEQ ID NO: 1367462 - DNA, 15 bp, Homo sapiens
ctcgaggctggcgcg

SEQ ID NO: 1367463 - DNA, 15 bp, Homo sapiens
cctcgaggctggcgc

SEQ ID NO: 1367464 - DNA, 15 bp, Homo sapiens
tcctcgaggctggcg

SEQ ID NO: 1367465 - DNA, 15 bp, Homo sapiens
ttcctcgaggctggc

SEQ ID NO: 1367466 - DNA, 15 bp, Homo sapiens
cttcctcgaggctgg

SEQ ID NO: 1367467 - DNA, 15 bp, Homo sapiens
acttcctcgaggctg

SEQ ID NO: 1367468 - DNA, 15 bp, Homo sapiens
gacttcctcgaggct

SEQ ID NO: 1367469 - DNA, 15 bp, Homo sapiens
ggacttcctcgaggc

SEQ ID NO: 1367470 - DNA, 15 bp, Homo sapiens
gggacttcctcgagg

SEQ ID NO: 1367471 - DNA, 15 bp, Homo sapiens
ggggacttcctcgag

SEQ ID NO: 1367472 - DNA, 15 bp, Homo sapiens
cggggacttcctcga

SEQ ID NO: 1367473 - DNA, 15 bp, Homo sapiens
gcggggacttcctcg

SEQ ID NO: 1367474 - DNA, 15 bp, Homo sapiens
ggcggggacttcctc

SEQ ID NO: 1367475 - DNA, 15 bp, Homo sapiens
cggcggggacttcct

SEQ ID NO: 1367476 - DNA, 15 bp, Homo sapiens
tcggcggggacttcc

SEQ ID NO: 1367477 - DNA, 15 bp, Homo sapiens
ctcggcggggacttc

SEQ ID NO: 1367478 - DNA, 15 bp, Homo sapiens
cctcggcggggactt

SEQ ID NO: 1367479 - DNA, 15 bp, Homo sapiens
tcctcggcggggact

SEQ ID NO: 1367480 - DNA, 15 bp, Homo sapiens
gtcctcggcggggac

SEQ ID NO: 1367481 - DNA, 15 bp, Homo sapiens
ggtcctcggcgggga

SEQ ID NO: 1367482 - DNA, 15 bp, Homo sapiens
aggtcctcggcgggg

SEQ ID NO: 1367483 - DNA, 15 bp, Homo sapiens
caggtcctcggcggg

SEQ ID NO: 1367484 - DNA, 15 bp, Homo sapiens
ccaggtcctcggcgg

SEQ ID NO: 1367485 - DNA, 15 bp, Homo sapiens
cccaggtcctcggcg

SEQ ID NO: 1367486 - DNA, 15 bp, Homo sapiens
gcccaggtcctcggc

SEQ ID NO: 1367487 - DNA, 15 bp, Homo sapiens
ggcccaggtcctcgg

SEQ ID NO: 1367488 - DNA, 15 bp, Homo sapiens
gggcccaggtcctcg

SEQ ID NO: 1367489 - DNA, 15 bp, Homo sapiens
ggggcccaggtcctc

SEQ ID NO: 1367490 - DNA, 15 bp, Homo sapiens
gggggcccaggtcct

SEQ ID NO: 1367491 - DNA, 15 bp, Homo sapiens
tgggggcccaggtcc

SEQ ID NO: 1367492 - DNA, 15 bp, Homo sapiens
ctgggggcccaggtc

SEQ ID NO: 1367493 - DNA, 15 bp, Homo sapiens
cctgggggcccaggt

SEQ ID NO: 1367494 - DNA, 15 bp, Homo sapiens
tcctgggggcccagg

SEQ ID NO: 1367495 - DNA, 15 bp, Homo sapiens
ctcctgggggcccag

SEQ ID NO: 1367496 - DNA, 15 bp, Homo sapiens
gctcctgggggccca

SEQ ID NO: 1367497 - DNA, 15 bp, Homo sapiens
cgctcctgggggccc

SEQ ID NO: 1367498 - DNA, 15 bp, Homo sapiens
gcgctcctgggggcc

SEQ ID NO: 1367499 - DNA, 15 bp, Homo sapiens
tgcgctcctgggggc

SEQ ID NO: 1367500 - DNA, 15 bp, Homo sapiens
ctgcgctcctggggg

SEQ ID NO: 1367501 - DNA, 15 bp, Homo sapiens
cctgcgctcctgggg

SEQ ID NO: 1367502 - DNA, 15 bp, Homo sapiens
ccctgcgctcctggg

SEQ ID NO: 1367503 - DNA, 15 bp, Homo sapiens
cccctgcgctcctgg

SEQ ID NO: 1367504 - DNA, 15 bp, Homo sapiens
ccccctgcgctcctg

SEQ ID NO: 1367505 - DNA, 15 bp, Homo sapiens
tccccctgcgctcct

SEQ ID NO: 1367506 - DNA, 15 bp, Homo sapiens
ttccccctgcgctcc

SEQ ID NO: 1367507 - DNA, 15 bp, Homo sapiens
tttccccctgcgctc

SEQ ID NO: 1367508 - DNA, 15 bp, Homo sapiens
ctttccccctgcgct

SEQ ID NO: 1367509 - DNA, 15 bp, Homo sapiens
tctttccccctgcgc

SEQ ID NO: 1367510 - DNA, 15 bp, Homo sapiens
gtctttccccctgcg

SEQ ID NO: 1367511 - DNA, 15 bp, Homo sapiens
ggtctttccccctgc

SEQ ID NO: 1367512 - DNA, 15 bp, Homo sapiens
tggtctttccccctg

SEQ ID NO: 1367513 - DNA, 15 bp, Homo sapiens
gggcgtccggctgga

SEQ ID NO: 1367514 - DNA, 15 bp, Homo sapiens
ggggcgtccggctgg

SEQ ID NO: 1367515 - DNA, 15 bp, Homo sapiens
gggggcgtccggctg

SEQ ID NO: 1367516 - DNA, 15 bp, Homo sapiens
tgggggcgtccggct

SEQ ID NO: 1367517 - DNA, 15 bp, Homo sapiens
ctgggggcgtccggc

SEQ ID NO: 1367518 - DNA, 15 bp, Homo sapiens
tctgggggcgtccgg

SEQ ID NO: 1367519 - DNA, 15 bp, Homo sapiens
gtctgggggcgtccg

SEQ ID NO: 1367520 - DNA, 15 bp, Homo sapiens
ggtctgggggcgtcc

SEQ ID NO: 1367521 - DNA, 15 bp, Homo sapiens
aggtctgggggcgtc

SEQ ID NO: 1367522 - DNA, 15 bp, Homo sapiens
gaggtctgggggcgt

SEQ ID NO: 1367523 - DNA, 15 bp, Homo sapiens
agaggtctgggggcg

SEQ ID NO: 1367524 - DNA, 15 bp, Homo sapiens
cagaggtctgggggc

SEQ ID NO: 1367525 - DNA, 15 bp, Homo sapiens
tcagaggtctggggg

SEQ ID NO: 1367526 - DNA, 15 bp, Homo sapiens
ctcagaggtctgggg

SEQ ID NO: 1367527 - DNA, 15 bp, Homo sapiens
cctcagaggtctggg

SEQ ID NO: 1367528 - DNA, 15 bp, Homo sapiens
acctcagaggtctgg

SEQ ID NO: 1367529 - DNA, 15 bp, Homo sapiens
aacctcagaggtctg

SEQ ID NO: 1367530 - DNA, 15 bp, Homo sapiens
gaacctcagaggtct

SEQ ID NO: 1367531 - DNA, 15 bp, Homo sapiens
cgaacctcagaggtc

SEQ ID NO: 1367532 - DNA, 15 bp, Homo sapiens
tcgaacctcagaggt

SEQ ID NO: 1367533 - DNA, 15 bp, Homo sapiens
ctcgaacctcagagg

SEQ ID NO: 1367534 - DNA, 15 bp, Homo sapiens
cctcgaacctcagag

SEQ ID NO: 1367535 - DNA, 15 bp, Homo sapiens
tcctcgaacctcaga

SEQ ID NO: 1367536 - DNA, 15 bp, Homo sapiens
ctcctcgaacctcag

SEQ ID NO: 1367537 - DNA, 15 bp, Homo sapiens
cctcctcgaacctca

SEQ ID NO: 1367538 - DNA, 15 bp, Homo sapiens
acctcctcgaacctc

SEQ ID NO: 1367539 - DNA, 15 bp, Homo sapiens
cacctcctcgaacct

SEQ ID NO: 1367540 - DNA, 15 bp, Homo sapiens
ccacctcctcgaacc

SEQ ID NO: 1367541 - DNA, 15 bp, Homo sapiens
accacctcctcgaac

SEQ ID NO: 1367542 - DNA, 15 bp, Homo sapiens
caccacctcctcgaa

SEQ ID NO: 1367543 - DNA, 15 bp, Homo sapiens
ccaccacctcctcga

SEQ ID NO: 1367544 - DNA, 15 bp, Homo sapiens
accaccacctcctcg

SEQ ID NO: 1367545 - DNA, 15 bp, Homo sapiens
aaccaccacctcctc

SEQ ID NO: 1367546 - DNA, 15 bp, Homo sapiens
aaaccaccacctcct

SEQ ID NO: 1367547 - DNA, 15 bp, Homo sapiens
aaaaccaccacctcc

SEQ ID NO: 1367548 - DNA, 15 bp, Homo sapiens
gaaaaccaccacctc

SEQ ID NO: 1367549 - DNA, 15 bp, Homo sapiens
tgaaaaccaccacct

SEQ ID NO: 1367550 - DNA, 15 bp, Homo sapiens
atgaaaaccaccacc

SEQ ID NO: 1367551 - DNA, 15 bp, Homo sapiens
aatgaaaaccaccac

SEQ ID NO: 1367552 - DNA, 15 bp, Homo sapiens
aaatgaaaaccacca

SEQ ID NO: 1367553 - DNA, 15 bp, Homo sapiens
caaatgaaaaccacc

SEQ ID NO: 1367554 - DNA, 15 bp, Homo sapiens
ccaaatgaaaaccac

SEQ ID NO: 1367555 - DNA, 15 bp, Homo sapiens
cccaaatgaaaacca

SEQ ID NO: 1367556 - DNA, 15 bp, Homo sapiens
ccccaaatgaaaacc

SEQ ID NO: 1367557 - DNA, 15 bp, Homo sapiens
gccccaaatgaaaac

SEQ ID NO: 1367558 - DNA, 15 bp, Homo sapiens
agccccaaatgaaaa

SEQ ID NO: 1367559 - DNA, 15 bp, Homo sapiens
aagccccaaatgaaa

SEQ ID NO: 1367560 - DNA, 15 bp, Homo sapiens
aaagccccaaatgaa

SEQ ID NO: 1367561 - DNA, 15 bp, Homo sapiens
caaagccccaaatga

SEQ ID NO: 1367562 - DNA, 15 bp, Homo sapiens
gcaaagccccaaatg

SEQ ID NO: 1367563 - DNA, 15 bp, Homo sapiens
tgcaaagccccaaat

SEQ ID NO: 1367564 - DNA, 15 bp, Homo sapiens
atgcaaagccccaaa

SEQ ID NO: 1367565 - DNA, 15 bp, Homo sapiens
tatgcaaagccccaa

SEQ ID NO: 1367566 - DNA, 15 bp, Homo sapiens
atatgcaaagcccca

SEQ ID NO: 1367567 - DNA, 15 bp, Homo sapiens
aatatgcaaagcccc

SEQ ID NO: 1367568 - DNA, 15 bp, Homo sapiens
aaatatgcaaagccc

SEQ ID NO: 1367569 - DNA, 15 bp, Homo sapiens
caaatatgcaaagcc

SEQ ID NO: 1367570 - DNA, 15 bp, Homo sapiens
ccaaatatgcaaagc

SEQ ID NO: 1367571 - DNA, 15 bp, Homo sapiens
accaaatatgcaaag

SEQ ID NO: 1367572 - DNA, 15 bp, Homo sapiens
aaccaaatatgcaaa

SEQ ID NO: 1367573 - DNA, 15 bp, Homo sapiens
caaccaaatatgcaa

SEQ ID NO: 1367574 - DNA, 15 bp, Homo sapiens
acaaccaaatatgca

SEQ ID NO: 1367575 - DNA, 15 bp, Homo sapiens
aacaaccaaatatgc

SEQ ID NO: 1367576 - DNA, 15 bp, Homo sapiens
taacaaccaaatatg

SEQ ID NO: 1367577 - DNA, 15 bp, Homo sapiens
ctaacaaccaaatat

SEQ ID NO: 1367578 - DNA, 15 bp, Homo sapiens
cctaacaaccaaata

SEQ ID NO: 1367579 - DNA, 15 bp, Homo sapiens
acctaacaaccaaat

SEQ ID NO: 1367580 - DNA, 15 bp, Homo sapiens
aacctaacaaccaaa

SEQ ID NO: 1367581 - DNA, 15 bp, Homo sapiens
aaacctaacaaccaa

SEQ ID NO: 1367582 - DNA, 15 bp, Homo sapiens
aaaacctaacaacca

SEQ ID NO: 1367583 - DNA, 15 bp, Homo sapiens
caaaacctaacaacc

SEQ ID NO: 1367584 - DNA, 15 bp, Homo sapiens
gcaaaacctaacaac

SEQ ID NO: 1367585 - DNA, 15 bp, Homo sapiens
cgcaaaacctaacaa

SEQ ID NO: 1367586 - DNA, 15 bp, Homo sapiens
tcgcaaaacctaaca

SEQ ID NO: 1367587 - DNA, 15 bp, Homo sapiens
ctcgcaaaacctaac

SEQ ID NO: 1367588 - DNA, 15 bp, Homo sapiens
tctcgcaaaacctaa

SEQ ID NO: 1367589 - DNA, 15 bp, Homo sapiens
ctctcgcaaaaccta

SEQ ID NO: 1367590 - DNA, 15 bp, Homo sapiens
gctctcgcaaaacct

SEQ ID NO: 1367591 - DNA, 15 bp, Homo sapiens
ggctctcgcaaaacc

SEQ ID NO: 1367592 - DNA, 15 bp, Homo sapiens
aggctctcgcaaaac

SEQ ID NO: 1367593 - DNA, 15 bp, Homo sapiens
gtggggatggtggtg

SEQ ID NO: 1367594 - DNA, 15 bp, Homo sapiens
ggtggggatggtggt

SEQ ID NO: 1367595 - DNA, 15 bp, Homo sapiens
gggtggggatggtgg

SEQ ID NO: 1367596 - DNA, 15 bp, Homo sapiens
cgggtggggatggtg

SEQ ID NO: 1367597 - DNA, 15 bp, Homo sapiens
gcgggtggggatggt

SEQ ID NO: 1367598 - DNA, 15 bp, Homo sapiens
ggcgggtggggatgg

SEQ ID NO: 1367599 - DNA, 15 bp, Homo sapiens
tggcgggtggggatg

SEQ ID NO: 1367600 - DNA, 15 bp, Homo sapiens
ctggcgggtggggat

SEQ ID NO: 1367601 - DNA, 15 bp, Homo sapiens
gctggcgggtgggga

SEQ ID NO: 1367602 - DNA, 15 bp, Homo sapiens
ggctggcgggtgggg

SEQ ID NO: 1367603 - DNA, 15 bp, Homo sapiens
cggctggcgggtggg

SEQ ID NO: 1367604 - DNA, 15 bp, Homo sapiens
gcggctggcgggtgg

SEQ ID NO: 1367605 - DNA, 15 bp, Homo sapiens
cgcggctggcgggtg

SEQ ID NO: 1367606 - DNA, 15 bp, Homo sapiens
ccgcggctggcgggt

SEQ ID NO: 1367607 - DNA, 15 bp, Homo sapiens
cccgcggctggcggg

SEQ ID NO: 1367608 - DNA, 15 bp, Homo sapiens
gcccgcggctggcgg

SEQ ID NO: 1367609 - DNA, 15 bp, Homo sapiens
cgcccgcggctggcg

SEQ ID NO: 1367610 - DNA, 15 bp, Homo sapiens
gcgcccgcggctggc

SEQ ID NO: 1367611 - DNA, 15 bp, Homo sapiens
ggcgcccgcggctgg

SEQ ID NO: 1367612 - DNA, 15 bp, Homo sapiens
cggcgcccgcggctg

SEQ ID NO: 1367613 - DNA, 15 bp, Homo sapiens
ccggcgcccgcggct

SEQ ID NO: 1367614 - DNA, 15 bp, Homo sapiens
gccggcgcccgcggc

SEQ ID NO: 1367615 - DNA, 15 bp, Homo sapiens
cgccggcgcccgcgg

SEQ ID NO: 1367616 - DNA, 15 bp, Homo sapiens
gcgccggcgcccgcg

SEQ ID NO: 1367617 - DNA, 15 bp, Homo sapiens
cgcgccggcgcccgc

SEQ ID NO: 1367618 - DNA, 15 bp, Homo sapiens
ccgcgccggcgcccg

SEQ ID NO: 1367619 - DNA, 15 bp, Homo sapiens
gccgcgccggcgccc

SEQ ID NO: 1367620 - DNA, 15 bp, Homo sapiens
ggccgcgccggcgcc

SEQ ID NO: 1367621 - DNA, 15 bp, Homo sapiens
cggccgcgccggcgc

SEQ ID NO: 1367622 - DNA, 15 bp, Homo sapiens
ccggccgcgccggcg

SEQ ID NO: 1367623 - DNA, 15 bp, Homo sapiens
cccggccgcgccggc

SEQ ID NO: 1367624 - DNA, 15 bp, Homo sapiens
ccccggccgcgccgg

SEQ ID NO: 1367625 - DNA, 15 bp, Homo sapiens
cccccggccgcgccg

SEQ ID NO: 1367626 - DNA, 15 bp, Homo sapiens
gcccccggccgcgcc

SEQ ID NO: 1367627 - DNA, 15 bp, Homo sapiens
cgcccccggccgcgc

SEQ ID NO: 1367628 - DNA, 15 bp, Homo sapiens
gcgcccccggccgcg

SEQ ID NO: 1367629 - DNA, 15 bp, Homo sapiens
ggcgcccccggccgc

SEQ ID NO: 1367630 - DNA, 15 bp, Homo sapiens
cggcgcccccggccg

SEQ ID NO: 1367631 - DNA, 15 bp, Homo sapiens
tcggcgcccccggcc

SEQ ID NO: 1367632 - DNA, 15 bp, Homo sapiens
ctcggcgcccccggc

SEQ ID NO: 1367633 - DNA, 15 bp, Homo sapiens
cctcggcgcccccgg

SEQ ID NO: 1367634 - DNA, 15 bp, Homo sapiens
gcctcggcgcccccg

SEQ ID NO: 1367635 - DNA, 15 bp, Homo sapiens
cgcctcggcgccccc

SEQ ID NO: 1367636 - DNA, 15 bp, Homo sapiens
ccgcctcggcgcccc

SEQ ID NO: 1367637 - DNA, 15 bp, Homo sapiens
tccgcctcggcgccc

SEQ ID NO: 1367638 - DNA, 15 bp, Homo sapiens
atccgcctcggcgcc

SEQ ID NO: 1367639 - DNA, 15 bp, Homo sapiens
gatccgcctcggcgc

SEQ ID NO: 1367640 - DNA, 15 bp, Homo sapiens
agatccgcctcggcg

SEQ ID NO: 1367641 - DNA, 15 bp, Homo sapiens
cagatccgcctcggc

SEQ ID NO: 1367642 - DNA, 15 bp, Homo sapiens
tcagatccgcctcgg

SEQ ID NO: 1367643 - DNA, 15 bp, Homo sapiens
ttcagatccgcctcg

SEQ ID NO: 1367644 - DNA, 15 bp, Homo sapiens
cttcagatccgcctc

SEQ ID NO: 1367645 - DNA, 15 bp, Homo sapiens
ccttcagatccgcct

SEQ ID NO: 1367646 - DNA, 15 bp, Homo sapiens
gccttcagatccgcc

SEQ ID NO: 1367647 - DNA, 15 bp, Homo sapiens
cgccttcagatccgc

SEQ ID NO: 1367648 - DNA, 15 bp, Homo sapiens
gcgccttcagatccg

SEQ ID NO: 1367649 - DNA, 15 bp, Homo sapiens
agcgccttcagatcc

SEQ ID NO: 1367650 - DNA, 15 bp, Homo sapiens
gagcgccttcagatc

SEQ ID NO: 1367651 - DNA, 15 bp, Homo sapiens
tgagcgccttcagat

SEQ ID NO: 1367652 - DNA, 15 bp, Homo sapiens
gtgagcgccttcaga

SEQ ID NO: 1367653 - DNA, 15 bp, Homo sapiens
cgtgagcgccttcag

SEQ ID NO: 1367654 - DNA, 15 bp, Homo sapiens
gcgtgagcgccttca

SEQ ID NO: 1367655 - DNA, 15 bp, Homo sapiens
tgcgtgagcgccttc

SEQ ID NO: 1367656 - DNA, 15 bp, Homo sapiens
gtgcgtgagcgcctt

SEQ ID NO: 1367657 - DNA, 15 bp, Homo sapiens
agtgcgtgagcgcct

SEQ ID NO: 1367658 - DNA, 15 bp, Homo sapiens
gagtgcgtgagcgcc

SEQ ID NO: 1367659 - DNA, 15 bp, Homo sapiens
cgagtgcgtgagcgc

SEQ ID NO: 1367660 - DNA, 15 bp, Homo sapiens
ccgagtgcgtgagcg

SEQ ID NO: 1367661 - DNA, 15 bp, Homo sapiens
accgagtgcgtgagc

SEQ ID NO: 1367662 - DNA, 15 bp, Homo sapiens
caccgagtgcgtgag

SEQ ID NO: 1367663 - DNA, 15 bp, Homo sapiens
gcaccgagtgcgtga

SEQ ID NO: 1367664 - DNA, 15 bp, Homo sapiens
agcaccgagtgcgtg

SEQ ID NO: 1367665 - DNA, 15 bp, Homo sapiens
gagcaccgagtgcgt

SEQ ID NO: 1367666 - DNA, 15 bp, Homo sapiens
tgagcaccgagtgcg

SEQ ID NO: 1367667 - DNA, 15 bp, Homo sapiens
ttgagcaccgagtgc

SEQ ID NO: 1367668 - DNA, 15 bp, Homo sapiens
cttgagcaccgagtg

SEQ ID NO: 1367669 - DNA, 15 bp, Homo sapiens
tcttgagcaccgagt

SEQ ID NO: 1367670 - DNA, 15 bp, Homo sapiens
ttcttgagcaccgag

SEQ ID NO: 1367671 - DNA, 15 bp, Homo sapiens
tttcttgagcaccga

SEQ ID NO: 1367672 - DNA, 15 bp, Homo sapiens
gtttcttgagcaccg

SEQ ID NO: 1367673 - DNA, 15 bp, Homo sapiens
agtttcttgagcacc

SEQ ID NO: 1367674 - DNA, 15 bp, Homo sapiens
cagtttcttgagcac

SEQ ID NO: 1367675 - DNA, 15 bp, Homo sapiens
tcagtttcttgagca

SEQ ID NO: 1367676 - DNA, 15 bp, Homo sapiens
ttcagtttcttgagc

SEQ ID NO: 1367677 - DNA, 15 bp, Homo sapiens
cttcagtttcttgag

SEQ ID NO: 1367678 - DNA, 15 bp, Homo sapiens
ccttcagtttcttga

SEQ ID NO: 1367679 - DNA, 15 bp, Homo sapiens
tccttcagtttcttg

SEQ ID NO: 1367680 - DNA, 15 bp, Homo sapiens
ctccttcagtttctt

SEQ ID NO: 1367681 - DNA, 15 bp, Homo sapiens
gctccttcagtttct

SEQ ID NO: 1367682 - DNA, 15 bp, Homo sapiens
cgctccttcagtttc

SEQ ID NO: 1367683 - DNA, 15 bp, Homo sapiens
ccgctccttcagttt

SEQ ID NO: 1367684 - DNA, 15 bp, Homo sapiens
gccgctccttcagtt

SEQ ID NO: 1367685 - DNA, 15 bp, Homo sapiens
tgccgctccttcagt

SEQ ID NO: 1367686 - DNA, 15 bp, Homo sapiens
ctgccgctccttcag

SEQ ID NO: 1367687 - DNA, 15 bp, Homo sapiens
gctgccgctccttca

SEQ ID NO: 1367688 - DNA, 15 bp, Homo sapiens
agctgccgctccttc

SEQ ID NO: 1367689 - DNA, 15 bp, Homo sapiens
cagctgccgctcctt

SEQ ID NO: 1367690 - DNA, 15 bp, Homo sapiens
ccagctgccgctcct

SEQ ID NO: 1367691 - DNA, 15 bp, Homo sapiens
tccagctgccgctcc

SEQ ID NO: 1367692 - DNA, 15 bp, Homo sapiens
ctccagctgccgctc

SEQ ID NO: 1367693 - DNA, 15 bp, Homo sapiens
gctccagctgccgct

SEQ ID NO: 1367694 - DNA, 15 bp, Homo sapiens
agctccagctgccgc

SEQ ID NO: 1367695 - DNA, 15 bp, Homo sapiens
cagctccagctgccg

SEQ ID NO: 1367696 - DNA, 15 bp, Homo sapiens
gcagctccagctgcc

SEQ ID NO: 1367697 - DNA, 15 bp, Homo sapiens
agcagctccagctgc

SEQ ID NO: 1367698 - DNA, 15 bp, Homo sapiens
cagcagctccagctg

SEQ ID NO: 1367699 - DNA, 15 bp, Homo sapiens
gcagcagctccagct

SEQ ID NO: 1367700 - DNA, 15 bp, Homo sapiens
agcagcagctccagc

SEQ ID NO: 1367701 - DNA, 15 bp, Homo sapiens
gagcagcagctccag

SEQ ID NO: 1367702 - DNA, 15 bp, Homo sapiens
ggagcagcagctcca

SEQ ID NO: 1367703 - DNA, 15 bp, Homo sapiens
tggagcagcagctcc

SEQ ID NO: 1367704 - DNA, 15 bp, Homo sapiens
ctggagcagcagctc

SEQ ID NO: 1367705 - DNA, 15 bp, Homo sapiens
cctggagcagcagct

SEQ ID NO: 1367706 - DNA, 15 bp, Homo sapiens
gcctggagcagcagc

SEQ ID NO: 1367707 - DNA, 15 bp, Homo sapiens
ggcctggagcagcag

SEQ ID NO: 1367708 - DNA, 15 bp, Homo sapiens
cggcctggagcagca

SEQ ID NO: 1367709 - DNA, 15 bp, Homo sapiens
acggcctggagcagc

SEQ ID NO: 1367710 - DNA, 15 bp, Homo sapiens
cacggcctggagcag

SEQ ID NO: 1367711 - DNA, 15 bp, Homo sapiens
ccacggcctggagca

SEQ ID NO: 1367712 - DNA, 15 bp, Homo sapiens
tccacggcctggagc

SEQ ID NO: 1367713 - DNA, 15 bp, Homo sapiens
ctccacggcctggag

SEQ ID NO: 1367714 - DNA, 15 bp, Homo sapiens
actccacggcctgga

SEQ ID NO: 1367715 - DNA, 15 bp, Homo sapiens
gactccacggcctgg

SEQ ID NO: 1367716 - DNA, 15 bp, Homo sapiens
ggactccacggcctg

SEQ ID NO: 1367717 - DNA, 15 bp, Homo sapiens
gggactccacggcct

SEQ ID NO: 1367718 - DNA, 15 bp, Homo sapiens
cgggactccacggcc

SEQ ID NO: 1367719 - DNA, 15 bp, Homo sapiens
gcgggactccacggc

SEQ ID NO: 1367720 - DNA, 15 bp, Homo sapiens
cgcgggactccacgg

SEQ ID NO: 1367721 - DNA, 15 bp, Homo sapiens
ccgcgggactccacg

SEQ ID NO: 1367722 - DNA, 15 bp, Homo sapiens
gccgcgggactccac

SEQ ID NO: 1367723 - DNA, 15 bp, Homo sapiens
cgccgcgggactcca

SEQ ID NO: 1367724 - DNA, 15 bp, Homo sapiens
ccgccgcgggactcc

SEQ ID NO: 1367725 - DNA, 15 bp, Homo sapiens
cccgccgcgggactc

SEQ ID NO: 1367726 - DNA, 15 bp, Homo sapiens
tcccgccgcgggact

SEQ ID NO: 1367727 - DNA, 15 bp, Homo sapiens
gtcccgccgcgggac

SEQ ID NO: 1367728 - DNA, 15 bp, Homo sapiens
cgtcccgccgcggga

SEQ ID NO: 1367729 - DNA, 15 bp, Homo sapiens
gcgtcccgccgcggg

SEQ ID NO: 1367730 - DNA, 15 bp, Homo sapiens
cgcgtcccgccgcgg

SEQ ID NO: 1367731 - DNA, 15 bp, Homo sapiens
gcgcgtcccgccgcg

SEQ ID NO: 1367732 - DNA, 15 bp, Homo sapiens
tgcgcgtcccgccgc

SEQ ID NO: 1367733 - DNA, 15 bp, Homo sapiens
gtgcgcgtcccgccg

SEQ ID NO: 1367734 - DNA, 15 bp, Homo sapiens
ggtgcgcgtcccgcc

SEQ ID NO: 1367735 - DNA, 15 bp, Homo sapiens
cggtgcgcgtcccgc

SEQ ID NO: 1367736 - DNA, 15 bp, Homo sapiens
gcggtgcgcgtcccg

SEQ ID NO: 1367737 - DNA, 15 bp, Homo sapiens
cgcggtgcgcgtccc

SEQ ID NO: 1367738 - DNA, 15 bp, Homo sapiens
acgcggtgcgcgtcc

SEQ ID NO: 1367739 - DNA, 15 bp, Homo sapiens
cacgcggtgcgcgtc

SEQ ID NO: 1367740 - DNA, 15 bp, Homo sapiens
gcacgcggtgcgcgt

SEQ ID NO: 1367741 - DNA, 15 bp, Homo sapiens
ggcacgcggtgcgcg

SEQ ID NO: 1367742 - DNA, 15 bp, Homo sapiens
aggcacgcggtgcgc

SEQ ID NO: 1367743 - DNA, 15 bp, Homo sapiens
gaggcacgcggtgcg

SEQ ID NO: 1367744 - DNA, 15 bp, Homo sapiens
ggaggcacgcggtgc

SEQ ID NO: 1367745 - DNA, 15 bp, Homo sapiens
aggaggcacgcggtg

SEQ ID NO: 1367746 - DNA, 15 bp, Homo sapiens
caggaggcacgcggt

SEQ ID NO: 1367747 - DNA, 15 bp, Homo sapiens
gcaggaggcacgcgg

SEQ ID NO: 1367748 - DNA, 15 bp, Homo sapiens
agcaggaggcacgcg

SEQ ID NO: 1367749 - DNA, 15 bp, Homo sapiens
cagcaggaggcacgc

SEQ ID NO: 1367750 - DNA, 15 bp, Homo sapiens
gcagcaggaggcacg

SEQ ID NO: 1367751 - DNA, 15 bp, Homo sapiens
ggcagcaggaggcac

SEQ ID NO: 1367752 - DNA, 15 bp, Homo sapiens
gggcagcaggaggca

SEQ ID NO: 1367753 - DNA, 15 bp, Homo sapiens
cgggcagcaggaggc

SEQ ID NO: 1367754 - DNA, 15 bp, Homo sapiens
ccgggcagcaggagg

SEQ ID NO: 1367755 - DNA, 15 bp, Homo sapiens
gccgggcagcaggag

SEQ ID NO: 1367756 - DNA, 15 bp, Homo sapiens
ggccgggcagcagga

SEQ ID NO: 1367757 - DNA, 15 bp, Homo sapiens
cggccgggcagcagg

SEQ ID NO: 1367758 - DNA, 15 bp, Homo sapiens
gcggccgggcagcag

SEQ ID NO: 1367759 - DNA, 15 bp, Homo sapiens
ggcggccgggcagca

SEQ ID NO: 1367760 - DNA, 15 bp, Homo sapiens
aggcggccgggcagc

SEQ ID NO: 1367761 - DNA, 15 bp, Homo sapiens
caggcggccgggcag

SEQ ID NO: 1367762 - DNA, 15 bp, Homo sapiens
ccaggcggccgggca

SEQ ID NO: 1367763 - DNA, 15 bp, Homo sapiens
tccaggcggccgggc

SEQ ID NO: 1367764 - DNA, 15 bp, Homo sapiens
gtccaggcggccggg

SEQ ID NO: 1367765 - DNA, 15 bp, Homo sapiens
agtccaggcggccgg

SEQ ID NO: 1367766 - DNA, 15 bp, Homo sapiens
cagtccaggcggccg

SEQ ID NO: 1367767 - DNA, 15 bp, Homo sapiens
gcagtccaggcggcc

SEQ ID NO: 1367768 - DNA, 15 bp, Homo sapiens
tgcagtccaggcggc

SEQ ID NO: 1367769 - DNA, 15 bp, Homo sapiens
ctgcagtccaggcgg

SEQ ID NO: 1367770 - DNA, 15 bp, Homo sapiens
cctgcagtccaggcg

SEQ ID NO: 1367771 - DNA, 15 bp, Homo sapiens
gcctgcagtccaggc

SEQ ID NO: 1367772 - DNA, 15 bp, Homo sapiens
agcctgcagtccagg

SEQ ID NO: 1367773 - DNA, 15 bp, Homo sapiens
cagcctgcagtccag

SEQ ID NO: 1367774 - DNA, 15 bp, Homo sapiens
ccagcctgcagtcca

SEQ ID NO: 1367775 - DNA, 15 bp, Homo sapiens
cccagcctgcagtcc

SEQ ID NO: 1367776 - DNA, 15 bp, Homo sapiens
gcccagcctgcagtc

SEQ ID NO: 1367777 - DNA, 15 bp, Homo sapiens
ggcccagcctgcagt

SEQ ID NO: 1367778 - DNA, 15 bp, Homo sapiens
gggcccagcctgcag

SEQ ID NO: 1367779 - DNA, 15 bp, Homo sapiens
cgggcccagcctgca

SEQ ID NO: 1367780 - DNA, 15 bp, Homo sapiens
ccgggcccagcctgc

SEQ ID NO: 1367781 - DNA, 15 bp, Homo sapiens
cccgggcccagcctg

SEQ ID NO: 1367782 - DNA, 15 bp, Homo sapiens
ccccgggcccagcct

SEQ ID NO: 1367783 - DNA, 15 bp, Homo sapiens
cccccgggcccagcc

SEQ ID NO: 1367784 - DNA, 15 bp, Homo sapiens
gcccccgggcccagc

SEQ ID NO: 1367785 - DNA, 15 bp, Homo sapiens
cgcccccgggcccag

SEQ ID NO: 1367786 - DNA, 15 bp, Homo sapiens
gcgcccccgggccca

SEQ ID NO: 1367787 - DNA, 15 bp, Homo sapiens
ggcgcccccgggccc

SEQ ID NO: 1367788 - DNA, 15 bp, Homo sapiens
gggcgcccccgggcc

SEQ ID NO: 1367789 - DNA, 15 bp, Homo sapiens
cgggcgcccccgggc

SEQ ID NO: 1367790 - DNA, 15 bp, Homo sapiens
gcgggcgcccccggg

SEQ ID NO: 1367791 - DNA, 15 bp, Homo sapiens
ggcgggcgcccccgg

SEQ ID NO: 1367792 - DNA, 15 bp, Homo sapiens
cggcgggcgcccccg

SEQ ID NO: 1367793 - DNA, 15 bp, Homo sapiens
ccggcgggcgccccc

SEQ ID NO: 1367794 - DNA, 15 bp, Homo sapiens
gccggcgggcgcccc

SEQ ID NO: 1367795 - DNA, 15 bp, Homo sapiens
cgccggcgggcgccc

SEQ ID NO: 1367796 - DNA, 15 bp, Homo sapiens
gcgccggcgggcgcc

SEQ ID NO: 1367797 - DNA, 15 bp, Homo sapiens
cgcgccggcgggcgc

SEQ ID NO: 1367798 - DNA, 15 bp, Homo sapiens
gcgcgccggcgggcg

SEQ ID NO: 1367799 - DNA, 15 bp, Homo sapiens
tgcgcgccggcgggc

SEQ ID NO: 1367800 - DNA, 15 bp, Homo sapiens
ctgcgcgccggcggg

SEQ ID NO: 1367801 - DNA, 15 bp, Homo sapiens
gctgcgcgccggcgg

SEQ ID NO: 1367802 - DNA, 15 bp, Homo sapiens
ggctgcgcgccggcg

SEQ ID NO: 1367803 - DNA, 15 bp, Homo sapiens
aggctgcgcgccggc

SEQ ID NO: 1367804 - DNA, 15 bp, Homo sapiens
caggctgcgcgccgg

SEQ ID NO: 1367805 - DNA, 15 bp, Homo sapiens
gcaggctgcgcgccg

SEQ ID NO: 1367806 - DNA, 15 bp, Homo sapiens
cgcaggctgcgcgcc

SEQ ID NO: 1367807 - DNA, 15 bp, Homo sapiens
gcgcaggctgcgcgc

SEQ ID NO: 1367808 - DNA, 15 bp, Homo sapiens
tgcgcaggctgcgcg

SEQ ID NO: 1367809 - DNA, 15 bp, Homo sapiens
ctgcgcaggctgcgc

SEQ ID NO: 1367810 - DNA, 15 bp, Homo sapiens
gctgcgcaggctgcg

SEQ ID NO: 1367811 - DNA, 15 bp, Homo sapiens
ggctgcgcaggctgc

SEQ ID NO: 1367812 - DNA, 15 bp, Homo sapiens
cggctgcgcaggctg

SEQ ID NO: 1367813 - DNA, 15 bp, Homo sapiens
gcggctgcgcaggct

SEQ ID NO: 1367814 - DNA, 15 bp, Homo sapiens
ggcggctgcgcaggc

SEQ ID NO: 1367815 - DNA, 15 bp, Homo sapiens
gggcggctgcgcagg

SEQ ID NO: 1367816 - DNA, 15 bp, Homo sapiens
agggcggctgcgcag

SEQ ID NO: 1367817 - DNA, 15 bp, Homo sapiens
gagggcggctgcgca

SEQ ID NO: 1367818 - DNA, 15 bp, Homo sapiens
cgagggcggctgcgc

SEQ ID NO: 1367819 - DNA, 15 bp, Homo sapiens
acgagggcggctgcg

SEQ ID NO: 1367820 - DNA, 15 bp, Homo sapiens
gacgagggcggctgc

SEQ ID NO: 1367821 - DNA, 15 bp, Homo sapiens
ggacgagggcggctg

SEQ ID NO: 1367822 - DNA, 15 bp, Homo sapiens
aggacgagggcggct

SEQ ID NO: 1367823 - DNA, 15 bp, Homo sapiens
taggacgagggcggc

SEQ ID NO: 1367824 - DNA, 15 bp, Homo sapiens
gtaggacgagggcgg

SEQ ID NO: 1367825 - DNA, 15 bp, Homo sapiens
agtaggacgagggcg

SEQ ID NO: 1367826 - DNA, 15 bp, Homo sapiens
gagtaggacgagggc

SEQ ID NO: 1367827 - DNA, 15 bp, Homo sapiens
cgagtaggacgaggg

SEQ ID NO: 1367828 - DNA, 15 bp, Homo sapiens
gcgagtaggacgagg

SEQ ID NO: 1367829 - DNA, 15 bp, Homo sapiens
agcgagtaggacgag

SEQ ID NO: 1367830 - DNA, 15 bp, Homo sapiens
gagcgagtaggacga

SEQ ID NO: 1367831 - DNA, 15 bp, Homo sapiens
ggagcgagtaggacg

SEQ ID NO: 1367832 - DNA, 15 bp, Homo sapiens
gggagcgagtaggac

SEQ ID NO: 1367833 - DNA, 15 bp, Homo sapiens
ggggagcgagtagga

SEQ ID NO: 1367834 - DNA, 15 bp, Homo sapiens
gggggagcgagtagg

SEQ ID NO: 1367835 - DNA, 15 bp, Homo sapiens
agggggagcgagtag

SEQ ID NO: 1367836 - DNA, 15 bp, Homo sapiens
gagggggagcgagta

SEQ ID NO: 1367837 - DNA, 15 bp, Homo sapiens
ggagggggagcgagt

SEQ ID NO: 1367838 - DNA, 15 bp, Homo sapiens
aggagggggagcgag

SEQ ID NO: 1367839 - DNA, 15 bp, Homo sapiens
caggagggggagcga

SEQ ID NO: 1367840 - DNA, 15 bp, Homo sapiens
gcaggagggggagcg

SEQ ID NO: 1367841 - DNA, 15 bp, Homo sapiens
agcaggagggggagc

SEQ ID NO: 1367842 - DNA, 15 bp, Homo sapiens
cagcaggagggggag

SEQ ID NO: 1367843 - DNA, 15 bp, Homo sapiens
acagcaggaggggga

SEQ ID NO: 1367844 - DNA, 15 bp, Homo sapiens
cacagcaggaggggg

SEQ ID NO: 1367845 - DNA, 15 bp, Homo sapiens
gcacagcaggagggg

SEQ ID NO: 1367846 - DNA, 15 bp, Homo sapiens
tgcacagcaggaggg

SEQ ID NO: 1367847 - DNA, 15 bp, Homo sapiens
ttgcacagcaggagg

SEQ ID NO: 1367848 - DNA, 15 bp, Homo sapiens
tttgcacagcaggag

SEQ ID NO: 1367849 - DNA, 15 bp, Homo sapiens
ctttgcacagcagga

SEQ ID NO: 1367850 - DNA, 15 bp, Homo sapiens
actttgcacagcagg

SEQ ID NO: 1367851 - DNA, 15 bp, Homo sapiens
cactttgcacagcag

SEQ ID NO: 1367852 - DNA, 15 bp, Homo sapiens
acactttgcacagca

SEQ ID NO: 1367853 - DNA, 15 bp, Homo sapiens
aacactttgcacagc

SEQ ID NO: 1367854 - DNA, 15 bp, Homo sapiens
gaacactttgcacag

SEQ ID NO: 1367855 - DNA, 15 bp, Homo sapiens
tgaacactttgcaca

SEQ ID NO: 1367856 - DNA, 15 bp, Homo sapiens
ctgaacactttgcac

SEQ ID NO: 1367857 - DNA, 15 bp, Homo sapiens
cctgaacactttgca

SEQ ID NO: 1367858 - DNA, 15 bp, Homo sapiens
acctgaacactttgc

SEQ ID NO: 1367859 - DNA, 15 bp, Homo sapiens
cacctgaacactttg

SEQ ID NO: 1367860 - DNA, 15 bp, Homo sapiens
ccacctgaacacttt

SEQ ID NO: 1367861 - DNA, 15 bp, Homo sapiens
gccacctgaacactt

SEQ ID NO: 1367862 - DNA, 15 bp, Homo sapiens
ggccacctgaacact

SEQ ID NO: 1367863 - DNA, 15 bp, Homo sapiens
cggccacctgaacac

SEQ ID NO: 1367864 - DNA, 15 bp, Homo sapiens
ccggccacctgaaca

SEQ ID NO: 1367865 - DNA, 15 bp, Homo sapiens
tccggccacctgaac

SEQ ID NO: 1367866 - DNA, 15 bp, Homo sapiens
atccggccacctgaa

SEQ ID NO: 1367867 - DNA, 15 bp, Homo sapiens
gatccggccacctga

SEQ ID NO: 1367868 - DNA, 15 bp, Homo sapiens
agatccggccacctg

SEQ ID NO: 1367869 - DNA, 15 bp, Homo sapiens
gagatccggccacct

SEQ ID NO: 1367870 - DNA, 15 bp, Homo sapiens
tgagatccggccacc

SEQ ID NO: 1367871 - DNA, 15 bp, Homo sapiens
ctgagatccggccac

SEQ ID NO: 1367872 - DNA, 15 bp, Homo sapiens
cctgagatccggcca

SEQ ID NO: 1367873 - DNA, 15 bp, Homo sapiens
gcctgagatccggcc

SEQ ID NO: 1367874 - DNA, 15 bp, Homo sapiens
tgcctgagatccggc

SEQ ID NO: 1367875 - DNA, 15 bp, Homo sapiens
atgcctgagatccgg

SEQ ID NO: 1367876 - DNA, 15 bp, Homo sapiens
aatgcctgagatccg

SEQ ID NO: 1367877 - DNA, 15 bp, Homo sapiens
gaatgcctgagatcc

SEQ ID NO: 1367878 - DNA, 15 bp, Homo sapiens
ggaatgcctgagatc

SEQ ID NO: 1367879 - DNA, 15 bp, Homo sapiens
aggaatgcctgagat

SEQ ID NO: 1367880 - DNA, 15 bp, Homo sapiens
gaggaatgcctgaga

SEQ ID NO: 1367881 - DNA, 15 bp, Homo sapiens
cgaggaatgcctgag

SEQ ID NO: 1367882 - DNA, 15 bp, Homo sapiens
ccgaggaatgcctga

SEQ ID NO: 1367883 - DNA, 15 bp, Homo sapiens
tccgaggaatgcctg

SEQ ID NO: 1367884 - DNA, 15 bp, Homo sapiens
ttccgaggaatgcct

SEQ ID NO: 1367885 - DNA, 15 bp, Homo sapiens
cttccgaggaatgcc

SEQ ID NO: 1367886 - DNA, 15 bp, Homo sapiens
acttccgaggaatgc

SEQ ID NO: 1367887 - DNA, 15 bp, Homo sapiens
gacttccgaggaatg

SEQ ID NO: 1367888 - DNA, 15 bp, Homo sapiens
tgacttccgaggaat

SEQ ID NO: 1367889 - DNA, 15 bp, Homo sapiens
ttgacttccgaggaa

SEQ ID NO: 1367890 - DNA, 15 bp, Homo sapiens
cttgacttccgagga

SEQ ID NO: 1367891 - DNA, 15 bp, Homo sapiens
tcttgacttccgagg

SEQ ID NO: 1367892 - DNA, 15 bp, Homo sapiens
ctcttgacttccgag

SEQ ID NO: 1367893 - DNA, 15 bp, Homo sapiens
cctcttgacttccga

SEQ ID NO: 1367894 - DNA, 15 bp, Homo sapiens
gcctcttgacttccg

SEQ ID NO: 1367895 - DNA, 15 bp, Homo sapiens
agcctcttgacttcc

SEQ ID NO: 1367896 - DNA, 15 bp, Homo sapiens
cagcctcttgacttc

SEQ ID NO: 1367897 - DNA, 15 bp, Homo sapiens
acagcctcttgactt

SEQ ID NO: 1367898 - DNA, 15 bp, Homo sapiens
cacagcctcttgact

SEQ ID NO: 1367899 - DNA, 15 bp, Homo sapiens
acacagcctcttgac

SEQ ID NO: 1367900 - DNA, 15 bp, Homo sapiens
aacacagcctcttga

SEQ ID NO: 1367901 - DNA, 15 bp, Homo sapiens
caacacagcctcttg

SEQ ID NO: 1367902 - DNA, 15 bp, Homo sapiens
gcaacacagcctctt

SEQ ID NO: 1367903 - DNA, 15 bp, Homo sapiens
agcaacacagcctct

SEQ ID NO: 1367904 - DNA, 15 bp, Homo sapiens
cagcaacacagcctc

SEQ ID NO: 1367905 - DNA, 15 bp, Homo sapiens
acagcaacacagcct

SEQ ID NO: 1367906 - DNA, 15 bp, Homo sapiens
cacagcaacacagcc

SEQ ID NO: 1367907 - DNA, 15 bp, Homo sapiens
tcacagcaacacagc

SEQ ID NO: 1367908 - DNA, 15 bp, Homo sapiens
ttcacagcaacacag

SEQ ID NO: 1367909 - DNA, 15 bp, Homo sapiens
attcacagcaacaca

SEQ ID NO: 1367910 - DNA, 15 bp, Homo sapiens
gattcacagcaacac

SEQ ID NO: 1367911 - DNA, 15 bp, Homo sapiens
agattcacagcaaca

SEQ ID NO: 1367912 - DNA, 15 bp, Homo sapiens
aagattcacagcaac

SEQ ID NO: 1367913 - DNA, 15 bp, Homo sapiens
taagattcacagcaa

SEQ ID NO: 1367914 - DNA, 15 bp, Homo sapiens
gtaagattcacagca

SEQ ID NO: 1367915 - DNA, 15 bp, Homo sapiens
cgtaagattcacagc

SEQ ID NO: 1367916 - DNA, 15 bp, Homo sapiens
ccgtaagattcacag

SEQ ID NO: 1367917 - DNA, 15 bp, Homo sapiens
cccgtaagattcaca

SEQ ID NO: 1367918 - DNA, 15 bp, Homo sapiens
tcccgtaagattcac

SEQ ID NO: 1367919 - DNA, 15 bp, Homo sapiens
ttcccgtaagattca

SEQ ID NO: 1367920 - DNA, 15 bp, Homo sapiens
cttcccgtaagattc

SEQ ID NO: 1367921 - DNA, 15 bp, Homo sapiens
tcttcccgtaagatt

SEQ ID NO: 1367922 - DNA, 15 bp, Homo sapiens
atcttcccgtaagat

SEQ ID NO: 1367923 - DNA, 15 bp, Homo sapiens
gatcttcccgtaaga

SEQ ID NO: 1367924 - DNA, 15 bp, Homo sapiens
tgatcttcccgtaag

SEQ ID NO: 1367925 - DNA, 15 bp, Homo sapiens
ttgatcttcccgtaa

SEQ ID NO: 1367926 - DNA, 15 bp, Homo sapiens
gttgatcttcccgta

SEQ ID NO: 1367927 - DNA, 15 bp, Homo sapiens
ggttgatcttcccgt

SEQ ID NO: 1367928 - DNA, 15 bp, Homo sapiens
gggttgatcttcccg

SEQ ID NO: 1367929 - DNA, 15 bp, Homo sapiens
ggggttgatcttccc

SEQ ID NO: 1367930 - DNA, 15 bp, Homo sapiens
cggggttgatcttcc

SEQ ID NO: 1367931 - DNA, 15 bp, Homo sapiens
tcggggttgatcttc

SEQ ID NO: 1367932 - DNA, 15 bp, Homo sapiens
ctcggggttgatctt

SEQ ID NO: 1367933 - DNA, 15 bp, Homo sapiens
gctcggggttgatct

SEQ ID NO: 1367934 - DNA, 15 bp, Homo sapiens
agctcggggttgatc

SEQ ID NO: 1367935 - DNA, 15 bp, Homo sapiens
cagctcggggttgat

SEQ ID NO: 1367936 - DNA, 15 bp, Homo sapiens
ccagctcggggttga

SEQ ID NO: 1367937 - DNA, 15 bp, Homo sapiens
accagctcggggttg

SEQ ID NO: 1367938 - DNA, 15 bp, Homo sapiens
caccagctcggggtt

SEQ ID NO: 1367939 - DNA, 15 bp, Homo sapiens
acaccagctcggggt

SEQ ID NO: 1367940 - DNA, 15 bp, Homo sapiens
cacaccagctcgggg

SEQ ID NO: 1367941 - DNA, 15 bp, Homo sapiens
gcacaccagctcggg

SEQ ID NO: 1367942 - DNA, 15 bp, Homo sapiens
agcacaccagctcgg

SEQ ID NO: 1367943 - DNA, 15 bp, Homo sapiens
cagcacaccagctcg

SEQ ID NO: 1367944 - DNA, 15 bp, Homo sapiens
gcagcacaccagctc

SEQ ID NO: 1367945 - DNA, 15 bp, Homo sapiens
tgcagcacaccagct

SEQ ID NO: 1367946 - DNA, 15 bp, Homo sapiens
ttgcagcacaccagc

SEQ ID NO: 1367947 - DNA, 15 bp, Homo sapiens
gttgcagcacaccag

SEQ ID NO: 1367948 - DNA, 15 bp, Homo sapiens
ggttgcagcacacca

SEQ ID NO: 1367949 - DNA, 15 bp, Homo sapiens
gggttgcagcacacc

SEQ ID NO: 1367950 - DNA, 15 bp, Homo sapiens
ggggttgcagcacac

SEQ ID NO: 1367951 - DNA, 15 bp, Homo sapiens
gggggttgcagcaca

SEQ ID NO: 1367952 - DNA, 15 bp, Homo sapiens
tgggggttgcagcac

SEQ ID NO: 1367953 - DNA, 15 bp, Homo sapiens
atgggggttgcagca

SEQ ID NO: 1367954 - DNA, 15 bp, Homo sapiens
gatgggggttgcagc

SEQ ID NO: 1367955 - DNA, 15 bp, Homo sapiens
tgatgggggttgcag

SEQ ID NO: 1367956 - DNA, 15 bp, Homo sapiens
gtgatgggggttgca

SEQ ID NO: 1367957 - DNA, 15 bp, Homo sapiens
ggtgatgggggttgc

SEQ ID NO: 1367958 - DNA, 15 bp, Homo sapiens
aggtgatgggggttg

SEQ ID NO: 1367959 - DNA, 15 bp, Homo sapiens
aaggtgatgggggtt

SEQ ID NO: 1367960 - DNA, 15 bp, Homo sapiens
taaggtgatgggggt

SEQ ID NO: 1367961 - DNA, 15 bp, Homo sapiens
ctaaggtgatggggg

SEQ ID NO: 1367962 - DNA, 15 bp, Homo sapiens
gctaaggtgatgggg

SEQ ID NO: 1367963 - DNA, 15 bp, Homo sapiens
ggctaaggtgatggg

SEQ ID NO: 1367964 - DNA, 15 bp, Homo sapiens
cggctaaggtgatgg

SEQ ID NO: 1367965 - DNA, 15 bp, Homo sapiens
tcggctaaggtgatg

SEQ ID NO: 1367966 - DNA, 15 bp, Homo sapiens
gtcggctaaggtgat

SEQ ID NO: 1367967 - DNA, 15 bp, Homo sapiens
agtcggctaaggtga

SEQ ID NO: 1367968 - DNA, 15 bp, Homo sapiens
gagtcggctaaggtg

SEQ ID NO: 1367969 - DNA, 15 bp, Homo sapiens
agagtcggctaaggt

SEQ ID NO: 1367970 - DNA, 15 bp, Homo sapiens
cagagtcggctaagg

SEQ ID NO: 1367971 - DNA, 15 bp, Homo sapiens
gcagagtcggctaag

SEQ ID NO: 1367972 - DNA, 15 bp, Homo sapiens
cgcagagtcggctaa

SEQ ID NO: 1367973 - DNA, 15 bp, Homo sapiens
tcgcagagtcggcta

SEQ ID NO: 1367974 - DNA, 15 bp, Homo sapiens
ttcgcagagtcggct

SEQ ID NO: 1367975 - DNA, 15 bp, Homo sapiens
gttcgcagagtcggc

SEQ ID NO: 1367976 - DNA, 15 bp, Homo sapiens
agttcgcagagtcgg

SEQ ID NO: 1367977 - DNA, 15 bp, Homo sapiens
tagttcgcagagtcg

SEQ ID NO: 1367978 - DNA, 15 bp, Homo sapiens
ctagttcgcagagtc

SEQ ID NO: 1367979 - DNA, 15 bp, Homo sapiens
cctagttcgcagagt

SEQ ID NO: 1367980 - DNA, 15 bp, Homo sapiens
acctagttcgcagag

SEQ ID NO: 1367981 - DNA, 15 bp, Homo sapiens
cacctagttcgcaga

SEQ ID NO: 1367982 - DNA, 15 bp, Homo sapiens
tcacctagttcgcag

SEQ ID NO: 1367983 - DNA, 15 bp, Homo sapiens
ctcacctagttcgca

SEQ ID NO: 1367984 - DNA, 15 bp, Homo sapiens
tctcacctagttcgc

SEQ ID NO: 1367985 - DNA, 15 bp, Homo sapiens
ttctcacctagttcg

SEQ ID NO: 1367986 - DNA, 15 bp, Homo sapiens
cttctcacctagttc

SEQ ID NO: 1367987 - DNA, 15 bp, Homo sapiens
acttctcacctagtt

SEQ ID NO: 1367988 - DNA, 15 bp, Homo sapiens
aacttctcacctagt

SEQ ID NO: 1367989 - DNA, 15 bp, Homo sapiens
caacttctcacctag

SEQ ID NO: 1367990 - DNA, 15 bp, Homo sapiens
acaacttctcaccta

SEQ ID NO: 1367991 - DNA, 15 bp, Homo sapiens
gacaacttctcacct

SEQ ID NO: 1367992 - DNA, 15 bp, Homo sapiens
ggacaacttctcacc

SEQ ID NO: 1367993 - DNA, 15 bp, Homo sapiens
gggacaacttctcac

SEQ ID NO: 1367994 - DNA, 15 bp, Homo sapiens
ggggacaacttctca

SEQ ID NO: 1367995 - DNA, 15 bp, Homo sapiens
gggggacaacttctc

SEQ ID NO: 1367996 - DNA, 15 bp, Homo sapiens
agggggacaacttct

SEQ ID NO: 1367997 - DNA, 15 bp, Homo sapiens
tagggggacaacttc

SEQ ID NO: 1367998 - DNA, 15 bp, Homo sapiens
gtagggggacaactt

SEQ ID NO: 1367999 - DNA, 15 bp, Homo sapiens
ggtagggggacaact

SEQ ID NO: 1368000 - DNA, 15 bp, Homo sapiens
gggtagggggacaac

SEQ ID NO: 1368001 - DNA, 15 bp, Homo sapiens
ggggtagggggacaa

SEQ ID NO: 1368002 - DNA, 15 bp, Homo sapiens
gggggtagggggaca

SEQ ID NO: 1368003 - DNA, 15 bp, Homo sapiens
tgggggtagggggac

SEQ ID NO: 1368004 - DNA, 15 bp, Homo sapiens
ttgggggtaggggga

SEQ ID NO: 1368005 - DNA, 15 bp, Homo sapiens
gttgggggtaggggg

SEQ ID NO: 1368006 - DNA, 15 bp, Homo sapiens
tgttgggggtagggg

SEQ ID NO: 1368007 - DNA, 15 bp, Homo sapiens
atgttgggggtaggg

SEQ ID NO: 1368008 - DNA, 15 bp, Homo sapiens
aatgttgggggtagg

SEQ ID NO: 1368009 - DNA, 15 bp, Homo sapiens
aaatgttgggggtag

SEQ ID NO: 1368010 - DNA, 15 bp, Homo sapiens
aaaatgttgggggta

SEQ ID NO: 1368011 - DNA, 15 bp, Homo sapiens
gaaaatgttgggggt

SEQ ID NO: 1368012 - DNA, 15 bp, Homo sapiens
ggaaaatgttggggg

SEQ ID NO: 1368013 - DNA, 15 bp, Homo sapiens
cggaaaatgttgggg

SEQ ID NO: 1368014 - DNA, 15 bp, Homo sapiens
ccggaaaatgttggg

SEQ ID NO: 1368015 - DNA, 15 bp, Homo sapiens
tccggaaaatgttgg

SEQ ID NO: 1368016 - DNA, 15 bp, Homo sapiens
ctccggaaaatgttg

SEQ ID NO: 1368017 - DNA, 15 bp, Homo sapiens
gctccggaaaatgtt

SEQ ID NO: 1368018 - DNA, 15 bp, Homo sapiens
cgctccggaaaatgt

SEQ ID NO: 1368019 - DNA, 15 bp, Homo sapiens
gcgctccggaaaatg

SEQ ID NO: 1368020 - DNA, 15 bp, Homo sapiens
ggcgctccggaaaat

SEQ ID NO: 1368021 - DNA, 15 bp, Homo sapiens
tggcgctccggaaaa

SEQ ID NO: 1368022 - DNA, 15 bp, Homo sapiens
ctggcgctccggaaa

SEQ ID NO: 1368023 - DNA, 15 bp, Homo sapiens
actggcgctccggaa

SEQ ID NO: 1368024 - DNA, 15 bp, Homo sapiens
cactggcgctccgga

SEQ ID NO: 1368025 - DNA, 15 bp, Homo sapiens
gcactggcgctccgg

SEQ ID NO: 1368026 - DNA, 15 bp, Homo sapiens
agcactggcgctccg

SEQ ID NO: 1368027 - DNA, 15 bp, Homo sapiens
cagcactggcgctcc

SEQ ID NO: 1368028 - DNA, 15 bp, Homo sapiens
ccagcactggcgctc

SEQ ID NO: 1368029 - DNA, 15 bp, Homo sapiens
tccagcactggcgct

SEQ ID NO: 1368030 - DNA, 15 bp, Homo sapiens
ttccagcactggcgc

SEQ ID NO: 1368031 - DNA, 15 bp, Homo sapiens
cttccagcactggcg

SEQ ID NO: 1368032 - DNA, 15 bp, Homo sapiens
tcttccagcactggc

SEQ ID NO: 1368033 - DNA, 15 bp, Homo sapiens
ttcttccagcactgg

SEQ ID NO: 1368034 - DNA, 15 bp, Homo sapiens
tttcttccagcactg

SEQ ID NO: 1368035 - DNA, 15 bp, Homo sapiens
ttttcttccagcact

SEQ ID NO: 1368036 - DNA, 15 bp, Homo sapiens
cttttcttccagcac

SEQ ID NO: 1368037 - DNA, 15 bp, Homo sapiens
gcttttcttccagca

SEQ ID NO: 1368038 - DNA, 15 bp, Homo sapiens
ggcttttcttccagc

SEQ ID NO: 1368039 - DNA, 15 bp, Homo sapiens
gggcttttcttccag

SEQ ID NO: 1368040 - DNA, 15 bp, Homo sapiens
ggggcttttcttcca

SEQ ID NO: 1368041 - DNA, 15 bp, Homo sapiens
aggggcttttcttcc

SEQ ID NO: 1368042 - DNA, 15 bp, Homo sapiens
taggggcttttcttc

SEQ ID NO: 1368043 - DNA, 15 bp, Homo sapiens
ctaggggcttttctt

SEQ ID NO: 1368044 - DNA, 15 bp, Homo sapiens
cctaggggcttttct

SEQ ID NO: 1368045 - DNA, 15 bp, Homo sapiens
ccctaggggcttttc

SEQ ID NO: 1368046 - DNA, 15 bp, Homo sapiens
gccctaggggctttt

SEQ ID NO: 1368047 - DNA, 15 bp, Homo sapiens
tgccctaggggcttt

SEQ ID NO: 1368048 - DNA, 15 bp, Homo sapiens
ctgccctaggggctt

SEQ ID NO: 1368049 - DNA, 15 bp, Homo sapiens
actgccctaggggct

SEQ ID NO: 1368050 - DNA, 15 bp, Homo sapiens
cactgccctaggggc

SEQ ID NO: 1368051 - DNA, 15 bp, Homo sapiens
gcactgccctagggg

SEQ ID NO: 1368052 - DNA, 15 bp, Homo sapiens
cgcactgccctaggg

SEQ ID NO: 1368053 - DNA, 15 bp, Homo sapiens
acgcactgccctagg

SEQ ID NO: 1368054 - DNA, 15 bp, Homo sapiens
aacgcactgccctag

SEQ ID NO: 1368055 - DNA, 15 bp, Homo sapiens
aaacgcactgcccta

SEQ ID NO: 1368056 - DNA, 15 bp, Homo sapiens
caaacgcactgccct

SEQ ID NO: 1368057 - DNA, 15 bp, Homo sapiens
acaaacgcactgccc

SEQ ID NO: 1368058 - DNA, 15 bp, Homo sapiens
cacaaacgcactgcc

SEQ ID NO: 1368059 - DNA, 15 bp, Homo sapiens
gcacaaacgcactgc

SEQ ID NO: 1368060 - DNA, 15 bp, Homo sapiens
tgcacaaacgcactg

SEQ ID NO: 1368061 - DNA, 15 bp, Homo sapiens
ctgcacaaacgcact

SEQ ID NO: 1368062 - DNA, 15 bp, Homo sapiens
gctgcacaaacgcac

SEQ ID NO: 1368063 - DNA, 15 bp, Homo sapiens
ggctgcacaaacgca

SEQ ID NO: 1368064 - DNA, 15 bp, Homo sapiens
tggctgcacaaacgc

SEQ ID NO: 1368065 - DNA, 15 bp, Homo sapiens
atggctgcacaaacg

SEQ ID NO: 1368066 - DNA, 15 bp, Homo sapiens
gatggctgcacaaac

SEQ ID NO: 1368067 - DNA, 15 bp, Homo sapiens
ggatggctgcacaaa

SEQ ID NO: 1368068 - DNA, 15 bp, Homo sapiens
gggatggctgcacaa

SEQ ID NO: 1368069 - DNA, 15 bp, Homo sapiens
agggatggctgcaca

SEQ ID NO: 1368070 - DNA, 15 bp, Homo sapiens
gagggatggctgcac

SEQ ID NO: 1368071 - DNA, 15 bp, Homo sapiens
ggagggatggctgca

SEQ ID NO: 1368072 - DNA, 15 bp, Homo sapiens
tggagggatggctgc

SEQ ID NO: 1368073 - DNA, 15 bp, Homo sapiens
ctggagggatggctg

SEQ ID NO: 1368074 - DNA, 15 bp, Homo sapiens
cctggagggatggct

SEQ ID NO: 1368075 - DNA, 15 bp, Homo sapiens
ccctggagggatggc

SEQ ID NO: 1368076 - DNA, 15 bp, Homo sapiens
cccctggagggatgg

SEQ ID NO: 1368077 - DNA, 15 bp, Homo sapiens
ccccctggagggatg

SEQ ID NO: 1368078 - DNA, 15 bp, Homo sapiens
tccccctggagggat

SEQ ID NO: 1368079 - DNA, 15 bp, Homo sapiens
ctccccctggaggga

SEQ ID NO: 1368080 - DNA, 15 bp, Homo sapiens
actccccctggaggg

SEQ ID NO: 1368081 - DNA, 15 bp, Homo sapiens
cactccccctggagg

SEQ ID NO: 1368082 - DNA, 15 bp, Homo sapiens
acactccccctggag

SEQ ID NO: 1368083 - DNA, 15 bp, Homo sapiens
cacactccccctgga

SEQ ID NO: 1368084 - DNA, 15 bp, Homo sapiens
gcacactccccctgg

SEQ ID NO: 1368085 - DNA, 15 bp, Homo sapiens
tgcacactccccctg

SEQ ID NO: 1368086 - DNA, 15 bp, Homo sapiens
atgcacactccccct

SEQ ID NO: 1368087 - DNA, 15 bp, Homo sapiens
tatgcacactccccc

SEQ ID NO: 1368088 - DNA, 15 bp, Homo sapiens
gtatgcacactcccc

SEQ ID NO: 1368089 - DNA, 15 bp, Homo sapiens
ggtatgcacactccc

SEQ ID NO: 1368090 - DNA, 15 bp, Homo sapiens
gggtatgcacactcc

SEQ ID NO: 1368091 - DNA, 15 bp, Homo sapiens
agggtatgcacactc

SEQ ID NO: 1368092 - DNA, 15 bp, Homo sapiens
gagggtatgcacact

SEQ ID NO: 1368093 - DNA, 15 bp, Homo sapiens
ggagggtatgcacac

SEQ ID NO: 1368094 - DNA, 15 bp, Homo sapiens
aggagggtatgcaca

SEQ ID NO: 1368095 - DNA, 15 bp, Homo sapiens
caggagggtatgcac

SEQ ID NO: 1368096 - DNA, 15 bp, Homo sapiens
ccaggagggtatgca

SEQ ID NO: 1368097 - DNA, 15 bp, Homo sapiens
cccaggagggtatgc

SEQ ID NO: 1368098 - DNA, 15 bp, Homo sapiens
tcccaggagggtatg

SEQ ID NO: 1368099 - DNA, 15 bp, Homo sapiens
ctcccaggagggtat

SEQ ID NO: 1368100 - DNA, 15 bp, Homo sapiens
tctcccaggagggta

SEQ ID NO: 1368101 - DNA, 15 bp, Homo sapiens
ctctcccaggagggt

SEQ ID NO: 1368102 - DNA, 15 bp, Homo sapiens
actctcccaggaggg

SEQ ID NO: 1368103 - DNA, 15 bp, Homo sapiens
cactctcccaggagg

SEQ ID NO: 1368104 - DNA, 15 bp, Homo sapiens
acactctcccaggag

SEQ ID NO: 1368105 - DNA, 15 bp, Homo sapiens
cacactctcccagga

SEQ ID NO: 1368106 - DNA, 15 bp, Homo sapiens
gcacactctcccagg

SEQ ID NO: 1368107 - DNA, 15 bp, Homo sapiens
tgcacactctcccag

SEQ ID NO: 1368108 - DNA, 15 bp, Homo sapiens
atgcacactctccca

SEQ ID NO: 1368109 - DNA, 15 bp, Homo sapiens
tatgcacactctccc

SEQ ID NO: 1368110 - DNA, 15 bp, Homo sapiens
gtatgcacactctcc

SEQ ID NO: 1368111 - DNA, 15 bp, Homo sapiens
ggtatgcacactctc

SEQ ID NO: 1368112 - DNA, 15 bp, Homo sapiens
gggtatgcacactct

SEQ ID NO: 1368113 - DNA, 15 bp, Homo sapiens
ttcccaggagggtat

SEQ ID NO: 1368114 - DNA, 15 bp, Homo sapiens
cttcccaggagggta

SEQ ID NO: 1368115 - DNA, 15 bp, Homo sapiens
tcttcccaggagggt

SEQ ID NO: 1368116 - DNA, 15 bp, Homo sapiens
ctcttcccaggaggg

SEQ ID NO: 1368117 - DNA, 15 bp, Homo sapiens
tctcttcccaggagg

SEQ ID NO: 1368118 - DNA, 15 bp, Homo sapiens
gtctcttcccaggag

SEQ ID NO: 1368119 - DNA, 15 bp, Homo sapiens
agtctcttcccagga

SEQ ID NO: 1368120 - DNA, 15 bp, Homo sapiens
cagtctcttcccagg

SEQ ID NO: 1368121 - DNA, 15 bp, Homo sapiens
ccagtctcttcccag

SEQ ID NO: 1368122 - DNA, 15 bp, Homo sapiens
cccagtctcttccca

SEQ ID NO: 1368123 - DNA, 15 bp, Homo sapiens
ccccagtctcttccc

SEQ ID NO: 1368124 - DNA, 15 bp, Homo sapiens
cccccagtctcttcc

SEQ ID NO: 1368125 - DNA, 15 bp, Homo sapiens
gcccccagtctcttc

SEQ ID NO: 1368126 - DNA, 15 bp, Homo sapiens
agcccccagtctctt

SEQ ID NO: 1368127 - DNA, 15 bp, Homo sapiens
cagcccccagtctct

SEQ ID NO: 1368128 - DNA, 15 bp, Homo sapiens
tcagcccccagtctc

SEQ ID NO: 1368129 - DNA, 15 bp, Homo sapiens
ttcagcccccagtct

SEQ ID NO: 1368130 - DNA, 15 bp, Homo sapiens
tttcagcccccagtc

SEQ ID NO: 1368131 - DNA, 15 bp, Homo sapiens
ctttcagcccccagt

SEQ ID NO: 1368132 - DNA, 15 bp, Homo sapiens
actttcagcccccag

SEQ ID NO: 1368133 - DNA, 15 bp, Homo sapiens
tactttcagccccca

SEQ ID NO: 1368134 - DNA, 15 bp, Homo sapiens
ctactttcagccccc

SEQ ID NO: 1368135 - DNA, 15 bp, Homo sapiens
tctactttcagcccc

SEQ ID NO: 1368136 - DNA, 15 bp, Homo sapiens
ctctactttcagccc

SEQ ID NO: 1368137 - DNA, 15 bp, Homo sapiens
tctctactttcagcc

SEQ ID NO: 1368138 - DNA, 15 bp, Homo sapiens
ttctctactttcagc

SEQ ID NO: 1368139 - DNA, 15 bp, Homo sapiens
cttctctactttcag

SEQ ID NO: 1368140 - DNA, 15 bp, Homo sapiens
ccttctctactttca

SEQ ID NO: 1368141 - DNA, 15 bp, Homo sapiens
cccttctctactttc

SEQ ID NO: 1368142 - DNA, 15 bp, Homo sapiens
tcccttctctacttt

SEQ ID NO: 1368143 - DNA, 15 bp, Homo sapiens
gtcccttctctactt

SEQ ID NO: 1368144 - DNA, 15 bp, Homo sapiens
tgtcccttctctact

SEQ ID NO: 1368145 - DNA, 15 bp, Homo sapiens
ttgtcccttctctac

SEQ ID NO: 1368146 - DNA, 15 bp, Homo sapiens
cttgtcccttctcta

SEQ ID NO: 1368147 - DNA, 15 bp, Homo sapiens
ccttgtcccttctct

SEQ ID NO: 1368148 - DNA, 15 bp, Homo sapiens
cccttgtcccttctc

SEQ ID NO: 1368149 - DNA, 15 bp, Homo sapiens
ccccttgtcccttct

SEQ ID NO: 1368150 - DNA, 15 bp, Homo sapiens
tccccttgtcccttc

SEQ ID NO: 1368151 - DNA, 15 bp, Homo sapiens
ttccccttgtccctt

SEQ ID NO: 1368152 - DNA, 15 bp, Homo sapiens
tttccccttgtccct

SEQ ID NO: 1368153 - DNA, 15 bp, Homo sapiens
gtttccccttgtccc

SEQ ID NO: 1368154 - DNA, 15 bp, Homo sapiens
agtttccccttgtcc

SEQ ID NO: 1368155 - DNA, 15 bp, Homo sapiens
gagtttccccttgtc

SEQ ID NO: 1368156 - DNA, 15 bp, Homo sapiens
tgagtttccccttgt

SEQ ID NO: 1368157 - DNA, 15 bp, Homo sapiens
ttgagtttccccttg

SEQ ID NO: 1368158 - DNA, 15 bp, Homo sapiens
tttgagtttcccctt

SEQ ID NO: 1368159 - DNA, 15 bp, Homo sapiens
ctttgagtttcccct

SEQ ID NO: 1368160 - DNA, 15 bp, Homo sapiens
cctttgagtttcccc

SEQ ID NO: 1368161 - DNA, 15 bp, Homo sapiens
ccctttgagtttccc

SEQ ID NO: 1368162 - DNA, 15 bp, Homo sapiens
gccctttgagtttcc

SEQ ID NO: 1368163 - DNA, 15 bp, Homo sapiens
tgccctttgagtttc

SEQ ID NO: 1368164 - DNA, 15 bp, Homo sapiens
atgccctttgagttt

SEQ ID NO: 1368165 - DNA, 15 bp, Homo sapiens
aatgccctttgagtt

SEQ ID NO: 1368166 - DNA, 15 bp, Homo sapiens
gaatgccctttgagt

SEQ ID NO: 1368167 - DNA, 15 bp, Homo sapiens
ggaatgccctttgag

SEQ ID NO: 1368168 - DNA, 15 bp, Homo sapiens
gggaatgccctttga

SEQ ID NO: 1368169 - DNA, 15 bp, Homo sapiens
agggaatgccctttg

SEQ ID NO: 1368170 - DNA, 15 bp, Homo sapiens
cagggaatgcccttt

SEQ ID NO: 1368171 - DNA, 15 bp, Homo sapiens
ccagggaatgccctt

SEQ ID NO: 1368172 - DNA, 15 bp, Homo sapiens
cccagggaatgccct

SEQ ID NO: 1368173 - DNA, 15 bp, Homo sapiens
ccccagggaatgccc

SEQ ID NO: 1368174 - DNA, 15 bp, Homo sapiens
cccccagggaatgcc

SEQ ID NO: 1368175 - DNA, 15 bp, Homo sapiens
acccccagggaatgc

SEQ ID NO: 1368176 - DNA, 15 bp, Homo sapiens
aacccccagggaatg

SEQ ID NO: 1368177 - DNA, 15 bp, Homo sapiens
gaacccccagggaat

SEQ ID NO: 1368178 - DNA, 15 bp, Homo sapiens
ggaacccccagggaa

SEQ ID NO: 1368179 - DNA, 15 bp, Homo sapiens
gggaacccccaggga

SEQ ID NO: 1368180 - DNA, 15 bp, Homo sapiens
agggaacccccaggg

SEQ ID NO: 1368181 - DNA, 15 bp, Homo sapiens
aagggaacccccagg

SEQ ID NO: 1368182 - DNA, 15 bp, Homo sapiens
gaagggaacccccag

SEQ ID NO: 1368183 - DNA, 15 bp, Homo sapiens
ggaagggaaccccca

SEQ ID NO: 1368184 - DNA, 15 bp, Homo sapiens
tggaagggaaccccc

SEQ ID NO: 1368185 - DNA, 15 bp, Homo sapiens
ctggaagggaacccc

SEQ ID NO: 1368186 - DNA, 15 bp, Homo sapiens
cctggaagggaaccc

SEQ ID NO: 1368187 - DNA, 15 bp, Homo sapiens
acctggaagggaacc

SEQ ID NO: 1368188 - DNA, 15 bp, Homo sapiens
aacctggaagggaac

SEQ ID NO: 1368189 - DNA, 15 bp, Homo sapiens
aaacctggaagggaa

SEQ ID NO: 1368190 - DNA, 15 bp, Homo sapiens
aaaacctggaaggga

SEQ ID NO: 1368191 - DNA, 15 bp, Homo sapiens
gaaaacctggaaggg

SEQ ID NO: 1368192 - DNA, 15 bp, Homo sapiens
agaaaacctggaagg

SEQ ID NO: 1368193 - DNA, 15 bp, Homo sapiens
gagaaaacctggaag

SEQ ID NO: 1368194 - DNA, 15 bp, Homo sapiens
ggagaaaacctggaa

SEQ ID NO: 1368195 - DNA, 15 bp, Homo sapiens
aggagaaaacctgga

SEQ ID NO: 1368196 - DNA, 15 bp, Homo sapiens
caggagaaaacctgg

SEQ ID NO: 1368197 - DNA, 15 bp, Homo sapiens
acaggagaaaacctg

SEQ ID NO: 1368198 - DNA, 15 bp, Homo sapiens
cacaggagaaaacct

SEQ ID NO: 1368199 - DNA, 15 bp, Homo sapiens
acacaggagaaaacc

SEQ ID NO: 1368200 - DNA, 15 bp, Homo sapiens
aacacaggagaaaac

SEQ ID NO: 1368201 - DNA, 15 bp, Homo sapiens
caacacaggagaaaa

SEQ ID NO: 1368202 - DNA, 15 bp, Homo sapiens
gcaacacaggagaaa

SEQ ID NO: 1368203 - DNA, 15 bp, Homo sapiens
ggcaacacaggagaa

SEQ ID NO: 1368204 - DNA, 15 bp, Homo sapiens
gggcaacacaggaga

SEQ ID NO: 1368205 - DNA, 15 bp, Homo sapiens
ggggcaacacaggag

SEQ ID NO: 1368206 - DNA, 15 bp, Homo sapiens
cggggcaacacagga

SEQ ID NO: 1368207 - DNA, 15 bp, Homo sapiens
tcggggcaacacagg

SEQ ID NO: 1368208 - DNA, 15 bp, Homo sapiens
ttcggggcaacacag

SEQ ID NO: 1368209 - DNA, 15 bp, Homo sapiens
cttcggggcaacaca

SEQ ID NO: 1368210 - DNA, 15 bp, Homo sapiens
ccttcggggcaacac

SEQ ID NO: 1368211 - DNA, 15 bp, Homo sapiens
cccttcggggcaaca

SEQ ID NO: 1368212 - DNA, 15 bp, Homo sapiens
ccccttcggggcaac

SEQ ID NO: 1368213 - DNA, 15 bp, Homo sapiens
accccttcggggcaa

SEQ ID NO: 1368214 - DNA, 15 bp, Homo sapiens
gaccccttcggggca

SEQ ID NO: 1368215 - DNA, 15 bp, Homo sapiens
agaccccttcggggc

SEQ ID NO: 1368216 - DNA, 15 bp, Homo sapiens
tagaccccttcgggg

SEQ ID NO: 1368217 - DNA, 15 bp, Homo sapiens
gtagaccccttcggg

SEQ ID NO: 1368218 - DNA, 15 bp, Homo sapiens
cgtagaccccttcgg

SEQ ID NO: 1368219 - DNA, 15 bp, Homo sapiens
ccgtagaccccttcg

SEQ ID NO: 1368220 - DNA, 15 bp, Homo sapiens
cccgtagaccccttc

SEQ ID NO: 1368221 - DNA, 15 bp, Homo sapiens
gcccgtagacccctt

SEQ ID NO: 1368222 - DNA, 15 bp, Homo sapiens
tgcccgtagacccct

SEQ ID NO: 1368223 - DNA, 15 bp, Homo sapiens
gtgcccgtagacccc

SEQ ID NO: 1368224 - DNA, 15 bp, Homo sapiens
agtgcccgtagaccc

SEQ ID NO: 1368225 - DNA, 15 bp, Homo sapiens
cagtgcccgtagacc

SEQ ID NO: 1368226 - DNA, 15 bp, Homo sapiens
gcagtgcccgtagac

SEQ ID NO: 1368227 - DNA, 15 bp, Homo sapiens
agcagtgcccgtaga

SEQ ID NO: 1368228 - DNA, 15 bp, Homo sapiens
gagcagtgcccgtag

SEQ ID NO: 1368229 - DNA, 15 bp, Homo sapiens
ggagcagtgcccgta

SEQ ID NO: 1368230 - DNA, 15 bp, Homo sapiens
aggagcagtgcccgt

SEQ ID NO: 1368231 - DNA, 15 bp, Homo sapiens
caggagcagtgcccg

SEQ ID NO: 1368232 - DNA, 15 bp, Homo sapiens
gcaggagcagtgccc

SEQ ID NO: 1368233 - DNA, 15 bp, Homo sapiens
tgcaggagcagtgcc

SEQ ID NO: 1368234 - DNA, 15 bp, Homo sapiens
ctgcaggagcagtgc

SEQ ID NO: 1368235 - DNA, 15 bp, Homo sapiens
actgcaggagcagtg

SEQ ID NO: 1368236 - DNA, 15 bp, Homo sapiens
gactgcaggagcagt

SEQ ID NO: 1368237 - DNA, 15 bp, Homo sapiens
agactgcaggagcag

SEQ ID NO: 1368238 - DNA, 15 bp, Homo sapiens
cagactgcaggagca

SEQ ID NO: 1368239 - DNA, 15 bp, Homo sapiens
gcagactgcaggagc

SEQ ID NO: 1368240 - DNA, 15 bp, Homo sapiens
cgcagactgcaggag

SEQ ID NO: 1368241 - DNA, 15 bp, Homo sapiens
ccgcagactgcagga

SEQ ID NO: 1368242 - DNA, 15 bp, Homo sapiens
accgcagactgcagg

SEQ ID NO: 1368243 - DNA, 15 bp, Homo sapiens
aaccgcagactgcag

SEQ ID NO: 1368244 - DNA, 15 bp, Homo sapiens
taaccgcagactgca

SEQ ID NO: 1368245 - DNA, 15 bp, Homo sapiens
ttaaccgcagactgc

SEQ ID NO: 1368246 - DNA, 15 bp, Homo sapiens
tttaaccgcagactg

SEQ ID NO: 1368247 - DNA, 15 bp, Homo sapiens
ttttaaccgcagact

SEQ ID NO: 1368248 - DNA, 15 bp, Homo sapiens
tttttaaccgcagac

SEQ ID NO: 1368249 - DNA, 15 bp, Homo sapiens
atttttaaccgcaga

SEQ ID NO: 1368250 - DNA, 15 bp, Homo sapiens
aatttttaaccgcag

SEQ ID NO: 1368251 - DNA, 15 bp, Homo sapiens
taatttttaaccgca

SEQ ID NO: 1368252 - DNA, 15 bp, Homo sapiens
ctaatttttaaccgc

SEQ ID NO: 1368253 - DNA, 15 bp, Homo sapiens
tctaatttttaaccg

SEQ ID NO: 1368254 - DNA, 15 bp, Homo sapiens
gtctaatttttaacc

SEQ ID NO: 1368255 - DNA, 15 bp, Homo sapiens
cgtctaatttttaac

SEQ ID NO: 1368256 - DNA, 15 bp, Homo sapiens
gcgtctaatttttaa

SEQ ID NO: 1368257 - DNA, 15 bp, Homo sapiens
ggcgtctaattttta

SEQ ID NO: 1368258 - DNA, 15 bp, Homo sapiens
aggcgtctaattttt

SEQ ID NO: 1368259 - DNA, 15 bp, Homo sapiens
aaggcgtctaatttt

SEQ ID NO: 1368260 - DNA, 15 bp, Homo sapiens
gaaggcgtctaattt

SEQ ID NO: 1368261 - DNA, 15 bp, Homo sapiens
tgaaggcgtctaatt

SEQ ID NO: 1368262 - DNA, 15 bp, Homo sapiens
atgaaggcgtctaat

SEQ ID NO: 1368263 - DNA, 15 bp, Homo sapiens
aatgaaggcgtctaa

SEQ ID NO: 1368264 - DNA, 15 bp, Homo sapiens
aaatgaaggcgtcta

SEQ ID NO: 1368265 - DNA, 15 bp, Homo sapiens
gaaatgaaggcgtct

SEQ ID NO: 1368266 - DNA, 15 bp, Homo sapiens
ggaaatgaaggcgtc

SEQ ID NO: 1368267 - DNA, 15 bp, Homo sapiens
cggaaatgaaggcgt

SEQ ID NO: 1368268 - DNA, 15 bp, Homo sapiens
ccggaaatgaaggcg

SEQ ID NO: 1368269 - DNA, 15 bp, Homo sapiens
tccggaaatgaaggc

SEQ ID NO: 1368270 - DNA, 15 bp, Homo sapiens
atccggaaatgaagg

SEQ ID NO: 1368271 - DNA, 15 bp, Homo sapiens
gatccggaaatgaag

SEQ ID NO: 1368272 - DNA, 15 bp, Homo sapiens
tgatccggaaatgaa

SEQ ID NO: 1368273 - DNA, 15 bp, Homo sapiens
ttgatccggaaatga

SEQ ID NO: 1368274 - DNA, 15 bp, Homo sapiens
gttgatccggaaatg

SEQ ID NO: 1368275 - DNA, 15 bp, Homo sapiens
tgttgatccggaaat

SEQ ID NO: 1368276 - DNA, 15 bp, Homo sapiens
ttgttgatccggaaa

SEQ ID NO: 1368277 - DNA, 15 bp, Homo sapiens
cttgttgatccggaa

SEQ ID NO: 1368278 - DNA, 15 bp, Homo sapiens
ccttgttgatccgga

SEQ ID NO: 1368279 - DNA, 15 bp, Homo sapiens
cccttgttgatccgg

SEQ ID NO: 1368280 - DNA, 15 bp, Homo sapiens
ccccttgttgatccg

SEQ ID NO: 1368281 - DNA, 15 bp, Homo sapiens
cccccttgttgatcc

SEQ ID NO: 1368282 - DNA, 15 bp, Homo sapiens
acccccttgttgatc

SEQ ID NO: 1368283 - DNA, 15 bp, Homo sapiens
cacccccttgttgat

SEQ ID NO: 1368284 - DNA, 15 bp, Homo sapiens
gcacccccttgttga

SEQ ID NO: 1368285 - DNA, 15 bp, Homo sapiens
tgcacccccttgttg

SEQ ID NO: 1368286 - DNA, 15 bp, Homo sapiens
ctgcacccccttgtt

SEQ ID NO: 1368287 - DNA, 15 bp, Homo sapiens
tctgcacccccttgt

SEQ ID NO: 1368288 - DNA, 15 bp, Homo sapiens
ctctgcacccccttg

SEQ ID NO: 1368289 - DNA, 15 bp, Homo sapiens
cctctgcaccccctt

SEQ ID NO: 1368290 - DNA, 15 bp, Homo sapiens
ccctctgcaccccct

SEQ ID NO: 1368291 - DNA, 15 bp, Homo sapiens
tccctctgcaccccc

SEQ ID NO: 1368292 - DNA, 15 bp, Homo sapiens
ctccctctgcacccc

SEQ ID NO: 1368293 - DNA, 15 bp, Homo sapiens
cctccctctgcaccc

SEQ ID NO: 1368294 - DNA, 15 bp, Homo sapiens
acctccctctgcacc

SEQ ID NO: 1368295 - DNA, 15 bp, Homo sapiens
cacctccctctgcac

SEQ ID NO: 1368296 - DNA, 15 bp, Homo sapiens
ccacctccctctgca

SEQ ID NO: 1368297 - DNA, 15 bp, Homo sapiens
cccacctccctctgc

SEQ ID NO: 1368298 - DNA, 15 bp, Homo sapiens
ccccacctccctctg

SEQ ID NO: 1368299 - DNA, 15 bp, Homo sapiens
cccccacctccctct

SEQ ID NO: 1368300 - DNA, 15 bp, Homo sapiens
ccccccacctccctc

SEQ ID NO: 1368301 - DNA, 15 bp, Homo sapiens
cccccccacctccct

SEQ ID NO: 1368302 - DNA, 15 bp, Homo sapiens
acccccccacctccc

SEQ ID NO: 1368303 - DNA, 15 bp, Homo sapiens
gacccccccacctcc

SEQ ID NO: 1368304 - DNA, 15 bp, Homo sapiens
tgacccccccacctc

SEQ ID NO: 1368305 - DNA, 15 bp, Homo sapiens
gtgacccccccacct

SEQ ID NO: 1368306 - DNA, 15 bp, Homo sapiens
cgtgacccccccacc

SEQ ID NO: 1368307 - DNA, 15 bp, Homo sapiens
gcgtgacccccccac

SEQ ID NO: 1368308 - DNA, 15 bp, Homo sapiens
ggcgtgaccccccca

SEQ ID NO: 1368309 - DNA, 15 bp, Homo sapiens
aggcgtgaccccccc

SEQ ID NO: 1368310 - DNA, 15 bp, Homo sapiens
gaggcgtgacccccc

SEQ ID NO: 1368311 - DNA, 15 bp, Homo sapiens
ggaggcgtgaccccc

SEQ ID NO: 1368312 - DNA, 15 bp, Homo sapiens
gggaggcgtgacccc

SEQ ID NO: 1368313 - DNA, 15 bp, Homo sapiens
ggggaggcgtgaccc

SEQ ID NO: 1368314 - DNA, 15 bp, Homo sapiens
cggggaggcgtgacc

SEQ ID NO: 1368315 - DNA, 15 bp, Homo sapiens
gcggggaggcgtgac

SEQ ID NO: 1368316 - DNA, 15 bp, Homo sapiens
tgcggggaggcgtga

SEQ ID NO: 1368317 - DNA, 15 bp, Homo sapiens
gtgcggggaggcgtg

SEQ ID NO: 1368318 - DNA, 15 bp, Homo sapiens
ggtgcggggaggcgt

SEQ ID NO: 1368319 - DNA, 15 bp, Homo sapiens
gggtgcggggaggcg

SEQ ID NO: 1368320 - DNA, 15 bp, Homo sapiens
cgggtgcggggaggc

SEQ ID NO: 1368321 - DNA, 15 bp, Homo sapiens
ccgggtgcggggagg

SEQ ID NO: 1368322 - DNA, 15 bp, Homo sapiens
tccgggtgcggggag

SEQ ID NO: 1368323 - DNA, 15 bp, Homo sapiens
ttccgggtgcgggga

SEQ ID NO: 1368324 - DNA, 15 bp, Homo sapiens
tttccgggtgcgggg

SEQ ID NO: 1368325 - DNA, 15 bp, Homo sapiens
ctttccgggtgcggg

SEQ ID NO: 1368326 - DNA, 15 bp, Homo sapiens
tctttccgggtgcgg

SEQ ID NO: 1368327 - DNA, 15 bp, Homo sapiens
gtctttccgggtgcg

SEQ ID NO: 1368328 - DNA, 15 bp, Homo sapiens
cgtctttccgggtgc

SEQ ID NO: 1368329 - DNA, 15 bp, Homo sapiens
acgtctttccgggtg

SEQ ID NO: 1368330 - DNA, 15 bp, Homo sapiens
aacgtctttccgggt

SEQ ID NO: 1368331 - DNA, 15 bp, Homo sapiens
caacgtctttccggg

SEQ ID NO: 1368332 - DNA, 15 bp, Homo sapiens
tcaacgtctttccgg

SEQ ID NO: 1368333 - DNA, 15 bp, Homo sapiens
ctcaacgtctttccg

SEQ ID NO: 1368334 - DNA, 15 bp, Homo sapiens
cctcaacgtctttcc

SEQ ID NO: 1368335 - DNA, 15 bp, Homo sapiens
acctcaacgtctttc

SEQ ID NO: 1368336 - DNA, 15 bp, Homo sapiens
cacctcaacgtcttt

SEQ ID NO: 1368337 - DNA, 15 bp, Homo sapiens
acacctcaacgtctt

SEQ ID NO: 1368338 - DNA, 15 bp, Homo sapiens
cacacctcaacgtct

SEQ ID NO: 1368339 - DNA, 15 bp, Homo sapiens
acacacctcaacgtc

SEQ ID NO: 1368340 - DNA, 15 bp, Homo sapiens
cacacacctcaacgt

SEQ ID NO: 1368341 - DNA, 15 bp, Homo sapiens
ccacacacctcaacg

SEQ ID NO: 1368342 - DNA, 15 bp, Homo sapiens
gccacacacctcaac

SEQ ID NO: 1368343 - DNA, 15 bp, Homo sapiens
ggccacacacctcaa

SEQ ID NO: 1368344 - DNA, 15 bp, Homo sapiens
cggccacacacctca

SEQ ID NO: 1368345 - DNA, 15 bp, Homo sapiens
tcggccacacacctc

SEQ ID NO: 1368346 - DNA, 15 bp, Homo sapiens
ctcggccacacacct

SEQ ID NO: 1368347 - DNA, 15 bp, Homo sapiens
actcggccacacacc

SEQ ID NO: 1368348 - DNA, 15 bp, Homo sapiens
aactcggccacacac

SEQ ID NO: 1368349 - DNA, 15 bp, Homo sapiens
caactcggccacaca

SEQ ID NO: 1368350 - DNA, 15 bp, Homo sapiens
ccaactcggccacac

SEQ ID NO: 1368351 - DNA, 15 bp, Homo sapiens
tccaactcggccaca

SEQ ID NO: 1368352 - DNA, 15 bp, Homo sapiens
atccaactcggccac

SEQ ID NO: 1368353 - DNA, 15 bp, Homo sapiens
aatccaactcggcca

SEQ ID NO: 1368354 - DNA, 15 bp, Homo sapiens
aaatccaactcggcc

SEQ ID NO: 1368355 - DNA, 15 bp, Homo sapiens
caaatccaactcggc

SEQ ID NO: 1368356 - DNA, 15 bp, Homo sapiens
ccaaatccaactcgg

SEQ ID NO: 1368357 - DNA, 15 bp, Homo sapiens
accaaatccaactcg

SEQ ID NO: 1368358 - DNA, 15 bp, Homo sapiens
gaccaaatccaactc

SEQ ID NO: 1368359 - DNA, 15 bp, Homo sapiens
ggaccaaatccaact

SEQ ID NO: 1368360 - DNA, 15 bp, Homo sapiens
tggaccaaatccaac

SEQ ID NO: 1368361 - DNA, 15 bp, Homo sapiens
ctggaccaaatccaa

SEQ ID NO: 1368362 - DNA, 15 bp, Homo sapiens
cctggaccaaatcca

SEQ ID NO: 1368363 - DNA, 15 bp, Homo sapiens
gcctggaccaaatcc

SEQ ID NO: 1368364 - DNA, 15 bp, Homo sapiens
ggcctggaccaaatc

SEQ ID NO: 1368365 - DNA, 15 bp, Homo sapiens
gggcctggaccaaat

SEQ ID NO: 1368366 - DNA, 15 bp, Homo sapiens
cgggcctggaccaaa

SEQ ID NO: 1368367 - DNA, 15 bp, Homo sapiens
gcgggcctggaccaa

SEQ ID NO: 1368368 - DNA, 15 bp, Homo sapiens
ggcgggcctggacca

SEQ ID NO: 1368369 - DNA, 15 bp, Homo sapiens
tggcgggcctggacc

SEQ ID NO: 1368370 - DNA, 15 bp, Homo sapiens
ttggcgggcctggac

SEQ ID NO: 1368371 - DNA, 15 bp, Homo sapiens
cttggcgggcctgga

SEQ ID NO: 1368372 - DNA, 15 bp, Homo sapiens
ccttggcgggcctgg

SEQ ID NO: 1368373 - DNA, 15 bp, Homo sapiens
tccttggcgggcctg

SEQ ID NO: 1368374 - DNA, 15 bp, Homo sapiens
ttccttggcgggcct

SEQ ID NO: 1368375 - DNA, 15 bp, Homo sapiens
cttccttggcgggcc

SEQ ID NO: 1368376 - DNA, 15 bp, Homo sapiens
ccttccttggcgggc

SEQ ID NO: 1368377 - DNA, 15 bp, Homo sapiens
gccttccttggcggg

SEQ ID NO: 1368378 - DNA, 15 bp, Homo sapiens
agccttccttggcgg

SEQ ID NO: 1368379 - DNA, 15 bp, Homo sapiens
cagccttccttggcg

SEQ ID NO: 1368380 - DNA, 15 bp, Homo sapiens
ccagccttccttggc

SEQ ID NO: 1368381 - DNA, 15 bp, Homo sapiens
cccagccttccttgg

SEQ ID NO: 1368382 - DNA, 15 bp, Homo sapiens
tcccagccttccttg

SEQ ID NO: 1368383 - DNA, 15 bp, Homo sapiens
ctcccagccttcctt

SEQ ID NO: 1368384 - DNA, 15 bp, Homo sapiens
tctcccagccttcct

SEQ ID NO: 1368385 - DNA, 15 bp, Homo sapiens
ctctcccagccttcc

SEQ ID NO: 1368386 - DNA, 15 bp, Homo sapiens
cctctcccagccttc

SEQ ID NO: 1368387 - DNA, 15 bp, Homo sapiens
gcctctcccagcctt

SEQ ID NO: 1368388 - DNA, 15 bp, Homo sapiens
cgcctctcccagcct

SEQ ID NO: 1368389 - DNA, 15 bp, Homo sapiens
acgcctctcccagcc

SEQ ID NO: 1368390 - DNA, 15 bp, Homo sapiens
cacgcctctcccagc

SEQ ID NO: 1368391 - DNA, 15 bp, Homo sapiens
gcacgcctctcccag

SEQ ID NO: 1368392 - DNA, 15 bp, Homo sapiens
agcacgcctctccca

SEQ ID NO: 1368393 - DNA, 15 bp, Homo sapiens
tagcacgcctctccc

SEQ ID NO: 1368394 - DNA, 15 bp, Homo sapiens
atagcacgcctctcc

SEQ ID NO: 1368395 - DNA, 15 bp, Homo sapiens
tatagcacgcctctc

SEQ ID NO: 1368396 - DNA, 15 bp, Homo sapiens
ttatagcacgcctct

SEQ ID NO: 1368397 - DNA, 15 bp, Homo sapiens
tttatagcacgcctc

SEQ ID NO: 1368398 - DNA, 15 bp, Homo sapiens
ctttatagcacgcct

SEQ ID NO: 1368399 - DNA, 15 bp, Homo sapiens
cctttatagcacgcc

SEQ ID NO: 1368400 - DNA, 15 bp, Homo sapiens
gcctttatagcacgc

SEQ ID NO: 1368401 - DNA, 15 bp, Homo sapiens
agcctttatagcacg

SEQ ID NO: 1368402 - DNA, 15 bp, Homo sapiens
cagcctttatagcac

SEQ ID NO: 1368403 - DNA, 15 bp, Homo sapiens
ccagcctttatagca

SEQ ID NO: 1368404 - DNA, 15 bp, Homo sapiens
tccagcctttatagc

SEQ ID NO: 1368405 - DNA, 15 bp, Homo sapiens
ttccagcctttatag

SEQ ID NO: 1368406 - DNA, 15 bp, Homo sapiens
cttccagcctttata

SEQ ID NO: 1368407 - DNA, 15 bp, Homo sapiens
ccttccagcctttat

SEQ ID NO: 1368408 - DNA, 15 bp, Homo sapiens
accttccagccttta

SEQ ID NO: 1368409 - DNA, 15 bp, Homo sapiens
gaccttccagccttt

SEQ ID NO: 1368410 - DNA, 15 bp, Homo sapiens
agaccttccagcctt

SEQ ID NO: 1368411 - DNA, 15 bp, Homo sapiens
gagaccttccagcct

SEQ ID NO: 1368412 - DNA, 15 bp, Homo sapiens
ggagaccttccagcc

SEQ ID NO: 1368413 - DNA, 15 bp, Homo sapiens
cggagaccttccagc

SEQ ID NO: 1368414 - DNA, 15 bp, Homo sapiens
acggagaccttccag

SEQ ID NO: 1368415 - DNA, 15 bp, Homo sapiens
tacggagaccttcca

SEQ ID NO: 1368416 - DNA, 15 bp, Homo sapiens
atacggagaccttcc

SEQ ID NO: 1368417 - DNA, 15 bp, Homo sapiens
aatacggagaccttc

SEQ ID NO: 1368418 - DNA, 15 bp, Homo sapiens
aaatacggagacctt

SEQ ID NO: 1368419 - DNA, 15 bp, Homo sapiens
taaatacggagacct

SEQ ID NO: 1368420 - DNA, 15 bp, Homo sapiens
gtaaatacggagacc

SEQ ID NO: 1368421 - DNA, 15 bp, Homo sapiens
agtaaatacggagac

SEQ ID NO: 1368422 - DNA, 15 bp, Homo sapiens
gagtaaatacggaga

SEQ ID NO: 1368423 - DNA, 15 bp, Homo sapiens
ggagtaaatacggag

SEQ ID NO: 1368424 - DNA, 15 bp, Homo sapiens
aggagtaaatacgga

SEQ ID NO: 1368425 - DNA, 15 bp, Homo sapiens
aaggagtaaatacgg

SEQ ID NO: 1368426 - DNA, 15 bp, Homo sapiens
aaaggagtaaatacg

SEQ ID NO: 1368427 - DNA, 15 bp, Homo sapiens
taaaggagtaaatac

SEQ ID NO: 1368428 - DNA, 15 bp, Homo sapiens
ctaaaggagtaaata

SEQ ID NO: 1368429 - DNA, 15 bp, Homo sapiens
actaaaggagtaaat

SEQ ID NO: 1368430 - DNA, 15 bp, Homo sapiens
tactaaaggagtaaa

SEQ ID NO: 1368431 - DNA, 15 bp, Homo sapiens
ttactaaaggagtaa

SEQ ID NO: 1368432 - DNA, 15 bp, Homo sapiens
tttactaaaggagta

SEQ ID NO: 1368433 - DNA, 15 bp, Homo sapiens
atttactaaaggagt

SEQ ID NO: 1368434 - DNA, 15 bp, Homo sapiens
tatttactaaaggag

SEQ ID NO: 1368435 - DNA, 15 bp, Homo sapiens
gtatttactaaagga

SEQ ID NO: 1368436 - DNA, 15 bp, Homo sapiens
cgtatttactaaagg

SEQ ID NO: 1368437 - DNA, 15 bp, Homo sapiens
ccgtatttactaaag

SEQ ID NO: 1368438 - DNA, 15 bp, Homo sapiens
tccgtatttactaaa

SEQ ID NO: 1368439 - DNA, 15 bp, Homo sapiens
ctccgtatttactaa

SEQ ID NO: 1368440 - DNA, 15 bp, Homo sapiens
tctccgtatttacta

SEQ ID NO: 1368441 - DNA, 15 bp, Homo sapiens
ttctccgtatttact

SEQ ID NO: 1368442 - DNA, 15 bp, Homo sapiens
attctccgtatttac

SEQ ID NO: 1368443 - DNA, 15 bp, Homo sapiens
gattctccgtattta

SEQ ID NO: 1368444 - DNA, 15 bp, Homo sapiens
tgattctccgtattt

SEQ ID NO: 1368445 - DNA, 15 bp, Homo sapiens
gtgattctccgtatt

SEQ ID NO: 1368446 - DNA, 15 bp, Homo sapiens
cgtgattctccgtat

SEQ ID NO: 1368447 - DNA, 15 bp, Homo sapiens
acgtgattctccgta

SEQ ID NO: 1368448 - DNA, 15 bp, Homo sapiens
gacgtgattctccgt

SEQ ID NO: 1368449 - DNA, 15 bp, Homo sapiens
cgacgtgattctccg

SEQ ID NO: 1368450 - DNA, 15 bp, Homo sapiens
tcgacgtgattctcc

SEQ ID NO: 1368451 - DNA, 15 bp, Homo sapiens
ttcgacgtgattctc

SEQ ID NO: 1368452 - DNA, 15 bp, Homo sapiens
gttcgacgtgattct

SEQ ID NO: 1368453 - DNA, 15 bp, Homo sapiens
tgttcgacgtgattc

SEQ ID NO: 1368454 - DNA, 15 bp, Homo sapiens
gtgttcgacgtgatt

SEQ ID NO: 1368455 - DNA, 15 bp, Homo sapiens
ggtgttcgacgtgat

SEQ ID NO: 1368456 - DNA, 15 bp, Homo sapiens
tggtgttcgacgtga

SEQ ID NO: 1368457 - DNA, 15 bp, Homo sapiens
ctggtgttcgacgtg

SEQ ID NO: 1368458 - DNA, 15 bp, Homo sapiens
actggtgttcgacgt

SEQ ID NO: 1368459 - DNA, 15 bp, Homo sapiens
cactggtgttcgacg

SEQ ID NO: 1368460 - DNA, 15 bp, Homo sapiens
ccactggtgttcgac

SEQ ID NO: 1368461 - DNA, 15 bp, Homo sapiens
gccactggtgttcga

SEQ ID NO: 1368462 - DNA, 15 bp, Homo sapiens
ggccactggtgttcg

SEQ ID NO: 1368463 - DNA, 15 bp, Homo sapiens
gggccactggtgttc

SEQ ID NO: 1368464 - DNA, 15 bp, Homo sapiens
tgggccactggtgtt

SEQ ID NO: 1368465 - DNA, 15 bp, Homo sapiens
ctgggccactggtgt

SEQ ID NO: 1368466 - DNA, 15 bp, Homo sapiens
tctgggccactggtg

SEQ ID NO: 1368467 - DNA, 15 bp, Homo sapiens
atctgggccactggt

SEQ ID NO: 1368468 - DNA, 15 bp, Homo sapiens
tatctgggccactgg

SEQ ID NO: 1368469 - DNA, 15 bp, Homo sapiens
gtatctgggccactg

SEQ ID NO: 1368470 - DNA, 15 bp, Homo sapiens
agtatctgggccact

SEQ ID NO: 1368471 - DNA, 15 bp, Homo sapiens
cagtatctgggccac

SEQ ID NO: 1368472 - DNA, 15 bp, Homo sapiens
acagtatctgggcca

SEQ ID NO: 1368473 - DNA, 15 bp, Homo sapiens
gacagtatctgggcc

SEQ ID NO: 1368474 - DNA, 15 bp, Homo sapiens
cgacagtatctgggc

SEQ ID NO: 1368475 - DNA, 15 bp, Homo sapiens
acgacagtatctggg

SEQ ID NO: 1368476 - DNA, 15 bp, Homo sapiens
cacgacagtatctgg

SEQ ID NO: 1368477 - DNA, 15 bp, Homo sapiens
ccacgacagtatctg

SEQ ID NO: 1368478 - DNA, 15 bp, Homo sapiens
gccacgacagtatct

SEQ ID NO: 1368479 - DNA, 15 bp, Homo sapiens
ggccacgacagtatc

SEQ ID NO: 1368480 - DNA, 15 bp, Homo sapiens
cggccacgacagtat

SEQ ID NO: 1368481 - DNA, 15 bp, Homo sapiens
gcggccacgacagta

SEQ ID NO: 1368482 - DNA, 15 bp, Homo sapiens
cgcggccacgacagt

SEQ ID NO: 1368483 - DNA, 15 bp, Homo sapiens
gcgcggccacgacag

SEQ ID NO: 1368484 - DNA, 15 bp, Homo sapiens
tgcgcggccacgaca

SEQ ID NO: 1368485 - DNA, 15 bp, Homo sapiens
gtgcgcggccacgac

SEQ ID NO: 1368486 - DNA, 15 bp, Homo sapiens
ggtgcgcggccacga

SEQ ID NO: 1368487 - DNA, 15 bp, Homo sapiens
aggtgcgcggccacg

SEQ ID NO: 1368488 - DNA, 15 bp, Homo sapiens
aaggtgcgcggccac

SEQ ID NO: 1368489 - DNA, 15 bp, Homo sapiens
aaaggtgcgcggcca

SEQ ID NO: 1368490 - DNA, 15 bp, Homo sapiens
caaaggtgcgcggcc

SEQ ID NO: 1368491 - DNA, 15 bp, Homo sapiens
ccaaaggtgcgcggc

SEQ ID NO: 1368492 - DNA, 15 bp, Homo sapiens
tccaaaggtgcgcgg

SEQ ID NO: 1368493 - DNA, 15 bp, Homo sapiens
ctccaaaggtgcgcg

SEQ ID NO: 1368494 - DNA, 15 bp, Homo sapiens
actccaaaggtgcgc

SEQ ID NO: 1368495 - DNA, 15 bp, Homo sapiens
aactccaaaggtgcg

SEQ ID NO: 1368496 - DNA, 15 bp, Homo sapiens
aaactccaaaggtgc

SEQ ID NO: 1368497 - DNA, 15 bp, Homo sapiens
aaaactccaaaggtg

SEQ ID NO: 1368498 - DNA, 15 bp, Homo sapiens
caaaactccaaaggt

SEQ ID NO: 1368499 - DNA, 15 bp, Homo sapiens
ccaaaactccaaagg

SEQ ID NO: 1368500 - DNA, 15 bp, Homo sapiens
cccaaaactccaaag

SEQ ID NO: 1368501 - DNA, 15 bp, Homo sapiens
ccccaaaactccaaa

SEQ ID NO: 1368502 - DNA, 15 bp, Homo sapiens
gccccaaaactccaa

SEQ ID NO: 1368503 - DNA, 15 bp, Homo sapiens
tgccccaaaactcca

SEQ ID NO: 1368504 - DNA, 15 bp, Homo sapiens
ttgccccaaaactcc

SEQ ID NO: 1368505 - DNA, 15 bp, Homo sapiens
tttgccccaaaactc

SEQ ID NO: 1368506 - DNA, 15 bp, Homo sapiens
ctttgccccaaaact

SEQ ID NO: 1368507 - DNA, 15 bp, Homo sapiens
tctttgccccaaaac

SEQ ID NO: 1368508 - DNA, 15 bp, Homo sapiens
ctctttgccccaaaa

SEQ ID NO: 1368509 - DNA, 15 bp, Homo sapiens
tctctttgccccaaa

SEQ ID NO: 1368510 - DNA, 15 bp, Homo sapiens
ctctctttgccccaa

SEQ ID NO: 1368511 - DNA, 15 bp, Homo sapiens
actctctttgcccca

SEQ ID NO: 1368512 - DNA, 15 bp, Homo sapiens
aactctctttgcccc

SEQ ID NO: 1368513 - DNA, 15 bp, Homo sapiens
caactctctttgccc

SEQ ID NO: 1368514 - DNA, 15 bp, Homo sapiens
ccaactctctttgcc

SEQ ID NO: 1368515 - DNA, 15 bp, Homo sapiens
tccaactctctttgc

SEQ ID NO: 1368516 - DNA, 15 bp, Homo sapiens
atccaactctctttg

SEQ ID NO: 1368517 - DNA, 15 bp, Homo sapiens
catccaactctcttt

SEQ ID NO: 1368518 - DNA, 15 bp, Homo sapiens
ccatccaactctctt

SEQ ID NO: 1368519 - DNA, 15 bp, Homo sapiens
tccatccaactctct

SEQ ID NO: 1368520 - DNA, 15 bp, Homo sapiens
ttccatccaactctc

SEQ ID NO: 1368521 - DNA, 15 bp, Homo sapiens
cttccatccaactct

SEQ ID NO: 1368522 - DNA, 15 bp, Homo sapiens
ccttccatccaactc

SEQ ID NO: 1368523 - DNA, 15 bp, Homo sapiens
gccttccatccaact

SEQ ID NO: 1368524 - DNA, 15 bp, Homo sapiens
ggccttccatccaac

SEQ ID NO: 1368525 - DNA, 15 bp, Homo sapiens
cggccttccatccaa

SEQ ID NO: 1368526 - DNA, 15 bp, Homo sapiens
tcggccttccatcca

SEQ ID NO: 1368527 - DNA, 15 bp, Homo sapiens
ttcggccttccatcc

SEQ ID NO: 1368528 - DNA, 15 bp, Homo sapiens
gttcggccttccatc

SEQ ID NO: 1368529 - DNA, 15 bp, Homo sapiens
agttcggccttccat

SEQ ID NO: 1368530 - DNA, 15 bp, Homo sapiens
cagttcggccttcca

SEQ ID NO: 1368531 - DNA, 15 bp, Homo sapiens
ccagttcggccttcc

SEQ ID NO: 1368532 - DNA, 15 bp, Homo sapiens
cccagttcggccttc

SEQ ID NO: 1368533 - DNA, 15 bp, Homo sapiens
acccagttcggcctt

SEQ ID NO: 1368534 - DNA, 15 bp, Homo sapiens
tacccagttcggcct

SEQ ID NO: 1368535 - DNA, 15 bp, Homo sapiens
atacccagttcggcc

SEQ ID NO: 1368536 - DNA, 15 bp, Homo sapiens
gatacccagttcggc

SEQ ID NO: 1368537 - DNA, 15 bp, Homo sapiens
agatacccagttcgg

SEQ ID NO: 1368538 - DNA, 15 bp, Homo sapiens
cagatacccagttcg

SEQ ID NO: 1368539 - DNA, 15 bp, Homo sapiens
acagatacccagttc

SEQ ID NO: 1368540 - DNA, 15 bp, Homo sapiens
gacagatacccagtt

SEQ ID NO: 1368541 - DNA, 15 bp, Homo sapiens
agacagatacccagt

SEQ ID NO: 1368542 - DNA, 15 bp, Homo sapiens
gagacagatacccag

SEQ ID NO: 1368543 - DNA, 15 bp, Homo sapiens
ggagacagataccca

SEQ ID NO: 1368544 - DNA, 15 bp, Homo sapiens
aggagacagataccc

SEQ ID NO: 1368545 - DNA, 15 bp, Homo sapiens
aaggagacagatacc

SEQ ID NO: 1368546 - DNA, 15 bp, Homo sapiens
aaaggagacagatac

SEQ ID NO: 1368547 - DNA, 15 bp, Homo sapiens
gaaaggagacagata

SEQ ID NO: 1368548 - DNA, 15 bp, Homo sapiens
tgaaaggagacagat

SEQ ID NO: 1368549 - DNA, 15 bp, Homo sapiens
ttgaaaggagacaga

SEQ ID NO: 1368550 - DNA, 15 bp, Homo sapiens
gttgaaaggagacag

SEQ ID NO: 1368551 - DNA, 15 bp, Homo sapiens
agttgaaaggagaca

SEQ ID NO: 1368552 - DNA, 15 bp, Homo sapiens
gagttgaaaggagac

SEQ ID NO: 1368553 - DNA, 15 bp, Homo sapiens
agagttgaaaggaga

SEQ ID NO: 1368554 - DNA, 15 bp, Homo sapiens
cagagttgaaaggag

SEQ ID NO: 1368555 - DNA, 15 bp, Homo sapiens
gcagagttgaaagga

SEQ ID NO: 1368556 - DNA, 15 bp, Homo sapiens
ggcagagttgaaagg

SEQ ID NO: 1368557 - DNA, 15 bp, Homo sapiens
tggcagagttgaaag

SEQ ID NO: 1368558 - DNA, 15 bp, Homo sapiens
ctggcagagttgaaa

SEQ ID NO: 1368559 - DNA, 15 bp, Homo sapiens
gctggcagagttgaa

SEQ ID NO: 1368560 - DNA, 15 bp, Homo sapiens
ggctggcagagttga

SEQ ID NO: 1368561 - DNA, 15 bp, Homo sapiens
gggctggcagagttg

SEQ ID NO: 1368562 - DNA, 15 bp, Homo sapiens
ggggctggcagagtt

SEQ ID NO: 1368563 - DNA, 15 bp, Homo sapiens
tggggctggcagagt

SEQ ID NO: 1368564 - DNA, 15 bp, Homo sapiens
ctggggctggcagag

SEQ ID NO: 1368565 - DNA, 15 bp, Homo sapiens
cctggggctggcaga

SEQ ID NO: 1368566 - DNA, 15 bp, Homo sapiens
ccctggggctggcag

SEQ ID NO: 1368567 - DNA, 15 bp, Homo sapiens
accctggggctggca

SEQ ID NO: 1368568 - DNA, 15 bp, Homo sapiens
caccctggggctggc

SEQ ID NO: 1368569 - DNA, 15 bp, Homo sapiens
gcaccctggggctgg

SEQ ID NO: 1368570 - DNA, 15 bp, Homo sapiens
tgcaccctggggctg

SEQ ID NO: 1368571 - DNA, 15 bp, Homo sapiens
ctgcaccctggggct

SEQ ID NO: 1368572 - DNA, 15 bp, Homo sapiens
tctgcaccctggggc

SEQ ID NO: 1368573 - DNA, 15 bp, Homo sapiens
ctctgcaccctgggg

SEQ ID NO: 1368574 - DNA, 15 bp, Homo sapiens
cctctgcaccctggg

SEQ ID NO: 1368575 - DNA, 15 bp, Homo sapiens
tcctctgcaccctgg

SEQ ID NO: 1368576 - DNA, 15 bp, Homo sapiens
ttcctctgcaccctg

SEQ ID NO: 1368577 - DNA, 15 bp, Homo sapiens
gttcctctgcaccct

SEQ ID NO: 1368578 - DNA, 15 bp, Homo sapiens
tgttcctctgcaccc

SEQ ID NO: 1368579 - DNA, 15 bp, Homo sapiens
ttgttcctctgcacc

SEQ ID NO: 1368580 - DNA, 15 bp, Homo sapiens
tttgttcctctgcac

SEQ ID NO: 1368581 - DNA, 15 bp, Homo sapiens
gtttgttcctctgca

SEQ ID NO: 1368582 - DNA, 15 bp, Homo sapiens
tgtttgttcctctgc

SEQ ID NO: 1368583 - DNA, 15 bp, Homo sapiens
ctgtttgttcctctg

SEQ ID NO: 1368584 - DNA, 15 bp, Homo sapiens
cctgtttgttcctct

SEQ ID NO: 1368585 - DNA, 15 bp, Homo sapiens
gcctgtttgttcctc

SEQ ID NO: 1368586 - DNA, 15 bp, Homo sapiens
tgcctgtttgttcct

SEQ ID NO: 1368587 - DNA, 15 bp, Homo sapiens
ctgcctgtttgttcc

SEQ ID NO: 1368588 - DNA, 15 bp, Homo sapiens
cctgcctgtttgttc

SEQ ID NO: 1368589 - DNA, 15 bp, Homo sapiens
tcctgcctgtttgtt

SEQ ID NO: 1368590 - DNA, 15 bp, Homo sapiens
ctcctgcctgtttgt

SEQ ID NO: 1368591 - DNA, 15 bp, Homo sapiens
tctcctgcctgtttg

SEQ ID NO: 1368592 - DNA, 15 bp, Homo sapiens
ttctcctgcctgttt

SEQ ID NO: 1368593 - DNA, 15 bp, Homo sapiens
cttctcctgcctgtt

SEQ ID NO: 1368594 - DNA, 15 bp, Homo sapiens
acttctcctgcctgt

SEQ ID NO: 1368595 - DNA, 15 bp, Homo sapiens
aacttctcctgcctg

SEQ ID NO: 1368596 - DNA, 15 bp, Homo sapiens
caacttctcctgcct

SEQ ID NO: 1368597 - DNA, 15 bp, Homo sapiens
ccaacttctcctgcc

SEQ ID NO: 1368598 - DNA, 15 bp, Homo sapiens
cccaacttctcctgc

SEQ ID NO: 1368599 - DNA, 15 bp, Homo sapiens
acccaacttctcctg

SEQ ID NO: 1368600 - DNA, 15 bp, Homo sapiens
cacccaacttctcct

SEQ ID NO: 1368601 - DNA, 15 bp, Homo sapiens
acacccaacttctcc

SEQ ID NO: 1368602 - DNA, 15 bp, Homo sapiens
gacacccaacttctc

SEQ ID NO: 1368603 - DNA, 15 bp, Homo sapiens
ggacacccaacttct

SEQ ID NO: 1368604 - DNA, 15 bp, Homo sapiens
gggacacccaacttc

SEQ ID NO: 1368605 - DNA, 15 bp, Homo sapiens
ggggacacccaactt

SEQ ID NO: 1368606 - DNA, 15 bp, Homo sapiens
aggggacacccaact

SEQ ID NO: 1368607 - DNA, 15 bp, Homo sapiens
taggggacacccaac

SEQ ID NO: 1368608 - DNA, 15 bp, Homo sapiens
gtaggggacacccaa

SEQ ID NO: 1368609 - DNA, 15 bp, Homo sapiens
agtaggggacaccca

SEQ ID NO: 1368610 - DNA, 15 bp, Homo sapiens
aagtaggggacaccc

SEQ ID NO: 1368611 - DNA, 15 bp, Homo sapiens
aaagtaggggacacc

SEQ ID NO: 1368612 - DNA, 15 bp, Homo sapiens
aaaagtaggggacac

SEQ ID NO: 1368613 - DNA, 15 bp, Homo sapiens
aaaaagtaggggaca

SEQ ID NO: 1368614 - DNA, 15 bp, Homo sapiens
gaaaaagtaggggac

SEQ ID NO: 1368615 - DNA, 15 bp, Homo sapiens
ggaaaaagtagggga

SEQ ID NO: 1368616 - DNA, 15 bp, Homo sapiens
aggaaaaagtagggg

SEQ ID NO: 1368617 - DNA, 15 bp, Homo sapiens
aaggaaaaagtaggg

SEQ ID NO: 1368618 - DNA, 15 bp, Homo sapiens
gaaggaaaaagtagg

SEQ ID NO: 1368619 - DNA, 15 bp, Homo sapiens
ggaaggaaaaagtag

SEQ ID NO: 1368620 - DNA, 15 bp, Homo sapiens
aggaaggaaaaagta

SEQ ID NO: 1368621 - DNA, 15 bp, Homo sapiens
aaggaaggaaaaagt

SEQ ID NO: 1368622 - DNA, 15 bp, Homo sapiens
gaaggaaggaaaaag

SEQ ID NO: 1368623 - DNA, 15 bp, Homo sapiens
ggaaggaaggaaaaa

SEQ ID NO: 1368624 - DNA, 15 bp, Homo sapiens
cggaaggaaggaaaa

SEQ ID NO: 1368625 - DNA, 15 bp, Homo sapiens
gcggaaggaaggaaa

SEQ ID NO: 1368626 - DNA, 15 bp, Homo sapiens
tgcggaaggaaggaa

SEQ ID NO: 1368627 - DNA, 15 bp, Homo sapiens
gtgcggaaggaagga

SEQ ID NO: 1368628 - DNA, 15 bp, Homo sapiens
tgtgcggaaggaagg

SEQ ID NO: 1368629 - DNA, 15 bp, Homo sapiens
ctgtgcggaaggaag

SEQ ID NO: 1368630 - DNA, 15 bp, Homo sapiens
tctgtgcggaaggaa

SEQ ID NO: 1368631 - DNA, 15 bp, Homo sapiens
atctgtgcggaagga

SEQ ID NO: 1368632 - DNA, 15 bp, Homo sapiens
tatctgtgcggaagg

SEQ ID NO: 1368633 - DNA, 15 bp, Homo sapiens
ttatctgtgcggaag

SEQ ID NO: 1368634 - DNA, 15 bp, Homo sapiens
cttatctgtgcggaa

SEQ ID NO: 1368635 - DNA, 15 bp, Homo sapiens
acttatctgtgcgga

SEQ ID NO: 1368636 - DNA, 15 bp, Homo sapiens
gacttatctgtgcgg

SEQ ID NO: 1368637 - DNA, 15 bp, Homo sapiens
agacttatctgtgcg

SEQ ID NO: 1368638 - DNA, 15 bp, Homo sapiens
cagacttatctgtgc

SEQ ID NO: 1368639 - DNA, 15 bp, Homo sapiens
acagacttatctgtg

SEQ ID NO: 1368640 - DNA, 15 bp, Homo sapiens
tacagacttatctgt

SEQ ID NO: 1368641 - DNA, 15 bp, Homo sapiens
ctacagacttatctg

SEQ ID NO: 1368642 - DNA, 15 bp, Homo sapiens
tctacagacttatct

SEQ ID NO: 1368643 - DNA, 15 bp, Homo sapiens
atctacagacttatc

SEQ ID NO: 1368644 - DNA, 15 bp, Homo sapiens
aatctacagacttat

SEQ ID NO: 1368645 - DNA, 15 bp, Homo sapiens
taatctacagactta

SEQ ID NO: 1368646 - DNA, 15 bp, Homo sapiens
ctaatctacagactt

SEQ ID NO: 1368647 - DNA, 15 bp, Homo sapiens
actaatctacagact

SEQ ID NO: 1368648 - DNA, 15 bp, Homo sapiens
cactaatctacagac

SEQ ID NO: 1368649 - DNA, 15 bp, Homo sapiens
ccactaatctacaga

SEQ ID NO: 1368650 - DNA, 15 bp, Homo sapiens
cccactaatctacag

SEQ ID NO: 1368651 - DNA, 15 bp, Homo sapiens
ccccactaatctaca

SEQ ID NO: 1368652 - DNA, 15 bp, Homo sapiens
gccccactaatctac

SEQ ID NO: 1368653 - DNA, 15 bp, Homo sapiens
ggccccactaatcta

SEQ ID NO: 1368654 - DNA, 15 bp, Homo sapiens
gggccccactaatct

SEQ ID NO: 1368655 - DNA, 15 bp, Homo sapiens
ggggccccactaatc

SEQ ID NO: 1368656 - DNA, 15 bp, Homo sapiens
cggggccccactaat

SEQ ID NO: 1368657 - DNA, 15 bp, Homo sapiens
ccggggccccactaa

SEQ ID NO: 1368658 - DNA, 15 bp, Homo sapiens
gccggggccccacta

SEQ ID NO: 1368659 - DNA, 15 bp, Homo sapiens
cgccggggccccact

SEQ ID NO: 1368660 - DNA, 15 bp, Homo sapiens
gcgccggggccccac

SEQ ID NO: 1368661 - DNA, 15 bp, Homo sapiens
ggcgccggggcccca

SEQ ID NO: 1368662 - DNA, 15 bp, Homo sapiens
aggcgccggggcccc

SEQ ID NO: 1368663 - DNA, 15 bp, Homo sapiens
gaggcgccggggccc

SEQ ID NO: 1368664 - DNA, 15 bp, Homo sapiens
tgaggcgccggggcc

SEQ ID NO: 1368665 - DNA, 15 bp, Homo sapiens
ctgaggcgccggggc

SEQ ID NO: 1368666 - DNA, 15 bp, Homo sapiens
actgaggcgccgggg

SEQ ID NO: 1368667 - DNA, 15 bp, Homo sapiens
cactgaggcgccggg

SEQ ID NO: 1368668 - DNA, 15 bp, Homo sapiens
tcactgaggcgccgg

SEQ ID NO: 1368669 - DNA, 15 bp, Homo sapiens
gtcactgaggcgccg

SEQ ID NO: 1368670 - DNA, 15 bp, Homo sapiens
cgtcactgaggcgcc

SEQ ID NO: 1368671 - DNA, 15 bp, Homo sapiens
acgtcactgaggcgc

SEQ ID NO: 1368672 - DNA, 15 bp, Homo sapiens
aacgtcactgaggcg

SEQ ID NO: 1368673 - DNA, 15 bp, Homo sapiens
caacgtcactgaggc

SEQ ID NO: 1368674 - DNA, 15 bp, Homo sapiens
acaacgtcactgagg

SEQ ID NO: 1368675 - DNA, 15 bp, Homo sapiens
gacaacgtcactgag

SEQ ID NO: 1368676 - DNA, 15 bp, Homo sapiens
cgacaacgtcactga

SEQ ID NO: 1368677 - DNA, 15 bp, Homo sapiens
gcgacaacgtcactg

SEQ ID NO: 1368678 - DNA, 15 bp, Homo sapiens
ggcgacaacgtcact

SEQ ID NO: 1368679 - DNA, 15 bp, Homo sapiens
aggcgacaacgtcac

SEQ ID NO: 1368680 - DNA, 15 bp, Homo sapiens
gaggcgacaacgtca

SEQ ID NO: 1368681 - DNA, 15 bp, Homo sapiens
agaggcgacaacgtc

SEQ ID NO: 1368682 - DNA, 15 bp, Homo sapiens
aagaggcgacaacgt

SEQ ID NO: 1368683 - DNA, 15 bp, Homo sapiens
taagaggcgacaacg

SEQ ID NO: 1368684 - DNA, 15 bp, Homo sapiens
gtaagaggcgacaac

SEQ ID NO: 1368685 - DNA, 15 bp, Homo sapiens
agtaagaggcgacaa

SEQ ID NO: 1368686 - DNA, 15 bp, Homo sapiens
cagtaagaggcgaca

SEQ ID NO: 1368687 - DNA, 15 bp, Homo sapiens
gcagtaagaggcgac

SEQ ID NO: 1368688 - DNA, 15 bp, Homo sapiens
cgcagtaagaggcga

SEQ ID NO: 1368689 - DNA, 15 bp, Homo sapiens
gcgcagtaagaggcg

SEQ ID NO: 1368690 - DNA, 15 bp, Homo sapiens
agcgcagtaagaggc

SEQ ID NO: 1368691 - DNA, 15 bp, Homo sapiens
cagcgcagtaagagg

SEQ ID NO: 1368692 - DNA, 15 bp, Homo sapiens
ccagcgcagtaagag

SEQ ID NO: 1368693 - DNA, 15 bp, Homo sapiens
cccagcgcagtaaga

SEQ ID NO: 1368694 - DNA, 15 bp, Homo sapiens
ccccagcgcagtaag

SEQ ID NO: 1368695 - DNA, 15 bp, Homo sapiens
gccccagcgcagtaa

SEQ ID NO: 1368696 - DNA, 15 bp, Homo sapiens
ggccccagcgcagta

SEQ ID NO: 1368697 - DNA, 15 bp, Homo sapiens
aggccccagcgcagt

SEQ ID NO: 1368698 - DNA, 15 bp, Homo sapiens
caggccccagcgcag

SEQ ID NO: 1368699 - DNA, 15 bp, Homo sapiens
ccaggccccagcgca

SEQ ID NO: 1368700 - DNA, 15 bp, Homo sapiens
cccaggccccagcgc

SEQ ID NO: 1368701 - DNA, 15 bp, Homo sapiens
gcccaggccccagcg

SEQ ID NO: 1368702 - DNA, 15 bp, Homo sapiens
agcccaggccccagc

SEQ ID NO: 1368703 - DNA, 15 bp, Homo sapiens
aagcccaggccccag

SEQ ID NO: 1368704 - DNA, 15 bp, Homo sapiens
gaagcccaggcccca

SEQ ID NO: 1368705 - DNA, 15 bp, Homo sapiens
agaagcccaggcccc

SEQ ID NO: 1368706 - DNA, 15 bp, Homo sapiens
gagaagcccaggccc

SEQ ID NO: 1368707 - DNA, 15 bp, Homo sapiens
cgagaagcccaggcc

SEQ ID NO: 1368708 - DNA, 15 bp, Homo sapiens
ccgagaagcccaggc

SEQ ID NO: 1368709 - DNA, 15 bp, Homo sapiens
gccgagaagcccagg

SEQ ID NO: 1368710 - DNA, 15 bp, Homo sapiens
agccgagaagcccag

SEQ ID NO: 1368711 - DNA, 15 bp, Homo sapiens
cagccgagaagccca

SEQ ID NO: 1368712 - DNA, 15 bp, Homo sapiens
tcagccgagaagccc

SEQ ID NO: 1368713 - DNA, 15 bp, Homo sapiens
ctcagccgagaagcc

SEQ ID NO: 1368714 - DNA, 15 bp, Homo sapiens
tctcagccgagaagc

SEQ ID NO: 1368715 - DNA, 15 bp, Homo sapiens
gtctcagccgagaag

SEQ ID NO: 1368716 - DNA, 15 bp, Homo sapiens
ggtctcagccgagaa

SEQ ID NO: 1368717 - DNA, 15 bp, Homo sapiens
gggtctcagccgaga

SEQ ID NO: 1368718 - DNA, 15 bp, Homo sapiens
agggtctcagccgag

SEQ ID NO: 1368719 - DNA, 15 bp, Homo sapiens
cagggtctcagccga

SEQ ID NO: 1368720 - DNA, 15 bp, Homo sapiens
tcagggtctcagccg

SEQ ID NO: 1368721 - DNA, 15 bp, Homo sapiens
ttcagggtctcagcc

SEQ ID NO: 1368722 - DNA, 15 bp, Homo sapiens
tttcagggtctcagc

SEQ ID NO: 1368723 - DNA, 15 bp, Homo sapiens
gtttcagggtctcag

SEQ ID NO: 1368724 - DNA, 15 bp, Homo sapiens
agtttcagggtctca

SEQ ID NO: 1368725 - DNA, 15 bp, Homo sapiens
gagtttcagggtctc

SEQ ID NO: 1368726 - DNA, 15 bp, Homo sapiens
ggagtttcagggtct

SEQ ID NO: 1368727 - DNA, 15 bp, Homo sapiens
aggagtttcagggtc

SEQ ID NO: 1368728 - DNA, 15 bp, Homo sapiens
aaggagtttcagggt

SEQ ID NO: 1368729 - DNA, 15 bp, Homo sapiens
aaaggagtttcaggg

SEQ ID NO: 1368730 - DNA, 15 bp, Homo sapiens
gaaaggagtttcagg

SEQ ID NO: 1368731 - DNA, 15 bp, Homo sapiens
ggaaaggagtttcag

SEQ ID NO: 1368732 - DNA, 15 bp, Homo sapiens
aggaaaggagtttca

SEQ ID NO: 1368733 - DNA, 15 bp, Homo sapiens
aaggaaaggagtttc

SEQ ID NO: 1368734 - DNA, 15 bp, Homo sapiens
aaaggaaaggagttt

SEQ ID NO: 1368735 - DNA, 15 bp, Homo sapiens
aaaaggaaaggagtt

SEQ ID NO: 1368736 - DNA, 15 bp, Homo sapiens
taaaaggaaaggagt

SEQ ID NO: 1368737 - DNA, 15 bp, Homo sapiens
ataaaaggaaaggag

SEQ ID NO: 1368738 - DNA, 15 bp, Homo sapiens
gataaaaggaaagga

SEQ ID NO: 1368739 - DNA, 15 bp, Homo sapiens
ggataaaaggaaagg

SEQ ID NO: 1368740 - DNA, 15 bp, Homo sapiens
aggataaaaggaaag

SEQ ID NO: 1368741 - DNA, 15 bp, Homo sapiens
gaggataaaaggaaa

SEQ ID NO: 1368742 - DNA, 15 bp, Homo sapiens
agaggataaaaggaa

SEQ ID NO: 1368743 - DNA, 15 bp, Homo sapiens
gagaggataaaagga

SEQ ID NO: 1368744 - DNA, 15 bp, Homo sapiens
tgagaggataaaagg

SEQ ID NO: 1368745 - DNA, 15 bp, Homo sapiens
ctgagaggataaaag

SEQ ID NO: 1368746 - DNA, 15 bp, Homo sapiens
gctgagaggataaaa

SEQ ID NO: 1368747 - DNA, 15 bp, Homo sapiens
agctgagaggataaa

SEQ ID NO: 1368748 - DNA, 15 bp, Homo sapiens
aagctgagaggataa

SEQ ID NO: 1368749 - DNA, 15 bp, Homo sapiens
aaagctgagaggata

SEQ ID NO: 1368750 - DNA, 15 bp, Homo sapiens
gaaagctgagaggat

SEQ ID NO: 1368751 - DNA, 15 bp, Homo sapiens
agaaagctgagagga

SEQ ID NO: 1368752 - DNA, 15 bp, Homo sapiens
gagaaagctgagagg

SEQ ID NO: 1368753 - DNA, 15 bp, Homo sapiens
ggagaaagctgagag

SEQ ID NO: 1368754 - DNA, 15 bp, Homo sapiens
tggagaaagctgaga

SEQ ID NO: 1368755 - DNA, 15 bp, Homo sapiens
atggagaaagctgag

SEQ ID NO: 1368756 - DNA, 15 bp, Homo sapiens
aatggagaaagctga

SEQ ID NO: 1368757 - DNA, 15 bp, Homo sapiens
gaatggagaaagctg

SEQ ID NO: 1368758 - DNA, 15 bp, Homo sapiens
ggaatggagaaagct

SEQ ID NO: 1368759 - DNA, 15 bp, Homo sapiens
aggaatggagaaagc

SEQ ID NO: 1368760 - DNA, 15 bp, Homo sapiens
aaggaatggagaaag

SEQ ID NO: 1368761 - DNA, 15 bp, Homo sapiens
gaaggaatggagaaa

SEQ ID NO: 1368762 - DNA, 15 bp, Homo sapiens
ggaaggaatggagaa

SEQ ID NO: 1368763 - DNA, 15 bp, Homo sapiens
aggaaggaatggaga

SEQ ID NO: 1368764 - DNA, 15 bp, Homo sapiens
aaggaaggaatggag

SEQ ID NO: 1368765 - DNA, 15 bp, Homo sapiens
aaaggaaggaatgga

SEQ ID NO: 1368766 - DNA, 15 bp, Homo sapiens
taaaggaaggaatgg

SEQ ID NO: 1368767 - DNA, 15 bp, Homo sapiens
gtaaaggaaggaatg

SEQ ID NO: 1368768 - DNA, 15 bp, Homo sapiens
agtaaaggaaggaat

SEQ ID NO: 1368769 - DNA, 15 bp, Homo sapiens
gagtaaaggaaggaa

SEQ ID NO: 1368770 - DNA, 15 bp, Homo sapiens
agagtaaaggaagga

SEQ ID NO: 1368771 - DNA, 15 bp, Homo sapiens
tagagtaaaggaagg

SEQ ID NO: 1368772 - DNA, 15 bp, Homo sapiens
gtagagtaaaggaag

SEQ ID NO: 1368773 - DNA, 15 bp, Homo sapiens
cgtagagtaaaggaa

SEQ ID NO: 1368774 - DNA, 15 bp, Homo sapiens
acgtagagtaaagga

SEQ ID NO: 1368775 - DNA, 15 bp, Homo sapiens
gacgtagagtaaagg

SEQ ID NO: 1368776 - DNA, 15 bp, Homo sapiens
agacgtagagtaaag

SEQ ID NO: 1368777 - DNA, 15 bp, Homo sapiens
gagacgtagagtaaa

SEQ ID NO: 1368778 - DNA, 15 bp, Homo sapiens
agagacgtagagtaa

SEQ ID NO: 1368779 - DNA, 15 bp, Homo sapiens
cagagacgtagagta

SEQ ID NO: 1368780 - DNA, 15 bp, Homo sapiens
acagagacgtagagt

SEQ ID NO: 1368781 - DNA, 15 bp, Homo sapiens
tacagagacgtagag

SEQ ID NO: 1368782 - DNA, 15 bp, Homo sapiens
gtacagagacgtaga

SEQ ID NO: 1368783 - DNA, 15 bp, Homo sapiens
tgtacagagacgtag

SEQ ID NO: 1368784 - DNA, 15 bp, Homo sapiens
gtgtacagagacgta

SEQ ID NO: 1368785 - DNA, 15 bp, Homo sapiens
tgtgtacagagacgt

SEQ ID NO: 1368786 - DNA, 15 bp, Homo sapiens
ctgtgtacagagacg

SEQ ID NO: 1368787 - DNA, 15 bp, Homo sapiens
tctgtgtacagagac

SEQ ID NO: 1368788 - DNA, 15 bp, Homo sapiens
ctctgtgtacagaga

SEQ ID NO: 1368789 - DNA, 15 bp, Homo sapiens
actctgtgtacagag

SEQ ID NO: 1368790 - DNA, 15 bp, Homo sapiens
cactctgtgtacaga

SEQ ID NO: 1368791 - DNA, 15 bp, Homo sapiens
acactctgtgtacag

SEQ ID NO: 1368792 - DNA, 15 bp, Homo sapiens
cacactctgtgtaca

SEQ ID NO: 1368793 - DNA, 15 bp, Homo sapiens
tcacactctgtgtac

SEQ ID NO: 1368794 - DNA, 15 bp, Homo sapiens
atcacactctgtgta

SEQ ID NO: 1368795 - DNA, 15 bp, Homo sapiens
catcacactctgtgt

SEQ ID NO: 1368796 - DNA, 15 bp, Homo sapiens
acatcacactctgtg

SEQ ID NO: 1368797 - DNA, 15 bp, Homo sapiens
cacatcacactctgt

SEQ ID NO: 1368798 - DNA, 15 bp, Homo sapiens
tcacatcacactctg

SEQ ID NO: 1368799 - DNA, 15 bp, Homo sapiens
ctcacatcacactct

SEQ ID NO: 1368800 - DNA, 15 bp, Homo sapiens
cctcacatcacactc

SEQ ID NO: 1368801 - DNA, 15 bp, Homo sapiens
ccctcacatcacact

SEQ ID NO: 1368802 - DNA, 15 bp, Homo sapiens
accctcacatcacac

SEQ ID NO: 1368803 - DNA, 15 bp, Homo sapiens
aaccctcacatcaca

SEQ ID NO: 1368804 - DNA, 15 bp, Homo sapiens
gaaccctcacatcac

SEQ ID NO: 1368805 - DNA, 15 bp, Homo sapiens
tgaaccctcacatca

SEQ ID NO: 1368806 - DNA, 15 bp, Homo sapiens
gtgaaccctcacatc

SEQ ID NO: 1368807 - DNA, 15 bp, Homo sapiens
ggtgaaccctcacat

SEQ ID NO: 1368808 - DNA, 15 bp, Homo sapiens
gggtgaaccctcaca

SEQ ID NO: 1368809 - DNA, 15 bp, Homo sapiens
ggggtgaaccctcac

SEQ ID NO: 1368810 - DNA, 15 bp, Homo sapiens
cggggtgaaccctca

SEQ ID NO: 1368811 - DNA, 15 bp, Homo sapiens
ccggggtgaaccctc

SEQ ID NO: 1368812 - DNA, 15 bp, Homo sapiens
cccggggtgaaccct

SEQ ID NO: 1368813 - DNA, 15 bp, Homo sapiens
gcccggggtgaaccc

SEQ ID NO: 1368814 - DNA, 15 bp, Homo sapiens
cgcccggggtgaacc

SEQ ID NO: 1368815 - DNA, 15 bp, Homo sapiens
gcgcccggggtgaac

SEQ ID NO: 1368816 - DNA, 15 bp, Homo sapiens
ggcgcccggggtgaa

SEQ ID NO: 1368817 - DNA, 15 bp, Homo sapiens
gggcgcccggggtga

SEQ ID NO: 1368818 - DNA, 15 bp, Homo sapiens
cgggcgcccggggtg

SEQ ID NO: 1368819 - DNA, 15 bp, Homo sapiens
gcgggcgcccggggt

SEQ ID NO: 1368820 - DNA, 15 bp, Homo sapiens
tgcgggcgcccgggg

SEQ ID NO: 1368821 - DNA, 15 bp, Homo sapiens
ctgcgggcgcccggg

SEQ ID NO: 1368822 - DNA, 15 bp, Homo sapiens
tctgcgggcgcccgg

SEQ ID NO: 1368823 - DNA, 15 bp, Homo sapiens
atctgcgggcgcccg

SEQ ID NO: 1368824 - DNA, 15 bp, Homo sapiens
gatctgcgggcgccc

SEQ ID NO: 1368825 - DNA, 15 bp, Homo sapiens
ggatctgcgggcgcc

SEQ ID NO: 1368826 - DNA, 15 bp, Homo sapiens
gggatctgcgggcgc

SEQ ID NO: 1368827 - DNA, 15 bp, Homo sapiens
ggggatctgcgggcg

SEQ ID NO: 1368828 - DNA, 15 bp, Homo sapiens
gggggatctgcgggc

SEQ ID NO: 1368829 - DNA, 15 bp, Homo sapiens
tgggggatctgcggg

SEQ ID NO: 1368830 - DNA, 15 bp, Homo sapiens
gtgggggatctgcgg

SEQ ID NO: 1368831 - DNA, 15 bp, Homo sapiens
cgtgggggatctgcg

SEQ ID NO: 1368832 - DNA, 15 bp, Homo sapiens
acgtgggggatctgc

SEQ ID NO: 1368833 - DNA, 15 bp, Homo sapiens
aacgtgggggatctg

SEQ ID NO: 1368834 - DNA, 15 bp, Homo sapiens
gaacgtgggggatct

SEQ ID NO: 1368835 - DNA, 15 bp, Homo sapiens
ggaacgtgggggatc

SEQ ID NO: 1368836 - DNA, 15 bp, Homo sapiens
gggaacgtgggggat

SEQ ID NO: 1368837 - DNA, 15 bp, Homo sapiens
ggggaacgtggggga

SEQ ID NO: 1368838 - DNA, 15 bp, Homo sapiens
tggggaacgtggggg

SEQ ID NO: 1368839 - DNA, 15 bp, Homo sapiens
ctggggaacgtgggg

SEQ ID NO: 1368840 - DNA, 15 bp, Homo sapiens
gctggggaacgtggg

SEQ ID NO: 1368841 - DNA, 15 bp, Homo sapiens
tgctggggaacgtgg

SEQ ID NO: 1368842 - DNA, 15 bp, Homo sapiens
gtgctggggaacgtg

SEQ ID NO: 1368843 - DNA, 15 bp, Homo sapiens
cgtgctggggaacgt

SEQ ID NO: 1368844 - DNA, 15 bp, Homo sapiens
gcgtgctggggaacg

SEQ ID NO: 1368845 - DNA, 15 bp, Homo sapiens
agcgtgctggggaac

SEQ ID NO: 1368846 - DNA, 15 bp, Homo sapiens
aagcgtgctggggaa

SEQ ID NO: 1368847 - DNA, 15 bp, Homo sapiens
caagcgtgctgggga

SEQ ID NO: 1368848 - DNA, 15 bp, Homo sapiens
ccaagcgtgctgggg

SEQ ID NO: 1368849 - DNA, 15 bp, Homo sapiens
cccaagcgtgctggg

SEQ ID NO: 1368850 - DNA, 15 bp, Homo sapiens
tcccaagcgtgctgg

SEQ ID NO: 1368851 - DNA, 15 bp, Homo sapiens
atcccaagcgtgctg

SEQ ID NO: 1368852 - DNA, 15 bp, Homo sapiens
catcccaagcgtgct

SEQ ID NO: 1368853 - DNA, 15 bp, Homo sapiens
gcatcccaagcgtgc

SEQ ID NO: 1368854 - DNA, 15 bp, Homo sapiens
tgcatcccaagcgtg

SEQ ID NO: 1368855 - DNA, 15 bp, Homo sapiens
atgcatcccaagcgt

SEQ ID NO: 1368856 - DNA, 15 bp, Homo sapiens
gatgcatcccaagcg

SEQ ID NO: 1368857 - DNA, 15 bp, Homo sapiens
agatgcatcccaagc

SEQ ID NO: 1368858 - DNA, 15 bp, Homo sapiens
gagatgcatcccaag

SEQ ID NO: 1368859 - DNA, 15 bp, Homo sapiens
ggagatgcatcccaa

SEQ ID NO: 1368860 - DNA, 15 bp, Homo sapiens
gggagatgcatccca

SEQ ID NO: 1368861 - DNA, 15 bp, Homo sapiens
cgggagatgcatccc

SEQ ID NO: 1368862 - DNA, 15 bp, Homo sapiens
tcgggagatgcatcc

SEQ ID NO: 1368863 - DNA, 15 bp, Homo sapiens
ctcgggagatgcatc

SEQ ID NO: 1368864 - DNA, 15 bp, Homo sapiens
actcgggagatgcat

SEQ ID NO: 1368865 - DNA, 15 bp, Homo sapiens
cactcgggagatgca

SEQ ID NO: 1368866 - DNA, 15 bp, Homo sapiens
gcactcgggagatgc

SEQ ID NO: 1368867 - DNA, 15 bp, Homo sapiens
cgcactcgggagatg

SEQ ID NO: 1368868 - DNA, 15 bp, Homo sapiens
gcgcactcgggagat

SEQ ID NO: 1368869 - DNA, 15 bp, Homo sapiens
agcgcactcgggaga

SEQ ID NO: 1368870 - DNA, 15 bp, Homo sapiens
tagcgcactcgggag

SEQ ID NO: 1368871 - DNA, 15 bp, Homo sapiens
ctagcgcactcggga

SEQ ID NO: 1368872 - DNA, 15 bp, Homo sapiens
cctagcgcactcggg

SEQ ID NO: 1368873 - DNA, 15 bp, Homo sapiens
tcctagcgcactcgg

SEQ ID NO: 1368874 - DNA, 15 bp, Homo sapiens
ttcctagcgcactcg

SEQ ID NO: 1368875 - DNA, 15 bp, Homo sapiens
attcctagcgcactc

SEQ ID NO: 1368876 - DNA, 15 bp, Homo sapiens
cattcctagcgcact

SEQ ID NO: 1368877 - DNA, 15 bp, Homo sapiens
ccattcctagcgcac

SEQ ID NO: 1368878 - DNA, 15 bp, Homo sapiens
cccattcctagcgca

SEQ ID NO: 1368879 - DNA, 15 bp, Homo sapiens
gcccattcctagcgc

SEQ ID NO: 1368880 - DNA, 15 bp, Homo sapiens
tgcccattcctagcg

SEQ ID NO: 1368881 - DNA, 15 bp, Homo sapiens
ctgcccattcctagc

SEQ ID NO: 1368882 - DNA, 15 bp, Homo sapiens
gctgcccattcctag

SEQ ID NO: 1368883 - DNA, 15 bp, Homo sapiens
ggctgcccattccta

SEQ ID NO: 1368884 - DNA, 15 bp, Homo sapiens
gggctgcccattcct

SEQ ID NO: 1368885 - DNA, 15 bp, Homo sapiens
ggggctgcccattcc

SEQ ID NO: 1368886 - DNA, 15 bp, Homo sapiens
cggggctgcccattc

SEQ ID NO: 1368887 - DNA, 15 bp, Homo sapiens
acggggctgcccatt

SEQ ID NO: 1368888 - DNA, 15 bp, Homo sapiens
cacggggctgcccat

SEQ ID NO: 1368889 - DNA, 15 bp, Homo sapiens
acacggggctgccca

SEQ ID NO: 1368890 - DNA, 15 bp, Homo sapiens
gacacggggctgccc

SEQ ID NO: 1368891 - DNA, 15 bp, Homo sapiens
ggacacggggctgcc

SEQ ID NO: 1368892 - DNA, 15 bp, Homo sapiens
gggacacggggctgc

SEQ ID NO: 1368893 - DNA, 15 bp, Homo sapiens
ggggacacggggctg

SEQ ID NO: 1368894 - DNA, 15 bp, Homo sapiens
gggggacacggggct

SEQ ID NO: 1368895 - DNA, 15 bp, Homo sapiens
cgggggacacggggc

SEQ ID NO: 1368896 - DNA, 15 bp, Homo sapiens
gcgggggacacgggg

SEQ ID NO: 1368897 - DNA, 15 bp, Homo sapiens
cgcgggggacacggg

SEQ ID NO: 1368898 - DNA, 15 bp, Homo sapiens
gcgcgggggacacgg

SEQ ID NO: 1368899 - DNA, 15 bp, Homo sapiens
cgcgcgggggacacg

SEQ ID NO: 1368900 - DNA, 15 bp, Homo sapiens
tcgcgcgggggacac

SEQ ID NO: 1368901 - DNA, 15 bp, Homo sapiens
ctcgcgcgggggaca

SEQ ID NO: 1368902 - DNA, 15 bp, Homo sapiens
actcgcgcgggggac

SEQ ID NO: 1368903 - DNA, 15 bp, Homo sapiens
cactcgcgcggggga

SEQ ID NO: 1368904 - DNA, 15 bp, Homo sapiens
gcactcgcgcggggg

SEQ ID NO: 1368905 - DNA, 15 bp, Homo sapiens
ggcactcgcgcgggg

SEQ ID NO: 1368906 - DNA, 15 bp, Homo sapiens
cggcactcgcgcggg

SEQ ID NO: 1368907 - DNA, 15 bp, Homo sapiens
tcggcactcgcgcgg

SEQ ID NO: 1368908 - DNA, 15 bp, Homo sapiens
ctcggcactcgcgcg

SEQ ID NO: 1368909 - DNA, 15 bp, Homo sapiens
gctcggcactcgcgc

SEQ ID NO: 1368910 - DNA, 15 bp, Homo sapiens
cgctcggcactcgcg

SEQ ID NO: 1368911 - DNA, 15 bp, Homo sapiens
ccgctcggcactcgc

SEQ ID NO: 1368912 - DNA, 15 bp, Homo sapiens
tccgctcggcactcg

SEQ ID NO: 1368913 - DNA, 15 bp, Homo sapiens
gtccgctcggcactc

SEQ ID NO: 1368914 - DNA, 15 bp, Homo sapiens
ggtccgctcggcact

SEQ ID NO: 1368915 - DNA, 15 bp, Homo sapiens
cggtccgctcggcac

SEQ ID NO: 1368916 - DNA, 15 bp, Homo sapiens
ccggtccgctcggca

SEQ ID NO: 1368917 - DNA, 15 bp, Homo sapiens
gccggtccgctcggc

SEQ ID NO: 1368918 - DNA, 15 bp, Homo sapiens
cgccggtccgctcgg

SEQ ID NO: 1368919 - DNA, 15 bp, Homo sapiens
ccgccggtccgctcg

SEQ ID NO: 1368920 - DNA, 15 bp, Homo sapiens
cccgccggtccgctc

SEQ ID NO: 1368921 - DNA, 15 bp, Homo sapiens
ccccgccggtccgct

SEQ ID NO: 1368922 - DNA, 15 bp, Homo sapiens
cccccgccggtccgc

SEQ ID NO: 1368923 - DNA, 15 bp, Homo sapiens
gcccccgccggtccg

SEQ ID NO: 1368924 - DNA, 15 bp, Homo sapiens
tgcccccgccggtcc

SEQ ID NO: 1368925 - DNA, 15 bp, Homo sapiens
ctgcccccgccggtc

SEQ ID NO: 1368926 - DNA, 15 bp, Homo sapiens
tctgcccccgccggt

SEQ ID NO: 1368927 - DNA, 15 bp, Homo sapiens
ctctgcccccgccgg

SEQ ID NO: 1368928 - DNA, 15 bp, Homo sapiens
cctctgcccccgccg

SEQ ID NO: 1368929 - DNA, 15 bp, Homo sapiens
acctctgcccccgcc

SEQ ID NO: 1368930 - DNA, 15 bp, Homo sapiens
tcacctctgcccccg

SEQ ID NO: 1368931 - DNA, 15 bp, Homo sapiens
ttcacctctgccccc

SEQ ID NO: 1368932 - DNA, 15 bp, Homo sapiens
attcacctctgcccc

SEQ ID NO: 1368933 - DNA, 15 bp, Homo sapiens
aattcacctctgccc

SEQ ID NO: 1368934 - DNA, 15 bp, Homo sapiens
caattcacctctgcc

SEQ ID NO: 1368935 - DNA, 15 bp, Homo sapiens
gcaattcacctctgc

SEQ ID NO: 1368936 - DNA, 15 bp, Homo sapiens
tgcaattcacctctg

SEQ ID NO: 1368937 - DNA, 15 bp, Homo sapiens
gtgcaattcacctct

SEQ ID NO: 1368938 - DNA, 15 bp, Homo sapiens
cgtgcaattcacctc

SEQ ID NO: 1368939 - DNA, 15 bp, Homo sapiens
gcgtgcaattcacct

SEQ ID NO: 1368940 - DNA, 15 bp, Homo sapiens
ggcgtgcaattcacc

SEQ ID NO: 1368941 - DNA, 15 bp, Homo sapiens
aggcgtgcaattcac

SEQ ID NO: 1368942 - DNA, 15 bp, Homo sapiens
caggcgtgcaattca

SEQ ID NO: 1368943 - DNA, 15 bp, Homo sapiens
ccaggcgtgcaattc

SEQ ID NO: 1368944 - DNA, 15 bp, Homo sapiens
cccaggcgtgcaatt

SEQ ID NO: 1368945 - DNA, 15 bp, Homo sapiens
ccccaggcgtgcaat

SEQ ID NO: 1368946 - DNA, 15 bp, Homo sapiens
cccccaggcgtgcaa

SEQ ID NO: 1368947 - DNA, 15 bp, Homo sapiens
ccccccaggcgtgca

SEQ ID NO: 1368948 - DNA, 15 bp, Homo sapiens
gccccccaggcgtgc

SEQ ID NO: 1368949 - DNA, 15 bp, Homo sapiens
cgccccccaggcgtg

SEQ ID NO: 1368950 - DNA, 15 bp, Homo sapiens
ccgccccccaggcgt

SEQ ID NO: 1368951 - DNA, 15 bp, Homo sapiens
cccgccccccaggcg

SEQ ID NO: 1368952 - DNA, 15 bp, Homo sapiens
gcccgccccccaggc

SEQ ID NO: 1368953 - DNA, 15 bp, Homo sapiens
ggcccgccccccagg

SEQ ID NO: 1368954 - DNA, 15 bp, Homo sapiens
cggcccgccccccag

SEQ ID NO: 1368955 - DNA, 15 bp, Homo sapiens
ccggcccgcccccca

SEQ ID NO: 1368956 - DNA, 15 bp, Homo sapiens
cccggcccgcccccc

SEQ ID NO: 1368957 - DNA, 15 bp, Homo sapiens
ccccggcccgccccc

SEQ ID NO: 1368958 - DNA, 15 bp, Homo sapiens
gccccggcccgcccc

SEQ ID NO: 1368959 - DNA, 15 bp, Homo sapiens
cgccccggcccgccc

SEQ ID NO: 1368960 - DNA, 15 bp, Homo sapiens
ccgccccggcccgcc

SEQ ID NO: 1368961 - DNA, 15 bp, Homo sapiens
cccgccccggcccgc

SEQ ID NO: 1368962 - DNA, 15 bp, Homo sapiens
ccccgccccggcccg

SEQ ID NO: 1368963 - DNA, 15 bp, Homo sapiens
tccccgccccggccc

SEQ ID NO: 1368964 - DNA, 15 bp, Homo sapiens
ctccccgccccggcc

SEQ ID NO: 1368965 - DNA, 15 bp, Homo sapiens
gctccccgccccggc

SEQ ID NO: 1368966 - DNA, 15 bp, Homo sapiens
ggctccccgccccgg

SEQ ID NO: 1368967 - DNA, 15 bp, Homo sapiens
cggctccccgccccg

SEQ ID NO: 1368968 - DNA, 15 bp, Homo sapiens
tcggctccccgcccc

SEQ ID NO: 1368969 - DNA, 15 bp, Homo sapiens
ctcggctccccgccc

SEQ ID NO: 1368970 - DNA, 15 bp, Homo sapiens
cctcggctccccgcc

SEQ ID NO: 1368971 - DNA, 15 bp, Homo sapiens
acctcggctccccgc

SEQ ID NO: 1368972 - DNA, 15 bp, Homo sapiens
aacctcggctccccg

SEQ ID NO: 1368973 - DNA, 15 bp, Homo sapiens
caacctcggctcccc

SEQ ID NO: 1368974 - DNA, 15 bp, Homo sapiens
gcaacctcggctccc

SEQ ID NO: 1368975 - DNA, 15 bp, Homo sapiens
agcaacctcggctcc

SEQ ID NO: 1368976 - DNA, 15 bp, Homo sapiens
cagcaacctcggctc

SEQ ID NO: 1368977 - DNA, 15 bp, Homo sapiens
ccagcaacctcggct

SEQ ID NO: 1368978 - DNA, 15 bp, Homo sapiens
cccagcaacctcggc

SEQ ID NO: 1368979 - DNA, 15 bp, Homo sapiens
tcccagcaacctcgg

SEQ ID NO: 1368980 - DNA, 15 bp, Homo sapiens
ctcccagcaacctcg

SEQ ID NO: 1368981 - DNA, 15 bp, Homo sapiens
gctcccagcaacctc

SEQ ID NO: 1368982 - DNA, 15 bp, Homo sapiens
agctcccagcaacct

SEQ ID NO: 1368983 - DNA, 15 bp, Homo sapiens
cagctcccagcaacc

SEQ ID NO: 1368984 - DNA, 15 bp, Homo sapiens
ccagctcccagcaac

SEQ ID NO: 1368985 - DNA, 15 bp, Homo sapiens
cccagctcccagcaa

SEQ ID NO: 1368986 - DNA, 15 bp, Homo sapiens
acccagctcccagca

SEQ ID NO: 1368987 - DNA, 15 bp, Homo sapiens
gacccagctcccagc

SEQ ID NO: 1368988 - DNA, 15 bp, Homo sapiens
agacccagctcccag

SEQ ID NO: 1368989 - DNA, 15 bp, Homo sapiens
cagacccagctccca

SEQ ID NO: 1368990 - DNA, 15 bp, Homo sapiens
ccagacccagctccc

SEQ ID NO: 1368991 - DNA, 15 bp, Homo sapiens
tccagacccagctcc

SEQ ID NO: 1368992 - DNA, 15 bp, Homo sapiens
ctccagacccagctc

SEQ ID NO: 1368993 - DNA, 15 bp, Homo sapiens
actccagacccagct

SEQ ID NO: 1368994 - DNA, 15 bp, Homo sapiens
gactccagacccagc

SEQ ID NO: 1368995 - DNA, 15 bp, Homo sapiens
ggactccagacccag

SEQ ID NO: 1368996 - DNA, 15 bp, Homo sapiens
cggactccagaccca

SEQ ID NO: 1368997 - DNA, 15 bp, Homo sapiens
tcggactccagaccc

SEQ ID NO: 1368998 - DNA, 15 bp, Homo sapiens
ctcggactccagacc

SEQ ID NO: 1368999 - DNA, 15 bp, Homo sapiens
cctcggactccagac

SEQ ID NO: 1369000 - DNA, 15 bp, Homo sapiens
tcctcggactccaga

SEQ ID NO: 1369001 - DNA, 15 bp, Homo sapiens
gtcctcggactccag

SEQ ID NO: 1369002 - DNA, 15 bp, Homo sapiens
cgtcctcggactcca

SEQ ID NO: 1369003 - DNA, 15 bp, Homo sapiens
ccgtcctcggactcc

SEQ ID NO: 1369004 - DNA, 15 bp, Homo sapiens
cccgtcctcggactc

SEQ ID NO: 1369005 - DNA, 15 bp, Homo sapiens
ccccgtcctcggact

SEQ ID NO: 1369006 - DNA, 15 bp, Homo sapiens
tccccgtcctcggac

SEQ ID NO: 1369007 - DNA, 15 bp, Homo sapiens
ctccccgtcctcgga

SEQ ID NO: 1369008 - DNA, 15 bp, Homo sapiens
cctccccgtcctcgg

SEQ ID NO: 1369009 - DNA, 15 bp, Homo sapiens
ccctccccgtcctcg

SEQ ID NO: 1369010 - DNA, 15 bp, Homo sapiens
cccctccccgtcctc

SEQ ID NO: 1369011 - DNA, 15 bp, Homo sapiens
ccccctccccgtcct

SEQ ID NO: 1369012 - DNA, 15 bp, Homo sapiens
gccccctccccgtcc

SEQ ID NO: 1369013 - DNA, 15 bp, Homo sapiens
tgccccctccccgtc

SEQ ID NO: 1369014 - DNA, 15 bp, Homo sapiens
atgccccctccccgt

SEQ ID NO: 1369015 - DNA, 15 bp, Homo sapiens
catgccccctccccg

SEQ ID NO: 1369016 - DNA, 15 bp, Homo sapiens
ccatgccccctcccc

SEQ ID NO: 1369017 - DNA, 15 bp, Homo sapiens
accatgccccctccc

SEQ ID NO: 1369018 - DNA, 15 bp, Homo sapiens
gaccatgccccctcc

SEQ ID NO: 1369019 - DNA, 15 bp, Homo sapiens
cgaccatgccccctc

SEQ ID NO: 1369020 - DNA, 15 bp, Homo sapiens
gcgaccatgccccct

SEQ ID NO: 1369021 - DNA, 15 bp, Homo sapiens
ggcgaccatgccccc

SEQ ID NO: 1369022 - DNA, 15 bp, Homo sapiens
gggcgaccatgcccc

SEQ ID NO: 1369023 - DNA, 15 bp, Homo sapiens
ggggcgaccatgccc

SEQ ID NO: 1369024 - DNA, 15 bp, Homo sapiens
gggggcgaccatgcc

SEQ ID NO: 1369025 - DNA, 15 bp, Homo sapiens
ggggggcgaccatgc

SEQ ID NO: 1369026 - DNA, 15 bp, Homo sapiens
cggggggcgaccatg

SEQ ID NO: 1369027 - DNA, 15 bp, Homo sapiens
gcggggggcgaccat

SEQ ID NO: 1369028 - DNA, 15 bp, Homo sapiens
ggcggggggcgacca

SEQ ID NO: 1369029 - DNA, 15 bp, Homo sapiens
gggcggggggcgacc

SEQ ID NO: 1369030 - DNA, 15 bp, Homo sapiens
agggcggggggcgac

SEQ ID NO: 1369031 - DNA, 15 bp, Homo sapiens
cagggcggggggcga

SEQ ID NO: 1369032 - DNA, 15 bp, Homo sapiens
acagggcggggggcg

SEQ ID NO: 1369033 - DNA, 15 bp, Homo sapiens
cacagggcggggggc

SEQ ID NO: 1369034 - DNA, 15 bp, Homo sapiens
tcacagggcgggggg

SEQ ID NO: 1369035 - DNA, 15 bp, Homo sapiens
ttcacagggcggggg

SEQ ID NO: 1369036 - DNA, 15 bp, Homo sapiens
gttcacagggcgggg

SEQ ID NO: 1369037 - DNA, 15 bp, Homo sapiens
agttcacagggcggg

SEQ ID NO: 1369038 - DNA, 15 bp, Homo sapiens
cagttcacagggcgg

SEQ ID NO: 1369039 - DNA, 15 bp, Homo sapiens
acagttcacagggcg

SEQ ID NO: 1369040 - DNA, 15 bp, Homo sapiens
cacagttcacagggc

SEQ ID NO: 1369041 - DNA, 15 bp, Homo sapiens
tcacagttcacaggg

SEQ ID NO: 1369042 - DNA, 15 bp, Homo sapiens
ttcacagttcacagg

SEQ ID NO: 1369043 - DNA, 15 bp, Homo sapiens
cttcacagttcacag

SEQ ID NO: 1369044 - DNA, 15 bp, Homo sapiens
acttcacagttcaca

SEQ ID NO: 1369045 - DNA, 15 bp, Homo sapiens
cacttcacagttcac

SEQ ID NO: 1369046 - DNA, 15 bp, Homo sapiens
gcacttcacagttca

SEQ ID NO: 1369047 - DNA, 15 bp, Homo sapiens
cgcacttcacagttc

SEQ ID NO: 1369048 - DNA, 15 bp, Homo sapiens
gcgcacttcacagtt

SEQ ID NO: 1369049 - DNA, 15 bp, Homo sapiens
cgcgcacttcacagt

SEQ ID NO: 1369050 - DNA, 15 bp, Homo sapiens
ccgcgcacttcacag

SEQ ID NO: 1369051 - DNA, 15 bp, Homo sapiens
gccgcgcacttcaca

SEQ ID NO: 1369052 - DNA, 15 bp, Homo sapiens
agccgcgcacttcac

SEQ ID NO: 1369053 - DNA, 15 bp, Homo sapiens
gagccgcgcacttca

SEQ ID NO: 1369054 - DNA, 15 bp, Homo sapiens
ggagccgcgcacttc

SEQ ID NO: 1369055 - DNA, 15 bp, Homo sapiens
cggagccgcgcactt

SEQ ID NO: 1369056 - DNA, 15 bp, Homo sapiens
ccggagccgcgcact

SEQ ID NO: 1369057 - DNA, 15 bp, Homo sapiens
gccggagccgcgcac

SEQ ID NO: 1369058 - DNA, 15 bp, Homo sapiens
ggccggagccgcgca

SEQ ID NO: 1369059 - DNA, 15 bp, Homo sapiens
cggccggagccgcgc

SEQ ID NO: 1369060 - DNA, 15 bp, Homo sapiens
tcggccggagccgcg

SEQ ID NO: 1369061 - DNA, 15 bp, Homo sapiens
ctcggccggagccgc

SEQ ID NO: 1369062 - DNA, 15 bp, Homo sapiens
gctcggccggagccg

SEQ ID NO: 1369063 - DNA, 15 bp, Homo sapiens
ggctcggccggagcc

SEQ ID NO: 1369064 - DNA, 15 bp, Homo sapiens
cggctcggccggagc

SEQ ID NO: 1369065 - DNA, 15 bp, Homo sapiens
ccggctcggccggag

SEQ ID NO: 1369066 - DNA, 15 bp, Homo sapiens
accggctcggccgga

SEQ ID NO: 1369067 - DNA, 15 bp, Homo sapiens
caccggctcggccgg

SEQ ID NO: 1369068 - DNA, 15 bp, Homo sapiens
ccaccggctcggccg

SEQ ID NO: 1369069 - DNA, 15 bp, Homo sapiens
accaccggctcggcc

SEQ ID NO: 1369070 - DNA, 15 bp, Homo sapiens
aaccaccggctcggc

SEQ ID NO: 1369071 - DNA, 15 bp, Homo sapiens
aaaccaccggctcgg

SEQ ID NO: 1369072 - DNA, 15 bp, Homo sapiens
gaaaccaccggctcg

SEQ ID NO: 1369073 - DNA, 15 bp, Homo sapiens
ggaaaccaccggctc

SEQ ID NO: 1369074 - DNA, 15 bp, Homo sapiens
tggaaaccaccggct

SEQ ID NO: 1369075 - DNA, 15 bp, Homo sapiens
ctggaaaccaccggc

SEQ ID NO: 1369076 - DNA, 15 bp, Homo sapiens
gctggaaaccaccgg

SEQ ID NO: 1369077 - DNA, 15 bp, Homo sapiens
ggctggaaaccaccg

SEQ ID NO: 1369078 - DNA, 15 bp, Homo sapiens
cggctggaaaccacc

SEQ ID NO: 1369079 - DNA, 15 bp, Homo sapiens
ccggctggaaaccac

SEQ ID NO: 1369080 - DNA, 15 bp, Homo sapiens
cccggctggaaacca

SEQ ID NO: 1369081 - DNA, 15 bp, Homo sapiens
gcccggctggaaacc

SEQ ID NO: 1369082 - DNA, 15 bp, Homo sapiens
ggcccggctggaaac

SEQ ID NO: 1369083 - DNA, 15 bp, Homo sapiens
tggcccggctggaaa

SEQ ID NO: 1369084 - DNA, 15 bp, Homo sapiens
ctggcccggctggaa

SEQ ID NO: 1369085 - DNA, 15 bp, Homo sapiens
gctggcccggctgga

SEQ ID NO: 1369086 - DNA, 15 bp, Homo sapiens
ggctggcccggctgg

SEQ ID NO: 1369087 - DNA, 15 bp, Homo sapiens
cggctggcccggctg

SEQ ID NO: 1369088 - DNA, 15 bp, Homo sapiens
tcggctggcccggct

SEQ ID NO: 1369089 - DNA, 15 bp, Homo sapiens
ctcggctggcccggc

SEQ ID NO: 1369090 - DNA, 15 bp, Homo sapiens
gctcggctggcccgg

SEQ ID NO: 1369091 - DNA, 15 bp, Homo sapiens
cgctcggctggcccg

SEQ ID NO: 1369092 - DNA, 15 bp, Homo sapiens
gcgctcggctggccc

SEQ ID NO: 1369093 - DNA, 15 bp, Homo sapiens
cgcgctcggctggcc

SEQ ID NO: 1369094 - DNA, 15 bp, Homo sapiens
ccgcgctcggctggc

SEQ ID NO: 1369095 - DNA, 15 bp, Homo sapiens
gccgcgctcggctgg

SEQ ID NO: 1369096 - DNA, 15 bp, Homo sapiens
cgccgcgctcggctg

SEQ ID NO: 1369097 - DNA, 15 bp, Homo sapiens
ccgccgcgctcggct

SEQ ID NO: 1369098 - DNA, 15 bp, Homo sapiens
gccgccgcgctcggc

SEQ ID NO: 1369099 - DNA, 15 bp, Homo sapiens
agccgccgcgctcgg

SEQ ID NO: 1369100 - DNA, 15 bp, Homo sapiens
cagccgccgcgctcg

SEQ ID NO: 1369101 - DNA, 15 bp, Homo sapiens
gcagccgccgcgctc

SEQ ID NO: 1369102 - DNA, 15 bp, Homo sapiens
cgcagccgccgcgct

SEQ ID NO: 1369103 - DNA, 15 bp, Homo sapiens
ccgcagccgccgcgc

SEQ ID NO: 1369104 - DNA, 15 bp, Homo sapiens
gccgcagccgccgcg

SEQ ID NO: 1369105 - DNA, 15 bp, Homo sapiens
ggccgcagccgccgc

SEQ ID NO: 1369106 - DNA, 15 bp, Homo sapiens
cggccgcagccgccg

SEQ ID NO: 1369107 - DNA, 15 bp, Homo sapiens
gcggccgcagccgcc

SEQ ID NO: 1369108 - DNA, 15 bp, Homo sapiens
tgcggccgcagccgc

SEQ ID NO: 1369109 - DNA, 15 bp, Homo sapiens
ctgcggccgcagccg

SEQ ID NO: 1369110 - DNA, 15 bp, Homo sapiens
tctgcggccgcagcc

SEQ ID NO: 1369111 - DNA, 15 bp, Homo sapiens
gtctgcggccgcagc

SEQ ID NO: 1369112 - DNA, 15 bp, Homo sapiens
cgtctgcggccgcag

SEQ ID NO: 1369113 - DNA, 15 bp, Homo sapiens
acgtctgcggccgca

SEQ ID NO: 1369114 - DNA, 15 bp, Homo sapiens
cacgtctgcggccgc

SEQ ID NO: 1369115 - DNA, 15 bp, Homo sapiens
ccacgtctgcggccg

SEQ ID NO: 1369116 - DNA, 15 bp, Homo sapiens
tccacgtctgcggcc

SEQ ID NO: 1369117 - DNA, 15 bp, Homo sapiens
ctccacgtctgcggc

SEQ ID NO: 1369118 - DNA, 15 bp, Homo sapiens
cctccacgtctgcgg

SEQ ID NO: 1369119 - DNA, 15 bp, Homo sapiens
tcctccacgtctgcg

SEQ ID NO: 1369120 - DNA, 15 bp, Homo sapiens
ctcctccacgtctgc

SEQ ID NO: 1369121 - DNA, 15 bp, Homo sapiens
gctcctccacgtctg

SEQ ID NO: 1369122 - DNA, 15 bp, Homo sapiens
cgctcctccacgtct

SEQ ID NO: 1369123 - DNA, 15 bp, Homo sapiens
ccgctcctccacgtc

SEQ ID NO: 1369124 - DNA, 15 bp, Homo sapiens
tccgctcctccacgt

SEQ ID NO: 1369125 - DNA, 15 bp, Homo sapiens
ctccgctcctccacg

SEQ ID NO: 1369126 - DNA, 15 bp, Homo sapiens
gctccgctcctccac

SEQ ID NO: 1369127 - DNA, 15 bp, Homo sapiens
cgctccgctcctcca

SEQ ID NO: 1369128 - DNA, 15 bp, Homo sapiens
gcgctccgctcctcc

SEQ ID NO: 1369129 - DNA, 15 bp, Homo sapiens
ggcgctccgctcctc

SEQ ID NO: 1369130 - DNA, 15 bp, Homo sapiens
cggcgctccgctcct

SEQ ID NO: 1369131 - DNA, 15 bp, Homo sapiens
tcggcgctccgctcc

SEQ ID NO: 1369132 - DNA, 15 bp, Homo sapiens
ctcggcgctccgctc

SEQ ID NO: 1369133 - DNA, 15 bp, Homo sapiens
cctcggcgctccgct

SEQ ID NO: 1369134 - DNA, 15 bp, Homo sapiens
gcctcggcgctccgc

SEQ ID NO: 1369135 - DNA, 15 bp, Homo sapiens
agcctcggcgctccg

SEQ ID NO: 1369136 - DNA, 15 bp, Homo sapiens
cagcctcggcgctcc

SEQ ID NO: 1369137 - DNA, 15 bp, Homo sapiens
ccagcctcggcgctc

SEQ ID NO: 1369138 - DNA, 15 bp, Homo sapiens
gccagcctcggcgct

SEQ ID NO: 1369139 - DNA, 15 bp, Homo sapiens
cgccagcctcggcgc

SEQ ID NO: 1369140 - DNA, 15 bp, Homo sapiens
gcgccagcctcggcg

SEQ ID NO: 1369141 - DNA, 15 bp, Homo sapiens
ggcgccagcctcggc

SEQ ID NO: 1369142 - DNA, 15 bp, Homo sapiens
tggcgccagcctcgg

SEQ ID NO: 1369143 - DNA, 15 bp, Homo sapiens
ctggcgccagcctcg

SEQ ID NO: 1369144 - DNA, 15 bp, Homo sapiens
cctggcgccagcctc

SEQ ID NO: 1369145 - DNA, 15 bp, Homo sapiens
gcctggcgccagcct

SEQ ID NO: 1369146 - DNA, 15 bp, Homo sapiens
cgcctggcgccagcc

SEQ ID NO: 1369147 - DNA, 15 bp, Homo sapiens
ccgcctggcgccagc

SEQ ID NO: 1369148 - DNA, 15 bp, Homo sapiens
gccgcctggcgccag

SEQ ID NO: 1369149 - DNA, 15 bp, Homo sapiens
ggccgcctggcgcca

SEQ ID NO: 1369150 - DNA, 15 bp, Homo sapiens
aggccgcctggcgcc

SEQ ID NO: 1369151 - DNA, 15 bp, Homo sapiens
gaggccgcctggcgc

SEQ ID NO: 1369152 - DNA, 15 bp, Homo sapiens
agaggccgcctggcg

SEQ ID NO: 1369153 - DNA, 15 bp, Homo sapiens
aagaggccgcctggc

SEQ ID NO: 1369154 - DNA, 15 bp, Homo sapiens
aaagaggccgcctgg

SEQ ID NO: 1369155 - DNA, 15 bp, Homo sapiens
aaaagaggccgcctg

SEQ ID NO: 1369156 - DNA, 15 bp, Homo sapiens
caaaagaggccgcct

SEQ ID NO: 1369157 - DNA, 15 bp, Homo sapiens
acaaaagaggccgcc

SEQ ID NO: 1369158 - DNA, 15 bp, Homo sapiens
aacaaaagaggccgc

SEQ ID NO: 1369159 - DNA, 15 bp, Homo sapiens
aaacaaaagaggccg

SEQ ID NO: 1369160 - DNA, 15 bp, Homo sapiens
taaacaaaagaggcc

SEQ ID NO: 1369161 - DNA, 15 bp, Homo sapiens
ataaacaaaagaggc

SEQ ID NO: 1369162 - DNA, 15 bp, Homo sapiens
gataaacaaaagagg

SEQ ID NO: 1369163 - DNA, 15 bp, Homo sapiens
agataaacaaaagag

SEQ ID NO: 1369164 - DNA, 15 bp, Homo sapiens
cagataaacaaaaga

SEQ ID NO: 1369165 - DNA, 15 bp, Homo sapiens
tcagataaacaaaag

SEQ ID NO: 1369166 - DNA, 15 bp, Homo sapiens
gtcagataaacaaaa

SEQ ID NO: 1369167 - DNA, 15 bp, Homo sapiens
tgtcagataaacaaa

SEQ ID NO: 1369168 - DNA, 15 bp, Homo sapiens
ctgtcagataaacaa

SEQ ID NO: 1369169 - DNA, 15 bp, Homo sapiens
gctgtcagataaaca

SEQ ID NO: 1369170 - DNA, 15 bp, Homo sapiens
agctgtcagataaac

SEQ ID NO: 1369171 - DNA, 15 bp, Homo sapiens
tagctgtcagataaa

SEQ ID NO: 1369172 - DNA, 15 bp, Homo sapiens
ttagctgtcagataa

SEQ ID NO: 1369173 - DNA, 15 bp, Homo sapiens
tttagctgtcagata

SEQ ID NO: 1369174 - DNA, 15 bp, Homo sapiens
atttagctgtcagat

SEQ ID NO: 1369175 - DNA, 15 bp, Homo sapiens
tatttagctgtcaga

SEQ ID NO: 1369176 - DNA, 15 bp, Homo sapiens
atatttagctgtcag

SEQ ID NO: 1369177 - DNA, 15 bp, Homo sapiens
gatatttagctgtca

SEQ ID NO: 1369178 - DNA, 15 bp, Homo sapiens
tgatatttagctgtc

SEQ ID NO: 1369179 - DNA, 15 bp, Homo sapiens
ttgatatttagctgt

SEQ ID NO: 1369180 - DNA, 15 bp, Homo sapiens
cttgatatttagctg

SEQ ID NO: 1369181 - DNA, 15 bp, Homo sapiens
ccttgatatttagct

SEQ ID NO: 1369182 - DNA, 15 bp, Homo sapiens
gccttgatatttagc

SEQ ID NO: 1369183 - DNA, 15 bp, Homo sapiens
tgccttgatatttag

SEQ ID NO: 1369184 - DNA, 15 bp, Homo sapiens
ttgccttgatattta

SEQ ID NO: 1369185 - DNA, 15 bp, Homo sapiens
attgccttgatattt

SEQ ID NO: 1369186 - DNA, 15 bp, Homo sapiens
gattgccttgatatt

SEQ ID NO: 1369187 - DNA, 15 bp, Homo sapiens
tgattgccttgatat

SEQ ID NO: 1369188 - DNA, 15 bp, Homo sapiens
gtgattgccttgata

SEQ ID NO: 1369189 - DNA, 15 bp, Homo sapiens
ggtgattgccttgat

SEQ ID NO: 1369190 - DNA, 15 bp, Homo sapiens
cggtgattgccttga

SEQ ID NO: 1369191 - DNA, 15 bp, Homo sapiens
gcggtgattgccttg

SEQ ID NO: 1369192 - DNA, 15 bp, Homo sapiens
ggcggtgattgcctt

SEQ ID NO: 1369193 - DNA, 15 bp, Homo sapiens
aggcggtgattgcct

SEQ ID NO: 1369194 - DNA, 15 bp, Homo sapiens
gaggcggtgattgcc

SEQ ID NO: 1369195 - DNA, 15 bp, Homo sapiens
cgaggcggtgattgc

SEQ ID NO: 1369196 - DNA, 15 bp, Homo sapiens
gcgaggcggtgattg

SEQ ID NO: 1369197 - DNA, 15 bp, Homo sapiens
cgcgaggcggtgatt

SEQ ID NO: 1369198 - DNA, 15 bp, Homo sapiens
ccgcgaggcggtgat

SEQ ID NO: 1369199 - DNA, 15 bp, Homo sapiens
gccgcgaggcggtga

SEQ ID NO: 1369200 - DNA, 15 bp, Homo sapiens
ggccgcgaggcggtg

SEQ ID NO: 1369201 - DNA, 15 bp, Homo sapiens
gggccgcgaggcggt

SEQ ID NO: 1369202 - DNA, 15 bp, Homo sapiens
agggccgcgaggcgg

SEQ ID NO: 1369203 - DNA, 15 bp, Homo sapiens
cagggccgcgaggcg

SEQ ID NO: 1369204 - DNA, 15 bp, Homo sapiens
gcagggccgcgaggc

SEQ ID NO: 1369205 - DNA, 15 bp, Homo sapiens
ggcagggccgcgagg

SEQ ID NO: 1369206 - DNA, 15 bp, Homo sapiens
aggcagggccgcgag

SEQ ID NO: 1369207 - DNA, 15 bp, Homo sapiens
gaggcagggccgcga

SEQ ID NO: 1369208 - DNA, 15 bp, Homo sapiens
ggaggcagggccgcg

SEQ ID NO: 1369209 - DNA, 15 bp, Homo sapiens
tggaggcagggccgc

SEQ ID NO: 1369210 - DNA, 15 bp, Homo sapiens
ttggaggcagggccg

SEQ ID NO: 1369211 - DNA, 15 bp, Homo sapiens
gttggaggcagggcc

SEQ ID NO: 1369212 - DNA, 15 bp, Homo sapiens
ggttggaggcagggc

SEQ ID NO: 1369213 - DNA, 15 bp, Homo sapiens
gggttggaggcaggg

SEQ ID NO: 1369214 - DNA, 15 bp, Homo sapiens
ggggttggaggcagg

SEQ ID NO: 1369215 - DNA, 15 bp, Homo sapiens
gggggttggaggcag

SEQ ID NO: 1369216 - DNA, 15 bp, Homo sapiens
tgggggttggaggca

SEQ ID NO: 1369217 - DNA, 15 bp, Homo sapiens
gtgggggttggaggc

SEQ ID NO: 1369218 - DNA, 15 bp, Homo sapiens
tgtgggggttggagg

SEQ ID NO: 1369219 - DNA, 15 bp, Homo sapiens
ctgtgggggttggag

SEQ ID NO: 1369220 - DNA, 15 bp, Homo sapiens
gctgtgggggttgga

SEQ ID NO: 1369221 - DNA, 15 bp, Homo sapiens
agctgtgggggttgg

SEQ ID NO: 1369222 - DNA, 15 bp, Homo sapiens
tagctgtgggggttg

SEQ ID NO: 1369223 - DNA, 15 bp, Homo sapiens
ttagctgtgggggtt

SEQ ID NO: 1369224 - DNA, 15 bp, Homo sapiens
cttagctgtgggggt

SEQ ID NO: 1369225 - DNA, 15 bp, Homo sapiens
tcttagctgtggggg

SEQ ID NO: 1369226 - DNA, 15 bp, Homo sapiens
gtcttagctgtgggg

SEQ ID NO: 1369227 - DNA, 15 bp, Homo sapiens
tgtcttagctgtggg

SEQ ID NO: 1369228 - DNA, 15 bp, Homo sapiens
ttgtcttagctgtgg

SEQ ID NO: 1369229 - DNA, 15 bp, Homo sapiens
tttgtcttagctgtg

SEQ ID NO: 1369230 - DNA, 15 bp, Homo sapiens
gtttgtcttagctgt

SEQ ID NO: 1369231 - DNA, 15 bp, Homo sapiens
tgtttgtcttagctg

SEQ ID NO: 1369232 - DNA, 15 bp, Homo sapiens
ctgtttgtcttagct

SEQ ID NO: 1369233 - DNA, 15 bp, Homo sapiens
actgtttgtcttagc

SEQ ID NO: 1369234 - DNA, 15 bp, Homo sapiens
aactgtttgtcttag

SEQ ID NO: 1369235 - DNA, 15 bp, Homo sapiens
caactgtttgtctta

SEQ ID NO: 1369236 - DNA, 15 bp, Homo sapiens
ccaactgtttgtctt

SEQ ID NO: 1369237 - DNA, 15 bp, Homo sapiens
cccaactgtttgtct

SEQ ID NO: 1369238 - DNA, 15 bp, Homo sapiens
gcccaactgtttgtc

SEQ ID NO: 1369239 - DNA, 15 bp, Homo sapiens
agcccaactgtttgt

SEQ ID NO: 1369240 - DNA, 15 bp, Homo sapiens
tagcccaactgtttg

SEQ ID NO: 1369241 - DNA, 15 bp, Homo sapiens
ttagcccaactgttt

SEQ ID NO: 1369242 - DNA, 15 bp, Homo sapiens
tttagcccaactgtt

SEQ ID NO: 1369243 - DNA, 15 bp, Homo sapiens
ttttagcccaactgt

SEQ ID NO: 1369244 - DNA, 15 bp, Homo sapiens
cttttagcccaactg

SEQ ID NO: 1369245 - DNA, 15 bp, Homo sapiens
tcttttagcccaact

SEQ ID NO: 1369246 - DNA, 15 bp, Homo sapiens
ttcttttagcccaac

SEQ ID NO: 1369247 - DNA, 15 bp, Homo sapiens
attcttttagcccaa

SEQ ID NO: 1369248 - DNA, 15 bp, Homo sapiens
cattcttttagccca

SEQ ID NO: 1369249 - DNA, 15 bp, Homo sapiens
gcattcttttagccc

SEQ ID NO: 1369250 - DNA, 15 bp, Homo sapiens
ggcattcttttagcc

SEQ ID NO: 1369251 - DNA, 15 bp, Homo sapiens
aggcattcttttagc

SEQ ID NO: 1369252 - DNA, 15 bp, Homo sapiens
gaggcattcttttag

SEQ ID NO: 1369253 - DNA, 15 bp, Homo sapiens
agaggcattctttta

SEQ ID NO: 1369254 - DNA, 15 bp, Homo sapiens
cagaggcattctttt

SEQ ID NO: 1369255 - DNA, 15 bp, Homo sapiens
acagaggcattcttt

SEQ ID NO: 1369256 - DNA, 15 bp, Homo sapiens
aacagaggcattctt

SEQ ID NO: 1369257 - DNA, 15 bp, Homo sapiens
taacagaggcattct

SEQ ID NO: 1369258 - DNA, 15 bp, Homo sapiens
ataacagaggcattc

SEQ ID NO: 1369259 - DNA, 15 bp, Homo sapiens
gataacagaggcatt

SEQ ID NO: 1369260 - DNA, 15 bp, Homo sapiens
tgataacagaggcat

SEQ ID NO: 1369261 - DNA, 15 bp, Homo sapiens
atgataacagaggca

SEQ ID NO: 1369262 - DNA, 15 bp, Homo sapiens
tatgataacagaggc

SEQ ID NO: 1369263 - DNA, 15 bp, Homo sapiens
ttatgataacagagg

SEQ ID NO: 1369264 - DNA, 15 bp, Homo sapiens
cttatgataacagag

SEQ ID NO: 1369265 - DNA, 15 bp, Homo sapiens
acttatgataacaga

SEQ ID NO: 1369266 - DNA, 15 bp, Homo sapiens
aacttatgataacag

SEQ ID NO: 1369267 - DNA, 15 bp, Homo sapiens
aaacttatgataaca

SEQ ID NO: 1369268 - DNA, 15 bp, Homo sapiens
gaaacttatgataac

SEQ ID NO: 1369269 - DNA, 15 bp, Homo sapiens
agaaacttatgataa

SEQ ID NO: 1369270 - DNA, 15 bp, Homo sapiens
tagaaacttatgata

SEQ ID NO: 1369271 - DNA, 15 bp, Homo sapiens
atagaaacttatgat

SEQ ID NO: 1369272 - DNA, 15 bp, Homo sapiens
gatagaaacttatga

SEQ ID NO: 1369273 - DNA, 15 bp, Homo sapiens
agatagaaacttatg

SEQ ID NO: 1369274 - DNA, 15 bp, Homo sapiens
gagatagaaacttat

SEQ ID NO: 1369275 - DNA, 15 bp, Homo sapiens
agagatagaaactta

SEQ ID NO: 1369276 - DNA, 15 bp, Homo sapiens
gagagatagaaactt

SEQ ID NO: 1369277 - DNA, 15 bp, Homo sapiens
agagagatagaaact

SEQ ID NO: 1369278 - DNA, 15 bp, Homo sapiens
aagagagatagaaac

SEQ ID NO: 1369279 - DNA, 15 bp, Homo sapiens
gaagagagatagaaa

SEQ ID NO: 1369280 - DNA, 15 bp, Homo sapiens
agaagagagatagaa

SEQ ID NO: 1369281 - DNA, 15 bp, Homo sapiens
gagaagagagataga

SEQ ID NO: 1369282 - DNA, 15 bp, Homo sapiens
tgagaagagagatag

SEQ ID NO: 1369283 - DNA, 15 bp, Homo sapiens
atgagaagagagata

SEQ ID NO: 1369284 - DNA, 15 bp, Homo sapiens
catgagaagagagat

SEQ ID NO: 1369285 - DNA, 15 bp, Homo sapiens
ccatgagaagagaga

SEQ ID NO: 1369286 - DNA, 15 bp, Homo sapiens
gccatgagaagagag

SEQ ID NO: 1369287 - DNA, 15 bp, Homo sapiens
agccatgagaagaga

SEQ ID NO: 1369288 - DNA, 15 bp, Homo sapiens
cagccatgagaagag

SEQ ID NO: 1369289 - DNA, 15 bp, Homo sapiens
ccagccatgagaaga

SEQ ID NO: 1369290 - DNA, 15 bp, Homo sapiens
cccagccatgagaag

SEQ ID NO: 1369291 - DNA, 15 bp, Homo sapiens
gcccagccatgagaa

SEQ ID NO: 1369292 - DNA, 15 bp, Homo sapiens
ggcccagccatgaga

SEQ ID NO: 1369293 - DNA, 15 bp, Homo sapiens
aggcccagccatgag

SEQ ID NO: 1369294 - DNA, 15 bp, Homo sapiens
aaggcccagccatga

SEQ ID NO: 1369295 - DNA, 15 bp, Homo sapiens
aaaggcccagccatg

SEQ ID NO: 1369296 - DNA, 15 bp, Homo sapiens
taaaggcccagccat

SEQ ID NO: 1369297 - DNA, 15 bp, Homo sapiens
ataaaggcccagcca

SEQ ID NO: 1369298 - DNA, 15 bp, Homo sapiens
aataaaggcccagcc

SEQ ID NO: 1369299 - DNA, 15 bp, Homo sapiens
aaataaaggcccagc

SEQ ID NO: 1369300 - DNA, 15 bp, Homo sapiens
aaaataaaggcccag

SEQ ID NO: 1369301 - DNA, 15 bp, Homo sapiens
gaaaataaaggccca

SEQ ID NO: 1369302 - DNA, 15 bp, Homo sapiens
agaaaataaaggccc

SEQ ID NO: 1369303 - DNA, 15 bp, Homo sapiens
gagaaaataaaggcc

SEQ ID NO: 1369304 - DNA, 15 bp, Homo sapiens
agagaaaataaaggc

SEQ ID NO: 1369305 - DNA, 15 bp, Homo sapiens
aagagaaaataaagg

SEQ ID NO: 1369306 - DNA, 15 bp, Homo sapiens
caagagaaaataaag

SEQ ID NO: 1369307 - DNA, 15 bp, Homo sapiens
gcaagagaaaataaa

SEQ ID NO: 1369308 - DNA, 15 bp, Homo sapiens
agcaagagaaaataa

SEQ ID NO: 1369309 - DNA, 15 bp, Homo sapiens
aagcaagagaaaata

SEQ ID NO: 1369310 - DNA, 15 bp, Homo sapiens
aaagcaagagaaaat

SEQ ID NO: 1369311 - DNA, 15 bp, Homo sapiens
aaaagcaagagaaaa

SEQ ID NO: 1369312 - DNA, 15 bp, Homo sapiens
aaaaagcaagagaaa

SEQ ID NO: 1369313 - DNA, 15 bp, Homo sapiens
aaaaaagcaagagaa

SEQ ID NO: 1369314 - DNA, 15 bp, Homo sapiens
taaaaaagcaagaga

SEQ ID NO: 1369315 - DNA, 15 bp, Homo sapiens
ttaaaaaagcaagag

SEQ ID NO: 1369316 - DNA, 15 bp, Homo sapiens
attaaaaaagcaaga

SEQ ID NO: 1369317 - DNA, 15 bp, Homo sapiens
aattaaaaaagcaag

SEQ ID NO: 1369318 - DNA, 15 bp, Homo sapiens
aaattaaaaaagcaa

SEQ ID NO: 1369319 - DNA, 15 bp, Homo sapiens
gaaattaaaaaagca

SEQ ID NO: 1369320 - DNA, 15 bp, Homo sapiens
tgaaattaaaaaagc

SEQ ID NO: 1369321 - DNA, 15 bp, Homo sapiens
ctgaaattaaaaaag

SEQ ID NO: 1369322 - DNA, 15 bp, Homo sapiens
tctgaaattaaaaaa

SEQ ID NO: 1369323 - DNA, 15 bp, Homo sapiens
ctctgaaattaaaaa

SEQ ID NO: 1369324 - DNA, 15 bp, Homo sapiens
actctgaaattaaaa

SEQ ID NO: 1369325 - DNA, 15 bp, Homo sapiens
agactctgaaattaa

SEQ ID NO: 1369326 - DNA, 15 bp, Homo sapiens
gagactctgaaatta

SEQ ID NO: 1369327 - DNA, 15 bp, Homo sapiens
ggagactctgaaatt

SEQ ID NO: 1369328 - DNA, 15 bp, Homo sapiens
gggagactctgaaat

SEQ ID NO: 1369329 - DNA, 15 bp, Homo sapiens
ggggagactctgaaa

SEQ ID NO: 1369330 - DNA, 15 bp, Homo sapiens
gggggagactctgaa

SEQ ID NO: 1369331 - DNA, 15 bp, Homo sapiens
ggggggagactctga

SEQ ID NO: 1369332 - DNA, 15 bp, Homo sapiens
gggggggagactctg

SEQ ID NO: 1369333 - DNA, 15 bp, Homo sapiens
ggggggggagactct

SEQ ID NO: 1369334 - DNA, 15 bp, Homo sapiens
aggggggggagactc

SEQ ID NO: 1369335 - DNA, 15 bp, Homo sapiens
gaggggggggagact

SEQ ID NO: 1369336 - DNA, 15 bp, Homo sapiens
ggaggggggggagac

SEQ ID NO: 1369337 - DNA, 15 bp, Homo sapiens
aggaggggggggaga

SEQ ID NO: 1369338 - DNA, 15 bp, Homo sapiens
aaggaggggggggag

SEQ ID NO: 1369339 - DNA, 15 bp, Homo sapiens
taaggagggggggga

SEQ ID NO: 1369340 - DNA, 15 bp, Homo sapiens
gtaaggagggggggg

SEQ ID NO: 1369341 - DNA, 15 bp, Homo sapiens
agtaaggaggggggg

SEQ ID NO: 1369342 - DNA, 15 bp, Homo sapiens
gagtaaggagggggg

SEQ ID NO: 1369343 - DNA, 15 bp, Homo sapiens
ggagtaaggaggggg

SEQ ID NO: 1369344 - DNA, 15 bp, Homo sapiens
tggagtaaggagggg

SEQ ID NO: 1369345 - DNA, 15 bp, Homo sapiens
ctggagtaaggaggg

SEQ ID NO: 1369346 - DNA, 15 bp, Homo sapiens
tctggagtaaggagg

SEQ ID NO: 1369347 - DNA, 15 bp, Homo sapiens
atctggagtaaggag

SEQ ID NO: 1369348 - DNA, 15 bp, Homo sapiens
tatctggagtaagga

SEQ ID NO: 1369349 - DNA, 15 bp, Homo sapiens
gtatctggagtaagg

SEQ ID NO: 1369350 - DNA, 15 bp, Homo sapiens
ggtatctggagtaag

SEQ ID NO: 1369351 - DNA, 15 bp, Homo sapiens
gggtatctggagtaa

SEQ ID NO: 1369352 - DNA, 15 bp, Homo sapiens
cgggtatctggagta

SEQ ID NO: 1369353 - DNA, 15 bp, Homo sapiens
tcgggtatctggagt

SEQ ID NO: 1369354 - DNA, 15 bp, Homo sapiens
atcgggtatctggag

SEQ ID NO: 1369355 - DNA, 15 bp, Homo sapiens
catcgggtatctgga

SEQ ID NO: 1369356 - DNA, 15 bp, Homo sapiens
ccatcgggtatctgg

SEQ ID NO: 1369357 - DNA, 15 bp, Homo sapiens
tccatcgggtatctg

SEQ ID NO: 1369358 - DNA, 15 bp, Homo sapiens
atccatcgggtatct

SEQ ID NO: 1369359 - DNA, 15 bp, Homo sapiens
aatccatcgggtatc

SEQ ID NO: 1369360 - DNA, 15 bp, Homo sapiens
aaatccatcgggtat

SEQ ID NO: 1369361 - DNA, 15 bp, Homo sapiens
aaaatccatcgggta

SEQ ID NO: 1369362 - DNA, 15 bp, Homo sapiens
gaaaatccatcgggt

SEQ ID NO: 1369363 - DNA, 15 bp, Homo sapiens
agaaaatccatcggg

SEQ ID NO: 1369364 - DNA, 15 bp, Homo sapiens
gagaaaatccatcgg

SEQ ID NO: 1369365 - DNA, 15 bp, Homo sapiens
tgagaaaatccatcg

SEQ ID NO: 1369366 - DNA, 15 bp, Homo sapiens
ttgagaaaatccatc

SEQ ID NO: 1369367 - DNA, 15 bp, Homo sapiens
tttgagaaaatccat

SEQ ID NO: 1369368 - DNA, 15 bp, Homo sapiens
gtttgagaaaatcca

SEQ ID NO: 1369369 - DNA, 15 bp, Homo sapiens
ggtttgagaaaatcc

SEQ ID NO: 1369370 - DNA, 15 bp, Homo sapiens
tggtttgagaaaatc

SEQ ID NO: 1369371 - DNA, 15 bp, Homo sapiens
ttggtttgagaaaat

SEQ ID NO: 1369372 - DNA, 15 bp, Homo sapiens
gttggtttgagaaaa

SEQ ID NO: 1369373 - DNA, 15 bp, Homo sapiens
agttggtttgagaaa

SEQ ID NO: 1369374 - DNA, 15 bp, Homo sapiens
cagttggtttgagaa

SEQ ID NO: 1369375 - DNA, 15 bp, Homo sapiens
ccagttggtttgaga

SEQ ID NO: 1369376 - DNA, 15 bp, Homo sapiens
accagttggtttgag

SEQ ID NO: 1369377 - DNA, 15 bp, Homo sapiens
caccagttggtttga

SEQ ID NO: 1369378 - DNA, 15 bp, Homo sapiens
tcaccagttggtttg

SEQ ID NO: 1369379 - DNA, 15 bp, Homo sapiens
ctcaccagttggttt

SEQ ID NO: 1369380 - DNA, 15 bp, Homo sapiens
actcaccagttggtt

SEQ ID NO: 1369381 - DNA, 15 bp, Homo sapiens
tactcaccagttggt

SEQ ID NO: 1369382 - DNA, 15 bp, Homo sapiens
ctactcaccagttgg

SEQ ID NO: 1369383 - DNA, 15 bp, Homo sapiens
tctactcaccagttg

SEQ ID NO: 1369384 - DNA, 15 bp, Homo sapiens
atctactcaccagtt

SEQ ID NO: 1369385 - DNA, 15 bp, Homo sapiens
catctactcaccagt

SEQ ID NO: 1369386 - DNA, 15 bp, Homo sapiens
tcatctactcaccag

SEQ ID NO: 1369387 - DNA, 15 bp, Homo sapiens
atcatctactcacca

SEQ ID NO: 1369388 - DNA, 15 bp, Homo sapiens
aatcatctactcacc

SEQ ID NO: 1369389 - DNA, 15 bp, Homo sapiens
aaatcatctactcac

SEQ ID NO: 1369390 - DNA, 15 bp, Homo sapiens
aaaatcatctactca

SEQ ID NO: 1369391 - DNA, 15 bp, Homo sapiens
aaaaatcatctactc

SEQ ID NO: 1369392 - DNA, 15 bp, Homo sapiens
taaaaatcatctact

SEQ ID NO: 1369393 - DNA, 15 bp, Homo sapiens
ttaaaaatcatctac

SEQ ID NO: 1369394 - DNA, 15 bp, Homo sapiens
tttaaaaatcatcta

SEQ ID NO: 1369395 - DNA, 15 bp, Homo sapiens
attttaaaaatcatc

SEQ ID NO: 1369396 - DNA, 15 bp, Homo sapiens
tattttaaaaatcat

SEQ ID NO: 1369397 - DNA, 15 bp, Homo sapiens
atattttaaaaatca

SEQ ID NO: 1369398 - DNA, 15 bp, Homo sapiens
gatattttaaaaatc

SEQ ID NO: 1369399 - DNA, 15 bp, Homo sapiens
aggatattttaaaaa

SEQ ID NO: 1369400 - DNA, 15 bp, Homo sapiens
caggatattttaaaa

SEQ ID NO: 1369401 - DNA, 15 bp, Homo sapiens
gcaggatattttaaa

SEQ ID NO: 1369402 - DNA, 15 bp, Homo sapiens
agcaggatattttaa

SEQ ID NO: 1369403 - DNA, 15 bp, Homo sapiens
aagcaggatatttta

SEQ ID NO: 1369404 - DNA, 15 bp, Homo sapiens
taagcaggatatttt

SEQ ID NO: 1369405 - DNA, 15 bp, Homo sapiens
ataagcaggatattt

SEQ ID NO: 1369406 - DNA, 15 bp, Homo sapiens
gataagcaggatatt

SEQ ID NO: 1369407 - DNA, 15 bp, Homo sapiens
agataagcaggatat

SEQ ID NO: 1369408 - DNA, 15 bp, Homo sapiens
aagataagcaggata

SEQ ID NO: 1369409 - DNA, 15 bp, Homo sapiens
taagataagcaggat

SEQ ID NO: 1369410 - DNA, 15 bp, Homo sapiens
ttaagataagcagga

SEQ ID NO: 1369411 - DNA, 15 bp, Homo sapiens
cttaagataagcagg

SEQ ID NO: 1369412 - DNA, 15 bp, Homo sapiens
acttaagataagcag

SEQ ID NO: 1369413 - DNA, 15 bp, Homo sapiens
aacttaagataagca

SEQ ID NO: 1369414 - DNA, 15 bp, Homo sapiens
taacttaagataagc

SEQ ID NO: 1369415 - DNA, 15 bp, Homo sapiens
ctaacttaagataag

SEQ ID NO: 1369416 - DNA, 15 bp, Homo sapiens
tctaacttaagataa

SEQ ID NO: 1369417 - DNA, 15 bp, Homo sapiens
ttctaacttaagata

SEQ ID NO: 1369418 - DNA, 15 bp, Homo sapiens
tttctaacttaagat

SEQ ID NO: 1369419 - DNA, 15 bp, Homo sapiens
atttctaacttaaga

SEQ ID NO: 1369420 - DNA, 15 bp, Homo sapiens
tatttctaacttaag

SEQ ID NO: 1369421 - DNA, 15 bp, Homo sapiens
ctatttctaacttaa

SEQ ID NO: 1369422 - DNA, 15 bp, Homo sapiens
tctatttctaactta

SEQ ID NO: 1369423 - DNA, 15 bp, Homo sapiens
ctctatttctaactt

SEQ ID NO: 1369424 - DNA, 15 bp, Homo sapiens
gctctatttctaact

SEQ ID NO: 1369425 - DNA, 15 bp, Homo sapiens
ggctctatttctaac

SEQ ID NO: 1369426 - DNA, 15 bp, Homo sapiens
aggctctatttctaa

SEQ ID NO: 1369427 - DNA, 15 bp, Homo sapiens
gaggctctatttcta

SEQ ID NO: 1369428 - DNA, 15 bp, Homo sapiens
agaggctctatttct

SEQ ID NO: 1369429 - DNA, 15 bp, Homo sapiens
tagaggctctatttc

SEQ ID NO: 1369430 - DNA, 15 bp, Homo sapiens
ctagaggctctattt

SEQ ID NO: 1369431 - DNA, 15 bp, Homo sapiens
tctagaggctctatt

SEQ ID NO: 1369432 - DNA, 15 bp, Homo sapiens
ttctagaggctctat

SEQ ID NO: 1369433 - DNA, 15 bp, Homo sapiens
gttctagaggctcta

SEQ ID NO: 1369434 - DNA, 15 bp, Homo sapiens
cgttctagaggctct

SEQ ID NO: 1369435 - DNA, 15 bp, Homo sapiens
acgttctagaggctc

SEQ ID NO: 1369436 - DNA, 15 bp, Homo sapiens
cacgttctagaggct

SEQ ID NO: 1369437 - DNA, 15 bp, Homo sapiens
ccacgttctagaggc

SEQ ID NO: 1369438 - DNA, 15 bp, Homo sapiens
gccacgttctagagg

SEQ ID NO: 1369439 - DNA, 15 bp, Homo sapiens
agccacgttctagag

SEQ ID NO: 1369440 - DNA, 15 bp, Homo sapiens
aagccacgttctaga

SEQ ID NO: 1369441 - DNA, 15 bp, Homo sapiens
aaagccacgttctag

SEQ ID NO: 1369442 - DNA, 15 bp, Homo sapiens
aaaagccacgttcta

SEQ ID NO: 1369443 - DNA, 15 bp, Homo sapiens
aaaaagccacgttct

SEQ ID NO: 1369444 - DNA, 15 bp, Homo sapiens
caaaaagccacgttc

SEQ ID NO: 1369445 - DNA, 15 bp, Homo sapiens
acaaaaagccacgtt

SEQ ID NO: 1369446 - DNA, 15 bp, Homo sapiens
cacaaaaagccacgt

SEQ ID NO: 1369447 - DNA, 15 bp, Homo sapiens
acacaaaaagccacg

SEQ ID NO: 1369448 - DNA, 15 bp, Homo sapiens
cacacaaaaagccac

SEQ ID NO: 1369449 - DNA, 15 bp, Homo sapiens
acacacaaaaagcca

SEQ ID NO: 1369450 - DNA, 15 bp, Homo sapiens
tacacacaaaaagcc

SEQ ID NO: 1369451 - DNA, 15 bp, Homo sapiens
ctacacacaaaaagc

SEQ ID NO: 1369452 - DNA, 15 bp, Homo sapiens
cctacacacaaaaag

SEQ ID NO: 1369453 - DNA, 15 bp, Homo sapiens
gcctacacacaaaaa

SEQ ID NO: 1369454 - DNA, 15 bp, Homo sapiens
tgcctacacacaaaa

SEQ ID NO: 1369455 - DNA, 15 bp, Homo sapiens
ttgcctacacacaaa

SEQ ID NO: 1369456 - DNA, 15 bp, Homo sapiens
tttgcctacacacaa

SEQ ID NO: 1369457 - DNA, 15 bp, Homo sapiens
ctttgcctacacaca

SEQ ID NO: 1369458 - DNA, 15 bp, Homo sapiens
cctttgcctacacac

SEQ ID NO: 1369459 - DNA, 15 bp, Homo sapiens
gcctttgcctacaca

SEQ ID NO: 1369460 - DNA, 15 bp, Homo sapiens
agcctttgcctacac

SEQ ID NO: 1369461 - DNA, 15 bp, Homo sapiens
aagcctttgcctaca

SEQ ID NO: 1369462 - DNA, 15 bp, Homo sapiens
caagcctttgcctac

SEQ ID NO: 1369463 - DNA, 15 bp, Homo sapiens
ccaagcctttgccta

SEQ ID NO: 1369464 - DNA, 15 bp, Homo sapiens
cccaagcctttgcct

SEQ ID NO: 1369465 - DNA, 15 bp, Homo sapiens
ccccaagcctttgcc

SEQ ID NO: 1369466 - DNA, 15 bp, Homo sapiens
tccccaagcctttgc

SEQ ID NO: 1369467 - DNA, 15 bp, Homo sapiens
ctccccaagcctttg

SEQ ID NO: 1369468 - DNA, 15 bp, Homo sapiens
cctccccaagccttt

SEQ ID NO: 1369469 - DNA, 15 bp, Homo sapiens
acctccccaagcctt

SEQ ID NO: 1369470 - DNA, 15 bp, Homo sapiens
cacctccccaagcct

SEQ ID NO: 1369471 - DNA, 15 bp, Homo sapiens
gcacctccccaagcc

SEQ ID NO: 1369472 - DNA, 15 bp, Homo sapiens
agcacctccccaagc

SEQ ID NO: 1369473 - DNA, 15 bp, Homo sapiens
cagcacctccccaag

SEQ ID NO: 1369474 - DNA, 15 bp, Homo sapiens
ccagcacctccccaa

SEQ ID NO: 1369475 - DNA, 15 bp, Homo sapiens
cccagcacctcccca

SEQ ID NO: 1369476 - DNA, 15 bp, Homo sapiens
gcccagcacctcccc

SEQ ID NO: 1369477 - DNA, 15 bp, Homo sapiens
agcccagcacctccc

SEQ ID NO: 1369478 - DNA, 15 bp, Homo sapiens
aagcccagcacctcc

SEQ ID NO: 1369479 - DNA, 15 bp, Homo sapiens
gaagcccagcacctc

SEQ ID NO: 1369480 - DNA, 15 bp, Homo sapiens
tgaagcccagcacct

SEQ ID NO: 1369481 - DNA, 15 bp, Homo sapiens
gtgaagcccagcacc

SEQ ID NO: 1369482 - DNA, 15 bp, Homo sapiens
cgtgaagcccagcac

SEQ ID NO: 1369483 - DNA, 15 bp, Homo sapiens
acgtgaagcccagca

SEQ ID NO: 1369484 - DNA, 15 bp, Homo sapiens
aacgtgaagcccagc

SEQ ID NO: 1369485 - DNA, 15 bp, Homo sapiens
caacgtgaagcccag

SEQ ID NO: 1369486 - DNA, 15 bp, Homo sapiens
ccaacgtgaagccca

SEQ ID NO: 1369487 - DNA, 15 bp, Homo sapiens
accaacgtgaagccc

SEQ ID NO: 1369488 - DNA, 15 bp, Homo sapiens
aaccaacgtgaagcc

SEQ ID NO: 1369489 - DNA, 15 bp, Homo sapiens
gaaccaacgtgaagc

SEQ ID NO: 1369490 - DNA, 15 bp, Homo sapiens
agaaccaacgtgaag

SEQ ID NO: 1369491 - DNA, 15 bp, Homo sapiens
tagaaccaacgtgaa

SEQ ID NO: 1369492 - DNA, 15 bp, Homo sapiens
ctagaaccaacgtga

SEQ ID NO: 1369493 - DNA, 15 bp, Homo sapiens
cctagaaccaacgtg

SEQ ID NO: 1369494 - DNA, 15 bp, Homo sapiens
acctagaaccaacgt

SEQ ID NO: 1369495 - DNA, 15 bp, Homo sapiens
aacctagaaccaacg

SEQ ID NO: 1369496 - DNA, 15 bp, Homo sapiens
aaacctagaaccaac

SEQ ID NO: 1369497 - DNA, 15 bp, Homo sapiens
gaaacctagaaccaa

SEQ ID NO: 1369498 - DNA, 15 bp, Homo sapiens
ggaaacctagaacca

SEQ ID NO: 1369499 - DNA, 15 bp, Homo sapiens
aggaaacctagaacc

SEQ ID NO: 1369500 - DNA, 15 bp, Homo sapiens
gaggaaacctagaac

SEQ ID NO: 1369501 - DNA, 15 bp, Homo sapiens
agaggaaacctagaa

SEQ ID NO: 1369502 - DNA, 15 bp, Homo sapiens
cagaggaaacctaga

SEQ ID NO: 1369503 - DNA, 15 bp, Homo sapiens
acagaggaaacctag

SEQ ID NO: 1369504 - DNA, 15 bp, Homo sapiens
aacagaggaaaccta

SEQ ID NO: 1369505 - DNA, 15 bp, Homo sapiens
caacagaggaaacct

SEQ ID NO: 1369506 - DNA, 15 bp, Homo sapiens
ccaacagaggaaacc

SEQ ID NO: 1369507 - DNA, 15 bp, Homo sapiens
tccaacagaggaaac

SEQ ID NO: 1369508 - DNA, 15 bp, Homo sapiens
ttccaacagaggaaa

SEQ ID NO: 1369509 - DNA, 15 bp, Homo sapiens
cttccaacagaggaa

SEQ ID NO: 1369510 - DNA, 15 bp, Homo sapiens
acttccaacagagga

SEQ ID NO: 1369511 - DNA, 15 bp, Homo sapiens
aacttccaacagagg

SEQ ID NO: 1369512 - DNA, 15 bp, Homo sapiens
aaacttccaacagag

SEQ ID NO: 1369513 - DNA, 15 bp, Homo sapiens
caaacttccaacaga

SEQ ID NO: 1369514 - DNA, 15 bp, Homo sapiens
ccaaacttccaacag

SEQ ID NO: 1369515 - DNA, 15 bp, Homo sapiens
accaaacttccaaca

SEQ ID NO: 1369516 - DNA, 15 bp, Homo sapiens
caccaaacttccaac

SEQ ID NO: 1369517 - DNA, 15 bp, Homo sapiens
tcaccaaacttccaa

SEQ ID NO: 1369518 - DNA, 15 bp, Homo sapiens
ttcaccaaacttcca

SEQ ID NO: 1369519 - DNA, 15 bp, Homo sapiens
attcaccaaacttcc

SEQ ID NO: 1369520 - DNA, 15 bp, Homo sapiens
aattcaccaaacttc

SEQ ID NO: 1369521 - DNA, 15 bp, Homo sapiens
aaattcaccaaactt

SEQ ID NO: 1369522 - DNA, 15 bp, Homo sapiens
aaaattcaccaaact

SEQ ID NO: 1369523 - DNA, 15 bp, Homo sapiens
aaaaattcaccaaac

SEQ ID NO: 1369524 - DNA, 15 bp, Homo sapiens
gaaaaattcaccaaa

SEQ ID NO: 1369525 - DNA, 15 bp, Homo sapiens
agaaaaattcaccaa

SEQ ID NO: 1369526 - DNA, 15 bp, Homo sapiens
cagaaaaattcacca

SEQ ID NO: 1369527 - DNA, 15 bp, Homo sapiens
acagaaaaattcacc

SEQ ID NO: 1369528 - DNA, 15 bp, Homo sapiens
aacagaaaaattcac

SEQ ID NO: 1369529 - DNA, 15 bp, Homo sapiens
caacagaaaaattca

SEQ ID NO: 1369530 - DNA, 15 bp, Homo sapiens
acaacagaaaaattc

SEQ ID NO: 1369531 - DNA, 15 bp, Homo sapiens
cacaacagaaaaatt

SEQ ID NO: 1369532 - DNA, 15 bp, Homo sapiens
ccacaacagaaaaat

SEQ ID NO: 1369533 - DNA, 15 bp, Homo sapiens
gccacaacagaaaaa

SEQ ID NO: 1369534 - DNA, 15 bp, Homo sapiens
agccacaacagaaaa

SEQ ID NO: 1369535 - DNA, 15 bp, Homo sapiens
cagccacaacagaaa

SEQ ID NO: 1369536 - DNA, 15 bp, Homo sapiens
ccagccacaacagaa

SEQ ID NO: 1369537 - DNA, 15 bp, Homo sapiens
cccagccacaacaga

SEQ ID NO: 1369538 - DNA, 15 bp, Homo sapiens
tttgggtgagtaacc

SEQ ID NO: 1369539 - DNA, 15 bp, Homo sapiens
ttttgggtgagtaac

SEQ ID NO: 1369540 - DNA, 15 bp, Homo sapiens
gttttgggtgagtaa

SEQ ID NO: 1369541 - DNA, 15 bp, Homo sapiens
cgttttgggtgagta

SEQ ID NO: 1369542 - DNA, 15 bp, Homo sapiens
acgttttgggtgagt

SEQ ID NO: 1369543 - DNA, 15 bp, Homo sapiens
aacgttttgggtgag

SEQ ID NO: 1369544 - DNA, 15 bp, Homo sapiens
aaacgttttgggtga

SEQ ID NO: 1369545 - DNA, 15 bp, Homo sapiens
aaaacgttttgggtg

SEQ ID NO: 1369546 - DNA, 15 bp, Homo sapiens
caaaacgttttgggt

SEQ ID NO: 1369547 - DNA, 15 bp, Homo sapiens
acaaaacgttttggg

SEQ ID NO: 1369548 - DNA, 15 bp, Homo sapiens
aacaaaacgttttgg

SEQ ID NO: 1369549 - DNA, 15 bp, Homo sapiens
caacaaaacgttttg

SEQ ID NO: 1369550 - DNA, 15 bp, Homo sapiens
tcaacaaaacgtttt

SEQ ID NO: 1369551 - DNA, 15 bp, Homo sapiens
ttcaacaaaacgttt

SEQ ID NO: 1369552 - DNA, 15 bp, Homo sapiens
tttcaacaaaacgtt

SEQ ID NO: 1369553 - DNA, 15 bp, Homo sapiens
ttttcaacaaaacgt

SEQ ID NO: 1369554 - DNA, 15 bp, Homo sapiens
attttcaacaaaacg

SEQ ID NO: 1369555 - DNA, 15 bp, Homo sapiens
tattttcaacaaaac

SEQ ID NO: 1369556 - DNA, 15 bp, Homo sapiens
ctattttcaacaaaa

SEQ ID NO: 1369557 - DNA, 15 bp, Homo sapiens
tctattttcaacaaa

SEQ ID NO: 1369558 - DNA, 15 bp, Homo sapiens
ttctattttcaacaa

SEQ ID NO: 1369559 - DNA, 15 bp, Homo sapiens
gttctattttcaaca

SEQ ID NO: 1369560 - DNA, 15 bp, Homo sapiens
tgttctattttcaac

SEQ ID NO: 1369561 - DNA, 15 bp, Homo sapiens
ttgttctattttcaa

SEQ ID NO: 1369562 - DNA, 15 bp, Homo sapiens
tttgttctattttca

SEQ ID NO: 1369563 - DNA, 15 bp, Homo sapiens
ttttgttctattttc

SEQ ID NO: 1369564 - DNA, 15 bp, Homo sapiens
tttttgttctatttt

SEQ ID NO: 1369565 - DNA, 15 bp, Homo sapiens
ttttttgttctattt

SEQ ID NO: 1369566 - DNA, 15 bp, Homo sapiens
tttttttgttctatt

SEQ ID NO: 1369567 - DNA, 15 bp, Homo sapiens
ctttttttgttctat

SEQ ID NO: 1369568 - DNA, 15 bp, Homo sapiens
tctttttttgttcta

SEQ ID NO: 1369569 - DNA, 15 bp, Homo sapiens
ttctttttttgttct

SEQ ID NO: 1369570 - DNA, 15 bp, Homo sapiens
tttctttttttgttc

SEQ ID NO: 1369571 - DNA, 15 bp, Homo sapiens
atttctttttttgtt

SEQ ID NO: 1369572 - DNA, 15 bp, Homo sapiens
catttctttttttgt

SEQ ID NO: 1369573 - DNA, 15 bp, Homo sapiens
tcatttctttttttg

SEQ ID NO: 1369574 - DNA, 15 bp, Homo sapiens
ctcatttcttttttt

SEQ ID NO: 1369575 - DNA, 15 bp, Homo sapiens
ttctcatttcttttt

SEQ ID NO: 1369576 - DNA, 15 bp, Homo sapiens
tttctcatttctttt

SEQ ID NO: 1369577 - DNA, 15 bp, Homo sapiens
ttttctcatttcttt

SEQ ID NO: 1369578 - DNA, 15 bp, Homo sapiens
cttttctcatttctt

SEQ ID NO: 1369579 - DNA, 15 bp, Homo sapiens
ccttttctcatttct

SEQ ID NO: 1369580 - DNA, 15 bp, Homo sapiens
gccttttctcatttc

SEQ ID NO: 1369581 - DNA, 15 bp, Homo sapiens
cgccttttctcattt

SEQ ID NO: 1369582 - DNA, 15 bp, Homo sapiens
gcgccttttctcatt

SEQ ID NO: 1369583 - DNA, 15 bp, Homo sapiens
agcgccttttctcat

SEQ ID NO: 1369584 - DNA, 15 bp, Homo sapiens
cagcgccttttctca

SEQ ID NO: 1369585 - DNA, 15 bp, Homo sapiens
gcagcgccttttctc

SEQ ID NO: 1369586 - DNA, 15 bp, Homo sapiens
agcagcgccttttct

SEQ ID NO: 1369587 - DNA, 15 bp, Homo sapiens
cagcagcgccttttc

SEQ ID NO: 1369588 - DNA, 15 bp, Homo sapiens
acagcagcgcctttt

SEQ ID NO: 1369589 - DNA, 15 bp, Homo sapiens
cacagcagcgccttt

SEQ ID NO: 1369590 - DNA, 15 bp, Homo sapiens
acacagcagcgcctt

SEQ ID NO: 1369591 - DNA, 15 bp, Homo sapiens
tacacagcagcgcct

SEQ ID NO: 1369592 - DNA, 15 bp, Homo sapiens
ttacacagcagcgcc

SEQ ID NO: 1369593 - DNA, 15 bp, Homo sapiens
cttacacagcagcgc

SEQ ID NO: 1369594 - DNA, 15 bp, Homo sapiens
tcttacacagcagcg

SEQ ID NO: 1369595 - DNA, 15 bp, Homo sapiens
ttcttacacagcagc

SEQ ID NO: 1369596 - DNA, 15 bp, Homo sapiens
attcttacacagcag

SEQ ID NO: 1369597 - DNA, 15 bp, Homo sapiens
aattcttacacagca

SEQ ID NO: 1369598 - DNA, 15 bp, Homo sapiens
aaattcttacacagc

SEQ ID NO: 1369599 - DNA, 15 bp, Homo sapiens
taaattcttacacag

SEQ ID NO: 1369600 - DNA, 15 bp, Homo sapiens
ctaaattcttacaca

SEQ ID NO: 1369601 - DNA, 15 bp, Homo sapiens
gctaaattcttacac

SEQ ID NO: 1369602 - DNA, 15 bp, Homo sapiens
tgctaaattcttaca

SEQ ID NO: 1369603 - DNA, 15 bp, Homo sapiens
atgctaaattcttac

SEQ ID NO: 1369604 - DNA, 15 bp, Homo sapiens
gatgctaaattctta

SEQ ID NO: 1369605 - DNA, 15 bp, Homo sapiens
tgatgctaaattctt

SEQ ID NO: 1369606 - DNA, 15 bp, Homo sapiens
ctgatgctaaattct

SEQ ID NO: 1369607 - DNA, 15 bp, Homo sapiens
actgatgctaaattc

SEQ ID NO: 1369608 - DNA, 15 bp, Homo sapiens
tactgatgctaaatt

SEQ ID NO: 1369609 - DNA, 15 bp, Homo sapiens
ttactgatgctaaat

SEQ ID NO: 1369610 - DNA, 15 bp, Homo sapiens
attactgatgctaaa

SEQ ID NO: 1369611 - DNA, 15 bp, Homo sapiens
tattactgatgctaa

SEQ ID NO: 1369612 - DNA, 15 bp, Homo sapiens
ctattactgatgcta

SEQ ID NO: 1369613 - DNA, 15 bp, Homo sapiens
tctattactgatgct

SEQ ID NO: 1369614 - DNA, 15 bp, Homo sapiens
gtctattactgatgc

SEQ ID NO: 1369615 - DNA, 15 bp, Homo sapiens
tgtctattactgatg

SEQ ID NO: 1369616 - DNA, 15 bp, Homo sapiens
ttgtctattactgat

SEQ ID NO: 1369617 - DNA, 15 bp, Homo sapiens
tttgtctattactga

SEQ ID NO: 1369618 - DNA, 15 bp, Homo sapiens
ctttgtctattactg

SEQ ID NO: 1369619 - DNA, 15 bp, Homo sapiens
gctttgtctattact

SEQ ID NO: 1369620 - DNA, 15 bp, Homo sapiens
ggctttgtctattac

SEQ ID NO: 1369621 - DNA, 15 bp, Homo sapiens
gggctttgtctatta

SEQ ID NO: 1369622 - DNA, 15 bp, Homo sapiens
ggggctttgtctatt

SEQ ID NO: 1369623 - DNA, 15 bp, Homo sapiens
gggggctttgtctat

SEQ ID NO: 1369624 - DNA, 15 bp, Homo sapiens
tgggggctttgtcta

SEQ ID NO: 1369625 - DNA, 15 bp, Homo sapiens
gtgggggctttgtct

SEQ ID NO: 1369626 - DNA, 15 bp, Homo sapiens
cgtgggggctttgtc

SEQ ID NO: 1369627 - DNA, 15 bp, Homo sapiens
tcgtgggggctttgt

SEQ ID NO: 1369628 - DNA, 15 bp, Homo sapiens
ttcgtgggggctttg

SEQ ID NO: 1369629 - DNA, 15 bp, Homo sapiens
cttcgtgggggcttt

SEQ ID NO: 1369630 - DNA, 15 bp, Homo sapiens
ccttcgtgggggctt

SEQ ID NO: 1369631 - DNA, 15 bp, Homo sapiens
cccttcgtgggggct

SEQ ID NO: 1369632 - DNA, 15 bp, Homo sapiens
tcccttcgtgggggc

SEQ ID NO: 1369633 - DNA, 15 bp, Homo sapiens
ttcccttcgtggggg

SEQ ID NO: 1369634 - DNA, 15 bp, Homo sapiens
attcccttcgtgggg

SEQ ID NO: 1369635 - DNA, 15 bp, Homo sapiens
aattcccttcgtggg

SEQ ID NO: 1369636 - DNA, 15 bp, Homo sapiens
caattcccttcgtgg

SEQ ID NO: 1369637 - DNA, 15 bp, Homo sapiens
acaattcccttcgtg

SEQ ID NO: 1369638 - DNA, 15 bp, Homo sapiens
gacaattcccttcgt

SEQ ID NO: 1369639 - DNA, 15 bp, Homo sapiens
ggacaattcccttcg

SEQ ID NO: 1369640 - DNA, 15 bp, Homo sapiens
aggacaattcccttc

SEQ ID NO: 1369641 - DNA, 15 bp, Homo sapiens
caggacaattccctt

SEQ ID NO: 1369642 - DNA, 15 bp, Homo sapiens
gcaggacaattccct

SEQ ID NO: 1369643 - DNA, 15 bp, Homo sapiens
ggcaggacaattccc

SEQ ID NO: 1369644 - DNA, 15 bp, Homo sapiens
tggcaggacaattcc

SEQ ID NO: 1369645 - DNA, 15 bp, Homo sapiens
gtggcaggacaattc

SEQ ID NO: 1369646 - DNA, 15 bp, Homo sapiens
tgtggcaggacaatt

SEQ ID NO: 1369647 - DNA, 15 bp, Homo sapiens
atgtggcaggacaat

SEQ ID NO: 1369648 - DNA, 15 bp, Homo sapiens
aatgtggcaggacaa

SEQ ID NO: 1369649 - DNA, 15 bp, Homo sapiens
caatgtggcaggaca

SEQ ID NO: 1369650 - DNA, 15 bp, Homo sapiens
ccaatgtggcaggac

SEQ ID NO: 1369651 - DNA, 15 bp, Homo sapiens
tccaatgtggcagga

SEQ ID NO: 1369652 - DNA, 15 bp, Homo sapiens
ctccaatgtggcagg

SEQ ID NO: 1369653 - DNA, 15 bp, Homo sapiens
cctccaatgtggcag

SEQ ID NO: 1369654 - DNA, 15 bp, Homo sapiens
tcctccaatgtggca

SEQ ID NO: 1369655 - DNA, 15 bp, Homo sapiens
gtcctccaatgtggc

SEQ ID NO: 1369656 - DNA, 15 bp, Homo sapiens
tgtcctccaatgtgg

SEQ ID NO: 1369657 - DNA, 15 bp, Homo sapiens
ctgtcctccaatgtg

SEQ ID NO: 1369658 - DNA, 15 bp, Homo sapiens
gctgtcctccaatgt

SEQ ID NO: 1369659 - DNA, 15 bp, Homo sapiens
ggctgtcctccaatg

SEQ ID NO: 1369660 - DNA, 15 bp, Homo sapiens
tggctgtcctccaat

SEQ ID NO: 1369661 - DNA, 15 bp, Homo sapiens
ctggctgtcctccaa

SEQ ID NO: 1369662 - DNA, 15 bp, Homo sapiens
cctggctgtcctcca

SEQ ID NO: 1369663 - DNA, 15 bp, Homo sapiens
acctggctgtcctcc

SEQ ID NO: 1369664 - DNA, 15 bp, Homo sapiens
gacctggctgtcctc

SEQ ID NO: 1369665 - DNA, 15 bp, Homo sapiens
agacctggctgtcct

SEQ ID NO: 1369666 - DNA, 15 bp, Homo sapiens
cagacctggctgtcc

SEQ ID NO: 1369667 - DNA, 15 bp, Homo sapiens
ccagacctggctgtc

SEQ ID NO: 1369668 - DNA, 15 bp, Homo sapiens
tccagacctggctgt

SEQ ID NO: 1369669 - DNA, 15 bp, Homo sapiens
ctccagacctggctg

SEQ ID NO: 1369670 - DNA, 15 bp, Homo sapiens
gctccagacctggct

SEQ ID NO: 1369671 - DNA, 15 bp, Homo sapiens
agctccagacctggc

SEQ ID NO: 1369672 - DNA, 15 bp, Homo sapiens
cagctccagacctgg

SEQ ID NO: 1369673 - DNA, 15 bp, Homo sapiens
ccagctccagacctg

SEQ ID NO: 1369674 - DNA, 15 bp, Homo sapiens
tccagctccagacct

SEQ ID NO: 1369675 - DNA, 15 bp, Homo sapiens
ctccagctccagacc

SEQ ID NO: 1369676 - DNA, 15 bp, Homo sapiens
gctccagctccagac

SEQ ID NO: 1369677 - DNA, 15 bp, Homo sapiens
tgctccagctccaga

SEQ ID NO: 1369678 - DNA, 15 bp, Homo sapiens
gtgctccagctccag

SEQ ID NO: 1369679 - DNA, 15 bp, Homo sapiens
tgtgctccagctcca

SEQ ID NO: 1369680 - DNA, 15 bp, Homo sapiens
gtgtgctccagctcc

SEQ ID NO: 1369681 - DNA, 15 bp, Homo sapiens
ggtgtgctccagctc

SEQ ID NO: 1369682 - DNA, 15 bp, Homo sapiens
gggtgtgctccagct

SEQ ID NO: 1369683 - DNA, 15 bp, Homo sapiens
ggggtgtgctccagc

SEQ ID NO: 1369684 - DNA, 15 bp, Homo sapiens
gggggtgtgctccag

SEQ ID NO: 1369685 - DNA, 15 bp, Homo sapiens
ggggggtgtgctcca

SEQ ID NO: 1369686 - DNA, 15 bp, Homo sapiens
gggggggtgtgctcc

SEQ ID NO: 1369687 - DNA, 15 bp, Homo sapiens
ggggggggtgtgctc

SEQ ID NO: 1369688 - DNA, 15 bp, Homo sapiens
cggggggggtgtgct

SEQ ID NO: 1369689 - DNA, 15 bp, Homo sapiens
gcggggggggtgtgc

SEQ ID NO: 1369690 - DNA, 15 bp, Homo sapiens
ggcggggggggtgtg

SEQ ID NO: 1369691 - DNA, 15 bp, Homo sapiens
gggcggggggggtgt

SEQ ID NO: 1369692 - DNA, 15 bp, Homo sapiens
ggggcggggggggtg

SEQ ID NO: 1369693 - DNA, 15 bp, Homo sapiens
gggggcggggggggt

SEQ ID NO: 1369694 - DNA, 15 bp, Homo sapiens
ggggggcgggggggg

SEQ ID NO: 1369695 - DNA, 15 bp, Homo sapiens
aggggggcggggggg

SEQ ID NO: 1369696 - DNA, 15 bp, Homo sapiens
gaggggggcgggggg

SEQ ID NO: 1369697 - DNA, 15 bp, Homo sapiens
tgaggggggcggggg

SEQ ID NO: 1369698 - DNA, 15 bp, Homo sapiens
gtgaggggggcgggg

SEQ ID NO: 1369699 - DNA, 15 bp, Homo sapiens
tgtgaggggggcggg

SEQ ID NO: 1369700 - DNA, 15 bp, Homo sapiens
ctgtgaggggggcgg

SEQ ID NO: 1369701 - DNA, 15 bp, Homo sapiens
cctgtgaggggggcg

SEQ ID NO: 1369702 - DNA, 15 bp, Homo sapiens
acctgtgaggggggc

SEQ ID NO: 1369703 - DNA, 15 bp, Homo sapiens
gacctgtgagggggg

SEQ ID NO: 1369704 - DNA, 15 bp, Homo sapiens
agacctgtgaggggg

SEQ ID NO: 1369705 - DNA, 15 bp, Homo sapiens
cagacctgtgagggg

SEQ ID NO: 1369706 - DNA, 15 bp, Homo sapiens
ccagacctgtgaggg

SEQ ID NO: 1369707 - DNA, 15 bp, Homo sapiens
cccagacctgtgagg

SEQ ID NO: 1369708 - DNA, 15 bp, Homo sapiens
ccccagacctgtgag

SEQ ID NO: 1369709 - DNA, 15 bp, Homo sapiens
gccccagacctgtga

SEQ ID NO: 1369710 - DNA, 15 bp, Homo sapiens
agccccagacctgtg

SEQ ID NO: 1369711 - DNA, 15 bp, Homo sapiens
cagccccagacctgt

SEQ ID NO: 1369712 - DNA, 15 bp, Homo sapiens
ccagccccagacctg

SEQ ID NO: 1369713 - DNA, 15 bp, Homo sapiens
accagccccagacct

SEQ ID NO: 1369714 - DNA, 15 bp, Homo sapiens
aaccagccccagacc

SEQ ID NO: 1369715 - DNA, 15 bp, Homo sapiens
aaaccagccccagac

SEQ ID NO: 1369716 - DNA, 15 bp, Homo sapiens
aaaaccagccccaga

SEQ ID NO: 1369717 - DNA, 15 bp, Homo sapiens
caaaaccagccccag

SEQ ID NO: 1369718 - DNA, 15 bp, Homo sapiens
gcaaaaccagcccca

SEQ ID NO: 1369719 - DNA, 15 bp, Homo sapiens
ggcaaaaccagcccc

SEQ ID NO: 1369720 - DNA, 15 bp, Homo sapiens
tggcaaaaccagccc

SEQ ID NO: 1369721 - DNA, 15 bp, Homo sapiens
ctggcaaaaccagcc

SEQ ID NO: 1369722 - DNA, 15 bp, Homo sapiens
gctggcaaaaccagc

SEQ ID NO: 1369723 - DNA, 15 bp, Homo sapiens
agctggcaaaaccag

SEQ ID NO: 1369724 - DNA, 15 bp, Homo sapiens
cagctggcaaaacca

SEQ ID NO: 1369725 - DNA, 15 bp, Homo sapiens
gcagctggcaaaacc

SEQ ID NO: 1369726 - DNA, 15 bp, Homo sapiens
agcagctggcaaaac

SEQ ID NO: 1369727 - DNA, 15 bp, Homo sapiens
cagcagctggcaaaa

SEQ ID NO: 1369728 - DNA, 15 bp, Homo sapiens
acagcagctggcaaa

SEQ ID NO: 1369729 - DNA, 15 bp, Homo sapiens
cacagcagctggcaa

SEQ ID NO: 1369730 - DNA, 15 bp, Homo sapiens
ccacagcagctggca

SEQ ID NO: 1369731 - DNA, 15 bp, Homo sapiens
gccacagcagctggc

SEQ ID NO: 1369732 - DNA, 15 bp, Homo sapiens
ggccacagcagctgg

SEQ ID NO: 1369733 - DNA, 15 bp, Homo sapiens
cggccacagcagctg

SEQ ID NO: 1369734 - DNA, 15 bp, Homo sapiens
ccggccacagcagct

SEQ ID NO: 1369735 - DNA, 15 bp, Homo sapiens
cccggccacagcagc

SEQ ID NO: 1369736 - DNA, 15 bp, Homo sapiens
ccccggccacagcag

SEQ ID NO: 1369737 - DNA, 15 bp, Homo sapiens
cccccggccacagca

SEQ ID NO: 1369738 - DNA, 15 bp, Homo sapiens
gcccccggccacagc

SEQ ID NO: 1369739 - DNA, 15 bp, Homo sapiens
tgcccccggccacag

SEQ ID NO: 1369740 - DNA, 15 bp, Homo sapiens
atgcccccggccaca

SEQ ID NO: 1369741 - DNA, 15 bp, Homo sapiens
aatgcccccggccac

SEQ ID NO: 1369742 - DNA, 15 bp, Homo sapiens
caatgcccccggcca

SEQ ID NO: 1369743 - DNA, 15 bp, Homo sapiens
tcaatgcccccggcc

SEQ ID NO: 1369744 - DNA, 15 bp, Homo sapiens
ctcaatgcccccggc

SEQ ID NO: 1369745 - DNA, 15 bp, Homo sapiens
cctcaatgcccccgg

SEQ ID NO: 1369746 - DNA, 15 bp, Homo sapiens
acctcaatgcccccg

SEQ ID NO: 1369747 - DNA, 15 bp, Homo sapiens
gacctcaatgccccc

SEQ ID NO: 1369748 - DNA, 15 bp, Homo sapiens
tgacctcaatgcccc

SEQ ID NO: 1369749 - DNA, 15 bp, Homo sapiens
ctgacctcaatgccc

SEQ ID NO: 1369750 - DNA, 15 bp, Homo sapiens
tctgacctcaatgcc

SEQ ID NO: 1369751 - DNA, 15 bp, Homo sapiens
gtctgacctcaatgc

SEQ ID NO: 1369752 - DNA, 15 bp, Homo sapiens
ggtctgacctcaatg

SEQ ID NO: 1369753 - DNA, 15 bp, Homo sapiens
tggtctgacctcaat

SEQ ID NO: 1369754 - DNA, 15 bp, Homo sapiens
gtggtctgacctcaa

SEQ ID NO: 1369755 - DNA, 15 bp, Homo sapiens
tgtggtctgacctca

SEQ ID NO: 1369756 - DNA, 15 bp, Homo sapiens
ctgtggtctgacctc

SEQ ID NO: 1369757 - DNA, 15 bp, Homo sapiens
tctgtggtctgacct

SEQ ID NO: 1369758 - DNA, 15 bp, Homo sapiens
atctgtggtctgacc

SEQ ID NO: 1369759 - DNA, 15 bp, Homo sapiens
catctgtggtctgac

SEQ ID NO: 1369760 - DNA, 15 bp, Homo sapiens
ccatctgtggtctga

SEQ ID NO: 1369761 - DNA, 15 bp, Homo sapiens
cccatctgtggtctg

SEQ ID NO: 1369762 - DNA, 15 bp, Homo sapiens
gcccatctgtggtct

SEQ ID NO: 1369763 - DNA, 15 bp, Homo sapiens
cgcccatctgtggtc

SEQ ID NO: 1369764 - DNA, 15 bp, Homo sapiens
gcgcccatctgtggt

SEQ ID NO: 1369765 - DNA, 15 bp, Homo sapiens
agcgcccatctgtgg

SEQ ID NO: 1369766 - DNA, 15 bp, Homo sapiens
cagcgcccatctgtg

SEQ ID NO: 1369767 - DNA, 15 bp, Homo sapiens
tcagcgcccatctgt

SEQ ID NO: 1369768 - DNA, 15 bp, Homo sapiens
gtcagcgcccatctg

SEQ ID NO: 1369769 - DNA, 15 bp, Homo sapiens
ggtcagcgcccatct

SEQ ID NO: 1369770 - DNA, 15 bp, Homo sapiens
gggtcagcgcccatc

SEQ ID NO: 1369771 - DNA, 15 bp, Homo sapiens
tgggtcagcgcccat

SEQ ID NO: 1369772 - DNA, 15 bp, Homo sapiens
ctgggtcagcgccca

SEQ ID NO: 1369773 - DNA, 15 bp, Homo sapiens
cctgggtcagcgccc

SEQ ID NO: 1369774 - DNA, 15 bp, Homo sapiens
acctgggtcagcgcc

SEQ ID NO: 1369775 - DNA, 15 bp, Homo sapiens
gacctgggtcagcgc

SEQ ID NO: 1369776 - DNA, 15 bp, Homo sapiens
agacctgggtcagcg

SEQ ID NO: 1369777 - DNA, 15 bp, Homo sapiens
aagacctgggtcagc

SEQ ID NO: 1369778 - DNA, 15 bp, Homo sapiens
gaagacctgggtcag

SEQ ID NO: 1369779 - DNA, 15 bp, Homo sapiens
tgaagacctgggtca

SEQ ID NO: 1369780 - DNA, 15 bp, Homo sapiens
atgaagacctgggtc

SEQ ID NO: 1369781 - DNA, 15 bp, Homo sapiens
gatgaagacctgggt

SEQ ID NO: 1369782 - DNA, 15 bp, Homo sapiens
ggatgaagacctggg

SEQ ID NO: 1369783 - DNA, 15 bp, Homo sapiens
gggatgaagacctgg

SEQ ID NO: 1369784 - DNA, 15 bp, Homo sapiens
ggggatgaagacctg

SEQ ID NO: 1369785 - DNA, 15 bp, Homo sapiens
tggggatgaagacct

SEQ ID NO: 1369786 - DNA, 15 bp, Homo sapiens
atggggatgaagacc

SEQ ID NO: 1369787 - DNA, 15 bp, Homo sapiens
aatggggatgaagac

SEQ ID NO: 1369788 - DNA, 15 bp, Homo sapiens
aaatggggatgaaga

SEQ ID NO: 1369789 - DNA, 15 bp, Homo sapiens
aaaatggggatgaag

SEQ ID NO: 1369790 - DNA, 15 bp, Homo sapiens
caaaatggggatgaa

SEQ ID NO: 1369791 - DNA, 15 bp, Homo sapiens
gcaaaatggggatga

SEQ ID NO: 1369792 - DNA, 15 bp, Homo sapiens
cgcaaaatggggatg

SEQ ID NO: 1369793 - DNA, 15 bp, Homo sapiens
acgcaaaatggggat

SEQ ID NO: 1369794 - DNA, 15 bp, Homo sapiens
tacgcaaaatgggga

SEQ ID NO: 1369795 - DNA, 15 bp, Homo sapiens
atacgcaaaatgggg

SEQ ID NO: 1369796 - DNA, 15 bp, Homo sapiens
catacgcaaaatggg

SEQ ID NO: 1369797 - DNA, 15 bp, Homo sapiens
ccatacgcaaaatgg

SEQ ID NO: 1369798 - DNA, 15 bp, Homo sapiens
cccatacgcaaaatg

SEQ ID NO: 1369799 - DNA, 15 bp, Homo sapiens
tcccatacgcaaaat

SEQ ID NO: 1369800 - DNA, 15 bp, Homo sapiens
ctcccatacgcaaaa

SEQ ID NO: 1369801 - DNA, 15 bp, Homo sapiens
tctcccatacgcaaa

SEQ ID NO: 1369802 - DNA, 15 bp, Homo sapiens
ttctcccatacgcaa

SEQ ID NO: 1369803 - DNA, 15 bp, Homo sapiens
attctcccatacgca

SEQ ID NO: 1369804 - DNA, 15 bp, Homo sapiens
cattctcccatacgc

SEQ ID NO: 1369805 - DNA, 15 bp, Homo sapiens
acattctcccatacg

SEQ ID NO: 1369806 - DNA, 15 bp, Homo sapiens
aacattctcccatac

SEQ ID NO: 1369807 - DNA, 15 bp, Homo sapiens
aaacattctcccata

SEQ ID NO: 1369808 - DNA, 15 bp, Homo sapiens
caaacattctcccat

SEQ ID NO: 1369809 - DNA, 15 bp, Homo sapiens
ccaaacattctccca

SEQ ID NO: 1369810 - DNA, 15 bp, Homo sapiens
gccaaacattctccc

SEQ ID NO: 1369811 - DNA, 15 bp, Homo sapiens
ggccaaacattctcc

SEQ ID NO: 1369812 - DNA, 15 bp, Homo sapiens
gggccaaacattctc

SEQ ID NO: 1369813 - DNA, 15 bp, Homo sapiens
cgggccaaacattct

SEQ ID NO: 1369814 - DNA, 15 bp, Homo sapiens
ccgggccaaacattc

SEQ ID NO: 1369815 - DNA, 15 bp, Homo sapiens
cccgggccaaacatt

SEQ ID NO: 1369816 - DNA, 15 bp, Homo sapiens
tcccgggccaaacat

SEQ ID NO: 1369817 - DNA, 15 bp, Homo sapiens
ttcccgggccaaaca

SEQ ID NO: 1369818 - DNA, 15 bp, Homo sapiens
attcccgggccaaac

SEQ ID NO: 1369819 - DNA, 15 bp, Homo sapiens
gattcccgggccaaa

SEQ ID NO: 1369820 - DNA, 15 bp, Homo sapiens
agattcccgggccaa

SEQ ID NO: 1369821 - DNA, 15 bp, Homo sapiens
tagattcccgggcca

SEQ ID NO: 1369822 - DNA, 15 bp, Homo sapiens
gtagattcccgggcc

SEQ ID NO: 1369823 - DNA, 15 bp, Homo sapiens
tgtagattcccgggc

SEQ ID NO: 1369824 - DNA, 15 bp, Homo sapiens
atgtagattcccggg

SEQ ID NO: 1369825 - DNA, 15 bp, Homo sapiens
catgtagattcccgg

SEQ ID NO: 1369826 - DNA, 15 bp, Homo sapiens
ccatgtagattcccg

SEQ ID NO: 1369827 - DNA, 15 bp, Homo sapiens
tccatgtagattccc

SEQ ID NO: 1369828 - DNA, 15 bp, Homo sapiens
gtccatgtagattcc

SEQ ID NO: 1369829 - DNA, 15 bp, Homo sapiens
ggtccatgtagattc

SEQ ID NO: 1369830 - DNA, 15 bp, Homo sapiens
tggtccatgtagatt

SEQ ID NO: 1369831 - DNA, 15 bp, Homo sapiens
atggtccatgtagat

SEQ ID NO: 1369832 - DNA, 15 bp, Homo sapiens
aatggtccatgtaga

SEQ ID NO: 1369833 - DNA, 15 bp, Homo sapiens
aaatggtccatgtag

SEQ ID NO: 1369834 - DNA, 15 bp, Homo sapiens
taaatggtccatgta

SEQ ID NO: 1369835 - DNA, 15 bp, Homo sapiens
gtaaatggtccatgt

SEQ ID NO: 1369836 - DNA, 15 bp, Homo sapiens
tgtaaatggtccatg

SEQ ID NO: 1369837 - DNA, 15 bp, Homo sapiens
atgtaaatggtccat

SEQ ID NO: 1369838 - DNA, 15 bp, Homo sapiens
aatgtaaatggtcca

SEQ ID NO: 1369839 - DNA, 15 bp, Homo sapiens
gaatgtaaatggtcc

SEQ ID NO: 1369840 - DNA, 15 bp, Homo sapiens
agaatgtaaatggtc

SEQ ID NO: 1369841 - DNA, 15 bp, Homo sapiens
aagaatgtaaatggt

SEQ ID NO: 1369842 - DNA, 15 bp, Homo sapiens
gaagaatgtaaatgg

SEQ ID NO: 1369843 - DNA, 15 bp, Homo sapiens
tgaagaatgtaaatg

SEQ ID NO: 1369844 - DNA, 15 bp, Homo sapiens
ctgaagaatgtaaat

SEQ ID NO: 1369845 - DNA, 15 bp, Homo sapiens
actgaagaatgtaaa

SEQ ID NO: 1369846 - DNA, 15 bp, Homo sapiens
aactgaagaatgtaa

SEQ ID NO: 1369847 - DNA, 15 bp, Homo sapiens
aaactgaagaatgta

SEQ ID NO: 1369848 - DNA, 15 bp, Homo sapiens
gaaactgaagaatgt

SEQ ID NO: 1369849 - DNA, 15 bp, Homo sapiens
agaaactgaagaatg

SEQ ID NO: 1369850 - DNA, 15 bp, Homo sapiens
tagaaactgaagaat

SEQ ID NO: 1369851 - DNA, 15 bp, Homo sapiens
atagaaactgaagaa

SEQ ID NO: 1369852 - DNA, 15 bp, Homo sapiens
catagaaactgaaga

SEQ ID NO: 1369853 - DNA, 15 bp, Homo sapiens
acatagaaactgaag

SEQ ID NO: 1369854 - DNA, 15 bp, Homo sapiens
gacatagaaactgaa

SEQ ID NO: 1369855 - DNA, 15 bp, Homo sapiens
ggacatagaaactga

SEQ ID NO: 1369856 - DNA, 15 bp, Homo sapiens
gggacatagaaactg

SEQ ID NO: 1369857 - DNA, 15 bp, Homo sapiens
agggacatagaaact

SEQ ID NO: 1369858 - DNA, 15 bp, Homo sapiens
aagggacatagaaac

SEQ ID NO: 1369859 - DNA, 15 bp, Homo sapiens
taagggacatagaaa

SEQ ID NO: 1369860 - DNA, 15 bp, Homo sapiens
ctaagggacatagaa

SEQ ID NO: 1369861 - DNA, 15 bp, Homo sapiens
cctaagggacataga

SEQ ID NO: 1369862 - DNA, 15 bp, Homo sapiens
acctaagggacatag

SEQ ID NO: 1369863 - DNA, 15 bp, Homo sapiens
aacctaagggacata

SEQ ID NO: 1369864 - DNA, 15 bp, Homo sapiens
caacctaagggacat

SEQ ID NO: 1369865 - DNA, 15 bp, Homo sapiens
tcaacctaagggaca

SEQ ID NO: 1369866 - DNA, 15 bp, Homo sapiens
ttcaacctaagggac

SEQ ID NO: 1369867 - DNA, 15 bp, Homo sapiens
attcaacctaaggga

SEQ ID NO: 1369868 - DNA, 15 bp, Homo sapiens
aattcaacctaaggg

SEQ ID NO: 1369869 - DNA, 15 bp, Homo sapiens
aaattcaacctaagg

SEQ ID NO: 1369870 - DNA, 15 bp, Homo sapiens
aaaattcaacctaag

SEQ ID NO: 1369871 - DNA, 15 bp, Homo sapiens
aaaaattcaacctaa

SEQ ID NO: 1369872 - DNA, 15 bp, Homo sapiens
caaaaattcaaccta

SEQ ID NO: 1369873 - DNA, 15 bp, Homo sapiens
ccaaaaattcaacct

SEQ ID NO: 1369874 - DNA, 15 bp, Homo sapiens
accaaaaattcaacc

SEQ ID NO: 1369875 - DNA, 15 bp, Homo sapiens
gaccaaaaattcaac

SEQ ID NO: 1369876 - DNA, 15 bp, Homo sapiens
agaccaaaaattcaa

SEQ ID NO: 1369877 - DNA, 15 bp, Homo sapiens
aagaccaaaaattca

SEQ ID NO: 1369878 - DNA, 15 bp, Homo sapiens
caagaccaaaaattc

SEQ ID NO: 1369879 - DNA, 15 bp, Homo sapiens
ccaagaccaaaaatt

SEQ ID NO: 1369880 - DNA, 15 bp, Homo sapiens
cccaagaccaaaaat

SEQ ID NO: 1369881 - DNA, 15 bp, Homo sapiens
acccaagaccaaaaa

SEQ ID NO: 1369882 - DNA, 15 bp, Homo sapiens
aacccaagaccaaaa

SEQ ID NO: 1369883 - DNA, 15 bp, Homo sapiens
taacccaagaccaaa

SEQ ID NO: 1369884 - DNA, 15 bp, Homo sapiens
gtaacccaagaccaa

SEQ ID NO: 1369885 - DNA, 15 bp, Homo sapiens
agtaacccaagacca

SEQ ID NO: 1369886 - DNA, 15 bp, Homo sapiens
tagtaacccaagacc

SEQ ID NO: 1369887 - DNA, 15 bp, Homo sapiens
ctagtaacccaagac

SEQ ID NO: 1369888 - DNA, 15 bp, Homo sapiens
tctagtaacccaaga

SEQ ID NO: 1369889 - DNA, 15 bp, Homo sapiens
atctagtaacccaag

SEQ ID NO: 1369890 - DNA, 15 bp, Homo sapiens
catctagtaacccaa

SEQ ID NO: 1369891 - DNA, 15 bp, Homo sapiens
tcatctagtaaccca

SEQ ID NO: 1369892 - DNA, 15 bp, Homo sapiens
ttcatctagtaaccc

SEQ ID NO: 1369893 - DNA, 15 bp, Homo sapiens
tttcatctagtaacc

SEQ ID NO: 1369894 - DNA, 15 bp, Homo sapiens
gtttcatctagtaac

SEQ ID NO: 1369895 - DNA, 15 bp, Homo sapiens
tgtttcatctagtaa

SEQ ID NO: 1369896 - DNA, 15 bp, Homo sapiens
ctgtttcatctagta

SEQ ID NO: 1369897 - DNA, 15 bp, Homo sapiens
cctgtttcatctagt

SEQ ID NO: 1369898 - DNA, 15 bp, Homo sapiens
gcctgtttcatctag

SEQ ID NO: 1369899 - DNA, 15 bp, Homo sapiens
tgcctgtttcatcta

SEQ ID NO: 1369900 - DNA, 15 bp, Homo sapiens
gtgcctgtttcatct

SEQ ID NO: 1369901 - DNA, 15 bp, Homo sapiens
tgtgcctgtttcatc

SEQ ID NO: 1369902 - DNA, 15 bp, Homo sapiens
ttgtgcctgtttcat

SEQ ID NO: 1369903 - DNA, 15 bp, Homo sapiens
tttgtgcctgtttca

SEQ ID NO: 1369904 - DNA, 15 bp, Homo sapiens
ctttgtgcctgtttc

SEQ ID NO: 1369905 - DNA, 15 bp, Homo sapiens
actttgtgcctgttt

SEQ ID NO: 1369906 - DNA, 15 bp, Homo sapiens
aactttgtgcctgtt

SEQ ID NO: 1369907 - DNA, 15 bp, Homo sapiens
aaactttgtgcctgt

SEQ ID NO: 1369908 - DNA, 15 bp, Homo sapiens
aaaactttgtgcctg

SEQ ID NO: 1369909 - DNA, 15 bp, Homo sapiens
taaaactttgtgcct

SEQ ID NO: 1369910 - DNA, 15 bp, Homo sapiens
gtaaaactttgtgcc

SEQ ID NO: 1369911 - DNA, 15 bp, Homo sapiens
tgtaaaactttgtgc

SEQ ID NO: 1369912 - DNA, 15 bp, Homo sapiens
ctgtaaaactttgtg

SEQ ID NO: 1369913 - DNA, 15 bp, Homo sapiens
actgtaaaactttgt

SEQ ID NO: 1369914 - DNA, 15 bp, Homo sapiens
cactgtaaaactttg

SEQ ID NO: 1369915 - DNA, 15 bp, Homo sapiens
ccactgtaaaacttt

SEQ ID NO: 1369916 - DNA, 15 bp, Homo sapiens
tccactgtaaaactt

SEQ ID NO: 1369917 - DNA, 15 bp, Homo sapiens
gtccactgtaaaact

SEQ ID NO: 1369918 - DNA, 15 bp, Homo sapiens
tgtccactgtaaaac

SEQ ID NO: 1369919 - DNA, 15 bp, Homo sapiens
ttgtccactgtaaaa

SEQ ID NO: 1369920 - DNA, 15 bp, Homo sapiens
gttgtccactgtaaa

SEQ ID NO: 1369921 - DNA, 15 bp, Homo sapiens
agttgtccactgtaa

SEQ ID NO: 1369922 - DNA, 15 bp, Homo sapiens
cagttgtccactgta

SEQ ID NO: 1369923 - DNA, 15 bp, Homo sapiens
acagttgtccactgt

SEQ ID NO: 1369924 - DNA, 15 bp, Homo sapiens
aacagttgtccactg

SEQ ID NO: 1369925 - DNA, 15 bp, Homo sapiens
taacagttgtccact

SEQ ID NO: 1369926 - DNA, 15 bp, Homo sapiens
ttaacagttgtccac

SEQ ID NO: 1369927 - DNA, 15 bp, Homo sapiens
tttaacagttgtcca

SEQ ID NO: 1369928 - DNA, 15 bp, Homo sapiens
ctccgggcagccagt

SEQ ID NO: 1369929 - DNA, 15 bp, Homo sapiens
gctccgggcagccag

SEQ ID NO: 1369930 - DNA, 15 bp, Homo sapiens
ggctccgggcagcca

SEQ ID NO: 1369931 - DNA, 15 bp, Homo sapiens
gggctccgggcagcc

SEQ ID NO: 1369932 - DNA, 15 bp, Homo sapiens
tgggctccgggcagc

SEQ ID NO: 1369933 - DNA, 15 bp, Homo sapiens
ctgggctccgggcag

SEQ ID NO: 1369934 - DNA, 15 bp, Homo sapiens
tctgggctccgggca

SEQ ID NO: 1369935 - DNA, 15 bp, Homo sapiens
gtctgggctccgggc

SEQ ID NO: 1369936 - DNA, 15 bp, Homo sapiens
cgtctgggctccggg

SEQ ID NO: 1369937 - DNA, 15 bp, Homo sapiens
ccgtctgggctccgg

SEQ ID NO: 1369938 - DNA, 15 bp, Homo sapiens
cccgtctgggctccg

SEQ ID NO: 1369939 - DNA, 15 bp, Homo sapiens
acccgtctgggctcc

SEQ ID NO: 1369940 - DNA, 15 bp, Homo sapiens
cacccgtctgggctc

SEQ ID NO: 1369941 - DNA, 15 bp, Homo sapiens
tcacccgtctgggct

SEQ ID NO: 1369942 - DNA, 15 bp, Homo sapiens
gtcacccgtctgggc

SEQ ID NO: 1369943 - DNA, 15 bp, Homo sapiens
tgtcacccgtctggg

SEQ ID NO: 1369944 - DNA, 15 bp, Homo sapiens
ttgtcacccgtctgg

SEQ ID NO: 1369945 - DNA, 15 bp, Homo sapiens
cttgtcacccgtctg

SEQ ID NO: 1369946 - DNA, 15 bp, Homo sapiens
ccttgtcacccgtct

SEQ ID NO: 1369947 - DNA, 15 bp, Homo sapiens
accttgtcacccgtc

SEQ ID NO: 1369948 - DNA, 15 bp, Homo sapiens
caccttgtcacccgt

SEQ ID NO: 1369949 - DNA, 15 bp, Homo sapiens
gcaccttgtcacccg

SEQ ID NO: 1369950 - DNA, 15 bp, Homo sapiens
agcaccttgtcaccc

SEQ ID NO: 1369951 - DNA, 15 bp, Homo sapiens
cagcaccttgtcacc

SEQ ID NO: 1369952 - DNA, 15 bp, Homo sapiens
acagcaccttgtcac

SEQ ID NO: 1369953 - DNA, 15 bp, Homo sapiens
cacagcaccttgtca

SEQ ID NO: 1369954 - DNA, 15 bp, Homo sapiens
ccacagcaccttgtc

SEQ ID NO: 1369955 - DNA, 15 bp, Homo sapiens
accacagcaccttgt

SEQ ID NO: 1369956 - DNA, 15 bp, Homo sapiens
gaccacagcaccttg

SEQ ID NO: 1369957 - DNA, 15 bp, Homo sapiens
agaccacagcacctt

SEQ ID NO: 1369958 - DNA, 15 bp, Homo sapiens
cagaccacagcacct

SEQ ID NO: 1369959 - DNA, 15 bp, Homo sapiens
acagaccacagcacc

SEQ ID NO: 1369960 - DNA, 15 bp, Homo sapiens
gacagaccacagcac

SEQ ID NO: 1369961 - DNA, 15 bp, Homo sapiens
agacagaccacagca

SEQ ID NO: 1369962 - DNA, 15 bp, Homo sapiens
aagacagaccacagc

SEQ ID NO: 1369963 - DNA, 15 bp, Homo sapiens
taagacagaccacag

SEQ ID NO: 1369964 - DNA, 15 bp, Homo sapiens
gtaagacagaccaca

SEQ ID NO: 1369965 - DNA, 15 bp, Homo sapiens
cgtaagacagaccac

SEQ ID NO: 1369966 - DNA, 15 bp, Homo sapiens
tcgtaagacagacca

SEQ ID NO: 1369967 - DNA, 15 bp, Homo sapiens
atcgtaagacagacc

SEQ ID NO: 1369968 - DNA, 15 bp, Homo sapiens
catcgtaagacagac

SEQ ID NO: 1369969 - DNA, 15 bp, Homo sapiens
ccatcgtaagacaga

SEQ ID NO: 1369970 - DNA, 15 bp, Homo sapiens
cccatcgtaagacag

SEQ ID NO: 1369971 - DNA, 15 bp, Homo sapiens
gcccatcgtaagaca

SEQ ID NO: 1369972 - DNA, 15 bp, Homo sapiens
tgcccatcgtaagac

SEQ ID NO: 1369973 - DNA, 15 bp, Homo sapiens
ctgcccatcgtaaga

SEQ ID NO: 1369974 - DNA, 15 bp, Homo sapiens
actgcccatcgtaag

SEQ ID NO: 1369975 - DNA, 15 bp, Homo sapiens
cactgcccatcgtaa

SEQ ID NO: 1369976 - DNA, 15 bp, Homo sapiens
tcactgcccatcgta

SEQ ID NO: 1369977 - DNA, 15 bp, Homo sapiens
ttcactgcccatcgt

SEQ ID NO: 1369978 - DNA, 15 bp, Homo sapiens
cttcactgcccatcg

SEQ ID NO: 1369979 - DNA, 15 bp, Homo sapiens
gcttcactgcccatc

SEQ ID NO: 1369980 - DNA, 15 bp, Homo sapiens
ggcttcactgcccat

SEQ ID NO: 1369981 - DNA, 15 bp, Homo sapiens
aggcttcactgccca

SEQ ID NO: 1369982 - DNA, 15 bp, Homo sapiens
caggcttcactgccc

SEQ ID NO: 1369983 - DNA, 15 bp, Homo sapiens
tcaggcttcactgcc

SEQ ID NO: 1369984 - DNA, 15 bp, Homo sapiens
ctcaggcttcactgc

SEQ ID NO: 1369985 - DNA, 15 bp, Homo sapiens
gctcaggcttcactg

SEQ ID NO: 1369986 - DNA, 15 bp, Homo sapiens
tgctcaggcttcact

SEQ ID NO: 1369987 - DNA, 15 bp, Homo sapiens
ctgctcaggcttcac

SEQ ID NO: 1369988 - DNA, 15 bp, Homo sapiens
tctgctcaggcttca

SEQ ID NO: 1369989 - DNA, 15 bp, Homo sapiens
gtctgctcaggcttc

SEQ ID NO: 1369990 - DNA, 15 bp, Homo sapiens
ggtctgctcaggctt

SEQ ID NO: 1369991 - DNA, 15 bp, Homo sapiens
tggtctgctcaggct

SEQ ID NO: 1369992 - DNA, 15 bp, Homo sapiens
atggtctgctcaggc

SEQ ID NO: 1369993 - DNA, 15 bp, Homo sapiens
aatggtctgctcagg

SEQ ID NO: 1369994 - DNA, 15 bp, Homo sapiens
taatggtctgctcag

SEQ ID NO: 1369995 - DNA, 15 bp, Homo sapiens
ttaatggtctgctca

SEQ ID NO: 1369996 - DNA, 15 bp, Homo sapiens
attaatggtctgctc

SEQ ID NO: 1369997 - DNA, 15 bp, Homo sapiens
tattaatggtctgct

SEQ ID NO: 1369998 - DNA, 15 bp, Homo sapiens
ttattaatggtctgc

SEQ ID NO: 1369999 - DNA, 15 bp, Homo sapiens
attattaatggtctg

SEQ ID NO: 1370000 - DNA, 15 bp, Homo sapiens
gattattaatggtct

SEQ ID NO: 1370001 - DNA, 15 bp, Homo sapiens
tgattattaatggtc

SEQ ID NO: 1370002 - DNA, 15 bp, Homo sapiens
ctgattattaatggt

SEQ ID NO: 1370003 - DNA, 15 bp, Homo sapiens
gctgattattaatgg

SEQ ID NO: 1370004 - DNA, 15 bp, Homo sapiens
tgctgattattaatg

SEQ ID NO: 1370005 - DNA, 15 bp, Homo sapiens
atgctgattattaat

SEQ ID NO: 1370006 - DNA, 15 bp, Homo sapiens
gatgctgattattaa

SEQ ID NO: 1370007 - DNA, 15 bp, Homo sapiens
tgatgctgattatta

SEQ ID NO: 1370008 - DNA, 15 bp, Homo sapiens
ttgatgctgattatt

SEQ ID NO: 1370009 - DNA, 15 bp, Homo sapiens
cttgatgctgattat

SEQ ID NO: 1370010 - DNA, 15 bp, Homo sapiens
ccttgatgctgatta

SEQ ID NO: 1370011 - DNA, 15 bp, Homo sapiens
gccttgatgctgatt

SEQ ID NO: 1370012 - DNA, 15 bp, Homo sapiens
ggccttgatgctgat

SEQ ID NO: 1370013 - DNA, 15 bp, Homo sapiens
cggccttgatgctga

SEQ ID NO: 1370014 - DNA, 15 bp, Homo sapiens
gcggccttgatgctg

SEQ ID NO: 1370015 - DNA, 15 bp, Homo sapiens
cgcggccttgatgct

SEQ ID NO: 1370016 - DNA, 15 bp, Homo sapiens
tcgcggccttgatgc

SEQ ID NO: 1370017 - DNA, 15 bp, Homo sapiens
ctcgcggccttgatg

SEQ ID NO: 1370018 - DNA, 15 bp, Homo sapiens
actcgcggccttgat

SEQ ID NO: 1370019 - DNA, 15 bp, Homo sapiens
gactcgcggccttga

SEQ ID NO: 1370020 - DNA, 15 bp, Homo sapiens
tgactcgcggccttg

SEQ ID NO: 1370021 - DNA, 15 bp, Homo sapiens
ctgactcgcggcctt

SEQ ID NO: 1370022 - DNA, 15 bp, Homo sapiens
gctgactcgcggcct

SEQ ID NO: 1370023 - DNA, 15 bp, Homo sapiens
ggctgactcgcggcc

SEQ ID NO: 1370024 - DNA, 15 bp, Homo sapiens
aggctgactcgcggc

SEQ ID NO: 1370025 - DNA, 15 bp, Homo sapiens
aaggctgactcgcgg

SEQ ID NO: 1370026 - DNA, 15 bp, Homo sapiens
aaaggctgactcgcg

SEQ ID NO: 1370027 - DNA, 15 bp, Homo sapiens
aaaaggctgactcgc

SEQ ID NO: 1370028 - DNA, 15 bp, Homo sapiens
caaaaggctgactcg

SEQ ID NO: 1370029 - DNA, 15 bp, Homo sapiens
ccaaaaggctgactc

SEQ ID NO: 1370030 - DNA, 15 bp, Homo sapiens
tccaaaaggctgact

SEQ ID NO: 1370031 - DNA, 15 bp, Homo sapiens
ttccaaaaggctgac

SEQ ID NO: 1370032 - DNA, 15 bp, Homo sapiens
attccaaaaggctga

SEQ ID NO: 1370033 - DNA, 15 bp, Homo sapiens
cattccaaaaggctg

SEQ ID NO: 1370034 - DNA, 15 bp, Homo sapiens
acattccaaaaggct

SEQ ID NO: 1370035 - DNA, 15 bp, Homo sapiens
cacattccaaaaggc

SEQ ID NO: 1370036 - DNA, 15 bp, Homo sapiens
acacattccaaaagg

SEQ ID NO: 1370037 - DNA, 15 bp, Homo sapiens
cacacattccaaaag

SEQ ID NO: 1370038 - DNA, 15 bp, Homo sapiens
ccacacattccaaaa

SEQ ID NO: 1370039 - DNA, 15 bp, Homo sapiens
accacacattccaaa

SEQ ID NO: 1370040 - DNA, 15 bp, Homo sapiens
aaccacacattccaa

SEQ ID NO: 1370041 - DNA, 15 bp, Homo sapiens
aaaccacacattcca

SEQ ID NO: 1370042 - DNA, 15 bp, Homo sapiens
caaaccacacattcc

SEQ ID NO: 1370043 - DNA, 15 bp, Homo sapiens
acaaaccacacattc

SEQ ID NO: 1370044 - DNA, 15 bp, Homo sapiens
gacaaaccacacatt

SEQ ID NO: 1370045 - DNA, 15 bp, Homo sapiens
agacaaaccacacat

SEQ ID NO: 1370046 - DNA, 15 bp, Homo sapiens
aagacaaaccacaca

SEQ ID NO: 1370047 - DNA, 15 bp, Homo sapiens
aaagacaaaccacac

SEQ ID NO: 1370048 - DNA, 15 bp, Homo sapiens
gaaagacaaaccaca

SEQ ID NO: 1370049 - DNA, 15 bp, Homo sapiens
tgaaagacaaaccac

SEQ ID NO: 1370050 - DNA, 15 bp, Homo sapiens
atgaaagacaaacca

SEQ ID NO: 1370051 - DNA, 15 bp, Homo sapiens
catgaaagacaaacc

SEQ ID NO: 1370052 - DNA, 15 bp, Homo sapiens
gcatgaaagacaaac

SEQ ID NO: 1370053 - DNA, 15 bp, Homo sapiens
agcatgaaagacaaa

SEQ ID NO: 1370054 - DNA, 15 bp, Homo sapiens
cagcatgaaagacaa

SEQ ID NO: 1370055 - DNA, 15 bp, Homo sapiens
acagcatgaaagaca

SEQ ID NO: 1370056 - DNA, 15 bp, Homo sapiens
aacagcatgaaagac

SEQ ID NO: 1370057 - DNA, 15 bp, Homo sapiens
aaacagcatgaaaga

SEQ ID NO: 1370058 - DNA, 15 bp, Homo sapiens
taaacagcatgaaag

SEQ ID NO: 1370059 - DNA, 15 bp, Homo sapiens
ctaaacagcatgaaa

SEQ ID NO: 1370060 - DNA, 15 bp, Homo sapiens
tctaaacagcatgaa

SEQ ID NO: 1370061 - DNA, 15 bp, Homo sapiens
ctctaaacagcatga

SEQ ID NO: 1370062 - DNA, 15 bp, Homo sapiens
gctctaaacagcatg

SEQ ID NO: 1370063 - DNA, 15 bp, Homo sapiens
cgctctaaacagcat

SEQ ID NO: 1370064 - DNA, 15 bp, Homo sapiens
acgctctaaacagca

SEQ ID NO: 1370065 - DNA, 15 bp, Homo sapiens
cacgctctaaacagc

SEQ ID NO: 1370066 - DNA, 15 bp, Homo sapiens
gcacgctctaaacag

SEQ ID NO: 1370067 - DNA, 15 bp, Homo sapiens
agcacgctctaaaca

SEQ ID NO: 1370068 - DNA, 15 bp, Homo sapiens
aagcacgctctaaac

SEQ ID NO: 1370069 - DNA, 15 bp, Homo sapiens
taagcacgctctaaa

SEQ ID NO: 1370070 - DNA, 15 bp, Homo sapiens
ttaagcacgctctaa

SEQ ID NO: 1370071 - DNA, 15 bp, Homo sapiens
tttaagcacgctcta

SEQ ID NO: 1370072 - DNA, 15 bp, Homo sapiens
ctttaagcacgctct

SEQ ID NO: 1370073 - DNA, 15 bp, Homo sapiens
tctttaagcacgctc

SEQ ID NO: 1370074 - DNA, 15 bp, Homo sapiens
atctttaagcacgct

SEQ ID NO: 1370075 - DNA, 15 bp, Homo sapiens
catctttaagcacgc

SEQ ID NO: 1370076 - DNA, 15 bp, Homo sapiens
ccatctttaagcacg

SEQ ID NO: 1370077 - DNA, 15 bp, Homo sapiens
tccatctttaagcac

SEQ ID NO: 1370078 - DNA, 15 bp, Homo sapiens
atccatctttaagca

SEQ ID NO: 1370079 - DNA, 15 bp, Homo sapiens
gatccatctttaagc

SEQ ID NO: 1370080 - DNA, 15 bp, Homo sapiens
agatccatctttaag

SEQ ID NO: 1370081 - DNA, 15 bp, Homo sapiens
aagatccatctttaa

SEQ ID NO: 1370082 - DNA, 15 bp, Homo sapiens
caagatccatcttta

SEQ ID NO: 1370083 - DNA, 15 bp, Homo sapiens
ccaagatccatcttt

SEQ ID NO: 1370084 - DNA, 15 bp, Homo sapiens
accaagatccatctt

SEQ ID NO: 1370085 - DNA, 15 bp, Homo sapiens
caccaagatccatct

SEQ ID NO: 1370086 - DNA, 15 bp, Homo sapiens
acaccaagatccatc

SEQ ID NO: 1370087 - DNA, 15 bp, Homo sapiens
aacaccaagatccat

SEQ ID NO: 1370088 - DNA, 15 bp, Homo sapiens
aaacaccaagatcca

SEQ ID NO: 1370089 - DNA, 15 bp, Homo sapiens
aaaacaccaagatcc

SEQ ID NO: 1370090 - DNA, 15 bp, Homo sapiens
aaaaacaccaagatc

SEQ ID NO: 1370091 - DNA, 15 bp, Homo sapiens
taaaaacaccaagat

SEQ ID NO: 1370092 - DNA, 15 bp, Homo sapiens
ataaaaacaccaaga

SEQ ID NO: 1370093 - DNA, 15 bp, Homo sapiens
aataaaaacaccaag

SEQ ID NO: 1370094 - DNA, 15 bp, Homo sapiens
aaataaaaacaccaa

SEQ ID NO: 1370095 - DNA, 15 bp, Homo sapiens
caaataaaaacacca

SEQ ID NO: 1370096 - DNA, 15 bp, Homo sapiens
acaaataaaaacacc

SEQ ID NO: 1370097 - DNA, 15 bp, Homo sapiens
cacaaataaaaacac

SEQ ID NO: 1370098 - DNA, 15 bp, Homo sapiens
acacaaataaaaaca

SEQ ID NO: 1370099 - DNA, 15 bp, Homo sapiens
tacacaaataaaaac

SEQ ID NO: 1370100 - DNA, 15 bp, Homo sapiens
atacacaaataaaaa

SEQ ID NO: 1370101 - DNA, 15 bp, Homo sapiens
aatacacaaataaaa

SEQ ID NO: 1370102 - DNA, 15 bp, Homo sapiens
aaatacacaaataaa

SEQ ID NO: 1370103 - DNA, 15 bp, Homo sapiens
taaatacacaaataa

SEQ ID NO: 1370104 - DNA, 15 bp, Homo sapiens
ataaatacacaaata

SEQ ID NO: 1370105 - DNA, 15 bp, Homo sapiens
aataaatacacaaat

SEQ ID NO: 1370106 - DNA, 15 bp, Homo sapiens
aaataaatacacaaa

SEQ ID NO: 1370107 - DNA, 15 bp, Homo sapiens
gaaataaatacacaa

SEQ ID NO: 1370108 - DNA, 15 bp, Homo sapiens
agaaataaatacaca

SEQ ID NO: 1370109 - DNA, 15 bp, Homo sapiens
aagaaataaatacac

SEQ ID NO: 1370110 - DNA, 15 bp, Homo sapiens
aaagaaataaataca

SEQ ID NO: 1370111 - DNA, 15 bp, Homo sapiens
gaaagaaataaatac

SEQ ID NO: 1370112 - DNA, 15 bp, Homo sapiens
agaaagaaataaata

SEQ ID NO: 1370113 - DNA, 15 bp, Homo sapiens
gagaaagaaataaat

SEQ ID NO: 1370114 - DNA, 15 bp, Homo sapiens
agagaaagaaataaa

SEQ ID NO: 1370115 - DNA, 15 bp, Homo sapiens
gagagaaagaaataa

SEQ ID NO: 1370116 - DNA, 15 bp, Homo sapiens
ggagagaaagaaata

SEQ ID NO: 1370117 - DNA, 15 bp, Homo sapiens
gggagagaaagaaat

SEQ ID NO: 1370118 - DNA, 15 bp, Homo sapiens
ggggagagaaagaaa

SEQ ID NO: 1370119 - DNA, 15 bp, Homo sapiens
aggggagagaaagaa

SEQ ID NO: 1370120 - DNA, 15 bp, Homo sapiens
aaggggagagaaaga

SEQ ID NO: 1370121 - DNA, 15 bp, Homo sapiens
aaaggggagagaaag

SEQ ID NO: 1370122 - DNA, 15 bp, Homo sapiens
aaaaggggagagaaa

SEQ ID NO: 1370123 - DNA, 15 bp, Homo sapiens
gaaaaggggagagaa

SEQ ID NO: 1370124 - DNA, 15 bp, Homo sapiens
tgaaaaggggagaga

SEQ ID NO: 1370125 - DNA, 15 bp, Homo sapiens
ttgaaaaggggagag

SEQ ID NO: 1370126 - DNA, 15 bp, Homo sapiens
tttgaaaaggggaga

SEQ ID NO: 1370127 - DNA, 15 bp, Homo sapiens
atttgaaaaggggag

SEQ ID NO: 1370128 - DNA, 15 bp, Homo sapiens
gatttgaaaagggga

SEQ ID NO: 1370129 - DNA, 15 bp, Homo sapiens
ggatttgaaaagggg

SEQ ID NO: 1370130 - DNA, 15 bp, Homo sapiens
tggatttgaaaaggg

SEQ ID NO: 1370131 - DNA, 15 bp, Homo sapiens
gtggatttgaaaagg

SEQ ID NO: 1370132 - DNA, 15 bp, Homo sapiens
tgtggatttgaaaag

SEQ ID NO: 1370133 - DNA, 15 bp, Homo sapiens
ctgtggatttgaaaa

SEQ ID NO: 1370134 - DNA, 15 bp, Homo sapiens
gctgtggatttgaaa

SEQ ID NO: 1370135 - DNA, 15 bp, Homo sapiens
tgctgtggatttgaa

SEQ ID NO: 1370136 - DNA, 15 bp, Homo sapiens
ctgctgtggatttga

SEQ ID NO: 1370137 - DNA, 15 bp, Homo sapiens
tctgctgtggatttg

SEQ ID NO: 1370138 - DNA, 15 bp, Homo sapiens
gtctgctgtggattt

SEQ ID NO: 1370139 - DNA, 15 bp, Homo sapiens
agtctgctgtggatt

SEQ ID NO: 1370140 - DNA, 15 bp, Homo sapiens
cagtctgctgtggat

SEQ ID NO: 1370141 - DNA, 15 bp, Homo sapiens
acagtctgctgtgga

SEQ ID NO: 1370142 - DNA, 15 bp, Homo sapiens
gacagtctgctgtgg

SEQ ID NO: 1370143 - DNA, 15 bp, Homo sapiens
ggacagtctgctgtg

SEQ ID NO: 1370144 - DNA, 15 bp, Homo sapiens
tggacagtctgctgt

SEQ ID NO: 1370145 - DNA, 15 bp, Homo sapiens
ctggacagtctgctg

SEQ ID NO: 1370146 - DNA, 15 bp, Homo sapiens
tctggacagtctgct

SEQ ID NO: 1370147 - DNA, 15 bp, Homo sapiens
atctggacagtctgc

SEQ ID NO: 1370148 - DNA, 15 bp, Homo sapiens
catctggacagtctg

SEQ ID NO: 1370149 - DNA, 15 bp, Homo sapiens
gcatctggacagtct

SEQ ID NO: 1370150 - DNA, 15 bp, Homo sapiens
agcatctggacagtc

SEQ ID NO: 1370151 - DNA, 15 bp, Homo sapiens
cagcatctggacagt

SEQ ID NO: 1370152 - DNA, 15 bp, Homo sapiens
acagcatctggacag

SEQ ID NO: 1370153 - DNA, 15 bp, Homo sapiens
cacagcatctggaca

SEQ ID NO: 1370154 - DNA, 15 bp, Homo sapiens
gcacagcatctggac

SEQ ID NO: 1370155 - DNA, 15 bp, Homo sapiens
ggcacagcatctgga

SEQ ID NO: 1370156 - DNA, 15 bp, Homo sapiens
aggcacagcatctgg

SEQ ID NO: 1370157 - DNA, 15 bp, Homo sapiens
aaggcacagcatctg

SEQ ID NO: 1370158 - DNA, 15 bp, Homo sapiens
gaaggcacagcatct

SEQ ID NO: 1370159 - DNA, 15 bp, Homo sapiens
ggaaggcacagcatc

SEQ ID NO: 1370160 - DNA, 15 bp, Homo sapiens
aggaaggcacagcat

SEQ ID NO: 1370161 - DNA, 15 bp, Homo sapiens
gaggaaggcacagca

SEQ ID NO: 1370162 - DNA, 15 bp, Homo sapiens
ggaggaaggcacagc

SEQ ID NO: 1370163 - DNA, 15 bp, Homo sapiens
cggaggaaggcacag

SEQ ID NO: 1370164 - DNA, 15 bp, Homo sapiens
gcggaggaaggcaca

SEQ ID NO: 1370165 - DNA, 15 bp, Homo sapiens
agcggaggaaggcac

SEQ ID NO: 1370166 - DNA, 15 bp, Homo sapiens
cagcggaggaaggca

SEQ ID NO: 1370167 - DNA, 15 bp, Homo sapiens
tcagcggaggaaggc

SEQ ID NO: 1370168 - DNA, 15 bp, Homo sapiens
ttcagcggaggaagg

SEQ ID NO: 1370169 - DNA, 15 bp, Homo sapiens
tttcagcggaggaag

SEQ ID NO: 1370170 - DNA, 15 bp, Homo sapiens
gtttcagcggaggaa

SEQ ID NO: 1370171 - DNA, 15 bp, Homo sapiens
tgtttcagcggagga

SEQ ID NO: 1370172 - DNA, 15 bp, Homo sapiens
ctgtttcagcggagg

SEQ ID NO: 1370173 - DNA, 15 bp, Homo sapiens
cctgtttcagcggag

SEQ ID NO: 1370174 - DNA, 15 bp, Homo sapiens
ccctgtttcagcgga

SEQ ID NO: 1370175 - DNA, 15 bp, Homo sapiens
cccctgtttcagcgg

SEQ ID NO: 1370176 - DNA, 15 bp, Homo sapiens
ccccctgtttcagcg

SEQ ID NO: 1370177 - DNA, 15 bp, Homo sapiens
tccccctgtttcagc

SEQ ID NO: 1370178 - DNA, 15 bp, Homo sapiens
ttccccctgtttcag

SEQ ID NO: 1370179 - DNA, 15 bp, Homo sapiens
gttccccctgtttca

SEQ ID NO: 1370180 - DNA, 15 bp, Homo sapiens
cgttccccctgtttc

SEQ ID NO: 1370181 - DNA, 15 bp, Homo sapiens
tcgttccccctgttt

SEQ ID NO: 1370182 - DNA, 15 bp, Homo sapiens
ttcgttccccctgtt

SEQ ID NO: 1370183 - DNA, 15 bp, Homo sapiens
attcgttccccctgt

SEQ ID NO: 1370184 - DNA, 15 bp, Homo sapiens
aattcgttccccctg

SEQ ID NO: 1370185 - DNA, 15 bp, Homo sapiens
taattcgttccccct

SEQ ID NO: 1370186 - DNA, 15 bp, Homo sapiens
ataattcgttccccc

SEQ ID NO: 1370187 - DNA, 15 bp, Homo sapiens
gataattcgttcccc

SEQ ID NO: 1370188 - DNA, 15 bp, Homo sapiens
agataattcgttccc

SEQ ID NO: 1370189 - DNA, 15 bp, Homo sapiens
cagataattcgttcc

SEQ ID NO: 1370190 - DNA, 15 bp, Homo sapiens
ccagataattcgttc

SEQ ID NO: 1370191 - DNA, 15 bp, Homo sapiens
gccagataattcgtt

SEQ ID NO: 1370192 - DNA, 15 bp, Homo sapiens
ggccagataattcgt

SEQ ID NO: 1370193 - DNA, 15 bp, Homo sapiens
gggccagataattcg

SEQ ID NO: 1370194 - DNA, 15 bp, Homo sapiens
ggggccagataattc

SEQ ID NO: 1370195 - DNA, 15 bp, Homo sapiens
aggggccagataatt

SEQ ID NO: 1370196 - DNA, 15 bp, Homo sapiens
caggggccagataat

SEQ ID NO: 1370197 - DNA, 15 bp, Homo sapiens
ccaggggccagataa

SEQ ID NO: 1370198 - DNA, 15 bp, Homo sapiens
cccaggggccagata

SEQ ID NO: 1370199 - DNA, 15 bp, Homo sapiens
ccccaggggccagat

SEQ ID NO: 1370200 - DNA, 15 bp, Homo sapiens
cccccaggggccaga

SEQ ID NO: 1370201 - DNA, 15 bp, Homo sapiens
ccccccaggggccag

SEQ ID NO: 1370202 - DNA, 15 bp, Homo sapiens
gccccccaggggcca

SEQ ID NO: 1370203 - DNA, 15 bp, Homo sapiens
agccccccaggggcc

SEQ ID NO: 1370204 - DNA, 15 bp, Homo sapiens
aagccccccaggggc

SEQ ID NO: 1370205 - DNA, 15 bp, Homo sapiens
aaagccccccagggg

SEQ ID NO: 1370206 - DNA, 15 bp, Homo sapiens
gaaagccccccaggg

SEQ ID NO: 1370207 - DNA, 15 bp, Homo sapiens
tgaaagccccccagg

SEQ ID NO: 1370208 - DNA, 15 bp, Homo sapiens
ctgaaagccccccag

SEQ ID NO: 1370209 - DNA, 15 bp, Homo sapiens
cctgaaagcccccca

SEQ ID NO: 1370210 - DNA, 15 bp, Homo sapiens
acctgaaagcccccc

SEQ ID NO: 1370211 - DNA, 15 bp, Homo sapiens
tacctgaaagccccc

SEQ ID NO: 1370212 - DNA, 15 bp, Homo sapiens
ttacctgaaagcccc

SEQ ID NO: 1370213 - DNA, 15 bp, Homo sapiens
cttacctgaaagccc

SEQ ID NO: 1370214 - DNA, 15 bp, Homo sapiens
tcttacctgaaagcc

SEQ ID NO: 1370215 - DNA, 15 bp, Homo sapiens
atcttacctgaaagc

SEQ ID NO: 1370216 - DNA, 15 bp, Homo sapiens
catcttacctgaaag

SEQ ID NO: 1370217 - DNA, 15 bp, Homo sapiens
gcatcttacctgaaa

SEQ ID NO: 1370218 - DNA, 15 bp, Homo sapiens
agcatcttacctgaa

SEQ ID NO: 1370219 - DNA, 15 bp, Homo sapiens
aagcatcttacctga

SEQ ID NO: 1370220 - DNA, 15 bp, Homo sapiens
aaagcatcttacctg

SEQ ID NO: 1370221 - DNA, 15 bp, Homo sapiens
gaaagcatcttacct

SEQ ID NO: 1370222 - DNA, 15 bp, Homo sapiens
agaaagcatcttacc

SEQ ID NO: 1370223 - DNA, 15 bp, Homo sapiens
gagaaagcatcttac

SEQ ID NO: 1370224 - DNA, 15 bp, Homo sapiens
agagaaagcatctta

SEQ ID NO: 1370225 - DNA, 15 bp, Homo sapiens
aagagaaagcatctt

SEQ ID NO: 1370226 - DNA, 15 bp, Homo sapiens
taagagaaagcatct

SEQ ID NO: 1370227 - DNA, 15 bp, Homo sapiens
ataagagaaagcatc

SEQ ID NO: 1370228 - DNA, 15 bp, Homo sapiens
aataagagaaagcat

SEQ ID NO: 1370229 - DNA, 15 bp, Homo sapiens
aaataagagaaagca

SEQ ID NO: 1370230 - DNA, 15 bp, Homo sapiens
aaaataagagaaagc

SEQ ID NO: 1370231 - DNA, 15 bp, Homo sapiens
gaaaataagagaaag

SEQ ID NO: 1370232 - DNA, 15 bp, Homo sapiens
ggaaaataagagaaa

SEQ ID NO: 1370233 - DNA, 15 bp, Homo sapiens
aggaaaataagagaa

SEQ ID NO: 1370234 - DNA, 15 bp, Homo sapiens
caggaaaataagaga

SEQ ID NO: 1370235 - DNA, 15 bp, Homo sapiens
ccaggaaaataagag

SEQ ID NO: 1370236 - DNA, 15 bp, Homo sapiens
gccaggaaaataaga

SEQ ID NO: 1370237 - DNA, 15 bp, Homo sapiens
tgccaggaaaataag

SEQ ID NO: 1370238 - DNA, 15 bp, Homo sapiens
ttgccaggaaaataa

SEQ ID NO: 1370239 - DNA, 15 bp, Homo sapiens
attgccaggaaaata

SEQ ID NO: 1370240 - DNA, 15 bp, Homo sapiens
aattgccaggaaaat

SEQ ID NO: 1370241 - DNA, 15 bp, Homo sapiens
gaattgccaggaaaa

SEQ ID NO: 1370242 - DNA, 15 bp, Homo sapiens
ggaattgccaggaaa

SEQ ID NO: 1370243 - DNA, 15 bp, Homo sapiens
tggaattgccaggaa

SEQ ID NO: 1370244 - DNA, 15 bp, Homo sapiens
ttggaattgccagga

SEQ ID NO: 1370245 - DNA, 15 bp, Homo sapiens
gttggaattgccagg

SEQ ID NO: 1370246 - DNA, 15 bp, Homo sapiens
ggttggaattgccag

SEQ ID NO: 1370247 - DNA, 15 bp, Homo sapiens
aggttggaattgcca

SEQ ID NO: 1370248 - DNA, 15 bp, Homo sapiens
aaggttggaattgcc

SEQ ID NO: 1370249 - DNA, 15 bp, Homo sapiens
aaaggttggaattgc

SEQ ID NO: 1370250 - DNA, 15 bp, Homo sapiens
aaaaggttggaattg

SEQ ID NO: 1370251 - DNA, 15 bp, Homo sapiens
aaaaaggttggaatt

SEQ ID NO: 1370252 - DNA, 15 bp, Homo sapiens
aaaaaaggttggaat

SEQ ID NO: 1370253 - DNA, 15 bp, Homo sapiens
caaaaaaggttggaa

SEQ ID NO: 1370254 - DNA, 15 bp, Homo sapiens
tcaaaaaaggttgga

SEQ ID NO: 1370255 - DNA, 15 bp, Homo sapiens
ttcaaaaaaggttgg

SEQ ID NO: 1370256 - DNA, 15 bp, Homo sapiens
tttcaaaaaaggttg

SEQ ID NO: 1370257 - DNA, 15 bp, Homo sapiens
atttcaaaaaaggtt

SEQ ID NO: 1370258 - DNA, 15 bp, Homo sapiens
aatttcaaaaaaggt

SEQ ID NO: 1370259 - DNA, 15 bp, Homo sapiens
caatttcaaaaaagg

SEQ ID NO: 1370260 - DNA, 15 bp, Homo sapiens
gcaatttcaaaaaag

SEQ ID NO: 1370261 - DNA, 15 bp, Homo sapiens
agcaatttcaaaaaa

SEQ ID NO: 1370262 - DNA, 15 bp, Homo sapiens
tagcaatttcaaaaa

SEQ ID NO: 1370263 - DNA, 15 bp, Homo sapiens
ttagcaatttcaaaa

SEQ ID NO: 1370264 - DNA, 15 bp, Homo sapiens
tttagcaatttcaaa

SEQ ID NO: 1370265 - DNA, 15 bp, Homo sapiens
ctttagcaatttcaa

SEQ ID NO: 1370266 - DNA, 15 bp, Homo sapiens
tctttagcaatttca

SEQ ID NO: 1370267 - DNA, 15 bp, Homo sapiens
gtctttagcaatttc

SEQ ID NO: 1370268 - DNA, 15 bp, Homo sapiens
agtctttagcaattt

SEQ ID NO: 1370269 - DNA, 15 bp, Homo sapiens
cagtctttagcaatt

SEQ ID NO: 1370270 - DNA, 15 bp, Homo sapiens
ccagtctttagcaat

SEQ ID NO: 1370271 - DNA, 15 bp, Homo sapiens
tccagtctttagcaa

SEQ ID NO: 1370272 - DNA, 15 bp, Homo sapiens
ctccagtctttagca

SEQ ID NO: 1370273 - DNA, 15 bp, Homo sapiens
cctccagtctttagc

SEQ ID NO: 1370274 - DNA, 15 bp, Homo sapiens
tcctccagtctttag

SEQ ID NO: 1370275 - DNA, 15 bp, Homo sapiens
ttcctccagtcttta

SEQ ID NO: 1370276 - DNA, 15 bp, Homo sapiens
attcctccagtcttt

SEQ ID NO: 1370277 - DNA, 15 bp, Homo sapiens
cattcctccagtctt

SEQ ID NO: 1370278 - DNA, 15 bp, Homo sapiens
ccattcctccagtct

SEQ ID NO: 1370279 - DNA, 15 bp, Homo sapiens
cccattcctccagtc

SEQ ID NO: 1370280 - DNA, 15 bp, Homo sapiens
ccccattcctccagt

SEQ ID NO: 1370281 - DNA, 15 bp, Homo sapiens
cccccattcctccag

SEQ ID NO: 1370282 - DNA, 15 bp, Homo sapiens
acccccattcctcca

SEQ ID NO: 1370283 - DNA, 15 bp, Homo sapiens
cacccccattcctcc

SEQ ID NO: 1370284 - DNA, 15 bp, Homo sapiens
ccacccccattcctc

SEQ ID NO: 1370285 - DNA, 15 bp, Homo sapiens
gccacccccattcct

SEQ ID NO: 1370286 - DNA, 15 bp, Homo sapiens
ggccacccccattcc

SEQ ID NO: 1370287 - DNA, 15 bp, Homo sapiens
aggccacccccattc

SEQ ID NO: 1370288 - DNA, 15 bp, Homo sapiens
aaggccacccccatt

SEQ ID NO: 1370289 - DNA, 15 bp, Homo sapiens
gaaggccacccccat

SEQ ID NO: 1370290 - DNA, 15 bp, Homo sapiens
agaaggccaccccca

SEQ ID NO: 1370291 - DNA, 15 bp, Homo sapiens
cagaaggccaccccc

SEQ ID NO: 1370292 - DNA, 15 bp, Homo sapiens
gcagaaggccacccc

SEQ ID NO: 1370293 - DNA, 15 bp, Homo sapiens
ggcagaaggccaccc

SEQ ID NO: 1370294 - DNA, 15 bp, Homo sapiens
tggcagaaggccacc

SEQ ID NO: 1370295 - DNA, 15 bp, Homo sapiens
gtggcagaaggccac

SEQ ID NO: 1370296 - DNA, 15 bp, Homo sapiens
ggtggcagaaggcca

SEQ ID NO: 1370297 - DNA, 15 bp, Homo sapiens
gggtggcagaaggcc

SEQ ID NO: 1370298 - DNA, 15 bp, Homo sapiens
ggggtggcagaaggc

SEQ ID NO: 1370299 - DNA, 15 bp, Homo sapiens
tggggtggcagaagg

SEQ ID NO: 1370300 - DNA, 15 bp, Homo sapiens
ctggggtggcagaag

SEQ ID NO: 1370301 - DNA, 15 bp, Homo sapiens
gctggggtggcagaa

SEQ ID NO: 1370302 - DNA, 15 bp, Homo sapiens
agctggggtggcaga

SEQ ID NO: 1370303 - DNA, 15 bp, Homo sapiens
cagctggggtggcag

SEQ ID NO: 1370304 - DNA, 15 bp, Homo sapiens
ccagctggggtggca

SEQ ID NO: 1370305 - DNA, 15 bp, Homo sapiens
accagctggggtggc

SEQ ID NO: 1370306 - DNA, 15 bp, Homo sapiens
gaccagctggggtgg

SEQ ID NO: 1370307 - DNA, 15 bp, Homo sapiens
agaccagctggggtg

SEQ ID NO: 1370308 - DNA, 15 bp, Homo sapiens
cagaccagctggggt

SEQ ID NO: 1370309 - DNA, 15 bp, Homo sapiens
ccagaccagctgggg

SEQ ID NO: 1370310 - DNA, 15 bp, Homo sapiens
tccagaccagctggg

SEQ ID NO: 1370311 - DNA, 15 bp, Homo sapiens
gtccagaccagctgg

SEQ ID NO: 1370312 - DNA, 15 bp, Homo sapiens
agtccagaccagctg

SEQ ID NO: 1370313 - DNA, 15 bp, Homo sapiens
aagtccagaccagct

SEQ ID NO: 1370314 - DNA, 15 bp, Homo sapiens
gaagtccagaccagc

SEQ ID NO: 1370315 - DNA, 15 bp, Homo sapiens
tgaagtccagaccag

SEQ ID NO: 1370316 - DNA, 15 bp, Homo sapiens
atgaagtccagacca

SEQ ID NO: 1370317 - DNA, 15 bp, Homo sapiens
aatgaagtccagacc

SEQ ID NO: 1370318 - DNA, 15 bp, Homo sapiens
gaatgaagtccagac

SEQ ID NO: 1370319 - DNA, 15 bp, Homo sapiens
agaatgaagtccaga

SEQ ID NO: 1370320 - DNA, 15 bp, Homo sapiens
gagaatgaagtccag

SEQ ID NO: 1370321 - DNA, 15 bp, Homo sapiens
tgagaatgaagtcca

SEQ ID NO: 1370322 - DNA, 15 bp, Homo sapiens
atgagaatgaagtcc

SEQ ID NO: 1370323 - DNA, 15 bp, Homo sapiens
aatgagaatgaagtc

SEQ ID NO: 1370324 - DNA, 15 bp, Homo sapiens
aaatgagaatgaagt

SEQ ID NO: 1370325 - DNA, 15 bp, Homo sapiens
aaaatgagaatgaag

SEQ ID NO: 1370326 - DNA, 15 bp, Homo sapiens
ataaaaatgagaatg

SEQ ID NO: 1370327 - DNA, 15 bp, Homo sapiens
tataaaaatgagaat

SEQ ID NO: 1370328 - DNA, 15 bp, Homo sapiens
atataaaaatgagaa

SEQ ID NO: 1370329 - DNA, 15 bp, Homo sapiens
catataaaaatgaga

SEQ ID NO: 1370330 - DNA, 15 bp, Homo sapiens
gcatataaaaatgag

SEQ ID NO: 1370331 - DNA, 15 bp, Homo sapiens
ggcatataaaaatga

SEQ ID NO: 1370332 - DNA, 15 bp, Homo sapiens
aggcatataaaaatg

SEQ ID NO: 1370333 - DNA, 15 bp, Homo sapiens
aaggcatataaaaat

SEQ ID NO: 1370334 - DNA, 15 bp, Homo sapiens
taaggcatataaaaa

SEQ ID NO: 1370335 - DNA, 15 bp, Homo sapiens
ttaaggcatataaaa

SEQ ID NO: 1370336 - DNA, 15 bp, Homo sapiens
cttaaggcatataaa

SEQ ID NO: 1370337 - DNA, 15 bp, Homo sapiens
acttaaggcatataa

SEQ ID NO: 1370338 - DNA, 15 bp, Homo sapiens
aacttaaggcatata

SEQ ID NO: 1370339 - DNA, 15 bp, Homo sapiens
caacttaaggcatat

SEQ ID NO: 1370340 - DNA, 15 bp, Homo sapiens
ccaacttaaggcata

SEQ ID NO: 1370341 - DNA, 15 bp, Homo sapiens
tccaacttaaggcat

SEQ ID NO: 1370342 - DNA, 15 bp, Homo sapiens
atccaacttaaggca

SEQ ID NO: 1370343 - DNA, 15 bp, Homo sapiens
catccaacttaaggc

SEQ ID NO: 1370344 - DNA, 15 bp, Homo sapiens
gcatccaacttaagg

SEQ ID NO: 1370345 - DNA, 15 bp, Homo sapiens
tgcatccaacttaag

SEQ ID NO: 1370346 - DNA, 15 bp, Homo sapiens
atgcatccaacttaa

SEQ ID NO: 1370347 - DNA, 15 bp, Homo sapiens
gatgcatccaactta

SEQ ID NO: 1370348 - DNA, 15 bp, Homo sapiens
cgatgcatccaactt

SEQ ID NO: 1370349 - DNA, 15 bp, Homo sapiens
ccgatgcatccaact

SEQ ID NO: 1370350 - DNA, 15 bp, Homo sapiens
accgatgcatccaac

SEQ ID NO: 1370351 - DNA, 15 bp, Homo sapiens
caccgatgcatccaa

SEQ ID NO: 1370352 - DNA, 15 bp, Homo sapiens
ccaccgatgcatcca

SEQ ID NO: 1370353 - DNA, 15 bp, Homo sapiens
accaccgatgcatcc

SEQ ID NO: 1370354 - DNA, 15 bp, Homo sapiens
caccaccgatgcatc

SEQ ID NO: 1370355 - DNA, 15 bp, Homo sapiens
tcaccaccgatgcat

SEQ ID NO: 1370356 - DNA, 15 bp, Homo sapiens
gtcaccaccgatgca

SEQ ID NO: 1370357 - DNA, 15 bp, Homo sapiens
tgtcaccaccgatgc

SEQ ID NO: 1370358 - DNA, 15 bp, Homo sapiens
atgtcaccaccgatg

SEQ ID NO: 1370359 - DNA, 15 bp, Homo sapiens
aatgtcaccaccgat

SEQ ID NO: 1370360 - DNA, 15 bp, Homo sapiens
caatgtcaccaccga

SEQ ID NO: 1370361 - DNA, 15 bp, Homo sapiens
acaatgtcaccaccg

SEQ ID NO: 1370362 - DNA, 15 bp, Homo sapiens
cacaatgtcaccacc

SEQ ID NO: 1370363 - DNA, 15 bp, Homo sapiens
ccacaatgtcaccac

SEQ ID NO: 1370364 - DNA, 15 bp, Homo sapiens
accacaatgtcacca

SEQ ID NO: 1370365 - DNA, 15 bp, Homo sapiens
caccacaatgtcacc

SEQ ID NO: 1370366 - DNA, 15 bp, Homo sapiens
gcaccacaatgtcac

SEQ ID NO: 1370367 - DNA, 15 bp, Homo sapiens
ggcaccacaatgtca

SEQ ID NO: 1370368 - DNA, 15 bp, Homo sapiens
gggcaccacaatgtc

SEQ ID NO: 1370369 - DNA, 15 bp, Homo sapiens
agggcaccacaatgt

SEQ ID NO: 1370370 - DNA, 15 bp, Homo sapiens
aagggcaccacaatg

SEQ ID NO: 1370371 - DNA, 15 bp, Homo sapiens
gaagggcaccacaat

SEQ ID NO: 1370372 - DNA, 15 bp, Homo sapiens
tgaagggcaccacaa

SEQ ID NO: 1370373 - DNA, 15 bp, Homo sapiens
ctgaagggcaccaca

SEQ ID NO: 1370374 - DNA, 15 bp, Homo sapiens
gctgaagggcaccac

SEQ ID NO: 1370375 - DNA, 15 bp, Homo sapiens
agctgaagggcacca

SEQ ID NO: 1370376 - DNA, 15 bp, Homo sapiens
gagctgaagggcacc

SEQ ID NO: 1370377 - DNA, 15 bp, Homo sapiens
ggagctgaagggcac

SEQ ID NO: 1370378 - DNA, 15 bp, Homo sapiens
aggagctgaagggca

SEQ ID NO: 1370379 - DNA, 15 bp, Homo sapiens
gaggagctgaagggc

SEQ ID NO: 1370380 - DNA, 15 bp, Homo sapiens
tgaggagctgaaggg

SEQ ID NO: 1370381 - DNA, 15 bp, Homo sapiens
atgaggagctgaagg

SEQ ID NO: 1370382 - DNA, 15 bp, Homo sapiens
gatgaggagctgaag

SEQ ID NO: 1370383 - DNA, 15 bp, Homo sapiens
ggatgaggagctgaa

SEQ ID NO: 1370384 - DNA, 15 bp, Homo sapiens
aggatgaggagctga

SEQ ID NO: 1370385 - DNA, 15 bp, Homo sapiens
caggatgaggagctg

SEQ ID NO: 1370386 - DNA, 15 bp, Homo sapiens
gcaggatgaggagct

SEQ ID NO: 1370387 - DNA, 15 bp, Homo sapiens
tgcaggatgaggagc

SEQ ID NO: 1370388 - DNA, 15 bp, Homo sapiens
ctgcaggatgaggag

SEQ ID NO: 1370389 - DNA, 15 bp, Homo sapiens
actgcaggatgagga

SEQ ID NO: 1370390 - DNA, 15 bp, Homo sapiens
gactgcaggatgagg

SEQ ID NO: 1370391 - DNA, 15 bp, Homo sapiens
ggactgcaggatgag

SEQ ID NO: 1370392 - DNA, 15 bp, Homo sapiens
aggactgcaggatga

SEQ ID NO: 1370393 - DNA, 15 bp, Homo sapiens
aaggactgcaggatg

SEQ ID NO: 1370394 - DNA, 15 bp, Homo sapiens
aaaggactgcaggat

SEQ ID NO: 1370395 - DNA, 15 bp, Homo sapiens
taaaggactgcagga

SEQ ID NO: 1370396 - DNA, 15 bp, Homo sapiens
gtaaaggactgcagg

SEQ ID NO: 1370397 - DNA, 15 bp, Homo sapiens
cgtaaaggactgcag

SEQ ID NO: 1370398 - DNA, 15 bp, Homo sapiens
gcgtaaaggactgca

SEQ ID NO: 1370399 - DNA, 15 bp, Homo sapiens
agcgtaaaggactgc

SEQ ID NO: 1370400 - DNA, 15 bp, Homo sapiens
gagcgtaaaggactg

SEQ ID NO: 1370401 - DNA, 15 bp, Homo sapiens
agagcgtaaaggact

SEQ ID NO: 1370402 - DNA, 15 bp, Homo sapiens
cagagcgtaaaggac

SEQ ID NO: 1370403 - DNA, 15 bp, Homo sapiens
ccagagcgtaaagga

SEQ ID NO: 1370404 - DNA, 15 bp, Homo sapiens
tccagagcgtaaagg

SEQ ID NO: 1370405 - DNA, 15 bp, Homo sapiens
gtccagagcgtaaag

SEQ ID NO: 1370406 - DNA, 15 bp, Homo sapiens
tgtccagagcgtaaa

SEQ ID NO: 1370407 - DNA, 15 bp, Homo sapiens
gtgtccagagcgtaa

SEQ ID NO: 1370408 - DNA, 15 bp, Homo sapiens
agtgtccagagcgta

SEQ ID NO: 1370409 - DNA, 15 bp, Homo sapiens
cagtgtccagagcgt

SEQ ID NO: 1370410 - DNA, 15 bp, Homo sapiens
ccagtgtccagagcg

SEQ ID NO: 1370411 - DNA, 15 bp, Homo sapiens
tccagtgtccagagc

SEQ ID NO: 1370412 - DNA, 15 bp, Homo sapiens
atccagtgtccagag

SEQ ID NO: 1370413 - DNA, 15 bp, Homo sapiens
gatccagtgtccaga

SEQ ID NO: 1370414 - DNA, 15 bp, Homo sapiens
ggatccagtgtccag

SEQ ID NO: 1370415 - DNA, 15 bp, Homo sapiens
cggatccagtgtcca

SEQ ID NO: 1370416 - DNA, 15 bp, Homo sapiens
acggatccagtgtcc

SEQ ID NO: 1370417 - DNA, 15 bp, Homo sapiens
aacggatccagtgtc

SEQ ID NO: 1370418 - DNA, 15 bp, Homo sapiens
gaacggatccagtgt

SEQ ID NO: 1370419 - DNA, 15 bp, Homo sapiens
ggaacggatccagtg

SEQ ID NO: 1370420 - DNA, 15 bp, Homo sapiens
cggaacggatccagt

SEQ ID NO: 1370421 - DNA, 15 bp, Homo sapiens
acggaacggatccag

SEQ ID NO: 1370422 - DNA, 15 bp, Homo sapiens
cacggaacggatcca

SEQ ID NO: 1370423 - DNA, 15 bp, Homo sapiens
ccacggaacggatcc

SEQ ID NO: 1370424 - DNA, 15 bp, Homo sapiens
tccacggaacggatc

SEQ ID NO: 1370425 - DNA, 15 bp, Homo sapiens
gtccacggaacggat

SEQ ID NO: 1370426 - DNA, 15 bp, Homo sapiens
cgtccacggaacgga

SEQ ID NO: 1370427 - DNA, 15 bp, Homo sapiens
ccgtccacggaacgg

SEQ ID NO: 1370428 - DNA, 15 bp, Homo sapiens
cccgtccacggaacg

SEQ ID NO: 1370429 - DNA, 15 bp, Homo sapiens
ccccgtccacggaac

SEQ ID NO: 1370430 - DNA, 15 bp, Homo sapiens
tccccgtccacggaa

SEQ ID NO: 1370431 - DNA, 15 bp, Homo sapiens
ctccccgtccacgga

SEQ ID NO: 1370432 - DNA, 15 bp, Homo sapiens
tctccccgtccacgg

SEQ ID NO: 1370433 - DNA, 15 bp, Homo sapiens
gtctccccgtccacg

SEQ ID NO: 1370434 - DNA, 15 bp, Homo sapiens
tgtctccccgtccac

SEQ ID NO: 1370435 - DNA, 15 bp, Homo sapiens
ttgtctccccgtcca

SEQ ID NO: 1370436 - DNA, 15 bp, Homo sapiens
cttgtctccccgtcc

SEQ ID NO: 1370437 - DNA, 15 bp, Homo sapiens
tcttgtctccccgtc

SEQ ID NO: 1370438 - DNA, 15 bp, Homo sapiens
ctcttgtctccccgt

SEQ ID NO: 1370439 - DNA, 15 bp, Homo sapiens
gctcttgtctccccg

SEQ ID NO: 1370440 - DNA, 15 bp, Homo sapiens
cgctcttgtctcccc

SEQ ID NO: 1370441 - DNA, 15 bp, Homo sapiens
tcgctcttgtctccc

SEQ ID NO: 1370442 - DNA, 15 bp, Homo sapiens
ctcgctcttgtctcc

SEQ ID NO: 1370443 - DNA, 15 bp, Homo sapiens
gctcgctcttgtctc

SEQ ID NO: 1370444 - DNA, 15 bp, Homo sapiens
agctcgctcttgtct

SEQ ID NO: 1370445 - DNA, 15 bp, Homo sapiens
cagctcgctcttgtc

SEQ ID NO: 1370446 - DNA, 15 bp, Homo sapiens
ccagctcgctcttgt

SEQ ID NO: 1370447 - DNA, 15 bp, Homo sapiens
cccagctcgctcttg

SEQ ID NO: 1370448 - DNA, 15 bp, Homo sapiens
ccccagctcgctctt

SEQ ID NO: 1370449 - DNA, 15 bp, Homo sapiens
tccccagctcgctct

SEQ ID NO: 1370450 - DNA, 15 bp, Homo sapiens
atccccagctcgctc

SEQ ID NO: 1370451 - DNA, 15 bp, Homo sapiens
aatccccagctcgct

SEQ ID NO: 1370452 - DNA, 15 bp, Homo sapiens
caatccccagctcgc

SEQ ID NO: 1370453 - DNA, 15 bp, Homo sapiens
gcaatccccagctcg

SEQ ID NO: 1370454 - DNA, 15 bp, Homo sapiens
agcaatccccagctc

SEQ ID NO: 1370455 - DNA, 15 bp, Homo sapiens
aagcaatccccagct

SEQ ID NO: 1370456 - DNA, 15 bp, Homo sapiens
aaagcaatccccagc

SEQ ID NO: 1370457 - DNA, 15 bp, Homo sapiens
caaagcaatccccag

SEQ ID NO: 1370458 - DNA, 15 bp, Homo sapiens
ccaaagcaatcccca

SEQ ID NO: 1370459 - DNA, 15 bp, Homo sapiens
accaaagcaatcccc

SEQ ID NO: 1370460 - DNA, 15 bp, Homo sapiens
caccaaagcaatccc

SEQ ID NO: 1370461 - DNA, 15 bp, Homo sapiens
acaccaaagcaatcc

SEQ ID NO: 1370462 - DNA, 15 bp, Homo sapiens
cacaccaaagcaatc

SEQ ID NO: 1370463 - DNA, 15 bp, Homo sapiens
acacaccaaagcaat

SEQ ID NO: 1370464 - DNA, 15 bp, Homo sapiens
cacacaccaaagcaa

SEQ ID NO: 1370465 - DNA, 15 bp, Homo sapiens
tcacacaccaaagca

SEQ ID NO: 1370466 - DNA, 15 bp, Homo sapiens
ttcacacaccaaagc

SEQ ID NO: 1370467 - DNA, 15 bp, Homo sapiens
cttcacacaccaaag

SEQ ID NO: 1370468 - DNA, 15 bp, Homo sapiens
acttcacacaccaaa

SEQ ID NO: 1370469 - DNA, 15 bp, Homo sapiens
cacttcacacaccaa

SEQ ID NO: 1370470 - DNA, 15 bp, Homo sapiens
acacttcacacacca

SEQ ID NO: 1370471 - DNA, 15 bp, Homo sapiens
aacacttcacacacc

SEQ ID NO: 1370472 - DNA, 15 bp, Homo sapiens
caacacttcacacac

SEQ ID NO: 1370473 - DNA, 15 bp, Homo sapiens
gcaacacttcacaca

SEQ ID NO: 1370474 - DNA, 15 bp, Homo sapiens
ggcaacacttcacac

SEQ ID NO: 1370475 - DNA, 15 bp, Homo sapiens
gggcaacacttcaca

SEQ ID NO: 1370476 - DNA, 15 bp, Homo sapiens
cgggcaacacttcac

SEQ ID NO: 1370477 - DNA, 15 bp, Homo sapiens
ccgggcaacacttca

SEQ ID NO: 1370478 - DNA, 15 bp, Homo sapiens
accgggcaacacttc

SEQ ID NO: 1370479 - DNA, 15 bp, Homo sapiens
aaccgggcaacactt

SEQ ID NO: 1370480 - DNA, 15 bp, Homo sapiens
taaccgggcaacact

SEQ ID NO: 1370481 - DNA, 15 bp, Homo sapiens
ataaccgggcaacac

SEQ ID NO: 1370482 - DNA, 15 bp, Homo sapiens
aataaccgggcaaca

SEQ ID NO: 1370483 - DNA, 15 bp, Homo sapiens
aaataaccgggcaac

SEQ ID NO: 1370484 - DNA, 15 bp, Homo sapiens
aaaataaccgggcaa

SEQ ID NO: 1370485 - DNA, 15 bp, Homo sapiens
aaaaataaccgggca

SEQ ID NO: 1370486 - DNA, 15 bp, Homo sapiens
taaaaataaccgggc

SEQ ID NO: 1370487 - DNA, 15 bp, Homo sapiens
ttaaaaataaccggg

SEQ ID NO: 1370488 - DNA, 15 bp, Homo sapiens
cttaaaaataaccgg

SEQ ID NO: 1370489 - DNA, 15 bp, Homo sapiens
gcttaaaaataaccg

SEQ ID NO: 1370490 - DNA, 15 bp, Homo sapiens
tgcttaaaaataacc

SEQ ID NO: 1370491 - DNA, 15 bp, Homo sapiens
ctgcttaaaaataac

SEQ ID NO: 1370492 - DNA, 15 bp, Homo sapiens
gctgcttaaaaataa

SEQ ID NO: 1370493 - DNA, 15 bp, Homo sapiens
agctgcttaaaaata

SEQ ID NO: 1370494 - DNA, 15 bp, Homo sapiens
gagctgcttaaaaat

SEQ ID NO: 1370495 - DNA, 15 bp, Homo sapiens
ggagctgcttaaaaa

SEQ ID NO: 1370496 - DNA, 15 bp, Homo sapiens
aggagctgcttaaaa

SEQ ID NO: 1370497 - DNA, 15 bp, Homo sapiens
caggagctgcttaaa

SEQ ID NO: 1370498 - DNA, 15 bp, Homo sapiens
ccaggagctgcttaa

SEQ ID NO: 1370499 - DNA, 15 bp, Homo sapiens
gccaggagctgctta

SEQ ID NO: 1370500 - DNA, 15 bp, Homo sapiens
agccaggagctgctt

SEQ ID NO: 1370501 - DNA, 15 bp, Homo sapiens
aagccaggagctgct

SEQ ID NO: 1370502 - DNA, 15 bp, Homo sapiens
caagccaggagctgc

SEQ ID NO: 1370503 - DNA, 15 bp, Homo sapiens
ccaagccaggagctg

SEQ ID NO: 1370504 - DNA, 15 bp, Homo sapiens
cccaagccaggagct

SEQ ID NO: 1370505 - DNA, 15 bp, Homo sapiens
ccccaagccaggagc

SEQ ID NO: 1370506 - DNA, 15 bp, Homo sapiens
cccccaagccaggag

SEQ ID NO: 1370507 - DNA, 15 bp, Homo sapiens
ccccccaagccagga

SEQ ID NO: 1370508 - DNA, 15 bp, Homo sapiens
gccccccaagccagg

SEQ ID NO: 1370509 - DNA, 15 bp, Homo sapiens
agccccccaagccag

SEQ ID NO: 1370510 - DNA, 15 bp, Homo sapiens
aagccccccaagcca

SEQ ID NO: 1370511 - DNA, 15 bp, Homo sapiens
gaagccccccaagcc

SEQ ID NO: 1370512 - DNA, 15 bp, Homo sapiens
tgaagccccccaagc

SEQ ID NO: 1370513 - DNA, 15 bp, Homo sapiens
ctgaagccccccaag

SEQ ID NO: 1370514 - DNA, 15 bp, Homo sapiens
gctgaagccccccaa

SEQ ID NO: 1370515 - DNA, 15 bp, Homo sapiens
agctgaagcccccca

SEQ ID NO: 1370516 - DNA, 15 bp, Homo sapiens
aagctgaagcccccc

SEQ ID NO: 1370517 - DNA, 15 bp, Homo sapiens
caagctgaagccccc

SEQ ID NO: 1370518 - DNA, 15 bp, Homo sapiens
ccaagctgaagcccc

SEQ ID NO: 1370519 - DNA, 15 bp, Homo sapiens
accaagctgaagccc

SEQ ID NO: 1370520 - DNA, 15 bp, Homo sapiens
caccaagctgaagcc

SEQ ID NO: 1370521 - DNA, 15 bp, Homo sapiens
tcaccaagctgaagc

SEQ ID NO: 1370522 - DNA, 15 bp, Homo sapiens
gtcaccaagctgaag

SEQ ID NO: 1370523 - DNA, 15 bp, Homo sapiens
agtcaccaagctgaa

SEQ ID NO: 1370524 - DNA, 15 bp, Homo sapiens
aagtcaccaagctga

SEQ ID NO: 1370525 - DNA, 15 bp, Homo sapiens
aaagtcaccaagctg

SEQ ID NO: 1370526 - DNA, 15 bp, Homo sapiens
caaagtcaccaagct

SEQ ID NO: 1370527 - DNA, 15 bp, Homo sapiens
ccaaagtcaccaagc

SEQ ID NO: 1370528 - DNA, 15 bp, Homo sapiens
accaaagtcaccaag

SEQ ID NO: 1370529 - DNA, 15 bp, Homo sapiens
caccaaagtcaccaa

SEQ ID NO: 1370530 - DNA, 15 bp, Homo sapiens
acaccaaagtcacca

SEQ ID NO: 1370531 - DNA, 15 bp, Homo sapiens
gacaccaaagtcacc

SEQ ID NO: 1370532 - DNA, 15 bp, Homo sapiens
tgacaccaaagtcac

SEQ ID NO: 1370533 - DNA, 15 bp, Homo sapiens
atgacaccaaagtca

SEQ ID NO: 1370534 - DNA, 15 bp, Homo sapiens
aatgacaccaaagtc

SEQ ID NO: 1370535 - DNA, 15 bp, Homo sapiens
taatgacaccaaagt

SEQ ID NO: 1370536 - DNA, 15 bp, Homo sapiens
ttaatgacaccaaag

SEQ ID NO: 1370537 - DNA, 15 bp, Homo sapiens
gttaatgacaccaaa

SEQ ID NO: 1370538 - DNA, 15 bp, Homo sapiens
agttaatgacaccaa

SEQ ID NO: 1370539 - DNA, 15 bp, Homo sapiens
gagttaatgacacca

SEQ ID NO: 1370540 - DNA, 15 bp, Homo sapiens
tgagttaatgacacc

SEQ ID NO: 1370541 - DNA, 15 bp, Homo sapiens
atgagttaatgacac

SEQ ID NO: 1370542 - DNA, 15 bp, Homo sapiens
catgagttaatgaca

SEQ ID NO: 1370543 - DNA, 15 bp, Homo sapiens
gcatgagttaatgac

SEQ ID NO: 1370544 - DNA, 15 bp, Homo sapiens
tgcatgagttaatga

SEQ ID NO: 1370545 - DNA, 15 bp, Homo sapiens
atgcatgagttaatg

SEQ ID NO: 1370546 - DNA, 15 bp, Homo sapiens
aatgcatgagttaat

SEQ ID NO: 1370547 - DNA, 15 bp, Homo sapiens
aaatgcatgagttaa

SEQ ID NO: 1370548 - DNA, 15 bp, Homo sapiens
caaatgcatgagtta

SEQ ID NO: 1370549 - DNA, 15 bp, Homo sapiens
tcaaatgcatgagtt

SEQ ID NO: 1370550 - DNA, 15 bp, Homo sapiens
ctcaaatgcatgagt

SEQ ID NO: 1370551 - DNA, 15 bp, Homo sapiens
gctcaaatgcatgag

SEQ ID NO: 1370552 - DNA, 15 bp, Homo sapiens
agctcaaatgcatga

SEQ ID NO: 1370553 - DNA, 15 bp, Homo sapiens
gagctcaaatgcatg

SEQ ID NO: 1370554 - DNA, 15 bp, Homo sapiens
agagctcaaatgcat

SEQ ID NO: 1370555 - DNA, 15 bp, Homo sapiens
aagagctcaaatgca

SEQ ID NO: 1370556 - DNA, 15 bp, Homo sapiens
aaagagctcaaatgc

SEQ ID NO: 1370557 - DNA, 15 bp, Homo sapiens
aaaagagctcaaatg

SEQ ID NO: 1370558 - DNA, 15 bp, Homo sapiens
aaaaagagctcaaat

SEQ ID NO: 1370559 - DNA, 15 bp, Homo sapiens
aaaaaagagctcaaa

SEQ ID NO: 1370560 - DNA, 15 bp, Homo sapiens
aaaaaaagagctcaa

SEQ ID NO: 1370561 - DNA, 15 bp, Homo sapiens
caaaaaaagagctca

SEQ ID NO: 1370562 - DNA, 15 bp, Homo sapiens
gcaaaaaaagagctc

SEQ ID NO: 1370563 - DNA, 15 bp, Homo sapiens
agcaaaaaaagagct

SEQ ID NO: 1370564 - DNA, 15 bp, Homo sapiens
aagcaaaaaaagagc

SEQ ID NO: 1370565 - DNA, 15 bp, Homo sapiens
aaagcaaaaaaagag

SEQ ID NO: 1370566 - DNA, 15 bp, Homo sapiens
aaaagcaaaaaaaga

SEQ ID NO: 1370567 - DNA, 15 bp, Homo sapiens
caaaagcaaaaaaag

SEQ ID NO: 1370568 - DNA, 15 bp, Homo sapiens
agcaaaagcaaaaaa

SEQ ID NO: 1370569 - DNA, 15 bp, Homo sapiens
gagcaaaagcaaaaa

SEQ ID NO: 1370570 - DNA, 15 bp, Homo sapiens
agagcaaaagcaaaa

SEQ ID NO: 1370571 - DNA, 15 bp, Homo sapiens
aagagcaaaagcaaa

SEQ ID NO: 1370572 - DNA, 15 bp, Homo sapiens
aaagagcaaaagcaa

SEQ ID NO: 1370573 - DNA, 15 bp, Homo sapiens
caaagagcaaaagca

SEQ ID NO: 1370574 - DNA, 15 bp, Homo sapiens
gcaaagagcaaaagc

SEQ ID NO: 1370575 - DNA, 15 bp, Homo sapiens
cgcaaagagcaaaag

SEQ ID NO: 1370576 - DNA, 15 bp, Homo sapiens
gcgcaaagagcaaaa

SEQ ID NO: 1370577 - DNA, 15 bp, Homo sapiens
tgcgcaaagagcaaa

SEQ ID NO: 1370578 - DNA, 15 bp, Homo sapiens
atgcgcaaagagcaa

SEQ ID NO: 1370579 - DNA, 15 bp, Homo sapiens
catgcgcaaagagca

SEQ ID NO: 1370580 - DNA, 15 bp, Homo sapiens
ccatgcgcaaagagc

SEQ ID NO: 1370581 - DNA, 15 bp, Homo sapiens
cccatgcgcaaagag

SEQ ID NO: 1370582 - DNA, 15 bp, Homo sapiens
ccccatgcgcaaaga

SEQ ID NO: 1370583 - DNA, 15 bp, Homo sapiens
cccccatgcgcaaag

SEQ ID NO: 1370584 - DNA, 15 bp, Homo sapiens
tcccccatgcgcaaa

SEQ ID NO: 1370585 - DNA, 15 bp, Homo sapiens
atcccccatgcgcaa

SEQ ID NO: 1370586 - DNA, 15 bp, Homo sapiens
catcccccatgcgca

SEQ ID NO: 1370587 - DNA, 15 bp, Homo sapiens
acatcccccatgcgc

SEQ ID NO: 1370588 - DNA, 15 bp, Homo sapiens
tacatcccccatgcg

SEQ ID NO: 1370589 - DNA, 15 bp, Homo sapiens
ttacatcccccatgc

SEQ ID NO: 1370590 - DNA, 15 bp, Homo sapiens
tttacatcccccatg

SEQ ID NO: 1370591 - DNA, 15 bp, Homo sapiens
ctttacatcccccat

SEQ ID NO: 1370592 - DNA, 15 bp, Homo sapiens
cctttacatccccca

SEQ ID NO: 1370593 - DNA, 15 bp, Homo sapiens
ccctttacatccccc

SEQ ID NO: 1370594 - DNA, 15 bp, Homo sapiens
tccctttacatcccc

SEQ ID NO: 1370595 - DNA, 15 bp, Homo sapiens
ttccctttacatccc

SEQ ID NO: 1370596 - DNA, 15 bp, Homo sapiens
attccctttacatcc

SEQ ID NO: 1370597 - DNA, 15 bp, Homo sapiens
cattccctttacatc

SEQ ID NO: 1370598 - DNA, 15 bp, Homo sapiens
ccattccctttacat

SEQ ID NO: 1370599 - DNA, 15 bp, Homo sapiens
tccattccctttaca

SEQ ID NO: 1370600 - DNA, 15 bp, Homo sapiens
gtccattccctttac

SEQ ID NO: 1370601 - DNA, 15 bp, Homo sapiens
ggtccattcccttta

SEQ ID NO: 1370602 - DNA, 15 bp, Homo sapiens
gggtccattcccttt

SEQ ID NO: 1370603 - DNA, 15 bp, Homo sapiens
tgggtccattccctt

SEQ ID NO: 1370604 - DNA, 15 bp, Homo sapiens
gtgggtccattccct

SEQ ID NO: 1370605 - DNA, 15 bp, Homo sapiens
ggtgggtccattccc

SEQ ID NO: 1370606 - DNA, 15 bp, Homo sapiens
aggtgggtccattcc

SEQ ID NO: 1370607 - DNA, 15 bp, Homo sapiens
aaggtgggtccattc

SEQ ID NO: 1370608 - DNA, 15 bp, Homo sapiens
aaaggtgggtccatt

SEQ ID NO: 1370609 - DNA, 15 bp, Homo sapiens
taaaggtgggtccat

SEQ ID NO: 1370610 - DNA, 15 bp, Homo sapiens
ctaaaggtgggtcca

SEQ ID NO: 1370611 - DNA, 15 bp, Homo sapiens
cctaaaggtgggtcc

SEQ ID NO: 1370612 - DNA, 15 bp, Homo sapiens
ccctaaaggtgggtc

SEQ ID NO: 1370613 - DNA, 15 bp, Homo sapiens
tccctaaaggtgggt

SEQ ID NO: 1370614 - DNA, 15 bp, Homo sapiens
ttccctaaaggtggg

SEQ ID NO: 1370615 - DNA, 15 bp, Homo sapiens
gttccctaaaggtgg

SEQ ID NO: 1370616 - DNA, 15 bp, Homo sapiens
agttccctaaaggtg

SEQ ID NO: 1370617 - DNA, 15 bp, Homo sapiens
aagttccctaaaggt

SEQ ID NO: 1370618 - DNA, 15 bp, Homo sapiens
caagttccctaaagg

SEQ ID NO: 1370619 - DNA, 15 bp, Homo sapiens
acaagttccctaaag

SEQ ID NO: 1370620 - DNA, 15 bp, Homo sapiens
aacaagttccctaaa

SEQ ID NO: 1370621 - DNA, 15 bp, Homo sapiens
caacaagttccctaa

SEQ ID NO: 1370622 - DNA, 15 bp, Homo sapiens
tcaacaagttcccta

SEQ ID NO: 1370623 - DNA, 15 bp, Homo sapiens
ttcaacaagttccct

SEQ ID NO: 1370624 - DNA, 15 bp, Homo sapiens
cttcaacaagttccc

SEQ ID NO: 1370625 - DNA, 15 bp, Homo sapiens
tcttcaacaagttcc

SEQ ID NO: 1370626 - DNA, 15 bp, Homo sapiens
gtcttcaacaagttc

SEQ ID NO: 1370627 - DNA, 15 bp, Homo sapiens
tgtcttcaacaagtt

SEQ ID NO: 1370628 - DNA, 15 bp, Homo sapiens
ctgtcttcaacaagt

SEQ ID NO: 1370629 - DNA, 15 bp, Homo sapiens
cctacaggcaaggaa

SEQ ID NO: 1370630 - DNA, 15 bp, Homo sapiens
tcctacaggcaagga

SEQ ID NO: 1370631 - DNA, 15 bp, Homo sapiens
atcctacaggcaagg

SEQ ID NO: 1370632 - DNA, 15 bp, Homo sapiens
gatcctacaggcaag

SEQ ID NO: 1370633 - DNA, 15 bp, Homo sapiens
tgatcctacaggcaa

SEQ ID NO: 1370634 - DNA, 15 bp, Homo sapiens
gtgatcctacaggca

SEQ ID NO: 1370635 - DNA, 15 bp, Homo sapiens
cgtgatcctacaggc

SEQ ID NO: 1370636 - DNA, 15 bp, Homo sapiens
acgtgatcctacagg

SEQ ID NO: 1370637 - DNA, 15 bp, Homo sapiens
cacgtgatcctacag

SEQ ID NO: 1370638 - DNA, 15 bp, Homo sapiens
ccacgtgatcctaca

SEQ ID NO: 1370639 - DNA, 15 bp, Homo sapiens
accacgtgatcctac

SEQ ID NO: 1370640 - DNA, 15 bp, Homo sapiens
taccacgtgatccta

SEQ ID NO: 1370641 - DNA, 15 bp, Homo sapiens
ctaccacgtgatcct

SEQ ID NO: 1370642 - DNA, 15 bp, Homo sapiens
gctaccacgtgatcc

SEQ ID NO: 1370643 - DNA, 15 bp, Homo sapiens
tgctaccacgtgatc

SEQ ID NO: 1370644 - DNA, 15 bp, Homo sapiens
ctgctaccacgtgat

SEQ ID NO: 1370645 - DNA, 15 bp, Homo sapiens
gctgctaccacgtga

SEQ ID NO: 1370646 - DNA, 15 bp, Homo sapiens
agctgctaccacgtg

SEQ ID NO: 1370647 - DNA, 15 bp, Homo sapiens
gagctgctaccacgt

SEQ ID NO: 1370648 - DNA, 15 bp, Homo sapiens
cgagctgctaccacg

SEQ ID NO: 1370649 - DNA, 15 bp, Homo sapiens
tcgagctgctaccac

SEQ ID NO: 1370650 - DNA, 15 bp, Homo sapiens
ttcgagctgctacca

SEQ ID NO: 1370651 - DNA, 15 bp, Homo sapiens
attcgagctgctacc

SEQ ID NO: 1370652 - DNA, 15 bp, Homo sapiens
tattcgagctgctac

SEQ ID NO: 1370653 - DNA, 15 bp, Homo sapiens
ctattcgagctgcta

SEQ ID NO: 1370654 - DNA, 15 bp, Homo sapiens
tctattcgagctgct

SEQ ID NO: 1370655 - DNA, 15 bp, Homo sapiens
ttctattcgagctgc

SEQ ID NO: 1370656 - DNA, 15 bp, Homo sapiens
cttctattcgagctg

SEQ ID NO: 1370657 - DNA, 15 bp, Homo sapiens
gcttctattcgagct

SEQ ID NO: 1370658 - DNA, 15 bp, Homo sapiens
agcttctattcgagc

SEQ ID NO: 1370659 - DNA, 15 bp, Homo sapiens
cagcttctattcgag

SEQ ID NO: 1370660 - DNA, 15 bp, Homo sapiens
acagcttctattcga

SEQ ID NO: 1370661 - DNA, 15 bp, Homo sapiens
cacagcttctattcg

SEQ ID NO: 1370662 - DNA, 15 bp, Homo sapiens
gcacagcttctattc

SEQ ID NO: 1370663 - DNA, 15 bp, Homo sapiens
ggcacagcttctatt

SEQ ID NO: 1370664 - DNA, 15 bp, Homo sapiens
gggcacagcttctat

SEQ ID NO: 1370665 - DNA, 15 bp, Homo sapiens
agggcacagcttcta

SEQ ID NO: 1370666 - DNA, 15 bp, Homo sapiens
cagggcacagcttct

SEQ ID NO: 1370667 - DNA, 15 bp, Homo sapiens
acagggcacagcttc

SEQ ID NO: 1370668 - DNA, 15 bp, Homo sapiens
aacagggcacagctt

SEQ ID NO: 1370669 - DNA, 15 bp, Homo sapiens
caacagggcacagct

SEQ ID NO: 1370670 - DNA, 15 bp, Homo sapiens
acaacagggcacagc

SEQ ID NO: 1370671 - DNA, 15 bp, Homo sapiens
cacaacagggcacag

SEQ ID NO: 1370672 - DNA, 15 bp, Homo sapiens
ccacaacagggcaca

SEQ ID NO: 1370673 - DNA, 15 bp, Homo sapiens
accacaacagggcac

SEQ ID NO: 1370674 - DNA, 15 bp, Homo sapiens
caccacaacagggca

SEQ ID NO: 1370675 - DNA, 15 bp, Homo sapiens
acaccacaacagggc

SEQ ID NO: 1370676 - DNA, 15 bp, Homo sapiens
tacaccacaacaggg

SEQ ID NO: 1370677 - DNA, 15 bp, Homo sapiens
atacaccacaacagg

SEQ ID NO: 1370678 - DNA, 15 bp, Homo sapiens
gatacaccacaacag

SEQ ID NO: 1370679 - DNA, 15 bp, Homo sapiens
ggatacaccacaaca

SEQ ID NO: 1370680 - DNA, 15 bp, Homo sapiens
aggatacaccacaac

SEQ ID NO: 1370681 - DNA, 15 bp, Homo sapiens
gaggatacaccacaa

SEQ ID NO: 1370682 - DNA, 15 bp, Homo sapiens
agaggatacaccaca

SEQ ID NO: 1370683 - DNA, 15 bp, Homo sapiens
aagaggatacaccac

SEQ ID NO: 1370684 - DNA, 15 bp, Homo sapiens
caagaggatacacca

SEQ ID NO: 1370685 - DNA, 15 bp, Homo sapiens
acaagaggatacacc

SEQ ID NO: 1370686 - DNA, 15 bp, Homo sapiens
cacaagaggatacac

SEQ ID NO: 1370687 - DNA, 15 bp, Homo sapiens
acacaagaggataca

SEQ ID NO: 1370688 - DNA, 15 bp, Homo sapiens
cacacaagaggatac

SEQ ID NO: 1370689 - DNA, 15 bp, Homo sapiens
tcacacaagaggata

SEQ ID NO: 1370690 - DNA, 15 bp, Homo sapiens
ctcacacaagaggat

SEQ ID NO: 1370691 - DNA, 15 bp, Homo sapiens
cctcacacaagagga

SEQ ID NO: 1370692 - DNA, 15 bp, Homo sapiens
ccctcacacaagagg

SEQ ID NO: 1370693 - DNA, 15 bp, Homo sapiens
cccctcacacaagag

SEQ ID NO: 1370694 - DNA, 15 bp, Homo sapiens
gcccctcacacaaga

SEQ ID NO: 1370695 - DNA, 15 bp, Homo sapiens
tgcccctcacacaag

SEQ ID NO: 1370696 - DNA, 15 bp, Homo sapiens
gtgcccctcacacaa

SEQ ID NO: 1370697 - DNA, 15 bp, Homo sapiens
ggtgcccctcacaca

SEQ ID NO: 1370698 - DNA, 15 bp, Homo sapiens
gggtgcccctcacac

SEQ ID NO: 1370699 - DNA, 15 bp, Homo sapiens
agggtgcccctcaca

SEQ ID NO: 1370700 - DNA, 15 bp, Homo sapiens
aagggtgcccctcac

SEQ ID NO: 1370701 - DNA, 15 bp, Homo sapiens
aaagggtgcccctca

SEQ ID NO: 1370702 - DNA, 15 bp, Homo sapiens
aaaagggtgcccctc

SEQ ID NO: 1370703 - DNA, 15 bp, Homo sapiens
aaaaagggtgcccct

SEQ ID NO: 1370704 - DNA, 15 bp, Homo sapiens
aaaaaagggtgcccc

SEQ ID NO: 1370705 - DNA, 15 bp, Homo sapiens
caaaaaagggtgccc

SEQ ID NO: 1370706 - DNA, 15 bp, Homo sapiens
acaaaaaagggtgcc

SEQ ID NO: 1370707 - DNA, 15 bp, Homo sapiens
cacaaaaaagggtgc

SEQ ID NO: 1370708 - DNA, 15 bp, Homo sapiens
ccacaaaaaagggtg

SEQ ID NO: 1370709 - DNA, 15 bp, Homo sapiens
cccacaaaaaagggt

SEQ ID NO: 1370710 - DNA, 15 bp, Homo sapiens
ccccacaaaaaaggg

SEQ ID NO: 1370711 - DNA, 15 bp, Homo sapiens
accccacaaaaaagg

SEQ ID NO: 1370712 - DNA, 15 bp, Homo sapiens
taccccacaaaaaag

SEQ ID NO: 1370713 - DNA, 15 bp, Homo sapiens
gtaccccacaaaaaa

SEQ ID NO: 1370714 - DNA, 15 bp, Homo sapiens
ggtaccccacaaaaa

SEQ ID NO: 1370715 - DNA, 15 bp, Homo sapiens
aggtaccccacaaaa

SEQ ID NO: 1370716 - DNA, 15 bp, Homo sapiens
caggtaccccacaaa

SEQ ID NO: 1370717 - DNA, 15 bp, Homo sapiens
gcaggtaccccacaa

SEQ ID NO: 1370718 - DNA, 15 bp, Homo sapiens
agcaggtaccccaca

SEQ ID NO: 1370719 - DNA, 15 bp, Homo sapiens
gagcaggtaccccac

SEQ ID NO: 1370720 - DNA, 15 bp, Homo sapiens
agagcaggtacccca

SEQ ID NO: 1370721 - DNA, 15 bp, Homo sapiens
cagagcaggtacccc

SEQ ID NO: 1370722 - DNA, 15 bp, Homo sapiens
tcagagcaggtaccc

SEQ ID NO: 1370723 - DNA, 15 bp, Homo sapiens
gtcagagcaggtacc

SEQ ID NO: 1370724 - DNA, 15 bp, Homo sapiens
agtcagagcaggtac

SEQ ID NO: 1370725 - DNA, 15 bp, Homo sapiens
tagtcagagcaggta

SEQ ID NO: 1370726 - DNA, 15 bp, Homo sapiens
gtagtcagagcaggt

SEQ ID NO: 1370727 - DNA, 15 bp, Homo sapiens
agtagtcagagcagg

SEQ ID NO: 1370728 - DNA, 15 bp, Homo sapiens
aagtagtcagagcag

SEQ ID NO: 1370729 - DNA, 15 bp, Homo sapiens
caagtagtcagagca

SEQ ID NO: 1370730 - DNA, 15 bp, Homo sapiens
ccaagtagtcagagc

SEQ ID NO: 1370731 - DNA, 15 bp, Homo sapiens
accaagtagtcagag

SEQ ID NO: 1370732 - DNA, 15 bp, Homo sapiens
caccaagtagtcaga

SEQ ID NO: 1370733 - DNA, 15 bp, Homo sapiens
ccaccaagtagtcag

SEQ ID NO: 1370734 - DNA, 15 bp, Homo sapiens
accaccaagtagtca

SEQ ID NO: 1370735 - DNA, 15 bp, Homo sapiens
caccaccaagtagtc

SEQ ID NO: 1370736 - DNA, 15 bp, Homo sapiens
acaccaccaagtagt

SEQ ID NO: 1370737 - DNA, 15 bp, Homo sapiens
cacaccaccaagtag

SEQ ID NO: 1370738 - DNA, 15 bp, Homo sapiens
acacaccaccaagta

SEQ ID NO: 1370739 - DNA, 15 bp, Homo sapiens
gacacaccaccaagt

SEQ ID NO: 1370740 - DNA, 15 bp, Homo sapiens
agacacaccaccaag

SEQ ID NO: 1370741 - DNA, 15 bp, Homo sapiens
aagacacaccaccaa

SEQ ID NO: 1370742 - DNA, 15 bp, Homo sapiens
gaagacacaccacca

SEQ ID NO: 1370743 - DNA, 15 bp, Homo sapiens
ggaagacacaccacc

SEQ ID NO: 1370744 - DNA, 15 bp, Homo sapiens
tggaagacacaccac

SEQ ID NO: 1370745 - DNA, 15 bp, Homo sapiens
atggaagacacacca

SEQ ID NO: 1370746 - DNA, 15 bp, Homo sapiens
catggaagacacacc

SEQ ID NO: 1370747 - DNA, 15 bp, Homo sapiens
ccatggaagacacac

SEQ ID NO: 1370748 - DNA, 15 bp, Homo sapiens
gccatggaagacaca

SEQ ID NO: 1370749 - DNA, 15 bp, Homo sapiens
agccatggaagacac

SEQ ID NO: 1370750 - DNA, 15 bp, Homo sapiens
cagccatggaagaca

SEQ ID NO: 1370751 - DNA, 15 bp, Homo sapiens
ccagccatggaagac

SEQ ID NO: 1370752 - DNA, 15 bp, Homo sapiens
gccagccatggaaga

SEQ ID NO: 1370753 - DNA, 15 bp, Homo sapiens
agccagccatggaag

SEQ ID NO: 1370754 - DNA, 15 bp, Homo sapiens
gagccagccatggaa

SEQ ID NO: 1370755 - DNA, 15 bp, Homo sapiens
tgagccagccatgga

SEQ ID NO: 1370756 - DNA, 15 bp, Homo sapiens
ctgagccagccatgg

SEQ ID NO: 1370757 - DNA, 15 bp, Homo sapiens
cctgagccagccatg

SEQ ID NO: 1370758 - DNA, 15 bp, Homo sapiens
gcctgagccagccat

SEQ ID NO: 1370759 - DNA, 15 bp, Homo sapiens
tgcctgagccagcca

SEQ ID NO: 1370760 - DNA, 15 bp, Homo sapiens
ttgcctgagccagcc

SEQ ID NO: 1370761 - DNA, 15 bp, Homo sapiens
tttgcctgagccagc

SEQ ID NO: 1370762 - DNA, 15 bp, Homo sapiens
ctttgcctgagccag

SEQ ID NO: 1370763 - DNA, 15 bp, Homo sapiens
actttgcctgagcca

SEQ ID NO: 1370764 - DNA, 15 bp, Homo sapiens
aactttgcctgagcc

SEQ ID NO: 1370765 - DNA, 15 bp, Homo sapiens
gaactttgcctgagc

SEQ ID NO: 1370766 - DNA, 15 bp, Homo sapiens
tgaactttgcctgag

SEQ ID NO: 1370767 - DNA, 15 bp, Homo sapiens
atgaactttgcctga

SEQ ID NO: 1370768 - DNA, 15 bp, Homo sapiens
aatgaactttgcctg

SEQ ID NO: 1370769 - DNA, 15 bp, Homo sapiens
gaatgaactttgcct

SEQ ID NO: 1370770 - DNA, 15 bp, Homo sapiens
ggaatgaactttgcc

SEQ ID NO: 1370771 - DNA, 15 bp, Homo sapiens
gggaatgaactttgc

SEQ ID NO: 1370772 - DNA, 15 bp, Homo sapiens
cgggaatgaactttg

SEQ ID NO: 1370773 - DNA, 15 bp, Homo sapiens
ccgggaatgaacttt

SEQ ID NO: 1370774 - DNA, 15 bp, Homo sapiens
tccgggaatgaactt

SEQ ID NO: 1370775 - DNA, 15 bp, Homo sapiens
gtccgggaatgaact

SEQ ID NO: 1370776 - DNA, 15 bp, Homo sapiens
cgtccgggaatgaac

SEQ ID NO: 1370777 - DNA, 15 bp, Homo sapiens
ccgtccgggaatgaa

SEQ ID NO: 1370778 - DNA, 15 bp, Homo sapiens
gccgtccgggaatga

SEQ ID NO: 1370779 - DNA, 15 bp, Homo sapiens
agccgtccgggaatg

SEQ ID NO: 1370780 - DNA, 15 bp, Homo sapiens
gagccgtccgggaat

SEQ ID NO: 1370781 - DNA, 15 bp, Homo sapiens
ggagccgtccgggaa

SEQ ID NO: 1370782 - DNA, 15 bp, Homo sapiens
gggagccgtccggga

SEQ ID NO: 1370783 - DNA, 15 bp, Homo sapiens
agggagccgtccggg

SEQ ID NO: 1370784 - DNA, 15 bp, Homo sapiens
gagggagccgtccgg

SEQ ID NO: 1370785 - DNA, 15 bp, Homo sapiens
ggagggagccgtccg

SEQ ID NO: 1370786 - DNA, 15 bp, Homo sapiens
gggagggagccgtcc

SEQ ID NO: 1370787 - DNA, 15 bp, Homo sapiens
ggggagggagccgtc

SEQ ID NO: 1370788 - DNA, 15 bp, Homo sapiens
cggggagggagccgt

SEQ ID NO: 1370789 - DNA, 15 bp, Homo sapiens
ccggggagggagccg

SEQ ID NO: 1370790 - DNA, 15 bp, Homo sapiens
gccggggagggagcc

SEQ ID NO: 1370791 - DNA, 15 bp, Homo sapiens
agccggggagggagc

SEQ ID NO: 1370792 - DNA, 15 bp, Homo sapiens
gagccggggagggag

SEQ ID NO: 1370793 - DNA, 15 bp, Homo sapiens
agagccggggaggga

SEQ ID NO: 1370794 - DNA, 15 bp, Homo sapiens
gagagccggggaggg

SEQ ID NO: 1370795 - DNA, 15 bp, Homo sapiens
ggagagccggggagg

SEQ ID NO: 1370796 - DNA, 15 bp, Homo sapiens
aggagagccggggag

SEQ ID NO: 1370797 - DNA, 15 bp, Homo sapiens
gaggagagccgggga

SEQ ID NO: 1370798 - DNA, 15 bp, Homo sapiens
agaggagagccgggg

SEQ ID NO: 1370799 - DNA, 15 bp, Homo sapiens
aagaggagagccggg

SEQ ID NO: 1370800 - DNA, 15 bp, Homo sapiens
gaagaggagagccgg

SEQ ID NO: 1370801 - DNA, 15 bp, Homo sapiens
tgaagaggagagccg

SEQ ID NO: 1370802 - DNA, 15 bp, Homo sapiens
ctgaagaggagagcc

SEQ ID NO: 1370803 - DNA, 15 bp, Homo sapiens
cctgaagaggagagc

SEQ ID NO: 1370804 - DNA, 15 bp, Homo sapiens
tcctgaagaggagag

SEQ ID NO: 1370805 - DNA, 15 bp, Homo sapiens
ttcctgaagaggaga

SEQ ID NO: 1370806 - DNA, 15 bp, Homo sapiens
gttcctgaagaggag

SEQ ID NO: 1370807 - DNA, 15 bp, Homo sapiens
agttcctgaagagga

SEQ ID NO: 1370808 - DNA, 15 bp, Homo sapiens
cagttcctgaagagg

SEQ ID NO: 1370809 - DNA, 15 bp, Homo sapiens
tcagttcctgaagag

SEQ ID NO: 1370810 - DNA, 15 bp, Homo sapiens
ctcagttcctgaaga

SEQ ID NO: 1370811 - DNA, 15 bp, Homo sapiens
gctcagttcctgaag

SEQ ID NO: 1370812 - DNA, 15 bp, Homo sapiens
agctcagttcctgaa

SEQ ID NO: 1370813 - DNA, 15 bp, Homo sapiens
aagctcagttcctga

SEQ ID NO: 1370814 - DNA, 15 bp, Homo sapiens
caagctcagttcctg

SEQ ID NO: 1370815 - DNA, 15 bp, Homo sapiens
gcaagctcagttcct

SEQ ID NO: 1370816 - DNA, 15 bp, Homo sapiens
agcaagctcagttcc

SEQ ID NO: 1370817 - DNA, 15 bp, Homo sapiens
cagcaagctcagttc

SEQ ID NO: 1370818 - DNA, 15 bp, Homo sapiens
tcagcaagctcagtt

SEQ ID NO: 1370819 - DNA, 15 bp, Homo sapiens
ctcagcaagctcagt

SEQ ID NO: 1370820 - DNA, 15 bp, Homo sapiens
tctcagcaagctcag

SEQ ID NO: 1370821 - DNA, 15 bp, Homo sapiens
ttctcagcaagctca

SEQ ID NO: 1370822 - DNA, 15 bp, Homo sapiens
gttctcagcaagctc

SEQ ID NO: 1370823 - DNA, 15 bp, Homo sapiens
cgttctcagcaagct

SEQ ID NO: 1370824 - DNA, 15 bp, Homo sapiens
acgttctcagcaagc

SEQ ID NO: 1370825 - DNA, 15 bp, Homo sapiens
gacgttctcagcaag

SEQ ID NO: 1370826 - DNA, 15 bp, Homo sapiens
agacgttctcagcaa

SEQ ID NO: 1370827 - DNA, 15 bp, Homo sapiens
aagacgttctcagca

SEQ ID NO: 1370828 - DNA, 15 bp, Homo sapiens
aaagacgttctcagc

SEQ ID NO: 1370829 - DNA, 15 bp, Homo sapiens
taaagacgttctcag

SEQ ID NO: 1370830 - DNA, 15 bp, Homo sapiens
ctaaagacgttctca

SEQ ID NO: 1370831 - DNA, 15 bp, Homo sapiens
cctaaagacgttctc

SEQ ID NO: 1370832 - DNA, 15 bp, Homo sapiens
ccctaaagacgttct

SEQ ID NO: 1370833 - DNA, 15 bp, Homo sapiens
tccctaaagacgttc

SEQ ID NO: 1370834 - DNA, 15 bp, Homo sapiens
ctccctaaagacgtt

SEQ ID NO: 1370835 - DNA, 15 bp, Homo sapiens
tctccctaaagacgt

SEQ ID NO: 1370836 - DNA, 15 bp, Homo sapiens
gtctccctaaagacg

SEQ ID NO: 1370837 - DNA, 15 bp, Homo sapiens
ggtctccctaaagac

SEQ ID NO: 1370838 - DNA, 15 bp, Homo sapiens
gggtctccctaaaga

SEQ ID NO: 1370839 - DNA, 15 bp, Homo sapiens
agggtctccctaaag

SEQ ID NO: 1370840 - DNA, 15 bp, Homo sapiens
aagggtctccctaaa

SEQ ID NO: 1370841 - DNA, 15 bp, Homo sapiens
caagggtctccctaa

SEQ ID NO: 1370842 - DNA, 15 bp, Homo sapiens
acaagggtctcccta

SEQ ID NO: 1370843 - DNA, 15 bp, Homo sapiens
aacaagggtctccct

SEQ ID NO: 1370844 - DNA, 15 bp, Homo sapiens
aaacaagggtctccc

SEQ ID NO: 1370845 - DNA, 15 bp, Homo sapiens
caaacaagggtctcc

SEQ ID NO: 1370846 - DNA, 15 bp, Homo sapiens
acaaacaagggtctc

SEQ ID NO: 1370847 - DNA, 15 bp, Homo sapiens
aacaaacaagggtct

SEQ ID NO: 1370848 - DNA, 15 bp, Homo sapiens
aaacaaacaagggtc

SEQ ID NO: 1370849 - DNA, 15 bp, Homo sapiens
aaaacaaacaagggt

SEQ ID NO: 1370850 - DNA, 15 bp, Homo sapiens
gaaaacaaacaaggg

SEQ ID NO: 1370851 - DNA, 15 bp, Homo sapiens
tgaaaacaaacaagg

SEQ ID NO: 1370852 - DNA, 15 bp, Homo sapiens
atgaaaacaaacaag

SEQ ID NO: 1370853 - DNA, 15 bp, Homo sapiens
aatgaaaacaaacaa

SEQ ID NO: 1370854 - DNA, 15 bp, Homo sapiens
aaatgaaaacaaaca

SEQ ID NO: 1370855 - DNA, 15 bp, Homo sapiens
gaaatgaaaacaaac

SEQ ID NO: 1370856 - DNA, 15 bp, Homo sapiens
tgaaatgaaaacaaa

SEQ ID NO: 1370857 - DNA, 15 bp, Homo sapiens
ttgaaatgaaaacaa

SEQ ID NO: 1370858 - DNA, 15 bp, Homo sapiens
attgaaatgaaaaca

SEQ ID NO: 1370859 - DNA, 15 bp, Homo sapiens
cattgaaatgaaaac

SEQ ID NO: 1370860 - DNA, 15 bp, Homo sapiens
gcattgaaatgaaaa

SEQ ID NO: 1370861 - DNA, 15 bp, Homo sapiens
tgcattgaaatgaaa

SEQ ID NO: 1370862 - DNA, 15 bp, Homo sapiens
ttgcattgaaatgaa

SEQ ID NO: 1370863 - DNA, 15 bp, Homo sapiens
attgcattgaaatga

SEQ ID NO: 1370864 - DNA, 15 bp, Homo sapiens
tattgcattgaaatg

SEQ ID NO: 1370865 - DNA, 15 bp, Homo sapiens
atattgcattgaaat

SEQ ID NO: 1370866 - DNA, 15 bp, Homo sapiens
tatattgcattgaaa

SEQ ID NO: 1370867 - DNA, 15 bp, Homo sapiens
atatattgcattgaa

SEQ ID NO: 1370868 - DNA, 15 bp, Homo sapiens
gtatatattgcattg

SEQ ID NO: 1370869 - DNA, 15 bp, Homo sapiens
agtatatattgcatt

SEQ ID NO: 1370870 - DNA, 15 bp, Homo sapiens
gagtatatattgcat

SEQ ID NO: 1370871 - DNA, 15 bp, Homo sapiens
agagtatatattgca

SEQ ID NO: 1370872 - DNA, 15 bp, Homo sapiens
cagagtatatattgc

SEQ ID NO: 1370873 - DNA, 15 bp, Homo sapiens
acagagtatatattg

SEQ ID NO: 1370874 - DNA, 15 bp, Homo sapiens
aacagagtatatatt

SEQ ID NO: 1370875 - DNA, 15 bp, Homo sapiens
taacagagtatatat

SEQ ID NO: 1370876 - DNA, 15 bp, Homo sapiens
ataacagagtatata

SEQ ID NO: 1370877 - DNA, 15 bp, Homo sapiens
gataacagagtatat

SEQ ID NO: 1370878 - DNA, 15 bp, Homo sapiens
agataacagagtata

SEQ ID NO: 1370879 - DNA, 15 bp, Homo sapiens
cagataacagagtat

SEQ ID NO: 1370880 - DNA, 15 bp, Homo sapiens
tcagataacagagta

SEQ ID NO: 1370881 - DNA, 15 bp, Homo sapiens
ctcagataacagagt

SEQ ID NO: 1370882 - DNA, 15 bp, Homo sapiens
tctcagataacagag

SEQ ID NO: 1370883 - DNA, 15 bp, Homo sapiens
gtctcagataacaga

SEQ ID NO: 1370884 - DNA, 15 bp, Homo sapiens
agtctcagataacag

SEQ ID NO: 1370885 - DNA, 15 bp, Homo sapiens
cagtctcagataaca

SEQ ID NO: 1370886 - DNA, 15 bp, Homo sapiens
tcagtctcagataac

SEQ ID NO: 1370887 - DNA, 15 bp, Homo sapiens
ctcagtctcagataa

SEQ ID NO: 1370888 - DNA, 15 bp, Homo sapiens
cctcagtctcagata

SEQ ID NO: 1370889 - DNA, 15 bp, Homo sapiens
ccctcagtctcagat

SEQ ID NO: 1370890 - DNA, 15 bp, Homo sapiens
accctcagtctcaga

SEQ ID NO: 1370891 - DNA, 15 bp, Homo sapiens
taccctcagtctcag

SEQ ID NO: 1370892 - DNA, 15 bp, Homo sapiens
ataccctcagtctca

SEQ ID NO: 1370893 - DNA, 15 bp, Homo sapiens
aataccctcagtctc

SEQ ID NO: 1370894 - DNA, 15 bp, Homo sapiens
caataccctcagtct

SEQ ID NO: 1370895 - DNA, 15 bp, Homo sapiens
acaataccctcagtc

SEQ ID NO: 1370896 - DNA, 15 bp, Homo sapiens
aacaataccctcagt

SEQ ID NO: 1370897 - DNA, 15 bp, Homo sapiens
aaacaataccctcag

SEQ ID NO: 1370898 - DNA, 15 bp, Homo sapiens
taaacaataccctca

SEQ ID NO: 1370899 - DNA, 15 bp, Homo sapiens
gtaaacaataccctc

SEQ ID NO: 1370900 - DNA, 15 bp, Homo sapiens
agtaaacaataccct

SEQ ID NO: 1370901 - DNA, 15 bp, Homo sapiens
gagtaaacaataccc

SEQ ID NO: 1370902 - DNA, 15 bp, Homo sapiens
tgagtaaacaatacc

SEQ ID NO: 1370903 - DNA, 15 bp, Homo sapiens
ttgagtaaacaatac

SEQ ID NO: 1370904 - DNA, 15 bp, Homo sapiens
tttgagtaaacaata

SEQ ID NO: 1370905 - DNA, 15 bp, Homo sapiens
ctttgagtaaacaat

SEQ ID NO: 1370906 - DNA, 15 bp, Homo sapiens
gctttgagtaaacaa

SEQ ID NO: 1370907 - DNA, 15 bp, Homo sapiens
agctttgagtaaaca

SEQ ID NO: 1370908 - DNA, 15 bp, Homo sapiens
aagctttgagtaaac

SEQ ID NO: 1370909 - DNA, 15 bp, Homo sapiens
gaagctttgagtaaa

SEQ ID NO: 1370910 - DNA, 15 bp, Homo sapiens
agaagctttgagtaa

SEQ ID NO: 1370911 - DNA, 15 bp, Homo sapiens
tagaagctttgagta

SEQ ID NO: 1370912 - DNA, 15 bp, Homo sapiens
ttagaagctttgagt

SEQ ID NO: 1370913 - DNA, 15 bp, Homo sapiens
attagaagctttgag

SEQ ID NO: 1370914 - DNA, 15 bp, Homo sapiens
cattagaagctttga

SEQ ID NO: 1370915 - DNA, 15 bp, Homo sapiens
tcattagaagctttg

SEQ ID NO: 1370916 - DNA, 15 bp, Homo sapiens
ctcattagaagcttt

SEQ ID NO: 1370917 - DNA, 15 bp, Homo sapiens
tctcattagaagctt

SEQ ID NO: 1370918 - DNA, 15 bp, Homo sapiens
ttctcattagaagct

SEQ ID NO: 1370919 - DNA, 15 bp, Homo sapiens
attctcattagaagc

SEQ ID NO: 1370920 - DNA, 15 bp, Homo sapiens
aattctcattagaag

SEQ ID NO: 1370921 - DNA, 15 bp, Homo sapiens
caattctcattagaa

SEQ ID NO: 1370922 - DNA, 15 bp, Homo sapiens
tcaattctcattaga

SEQ ID NO: 1370923 - DNA, 15 bp, Homo sapiens
ctcaattctcattag

SEQ ID NO: 1370924 - DNA, 15 bp, Homo sapiens
gctcaattctcatta

SEQ ID NO: 1370925 - DNA, 15 bp, Homo sapiens
tgctcaattctcatt

SEQ ID NO: 1370926 - DNA, 15 bp, Homo sapiens
ctgctcaattctcat

SEQ ID NO: 1370927 - DNA, 15 bp, Homo sapiens
cctgctcaattctca

SEQ ID NO: 1370928 - DNA, 15 bp, Homo sapiens
tcctgctcaattctc

SEQ ID NO: 1370929 - DNA, 15 bp, Homo sapiens
ttcctgctcaattct

SEQ ID NO: 1370930 - DNA, 15 bp, Homo sapiens
tttcctgctcaattc

SEQ ID NO: 1370931 - DNA, 15 bp, Homo sapiens
ttttcctgctcaatt

SEQ ID NO: 1370932 - DNA, 15 bp, Homo sapiens
tttttcctgctcaat

SEQ ID NO: 1370933 - DNA, 15 bp, Homo sapiens
ctttttcctgctcaa

SEQ ID NO: 1370934 - DNA, 15 bp, Homo sapiens
tctttttcctgctca

SEQ ID NO: 1370935 - DNA, 15 bp, Homo sapiens
ctctttttcctgctc

SEQ ID NO: 1370936 - DNA, 15 bp, Homo sapiens
cctctttttcctgct

SEQ ID NO: 1370937 - DNA, 15 bp, Homo sapiens
ccctctttttcctgc

SEQ ID NO: 1370938 - DNA, 15 bp, Homo sapiens
tccctctttttcctg

SEQ ID NO: 1370939 - DNA, 15 bp, Homo sapiens
gtccctctttttcct

SEQ ID NO: 1370940 - DNA, 15 bp, Homo sapiens
ggtccctctttttcc

SEQ ID NO: 1370941 - DNA, 15 bp, Homo sapiens
aggtccctctttttc

SEQ ID NO: 1370942 - DNA, 15 bp, Homo sapiens
taggtccctcttttt

SEQ ID NO: 1370943 - DNA, 15 bp, Homo sapiens
ctaggtccctctttt

SEQ ID NO: 1370944 - DNA, 15 bp, Homo sapiens
tctaggtccctcttt

SEQ ID NO: 1370945 - DNA, 15 bp, Homo sapiens
ctctaggtccctctt

SEQ ID NO: 1370946 - DNA, 15 bp, Homo sapiens
tctctaggtccctct

SEQ ID NO: 1370947 - DNA, 15 bp, Homo sapiens
ttctctaggtccctc

SEQ ID NO: 1370948 - DNA, 15 bp, Homo sapiens
cttctctaggtccct

SEQ ID NO: 1370949 - DNA, 15 bp, Homo sapiens
ccttctctaggtccc

SEQ ID NO: 1370950 - DNA, 15 bp, Homo sapiens
cccttctctaggtcc

SEQ ID NO: 1370951 - DNA, 15 bp, Homo sapiens
tcccttctctaggtc

SEQ ID NO: 1370952 - DNA, 15 bp, Homo sapiens
ctcccttctctaggt

SEQ ID NO: 1370953 - DNA, 15 bp, Homo sapiens
cctcccttctctagg

SEQ ID NO: 1370954 - DNA, 15 bp, Homo sapiens
ccctcccttctctag

SEQ ID NO: 1370955 - DNA, 15 bp, Homo sapiens
cccctcccttctcta

SEQ ID NO: 1370956 - DNA, 15 bp, Homo sapiens
ccccctcccttctct

SEQ ID NO: 1370957 - DNA, 15 bp, Homo sapiens
gccccctcccttctc

SEQ ID NO: 1370958 - DNA, 15 bp, Homo sapiens
agccccctcccttct

SEQ ID NO: 1370959 - DNA, 15 bp, Homo sapiens
aagccccctcccttc

SEQ ID NO: 1370960 - DNA, 15 bp, Homo sapiens
gaagccccctccctt

SEQ ID NO: 1370961 - DNA, 15 bp, Homo sapiens
tgaagccccctccct

SEQ ID NO: 1370962 - DNA, 15 bp, Homo sapiens
ctgaagccccctccc

SEQ ID NO: 1370963 - DNA, 15 bp, Homo sapiens
cctgaagccccctcc

SEQ ID NO: 1370964 - DNA, 15 bp, Homo sapiens
gcctgaagccccctc

SEQ ID NO: 1370965 - DNA, 15 bp, Homo sapiens
tgcctgaagccccct

SEQ ID NO: 1370966 - DNA, 15 bp, Homo sapiens
ctgcctgaagccccc

SEQ ID NO: 1370967 - DNA, 15 bp, Homo sapiens
actgcctgaagcccc

SEQ ID NO: 1370968 - DNA, 15 bp, Homo sapiens
tactgcctgaagccc

SEQ ID NO: 1370969 - DNA, 15 bp, Homo sapiens
gtactgcctgaagcc

SEQ ID NO: 1370970 - DNA, 15 bp, Homo sapiens
cgtactgcctgaagc

SEQ ID NO: 1370971 - DNA, 15 bp, Homo sapiens
ccgtactgcctgaag

SEQ ID NO: 1370972 - DNA, 15 bp, Homo sapiens
accgtactgcctgaa

SEQ ID NO: 1370973 - DNA, 15 bp, Homo sapiens
caccgtactgcctga

SEQ ID NO: 1370974 - DNA, 15 bp, Homo sapiens
ccaccgtactgcctg

SEQ ID NO: 1370975 - DNA, 15 bp, Homo sapiens
cccaccgtactgcct

SEQ ID NO: 1370976 - DNA, 15 bp, Homo sapiens
tcccaccgtactgcc

SEQ ID NO: 1370977 - DNA, 15 bp, Homo sapiens
ctcccaccgtactgc

SEQ ID NO: 1370978 - DNA, 15 bp, Homo sapiens
actcccaccgtactg

SEQ ID NO: 1370979 - DNA, 15 bp, Homo sapiens
cactcccaccgtact

SEQ ID NO: 1370980 - DNA, 15 bp, Homo sapiens
ccactcccaccgtac

SEQ ID NO: 1370981 - DNA, 15 bp, Homo sapiens
tccactcccaccgta

SEQ ID NO: 1370982 - DNA, 15 bp, Homo sapiens
gtccactcccaccgt

SEQ ID NO: 1370983 - DNA, 15 bp, Homo sapiens
tgtccactcccaccg

SEQ ID NO: 1370984 - DNA, 15 bp, Homo sapiens
ctgtccactcccacc

SEQ ID NO: 1370985 - DNA, 15 bp, Homo sapiens
tctgtccactcccac

SEQ ID NO: 1370986 - DNA, 15 bp, Homo sapiens
ctctgtccactccca

SEQ ID NO: 1370987 - DNA, 15 bp, Homo sapiens
cctctgtccactccc

SEQ ID NO: 1370988 - DNA, 15 bp, Homo sapiens
tcctctgtccactcc

SEQ ID NO: 1370989 - DNA, 15 bp, Homo sapiens
ctcctctgtccactc

SEQ ID NO: 1370990 - DNA, 15 bp, Homo sapiens
actcctctgtccact

SEQ ID NO: 1370991 - DNA, 15 bp, Homo sapiens
aactcctctgtccac

SEQ ID NO: 1370992 - DNA, 15 bp, Homo sapiens
caactcctctgtcca

SEQ ID NO: 1370993 - DNA, 15 bp, Homo sapiens
tcaactcctctgtcc

SEQ ID NO: 1370994 - DNA, 15 bp, Homo sapiens
catggtgccgggtct

SEQ ID NO: 1370995 - DNA, 15 bp, Homo sapiens
gcatggtgccgggtc

SEQ ID NO: 1370996 - DNA, 15 bp, Homo sapiens
ggcatggtgccgggt

SEQ ID NO: 1370997 - DNA, 15 bp, Homo sapiens
aggcatggtgccggg

SEQ ID NO: 1370998 - DNA, 15 bp, Homo sapiens
gaggcatggtgccgg

SEQ ID NO: 1370999 - DNA, 15 bp, Homo sapiens
ggaggcatggtgccg

SEQ ID NO: 1371000 - DNA, 15 bp, Homo sapiens
tggaggcatggtgcc

SEQ ID NO: 1371001 - DNA, 15 bp, Homo sapiens
ttggaggcatggtgc

SEQ ID NO: 1371002 - DNA, 15 bp, Homo sapiens
gttggaggcatggtg

SEQ ID NO: 1371003 - DNA, 15 bp, Homo sapiens
ggttggaggcatggt

SEQ ID NO: 1371004 - DNA, 15 bp, Homo sapiens
gggttggaggcatgg

SEQ ID NO: 1371005 - DNA, 15 bp, Homo sapiens
tgggttggaggcatg

SEQ ID NO: 1371006 - DNA, 15 bp, Homo sapiens
ttgggttggaggcat

SEQ ID NO: 1371007 - DNA, 15 bp, Homo sapiens
cttgggttggaggca

SEQ ID NO: 1371008 - DNA, 15 bp, Homo sapiens
ccttgggttggaggc

SEQ ID NO: 1371009 - DNA, 15 bp, Homo sapiens
cccttgggttggagg

SEQ ID NO: 1371010 - DNA, 15 bp, Homo sapiens
acccttgggttggag

SEQ ID NO: 1371011 - DNA, 15 bp, Homo sapiens
cacccttgggttgga

SEQ ID NO: 1371012 - DNA, 15 bp, Homo sapiens
ccacccttgggttgg

SEQ ID NO: 1371013 - DNA, 15 bp, Homo sapiens
gccacccttgggttg

SEQ ID NO: 1371014 - DNA, 15 bp, Homo sapiens
ggccacccttgggtt

SEQ ID NO: 1371015 - DNA, 15 bp, Homo sapiens
tggccacccttgggt

SEQ ID NO: 1371016 - DNA, 15 bp, Homo sapiens
ttggccacccttggg

SEQ ID NO: 1371017 - DNA, 15 bp, Homo sapiens
gttggccacccttgg

SEQ ID NO: 1371018 - DNA, 15 bp, Homo sapiens
agttggccacccttg

SEQ ID NO: 1371019 - DNA, 15 bp, Homo sapiens
gagttggccaccctt

SEQ ID NO: 1371020 - DNA, 15 bp, Homo sapiens
agagttggccaccct

SEQ ID NO: 1371021 - DNA, 15 bp, Homo sapiens
aagagttggccaccc

SEQ ID NO: 1371022 - DNA, 15 bp, Homo sapiens
aaagagttggccacc

SEQ ID NO: 1371023 - DNA, 15 bp, Homo sapiens
caaagagttggccac

SEQ ID NO: 1371024 - DNA, 15 bp, Homo sapiens
gcaaagagttggcca

SEQ ID NO: 1371025 - DNA, 15 bp, Homo sapiens
agcaaagagttggcc

SEQ ID NO: 1371026 - DNA, 15 bp, Homo sapiens
aagcaaagagttggc

SEQ ID NO: 1371027 - DNA, 15 bp, Homo sapiens
caagcaaagagttgg

SEQ ID NO: 1371028 - DNA, 15 bp, Homo sapiens
tcaagcaaagagttg

SEQ ID NO: 1371029 - DNA, 15 bp, Homo sapiens
ctcaagcaaagagtt

SEQ ID NO: 1371030 - DNA, 15 bp, Homo sapiens
tctcaagcaaagagt

SEQ ID NO: 1371031 - DNA, 15 bp, Homo sapiens
atctcaagcaaagag

SEQ ID NO: 1371032 - DNA, 15 bp, Homo sapiens
aatctcaagcaaaga

SEQ ID NO: 1371033 - DNA, 15 bp, Homo sapiens
gaatctcaagcaaag

SEQ ID NO: 1371034 - DNA, 15 bp, Homo sapiens
tgaatctcaagcaaa

SEQ ID NO: 1371035 - DNA, 15 bp, Homo sapiens
atgaatctcaagcaa

SEQ ID NO: 1371036 - DNA, 15 bp, Homo sapiens
tatgaatctcaagca

SEQ ID NO: 1371037 - DNA, 15 bp, Homo sapiens
atatgaatctcaagc

SEQ ID NO: 1371038 - DNA, 15 bp, Homo sapiens
catatgaatctcaag

SEQ ID NO: 1371039 - DNA, 15 bp, Homo sapiens
acatatgaatctcaa

SEQ ID NO: 1371040 - DNA, 15 bp, Homo sapiens
cacatatgaatctca

SEQ ID NO: 1371041 - DNA, 15 bp, Homo sapiens
ccacatatgaatctc

SEQ ID NO: 1371042 - DNA, 15 bp, Homo sapiens
gccacatatgaatct

SEQ ID NO: 1371043 - DNA, 15 bp, Homo sapiens
agccacatatgaatc

SEQ ID NO: 1371044 - DNA, 15 bp, Homo sapiens
tagccacatatgaat

SEQ ID NO: 1371045 - DNA, 15 bp, Homo sapiens
gtagccacatatgaa

SEQ ID NO: 1371046 - DNA, 15 bp, Homo sapiens
agtagccacatatga

SEQ ID NO: 1371047 - DNA, 15 bp, Homo sapiens
tagtagccacatatg

SEQ ID NO: 1371048 - DNA, 15 bp, Homo sapiens
ctagtagccacatat

SEQ ID NO: 1371049 - DNA, 15 bp, Homo sapiens
actagtagccacata

SEQ ID NO: 1371050 - DNA, 15 bp, Homo sapiens
gactagtagccacat

SEQ ID NO: 1371051 - DNA, 15 bp, Homo sapiens
ggactagtagccaca

SEQ ID NO: 1371052 - DNA, 15 bp, Homo sapiens
gggactagtagccac

SEQ ID NO: 1371053 - DNA, 15 bp, Homo sapiens
ggggactagtagcca

SEQ ID NO: 1371054 - DNA, 15 bp, Homo sapiens
tggggactagtagcc

SEQ ID NO: 1371055 - DNA, 15 bp, Homo sapiens
ttggggactagtagc

SEQ ID NO: 1371056 - DNA, 15 bp, Homo sapiens
cttggggactagtag

SEQ ID NO: 1371057 - DNA, 15 bp, Homo sapiens
acttggggactagta

SEQ ID NO: 1371058 - DNA, 15 bp, Homo sapiens
gacttggggactagt

SEQ ID NO: 1371059 - DNA, 15 bp, Homo sapiens
agacttggggactag

SEQ ID NO: 1371060 - DNA, 15 bp, Homo sapiens
cagacttggggacta

SEQ ID NO: 1371061 - DNA, 15 bp, Homo sapiens
ccagacttggggact

SEQ ID NO: 1371062 - DNA, 15 bp, Homo sapiens
cccagacttggggac

SEQ ID NO: 1371063 - DNA, 15 bp, Homo sapiens
ccccagacttgggga

SEQ ID NO: 1371064 - DNA, 15 bp, Homo sapiens
cccccagacttgggg

SEQ ID NO: 1371065 - DNA, 15 bp, Homo sapiens
tcccccagacttggg

SEQ ID NO: 1371066 - DNA, 15 bp, Homo sapiens
atcccccagacttgg

SEQ ID NO: 1371067 - DNA, 15 bp, Homo sapiens
catcccccagacttg

SEQ ID NO: 1371068 - DNA, 15 bp, Homo sapiens
ccatcccccagactt

SEQ ID NO: 1371069 - DNA, 15 bp, Homo sapiens
cccatcccccagact

SEQ ID NO: 1371070 - DNA, 15 bp, Homo sapiens
tcccatcccccagac

SEQ ID NO: 1371071 - DNA, 15 bp, Homo sapiens
ctcccatcccccaga

SEQ ID NO: 1371072 - DNA, 15 bp, Homo sapiens
gctcccatcccccag

SEQ ID NO: 1371073 - DNA, 15 bp, Homo sapiens
cgctcccatccccca

SEQ ID NO: 1371074 - DNA, 15 bp, Homo sapiens
acgctcccatccccc

SEQ ID NO: 1371075 - DNA, 15 bp, Homo sapiens
gacgctcccatcccc

SEQ ID NO: 1371076 - DNA, 15 bp, Homo sapiens
ggacgctcccatccc

SEQ ID NO: 1371077 - DNA, 15 bp, Homo sapiens
aggacgctcccatcc

SEQ ID NO: 1371078 - DNA, 15 bp, Homo sapiens
aaggacgctcccatc

SEQ ID NO: 1371079 - DNA, 15 bp, Homo sapiens
caaggacgctcccat

SEQ ID NO: 1371080 - DNA, 15 bp, Homo sapiens
tcaaggacgctccca

SEQ ID NO: 1371081 - DNA, 15 bp, Homo sapiens
ctcaaggacgctccc

SEQ ID NO: 1371082 - DNA, 15 bp, Homo sapiens
actcaaggacgctcc

SEQ ID NO: 1371083 - DNA, 15 bp, Homo sapiens
gactcaaggacgctc

SEQ ID NO: 1371084 - DNA, 15 bp, Homo sapiens
tgactcaaggacgct

SEQ ID NO: 1371085 - DNA, 15 bp, Homo sapiens
ctgactcaaggacgc

SEQ ID NO: 1371086 - DNA, 15 bp, Homo sapiens
actgactcaaggacg

SEQ ID NO: 1371087 - DNA, 15 bp, Homo sapiens
tactgactcaaggac

SEQ ID NO: 1371088 - DNA, 15 bp, Homo sapiens
atactgactcaagga

SEQ ID NO: 1371089 - DNA, 15 bp, Homo sapiens
gatactgactcaagg

SEQ ID NO: 1371090 - DNA, 15 bp, Homo sapiens
ggatactgactcaag

SEQ ID NO: 1371091 - DNA, 15 bp, Homo sapiens
tggatactgactcaa

SEQ ID NO: 1371092 - DNA, 15 bp, Homo sapiens
atggatactgactca

SEQ ID NO: 1371093 - DNA, 15 bp, Homo sapiens
aatggatactgactc

SEQ ID NO: 1371094 - DNA, 15 bp, Homo sapiens
gaatggatactgact

SEQ ID NO: 1371095 - DNA, 15 bp, Homo sapiens
tgaatggatactgac

SEQ ID NO: 1371096 - DNA, 15 bp, Homo sapiens
ctgaatggatactga

SEQ ID NO: 1371097 - DNA, 15 bp, Homo sapiens
gctgaatggatactg

SEQ ID NO: 1371098 - DNA, 15 bp, Homo sapiens
tgctgaatggatact

SEQ ID NO: 1371099 - DNA, 15 bp, Homo sapiens
atgctgaatggatac

SEQ ID NO: 1371100 - DNA, 15 bp, Homo sapiens
gatgctgaatggata

SEQ ID NO: 1371101 - DNA, 15 bp, Homo sapiens
ggatgctgaatggat

SEQ ID NO: 1371102 - DNA, 15 bp, Homo sapiens
tggatgctgaatgga

SEQ ID NO: 1371103 - DNA, 15 bp, Homo sapiens
ttggatgctgaatgg

SEQ ID NO: 1371104 - DNA, 15 bp, Homo sapiens
cttggatgctgaatg

SEQ ID NO: 1371105 - DNA, 15 bp, Homo sapiens
ccttggatgctgaat

SEQ ID NO: 1371106 - DNA, 15 bp, Homo sapiens
tccttggatgctgaa

SEQ ID NO: 1371107 - DNA, 15 bp, Homo sapiens
atccttggatgctga

SEQ ID NO: 1371108 - DNA, 15 bp, Homo sapiens
catccttggatgctg

SEQ ID NO: 1371109 - DNA, 15 bp, Homo sapiens
acatccttggatgct

SEQ ID NO: 1371110 - DNA, 15 bp, Homo sapiens
aacatccttggatgc

SEQ ID NO: 1371111 - DNA, 15 bp, Homo sapiens
aaacatccttggatg

SEQ ID NO: 1371112 - DNA, 15 bp, Homo sapiens
gaaacatccttggat

SEQ ID NO: 1371113 - DNA, 15 bp, Homo sapiens
agaaacatccttgga

SEQ ID NO: 1371114 - DNA, 15 bp, Homo sapiens
cagaaacatccttgg

SEQ ID NO: 1371115 - DNA, 15 bp, Homo sapiens
acagaaacatccttg

SEQ ID NO: 1371116 - DNA, 15 bp, Homo sapiens
gacagaaacatcctt

SEQ ID NO: 1371117 - DNA, 15 bp, Homo sapiens
agacagaaacatcct

SEQ ID NO: 1371118 - DNA, 15 bp, Homo sapiens
gagacagaaacatcc

SEQ ID NO: 1371119 - DNA, 15 bp, Homo sapiens
ggagacagaaacatc

SEQ ID NO: 1371120 - DNA, 15 bp, Homo sapiens
aggagacagaaacat

SEQ ID NO: 1371121 - DNA, 15 bp, Homo sapiens
aaggagacagaaaca

SEQ ID NO: 1371122 - DNA, 15 bp, Homo sapiens
gaaggagacagaaac

SEQ ID NO: 1371123 - DNA, 15 bp, Homo sapiens
agaaggagacagaaa

SEQ ID NO: 1371124 - DNA, 15 bp, Homo sapiens
gagaaggagacagaa

SEQ ID NO: 1371125 - DNA, 15 bp, Homo sapiens
agagaaggagacaga

SEQ ID NO: 1371126 - DNA, 15 bp, Homo sapiens
aagagaaggagacag

SEQ ID NO: 1371127 - DNA, 15 bp, Homo sapiens
aaagagaaggagaca

SEQ ID NO: 1371128 - DNA, 15 bp, Homo sapiens
caaagagaaggagac

SEQ ID NO: 1371129 - DNA, 15 bp, Homo sapiens
tcaaagagaaggaga

SEQ ID NO: 1371130 - DNA, 15 bp, Homo sapiens
atcaaagagaaggag

SEQ ID NO: 1371131 - DNA, 15 bp, Homo sapiens
gatcaaagagaagga

SEQ ID NO: 1371132 - DNA, 15 bp, Homo sapiens
ggatcaaagagaagg

SEQ ID NO: 1371133 - DNA, 15 bp, Homo sapiens
aggatcaaagagaag

SEQ ID NO: 1371134 - DNA, 15 bp, Homo sapiens
aaggatcaaagagaa

SEQ ID NO: 1371135 - DNA, 15 bp, Homo sapiens
caaggatcaaagaga

SEQ ID NO: 1371136 - DNA, 15 bp, Homo sapiens
gcaaggatcaaagag

SEQ ID NO: 1371137 - DNA, 15 bp, Homo sapiens
agcaaggatcaaaga

SEQ ID NO: 1371138 - DNA, 15 bp, Homo sapiens
cagcaaggatcaaag

SEQ ID NO: 1371139 - DNA, 15 bp, Homo sapiens
ccagcaaggatcaaa

SEQ ID NO: 1371140 - DNA, 15 bp, Homo sapiens
gccagcaaggatcaa

SEQ ID NO: 1371141 - DNA, 15 bp, Homo sapiens
tgccagcaaggatca

SEQ ID NO: 1371142 - DNA, 15 bp, Homo sapiens
atgccagcaaggatc

SEQ ID NO: 1371143 - DNA, 15 bp, Homo sapiens
gatgccagcaaggat

SEQ ID NO: 1371144 - DNA, 15 bp, Homo sapiens
agatgccagcaagga

SEQ ID NO: 1371145 - DNA, 15 bp, Homo sapiens
cagatgccagcaagg

SEQ ID NO: 1371146 - DNA, 15 bp, Homo sapiens
acagatgccagcaag

SEQ ID NO: 1371147 - DNA, 15 bp, Homo sapiens
gacagatgccagcaa

SEQ ID NO: 1371148 - DNA, 15 bp, Homo sapiens
tgacagatgccagca

SEQ ID NO: 1371149 - DNA, 15 bp, Homo sapiens
atgacagatgccagc

SEQ ID NO: 1371150 - DNA, 15 bp, Homo sapiens
tatgacagatgccag

SEQ ID NO: 1371151 - DNA, 15 bp, Homo sapiens
ctatgacagatgcca

SEQ ID NO: 1371152 - DNA, 15 bp, Homo sapiens
actatgacagatgcc

SEQ ID NO: 1371153 - DNA, 15 bp, Homo sapiens
gactatgacagatgc

SEQ ID NO: 1371154 - DNA, 15 bp, Homo sapiens
agactatgacagatg

SEQ ID NO: 1371155 - DNA, 15 bp, Homo sapiens
gagactatgacagat

SEQ ID NO: 1371156 - DNA, 15 bp, Homo sapiens
tgagactatgacaga

SEQ ID NO: 1371157 - DNA, 15 bp, Homo sapiens
ctgagactatgacag

SEQ ID NO: 1371158 - DNA, 15 bp, Homo sapiens
tctgagactatgaca

SEQ ID NO: 1371159 - DNA, 15 bp, Homo sapiens
ctctgagactatgac

SEQ ID NO: 1371160 - DNA, 15 bp, Homo sapiens
cctctgagactatga

SEQ ID NO: 1371161 - DNA, 15 bp, Homo sapiens
tcctctgagactatg

SEQ ID NO: 1371162 - DNA, 15 bp, Homo sapiens
ctcctctgagactat

SEQ ID NO: 1371163 - DNA, 15 bp, Homo sapiens
tctcctctgagacta

SEQ ID NO: 1371164 - DNA, 15 bp, Homo sapiens
ctctcctctgagact

SEQ ID NO: 1371165 - DNA, 15 bp, Homo sapiens
gctctcctctgagac

SEQ ID NO: 1371166 - DNA, 15 bp, Homo sapiens
ggctctcctctgaga

SEQ ID NO: 1371167 - DNA, 15 bp, Homo sapiens
aggctctcctctgag

SEQ ID NO: 1371168 - DNA, 15 bp, Homo sapiens
aaggctctcctctga

SEQ ID NO: 1371169 - DNA, 15 bp, Homo sapiens
gaaggctctcctctg

SEQ ID NO: 1371170 - DNA, 15 bp, Homo sapiens
tgaaggctctcctct

SEQ ID NO: 1371171 - DNA, 15 bp, Homo sapiens
ttgaaggctctcctc

SEQ ID NO: 1371172 - DNA, 15 bp, Homo sapiens
tttgaaggctctcct

SEQ ID NO: 1371173 - DNA, 15 bp, Homo sapiens
ttttgaaggctctcc

SEQ ID NO: 1371174 - DNA, 15 bp, Homo sapiens
tttttgaaggctctc

SEQ ID NO: 1371175 - DNA, 15 bp, Homo sapiens
atttttgaaggctct

SEQ ID NO: 1371176 - DNA, 15 bp, Homo sapiens
tatttttgaaggctc

SEQ ID NO: 1371177 - DNA, 15 bp, Homo sapiens
gtatttttgaaggct

SEQ ID NO: 1371178 - DNA, 15 bp, Homo sapiens
ggtatttttgaaggc

SEQ ID NO: 1371179 - DNA, 15 bp, Homo sapiens
aggtatttttgaagg

SEQ ID NO: 1371180 - DNA, 15 bp, Homo sapiens
taggtatttttgaag

SEQ ID NO: 1371181 - DNA, 15 bp, Homo sapiens
ataggtatttttgaa

SEQ ID NO: 1371182 - DNA, 15 bp, Homo sapiens
tataggtatttttga

SEQ ID NO: 1371183 - DNA, 15 bp, Homo sapiens
atataggtatttttg

SEQ ID NO: 1371184 - DNA, 15 bp, Homo sapiens
tatataggtattttt

SEQ ID NO: 1371185 - DNA, 15 bp, Homo sapiens
ttatataggtatttt

SEQ ID NO: 1371186 - DNA, 15 bp, Homo sapiens
attatataggtattt

SEQ ID NO: 1371187 - DNA, 15 bp, Homo sapiens
gattatataggtatt

SEQ ID NO: 1371188 - DNA, 15 bp, Homo sapiens
agattatataggtat

SEQ ID NO: 1371189 - DNA, 15 bp, Homo sapiens
cagattatataggta

SEQ ID NO: 1371190 - DNA, 15 bp, Homo sapiens
tcagattatataggt

SEQ ID NO: 1371191 - DNA, 15 bp, Homo sapiens
ttcagattatatagg

SEQ ID NO: 1371192 - DNA, 15 bp, Homo sapiens
tttcagattatatag

SEQ ID NO: 1371193 - DNA, 15 bp, Homo sapiens
ttttcagattatata

SEQ ID NO: 1371194 - DNA, 15 bp, Homo sapiens
gcattttcagattat

SEQ ID NO: 1371195 - DNA, 15 bp, Homo sapiens
tgcattttcagatta

SEQ ID NO: 1371196 - DNA, 15 bp, Homo sapiens
gtgcattttcagatt

SEQ ID NO: 1371197 - DNA, 15 bp, Homo sapiens
ggtgcattttcagat

SEQ ID NO: 1371198 - DNA, 15 bp, Homo sapiens
gggtgcattttcaga

SEQ ID NO: 1371199 - DNA, 15 bp, Homo sapiens
ggggtgcattttcag

SEQ ID NO: 1371200 - DNA, 15 bp, Homo sapiens
aggggtgcattttca

SEQ ID NO: 1371201 - DNA, 15 bp, Homo sapiens
caggggtgcattttc

SEQ ID NO: 1371202 - DNA, 15 bp, Homo sapiens
ccaggggtgcatttt

SEQ ID NO: 1371203 - DNA, 15 bp, Homo sapiens
gccaggggtgcattt

SEQ ID NO: 1371204 - DNA, 15 bp, Homo sapiens
agccaggggtgcatt

SEQ ID NO: 1371205 - DNA, 15 bp, Homo sapiens
gagccaggggtgcat

SEQ ID NO: 1371206 - DNA, 15 bp, Homo sapiens
tgagccaggggtgca

SEQ ID NO: 1371207 - DNA, 15 bp, Homo sapiens
ctgagccaggggtgc

SEQ ID NO: 1371208 - DNA, 15 bp, Homo sapiens
actgagccaggggtg

SEQ ID NO: 1371209 - DNA, 15 bp, Homo sapiens
gactgagccaggggt

SEQ ID NO: 1371210 - DNA, 15 bp, Homo sapiens
ggactgagccagggg

SEQ ID NO: 1371211 - DNA, 15 bp, Homo sapiens
tggactgagccaggg

SEQ ID NO: 1371212 - DNA, 15 bp, Homo sapiens
gtggactgagccagg

SEQ ID NO: 1371213 - DNA, 15 bp, Homo sapiens
tgtggactgagccag

SEQ ID NO: 1371214 - DNA, 15 bp, Homo sapiens
ctgtggactgagcca

SEQ ID NO: 1371215 - DNA, 15 bp, Homo sapiens
actgtggactgagcc

SEQ ID NO: 1371216 - DNA, 15 bp, Homo sapiens
aactgtggactgagc

SEQ ID NO: 1371217 - DNA, 15 bp, Homo sapiens
caactgtggactgag

SEQ ID NO: 1371218 - DNA, 15 bp, Homo sapiens
tcaactgtggactga

SEQ ID NO: 1371219 - DNA, 15 bp, Homo sapiens
gtcaactgtggactg

SEQ ID NO: 1371220 - DNA, 15 bp, Homo sapiens
agtcaactgtggact

SEQ ID NO: 1371221 - DNA, 15 bp, Homo sapiens
aagtcaactgtggac

SEQ ID NO: 1371222 - DNA, 15 bp, Homo sapiens
caagtcaactgtgga

SEQ ID NO: 1371223 - DNA, 15 bp, Homo sapiens
ccaagtcaactgtgg

SEQ ID NO: 1371224 - DNA, 15 bp, Homo sapiens
cccaagtcaactgtg

SEQ ID NO: 1371225 - DNA, 15 bp, Homo sapiens
gcccaagtcaactgt

SEQ ID NO: 1371226 - DNA, 15 bp, Homo sapiens
agcccaagtcaactg

SEQ ID NO: 1371227 - DNA, 15 bp, Homo sapiens
gagcccaagtcaact

SEQ ID NO: 1371228 - DNA, 15 bp, Homo sapiens
tgagcccaagtcaac

SEQ ID NO: 1371229 - DNA, 15 bp, Homo sapiens
ttgagcccaagtcaa

SEQ ID NO: 1371230 - DNA, 15 bp, Homo sapiens
tttgagcccaagtca

SEQ ID NO: 1371231 - DNA, 15 bp, Homo sapiens
gtttgagcccaagtc

SEQ ID NO: 1371232 - DNA, 15 bp, Homo sapiens
ggtttgagcccaagt

SEQ ID NO: 1371233 - DNA, 15 bp, Homo sapiens
tggtttgagcccaag

SEQ ID NO: 1371234 - DNA, 15 bp, Homo sapiens
ttggtttgagcccaa

SEQ ID NO: 1371235 - DNA, 15 bp, Homo sapiens
cttggtttgagccca

SEQ ID NO: 1371236 - DNA, 15 bp, Homo sapiens
acttggtttgagccc

SEQ ID NO: 1371237 - DNA, 15 bp, Homo sapiens
tacttggtttgagcc

SEQ ID NO: 1371238 - DNA, 15 bp, Homo sapiens
ctacttggtttgagc

SEQ ID NO: 1371239 - DNA, 15 bp, Homo sapiens
gctacttggtttgag

SEQ ID NO: 1371240 - DNA, 15 bp, Homo sapiens
agctacttggtttga

SEQ ID NO: 1371241 - DNA, 15 bp, Homo sapiens
aagctacttggtttg

SEQ ID NO: 1371242 - DNA, 15 bp, Homo sapiens
taagctacttggttt

SEQ ID NO: 1371243 - DNA, 15 bp, Homo sapiens
ctaagctacttggtt

SEQ ID NO: 1371244 - DNA, 15 bp, Homo sapiens
cctaagctacttggt

SEQ ID NO: 1371245 - DNA, 15 bp, Homo sapiens
tcctaagctacttgg

SEQ ID NO: 1371246 - DNA, 15 bp, Homo sapiens
ttcctaagctacttg

SEQ ID NO: 1371247 - DNA, 15 bp, Homo sapiens
tttcctaagctactt

SEQ ID NO: 1371248 - DNA, 15 bp, Homo sapiens
gtttcctaagctact

SEQ ID NO: 1371249 - DNA, 15 bp, Homo sapiens
tgtttcctaagctac

SEQ ID NO: 1371250 - DNA, 15 bp, Homo sapiens
atgtttcctaagcta

SEQ ID NO: 1371251 - DNA, 15 bp, Homo sapiens
aatgtttcctaagct

SEQ ID NO: 1371252 - DNA, 15 bp, Homo sapiens
caatgtttcctaagc

SEQ ID NO: 1371253 - DNA, 15 bp, Homo sapiens
gcaatgtttcctaag

SEQ ID NO: 1371254 - DNA, 15 bp, Homo sapiens
agcaatgtttcctaa

SEQ ID NO: 1371255 - DNA, 15 bp, Homo sapiens
gagcaatgtttccta

SEQ ID NO: 1371256 - DNA, 15 bp, Homo sapiens
ggagcaatgtttcct

SEQ ID NO: 1371257 - DNA, 15 bp, Homo sapiens
tggagcaatgtttcc

SEQ ID NO: 1371258 - DNA, 15 bp, Homo sapiens
atggagcaatgtttc

SEQ ID NO: 1371259 - DNA, 15 bp, Homo sapiens
gatggagcaatgttt

SEQ ID NO: 1371260 - DNA, 15 bp, Homo sapiens
ggatggagcaatgtt

SEQ ID NO: 1371261 - DNA, 15 bp, Homo sapiens
aggatggagcaatgt

SEQ ID NO: 1371262 - DNA, 15 bp, Homo sapiens
caggatggagcaatg

SEQ ID NO: 1371263 - DNA, 15 bp, Homo sapiens
acaggatggagcaat

SEQ ID NO: 1371264 - DNA, 15 bp, Homo sapiens
aacaggatggagcaa

SEQ ID NO: 1371265 - DNA, 15 bp, Homo sapiens
aaacaggatggagca

SEQ ID NO: 1371266 - DNA, 15 bp, Homo sapiens
aaaacaggatggagc

SEQ ID NO: 1371267 - DNA, 15 bp, Homo sapiens
taaaacaggatggag

SEQ ID NO: 1371268 - DNA, 15 bp, Homo sapiens
ttaaaacaggatgga

SEQ ID NO: 1371269 - DNA, 15 bp, Homo sapiens
cttaaaacaggatgg

SEQ ID NO: 1371270 - DNA, 15 bp, Homo sapiens
ccttaaaacaggatg

SEQ ID NO: 1371271 - DNA, 15 bp, Homo sapiens
tccttaaaacaggat

SEQ ID NO: 1371272 - DNA, 15 bp, Homo sapiens
ttccttaaaacagga

SEQ ID NO: 1371273 - DNA, 15 bp, Homo sapiens
tttccttaaaacagg

SEQ ID NO: 1371274 - DNA, 15 bp, Homo sapiens
ctttccttaaaacag

SEQ ID NO: 1371275 - DNA, 15 bp, Homo sapiens
actttccttaaaaca

SEQ ID NO: 1371276 - DNA, 15 bp, Homo sapiens
aactttccttaaaac

SEQ ID NO: 1371277 - DNA, 15 bp, Homo sapiens
taactttccttaaaa

SEQ ID NO: 1371278 - DNA, 15 bp, Homo sapiens
ttaactttccttaaa

SEQ ID NO: 1371279 - DNA, 15 bp, Homo sapiens
attaactttccttaa

SEQ ID NO: 1371280 - DNA, 15 bp, Homo sapiens
gattaactttcctta

SEQ ID NO: 1371281 - DNA, 15 bp, Homo sapiens
tgattaactttcctt

SEQ ID NO: 1371282 - DNA, 15 bp, Homo sapiens
ctgattaactttcct

SEQ ID NO: 1371283 - DNA, 15 bp, Homo sapiens
gctgattaactttcc

SEQ ID NO: 1371284 - DNA, 15 bp, Homo sapiens
agctgattaactttc

SEQ ID NO: 1371285 - DNA, 15 bp, Homo sapiens
cagctgattaacttt

SEQ ID NO: 1371286 - DNA, 15 bp, Homo sapiens
gcagctgattaactt

SEQ ID NO: 1371287 - DNA, 15 bp, Homo sapiens
tgcagctgattaact

SEQ ID NO: 1371288 - DNA, 15 bp, Homo sapiens
gtgcagctgattaac

SEQ ID NO: 1371289 - DNA, 15 bp, Homo sapiens
cgtgcagctgattaa

SEQ ID NO: 1371290 - DNA, 15 bp, Homo sapiens
acgtgcagctgatta

SEQ ID NO: 1371291 - DNA, 15 bp, Homo sapiens
cacgtgcagctgatt

SEQ ID NO: 1371292 - DNA, 15 bp, Homo sapiens
tcacgtgcagctgat

SEQ ID NO: 1371293 - DNA, 15 bp, Homo sapiens
ttcacgtgcagctga

SEQ ID NO: 1371294 - DNA, 15 bp, Homo sapiens
gttcacgtgcagctg

SEQ ID NO: 1371295 - DNA, 15 bp, Homo sapiens
tgttcacgtgcagct

SEQ ID NO: 1371296 - DNA, 15 bp, Homo sapiens
ttgttcacgtgcagc

SEQ ID NO: 1371297 - DNA, 15 bp, Homo sapiens
attgttcacgtgcag

SEQ ID NO: 1371298 - DNA, 15 bp, Homo sapiens
aattgttcacgtgca

SEQ ID NO: 1371299 - DNA, 15 bp, Homo sapiens
taattgttcacgtgc

SEQ ID NO: 1371300 - DNA, 15 bp, Homo sapiens
ataattgttcacgtg

SEQ ID NO: 1371301 - DNA, 15 bp, Homo sapiens
aataattgttcacgt

SEQ ID NO: 1371302 - DNA, 15 bp, Homo sapiens
gaataattgttcacg

SEQ ID NO: 1371303 - DNA, 15 bp, Homo sapiens
tgaataattgttcac

SEQ ID NO: 1371304 - DNA, 15 bp, Homo sapiens
atgaataattgttca

SEQ ID NO: 1371305 - DNA, 15 bp, Homo sapiens
aatgaataattgttc

SEQ ID NO: 1371306 - DNA, 15 bp, Homo sapiens
caatgaataattgtt

SEQ ID NO: 1371307 - DNA, 15 bp, Homo sapiens
acaatgaataattgt

SEQ ID NO: 1371308 - DNA, 15 bp, Homo sapiens
gacaatgaataattg

SEQ ID NO: 1371309 - DNA, 15 bp, Homo sapiens
agacaatgaataatt

SEQ ID NO: 1371310 - DNA, 15 bp, Homo sapiens
cagacaatgaataat

SEQ ID NO: 1371311 - DNA, 15 bp, Homo sapiens
ccagacaatgaataa

SEQ ID NO: 1371312 - DNA, 15 bp, Homo sapiens
gccagacaatgaata

SEQ ID NO: 1371313 - DNA, 15 bp, Homo sapiens
agccagacaatgaat

SEQ ID NO: 1371314 - DNA, 15 bp, Homo sapiens
aagccagacaatgaa

SEQ ID NO: 1371315 - DNA, 15 bp, Homo sapiens
caagccagacaatga

SEQ ID NO: 1371316 - DNA, 15 bp, Homo sapiens
ccaagccagacaatg

SEQ ID NO: 1371317 - DNA, 15 bp, Homo sapiens
tccaagccagacaat

SEQ ID NO: 1371318 - DNA, 15 bp, Homo sapiens
ttccaagccagacaa

SEQ ID NO: 1371319 - DNA, 15 bp, Homo sapiens
attccaagccagaca

SEQ ID NO: 1371320 - DNA, 15 bp, Homo sapiens
aattccaagccagac

SEQ ID NO: 1371321 - DNA, 15 bp, Homo sapiens
caattccaagccaga

SEQ ID NO: 1371322 - DNA, 15 bp, Homo sapiens
acaattccaagccag

SEQ ID NO: 1371323 - DNA, 15 bp, Homo sapiens
cacaattccaagcca

SEQ ID NO: 1371324 - DNA, 15 bp, Homo sapiens
tcacaattccaagcc

SEQ ID NO: 1371325 - DNA, 15 bp, Homo sapiens
atcacaattccaagc

SEQ ID NO: 1371326 - DNA, 15 bp, Homo sapiens
gatcacaattccaag

SEQ ID NO: 1371327 - DNA, 15 bp, Homo sapiens
tgatcacaattccaa

SEQ ID NO: 1371328 - DNA, 15 bp, Homo sapiens
atgatcacaattcca

SEQ ID NO: 1371329 - DNA, 15 bp, Homo sapiens
catgatcacaattcc

SEQ ID NO: 1371330 - DNA, 15 bp, Homo sapiens
tcatgatcacaattc

SEQ ID NO: 1371331 - DNA, 15 bp, Homo sapiens
ttcatgatcacaatt

SEQ ID NO: 1371332 - DNA, 15 bp, Homo sapiens
gttcatgatcacaat

SEQ ID NO: 1371333 - DNA, 15 bp, Homo sapiens
agttcatgatcacaa

SEQ ID NO: 1371334 - DNA, 15 bp, Homo sapiens
cagttcatgatcaca

SEQ ID NO: 1371335 - DNA, 15 bp, Homo sapiens
ccagttcatgatcac

SEQ ID NO: 1371336 - DNA, 15 bp, Homo sapiens
cccagttcatgatca

SEQ ID NO: 1371337 - DNA, 15 bp, Homo sapiens
tcccagttcatgatc

SEQ ID NO: 1371338 - DNA, 15 bp, Homo sapiens
ttcccagttcatgat

SEQ ID NO: 1371339 - DNA, 15 bp, Homo sapiens
gttcccagttcatga

SEQ ID NO: 1371340 - DNA, 15 bp, Homo sapiens
ggttcccagttcatg

SEQ ID NO: 1371341 - DNA, 15 bp, Homo sapiens
aggttcccagttcat

SEQ ID NO: 1371342 - DNA, 15 bp, Homo sapiens
caggttcccagttca

SEQ ID NO: 1371343 - DNA, 15 bp, Homo sapiens
ccaggttcccagttc

SEQ ID NO: 1371344 - DNA, 15 bp, Homo sapiens
cccaggttcccagtt

SEQ ID NO: 1371345 - DNA, 15 bp, Homo sapiens
gcccaggttcccagt

SEQ ID NO: 1371346 - DNA, 15 bp, Homo sapiens
ggcccaggttcccag

SEQ ID NO: 1371347 - DNA, 15 bp, Homo sapiens
aggcccaggttccca

SEQ ID NO: 1371348 - DNA, 15 bp, Homo sapiens
caggcccaggttccc

SEQ ID NO: 1371349 - DNA, 15 bp, Homo sapiens
ccaggcccaggttcc

SEQ ID NO: 1371350 - DNA, 15 bp, Homo sapiens
cccaggcccaggttc

SEQ ID NO: 1371351 - DNA, 15 bp, Homo sapiens
gcccaggcccaggtt

SEQ ID NO: 1371352 - DNA, 15 bp, Homo sapiens
cgcccaggcccaggt

SEQ ID NO: 1371353 - DNA, 15 bp, Homo sapiens
gcgcccaggcccagg

SEQ ID NO: 1371354 - DNA, 15 bp, Homo sapiens
ggcgcccaggcccag

SEQ ID NO: 1371355 - DNA, 15 bp, Homo sapiens
aggcgcccaggccca

SEQ ID NO: 1371356 - DNA, 15 bp, Homo sapiens
caggcgcccaggccc

SEQ ID NO: 1371357 - DNA, 15 bp, Homo sapiens
acaggcgcccaggcc

SEQ ID NO: 1371358 - DNA, 15 bp, Homo sapiens
aacaggcgcccaggc

SEQ ID NO: 1371359 - DNA, 15 bp, Homo sapiens
caacaggcgcccagg

SEQ ID NO: 1371360 - DNA, 15 bp, Homo sapiens
gcaacaggcgcccag

SEQ ID NO: 1371361 - DNA, 15 bp, Homo sapiens
agcaacaggcgccca

SEQ ID NO: 1371362 - DNA, 15 bp, Homo sapiens
gagcaacaggcgccc

SEQ ID NO: 1371363 - DNA, 15 bp, Homo sapiens
agagcaacaggcgcc

SEQ ID NO: 1371364 - DNA, 15 bp, Homo sapiens
cagagcaacaggcgc

SEQ ID NO: 1371365 - DNA, 15 bp, Homo sapiens
gcagagcaacaggcg

SEQ ID NO: 1371366 - DNA, 15 bp, Homo sapiens
agcagagcaacaggc

SEQ ID NO: 1371367 - DNA, 15 bp, Homo sapiens
aagcagagcaacagg

SEQ ID NO: 1371368 - DNA, 15 bp, Homo sapiens
aaagcagagcaacag

SEQ ID NO: 1371369 - DNA, 15 bp, Homo sapiens
aaaagcagagcaaca

SEQ ID NO: 1371370 - DNA, 15 bp, Homo sapiens
taaaagcagagcaac

SEQ ID NO: 1371371 - DNA, 15 bp, Homo sapiens
ttaaaagcagagcaa

SEQ ID NO: 1371372 - DNA, 15 bp, Homo sapiens
tttaaaagcagagca

SEQ ID NO: 1371373 - DNA, 15 bp, Homo sapiens
atttaaaagcagagc

SEQ ID NO: 1371374 - DNA, 15 bp, Homo sapiens
aatttaaaagcagag

SEQ ID NO: 1371375 - DNA, 15 bp, Homo sapiens
taatttaaaagcaga

SEQ ID NO: 1371376 - DNA, 15 bp, Homo sapiens
ttaatttaaaagcag

SEQ ID NO: 1371377 - DNA, 15 bp, Homo sapiens
cttaatttaaaagca

SEQ ID NO: 1371378 - DNA, 15 bp, Homo sapiens
acttaatttaaaagc

SEQ ID NO: 1371379 - DNA, 15 bp, Homo sapiens
gacttaatttaaaag

SEQ ID NO: 1371380 - DNA, 15 bp, Homo sapiens
tgacttaatttaaaa

SEQ ID NO: 1371381 - DNA, 15 bp, Homo sapiens
gtgacttaatttaaa

SEQ ID NO: 1371382 - DNA, 15 bp, Homo sapiens
ggtgacttaatttaa

SEQ ID NO: 1371383 - DNA, 15 bp, Homo sapiens
aggtgacttaattta

SEQ ID NO: 1371384 - DNA, 15 bp, Homo sapiens
gaggtgacttaattt

SEQ ID NO: 1371385 - DNA, 15 bp, Homo sapiens
ggaggtgacttaatt

SEQ ID NO: 1371386 - DNA, 15 bp, Homo sapiens
gggaggtgacttaat

SEQ ID NO: 1371387 - DNA, 15 bp, Homo sapiens
ggggaggtgacttaa

SEQ ID NO: 1371388 - DNA, 15 bp, Homo sapiens
gggggaggtgactta

SEQ ID NO: 1371389 - DNA, 15 bp, Homo sapiens
agggggaggtgactt

SEQ ID NO: 1371390 - DNA, 15 bp, Homo sapiens
cagggggaggtgact

SEQ ID NO: 1371391 - DNA, 15 bp, Homo sapiens
gcagggggaggtgac

SEQ ID NO: 1371392 - DNA, 15 bp, Homo sapiens
ggcagggggaggtga

SEQ ID NO: 1371393 - DNA, 15 bp, Homo sapiens
aggcagggggaggtg

SEQ ID NO: 1371394 - DNA, 15 bp, Homo sapiens
caggcagggggaggt

SEQ ID NO: 1371395 - DNA, 15 bp, Homo sapiens
ccaggcagggggagg

SEQ ID NO: 1371396 - DNA, 15 bp, Homo sapiens
gccaggcagggggag

SEQ ID NO: 1371397 - DNA, 15 bp, Homo sapiens
agccaggcaggggga

SEQ ID NO: 1371398 - DNA, 15 bp, Homo sapiens
tagccaggcaggggg

SEQ ID NO: 1371399 - DNA, 15 bp, Homo sapiens
gtagccaggcagggg

SEQ ID NO: 1371400 - DNA, 15 bp, Homo sapiens
tgtagccaggcaggg

SEQ ID NO: 1371401 - DNA, 15 bp, Homo sapiens
ttgtagccaggcagg

SEQ ID NO: 1371402 - DNA, 15 bp, Homo sapiens
tttgtagccaggcag

SEQ ID NO: 1371403 - DNA, 15 bp, Homo sapiens
ttttgtagccaggca

SEQ ID NO: 1371404 - DNA, 15 bp, Homo sapiens
gttttgtagccaggc

SEQ ID NO: 1371405 - DNA, 15 bp, Homo sapiens
tgttttgtagccagg

SEQ ID NO: 1371406 - DNA, 15 bp, Homo sapiens
ctgttttgtagccag

SEQ ID NO: 1371407 - DNA, 15 bp, Homo sapiens
gctgttttgtagcca

SEQ ID NO: 1371408 - DNA, 15 bp, Homo sapiens
agctgttttgtagcc

SEQ ID NO: 1371409 - DNA, 15 bp, Homo sapiens
gagctgttttgtagc

SEQ ID NO: 1371410 - DNA, 15 bp, Homo sapiens
tgagctgttttgtag

SEQ ID NO: 1371411 - DNA, 15 bp, Homo sapiens
atgagctgttttgta

SEQ ID NO: 1371412 - DNA, 15 bp, Homo sapiens
catgagctgttttgt

SEQ ID NO: 1371413 - DNA, 15 bp, Homo sapiens
ccatgagctgttttg

SEQ ID NO: 1371414 - DNA, 15 bp, Homo sapiens
accatgagctgtttt

SEQ ID NO: 1371415 - DNA, 15 bp, Homo sapiens
aaccatgagctgttt

SEQ ID NO: 1371416 - DNA, 15 bp, Homo sapiens
aaaccatgagctgtt

SEQ ID NO: 1371417 - DNA, 15 bp, Homo sapiens
gaaaccatgagctgt

SEQ ID NO: 1371418 - DNA, 15 bp, Homo sapiens
tgaaaccatgagctg

SEQ ID NO: 1371419 - DNA, 15 bp, Homo sapiens
gtgaaaccatgagct

SEQ ID NO: 1371420 - DNA, 15 bp, Homo sapiens
agtgaaaccatgagc

SEQ ID NO: 1371421 - DNA, 15 bp, Homo sapiens
cagtgaaaccatgag

SEQ ID NO: 1371422 - DNA, 15 bp, Homo sapiens
tcagtgaaaccatga

SEQ ID NO: 1371423 - DNA, 15 bp, Homo sapiens
ctcagtgaaaccatg

SEQ ID NO: 1371424 - DNA, 15 bp, Homo sapiens
cctcagtgaaaccat

SEQ ID NO: 1371425 - DNA, 15 bp, Homo sapiens
acctcagtgaaacca

SEQ ID NO: 1371426 - DNA, 15 bp, Homo sapiens
gacctcagtgaaacc

SEQ ID NO: 1371427 - DNA, 15 bp, Homo sapiens
agacctcagtgaaac

SEQ ID NO: 1371428 - DNA, 15 bp, Homo sapiens
gagacctcagtgaaa

SEQ ID NO: 1371429 - DNA, 15 bp, Homo sapiens
agagacctcagtgaa

SEQ ID NO: 1371430 - DNA, 15 bp, Homo sapiens
tagagacctcagtga

SEQ ID NO: 1371431 - DNA, 15 bp, Homo sapiens
ttagagacctcagtg

SEQ ID NO: 1371432 - DNA, 15 bp, Homo sapiens
attagagacctcagt

SEQ ID NO: 1371433 - DNA, 15 bp, Homo sapiens
cattagagacctcag

SEQ ID NO: 1371434 - DNA, 15 bp, Homo sapiens
gcattagagacctca

SEQ ID NO: 1371435 - DNA, 15 bp, Homo sapiens
ggcattagagacctc

SEQ ID NO: 1371436 - DNA, 15 bp, Homo sapiens
tggcattagagacct

SEQ ID NO: 1371437 - DNA, 15 bp, Homo sapiens
atggcattagagacc

SEQ ID NO: 1371438 - DNA, 15 bp, Homo sapiens
aatggcattagagac

SEQ ID NO: 1371439 - DNA, 15 bp, Homo sapiens
caatggcattagaga

SEQ ID NO: 1371440 - DNA, 15 bp, Homo sapiens
acaatggcattagag

SEQ ID NO: 1371441 - DNA, 15 bp, Homo sapiens
cacaatggcattaga

SEQ ID NO: 1371442 - DNA, 15 bp, Homo sapiens
ccacaatggcattag

SEQ ID NO: 1371443 - DNA, 15 bp, Homo sapiens
tccacaatggcatta

SEQ ID NO: 1371444 - DNA, 15 bp, Homo sapiens
ctccacaatggcatt

SEQ ID NO: 1371445 - DNA, 15 bp, Homo sapiens
actccacaatggcat

SEQ ID NO: 1371446 - DNA, 15 bp, Homo sapiens
cactccacaatggca

SEQ ID NO: 1371447 - DNA, 15 bp, Homo sapiens
tcactccacaatggc

SEQ ID NO: 1371448 - DNA, 15 bp, Homo sapiens
ctcactccacaatgg

SEQ ID NO: 1371449 - DNA, 15 bp, Homo sapiens
cctcactccacaatg

SEQ ID NO: 1371450 - DNA, 15 bp, Homo sapiens
ccctcactccacaat

SEQ ID NO: 1371451 - DNA, 15 bp, Homo sapiens
gccctcactccacaa

SEQ ID NO: 1371452 - DNA, 15 bp, Homo sapiens
tgccctcactccaca

SEQ ID NO: 1371453 - DNA, 15 bp, Homo sapiens
ctgccctcactccac

SEQ ID NO: 1371454 - DNA, 15 bp, Homo sapiens
cctgccctcactcca

SEQ ID NO: 1371455 - DNA, 15 bp, Homo sapiens
ccctgccctcactcc

SEQ ID NO: 1371456 - DNA, 15 bp, Homo sapiens
cccctgccctcactc

SEQ ID NO: 1371457 - DNA, 15 bp, Homo sapiens
ccccctgccctcact

SEQ ID NO: 1371458 - DNA, 15 bp, Homo sapiens
gccccctgccctcac

SEQ ID NO: 1371459 - DNA, 15 bp, Homo sapiens
tgccccctgccctca

SEQ ID NO: 1371460 - DNA, 15 bp, Homo sapiens
gtgccccctgccctc

SEQ ID NO: 1371461 - DNA, 15 bp, Homo sapiens
tgtgccccctgccct

SEQ ID NO: 1371462 - DNA, 15 bp, Homo sapiens
ctgtgccccctgccc

SEQ ID NO: 1371463 - DNA, 15 bp, Homo sapiens
cctgtgccccctgcc

SEQ ID NO: 1371464 - DNA, 15 bp, Homo sapiens
acctgtgccccctgc

SEQ ID NO: 1371465 - DNA, 15 bp, Homo sapiens
aacctgtgccccctg

SEQ ID NO: 1371466 - DNA, 15 bp, Homo sapiens
caacctgtgccccct

SEQ ID NO: 1371467 - DNA, 15 bp, Homo sapiens
tcaacctgtgccccc

SEQ ID NO: 1371468 - DNA, 15 bp, Homo sapiens
ctcaacctgtgcccc

SEQ ID NO: 1371469 - DNA, 15 bp, Homo sapiens
gctcaacctgtgccc

SEQ ID NO: 1371470 - DNA, 15 bp, Homo sapiens
agctcaacctgtgcc

SEQ ID NO: 1371471 - DNA, 15 bp, Homo sapiens
gagctcaacctgtgc

SEQ ID NO: 1371472 - DNA, 15 bp, Homo sapiens
tgagctcaacctgtg

SEQ ID NO: 1371473 - DNA, 15 bp, Homo sapiens
gtgagctcaacctgt

SEQ ID NO: 1371474 - DNA, 15 bp, Homo sapiens
tgtgagctcaacctg

SEQ ID NO: 1371475 - DNA, 15 bp, Homo sapiens
ctgtgagctcaacct

SEQ ID NO: 1371476 - DNA, 15 bp, Homo sapiens
cctgtgagctcaacc

SEQ ID NO: 1371477 - DNA, 15 bp, Homo sapiens
gcctgtgagctcaac

SEQ ID NO: 1371478 - DNA, 15 bp, Homo sapiens
tgcctgtgagctcaa

SEQ ID NO: 1371479 - DNA, 15 bp, Homo sapiens
atgcctgtgagctca

SEQ ID NO: 1371480 - DNA, 15 bp, Homo sapiens
catgcctgtgagctc

SEQ ID NO: 1371481 - DNA, 15 bp, Homo sapiens
acatgcctgtgagct

SEQ ID NO: 1371482 - DNA, 15 bp, Homo sapiens
cacatgcctgtgagc

SEQ ID NO: 1371483 - DNA, 15 bp, Homo sapiens
ccacatgcctgtgag

SEQ ID NO: 1371484 - DNA, 15 bp, Homo sapiens
cccacatgcctgtga

SEQ ID NO: 1371485 - DNA, 15 bp, Homo sapiens
gcccacatgcctgtg

SEQ ID NO: 1371486 - DNA, 15 bp, Homo sapiens
ggcccacatgcctgt

SEQ ID NO: 1371487 - DNA, 15 bp, Homo sapiens
aggcccacatgcctg

SEQ ID NO: 1371488 - DNA, 15 bp, Homo sapiens
aaggcccacatgcct

SEQ ID NO: 1371489 - DNA, 15 bp, Homo sapiens
aaaggcccacatgcc

SEQ ID NO: 1371490 - DNA, 15 bp, Homo sapiens
gaaaggcccacatgc

SEQ ID NO: 1371491 - DNA, 15 bp, Homo sapiens
tgaaaggcccacatg

SEQ ID NO: 1371492 - DNA, 15 bp, Homo sapiens
atgaaaggcccacat

SEQ ID NO: 1371493 - DNA, 15 bp, Homo sapiens
gatgaaaggcccaca

SEQ ID NO: 1371494 - DNA, 15 bp, Homo sapiens
ggatgaaaggcccac

SEQ ID NO: 1371495 - DNA, 15 bp, Homo sapiens
tggatgaaaggccca

SEQ ID NO: 1371496 - DNA, 15 bp, Homo sapiens
ttggatgaaaggccc

SEQ ID NO: 1371497 - DNA, 15 bp, Homo sapiens
tttggatgaaaggcc

SEQ ID NO: 1371498 - DNA, 15 bp, Homo sapiens
atttggatgaaaggc

SEQ ID NO: 1371499 - DNA, 15 bp, Homo sapiens
catttggatgaaagg

SEQ ID NO: 1371500 - DNA, 15 bp, Homo sapiens
gcatttggatgaaag

SEQ ID NO: 1371501 - DNA, 15 bp, Homo sapiens
agcatttggatgaaa

SEQ ID NO: 1371502 - DNA, 15 bp, Homo sapiens
gagcatttggatgaa

SEQ ID NO: 1371503 - DNA, 15 bp, Homo sapiens
tgagcatttggatga

SEQ ID NO: 1371504 - DNA, 15 bp, Homo sapiens
atgagcatttggatg

SEQ ID NO: 1371505 - DNA, 15 bp, Homo sapiens
catgagcatttggat

SEQ ID NO: 1371506 - DNA, 15 bp, Homo sapiens
tcatgagcatttgga

SEQ ID NO: 1371507 - DNA, 15 bp, Homo sapiens
ctcatgagcatttgg

SEQ ID NO: 1371508 - DNA, 15 bp, Homo sapiens
gctcatgagcatttg

SEQ ID NO: 1371509 - DNA, 15 bp, Homo sapiens
cgctcatgagcattt

SEQ ID NO: 1371510 - DNA, 15 bp, Homo sapiens
acgctcatgagcatt

SEQ ID NO: 1371511 - DNA, 15 bp, Homo sapiens
cacgctcatgagcat

SEQ ID NO: 1371512 - DNA, 15 bp, Homo sapiens
ccacgctcatgagca

SEQ ID NO: 1371513 - DNA, 15 bp, Homo sapiens
tccacgctcatgagc

SEQ ID NO: 1371514 - DNA, 15 bp, Homo sapiens
gtccacgctcatgag

SEQ ID NO: 1371515 - DNA, 15 bp, Homo sapiens
agtccacgctcatga

SEQ ID NO: 1371516 - DNA, 15 bp, Homo sapiens
aagtccacgctcatg

SEQ ID NO: 1371517 - DNA, 15 bp, Homo sapiens
aaagtccacgctcat

SEQ ID NO: 1371518 - DNA, 15 bp, Homo sapiens
caaagtccacgctca

SEQ ID NO: 1371519 - DNA, 15 bp, Homo sapiens
ccaaagtccacgctc

SEQ ID NO: 1371520 - DNA, 15 bp, Homo sapiens
cccaaagtccacgct

SEQ ID NO: 1371521 - DNA, 15 bp, Homo sapiens
ccccaaagtccacgc

SEQ ID NO: 1371522 - DNA, 15 bp, Homo sapiens
cccccaaagtccacg

SEQ ID NO: 1371523 - DNA, 15 bp, Homo sapiens
tcccccaaagtccac

SEQ ID NO: 1371524 - DNA, 15 bp, Homo sapiens
gtcccccaaagtcca

SEQ ID NO: 1371525 - DNA, 15 bp, Homo sapiens
agtcccccaaagtcc

SEQ ID NO: 1371526 - DNA, 15 bp, Homo sapiens
gagtcccccaaagtc

SEQ ID NO: 1371527 - DNA, 15 bp, Homo sapiens
tgagtcccccaaagt

SEQ ID NO: 1371528 - DNA, 15 bp, Homo sapiens
ctgagtcccccaaag

SEQ ID NO: 1371529 - DNA, 15 bp, Homo sapiens
cctgagtcccccaaa

SEQ ID NO: 1371530 - DNA, 15 bp, Homo sapiens
acctgagtcccccaa

SEQ ID NO: 1371531 - DNA, 15 bp, Homo sapiens
cacctgagtccccca

SEQ ID NO: 1371532 - DNA, 15 bp, Homo sapiens
ccacctgagtccccc

SEQ ID NO: 1371533 - DNA, 15 bp, Homo sapiens
tccacctgagtcccc

SEQ ID NO: 1371534 - DNA, 15 bp, Homo sapiens
gtccacctgagtccc

SEQ ID NO: 1371535 - DNA, 15 bp, Homo sapiens
tgtccacctgagtcc

SEQ ID NO: 1371536 - DNA, 15 bp, Homo sapiens
ctgtccacctgagtc

SEQ ID NO: 1371537 - DNA, 15 bp, Homo sapiens
cctgtccacctgagt

SEQ ID NO: 1371538 - DNA, 15 bp, Homo sapiens
acctgtccacctgag

SEQ ID NO: 1371539 - DNA, 15 bp, Homo sapiens
cacctgtccacctga

SEQ ID NO: 1371540 - DNA, 15 bp, Homo sapiens
gcacctgtccacctg

SEQ ID NO: 1371541 - DNA, 15 bp, Homo sapiens
agcacctgtccacct

SEQ ID NO: 1371542 - DNA, 15 bp, Homo sapiens
aagcacctgtccacc

SEQ ID NO: 1371543 - DNA, 15 bp, Homo sapiens
caagcacctgtccac

SEQ ID NO: 1371544 - DNA, 15 bp, Homo sapiens
acaagcacctgtcca

SEQ ID NO: 1371545 - DNA, 15 bp, Homo sapiens
cacaagcacctgtcc

SEQ ID NO: 1371546 - DNA, 15 bp, Homo sapiens
tcacaagcacctgtc

SEQ ID NO: 1371547 - DNA, 15 bp, Homo sapiens
gtcacaagcacctgt

SEQ ID NO: 1371548 - DNA, 15 bp, Homo sapiens
ggtcacaagcacctg

SEQ ID NO: 1371549 - DNA, 15 bp, Homo sapiens
tggtcacaagcacct

SEQ ID NO: 1371550 - DNA, 15 bp, Homo sapiens
atggtcacaagcacc

SEQ ID NO: 1371551 - DNA, 15 bp, Homo sapiens
catggtcacaagcac

SEQ ID NO: 1371552 - DNA, 15 bp, Homo sapiens
tcatggtcacaagca

SEQ ID NO: 1371553 - DNA, 15 bp, Homo sapiens
ctcatggtcacaagc

SEQ ID NO: 1371554 - DNA, 15 bp, Homo sapiens
gctcatggtcacaag

SEQ ID NO: 1371555 - DNA, 15 bp, Homo sapiens
tgctcatggtcacaa

SEQ ID NO: 1371556 - DNA, 15 bp, Homo sapiens
ttgctcatggtcaca

SEQ ID NO: 1371557 - DNA, 15 bp, Homo sapiens
cttgctcatggtcac

SEQ ID NO: 1371558 - DNA, 15 bp, Homo sapiens
gcttgctcatggtca

SEQ ID NO: 1371559 - DNA, 15 bp, Homo sapiens
agcttgctcatggtc

SEQ ID NO: 1371560 - DNA, 15 bp, Homo sapiens
gagcttgctcatggt

SEQ ID NO: 1371561 - DNA, 15 bp, Homo sapiens
ggagcttgctcatgg

SEQ ID NO: 1371562 - DNA, 15 bp, Homo sapiens
aggagcttgctcatg

SEQ ID NO: 1371563 - DNA, 15 bp, Homo sapiens
aaggagcttgctcat

SEQ ID NO: 1371564 - DNA, 15 bp, Homo sapiens
gaaggagcttgctca

SEQ ID NO: 1371565 - DNA, 15 bp, Homo sapiens
ggaaggagcttgctc

SEQ ID NO: 1371566 - DNA, 15 bp, Homo sapiens
aggaaggagcttgct

SEQ ID NO: 1371567 - DNA, 15 bp, Homo sapiens
aaggaaggagcttgc

SEQ ID NO: 1371568 - DNA, 15 bp, Homo sapiens
gaaggaaggagcttg

SEQ ID NO: 1371569 - DNA, 15 bp, Homo sapiens
ggaaggaaggagctt

SEQ ID NO: 1371570 - DNA, 15 bp, Homo sapiens
gggaaggaaggagct

SEQ ID NO: 1371571 - DNA, 15 bp, Homo sapiens
tgggaaggaaggagc

SEQ ID NO: 1371572 - DNA, 15 bp, Homo sapiens
atgggaaggaaggag

SEQ ID NO: 1371573 - DNA, 15 bp, Homo sapiens
gatgggaaggaagga

SEQ ID NO: 1371574 - DNA, 15 bp, Homo sapiens
ggatgggaaggaagg

SEQ ID NO: 1371575 - DNA, 15 bp, Homo sapiens
gggatgggaaggaag

SEQ ID NO: 1371576 - DNA, 15 bp, Homo sapiens
ggggatgggaaggaa

SEQ ID NO: 1371577 - DNA, 15 bp, Homo sapiens
aggggatgggaagga

SEQ ID NO: 1371578 - DNA, 15 bp, Homo sapiens
aaggggatgggaagg

SEQ ID NO: 1371579 - DNA, 15 bp, Homo sapiens
taaggggatgggaag

SEQ ID NO: 1371580 - DNA, 15 bp, Homo sapiens
ctaaggggatgggaa

SEQ ID NO: 1371581 - DNA, 15 bp, Homo sapiens
actaaggggatggga

SEQ ID NO: 1371582 - DNA, 15 bp, Homo sapiens
tactaaggggatggg

SEQ ID NO: 1371583 - DNA, 15 bp, Homo sapiens
gtactaaggggatgg

SEQ ID NO: 1371584 - DNA, 15 bp, Homo sapiens
ggtactaaggggatg

SEQ ID NO: 1371585 - DNA, 15 bp, Homo sapiens
gggtactaaggggat

SEQ ID NO: 1371586 - DNA, 15 bp, Homo sapiens
agggtactaagggga

SEQ ID NO: 1371587 - DNA, 15 bp, Homo sapiens
cagggtactaagggg

SEQ ID NO: 1371588 - DNA, 15 bp, Homo sapiens
gcagggtactaaggg

SEQ ID NO: 1371589 - DNA, 15 bp, Homo sapiens
tgcagggtactaagg

SEQ ID NO: 1371590 - DNA, 15 bp, Homo sapiens
ctgcagggtactaag

SEQ ID NO: 1371591 - DNA, 15 bp, Homo sapiens
cctgcagggtactaa

SEQ ID NO: 1371592 - DNA, 15 bp, Homo sapiens
gcctgcagggtacta

SEQ ID NO: 1371593 - DNA, 15 bp, Homo sapiens
ggcctgcagggtact

SEQ ID NO: 1371594 - DNA, 15 bp, Homo sapiens
tggcctgcagggtac

SEQ ID NO: 1371595 - DNA, 15 bp, Homo sapiens
gtggcctgcagggta

SEQ ID NO: 1371596 - DNA, 15 bp, Homo sapiens
agtggcctgcagggt

SEQ ID NO: 1371597 - DNA, 15 bp, Homo sapiens
cagtggcctgcaggg

SEQ ID NO: 1371598 - DNA, 15 bp, Homo sapiens
acagtggcctgcagg

SEQ ID NO: 1371599 - DNA, 15 bp, Homo sapiens
cacagtggcctgcag

SEQ ID NO: 1371600 - DNA, 15 bp, Homo sapiens
tcacagtggcctgca

SEQ ID NO: 1371601 - DNA, 15 bp, Homo sapiens
ctcacagtggcctgc

SEQ ID NO: 1371602 - DNA, 15 bp, Homo sapiens
tctcacagtggcctg

SEQ ID NO: 1371603 - DNA, 15 bp, Homo sapiens
ttctcacagtggcct

SEQ ID NO: 1371604 - DNA, 15 bp, Homo sapiens
tttctcacagtggcc

SEQ ID NO: 1371605 - DNA, 15 bp, Homo sapiens
atttctcacagtggc

SEQ ID NO: 1371606 - DNA, 15 bp, Homo sapiens
catttctcacagtgg

SEQ ID NO: 1371607 - DNA, 15 bp, Homo sapiens
tcatttctcacagtg

SEQ ID NO: 1371608 - DNA, 15 bp, Homo sapiens
gtcatttctcacagt

SEQ ID NO: 1371609 - DNA, 15 bp, Homo sapiens
cgtcatttctcacag

SEQ ID NO: 1371610 - DNA, 15 bp, Homo sapiens
ccgtcatttctcaca

SEQ ID NO: 1371611 - DNA, 15 bp, Homo sapiens
gccgtcatttctcac

SEQ ID NO: 1371612 - DNA, 15 bp, Homo sapiens
ggccgtcatttctca

SEQ ID NO: 1371613 - DNA, 15 bp, Homo sapiens
aggccgtcatttctc

SEQ ID NO: 1371614 - DNA, 15 bp, Homo sapiens
taggccgtcatttct

SEQ ID NO: 1371615 - DNA, 15 bp, Homo sapiens
ctaggccgtcatttc

SEQ ID NO: 1371616 - DNA, 15 bp, Homo sapiens
tctaggccgtcattt

SEQ ID NO: 1371617 - DNA, 15 bp, Homo sapiens
ttctaggccgtcatt

SEQ ID NO: 1371618 - DNA, 15 bp, Homo sapiens
gttctaggccgtcat

SEQ ID NO: 1371619 - DNA, 15 bp, Homo sapiens
agttctaggccgtca

SEQ ID NO: 1371620 - DNA, 15 bp, Homo sapiens
gagttctaggccgtc

SEQ ID NO: 1371621 - DNA, 15 bp, Homo sapiens
tgagttctaggccgt

SEQ ID NO: 1371622 - DNA, 15 bp, Homo sapiens
ctgagttctaggccg

SEQ ID NO: 1371623 - DNA, 15 bp, Homo sapiens
cctgagttctaggcc

SEQ ID NO: 1371624 - DNA, 15 bp, Homo sapiens
ccctgagttctaggc

SEQ ID NO: 1371625 - DNA, 15 bp, Homo sapiens
cccctgagttctagg

SEQ ID NO: 1371626 - DNA, 15 bp, Homo sapiens
tcccctgagttctag

SEQ ID NO: 1371627 - DNA, 15 bp, Homo sapiens
gtcccctgagttcta

SEQ ID NO: 1371628 - DNA, 15 bp, Homo sapiens
tgtcccctgagttct

SEQ ID NO: 1371629 - DNA, 15 bp, Homo sapiens
gtgtcccctgagttc

SEQ ID NO: 1371630 - DNA, 15 bp, Homo sapiens
ggtgtcccctgagtt

SEQ ID NO: 1371631 - DNA, 15 bp, Homo sapiens
aggtgtcccctgagt

SEQ ID NO: 1371632 - DNA, 15 bp, Homo sapiens
aaggtgtcccctgag

SEQ ID NO: 1371633 - DNA, 15 bp, Homo sapiens
gaaggtgtcccctga

SEQ ID NO: 1371634 - DNA, 15 bp, Homo sapiens
agaaggtgtcccctg

SEQ ID NO: 1371635 - DNA, 15 bp, Homo sapiens
cagaaggtgtcccct

SEQ ID NO: 1371636 - DNA, 15 bp, Homo sapiens
gcagaaggtgtcccc

SEQ ID NO: 1371637 - DNA, 15 bp, Homo sapiens
ggcagaaggtgtccc

SEQ ID NO: 1371638 - DNA, 15 bp, Homo sapiens
aggcagaaggtgtcc

SEQ ID NO: 1371639 - DNA, 15 bp, Homo sapiens
gaggcagaaggtgtc

SEQ ID NO: 1371640 - DNA, 15 bp, Homo sapiens
agaggcagaaggtgt

SEQ ID NO: 1371641 - DNA, 15 bp, Homo sapiens
gagaggcagaaggtg

SEQ ID NO: 1371642 - DNA, 15 bp, Homo sapiens
ggagaggcagaaggt

SEQ ID NO: 1371643 - DNA, 15 bp, Homo sapiens
aggagaggcagaagg

SEQ ID NO: 1371644 - DNA, 15 bp, Homo sapiens
aaggagaggcagaag

SEQ ID NO: 1371645 - DNA, 15 bp, Homo sapiens
taaggagaggcagaa

SEQ ID NO: 1371646 - DNA, 15 bp, Homo sapiens
ttaaggagaggcaga

SEQ ID NO: 1371647 - DNA, 15 bp, Homo sapiens
tttaaggagaggcag

SEQ ID NO: 1371648 - DNA, 15 bp, Homo sapiens
gtttaaggagaggca

SEQ ID NO: 1371649 - DNA, 15 bp, Homo sapiens
tgtttaaggagaggc

SEQ ID NO: 1371650 - DNA, 15 bp, Homo sapiens
gtgtttaaggagagg

SEQ ID NO: 1371651 - DNA, 15 bp, Homo sapiens
ggtgtttaaggagag

SEQ ID NO: 1371652 - DNA, 15 bp, Homo sapiens
aggtgtttaaggaga

SEQ ID NO: 1371653 - DNA, 15 bp, Homo sapiens
caggtgtttaaggag

SEQ ID NO: 1371654 - DNA, 15 bp, Homo sapiens
gcaggtgtttaagga

SEQ ID NO: 1371655 - DNA, 15 bp, Homo sapiens
ggcaggtgtttaagg

SEQ ID NO: 1371656 - DNA, 15 bp, Homo sapiens
tggcaggtgtttaag

SEQ ID NO: 1371657 - DNA, 15 bp, Homo sapiens
ttggcaggtgtttaa

SEQ ID NO: 1371658 - DNA, 15 bp, Homo sapiens
gttggcaggtgttta

SEQ ID NO: 1371659 - DNA, 15 bp, Homo sapiens
tgttggcaggtgttt

SEQ ID NO: 1371660 - DNA, 15 bp, Homo sapiens
ctgttggcaggtgtt

SEQ ID NO: 1371661 - DNA, 15 bp, Homo sapiens
cctgttggcaggtgt

SEQ ID NO: 1371662 - DNA, 15 bp, Homo sapiens
tcctgttggcaggtg

SEQ ID NO: 1371663 - DNA, 15 bp, Homo sapiens
atcctgttggcaggt

SEQ ID NO: 1371664 - DNA, 15 bp, Homo sapiens
catcctgttggcagg

SEQ ID NO: 1371665 - DNA, 15 bp, Homo sapiens
tcatcctgttggcag

SEQ ID NO: 1371666 - DNA, 15 bp, Homo sapiens
ctcatcctgttggca

SEQ ID NO: 1371667 - DNA, 15 bp, Homo sapiens
actcatcctgttggc

SEQ ID NO: 1371668 - DNA, 15 bp, Homo sapiens
gactcatcctgttgg

SEQ ID NO: 1371669 - DNA, 15 bp, Homo sapiens
tgactcatcctgttg

SEQ ID NO: 1371670 - DNA, 15 bp, Homo sapiens
ctgactcatcctgtt

SEQ ID NO: 1371671 - DNA, 15 bp, Homo sapiens
cctgactcatcctgt

SEQ ID NO: 1371672 - DNA, 15 bp, Homo sapiens
ccctgactcatcctg

SEQ ID NO: 1371673 - DNA, 15 bp, Homo sapiens
gccctgactcatcct

SEQ ID NO: 1371674 - DNA, 15 bp, Homo sapiens
agccctgactcatcc

SEQ ID NO: 1371675 - DNA, 15 bp, Homo sapiens
cagccctgactcatc

SEQ ID NO: 1371676 - DNA, 15 bp, Homo sapiens
ccagccctgactcat

SEQ ID NO: 1371677 - DNA, 15 bp, Homo sapiens
cccagccctgactca

SEQ ID NO: 1371678 - DNA, 15 bp, Homo sapiens
ccccagccctgactc

SEQ ID NO: 1371679 - DNA, 15 bp, Homo sapiens
gccccagccctgact

SEQ ID NO: 1371680 - DNA, 15 bp, Homo sapiens
cgccccagccctgac

SEQ ID NO: 1371681 - DNA, 15 bp, Homo sapiens
ccgccccagccctga

SEQ ID NO: 1371682 - DNA, 15 bp, Homo sapiens
cccgccccagccctg

SEQ ID NO: 1371683 - DNA, 15 bp, Homo sapiens
gcccgccccagccct

SEQ ID NO: 1371684 - DNA, 15 bp, Homo sapiens
agcccgccccagccc

SEQ ID NO: 1371685 - DNA, 15 bp, Homo sapiens
gagcccgccccagcc

SEQ ID NO: 1371686 - DNA, 15 bp, Homo sapiens
tgagcccgccccagc

SEQ ID NO: 1371687 - DNA, 15 bp, Homo sapiens
gtgagcccgccccag

SEQ ID NO: 1371688 - DNA, 15 bp, Homo sapiens
ggtgagcccgcccca

SEQ ID NO: 1371689 - DNA, 15 bp, Homo sapiens
accaggtgagcccgc

SEQ ID NO: 1371690 - DNA, 15 bp, Homo sapiens
caccaggtgagcccg

SEQ ID NO: 1371691 - DNA, 15 bp, Homo sapiens
gcaccaggtgagccc

SEQ ID NO: 1371692 - DNA, 15 bp, Homo sapiens
tgcaccaggtgagcc

SEQ ID NO: 1371693 - DNA, 15 bp, Homo sapiens
gtgcaccaggtgagc

SEQ ID NO: 1371694 - DNA, 15 bp, Homo sapiens
tgtgcaccaggtgag

SEQ ID NO: 1371695 - DNA, 15 bp, Homo sapiens
gtgtgcaccaggtga

SEQ ID NO: 1371696 - DNA, 15 bp, Homo sapiens
ggtgtgcaccaggtg

SEQ ID NO: 1371697 - DNA, 15 bp, Homo sapiens
gggtgtgcaccaggt

SEQ ID NO: 1371698 - DNA, 15 bp, Homo sapiens
tgggtgtgcaccagg

SEQ ID NO: 1371699 - DNA, 15 bp, Homo sapiens
gtgggtgtgcaccag

SEQ ID NO: 1371700 - DNA, 15 bp, Homo sapiens
tgtgggtgtgcacca

SEQ ID NO: 1371701 - DNA, 15 bp, Homo sapiens
gtgtgggtgtgcacc

SEQ ID NO: 1371702 - DNA, 15 bp, Homo sapiens
ggtgtgggtgtgcac

SEQ ID NO: 1371703 - DNA, 15 bp, Homo sapiens
gggtgtgggtgtgca

SEQ ID NO: 1371704 - DNA, 15 bp, Homo sapiens
agggtgtgggtgtgc

SEQ ID NO: 1371705 - DNA, 15 bp, Homo sapiens
cagggtgtgggtgtg

SEQ ID NO: 1371706 - DNA, 15 bp, Homo sapiens
ccagggtgtgggtgt

SEQ ID NO: 1371707 - DNA, 15 bp, Homo sapiens
accagggtgtgggtg

SEQ ID NO: 1371708 - DNA, 15 bp, Homo sapiens
caccagggtgtgggt

SEQ ID NO: 1371709 - DNA, 15 bp, Homo sapiens
tcaccagggtgtggg

SEQ ID NO: 1371710 - DNA, 15 bp, Homo sapiens
ttcaccagggtgtgg

SEQ ID NO: 1371711 - DNA, 15 bp, Homo sapiens
cttcaccagggtgtg

SEQ ID NO: 1371712 - DNA, 15 bp, Homo sapiens
tcttcaccagggtgt

SEQ ID NO: 1371713 - DNA, 15 bp, Homo sapiens
gtcttcaccagggtg

SEQ ID NO: 1371714 - DNA, 15 bp, Homo sapiens
ggtcttcaccagggt

SEQ ID NO: 1371715 - DNA, 15 bp, Homo sapiens
tggtcttcaccaggg

SEQ ID NO: 1371716 - DNA, 15 bp, Homo sapiens
ctggtcttcaccagg

SEQ ID NO: 1371717 - DNA, 15 bp, Homo sapiens
actggtcttcaccag

SEQ ID NO: 1371718 - DNA, 15 bp, Homo sapiens
gactggtcttcacca

SEQ ID NO: 1371719 - DNA, 15 bp, Homo sapiens
ggactggtcttcacc

SEQ ID NO: 1371720 - DNA, 15 bp, Homo sapiens
aggactggtcttcac

SEQ ID NO: 1371721 - DNA, 15 bp, Homo sapiens
caggactggtcttca

SEQ ID NO: 1371722 - DNA, 15 bp, Homo sapiens
ccaggactggtcttc

SEQ ID NO: 1371723 - DNA, 15 bp, Homo sapiens
tccaggactggtctt

SEQ ID NO: 1371724 - DNA, 15 bp, Homo sapiens
gtccaggactggtct

SEQ ID NO: 1371725 - DNA, 15 bp, Homo sapiens
ggtccaggactggtc

SEQ ID NO: 1371726 - DNA, 15 bp, Homo sapiens
gggtccaggactggt

SEQ ID NO: 1371727 - DNA, 15 bp, Homo sapiens
ggggtccaggactgg

SEQ ID NO: 1371728 - DNA, 15 bp, Homo sapiens
cggggtccaggactg

SEQ ID NO: 1371729 - DNA, 15 bp, Homo sapiens
gcggggtccaggact

SEQ ID NO: 1371730 - DNA, 15 bp, Homo sapiens
ggcggggtccaggac

SEQ ID NO: 1371731 - DNA, 15 bp, Homo sapiens
aggcggggtccagga

SEQ ID NO: 1371732 - DNA, 15 bp, Homo sapiens
gaggcggggtccagg

SEQ ID NO: 1371733 - DNA, 15 bp, Homo sapiens
agaggcggggtccag

SEQ ID NO: 1371734 - DNA, 15 bp, Homo sapiens
aagaggcggggtcca

SEQ ID NO: 1371735 - DNA, 15 bp, Homo sapiens
gaagaggcggggtcc

SEQ ID NO: 1371736 - DNA, 15 bp, Homo sapiens
agaagaggcggggtc

SEQ ID NO: 1371737 - DNA, 15 bp, Homo sapiens
cagaagaggcggggt

SEQ ID NO: 1371738 - DNA, 15 bp, Homo sapiens
gcagaagaggcgggg

SEQ ID NO: 1371739 - DNA, 15 bp, Homo sapiens
tgcagaagaggcggg

SEQ ID NO: 1371740 - DNA, 15 bp, Homo sapiens
ctgcagaagaggcgg

SEQ ID NO: 1371741 - DNA, 15 bp, Homo sapiens
actgcagaagaggcg

SEQ ID NO: 1371742 - DNA, 15 bp, Homo sapiens
cactgcagaagaggc

SEQ ID NO: 1371743 - DNA, 15 bp, Homo sapiens
gcactgcagaagagg

SEQ ID NO: 1371744 - DNA, 15 bp, Homo sapiens
ggcactgcagaagag

SEQ ID NO: 1371745 - DNA, 15 bp, Homo sapiens
gggcactgcagaaga

SEQ ID NO: 1371746 - DNA, 15 bp, Homo sapiens
ggggcactgcagaag

SEQ ID NO: 1371747 - DNA, 15 bp, Homo sapiens
tggggcactgcagaa

SEQ ID NO: 1371748 - DNA, 15 bp, Homo sapiens
ctggggcactgcaga

SEQ ID NO: 1371749 - DNA, 15 bp, Homo sapiens
cctggggcactgcag

SEQ ID NO: 1371750 - DNA, 15 bp, Homo sapiens
acctggggcactgca

SEQ ID NO: 1371751 - DNA, 15 bp, Homo sapiens
gacctggggcactgc

SEQ ID NO: 1371752 - DNA, 15 bp, Homo sapiens
tgacctggggcactg

SEQ ID NO: 1371753 - DNA, 15 bp, Homo sapiens
atgacctggggcact

SEQ ID NO: 1371754 - DNA, 15 bp, Homo sapiens
catgacctggggcac

SEQ ID NO: 1371755 - DNA, 15 bp, Homo sapiens
gcatgacctggggca

SEQ ID NO: 1371756 - DNA, 15 bp, Homo sapiens
tgcatgacctggggc

SEQ ID NO: 1371757 - DNA, 15 bp, Homo sapiens
gtgcatgacctgggg

SEQ ID NO: 1371758 - DNA, 15 bp, Homo sapiens
agtgcatgacctggg

SEQ ID NO: 1371759 - DNA, 15 bp, Homo sapiens
aagtgcatgacctgg

SEQ ID NO: 1371760 - DNA, 15 bp, Homo sapiens
gaagtgcatgacctg

SEQ ID NO: 1371761 - DNA, 15 bp, Homo sapiens
ggaagtgcatgacct

SEQ ID NO: 1371762 - DNA, 15 bp, Homo sapiens
gggaagtgcatgacc

SEQ ID NO: 1371763 - DNA, 15 bp, Homo sapiens
ggggaagtgcatgac

SEQ ID NO: 1371764 - DNA, 15 bp, Homo sapiens
gggggaagtgcatga

SEQ ID NO: 1371765 - DNA, 15 bp, Homo sapiens
agggggaagtgcatg

SEQ ID NO: 1371766 - DNA, 15 bp, Homo sapiens
cagggggaagtgcat

SEQ ID NO: 1371767 - DNA, 15 bp, Homo sapiens
ccagggggaagtgca

SEQ ID NO: 1371768 - DNA, 15 bp, Homo sapiens
tccagggggaagtgc

SEQ ID NO: 1371769 - DNA, 15 bp, Homo sapiens
ctccagggggaagtg

SEQ ID NO: 1371770 - DNA, 15 bp, Homo sapiens
tctccagggggaagt

SEQ ID NO: 1371771 - DNA, 15 bp, Homo sapiens
ttctccagggggaag

SEQ ID NO: 1371772 - DNA, 15 bp, Homo sapiens
cttctccagggggaa

SEQ ID NO: 1371773 - DNA, 15 bp, Homo sapiens
ccttctccaggggga

SEQ ID NO: 1371774 - DNA, 15 bp, Homo sapiens
cccttctccaggggg

SEQ ID NO: 1371775 - DNA, 15 bp, Homo sapiens
gcccttctccagggg

SEQ ID NO: 1371776 - DNA, 15 bp, Homo sapiens
agcccttctccaggg

SEQ ID NO: 1371777 - DNA, 15 bp, Homo sapiens
aagcccttctccagg

SEQ ID NO: 1371778 - DNA, 15 bp, Homo sapiens
taagcccttctccag

SEQ ID NO: 1371779 - DNA, 15 bp, Homo sapiens
gtaagcccttctcca

SEQ ID NO: 1371780 - DNA, 15 bp, Homo sapiens
agtaagcccttctcc

SEQ ID NO: 1371781 - DNA, 15 bp, Homo sapiens
cagtaagcccttctc

SEQ ID NO: 1371782 - DNA, 15 bp, Homo sapiens
tcagtaagcccttct

SEQ ID NO: 1371783 - DNA, 15 bp, Homo sapiens
atcagtaagcccttc

SEQ ID NO: 1371784 - DNA, 15 bp, Homo sapiens
tatcagtaagccctt

SEQ ID NO: 1371785 - DNA, 15 bp, Homo sapiens
ttatcagtaagccct

SEQ ID NO: 1371786 - DNA, 15 bp, Homo sapiens
tttatcagtaagccc

SEQ ID NO: 1371787 - DNA, 15 bp, Homo sapiens
ttttatcagtaagcc

SEQ ID NO: 1371788 - DNA, 15 bp, Homo sapiens
gttttatcagtaagc

SEQ ID NO: 1371789 - DNA, 15 bp, Homo sapiens
ggttttatcagtaag

SEQ ID NO: 1371790 - DNA, 15 bp, Homo sapiens
gggttttatcagtaa

SEQ ID NO: 1371791 - DNA, 15 bp, Homo sapiens
ggggttttatcagta

SEQ ID NO: 1371792 - DNA, 15 bp, Homo sapiens
aggggttttatcagt

SEQ ID NO: 1371793 - DNA, 15 bp, Homo sapiens
aaggggttttatcag

SEQ ID NO: 1371794 - DNA, 15 bp, Homo sapiens
aaaggggttttatca

SEQ ID NO: 1371795 - DNA, 15 bp, Homo sapiens
aaaaggggttttatc

SEQ ID NO: 1371796 - DNA, 15 bp, Homo sapiens
caaaaggggttttat

SEQ ID NO: 1371797 - DNA, 15 bp, Homo sapiens
acaaaaggggtttta

SEQ ID NO: 1371798 - DNA, 15 bp, Homo sapiens
gacaaaaggggtttt

SEQ ID NO: 1371799 - DNA, 15 bp, Homo sapiens
ggacaaaaggggttt

SEQ ID NO: 1371800 - DNA, 15 bp, Homo sapiens
aggacaaaaggggtt

SEQ ID NO: 1371801 - DNA, 15 bp, Homo sapiens
caggacaaaaggggt

SEQ ID NO: 1371802 - DNA, 15 bp, Homo sapiens
ccaggacaaaagggg

SEQ ID NO: 1371803 - DNA, 15 bp, Homo sapiens
tccaggacaaaaggg

SEQ ID NO: 1371804 - DNA, 15 bp, Homo sapiens
ttccaggacaaaagg

SEQ ID NO: 1371805 - DNA, 15 bp, Homo sapiens
tttccaggacaaaag

SEQ ID NO: 1371806 - DNA, 15 bp, Homo sapiens
ctttccaggacaaaa

SEQ ID NO: 1371807 - DNA, 15 bp, Homo sapiens
tctttccaggacaaa

SEQ ID NO: 1371808 - DNA, 15 bp, Homo sapiens
ttctttccaggacaa

SEQ ID NO: 1371809 - DNA, 15 bp, Homo sapiens
attctttccaggaca

SEQ ID NO: 1371810 - DNA, 15 bp, Homo sapiens
cattctttccaggac

SEQ ID NO: 1371811 - DNA, 15 bp, Homo sapiens
tcattctttccagga

SEQ ID NO: 1371812 - DNA, 15 bp, Homo sapiens
ctcattctttccagg

SEQ ID NO: 1371813 - DNA, 15 bp, Homo sapiens
cctcattctttccag

SEQ ID NO: 1371814 - DNA, 15 bp, Homo sapiens
gcctcattctttcca

SEQ ID NO: 1371815 - DNA, 15 bp, Homo sapiens
tgcctcattctttcc

SEQ ID NO: 1371816 - DNA, 15 bp, Homo sapiens
ctgcctcattctttc

SEQ ID NO: 1371817 - DNA, 15 bp, Homo sapiens
actgcctcattcttt

SEQ ID NO: 1371818 - DNA, 15 bp, Homo sapiens
gactgcctcattctt

SEQ ID NO: 1371819 - DNA, 15 bp, Homo sapiens
ggactgcctcattct

SEQ ID NO: 1371820 - DNA, 15 bp, Homo sapiens
cggactgcctcattc

SEQ ID NO: 1371821 - DNA, 15 bp, Homo sapiens
ccggactgcctcatt

SEQ ID NO: 1371822 - DNA, 15 bp, Homo sapiens
gccggactgcctcat

SEQ ID NO: 1371823 - DNA, 15 bp, Homo sapiens
tgccggactgcctca

SEQ ID NO: 1371824 - DNA, 15 bp, Homo sapiens
ctgccggactgcctc

SEQ ID NO: 1371825 - DNA, 15 bp, Homo sapiens
cctgccggactgcct

SEQ ID NO: 1371826 - DNA, 15 bp, Homo sapiens
ccctgccggactgcc

SEQ ID NO: 1371827 - DNA, 15 bp, Homo sapiens
cccctgccggactgc

SEQ ID NO: 1371828 - DNA, 15 bp, Homo sapiens
acccctgccggactg

SEQ ID NO: 1371829 - DNA, 15 bp, Homo sapiens
aacccctgccggact

SEQ ID NO: 1371830 - DNA, 15 bp, Homo sapiens
taacccctgccggac

SEQ ID NO: 1371831 - DNA, 15 bp, Homo sapiens
ttaacccctgccgga

SEQ ID NO: 1371832 - DNA, 15 bp, Homo sapiens
tttaacccctgccgg

SEQ ID NO: 1371833 - DNA, 15 bp, Homo sapiens
atttaacccctgccg

SEQ ID NO: 1371834 - DNA, 15 bp, Homo sapiens
tatttaacccctgcc

SEQ ID NO: 1371835 - DNA, 15 bp, Homo sapiens
gtatttaacccctgc

SEQ ID NO: 1371836 - DNA, 15 bp, Homo sapiens
tgtatttaacccctg

SEQ ID NO: 1371837 - DNA, 15 bp, Homo sapiens
ctgtatttaacccct

SEQ ID NO: 1371838 - DNA, 15 bp, Homo sapiens
cctgtatttaacccc

SEQ ID NO: 1371839 - DNA, 15 bp, Homo sapiens
ccctgtatttaaccc

SEQ ID NO: 1371840 - DNA, 15 bp, Homo sapiens
accctgtatttaacc

SEQ ID NO: 1371841 - DNA, 15 bp, Homo sapiens
caccctgtatttaac

SEQ ID NO: 1371842 - DNA, 15 bp, Homo sapiens
tcaccctgtatttaa

SEQ ID NO: 1371843 - DNA, 15 bp, Homo sapiens
gtcaccctgtattta

SEQ ID NO: 1371844 - DNA, 15 bp, Homo sapiens
tgtcaccctgtattt

SEQ ID NO: 1371845 - DNA, 15 bp, Homo sapiens
ctgtcaccctgtatt

SEQ ID NO: 1371846 - DNA, 15 bp, Homo sapiens
gctgtcaccctgtat

SEQ ID NO: 1371847 - DNA, 15 bp, Homo sapiens
tgctgtcaccctgta

SEQ ID NO: 1371848 - DNA, 15 bp, Homo sapiens
atgctgtcaccctgt

SEQ ID NO: 1371849 - DNA, 15 bp, Homo sapiens
aatgctgtcaccctg

SEQ ID NO: 1371850 - DNA, 15 bp, Homo sapiens
aaatgctgtcaccct

SEQ ID NO: 1371851 - DNA, 15 bp, Homo sapiens
taaatgctgtcaccc

SEQ ID NO: 1371852 - DNA, 15 bp, Homo sapiens
ttaaatgctgtcacc

SEQ ID NO: 1371853 - DNA, 15 bp, Homo sapiens
tttaaatgctgtcac

SEQ ID NO: 1371854 - DNA, 15 bp, Homo sapiens
ttttaaatgctgtca

SEQ ID NO: 1371855 - DNA, 15 bp, Homo sapiens
attttaaatgctgtc

SEQ ID NO: 1371856 - DNA, 15 bp, Homo sapiens
gattttaaatgctgt

SEQ ID NO: 1371857 - DNA, 15 bp, Homo sapiens
agattttaaatgctg

SEQ ID NO: 1371858 - DNA, 15 bp, Homo sapiens
gagattttaaatgct

SEQ ID NO: 1371859 - DNA, 15 bp, Homo sapiens
agagattttaaatgc

SEQ ID NO: 1371860 - DNA, 15 bp, Homo sapiens
cagagattttaaatg

SEQ ID NO: 1371861 - DNA, 15 bp, Homo sapiens
ccagagattttaaat

SEQ ID NO: 1371862 - DNA, 15 bp, Homo sapiens
tccagagattttaaa

SEQ ID NO: 1371863 - DNA, 15 bp, Homo sapiens
ctccagagattttaa

SEQ ID NO: 1371864 - DNA, 15 bp, Homo sapiens
gctccagagatttta

SEQ ID NO: 1371865 - DNA, 15 bp, Homo sapiens
tgctccagagatttt

SEQ ID NO: 1371866 - DNA, 15 bp, Homo sapiens
ttgctccagagattt

SEQ ID NO: 1371867 - DNA, 15 bp, Homo sapiens
tttgctccagagatt

SEQ ID NO: 1371868 - DNA, 15 bp, Homo sapiens
atttgctccagagat

SEQ ID NO: 1371869 - DNA, 15 bp, Homo sapiens
aatttgctccagaga

SEQ ID NO: 1371870 - DNA, 15 bp, Homo sapiens
aaatttgctccagag

SEQ ID NO: 1371871 - DNA, 15 bp, Homo sapiens
caaatttgctccaga

SEQ ID NO: 1371872 - DNA, 15 bp, Homo sapiens
ccaaatttgctccag

SEQ ID NO: 1371873 - DNA, 15 bp, Homo sapiens
cccaaatttgctcca

SEQ ID NO: 1371874 - DNA, 15 bp, Homo sapiens
gcccaaatttgctcc

SEQ ID NO: 1371875 - DNA, 15 bp, Homo sapiens
agcccaaatttgctc

SEQ ID NO: 1371876 - DNA, 15 bp, Homo sapiens
cagcccaaatttgct

SEQ ID NO: 1371877 - DNA, 15 bp, Homo sapiens
gcagcccaaatttgc

SEQ ID NO: 1371878 - DNA, 15 bp, Homo sapiens
agcagcccaaatttg

SEQ ID NO: 1371879 - DNA, 15 bp, Homo sapiens
gagcagcccaaattt

SEQ ID NO: 1371880 - DNA, 15 bp, Homo sapiens
agagcagcccaaatt

SEQ ID NO: 1371881 - DNA, 15 bp, Homo sapiens
cagagcagcccaaat

SEQ ID NO: 1371882 - DNA, 15 bp, Homo sapiens
gcagagcagcccaaa

SEQ ID NO: 1371883 - DNA, 15 bp, Homo sapiens
ggcagagcagcccaa

SEQ ID NO: 1371884 - DNA, 15 bp, Homo sapiens
cggcagagcagccca

SEQ ID NO: 1371885 - DNA, 15 bp, Homo sapiens
ccggcagagcagccc

SEQ ID NO: 1371886 - DNA, 15 bp, Homo sapiens
gccggcagagcagcc

SEQ ID NO: 1371887 - DNA, 15 bp, Homo sapiens
ggccggcagagcagc

SEQ ID NO: 1371888 - DNA, 15 bp, Homo sapiens
tggccggcagagcag

SEQ ID NO: 1371889 - DNA, 15 bp, Homo sapiens
ctggccggcagagca

SEQ ID NO: 1371890 - DNA, 15 bp, Homo sapiens
tctggccggcagagc

SEQ ID NO: 1371891 - DNA, 15 bp, Homo sapiens
gtctggccggcagag

SEQ ID NO: 1371892 - DNA, 15 bp, Homo sapiens
tgtctggccggcaga

SEQ ID NO: 1371893 - DNA, 15 bp, Homo sapiens
ttgtctggccggcag

SEQ ID NO: 1371894 - DNA, 15 bp, Homo sapiens
cttgtctggccggca

SEQ ID NO: 1371895 - DNA, 15 bp, Homo sapiens
tcttgtctggccggc

SEQ ID NO: 1371896 - DNA, 15 bp, Homo sapiens
atcttgtctggccgg

SEQ ID NO: 1371897 - DNA, 15 bp, Homo sapiens
catcttgtctggccg

SEQ ID NO: 1371898 - DNA, 15 bp, Homo sapiens
ccatcttgtctggcc

SEQ ID NO: 1371899 - DNA, 15 bp, Homo sapiens
accatcttgtctggc

SEQ ID NO: 1371900 - DNA, 15 bp, Homo sapiens
gaccatcttgtctgg

SEQ ID NO: 1371901 - DNA, 15 bp, Homo sapiens
agaccatcttgtctg

SEQ ID NO: 1371902 - DNA, 15 bp, Homo sapiens
cagaccatcttgtct

SEQ ID NO: 1371903 - DNA, 15 bp, Homo sapiens
gcagaccatcttgtc

SEQ ID NO: 1371904 - DNA, 15 bp, Homo sapiens
agcagaccatcttgt

SEQ ID NO: 1371905 - DNA, 15 bp, Homo sapiens
cagcagaccatcttg

SEQ ID NO: 1371906 - DNA, 15 bp, Homo sapiens
gcagcagaccatctt

SEQ ID NO: 1371907 - DNA, 15 bp, Homo sapiens
ggcagcagaccatct

SEQ ID NO: 1371908 - DNA, 15 bp, Homo sapiens
cggcagcagaccatc

SEQ ID NO: 1371909 - DNA, 15 bp, Homo sapiens
gcggcagcagaccat

SEQ ID NO: 1371910 - DNA, 15 bp, Homo sapiens
ggcggcagcagacca

SEQ ID NO: 1371911 - DNA, 15 bp, Homo sapiens
aggcggcagcagacc

SEQ ID NO: 1371912 - DNA, 15 bp, Homo sapiens
gaggcggcagcagac

SEQ ID NO: 1371913 - DNA, 15 bp, Homo sapiens
tgaggcggcagcaga

SEQ ID NO: 1371914 - DNA, 15 bp, Homo sapiens
gtgaggcggcagcag

SEQ ID NO: 1371915 - DNA, 15 bp, Homo sapiens
cgtgaggcggcagca

SEQ ID NO: 1371916 - DNA, 15 bp, Homo sapiens
gcgtgaggcggcagc

SEQ ID NO: 1371917 - DNA, 15 bp, Homo sapiens
tgcgtgaggcggcag

SEQ ID NO: 1371918 - DNA, 15 bp, Homo sapiens
atgcgtgaggcggca

SEQ ID NO: 1371919 - DNA, 15 bp, Homo sapiens
gatgcgtgaggcggc

SEQ ID NO: 1371920 - DNA, 15 bp, Homo sapiens
ggatgcgtgaggcgg

SEQ ID NO: 1371921 - DNA, 15 bp, Homo sapiens
aggatgcgtgaggcg

SEQ ID NO: 1371922 - DNA, 15 bp, Homo sapiens
caggatgcgtgaggc

SEQ ID NO: 1371923 - DNA, 15 bp, Homo sapiens
acaggatgcgtgagg

SEQ ID NO: 1371924 - DNA, 15 bp, Homo sapiens
gacaggatgcgtgag

SEQ ID NO: 1371925 - DNA, 15 bp, Homo sapiens
ggacaggatgcgtga

SEQ ID NO: 1371926 - DNA, 15 bp, Homo sapiens
gggacaggatgcgtg

SEQ ID NO: 1371927 - DNA, 15 bp, Homo sapiens
ggggacaggatgcgt

SEQ ID NO: 1371928 - DNA, 15 bp, Homo sapiens
tggggacaggatgcg

SEQ ID NO: 1371929 - DNA, 15 bp, Homo sapiens
ctggggacaggatgc

SEQ ID NO: 1371930 - DNA, 15 bp, Homo sapiens
cctggggacaggatg

SEQ ID NO: 1371931 - DNA, 15 bp, Homo sapiens
gcctggggacaggat

SEQ ID NO: 1371932 - DNA, 15 bp, Homo sapiens
agcctggggacagga

SEQ ID NO: 1371933 - DNA, 15 bp, Homo sapiens
cagcctggggacagg

SEQ ID NO: 1371934 - DNA, 15 bp, Homo sapiens
tcagcctggggacag

SEQ ID NO: 1371935 - DNA, 15 bp, Homo sapiens
ttcagcctggggaca

SEQ ID NO: 1371936 - DNA, 15 bp, Homo sapiens
gttcagcctggggac

SEQ ID NO: 1371937 - DNA, 15 bp, Homo sapiens
agttcagcctgggga

SEQ ID NO: 1371938 - DNA, 15 bp, Homo sapiens
cagttcagcctgggg

SEQ ID NO: 1371939 - DNA, 15 bp, Homo sapiens
ccagttcagcctggg

SEQ ID NO: 1371940 - DNA, 15 bp, Homo sapiens
cccagttcagcctgg

SEQ ID NO: 1371941 - DNA, 15 bp, Homo sapiens
gcccagttcagcctg

SEQ ID NO: 1371942 - DNA, 15 bp, Homo sapiens
ggcccagttcagcct

SEQ ID NO: 1371943 - DNA, 15 bp, Homo sapiens
tggcccagttcagcc

SEQ ID NO: 1371944 - DNA, 15 bp, Homo sapiens
ctggcccagttcagc

SEQ ID NO: 1371945 - DNA, 15 bp, Homo sapiens
gctggcccagttcag

SEQ ID NO: 1371946 - DNA, 15 bp, Homo sapiens
tgctggcccagttca

SEQ ID NO: 1371947 - DNA, 15 bp, Homo sapiens
ttgctggcccagttc

SEQ ID NO: 1371948 - DNA, 15 bp, Homo sapiens
tttgctggcccagtt

SEQ ID NO: 1371949 - DNA, 15 bp, Homo sapiens
ctttgctggcccagt

SEQ ID NO: 1371950 - DNA, 15 bp, Homo sapiens
cctttgctggcccag

SEQ ID NO: 1371951 - DNA, 15 bp, Homo sapiens
ccctttgctggccca

SEQ ID NO: 1371952 - DNA, 15 bp, Homo sapiens
tccctttgctggccc

SEQ ID NO: 1371953 - DNA, 15 bp, Homo sapiens
ctccctttgctggcc

SEQ ID NO: 1371954 - DNA, 15 bp, Homo sapiens
tctccctttgctggc

SEQ ID NO: 1371955 - DNA, 15 bp, Homo sapiens
ctctccctttgctgg

SEQ ID NO: 1371956 - DNA, 15 bp, Homo sapiens
cctctccctttgctg

SEQ ID NO: 1371957 - DNA, 15 bp, Homo sapiens
ccctctccctttgct

SEQ ID NO: 1371958 - DNA, 15 bp, Homo sapiens
gccctctccctttgc

SEQ ID NO: 1371959 - DNA, 15 bp, Homo sapiens
ggccctctccctttg

SEQ ID NO: 1371960 - DNA, 15 bp, Homo sapiens
tggccctctcccttt

SEQ ID NO: 1371961 - DNA, 15 bp, Homo sapiens
ctggccctctccctt

SEQ ID NO: 1371962 - DNA, 15 bp, Homo sapiens
cctggccctctccct

SEQ ID NO: 1371963 - DNA, 15 bp, Homo sapiens
acctggccctctccc

SEQ ID NO: 1371964 - DNA, 15 bp, Homo sapiens
cacctggccctctcc

SEQ ID NO: 1371965 - DNA, 15 bp, Homo sapiens
tcacctggccctctc

SEQ ID NO: 1371966 - DNA, 15 bp, Homo sapiens
ttcacctggccctct

SEQ ID NO: 1371967 - DNA, 15 bp, Homo sapiens
cttcacctggccctc

SEQ ID NO: 1371968 - DNA, 15 bp, Homo sapiens
ccttcacctggccct

SEQ ID NO: 1371969 - DNA, 15 bp, Homo sapiens
gccttcacctggccc

SEQ ID NO: 1371970 - DNA, 15 bp, Homo sapiens
ggccttcacctggcc

SEQ ID NO: 1371971 - DNA, 15 bp, Homo sapiens
tggccttcacctggc

SEQ ID NO: 1371972 - DNA, 15 bp, Homo sapiens
ctggccttcacctgg

SEQ ID NO: 1371973 - DNA, 15 bp, Homo sapiens
cctggccttcacctg

SEQ ID NO: 1371974 - DNA, 15 bp, Homo sapiens
gcctggccttcacct

SEQ ID NO: 1371975 - DNA, 15 bp, Homo sapiens
agcctggccttcacc

SEQ ID NO: 1371976 - DNA, 15 bp, Homo sapiens
aagcctggccttcac

SEQ ID NO: 1371977 - DNA, 15 bp, Homo sapiens
aaagcctggccttca

SEQ ID NO: 1371978 - DNA, 15 bp, Homo sapiens
caaagcctggccttc

SEQ ID NO: 1371979 - DNA, 15 bp, Homo sapiens
ccaaagcctggcctt

SEQ ID NO: 1371980 - DNA, 15 bp, Homo sapiens
cccaaagcctggcct

SEQ ID NO: 1371981 - DNA, 15 bp, Homo sapiens
acccaaagcctggcc

SEQ ID NO: 1371982 - DNA, 15 bp, Homo sapiens
cacccaaagcctggc

SEQ ID NO: 1371983 - DNA, 15 bp, Homo sapiens
ccacccaaagcctgg

SEQ ID NO: 1371984 - DNA, 15 bp, Homo sapiens
accacccaaagcctg

SEQ ID NO: 1371985 - DNA, 15 bp, Homo sapiens
caccacccaaagcct

SEQ ID NO: 1371986 - DNA, 15 bp, Homo sapiens
acaccacccaaagcc

SEQ ID NO: 1371987 - DNA, 15 bp, Homo sapiens
gacaccacccaaagc

SEQ ID NO: 1371988 - DNA, 15 bp, Homo sapiens
tgacaccacccaaag

SEQ ID NO: 1371989 - DNA, 15 bp, Homo sapiens
gtgacaccacccaaa

SEQ ID NO: 1371990 - DNA, 15 bp, Homo sapiens
agtgacaccacccaa

SEQ ID NO: 1371991 - DNA, 15 bp, Homo sapiens
aagtgacaccaccca

SEQ ID NO: 1371992 - DNA, 15 bp, Homo sapiens
aaagtgacaccaccc

SEQ ID NO: 1371993 - DNA, 15 bp, Homo sapiens
aaaagtgacaccacc

SEQ ID NO: 1371994 - DNA, 15 bp, Homo sapiens
caaaagtgacaccac

SEQ ID NO: 1371995 - DNA, 15 bp, Homo sapiens
ccaaaagtgacacca

SEQ ID NO: 1371996 - DNA, 15 bp, Homo sapiens
accaaaagtgacacc

SEQ ID NO: 1371997 - DNA, 15 bp, Homo sapiens
caccaaaagtgacac

SEQ ID NO: 1371998 - DNA, 15 bp, Homo sapiens
tcaccaaaagtgaca

SEQ ID NO: 1371999 - DNA, 15 bp, Homo sapiens
gtcaccaaaagtgac

SEQ ID NO: 1372000 - DNA, 15 bp, Homo sapiens
tgtcaccaaaagtga

SEQ ID NO: 1372001 - DNA, 15 bp, Homo sapiens
gtgtcaccaaaagtg

SEQ ID NO: 1372002 - DNA, 15 bp, Homo sapiens
agtgtcaccaaaagt

SEQ ID NO: 1372003 - DNA, 15 bp, Homo sapiens
cagtgtcaccaaaag

SEQ ID NO: 1372004 - DNA, 15 bp, Homo sapiens
acagtgtcaccaaaa

SEQ ID NO: 1372005 - DNA, 15 bp, Homo sapiens
tacagtgtcaccaaa

SEQ ID NO: 1372006 - DNA, 15 bp, Homo sapiens
ctacagtgtcaccaa

SEQ ID NO: 1372007 - DNA, 15 bp, Homo sapiens
gctacagtgtcacca

SEQ ID NO: 1372008 - DNA, 15 bp, Homo sapiens
tgctacagtgtcacc

SEQ ID NO: 1372009 - DNA, 15 bp, Homo sapiens
atgctacagtgtcac

SEQ ID NO: 1372010 - DNA, 15 bp, Homo sapiens
catgctacagtgtca

SEQ ID NO: 1372011 - DNA, 15 bp, Homo sapiens
gcatgctacagtgtc

SEQ ID NO: 1372012 - DNA, 15 bp, Homo sapiens
agcatgctacagtgt

SEQ ID NO: 1372013 - DNA, 15 bp, Homo sapiens
cagcatgctacagtg

SEQ ID NO: 1372014 - DNA, 15 bp, Homo sapiens
tcagcatgctacagt

SEQ ID NO: 1372015 - DNA, 15 bp, Homo sapiens
atcagcatgctacag

SEQ ID NO: 1372016 - DNA, 15 bp, Homo sapiens
aatcagcatgctaca

SEQ ID NO: 1372017 - DNA, 15 bp, Homo sapiens
caatcagcatgctac

SEQ ID NO: 1372018 - DNA, 15 bp, Homo sapiens
gcaatcagcatgcta

SEQ ID NO: 1372019 - DNA, 15 bp, Homo sapiens
ggcaatcagcatgct

SEQ ID NO: 1372020 - DNA, 15 bp, Homo sapiens
gggcaatcagcatgc

SEQ ID NO: 1372021 - DNA, 15 bp, Homo sapiens
ggggcaatcagcatg

SEQ ID NO: 1372022 - DNA, 15 bp, Homo sapiens
aggggcaatcagcat

SEQ ID NO: 1372023 - DNA, 15 bp, Homo sapiens
gaggggcaatcagca

SEQ ID NO: 1372024 - DNA, 15 bp, Homo sapiens
tgaggggcaatcagc

SEQ ID NO: 1372025 - DNA, 15 bp, Homo sapiens
gtgaggggcaatcag

SEQ ID NO: 1372026 - DNA, 15 bp, Homo sapiens
agtgaggggcaatca

SEQ ID NO: 1372027 - DNA, 15 bp, Homo sapiens
aagtgaggggcaatc

SEQ ID NO: 1372028 - DNA, 15 bp, Homo sapiens
gaagtgaggggcaat

SEQ ID NO: 1372029 - DNA, 15 bp, Homo sapiens
ggaagtgaggggcaa

SEQ ID NO: 1372030 - DNA, 15 bp, Homo sapiens
aggaagtgaggggca

SEQ ID NO: 1372031 - DNA, 15 bp, Homo sapiens
taggaagtgaggggc

SEQ ID NO: 1372032 - DNA, 15 bp, Homo sapiens
gtaggaagtgagggg

SEQ ID NO: 1372033 - DNA, 15 bp, Homo sapiens
tgtaggaagtgaggg

SEQ ID NO: 1372034 - DNA, 15 bp, Homo sapiens
gtgtaggaagtgagg

SEQ ID NO: 1372035 - DNA, 15 bp, Homo sapiens
tgtgtaggaagtgag

SEQ ID NO: 1372036 - DNA, 15 bp, Homo sapiens
gtgtgtaggaagtga

SEQ ID NO: 1372037 - DNA, 15 bp, Homo sapiens
tgtgtgtaggaagtg

SEQ ID NO: 1372038 - DNA, 15 bp, Homo sapiens
gtgtgtgtaggaagt

SEQ ID NO: 1372039 - DNA, 15 bp, Homo sapiens
tgtgtgtgtaggaag

SEQ ID NO: 1372040 - DNA, 15 bp, Homo sapiens
gtgtgtgtgtaggaa

SEQ ID NO: 1372041 - DNA, 15 bp, Homo sapiens
tgtgtgtgtgtagga

SEQ ID NO: 1372042 - DNA, 15 bp, Homo sapiens
gtgtgtgtgtgtagg

SEQ ID NO: 1372043 - DNA, 15 bp, Homo sapiens
ggcatgtgtgtgtgt

SEQ ID NO: 1372044 - DNA, 15 bp, Homo sapiens
aggcatgtgtgtgtg

SEQ ID NO: 1372045 - DNA, 15 bp, Homo sapiens
aaggcatgtgtgtgt

SEQ ID NO: 1372046 - DNA, 15 bp, Homo sapiens
aaaggcatgtgtgtg

SEQ ID NO: 1372047 - DNA, 15 bp, Homo sapiens
taaaggcatgtgtgt

SEQ ID NO: 1372048 - DNA, 15 bp, Homo sapiens
gtaaaggcatgtgtg

SEQ ID NO: 1372049 - DNA, 15 bp, Homo sapiens
agtaaaggcatgtgt

SEQ ID NO: 1372050 - DNA, 15 bp, Homo sapiens
aagtaaaggcatgtg

SEQ ID NO: 1372051 - DNA, 15 bp, Homo sapiens
taagtaaaggcatgt

SEQ ID NO: 1372052 - DNA, 15 bp, Homo sapiens
ctaagtaaaggcatg

SEQ ID NO: 1372053 - DNA, 15 bp, Homo sapiens
gctaagtaaaggcat

SEQ ID NO: 1372054 - DNA, 15 bp, Homo sapiens
tgctaagtaaaggca

SEQ ID NO: 1372055 - DNA, 15 bp, Homo sapiens
ttgctaagtaaaggc

SEQ ID NO: 1372056 - DNA, 15 bp, Homo sapiens
tttgctaagtaaagg

SEQ ID NO: 1372057 - DNA, 15 bp, Homo sapiens
ctttgctaagtaaag

SEQ ID NO: 1372058 - DNA, 15 bp, Homo sapiens
gctttgctaagtaaa

SEQ ID NO: 1372059 - DNA, 15 bp, Homo sapiens
ggctttgctaagtaa

SEQ ID NO: 1372060 - DNA, 15 bp, Homo sapiens
aggctttgctaagta

SEQ ID NO: 1372061 - DNA, 15 bp, Homo sapiens
caggctttgctaagt

SEQ ID NO: 1372062 - DNA, 15 bp, Homo sapiens
tcaggctttgctaag

SEQ ID NO: 1372063 - DNA, 15 bp, Homo sapiens
gtcaggctttgctaa

SEQ ID NO: 1372064 - DNA, 15 bp, Homo sapiens
agtcaggctttgcta

SEQ ID NO: 1372065 - DNA, 15 bp, Homo sapiens
cagtcaggctttgct

SEQ ID NO: 1372066 - DNA, 15 bp, Homo sapiens
acagtcaggctttgc

SEQ ID NO: 1372067 - DNA, 15 bp, Homo sapiens
tacagtcaggctttg

SEQ ID NO: 1372068 - DNA, 15 bp, Homo sapiens
ctacagtcaggcttt

SEQ ID NO: 1372069 - DNA, 15 bp, Homo sapiens
gctacagtcaggctt

SEQ ID NO: 1372070 - DNA, 15 bp, Homo sapiens
agctacagtcaggct

SEQ ID NO: 1372071 - DNA, 15 bp, Homo sapiens
cagctacagtcaggc

SEQ ID NO: 1372072 - DNA, 15 bp, Homo sapiens
gcagctacagtcagg

SEQ ID NO: 1372073 - DNA, 15 bp, Homo sapiens
cgcagctacagtcag

SEQ ID NO: 1372074 - DNA, 15 bp, Homo sapiens
acgcagctacagtca

SEQ ID NO: 1372075 - DNA, 15 bp, Homo sapiens
tacgcagctacagtc

SEQ ID NO: 1372076 - DNA, 15 bp, Homo sapiens
ctacgcagctacagt

SEQ ID NO: 1372077 - DNA, 15 bp, Homo sapiens
tctacgcagctacag

SEQ ID NO: 1372078 - DNA, 15 bp, Homo sapiens
gtctacgcagctaca

SEQ ID NO: 1372079 - DNA, 15 bp, Homo sapiens
agtctacgcagctac

SEQ ID NO: 1372080 - DNA, 15 bp, Homo sapiens
aagtctacgcagcta

SEQ ID NO: 1372081 - DNA, 15 bp, Homo sapiens
caagtctacgcagct

SEQ ID NO: 1372082 - DNA, 15 bp, Homo sapiens
acaagtctacgcagc

SEQ ID NO: 1372083 - DNA, 15 bp, Homo sapiens
tacaagtctacgcag

SEQ ID NO: 1372084 - DNA, 15 bp, Homo sapiens
gtacaagtctacgca

SEQ ID NO: 1372085 - DNA, 15 bp, Homo sapiens
tgtacaagtctacgc

SEQ ID NO: 1372086 - DNA, 15 bp, Homo sapiens
gtgtacaagtctacg

SEQ ID NO: 1372087 - DNA, 15 bp, Homo sapiens
ggtgtacaagtctac

SEQ ID NO: 1372088 - DNA, 15 bp, Homo sapiens
aggtgtacaagtcta

SEQ ID NO: 1372089 - DNA, 15 bp, Homo sapiens
taggtgtacaagtct

SEQ ID NO: 1372090 - DNA, 15 bp, Homo sapiens
ataggtgtacaagtc

SEQ ID NO: 1372091 - DNA, 15 bp, Homo sapiens
cataggtgtacaagt

SEQ ID NO: 1372092 - DNA, 15 bp, Homo sapiens
ccataggtgtacaag

SEQ ID NO: 1372093 - DNA, 15 bp, Homo sapiens
cccataggtgtacaa

SEQ ID NO: 1372094 - DNA, 15 bp, Homo sapiens
tcccataggtgtaca

SEQ ID NO: 1372095 - DNA, 15 bp, Homo sapiens
gtcccataggtgtac

SEQ ID NO: 1372096 - DNA, 15 bp, Homo sapiens
ggtcccataggtgta

SEQ ID NO: 1372097 - DNA, 15 bp, Homo sapiens
aggtcccataggtgt

SEQ ID NO: 1372098 - DNA, 15 bp, Homo sapiens
gaggtcccataggtg

SEQ ID NO: 1372099 - DNA, 15 bp, Homo sapiens
ggaggtcccataggt

SEQ ID NO: 1372100 - DNA, 15 bp, Homo sapiens
cggaggtcccatagg

SEQ ID NO: 1372101 - DNA, 15 bp, Homo sapiens
acggaggtcccatag

SEQ ID NO: 1372102 - DNA, 15 bp, Homo sapiens
cacggaggtcccata

SEQ ID NO: 1372103 - DNA, 15 bp, Homo sapiens
ccacggaggtcccat

SEQ ID NO: 1372104 - DNA, 15 bp, Homo sapiens
gccacggaggtccca

SEQ ID NO: 1372105 - DNA, 15 bp, Homo sapiens
tgccacggaggtccc

SEQ ID NO: 1372106 - DNA, 15 bp, Homo sapiens
ttgccacggaggtcc

SEQ ID NO: 1372107 - DNA, 15 bp, Homo sapiens
cttgccacggaggtc

SEQ ID NO: 1372108 - DNA, 15 bp, Homo sapiens
gcttgccacggaggt

SEQ ID NO: 1372109 - DNA, 15 bp, Homo sapiens
agcttgccacggagg

SEQ ID NO: 1372110 - DNA, 15 bp, Homo sapiens
gagcttgccacggag

SEQ ID NO: 1372111 - DNA, 15 bp, Homo sapiens
tgagcttgccacgga

SEQ ID NO: 1372112 - DNA, 15 bp, Homo sapiens
ctgagcttgccacgg

SEQ ID NO: 1372113 - DNA, 15 bp, Homo sapiens
tctgagcttgccacg

SEQ ID NO: 1372114 - DNA, 15 bp, Homo sapiens
ctctgagcttgccac

SEQ ID NO: 1372115 - DNA, 15 bp, Homo sapiens
gctctgagcttgcca

SEQ ID NO: 1372116 - DNA, 15 bp, Homo sapiens
ggctctgagcttgcc

SEQ ID NO: 1372117 - DNA, 15 bp, Homo sapiens
cggctctgagcttgc

SEQ ID NO: 1372118 - DNA, 15 bp, Homo sapiens
ccggctctgagcttg

SEQ ID NO: 1372119 - DNA, 15 bp, Homo sapiens
accggctctgagctt

SEQ ID NO: 1372120 - DNA, 15 bp, Homo sapiens
caccggctctgagct

SEQ ID NO: 1372121 - DNA, 15 bp, Homo sapiens
ccaccggctctgagc

SEQ ID NO: 1372122 - DNA, 15 bp, Homo sapiens
tccaccggctctgag

SEQ ID NO: 1372123 - DNA, 15 bp, Homo sapiens
ctccaccggctctga

SEQ ID NO: 1372124 - DNA, 15 bp, Homo sapiens
gctccaccggctctg

SEQ ID NO: 1372125 - DNA, 15 bp, Homo sapiens
tgctccaccggctct

SEQ ID NO: 1372126 - DNA, 15 bp, Homo sapiens
ctgctccaccggctc

SEQ ID NO: 1372127 - DNA, 15 bp, Homo sapiens
actgctccaccggct

SEQ ID NO: 1372128 - DNA, 15 bp, Homo sapiens
cactgctccaccggc

SEQ ID NO: 1372129 - DNA, 15 bp, Homo sapiens
tcactgctccaccgg

SEQ ID NO: 1372130 - DNA, 15 bp, Homo sapiens
ttcactgctccaccg

SEQ ID NO: 1372131 - DNA, 15 bp, Homo sapiens
tttcactgctccacc

SEQ ID NO: 1372132 - DNA, 15 bp, Homo sapiens
ttttcactgctccac

SEQ ID NO: 1372133 - DNA, 15 bp, Homo sapiens
cttttcactgctcca

SEQ ID NO: 1372134 - DNA, 15 bp, Homo sapiens
ccttttcactgctcc

SEQ ID NO: 1372135 - DNA, 15 bp, Homo sapiens
cccttttcactgctc

SEQ ID NO: 1372136 - DNA, 15 bp, Homo sapiens
tcccttttcactgct

SEQ ID NO: 1372137 - DNA, 15 bp, Homo sapiens
ctcccttttcactgc

SEQ ID NO: 1372138 - DNA, 15 bp, Homo sapiens
cctcccttttcactg

SEQ ID NO: 1372139 - DNA, 15 bp, Homo sapiens
tcctcccttttcact

SEQ ID NO: 1372140 - DNA, 15 bp, Homo sapiens
ttcctcccttttcac

SEQ ID NO: 1372141 - DNA, 15 bp, Homo sapiens
tttcctcccttttca

SEQ ID NO: 1372142 - DNA, 15 bp, Homo sapiens
atttcctcccttttc

SEQ ID NO: 1372143 - DNA, 15 bp, Homo sapiens
catttcctccctttt

SEQ ID NO: 1372144 - DNA, 15 bp, Homo sapiens
gcatttcctcccttt

SEQ ID NO: 1372145 - DNA, 15 bp, Homo sapiens
ggcatttcctccctt

SEQ ID NO: 1372146 - DNA, 15 bp, Homo sapiens
cggcatttcctccct

SEQ ID NO: 1372147 - DNA, 15 bp, Homo sapiens
tcggcatttcctccc

SEQ ID NO: 1372148 - DNA, 15 bp, Homo sapiens
ttcggcatttcctcc

SEQ ID NO: 1372149 - DNA, 15 bp, Homo sapiens
cttcggcatttcctc

SEQ ID NO: 1372150 - DNA, 15 bp, Homo sapiens
tcttcggcatttcct

SEQ ID NO: 1372151 - DNA, 15 bp, Homo sapiens
ttcttcggcatttcc

SEQ ID NO: 1372152 - DNA, 15 bp, Homo sapiens
attcttcggcatttc

SEQ ID NO: 1372153 - DNA, 15 bp, Homo sapiens
aattcttcggcattt

SEQ ID NO: 1372154 - DNA, 15 bp, Homo sapiens
gaattcttcggcatt

SEQ ID NO: 1372155 - DNA, 15 bp, Homo sapiens
tgaattcttcggcat

SEQ ID NO: 1372156 - DNA, 15 bp, Homo sapiens
atgaattcttcggca

SEQ ID NO: 1372157 - DNA, 15 bp, Homo sapiens
catgaattcttcggc

SEQ ID NO: 1372158 - DNA, 15 bp, Homo sapiens
tcatgaattcttcgg

SEQ ID NO: 1372159 - DNA, 15 bp, Homo sapiens
atcatgaattcttcg

SEQ ID NO: 1372160 - DNA, 15 bp, Homo sapiens
gatcatgaattcttc

SEQ ID NO: 1372161 - DNA, 15 bp, Homo sapiens
tgatcatgaattctt

SEQ ID NO: 1372162 - DNA, 15 bp, Homo sapiens
ttgatcatgaattct

SEQ ID NO: 1372163 - DNA, 15 bp, Homo sapiens
cttgatcatgaattc

SEQ ID NO: 1372164 - DNA, 15 bp, Homo sapiens
acttgatcatgaatt

SEQ ID NO: 1372165 - DNA, 15 bp, Homo sapiens
aacttgatcatgaat

SEQ ID NO: 1372166 - DNA, 15 bp, Homo sapiens
aaacttgatcatgaa

SEQ ID NO: 1372167 - DNA, 15 bp, Homo sapiens
caaacttgatcatga

SEQ ID NO: 1372168 - DNA, 15 bp, Homo sapiens
ccaaacttgatcatg

SEQ ID NO: 1372169 - DNA, 15 bp, Homo sapiens
gccaaacttgatcat

SEQ ID NO: 1372170 - DNA, 15 bp, Homo sapiens
agccaaacttgatca

SEQ ID NO: 1372171 - DNA, 15 bp, Homo sapiens
aagccaaacttgatc

SEQ ID NO: 1372172 - DNA, 15 bp, Homo sapiens
gaagccaaacttgat

SEQ ID NO: 1372173 - DNA, 15 bp, Homo sapiens
ggaagccaaacttga

SEQ ID NO: 1372174 - DNA, 15 bp, Homo sapiens
aggaagccaaacttg

SEQ ID NO: 1372175 - DNA, 15 bp, Homo sapiens
aaggaagccaaactt

SEQ ID NO: 1372176 - DNA, 15 bp, Homo sapiens
aaaggaagccaaact

SEQ ID NO: 1372177 - DNA, 15 bp, Homo sapiens
caaaggaagccaaac

SEQ ID NO: 1372178 - DNA, 15 bp, Homo sapiens
gcaaaggaagccaaa

SEQ ID NO: 1372179 - DNA, 15 bp, Homo sapiens
agcaaaggaagccaa

SEQ ID NO: 1372180 - DNA, 15 bp, Homo sapiens
aagcaaaggaagcca

SEQ ID NO: 1372181 - DNA, 15 bp, Homo sapiens
gaagcaaaggaagcc

SEQ ID NO: 1372182 - DNA, 15 bp, Homo sapiens
agaagcaaaggaagc

SEQ ID NO: 1372183 - DNA, 15 bp, Homo sapiens
aagaagcaaaggaag

SEQ ID NO: 1372184 - DNA, 15 bp, Homo sapiens
aaagaagcaaaggaa

SEQ ID NO: 1372185 - DNA, 15 bp, Homo sapiens
aaaagaagcaaagga

SEQ ID NO: 1372186 - DNA, 15 bp, Homo sapiens
aaaaagaagcaaagg

SEQ ID NO: 1372187 - DNA, 15 bp, Homo sapiens
taaaaagaagcaaag

SEQ ID NO: 1372188 - DNA, 15 bp, Homo sapiens
ttaaaaagaagcaaa

SEQ ID NO: 1372189 - DNA, 15 bp, Homo sapiens
tttaaaaagaagcaa

SEQ ID NO: 1372190 - DNA, 15 bp, Homo sapiens
ttttaaaaagaagca

SEQ ID NO: 1372191 - DNA, 15 bp, Homo sapiens
attttaaaaagaagc

SEQ ID NO: 1372192 - DNA, 15 bp, Homo sapiens
aattttaaaaagaag

SEQ ID NO: 1372193 - DNA, 15 bp, Homo sapiens
aaattttaaaaagaa

SEQ ID NO: 1372194 - DNA, 15 bp, Homo sapiens
aaaattttaaaaaga

SEQ ID NO: 1372195 - DNA, 15 bp, Homo sapiens
aaaaattttaaaaag

SEQ ID NO: 1372196 - DNA, 15 bp, Homo sapiens
aaaaaattttaaaaa

SEQ ID NO: 1372197 - DNA, 15 bp, Homo sapiens
taaaaaattttaaaa

SEQ ID NO: 1372198 - DNA, 15 bp, Homo sapiens
attaaaaaattttaa

SEQ ID NO: 1372199 - DNA, 15 bp, Homo sapiens
cattaaaaaatttta

SEQ ID NO: 1372200 - DNA, 15 bp, Homo sapiens
acattaaaaaatttt

SEQ ID NO: 1372201 - DNA, 15 bp, Homo sapiens
aacattaaaaaattt

SEQ ID NO: 1372202 - DNA, 15 bp, Homo sapiens
aaacattaaaaaatt

SEQ ID NO: 1372203 - DNA, 15 bp, Homo sapiens
aaaacattaaaaaat

SEQ ID NO: 1372204 - DNA, 15 bp, Homo sapiens
taaaacattaaaaaa

SEQ ID NO: 1372205 - DNA, 15 bp, Homo sapiens
ttaaaacattaaaaa

SEQ ID NO: 1372206 - DNA, 15 bp, Homo sapiens
attaaaacattaaaa

SEQ ID NO: 1372207 - DNA, 15 bp, Homo sapiens
aattaaaacattaaa

SEQ ID NO: 1372208 - DNA, 15 bp, Homo sapiens
aaattaaaacattaa

SEQ ID NO: 1372209 - DNA, 15 bp, Homo sapiens
aaaattaaaacatta

SEQ ID NO: 1372210 - DNA, 15 bp, Homo sapiens
aaaaaattaaaacat

SEQ ID NO: 1372211 - DNA, 15 bp, Homo sapiens
aaaaaaattaaaaca

SEQ ID NO: 1372212 - DNA, 15 bp, Homo sapiens
aaaaaaaattaaaac

SEQ ID NO: 1372213 - DNA, 15 bp, Homo sapiens
aaaaaaaaattaaaa

SEQ ID NO: 1372214 - DNA, 15 bp, Homo sapiens
gaattaaaaaaaaaa

SEQ ID NO: 1372215 - DNA, 15 bp, Homo sapiens
cgaattaaaaaaaaa

SEQ ID NO: 1372216 - DNA, 15 bp, Homo sapiens
tcgaattaaaaaaaa

SEQ ID NO: 1372217 - DNA, 15 bp, Homo sapiens
ctcgaattaaaaaaa

SEQ ID NO: 1372218 - DNA, 15 bp, Homo sapiens
tctcgaattaaaaaa

SEQ ID NO: 1372219 - DNA, 15 bp, Homo sapiens
atctcgaattaaaaa

SEQ ID NO: 1372220 - DNA, 15 bp, Homo sapiens
catctcgaattaaaa

SEQ ID NO: 1372221 - DNA, 15 bp, Homo sapiens
ccatctcgaattaaa

SEQ ID NO: 1372222 - DNA, 15 bp, Homo sapiens
tccatctcgaattaa

SEQ ID NO: 1372223 - DNA, 15 bp, Homo sapiens
ctccatctcgaatta

SEQ ID NO: 1372224 - DNA, 15 bp, Homo sapiens
actccatctcgaatt

SEQ ID NO: 1372225 - DNA, 15 bp, Homo sapiens
aactccatctcgaat

SEQ ID NO: 1372226 - DNA, 15 bp, Homo sapiens
aaactccatctcgaa

SEQ ID NO: 1372227 - DNA, 15 bp, Homo sapiens
aaaactccatctcga

SEQ ID NO: 1372228 - DNA, 15 bp, Homo sapiens
caaaactccatctcg

SEQ ID NO: 1372229 - DNA, 15 bp, Homo sapiens
cagagcaaaactcca

SEQ ID NO: 1372230 - DNA, 15 bp, Homo sapiens
acagagcaaaactcc

SEQ ID NO: 1372231 - DNA, 15 bp, Homo sapiens
gacagagcaaaactc

SEQ ID NO: 1372232 - DNA, 15 bp, Homo sapiens
cgacagagcaaaact

SEQ ID NO: 1372233 - DNA, 15 bp, Homo sapiens
gcgacagagcaaaac

SEQ ID NO: 1372234 - DNA, 15 bp, Homo sapiens
ggcgacagagcaaaa

SEQ ID NO: 1372235 - DNA, 15 bp, Homo sapiens
gggcgacagagcaaa

SEQ ID NO: 1372236 - DNA, 15 bp, Homo sapiens
cctgccattgcactc

SEQ ID NO: 1372237 - DNA, 15 bp, Homo sapiens
tcctgccattgcact

SEQ ID NO: 1372238 - DNA, 15 bp, Homo sapiens
atcctgccattgcac

SEQ ID NO: 1372239 - DNA, 15 bp, Homo sapiens
gatcctgccattgca

SEQ ID NO: 1372240 - DNA, 15 bp, Homo sapiens
agatcctgccattgc

SEQ ID NO: 1372241 - DNA, 15 bp, Homo sapiens
gagatcctgccattg

SEQ ID NO: 1372242 - DNA, 15 bp, Homo sapiens
cgagatcctgccatt

SEQ ID NO: 1372243 - DNA, 15 bp, Homo sapiens
tcgagatcctgccat

SEQ ID NO: 1372244 - DNA, 15 bp, Homo sapiens
ctcgagatcctgcca

SEQ ID NO: 1372245 - DNA, 15 bp, Homo sapiens
actcgagatcctgcc

SEQ ID NO: 1372246 - DNA, 15 bp, Homo sapiens
gactcgagatcctgc

SEQ ID NO: 1372247 - DNA, 15 bp, Homo sapiens
tgactcgagatcctg

SEQ ID NO: 1372248 - DNA, 15 bp, Homo sapiens
gtgactcgagatcct

SEQ ID NO: 1372249 - DNA, 15 bp, Homo sapiens
agtgactcgagatcc

SEQ ID NO: 1372250 - DNA, 15 bp, Homo sapiens
cagtgactcgagatc

SEQ ID NO: 1372251 - DNA, 15 bp, Homo sapiens
gcagtgactcgagat

SEQ ID NO: 1372252 - DNA, 15 bp, Homo sapiens
tgcagtgactcgaga

SEQ ID NO: 1372253 - DNA, 15 bp, Homo sapiens
ttgcagtgactcgag

SEQ ID NO: 1372254 - DNA, 15 bp, Homo sapiens
gttgcagtgactcga

SEQ ID NO: 1372255 - DNA, 15 bp, Homo sapiens
ggttgcagtgactcg

SEQ ID NO: 1372256 - DNA, 15 bp, Homo sapiens
aggttgcagtgactc

SEQ ID NO: 1372257 - DNA, 15 bp, Homo sapiens
gaggttgcagtgact

SEQ ID NO: 1372258 - DNA, 15 bp, Homo sapiens
agaggttgcagtgac

SEQ ID NO: 1372259 - DNA, 15 bp, Homo sapiens
tgaatccaggaggca

SEQ ID NO: 1372260 - DNA, 15 bp, Homo sapiens
ttgaatccaggaggc

SEQ ID NO: 1372261 - DNA, 15 bp, Homo sapiens
cttgaatccaggagg

SEQ ID NO: 1372262 - DNA, 15 bp, Homo sapiens
ccttgaatccaggag

SEQ ID NO: 1372263 - DNA, 15 bp, Homo sapiens
cccttgaatccagga

SEQ ID NO: 1372264 - DNA, 15 bp, Homo sapiens
tcccttgaatccagg

SEQ ID NO: 1372265 - DNA, 15 bp, Homo sapiens
gtcccttgaatccag

SEQ ID NO: 1372266 - DNA, 15 bp, Homo sapiens
agtcccttgaatcca

SEQ ID NO: 1372267 - DNA, 15 bp, Homo sapiens
gagtcccttgaatcc

SEQ ID NO: 1372268 - DNA, 15 bp, Homo sapiens
gagagtcccttgaat

SEQ ID NO: 1372269 - DNA, 15 bp, Homo sapiens
ggagagtcccttgaa

SEQ ID NO: 1372270 - DNA, 15 bp, Homo sapiens
aggagagtcccttga

SEQ ID NO: 1372271 - DNA, 15 bp, Homo sapiens
caggagagtcccttg

SEQ ID NO: 1372272 - DNA, 15 bp, Homo sapiens
gcaggagagtccctt

SEQ ID NO: 1372273 - DNA, 15 bp, Homo sapiens
ggcaggagagtccct

SEQ ID NO: 1372274 - DNA, 15 bp, Homo sapiens
aggcaggagagtccc

SEQ ID NO: 1372275 - DNA, 15 bp, Homo sapiens
gaggcaggagagtcc

SEQ ID NO: 1372276 - DNA, 15 bp, Homo sapiens
tgaggcaggagagtc

SEQ ID NO: 1372277 - DNA, 15 bp, Homo sapiens
cagaggctgaggcag

SEQ ID NO: 1372278 - DNA, 15 bp, Homo sapiens
ctcagaggctgaggc

SEQ ID NO: 1372279 - DNA, 15 bp, Homo sapiens
actcagaggctgagg

SEQ ID NO: 1372280 - DNA, 15 bp, Homo sapiens
tactcagaggctgag

SEQ ID NO: 1372281 - DNA, 15 bp, Homo sapiens
ctactcagaggctga

SEQ ID NO: 1372282 - DNA, 15 bp, Homo sapiens
actactcagaggctg

SEQ ID NO: 1372283 - DNA, 15 bp, Homo sapiens
aactactcagaggct

SEQ ID NO: 1372284 - DNA, 15 bp, Homo sapiens
caactactcagaggc

SEQ ID NO: 1372285 - DNA, 15 bp, Homo sapiens
ccaactactcagagg

SEQ ID NO: 1372286 - DNA, 15 bp, Homo sapiens
tccaactactcagag

SEQ ID NO: 1372287 - DNA, 15 bp, Homo sapiens
atccaactactcaga

SEQ ID NO: 1372288 - DNA, 15 bp, Homo sapiens
aatccaactactcag

SEQ ID NO: 1372289 - DNA, 15 bp, Homo sapiens
caatccaactactca

SEQ ID NO: 1372290 - DNA, 15 bp, Homo sapiens
gcaatccaactactc

SEQ ID NO: 1372291 - DNA, 15 bp, Homo sapiens
tgcaatccaactact

SEQ ID NO: 1372292 - DNA, 15 bp, Homo sapiens
ctgcaatccaactac

SEQ ID NO: 1372293 - DNA, 15 bp, Homo sapiens
cctgcaatccaacta

SEQ ID NO: 1372294 - DNA, 15 bp, Homo sapiens
gcctgcaatccaact

SEQ ID NO: 1372295 - DNA, 15 bp, Homo sapiens
cgcctgcaatccaac

SEQ ID NO: 1372296 - DNA, 15 bp, Homo sapiens
acgcctgcaatccaa

SEQ ID NO: 1372297 - DNA, 15 bp, Homo sapiens
cacgcctgcaatcca

SEQ ID NO: 1372298 - DNA, 15 bp, Homo sapiens
gcacgcctgcaatcc

SEQ ID NO: 1372299 - DNA, 15 bp, Homo sapiens
tgcacgcctgcaatc

SEQ ID NO: 1372300 - DNA, 15 bp, Homo sapiens
gtgcacgcctgcaat

SEQ ID NO: 1372301 - DNA, 15 bp, Homo sapiens
ggtgcacgcctgcaa

SEQ ID NO: 1372302 - DNA, 15 bp, Homo sapiens
tggtgcacgcctgca

SEQ ID NO: 1372303 - DNA, 15 bp, Homo sapiens
gtggtgcacgcctgc

SEQ ID NO: 1372304 - DNA, 15 bp, Homo sapiens
cgtggtggtgcacgc

SEQ ID NO: 1372305 - DNA, 15 bp, Homo sapiens
gcgtggtggtgcacg

SEQ ID NO: 1372306 - DNA, 15 bp, Homo sapiens
ggcgtggtggtgcac

SEQ ID NO: 1372307 - DNA, 15 bp, Homo sapiens
caaattagccgggcg

SEQ ID NO: 1372308 - DNA, 15 bp, Homo sapiens
acaaattagccgggc

SEQ ID NO: 1372309 - DNA, 15 bp, Homo sapiens
cacaaattagccggg

SEQ ID NO: 1372310 - DNA, 15 bp, Homo sapiens
acacaaattagccgg

SEQ ID NO: 1372311 - DNA, 15 bp, Homo sapiens
tacacaaattagccg

SEQ ID NO: 1372312 - DNA, 15 bp, Homo sapiens
gtacacaaattagcc

SEQ ID NO: 1372313 - DNA, 15 bp, Homo sapiens
agtacacaaattagc

SEQ ID NO: 1372314 - DNA, 15 bp, Homo sapiens
aagtacacaaattag

SEQ ID NO: 1372315 - DNA, 15 bp, Homo sapiens
aaagtacacaaatta

SEQ ID NO: 1372316 - DNA, 15 bp, Homo sapiens
aaaagtacacaaatt

SEQ ID NO: 1372317 - DNA, 15 bp, Homo sapiens
aaaaagtacacaaat

SEQ ID NO: 1372318 - DNA, 15 bp, Homo sapiens
aaaaaagtacacaaa

SEQ ID NO: 1372319 - DNA, 15 bp, Homo sapiens
caaaaaagtacacaa

SEQ ID NO: 1372320 - DNA, 15 bp, Homo sapiens
acaaaaaagtacaca

SEQ ID NO: 1372321 - DNA, 15 bp, Homo sapiens
tacaaaaaagtacac

SEQ ID NO: 1372322 - DNA, 15 bp, Homo sapiens
ctacaaaaaagtaca

SEQ ID NO: 1372323 - DNA, 15 bp, Homo sapiens
tctacaaaaaagtac

SEQ ID NO: 1372324 - DNA, 15 bp, Homo sapiens
ctctacaaaaaagta

SEQ ID NO: 1372325 - DNA, 15 bp, Homo sapiens
tctctacaaaaaagt

SEQ ID NO: 1372326 - DNA, 15 bp, Homo sapiens
ctctctacaaaaaag

SEQ ID NO: 1372327 - DNA, 15 bp, Homo sapiens
tctctctacaaaaaa

SEQ ID NO: 1372328 - DNA, 15 bp, Homo sapiens
ctctctctacaaaaa

SEQ ID NO: 1372329 - DNA, 15 bp, Homo sapiens
cctctctctacaaaa

SEQ ID NO: 1372330 - DNA, 15 bp, Homo sapiens
ccctctctctacaaa

SEQ ID NO: 1372331 - DNA, 15 bp, Homo sapiens
accctctctctacaa

SEQ ID NO: 1372332 - DNA, 15 bp, Homo sapiens
aaccctctctctaca

SEQ ID NO: 1372333 - DNA, 15 bp, Homo sapiens
aaaccctctctctac

SEQ ID NO: 1372334 - DNA, 15 bp, Homo sapiens
aaaaccctctctcta

SEQ ID NO: 1372335 - DNA, 15 bp, Homo sapiens
caaaaccctctctct

SEQ ID NO: 1372336 - DNA, 15 bp, Homo sapiens
gcaaaaccctctctc

SEQ ID NO: 1372337 - DNA, 15 bp, Homo sapiens
ggcaaaaccctctct

SEQ ID NO: 1372338 - DNA, 15 bp, Homo sapiens
tggcaaaaccctctc

SEQ ID NO: 1372339 - DNA, 15 bp, Homo sapiens
atggcaaaaccctct

SEQ ID NO: 1372340 - DNA, 15 bp, Homo sapiens
catggcaaaaccctc

SEQ ID NO: 1372341 - DNA, 15 bp, Homo sapiens
accaacatggcaaaa

SEQ ID NO: 1372342 - DNA, 15 bp, Homo sapiens
gaccaacatggcaaa

SEQ ID NO: 1372343 - DNA, 15 bp, Homo sapiens
tgaccaacatggcaa

SEQ ID NO: 1372344 - DNA, 15 bp, Homo sapiens
ctgaccaacatggca

SEQ ID NO: 1372345 - DNA, 15 bp, Homo sapiens
aaaaaggctaaaggc

SEQ ID NO: 1372346 - DNA, 15 bp, Homo sapiens
taaaaaggctaaagg

SEQ ID NO: 1372347 - DNA, 15 bp, Homo sapiens
gtaaaaaggctaaag

SEQ ID NO: 1372348 - DNA, 15 bp, Homo sapiens
ggtaaaaaggctaaa

SEQ ID NO: 1372349 - DNA, 15 bp, Homo sapiens
gggtaaaaaggctaa

SEQ ID NO: 1372350 - DNA, 15 bp, Homo sapiens
tgggtaaaaaggcta

SEQ ID NO: 1372351 - DNA, 15 bp, Homo sapiens
gtgggtaaaaaggct

SEQ ID NO: 1372352 - DNA, 15 bp, Homo sapiens
ggtgggtaaaaaggc

SEQ ID NO: 1372353 - DNA, 15 bp, Homo sapiens
gggtgggtaaaaagg

SEQ ID NO: 1372354 - DNA, 15 bp, Homo sapiens
ggggtgggtaaaaag

SEQ ID NO: 1372355 - DNA, 15 bp, Homo sapiens
gggggtgggtaaaaa

SEQ ID NO: 1372356 - DNA, 15 bp, Homo sapiens
cgggggtgggtaaaa

SEQ ID NO: 1372357 - DNA, 15 bp, Homo sapiens
ccgggggtgggtaaa

SEQ ID NO: 1372358 - DNA, 15 bp, Homo sapiens
accgggggtgggtaa

SEQ ID NO: 1372359 - DNA, 15 bp, Homo sapiens
taccgggggtgggta

SEQ ID NO: 1372360 - DNA, 15 bp, Homo sapiens
gtaccgggggtgggt

SEQ ID NO: 1372361 - DNA, 15 bp, Homo sapiens
agtaccgggggtggg

SEQ ID NO: 1372362 - DNA, 15 bp, Homo sapiens
cagtaccgggggtgg

SEQ ID NO: 1372363 - DNA, 15 bp, Homo sapiens
gcagtaccgggggtg

SEQ ID NO: 1372364 - DNA, 15 bp, Homo sapiens
ggcagtaccgggggt

SEQ ID NO: 1372365 - DNA, 15 bp, Homo sapiens
aggcagtaccggggg

SEQ ID NO: 1372366 - DNA, 15 bp, Homo sapiens
aaggcagtaccgggg

SEQ ID NO: 1372367 - DNA, 15 bp, Homo sapiens
gaaggcagtaccggg

SEQ ID NO: 1372368 - DNA, 15 bp, Homo sapiens
ggaaggcagtaccgg

SEQ ID NO: 1372369 - DNA, 15 bp, Homo sapiens
gggaaggcagtaccg

SEQ ID NO: 1372370 - DNA, 15 bp, Homo sapiens
ggggaaggcagtacc

SEQ ID NO: 1372371 - DNA, 15 bp, Homo sapiens
aggggaaggcagtac

SEQ ID NO: 1372372 - DNA, 15 bp, Homo sapiens
taggggaaggcagta

SEQ ID NO: 1372373 - DNA, 15 bp, Homo sapiens
ttaggggaaggcagt

SEQ ID NO: 1372374 - DNA, 15 bp, Homo sapiens
gttaggggaaggcag

SEQ ID NO: 1372375 - DNA, 15 bp, Homo sapiens
tgttaggggaaggca

SEQ ID NO: 1372376 - DNA, 15 bp, Homo sapiens
ctgttaggggaaggc

SEQ ID NO: 1372377 - DNA, 15 bp, Homo sapiens
tctgttaggggaagg

SEQ ID NO: 1372378 - DNA, 15 bp, Homo sapiens
ctctgttaggggaag

SEQ ID NO: 1372379 - DNA, 15 bp, Homo sapiens
cctctgttaggggaa

SEQ ID NO: 1372380 - DNA, 15 bp, Homo sapiens
gcctctgttagggga

SEQ ID NO: 1372381 - DNA, 15 bp, Homo sapiens
tgcctctgttagggg

SEQ ID NO: 1372382 - DNA, 15 bp, Homo sapiens
gtgcctctgttaggg

SEQ ID NO: 1372383 - DNA, 15 bp, Homo sapiens
ggtgcctctgttagg

SEQ ID NO: 1372384 - DNA, 15 bp, Homo sapiens
aggtgcctctgttag

SEQ ID NO: 1372385 - DNA, 15 bp, Homo sapiens
caggtgcctctgtta

SEQ ID NO: 1372386 - DNA, 15 bp, Homo sapiens
ccaggtgcctctgtt

SEQ ID NO: 1372387 - DNA, 15 bp, Homo sapiens
gccaggtgcctctgt

SEQ ID NO: 1372388 - DNA, 15 bp, Homo sapiens
tgccaggtgcctctg

SEQ ID NO: 1372389 - DNA, 15 bp, Homo sapiens
gtgccaggtgcctct

SEQ ID NO: 1372390 - DNA, 15 bp, Homo sapiens
agtgccaggtgcctc

SEQ ID NO: 1372391 - DNA, 15 bp, Homo sapiens
aagtgccaggtgcct

SEQ ID NO: 1372392 - DNA, 15 bp, Homo sapiens
taagtgccaggtgcc

SEQ ID NO: 1372393 - DNA, 15 bp, Homo sapiens
ctaagtgccaggtgc

SEQ ID NO: 1372394 - DNA, 15 bp, Homo sapiens
gctaagtgccaggtg

SEQ ID NO: 1372395 - DNA, 15 bp, Homo sapiens
ggctaagtgccaggt

SEQ ID NO: 1372396 - DNA, 15 bp, Homo sapiens
cggctaagtgccagg

SEQ ID NO: 1372397 - DNA, 15 bp, Homo sapiens
gcggctaagtgccag

SEQ ID NO: 1372398 - DNA, 15 bp, Homo sapiens
ggcggctaagtgcca

SEQ ID NO: 1372399 - DNA, 15 bp, Homo sapiens
cggcggctaagtgcc

SEQ ID NO: 1372400 - DNA, 15 bp, Homo sapiens
ccggcggctaagtgc

SEQ ID NO: 1372401 - DNA, 15 bp, Homo sapiens
cccggcggctaagtg

SEQ ID NO: 1372402 - DNA, 15 bp, Homo sapiens
tcccggcggctaagt

SEQ ID NO: 1372403 - DNA, 15 bp, Homo sapiens
ttcccggcggctaag

SEQ ID NO: 1372404 - DNA, 15 bp, Homo sapiens
gttcccggcggctaa

SEQ ID NO: 1372405 - DNA, 15 bp, Homo sapiens
agttcccggcggcta

SEQ ID NO: 1372406 - DNA, 15 bp, Homo sapiens
gagttcccggcggct

SEQ ID NO: 1372407 - DNA, 15 bp, Homo sapiens
tgagttcccggcggc

SEQ ID NO: 1372408 - DNA, 15 bp, Homo sapiens
ctgagttcccggcgg

SEQ ID NO: 1372409 - DNA, 15 bp, Homo sapiens
cctgagttcccggcg

SEQ ID NO: 1372410 - DNA, 15 bp, Homo sapiens
ccctgagttcccggc

SEQ ID NO: 1372411 - DNA, 15 bp, Homo sapiens
gccctgagttcccgg

SEQ ID NO: 1372412 - DNA, 15 bp, Homo sapiens
agccctgagttcccg

SEQ ID NO: 1372413 - DNA, 15 bp, Homo sapiens
cagccctgagttccc

SEQ ID NO: 1372414 - DNA, 15 bp, Homo sapiens
gcagccctgagttcc

SEQ ID NO: 1372415 - DNA, 15 bp, Homo sapiens
ggcagccctgagttc

SEQ ID NO: 1372416 - DNA, 15 bp, Homo sapiens
aggcagccctgagtt

SEQ ID NO: 1372417 - DNA, 15 bp, Homo sapiens
aaggcagccctgagt

SEQ ID NO: 1372418 - DNA, 15 bp, Homo sapiens
gaaggcagccctgag

SEQ ID NO: 1372419 - DNA, 15 bp, Homo sapiens
cgaaggcagccctga

SEQ ID NO: 1372420 - DNA, 15 bp, Homo sapiens
acgaaggcagccctg

SEQ ID NO: 1372421 - DNA, 15 bp, Homo sapiens
cacgaaggcagccct

SEQ ID NO: 1372422 - DNA, 15 bp, Homo sapiens
acacgaaggcagccc

SEQ ID NO: 1372423 - DNA, 15 bp, Homo sapiens
aacacgaaggcagcc

SEQ ID NO: 1372424 - DNA, 15 bp, Homo sapiens
aaacacgaaggcagc

SEQ ID NO: 1372425 - DNA, 15 bp, Homo sapiens
aaaacacgaaggcag

SEQ ID NO: 1372426 - DNA, 15 bp, Homo sapiens
gaaaacacgaaggca

SEQ ID NO: 1372427 - DNA, 15 bp, Homo sapiens
tgaaaacacgaaggc

SEQ ID NO: 1372428 - DNA, 15 bp, Homo sapiens
ttgaaaacacgaagg

SEQ ID NO: 1372429 - DNA, 15 bp, Homo sapiens
cttgaaaacacgaag

SEQ ID NO: 1372430 - DNA, 15 bp, Homo sapiens
gcttgaaaacacgaa

SEQ ID NO: 1372431 - DNA, 15 bp, Homo sapiens
ggcttgaaaacacga

SEQ ID NO: 1372432 - DNA, 15 bp, Homo sapiens
tggcttgaaaacacg

SEQ ID NO: 1372433 - DNA, 15 bp, Homo sapiens
gtggcttgaaaacac

SEQ ID NO: 1372434 - DNA, 15 bp, Homo sapiens
ggtggcttgaaaaca

SEQ ID NO: 1372435 - DNA, 15 bp, Homo sapiens
cggtggcttgaaaac

SEQ ID NO: 1372436 - DNA, 15 bp, Homo sapiens
acggtggcttgaaaa

SEQ ID NO: 1372437 - DNA, 15 bp, Homo sapiens
cacggtggcttgaaa

SEQ ID NO: 1372438 - DNA, 15 bp, Homo sapiens
acacggtggcttgaa

SEQ ID NO: 1372439 - DNA, 15 bp, Homo sapiens
gacacggtggcttga

SEQ ID NO: 1372440 - DNA, 15 bp, Homo sapiens
ggacacggtggcttg

SEQ ID NO: 1372441 - DNA, 15 bp, Homo sapiens
gggacacggtggctt

SEQ ID NO: 1372442 - DNA, 15 bp, Homo sapiens
ggggacacggtggct

SEQ ID NO: 1372443 - DNA, 15 bp, Homo sapiens
gggggacacggtggc

SEQ ID NO: 1372444 - DNA, 15 bp, Homo sapiens
agggggacacggtgg

SEQ ID NO: 1372445 - DNA, 15 bp, Homo sapiens
gagggggacacggtg

SEQ ID NO: 1372446 - DNA, 15 bp, Homo sapiens
tgagggggacacggt

SEQ ID NO: 1372447 - DNA, 15 bp, Homo sapiens
atgagggggacacgg

SEQ ID NO: 1372448 - DNA, 15 bp, Homo sapiens
gatgagggggacacg

SEQ ID NO: 1372449 - DNA, 15 bp, Homo sapiens
ggatgagggggacac

SEQ ID NO: 1372450 - DNA, 15 bp, Homo sapiens
aggatgagggggaca

SEQ ID NO: 1372451 - DNA, 15 bp, Homo sapiens
caggatgagggggac

SEQ ID NO: 1372452 - DNA, 15 bp, Homo sapiens
gcaggatgaggggga

SEQ ID NO: 1372453 - DNA, 15 bp, Homo sapiens
tgcaggatgaggggg

SEQ ID NO: 1372454 - DNA, 15 bp, Homo sapiens
ctgcaggatgagggg

SEQ ID NO: 1372455 - DNA, 15 bp, Homo sapiens
cctgcaggatgaggg

SEQ ID NO: 1372456 - DNA, 15 bp, Homo sapiens
tcctgcaggatgagg

SEQ ID NO: 1372457 - DNA, 15 bp, Homo sapiens
ctcctgcaggatgag

SEQ ID NO: 1372458 - DNA, 15 bp, Homo sapiens
actcctgcaggatga

SEQ ID NO: 1372459 - DNA, 15 bp, Homo sapiens
aactcctgcaggatg

SEQ ID NO: 1372460 - DNA, 15 bp, Homo sapiens
gaactcctgcaggat

SEQ ID NO: 1372461 - DNA, 15 bp, Homo sapiens
agaactcctgcagga

SEQ ID NO: 1372462 - DNA, 15 bp, Homo sapiens
cagaactcctgcagg

SEQ ID NO: 1372463 - DNA, 15 bp, Homo sapiens
acagaactcctgcag

SEQ ID NO: 1372464 - DNA, 15 bp, Homo sapiens
tacagaactcctgca

SEQ ID NO: 1372465 - DNA, 15 bp, Homo sapiens
ttacagaactcctgc

SEQ ID NO: 1372466 - DNA, 15 bp, Homo sapiens
gttacagaactcctg

SEQ ID NO: 1372467 - DNA, 15 bp, Homo sapiens
agttacagaactcct

SEQ ID NO: 1372468 - DNA, 15 bp, Homo sapiens
aagttacagaactcc

SEQ ID NO: 1372469 - DNA, 15 bp, Homo sapiens
aaagttacagaactc

SEQ ID NO: 1372470 - DNA, 15 bp, Homo sapiens
gaaagttacagaact

SEQ ID NO: 1372471 - DNA, 15 bp, Homo sapiens
ggaaagttacagaac

SEQ ID NO: 1372472 - DNA, 15 bp, Homo sapiens
aggaaagttacagaa

SEQ ID NO: 1372473 - DNA, 15 bp, Homo sapiens
caggaaagttacaga

SEQ ID NO: 1372474 - DNA, 15 bp, Homo sapiens
tcaggaaagttacag

SEQ ID NO: 1372475 - DNA, 15 bp, Homo sapiens
ctcaggaaagttaca

SEQ ID NO: 1372476 - DNA, 15 bp, Homo sapiens
tctcaggaaagttac

SEQ ID NO: 1372477 - DNA, 15 bp, Homo sapiens
gtctcaggaaagtta

SEQ ID NO: 1372478 - DNA, 15 bp, Homo sapiens
agtctcaggaaagtt

SEQ ID NO: 1372479 - DNA, 15 bp, Homo sapiens
tagtctcaggaaagt

SEQ ID NO: 1372480 - DNA, 15 bp, Homo sapiens
atagtctcaggaaag

SEQ ID NO: 1372481 - DNA, 15 bp, Homo sapiens
aatagtctcaggaaa

SEQ ID NO: 1372482 - DNA, 15 bp, Homo sapiens
aaatagtctcaggaa

SEQ ID NO: 1372483 - DNA, 15 bp, Homo sapiens
gaaatagtctcagga

SEQ ID NO: 1372484 - DNA, 15 bp, Homo sapiens
agaaatagtctcagg

SEQ ID NO: 1372485 - DNA, 15 bp, Homo sapiens
tagaaatagtctcag

SEQ ID NO: 1372486 - DNA, 15 bp, Homo sapiens
ctagaaatagtctca

SEQ ID NO: 1372487 - DNA, 15 bp, Homo sapiens
cctagaaatagtctc

SEQ ID NO: 1372488 - DNA, 15 bp, Homo sapiens
ccctagaaatagtct

SEQ ID NO: 1372489 - DNA, 15 bp, Homo sapiens
accctagaaatagtc

SEQ ID NO: 1372490 - DNA, 15 bp, Homo sapiens
caccctagaaatagt

SEQ ID NO: 1372491 - DNA, 15 bp, Homo sapiens
gcaccctagaaatag

SEQ ID NO: 1372492 - DNA, 15 bp, Homo sapiens
agcaccctagaaata

SEQ ID NO: 1372493 - DNA, 15 bp, Homo sapiens
tagcaccctagaaat

SEQ ID NO: 1372494 - DNA, 15 bp, Homo sapiens
ctagcaccctagaaa

SEQ ID NO: 1372495 - DNA, 15 bp, Homo sapiens
actagcaccctagaa

SEQ ID NO: 1372496 - DNA, 15 bp, Homo sapiens
cactagcaccctaga

SEQ ID NO: 1372497 - DNA, 15 bp, Homo sapiens
tcactagcaccctag

SEQ ID NO: 1372498 - DNA, 15 bp, Homo sapiens
ctcactagcacccta

SEQ ID NO: 1372499 - DNA, 15 bp, Homo sapiens
cctcactagcaccct

SEQ ID NO: 1372500 - DNA, 15 bp, Homo sapiens
tcctcactagcaccc

SEQ ID NO: 1372501 - DNA, 15 bp, Homo sapiens
ctcctcactagcacc

SEQ ID NO: 1372502 - DNA, 15 bp, Homo sapiens
actcctcactagcac

SEQ ID NO: 1372503 - DNA, 15 bp, Homo sapiens
cactcctcactagca

SEQ ID NO: 1372504 - DNA, 15 bp, Homo sapiens
ccactcctcactagc

SEQ ID NO: 1372505 - DNA, 15 bp, Homo sapiens
tccactcctcactag

SEQ ID NO: 1372506 - DNA, 15 bp, Homo sapiens
ctccactcctcacta

SEQ ID NO: 1372507 - DNA, 15 bp, Homo sapiens
cctccactcctcact

SEQ ID NO: 1372508 - DNA, 15 bp, Homo sapiens
ccctccactcctcac

SEQ ID NO: 1372509 - DNA, 15 bp, Homo sapiens
cccctccactcctca

SEQ ID NO: 1372510 - DNA, 15 bp, Homo sapiens
tcccctccactcctc

SEQ ID NO: 1372511 - DNA, 15 bp, Homo sapiens
ttcccctccactcct

SEQ ID NO: 1372512 - DNA, 15 bp, Homo sapiens
tttcccctccactcc

SEQ ID NO: 1372513 - DNA, 15 bp, Homo sapiens
atttcccctccactc

SEQ ID NO: 1372514 - DNA, 15 bp, Homo sapiens
catttcccctccact

SEQ ID NO: 1372515 - DNA, 15 bp, Homo sapiens
ccatttcccctccac

SEQ ID NO: 1372516 - DNA, 15 bp, Homo sapiens
cccatttcccctcca

SEQ ID NO: 1372517 - DNA, 15 bp, Homo sapiens
acccatttcccctcc

SEQ ID NO: 1372518 - DNA, 15 bp, Homo sapiens
gacccatttcccctc

SEQ ID NO: 1372519 - DNA, 15 bp, Homo sapiens
agacccatttcccct

SEQ ID NO: 1372520 - DNA, 15 bp, Homo sapiens
gagacccatttcccc

SEQ ID NO: 1372521 - DNA, 15 bp, Homo sapiens
cgagacccatttccc

SEQ ID NO: 1372522 - DNA, 15 bp, Homo sapiens
ccgagacccatttcc

SEQ ID NO: 1372523 - DNA, 15 bp, Homo sapiens
tccgagacccatttc

SEQ ID NO: 1372524 - DNA, 15 bp, Homo sapiens
ctccgagacccattt

SEQ ID NO: 1372525 - DNA, 15 bp, Homo sapiens
gctccgagacccatt

SEQ ID NO: 1372526 - DNA, 15 bp, Homo sapiens
agctccgagacccat

SEQ ID NO: 1372527 - DNA, 15 bp, Homo sapiens
cagctccgagaccca

SEQ ID NO: 1372528 - DNA, 15 bp, Homo sapiens
gcagctccgagaccc

SEQ ID NO: 1372529 - DNA, 15 bp, Homo sapiens
ggcagctccgagacc

SEQ ID NO: 1372530 - DNA, 15 bp, Homo sapiens
gggcagctccgagac

SEQ ID NO: 1372531 - DNA, 15 bp, Homo sapiens
agggcagctccgaga

SEQ ID NO: 1372532 - DNA, 15 bp, Homo sapiens
cagggcagctccgag

SEQ ID NO: 1372533 - DNA, 15 bp, Homo sapiens
ccagggcagctccga

SEQ ID NO: 1372534 - DNA, 15 bp, Homo sapiens
accagggcagctccg

SEQ ID NO: 1372535 - DNA, 15 bp, Homo sapiens
taccagggcagctcc

SEQ ID NO: 1372536 - DNA, 15 bp, Homo sapiens
gtaccagggcagctc

SEQ ID NO: 1372537 - DNA, 15 bp, Homo sapiens
tgtaccagggcagct

SEQ ID NO: 1372538 - DNA, 15 bp, Homo sapiens
ctgtaccagggcagc

SEQ ID NO: 1372539 - DNA, 15 bp, Homo sapiens
gctgtaccagggcag

SEQ ID NO: 1372540 - DNA, 15 bp, Homo sapiens
agctgtaccagggca

SEQ ID NO: 1372541 - DNA, 15 bp, Homo sapiens
cagctgtaccagggc

SEQ ID NO: 1372542 - DNA, 15 bp, Homo sapiens
acagctgtaccaggg

SEQ ID NO: 1372543 - DNA, 15 bp, Homo sapiens
cacagctgtaccagg

SEQ ID NO: 1372544 - DNA, 15 bp, Homo sapiens
acacagctgtaccag

SEQ ID NO: 1372545 - DNA, 15 bp, Homo sapiens
gacacagctgtacca

SEQ ID NO: 1372546 - DNA, 15 bp, Homo sapiens
ggacacagctgtacc

SEQ ID NO: 1372547 - DNA, 15 bp, Homo sapiens
tggacacagctgtac

SEQ ID NO: 1372548 - DNA, 15 bp, Homo sapiens
ctggacacagctgta

SEQ ID NO: 1372549 - DNA, 15 bp, Homo sapiens
actggacacagctgt

SEQ ID NO: 1372550 - DNA, 15 bp, Homo sapiens
tactggacacagctg

SEQ ID NO: 1372551 - DNA, 15 bp, Homo sapiens
ttactggacacagct

SEQ ID NO: 1372552 - DNA, 15 bp, Homo sapiens
gttactggacacagc

SEQ ID NO: 1372553 - DNA, 15 bp, Homo sapiens
cgttactggacacag

SEQ ID NO: 1372554 - DNA, 15 bp, Homo sapiens
ccgttactggacaca

SEQ ID NO: 1372555 - DNA, 15 bp, Homo sapiens
accgttactggacac

SEQ ID NO: 1372556 - DNA, 15 bp, Homo sapiens
caccgttactggaca

SEQ ID NO: 1372557 - DNA, 15 bp, Homo sapiens
gcaccgttactggac

SEQ ID NO: 1372558 - DNA, 15 bp, Homo sapiens
agcaccgttactgga

SEQ ID NO: 1372559 - DNA, 15 bp, Homo sapiens
cagcaccgttactgg

SEQ ID NO: 1372560 - DNA, 15 bp, Homo sapiens
acagcaccgttactg

SEQ ID NO: 1372561 - DNA, 15 bp, Homo sapiens
cacagcaccgttact

SEQ ID NO: 1372562 - DNA, 15 bp, Homo sapiens
gcacagcaccgttac

SEQ ID NO: 1372563 - DNA, 15 bp, Homo sapiens
agcacagcaccgtta

SEQ ID NO: 1372564 - DNA, 15 bp, Homo sapiens
aagcacagcaccgtt

SEQ ID NO: 1372565 - DNA, 15 bp, Homo sapiens
aaagcacagcaccgt

SEQ ID NO: 1372566 - DNA, 15 bp, Homo sapiens
caaagcacagcaccg

SEQ ID NO: 1372567 - DNA, 15 bp, Homo sapiens
ccaaagcacagcacc

SEQ ID NO: 1372568 - DNA, 15 bp, Homo sapiens
tccaaagcacagcac

SEQ ID NO: 1372569 - DNA, 15 bp, Homo sapiens
ctccaaagcacagca

SEQ ID NO: 1372570 - DNA, 15 bp, Homo sapiens
cctccaaagcacagc

SEQ ID NO: 1372571 - DNA, 15 bp, Homo sapiens
tcctccaaagcacag

SEQ ID NO: 1372572 - DNA, 15 bp, Homo sapiens
ttcctccaaagcaca

SEQ ID NO: 1372573 - DNA, 15 bp, Homo sapiens
cttcctccaaagcac

SEQ ID NO: 1372574 - DNA, 15 bp, Homo sapiens
ccttcctccaaagca

SEQ ID NO: 1372575 - DNA, 15 bp, Homo sapiens
tccttcctccaaagc

SEQ ID NO: 1372576 - DNA, 15 bp, Homo sapiens
ctccttcctccaaag

SEQ ID NO: 1372577 - DNA, 15 bp, Homo sapiens
actccttcctccaaa

SEQ ID NO: 1372578 - DNA, 15 bp, Homo sapiens
cactccttcctccaa

SEQ ID NO: 1372579 - DNA, 15 bp, Homo sapiens
tcactccttcctcca

SEQ ID NO: 1372580 - DNA, 15 bp, Homo sapiens
atcactccttcctcc

SEQ ID NO: 1372581 - DNA, 15 bp, Homo sapiens
tatcactccttcctc

SEQ ID NO: 1372582 - DNA, 15 bp, Homo sapiens
atatcactccttcct

SEQ ID NO: 1372583 - DNA, 15 bp, Homo sapiens
catatcactccttcc

SEQ ID NO: 1372584 - DNA, 15 bp, Homo sapiens
ccatatcactccttc

SEQ ID NO: 1372585 - DNA, 15 bp, Homo sapiens
accatatcactcctt

SEQ ID NO: 1372586 - DNA, 15 bp, Homo sapiens
aaccatatcactcct

SEQ ID NO: 1372587 - DNA, 15 bp, Homo sapiens
gaaccatatcactcc

SEQ ID NO: 1372588 - DNA, 15 bp, Homo sapiens
tgaaccatatcactc

SEQ ID NO: 1372589 - DNA, 15 bp, Homo sapiens
gtgaaccatatcact

SEQ ID NO: 1372590 - DNA, 15 bp, Homo sapiens
ggtgaaccatatcac

SEQ ID NO: 1372591 - DNA, 15 bp, Homo sapiens
aggtgaaccatatca

SEQ ID NO: 1372592 - DNA, 15 bp, Homo sapiens
taggtgaaccatatc

SEQ ID NO: 1372593 - DNA, 15 bp, Homo sapiens
ctaggtgaaccatat

SEQ ID NO: 1372594 - DNA, 15 bp, Homo sapiens
tctaggtgaaccata

SEQ ID NO: 1372595 - DNA, 15 bp, Homo sapiens
ttctaggtgaaccat

SEQ ID NO: 1372596 - DNA, 15 bp, Homo sapiens
cttctaggtgaacca

SEQ ID NO: 1372597 - DNA, 15 bp, Homo sapiens
gcttctaggtgaacc

SEQ ID NO: 1372598 - DNA, 15 bp, Homo sapiens
tgcttctaggtgaac

SEQ ID NO: 1372599 - DNA, 15 bp, Homo sapiens
atgcttctaggtgaa

SEQ ID NO: 1372600 - DNA, 15 bp, Homo sapiens
gatgcttctaggtga

SEQ ID NO: 1372601 - DNA, 15 bp, Homo sapiens
agatgcttctaggtg

SEQ ID NO: 1372602 - DNA, 15 bp, Homo sapiens
gagatgcttctaggt

SEQ ID NO: 1372603 - DNA, 15 bp, Homo sapiens
ggagatgcttctagg

SEQ ID NO: 1372604 - DNA, 15 bp, Homo sapiens
gggagatgcttctag

SEQ ID NO: 1372605 - DNA, 15 bp, Homo sapiens
tgggagatgcttcta

SEQ ID NO: 1372606 - DNA, 15 bp, Homo sapiens
ctgggagatgcttct

SEQ ID NO: 1372607 - DNA, 15 bp, Homo sapiens
tctgggagatgcttc

SEQ ID NO: 1372608 - DNA, 15 bp, Homo sapiens
ctctgggagatgctt

SEQ ID NO: 1372609 - DNA, 15 bp, Homo sapiens
tctctgggagatgct

SEQ ID NO: 1372610 - DNA, 15 bp, Homo sapiens
ctctctgggagatgc

SEQ ID NO: 1372611 - DNA, 15 bp, Homo sapiens
cctctctgggagatg

SEQ ID NO: 1372612 - DNA, 15 bp, Homo sapiens
ccctctctgggagat

SEQ ID NO: 1372613 - DNA, 15 bp, Homo sapiens
cccctctctgggaga

SEQ ID NO: 1372614 - DNA, 15 bp, Homo sapiens
ccccctctctgggag

SEQ ID NO: 1372615 - DNA, 15 bp, Homo sapiens
gccccctctctggga

SEQ ID NO: 1372616 - DNA, 15 bp, Homo sapiens
agccccctctctggg

SEQ ID NO: 1372617 - DNA, 15 bp, Homo sapiens
aagccccctctctgg

SEQ ID NO: 1372618 - DNA, 15 bp, Homo sapiens
taagccccctctctg

SEQ ID NO: 1372619 - DNA, 15 bp, Homo sapiens
ataagccccctctct

SEQ ID NO: 1372620 - DNA, 15 bp, Homo sapiens
gataagccccctctc

SEQ ID NO: 1372621 - DNA, 15 bp, Homo sapiens
tgataagccccctct

SEQ ID NO: 1372622 - DNA, 15 bp, Homo sapiens
gtgataagccccctc

SEQ ID NO: 1372623 - DNA, 15 bp, Homo sapiens
tgtgataagccccct

SEQ ID NO: 1372624 - DNA, 15 bp, Homo sapiens
ctgtgataagccccc

SEQ ID NO: 1372625 - DNA, 15 bp, Homo sapiens
gctgtgataagcccc

SEQ ID NO: 1372626 - DNA, 15 bp, Homo sapiens
ggctgtgataagccc

SEQ ID NO: 1372627 - DNA, 15 bp, Homo sapiens
gggctgtgataagcc

SEQ ID NO: 1372628 - DNA, 15 bp, Homo sapiens
agggctgtgataagc

SEQ ID NO: 1372629 - DNA, 15 bp, Homo sapiens
tagggctgtgataag

SEQ ID NO: 1372630 - DNA, 15 bp, Homo sapiens
gtagggctgtgataa

SEQ ID NO: 1372631 - DNA, 15 bp, Homo sapiens
tgtagggctgtgata

SEQ ID NO: 1372632 - DNA, 15 bp, Homo sapiens
ctgtagggctgtgat

SEQ ID NO: 1372633 - DNA, 15 bp, Homo sapiens
actgtagggctgtga

SEQ ID NO: 1372634 - DNA, 15 bp, Homo sapiens
cactgtagggctgtg

SEQ ID NO: 1372635 - DNA, 15 bp, Homo sapiens
ccactgtagggctgt

SEQ ID NO: 1372636 - DNA, 15 bp, Homo sapiens
accactgtagggctg

SEQ ID NO: 1372637 - DNA, 15 bp, Homo sapiens
caccactgtagggct

SEQ ID NO: 1372638 - DNA, 15 bp, Homo sapiens
gcaccactgtagggc

SEQ ID NO: 1372639 - DNA, 15 bp, Homo sapiens
tgcaccactgtaggg

SEQ ID NO: 1372640 - DNA, 15 bp, Homo sapiens
ctgcaccactgtagg

SEQ ID NO: 1372641 - DNA, 15 bp, Homo sapiens
tctgcaccactgtag

SEQ ID NO: 1372642 - DNA, 15 bp, Homo sapiens
atctgcaccactgta

SEQ ID NO: 1372643 - DNA, 15 bp, Homo sapiens
tatctgcaccactgt

SEQ ID NO: 1372644 - DNA, 15 bp, Homo sapiens
ttatctgcaccactg

SEQ ID NO: 1372645 - DNA, 15 bp, Homo sapiens
cttatctgcaccact

SEQ ID NO: 1372646 - DNA, 15 bp, Homo sapiens
ccttatctgcaccac

SEQ ID NO: 1372647 - DNA, 15 bp, Homo sapiens
accttatctgcacca

SEQ ID NO: 1372648 - DNA, 15 bp, Homo sapiens
gaccttatctgcacc

SEQ ID NO: 1372649 - DNA, 15 bp, Homo sapiens
ggaccttatctgcac

SEQ ID NO: 1372650 - DNA, 15 bp, Homo sapiens
tggaccttatctgca

SEQ ID NO: 1372651 - DNA, 15 bp, Homo sapiens
ctggaccttatctgc

SEQ ID NO: 1372652 - DNA, 15 bp, Homo sapiens
actggaccttatctg

SEQ ID NO: 1372653 - DNA, 15 bp, Homo sapiens
aactggaccttatct

SEQ ID NO: 1372654 - DNA, 15 bp, Homo sapiens
gaactggaccttatc

SEQ ID NO: 1372655 - DNA, 15 bp, Homo sapiens
ggaactggaccttat

SEQ ID NO: 1372656 - DNA, 15 bp, Homo sapiens
tggaactggacctta

SEQ ID NO: 1372657 - DNA, 15 bp, Homo sapiens
atggaactggacctt

SEQ ID NO: 1372658 - DNA, 15 bp, Homo sapiens
aatggaactggacct

SEQ ID NO: 1372659 - DNA, 15 bp, Homo sapiens
aaatggaactggacc

SEQ ID NO: 1372660 - DNA, 15 bp, Homo sapiens
aaaatggaactggac

SEQ ID NO: 1372661 - DNA, 15 bp, Homo sapiens
aaaaatggaactgga

SEQ ID NO: 1372662 - DNA, 15 bp, Homo sapiens
aaaaaatggaactgg

SEQ ID NO: 1372663 - DNA, 15 bp, Homo sapiens
caaaaaatggaactg

SEQ ID NO: 1372664 - DNA, 15 bp, Homo sapiens
acaaaaaatggaact

SEQ ID NO: 1372665 - DNA, 15 bp, Homo sapiens
gacaaaaaatggaac

SEQ ID NO: 1372666 - DNA, 15 bp, Homo sapiens
agacaaaaaatggaa

SEQ ID NO: 1372667 - DNA, 15 bp, Homo sapiens
gagacaaaaaatgga

SEQ ID NO: 1372668 - DNA, 15 bp, Homo sapiens
agagacaaaaaatgg

SEQ ID NO: 1372669 - DNA, 15 bp, Homo sapiens
cagagacaaaaaatg

SEQ ID NO: 1372670 - DNA, 15 bp, Homo sapiens
ccagagacaaaaaat

SEQ ID NO: 1372671 - DNA, 15 bp, Homo sapiens
cccagagacaaaaaa

SEQ ID NO: 1372672 - DNA, 15 bp, Homo sapiens
acccagagacaaaaa

SEQ ID NO: 1372673 - DNA, 15 bp, Homo sapiens
aacccagagacaaaa

SEQ ID NO: 1372674 - DNA, 15 bp, Homo sapiens
aaacccagagacaaa

SEQ ID NO: 1372675 - DNA, 15 bp, Homo sapiens
gaaacccagagacaa

SEQ ID NO: 1372676 - DNA, 15 bp, Homo sapiens
agaaacccagagaca

SEQ ID NO: 1372677 - DNA, 15 bp, Homo sapiens
tagaaacccagagac

SEQ ID NO: 1372678 - DNA, 15 bp, Homo sapiens
tttagaaacccagag

SEQ ID NO: 1372679 - DNA, 15 bp, Homo sapiens
atttagaaacccaga

SEQ ID NO: 1372680 - DNA, 15 bp, Homo sapiens
gatttagaaacccag

SEQ ID NO: 1372681 - DNA, 15 bp, Homo sapiens
ggatttagaaaccca

SEQ ID NO: 1372682 - DNA, 15 bp, Homo sapiens
gggatttagaaaccc

SEQ ID NO: 1372683 - DNA, 15 bp, Homo sapiens
ggggatttagaaacc

SEQ ID NO: 1372684 - DNA, 15 bp, Homo sapiens
aggggatttagaaac

SEQ ID NO: 1372685 - DNA, 15 bp, Homo sapiens
gaggggatttagaaa

SEQ ID NO: 1372686 - DNA, 15 bp, Homo sapiens
agaggggatttagaa

SEQ ID NO: 1372687 - DNA, 15 bp, Homo sapiens
aagaggggatttaga

SEQ ID NO: 1372688 - DNA, 15 bp, Homo sapiens
aaagaggggatttag

SEQ ID NO: 1372689 - DNA, 15 bp, Homo sapiens
caaagaggggattta

SEQ ID NO: 1372690 - DNA, 15 bp, Homo sapiens
acaaagaggggattt

SEQ ID NO: 1372691 - DNA, 15 bp, Homo sapiens
aacaaagaggggatt

SEQ ID NO: 1372692 - DNA, 15 bp, Homo sapiens
caacaaagaggggat

SEQ ID NO: 1372693 - DNA, 15 bp, Homo sapiens
tcaacaaagagggga

SEQ ID NO: 1372694 - DNA, 15 bp, Homo sapiens
atcaacaaagagggg

SEQ ID NO: 1372695 - DNA, 15 bp, Homo sapiens
catcaacaaagaggg

SEQ ID NO: 1372696 - DNA, 15 bp, Homo sapiens
acatcaacaaagagg

SEQ ID NO: 1372697 - DNA, 15 bp, Homo sapiens
gacatcaacaaagag

SEQ ID NO: 1372698 - DNA, 15 bp, Homo sapiens
tgacatcaacaaaga

SEQ ID NO: 1372699 - DNA, 15 bp, Homo sapiens
atgacatcaacaaag

SEQ ID NO: 1372700 - DNA, 15 bp, Homo sapiens
aatgacatcaacaaa

SEQ ID NO: 1372701 - DNA, 15 bp, Homo sapiens
caatgacatcaacaa

SEQ ID NO: 1372702 - DNA, 15 bp, Homo sapiens
acaatgacatcaaca

SEQ ID NO: 1372703 - DNA, 15 bp, Homo sapiens
aacaatgacatcaac

SEQ ID NO: 1372704 - DNA, 15 bp, Homo sapiens
gaacaatgacatcaa

SEQ ID NO: 1372705 - DNA, 15 bp, Homo sapiens
agaacaatgacatca

SEQ ID NO: 1372706 - DNA, 15 bp, Homo sapiens
tagaacaatgacatc

SEQ ID NO: 1372707 - DNA, 15 bp, Homo sapiens
ttagaacaatgacat

SEQ ID NO: 1372708 - DNA, 15 bp, Homo sapiens
attagaacaatgaca

SEQ ID NO: 1372709 - DNA, 15 bp, Homo sapiens
cattagaacaatgac

SEQ ID NO: 1372710 - DNA, 15 bp, Homo sapiens
tcattagaacaatga

SEQ ID NO: 1372711 - DNA, 15 bp, Homo sapiens
gtcattagaacaatg

SEQ ID NO: 1372712 - DNA, 15 bp, Homo sapiens
tgtcattagaacaat

SEQ ID NO: 1372713 - DNA, 15 bp, Homo sapiens
gtgtcattagaacaa

SEQ ID NO: 1372714 - DNA, 15 bp, Homo sapiens
tgtgtcattagaaca

SEQ ID NO: 1372715 - DNA, 15 bp, Homo sapiens
ctgtgtcattagaac

SEQ ID NO: 1372716 - DNA, 15 bp, Homo sapiens
cctgtgtcattagaa

SEQ ID NO: 1372717 - DNA, 15 bp, Homo sapiens
ccctgtgtcattaga

SEQ ID NO: 1372718 - DNA, 15 bp, Homo sapiens
gccctgtgtcattag

SEQ ID NO: 1372719 - DNA, 15 bp, Homo sapiens
tgccctgtgtcatta

SEQ ID NO: 1372720 - DNA, 15 bp, Homo sapiens
atgccctgtgtcatt

SEQ ID NO: 1372721 - DNA, 15 bp, Homo sapiens
catgccctgtgtcat

SEQ ID NO: 1372722 - DNA, 15 bp, Homo sapiens
ccatgccctgtgtca

SEQ ID NO: 1372723 - DNA, 15 bp, Homo sapiens
cccatgccctgtgtc

SEQ ID NO: 1372724 - DNA, 15 bp, Homo sapiens
tcccatgccctgtgt

SEQ ID NO: 1372725 - DNA, 15 bp, Homo sapiens
gtcccatgccctgtg

SEQ ID NO: 1372726 - DNA, 15 bp, Homo sapiens
tgtcccatgccctgt

SEQ ID NO: 1372727 - DNA, 15 bp, Homo sapiens
ctgtcccatgccctg

SEQ ID NO: 1372728 - DNA, 15 bp, Homo sapiens
actgtcccatgccct

SEQ ID NO: 1372729 - DNA, 15 bp, Homo sapiens
cactgtcccatgccc

SEQ ID NO: 1372730 - DNA, 15 bp, Homo sapiens
gcactgtcccatgcc

SEQ ID NO: 1372731 - DNA, 15 bp, Homo sapiens
ggcactgtcccatgc

SEQ ID NO: 1372732 - DNA, 15 bp, Homo sapiens
gggcactgtcccatg

SEQ ID NO: 1372733 - DNA, 15 bp, Homo sapiens
ggggcactgtcccat

SEQ ID NO: 1372734 - DNA, 15 bp, Homo sapiens
cggggcactgtccca

SEQ ID NO: 1372735 - DNA, 15 bp, Homo sapiens
ccggggcactgtccc

SEQ ID NO: 1372736 - DNA, 15 bp, Homo sapiens
gccggggcactgtcc

SEQ ID NO: 1372737 - DNA, 15 bp, Homo sapiens
ggccggggcactgtc

SEQ ID NO: 1372738 - DNA, 15 bp, Homo sapiens
gggccggggcactgt

SEQ ID NO: 1372739 - DNA, 15 bp, Homo sapiens
cgggccggggcactg

SEQ ID NO: 1372740 - DNA, 15 bp, Homo sapiens
acgggccggggcact

SEQ ID NO: 1372741 - DNA, 15 bp, Homo sapiens
cacgggccggggcac

SEQ ID NO: 1372742 - DNA, 15 bp, Homo sapiens
gcacgggccggggca

SEQ ID NO: 1372743 - DNA, 15 bp, Homo sapiens
agcacgggccggggc

SEQ ID NO: 1372744 - DNA, 15 bp, Homo sapiens
cagcacgggccgggg

SEQ ID NO: 1372745 - DNA, 15 bp, Homo sapiens
gcagcacgggccggg

SEQ ID NO: 1372746 - DNA, 15 bp, Homo sapiens
ggcagcacgggccgg

SEQ ID NO: 1372747 - DNA, 15 bp, Homo sapiens
tggcagcacgggccg

SEQ ID NO: 1372748 - DNA, 15 bp, Homo sapiens
ttggcagcacgggcc

SEQ ID NO: 1372749 - DNA, 15 bp, Homo sapiens
cttggcagcacgggc

SEQ ID NO: 1372750 - DNA, 15 bp, Homo sapiens
ccttggcagcacggg

SEQ ID NO: 1372751 - DNA, 15 bp, Homo sapiens
tccttggcagcacgg

SEQ ID NO: 1372752 - DNA, 15 bp, Homo sapiens
ctccttggcagcacg

SEQ ID NO: 1372753 - DNA, 15 bp, Homo sapiens
gctccttggcagcac

SEQ ID NO: 1372754 - DNA, 15 bp, Homo sapiens
ggctccttggcagca

SEQ ID NO: 1372755 - DNA, 15 bp, Homo sapiens
cggctccttggcagc

SEQ ID NO: 1372756 - DNA, 15 bp, Homo sapiens
acggctccttggcag

SEQ ID NO: 1372757 - DNA, 15 bp, Homo sapiens
gacggctccttggca

SEQ ID NO: 1372758 - DNA, 15 bp, Homo sapiens
agacggctccttggc

SEQ ID NO: 1372759 - DNA, 15 bp, Homo sapiens
aagacggctccttgg

SEQ ID NO: 1372760 - DNA, 15 bp, Homo sapiens
aaagacggctccttg

SEQ ID NO: 1372761 - DNA, 15 bp, Homo sapiens
taaagacggctcctt

SEQ ID NO: 1372762 - DNA, 15 bp, Homo sapiens
ctaaagacggctcct

SEQ ID NO: 1372763 - DNA, 15 bp, Homo sapiens
cctaaagacggctcc

SEQ ID NO: 1372764 - DNA, 15 bp, Homo sapiens
tcctaaagacggctc

SEQ ID NO: 1372765 - DNA, 15 bp, Homo sapiens
gtcctaaagacggct

SEQ ID NO: 1372766 - DNA, 15 bp, Homo sapiens
tgtcctaaagacggc

SEQ ID NO: 1372767 - DNA, 15 bp, Homo sapiens
ctgtcctaaagacgg

SEQ ID NO: 1372768 - DNA, 15 bp, Homo sapiens
tctgtcctaaagacg

SEQ ID NO: 1372769 - DNA, 15 bp, Homo sapiens
ctctgtcctaaagac

SEQ ID NO: 1372770 - DNA, 15 bp, Homo sapiens
tctctgtcctaaaga

SEQ ID NO: 1372771 - DNA, 15 bp, Homo sapiens
gtctctgtcctaaag

SEQ ID NO: 1372772 - DNA, 15 bp, Homo sapiens
ggtctctgtcctaaa

SEQ ID NO: 1372773 - DNA, 15 bp, Homo sapiens
tggtctctgtcctaa

SEQ ID NO: 1372774 - DNA, 15 bp, Homo sapiens
ctggtctctgtccta

SEQ ID NO: 1372775 - DNA, 15 bp, Homo sapiens
tctggtctctgtcct

SEQ ID NO: 1372776 - DNA, 15 bp, Homo sapiens
ttctggtctctgtcc

SEQ ID NO: 1372777 - DNA, 15 bp, Homo sapiens
tttctggtctctgtc

SEQ ID NO: 1372778 - DNA, 15 bp, Homo sapiens
ctttctggtctctgt

SEQ ID NO: 1372779 - DNA, 15 bp, Homo sapiens
tctttctggtctctg

SEQ ID NO: 1372780 - DNA, 15 bp, Homo sapiens
ttctttctggtctct

SEQ ID NO: 1372781 - DNA, 15 bp, Homo sapiens
tttctttctggtctc

SEQ ID NO: 1372782 - DNA, 15 bp, Homo sapiens
ctttctttctggtct

SEQ ID NO: 1372783 - DNA, 15 bp, Homo sapiens
tctttctttctggtc

SEQ ID NO: 1372784 - DNA, 15 bp, Homo sapiens
ctctttctttctggt

SEQ ID NO: 1372785 - DNA, 15 bp, Homo sapiens
tctctttctttctgg

SEQ ID NO: 1372786 - DNA, 15 bp, Homo sapiens
gtctctttctttctg

SEQ ID NO: 1372787 - DNA, 15 bp, Homo sapiens
ggtctctttctttct

SEQ ID NO: 1372788 - DNA, 15 bp, Homo sapiens
aggtctctttctttc

SEQ ID NO: 1372789 - DNA, 15 bp, Homo sapiens
caggtctctttcttt

SEQ ID NO: 1372790 - DNA, 15 bp, Homo sapiens
acaggtctctttctt

SEQ ID NO: 1372791 - DNA, 15 bp, Homo sapiens
cacaggtctctttct

SEQ ID NO: 1372792 - DNA, 15 bp, Homo sapiens
acacaggtctctttc

SEQ ID NO: 1372793 - DNA, 15 bp, Homo sapiens
cacacaggtctcttt

SEQ ID NO: 1372794 - DNA, 15 bp, Homo sapiens
acacacaggtctctt

SEQ ID NO: 1372795 - DNA, 15 bp, Homo sapiens
cacacacaggtctct

SEQ ID NO: 1372796 - DNA, 15 bp, Homo sapiens
acacacacaggtctc

SEQ ID NO: 1372797 - DNA, 15 bp, Homo sapiens
cacacacacaggtct

SEQ ID NO: 1372798 - DNA, 15 bp, Homo sapiens
ccacacacacaggtc

SEQ ID NO: 1372799 - DNA, 15 bp, Homo sapiens
gccacacacacaggt

SEQ ID NO: 1372800 - DNA, 15 bp, Homo sapiens
agccacacacacagg

SEQ ID NO: 1372801 - DNA, 15 bp, Homo sapiens
cagccacacacacag

SEQ ID NO: 1372802 - DNA, 15 bp, Homo sapiens
ccagccacacacaca

SEQ ID NO: 1372803 - DNA, 15 bp, Homo sapiens
gccagccacacacac

SEQ ID NO: 1372804 - DNA, 15 bp, Homo sapiens
ggccagccacacaca

SEQ ID NO: 1372805 - DNA, 15 bp, Homo sapiens
gggccagccacacac

SEQ ID NO: 1372806 - DNA, 15 bp, Homo sapiens
cgggccagccacaca

SEQ ID NO: 1372807 - DNA, 15 bp, Homo sapiens
gcgggccagccacac

SEQ ID NO: 1372808 - DNA, 15 bp, Homo sapiens
agcgggccagccaca

SEQ ID NO: 1372809 - DNA, 15 bp, Homo sapiens
gagcgggccagccac

SEQ ID NO: 1372810 - DNA, 15 bp, Homo sapiens
agagcgggccagcca

SEQ ID NO: 1372811 - DNA, 15 bp, Homo sapiens
gagagcgggccagcc

SEQ ID NO: 1372812 - DNA, 15 bp, Homo sapiens
ggagagcgggccagc

SEQ ID NO: 1372813 - DNA, 15 bp, Homo sapiens
tggagagcgggccag

SEQ ID NO: 1372814 - DNA, 15 bp, Homo sapiens
gtggagagcgggcca

SEQ ID NO: 1372815 - DNA, 15 bp, Homo sapiens
agtggagagcgggcc

SEQ ID NO: 1372816 - DNA, 15 bp, Homo sapiens
gagtggagagcgggc

SEQ ID NO: 1372817 - DNA, 15 bp, Homo sapiens
tgagtggagagcggg

SEQ ID NO: 1372818 - DNA, 15 bp, Homo sapiens
gtgagtggagagcgg

SEQ ID NO: 1372819 - DNA, 15 bp, Homo sapiens
cgtgagtggagagcg

SEQ ID NO: 1372820 - DNA, 15 bp, Homo sapiens
gcgtgagtggagagc

SEQ ID NO: 1372821 - DNA, 15 bp, Homo sapiens
agcgtgagtggagag

SEQ ID NO: 1372822 - DNA, 15 bp, Homo sapiens
gagcgtgagtggaga

SEQ ID NO: 1372823 - DNA, 15 bp, Homo sapiens
tgagcgtgagtggag

SEQ ID NO: 1372824 - DNA, 15 bp, Homo sapiens
gtgagcgtgagtgga

SEQ ID NO: 1372825 - DNA, 15 bp, Homo sapiens
ggtgagcgtgagtgg

SEQ ID NO: 1372826 - DNA, 15 bp, Homo sapiens
gggtgagcgtgagtg

SEQ ID NO: 1372827 - DNA, 15 bp, Homo sapiens
ggggtgagcgtgagt

SEQ ID NO: 1372828 - DNA, 15 bp, Homo sapiens
gggggtgagcgtgag

SEQ ID NO: 1372829 - DNA, 15 bp, Homo sapiens
tgggggtgagcgtga

SEQ ID NO: 1372830 - DNA, 15 bp, Homo sapiens
gtgggggtgagcgtg

SEQ ID NO: 1372831 - DNA, 15 bp, Homo sapiens
ggtgggggtgagcgt

SEQ ID NO: 1372832 - DNA, 15 bp, Homo sapiens
gggtgggggtgagcg

SEQ ID NO: 1372833 - DNA, 15 bp, Homo sapiens
agggtgggggtgagc

SEQ ID NO: 1372834 - DNA, 15 bp, Homo sapiens
gagggtgggggtgag

SEQ ID NO: 1372835 - DNA, 15 bp, Homo sapiens
ggagggtgggggtga

SEQ ID NO: 1372836 - DNA, 15 bp, Homo sapiens
gggagggtgggggtg

SEQ ID NO: 1372837 - DNA, 15 bp, Homo sapiens
tgggagggtgggggt

SEQ ID NO: 1372838 - DNA, 15 bp, Homo sapiens
ctgggagggtggggg

SEQ ID NO: 1372839 - DNA, 15 bp, Homo sapiens
gctgggagggtgggg

SEQ ID NO: 1372840 - DNA, 15 bp, Homo sapiens
agctgggagggtggg

SEQ ID NO: 1372841 - DNA, 15 bp, Homo sapiens
aagctgggagggtgg

SEQ ID NO: 1372842 - DNA, 15 bp, Homo sapiens
aaagctgggagggtg

SEQ ID NO: 1372843 - DNA, 15 bp, Homo sapiens
aaaagctgggagggt

SEQ ID NO: 1372844 - DNA, 15 bp, Homo sapiens
aaaaagctgggaggg

SEQ ID NO: 1372845 - DNA, 15 bp, Homo sapiens
gaaaaagctgggagg

SEQ ID NO: 1372846 - DNA, 15 bp, Homo sapiens
ggaaaaagctgggag

SEQ ID NO: 1372847 - DNA, 15 bp, Homo sapiens
aggaaaaagctggga

SEQ ID NO: 1372848 - DNA, 15 bp, Homo sapiens
aaggaaaaagctggg

SEQ ID NO: 1372849 - DNA, 15 bp, Homo sapiens
taaggaaaaagctgg

SEQ ID NO: 1372850 - DNA, 15 bp, Homo sapiens
ctaaggaaaaagctg

SEQ ID NO: 1372851 - DNA, 15 bp, Homo sapiens
gctaaggaaaaagct

SEQ ID NO: 1372852 - DNA, 15 bp, Homo sapiens
cgctaaggaaaaagc

SEQ ID NO: 1372853 - DNA, 15 bp, Homo sapiens
acgctaaggaaaaag

SEQ ID NO: 1372854 - DNA, 15 bp, Homo sapiens
cacgctaaggaaaaa

SEQ ID NO: 1372855 - DNA, 15 bp, Homo sapiens
gcacgctaaggaaaa

SEQ ID NO: 1372856 - DNA, 15 bp, Homo sapiens
agcacgctaaggaaa

SEQ ID NO: 1372857 - DNA, 15 bp, Homo sapiens
aagcacgctaaggaa

SEQ ID NO: 1372858 - DNA, 15 bp, Homo sapiens
aaagcacgctaagga

SEQ ID NO: 1372859 - DNA, 15 bp, Homo sapiens
caaagcacgctaagg

SEQ ID NO: 1372860 - DNA, 15 bp, Homo sapiens
acaaagcacgctaag

SEQ ID NO: 1372861 - DNA, 15 bp, Homo sapiens
aacaaagcacgctaa

SEQ ID NO: 1372862 - DNA, 15 bp, Homo sapiens
aaacaaagcacgcta

SEQ ID NO: 1372863 - DNA, 15 bp, Homo sapiens
aaaacaaagcacgct

SEQ ID NO: 1372864 - DNA, 15 bp, Homo sapiens
caaaacaaagcacgc

SEQ ID NO: 1372865 - DNA, 15 bp, Homo sapiens
acaaaacaaagcacg

SEQ ID NO: 1372866 - DNA, 15 bp, Homo sapiens
aacaaaacaaagcac

SEQ ID NO: 1372867 - DNA, 15 bp, Homo sapiens
aaacaaaacaaagca

SEQ ID NO: 1372868 - DNA, 15 bp, Homo sapiens
aaaacaaaacaaagc

SEQ ID NO: 1372869 - DNA, 15 bp, Homo sapiens
gaaaacaaaacaaag

SEQ ID NO: 1372870 - DNA, 15 bp, Homo sapiens
tgaaaacaaaacaaa

SEQ ID NO: 1372871 - DNA, 15 bp, Homo sapiens
atgaaaacaaaacaa

SEQ ID NO: 1372872 - DNA, 15 bp, Homo sapiens
tatgaaaacaaaaca

SEQ ID NO: 1372873 - DNA, 15 bp, Homo sapiens
ttatgaaaacaaaac

SEQ ID NO: 1372874 - DNA, 15 bp, Homo sapiens
gttatgaaaacaaaa

SEQ ID NO: 1372875 - DNA, 15 bp, Homo sapiens
tgttatgaaaacaaa

SEQ ID NO: 1372876 - DNA, 15 bp, Homo sapiens
gtgttatgaaaacaa

SEQ ID NO: 1372877 - DNA, 15 bp, Homo sapiens
tgtgttatgaaaaca

SEQ ID NO: 1372878 - DNA, 15 bp, Homo sapiens
ttgtgttatgaaaac

SEQ ID NO: 1372879 - DNA, 15 bp, Homo sapiens
gttgtgttatgaaaa

SEQ ID NO: 1372880 - DNA, 15 bp, Homo sapiens
tgttgtgttatgaaa

SEQ ID NO: 1372881 - DNA, 15 bp, Homo sapiens
ttgttgtgttatgaa

SEQ ID NO: 1372882 - DNA, 15 bp, Homo sapiens
cttgttgtgttatga

SEQ ID NO: 1372883 - DNA, 15 bp, Homo sapiens
ccttgttgtgttatg

SEQ ID NO: 1372884 - DNA, 15 bp, Homo sapiens
cccttgttgtgttat

SEQ ID NO: 1372885 - DNA, 15 bp, Homo sapiens
gcccttgttgtgtta

SEQ ID NO: 1372886 - DNA, 15 bp, Homo sapiens
ggcccttgttgtgtt

SEQ ID NO: 1372887 - DNA, 15 bp, Homo sapiens
gggcccttgttgtgt

SEQ ID NO: 1372888 - DNA, 15 bp, Homo sapiens
agggcccttgttgtg

SEQ ID NO: 1372889 - DNA, 15 bp, Homo sapiens
cagggcccttgttgt

SEQ ID NO: 1372890 - DNA, 15 bp, Homo sapiens
ccagggcccttgttg

SEQ ID NO: 1372891 - DNA, 15 bp, Homo sapiens
cccagggcccttgtt

SEQ ID NO: 1372892 - DNA, 15 bp, Homo sapiens
ccccagggcccttgt

SEQ ID NO: 1372893 - DNA, 15 bp, Homo sapiens
accccagggcccttg

SEQ ID NO: 1372894 - DNA, 15 bp, Homo sapiens
caccccagggccctt

SEQ ID NO: 1372895 - DNA, 15 bp, Homo sapiens
acaccccagggccct

SEQ ID NO: 1372896 - DNA, 15 bp, Homo sapiens
cacaccccagggccc

SEQ ID NO: 1372897 - DNA, 15 bp, Homo sapiens
acacaccccagggcc

SEQ ID NO: 1372898 - DNA, 15 bp, Homo sapiens
tacacaccccagggc

SEQ ID NO: 1372899 - DNA, 15 bp, Homo sapiens
ttacacaccccaggg

SEQ ID NO: 1372900 - DNA, 15 bp, Homo sapiens
tttacacaccccagg

SEQ ID NO: 1372901 - DNA, 15 bp, Homo sapiens
ttttacacaccccag

SEQ ID NO: 1372902 - DNA, 15 bp, Homo sapiens
cttttacacacccca

SEQ ID NO: 1372903 - DNA, 15 bp, Homo sapiens
gcttttacacacccc

SEQ ID NO: 1372904 - DNA, 15 bp, Homo sapiens
tgcttttacacaccc

SEQ ID NO: 1372905 - DNA, 15 bp, Homo sapiens
atgcttttacacacc

SEQ ID NO: 1372906 - DNA, 15 bp, Homo sapiens
aatgcttttacacac

SEQ ID NO: 1372907 - DNA, 15 bp, Homo sapiens
caatgcttttacaca

SEQ ID NO: 1372908 - DNA, 15 bp, Homo sapiens
acaatgcttttacac

SEQ ID NO: 1372909 - DNA, 15 bp, Homo sapiens
aacaatgcttttaca

SEQ ID NO: 1372910 - DNA, 15 bp, Homo sapiens
caacaatgcttttac

SEQ ID NO: 1372911 - DNA, 15 bp, Homo sapiens
tcaacaatgctttta

SEQ ID NO: 1372912 - DNA, 15 bp, Homo sapiens
ttcaacaatgctttt

SEQ ID NO: 1372913 - DNA, 15 bp, Homo sapiens
gttcaacaatgcttt

SEQ ID NO: 1372914 - DNA, 15 bp, Homo sapiens
tgttcaacaatgctt

SEQ ID NO: 1372915 - DNA, 15 bp, Homo sapiens
gtgttcaacaatgct

SEQ ID NO: 1372916 - DNA, 15 bp, Homo sapiens
agtgttcaacaatgc

SEQ ID NO: 1372917 - DNA, 15 bp, Homo sapiens
aagtgttcaacaatg

SEQ ID NO: 1372918 - DNA, 15 bp, Homo sapiens
caagtgttcaacaat

SEQ ID NO: 1372919 - DNA, 15 bp, Homo sapiens
ccaagtgttcaacaa

SEQ ID NO: 1372920 - DNA, 15 bp, Homo sapiens
accaagtgttcaaca

SEQ ID NO: 1372921 - DNA, 15 bp, Homo sapiens
caccaagtgttcaac

SEQ ID NO: 1372922 - DNA, 15 bp, Homo sapiens
tcaccaagtgttcaa

SEQ ID NO: 1372923 - DNA, 15 bp, Homo sapiens
ctcaccaagtgttca

SEQ ID NO: 1372924 - DNA, 15 bp, Homo sapiens
cctcaccaagtgttc

SEQ ID NO: 1372925 - DNA, 15 bp, Homo sapiens
ccctcaccaagtgtt

SEQ ID NO: 1372926 - DNA, 15 bp, Homo sapiens
gccctcaccaagtgt

SEQ ID NO: 1372927 - DNA, 15 bp, Homo sapiens
tgccctcaccaagtg

SEQ ID NO: 1372928 - DNA, 15 bp, Homo sapiens
ttgccctcaccaagt

SEQ ID NO: 1372929 - DNA, 15 bp, Homo sapiens
gttgccctcaccaag

SEQ ID NO: 1372930 - DNA, 15 bp, Homo sapiens
agttgccctcaccaa

SEQ ID NO: 1372931 - DNA, 15 bp, Homo sapiens
aagttgccctcacca

SEQ ID NO: 1372932 - DNA, 15 bp, Homo sapiens
caagttgccctcacc

SEQ ID NO: 1372933 - DNA, 15 bp, Homo sapiens
acaagttgccctcac

SEQ ID NO: 1372934 - DNA, 15 bp, Homo sapiens
gacaagttgccctca

SEQ ID NO: 1372935 - DNA, 15 bp, Homo sapiens
ggacaagttgccctc

SEQ ID NO: 1372936 - DNA, 15 bp, Homo sapiens
tggacaagttgccct

SEQ ID NO: 1372937 - DNA, 15 bp, Homo sapiens
ttggacaagttgccc

SEQ ID NO: 1372938 - DNA, 15 bp, Homo sapiens
tttggacaagttgcc

SEQ ID NO: 1372939 - DNA, 15 bp, Homo sapiens
gtttggacaagttgc

SEQ ID NO: 1372940 - DNA, 15 bp, Homo sapiens
tgtttggacaagttg

SEQ ID NO: 1372941 - DNA, 15 bp, Homo sapiens
ctgtttggacaagtt

SEQ ID NO: 1372942 - DNA, 15 bp, Homo sapiens
tctgtttggacaagt

SEQ ID NO: 1372943 - DNA, 15 bp, Homo sapiens
ctctgtttggacaag

SEQ ID NO: 1372944 - DNA, 15 bp, Homo sapiens
gctctgtttggacaa

SEQ ID NO: 1372945 - DNA, 15 bp, Homo sapiens
tgctctgtttggaca

SEQ ID NO: 1372946 - DNA, 15 bp, Homo sapiens
ctgctctgtttggac

SEQ ID NO: 1372947 - DNA, 15 bp, Homo sapiens
cctgctctgtttgga

SEQ ID NO: 1372948 - DNA, 15 bp, Homo sapiens
tcctgctctgtttgg

SEQ ID NO: 1372949 - DNA, 15 bp, Homo sapiens
gtcctgctctgtttg

SEQ ID NO: 1372950 - DNA, 15 bp, Homo sapiens
cgtcctgctctgttt

SEQ ID NO: 1372951 - DNA, 15 bp, Homo sapiens
gcgtcctgctctgtt

SEQ ID NO: 1372952 - DNA, 15 bp, Homo sapiens
ggcgtcctgctctgt

SEQ ID NO: 1372953 - DNA, 15 bp, Homo sapiens
tggcgtcctgctctg

SEQ ID NO: 1372954 - DNA, 15 bp, Homo sapiens
ttggcgtcctgctct

SEQ ID NO: 1372955 - DNA, 15 bp, Homo sapiens
tttggcgtcctgctc

SEQ ID NO: 1372956 - DNA, 15 bp, Homo sapiens
ctttggcgtcctgct

SEQ ID NO: 1372957 - DNA, 15 bp, Homo sapiens
gctttggcgtcctgc

SEQ ID NO: 1372958 - DNA, 15 bp, Homo sapiens
tgctttggcgtcctg

SEQ ID NO: 1372959 - DNA, 15 bp, Homo sapiens
ctgctttggcgtcct

SEQ ID NO: 1372960 - DNA, 15 bp, Homo sapiens
tctgctttggcgtcc

SEQ ID NO: 1372961 - DNA, 15 bp, Homo sapiens
ttctgctttggcgtc

SEQ ID NO: 1372962 - DNA, 15 bp, Homo sapiens
attctgctttggcgt

SEQ ID NO: 1372963 - DNA, 15 bp, Homo sapiens
cattctgctttggcg

SEQ ID NO: 1372964 - DNA, 15 bp, Homo sapiens
gcattctgctttggc

SEQ ID NO: 1372965 - DNA, 15 bp, Homo sapiens
agcattctgctttgg

SEQ ID NO: 1372966 - DNA, 15 bp, Homo sapiens
cagcattctgctttg

SEQ ID NO: 1372967 - DNA, 15 bp, Homo sapiens
acagcattctgcttt

SEQ ID NO: 1372968 - DNA, 15 bp, Homo sapiens
cacagcattctgctt

SEQ ID NO: 1372969 - DNA, 15 bp, Homo sapiens
ccacagcattctgct

SEQ ID NO: 1372970 - DNA, 15 bp, Homo sapiens
cccacagcattctgc

SEQ ID NO: 1372971 - DNA, 15 bp, Homo sapiens
gcccacagcattctg

SEQ ID NO: 1372972 - DNA, 15 bp, Homo sapiens
tgcccacagcattct

SEQ ID NO: 1372973 - DNA, 15 bp, Homo sapiens
ctgcccacagcattc

SEQ ID NO: 1372974 - DNA, 15 bp, Homo sapiens
cctgcccacagcatt

SEQ ID NO: 1372975 - DNA, 15 bp, Homo sapiens
acctgcccacagcat

SEQ ID NO: 1372976 - DNA, 15 bp, Homo sapiens
cacctgcccacagca

SEQ ID NO: 1372977 - DNA, 15 bp, Homo sapiens
ccacctgcccacagc

SEQ ID NO: 1372978 - DNA, 15 bp, Homo sapiens
accacctgcccacag

SEQ ID NO: 1372979 - DNA, 15 bp, Homo sapiens
caccacctgcccaca

SEQ ID NO: 1372980 - DNA, 15 bp, Homo sapiens
acaccacctgcccac

SEQ ID NO: 1372981 - DNA, 15 bp, Homo sapiens
cacaccacctgccca

SEQ ID NO: 1372982 - DNA, 15 bp, Homo sapiens
gcacaccacctgccc

SEQ ID NO: 1372983 - DNA, 15 bp, Homo sapiens
ggcacaccacctgcc

SEQ ID NO: 1372984 - DNA, 15 bp, Homo sapiens
gggcacaccacctgc

SEQ ID NO: 1372985 - DNA, 15 bp, Homo sapiens
tgggcacaccacctg

SEQ ID NO: 1372986 - DNA, 15 bp, Homo sapiens
gtgggcacaccacct

SEQ ID NO: 1372987 - DNA, 15 bp, Homo sapiens
tgtgggcacaccacc

SEQ ID NO: 1372988 - DNA, 15 bp, Homo sapiens
ctgtgggcacaccac

SEQ ID NO: 1372989 - DNA, 15 bp, Homo sapiens
tctgtgggcacacca

SEQ ID NO: 1372990 - DNA, 15 bp, Homo sapiens
ctctgtgggcacacc

SEQ ID NO: 1372991 - DNA, 15 bp, Homo sapiens
cctctgtgggcacac

SEQ ID NO: 1372992 - DNA, 15 bp, Homo sapiens
acctctgtgggcaca

SEQ ID NO: 1372993 - DNA, 15 bp, Homo sapiens
aacctctgtgggcac

SEQ ID NO: 1372994 - DNA, 15 bp, Homo sapiens
caacctctgtgggca

SEQ ID NO: 1372995 - DNA, 15 bp, Homo sapiens
ccaacctctgtgggc

SEQ ID NO: 1372996 - DNA, 15 bp, Homo sapiens
accaacctctgtggg

SEQ ID NO: 1372997 - DNA, 15 bp, Homo sapiens
caccaacctctgtgg

SEQ ID NO: 1372998 - DNA, 15 bp, Homo sapiens
ccaccaacctctgtg

SEQ ID NO: 1372999 - DNA, 15 bp, Homo sapiens
cccaccaacctctgt

SEQ ID NO: 1373000 - DNA, 15 bp, Homo sapiens
gcccaccaacctctg

SEQ ID NO: 1373001 - DNA, 15 bp, Homo sapiens
ggcccaccaacctct

SEQ ID NO: 1373002 - DNA, 15 bp, Homo sapiens
cggcccaccaacctc

SEQ ID NO: 1373003 - DNA, 15 bp, Homo sapiens
ccggcccaccaacct

SEQ ID NO: 1373004 - DNA, 15 bp, Homo sapiens
gccggcccaccaacc

SEQ ID NO: 1373005 - DNA, 15 bp, Homo sapiens
cgccggcccaccaac

SEQ ID NO: 1373006 - DNA, 15 bp, Homo sapiens
gcgccggcccaccaa

SEQ ID NO: 1373007 - DNA, 15 bp, Homo sapiens
ggcgccggcccacca

SEQ ID NO: 1373008 - DNA, 15 bp, Homo sapiens
cggcgccggcccacc

SEQ ID NO: 1373009 - DNA, 15 bp, Homo sapiens
ccggcgccggcccac

SEQ ID NO: 1373010 - DNA, 15 bp, Homo sapiens
gccggcgccggccca

SEQ ID NO: 1373011 - DNA, 15 bp, Homo sapiens
ggccggcgccggccc

SEQ ID NO: 1373012 - DNA, 15 bp, Homo sapiens
aggccggcgccggcc

SEQ ID NO: 1373013 - DNA, 15 bp, Homo sapiens
aaggccggcgccggc

SEQ ID NO: 1373014 - DNA, 15 bp, Homo sapiens
caaggccggcgccgg

SEQ ID NO: 1373015 - DNA, 15 bp, Homo sapiens
ccaaggccggcgccg

SEQ ID NO: 1373016 - DNA, 15 bp, Homo sapiens
tccaaggccggcgcc

SEQ ID NO: 1373017 - DNA, 15 bp, Homo sapiens
ttccaaggccggcgc

SEQ ID NO: 1373018 - DNA, 15 bp, Homo sapiens
tttccaaggccggcg

SEQ ID NO: 1373019 - DNA, 15 bp, Homo sapiens
gtttccaaggccggc

SEQ ID NO: 1373020 - DNA, 15 bp, Homo sapiens
tgtttccaaggccgg

SEQ ID NO: 1373021 - DNA, 15 bp, Homo sapiens
gtgtttccaaggccg

SEQ ID NO: 1373022 - DNA, 15 bp, Homo sapiens
ggtgtttccaaggcc

SEQ ID NO: 1373023 - DNA, 15 bp, Homo sapiens
aggtgtttccaaggc

SEQ ID NO: 1373024 - DNA, 15 bp, Homo sapiens
gaggtgtttccaagg

SEQ ID NO: 1373025 - DNA, 15 bp, Homo sapiens
agaggtgtttccaag

SEQ ID NO: 1373026 - DNA, 15 bp, Homo sapiens
gagaggtgtttccaa

SEQ ID NO: 1373027 - DNA, 15 bp, Homo sapiens
tgagaggtgtttcca

SEQ ID NO: 1373028 - DNA, 15 bp, Homo sapiens
ctgagaggtgtttcc

SEQ ID NO: 1373029 - DNA, 15 bp, Homo sapiens
actgagaggtgtttc

SEQ ID NO: 1373030 - DNA, 15 bp, Homo sapiens
cactgagaggtgttt

SEQ ID NO: 1373031 - DNA, 15 bp, Homo sapiens
ccactgagaggtgtt

SEQ ID NO: 1373032 - DNA, 15 bp, Homo sapiens
gccactgagaggtgt

SEQ ID NO: 1373033 - DNA, 15 bp, Homo sapiens
tgccactgagaggtg

SEQ ID NO: 1373034 - DNA, 15 bp, Homo sapiens
atgccactgagaggt

SEQ ID NO: 1373035 - DNA, 15 bp, Homo sapiens
tatgccactgagagg

SEQ ID NO: 1373036 - DNA, 15 bp, Homo sapiens
atatgccactgagag

SEQ ID NO: 1373037 - DNA, 15 bp, Homo sapiens
catatgccactgaga

SEQ ID NO: 1373038 - DNA, 15 bp, Homo sapiens
gcatatgccactgag

SEQ ID NO: 1373039 - DNA, 15 bp, Homo sapiens
ggcatatgccactga

SEQ ID NO: 1373040 - DNA, 15 bp, Homo sapiens
cggcatatgccactg

SEQ ID NO: 1373041 - DNA, 15 bp, Homo sapiens
gcggcatatgccact

SEQ ID NO: 1373042 - DNA, 15 bp, Homo sapiens
cgcggcatatgccac

SEQ ID NO: 1373043 - DNA, 15 bp, Homo sapiens
ccgcggcatatgcca

SEQ ID NO: 1373044 - DNA, 15 bp, Homo sapiens
gccgcggcatatgcc

SEQ ID NO: 1373045 - DNA, 15 bp, Homo sapiens
cgccgcggcatatgc

SEQ ID NO: 1373046 - DNA, 15 bp, Homo sapiens
ccgccgcggcatatg

SEQ ID NO: 1373047 - DNA, 15 bp, Homo sapiens
gccgccgcggcatat

SEQ ID NO: 1373048 - DNA, 15 bp, Homo sapiens
agccgccgcggcata

SEQ ID NO: 1373049 - DNA, 15 bp, Homo sapiens
cagccgccgcggcat

SEQ ID NO: 1373050 - DNA, 15 bp, Homo sapiens
tcagccgccgcggca

SEQ ID NO: 1373051 - DNA, 15 bp, Homo sapiens
ctcagccgccgcggc

SEQ ID NO: 1373052 - DNA, 15 bp, Homo sapiens
actcagccgccgcgg

SEQ ID NO: 1373053 - DNA, 15 bp, Homo sapiens
cactcagccgccgcg

SEQ ID NO: 1373054 - DNA, 15 bp, Homo sapiens
acactcagccgccgc

SEQ ID NO: 1373055 - DNA, 15 bp, Homo sapiens
cacactcagccgccg

SEQ ID NO: 1373056 - DNA, 15 bp, Homo sapiens
tcacactcagccgcc

SEQ ID NO: 1373057 - DNA, 15 bp, Homo sapiens
gtcacactcagccgc

SEQ ID NO: 1373058 - DNA, 15 bp, Homo sapiens
ggtcacactcagccg

SEQ ID NO: 1373059 - DNA, 15 bp, Homo sapiens
aggtcacactcagcc

SEQ ID NO: 1373060 - DNA, 15 bp, Homo sapiens
taggtcacactcagc

SEQ ID NO: 1373061 - DNA, 15 bp, Homo sapiens
ctaggtcacactcag

SEQ ID NO: 1373062 - DNA, 15 bp, Homo sapiens
gctaggtcacactca

SEQ ID NO: 1373063 - DNA, 15 bp, Homo sapiens
cgctaggtcacactc

SEQ ID NO: 1373064 - DNA, 15 bp, Homo sapiens
gcgctaggtcacact

SEQ ID NO: 1373065 - DNA, 15 bp, Homo sapiens
tgcgctaggtcacac

SEQ ID NO: 1373066 - DNA, 15 bp, Homo sapiens
ctgcgctaggtcaca

SEQ ID NO: 1373067 - DNA, 15 bp, Homo sapiens
tctgcgctaggtcac

SEQ ID NO: 1373068 - DNA, 15 bp, Homo sapiens
ttctgcgctaggtca

SEQ ID NO: 1373069 - DNA, 15 bp, Homo sapiens
gttctgcgctaggtc

SEQ ID NO: 1373070 - DNA, 15 bp, Homo sapiens
tgttctgcgctaggt

SEQ ID NO: 1373071 - DNA, 15 bp, Homo sapiens
ctgttctgcgctagg

SEQ ID NO: 1373072 - DNA, 15 bp, Homo sapiens
cctgttctgcgctag

SEQ ID NO: 1373073 - DNA, 15 bp, Homo sapiens
ccctgttctgcgcta

SEQ ID NO: 1373074 - DNA, 15 bp, Homo sapiens
gccctgttctgcgct

SEQ ID NO: 1373075 - DNA, 15 bp, Homo sapiens
agccctgttctgcgc

SEQ ID NO: 1373076 - DNA, 15 bp, Homo sapiens
aagccctgttctgcg

SEQ ID NO: 1373077 - DNA, 15 bp, Homo sapiens
gaagccctgttctgc

SEQ ID NO: 1373078 - DNA, 15 bp, Homo sapiens
ggaagccctgttctg

SEQ ID NO: 1373079 - DNA, 15 bp, Homo sapiens
gggaagccctgttct

SEQ ID NO: 1373080 - DNA, 15 bp, Homo sapiens
agggaagccctgttc

SEQ ID NO: 1373081 - DNA, 15 bp, Homo sapiens
gagggaagccctgtt

SEQ ID NO: 1373082 - DNA, 15 bp, Homo sapiens
agagggaagccctgt

SEQ ID NO: 1373083 - DNA, 15 bp, Homo sapiens
aagagggaagccctg

SEQ ID NO: 1373084 - DNA, 15 bp, Homo sapiens
caagagggaagccct

SEQ ID NO: 1373085 - DNA, 15 bp, Homo sapiens
acaagagggaagccc

SEQ ID NO: 1373086 - DNA, 15 bp, Homo sapiens
cacaagagggaagcc

SEQ ID NO: 1373087 - DNA, 15 bp, Homo sapiens
acacaagagggaagc

SEQ ID NO: 1373088 - DNA, 15 bp, Homo sapiens
gacacaagagggaag

SEQ ID NO: 1373089 - DNA, 15 bp, Homo sapiens
ggacacaagagggaa

SEQ ID NO: 1373090 - DNA, 15 bp, Homo sapiens
aggacacaagaggga

SEQ ID NO: 1373091 - DNA, 15 bp, Homo sapiens
gaggacacaagaggg

SEQ ID NO: 1373092 - DNA, 15 bp, Homo sapiens
ggaggacacaagagg

SEQ ID NO: 1373093 - DNA, 15 bp, Homo sapiens
cggaggacacaagag

SEQ ID NO: 1373094 - DNA, 15 bp, Homo sapiens
acggaggacacaaga

SEQ ID NO: 1373095 - DNA, 15 bp, Homo sapiens
cacggaggacacaag

SEQ ID NO: 1373096 - DNA, 15 bp, Homo sapiens
ccacggaggacacaa

SEQ ID NO: 1373097 - DNA, 15 bp, Homo sapiens
cccacggaggacaca

SEQ ID NO: 1373098 - DNA, 15 bp, Homo sapiens
ccccacggaggacac

SEQ ID NO: 1373099 - DNA, 15 bp, Homo sapiens
tccccacggaggaca

SEQ ID NO: 1373100 - DNA, 15 bp, Homo sapiens
ctccccacggaggac

SEQ ID NO: 1373101 - DNA, 15 bp, Homo sapiens
actccccacggagga

SEQ ID NO: 1373102 - DNA, 15 bp, Homo sapiens
gactccccacggagg

SEQ ID NO: 1373103 - DNA, 15 bp, Homo sapiens
ggactccccacggag

SEQ ID NO: 1373104 - DNA, 15 bp, Homo sapiens
tggactccccacgga

SEQ ID NO: 1373105 - DNA, 15 bp, Homo sapiens
ctggactccccacgg

SEQ ID NO: 1373106 - DNA, 15 bp, Homo sapiens
cctggactccccacg

SEQ ID NO: 1373107 - DNA, 15 bp, Homo sapiens
tcctggactccccac

SEQ ID NO: 1373108 - DNA, 15 bp, Homo sapiens
ctcctggactcccca

SEQ ID NO: 1373109 - DNA, 15 bp, Homo sapiens
tctcctggactcccc

SEQ ID NO: 1373110 - DNA, 15 bp, Homo sapiens
ctctcctggactccc

SEQ ID NO: 1373111 - DNA, 15 bp, Homo sapiens
cctctcctggactcc

SEQ ID NO: 1373112 - DNA, 15 bp, Homo sapiens
ccctctcctggactc

SEQ ID NO: 1373113 - DNA, 15 bp, Homo sapiens
tccctctcctggact

SEQ ID NO: 1373114 - DNA, 15 bp, Homo sapiens
gtccctctcctggac

SEQ ID NO: 1373115 - DNA, 15 bp, Homo sapiens
agtccctctcctgga

SEQ ID NO: 1373116 - DNA, 15 bp, Homo sapiens
aagtccctctcctgg

SEQ ID NO: 1373117 - DNA, 15 bp, Homo sapiens
caagtccctctcctg

SEQ ID NO: 1373118 - DNA, 15 bp, Homo sapiens
ccaagtccctctcct

SEQ ID NO: 1373119 - DNA, 15 bp, Homo sapiens
accaagtccctctcc

SEQ ID NO: 1373120 - DNA, 15 bp, Homo sapiens
gaccaagtccctctc

SEQ ID NO: 1373121 - DNA, 15 bp, Homo sapiens
ggaccaagtccctct

SEQ ID NO: 1373122 - DNA, 15 bp, Homo sapiens
aggaccaagtccctc

SEQ ID NO: 1373123 - DNA, 15 bp, Homo sapiens
aaggaccaagtccct

SEQ ID NO: 1373124 - DNA, 15 bp, Homo sapiens
gaaggaccaagtccc

SEQ ID NO: 1373125 - DNA, 15 bp, Homo sapiens
agaaggaccaagtcc

SEQ ID NO: 1373126 - DNA, 15 bp, Homo sapiens
cagaaggaccaagtc

SEQ ID NO: 1373127 - DNA, 15 bp, Homo sapiens
ccagaaggaccaagt

SEQ ID NO: 1373128 - DNA, 15 bp, Homo sapiens
gccagaaggaccaag

SEQ ID NO: 1373129 - DNA, 15 bp, Homo sapiens
agccagaaggaccaa

SEQ ID NO: 1373130 - DNA, 15 bp, Homo sapiens
cagccagaaggacca

SEQ ID NO: 1373131 - DNA, 15 bp, Homo sapiens
tcagccagaaggacc

SEQ ID NO: 1373132 - DNA, 15 bp, Homo sapiens
gtcagccagaaggac

SEQ ID NO: 1373133 - DNA, 15 bp, Homo sapiens
agtcagccagaagga

SEQ ID NO: 1373134 - DNA, 15 bp, Homo sapiens
gagtcagccagaagg

SEQ ID NO: 1373135 - DNA, 15 bp, Homo sapiens
ggagtcagccagaag

SEQ ID NO: 1373136 - DNA, 15 bp, Homo sapiens
cggagtcagccagaa

SEQ ID NO: 1373137 - DNA, 15 bp, Homo sapiens
acggagtcagccaga

SEQ ID NO: 1373138 - DNA, 15 bp, Homo sapiens
cacggagtcagccag

SEQ ID NO: 1373139 - DNA, 15 bp, Homo sapiens
gcacggagtcagcca

SEQ ID NO: 1373140 - DNA, 15 bp, Homo sapiens
agcacggagtcagcc

SEQ ID NO: 1373141 - DNA, 15 bp, Homo sapiens
aagcacggagtcagc

SEQ ID NO: 1373142 - DNA, 15 bp, Homo sapiens
caagcacggagtcag

SEQ ID NO: 1373143 - DNA, 15 bp, Homo sapiens
ccaagcacggagtca

SEQ ID NO: 1373144 - DNA, 15 bp, Homo sapiens
tccaagcacggagtc

SEQ ID NO: 1373145 - DNA, 15 bp, Homo sapiens
ttccaagcacggagt

SEQ ID NO: 1373146 - DNA, 15 bp, Homo sapiens
cttccaagcacggag

SEQ ID NO: 1373147 - DNA, 15 bp, Homo sapiens
ccttccaagcacgga

SEQ ID NO: 1373148 - DNA, 15 bp, Homo sapiens
accttccaagcacgg

SEQ ID NO: 1373149 - DNA, 15 bp, Homo sapiens
caccttccaagcacg

SEQ ID NO: 1373150 - DNA, 15 bp, Homo sapiens
acaccttccaagcac

SEQ ID NO: 1373151 - DNA, 15 bp, Homo sapiens
cacaccttccaagca

SEQ ID NO: 1373152 - DNA, 15 bp, Homo sapiens
gcacaccttccaagc

SEQ ID NO: 1373153 - DNA, 15 bp, Homo sapiens
agcacaccttccaag

SEQ ID NO: 1373154 - DNA, 15 bp, Homo sapiens
gagcacaccttccaa

SEQ ID NO: 1373155 - DNA, 15 bp, Homo sapiens
ggagcacaccttcca

SEQ ID NO: 1373156 - DNA, 15 bp, Homo sapiens
gggagcacaccttcc

SEQ ID NO: 1373157 - DNA, 15 bp, Homo sapiens
ggggagcacaccttc

SEQ ID NO: 1373158 - DNA, 15 bp, Homo sapiens
aggggagcacacctt

SEQ ID NO: 1373159 - DNA, 15 bp, Homo sapiens
gaggggagcacacct

SEQ ID NO: 1373160 - DNA, 15 bp, Homo sapiens
agaggggagcacacc

SEQ ID NO: 1373161 - DNA, 15 bp, Homo sapiens
gagaggggagcacac

SEQ ID NO: 1373162 - DNA, 15 bp, Homo sapiens
tgagaggggagcaca

SEQ ID NO: 1373163 - DNA, 15 bp, Homo sapiens
ctgagaggggagcac

SEQ ID NO: 1373164 - DNA, 15 bp, Homo sapiens
cctgagaggggagca

SEQ ID NO: 1373165 - DNA, 15 bp, Homo sapiens
acctgagaggggagc

SEQ ID NO: 1373166 - DNA, 15 bp, Homo sapiens
cacctgagaggggag

SEQ ID NO: 1373167 - DNA, 15 bp, Homo sapiens
ccacctgagagggga

SEQ ID NO: 1373168 - DNA, 15 bp, Homo sapiens
cccacctgagagggg

SEQ ID NO: 1373169 - DNA, 15 bp, Homo sapiens
acccacctgagaggg

SEQ ID NO: 1373170 - DNA, 15 bp, Homo sapiens
aacccacctgagagg

SEQ ID NO: 1373171 - DNA, 15 bp, Homo sapiens
gaacccacctgagag

SEQ ID NO: 1373172 - DNA, 15 bp, Homo sapiens
tgaacccacctgaga

SEQ ID NO: 1373173 - DNA, 15 bp, Homo sapiens
gtgaacccacctgag

SEQ ID NO: 1373174 - DNA, 15 bp, Homo sapiens
tgtgaacccacctga

SEQ ID NO: 1373175 - DNA, 15 bp, Homo sapiens
atgtgaacccacctg

SEQ ID NO: 1373176 - DNA, 15 bp, Homo sapiens
catgtgaacccacct

SEQ ID NO: 1373177 - DNA, 15 bp, Homo sapiens
acatgtgaacccacc

SEQ ID NO: 1373178 - DNA, 15 bp, Homo sapiens
cacatgtgaacccac

SEQ ID NO: 1373179 - DNA, 15 bp, Homo sapiens
gcacatgtgaaccca

SEQ ID NO: 1373180 - DNA, 15 bp, Homo sapiens
ggcacatgtgaaccc

SEQ ID NO: 1373181 - DNA, 15 bp, Homo sapiens
aggcacatgtgaacc

SEQ ID NO: 1373182 - DNA, 15 bp, Homo sapiens
gaggcacatgtgaac

SEQ ID NO: 1373183 - DNA, 15 bp, Homo sapiens
ggaggcacatgtgaa

SEQ ID NO: 1373184 - DNA, 15 bp, Homo sapiens
gggaggcacatgtga

SEQ ID NO: 1373185 - DNA, 15 bp, Homo sapiens
agggaggcacatgtg

SEQ ID NO: 1373186 - DNA, 15 bp, Homo sapiens
gagggaggcacatgt

SEQ ID NO: 1373187 - DNA, 15 bp, Homo sapiens
agagggaggcacatg

SEQ ID NO: 1373188 - DNA, 15 bp, Homo sapiens
cagagggaggcacat

SEQ ID NO: 1373189 - DNA, 15 bp, Homo sapiens
gcagagggaggcaca

SEQ ID NO: 1373190 - DNA, 15 bp, Homo sapiens
ggcagagggaggcac

SEQ ID NO: 1373191 - DNA, 15 bp, Homo sapiens
cggcagagggaggca

SEQ ID NO: 1373192 - DNA, 15 bp, Homo sapiens
ccggcagagggaggc

SEQ ID NO: 1373193 - DNA, 15 bp, Homo sapiens
cccggcagagggagg

SEQ ID NO: 1373194 - DNA, 15 bp, Homo sapiens
acccggcagagggag

SEQ ID NO: 1373195 - DNA, 15 bp, Homo sapiens
cacccggcagaggga

SEQ ID NO: 1373196 - DNA, 15 bp, Homo sapiens
acacccggcagaggg

SEQ ID NO: 1373197 - DNA, 15 bp, Homo sapiens
cacacccggcagagg

SEQ ID NO: 1373198 - DNA, 15 bp, Homo sapiens
tcacacccggcagag

SEQ ID NO: 1373199 - DNA, 15 bp, Homo sapiens
ttcacacccggcaga

SEQ ID NO: 1373200 - DNA, 15 bp, Homo sapiens
cttcacacccggcag

SEQ ID NO: 1373201 - DNA, 15 bp, Homo sapiens
gcttcacacccggca

SEQ ID NO: 1373202 - DNA, 15 bp, Homo sapiens
agcttcacacccggc

SEQ ID NO: 1373203 - DNA, 15 bp, Homo sapiens
tagcttcacacccgg

SEQ ID NO: 1373204 - DNA, 15 bp, Homo sapiens
ctagcttcacacccg

SEQ ID NO: 1373205 - DNA, 15 bp, Homo sapiens
cctagcttcacaccc

SEQ ID NO: 1373206 - DNA, 15 bp, Homo sapiens
acctagcttcacacc

SEQ ID NO: 1373207 - DNA, 15 bp, Homo sapiens
cacctagcttcacac

SEQ ID NO: 1373208 - DNA, 15 bp, Homo sapiens
ccacctagcttcaca

SEQ ID NO: 1373209 - DNA, 15 bp, Homo sapiens
cccacctagcttcac

SEQ ID NO: 1373210 - DNA, 15 bp, Homo sapiens
gcccacctagcttca

SEQ ID NO: 1373211 - DNA, 15 bp, Homo sapiens
ggcccacctagcttc

SEQ ID NO: 1373212 - DNA, 15 bp, Homo sapiens
gggcccacctagctt

SEQ ID NO: 1373213 - DNA, 15 bp, Homo sapiens
cgggcccacctagct

SEQ ID NO: 1373214 - DNA, 15 bp, Homo sapiens
gcgggcccacctagc

SEQ ID NO: 1373215 - DNA, 15 bp, Homo sapiens
agcgggcccacctag

SEQ ID NO: 1373216 - DNA, 15 bp, Homo sapiens
cagcgggcccaccta

SEQ ID NO: 1373217 - DNA, 15 bp, Homo sapiens
gcagcgggcccacct

SEQ ID NO: 1373218 - DNA, 15 bp, Homo sapiens
agcagcgggcccacc

SEQ ID NO: 1373219 - DNA, 15 bp, Homo sapiens
aagcagcgggcccac

SEQ ID NO: 1373220 - DNA, 15 bp, Homo sapiens
aaagcagcgggccca

SEQ ID NO: 1373221 - DNA, 15 bp, Homo sapiens
caaagcagcgggccc

SEQ ID NO: 1373222 - DNA, 15 bp, Homo sapiens
ccaaagcagcgggcc

SEQ ID NO: 1373223 - DNA, 15 bp, Homo sapiens
tccaaagcagcgggc

SEQ ID NO: 1373224 - DNA, 15 bp, Homo sapiens
ttccaaagcagcggg

SEQ ID NO: 1373225 - DNA, 15 bp, Homo sapiens
cttccaaagcagcgg

SEQ ID NO: 1373226 - DNA, 15 bp, Homo sapiens
tcttccaaagcagcg

SEQ ID NO: 1373227 - DNA, 15 bp, Homo sapiens
ttcttccaaagcagc

SEQ ID NO: 1373228 - DNA, 15 bp, Homo sapiens
cttcttccaaagcag

SEQ ID NO: 1373229 - DNA, 15 bp, Homo sapiens
gcttcttccaaagca

SEQ ID NO: 1373230 - DNA, 15 bp, Homo sapiens
ggcttcttccaaagc

SEQ ID NO: 1373231 - DNA, 15 bp, Homo sapiens
tggcttcttccaaag

SEQ ID NO: 1373232 - DNA, 15 bp, Homo sapiens
ctggcttcttccaaa

SEQ ID NO: 1373233 - DNA, 15 bp, Homo sapiens
actggcttcttccaa

SEQ ID NO: 1373234 - DNA, 15 bp, Homo sapiens
cactggcttcttcca

SEQ ID NO: 1373235 - DNA, 15 bp, Homo sapiens
acactggcttcttcc

SEQ ID NO: 1373236 - DNA, 15 bp, Homo sapiens
cacactggcttcttc

SEQ ID NO: 1373237 - DNA, 15 bp, Homo sapiens
acacactggcttctt

SEQ ID NO: 1373238 - DNA, 15 bp, Homo sapiens
gacacactggcttct

SEQ ID NO: 1373239 - DNA, 15 bp, Homo sapiens
ggacacactggcttc

SEQ ID NO: 1373240 - DNA, 15 bp, Homo sapiens
gggacacactggctt

SEQ ID NO: 1373241 - DNA, 15 bp, Homo sapiens
cagggacacactggc

SEQ ID NO: 1373242 - DNA, 15 bp, Homo sapiens
acagggacacactgg

SEQ ID NO: 1373243 - DNA, 15 bp, Homo sapiens
cacagggacacactg

SEQ ID NO: 1373244 - DNA, 15 bp, Homo sapiens
ccacagggacacact

SEQ ID NO: 1373245 - DNA, 15 bp, Homo sapiens
accacagggacacac

SEQ ID NO: 1373246 - DNA, 15 bp, Homo sapiens
aaccacagggacaca

SEQ ID NO: 1373247 - DNA, 15 bp, Homo sapiens
aaaccacagggacac

SEQ ID NO: 1373248 - DNA, 15 bp, Homo sapiens
caaaccacagggaca

SEQ ID NO: 1373249 - DNA, 15 bp, Homo sapiens
acaaaccacagggac

SEQ ID NO: 1373250 - DNA, 15 bp, Homo sapiens
aacaaaccacaggga

SEQ ID NO: 1373251 - DNA, 15 bp, Homo sapiens
aaacaaaccacaggg

SEQ ID NO: 1373252 - DNA, 15 bp, Homo sapiens
taaacaaaccacagg

SEQ ID NO: 1373253 - DNA, 15 bp, Homo sapiens
ataaacaaaccacag

SEQ ID NO: 1373254 - DNA, 15 bp, Homo sapiens
cataaacaaaccaca

SEQ ID NO: 1373255 - DNA, 15 bp, Homo sapiens
ccataaacaaaccac

SEQ ID NO: 1373256 - DNA, 15 bp, Homo sapiens
tccataaacaaacca

SEQ ID NO: 1373257 - DNA, 15 bp, Homo sapiens
ctccataaacaaacc

SEQ ID NO: 1373258 - DNA, 15 bp, Homo sapiens
gctccataaacaaac

SEQ ID NO: 1373259 - DNA, 15 bp, Homo sapiens
tgctccataaacaaa

SEQ ID NO: 1373260 - DNA, 15 bp, Homo sapiens
ttgctccataaacaa

SEQ ID NO: 1373261 - DNA, 15 bp, Homo sapiens
tttgctccataaaca

SEQ ID NO: 1373262 - DNA, 15 bp, Homo sapiens
atttgctccataaac

SEQ ID NO: 1373263 - DNA, 15 bp, Homo sapiens
tatttgctccataaa

SEQ ID NO: 1373264 - DNA, 15 bp, Homo sapiens
atatttgctccataa

SEQ ID NO: 1373265 - DNA, 15 bp, Homo sapiens
catatttgctccata

SEQ ID NO: 1373266 - DNA, 15 bp, Homo sapiens
acatatttgctccat

SEQ ID NO: 1373267 - DNA, 15 bp, Homo sapiens
tacatatttgctcca

SEQ ID NO: 1373268 - DNA, 15 bp, Homo sapiens
atacatatttgctcc

SEQ ID NO: 1373269 - DNA, 15 bp, Homo sapiens
aatacatatttgctc

SEQ ID NO: 1373270 - DNA, 15 bp, Homo sapiens
caatacatatttgct

SEQ ID NO: 1373271 - DNA, 15 bp, Homo sapiens
tcaatacatatttgc

SEQ ID NO: 1373272 - DNA, 15 bp, Homo sapiens
ggcattgtctgctca

SEQ ID NO: 1373273 - DNA, 15 bp, Homo sapiens
tggcattgtctgctc

SEQ ID NO: 1373274 - DNA, 15 bp, Homo sapiens
atggcattgtctgct

SEQ ID NO: 1373275 - DNA, 15 bp, Homo sapiens
catggcattgtctgc

SEQ ID NO: 1373276 - DNA, 15 bp, Homo sapiens
gcatggcattgtctg

SEQ ID NO: 1373277 - DNA, 15 bp, Homo sapiens
tgcatggcattgtct

SEQ ID NO: 1373278 - DNA, 15 bp, Homo sapiens
ctgcatggcattgtc

SEQ ID NO: 1373279 - DNA, 15 bp, Homo sapiens
cctgcatggcattgt

SEQ ID NO: 1373280 - DNA, 15 bp, Homo sapiens
ccctgcatggcattg

SEQ ID NO: 1373281 - DNA, 15 bp, Homo sapiens
gccctgcatggcatt

SEQ ID NO: 1373282 - DNA, 15 bp, Homo sapiens
agccctgcatggcat

SEQ ID NO: 1373283 - DNA, 15 bp, Homo sapiens
cagccctgcatggca

SEQ ID NO: 1373284 - DNA, 15 bp, Homo sapiens
tcagccctgcatggc

SEQ ID NO: 1373285 - DNA, 15 bp, Homo sapiens
ctcagccctgcatgg

SEQ ID NO: 1373286 - DNA, 15 bp, Homo sapiens
cctcagccctgcatg

SEQ ID NO: 1373287 - DNA, 15 bp, Homo sapiens
ccctcagccctgcat

SEQ ID NO: 1373288 - DNA, 15 bp, Homo sapiens
gccctcagccctgca

SEQ ID NO: 1373289 - DNA, 15 bp, Homo sapiens
agccctcagccctgc

SEQ ID NO: 1373290 - DNA, 15 bp, Homo sapiens
aagccctcagccctg

SEQ ID NO: 1373291 - DNA, 15 bp, Homo sapiens
gaagccctcagccct

SEQ ID NO: 1373292 - DNA, 15 bp, Homo sapiens
agaagccctcagccc

SEQ ID NO: 1373293 - DNA, 15 bp, Homo sapiens
cagaagccctcagcc

SEQ ID NO: 1373294 - DNA, 15 bp, Homo sapiens
acagaagccctcagc

SEQ ID NO: 1373295 - DNA, 15 bp, Homo sapiens
cacagaagccctcag

SEQ ID NO: 1373296 - DNA, 15 bp, Homo sapiens
gcacagaagccctca

SEQ ID NO: 1373297 - DNA, 15 bp, Homo sapiens
ggcacagaagccctc

SEQ ID NO: 1373298 - DNA, 15 bp, Homo sapiens
aggcacagaagccct

SEQ ID NO: 1373299 - DNA, 15 bp, Homo sapiens
caggcacagaagccc

SEQ ID NO: 1373300 - DNA, 15 bp, Homo sapiens
gcaggcacagaagcc

SEQ ID NO: 1373301 - DNA, 15 bp, Homo sapiens
agcaggcacagaagc

SEQ ID NO: 1373302 - DNA, 15 bp, Homo sapiens
tagcaggcacagaag

SEQ ID NO: 1373303 - DNA, 15 bp, Homo sapiens
ttagcaggcacagaa

SEQ ID NO: 1373304 - DNA, 15 bp, Homo sapiens
attagcaggcacaga

SEQ ID NO: 1373305 - DNA, 15 bp, Homo sapiens
tattagcaggcacag

SEQ ID NO: 1373306 - DNA, 15 bp, Homo sapiens
atattagcaggcaca

SEQ ID NO: 1373307 - DNA, 15 bp, Homo sapiens
catattagcaggcac

SEQ ID NO: 1373308 - DNA, 15 bp, Homo sapiens
acatattagcaggca

SEQ ID NO: 1373309 - DNA, 15 bp, Homo sapiens
cacatattagcaggc

SEQ ID NO: 1373310 - DNA, 15 bp, Homo sapiens
tcacatattagcagg

SEQ ID NO: 1373311 - DNA, 15 bp, Homo sapiens
ttcacatattagcag

SEQ ID NO: 1373312 - DNA, 15 bp, Homo sapiens
gttcacatattagca

SEQ ID NO: 1373313 - DNA, 15 bp, Homo sapiens
ggttcacatattagc

SEQ ID NO: 1373314 - DNA, 15 bp, Homo sapiens
gggttcacatattag

SEQ ID NO: 1373315 - DNA, 15 bp, Homo sapiens
ggggttcacatatta

SEQ ID NO: 1373316 - DNA, 15 bp, Homo sapiens
gggggttcacatatt

SEQ ID NO: 1373317 - DNA, 15 bp, Homo sapiens
agggggttcacatat

SEQ ID NO: 1373318 - DNA, 15 bp, Homo sapiens
aagggggttcacata

SEQ ID NO: 1373319 - DNA, 15 bp, Homo sapiens
aaagggggttcacat

SEQ ID NO: 1373320 - DNA, 15 bp, Homo sapiens
gaaagggggttcaca

SEQ ID NO: 1373321 - DNA, 15 bp, Homo sapiens
agaaagggggttcac

SEQ ID NO: 1373322 - DNA, 15 bp, Homo sapiens
cagaaagggggttca

SEQ ID NO: 1373323 - DNA, 15 bp, Homo sapiens
tcagaaagggggttc

SEQ ID NO: 1373324 - DNA, 15 bp, Homo sapiens
ttcagaaagggggtt

SEQ ID NO: 1373325 - DNA, 15 bp, Homo sapiens
ccccaaactggtccc

SEQ ID NO: 1373326 - DNA, 15 bp, Homo sapiens
tccccaaactggtcc

SEQ ID NO: 1373327 - DNA, 15 bp, Homo sapiens
ctccccaaactggtc

SEQ ID NO: 1373328 - DNA, 15 bp, Homo sapiens
gctccccaaactggt

SEQ ID NO: 1373329 - DNA, 15 bp, Homo sapiens
ggctccccaaactgg

SEQ ID NO: 1373330 - DNA, 15 bp, Homo sapiens
tggctccccaaactg

SEQ ID NO: 1373331 - DNA, 15 bp, Homo sapiens
ctggctccccaaact

SEQ ID NO: 1373332 - DNA, 15 bp, Homo sapiens
cctggctccccaaac

SEQ ID NO: 1373333 - DNA, 15 bp, Homo sapiens
ccctggctccccaaa

SEQ ID NO: 1373334 - DNA, 15 bp, Homo sapiens
tccctggctccccaa

SEQ ID NO: 1373335 - DNA, 15 bp, Homo sapiens
ctccctggctcccca

SEQ ID NO: 1373336 - DNA, 15 bp, Homo sapiens
actccctggctcccc

SEQ ID NO: 1373337 - DNA, 15 bp, Homo sapiens
tactccctggctccc

SEQ ID NO: 1373338 - DNA, 15 bp, Homo sapiens
gtactccctggctcc

SEQ ID NO: 1373339 - DNA, 15 bp, Homo sapiens
tgtactccctggctc

SEQ ID NO: 1373340 - DNA, 15 bp, Homo sapiens
atgtactccctggct

SEQ ID NO: 1373341 - DNA, 15 bp, Homo sapiens
aatgtactccctggc

SEQ ID NO: 1373342 - DNA, 15 bp, Homo sapiens
aaatgtactccctgg

SEQ ID NO: 1373343 - DNA, 15 bp, Homo sapiens
aaaatgtactccctg

SEQ ID NO: 1373344 - DNA, 15 bp, Homo sapiens
taaaatgtactccct

SEQ ID NO: 1373345 - DNA, 15 bp, Homo sapiens
ctaaaatgtactccc

SEQ ID NO: 1373346 - DNA, 15 bp, Homo sapiens
actaaaatgtactcc

SEQ ID NO: 1373347 - DNA, 15 bp, Homo sapiens
aactaaaatgtactc

SEQ ID NO: 1373348 - DNA, 15 bp, Homo sapiens
gaactaaaatgtact

SEQ ID NO: 1373349 - DNA, 15 bp, Homo sapiens
agaactaaaatgtac

SEQ ID NO: 1373350 - DNA, 15 bp, Homo sapiens
tagaactaaaatgta

SEQ ID NO: 1373351 - DNA, 15 bp, Homo sapiens
ctagaactaaaatgt

SEQ ID NO: 1373352 - DNA, 15 bp, Homo sapiens
cctagaactaaaatg

SEQ ID NO: 1373353 - DNA, 15 bp, Homo sapiens
tcctagaactaaaat

SEQ ID NO: 1373354 - DNA, 15 bp, Homo sapiens
ttcctagaactaaaa

SEQ ID NO: 1373355 - DNA, 15 bp, Homo sapiens
attcctagaactaaa

SEQ ID NO: 1373356 - DNA, 15 bp, Homo sapiens
aattcctagaactaa

SEQ ID NO: 1373357 - DNA, 15 bp, Homo sapiens
caattcctagaacta

SEQ ID NO: 1373358 - DNA, 15 bp, Homo sapiens
tcaattcctagaact

SEQ ID NO: 1373359 - DNA, 15 bp, Homo sapiens
atcaattcctagaac

SEQ ID NO: 1373360 - DNA, 15 bp, Homo sapiens
aatcaattcctagaa

SEQ ID NO: 1373361 - DNA, 15 bp, Homo sapiens
taatcaattcctaga

SEQ ID NO: 1373362 - DNA, 15 bp, Homo sapiens
ataatcaattcctag

SEQ ID NO: 1373363 - DNA, 15 bp, Homo sapiens
aataatcaattccta

SEQ ID NO: 1373364 - DNA, 15 bp, Homo sapiens
aaataatcaattcct

SEQ ID NO: 1373365 - DNA, 15 bp, Homo sapiens
taaataatcaattcc

SEQ ID NO: 1373366 - DNA, 15 bp, Homo sapiens
ttaaataatcaattc

SEQ ID NO: 1373367 - DNA, 15 bp, Homo sapiens
gttaaataatcaatt

SEQ ID NO: 1373368 - DNA, 15 bp, Homo sapiens
tgttaaataatcaat

SEQ ID NO: 1373369 - DNA, 15 bp, Homo sapiens
atgttaaataatcaa

SEQ ID NO: 1373370 - DNA, 15 bp, Homo sapiens
tatgttaaataatca

SEQ ID NO: 1373371 - DNA, 15 bp, Homo sapiens
ttatgttaaataatc

SEQ ID NO: 1373372 - DNA, 15 bp, Homo sapiens
attatgttaaataat

SEQ ID NO: 1373373 - DNA, 15 bp, Homo sapiens
aattatgttaaataa

SEQ ID NO: 1373374 - DNA, 15 bp, Homo sapiens
aaattatgttaaata

SEQ ID NO: 1373375 - DNA, 15 bp, Homo sapiens
caaattatgttaaat

SEQ ID NO: 1373376 - DNA, 15 bp, Homo sapiens
acaaattatgttaaa

SEQ ID NO: 1373377 - DNA, 15 bp, Homo sapiens
tacaaattatgttaa

SEQ ID NO: 1373378 - DNA, 15 bp, Homo sapiens
ttacaaattatgtta

SEQ ID NO: 1373379 - DNA, 15 bp, Homo sapiens
cttacaaattatgtt

SEQ ID NO: 1373380 - DNA, 15 bp, Homo sapiens
ccttacaaattatgt

SEQ ID NO: 1373381 - DNA, 15 bp, Homo sapiens
tccttacaaattatg

SEQ ID NO: 1373382 - DNA, 15 bp, Homo sapiens
gtccttacaaattat

SEQ ID NO: 1373383 - DNA, 15 bp, Homo sapiens
tgtccttacaaatta

SEQ ID NO: 1373384 - DNA, 15 bp, Homo sapiens
gtgtccttacaaatt

SEQ ID NO: 1373385 - DNA, 15 bp, Homo sapiens
tgtgtccttacaaat

SEQ ID NO: 1373386 - DNA, 15 bp, Homo sapiens
ctgtgtccttacaaa

SEQ ID NO: 1373387 - DNA, 15 bp, Homo sapiens
actgtgtccttacaa

SEQ ID NO: 1373388 - DNA, 15 bp, Homo sapiens
gactgtgtccttaca

SEQ ID NO: 1373389 - DNA, 15 bp, Homo sapiens
tgactgtgtccttac

SEQ ID NO: 1373390 - DNA, 15 bp, Homo sapiens
gtgactgtgtcctta

SEQ ID NO: 1373391 - DNA, 15 bp, Homo sapiens
agtgactgtgtcctt

SEQ ID NO: 1373392 - DNA, 15 bp, Homo sapiens
tagtgactgtgtcct

SEQ ID NO: 1373393 - DNA, 15 bp, Homo sapiens
ttagtgactgtgtcc

SEQ ID NO: 1373394 - DNA, 15 bp, Homo sapiens
attagtgactgtgtc

SEQ ID NO: 1373395 - DNA, 15 bp, Homo sapiens
aattagtgactgtgt

SEQ ID NO: 1373396 - DNA, 15 bp, Homo sapiens
taattagtgactgtg

SEQ ID NO: 1373397 - DNA, 15 bp, Homo sapiens
ctaattagtgactgt

SEQ ID NO: 1373398 - DNA, 15 bp, Homo sapiens
actaattagtgactg

SEQ ID NO: 1373399 - DNA, 15 bp, Homo sapiens
cactaattagtgact

SEQ ID NO: 1373400 - DNA, 15 bp, Homo sapiens
acactaattagtgac

SEQ ID NO: 1373401 - DNA, 15 bp, Homo sapiens
aacactaattagtga

SEQ ID NO: 1373402 - DNA, 15 bp, Homo sapiens
gaacactaattagtg

SEQ ID NO: 1373403 - DNA, 15 bp, Homo sapiens
agaacactaattagt

SEQ ID NO: 1373404 - DNA, 15 bp, Homo sapiens
tagaacactaattag

SEQ ID NO: 1373405 - DNA, 15 bp, Homo sapiens
ctagaacactaatta

SEQ ID NO: 1373406 - DNA, 15 bp, Homo sapiens
tctagaacactaatt

SEQ ID NO: 1373407 - DNA, 15 bp, Homo sapiens
gtctagaacactaat

SEQ ID NO: 1373408 - DNA, 15 bp, Homo sapiens
ggtctagaacactaa

SEQ ID NO: 1373409 - DNA, 15 bp, Homo sapiens
tggtctagaacacta

SEQ ID NO: 1373410 - DNA, 15 bp, Homo sapiens
ctggtctagaacact

SEQ ID NO: 1373411 - DNA, 15 bp, Homo sapiens
gctggtctagaacac

SEQ ID NO: 1373412 - DNA, 15 bp, Homo sapiens
tgctggtctagaaca

SEQ ID NO: 1373413 - DNA, 15 bp, Homo sapiens
ctgctggtctagaac

SEQ ID NO: 1373414 - DNA, 15 bp, Homo sapiens
cctgctggtctagaa

SEQ ID NO: 1373415 - DNA, 15 bp, Homo sapiens
tcctgctggtctaga

SEQ ID NO: 1373416 - DNA, 15 bp, Homo sapiens
atcctgctggtctag

SEQ ID NO: 1373417 - DNA, 15 bp, Homo sapiens
gatcctgctggtcta

SEQ ID NO: 1373418 - DNA, 15 bp, Homo sapiens
agatcctgctggtct

SEQ ID NO: 1373419 - DNA, 15 bp, Homo sapiens
cagatcctgctggtc

SEQ ID NO: 1373420 - DNA, 15 bp, Homo sapiens
gcagatcctgctggt

SEQ ID NO: 1373421 - DNA, 15 bp, Homo sapiens
cgcagatcctgctgg

SEQ ID NO: 1373422 - DNA, 15 bp, Homo sapiens
tcgcagatcctgctg

SEQ ID NO: 1373423 - DNA, 15 bp, Homo sapiens
ttcgcagatcctgct

SEQ ID NO: 1373424 - DNA, 15 bp, Homo sapiens
tttcgcagatcctgc

SEQ ID NO: 1373425 - DNA, 15 bp, Homo sapiens
atttcgcagatcctg

SEQ ID NO: 1373426 - DNA, 15 bp, Homo sapiens
tatttcgcagatcct

SEQ ID NO: 1373427 - DNA, 15 bp, Homo sapiens
atatttcgcagatcc

SEQ ID NO: 1373428 - DNA, 15 bp, Homo sapiens
catatttcgcagatc

SEQ ID NO: 1373429 - DNA, 15 bp, Homo sapiens
acatatttcgcagat

SEQ ID NO: 1373430 - DNA, 15 bp, Homo sapiens
tacatatttcgcaga

SEQ ID NO: 1373431 - DNA, 15 bp, Homo sapiens
ctacatatttcgcag

SEQ ID NO: 1373432 - DNA, 15 bp, Homo sapiens
cctacatatttcgca

SEQ ID NO: 1373433 - DNA, 15 bp, Homo sapiens
gcctacatatttcgc

SEQ ID NO: 1373434 - DNA, 15 bp, Homo sapiens
agcctacatatttcg

SEQ ID NO: 1373435 - DNA, 15 bp, Homo sapiens
aagcctacatatttc

SEQ ID NO: 1373436 - DNA, 15 bp, Homo sapiens
caagcctacatattt

SEQ ID NO: 1373437 - DNA, 15 bp, Homo sapiens
ccaagcctacatatt

SEQ ID NO: 1373438 - DNA, 15 bp, Homo sapiens
cccaagcctacatat

SEQ ID NO: 1373439 - DNA, 15 bp, Homo sapiens
tcccaagcctacata

SEQ ID NO: 1373440 - DNA, 15 bp, Homo sapiens
ctcccaagcctacat

SEQ ID NO: 1373441 - DNA, 15 bp, Homo sapiens
tctcccaagcctaca

SEQ ID NO: 1373442 - DNA, 15 bp, Homo sapiens
ctctcccaagcctac

SEQ ID NO: 1373443 - DNA, 15 bp, Homo sapiens
cctctcccaagccta

SEQ ID NO: 1373444 - DNA, 15 bp, Homo sapiens
acctctcccaagcct

SEQ ID NO: 1373445 - DNA, 15 bp, Homo sapiens
cacctctcccaagcc

SEQ ID NO: 1373446 - DNA, 15 bp, Homo sapiens
ccacctctcccaagc

SEQ ID NO: 1373447 - DNA, 15 bp, Homo sapiens
gccacctctcccaag

SEQ ID NO: 1373448 - DNA, 15 bp, Homo sapiens
tgccacctctcccaa

SEQ ID NO: 1373449 - DNA, 15 bp, Homo sapiens
ttgccacctctccca

SEQ ID NO: 1373450 - DNA, 15 bp, Homo sapiens
cttgccacctctccc

SEQ ID NO: 1373451 - DNA, 15 bp, Homo sapiens
ccttgccacctctcc

SEQ ID NO: 1373452 - DNA, 15 bp, Homo sapiens
tccttgccacctctc

SEQ ID NO: 1373453 - DNA, 15 bp, Homo sapiens
ctccttgccacctct

SEQ ID NO: 1373454 - DNA, 15 bp, Homo sapiens
cctccttgccacctc

SEQ ID NO: 1373455 - DNA, 15 bp, Homo sapiens
ccctccttgccacct

SEQ ID NO: 1373456 - DNA, 15 bp, Homo sapiens
gccctccttgccacc

SEQ ID NO: 1373457 - DNA, 15 bp, Homo sapiens
cgccctccttgccac

SEQ ID NO: 1373458 - DNA, 15 bp, Homo sapiens
ccgccctccttgcca

SEQ ID NO: 1373459 - DNA, 15 bp, Homo sapiens
accgccctccttgcc

SEQ ID NO: 1373460 - DNA, 15 bp, Homo sapiens
caccgccctccttgc

SEQ ID NO: 1373461 - DNA, 15 bp, Homo sapiens
tcaccgccctccttg

SEQ ID NO: 1373462 - DNA, 15 bp, Homo sapiens
atcaccgccctcctt

SEQ ID NO: 1373463 - DNA, 15 bp, Homo sapiens
catcaccgccctcct

SEQ ID NO: 1373464 - DNA, 15 bp, Homo sapiens
ccatcaccgccctcc

SEQ ID NO: 1373465 - DNA, 15 bp, Homo sapiens
cccatcaccgccctc

SEQ ID NO: 1373466 - DNA, 15 bp, Homo sapiens
tcccatcaccgccct

SEQ ID NO: 1373467 - DNA, 15 bp, Homo sapiens
ctcccatcaccgccc

SEQ ID NO: 1373468 - DNA, 15 bp, Homo sapiens
cctcccatcaccgcc

SEQ ID NO: 1373469 - DNA, 15 bp, Homo sapiens
tcctcccatcaccgc

SEQ ID NO: 1373470 - DNA, 15 bp, Homo sapiens
ctcctcccatcaccg

SEQ ID NO: 1373471 - DNA, 15 bp, Homo sapiens
tctcctcccatcacc

SEQ ID NO: 1373472 - DNA, 15 bp, Homo sapiens
ttctcctcccatcac

SEQ ID NO: 1373473 - DNA, 15 bp, Homo sapiens
tttctcctcccatca

SEQ ID NO: 1373474 - DNA, 15 bp, Homo sapiens
gtttctcctcccatc

SEQ ID NO: 1373475 - DNA, 15 bp, Homo sapiens
agtttctcctcccat

SEQ ID NO: 1373476 - DNA, 15 bp, Homo sapiens
aagtttctcctccca

SEQ ID NO: 1373477 - DNA, 15 bp, Homo sapiens
gaagtttctcctccc

SEQ ID NO: 1373478 - DNA, 15 bp, Homo sapiens
tgaagtttctcctcc

SEQ ID NO: 1373479 - DNA, 15 bp, Homo sapiens
ctgaagtttctcctc

SEQ ID NO: 1373480 - DNA, 15 bp, Homo sapiens
cctgaagtttctcct

SEQ ID NO: 1373481 - DNA, 15 bp, Homo sapiens
ccctgaagtttctcc

SEQ ID NO: 1373482 - DNA, 15 bp, Homo sapiens
tccctgaagtttctc

SEQ ID NO: 1373483 - DNA, 15 bp, Homo sapiens
ttccctgaagtttct

SEQ ID NO: 1373484 - DNA, 15 bp, Homo sapiens
gttccctgaagtttc

SEQ ID NO: 1373485 - DNA, 15 bp, Homo sapiens
ggttccctgaagttt

SEQ ID NO: 1373486 - DNA, 15 bp, Homo sapiens
tggttccctgaagtt

SEQ ID NO: 1373487 - DNA, 15 bp, Homo sapiens
ttggttccctgaagt

SEQ ID NO: 1373488 - DNA, 15 bp, Homo sapiens
cttggttccctgaag

SEQ ID NO: 1373489 - DNA, 15 bp, Homo sapiens
gcttggttccctgaa

SEQ ID NO: 1373490 - DNA, 15 bp, Homo sapiens
ggcttggttccctga

SEQ ID NO: 1373491 - DNA, 15 bp, Homo sapiens
aggcttggttccctg

SEQ ID NO: 1373492 - DNA, 15 bp, Homo sapiens
caggcttggttccct

SEQ ID NO: 1373493 - DNA, 15 bp, Homo sapiens
ccaggcttggttccc

SEQ ID NO: 1373494 - DNA, 15 bp, Homo sapiens
cccaggcttggttcc

SEQ ID NO: 1373495 - DNA, 15 bp, Homo sapiens
gcccaggcttggttc

SEQ ID NO: 1373496 - DNA, 15 bp, Homo sapiens
tgcccaggcttggtt

SEQ ID NO: 1373497 - DNA, 15 bp, Homo sapiens
ctgcccaggcttggt

SEQ ID NO: 1373498 - DNA, 15 bp, Homo sapiens
tctgcccaggcttgg

SEQ ID NO: 1373499 - DNA, 15 bp, Homo sapiens
gtctgcccaggcttg

SEQ ID NO: 1373500 - DNA, 15 bp, Homo sapiens
tgtctgcccaggctt

SEQ ID NO: 1373501 - DNA, 15 bp, Homo sapiens
ctgtctgcccaggct

SEQ ID NO: 1373502 - DNA, 15 bp, Homo sapiens
actgtctgcccaggc

SEQ ID NO: 1373503 - DNA, 15 bp, Homo sapiens
cactgtctgcccagg

SEQ ID NO: 1373504 - DNA, 15 bp, Homo sapiens
ccactgtctgcccag

SEQ ID NO: 1373505 - DNA, 15 bp, Homo sapiens
tccactgtctgccca

SEQ ID NO: 1373506 - DNA, 15 bp, Homo sapiens
gtccactgtctgccc

SEQ ID NO: 1373507 - DNA, 15 bp, Homo sapiens
cgtccactgtctgcc

SEQ ID NO: 1373508 - DNA, 15 bp, Homo sapiens
ccgtccactgtctgc

SEQ ID NO: 1373509 - DNA, 15 bp, Homo sapiens
tccgtccactgtctg

SEQ ID NO: 1373510 - DNA, 15 bp, Homo sapiens
atccgtccactgtct

SEQ ID NO: 1373511 - DNA, 15 bp, Homo sapiens
catccgtccactgtc

SEQ ID NO: 1373512 - DNA, 15 bp, Homo sapiens
tcatccgtccactgt

SEQ ID NO: 1373513 - DNA, 15 bp, Homo sapiens
gtcatccgtccactg

SEQ ID NO: 1373514 - DNA, 15 bp, Homo sapiens
tgtcatccgtccact

SEQ ID NO: 1373515 - DNA, 15 bp, Homo sapiens
ctgtcatccgtccac

SEQ ID NO: 1373516 - DNA, 15 bp, Homo sapiens
actgtcatccgtcca

SEQ ID NO: 1373517 - DNA, 15 bp, Homo sapiens
cactgtcatccgtcc

SEQ ID NO: 1373518 - DNA, 15 bp, Homo sapiens
tcactgtcatccgtc

SEQ ID NO: 1373519 - DNA, 15 bp, Homo sapiens
atcactgtcatccgt

SEQ ID NO: 1373520 - DNA, 15 bp, Homo sapiens
tatcactgtcatccg

SEQ ID NO: 1373521 - DNA, 15 bp, Homo sapiens
ttatcactgtcatcc

SEQ ID NO: 1373522 - DNA, 15 bp, Homo sapiens
tttatcactgtcatc

SEQ ID NO: 1373523 - DNA, 15 bp, Homo sapiens
ttttatcactgtcat

SEQ ID NO: 1373524 - DNA, 15 bp, Homo sapiens
cttttatcactgtca

SEQ ID NO: 1373525 - DNA, 15 bp, Homo sapiens
tcttttatcactgtc

SEQ ID NO: 1373526 - DNA, 15 bp, Homo sapiens
ctcttttatcactgt

SEQ ID NO: 1373527 - DNA, 15 bp, Homo sapiens
tctcttttatcactg

SEQ ID NO: 1373528 - DNA, 15 bp, Homo sapiens
atctcttttatcact

SEQ ID NO: 1373529 - DNA, 15 bp, Homo sapiens
gatctcttttatcac

SEQ ID NO: 1373530 - DNA, 15 bp, Homo sapiens
ggatctcttttatca

SEQ ID NO: 1373531 - DNA, 15 bp, Homo sapiens
aggatctcttttatc

SEQ ID NO: 1373532 - DNA, 15 bp, Homo sapiens
gaggatctcttttat

SEQ ID NO: 1373533 - DNA, 15 bp, Homo sapiens
agaggatctctttta

SEQ ID NO: 1373534 - DNA, 15 bp, Homo sapiens
gagaggatctctttt

SEQ ID NO: 1373535 - DNA, 15 bp, Homo sapiens
agagaggatctcttt

SEQ ID NO: 1373536 - DNA, 15 bp, Homo sapiens
aagagaggatctctt

SEQ ID NO: 1373537 - DNA, 15 bp, Homo sapiens
caagagaggatctct

SEQ ID NO: 1373538 - DNA, 15 bp, Homo sapiens
ccaagagaggatctc

SEQ ID NO: 1373539 - DNA, 15 bp, Homo sapiens
cccaagagaggatct

SEQ ID NO: 1373540 - DNA, 15 bp, Homo sapiens
ccccaagagaggatc

SEQ ID NO: 1373541 - DNA, 15 bp, Homo sapiens
cccccaagagaggat

SEQ ID NO: 1373542 - DNA, 15 bp, Homo sapiens
gcccccaagagagga

SEQ ID NO: 1373543 - DNA, 15 bp, Homo sapiens
agcccccaagagagg

SEQ ID NO: 1373544 - DNA, 15 bp, Homo sapiens
gagcccccaagagag

SEQ ID NO: 1373545 - DNA, 15 bp, Homo sapiens
tgagcccccaagaga

SEQ ID NO: 1373546 - DNA, 15 bp, Homo sapiens
gtgagcccccaagag

SEQ ID NO: 1373547 - DNA, 15 bp, Homo sapiens
ggtgagcccccaaga

SEQ ID NO: 1373548 - DNA, 15 bp, Homo sapiens
cggtgagcccccaag

SEQ ID NO: 1373549 - DNA, 15 bp, Homo sapiens
acggtgagcccccaa

SEQ ID NO: 1373550 - DNA, 15 bp, Homo sapiens
gacggtgagccccca

SEQ ID NO: 1373551 - DNA, 15 bp, Homo sapiens
agacggtgagccccc

SEQ ID NO: 1373552 - DNA, 15 bp, Homo sapiens
gagacggtgagcccc

SEQ ID NO: 1373553 - DNA, 15 bp, Homo sapiens
agagacggtgagccc

SEQ ID NO: 1373554 - DNA, 15 bp, Homo sapiens
aagagacggtgagcc

SEQ ID NO: 1373555 - DNA, 15 bp, Homo sapiens
caagagacggtgagc

SEQ ID NO: 1373556 - DNA, 15 bp, Homo sapiens
tcaagagacggtgag

SEQ ID NO: 1373557 - DNA, 15 bp, Homo sapiens
ctcaagagacggtga

SEQ ID NO: 1373558 - DNA, 15 bp, Homo sapiens
cctcaagagacggtg

SEQ ID NO: 1373559 - DNA, 15 bp, Homo sapiens
ccctcaagagacggt

SEQ ID NO: 1373560 - DNA, 15 bp, Homo sapiens
accctcaagagacgg

SEQ ID NO: 1373561 - DNA, 15 bp, Homo sapiens
caccctcaagagacg

SEQ ID NO: 1373562 - DNA, 15 bp, Homo sapiens
tcaccctcaagagac

SEQ ID NO: 1373563 - DNA, 15 bp, Homo sapiens
atcaccctcaagaga

SEQ ID NO: 1373564 - DNA, 15 bp, Homo sapiens
catcaccctcaagag

SEQ ID NO: 1373565 - DNA, 15 bp, Homo sapiens
tcatcaccctcaaga

SEQ ID NO: 1373566 - DNA, 15 bp, Homo sapiens
ttcatcaccctcaag

SEQ ID NO: 1373567 - DNA, 15 bp, Homo sapiens
attcatcaccctcaa

SEQ ID NO: 1373568 - DNA, 15 bp, Homo sapiens
tattcatcaccctca

SEQ ID NO: 1373569 - DNA, 15 bp, Homo sapiens
ctattcatcaccctc

SEQ ID NO: 1373570 - DNA, 15 bp, Homo sapiens
actattcatcaccct

SEQ ID NO: 1373571 - DNA, 15 bp, Homo sapiens
tactattcatcaccc

SEQ ID NO: 1373572 - DNA, 15 bp, Homo sapiens
ttactattcatcacc

SEQ ID NO: 1373573 - DNA, 15 bp, Homo sapiens
cttactattcatcac

SEQ ID NO: 1373574 - DNA, 15 bp, Homo sapiens
tcttactattcatca

SEQ ID NO: 1373575 - DNA, 15 bp, Homo sapiens
gtcttactattcatc

SEQ ID NO: 1373576 - DNA, 15 bp, Homo sapiens
tgtcttactattcat

SEQ ID NO: 1373577 - DNA, 15 bp, Homo sapiens
ctgtcttactattca

SEQ ID NO: 1373578 - DNA, 15 bp, Homo sapiens
tctgtcttactattc

SEQ ID NO: 1373579 - DNA, 15 bp, Homo sapiens
ctctgtcttactatt

SEQ ID NO: 1373580 - DNA, 15 bp, Homo sapiens
actctgtcttactat

SEQ ID NO: 1373581 - DNA, 15 bp, Homo sapiens
tactctgtcttacta

SEQ ID NO: 1373582 - DNA, 15 bp, Homo sapiens
ttactctgtcttact

SEQ ID NO: 1373583 - DNA, 15 bp, Homo sapiens
tttactctgtcttac

SEQ ID NO: 1373584 - DNA, 15 bp, Homo sapiens
ttttactctgtctta

SEQ ID NO: 1373585 - DNA, 15 bp, Homo sapiens
tttttactctgtctt

SEQ ID NO: 1373586 - DNA, 15 bp, Homo sapiens
ctttttactctgtct

SEQ ID NO: 1373587 - DNA, 15 bp, Homo sapiens
actttttactctgtc

SEQ ID NO: 1373588 - DNA, 15 bp, Homo sapiens
gactttttactctgt

SEQ ID NO: 1373589 - DNA, 15 bp, Homo sapiens
tgactttttactctg

SEQ ID NO: 1373590 - DNA, 15 bp, Homo sapiens
atgactttttactct

SEQ ID NO: 1373591 - DNA, 15 bp, Homo sapiens
aatgactttttactc

SEQ ID NO: 1373592 - DNA, 15 bp, Homo sapiens
aaatgactttttact

SEQ ID NO: 1373593 - DNA, 15 bp, Homo sapiens
gaaatgactttttac

SEQ ID NO: 1373594 - DNA, 15 bp, Homo sapiens
agaaatgacttttta

SEQ ID NO: 1373595 - DNA, 15 bp, Homo sapiens
cagaaatgacttttt

SEQ ID NO: 1373596 - DNA, 15 bp, Homo sapiens
tcagaaatgactttt

SEQ ID NO: 1373597 - DNA, 15 bp, Homo sapiens
gtcagaaatgacttt

SEQ ID NO: 1373598 - DNA, 15 bp, Homo sapiens
agtcagaaatgactt

SEQ ID NO: 1373599 - DNA, 15 bp, Homo sapiens
gagtcagaaatgact

SEQ ID NO: 1373600 - DNA, 15 bp, Homo sapiens
agagtcagaaatgac

SEQ ID NO: 1373601 - DNA, 15 bp, Homo sapiens
cagagtcagaaatga

SEQ ID NO: 1373602 - DNA, 15 bp, Homo sapiens
tcagagtcagaaatg

SEQ ID NO: 1373603 - DNA, 15 bp, Homo sapiens
ttcagagtcagaaat

SEQ ID NO: 1373604 - DNA, 15 bp, Homo sapiens
tttcagagtcagaaa

SEQ ID NO: 1373605 - DNA, 15 bp, Homo sapiens
atttcagagtcagaa

SEQ ID NO: 1373606 - DNA, 15 bp, Homo sapiens
aatttcagagtcaga

SEQ ID NO: 1373607 - DNA, 15 bp, Homo sapiens
taatttcagagtcag

SEQ ID NO: 1373608 - DNA, 15 bp, Homo sapiens
ttaatttcagagtca

SEQ ID NO: 1373609 - DNA, 15 bp, Homo sapiens
ctttaatttcagagt

SEQ ID NO: 1373610 - DNA, 15 bp, Homo sapiens
tctttaatttcagag

SEQ ID NO: 1373611 - DNA, 15 bp, Homo sapiens
ttctttaatttcaga

SEQ ID NO: 1373612 - DNA, 15 bp, Homo sapiens
tttctttaatttcag

SEQ ID NO: 1373613 - DNA, 15 bp, Homo sapiens
ttttctttaatttca

SEQ ID NO: 1373614 - DNA, 15 bp, Homo sapiens
tttttctttaatttc

SEQ ID NO: 1373615 - DNA, 15 bp, Homo sapiens
ttttttctttaattt

SEQ ID NO: 1373616 - DNA, 15 bp, Homo sapiens
tttttttctttaatt

SEQ ID NO: 1373617 - DNA, 15 bp, Homo sapiens
ttttttttctttaat

SEQ ID NO: 1373618 - DNA, 15 bp, Homo sapiens
ttttttttttcttta

SEQ ID NO: 1373619 - DNA, 15 bp, Homo sapiens
acttttttttttctt

SEQ ID NO: 1373620 - DNA, 15 bp, Homo sapiens
aacttttttttttct

SEQ ID NO: 1373621 - DNA, 15 bp, Homo sapiens
caacttttttttttc

SEQ ID NO: 1373622 - DNA, 15 bp, Homo sapiens
taaaccaactttttt

SEQ ID NO: 1373623 - DNA, 15 bp, Homo sapiens
ctaaaccaacttttt

SEQ ID NO: 1373624 - DNA, 15 bp, Homo sapiens
tctaaaccaactttt

SEQ ID NO: 1373625 - DNA, 15 bp, Homo sapiens
ctctaaaccaacttt

SEQ ID NO: 1373626 - DNA, 15 bp, Homo sapiens
tctctaaaccaactt

SEQ ID NO: 1373627 - DNA, 15 bp, Homo sapiens
atctctaaaccaact

SEQ ID NO: 1373628 - DNA, 15 bp, Homo sapiens
catctctaaaccaac

SEQ ID NO: 1373629 - DNA, 15 bp, Homo sapiens
ccatctctaaaccaa

SEQ ID NO: 1373630 - DNA, 15 bp, Homo sapiens
tccatctctaaacca

SEQ ID NO: 1373631 - DNA, 15 bp, Homo sapiens
gtccatctctaaacc

SEQ ID NO: 1373632 - DNA, 15 bp, Homo sapiens
tgtccatctctaaac

SEQ ID NO: 1373633 - DNA, 15 bp, Homo sapiens
gtgtccatctctaaa

SEQ ID NO: 1373634 - DNA, 15 bp, Homo sapiens
tgtgtccatctctaa

SEQ ID NO: 1373635 - DNA, 15 bp, Homo sapiens
ctgtgtccatctcta

SEQ ID NO: 1373636 - DNA, 15 bp, Homo sapiens
gctgtgtccatctct

SEQ ID NO: 1373637 - DNA, 15 bp, Homo sapiens
tgctgtgtccatctc

SEQ ID NO: 1373638 - DNA, 15 bp, Homo sapiens
ttgctgtgtccatct

SEQ ID NO: 1373639 - DNA, 15 bp, Homo sapiens
tttgctgtgtccatc

SEQ ID NO: 1373640 - DNA, 15 bp, Homo sapiens
ttttgctgtgtccat

SEQ ID NO: 1373641 - DNA, 15 bp, Homo sapiens
gttttgctgtgtcca

SEQ ID NO: 1373642 - DNA, 15 bp, Homo sapiens
ggttttgctgtgtcc

SEQ ID NO: 1373643 - DNA, 15 bp, Homo sapiens
aggttttgctgtgtc

SEQ ID NO: 1373644 - DNA, 15 bp, Homo sapiens
caggttttgctgtgt

SEQ ID NO: 1373645 - DNA, 15 bp, Homo sapiens
tcaggttttgctgtg

SEQ ID NO: 1373646 - DNA, 15 bp, Homo sapiens
gtcaggttttgctgt

SEQ ID NO: 1373647 - DNA, 15 bp, Homo sapiens
agtcaggttttgctg

SEQ ID NO: 1373648 - DNA, 15 bp, Homo sapiens
gagtcaggttttgct

SEQ ID NO: 1373649 - DNA, 15 bp, Homo sapiens
tgagtcaggttttgc

SEQ ID NO: 1373650 - DNA, 15 bp, Homo sapiens
ttgagtcaggttttg

SEQ ID NO: 1373651 - DNA, 15 bp, Homo sapiens
tttgagtcaggtttt

SEQ ID NO: 1373652 - DNA, 15 bp, Homo sapiens
gtttgagtcaggttt

SEQ ID NO: 1373653 - DNA, 15 bp, Homo sapiens
ggtttgagtcaggtt

SEQ ID NO: 1373654 - DNA, 15 bp, Homo sapiens
aggtttgagtcaggt

SEQ ID NO: 1373655 - DNA, 15 bp, Homo sapiens
gaggtttgagtcagg

SEQ ID NO: 1373656 - DNA, 15 bp, Homo sapiens
ggaggtttgagtcag

SEQ ID NO: 1373657 - DNA, 15 bp, Homo sapiens
aggaggtttgagtca

SEQ ID NO: 1373658 - DNA, 15 bp, Homo sapiens
aaggaggtttgagtc

SEQ ID NO: 1373659 - DNA, 15 bp, Homo sapiens
aaaggaggtttgagt

SEQ ID NO: 1373660 - DNA, 15 bp, Homo sapiens
gaaaggaggtttgag

SEQ ID NO: 1373661 - DNA, 15 bp, Homo sapiens
ggaaaggaggtttga

SEQ ID NO: 1373662 - DNA, 15 bp, Homo sapiens
gggaaaggaggtttg

SEQ ID NO: 1373663 - DNA, 15 bp, Homo sapiens
agggaaaggaggttt

SEQ ID NO: 1373664 - DNA, 15 bp, Homo sapiens
aagggaaaggaggtt

SEQ ID NO: 1373665 - DNA, 15 bp, Homo sapiens
aaagggaaaggaggt

SEQ ID NO: 1373666 - DNA, 15 bp, Homo sapiens
aaaagggaaaggagg

SEQ ID NO: 1373667 - DNA, 15 bp, Homo sapiens
caaaagggaaaggag

SEQ ID NO: 1373668 - DNA, 15 bp, Homo sapiens
tcaaaagggaaagga

SEQ ID NO: 1373669 - DNA, 15 bp, Homo sapiens
atcaaaagggaaagg

SEQ ID NO: 1373670 - DNA, 15 bp, Homo sapiens
aatcaaaagggaaag

SEQ ID NO: 1373671 - DNA, 15 bp, Homo sapiens
aaatcaaaagggaaa

SEQ ID NO: 1373672 - DNA, 15 bp, Homo sapiens
aaaatcaaaagggaa

SEQ ID NO: 1373673 - DNA, 15 bp, Homo sapiens
taaaatcaaaaggga

SEQ ID NO: 1373674 - DNA, 15 bp, Homo sapiens
ataaaatcaaaaggg

SEQ ID NO: 1373675 - DNA, 15 bp, Homo sapiens
aataaaatcaaaagg

SEQ ID NO: 1373676 - DNA, 15 bp, Homo sapiens
aaataaaatcaaaag

SEQ ID NO: 1373677 - DNA, 15 bp, Homo sapiens
aaaataaaatcaaaa

SEQ ID NO: 1373678 - DNA, 15 bp, Homo sapiens
caaaataaaatcaaa

SEQ ID NO: 1373679 - DNA, 15 bp, Homo sapiens
acaaaataaaatcaa

SEQ ID NO: 1373680 - DNA, 15 bp, Homo sapiens
aacaaaataaaatca

SEQ ID NO: 1373681 - DNA, 15 bp, Homo sapiens
aaacaaaataaaatc

SEQ ID NO: 1373682 - DNA, 15 bp, Homo sapiens
aaaacaaaataaaat

SEQ ID NO: 1373683 - DNA, 15 bp, Homo sapiens
taaaacaaaataaaa

SEQ ID NO: 1373684 - DNA, 15 bp, Homo sapiens
ataaaacaaaataaa

SEQ ID NO: 1373685 - DNA, 15 bp, Homo sapiens
aataaaacaaaataa

SEQ ID NO: 1373686 - DNA, 15 bp, Homo sapiens
caataaaacaaaata

SEQ ID NO: 1373687 - DNA, 15 bp, Homo sapiens
acaataaaacaaaat

SEQ ID NO: 1373688 - DNA, 15 bp, Homo sapiens
aacaataaaacaaaa

SEQ ID NO: 1373689 - DNA, 15 bp, Homo sapiens
caacaataaaacaaa

SEQ ID NO: 1373690 - DNA, 15 bp, Homo sapiens
gcaacaataaaacaa

SEQ ID NO: 1373691 - DNA, 15 bp, Homo sapiens
tgcaacaataaaaca

SEQ ID NO: 1373692 - DNA, 15 bp, Homo sapiens
ttgcaacaataaaac

SEQ ID NO: 1373693 - DNA, 15 bp, Homo sapiens
tttgcaacaataaaa

SEQ ID NO: 1373694 - DNA, 15 bp, Homo sapiens
atttgcaacaataaa

SEQ ID NO: 1373695 - DNA, 15 bp, Homo sapiens
aatttgcaacaataa

SEQ ID NO: 1373696 - DNA, 15 bp, Homo sapiens
taatttgcaacaata

SEQ ID NO: 1373697 - DNA, 15 bp, Homo sapiens
ttaatttgcaacaat

SEQ ID NO: 1373698 - DNA, 15 bp, Homo sapiens
tttaatttgcaacaa

SEQ ID NO: 1373699 - DNA, 15 bp, Homo sapiens
atttaatttgcaaca

SEQ ID NO: 1373700 - DNA, 15 bp, Homo sapiens
catttaatttgcaac

SEQ ID NO: 1373701 - DNA, 15 bp, Homo sapiens
gcatttaatttgcaa

SEQ ID NO: 1373702 - DNA, 15 bp, Homo sapiens
tgcatttaatttgca

SEQ ID NO: 1373703 - DNA, 15 bp, Homo sapiens
ttgcatttaatttgc

SEQ ID NO: 1373704 - DNA, 15 bp, Homo sapiens
tttgcatttaatttg

SEQ ID NO: 1373705 - DNA, 15 bp, Homo sapiens
ttttgcatttaattt

SEQ ID NO: 1373706 - DNA, 15 bp, Homo sapiens
tttttgcatttaatt

SEQ ID NO: 1373707 - DNA, 15 bp, Homo sapiens
atttttgcatttaat

SEQ ID NO: 1373708 - DNA, 15 bp, Homo sapiens
catttttgcatttaa

SEQ ID NO: 1373709 - DNA, 15 bp, Homo sapiens
acatttttgcattta

SEQ ID NO: 1373710 - DNA, 15 bp, Homo sapiens
tacatttttgcattt

SEQ ID NO: 1373711 - DNA, 15 bp, Homo sapiens
gtacatttttgcatt

SEQ ID NO: 1373712 - DNA, 15 bp, Homo sapiens
ggtacatttttgcat

SEQ ID NO: 1373713 - DNA, 15 bp, Homo sapiens
gggtacatttttgca

SEQ ID NO: 1373714 - DNA, 15 bp, Homo sapiens
agggtacatttttgc

SEQ ID NO: 1373715 - DNA, 15 bp, Homo sapiens
cagggtacatttttg

SEQ ID NO: 1373716 - DNA, 15 bp, Homo sapiens
gcagggtacattttt

SEQ ID NO: 1373717 - DNA, 15 bp, Homo sapiens
agcagggtacatttt

SEQ ID NO: 1373718 - DNA, 15 bp, Homo sapiens
gagcagggtacattt

SEQ ID NO: 1373719 - DNA, 15 bp, Homo sapiens
ggagcagggtacatt

SEQ ID NO: 1373720 - DNA, 15 bp, Homo sapiens
aggagcagggtacat

SEQ ID NO: 1373721 - DNA, 15 bp, Homo sapiens
gaggagcagggtaca

SEQ ID NO: 1373722 - DNA, 15 bp, Homo sapiens
tgaggagcagggtac

SEQ ID NO: 1373723 - DNA, 15 bp, Homo sapiens
ttgaggagcagggta

SEQ ID NO: 1373724 - DNA, 15 bp, Homo sapiens
tttgaggagcagggt

SEQ ID NO: 1373725 - DNA, 15 bp, Homo sapiens
ctttgaggagcaggg

SEQ ID NO: 1373726 - DNA, 15 bp, Homo sapiens
actttgaggagcagg

SEQ ID NO: 1373727 - DNA, 15 bp, Homo sapiens
cactttgaggagcag

SEQ ID NO: 1373728 - DNA, 15 bp, Homo sapiens
ccactttgaggagca

SEQ ID NO: 1373729 - DNA, 15 bp, Homo sapiens
accactttgaggagc

SEQ ID NO: 1373730 - DNA, 15 bp, Homo sapiens
aaccactttgaggag

SEQ ID NO: 1373731 - DNA, 15 bp, Homo sapiens
aaaccactttgagga

SEQ ID NO: 1373732 - DNA, 15 bp, Homo sapiens
aaaaccactttgagg

SEQ ID NO: 1373733 - DNA, 15 bp, Homo sapiens
gaaaaccactttgag

SEQ ID NO: 1373734 - DNA, 15 bp, Homo sapiens
agaaaaccactttga

SEQ ID NO: 1373735 - DNA, 15 bp, Homo sapiens
aagaaaaccactttg

SEQ ID NO: 1373736 - DNA, 15 bp, Homo sapiens
taagaaaaccacttt

SEQ ID NO: 1373737 - DNA, 15 bp, Homo sapiens
gtaagaaaaccactt

SEQ ID NO: 1373738 - DNA, 15 bp, Homo sapiens
agtaagaaaaccact

SEQ ID NO: 1373739 - DNA, 15 bp, Homo sapiens
gagtaagaaaaccac

SEQ ID NO: 1373740 - DNA, 15 bp, Homo sapiens
agagtaagaaaacca

SEQ ID NO: 1373741 - DNA, 15 bp, Homo sapiens
gagagtaagaaaacc

SEQ ID NO: 1373742 - DNA, 15 bp, Homo sapiens
agagagtaagaaaac

SEQ ID NO: 1373743 - DNA, 15 bp, Homo sapiens
cagagagtaagaaaa

SEQ ID NO: 1373744 - DNA, 15 bp, Homo sapiens
ccagagagtaagaaa

SEQ ID NO: 1373745 - DNA, 15 bp, Homo sapiens
tccagagagtaagaa

SEQ ID NO: 1373746 - DNA, 15 bp, Homo sapiens
ttccagagagtaaga

SEQ ID NO: 1373747 - DNA, 15 bp, Homo sapiens
cttccagagagtaag

SEQ ID NO: 1373748 - DNA, 15 bp, Homo sapiens
ccttccagagagtaa

SEQ ID NO: 1373749 - DNA, 15 bp, Homo sapiens
accttccagagagta

SEQ ID NO: 1373750 - DNA, 15 bp, Homo sapiens
taccttccagagagt

SEQ ID NO: 1373751 - DNA, 15 bp, Homo sapiens
ctaccttccagagag

SEQ ID NO: 1373752 - DNA, 15 bp, Homo sapiens
actaccttccagaga

SEQ ID NO: 1373753 - DNA, 15 bp, Homo sapiens
tactaccttccagag

SEQ ID NO: 1373754 - DNA, 15 bp, Homo sapiens
ttactaccttccaga

SEQ ID NO: 1373755 - DNA, 15 bp, Homo sapiens
tttactaccttccag

SEQ ID NO: 1373756 - DNA, 15 bp, Homo sapiens
ttttactaccttcca

SEQ ID NO: 1373757 - DNA, 15 bp, Homo sapiens
tttttactaccttcc

SEQ ID NO: 1373758 - DNA, 15 bp, Homo sapiens
atttttactaccttc

SEQ ID NO: 1373759 - DNA, 15 bp, Homo sapiens
tatttttactacctt

SEQ ID NO: 1373760 - DNA, 15 bp, Homo sapiens
ttatttttactacct

SEQ ID NO: 1373761 - DNA, 15 bp, Homo sapiens
tttatttttactacc

SEQ ID NO: 1373762 - DNA, 15 bp, Homo sapiens
atttatttttactac

SEQ ID NO: 1373763 - DNA, 15 bp, Homo sapiens
catttatttttacta

SEQ ID NO: 1373764 - DNA, 15 bp, Homo sapiens
ccatttatttttact

SEQ ID NO: 1373765 - DNA, 15 bp, Homo sapiens
tccatttatttttac

SEQ ID NO: 1373766 - DNA, 15 bp, Homo sapiens
ttccatttattttta

SEQ ID NO: 1373767 - DNA, 15 bp, Homo sapiens
ggttccatttatttt

SEQ ID NO: 1373768 - DNA, 15 bp, Homo sapiens
tggttccatttattt

SEQ ID NO: 1373769 - DNA, 15 bp, Homo sapiens
ctggttccatttatt

SEQ ID NO: 1373770 - DNA, 15 bp, Homo sapiens
actggttccatttat

SEQ ID NO: 1373771 - DNA, 15 bp, Homo sapiens
cactggttccattta

SEQ ID NO: 1373772 - DNA, 15 bp, Homo sapiens
acactggttccattt

SEQ ID NO: 1373773 - DNA, 15 bp, Homo sapiens
aacactggttccatt

SEQ ID NO: 1373774 - DNA, 15 bp, Homo sapiens
caacactggttccat

SEQ ID NO: 1373775 - DNA, 15 bp, Homo sapiens
acaacactggttcca

SEQ ID NO: 1373776 - DNA, 15 bp, Homo sapiens
aacaacactggttcc

SEQ ID NO: 1373777 - DNA, 15 bp, Homo sapiens
aaacaacactggttc

SEQ ID NO: 1373778 - DNA, 15 bp, Homo sapiens
taaacaacactggtt

SEQ ID NO: 1373779 - DNA, 15 bp, Homo sapiens
ttaaacaacactggt

SEQ ID NO: 1373780 - DNA, 15 bp, Homo sapiens
attaaacaacactgg

SEQ ID NO: 1373781 - DNA, 15 bp, Homo sapiens
tattaaacaacactg

SEQ ID NO: 1373782 - DNA, 15 bp, Homo sapiens
gtattaaacaacact

SEQ ID NO: 1373783 - DNA, 15 bp, Homo sapiens
tcagtattaaacaac

SEQ ID NO: 1373784 - DNA, 15 bp, Homo sapiens
ctcagtattaaacaa

SEQ ID NO: 1373785 - DNA, 15 bp, Homo sapiens
tctcagtattaaaca

SEQ ID NO: 1373786 - DNA, 15 bp, Homo sapiens
ttctcagtattaaac

SEQ ID NO: 1373787 - DNA, 15 bp, Homo sapiens
attctcagtattaaa

SEQ ID NO: 1373788 - DNA, 15 bp, Homo sapiens
gattctcagtattaa

SEQ ID NO: 1373789 - DNA, 15 bp, Homo sapiens
tgattctcagtatta

SEQ ID NO: 1373790 - DNA, 15 bp, Homo sapiens
ctgattctcagtatt

SEQ ID NO: 1373791 - DNA, 15 bp, Homo sapiens
tctgattctcagtat

SEQ ID NO: 1373792 - DNA, 15 bp, Homo sapiens
ctctgattctcagta

SEQ ID NO: 1373793 - DNA, 15 bp, Homo sapiens
actctgattctcagt

SEQ ID NO: 1373794 - DNA, 15 bp, Homo sapiens
gactctgattctcag

SEQ ID NO: 1373795 - DNA, 15 bp, Homo sapiens
ggactctgattctca

SEQ ID NO: 1373796 - DNA, 15 bp, Homo sapiens
tggactctgattctc

SEQ ID NO: 1373797 - DNA, 15 bp, Homo sapiens
ctggactctgattct

SEQ ID NO: 1373798 - DNA, 15 bp, Homo sapiens
gctggactctgattc

SEQ ID NO: 1373799 - DNA, 15 bp, Homo sapiens
ggctggactctgatt

SEQ ID NO: 1373800 - DNA, 15 bp, Homo sapiens
tggctggactctgat

SEQ ID NO: 1373801 - DNA, 15 bp, Homo sapiens
ctggctggactctga

SEQ ID NO: 1373802 - DNA, 15 bp, Homo sapiens
tctggctggactctg

SEQ ID NO: 1373803 - DNA, 15 bp, Homo sapiens
ctctggctggactct

SEQ ID NO: 1373804 - DNA, 15 bp, Homo sapiens
tctctggctggactc

SEQ ID NO: 1373805 - DNA, 15 bp, Homo sapiens
gtctctggctggact

SEQ ID NO: 1373806 - DNA, 15 bp, Homo sapiens
ggtctctggctggac

SEQ ID NO: 1373807 - DNA, 15 bp, Homo sapiens
tggtctctggctgga

SEQ ID NO: 1373808 - DNA, 15 bp, Homo sapiens
atggtctctggctgg

SEQ ID NO: 1373809 - DNA, 15 bp, Homo sapiens
catggtctctggctg

SEQ ID NO: 1373810 - DNA, 15 bp, Homo sapiens
tcatggtctctggct

SEQ ID NO: 1373811 - DNA, 15 bp, Homo sapiens
ttcatggtctctggc

SEQ ID NO: 1373812 - DNA, 15 bp, Homo sapiens
cttcatggtctctgg

SEQ ID NO: 1373813 - DNA, 15 bp, Homo sapiens
ccttcatggtctctg

SEQ ID NO: 1373814 - DNA, 15 bp, Homo sapiens
gccttcatggtctct

SEQ ID NO: 1373815 - DNA, 15 bp, Homo sapiens
tgccttcatggtctc

SEQ ID NO: 1373816 - DNA, 15 bp, Homo sapiens
ctgccttcatggtct

SEQ ID NO: 1373817 - DNA, 15 bp, Homo sapiens
tctgccttcatggtc

SEQ ID NO: 1373818 - DNA, 15 bp, Homo sapiens
ttctgccttcatggt

SEQ ID NO: 1373819 - DNA, 15 bp, Homo sapiens
cttctgccttcatgg

SEQ ID NO: 1373820 - DNA, 15 bp, Homo sapiens
ccttctgccttcatg

SEQ ID NO: 1373821 - DNA, 15 bp, Homo sapiens
cccttctgccttcat

SEQ ID NO: 1373822 - DNA, 15 bp, Homo sapiens
ccccttctgccttca

SEQ ID NO: 1373823 - DNA, 15 bp, Homo sapiens
cccccttctgccttc

SEQ ID NO: 1373824 - DNA, 15 bp, Homo sapiens
gcccccttctgcctt

SEQ ID NO: 1373825 - DNA, 15 bp, Homo sapiens
ggcccccttctgcct

SEQ ID NO: 1373826 - DNA, 15 bp, Homo sapiens
gggcccccttctgcc

SEQ ID NO: 1373827 - DNA, 15 bp, Homo sapiens
tgggcccccttctgc

SEQ ID NO: 1373828 - DNA, 15 bp, Homo sapiens
atgggcccccttctg

SEQ ID NO: 1373829 - DNA, 15 bp, Homo sapiens
catgggcccccttct

SEQ ID NO: 1373830 - DNA, 15 bp, Homo sapiens
ccatgggcccccttc

SEQ ID NO: 1373831 - DNA, 15 bp, Homo sapiens
cccatgggccccctt

SEQ ID NO: 1373832 - DNA, 15 bp, Homo sapiens
ccccatgggccccct

SEQ ID NO: 1373833 - DNA, 15 bp, Homo sapiens
gccccatgggccccc

SEQ ID NO: 1373834 - DNA, 15 bp, Homo sapiens
ggccccatgggcccc

SEQ ID NO: 1373835 - DNA, 15 bp, Homo sapiens
tggccccatgggccc

SEQ ID NO: 1373836 - DNA, 15 bp, Homo sapiens
atggccccatgggcc

SEQ ID NO: 1373837 - DNA, 15 bp, Homo sapiens
gatggccccatgggc

SEQ ID NO: 1373838 - DNA, 15 bp, Homo sapiens
agatggccccatggg

SEQ ID NO: 1373839 - DNA, 15 bp, Homo sapiens
aagatggccccatgg

SEQ ID NO: 1373840 - DNA, 15 bp, Homo sapiens
gaagatggccccatg

SEQ ID NO: 1373841 - DNA, 15 bp, Homo sapiens
ggaagatggccccat

SEQ ID NO: 1373842 - DNA, 15 bp, Homo sapiens
gggaagatggcccca

SEQ ID NO: 1373843 - DNA, 15 bp, Homo sapiens
agggaagatggcccc

SEQ ID NO: 1373844 - DNA, 15 bp, Homo sapiens
aagggaagatggccc

SEQ ID NO: 1373845 - DNA, 15 bp, Homo sapiens
caagggaagatggcc

SEQ ID NO: 1373846 - DNA, 15 bp, Homo sapiens
acaagggaagatggc

SEQ ID NO: 1373847 - DNA, 15 bp, Homo sapiens
gacaagggaagatgg

SEQ ID NO: 1373848 - DNA, 15 bp, Homo sapiens
ggacaagggaagatg

SEQ ID NO: 1373849 - DNA, 15 bp, Homo sapiens
gggacaagggaagat

SEQ ID NO: 1373850 - DNA, 15 bp, Homo sapiens
ggggacaagggaaga

SEQ ID NO: 1373851 - DNA, 15 bp, Homo sapiens
aggggacaagggaag

SEQ ID NO: 1373852 - DNA, 15 bp, Homo sapiens
aaggggacaagggaa

SEQ ID NO: 1373853 - DNA, 15 bp, Homo sapiens
aaaggggacaaggga

SEQ ID NO: 1373854 - DNA, 15 bp, Homo sapiens
taaaggggacaaggg

SEQ ID NO: 1373855 - DNA, 15 bp, Homo sapiens
gtaaaggggacaagg

SEQ ID NO: 1373856 - DNA, 15 bp, Homo sapiens
tgtaaaggggacaag

SEQ ID NO: 1373857 - DNA, 15 bp, Homo sapiens
atgtaaaggggacaa

SEQ ID NO: 1373858 - DNA, 15 bp, Homo sapiens
aatgtaaaggggaca

SEQ ID NO: 1373859 - DNA, 15 bp, Homo sapiens
taatgtaaaggggac

SEQ ID NO: 1373860 - DNA, 15 bp, Homo sapiens
ataatgtaaagggga

SEQ ID NO: 1373861 - DNA, 15 bp, Homo sapiens
aataatgtaaagggg

SEQ ID NO: 1373862 - DNA, 15 bp, Homo sapiens
aaataatgtaaaggg

SEQ ID NO: 1373863 - DNA, 15 bp, Homo sapiens
taaataatgtaaagg

SEQ ID NO: 1373864 - DNA, 15 bp, Homo sapiens
ataaataatgtaaag

SEQ ID NO: 1373865 - DNA, 15 bp, Homo sapiens
cataaataatgtaaa

SEQ ID NO: 1373866 - DNA, 15 bp, Homo sapiens
ccataaataatgtaa

SEQ ID NO: 1373867 - DNA, 15 bp, Homo sapiens
tccataaataatgta

SEQ ID NO: 1373868 - DNA, 15 bp, Homo sapiens
gtccataaataatgt

SEQ ID NO: 1373869 - DNA, 15 bp, Homo sapiens
tgtccataaataatg

SEQ ID NO: 1373870 - DNA, 15 bp, Homo sapiens
ctgtccataaataat

SEQ ID NO: 1373871 - DNA, 15 bp, Homo sapiens
cctgtccataaataa

SEQ ID NO: 1373872 - DNA, 15 bp, Homo sapiens
acctgtccataaata

SEQ ID NO: 1373873 - DNA, 15 bp, Homo sapiens
gacctgtccataaat

SEQ ID NO: 1373874 - DNA, 15 bp, Homo sapiens
tgacctgtccataaa

SEQ ID NO: 1373875 - DNA, 15 bp, Homo sapiens
ttgacctgtccataa

SEQ ID NO: 1373876 - DNA, 15 bp, Homo sapiens
tttgacctgtccata

SEQ ID NO: 1373877 - DNA, 15 bp, Homo sapiens
gtttgacctgtccat

SEQ ID NO: 1373878 - DNA, 15 bp, Homo sapiens
agtttgacctgtcca

SEQ ID NO: 1373879 - DNA, 15 bp, Homo sapiens
cagtttgacctgtcc

SEQ ID NO: 1373880 - DNA, 15 bp, Homo sapiens
tcagtttgacctgtc

SEQ ID NO: 1373881 - DNA, 15 bp, Homo sapiens
ctcagtttgacctgt

SEQ ID NO: 1373882 - DNA, 15 bp, Homo sapiens
tctcagtttgacctg

SEQ ID NO: 1373883 - DNA, 15 bp, Homo sapiens
gtctcagtttgacct

SEQ ID NO: 1373884 - DNA, 15 bp, Homo sapiens
ggtctcagtttgacc

SEQ ID NO: 1373885 - DNA, 15 bp, Homo sapiens
gggtctcagtttgac

SEQ ID NO: 1373886 - DNA, 15 bp, Homo sapiens
agggtctcagtttga

SEQ ID NO: 1373887 - DNA, 15 bp, Homo sapiens
cagggtctcagtttg

SEQ ID NO: 1373888 - DNA, 15 bp, Homo sapiens
tcagggtctcagttt

SEQ ID NO: 1373889 - DNA, 15 bp, Homo sapiens
ctcagggtctcagtt

SEQ ID NO: 1373890 - DNA, 15 bp, Homo sapiens
tctcagggtctcagt

SEQ ID NO: 1373891 - DNA, 15 bp, Homo sapiens
ctctcagggtctcag

SEQ ID NO: 1373892 - DNA, 15 bp, Homo sapiens
cctctcagggtctca

SEQ ID NO: 1373893 - DNA, 15 bp, Homo sapiens
ccctctcagggtctc

SEQ ID NO: 1373894 - DNA, 15 bp, Homo sapiens
gccctctcagggtct

SEQ ID NO: 1373895 - DNA, 15 bp, Homo sapiens
tgccctctcagggtc

SEQ ID NO: 1373896 - DNA, 15 bp, Homo sapiens
ttgccctctcagggt

SEQ ID NO: 1373897 - DNA, 15 bp, Homo sapiens
cttgccctctcaggg

SEQ ID NO: 1373898 - DNA, 15 bp, Homo sapiens
gcttgccctctcagg

SEQ ID NO: 1373899 - DNA, 15 bp, Homo sapiens
ggcttgccctctcag

SEQ ID NO: 1373900 - DNA, 15 bp, Homo sapiens
tggcttgccctctca

SEQ ID NO: 1373901 - DNA, 15 bp, Homo sapiens
gtggcttgccctctc

SEQ ID NO: 1373902 - DNA, 15 bp, Homo sapiens
agtggcttgccctct

SEQ ID NO: 1373903 - DNA, 15 bp, Homo sapiens
aagtggcttgccctc

SEQ ID NO: 1373904 - DNA, 15 bp, Homo sapiens
caagtggcttgccct

SEQ ID NO: 1373905 - DNA, 15 bp, Homo sapiens
ccaagtggcttgccc

SEQ ID NO: 1373906 - DNA, 15 bp, Homo sapiens
gccaagtggcttgcc

SEQ ID NO: 1373907 - DNA, 15 bp, Homo sapiens
ggccaagtggcttgc

SEQ ID NO: 1373908 - DNA, 15 bp, Homo sapiens
tggccaagtggcttg

SEQ ID NO: 1373909 - DNA, 15 bp, Homo sapiens
ttggccaagtggctt

SEQ ID NO: 1373910 - DNA, 15 bp, Homo sapiens
cttggccaagtggct

SEQ ID NO: 1373911 - DNA, 15 bp, Homo sapiens
ccttggccaagtggc

SEQ ID NO: 1373912 - DNA, 15 bp, Homo sapiens
accttggccaagtgg

SEQ ID NO: 1373913 - DNA, 15 bp, Homo sapiens
gaccttggccaagtg

SEQ ID NO: 1373914 - DNA, 15 bp, Homo sapiens
tgaccttggccaagt

SEQ ID NO: 1373915 - DNA, 15 bp, Homo sapiens
gtgaccttggccaag

SEQ ID NO: 1373916 - DNA, 15 bp, Homo sapiens
tgtgaccttggccaa

SEQ ID NO: 1373917 - DNA, 15 bp, Homo sapiens
ctgtgaccttggcca

SEQ ID NO: 1373918 - DNA, 15 bp, Homo sapiens
tctgtgaccttggcc

SEQ ID NO: 1373919 - DNA, 15 bp, Homo sapiens
ctctgtgaccttggc

SEQ ID NO: 1373920 - DNA, 15 bp, Homo sapiens
gctctgtgaccttgg

SEQ ID NO: 1373921 - DNA, 15 bp, Homo sapiens
tgctctgtgaccttg

SEQ ID NO: 1373922 - DNA, 15 bp, Homo sapiens
ctgctctgtgacctt

SEQ ID NO: 1373923 - DNA, 15 bp, Homo sapiens
gctgctctgtgacct

SEQ ID NO: 1373924 - DNA, 15 bp, Homo sapiens
agctgctctgtgacc

SEQ ID NO: 1373925 - DNA, 15 bp, Homo sapiens
aagctgctctgtgac

SEQ ID NO: 1373926 - DNA, 15 bp, Homo sapiens
caagctgctctgtga

SEQ ID NO: 1373927 - DNA, 15 bp, Homo sapiens
gcaagctgctctgtg

SEQ ID NO: 1373928 - DNA, 15 bp, Homo sapiens
agcaagctgctctgt

SEQ ID NO: 1373929 - DNA, 15 bp, Homo sapiens
cagcaagctgctctg

SEQ ID NO: 1373930 - DNA, 15 bp, Homo sapiens
ccagcaagctgctct

SEQ ID NO: 1373931 - DNA, 15 bp, Homo sapiens
gccagcaagctgctc

SEQ ID NO: 1373932 - DNA, 15 bp, Homo sapiens
tgccagcaagctgct

SEQ ID NO: 1373933 - DNA, 15 bp, Homo sapiens
ttgccagcaagctgc

SEQ ID NO: 1373934 - DNA, 15 bp, Homo sapiens
tttgccagcaagctg

SEQ ID NO: 1373935 - DNA, 15 bp, Homo sapiens
ttttgccagcaagct

SEQ ID NO: 1373936 - DNA, 15 bp, Homo sapiens
tttttgccagcaagc

SEQ ID NO: 1373937 - DNA, 15 bp, Homo sapiens
ttttttgccagcaag

SEQ ID NO: 1373938 - DNA, 15 bp, Homo sapiens
cttttttgccagcaa

SEQ ID NO: 1373939 - DNA, 15 bp, Homo sapiens
gcttttttgccagca

SEQ ID NO: 1373940 - DNA, 15 bp, Homo sapiens
ggcttttttgccagc

SEQ ID NO: 1373941 - DNA, 15 bp, Homo sapiens
cggcttttttgccag

SEQ ID NO: 1373942 - DNA, 15 bp, Homo sapiens
acggcttttttgcca

SEQ ID NO: 1373943 - DNA, 15 bp, Homo sapiens
tacggcttttttgcc

SEQ ID NO: 1373944 - DNA, 15 bp, Homo sapiens
atacggcttttttgc

SEQ ID NO: 1373945 - DNA, 15 bp, Homo sapiens
gatacggcttttttg

SEQ ID NO: 1373946 - DNA, 15 bp, Homo sapiens
tgatacggctttttt

SEQ ID NO: 1373947 - DNA, 15 bp, Homo sapiens
gtgatacggcttttt

SEQ ID NO: 1373948 - DNA, 15 bp, Homo sapiens
ggtgatacggctttt

SEQ ID NO: 1373949 - DNA, 15 bp, Homo sapiens
gggtgatacggcttt

SEQ ID NO: 1373950 - DNA, 15 bp, Homo sapiens
ggggtgatacggctt

SEQ ID NO: 1373951 - DNA, 15 bp, Homo sapiens
gggggtgatacggct

SEQ ID NO: 1373952 - DNA, 15 bp, Homo sapiens
ggggggtgatacggc

SEQ ID NO: 1373953 - DNA, 15 bp, Homo sapiens
tggggggtgatacgg

SEQ ID NO: 1373954 - DNA, 15 bp, Homo sapiens
gtggggggtgatacg

SEQ ID NO: 1373955 - DNA, 15 bp, Homo sapiens
agtggggggtgatac

SEQ ID NO: 1373956 - DNA, 15 bp, Homo sapiens
aagtggggggtgata

SEQ ID NO: 1373957 - DNA, 15 bp, Homo sapiens
gaagtggggggtgat

SEQ ID NO: 1373958 - DNA, 15 bp, Homo sapiens
agaagtggggggtga

SEQ ID NO: 1373959 - DNA, 15 bp, Homo sapiens
aagaagtggggggtg

SEQ ID NO: 1373960 - DNA, 15 bp, Homo sapiens
caagaagtggggggt

SEQ ID NO: 1373961 - DNA, 15 bp, Homo sapiens
gcaagaagtgggggg

SEQ ID NO: 1373962 - DNA, 15 bp, Homo sapiens
agcaagaagtggggg

SEQ ID NO: 1373963 - DNA, 15 bp, Homo sapiens
cagcaagaagtgggg

SEQ ID NO: 1373964 - DNA, 15 bp, Homo sapiens
gcagcaagaagtggg

SEQ ID NO: 1373965 - DNA, 15 bp, Homo sapiens
tgcagcaagaagtgg

SEQ ID NO: 1373966 - DNA, 15 bp, Homo sapiens
ctgcagcaagaagtg

SEQ ID NO: 1373967 - DNA, 15 bp, Homo sapiens
cctgcagcaagaagt

SEQ ID NO: 1373968 - DNA, 15 bp, Homo sapiens
ccctgcagcaagaag

SEQ ID NO: 1373969 - DNA, 15 bp, Homo sapiens
cccctgcagcaagaa

SEQ ID NO: 1373970 - DNA, 15 bp, Homo sapiens
tcccctgcagcaaga

SEQ ID NO: 1373971 - DNA, 15 bp, Homo sapiens
ctcccctgcagcaag

SEQ ID NO: 1373972 - DNA, 15 bp, Homo sapiens
actcccctgcagcaa

SEQ ID NO: 1373973 - DNA, 15 bp, Homo sapiens
aactcccctgcagca

SEQ ID NO: 1373974 - DNA, 15 bp, Homo sapiens
caactcccctgcagc

SEQ ID NO: 1373975 - DNA, 15 bp, Homo sapiens
gcaactcccctgcag

SEQ ID NO: 1373976 - DNA, 15 bp, Homo sapiens
tgcaactcccctgca

SEQ ID NO: 1373977 - DNA, 15 bp, Homo sapiens
gtgcaactcccctgc

SEQ ID NO: 1373978 - DNA, 15 bp, Homo sapiens
ggtgcaactcccctg

SEQ ID NO: 1373979 - DNA, 15 bp, Homo sapiens
gggtgcaactcccct

SEQ ID NO: 1373980 - DNA, 15 bp, Homo sapiens
ggggtgcaactcccc

SEQ ID NO: 1373981 - DNA, 15 bp, Homo sapiens
tggggtgcaactccc

SEQ ID NO: 1373982 - DNA, 15 bp, Homo sapiens
atggggtgcaactcc

SEQ ID NO: 1373983 - DNA, 15 bp, Homo sapiens
catggggtgcaactc

SEQ ID NO: 1373984 - DNA, 15 bp, Homo sapiens
gcatggggtgcaact

SEQ ID NO: 1373985 - DNA, 15 bp, Homo sapiens
cgcatggggtgcaac

SEQ ID NO: 1373986 - DNA, 15 bp, Homo sapiens
gcgcatggggtgcaa

SEQ ID NO: 1373987 - DNA, 15 bp, Homo sapiens
tgcgcatggggtgca

SEQ ID NO: 1373988 - DNA, 15 bp, Homo sapiens
ctgcgcatggggtgc

SEQ ID NO: 1373989 - DNA, 15 bp, Homo sapiens
gctgcgcatggggtg

SEQ ID NO: 1373990 - DNA, 15 bp, Homo sapiens
agctgcgcatggggt

SEQ ID NO: 1373991 - DNA, 15 bp, Homo sapiens
gagctgcgcatgggg

SEQ ID NO: 1373992 - DNA, 15 bp, Homo sapiens
agagctgcgcatggg

SEQ ID NO: 1373993 - DNA, 15 bp, Homo sapiens
tagagctgcgcatgg

SEQ ID NO: 1373994 - DNA, 15 bp, Homo sapiens
ttagagctgcgcatg

SEQ ID NO: 1373995 - DNA, 15 bp, Homo sapiens
tttagagctgcgcat

SEQ ID NO: 1373996 - DNA, 15 bp, Homo sapiens
ttttagagctgcgca

SEQ ID NO: 1373997 - DNA, 15 bp, Homo sapiens
cttttagagctgcgc

SEQ ID NO: 1373998 - DNA, 15 bp, Homo sapiens
gcttttagagctgcg

SEQ ID NO: 1373999 - DNA, 15 bp, Homo sapiens
agcttttagagctgc

SEQ ID NO: 1374000 - DNA, 15 bp, Homo sapiens
cagcttttagagctg

SEQ ID NO: 1374001 - DNA, 15 bp, Homo sapiens
ccagcttttagagct

SEQ ID NO: 1374002 - DNA, 15 bp, Homo sapiens
accagcttttagagc

SEQ ID NO: 1374003 - DNA, 15 bp, Homo sapiens
caccagcttttagag

SEQ ID NO: 1374004 - DNA, 15 bp, Homo sapiens
gcaccagcttttaga

SEQ ID NO: 1374005 - DNA, 15 bp, Homo sapiens
tgcaccagcttttag

SEQ ID NO: 1374006 - DNA, 15 bp, Homo sapiens
ctgcaccagctttta

SEQ ID NO: 1374007 - DNA, 15 bp, Homo sapiens
gctgcaccagctttt

SEQ ID NO: 1374008 - DNA, 15 bp, Homo sapiens
tgctgcaccagcttt

SEQ ID NO: 1374009 - DNA, 15 bp, Homo sapiens
atgctgcaccagctt

SEQ ID NO: 1374010 - DNA, 15 bp, Homo sapiens
aatgctgcaccagct

SEQ ID NO: 1374011 - DNA, 15 bp, Homo sapiens
aaatgctgcaccagc

SEQ ID NO: 1374012 - DNA, 15 bp, Homo sapiens
gaaatgctgcaccag

SEQ ID NO: 1374013 - DNA, 15 bp, Homo sapiens
ggaaatgctgcacca

SEQ ID NO: 1374014 - DNA, 15 bp, Homo sapiens
tggaaatgctgcacc

SEQ ID NO: 1374015 - DNA, 15 bp, Homo sapiens
ttggaaatgctgcac

SEQ ID NO: 1374016 - DNA, 15 bp, Homo sapiens
tttggaaatgctgca

SEQ ID NO: 1374017 - DNA, 15 bp, Homo sapiens
ctttggaaatgctgc

SEQ ID NO: 1374018 - DNA, 15 bp, Homo sapiens
actttggaaatgctg

SEQ ID NO: 1374019 - DNA, 15 bp, Homo sapiens
cactttggaaatgct

SEQ ID NO: 1374020 - DNA, 15 bp, Homo sapiens
acactttggaaatgc

SEQ ID NO: 1374021 - DNA, 15 bp, Homo sapiens
cacactttggaaatg

SEQ ID NO: 1374022 - DNA, 15 bp, Homo sapiens
acacactttggaaat

SEQ ID NO: 1374023 - DNA, 15 bp, Homo sapiens
aacacactttggaaa

SEQ ID NO: 1374024 - DNA, 15 bp, Homo sapiens
gaacacactttggaa

SEQ ID NO: 1374025 - DNA, 15 bp, Homo sapiens
agaacacactttgga

SEQ ID NO: 1374026 - DNA, 15 bp, Homo sapiens
cagaacacactttgg

SEQ ID NO: 1374027 - DNA, 15 bp, Homo sapiens
tcagaacacactttg

SEQ ID NO: 1374028 - DNA, 15 bp, Homo sapiens
ttcagaacacacttt

SEQ ID NO: 1374029 - DNA, 15 bp, Homo sapiens
cttcagaacacactt

SEQ ID NO: 1374030 - DNA, 15 bp, Homo sapiens
ccttcagaacacact

SEQ ID NO: 1374031 - DNA, 15 bp, Homo sapiens
tccttcagaacacac

SEQ ID NO: 1374032 - DNA, 15 bp, Homo sapiens
gtccttcagaacaca

SEQ ID NO: 1374033 - DNA, 15 bp, Homo sapiens
tgtccttcagaacac

SEQ ID NO: 1374034 - DNA, 15 bp, Homo sapiens
gtgtccttcagaaca

SEQ ID NO: 1374035 - DNA, 15 bp, Homo sapiens
agtgtccttcagaac

SEQ ID NO: 1374036 - DNA, 15 bp, Homo sapiens
aagtgtccttcagaa

SEQ ID NO: 1374037 - DNA, 15 bp, Homo sapiens
aaagtgtccttcaga

SEQ ID NO: 1374038 - DNA, 15 bp, Homo sapiens
caaagtgtccttcag

SEQ ID NO: 1374039 - DNA, 15 bp, Homo sapiens
ccaaagtgtccttca

SEQ ID NO: 1374040 - DNA, 15 bp, Homo sapiens
tccaaagtgtccttc

SEQ ID NO: 1374041 - DNA, 15 bp, Homo sapiens
ctccaaagtgtcctt

SEQ ID NO: 1374042 - DNA, 15 bp, Homo sapiens
tctccaaagtgtcct

SEQ ID NO: 1374043 - DNA, 15 bp, Homo sapiens
ctctccaaagtgtcc

SEQ ID NO: 1374044 - DNA, 15 bp, Homo sapiens
cctctccaaagtgtc

SEQ ID NO: 1374045 - DNA, 15 bp, Homo sapiens
tcctctccaaagtgt

SEQ ID NO: 1374046 - DNA, 15 bp, Homo sapiens
ttcctctccaaagtg

SEQ ID NO: 1374047 - DNA, 15 bp, Homo sapiens
gttcctctccaaagt

SEQ ID NO: 1374048 - DNA, 15 bp, Homo sapiens
tgttcctctccaaag

SEQ ID NO: 1374049 - DNA, 15 bp, Homo sapiens
ctgttcctctccaaa

SEQ ID NO: 1374050 - DNA, 15 bp, Homo sapiens
actgttcctctccaa

SEQ ID NO: 1374051 - DNA, 15 bp, Homo sapiens
cactgttcctctcca

SEQ ID NO: 1374052 - DNA, 15 bp, Homo sapiens
ccactgttcctctcc

SEQ ID NO: 1374053 - DNA, 15 bp, Homo sapiens
cccactgttcctctc

SEQ ID NO: 1374054 - DNA, 15 bp, Homo sapiens
gcccactgttcctct

SEQ ID NO: 1374055 - DNA, 15 bp, Homo sapiens
agcccactgttcctc

SEQ ID NO: 1374056 - DNA, 15 bp, Homo sapiens
aagcccactgttcct

SEQ ID NO: 1374057 - DNA, 15 bp, Homo sapiens
caagcccactgttcc

SEQ ID NO: 1374058 - DNA, 15 bp, Homo sapiens
ccaagcccactgttc

SEQ ID NO: 1374059 - DNA, 15 bp, Homo sapiens
accaagcccactgtt

SEQ ID NO: 1374060 - DNA, 15 bp, Homo sapiens
caccaagcccactgt

SEQ ID NO: 1374061 - DNA, 15 bp, Homo sapiens
ccaccaagcccactg

SEQ ID NO: 1374062 - DNA, 15 bp, Homo sapiens
gccaccaagcccact

SEQ ID NO: 1374063 - DNA, 15 bp, Homo sapiens
agccaccaagcccac

SEQ ID NO: 1374064 - DNA, 15 bp, Homo sapiens
aagccaccaagccca

SEQ ID NO: 1374065 - DNA, 15 bp, Homo sapiens
aaagccaccaagccc

SEQ ID NO: 1374066 - DNA, 15 bp, Homo sapiens
taaagccaccaagcc

SEQ ID NO: 1374067 - DNA, 15 bp, Homo sapiens
ctaaagccaccaagc

SEQ ID NO: 1374068 - DNA, 15 bp, Homo sapiens
tctaaagccaccaag

SEQ ID NO: 1374069 - DNA, 15 bp, Homo sapiens
ctctaaagccaccaa

SEQ ID NO: 1374070 - DNA, 15 bp, Homo sapiens
cctctaaagccacca

SEQ ID NO: 1374071 - DNA, 15 bp, Homo sapiens
gcctctaaagccacc

SEQ ID NO: 1374072 - DNA, 15 bp, Homo sapiens
ggcctctaaagccac

SEQ ID NO: 1374073 - DNA, 15 bp, Homo sapiens
aggcctctaaagcca

SEQ ID NO: 1374074 - DNA, 15 bp, Homo sapiens
caggcctctaaagcc

SEQ ID NO: 1374075 - DNA, 15 bp, Homo sapiens
acaggcctctaaagc

SEQ ID NO: 1374076 - DNA, 15 bp, Homo sapiens
cacaggcctctaaag

SEQ ID NO: 1374077 - DNA, 15 bp, Homo sapiens
acacaggcctctaaa

SEQ ID NO: 1374078 - DNA, 15 bp, Homo sapiens
gacacaggcctctaa

SEQ ID NO: 1374079 - DNA, 15 bp, Homo sapiens
ggacacaggcctcta

SEQ ID NO: 1374080 - DNA, 15 bp, Homo sapiens
tggacacaggcctct

SEQ ID NO: 1374081 - DNA, 15 bp, Homo sapiens
gtggacacaggcctc

SEQ ID NO: 1374082 - DNA, 15 bp, Homo sapiens
tgtggacacaggcct

SEQ ID NO: 1374083 - DNA, 15 bp, Homo sapiens
ctgtggacacaggcc

SEQ ID NO: 1374084 - DNA, 15 bp, Homo sapiens
gctgtggacacaggc

SEQ ID NO: 1374085 - DNA, 15 bp, Homo sapiens
agctgtggacacagg

SEQ ID NO: 1374086 - DNA, 15 bp, Homo sapiens
gagctgtggacacag

SEQ ID NO: 1374087 - DNA, 15 bp, Homo sapiens
tgagctgtggacaca

SEQ ID NO: 1374088 - DNA, 15 bp, Homo sapiens
gtgagctgtggacac

SEQ ID NO: 1374089 - DNA, 15 bp, Homo sapiens
tgtgagctgtggaca

SEQ ID NO: 1374090 - DNA, 15 bp, Homo sapiens
gtgtgagctgtggac

SEQ ID NO: 1374091 - DNA, 15 bp, Homo sapiens
ggtgtgagctgtgga

SEQ ID NO: 1374092 - DNA, 15 bp, Homo sapiens
tggtgtgagctgtgg

SEQ ID NO: 1374093 - DNA, 15 bp, Homo sapiens
ctggtgtgagctgtg

SEQ ID NO: 1374094 - DNA, 15 bp, Homo sapiens
cctggtgtgagctgt

SEQ ID NO: 1374095 - DNA, 15 bp, Homo sapiens
gcctggtgtgagctg

SEQ ID NO: 1374096 - DNA, 15 bp, Homo sapiens
tgcctggtgtgagct

SEQ ID NO: 1374097 - DNA, 15 bp, Homo sapiens
ttgcctggtgtgagc

SEQ ID NO: 1374098 - DNA, 15 bp, Homo sapiens
attgcctggtgtgag

SEQ ID NO: 1374099 - DNA, 15 bp, Homo sapiens
tattgcctggtgtga

SEQ ID NO: 1374100 - DNA, 15 bp, Homo sapiens
atattgcctggtgtg

SEQ ID NO: 1374101 - DNA, 15 bp, Homo sapiens
aatattgcctggtgt

SEQ ID NO: 1374102 - DNA, 15 bp, Homo sapiens
gaatattgcctggtg

SEQ ID NO: 1374103 - DNA, 15 bp, Homo sapiens
agaatattgcctggt

SEQ ID NO: 1374104 - DNA, 15 bp, Homo sapiens
cagaatattgcctgg

SEQ ID NO: 1374105 - DNA, 15 bp, Homo sapiens
ccagaatattgcctg

SEQ ID NO: 1374106 - DNA, 15 bp, Homo sapiens
cccagaatattgcct

SEQ ID NO: 1374107 - DNA, 15 bp, Homo sapiens
gcccagaatattgcc

SEQ ID NO: 1374108 - DNA, 15 bp, Homo sapiens
agcccagaatattgc

SEQ ID NO: 1374109 - DNA, 15 bp, Homo sapiens
aagcccagaatattg

SEQ ID NO: 1374110 - DNA, 15 bp, Homo sapiens
caagcccagaatatt

SEQ ID NO: 1374111 - DNA, 15 bp, Homo sapiens
tcaagcccagaatat

SEQ ID NO: 1374112 - DNA, 15 bp, Homo sapiens
ttcaagcccagaata

SEQ ID NO: 1374113 - DNA, 15 bp, Homo sapiens
attcaagcccagaat

SEQ ID NO: 1374114 - DNA, 15 bp, Homo sapiens
aattcaagcccagaa

SEQ ID NO: 1374115 - DNA, 15 bp, Homo sapiens
caattcaagcccaga

SEQ ID NO: 1374116 - DNA, 15 bp, Homo sapiens
gcaattcaagcccag

SEQ ID NO: 1374117 - DNA, 15 bp, Homo sapiens
tgcaattcaagccca

SEQ ID NO: 1374118 - DNA, 15 bp, Homo sapiens
ctgcaattcaagccc

SEQ ID NO: 1374119 - DNA, 15 bp, Homo sapiens
gctgcaattcaagcc

SEQ ID NO: 1374120 - DNA, 15 bp, Homo sapiens
agctgcaattcaagc

SEQ ID NO: 1374121 - DNA, 15 bp, Homo sapiens
gagctgcaattcaag

SEQ ID NO: 1374122 - DNA, 15 bp, Homo sapiens
agagctgcaattcaa

SEQ ID NO: 1374123 - DNA, 15 bp, Homo sapiens
cagagctgcaattca

SEQ ID NO: 1374124 - DNA, 15 bp, Homo sapiens
gcagagctgcaattc

SEQ ID NO: 1374125 - DNA, 15 bp, Homo sapiens
tgcagagctgcaatt

SEQ ID NO: 1374126 - DNA, 15 bp, Homo sapiens
gtgcagagctgcaat

SEQ ID NO: 1374127 - DNA, 15 bp, Homo sapiens
agtgcagagctgcaa

SEQ ID NO: 1374128 - DNA, 15 bp, Homo sapiens
aagtgcagagctgca

SEQ ID NO: 1374129 - DNA, 15 bp, Homo sapiens
gaagtgcagagctgc

SEQ ID NO: 1374130 - DNA, 15 bp, Homo sapiens
cgaagtgcagagctg

SEQ ID NO: 1374131 - DNA, 15 bp, Homo sapiens
ccgaagtgcagagct

SEQ ID NO: 1374132 - DNA, 15 bp, Homo sapiens
gccgaagtgcagagc

SEQ ID NO: 1374133 - DNA, 15 bp, Homo sapiens
ggccgaagtgcagag

SEQ ID NO: 1374134 - DNA, 15 bp, Homo sapiens
tggccgaagtgcaga

SEQ ID NO: 1374135 - DNA, 15 bp, Homo sapiens
ctggccgaagtgcag

SEQ ID NO: 1374136 - DNA, 15 bp, Homo sapiens
actggccgaagtgca

SEQ ID NO: 1374137 - DNA, 15 bp, Homo sapiens
cactggccgaagtgc

SEQ ID NO: 1374138 - DNA, 15 bp, Homo sapiens
tcactggccgaagtg

SEQ ID NO: 1374139 - DNA, 15 bp, Homo sapiens
gtcactggccgaagt

SEQ ID NO: 1374140 - DNA, 15 bp, Homo sapiens
agtcactggccgaag

SEQ ID NO: 1374141 - DNA, 15 bp, Homo sapiens
aagtcactggccgaa

SEQ ID NO: 1374142 - DNA, 15 bp, Homo sapiens
caagtcactggccga

SEQ ID NO: 1374143 - DNA, 15 bp, Homo sapiens
acaagtcactggccg

SEQ ID NO: 1374144 - DNA, 15 bp, Homo sapiens
cacaagtcactggcc

SEQ ID NO: 1374145 - DNA, 15 bp, Homo sapiens
gcacaagtcactggc

SEQ ID NO: 1374146 - DNA, 15 bp, Homo sapiens
ggcacaagtcactgg

SEQ ID NO: 1374147 - DNA, 15 bp, Homo sapiens
aggcacaagtcactg

SEQ ID NO: 1374148 - DNA, 15 bp, Homo sapiens
gaggcacaagtcact

SEQ ID NO: 1374149 - DNA, 15 bp, Homo sapiens
tgaggcacaagtcac

SEQ ID NO: 1374150 - DNA, 15 bp, Homo sapiens
gtgaggcacaagtca

SEQ ID NO: 1374151 - DNA, 15 bp, Homo sapiens
ggtgaggcacaagtc

SEQ ID NO: 1374152 - DNA, 15 bp, Homo sapiens
gggtgaggcacaagt

SEQ ID NO: 1374153 - DNA, 15 bp, Homo sapiens
ggggtgaggcacaag

SEQ ID NO: 1374154 - DNA, 15 bp, Homo sapiens
aggggtgaggcacaa

SEQ ID NO: 1374155 - DNA, 15 bp, Homo sapiens
taggggtgaggcaca

SEQ ID NO: 1374156 - DNA, 15 bp, Homo sapiens
gtaggggtgaggcac

SEQ ID NO: 1374157 - DNA, 15 bp, Homo sapiens
agtaggggtgaggca

SEQ ID NO: 1374158 - DNA, 15 bp, Homo sapiens
tagtaggggtgaggc

SEQ ID NO: 1374159 - DNA, 15 bp, Homo sapiens
gtagtaggggtgagg

SEQ ID NO: 1374160 - DNA, 15 bp, Homo sapiens
agtagtaggggtgag

SEQ ID NO: 1374161 - DNA, 15 bp, Homo sapiens
gagtagtaggggtga

SEQ ID NO: 1374162 - DNA, 15 bp, Homo sapiens
ggagtagtaggggtg

SEQ ID NO: 1374163 - DNA, 15 bp, Homo sapiens
gggagtagtaggggt

SEQ ID NO: 1374164 - DNA, 15 bp, Homo sapiens
agggagtagtagggg

SEQ ID NO: 1374165 - DNA, 15 bp, Homo sapiens
aagggagtagtaggg

SEQ ID NO: 1374166 - DNA, 15 bp, Homo sapiens
aaagggagtagtagg

SEQ ID NO: 1374167 - DNA, 15 bp, Homo sapiens
aaaagggagtagtag

SEQ ID NO: 1374168 - DNA, 15 bp, Homo sapiens
aaaaagggagtagta

SEQ ID NO: 1374169 - DNA, 15 bp, Homo sapiens
aaaaaagggagtagt

SEQ ID NO: 1374170 - DNA, 15 bp, Homo sapiens
aaaaaaagggagtag

SEQ ID NO: 1374171 - DNA, 15 bp, Homo sapiens
taaaaaaagggagta

SEQ ID NO: 1374172 - DNA, 15 bp, Homo sapiens
ttaaaaaaagggagt

SEQ ID NO: 1374173 - DNA, 15 bp, Homo sapiens
cttaaaaaaagggag

SEQ ID NO: 1374174 - DNA, 15 bp, Homo sapiens
tcttaaaaaaaggga

SEQ ID NO: 1374175 - DNA, 15 bp, Homo sapiens
atcttaaaaaaaggg

SEQ ID NO: 1374176 - DNA, 15 bp, Homo sapiens
tatcttaaaaaaagg

SEQ ID NO: 1374177 - DNA, 15 bp, Homo sapiens
ctatcttaaaaaaag

SEQ ID NO: 1374178 - DNA, 15 bp, Homo sapiens
cctatcttaaaaaaa

SEQ ID NO: 1374179 - DNA, 15 bp, Homo sapiens
gcctatcttaaaaaa

SEQ ID NO: 1374180 - DNA, 15 bp, Homo sapiens
agcctatcttaaaaa

SEQ ID NO: 1374181 - DNA, 15 bp, Homo sapiens
cagcctatcttaaaa

SEQ ID NO: 1374182 - DNA, 15 bp, Homo sapiens
ccagcctatcttaaa

SEQ ID NO: 1374183 - DNA, 15 bp, Homo sapiens
accagcctatcttaa

SEQ ID NO: 1374184 - DNA, 15 bp, Homo sapiens
caccagcctatctta

SEQ ID NO: 1374185 - DNA, 15 bp, Homo sapiens
tcaccagcctatctt

SEQ ID NO: 1374186 - DNA, 15 bp, Homo sapiens
atcaccagcctatct

SEQ ID NO: 1374187 - DNA, 15 bp, Homo sapiens
tatcaccagcctatc

SEQ ID NO: 1374188 - DNA, 15 bp, Homo sapiens
ctatcaccagcctat

SEQ ID NO: 1374189 - DNA, 15 bp, Homo sapiens
actatcaccagccta

SEQ ID NO: 1374190 - DNA, 15 bp, Homo sapiens
tactatcaccagcct

SEQ ID NO: 1374191 - DNA, 15 bp, Homo sapiens
atactatcaccagcc

SEQ ID NO: 1374192 - DNA, 15 bp, Homo sapiens
catactatcaccagc

SEQ ID NO: 1374193 - DNA, 15 bp, Homo sapiens
gcatactatcaccag

SEQ ID NO: 1374194 - DNA, 15 bp, Homo sapiens
tgcatactatcacca

SEQ ID NO: 1374195 - DNA, 15 bp, Homo sapiens
ctgcatactatcacc

SEQ ID NO: 1374196 - DNA, 15 bp, Homo sapiens
gctgcatactatcac

SEQ ID NO: 1374197 - DNA, 15 bp, Homo sapiens
ggctgcatactatca

SEQ ID NO: 1374198 - DNA, 15 bp, Homo sapiens
aggctgcatactatc

SEQ ID NO: 1374199 - DNA, 15 bp, Homo sapiens
gaggctgcatactat

SEQ ID NO: 1374200 - DNA, 15 bp, Homo sapiens
tgaggctgcatacta

SEQ ID NO: 1374201 - DNA, 15 bp, Homo sapiens
ctgaggctgcatact

SEQ ID NO: 1374202 - DNA, 15 bp, Homo sapiens
tctgaggctgcatac

SEQ ID NO: 1374203 - DNA, 15 bp, Homo sapiens
ctctgaggctgcata

SEQ ID NO: 1374204 - DNA, 15 bp, Homo sapiens
cctctgaggctgcat

SEQ ID NO: 1374205 - DNA, 15 bp, Homo sapiens
ccctctgaggctgca

SEQ ID NO: 1374206 - DNA, 15 bp, Homo sapiens
accctctgaggctgc

SEQ ID NO: 1374207 - DNA, 15 bp, Homo sapiens
aaccctctgaggctg

SEQ ID NO: 1374208 - DNA, 15 bp, Homo sapiens
caaccctctgaggct

SEQ ID NO: 1374209 - DNA, 15 bp, Homo sapiens
acaaccctctgaggc

SEQ ID NO: 1374210 - DNA, 15 bp, Homo sapiens
gacaaccctctgagg

SEQ ID NO: 1374211 - DNA, 15 bp, Homo sapiens
tgacaaccctctgag

SEQ ID NO: 1374212 - DNA, 15 bp, Homo sapiens
atgacaaccctctga

SEQ ID NO: 1374213 - DNA, 15 bp, Homo sapiens
catgacaaccctctg

SEQ ID NO: 1374214 - DNA, 15 bp, Homo sapiens
tcatgacaaccctct

SEQ ID NO: 1374215 - DNA, 15 bp, Homo sapiens
ctcatgacaaccctc

SEQ ID NO: 1374216 - DNA, 15 bp, Homo sapiens
gctcatgacaaccct

SEQ ID NO: 1374217 - DNA, 15 bp, Homo sapiens
ggctcatgacaaccc

SEQ ID NO: 1374218 - DNA, 15 bp, Homo sapiens
tggctcatgacaacc

SEQ ID NO: 1374219 - DNA, 15 bp, Homo sapiens
gtggctcatgacaac

SEQ ID NO: 1374220 - DNA, 15 bp, Homo sapiens
agtggctcatgacaa

SEQ ID NO: 1374221 - DNA, 15 bp, Homo sapiens
aagtggctcatgaca

SEQ ID NO: 1374222 - DNA, 15 bp, Homo sapiens
taagtggctcatgac

SEQ ID NO: 1374223 - DNA, 15 bp, Homo sapiens
ctaagtggctcatga

SEQ ID NO: 1374224 - DNA, 15 bp, Homo sapiens
tctaagtggctcatg

SEQ ID NO: 1374225 - DNA, 15 bp, Homo sapiens
ctctaagtggctcat

SEQ ID NO: 1374226 - DNA, 15 bp, Homo sapiens
tctctaagtggctca

SEQ ID NO: 1374227 - DNA, 15 bp, Homo sapiens
ttctctaagtggctc

SEQ ID NO: 1374228 - DNA, 15 bp, Homo sapiens
gttctctaagtggct

SEQ ID NO: 1374229 - DNA, 15 bp, Homo sapiens
tgttctctaagtggc

SEQ ID NO: 1374230 - DNA, 15 bp, Homo sapiens
gtgttctctaagtgg

SEQ ID NO: 1374231 - DNA, 15 bp, Homo sapiens
tgtgttctctaagtg

SEQ ID NO: 1374232 - DNA, 15 bp, Homo sapiens
ctgtgttctctaagt

SEQ ID NO: 1374233 - DNA, 15 bp, Homo sapiens
gctgtgttctctaag

SEQ ID NO: 1374234 - DNA, 15 bp, Homo sapiens
ggctgtgttctctaa

SEQ ID NO: 1374235 - DNA, 15 bp, Homo sapiens
aggctgtgttctcta

SEQ ID NO: 1374236 - DNA, 15 bp, Homo sapiens
taggctgtgttctct

SEQ ID NO: 1374237 - DNA, 15 bp, Homo sapiens
ataggctgtgttctc

SEQ ID NO: 1374238 - DNA, 15 bp, Homo sapiens
cataggctgtgttct

SEQ ID NO: 1374239 - DNA, 15 bp, Homo sapiens
gcataggctgtgttc

SEQ ID NO: 1374240 - DNA, 15 bp, Homo sapiens
tgcataggctgtgtt

SEQ ID NO: 1374241 - DNA, 15 bp, Homo sapiens
ttgcataggctgtgt

SEQ ID NO: 1374242 - DNA, 15 bp, Homo sapiens
tttgcataggctgtg

SEQ ID NO: 1374243 - DNA, 15 bp, Homo sapiens
ctttgcataggctgt

SEQ ID NO: 1374244 - DNA, 15 bp, Homo sapiens
actttgcataggctg

SEQ ID NO: 1374245 - DNA, 15 bp, Homo sapiens
tactttgcataggct

SEQ ID NO: 1374246 - DNA, 15 bp, Homo sapiens
ttactttgcataggc

SEQ ID NO: 1374247 - DNA, 15 bp, Homo sapiens
tttactttgcatagg

SEQ ID NO: 1374248 - DNA, 15 bp, Homo sapiens
atttactttgcatag

SEQ ID NO: 1374249 - DNA, 15 bp, Homo sapiens
catttactttgcata

SEQ ID NO: 1374250 - DNA, 15 bp, Homo sapiens
gcatttactttgcat

SEQ ID NO: 1374251 - DNA, 15 bp, Homo sapiens
agcatttactttgca

SEQ ID NO: 1374252 - DNA, 15 bp, Homo sapiens
aagcatttactttgc

SEQ ID NO: 1374253 - DNA, 15 bp, Homo sapiens
taagcatttactttg

SEQ ID NO: 1374254 - DNA, 15 bp, Homo sapiens
ataagcatttacttt

SEQ ID NO: 1374255 - DNA, 15 bp, Homo sapiens
aataagcatttactt

SEQ ID NO: 1374256 - DNA, 15 bp, Homo sapiens
taataagcatttact

SEQ ID NO: 1374257 - DNA, 15 bp, Homo sapiens
ttaataagcatttac

SEQ ID NO: 1374258 - DNA, 15 bp, Homo sapiens
cttaataagcattta

SEQ ID NO: 1374259 - DNA, 15 bp, Homo sapiens
acttaataagcattt

SEQ ID NO: 1374260 - DNA, 15 bp, Homo sapiens
cacttaataagcatt

SEQ ID NO: 1374261 - DNA, 15 bp, Homo sapiens
acacttaataagcat

SEQ ID NO: 1374262 - DNA, 15 bp, Homo sapiens
tacacttaataagca

SEQ ID NO: 1374263 - DNA, 15 bp, Homo sapiens
ctacacttaataagc

SEQ ID NO: 1374264 - DNA, 15 bp, Homo sapiens
cctacacttaataag

SEQ ID NO: 1374265 - DNA, 15 bp, Homo sapiens
gcctacacttaataa

SEQ ID NO: 1374266 - DNA, 15 bp, Homo sapiens
tgcctacacttaata

SEQ ID NO: 1374267 - DNA, 15 bp, Homo sapiens
atgcctacacttaat

SEQ ID NO: 1374268 - DNA, 15 bp, Homo sapiens
aatgcctacacttaa

SEQ ID NO: 1374269 - DNA, 15 bp, Homo sapiens
caatgcctacactta

SEQ ID NO: 1374270 - DNA, 15 bp, Homo sapiens
ccaatgcctacactt

SEQ ID NO: 1374271 - DNA, 15 bp, Homo sapiens
gccaatgcctacact

SEQ ID NO: 1374272 - DNA, 15 bp, Homo sapiens
ggccaatgcctacac

SEQ ID NO: 1374273 - DNA, 15 bp, Homo sapiens
gggccaatgcctaca

SEQ ID NO: 1374274 - DNA, 15 bp, Homo sapiens
tgggccaatgcctac

SEQ ID NO: 1374275 - DNA, 15 bp, Homo sapiens
ctgggccaatgccta

SEQ ID NO: 1374276 - DNA, 15 bp, Homo sapiens
tctgggccaatgcct

SEQ ID NO: 1374277 - DNA, 15 bp, Homo sapiens
ttctgggccaatgcc

SEQ ID NO: 1374278 - DNA, 15 bp, Homo sapiens
gttctgggccaatgc

SEQ ID NO: 1374279 - DNA, 15 bp, Homo sapiens
agttctgggccaatg

SEQ ID NO: 1374280 - DNA, 15 bp, Homo sapiens
cagttctgggccaat

SEQ ID NO: 1374281 - DNA, 15 bp, Homo sapiens
acagttctgggccaa

SEQ ID NO: 1374282 - DNA, 15 bp, Homo sapiens
aacagttctgggcca

SEQ ID NO: 1374283 - DNA, 15 bp, Homo sapiens
gaacagttctgggcc

SEQ ID NO: 1374284 - DNA, 15 bp, Homo sapiens
agaacagttctgggc

SEQ ID NO: 1374285 - DNA, 15 bp, Homo sapiens
tagaacagttctggg

SEQ ID NO: 1374286 - DNA, 15 bp, Homo sapiens
gtagaacagttctgg

SEQ ID NO: 1374287 - DNA, 15 bp, Homo sapiens
ggtagaacagttctg

SEQ ID NO: 1374288 - DNA, 15 bp, Homo sapiens
tggtagaacagttct

SEQ ID NO: 1374289 - DNA, 15 bp, Homo sapiens
atggtagaacagttc

SEQ ID NO: 1374290 - DNA, 15 bp, Homo sapiens
catggtagaacagtt

SEQ ID NO: 1374291 - DNA, 15 bp, Homo sapiens
ccatggtagaacagt

SEQ ID NO: 1374292 - DNA, 15 bp, Homo sapiens
cccatggtagaacag

SEQ ID NO: 1374293 - DNA, 15 bp, Homo sapiens
ccccatggtagaaca

SEQ ID NO: 1374294 - DNA, 15 bp, Homo sapiens
accccatggtagaac

SEQ ID NO: 1374295 - DNA, 15 bp, Homo sapiens
caccccatggtagaa

SEQ ID NO: 1374296 - DNA, 15 bp, Homo sapiens
acaccccatggtaga

SEQ ID NO: 1374297 - DNA, 15 bp, Homo sapiens
cacaccccatggtag

SEQ ID NO: 1374298 - DNA, 15 bp, Homo sapiens
ccacaccccatggta

SEQ ID NO: 1374299 - DNA, 15 bp, Homo sapiens
cccacaccccatggt

SEQ ID NO: 1374300 - DNA, 15 bp, Homo sapiens
ccccacaccccatgg

SEQ ID NO: 1374301 - DNA, 15 bp, Homo sapiens
tccccacaccccatg

SEQ ID NO: 1374302 - DNA, 15 bp, Homo sapiens
atccccacaccccat

SEQ ID NO: 1374303 - DNA, 15 bp, Homo sapiens
catccccacacccca

SEQ ID NO: 1374304 - DNA, 15 bp, Homo sapiens
acatccccacacccc

SEQ ID NO: 1374305 - DNA, 15 bp, Homo sapiens
cacatccccacaccc

SEQ ID NO: 1374306 - DNA, 15 bp, Homo sapiens
ccacatccccacacc

SEQ ID NO: 1374307 - DNA, 15 bp, Homo sapiens
tccacatccccacac

SEQ ID NO: 1374308 - DNA, 15 bp, Homo sapiens
ctccacatccccaca

SEQ ID NO: 1374309 - DNA, 15 bp, Homo sapiens
tctccacatccccac

SEQ ID NO: 1374310 - DNA, 15 bp, Homo sapiens
gtctccacatcccca

SEQ ID NO: 1374311 - DNA, 15 bp, Homo sapiens
tgtctccacatcccc

SEQ ID NO: 1374312 - DNA, 15 bp, Homo sapiens
ttgtctccacatccc

SEQ ID NO: 1374313 - DNA, 15 bp, Homo sapiens
attgtctccacatcc

SEQ ID NO: 1374314 - DNA, 15 bp, Homo sapiens
gattgtctccacatc

SEQ ID NO: 1374315 - DNA, 15 bp, Homo sapiens
tgattgtctccacat

SEQ ID NO: 1374316 - DNA, 15 bp, Homo sapiens
ctgattgtctccaca

SEQ ID NO: 1374317 - DNA, 15 bp, Homo sapiens
cctgattgtctccac

SEQ ID NO: 1374318 - DNA, 15 bp, Homo sapiens
tcctgattgtctcca

SEQ ID NO: 1374319 - DNA, 15 bp, Homo sapiens
ttcctgattgtctcc

SEQ ID NO: 1374320 - DNA, 15 bp, Homo sapiens
cttcctgattgtctc

SEQ ID NO: 1374321 - DNA, 15 bp, Homo sapiens
tcttcctgattgtct

SEQ ID NO: 1374322 - DNA, 15 bp, Homo sapiens
gtcttcctgattgtc

SEQ ID NO: 1374323 - DNA, 15 bp, Homo sapiens
agtcttcctgattgt

SEQ ID NO: 1374324 - DNA, 15 bp, Homo sapiens
cagtcttcctgattg

SEQ ID NO: 1374325 - DNA, 15 bp, Homo sapiens
ccagtcttcctgatt

SEQ ID NO: 1374326 - DNA, 15 bp, Homo sapiens
accagtcttcctgat

SEQ ID NO: 1374327 - DNA, 15 bp, Homo sapiens
caccagtcttcctga

SEQ ID NO: 1374328 - DNA, 15 bp, Homo sapiens
ccaccagtcttcctg

SEQ ID NO: 1374329 - DNA, 15 bp, Homo sapiens
cccaccagtcttcct

SEQ ID NO: 1374330 - DNA, 15 bp, Homo sapiens
gcccaccagtcttcc

SEQ ID NO: 1374331 - DNA, 15 bp, Homo sapiens
tgcccaccagtcttc

SEQ ID NO: 1374332 - DNA, 15 bp, Homo sapiens
atgcccaccagtctt

SEQ ID NO: 1374333 - DNA, 15 bp, Homo sapiens
aatgcccaccagtct

SEQ ID NO: 1374334 - DNA, 15 bp, Homo sapiens
aaatgcccaccagtc

SEQ ID NO: 1374335 - DNA, 15 bp, Homo sapiens
aaaatgcccaccagt

SEQ ID NO: 1374336 - DNA, 15 bp, Homo sapiens
gaaaatgcccaccag

SEQ ID NO: 1374337 - DNA, 15 bp, Homo sapiens
agaaaatgcccacca

SEQ ID NO: 1374338 - DNA, 15 bp, Homo sapiens
cagaaaatgcccacc

SEQ ID NO: 1374339 - DNA, 15 bp, Homo sapiens
tcagaaaatgcccac

SEQ ID NO: 1374340 - DNA, 15 bp, Homo sapiens
gctcagaaaatgccc

SEQ ID NO: 1374341 - DNA, 15 bp, Homo sapiens
cgctcagaaaatgcc

SEQ ID NO: 1374342 - DNA, 15 bp, Homo sapiens
ccgctcagaaaatgc

SEQ ID NO: 1374343 - DNA, 15 bp, Homo sapiens
gccgctcagaaaatg

SEQ ID NO: 1374344 - DNA, 15 bp, Homo sapiens
agccgctcagaaaat

SEQ ID NO: 1374345 - DNA, 15 bp, Homo sapiens
cagccgctcagaaaa

SEQ ID NO: 1374346 - DNA, 15 bp, Homo sapiens
ccagccgctcagaaa

SEQ ID NO: 1374347 - DNA, 15 bp, Homo sapiens
tccagccgctcagaa

SEQ ID NO: 1374348 - DNA, 15 bp, Homo sapiens
ctccagccgctcaga

SEQ ID NO: 1374349 - DNA, 15 bp, Homo sapiens
tctccagccgctcag

SEQ ID NO: 1374350 - DNA, 15 bp, Homo sapiens
ttctccagccgctca

SEQ ID NO: 1374351 - DNA, 15 bp, Homo sapiens
gttctccagccgctc

SEQ ID NO: 1374352 - DNA, 15 bp, Homo sapiens
ggttctccagccgct

SEQ ID NO: 1374353 - DNA, 15 bp, Homo sapiens
gggttctccagccgc

SEQ ID NO: 1374354 - DNA, 15 bp, Homo sapiens
tgggttctccagccg

SEQ ID NO: 1374355 - DNA, 15 bp, Homo sapiens
ctgggttctccagcc

SEQ ID NO: 1374356 - DNA, 15 bp, Homo sapiens
cctgggttctccagc

SEQ ID NO: 1374357 - DNA, 15 bp, Homo sapiens
tcctgggttctccag

SEQ ID NO: 1374358 - DNA, 15 bp, Homo sapiens
ctcctgggttctcca

SEQ ID NO: 1374359 - DNA, 15 bp, Homo sapiens
gctcctgggttctcc

SEQ ID NO: 1374360 - DNA, 15 bp, Homo sapiens
ggctcctgggttctc

SEQ ID NO: 1374361 - DNA, 15 bp, Homo sapiens
aggctcctgggttct

SEQ ID NO: 1374362 - DNA, 15 bp, Homo sapiens
gaggctcctgggttc

SEQ ID NO: 1374363 - DNA, 15 bp, Homo sapiens
tgaggctcctgggtt

SEQ ID NO: 1374364 - DNA, 15 bp, Homo sapiens
ctgaggctcctgggt

SEQ ID NO: 1374365 - DNA, 15 bp, Homo sapiens
tctgaggctcctggg

SEQ ID NO: 1374366 - DNA, 15 bp, Homo sapiens
ctctgaggctcctgg

SEQ ID NO: 1374367 - DNA, 15 bp, Homo sapiens
tctctgaggctcctg

SEQ ID NO: 1374368 - DNA, 15 bp, Homo sapiens
atctctgaggctcct

SEQ ID NO: 1374369 - DNA, 15 bp, Homo sapiens
catctctgaggctcc

SEQ ID NO: 1374370 - DNA, 15 bp, Homo sapiens
tcatctctgaggctc

SEQ ID NO: 1374371 - DNA, 15 bp, Homo sapiens
ctcatctctgaggct

SEQ ID NO: 1374372 - DNA, 15 bp, Homo sapiens
tctcatctctgaggc

SEQ ID NO: 1374373 - DNA, 15 bp, Homo sapiens
gtctcatctctgagg

SEQ ID NO: 1374374 - DNA, 15 bp, Homo sapiens
ggtctcatctctgag

SEQ ID NO: 1374375 - DNA, 15 bp, Homo sapiens
tggtctcatctctga

SEQ ID NO: 1374376 - DNA, 15 bp, Homo sapiens
ttggtctcatctctg

SEQ ID NO: 1374377 - DNA, 15 bp, Homo sapiens
gttggtctcatctct

SEQ ID NO: 1374378 - DNA, 15 bp, Homo sapiens
cgttggtctcatctc

SEQ ID NO: 1374379 - DNA, 15 bp, Homo sapiens
acgttggtctcatct

SEQ ID NO: 1374380 - DNA, 15 bp, Homo sapiens
cacgttggtctcatc

SEQ ID NO: 1374381 - DNA, 15 bp, Homo sapiens
acacgttggtctcat

SEQ ID NO: 1374382 - DNA, 15 bp, Homo sapiens
cacacgttggtctca

SEQ ID NO: 1374383 - DNA, 15 bp, Homo sapiens
acacacgttggtctc

SEQ ID NO: 1374384 - DNA, 15 bp, Homo sapiens
cacacacgttggtct

SEQ ID NO: 1374385 - DNA, 15 bp, Homo sapiens
gcacacacgttggtc

SEQ ID NO: 1374386 - DNA, 15 bp, Homo sapiens
tgcacacacgttggt

SEQ ID NO: 1374387 - DNA, 15 bp, Homo sapiens
ctgcacacacgttgg

SEQ ID NO: 1374388 - DNA, 15 bp, Homo sapiens
gctgcacacacgttg

SEQ ID NO: 1374389 - DNA, 15 bp, Homo sapiens
tgctgcacacacgtt

SEQ ID NO: 1374390 - DNA, 15 bp, Homo sapiens
gtgctgcacacacgt

SEQ ID NO: 1374391 - DNA, 15 bp, Homo sapiens
agtgctgcacacacg

SEQ ID NO: 1374392 - DNA, 15 bp, Homo sapiens
gagtgctgcacacac

SEQ ID NO: 1374393 - DNA, 15 bp, Homo sapiens
agagtgctgcacaca

SEQ ID NO: 1374394 - DNA, 15 bp, Homo sapiens
gagagtgctgcacac

SEQ ID NO: 1374395 - DNA, 15 bp, Homo sapiens
ggagagtgctgcaca

SEQ ID NO: 1374396 - DNA, 15 bp, Homo sapiens
tggagagtgctgcac

SEQ ID NO: 1374397 - DNA, 15 bp, Homo sapiens
gtggagagtgctgca

SEQ ID NO: 1374398 - DNA, 15 bp, Homo sapiens
tgtggagagtgctgc

SEQ ID NO: 1374399 - DNA, 15 bp, Homo sapiens
ttgtggagagtgctg

SEQ ID NO: 1374400 - DNA, 15 bp, Homo sapiens
cttgtggagagtgct

SEQ ID NO: 1374401 - DNA, 15 bp, Homo sapiens
gcttgtggagagtgc

SEQ ID NO: 1374402 - DNA, 15 bp, Homo sapiens
agcttgtggagagtg

SEQ ID NO: 1374403 - DNA, 15 bp, Homo sapiens
cagcttgtggagagt

SEQ ID NO: 1374404 - DNA, 15 bp, Homo sapiens
ccagcttgtggagag

SEQ ID NO: 1374405 - DNA, 15 bp, Homo sapiens
gccagcttgtggaga

SEQ ID NO: 1374406 - DNA, 15 bp, Homo sapiens
ggccagcttgtggag

SEQ ID NO: 1374407 - DNA, 15 bp, Homo sapiens
gggccagcttgtgga

SEQ ID NO: 1374408 - DNA, 15 bp, Homo sapiens
ggggccagcttgtgg

SEQ ID NO: 1374409 - DNA, 15 bp, Homo sapiens
tggggccagcttgtg

SEQ ID NO: 1374410 - DNA, 15 bp, Homo sapiens
ttggggccagcttgt

SEQ ID NO: 1374411 - DNA, 15 bp, Homo sapiens
attggggccagcttg

SEQ ID NO: 1374412 - DNA, 15 bp, Homo sapiens
gattggggccagctt

SEQ ID NO: 1374413 - DNA, 15 bp, Homo sapiens
tgattggggccagct

SEQ ID NO: 1374414 - DNA, 15 bp, Homo sapiens
gtgattggggccagc

SEQ ID NO: 1374415 - DNA, 15 bp, Homo sapiens
agtgattggggccag

SEQ ID NO: 1374416 - DNA, 15 bp, Homo sapiens
aagtgattggggcca

SEQ ID NO: 1374417 - DNA, 15 bp, Homo sapiens
aaagtgattggggcc

SEQ ID NO: 1374418 - DNA, 15 bp, Homo sapiens
aaaagtgattggggc

SEQ ID NO: 1374419 - DNA, 15 bp, Homo sapiens
caaaagtgattgggg

SEQ ID NO: 1374420 - DNA, 15 bp, Homo sapiens
gcaaaagtgattggg

SEQ ID NO: 1374421 - DNA, 15 bp, Homo sapiens
tgcaaaagtgattgg

SEQ ID NO: 1374422 - DNA, 15 bp, Homo sapiens
atgcaaaagtgattg

SEQ ID NO: 1374423 - DNA, 15 bp, Homo sapiens
gatgcaaaagtgatt

SEQ ID NO: 1374424 - DNA, 15 bp, Homo sapiens
tgatgcaaaagtgat

SEQ ID NO: 1374425 - DNA, 15 bp, Homo sapiens
ttgatgcaaaagtga

SEQ ID NO: 1374426 - DNA, 15 bp, Homo sapiens
tttgatgcaaaagtg

SEQ ID NO: 1374427 - DNA, 15 bp, Homo sapiens
atttgatgcaaaagt

SEQ ID NO: 1374428 - DNA, 15 bp, Homo sapiens
aatttgatgcaaaag

SEQ ID NO: 1374429 - DNA, 15 bp, Homo sapiens
caatttgatgcaaaa

SEQ ID NO: 1374430 - DNA, 15 bp, Homo sapiens
ccaatttgatgcaaa

SEQ ID NO: 1374431 - DNA, 15 bp, Homo sapiens
accaatttgatgcaa

SEQ ID NO: 1374432 - DNA, 15 bp, Homo sapiens
taccaatttgatgca

SEQ ID NO: 1374433 - DNA, 15 bp, Homo sapiens
gtaccaatttgatgc

SEQ ID NO: 1374434 - DNA, 15 bp, Homo sapiens
tgtaccaatttgatg

SEQ ID NO: 1374435 - DNA, 15 bp, Homo sapiens
ctgtaccaatttgat

SEQ ID NO: 1374436 - DNA, 15 bp, Homo sapiens
gctgtaccaatttga

SEQ ID NO: 1374437 - DNA, 15 bp, Homo sapiens
tgctgtaccaatttg

SEQ ID NO: 1374438 - DNA, 15 bp, Homo sapiens
ttgctgtaccaattt

SEQ ID NO: 1374439 - DNA, 15 bp, Homo sapiens
gttgctgtaccaatt

SEQ ID NO: 1374440 - DNA, 15 bp, Homo sapiens
ggttgctgtaccaat

SEQ ID NO: 1374441 - DNA, 15 bp, Homo sapiens
aggttgctgtaccaa

SEQ ID NO: 1374442 - DNA, 15 bp, Homo sapiens
aaggttgctgtacca

SEQ ID NO: 1374443 - DNA, 15 bp, Homo sapiens
taaggttgctgtacc

SEQ ID NO: 1374444 - DNA, 15 bp, Homo sapiens
cataaggttgctgta

SEQ ID NO: 1374445 - DNA, 15 bp, Homo sapiens
tcataaggttgctgt

SEQ ID NO: 1374446 - DNA, 15 bp, Homo sapiens
ctcataaggttgctg

SEQ ID NO: 1374447 - DNA, 15 bp, Homo sapiens
cctcataaggttgct

SEQ ID NO: 1374448 - DNA, 15 bp, Homo sapiens
gcctcataaggttgc

SEQ ID NO: 1374449 - DNA, 15 bp, Homo sapiens
agcctcataaggttg

SEQ ID NO: 1374450 - DNA, 15 bp, Homo sapiens
cagcctcataaggtt

SEQ ID NO: 1374451 - DNA, 15 bp, Homo sapiens
ccagcctcataaggt

SEQ ID NO: 1374452 - DNA, 15 bp, Homo sapiens
gccagcctcataagg

SEQ ID NO: 1374453 - DNA, 15 bp, Homo sapiens
ggccagcctcataag

SEQ ID NO: 1374454 - DNA, 15 bp, Homo sapiens
aggccagcctcataa

SEQ ID NO: 1374455 - DNA, 15 bp, Homo sapiens
aaggccagcctcata

SEQ ID NO: 1374456 - DNA, 15 bp, Homo sapiens
caaggccagcctcat

SEQ ID NO: 1374457 - DNA, 15 bp, Homo sapiens
ccaaggccagcctca

SEQ ID NO: 1374458 - DNA, 15 bp, Homo sapiens
cccaaggccagcctc

SEQ ID NO: 1374459 - DNA, 15 bp, Homo sapiens
ccccaaggccagcct

SEQ ID NO: 1374460 - DNA, 15 bp, Homo sapiens
tcccccaaggccagc

SEQ ID NO: 1374461 - DNA, 15 bp, Homo sapiens
ttcccccaaggccag

SEQ ID NO: 1374462 - DNA, 15 bp, Homo sapiens
gttcccccaaggcca

SEQ ID NO: 1374463 - DNA, 15 bp, Homo sapiens
ggttcccccaaggcc

SEQ ID NO: 1374464 - DNA, 15 bp, Homo sapiens
gggttcccccaaggc

SEQ ID NO: 1374465 - DNA, 15 bp, Homo sapiens
agggttcccccaagg

SEQ ID NO: 1374466 - DNA, 15 bp, Homo sapiens
cagggttcccccaag

SEQ ID NO: 1374467 - DNA, 15 bp, Homo sapiens
acagggttcccccaa

SEQ ID NO: 1374468 - DNA, 15 bp, Homo sapiens
aacagggttccccca

SEQ ID NO: 1374469 - DNA, 15 bp, Homo sapiens
aaacagggttccccc

SEQ ID NO: 1374470 - DNA, 15 bp, Homo sapiens
aaaacagggttcccc

SEQ ID NO: 1374471 - DNA, 15 bp, Homo sapiens
taaaacagggttccc

SEQ ID NO: 1374472 - DNA, 15 bp, Homo sapiens
ctaaaacagggttcc

SEQ ID NO: 1374473 - DNA, 15 bp, Homo sapiens
cctaaaacagggttc

SEQ ID NO: 1374474 - DNA, 15 bp, Homo sapiens
ccctaaaacagggtt

SEQ ID NO: 1374475 - DNA, 15 bp, Homo sapiens
tccctaaaacagggt

SEQ ID NO: 1374476 - DNA, 15 bp, Homo sapiens
atccctaaaacaggg

SEQ ID NO: 1374477 - DNA, 15 bp, Homo sapiens
catccctaaaacagg

SEQ ID NO: 1374478 - DNA, 15 bp, Homo sapiens
tcatccctaaaacag

SEQ ID NO: 1374479 - DNA, 15 bp, Homo sapiens
ctcatccctaaaaca

SEQ ID NO: 1374480 - DNA, 15 bp, Homo sapiens
gctcatccctaaaac

SEQ ID NO: 1374481 - DNA, 15 bp, Homo sapiens
agctcatccctaaaa

SEQ ID NO: 1374482 - DNA, 15 bp, Homo sapiens
cagctcatccctaaa

SEQ ID NO: 1374483 - DNA, 15 bp, Homo sapiens
tcagctcatccctaa

SEQ ID NO: 1374484 - DNA, 15 bp, Homo sapiens
ttcagctcatcccta

SEQ ID NO: 1374485 - DNA, 15 bp, Homo sapiens
gttcagctcatccct

SEQ ID NO: 1374486 - DNA, 15 bp, Homo sapiens
agttcagctcatccc

SEQ ID NO: 1374487 - DNA, 15 bp, Homo sapiens
aagttcagctcatcc

SEQ ID NO: 1374488 - DNA, 15 bp, Homo sapiens
taagttcagctcatc

SEQ ID NO: 1374489 - DNA, 15 bp, Homo sapiens
gtaagttcagctcat

SEQ ID NO: 1374490 - DNA, 15 bp, Homo sapiens
ggtaagttcagctca

SEQ ID NO: 1374491 - DNA, 15 bp, Homo sapiens
cggtaagttcagctc

SEQ ID NO: 1374492 - DNA, 15 bp, Homo sapiens
ccggtaagttcagct

SEQ ID NO: 1374493 - DNA, 15 bp, Homo sapiens
cccggtaagttcagc

SEQ ID NO: 1374494 - DNA, 15 bp, Homo sapiens
tcccggtaagttcag

SEQ ID NO: 1374495 - DNA, 15 bp, Homo sapiens
ctcccggtaagttca

SEQ ID NO: 1374496 - DNA, 15 bp, Homo sapiens
cctcccggtaagttc

SEQ ID NO: 1374497 - DNA, 15 bp, Homo sapiens
gcctcccggtaagtt

SEQ ID NO: 1374498 - DNA, 15 bp, Homo sapiens
agcctcccggtaagt

SEQ ID NO: 1374499 - DNA, 15 bp, Homo sapiens
cagcctcccggtaag

SEQ ID NO: 1374500 - DNA, 15 bp, Homo sapiens
gcagcctcccggtaa

SEQ ID NO: 1374501 - DNA, 15 bp, Homo sapiens
tgcagcctcccggta

SEQ ID NO: 1374502 - DNA, 15 bp, Homo sapiens
atgcagcctcccggt

SEQ ID NO: 1374503 - DNA, 15 bp, Homo sapiens
catgcagcctcccgg

SEQ ID NO: 1374504 - DNA, 15 bp, Homo sapiens
gcatgcagcctcccg

SEQ ID NO: 1374505 - DNA, 15 bp, Homo sapiens
cgcatgcagcctccc

SEQ ID NO: 1374506 - DNA, 15 bp, Homo sapiens
tcgcatgcagcctcc

SEQ ID NO: 1374507 - DNA, 15 bp, Homo sapiens
ctcgcatgcagcctc

SEQ ID NO: 1374508 - DNA, 15 bp, Homo sapiens
cctcgcatgcagcct

SEQ ID NO: 1374509 - DNA, 15 bp, Homo sapiens
acctcgcatgcagcc

SEQ ID NO: 1374510 - DNA, 15 bp, Homo sapiens
aacctcgcatgcagc

SEQ ID NO: 1374511 - DNA, 15 bp, Homo sapiens
caacctcgcatgcag

SEQ ID NO: 1374512 - DNA, 15 bp, Homo sapiens
ccaacctcgcatgca

SEQ ID NO: 1374513 - DNA, 15 bp, Homo sapiens
accaacctcgcatgc

SEQ ID NO: 1374514 - DNA, 15 bp, Homo sapiens
caccaacctcgcatg

SEQ ID NO: 1374515 - DNA, 15 bp, Homo sapiens
acaccaacctcgcat

SEQ ID NO: 1374516 - DNA, 15 bp, Homo sapiens
cacaccaacctcgca

SEQ ID NO: 1374517 - DNA, 15 bp, Homo sapiens
tcacaccaacctcgc

SEQ ID NO: 1374518 - DNA, 15 bp, Homo sapiens
ttcacaccaacctcg

SEQ ID NO: 1374519 - DNA, 15 bp, Homo sapiens
tttcacaccaacctc

SEQ ID NO: 1374520 - DNA, 15 bp, Homo sapiens
atttcacaccaacct

SEQ ID NO: 1374521 - DNA, 15 bp, Homo sapiens
catttcacaccaacc

SEQ ID NO: 1374522 - DNA, 15 bp, Homo sapiens
gcatttcacaccaac

SEQ ID NO: 1374523 - DNA, 15 bp, Homo sapiens
tgcatttcacaccaa

SEQ ID NO: 1374524 - DNA, 15 bp, Homo sapiens
atgcatttcacacca

SEQ ID NO: 1374525 - DNA, 15 bp, Homo sapiens
tatgcatttcacacc

SEQ ID NO: 1374526 - DNA, 15 bp, Homo sapiens
atatgcatttcacac

SEQ ID NO: 1374527 - DNA, 15 bp, Homo sapiens
gatatgcatttcaca

SEQ ID NO: 1374528 - DNA, 15 bp, Homo sapiens
agatatgcatttcac

SEQ ID NO: 1374529 - DNA, 15 bp, Homo sapiens
cagatatgcatttca

SEQ ID NO: 1374530 - DNA, 15 bp, Homo sapiens
ccagatatgcatttc

SEQ ID NO: 1374531 - DNA, 15 bp, Homo sapiens
gccagatatgcattt

SEQ ID NO: 1374532 - DNA, 15 bp, Homo sapiens
agccagatatgcatt

SEQ ID NO: 1374533 - DNA, 15 bp, Homo sapiens
aagccagatatgcat

SEQ ID NO: 1374534 - DNA, 15 bp, Homo sapiens
aaagccagatatgca

SEQ ID NO: 1374535 - DNA, 15 bp, Homo sapiens
caaagccagatatgc

SEQ ID NO: 1374536 - DNA, 15 bp, Homo sapiens
acaaagccagatatg

SEQ ID NO: 1374537 - DNA, 15 bp, Homo sapiens
tacaaagccagatat

SEQ ID NO: 1374538 - DNA, 15 bp, Homo sapiens
ctacaaagccagata

SEQ ID NO: 1374539 - DNA, 15 bp, Homo sapiens
gctacaaagccagat

SEQ ID NO: 1374540 - DNA, 15 bp, Homo sapiens
agctacaaagccaga

SEQ ID NO: 1374541 - DNA, 15 bp, Homo sapiens
cagctacaaagccag

SEQ ID NO: 1374542 - DNA, 15 bp, Homo sapiens
ccagctacaaagcca

SEQ ID NO: 1374543 - DNA, 15 bp, Homo sapiens
accagctacaaagcc

SEQ ID NO: 1374544 - DNA, 15 bp, Homo sapiens
gaccagctacaaagc

SEQ ID NO: 1374545 - DNA, 15 bp, Homo sapiens
cgaccagctacaaag

SEQ ID NO: 1374546 - DNA, 15 bp, Homo sapiens
ccgaccagctacaaa

SEQ ID NO: 1374547 - DNA, 15 bp, Homo sapiens
gccgaccagctacaa

SEQ ID NO: 1374548 - DNA, 15 bp, Homo sapiens
agccgaccagctaca

SEQ ID NO: 1374549 - DNA, 15 bp, Homo sapiens
gagccgaccagctac

SEQ ID NO: 1374550 - DNA, 15 bp, Homo sapiens
tgagccgaccagcta

SEQ ID NO: 1374551 - DNA, 15 bp, Homo sapiens
gtgagccgaccagct

SEQ ID NO: 1374552 - DNA, 15 bp, Homo sapiens
ggtgagccgaccagc

SEQ ID NO: 1374553 - DNA, 15 bp, Homo sapiens
aggtgagccgaccag

SEQ ID NO: 1374554 - DNA, 15 bp, Homo sapiens
gaggtgagccgacca

SEQ ID NO: 1374555 - DNA, 15 bp, Homo sapiens
agaggtgagccgacc

SEQ ID NO: 1374556 - DNA, 15 bp, Homo sapiens
cagaggtgagccgac

SEQ ID NO: 1374557 - DNA, 15 bp, Homo sapiens
ccagaggtgagccga

SEQ ID NO: 1374558 - DNA, 15 bp, Homo sapiens
cccagaggtgagccg

SEQ ID NO: 1374559 - DNA, 15 bp, Homo sapiens
ccccagaggtgagcc

SEQ ID NO: 1374560 - DNA, 15 bp, Homo sapiens
accccagaggtgagc

SEQ ID NO: 1374561 - DNA, 15 bp, Homo sapiens
aaccccagaggtgag

SEQ ID NO: 1374562 - DNA, 15 bp, Homo sapiens
caaccccagaggtga

SEQ ID NO: 1374563 - DNA, 15 bp, Homo sapiens
ccaaccccagaggtg

SEQ ID NO: 1374564 - DNA, 15 bp, Homo sapiens
gccaaccccagaggt

SEQ ID NO: 1374565 - DNA, 15 bp, Homo sapiens
tgccaaccccagagg

SEQ ID NO: 1374566 - DNA, 15 bp, Homo sapiens
gtgccaaccccagag

SEQ ID NO: 1374567 - DNA, 15 bp, Homo sapiens
tgtgccaaccccaga

SEQ ID NO: 1374568 - DNA, 15 bp, Homo sapiens
ctgtgccaaccccag

SEQ ID NO: 1374569 - DNA, 15 bp, Homo sapiens
cctgtgccaacccca

SEQ ID NO: 1374570 - DNA, 15 bp, Homo sapiens
ccctgtgccaacccc

SEQ ID NO: 1374571 - DNA, 15 bp, Homo sapiens
cccctgtgccaaccc

SEQ ID NO: 1374572 - DNA, 15 bp, Homo sapiens
gcccctgtgccaacc

SEQ ID NO: 1374573 - DNA, 15 bp, Homo sapiens
cgcccctgtgccaac

SEQ ID NO: 1374574 - DNA, 15 bp, Homo sapiens
ccgcccctgtgccaa

SEQ ID NO: 1374575 - DNA, 15 bp, Homo sapiens
cccgcccctgtgcca

SEQ ID NO: 1374576 - DNA, 15 bp, Homo sapiens
ccccgcccctgtgcc

SEQ ID NO: 1374577 - DNA, 15 bp, Homo sapiens
cccccgcccctgtgc

SEQ ID NO: 1374578 - DNA, 15 bp, Homo sapiens
acccccgcccctgtg

SEQ ID NO: 1374579 - DNA, 15 bp, Homo sapiens
aacccccgcccctgt

SEQ ID NO: 1374580 - DNA, 15 bp, Homo sapiens
gaacccccgcccctg

SEQ ID NO: 1374581 - DNA, 15 bp, Homo sapiens
agaacccccgcccct

SEQ ID NO: 1374582 - DNA, 15 bp, Homo sapiens
cagaacccccgcccc

SEQ ID NO: 1374583 - DNA, 15 bp, Homo sapiens
gcagaacccccgccc

SEQ ID NO: 1374584 - DNA, 15 bp, Homo sapiens
ggcagaacccccgcc

SEQ ID NO: 1374585 - DNA, 15 bp, Homo sapiens
tggcagaacccccgc

SEQ ID NO: 1374586 - DNA, 15 bp, Homo sapiens
atggcagaacccccg

SEQ ID NO: 1374587 - DNA, 15 bp, Homo sapiens
catggcagaaccccc

SEQ ID NO: 1374588 - DNA, 15 bp, Homo sapiens
ccatggcagaacccc

SEQ ID NO: 1374589 - DNA, 15 bp, Homo sapiens
gccatggcagaaccc

SEQ ID NO: 1374590 - DNA, 15 bp, Homo sapiens
agccatggcagaacc

SEQ ID NO: 1374591 - DNA, 15 bp, Homo sapiens
tagccatggcagaac

SEQ ID NO: 1374592 - DNA, 15 bp, Homo sapiens
ctagccatggcagaa

SEQ ID NO: 1374593 - DNA, 15 bp, Homo sapiens
tctagccatggcaga

SEQ ID NO: 1374594 - DNA, 15 bp, Homo sapiens
ttctagccatggcag

SEQ ID NO: 1374595 - DNA, 15 bp, Homo sapiens
attctagccatggca

SEQ ID NO: 1374596 - DNA, 15 bp, Homo sapiens
cattctagccatggc

SEQ ID NO: 1374597 - DNA, 15 bp, Homo sapiens
gcattctagccatgg

SEQ ID NO: 1374598 - DNA, 15 bp, Homo sapiens
cgcattctagccatg

SEQ ID NO: 1374599 - DNA, 15 bp, Homo sapiens
gcgcattctagccat

SEQ ID NO: 1374600 - DNA, 15 bp, Homo sapiens
agcgcattctagcca

SEQ ID NO: 1374601 - DNA, 15 bp, Homo sapiens
tagcgcattctagcc

SEQ ID NO: 1374602 - DNA, 15 bp, Homo sapiens
ttagcgcattctagc

SEQ ID NO: 1374603 - DNA, 15 bp, Homo sapiens
cttagcgcattctag

SEQ ID NO: 1374604 - DNA, 15 bp, Homo sapiens
ccttagcgcattcta

SEQ ID NO: 1374605 - DNA, 15 bp, Homo sapiens
cccttagcgcattct

SEQ ID NO: 1374606 - DNA, 15 bp, Homo sapiens
ccccttagcgcattc

SEQ ID NO: 1374607 - DNA, 15 bp, Homo sapiens
accccttagcgcatt

SEQ ID NO: 1374608 - DNA, 15 bp, Homo sapiens
caccccttagcgcat

SEQ ID NO: 1374609 - DNA, 15 bp, Homo sapiens
ccaccccttagcgca

SEQ ID NO: 1374610 - DNA, 15 bp, Homo sapiens
tccaccccttagcgc

SEQ ID NO: 1374611 - DNA, 15 bp, Homo sapiens
ttccaccccttagcg

SEQ ID NO: 1374612 - DNA, 15 bp, Homo sapiens
tttccaccccttagc

SEQ ID NO: 1374613 - DNA, 15 bp, Homo sapiens
gtttccaccccttag

SEQ ID NO: 1374614 - DNA, 15 bp, Homo sapiens
cgtttccacccctta

SEQ ID NO: 1374615 - DNA, 15 bp, Homo sapiens
tcgtttccacccctt

SEQ ID NO: 1374616 - DNA, 15 bp, Homo sapiens
ttcgtttccacccct

SEQ ID NO: 1374617 - DNA, 15 bp, Homo sapiens
cttcgtttccacccc

SEQ ID NO: 1374618 - DNA, 15 bp, Homo sapiens
gcttcgtttccaccc

SEQ ID NO: 1374619 - DNA, 15 bp, Homo sapiens
ggcttcgtttccacc

SEQ ID NO: 1374620 - DNA, 15 bp, Homo sapiens
aggcttcgtttccac

SEQ ID NO: 1374621 - DNA, 15 bp, Homo sapiens
caggcttcgtttcca

SEQ ID NO: 1374622 - DNA, 15 bp, Homo sapiens
gcaggcttcgtttcc

SEQ ID NO: 1374623 - DNA, 15 bp, Homo sapiens
agcaggcttcgtttc

SEQ ID NO: 1374624 - DNA, 15 bp, Homo sapiens
cagcaggcttcgttt

SEQ ID NO: 1374625 - DNA, 15 bp, Homo sapiens
ccagcaggcttcgtt

SEQ ID NO: 1374626 - DNA, 15 bp, Homo sapiens
cccagcaggcttcgt

SEQ ID NO: 1374627 - DNA, 15 bp, Homo sapiens
gcccagcaggcttcg

SEQ ID NO: 1374628 - DNA, 15 bp, Homo sapiens
ggcccagcaggcttc

SEQ ID NO: 1374629 - DNA, 15 bp, Homo sapiens
gggcccagcaggctt

SEQ ID NO: 1374630 - DNA, 15 bp, Homo sapiens
cgggcccagcaggct

SEQ ID NO: 1374631 - DNA, 15 bp, Homo sapiens
ccgggcccagcaggc

SEQ ID NO: 1374632 - DNA, 15 bp, Homo sapiens
cccgggcccagcagg

SEQ ID NO: 1374633 - DNA, 15 bp, Homo sapiens
tcccgggcccagcag

SEQ ID NO: 1374634 - DNA, 15 bp, Homo sapiens
ttcccgggcccagca

SEQ ID NO: 1374635 - DNA, 15 bp, Homo sapiens
gttcccgggcccagc

SEQ ID NO: 1374636 - DNA, 15 bp, Homo sapiens
ggttcccgggcccag

SEQ ID NO: 1374637 - DNA, 15 bp, Homo sapiens
tggttcccgggccca

SEQ ID NO: 1374638 - DNA, 15 bp, Homo sapiens
ctggttcccgggccc

SEQ ID NO: 1374639 - DNA, 15 bp, Homo sapiens
tctggttcccgggcc

SEQ ID NO: 1374640 - DNA, 15 bp, Homo sapiens
ctctggttcccgggc

SEQ ID NO: 1374641 - DNA, 15 bp, Homo sapiens
tctctggttcccggg

SEQ ID NO: 1374642 - DNA, 15 bp, Homo sapiens
ctctctggttcccgg

SEQ ID NO: 1374643 - DNA, 15 bp, Homo sapiens
gctctctggttcccg

SEQ ID NO: 1374644 - DNA, 15 bp, Homo sapiens
tgctctctggttccc

SEQ ID NO: 1374645 - DNA, 15 bp, Homo sapiens
ctgctctctggttcc

SEQ ID NO: 1374646 - DNA, 15 bp, Homo sapiens
gctgctctctggttc

SEQ ID NO: 1374647 - DNA, 15 bp, Homo sapiens
ggctgctctctggtt

SEQ ID NO: 1374648 - DNA, 15 bp, Homo sapiens
aggctgctctctggt

SEQ ID NO: 1374649 - DNA, 15 bp, Homo sapiens
caggctgctctctgg

SEQ ID NO: 1374650 - DNA, 15 bp, Homo sapiens
ccaggctgctctctg

SEQ ID NO: 1374651 - DNA, 15 bp, Homo sapiens
gccaggctgctctct

SEQ ID NO: 1374652 - DNA, 15 bp, Homo sapiens
aggccaggctgctct

SEQ ID NO: 1374653 - DNA, 15 bp, Homo sapiens
aaggccaggctgctc

SEQ ID NO: 1374654 - DNA, 15 bp, Homo sapiens
aaaggccaggctgct

SEQ ID NO: 1374655 - DNA, 15 bp, Homo sapiens
caaaggccaggctgc

SEQ ID NO: 1374656 - DNA, 15 bp, Homo sapiens
tcaaaggccaggctg

SEQ ID NO: 1374657 - DNA, 15 bp, Homo sapiens
ttcaaaggccaggct

SEQ ID NO: 1374658 - DNA, 15 bp, Homo sapiens
cttcaaaggccaggc

SEQ ID NO: 1374659 - DNA, 15 bp, Homo sapiens
ccttcaaaggccagg

SEQ ID NO: 1374660 - DNA, 15 bp, Homo sapiens
tccttcaaaggccag

SEQ ID NO: 1374661 - DNA, 15 bp, Homo sapiens
ctccttcaaaggcca

SEQ ID NO: 1374662 - DNA, 15 bp, Homo sapiens
tctccttcaaaggcc

SEQ ID NO: 1374663 - DNA, 15 bp, Homo sapiens
gtctccttcaaaggc

SEQ ID NO: 1374664 - DNA, 15 bp, Homo sapiens
ggtctccttcaaagg

SEQ ID NO: 1374665 - DNA, 15 bp, Homo sapiens
gggtctccttcaaag

SEQ ID NO: 1374666 - DNA, 15 bp, Homo sapiens
agggtctccttcaaa

SEQ ID NO: 1374667 - DNA, 15 bp, Homo sapiens
cagggtctccttcaa

SEQ ID NO: 1374668 - DNA, 15 bp, Homo sapiens
acagggtctccttca

SEQ ID NO: 1374669 - DNA, 15 bp, Homo sapiens
cacagggtctccttc

SEQ ID NO: 1374670 - DNA, 15 bp, Homo sapiens
ccacagggtctcctt

SEQ ID NO: 1374671 - DNA, 15 bp, Homo sapiens
gccacagggtctcct

SEQ ID NO: 1374672 - DNA, 15 bp, Homo sapiens
tgccacagggtctcc

SEQ ID NO: 1374673 - DNA, 15 bp, Homo sapiens
gtgccacagggtctc

SEQ ID NO: 1374674 - DNA, 15 bp, Homo sapiens
ggtgccacagggtct

SEQ ID NO: 1374675 - DNA, 15 bp, Homo sapiens
gggtgccacagggtc

SEQ ID NO: 1374676 - DNA, 15 bp, Homo sapiens
ggggtgccacagggt

SEQ ID NO: 1374677 - DNA, 15 bp, Homo sapiens
gggggtgccacaggg

SEQ ID NO: 1374678 - DNA, 15 bp, Homo sapiens
agggggtgccacagg

SEQ ID NO: 1374679 - DNA, 15 bp, Homo sapiens
cagggggtgccacag

SEQ ID NO: 1374680 - DNA, 15 bp, Homo sapiens
gcagggggtgccaca

SEQ ID NO: 1374681 - DNA, 15 bp, Homo sapiens
ggcagggggtgccac

SEQ ID NO: 1374682 - DNA, 15 bp, Homo sapiens
gggcagggggtgcca

SEQ ID NO: 1374683 - DNA, 15 bp, Homo sapiens
tgggcagggggtgcc

SEQ ID NO: 1374684 - DNA, 15 bp, Homo sapiens
gtgggcagggggtgc

SEQ ID NO: 1374685 - DNA, 15 bp, Homo sapiens
ggtgggcagggggtg

SEQ ID NO: 1374686 - DNA, 15 bp, Homo sapiens
gggtgggcagggggt

SEQ ID NO: 1374687 - DNA, 15 bp, Homo sapiens
ggggtgggcaggggg

SEQ ID NO: 1374688 - DNA, 15 bp, Homo sapiens
gggggtgggcagggg

SEQ ID NO: 1374689 - DNA, 15 bp, Homo sapiens
tgggggtgggcaggg

SEQ ID NO: 1374690 - DNA, 15 bp, Homo sapiens
ttgggggtgggcagg

SEQ ID NO: 1374691 - DNA, 15 bp, Homo sapiens
cttgggggtgggcag

SEQ ID NO: 1374692 - DNA, 15 bp, Homo sapiens
acttgggggtgggca

SEQ ID NO: 1374693 - DNA, 15 bp, Homo sapiens
gacttgggggtgggc

SEQ ID NO: 1374694 - DNA, 15 bp, Homo sapiens
ggacttgggggtggg

SEQ ID NO: 1374695 - DNA, 15 bp, Homo sapiens
tggacttgggggtgg

SEQ ID NO: 1374696 - DNA, 15 bp, Homo sapiens
ctggacttgggggtg

SEQ ID NO: 1374697 - DNA, 15 bp, Homo sapiens
gctggacttgggggt

SEQ ID NO: 1374698 - DNA, 15 bp, Homo sapiens
ggctggacttggggg

SEQ ID NO: 1374699 - DNA, 15 bp, Homo sapiens
tggctggacttgggg

SEQ ID NO: 1374700 - DNA, 15 bp, Homo sapiens
atggctggacttggg

SEQ ID NO: 1374701 - DNA, 15 bp, Homo sapiens
gatggctggacttgg

SEQ ID NO: 1374702 - DNA, 15 bp, Homo sapiens
agatggctggacttg

SEQ ID NO: 1374703 - DNA, 15 bp, Homo sapiens
gagatggctggactt

SEQ ID NO: 1374704 - DNA, 15 bp, Homo sapiens
tgagatggctggact

SEQ ID NO: 1374705 - DNA, 15 bp, Homo sapiens
gtgagatggctggac

SEQ ID NO: 1374706 - DNA, 15 bp, Homo sapiens
agtgagatggctgga

SEQ ID NO: 1374707 - DNA, 15 bp, Homo sapiens
aagtgagatggctgg

SEQ ID NO: 1374708 - DNA, 15 bp, Homo sapiens
gaagtgagatggctg

SEQ ID NO: 1374709 - DNA, 15 bp, Homo sapiens
tgaagtgagatggct

SEQ ID NO: 1374710 - DNA, 15 bp, Homo sapiens
gtgaagtgagatggc

SEQ ID NO: 1374711 - DNA, 15 bp, Homo sapiens
agtgaagtgagatgg

SEQ ID NO: 1374712 - DNA, 15 bp, Homo sapiens
cagtgaagtgagatg

SEQ ID NO: 1374713 - DNA, 15 bp, Homo sapiens
ccagtgaagtgagat

SEQ ID NO: 1374714 - DNA, 15 bp, Homo sapiens
tccagtgaagtgaga

SEQ ID NO: 1374715 - DNA, 15 bp, Homo sapiens
ctccagtgaagtgag

SEQ ID NO: 1374716 - DNA, 15 bp, Homo sapiens
tctccagtgaagtga

SEQ ID NO: 1374717 - DNA, 15 bp, Homo sapiens
atctccagtgaagtg

SEQ ID NO: 1374718 - DNA, 15 bp, Homo sapiens
catctccagtgaagt

SEQ ID NO: 1374719 - DNA, 15 bp, Homo sapiens
gcatctccagtgaag

SEQ ID NO: 1374720 - DNA, 15 bp, Homo sapiens
agcatctccagtgaa

SEQ ID NO: 1374721 - DNA, 15 bp, Homo sapiens
cagcatctccagtga

SEQ ID NO: 1374722 - DNA, 15 bp, Homo sapiens
gcagcatctccagtg

SEQ ID NO: 1374723 - DNA, 15 bp, Homo sapiens
tgcagcatctccagt

SEQ ID NO: 1374724 - DNA, 15 bp, Homo sapiens
ttgcagcatctccag

SEQ ID NO: 1374725 - DNA, 15 bp, Homo sapiens
tttgcagcatctcca

SEQ ID NO: 1374726 - DNA, 15 bp, Homo sapiens
ctttgcagcatctcc

SEQ ID NO: 1374727 - DNA, 15 bp, Homo sapiens
gctttgcagcatctc

SEQ ID NO: 1374728 - DNA, 15 bp, Homo sapiens
tgctttgcagcatct

SEQ ID NO: 1374729 - DNA, 15 bp, Homo sapiens
atgctttgcagcatc

SEQ ID NO: 1374730 - DNA, 15 bp, Homo sapiens
catgctttgcagcat

SEQ ID NO: 1374731 - DNA, 15 bp, Homo sapiens
tcatgctttgcagca

SEQ ID NO: 1374732 - DNA, 15 bp, Homo sapiens
ttcatgctttgcagc

SEQ ID NO: 1374733 - DNA, 15 bp, Homo sapiens
tttcatgctttgcag

SEQ ID NO: 1374734 - DNA, 15 bp, Homo sapiens
ttttcatgctttgca

SEQ ID NO: 1374735 - DNA, 15 bp, Homo sapiens
tttttcatgctttgc

SEQ ID NO: 1374736 - DNA, 15 bp, Homo sapiens
ttttttcatgctttg

SEQ ID NO: 1374737 - DNA, 15 bp, Homo sapiens
tttttttcatgcttt

SEQ ID NO: 1374738 - DNA, 15 bp, Homo sapiens
ttttttttcatgctt

SEQ ID NO: 1374739 - DNA, 15 bp, Homo sapiens
tttttttttcatgct

SEQ ID NO: 1374740 - DNA, 15 bp, Homo sapiens
ttttttttttcatgc

SEQ ID NO: 1374741 - DNA, 15 bp, Homo sapiens
tttttttttttcatg

SEQ ID NO: 1374742 - DNA, 15 bp, Homo sapiens
ttttttttttttcat

SEQ ID NO: 1374743 - DNA, 15 bp, Homo sapiens
attttttttttttca

SEQ ID NO: 1374744 - DNA, 15 bp, Homo sapiens
gattttttttttttc

SEQ ID NO: 1374745 - DNA, 15 bp, Homo sapiens
tggattttttttttt

SEQ ID NO: 1374746 - DNA, 15 bp, Homo sapiens
ctggatttttttttt

SEQ ID NO: 1374747 - DNA, 15 bp, Homo sapiens
actggattttttttt

SEQ ID NO: 1374748 - DNA, 15 bp, Homo sapiens
cactggatttttttt

SEQ ID NO: 1374749 - DNA, 15 bp, Homo sapiens
acactggattttttt

SEQ ID NO: 1374750 - DNA, 15 bp, Homo sapiens
aacactggatttttt

SEQ ID NO: 1374751 - DNA, 15 bp, Homo sapiens
gaacactggattttt

SEQ ID NO: 1374752 - DNA, 15 bp, Homo sapiens
agaacactggatttt

SEQ ID NO: 1374753 - DNA, 15 bp, Homo sapiens
gagaacactggattt

SEQ ID NO: 1374754 - DNA, 15 bp, Homo sapiens
tgagaacactggatt

SEQ ID NO: 1374755 - DNA, 15 bp, Homo sapiens
ctgagaacactggat

SEQ ID NO: 1374756 - DNA, 15 bp, Homo sapiens
cctgagaacactgga

SEQ ID NO: 1374757 - DNA, 15 bp, Homo sapiens
acctgagaacactgg

SEQ ID NO: 1374758 - DNA, 15 bp, Homo sapiens
gacctgagaacactg

SEQ ID NO: 1374759 - DNA, 15 bp, Homo sapiens
tgacctgagaacact

SEQ ID NO: 1374760 - DNA, 15 bp, Homo sapiens
ctgacctgagaacac

SEQ ID NO: 1374761 - DNA, 15 bp, Homo sapiens
gctgacctgagaaca

SEQ ID NO: 1374762 - DNA, 15 bp, Homo sapiens
ggctgacctgagaac

SEQ ID NO: 1374763 - DNA, 15 bp, Homo sapiens
aggctgacctgagaa

SEQ ID NO: 1374764 - DNA, 15 bp, Homo sapiens
aaggctgacctgaga

SEQ ID NO: 1374765 - DNA, 15 bp, Homo sapiens
gaaggctgacctgag

SEQ ID NO: 1374766 - DNA, 15 bp, Homo sapiens
ggaaggctgacctga

SEQ ID NO: 1374767 - DNA, 15 bp, Homo sapiens
tggaaggctgacctg

SEQ ID NO: 1374768 - DNA, 15 bp, Homo sapiens
gtggaaggctgacct

SEQ ID NO: 1374769 - DNA, 15 bp, Homo sapiens
ggtggaaggctgacc

SEQ ID NO: 1374770 - DNA, 15 bp, Homo sapiens
tggtggaaggctgac

SEQ ID NO: 1374771 - DNA, 15 bp, Homo sapiens
ctggtggaaggctga

SEQ ID NO: 1374772 - DNA, 15 bp, Homo sapiens
gctggtggaaggctg

SEQ ID NO: 1374773 - DNA, 15 bp, Homo sapiens
ggctggtggaaggct

SEQ ID NO: 1374774 - DNA, 15 bp, Homo sapiens
tggctggtggaaggc

SEQ ID NO: 1374775 - DNA, 15 bp, Homo sapiens
ctggctggtggaagg

SEQ ID NO: 1374776 - DNA, 15 bp, Homo sapiens
cctggctggtggaag

SEQ ID NO: 1374777 - DNA, 15 bp, Homo sapiens
tcctggctggtggaa

SEQ ID NO: 1374778 - DNA, 15 bp, Homo sapiens
atcctggctggtgga

SEQ ID NO: 1374779 - DNA, 15 bp, Homo sapiens
aatcctggctggtgg

SEQ ID NO: 1374780 - DNA, 15 bp, Homo sapiens
gaatcctggctggtg

SEQ ID NO: 1374781 - DNA, 15 bp, Homo sapiens
tgaatcctggctggt

SEQ ID NO: 1374782 - DNA, 15 bp, Homo sapiens
atgaatcctggctgg

SEQ ID NO: 1374783 - DNA, 15 bp, Homo sapiens
gatgaatcctggctg

SEQ ID NO: 1374784 - DNA, 15 bp, Homo sapiens
cgatgaatcctggct

SEQ ID NO: 1374785 - DNA, 15 bp, Homo sapiens
acgatgaatcctggc

SEQ ID NO: 1374786 - DNA, 15 bp, Homo sapiens
gacgatgaatcctgg

SEQ ID NO: 1374787 - DNA, 15 bp, Homo sapiens
agacgatgaatcctg

SEQ ID NO: 1374788 - DNA, 15 bp, Homo sapiens
cagacgatgaatcct

SEQ ID NO: 1374789 - DNA, 15 bp, Homo sapiens
tcagacgatgaatcc

SEQ ID NO: 1374790 - DNA, 15 bp, Homo sapiens
atcagacgatgaatc

SEQ ID NO: 1374791 - DNA, 15 bp, Homo sapiens
gatcagacgatgaat

SEQ ID NO: 1374792 - DNA, 15 bp, Homo sapiens
agatcagacgatgaa

SEQ ID NO: 1374793 - DNA, 15 bp, Homo sapiens
cagatcagacgatga

SEQ ID NO: 1374794 - DNA, 15 bp, Homo sapiens
acagatcagacgatg

SEQ ID NO: 1374795 - DNA, 15 bp, Homo sapiens
aacagatcagacgat

SEQ ID NO: 1374796 - DNA, 15 bp, Homo sapiens
aaacagatcagacga

SEQ ID NO: 1374797 - DNA, 15 bp, Homo sapiens
caaacagatcagacg

SEQ ID NO: 1374798 - DNA, 15 bp, Homo sapiens
ccaaacagatcagac

SEQ ID NO: 1374799 - DNA, 15 bp, Homo sapiens
cccaaacagatcaga

SEQ ID NO: 1374800 - DNA, 15 bp, Homo sapiens
ccccaaacagatcag

SEQ ID NO: 1374801 - DNA, 15 bp, Homo sapiens
tccccaaacagatca

SEQ ID NO: 1374802 - DNA, 15 bp, Homo sapiens
ctccccaaacagatc

SEQ ID NO: 1374803 - DNA, 15 bp, Homo sapiens
tctccccaaacagat

SEQ ID NO: 1374804 - DNA, 15 bp, Homo sapiens
ctctccccaaacaga

SEQ ID NO: 1374805 - DNA, 15 bp, Homo sapiens
tctctccccaaacag

SEQ ID NO: 1374806 - DNA, 15 bp, Homo sapiens
ctctctccccaaaca

SEQ ID NO: 1374807 - DNA, 15 bp, Homo sapiens
gctctctccccaaac

SEQ ID NO: 1374808 - DNA, 15 bp, Homo sapiens
tgctctctccccaaa

SEQ ID NO: 1374809 - DNA, 15 bp, Homo sapiens
atgctctctccccaa

SEQ ID NO: 1374810 - DNA, 15 bp, Homo sapiens
catgctctctcccca

SEQ ID NO: 1374811 - DNA, 15 bp, Homo sapiens
ccatgctctctcccc

SEQ ID NO: 1374812 - DNA, 15 bp, Homo sapiens
cccatgctctctccc

SEQ ID NO: 1374813 - DNA, 15 bp, Homo sapiens
ccccatgctctctcc

SEQ ID NO: 1374814 - DNA, 15 bp, Homo sapiens
accccatgctctctc

SEQ ID NO: 1374815 - DNA, 15 bp, Homo sapiens
caccccatgctctct

SEQ ID NO: 1374816 - DNA, 15 bp, Homo sapiens
ccaccccatgctctc

SEQ ID NO: 1374817 - DNA, 15 bp, Homo sapiens
accaccccatgctct

SEQ ID NO: 1374818 - DNA, 15 bp, Homo sapiens
caccaccccatgctc

SEQ ID NO: 1374819 - DNA, 15 bp, Homo sapiens
ccaccaccccatgct

SEQ ID NO: 1374820 - DNA, 15 bp, Homo sapiens
tccaccaccccatgc

SEQ ID NO: 1374821 - DNA, 15 bp, Homo sapiens
ctccaccaccccatg

SEQ ID NO: 1374822 - DNA, 15 bp, Homo sapiens
tctccaccaccccat

SEQ ID NO: 1374823 - DNA, 15 bp, Homo sapiens
atctccaccacccca

SEQ ID NO: 1374824 - DNA, 15 bp, Homo sapiens
catctccaccacccc

SEQ ID NO: 1374825 - DNA, 15 bp, Homo sapiens
ccatctccaccaccc

SEQ ID NO: 1374826 - DNA, 15 bp, Homo sapiens
cccatctccaccacc

SEQ ID NO: 1374827 - DNA, 15 bp, Homo sapiens
acccatctccaccac

SEQ ID NO: 1374828 - DNA, 15 bp, Homo sapiens
aacccatctccacca

SEQ ID NO: 1374829 - DNA, 15 bp, Homo sapiens
caacccatctccacc

SEQ ID NO: 1374830 - DNA, 15 bp, Homo sapiens
ccaacccatctccac

SEQ ID NO: 1374831 - DNA, 15 bp, Homo sapiens
cccaacccatctcca

SEQ ID NO: 1374832 - DNA, 15 bp, Homo sapiens
gcccaacccatctcc

SEQ ID NO: 1374833 - DNA, 15 bp, Homo sapiens
ggcccaacccatctc

SEQ ID NO: 1374834 - DNA, 15 bp, Homo sapiens
gggcccaacccatct

SEQ ID NO: 1374835 - DNA, 15 bp, Homo sapiens
ggggcccaacccatc

SEQ ID NO: 1374836 - DNA, 15 bp, Homo sapiens
tggggcccaacccat

SEQ ID NO: 1374837 - DNA, 15 bp, Homo sapiens
ctggggcccaaccca

SEQ ID NO: 1374838 - DNA, 15 bp, Homo sapiens
actggggcccaaccc

SEQ ID NO: 1374839 - DNA, 15 bp, Homo sapiens
cactggggcccaacc

SEQ ID NO: 1374840 - DNA, 15 bp, Homo sapiens
acactggggcccaac

SEQ ID NO: 1374841 - DNA, 15 bp, Homo sapiens
aacactggggcccaa

SEQ ID NO: 1374842 - DNA, 15 bp, Homo sapiens
aaacactggggccca

SEQ ID NO: 1374843 - DNA, 15 bp, Homo sapiens
aaaacactggggccc

SEQ ID NO: 1374844 - DNA, 15 bp, Homo sapiens
gaaaacactggggcc

SEQ ID NO: 1374845 - DNA, 15 bp, Homo sapiens
agaaaacactggggc

SEQ ID NO: 1374846 - DNA, 15 bp, Homo sapiens
cagaaaacactgggg

SEQ ID NO: 1374847 - DNA, 15 bp, Homo sapiens
tcagaaaacactggg

SEQ ID NO: 1374848 - DNA, 15 bp, Homo sapiens
atcagaaaacactgg

SEQ ID NO: 1374849 - DNA, 15 bp, Homo sapiens
aatcagaaaacactg

SEQ ID NO: 1374850 - DNA, 15 bp, Homo sapiens
taatcagaaaacact

SEQ ID NO: 1374851 - DNA, 15 bp, Homo sapiens
ttaatcagaaaacac

SEQ ID NO: 1374852 - DNA, 15 bp, Homo sapiens
gttaatcagaaaaca

SEQ ID NO: 1374853 - DNA, 15 bp, Homo sapiens
agttaatcagaaaac

SEQ ID NO: 1374854 - DNA, 15 bp, Homo sapiens
gagttaatcagaaaa

SEQ ID NO: 1374855 - DNA, 15 bp, Homo sapiens
cgagttaatcagaaa

SEQ ID NO: 1374856 - DNA, 15 bp, Homo sapiens
gcgagttaatcagaa

SEQ ID NO: 1374857 - DNA, 15 bp, Homo sapiens
tgcgagttaatcaga

SEQ ID NO: 1374858 - DNA, 15 bp, Homo sapiens
ctgcgagttaatcag

SEQ ID NO: 1374859 - DNA, 15 bp, Homo sapiens
actgcgagttaatca

SEQ ID NO: 1374860 - DNA, 15 bp, Homo sapiens
aactgcgagttaatc

SEQ ID NO: 1374861 - DNA, 15 bp, Homo sapiens
aaactgcgagttaat

SEQ ID NO: 1374862 - DNA, 15 bp, Homo sapiens
taaactgcgagttaa

SEQ ID NO: 1374863 - DNA, 15 bp, Homo sapiens
gtaaactgcgagtta

SEQ ID NO: 1374864 - DNA, 15 bp, Homo sapiens
ggtaaactgcgagtt

SEQ ID NO: 1374865 - DNA, 15 bp, Homo sapiens
aggtaaactgcgagt

SEQ ID NO: 1374866 - DNA, 15 bp, Homo sapiens
caggtaaactgcgag

SEQ ID NO: 1374867 - DNA, 15 bp, Homo sapiens
tcaggtaaactgcga

SEQ ID NO: 1374868 - DNA, 15 bp, Homo sapiens
ttcaggtaaactgcg

SEQ ID NO: 1374869 - DNA, 15 bp, Homo sapiens
tttcaggtaaactgc

SEQ ID NO: 1374870 - DNA, 15 bp, Homo sapiens
gtttcaggtaaactg

SEQ ID NO: 1374871 - DNA, 15 bp, Homo sapiens
tgtttcaggtaaact

SEQ ID NO: 1374872 - DNA, 15 bp, Homo sapiens
atgtttcaggtaaac

SEQ ID NO: 1374873 - DNA, 15 bp, Homo sapiens
aatgtttcaggtaaa

SEQ ID NO: 1374874 - DNA, 15 bp, Homo sapiens
aaatgtttcaggtaa

SEQ ID NO: 1374875 - DNA, 15 bp, Homo sapiens
aaaatgtttcaggta

SEQ ID NO: 1374876 - DNA, 15 bp, Homo sapiens
ccaaaatgtttcagg

SEQ ID NO: 1374877 - DNA, 15 bp, Homo sapiens
accaaaatgtttcag

SEQ ID NO: 1374878 - DNA, 15 bp, Homo sapiens
aaccaaaatgtttca

SEQ ID NO: 1374879 - DNA, 15 bp, Homo sapiens
aaaccaaaatgtttc

SEQ ID NO: 1374880 - DNA, 15 bp, Homo sapiens
caaaccaaaatgttt

SEQ ID NO: 1374881 - DNA, 15 bp, Homo sapiens
acaaaccaaaatgtt

SEQ ID NO: 1374882 - DNA, 15 bp, Homo sapiens
aacaaaccaaaatgt

SEQ ID NO: 1374883 - DNA, 15 bp, Homo sapiens
aaacaaaccaaaatg

SEQ ID NO: 1374884 - DNA, 15 bp, Homo sapiens
gaaacaaaccaaaat

SEQ ID NO: 1374885 - DNA, 15 bp, Homo sapiens
ggaaacaaaccaaaa

SEQ ID NO: 1374886 - DNA, 15 bp, Homo sapiens
aggaaacaaaccaaa

SEQ ID NO: 1374887 - DNA, 15 bp, Homo sapiens
gaggaaacaaaccaa

SEQ ID NO: 1374888 - DNA, 15 bp, Homo sapiens
ggaggaaacaaacca

SEQ ID NO: 1374889 - DNA, 15 bp, Homo sapiens
tggaggaaacaaacc

SEQ ID NO: 1374890 - DNA, 15 bp, Homo sapiens
atggaggaaacaaac

SEQ ID NO: 1374891 - DNA, 15 bp, Homo sapiens
catggaggaaacaaa

SEQ ID NO: 1374892 - DNA, 15 bp, Homo sapiens
tcatggaggaaacaa

SEQ ID NO: 1374893 - DNA, 15 bp, Homo sapiens
ctcatggaggaaaca

SEQ ID NO: 1374894 - DNA, 15 bp, Homo sapiens
cctcatggaggaaac

SEQ ID NO: 1374895 - DNA, 15 bp, Homo sapiens
tcctcatggaggaaa

SEQ ID NO: 1374896 - DNA, 15 bp, Homo sapiens
ttcctcatggaggaa

SEQ ID NO: 1374897 - DNA, 15 bp, Homo sapiens
gttcctcatggagga

SEQ ID NO: 1374898 - DNA, 15 bp, Homo sapiens
agttcctcatggagg

SEQ ID NO: 1374899 - DNA, 15 bp, Homo sapiens
gagttcctcatggag

SEQ ID NO: 1374900 - DNA, 15 bp, Homo sapiens
tgagttcctcatgga

SEQ ID NO: 1374901 - DNA, 15 bp, Homo sapiens
gtgagttcctcatgg

SEQ ID NO: 1374902 - DNA, 15 bp, Homo sapiens
agtgagttcctcatg

SEQ ID NO: 1374903 - DNA, 15 bp, Homo sapiens
gagtgagttcctcat

SEQ ID NO: 1374904 - DNA, 15 bp, Homo sapiens
agagtgagttcctca

SEQ ID NO: 1374905 - DNA, 15 bp, Homo sapiens
tagagtgagttcctc

SEQ ID NO: 1374906 - DNA, 15 bp, Homo sapiens
ttagagtgagttcct

SEQ ID NO: 1374907 - DNA, 15 bp, Homo sapiens
tttagagtgagttcc

SEQ ID NO: 1374908 - DNA, 15 bp, Homo sapiens
gtttagagtgagttc

SEQ ID NO: 1374909 - DNA, 15 bp, Homo sapiens
ggtttagagtgagtt

SEQ ID NO: 1374910 - DNA, 15 bp, Homo sapiens
gggtttagagtgagt

SEQ ID NO: 1374911 - DNA, 15 bp, Homo sapiens
ggggtttagagtgag

SEQ ID NO: 1374912 - DNA, 15 bp, Homo sapiens
tggggtttagagtga

SEQ ID NO: 1374913 - DNA, 15 bp, Homo sapiens
ctggggtttagagtg

SEQ ID NO: 1374914 - DNA, 15 bp, Homo sapiens
gctggggtttagagt

SEQ ID NO: 1374915 - DNA, 15 bp, Homo sapiens
tgctggggtttagag

SEQ ID NO: 1374916 - DNA, 15 bp, Homo sapiens
atgctggggtttaga

SEQ ID NO: 1374917 - DNA, 15 bp, Homo sapiens
aatgctggggtttag

SEQ ID NO: 1374918 - DNA, 15 bp, Homo sapiens
caatgctggggttta

SEQ ID NO: 1374919 - DNA, 15 bp, Homo sapiens
acaatgctggggttt

SEQ ID NO: 1374920 - DNA, 15 bp, Homo sapiens
gacaatgctggggtt

SEQ ID NO: 1374921 - DNA, 15 bp, Homo sapiens
agacaatgctggggt

SEQ ID NO: 1374922 - DNA, 15 bp, Homo sapiens
cagacaatgctgggg

SEQ ID NO: 1374923 - DNA, 15 bp, Homo sapiens
acagacaatgctggg

SEQ ID NO: 1374924 - DNA, 15 bp, Homo sapiens
cacagacaatgctgg

SEQ ID NO: 1374925 - DNA, 15 bp, Homo sapiens
acacagacaatgctg

SEQ ID NO: 1374926 - DNA, 15 bp, Homo sapiens
aacacagacaatgct

SEQ ID NO: 1374927 - DNA, 15 bp, Homo sapiens
aaacacagacaatgc

SEQ ID NO: 1374928 - DNA, 15 bp, Homo sapiens
gaaacacagacaatg

SEQ ID NO: 1374929 - DNA, 15 bp, Homo sapiens
ggaaacacagacaat

SEQ ID NO: 1374930 - DNA, 15 bp, Homo sapiens
aggaaacacagacaa

SEQ ID NO: 1374931 - DNA, 15 bp, Homo sapiens
caggaaacacagaca

SEQ ID NO: 1374932 - DNA, 15 bp, Homo sapiens
tcaggaaacacagac

SEQ ID NO: 1374933 - DNA, 15 bp, Homo sapiens
ctcaggaaacacaga

SEQ ID NO: 1374934 - DNA, 15 bp, Homo sapiens
cctcaggaaacacag

SEQ ID NO: 1374935 - DNA, 15 bp, Homo sapiens
tcctcaggaaacaca

SEQ ID NO: 1374936 - DNA, 15 bp, Homo sapiens
ctcctcaggaaacac

SEQ ID NO: 1374937 - DNA, 15 bp, Homo sapiens
actcctcaggaaaca

SEQ ID NO: 1374938 - DNA, 15 bp, Homo sapiens
gactcctcaggaaac

SEQ ID NO: 1374939 - DNA, 15 bp, Homo sapiens
agactcctcaggaaa

SEQ ID NO: 1374940 - DNA, 15 bp, Homo sapiens
cagactcctcaggaa

SEQ ID NO: 1374941 - DNA, 15 bp, Homo sapiens
tcagactcctcagga

SEQ ID NO: 1374942 - DNA, 15 bp, Homo sapiens
ctcagactcctcagg

SEQ ID NO: 1374943 - DNA, 15 bp, Homo sapiens
cctcagactcctcag

SEQ ID NO: 1374944 - DNA, 15 bp, Homo sapiens
ccctcagactcctca

SEQ ID NO: 1374945 - DNA, 15 bp, Homo sapiens
ctccctcagactcct

SEQ ID NO: 1374946 - DNA, 15 bp, Homo sapiens
gctccctcagactcc

SEQ ID NO: 1374947 - DNA, 15 bp, Homo sapiens
agctccctcagactc

SEQ ID NO: 1374948 - DNA, 15 bp, Homo sapiens
gagctccctcagact

SEQ ID NO: 1374949 - DNA, 15 bp, Homo sapiens
agagctccctcagac

SEQ ID NO: 1374950 - DNA, 15 bp, Homo sapiens
cagagctccctcaga

SEQ ID NO: 1374951 - DNA, 15 bp, Homo sapiens
ccagagctccctcag

SEQ ID NO: 1374952 - DNA, 15 bp, Homo sapiens
cccagagctccctca

SEQ ID NO: 1374953 - DNA, 15 bp, Homo sapiens
ccccagagctccctc

SEQ ID NO: 1374954 - DNA, 15 bp, Homo sapiens
accccagagctccct

SEQ ID NO: 1374955 - DNA, 15 bp, Homo sapiens
gaccccagagctccc

SEQ ID NO: 1374956 - DNA, 15 bp, Homo sapiens
ggaccccagagctcc

SEQ ID NO: 1374957 - DNA, 15 bp, Homo sapiens
aggaccccagagctc

SEQ ID NO: 1374958 - DNA, 15 bp, Homo sapiens
taggaccccagagct

SEQ ID NO: 1374959 - DNA, 15 bp, Homo sapiens
ataggaccccagagc

SEQ ID NO: 1374960 - DNA, 15 bp, Homo sapiens
aataggaccccagag

SEQ ID NO: 1374961 - DNA, 15 bp, Homo sapiens
aaataggaccccaga

SEQ ID NO: 1374962 - DNA, 15 bp, Homo sapiens
gaaataggaccccag

SEQ ID NO: 1374963 - DNA, 15 bp, Homo sapiens
ggaaataggacccca

SEQ ID NO: 1374964 - DNA, 15 bp, Homo sapiens
aggaaataggacccc

SEQ ID NO: 1374965 - DNA, 15 bp, Homo sapiens
gaggaaataggaccc

SEQ ID NO: 1374966 - DNA, 15 bp, Homo sapiens
agaggaaataggacc

SEQ ID NO: 1374967 - DNA, 15 bp, Homo sapiens
aagaggaaataggac

SEQ ID NO: 1374968 - DNA, 15 bp, Homo sapiens
aaagaggaaatagga

SEQ ID NO: 1374969 - DNA, 15 bp, Homo sapiens
aaaagaggaaatagg

SEQ ID NO: 1374970 - DNA, 15 bp, Homo sapiens
caaaagaggaaatag

SEQ ID NO: 1374971 - DNA, 15 bp, Homo sapiens
ccaaaagaggaaata

SEQ ID NO: 1374972 - DNA, 15 bp, Homo sapiens
tccaaaagaggaaat

SEQ ID NO: 1374973 - DNA, 15 bp, Homo sapiens
atccaaaagaggaaa

SEQ ID NO: 1374974 - DNA, 15 bp, Homo sapiens
catccaaaagaggaa

SEQ ID NO: 1374975 - DNA, 15 bp, Homo sapiens
tcatccaaaagagga

SEQ ID NO: 1374976 - DNA, 15 bp, Homo sapiens
ctcatccaaaagagg

SEQ ID NO: 1374977 - DNA, 15 bp, Homo sapiens
cctcatccaaaagag

SEQ ID NO: 1374978 - DNA, 15 bp, Homo sapiens
gcctcatccaaaaga

SEQ ID NO: 1374979 - DNA, 15 bp, Homo sapiens
agcctcatccaaaag

SEQ ID NO: 1374980 - DNA, 15 bp, Homo sapiens
cagcctcatccaaaa

SEQ ID NO: 1374981 - DNA, 15 bp, Homo sapiens
acagcctcatccaaa

SEQ ID NO: 1374982 - DNA, 15 bp, Homo sapiens
cacagcctcatccaa

SEQ ID NO: 1374983 - DNA, 15 bp, Homo sapiens
tcacagcctcatcca

SEQ ID NO: 1374984 - DNA, 15 bp, Homo sapiens
ctcacagcctcatcc

SEQ ID NO: 1374985 - DNA, 15 bp, Homo sapiens
gctcacagcctcatc

SEQ ID NO: 1374986 - DNA, 15 bp, Homo sapiens
tgctcacagcctcat

SEQ ID NO: 1374987 - DNA, 15 bp, Homo sapiens
atgctcacagcctca

SEQ ID NO: 1374988 - DNA, 15 bp, Homo sapiens
catgctcacagcctc

SEQ ID NO: 1374989 - DNA, 15 bp, Homo sapiens
ccatgctcacagcct

SEQ ID NO: 1374990 - DNA, 15 bp, Homo sapiens
accatgctcacagcc

SEQ ID NO: 1374991 - DNA, 15 bp, Homo sapiens
caccatgctcacagc

SEQ ID NO: 1374992 - DNA, 15 bp, Homo sapiens
ccaccatgctcacag

SEQ ID NO: 1374993 - DNA, 15 bp, Homo sapiens
tccaccatgctcaca

SEQ ID NO: 1374994 - DNA, 15 bp, Homo sapiens
atccaccatgctcac

SEQ ID NO: 1374995 - DNA, 15 bp, Homo sapiens
aatccaccatgctca

SEQ ID NO: 1374996 - DNA, 15 bp, Homo sapiens
taatccaccatgctc

SEQ ID NO: 1374997 - DNA, 15 bp, Homo sapiens
ctaatccaccatgct

SEQ ID NO: 1374998 - DNA, 15 bp, Homo sapiens
tctaatccaccatgc

SEQ ID NO: 1374999 - DNA, 15 bp, Homo sapiens
ctctaatccaccatg

SEQ ID NO: 1375000 - DNA, 15 bp, Homo sapiens
tctctaatccaccat

SEQ ID NO: 1375001 - DNA, 15 bp, Homo sapiens
gtctctaatccacca

SEQ ID NO: 1375002 - DNA, 15 bp, Homo sapiens
tgtctctaatccacc

SEQ ID NO: 1375003 - DNA, 15 bp, Homo sapiens
ctgtctctaatccac

SEQ ID NO: 1375004 - DNA, 15 bp, Homo sapiens
gctgtctctaatcca

SEQ ID NO: 1375005 - DNA, 15 bp, Homo sapiens
ggctgtctctaatcc

SEQ ID NO: 1375006 - DNA, 15 bp, Homo sapiens
gggctgtctctaatc

SEQ ID NO: 1375007 - DNA, 15 bp, Homo sapiens
ggggctgtctctaat

SEQ ID NO: 1375008 - DNA, 15 bp, Homo sapiens
aggggctgtctctaa

SEQ ID NO: 1375009 - DNA, 15 bp, Homo sapiens
aaggggctgtctcta

SEQ ID NO: 1375010 - DNA, 15 bp, Homo sapiens
taaggggctgtctct

SEQ ID NO: 1375011 - DNA, 15 bp, Homo sapiens
ttaaggggctgtctc

SEQ ID NO: 1375012 - DNA, 15 bp, Homo sapiens
tttaaggggctgtct

SEQ ID NO: 1375013 - DNA, 15 bp, Homo sapiens
ctttaaggggctgtc

SEQ ID NO: 1375014 - DNA, 15 bp, Homo sapiens
actttaaggggctgt

SEQ ID NO: 1375015 - DNA, 15 bp, Homo sapiens
aactttaaggggctg

SEQ ID NO: 1375016 - DNA, 15 bp, Homo sapiens
taactttaaggggct

SEQ ID NO: 1375017 - DNA, 15 bp, Homo sapiens
ctaactttaaggggc

SEQ ID NO: 1375018 - DNA, 15 bp, Homo sapiens
gctaactttaagggg

SEQ ID NO: 1375019 - DNA, 15 bp, Homo sapiens
ggctaactttaaggg

SEQ ID NO: 1375020 - DNA, 15 bp, Homo sapiens
gggctaactttaagg

SEQ ID NO: 1375021 - DNA, 15 bp, Homo sapiens
tgggctaactttaag

SEQ ID NO: 1375022 - DNA, 15 bp, Homo sapiens
ctgggctaactttaa

SEQ ID NO: 1375023 - DNA, 15 bp, Homo sapiens
tctgggctaacttta

SEQ ID NO: 1375024 - DNA, 15 bp, Homo sapiens
atctgggctaacttt

SEQ ID NO: 1375025 - DNA, 15 bp, Homo sapiens
tatctgggctaactt

SEQ ID NO: 1375026 - DNA, 15 bp, Homo sapiens
atatctgggctaact

SEQ ID NO: 1375027 - DNA, 15 bp, Homo sapiens
gatatctgggctaac

SEQ ID NO: 1375028 - DNA, 15 bp, Homo sapiens
agatatctgggctaa

SEQ ID NO: 1375029 - DNA, 15 bp, Homo sapiens
gagatatctgggcta

SEQ ID NO: 1375030 - DNA, 15 bp, Homo sapiens
tgagatatctgggct

SEQ ID NO: 1375031 - DNA, 15 bp, Homo sapiens
ctgagatatctgggc

SEQ ID NO: 1375032 - DNA, 15 bp, Homo sapiens
gctgagatatctggg

SEQ ID NO: 1375033 - DNA, 15 bp, Homo sapiens
tgctgagatatctgg

SEQ ID NO: 1375034 - DNA, 15 bp, Homo sapiens
ttgctgagatatctg

SEQ ID NO: 1375035 - DNA, 15 bp, Homo sapiens
cttgctgagatatct

SEQ ID NO: 1375036 - DNA, 15 bp, Homo sapiens
acttgctgagatatc

SEQ ID NO: 1375037 - DNA, 15 bp, Homo sapiens
aacttgctgagatat

SEQ ID NO: 1375038 - DNA, 15 bp, Homo sapiens
aaacttgctgagata

SEQ ID NO: 1375039 - DNA, 15 bp, Homo sapiens
aaaacttgctgagat

SEQ ID NO: 1375040 - DNA, 15 bp, Homo sapiens
taaaacttgctgaga

SEQ ID NO: 1375041 - DNA, 15 bp, Homo sapiens
gtaaaacttgctgag

SEQ ID NO: 1375042 - DNA, 15 bp, Homo sapiens
cgtaaaacttgctga

SEQ ID NO: 1375043 - DNA, 15 bp, Homo sapiens
gcgtaaaacttgctg

SEQ ID NO: 1375044 - DNA, 15 bp, Homo sapiens
cgcgtaaaacttgct

SEQ ID NO: 1375045 - DNA, 15 bp, Homo sapiens
acgcgtaaaacttgc

SEQ ID NO: 1375046 - DNA, 15 bp, Homo sapiens
gacgcgtaaaacttg

SEQ ID NO: 1375047 - DNA, 15 bp, Homo sapiens
agacgcgtaaaactt

SEQ ID NO: 1375048 - DNA, 15 bp, Homo sapiens
gagacgcgtaaaact

SEQ ID NO: 1375049 - DNA, 15 bp, Homo sapiens
agagacgcgtaaaac

SEQ ID NO: 1375050 - DNA, 15 bp, Homo sapiens
tagagacgcgtaaaa

SEQ ID NO: 1375051 - DNA, 15 bp, Homo sapiens
atagagacgcgtaaa

SEQ ID NO: 1375052 - DNA, 15 bp, Homo sapiens
aatagagacgcgtaa

SEQ ID NO: 1375053 - DNA, 15 bp, Homo sapiens
aaatagagacgcgta

SEQ ID NO: 1375054 - DNA, 15 bp, Homo sapiens
caaatagagacgcgt

SEQ ID NO: 1375055 - DNA, 15 bp, Homo sapiens
ccaaatagagacgcg

SEQ ID NO: 1375056 - DNA, 15 bp, Homo sapiens
cccaaatagagacgc

SEQ ID NO: 1375057 - DNA, 15 bp, Homo sapiens
ccccaaatagagacg

SEQ ID NO: 1375058 - DNA, 15 bp, Homo sapiens
cccccaaatagagac

SEQ ID NO: 1375059 - DNA, 15 bp, Homo sapiens
tcccccaaatagaga

SEQ ID NO: 1375060 - DNA, 15 bp, Homo sapiens
ctcccccaaatagag

SEQ ID NO: 1375061 - DNA, 15 bp, Homo sapiens
cctcccccaaataga

SEQ ID NO: 1375062 - DNA, 15 bp, Homo sapiens
ccctcccccaaatag

SEQ ID NO: 1375063 - DNA, 15 bp, Homo sapiens
tccctcccccaaata

SEQ ID NO: 1375064 - DNA, 15 bp, Homo sapiens
atccctcccccaaat

SEQ ID NO: 1375065 - DNA, 15 bp, Homo sapiens
aatccctcccccaaa

SEQ ID NO: 1375066 - DNA, 15 bp, Homo sapiens
gaatccctcccccaa

SEQ ID NO: 1375067 - DNA, 15 bp, Homo sapiens
cgaatccctccccca

SEQ ID NO: 1375068 - DNA, 15 bp, Homo sapiens
gcgaatccctccccc

SEQ ID NO: 1375069 - DNA, 15 bp, Homo sapiens
ggcgaatccctcccc

SEQ ID NO: 1375070 - DNA, 15 bp, Homo sapiens
aggcgaatccctccc

SEQ ID NO: 1375071 - DNA, 15 bp, Homo sapiens
taggcgaatccctcc

SEQ ID NO: 1375072 - DNA, 15 bp, Homo sapiens
ataggcgaatccctc

SEQ ID NO: 1375073 - DNA, 15 bp, Homo sapiens
aataggcgaatccct

SEQ ID NO: 1375074 - DNA, 15 bp, Homo sapiens
caataggcgaatccc

SEQ ID NO: 1375075 - DNA, 15 bp, Homo sapiens
tcaataggcgaatcc

SEQ ID NO: 1375076 - DNA, 15 bp, Homo sapiens
ttcaataggcgaatc

SEQ ID NO: 1375077 - DNA, 15 bp, Homo sapiens
tttcaataggcgaat

SEQ ID NO: 1375078 - DNA, 15 bp, Homo sapiens
ttttcaataggcgaa

SEQ ID NO: 1375079 - DNA, 15 bp, Homo sapiens
gttttcaataggcga

SEQ ID NO: 1375080 - DNA, 15 bp, Homo sapiens
tgttttcaataggcg

SEQ ID NO: 1375081 - DNA, 15 bp, Homo sapiens
ttgttttcaataggc

SEQ ID NO: 1375082 - DNA, 15 bp, Homo sapiens
cttgttttcaatagg

SEQ ID NO: 1375083 - DNA, 15 bp, Homo sapiens
tcttgttttcaatag

SEQ ID NO: 1375084 - DNA, 15 bp, Homo sapiens
ctcttgttttcaata

SEQ ID NO: 1375085 - DNA, 15 bp, Homo sapiens
tctcttgttttcaat

SEQ ID NO: 1375086 - DNA, 15 bp, Homo sapiens
gtctcttgttttcaa

SEQ ID NO: 1375087 - DNA, 15 bp, Homo sapiens
ggtctcttgttttca

SEQ ID NO: 1375088 - DNA, 15 bp, Homo sapiens
tggtctcttgttttc

SEQ ID NO: 1375089 - DNA, 15 bp, Homo sapiens
ctggtctcttgtttt

SEQ ID NO: 1375090 - DNA, 15 bp, Homo sapiens
gctggtctcttgttt

SEQ ID NO: 1375091 - DNA, 15 bp, Homo sapiens
tgctggtctcttgtt

SEQ ID NO: 1375092 - DNA, 15 bp, Homo sapiens
ttgctggtctcttgt

SEQ ID NO: 1375093 - DNA, 15 bp, Homo sapiens
cttgctggtctcttg

SEQ ID NO: 1375094 - DNA, 15 bp, Homo sapiens
ccttgctggtctctt

SEQ ID NO: 1375095 - DNA, 15 bp, Homo sapiens
cccttgctggtctct

SEQ ID NO: 1375096 - DNA, 15 bp, Homo sapiens
acccttgctggtctc

SEQ ID NO: 1375097 - DNA, 15 bp, Homo sapiens
gacccttgctggtct

SEQ ID NO: 1375098 - DNA, 15 bp, Homo sapiens
ggacccttgctggtc

SEQ ID NO: 1375099 - DNA, 15 bp, Homo sapiens
aggacccttgctggt

SEQ ID NO: 1375100 - DNA, 15 bp, Homo sapiens
aaggacccttgctgg

SEQ ID NO: 1375101 - DNA, 15 bp, Homo sapiens
caaggacccttgctg

SEQ ID NO: 1375102 - DNA, 15 bp, Homo sapiens
acaaggacccttgct

SEQ ID NO: 1375103 - DNA, 15 bp, Homo sapiens
cacaaggacccttgc

SEQ ID NO: 1375104 - DNA, 15 bp, Homo sapiens
tcacaaggacccttg

SEQ ID NO: 1375105 - DNA, 15 bp, Homo sapiens
ttcacaaggaccctt

SEQ ID NO: 1375106 - DNA, 15 bp, Homo sapiens
attcacaaggaccct

SEQ ID NO: 1375107 - DNA, 15 bp, Homo sapiens
aattcacaaggaccc

SEQ ID NO: 1375108 - DNA, 15 bp, Homo sapiens
taattcacaaggacc

SEQ ID NO: 1375109 - DNA, 15 bp, Homo sapiens
ataattcacaaggac

SEQ ID NO: 1375110 - DNA, 15 bp, Homo sapiens
cataattcacaagga

SEQ ID NO: 1375111 - DNA, 15 bp, Homo sapiens
tcataattcacaagg

SEQ ID NO: 1375112 - DNA, 15 bp, Homo sapiens
atcataattcacaag

SEQ ID NO: 1375113 - DNA, 15 bp, Homo sapiens
catcataattcacaa

SEQ ID NO: 1375114 - DNA, 15 bp, Homo sapiens
ccatcataattcaca

SEQ ID NO: 1375115 - DNA, 15 bp, Homo sapiens
accatcataattcac

SEQ ID NO: 1375116 - DNA, 15 bp, Homo sapiens
aaccatcataattca

SEQ ID NO: 1375117 - DNA, 15 bp, Homo sapiens
aaaccatcataattc

SEQ ID NO: 1375118 - DNA, 15 bp, Homo sapiens
caaaccatcataatt

SEQ ID NO: 1375119 - DNA, 15 bp, Homo sapiens
ccaaaccatcataat

SEQ ID NO: 1375120 - DNA, 15 bp, Homo sapiens
gccaaaccatcataa

SEQ ID NO: 1375121 - DNA, 15 bp, Homo sapiens
cgccaaaccatcata

SEQ ID NO: 1375122 - DNA, 15 bp, Homo sapiens
acgccaaaccatcat

SEQ ID NO: 1375123 - DNA, 15 bp, Homo sapiens
cacgccaaaccatca

SEQ ID NO: 1375124 - DNA, 15 bp, Homo sapiens
tcacgccaaaccatc

SEQ ID NO: 1375125 - DNA, 15 bp, Homo sapiens
ctcacgccaaaccat

SEQ ID NO: 1375126 - DNA, 15 bp, Homo sapiens
tctcacgccaaacca

SEQ ID NO: 1375127 - DNA, 15 bp, Homo sapiens
ttctcacgccaaacc

SEQ ID NO: 1375128 - DNA, 15 bp, Homo sapiens
attctcacgccaaac

SEQ ID NO: 1375129 - DNA, 15 bp, Homo sapiens
tattctcacgccaaa

SEQ ID NO: 1375130 - DNA, 15 bp, Homo sapiens
ctattctcacgccaa

SEQ ID NO: 1375131 - DNA, 15 bp, Homo sapiens
tctattctcacgcca

SEQ ID NO: 1375132 - DNA, 15 bp, Homo sapiens
atctattctcacgcc

SEQ ID NO: 1375133 - DNA, 15 bp, Homo sapiens
catctattctcacgc

SEQ ID NO: 1375134 - DNA, 15 bp, Homo sapiens
ccatctattctcacg

SEQ ID NO: 1375135 - DNA, 15 bp, Homo sapiens
cccatctattctcac

SEQ ID NO: 1375136 - DNA, 15 bp, Homo sapiens
tcccatctattctca

SEQ ID NO: 1375137 - DNA, 15 bp, Homo sapiens
atcccatctattctc

SEQ ID NO: 1375138 - DNA, 15 bp, Homo sapiens
catcccatctattct

SEQ ID NO: 1375139 - DNA, 15 bp, Homo sapiens
ccatcccatctattc

SEQ ID NO: 1375140 - DNA, 15 bp, Homo sapiens
tccatcccatctatt

SEQ ID NO: 1375141 - DNA, 15 bp, Homo sapiens
atccatcccatctat

SEQ ID NO: 1375142 - DNA, 15 bp, Homo sapiens
aatccatcccatcta

SEQ ID NO: 1375143 - DNA, 15 bp, Homo sapiens
caatccatcccatct

SEQ ID NO: 1375144 - DNA, 15 bp, Homo sapiens
ccaatccatcccatc

SEQ ID NO: 1375145 - DNA, 15 bp, Homo sapiens
gccaatccatcccat

SEQ ID NO: 1375146 - DNA, 15 bp, Homo sapiens
tgccaatccatccca

SEQ ID NO: 1375147 - DNA, 15 bp, Homo sapiens
gtgccaatccatccc

SEQ ID NO: 1375148 - DNA, 15 bp, Homo sapiens
agtgccaatccatcc

SEQ ID NO: 1375149 - DNA, 15 bp, Homo sapiens
cagtgccaatccatc

SEQ ID NO: 1375150 - DNA, 15 bp, Homo sapiens
ccagtgccaatccat

SEQ ID NO: 1375151 - DNA, 15 bp, Homo sapiens
tccagtgccaatcca

SEQ ID NO: 1375152 - DNA, 15 bp, Homo sapiens
ctccagtgccaatcc

SEQ ID NO: 1375153 - DNA, 15 bp, Homo sapiens
actccagtgccaatc

SEQ ID NO: 1375154 - DNA, 15 bp, Homo sapiens
gactccagtgccaat

SEQ ID NO: 1375155 - DNA, 15 bp, Homo sapiens
ggactccagtgccaa

SEQ ID NO: 1375156 - DNA, 15 bp, Homo sapiens
gggactccagtgcca

SEQ ID NO: 1375157 - DNA, 15 bp, Homo sapiens
ggggactccagtgcc

SEQ ID NO: 1375158 - DNA, 15 bp, Homo sapiens
aggggactccagtgc

SEQ ID NO: 1375159 - DNA, 15 bp, Homo sapiens
aaggggactccagtg

SEQ ID NO: 1375160 - DNA, 15 bp, Homo sapiens
aaaggggactccagt

SEQ ID NO: 1375161 - DNA, 15 bp, Homo sapiens
aaaaggggactccag

SEQ ID NO: 1375162 - DNA, 15 bp, Homo sapiens
taaaaggggactcca

SEQ ID NO: 1375163 - DNA, 15 bp, Homo sapiens
ataaaaggggactcc

SEQ ID NO: 1375164 - DNA, 15 bp, Homo sapiens
gataaaaggggactc

SEQ ID NO: 1375165 - DNA, 15 bp, Homo sapiens
agataaaaggggact

SEQ ID NO: 1375166 - DNA, 15 bp, Homo sapiens
aagataaaaggggac

SEQ ID NO: 1375167 - DNA, 15 bp, Homo sapiens
taagataaaagggga

SEQ ID NO: 1375168 - DNA, 15 bp, Homo sapiens
ctaagataaaagggg

SEQ ID NO: 1375169 - DNA, 15 bp, Homo sapiens
cctaagataaaaggg

SEQ ID NO: 1375170 - DNA, 15 bp, Homo sapiens
gcctaagataaaagg

SEQ ID NO: 1375171 - DNA, 15 bp, Homo sapiens
agcctaagataaaag

SEQ ID NO: 1375172 - DNA, 15 bp, Homo sapiens
aagcctaagataaaa

SEQ ID NO: 1375173 - DNA, 15 bp, Homo sapiens
caagcctaagataaa

SEQ ID NO: 1375174 - DNA, 15 bp, Homo sapiens
acaagcctaagataa

SEQ ID NO: 1375175 - DNA, 15 bp, Homo sapiens
gacaagcctaagata

SEQ ID NO: 1375176 - DNA, 15 bp, Homo sapiens
ggacaagcctaagat

SEQ ID NO: 1375177 - DNA, 15 bp, Homo sapiens
gggacaagcctaaga

SEQ ID NO: 1375178 - DNA, 15 bp, Homo sapiens
agggacaagcctaag

SEQ ID NO: 1375179 - DNA, 15 bp, Homo sapiens
cagggacaagcctaa

SEQ ID NO: 1375180 - DNA, 15 bp, Homo sapiens
tcagggacaagccta

SEQ ID NO: 1375181 - DNA, 15 bp, Homo sapiens
ttcagggacaagcct

SEQ ID NO: 1375182 - DNA, 15 bp, Homo sapiens
cttcagggacaagcc

SEQ ID NO: 1375183 - DNA, 15 bp, Homo sapiens
tcttcagggacaagc

SEQ ID NO: 1375184 - DNA, 15 bp, Homo sapiens
ctcttcagggacaag

SEQ ID NO: 1375185 - DNA, 15 bp, Homo sapiens
cctcttcagggacaa

SEQ ID NO: 1375186 - DNA, 15 bp, Homo sapiens
ccctcttcagggaca

SEQ ID NO: 1375187 - DNA, 15 bp, Homo sapiens
gccctcttcagggac

SEQ ID NO: 1375188 - DNA, 15 bp, Homo sapiens
agccctcttcaggga

SEQ ID NO: 1375189 - DNA, 15 bp, Homo sapiens
aagccctcttcaggg

SEQ ID NO: 1375190 - DNA, 15 bp, Homo sapiens
caagccctcttcagg

SEQ ID NO: 1375191 - DNA, 15 bp, Homo sapiens
acaagccctcttcag

SEQ ID NO: 1375192 - DNA, 15 bp, Homo sapiens
aacaagccctcttca

SEQ ID NO: 1375193 - DNA, 15 bp, Homo sapiens
caacaagccctcttc

SEQ ID NO: 1375194 - DNA, 15 bp, Homo sapiens
tcaacaagccctctt

SEQ ID NO: 1375195 - DNA, 15 bp, Homo sapiens
atcaacaagccctct

SEQ ID NO: 1375196 - DNA, 15 bp, Homo sapiens
tatcaacaagccctc

SEQ ID NO: 1375197 - DNA, 15 bp, Homo sapiens
atatcaacaagccct

SEQ ID NO: 1375198 - DNA, 15 bp, Homo sapiens
gatatcaacaagccc

SEQ ID NO: 1375199 - DNA, 15 bp, Homo sapiens
tgatatcaacaagcc

SEQ ID NO: 1375200 - DNA, 15 bp, Homo sapiens
ctgatatcaacaagc

SEQ ID NO: 1375201 - DNA, 15 bp, Homo sapiens
tctgatatcaacaag

SEQ ID NO: 1375202 - DNA, 15 bp, Homo sapiens
ttctgatatcaacaa

SEQ ID NO: 1375203 - DNA, 15 bp, Homo sapiens
gttctgatatcaaca

SEQ ID NO: 1375204 - DNA, 15 bp, Homo sapiens
tgttctgatatcaac

SEQ ID NO: 1375205 - DNA, 15 bp, Homo sapiens
ctgttctgatatcaa

SEQ ID NO: 1375206 - DNA, 15 bp, Homo sapiens
gctgttctgatatca

SEQ ID NO: 1375207 - DNA, 15 bp, Homo sapiens
ggctgttctgatatc

SEQ ID NO: 1375208 - DNA, 15 bp, Homo sapiens
tggctgttctgatat

SEQ ID NO: 1375209 - DNA, 15 bp, Homo sapiens
ttggctgttctgata

SEQ ID NO: 1375210 - DNA, 15 bp, Homo sapiens
attggctgttctgat

SEQ ID NO: 1375211 - DNA, 15 bp, Homo sapiens
aattggctgttctga

SEQ ID NO: 1375212 - DNA, 15 bp, Homo sapiens
aaattggctgttctg

SEQ ID NO: 1375213 - DNA, 15 bp, Homo sapiens
gaaattggctgttct

SEQ ID NO: 1375214 - DNA, 15 bp, Homo sapiens
ggaaattggctgttc

SEQ ID NO: 1375215 - DNA, 15 bp, Homo sapiens
aggaaattggctgtt

SEQ ID NO: 1375216 - DNA, 15 bp, Homo sapiens
caggaaattggctgt

SEQ ID NO: 1375217 - DNA, 15 bp, Homo sapiens
tcaggaaattggctg

SEQ ID NO: 1375218 - DNA, 15 bp, Homo sapiens
gtcaggaaattggct

SEQ ID NO: 1375219 - DNA, 15 bp, Homo sapiens
tgtcaggaaattggc

SEQ ID NO: 1375220 - DNA, 15 bp, Homo sapiens
ctgtcaggaaattgg

SEQ ID NO: 1375221 - DNA, 15 bp, Homo sapiens
cctgtcaggaaattg

SEQ ID NO: 1375222 - DNA, 15 bp, Homo sapiens
ccctgtcaggaaatt

SEQ ID NO: 1375223 - DNA, 15 bp, Homo sapiens
accctgtcaggaaat

SEQ ID NO: 1375224 - DNA, 15 bp, Homo sapiens
aaccctgtcaggaaa

SEQ ID NO: 1375225 - DNA, 15 bp, Homo sapiens
caaccctgtcaggaa

SEQ ID NO: 1375226 - DNA, 15 bp, Homo sapiens
ccaaccctgtcagga

SEQ ID NO: 1375227 - DNA, 15 bp, Homo sapiens
cccaaccctgtcagg

SEQ ID NO: 1375228 - DNA, 15 bp, Homo sapiens
tcccaaccctgtcag

SEQ ID NO: 1375229 - DNA, 15 bp, Homo sapiens
ctcccaaccctgtca

SEQ ID NO: 1375230 - DNA, 15 bp, Homo sapiens
gctcccaaccctgtc

SEQ ID NO: 1375231 - DNA, 15 bp, Homo sapiens
tgctcccaaccctgt

SEQ ID NO: 1375232 - DNA, 15 bp, Homo sapiens
ctgctcccaaccctg

SEQ ID NO: 1375233 - DNA, 15 bp, Homo sapiens
cctgctcccaaccct

SEQ ID NO: 1375234 - DNA, 15 bp, Homo sapiens
ccctgctcccaaccc

SEQ ID NO: 1375235 - DNA, 15 bp, Homo sapiens
cccctgctcccaacc

SEQ ID NO: 1375236 - DNA, 15 bp, Homo sapiens
tcccctgctcccaac

SEQ ID NO: 1375237 - DNA, 15 bp, Homo sapiens
atcccctgctcccaa

SEQ ID NO: 1375238 - DNA, 15 bp, Homo sapiens
catcccctgctccca

SEQ ID NO: 1375239 - DNA, 15 bp, Homo sapiens
ccatcccctgctccc

SEQ ID NO: 1375240 - DNA, 15 bp, Homo sapiens
cccatcccctgctcc

SEQ ID NO: 1375241 - DNA, 15 bp, Homo sapiens
acccatcccctgctc

SEQ ID NO: 1375242 - DNA, 15 bp, Homo sapiens
cacccatcccctgct

SEQ ID NO: 1375243 - DNA, 15 bp, Homo sapiens
gcacccatcccctgc

SEQ ID NO: 1375244 - DNA, 15 bp, Homo sapiens
agcacccatcccctg

SEQ ID NO: 1375245 - DNA, 15 bp, Homo sapiens
cagcacccatcccct

SEQ ID NO: 1375246 - DNA, 15 bp, Homo sapiens
acagcacccatcccc

SEQ ID NO: 1375247 - DNA, 15 bp, Homo sapiens
aacagcacccatccc

SEQ ID NO: 1375248 - DNA, 15 bp, Homo sapiens
taacagcacccatcc

SEQ ID NO: 1375249 - DNA, 15 bp, Homo sapiens
ttaacagcacccatc

SEQ ID NO: 1375250 - DNA, 15 bp, Homo sapiens
gttaacagcacccat

SEQ ID NO: 1375251 - DNA, 15 bp, Homo sapiens
ggttaacagcaccca

SEQ ID NO: 1375252 - DNA, 15 bp, Homo sapiens
aggttaacagcaccc

SEQ ID NO: 1375253 - DNA, 15 bp, Homo sapiens
aaggttaacagcacc

SEQ ID NO: 1375254 - DNA, 15 bp, Homo sapiens
aaaggttaacagcac

SEQ ID NO: 1375255 - DNA, 15 bp, Homo sapiens
caaaggttaacagca

SEQ ID NO: 1375256 - DNA, 15 bp, Homo sapiens
tcaaaggttaacagc

SEQ ID NO: 1375257 - DNA, 15 bp, Homo sapiens
ctcaaaggttaacag

SEQ ID NO: 1375258 - DNA, 15 bp, Homo sapiens
tctcaaaggttaaca

SEQ ID NO: 1375259 - DNA, 15 bp, Homo sapiens
atctcaaaggttaac

SEQ ID NO: 1375260 - DNA, 15 bp, Homo sapiens
catctcaaaggttaa

SEQ ID NO: 1375261 - DNA, 15 bp, Homo sapiens
acatctcaaaggtta

SEQ ID NO: 1375262 - DNA, 15 bp, Homo sapiens
gacatctcaaaggtt

SEQ ID NO: 1375263 - DNA, 15 bp, Homo sapiens
ggacatctcaaaggt

SEQ ID NO: 1375264 - DNA, 15 bp, Homo sapiens
cggacatctcaaagg

SEQ ID NO: 1375265 - DNA, 15 bp, Homo sapiens
acggacatctcaaag

SEQ ID NO: 1375266 - DNA, 15 bp, Homo sapiens
aacggacatctcaaa

SEQ ID NO: 1375267 - DNA, 15 bp, Homo sapiens
caacggacatctcaa

SEQ ID NO: 1375268 - DNA, 15 bp, Homo sapiens
acaacggacatctca

SEQ ID NO: 1375269 - DNA, 15 bp, Homo sapiens
cacaacggacatctc

SEQ ID NO: 1375270 - DNA, 15 bp, Homo sapiens
ccacaacggacatct

SEQ ID NO: 1375271 - DNA, 15 bp, Homo sapiens
tccacaacggacatc

SEQ ID NO: 1375272 - DNA, 15 bp, Homo sapiens
ctccacaacggacat

SEQ ID NO: 1375273 - DNA, 15 bp, Homo sapiens
cctccacaacggaca

SEQ ID NO: 1375274 - DNA, 15 bp, Homo sapiens
ccctccacaacggac

SEQ ID NO: 1375275 - DNA, 15 bp, Homo sapiens
tccctccacaacgga

SEQ ID NO: 1375276 - DNA, 15 bp, Homo sapiens
ctccctccacaacgg

SEQ ID NO: 1375277 - DNA, 15 bp, Homo sapiens
tctccctccacaacg

SEQ ID NO: 1375278 - DNA, 15 bp, Homo sapiens
ctctccctccacaac

SEQ ID NO: 1375279 - DNA, 15 bp, Homo sapiens
tctctccctccacaa

SEQ ID NO: 1375280 - DNA, 15 bp, Homo sapiens
gtctctccctccaca

SEQ ID NO: 1375281 - DNA, 15 bp, Homo sapiens
tgtctctccctccac

SEQ ID NO: 1375282 - DNA, 15 bp, Homo sapiens
ctgtctctccctcca

SEQ ID NO: 1375283 - DNA, 15 bp, Homo sapiens
cctgtctctccctcc

SEQ ID NO: 1375284 - DNA, 15 bp, Homo sapiens
tcctgtctctccctc

SEQ ID NO: 1375285 - DNA, 15 bp, Homo sapiens
atcctgtctctccct

SEQ ID NO: 1375286 - DNA, 15 bp, Homo sapiens
catcctgtctctccc

SEQ ID NO: 1375287 - DNA, 15 bp, Homo sapiens
tcatcctgtctctcc

SEQ ID NO: 1375288 - DNA, 15 bp, Homo sapiens
ctcatcctgtctctc

SEQ ID NO: 1375289 - DNA, 15 bp, Homo sapiens
cctcatcctgtctct

SEQ ID NO: 1375290 - DNA, 15 bp, Homo sapiens
gcctcatcctgtctc

SEQ ID NO: 1375291 - DNA, 15 bp, Homo sapiens
tgcctcatcctgtct

SEQ ID NO: 1375292 - DNA, 15 bp, Homo sapiens
ttgcctcatcctgtc

SEQ ID NO: 1375293 - DNA, 15 bp, Homo sapiens
gttgcctcatcctgt

SEQ ID NO: 1375294 - DNA, 15 bp, Homo sapiens
ggttgcctcatcctg

SEQ ID NO: 1375295 - DNA, 15 bp, Homo sapiens
cggttgcctcatcct

SEQ ID NO: 1375296 - DNA, 15 bp, Homo sapiens
acggttgcctcatcc

SEQ ID NO: 1375297 - DNA, 15 bp, Homo sapiens
aacggttgcctcatc

SEQ ID NO: 1375298 - DNA, 15 bp, Homo sapiens
caacggttgcctcat

SEQ ID NO: 1375299 - DNA, 15 bp, Homo sapiens
ccaacggttgcctca

SEQ ID NO: 1375300 - DNA, 15 bp, Homo sapiens
gaagtgtcaggtggg

SEQ ID NO: 1375301 - DNA, 15 bp, Homo sapiens
ggaagtgtcaggtgg

SEQ ID NO: 1375302 - DNA, 15 bp, Homo sapiens
gggaagtgtcaggtg

SEQ ID NO: 1375303 - DNA, 15 bp, Homo sapiens
ggggaagtgtcaggt

SEQ ID NO: 1375304 - DNA, 15 bp, Homo sapiens
cggggaagtgtcagg

SEQ ID NO: 1375305 - DNA, 15 bp, Homo sapiens
acggggaagtgtcag

SEQ ID NO: 1375306 - DNA, 15 bp, Homo sapiens
gacggggaagtgtca

SEQ ID NO: 1375307 - DNA, 15 bp, Homo sapiens
ggacggggaagtgtc

SEQ ID NO: 1375308 - DNA, 15 bp, Homo sapiens
aggacggggaagtgt

SEQ ID NO: 1375309 - DNA, 15 bp, Homo sapiens
caggacggggaagtg

SEQ ID NO: 1375310 - DNA, 15 bp, Homo sapiens
gcaggacggggaagt

SEQ ID NO: 1375311 - DNA, 15 bp, Homo sapiens
agcaggacggggaag

SEQ ID NO: 1375312 - DNA, 15 bp, Homo sapiens
tagcaggacggggaa

SEQ ID NO: 1375313 - DNA, 15 bp, Homo sapiens
gtagcaggacgggga

SEQ ID NO: 1375314 - DNA, 15 bp, Homo sapiens
tgtagcaggacgggg

SEQ ID NO: 1375315 - DNA, 15 bp, Homo sapiens
ctgtagcaggacggg

SEQ ID NO: 1375316 - DNA, 15 bp, Homo sapiens
tctgtagcaggacgg

SEQ ID NO: 1375317 - DNA, 15 bp, Homo sapiens
atctgtagcaggacg

SEQ ID NO: 1375318 - DNA, 15 bp, Homo sapiens
gatctgtagcaggac

SEQ ID NO: 1375319 - DNA, 15 bp, Homo sapiens
agatctgtagcagga

SEQ ID NO: 1375320 - DNA, 15 bp, Homo sapiens
gagatctgtagcagg

SEQ ID NO: 1375321 - DNA, 15 bp, Homo sapiens
tgagatctgtagcag

SEQ ID NO: 1375322 - DNA, 15 bp, Homo sapiens
ctgagatctgtagca

SEQ ID NO: 1375323 - DNA, 15 bp, Homo sapiens
cctgagatctgtagc

SEQ ID NO: 1375324 - DNA, 15 bp, Homo sapiens
gcctgagatctgtag

SEQ ID NO: 1375325 - DNA, 15 bp, Homo sapiens
agcctgagatctgta

SEQ ID NO: 1375326 - DNA, 15 bp, Homo sapiens
gagcctgagatctgt

SEQ ID NO: 1375327 - DNA, 15 bp, Homo sapiens
ggagcctgagatctg

SEQ ID NO: 1375328 - DNA, 15 bp, Homo sapiens
tggagcctgagatct

SEQ ID NO: 1375329 - DNA, 15 bp, Homo sapiens
ctggagcctgagatc

SEQ ID NO: 1375330 - DNA, 15 bp, Homo sapiens
actggagcctgagat

SEQ ID NO: 1375331 - DNA, 15 bp, Homo sapiens
gactggagcctgaga

SEQ ID NO: 1375332 - DNA, 15 bp, Homo sapiens
ggactggagcctgag

SEQ ID NO: 1375333 - DNA, 15 bp, Homo sapiens
gggactggagcctga

SEQ ID NO: 1375334 - DNA, 15 bp, Homo sapiens
ggggactggagcctg

SEQ ID NO: 1375335 - DNA, 15 bp, Homo sapiens
tggggactggagcct

SEQ ID NO: 1375336 - DNA, 15 bp, Homo sapiens
gtggggactggagcc

SEQ ID NO: 1375337 - DNA, 15 bp, Homo sapiens
ggtggggactggagc

SEQ ID NO: 1375338 - DNA, 15 bp, Homo sapiens
gggtggggactggag

SEQ ID NO: 1375339 - DNA, 15 bp, Homo sapiens
tgggtggggactgga

SEQ ID NO: 1375340 - DNA, 15 bp, Homo sapiens
ctgggtggggactgg

SEQ ID NO: 1375341 - DNA, 15 bp, Homo sapiens
gctgggtggggactg

SEQ ID NO: 1375342 - DNA, 15 bp, Homo sapiens
agctgggtggggact

SEQ ID NO: 1375343 - DNA, 15 bp, Homo sapiens
aagctgggtggggac

SEQ ID NO: 1375344 - DNA, 15 bp, Homo sapiens
gaagctgggtgggga

SEQ ID NO: 1375345 - DNA, 15 bp, Homo sapiens
ggaagctgggtgggg

SEQ ID NO: 1375346 - DNA, 15 bp, Homo sapiens
aggaagctgggtggg

SEQ ID NO: 1375347 - DNA, 15 bp, Homo sapiens
gaggaagctgggtgg

SEQ ID NO: 1375348 - DNA, 15 bp, Homo sapiens
agaggaagctgggtg

SEQ ID NO: 1375349 - DNA, 15 bp, Homo sapiens
cagaggaagctgggt

SEQ ID NO: 1375350 - DNA, 15 bp, Homo sapiens
gcagaggaagctggg

SEQ ID NO: 1375351 - DNA, 15 bp, Homo sapiens
ggcagaggaagctgg

SEQ ID NO: 1375352 - DNA, 15 bp, Homo sapiens
gggcagaggaagctg

SEQ ID NO: 1375353 - DNA, 15 bp, Homo sapiens
ggggcagaggaagct

SEQ ID NO: 1375354 - DNA, 15 bp, Homo sapiens
gggggcagaggaagc

SEQ ID NO: 1375355 - DNA, 15 bp, Homo sapiens
tgggggcagaggaag

SEQ ID NO: 1375356 - DNA, 15 bp, Homo sapiens
ctgggggcagaggaa

SEQ ID NO: 1375357 - DNA, 15 bp, Homo sapiens
tctgggggcagagga

SEQ ID NO: 1375358 - DNA, 15 bp, Homo sapiens
ctctgggggcagagg

SEQ ID NO: 1375359 - DNA, 15 bp, Homo sapiens
cctctgggggcagag

SEQ ID NO: 1375360 - DNA, 15 bp, Homo sapiens
gcctctgggggcaga

SEQ ID NO: 1375361 - DNA, 15 bp, Homo sapiens
ggcctctgggggcag

SEQ ID NO: 1375362 - DNA, 15 bp, Homo sapiens
gggcctctgggggca

SEQ ID NO: 1375363 - DNA, 15 bp, Homo sapiens
ggggcctctgggggc

SEQ ID NO: 1375364 - DNA, 15 bp, Homo sapiens
gggggcctctggggg

SEQ ID NO: 1375365 - DNA, 15 bp, Homo sapiens
tgggggcctctgggg

SEQ ID NO: 1375366 - DNA, 15 bp, Homo sapiens
gtgggggcctctggg

SEQ ID NO: 1375367 - DNA, 15 bp, Homo sapiens
ggtgggggcctctgg

SEQ ID NO: 1375368 - DNA, 15 bp, Homo sapiens
gggtgggggcctctg

SEQ ID NO: 1375369 - DNA, 15 bp, Homo sapiens
agggtgggggcctct

SEQ ID NO: 1375370 - DNA, 15 bp, Homo sapiens
aagggtgggggcctc

SEQ ID NO: 1375371 - DNA, 15 bp, Homo sapiens
caagggtgggggcct

SEQ ID NO: 1375372 - DNA, 15 bp, Homo sapiens
ccaagggtgggggcc

SEQ ID NO: 1375373 - DNA, 15 bp, Homo sapiens
gccaagggtgggggc

SEQ ID NO: 1375374 - DNA, 15 bp, Homo sapiens
tgccaagggtggggg

SEQ ID NO: 1375375 - DNA, 15 bp, Homo sapiens
ctgccaagggtgggg

SEQ ID NO: 1375376 - DNA, 15 bp, Homo sapiens
tctgccaagggtggg

SEQ ID NO: 1375377 - DNA, 15 bp, Homo sapiens
gtctgccaagggtgg

SEQ ID NO: 1375378 - DNA, 15 bp, Homo sapiens
tgtctgccaagggtg

SEQ ID NO: 1375379 - DNA, 15 bp, Homo sapiens
ttgtctgccaagggt

SEQ ID NO: 1375380 - DNA, 15 bp, Homo sapiens
cttgtctgccaaggg

SEQ ID NO: 1375381 - DNA, 15 bp, Homo sapiens
ccttgtctgccaagg

SEQ ID NO: 1375382 - DNA, 15 bp, Homo sapiens
gccttgtctgccaag

SEQ ID NO: 1375383 - DNA, 15 bp, Homo sapiens
agccttgtctgccaa

SEQ ID NO: 1375384 - DNA, 15 bp, Homo sapiens
aagccttgtctgcca

SEQ ID NO: 1375385 - DNA, 15 bp, Homo sapiens
gaagccttgtctgcc

SEQ ID NO: 1375386 - DNA, 15 bp, Homo sapiens
ggaagccttgtctgc

SEQ ID NO: 1375387 - DNA, 15 bp, Homo sapiens
tggaagccttgtctg

SEQ ID NO: 1375388 - DNA, 15 bp, Homo sapiens
gtggaagccttgtct

SEQ ID NO: 1375389 - DNA, 15 bp, Homo sapiens
ggtggaagccttgtc

SEQ ID NO: 1375390 - DNA, 15 bp, Homo sapiens
gggtggaagccttgt

SEQ ID NO: 1375391 - DNA, 15 bp, Homo sapiens
ggggtggaagccttg

SEQ ID NO: 1375392 - DNA, 15 bp, Homo sapiens
aggggtggaagcctt

SEQ ID NO: 1375393 - DNA, 15 bp, Homo sapiens
aaggggtggaagcct

SEQ ID NO: 1375394 - DNA, 15 bp, Homo sapiens
caaggggtggaagcc

SEQ ID NO: 1375395 - DNA, 15 bp, Homo sapiens
gcaaggggtggaagc

SEQ ID NO: 1375396 - DNA, 15 bp, Homo sapiens
ggcaaggggtggaag

SEQ ID NO: 1375397 - DNA, 15 bp, Homo sapiens
aggcaaggggtggaa

SEQ ID NO: 1375398 - DNA, 15 bp, Homo sapiens
taggcaaggggtgga

SEQ ID NO: 1375399 - DNA, 15 bp, Homo sapiens
ctaggcaaggggtgg

SEQ ID NO: 1375400 - DNA, 15 bp, Homo sapiens
cctaggcaaggggtg

SEQ ID NO: 1375401 - DNA, 15 bp, Homo sapiens
acctaggcaaggggt

SEQ ID NO: 1375402 - DNA, 15 bp, Homo sapiens
cacctaggcaagggg

SEQ ID NO: 1375403 - DNA, 15 bp, Homo sapiens
ccacctaggcaaggg

SEQ ID NO: 1375404 - DNA, 15 bp, Homo sapiens
gccacctaggcaagg

SEQ ID NO: 1375405 - DNA, 15 bp, Homo sapiens
agccacctaggcaag

SEQ ID NO: 1375406 - DNA, 15 bp, Homo sapiens
cagccacctaggcaa

SEQ ID NO: 1375407 - DNA, 15 bp, Homo sapiens
tcagccacctaggca

SEQ ID NO: 1375408 - DNA, 15 bp, Homo sapiens
gtcagccacctaggc

SEQ ID NO: 1375409 - DNA, 15 bp, Homo sapiens
tgtcagccacctagg

SEQ ID NO: 1375410 - DNA, 15 bp, Homo sapiens
ctgtcagccacctag

SEQ ID NO: 1375411 - DNA, 15 bp, Homo sapiens
cctgtcagccaccta

SEQ ID NO: 1375412 - DNA, 15 bp, Homo sapiens
gcctgtcagccacct

SEQ ID NO: 1375413 - DNA, 15 bp, Homo sapiens
ggcctgtcagccacc

SEQ ID NO: 1375414 - DNA, 15 bp, Homo sapiens
aggcctgtcagccac

SEQ ID NO: 1375415 - DNA, 15 bp, Homo sapiens
caggcctgtcagcca

SEQ ID NO: 1375416 - DNA, 15 bp, Homo sapiens
ccaggcctgtcagcc

SEQ ID NO: 1375417 - DNA, 15 bp, Homo sapiens
gccaggcctgtcagc

SEQ ID NO: 1375418 - DNA, 15 bp, Homo sapiens
tgccaggcctgtcag

SEQ ID NO: 1375419 - DNA, 15 bp, Homo sapiens
atgccaggcctgtca

SEQ ID NO: 1375420 - DNA, 15 bp, Homo sapiens
catgccaggcctgtc

SEQ ID NO: 1375421 - DNA, 15 bp, Homo sapiens
ccatgccaggcctgt

SEQ ID NO: 1375422 - DNA, 15 bp, Homo sapiens
cccatgccaggcctg

SEQ ID NO: 1375423 - DNA, 15 bp, Homo sapiens
ccccatgccaggcct

SEQ ID NO: 1375424 - DNA, 15 bp, Homo sapiens
cccccatgccaggcc

SEQ ID NO: 1375425 - DNA, 15 bp, Homo sapiens
gcccccatgccaggc

SEQ ID NO: 1375426 - DNA, 15 bp, Homo sapiens
tgcccccatgccagg

SEQ ID NO: 1375427 - DNA, 15 bp, Homo sapiens
gtgcccccatgccag

SEQ ID NO: 1375428 - DNA, 15 bp, Homo sapiens
ggtgcccccatgcca

SEQ ID NO: 1375429 - DNA, 15 bp, Homo sapiens
aggtgcccccatgcc

SEQ ID NO: 1375430 - DNA, 15 bp, Homo sapiens
gaggtgcccccatgc

SEQ ID NO: 1375431 - DNA, 15 bp, Homo sapiens
cgaggtgcccccatg

SEQ ID NO: 1375432 - DNA, 15 bp, Homo sapiens
tcgaggtgcccccat

SEQ ID NO: 1375433 - DNA, 15 bp, Homo sapiens
atcgaggtgccccca

SEQ ID NO: 1375434 - DNA, 15 bp, Homo sapiens
gatcgaggtgccccc

SEQ ID NO: 1375435 - DNA, 15 bp, Homo sapiens
agatcgaggtgcccc

SEQ ID NO: 1375436 - DNA, 15 bp, Homo sapiens
gagatcgaggtgccc

SEQ ID NO: 1375437 - DNA, 15 bp, Homo sapiens
tgagatcgaggtgcc

SEQ ID NO: 1375438 - DNA, 15 bp, Homo sapiens
ctgagatcgaggtgc

SEQ ID NO: 1375439 - DNA, 15 bp, Homo sapiens
cctgagatcgaggtg

SEQ ID NO: 1375440 - DNA, 15 bp, Homo sapiens
acctgagatcgaggt

SEQ ID NO: 1375441 - DNA, 15 bp, Homo sapiens
gacctgagatcgagg

SEQ ID NO: 1375442 - DNA, 15 bp, Homo sapiens
ggacctgagatcgag

SEQ ID NO: 1375443 - DNA, 15 bp, Homo sapiens
tggacctgagatcga

SEQ ID NO: 1375444 - DNA, 15 bp, Homo sapiens
atggacctgagatcg

SEQ ID NO: 1375445 - DNA, 15 bp, Homo sapiens
tatggacctgagatc

SEQ ID NO: 1375446 - DNA, 15 bp, Homo sapiens
gtatggacctgagat

SEQ ID NO: 1375447 - DNA, 15 bp, Homo sapiens
agtatggacctgaga

SEQ ID NO: 1375448 - DNA, 15 bp, Homo sapiens
gagtatggacctgag

SEQ ID NO: 1375449 - DNA, 15 bp, Homo sapiens
ggagtatggacctga

SEQ ID NO: 1375450 - DNA, 15 bp, Homo sapiens
tggagtatggacctg

SEQ ID NO: 1375451 - DNA, 15 bp, Homo sapiens
gtggagtatggacct

SEQ ID NO: 1375452 - DNA, 15 bp, Homo sapiens
agtggagtatggacc

SEQ ID NO: 1375453 - DNA, 15 bp, Homo sapiens
gagtggagtatggac

SEQ ID NO: 1375454 - DNA, 15 bp, Homo sapiens
tgagtggagtatgga

SEQ ID NO: 1375455 - DNA, 15 bp, Homo sapiens
gtgagtggagtatgg

SEQ ID NO: 1375456 - DNA, 15 bp, Homo sapiens
agtgagtggagtatg

SEQ ID NO: 1375457 - DNA, 15 bp, Homo sapiens
gagtgagtggagtat

SEQ ID NO: 1375458 - DNA, 15 bp, Homo sapiens
ggagtgagtggagta

SEQ ID NO: 1375459 - DNA, 15 bp, Homo sapiens
gggagtgagtggagt

SEQ ID NO: 1375460 - DNA, 15 bp, Homo sapiens
agggagtgagtggag

SEQ ID NO: 1375461 - DNA, 15 bp, Homo sapiens
aagggagtgagtgga

SEQ ID NO: 1375462 - DNA, 15 bp, Homo sapiens
caagggagtgagtgg

SEQ ID NO: 1375463 - DNA, 15 bp, Homo sapiens
gcaagggagtgagtg

SEQ ID NO: 1375464 - DNA, 15 bp, Homo sapiens
agcaagggagtgagt

SEQ ID NO: 1375465 - DNA, 15 bp, Homo sapiens
gagcaagggagtgag

SEQ ID NO: 1375466 - DNA, 15 bp, Homo sapiens
ggagcaagggagtga

SEQ ID NO: 1375467 - DNA, 15 bp, Homo sapiens
aggagcaagggagtg

SEQ ID NO: 1375468 - DNA, 15 bp, Homo sapiens
gaggagcaagggagt

SEQ ID NO: 1375469 - DNA, 15 bp, Homo sapiens
ggaggagcaagggag

SEQ ID NO: 1375470 - DNA, 15 bp, Homo sapiens
aggaggagcaaggga

SEQ ID NO: 1375471 - DNA, 15 bp, Homo sapiens
gaggaggagcaaggg

SEQ ID NO: 1375472 - DNA, 15 bp, Homo sapiens
ggaggaggagcaagg

SEQ ID NO: 1375473 - DNA, 15 bp, Homo sapiens
aggaggaggagcaag

SEQ ID NO: 1375474 - DNA, 15 bp, Homo sapiens
gaggaggaggagcaa

SEQ ID NO: 1375475 - DNA, 15 bp, Homo sapiens
ggaggaggaggagca

SEQ ID NO: 1375476 - DNA, 15 bp, Homo sapiens
aggaggaggaggagc

SEQ ID NO: 1375477 - DNA, 15 bp, Homo sapiens
acaggaggaggagga

SEQ ID NO: 1375478 - DNA, 15 bp, Homo sapiens
aacaggaggaggagg

SEQ ID NO: 1375479 - DNA, 15 bp, Homo sapiens
caacaggaggaggag

SEQ ID NO: 1375480 - DNA, 15 bp, Homo sapiens
ccaacaggaggagga

SEQ ID NO: 1375481 - DNA, 15 bp, Homo sapiens
gccaacaggaggagg

SEQ ID NO: 1375482 - DNA, 15 bp, Homo sapiens
ggccaacaggaggag

SEQ ID NO: 1375483 - DNA, 15 bp, Homo sapiens
cggccaacaggagga

SEQ ID NO: 1375484 - DNA, 15 bp, Homo sapiens
ccggccaacaggagg

SEQ ID NO: 1375485 - DNA, 15 bp, Homo sapiens
accggccaacaggag

SEQ ID NO: 1375486 - DNA, 15 bp, Homo sapiens
caccggccaacagga

SEQ ID NO: 1375487 - DNA, 15 bp, Homo sapiens
gcaccggccaacagg

SEQ ID NO: 1375488 - DNA, 15 bp, Homo sapiens
ggcaccggccaacag

SEQ ID NO: 1375489 - DNA, 15 bp, Homo sapiens
tggcaccggccaaca

SEQ ID NO: 1375490 - DNA, 15 bp, Homo sapiens
ctggcaccggccaac

SEQ ID NO: 1375491 - DNA, 15 bp, Homo sapiens
cctggcaccggccaa

SEQ ID NO: 1375492 - DNA, 15 bp, Homo sapiens
acctggcaccggcca

SEQ ID NO: 1375493 - DNA, 15 bp, Homo sapiens
aacctggcaccggcc

SEQ ID NO: 1375494 - DNA, 15 bp, Homo sapiens
aaacctggcaccggc

SEQ ID NO: 1375495 - DNA, 15 bp, Homo sapiens
gaaacctggcaccgg

SEQ ID NO: 1375496 - DNA, 15 bp, Homo sapiens
tgaaacctggcaccg

SEQ ID NO: 1375497 - DNA, 15 bp, Homo sapiens
ctgaaacctggcacc

SEQ ID NO: 1375498 - DNA, 15 bp, Homo sapiens
actgaaacctggcac

SEQ ID NO: 1375499 - DNA, 15 bp, Homo sapiens
cactgaaacctggca

SEQ ID NO: 1375500 - DNA, 15 bp, Homo sapiens
ccactgaaacctggc

SEQ ID NO: 1375501 - DNA, 15 bp, Homo sapiens
cccactgaaacctgg

SEQ ID NO: 1375502 - DNA, 15 bp, Homo sapiens
acccactgaaacctg

SEQ ID NO: 1375503 - DNA, 15 bp, Homo sapiens
gacccactgaaacct

SEQ ID NO: 1375504 - DNA, 15 bp, Homo sapiens
ggacccactgaaacc

SEQ ID NO: 1375505 - DNA, 15 bp, Homo sapiens
aggacccactgaaac

SEQ ID NO: 1375506 - DNA, 15 bp, Homo sapiens
caggacccactgaaa

SEQ ID NO: 1375507 - DNA, 15 bp, Homo sapiens
ccaggacccactgaa

SEQ ID NO: 1375508 - DNA, 15 bp, Homo sapiens
gccaggacccactga

SEQ ID NO: 1375509 - DNA, 15 bp, Homo sapiens
agccaggacccactg

SEQ ID NO: 1375510 - DNA, 15 bp, Homo sapiens
cagccaggacccact

SEQ ID NO: 1375511 - DNA, 15 bp, Homo sapiens
gcagccaggacccac

SEQ ID NO: 1375512 - DNA, 15 bp, Homo sapiens
tgcagccaggaccca

SEQ ID NO: 1375513 - DNA, 15 bp, Homo sapiens
atgcagccaggaccc

SEQ ID NO: 1375514 - DNA, 15 bp, Homo sapiens
catgcagccaggacc

SEQ ID NO: 1375515 - DNA, 15 bp, Homo sapiens
tcatgcagccaggac

SEQ ID NO: 1375516 - DNA, 15 bp, Homo sapiens
ttcatgcagccagga

SEQ ID NO: 1375517 - DNA, 15 bp, Homo sapiens
tttcatgcagccagg

SEQ ID NO: 1375518 - DNA, 15 bp, Homo sapiens
gtttcatgcagccag

SEQ ID NO: 1375519 - DNA, 15 bp, Homo sapiens
tgtttcatgcagcca

SEQ ID NO: 1375520 - DNA, 15 bp, Homo sapiens
ttgtttcatgcagcc

SEQ ID NO: 1375521 - DNA, 15 bp, Homo sapiens
tttgtttcatgcagc

SEQ ID NO: 1375522 - DNA, 15 bp, Homo sapiens
ctttgtttcatgcag

SEQ ID NO: 1375523 - DNA, 15 bp, Homo sapiens
gctttgtttcatgca

SEQ ID NO: 1375524 - DNA, 15 bp, Homo sapiens
tgctttgtttcatgc

SEQ ID NO: 1375525 - DNA, 15 bp, Homo sapiens
atgctttgtttcatg

SEQ ID NO: 1375526 - DNA, 15 bp, Homo sapiens
aatgctttgtttcat

SEQ ID NO: 1375527 - DNA, 15 bp, Homo sapiens
caatgctttgtttca

SEQ ID NO: 1375528 - DNA, 15 bp, Homo sapiens
acaatgctttgtttc

SEQ ID NO: 1375529 - DNA, 15 bp, Homo sapiens
cacaatgctttgttt

SEQ ID NO: 1375530 - DNA, 15 bp, Homo sapiens
tcacaatgctttgtt

SEQ ID NO: 1375531 - DNA, 15 bp, Homo sapiens
ctcacaatgctttgt

SEQ ID NO: 1375532 - DNA, 15 bp, Homo sapiens
cctcacaatgctttg

SEQ ID NO: 1375533 - DNA, 15 bp, Homo sapiens
gcctcacaatgcttt

SEQ ID NO: 1375534 - DNA, 15 bp, Homo sapiens
agcctcacaatgctt

SEQ ID NO: 1375535 - DNA, 15 bp, Homo sapiens
gagcctcacaatgct

SEQ ID NO: 1375536 - DNA, 15 bp, Homo sapiens
agagcctcacaatgc

SEQ ID NO: 1375537 - DNA, 15 bp, Homo sapiens
cagagcctcacaatg

SEQ ID NO: 1375538 - DNA, 15 bp, Homo sapiens
gcagagcctcacaat

SEQ ID NO: 1375539 - DNA, 15 bp, Homo sapiens
agcagagcctcacaa

SEQ ID NO: 1375540 - DNA, 15 bp, Homo sapiens
cagcagagcctcaca

SEQ ID NO: 1375541 - DNA, 15 bp, Homo sapiens
tcagcagagcctcac

SEQ ID NO: 1375542 - DNA, 15 bp, Homo sapiens
ctcagcagagcctca

SEQ ID NO: 1375543 - DNA, 15 bp, Homo sapiens
cctcagcagagcctc

SEQ ID NO: 1375544 - DNA, 15 bp, Homo sapiens
ccctcagcagagcct

SEQ ID NO: 1375545 - DNA, 15 bp, Homo sapiens
accctcagcagagcc

SEQ ID NO: 1375546 - DNA, 15 bp, Homo sapiens
gaccctcagcagagc

SEQ ID NO: 1375547 - DNA, 15 bp, Homo sapiens
agaccctcagcagag

SEQ ID NO: 1375548 - DNA, 15 bp, Homo sapiens
gagaccctcagcaga

SEQ ID NO: 1375549 - DNA, 15 bp, Homo sapiens
ggagaccctcagcag

SEQ ID NO: 1375550 - DNA, 15 bp, Homo sapiens
gggagaccctcagca

SEQ ID NO: 1375551 - DNA, 15 bp, Homo sapiens
tgggagaccctcagc

SEQ ID NO: 1375552 - DNA, 15 bp, Homo sapiens
gtgggagaccctcag

SEQ ID NO: 1375553 - DNA, 15 bp, Homo sapiens
ggtgggagaccctca

SEQ ID NO: 1375554 - DNA, 15 bp, Homo sapiens
gggtgggagaccctc

SEQ ID NO: 1375555 - DNA, 15 bp, Homo sapiens
tgggtgggagaccct

SEQ ID NO: 1375556 - DNA, 15 bp, Homo sapiens
gtgggtgggagaccc

SEQ ID NO: 1375557 - DNA, 15 bp, Homo sapiens
ggtgggtgggagacc

SEQ ID NO: 1375558 - DNA, 15 bp, Homo sapiens
gggtgggtgggagac

SEQ ID NO: 1375559 - DNA, 15 bp, Homo sapiens
agggtgggtgggaga

SEQ ID NO: 1375560 - DNA, 15 bp, Homo sapiens
gagggtgggtgggag

SEQ ID NO: 1375561 - DNA, 15 bp, Homo sapiens
ggagggtgggtggga

SEQ ID NO: 1375562 - DNA, 15 bp, Homo sapiens
gggagggtgggtggg

SEQ ID NO: 1375563 - DNA, 15 bp, Homo sapiens
agggagggtgggtgg

SEQ ID NO: 1375564 - DNA, 15 bp, Homo sapiens
gagggagggtgggtg

SEQ ID NO: 1375565 - DNA, 15 bp, Homo sapiens
ggagggagggtgggt

SEQ ID NO: 1375566 - DNA, 15 bp, Homo sapiens
cgggagggagggtgg

SEQ ID NO: 1375567 - DNA, 15 bp, Homo sapiens
gcgggagggagggtg

SEQ ID NO: 1375568 - DNA, 15 bp, Homo sapiens
ggcgggagggagggt

SEQ ID NO: 1375569 - DNA, 15 bp, Homo sapiens
aggcgggagggaggg

SEQ ID NO: 1375570 - DNA, 15 bp, Homo sapiens
gaggcgggagggagg

SEQ ID NO: 1375571 - DNA, 15 bp, Homo sapiens
ggaggcgggagggag

SEQ ID NO: 1375572 - DNA, 15 bp, Homo sapiens
aggaggcgggaggga

SEQ ID NO: 1375573 - DNA, 15 bp, Homo sapiens
aaggaggcgggaggg

SEQ ID NO: 1375574 - DNA, 15 bp, Homo sapiens
gaaggaggcgggagg

SEQ ID NO: 1375575 - DNA, 15 bp, Homo sapiens
ggaaggaggcgggag

SEQ ID NO: 1375576 - DNA, 15 bp, Homo sapiens
gggaaggaggcggga

SEQ ID NO: 1375577 - DNA, 15 bp, Homo sapiens
tgggaaggaggcggg

SEQ ID NO: 1375578 - DNA, 15 bp, Homo sapiens
ctgggaaggaggcgg

SEQ ID NO: 1375579 - DNA, 15 bp, Homo sapiens
gctgggaaggaggcg

SEQ ID NO: 1375580 - DNA, 15 bp, Homo sapiens
tgctgggaaggaggc

SEQ ID NO: 1375581 - DNA, 15 bp, Homo sapiens
ctgctgggaaggagg

SEQ ID NO: 1375582 - DNA, 15 bp, Homo sapiens
gctgctgggaaggag

SEQ ID NO: 1375583 - DNA, 15 bp, Homo sapiens
agctgctgggaagga

SEQ ID NO: 1375584 - DNA, 15 bp, Homo sapiens
gagctgctgggaagg

SEQ ID NO: 1375585 - DNA, 15 bp, Homo sapiens
ggagctgctgggaag

SEQ ID NO: 1375586 - DNA, 15 bp, Homo sapiens
aggagctgctgggaa

SEQ ID NO: 1375587 - DNA, 15 bp, Homo sapiens
gaggagctgctggga

SEQ ID NO: 1375588 - DNA, 15 bp, Homo sapiens
cgaggagctgctggg

SEQ ID NO: 1375589 - DNA, 15 bp, Homo sapiens
tcgaggagctgctgg

SEQ ID NO: 1375590 - DNA, 15 bp, Homo sapiens
ctcgaggagctgctg

SEQ ID NO: 1375591 - DNA, 15 bp, Homo sapiens
actcgaggagctgct

SEQ ID NO: 1375592 - DNA, 15 bp, Homo sapiens
gactcgaggagctgc

SEQ ID NO: 1375593 - DNA, 15 bp, Homo sapiens
agactcgaggagctg

SEQ ID NO: 1375594 - DNA, 15 bp, Homo sapiens
aagactcgaggagct

SEQ ID NO: 1375595 - DNA, 15 bp, Homo sapiens
gaagactcgaggagc

SEQ ID NO: 1375596 - DNA, 15 bp, Homo sapiens
ggaagactcgaggag

SEQ ID NO: 1375597 - DNA, 15 bp, Homo sapiens
aggaagactcgagga

SEQ ID NO: 1375598 - DNA, 15 bp, Homo sapiens
aaggaagactcgagg

SEQ ID NO: 1375599 - DNA, 15 bp, Homo sapiens
aaaggaagactcgag

SEQ ID NO: 1375600 - DNA, 15 bp, Homo sapiens
gaaaggaagactcga

SEQ ID NO: 1375601 - DNA, 15 bp, Homo sapiens
ggaaaggaagactcg

SEQ ID NO: 1375602 - DNA, 15 bp, Homo sapiens
tggaaaggaagactc

SEQ ID NO: 1375603 - DNA, 15 bp, Homo sapiens
ctggaaaggaagact

SEQ ID NO: 1375604 - DNA, 15 bp, Homo sapiens
cctggaaaggaagac

SEQ ID NO: 1375605 - DNA, 15 bp, Homo sapiens
gcctggaaaggaaga

SEQ ID NO: 1375606 - DNA, 15 bp, Homo sapiens
ggcctggaaaggaag

SEQ ID NO: 1375607 - DNA, 15 bp, Homo sapiens
tggcctggaaaggaa

SEQ ID NO: 1375608 - DNA, 15 bp, Homo sapiens
ctggcctggaaagga

SEQ ID NO: 1375609 - DNA, 15 bp, Homo sapiens
cctggcctggaaagg

SEQ ID NO: 1375610 - DNA, 15 bp, Homo sapiens
acctggcctggaaag

SEQ ID NO: 1375611 - DNA, 15 bp, Homo sapiens
aacctggcctggaaa

SEQ ID NO: 1375612 - DNA, 15 bp, Homo sapiens
aaacctggcctggaa

SEQ ID NO: 1375613 - DNA, 15 bp, Homo sapiens
caaacctggcctgga

SEQ ID NO: 1375614 - DNA, 15 bp, Homo sapiens
acaaacctggcctgg

SEQ ID NO: 1375615 - DNA, 15 bp, Homo sapiens
aacaaacctggcctg

SEQ ID NO: 1375616 - DNA, 15 bp, Homo sapiens
caacaaacctggcct

SEQ ID NO: 1375617 - DNA, 15 bp, Homo sapiens
acaacaaacctggcc

SEQ ID NO: 1375618 - DNA, 15 bp, Homo sapiens
gacaacaaacctggc

SEQ ID NO: 1375619 - DNA, 15 bp, Homo sapiens
ggacaacaaacctgg

SEQ ID NO: 1375620 - DNA, 15 bp, Homo sapiens
gggacaacaaacctg

SEQ ID NO: 1375621 - DNA, 15 bp, Homo sapiens
cgggacaacaaacct

SEQ ID NO: 1375622 - DNA, 15 bp, Homo sapiens
tcgggacaacaaacc

SEQ ID NO: 1375623 - DNA, 15 bp, Homo sapiens
ttcgggacaacaaac

SEQ ID NO: 1375624 - DNA, 15 bp, Homo sapiens
attcgggacaacaaa

SEQ ID NO: 1375625 - DNA, 15 bp, Homo sapiens
aattcgggacaacaa

SEQ ID NO: 1375626 - DNA, 15 bp, Homo sapiens
caattcgggacaaca

SEQ ID NO: 1375627 - DNA, 15 bp, Homo sapiens
ggttgcaccctgcag

SEQ ID NO: 1375628 - DNA, 15 bp, Homo sapiens
gggttgcaccctgca

SEQ ID NO: 1375629 - DNA, 15 bp, Homo sapiens
tgggttgcaccctgc

SEQ ID NO: 1375630 - DNA, 15 bp, Homo sapiens
atgggttgcaccctg

SEQ ID NO: 1375631 - DNA, 15 bp, Homo sapiens
gatgggttgcaccct

SEQ ID NO: 1375632 - DNA, 15 bp, Homo sapiens
tgatgggttgcaccc

SEQ ID NO: 1375633 - DNA, 15 bp, Homo sapiens
atgatgggttgcacc

SEQ ID NO: 1375634 - DNA, 15 bp, Homo sapiens
gatgatgggttgcac

SEQ ID NO: 1375635 - DNA, 15 bp, Homo sapiens
tgatgatgggttgca

SEQ ID NO: 1375636 - DNA, 15 bp, Homo sapiens
atgatgatgggttgc

SEQ ID NO: 1375637 - DNA, 15 bp, Homo sapiens
aatgatgatgggttg

SEQ ID NO: 1375638 - DNA, 15 bp, Homo sapiens
caatgatgatgggtt

SEQ ID NO: 1375639 - DNA, 15 bp, Homo sapiens
tcaatgatgatgggt

SEQ ID NO: 1375640 - DNA, 15 bp, Homo sapiens
gtcaatgatgatggg

SEQ ID NO: 1375641 - DNA, 15 bp, Homo sapiens
agtcaatgatgatgg

SEQ ID NO: 1375642 - DNA, 15 bp, Homo sapiens
gagtcaatgatgatg

SEQ ID NO: 1375643 - DNA, 15 bp, Homo sapiens
agagtcaatgatgat

SEQ ID NO: 1375644 - DNA, 15 bp, Homo sapiens
cagagtcaatgatga

SEQ ID NO: 1375645 - DNA, 15 bp, Homo sapiens
tcagagtcaatgatg

SEQ ID NO: 1375646 - DNA, 15 bp, Homo sapiens
ttcagagtcaatgat

SEQ ID NO: 1375647 - DNA, 15 bp, Homo sapiens
gttcagagtcaatga

SEQ ID NO: 1375648 - DNA, 15 bp, Homo sapiens
ggttcagagtcaatg

SEQ ID NO: 1375649 - DNA, 15 bp, Homo sapiens
gggttcagagtcaat

SEQ ID NO: 1375650 - DNA, 15 bp, Homo sapiens
tgggttcagagtcaa

SEQ ID NO: 1375651 - DNA, 15 bp, Homo sapiens
ctgggttcagagtca

SEQ ID NO: 1375652 - DNA, 15 bp, Homo sapiens
actgggttcagagtc

SEQ ID NO: 1375653 - DNA, 15 bp, Homo sapiens
aactgggttcagagt

SEQ ID NO: 1375654 - DNA, 15 bp, Homo sapiens
taactgggttcagag

SEQ ID NO: 1375655 - DNA, 15 bp, Homo sapiens
gtaactgggttcaga

SEQ ID NO: 1375656 - DNA, 15 bp, Homo sapiens
agtaactgggttcag

SEQ ID NO: 1375657 - DNA, 15 bp, Homo sapiens
gagtaactgggttca

SEQ ID NO: 1375658 - DNA, 15 bp, Homo sapiens
ggagtaactgggttc

SEQ ID NO: 1375659 - DNA, 15 bp, Homo sapiens
tggagtaactgggtt

SEQ ID NO: 1375660 - DNA, 15 bp, Homo sapiens
ctggagtaactgggt

SEQ ID NO: 1375661 - DNA, 15 bp, Homo sapiens
tctggagtaactggg

SEQ ID NO: 1375662 - DNA, 15 bp, Homo sapiens
ttctggagtaactgg

SEQ ID NO: 1375663 - DNA, 15 bp, Homo sapiens
tttctggagtaactg

SEQ ID NO: 1375664 - DNA, 15 bp, Homo sapiens
gtttctggagtaact

SEQ ID NO: 1375665 - DNA, 15 bp, Homo sapiens
tgtttctggagtaac

SEQ ID NO: 1375666 - DNA, 15 bp, Homo sapiens
gtgtttctggagtaa

SEQ ID NO: 1375667 - DNA, 15 bp, Homo sapiens
tgtgtttctggagta

SEQ ID NO: 1375668 - DNA, 15 bp, Homo sapiens
ttgtgtttctggagt

SEQ ID NO: 1375669 - DNA, 15 bp, Homo sapiens
tttgtgtttctggag

SEQ ID NO: 1375670 - DNA, 15 bp, Homo sapiens
ctttgtgtttctgga

SEQ ID NO: 1375671 - DNA, 15 bp, Homo sapiens
cctttgtgtttctgg

SEQ ID NO: 1375672 - DNA, 15 bp, Homo sapiens
gcctttgtgtttctg

SEQ ID NO: 1375673 - DNA, 15 bp, Homo sapiens
ggcctttgtgtttct

SEQ ID NO: 1375674 - DNA, 15 bp, Homo sapiens
tggcctttgtgtttc

SEQ ID NO: 1375675 - DNA, 15 bp, Homo sapiens
gtggcctttgtgttt

SEQ ID NO: 1375676 - DNA, 15 bp, Homo sapiens
tgtggcctttgtgtt

SEQ ID NO: 1375677 - DNA, 15 bp, Homo sapiens
gtgtggcctttgtgt

SEQ ID NO: 1375678 - DNA, 15 bp, Homo sapiens
ggtgtggcctttgtg

SEQ ID NO: 1375679 - DNA, 15 bp, Homo sapiens
tggtgtggcctttgt

SEQ ID NO: 1375680 - DNA, 15 bp, Homo sapiens
ttggtgtggcctttg

SEQ ID NO: 1375681 - DNA, 15 bp, Homo sapiens
tttggtgtggccttt

SEQ ID NO: 1375682 - DNA, 15 bp, Homo sapiens
ttttggtgtggcctt

SEQ ID NO: 1375683 - DNA, 15 bp, Homo sapiens
gttttggtgtggcct

SEQ ID NO: 1375684 - DNA, 15 bp, Homo sapiens
tgttttggtgtggcc

SEQ ID NO: 1375685 - DNA, 15 bp, Homo sapiens
gtgttttggtgtggc

SEQ ID NO: 1375686 - DNA, 15 bp, Homo sapiens
tgtgttttggtgtgg

SEQ ID NO: 1375687 - DNA, 15 bp, Homo sapiens
atgtgttttggtgtg

SEQ ID NO: 1375688 - DNA, 15 bp, Homo sapiens
gatgtgttttggtgt

SEQ ID NO: 1375689 - DNA, 15 bp, Homo sapiens
agatgtgttttggtg

SEQ ID NO: 1375690 - DNA, 15 bp, Homo sapiens
gagatgtgttttggt

SEQ ID NO: 1375691 - DNA, 15 bp, Homo sapiens
tgagatgtgttttgg

SEQ ID NO: 1375692 - DNA, 15 bp, Homo sapiens
gtgagatgtgttttg

SEQ ID NO: 1375693 - DNA, 15 bp, Homo sapiens
tgtgagatgtgtttt

SEQ ID NO: 1375694 - DNA, 15 bp, Homo sapiens
gtgtgagatgtgttt

SEQ ID NO: 1375695 - DNA, 15 bp, Homo sapiens
agtgtgagatgtgtt

SEQ ID NO: 1375696 - DNA, 15 bp, Homo sapiens
gagtgtgagatgtgt

SEQ ID NO: 1375697 - DNA, 15 bp, Homo sapiens
tgagtgtgagatgtg

SEQ ID NO: 1375698 - DNA, 15 bp, Homo sapiens
ttgagtgtgagatgt

SEQ ID NO: 1375699 - DNA, 15 bp, Homo sapiens
gttgagtgtgagatg

SEQ ID NO: 1375700 - DNA, 15 bp, Homo sapiens
ggttgagtgtgagat

SEQ ID NO: 1375701 - DNA, 15 bp, Homo sapiens
gggttgagtgtgaga

SEQ ID NO: 1375702 - DNA, 15 bp, Homo sapiens
ggggttgagtgtgag

SEQ ID NO: 1375703 - DNA, 15 bp, Homo sapiens
aggggttgagtgtga

SEQ ID NO: 1375704 - DNA, 15 bp, Homo sapiens
caggggttgagtgtg

SEQ ID NO: 1375705 - DNA, 15 bp, Homo sapiens
gcaggggttgagtgt

SEQ ID NO: 1375706 - DNA, 15 bp, Homo sapiens
agcaggggttgagtg

SEQ ID NO: 1375707 - DNA, 15 bp, Homo sapiens
aagcaggggttgagt

SEQ ID NO: 1375708 - DNA, 15 bp, Homo sapiens
aaagcaggggttgag

SEQ ID NO: 1375709 - DNA, 15 bp, Homo sapiens
caaagcaggggttga

SEQ ID NO: 1375710 - DNA, 15 bp, Homo sapiens
acaaagcaggggttg

SEQ ID NO: 1375711 - DNA, 15 bp, Homo sapiens
cacaaagcaggggtt

SEQ ID NO: 1375712 - DNA, 15 bp, Homo sapiens
gcacaaagcaggggt

SEQ ID NO: 1375713 - DNA, 15 bp, Homo sapiens
ggcacaaagcagggg

SEQ ID NO: 1375714 - DNA, 15 bp, Homo sapiens
gggcacaaagcaggg

SEQ ID NO: 1375715 - DNA, 15 bp, Homo sapiens
ggggcacaaagcagg

SEQ ID NO: 1375716 - DNA, 15 bp, Homo sapiens
gggggcacaaagcag

SEQ ID NO: 1375717 - DNA, 15 bp, Homo sapiens
ggggggcacaaagca

SEQ ID NO: 1375718 - DNA, 15 bp, Homo sapiens
tggggggcacaaagc

SEQ ID NO: 1375719 - DNA, 15 bp, Homo sapiens
ctggggggcacaaag

SEQ ID NO: 1375720 - DNA, 15 bp, Homo sapiens
cctggggggcacaaa

SEQ ID NO: 1375721 - DNA, 15 bp, Homo sapiens
acctggggggcacaa

SEQ ID NO: 1375722 - DNA, 15 bp, Homo sapiens
gacctggggggcaca

SEQ ID NO: 1375723 - DNA, 15 bp, Homo sapiens
ggacctggggggcac

SEQ ID NO: 1375724 - DNA, 15 bp, Homo sapiens
gggacctggggggca

SEQ ID NO: 1375725 - DNA, 15 bp, Homo sapiens
ggggacctggggggc

SEQ ID NO: 1375726 - DNA, 15 bp, Homo sapiens
tggggacctgggggg

SEQ ID NO: 1375727 - DNA, 15 bp, Homo sapiens
ttggggacctggggg

SEQ ID NO: 1375728 - DNA, 15 bp, Homo sapiens
cttggggacctgggg

SEQ ID NO: 1375729 - DNA, 15 bp, Homo sapiens
tcttggggacctggg

SEQ ID NO: 1375730 - DNA, 15 bp, Homo sapiens
ctcttggggacctgg

SEQ ID NO: 1375731 - DNA, 15 bp, Homo sapiens
cctcttggggacctg

SEQ ID NO: 1375732 - DNA, 15 bp, Homo sapiens
tcctcttggggacct

SEQ ID NO: 1375733 - DNA, 15 bp, Homo sapiens
ctcctcttggggacc

SEQ ID NO: 1375734 - DNA, 15 bp, Homo sapiens
cctcctcttggggac

SEQ ID NO: 1375735 - DNA, 15 bp, Homo sapiens
tcctcctcttgggga

SEQ ID NO: 1375736 - DNA, 15 bp, Homo sapiens
ctcctcctcttgggg

SEQ ID NO: 1375737 - DNA, 15 bp, Homo sapiens
gctcctcctcttggg

SEQ ID NO: 1375738 - DNA, 15 bp, Homo sapiens
agctcctcctcttgg

SEQ ID NO: 1375739 - DNA, 15 bp, Homo sapiens
cagctcctcctcttg

SEQ ID NO: 1375740 - DNA, 15 bp, Homo sapiens
ccagctcctcctctt

SEQ ID NO: 1375741 - DNA, 15 bp, Homo sapiens
cccagctcctcctct

SEQ ID NO: 1375742 - DNA, 15 bp, Homo sapiens
ccccagctcctcctc

SEQ ID NO: 1375743 - DNA, 15 bp, Homo sapiens
gccccagctcctcct

SEQ ID NO: 1375744 - DNA, 15 bp, Homo sapiens
agccccagctcctcc

SEQ ID NO: 1375745 - DNA, 15 bp, Homo sapiens
cagccccagctcctc

SEQ ID NO: 1375746 - DNA, 15 bp, Homo sapiens
gcagccccagctcct

SEQ ID NO: 1375747 - DNA, 15 bp, Homo sapiens
tgcagccccagctcc

SEQ ID NO: 1375748 - DNA, 15 bp, Homo sapiens
ctgcagccccagctc

SEQ ID NO: 1375749 - DNA, 15 bp, Homo sapiens
cctgcagccccagct

SEQ ID NO: 1375750 - DNA, 15 bp, Homo sapiens
ccctgcagccccagc

SEQ ID NO: 1375751 - DNA, 15 bp, Homo sapiens
tccctgcagccccag

SEQ ID NO: 1375752 - DNA, 15 bp, Homo sapiens
ctccctgcagcccca

SEQ ID NO: 1375753 - DNA, 15 bp, Homo sapiens
gctccctgcagcccc

SEQ ID NO: 1375754 - DNA, 15 bp, Homo sapiens
cgctccctgcagccc

SEQ ID NO: 1375755 - DNA, 15 bp, Homo sapiens
tcgctccctgcagcc

SEQ ID NO: 1375756 - DNA, 15 bp, Homo sapiens
ctcgctccctgcagc

SEQ ID NO: 1375757 - DNA, 15 bp, Homo sapiens
cctcgctccctgcag

SEQ ID NO: 1375758 - DNA, 15 bp, Homo sapiens
ccctcgctccctgca

SEQ ID NO: 1375759 - DNA, 15 bp, Homo sapiens
gccctcgctccctgc

SEQ ID NO: 1375760 - DNA, 15 bp, Homo sapiens
tgccctcgctccctg

SEQ ID NO: 1375761 - DNA, 15 bp, Homo sapiens
ttgccctcgctccct

SEQ ID NO: 1375762 - DNA, 15 bp, Homo sapiens
cttgccctcgctccc

SEQ ID NO: 1375763 - DNA, 15 bp, Homo sapiens
ccttgccctcgctcc

SEQ ID NO: 1375764 - DNA, 15 bp, Homo sapiens
gccttgccctcgctc

SEQ ID NO: 1375765 - DNA, 15 bp, Homo sapiens
ggccttgccctcgct

SEQ ID NO: 1375766 - DNA, 15 bp, Homo sapiens
gggccttgccctcgc

SEQ ID NO: 1375767 - DNA, 15 bp, Homo sapiens
agggccttgccctcg

SEQ ID NO: 1375768 - DNA, 15 bp, Homo sapiens
cagggccttgccctc

SEQ ID NO: 1375769 - DNA, 15 bp, Homo sapiens
tcagggccttgccct

SEQ ID NO: 1375770 - DNA, 15 bp, Homo sapiens
gtcagggccttgccc

SEQ ID NO: 1375771 - DNA, 15 bp, Homo sapiens
ggtcagggccttgcc

SEQ ID NO: 1375772 - DNA, 15 bp, Homo sapiens
cggtcagggccttgc

SEQ ID NO: 1375773 - DNA, 15 bp, Homo sapiens
tcggtcagggccttg

SEQ ID NO: 1375774 - DNA, 15 bp, Homo sapiens
gtcggtcagggcctt

SEQ ID NO: 1375775 - DNA, 15 bp, Homo sapiens
cgtcggtcagggcct

SEQ ID NO: 1375776 - DNA, 15 bp, Homo sapiens
acgtcggtcagggcc

SEQ ID NO: 1375777 - DNA, 15 bp, Homo sapiens
cacgtcggtcagggc

SEQ ID NO: 1375778 - DNA, 15 bp, Homo sapiens
ccacgtcggtcaggg

SEQ ID NO: 1375779 - DNA, 15 bp, Homo sapiens
cccacgtcggtcagg

SEQ ID NO: 1375780 - DNA, 15 bp, Homo sapiens
ccccacgtcggtcag

SEQ ID NO: 1375781 - DNA, 15 bp, Homo sapiens
gccccacgtcggtca

SEQ ID NO: 1375782 - DNA, 15 bp, Homo sapiens
ggccccacgtcggtc

SEQ ID NO: 1375783 - DNA, 15 bp, Homo sapiens
gggccccacgtcggt

SEQ ID NO: 1375784 - DNA, 15 bp, Homo sapiens
agggccccacgtcgg

SEQ ID NO: 1375785 - DNA, 15 bp, Homo sapiens
aagggccccacgtcg

SEQ ID NO: 1375786 - DNA, 15 bp, Homo sapiens
gaagggccccacgtc

SEQ ID NO: 1375787 - DNA, 15 bp, Homo sapiens
ggaagggccccacgt

SEQ ID NO: 1375788 - DNA, 15 bp, Homo sapiens
gggaagggccccacg

SEQ ID NO: 1375789 - DNA, 15 bp, Homo sapiens
ggggaagggccccac

SEQ ID NO: 1375790 - DNA, 15 bp, Homo sapiens
aggggaagggcccca

SEQ ID NO: 1375791 - DNA, 15 bp, Homo sapiens
gaggggaagggcccc

SEQ ID NO: 1375792 - DNA, 15 bp, Homo sapiens
agaggggaagggccc

SEQ ID NO: 1375793 - DNA, 15 bp, Homo sapiens
cagaggggaagggcc

SEQ ID NO: 1375794 - DNA, 15 bp, Homo sapiens
gcagaggggaagggc

SEQ ID NO: 1375795 - DNA, 15 bp, Homo sapiens
agcagaggggaaggg

SEQ ID NO: 1375796 - DNA, 15 bp, Homo sapiens
aagcagaggggaagg

SEQ ID NO: 1375797 - DNA, 15 bp, Homo sapiens
aaagcagaggggaag

SEQ ID NO: 1375798 - DNA, 15 bp, Homo sapiens
aaaagcagaggggaa

SEQ ID NO: 1375799 - DNA, 15 bp, Homo sapiens
gaaaagcagagggga

SEQ ID NO: 1375800 - DNA, 15 bp, Homo sapiens
ggaaaagcagagggg

SEQ ID NO: 1375801 - DNA, 15 bp, Homo sapiens
gggaaaagcagaggg

SEQ ID NO: 1375802 - DNA, 15 bp, Homo sapiens
ggggaaaagcagagg

SEQ ID NO: 1375803 - DNA, 15 bp, Homo sapiens
gggggaaaagcagag

SEQ ID NO: 1375804 - DNA, 15 bp, Homo sapiens
agggggaaaagcaga

SEQ ID NO: 1375805 - DNA, 15 bp, Homo sapiens
gagggggaaaagcag

SEQ ID NO: 1375806 - DNA, 15 bp, Homo sapiens
agagggggaaaagca

SEQ ID NO: 1375807 - DNA, 15 bp, Homo sapiens
cagagggggaaaagc

SEQ ID NO: 1375808 - DNA, 15 bp, Homo sapiens
gcagagggggaaaag

SEQ ID NO: 1375809 - DNA, 15 bp, Homo sapiens
agcagagggggaaaa

SEQ ID NO: 1375810 - DNA, 15 bp, Homo sapiens
cagcagagggggaaa

SEQ ID NO: 1375811 - DNA, 15 bp, Homo sapiens
acagcagagggggaa

SEQ ID NO: 1375812 - DNA, 15 bp, Homo sapiens
gacagcagaggggga

SEQ ID NO: 1375813 - DNA, 15 bp, Homo sapiens
ggacagcagaggggg

SEQ ID NO: 1375814 - DNA, 15 bp, Homo sapiens
gggacagcagagggg

SEQ ID NO: 1375815 - DNA, 15 bp, Homo sapiens
ggggacagcagaggg

SEQ ID NO: 1375816 - DNA, 15 bp, Homo sapiens
tggggacagcagagg

SEQ ID NO: 1375817 - DNA, 15 bp, Homo sapiens
atggggacagcagag

SEQ ID NO: 1375818 - DNA, 15 bp, Homo sapiens
aatggggacagcaga

SEQ ID NO: 1375819 - DNA, 15 bp, Homo sapiens
aaatggggacagcag

SEQ ID NO: 1375820 - DNA, 15 bp, Homo sapiens
aaaatggggacagca

SEQ ID NO: 1375821 - DNA, 15 bp, Homo sapiens
aaaaatggggacagc

SEQ ID NO: 1375822 - DNA, 15 bp, Homo sapiens
caaaaatggggacag

SEQ ID NO: 1375823 - DNA, 15 bp, Homo sapiens
acaaaaatggggaca

SEQ ID NO: 1375824 - DNA, 15 bp, Homo sapiens
aacaaaaatggggac

SEQ ID NO: 1375825 - DNA, 15 bp, Homo sapiens
taacaaaaatgggga

SEQ ID NO: 1375826 - DNA, 15 bp, Homo sapiens
ttaacaaaaatgggg

SEQ ID NO: 1375827 - DNA, 15 bp, Homo sapiens
gttaacaaaaatggg

SEQ ID NO: 1375828 - DNA, 15 bp, Homo sapiens
tgttaacaaaaatgg

SEQ ID NO: 1375829 - DNA, 15 bp, Homo sapiens
ttgttaacaaaaatg

SEQ ID NO: 1375830 - DNA, 15 bp, Homo sapiens
tttgttaacaaaaat

SEQ ID NO: 1375831 - DNA, 15 bp, Homo sapiens
atttgttaacaaaaa

SEQ ID NO: 1375832 - DNA, 15 bp, Homo sapiens
tatttgttaacaaaa

SEQ ID NO: 1375833 - DNA, 15 bp, Homo sapiens
gtatttgttaacaaa

SEQ ID NO: 1375834 - DNA, 15 bp, Homo sapiens
tgtatttgttaacaa

SEQ ID NO: 1375835 - DNA, 15 bp, Homo sapiens
ttgtatttgttaaca

SEQ ID NO: 1375836 - DNA, 15 bp, Homo sapiens
cttgtatttgttaac

SEQ ID NO: 1375837 - DNA, 15 bp, Homo sapiens
tcttgtatttgttaa

SEQ ID NO: 1375838 - DNA, 15 bp, Homo sapiens
gtcttgtatttgtta

SEQ ID NO: 1375839 - DNA, 15 bp, Homo sapiens
agtcttgtatttgtt

SEQ ID NO: 1375840 - DNA, 15 bp, Homo sapiens
aagtcttgtatttgt

SEQ ID NO: 1375841 - DNA, 15 bp, Homo sapiens
gaagtcttgtatttg

SEQ ID NO: 1375842 - DNA, 15 bp, Homo sapiens
ggaagtcttgtattt

SEQ ID NO: 1375843 - DNA, 15 bp, Homo sapiens
cggaagtcttgtatt

SEQ ID NO: 1375844 - DNA, 15 bp, Homo sapiens
ccggaagtcttgtat

SEQ ID NO: 1375845 - DNA, 15 bp, Homo sapiens
accggaagtcttgta

SEQ ID NO: 1375846 - DNA, 15 bp, Homo sapiens
gaccggaagtcttgt

SEQ ID NO: 1375847 - DNA, 15 bp, Homo sapiens
agaccggaagtcttg

SEQ ID NO: 1375848 - DNA, 15 bp, Homo sapiens
gagaccggaagtctt

SEQ ID NO: 1375849 - DNA, 15 bp, Homo sapiens
ggagaccggaagtct

SEQ ID NO: 1375850 - DNA, 15 bp, Homo sapiens
tggagaccggaagtc

SEQ ID NO: 1375851 - DNA, 15 bp, Homo sapiens
gtggagaccggaagt

SEQ ID NO: 1375852 - DNA, 15 bp, Homo sapiens
ggtggagaccggaag

SEQ ID NO: 1375853 - DNA, 15 bp, Homo sapiens
gggtggagaccggaa

SEQ ID NO: 1375854 - DNA, 15 bp, Homo sapiens
agggtggagaccgga

SEQ ID NO: 1375855 - DNA, 15 bp, Homo sapiens
cagggtggagaccgg

SEQ ID NO: 1375856 - DNA, 15 bp, Homo sapiens
gcagggtggagaccg

SEQ ID NO: 1375857 - DNA, 15 bp, Homo sapiens
agcagggtggagacc

SEQ ID NO: 1375858 - DNA, 15 bp, Homo sapiens
cagcagggtggagac

SEQ ID NO: 1375859 - DNA, 15 bp, Homo sapiens
gcagcagggtggaga

SEQ ID NO: 1375860 - DNA, 15 bp, Homo sapiens
ggcagcagggtggag

SEQ ID NO: 1375861 - DNA, 15 bp, Homo sapiens
tggcagcagggtgga

SEQ ID NO: 1375862 - DNA, 15 bp, Homo sapiens
gtggcagcagggtgg

SEQ ID NO: 1375863 - DNA, 15 bp, Homo sapiens
tgtggcagcagggtg

SEQ ID NO: 1375864 - DNA, 15 bp, Homo sapiens
ttgtggcagcagggt

SEQ ID NO: 1375865 - DNA, 15 bp, Homo sapiens
tttgtggcagcaggg

SEQ ID NO: 1375866 - DNA, 15 bp, Homo sapiens
gtttgtggcagcagg

SEQ ID NO: 1375867 - DNA, 15 bp, Homo sapiens
ggtttgtggcagcag

SEQ ID NO: 1375868 - DNA, 15 bp, Homo sapiens
tggtttgtggcagca

SEQ ID NO: 1375869 - DNA, 15 bp, Homo sapiens
gtggtttgtggcagc

SEQ ID NO: 1375870 - DNA, 15 bp, Homo sapiens
tgtggtttgtggcag

SEQ ID NO: 1375871 - DNA, 15 bp, Homo sapiens
ctgtggtttgtggca

SEQ ID NO: 1375872 - DNA, 15 bp, Homo sapiens
gctgtggtttgtggc

SEQ ID NO: 1375873 - DNA, 15 bp, Homo sapiens
cgctgtggtttgtgg

SEQ ID NO: 1375874 - DNA, 15 bp, Homo sapiens
acgctgtggtttgtg

SEQ ID NO: 1375875 - DNA, 15 bp, Homo sapiens
aacgctgtggtttgt

SEQ ID NO: 1375876 - DNA, 15 bp, Homo sapiens
gaacgctgtggtttg

SEQ ID NO: 1375877 - DNA, 15 bp, Homo sapiens
ggaacgctgtggttt

SEQ ID NO: 1375878 - DNA, 15 bp, Homo sapiens
aggaacgctgtggtt

SEQ ID NO: 1375879 - DNA, 15 bp, Homo sapiens
caggaacgctgtggt

SEQ ID NO: 1375880 - DNA, 15 bp, Homo sapiens
gcaggaacgctgtgg

SEQ ID NO: 1375881 - DNA, 15 bp, Homo sapiens
tgcaggaacgctgtg

SEQ ID NO: 1375882 - DNA, 15 bp, Homo sapiens
ctgcaggaacgctgt

SEQ ID NO: 1375883 - DNA, 15 bp, Homo sapiens
actgcaggaacgctg

SEQ ID NO: 1375884 - DNA, 15 bp, Homo sapiens
gactgcaggaacgct

SEQ ID NO: 1375885 - DNA, 15 bp, Homo sapiens
agactgcaggaacgc

SEQ ID NO: 1375886 - DNA, 15 bp, Homo sapiens
cagactgcaggaacg

SEQ ID NO: 1375887 - DNA, 15 bp, Homo sapiens
ccagactgcaggaac

SEQ ID NO: 1375888 - DNA, 15 bp, Homo sapiens
gccagactgcaggaa

SEQ ID NO: 1375889 - DNA, 15 bp, Homo sapiens
agccagactgcagga

SEQ ID NO: 1375890 - DNA, 15 bp, Homo sapiens
cagccagactgcagg

SEQ ID NO: 1375891 - DNA, 15 bp, Homo sapiens
ccagccagactgcag

SEQ ID NO: 1375892 - DNA, 15 bp, Homo sapiens
cccagccagactgca

SEQ ID NO: 1375893 - DNA, 15 bp, Homo sapiens
gcccagccagactgc

SEQ ID NO: 1375894 - DNA, 15 bp, Homo sapiens
agcccagccagactg

SEQ ID NO: 1375895 - DNA, 15 bp, Homo sapiens
cagcccagccagact

SEQ ID NO: 1375896 - DNA, 15 bp, Homo sapiens
ccagcccagccagac

SEQ ID NO: 1375897 - DNA, 15 bp, Homo sapiens
cccagcccagccaga

SEQ ID NO: 1375898 - DNA, 15 bp, Homo sapiens
ccccagcccagccag

SEQ ID NO: 1375899 - DNA, 15 bp, Homo sapiens
tccccagcccagcca

SEQ ID NO: 1375900 - DNA, 15 bp, Homo sapiens
ctccccagcccagcc

SEQ ID NO: 1375901 - DNA, 15 bp, Homo sapiens
tctccccagcccagc

SEQ ID NO: 1375902 - DNA, 15 bp, Homo sapiens
atctccccagcccag

SEQ ID NO: 1375903 - DNA, 15 bp, Homo sapiens
aatctccccagccca

SEQ ID NO: 1375904 - DNA, 15 bp, Homo sapiens
aaatctccccagccc

SEQ ID NO: 1375905 - DNA, 15 bp, Homo sapiens
taaatctccccagcc

SEQ ID NO: 1375906 - DNA, 15 bp, Homo sapiens
ataaatctccccagc

SEQ ID NO: 1375907 - DNA, 15 bp, Homo sapiens
cataaatctccccag

SEQ ID NO: 1375908 - DNA, 15 bp, Homo sapiens
ccataaatctcccca

SEQ ID NO: 1375909 - DNA, 15 bp, Homo sapiens
accataaatctcccc

SEQ ID NO: 1375910 - DNA, 15 bp, Homo sapiens
gaccataaatctccc

SEQ ID NO: 1375911 - DNA, 15 bp, Homo sapiens
ggaccataaatctcc

SEQ ID NO: 1375912 - DNA, 15 bp, Homo sapiens
gggaccataaatctc

SEQ ID NO: 1375913 - DNA, 15 bp, Homo sapiens
tgggaccataaatct

SEQ ID NO: 1375914 - DNA, 15 bp, Homo sapiens
ttgggaccataaatc

SEQ ID NO: 1375915 - DNA, 15 bp, Homo sapiens
cttgggaccataaat

SEQ ID NO: 1375916 - DNA, 15 bp, Homo sapiens
acttgggaccataaa

SEQ ID NO: 1375917 - DNA, 15 bp, Homo sapiens
gacttgggaccataa

SEQ ID NO: 1375918 - DNA, 15 bp, Homo sapiens
agacttgggaccata

SEQ ID NO: 1375919 - DNA, 15 bp, Homo sapiens
cagacttgggaccat

SEQ ID NO: 1375920 - DNA, 15 bp, Homo sapiens
tcagacttgggacca

SEQ ID NO: 1375921 - DNA, 15 bp, Homo sapiens
ctcagacttgggacc

SEQ ID NO: 1375922 - DNA, 15 bp, Homo sapiens
cctcagacttgggac

SEQ ID NO: 1375923 - DNA, 15 bp, Homo sapiens
gcctcagacttggga

SEQ ID NO: 1375924 - DNA, 15 bp, Homo sapiens
ggcctcagacttggg

SEQ ID NO: 1375925 - DNA, 15 bp, Homo sapiens
aggcctcagacttgg

SEQ ID NO: 1375926 - DNA, 15 bp, Homo sapiens
caggcctcagacttg

SEQ ID NO: 1375927 - DNA, 15 bp, Homo sapiens
gcaggcctcagactt

SEQ ID NO: 1375928 - DNA, 15 bp, Homo sapiens
ggcaggcctcagact

SEQ ID NO: 1375929 - DNA, 15 bp, Homo sapiens
gggcaggcctcagac

SEQ ID NO: 1375930 - DNA, 15 bp, Homo sapiens
cgggcaggcctcaga

SEQ ID NO: 1375931 - DNA, 15 bp, Homo sapiens
gcgggcaggcctcag

SEQ ID NO: 1375932 - DNA, 15 bp, Homo sapiens
agcgggcaggcctca

SEQ ID NO: 1375933 - DNA, 15 bp, Homo sapiens
cagcgggcaggcctc

SEQ ID NO: 1375934 - DNA, 15 bp, Homo sapiens
ccagcgggcaggcct

SEQ ID NO: 1375935 - DNA, 15 bp, Homo sapiens
gccagcgggcaggcc

SEQ ID NO: 1375936 - DNA, 15 bp, Homo sapiens
agccagcgggcaggc

SEQ ID NO: 1375937 - DNA, 15 bp, Homo sapiens
gagccagcgggcagg

SEQ ID NO: 1375938 - DNA, 15 bp, Homo sapiens
ggagccagcgggcag

SEQ ID NO: 1375939 - DNA, 15 bp, Homo sapiens
aggagccagcgggca

SEQ ID NO: 1375940 - DNA, 15 bp, Homo sapiens
taggagccagcgggc

SEQ ID NO: 1375941 - DNA, 15 bp, Homo sapiens
gtaggagccagcggg

SEQ ID NO: 1375942 - DNA, 15 bp, Homo sapiens
agtaggagccagcgg

SEQ ID NO: 1375943 - DNA, 15 bp, Homo sapiens
aagtaggagccagcg

SEQ ID NO: 1375944 - DNA, 15 bp, Homo sapiens
taagtaggagccagc

SEQ ID NO: 1375945 - DNA, 15 bp, Homo sapiens
ttaagtaggagccag

SEQ ID NO: 1375946 - DNA, 15 bp, Homo sapiens
cttaagtaggagcca

SEQ ID NO: 1375947 - DNA, 15 bp, Homo sapiens
ccttaagtaggagcc

SEQ ID NO: 1375948 - DNA, 15 bp, Homo sapiens
tccttaagtaggagc

SEQ ID NO: 1375949 - DNA, 15 bp, Homo sapiens
ctccttaagtaggag

SEQ ID NO: 1375950 - DNA, 15 bp, Homo sapiens
cctccttaagtagga

SEQ ID NO: 1375951 - DNA, 15 bp, Homo sapiens
tcctccttaagtagg

SEQ ID NO: 1375952 - DNA, 15 bp, Homo sapiens
ctcctccttaagtag

SEQ ID NO: 1375953 - DNA, 15 bp, Homo sapiens
actcctccttaagta

SEQ ID NO: 1375954 - DNA, 15 bp, Homo sapiens
gactcctccttaagt

SEQ ID NO: 1375955 - DNA, 15 bp, Homo sapiens
tgactcctccttaag

SEQ ID NO: 1375956 - DNA, 15 bp, Homo sapiens
ctgactcctccttaa

SEQ ID NO: 1375957 - DNA, 15 bp, Homo sapiens
tctgactcctcctta

SEQ ID NO: 1375958 - DNA, 15 bp, Homo sapiens
ttctgactcctcctt

SEQ ID NO: 1375959 - DNA, 15 bp, Homo sapiens
attctgactcctcct

SEQ ID NO: 1375960 - DNA, 15 bp, Homo sapiens
cattctgactcctcc

SEQ ID NO: 1375961 - DNA, 15 bp, Homo sapiens
gcattctgactcctc

SEQ ID NO: 1375962 - DNA, 15 bp, Homo sapiens
ggcattctgactcct

SEQ ID NO: 1375963 - DNA, 15 bp, Homo sapiens
gggcattctgactcc

SEQ ID NO: 1375964 - DNA, 15 bp, Homo sapiens
cgggcattctgactc

SEQ ID NO: 1375965 - DNA, 15 bp, Homo sapiens
gcgggcattctgact

SEQ ID NO: 1375966 - DNA, 15 bp, Homo sapiens
ggcgggcattctgac

SEQ ID NO: 1375967 - DNA, 15 bp, Homo sapiens
cggcgggcattctga

SEQ ID NO: 1375968 - DNA, 15 bp, Homo sapiens
gcggcgggcattctg

SEQ ID NO: 1375969 - DNA, 15 bp, Homo sapiens
ggcggcgggcattct

SEQ ID NO: 1375970 - DNA, 15 bp, Homo sapiens
cggcggcgggcattc

SEQ ID NO: 1375971 - DNA, 15 bp, Homo sapiens
ccggcggcgggcatt

SEQ ID NO: 1375972 - DNA, 15 bp, Homo sapiens
cccggcggcgggcat

SEQ ID NO: 1375973 - DNA, 15 bp, Homo sapiens
ccccggcggcgggca

SEQ ID NO: 1375974 - DNA, 15 bp, Homo sapiens
gccccggcggcgggc

SEQ ID NO: 1375975 - DNA, 15 bp, Homo sapiens
agccccggcggcggg

SEQ ID NO: 1375976 - DNA, 15 bp, Homo sapiens
gagccccggcggcgg

SEQ ID NO: 1375977 - DNA, 15 bp, Homo sapiens
ggagccccggcggcg

SEQ ID NO: 1375978 - DNA, 15 bp, Homo sapiens
gggagccccggcggc

SEQ ID NO: 1375979 - DNA, 15 bp, Homo sapiens
agggagccccggcgg

SEQ ID NO: 1375980 - DNA, 15 bp, Homo sapiens
aagggagccccggcg

SEQ ID NO: 1375981 - DNA, 15 bp, Homo sapiens
aaagggagccccggc

SEQ ID NO: 1375982 - DNA, 15 bp, Homo sapiens
gaaagggagccccgg

SEQ ID NO: 1375983 - DNA, 15 bp, Homo sapiens
ggaaagggagccccg

SEQ ID NO: 1375984 - DNA, 15 bp, Homo sapiens
gggaaagggagcccc

SEQ ID NO: 1375985 - DNA, 15 bp, Homo sapiens
agggaaagggagccc

SEQ ID NO: 1375986 - DNA, 15 bp, Homo sapiens
gagggaaagggagcc

SEQ ID NO: 1375987 - DNA, 15 bp, Homo sapiens
ggagggaaagggagc

SEQ ID NO: 1375988 - DNA, 15 bp, Homo sapiens
cggagggaaagggag

SEQ ID NO: 1375989 - DNA, 15 bp, Homo sapiens
acggagggaaaggga

SEQ ID NO: 1375990 - DNA, 15 bp, Homo sapiens
cacggagggaaaggg

SEQ ID NO: 1375991 - DNA, 15 bp, Homo sapiens
acacggagggaaagg

SEQ ID NO: 1375992 - DNA, 15 bp, Homo sapiens
cacacggagggaaag

SEQ ID NO: 1375993 - DNA, 15 bp, Homo sapiens
tcacacggagggaaa

SEQ ID NO: 1375994 - DNA, 15 bp, Homo sapiens
gtcacacggagggaa

SEQ ID NO: 1375995 - DNA, 15 bp, Homo sapiens
ggtcacacggaggga

SEQ ID NO: 1375996 - DNA, 15 bp, Homo sapiens
gggtcacacggaggg

SEQ ID NO: 1375997 - DNA, 15 bp, Homo sapiens
ggggtcacacggagg

SEQ ID NO: 1375998 - DNA, 15 bp, Homo sapiens
gggggtcacacggag

SEQ ID NO: 1375999 - DNA, 15 bp, Homo sapiens
ggggggtcacacgga

SEQ ID NO: 1376000 - DNA, 15 bp, Homo sapiens
aggggggtcacacgg

SEQ ID NO: 1376001 - DNA, 15 bp, Homo sapiens
aaggggggtcacacg

SEQ ID NO: 1376002 - DNA, 15 bp, Homo sapiens
aaaggggggtcacac

SEQ ID NO: 1376003 - DNA, 15 bp, Homo sapiens
aaaaggggggtcaca

SEQ ID NO: 1376004 - DNA, 15 bp, Homo sapiens
taaaaggggggtcac

SEQ ID NO: 1376005 - DNA, 15 bp, Homo sapiens
ttaaaaggggggtca

SEQ ID NO: 1376006 - DNA, 15 bp, Homo sapiens
tttaaaaggggggtc

SEQ ID NO: 1376007 - DNA, 15 bp, Homo sapiens
ctttaaaaggggggt

SEQ ID NO: 1376008 - DNA, 15 bp, Homo sapiens
actttaaaagggggg

SEQ ID NO: 1376009 - DNA, 15 bp, Homo sapiens
gactttaaaaggggg

SEQ ID NO: 1376010 - DNA, 15 bp, Homo sapiens
ggactttaaaagggg

SEQ ID NO: 1376011 - DNA, 15 bp, Homo sapiens
aggactttaaaaggg

SEQ ID NO: 1376012 - DNA, 15 bp, Homo sapiens
gaggactttaaaagg

SEQ ID NO: 1376013 - DNA, 15 bp, Homo sapiens
ggaggactttaaaag

SEQ ID NO: 1376014 - DNA, 15 bp, Homo sapiens
tggaggactttaaaa

SEQ ID NO: 1376015 - DNA, 15 bp, Homo sapiens
ttggaggactttaaa

SEQ ID NO: 1376016 - DNA, 15 bp, Homo sapiens
cttggaggactttaa

SEQ ID NO: 1376017 - DNA, 15 bp, Homo sapiens
acttggaggacttta

SEQ ID NO: 1376018 - DNA, 15 bp, Homo sapiens
cacttggaggacttt

SEQ ID NO: 1376019 - DNA, 15 bp, Homo sapiens
gcacttggaggactt

SEQ ID NO: 1376020 - DNA, 15 bp, Homo sapiens
ggcacttggaggact

SEQ ID NO: 1376021 - DNA, 15 bp, Homo sapiens
aggcacttggaggac

SEQ ID NO: 1376022 - DNA, 15 bp, Homo sapiens
caggcacttggagga

SEQ ID NO: 1376023 - DNA, 15 bp, Homo sapiens
acaggcacttggagg

SEQ ID NO: 1376024 - DNA, 15 bp, Homo sapiens
aacaggcacttggag

SEQ ID NO: 1376025 - DNA, 15 bp, Homo sapiens
caacaggcacttgga

SEQ ID NO: 1376026 - DNA, 15 bp, Homo sapiens
tcaacaggcacttgg

SEQ ID NO: 1376027 - DNA, 15 bp, Homo sapiens
ctcaacaggcacttg

SEQ ID NO: 1376028 - DNA, 15 bp, Homo sapiens
cctcaacaggcactt

SEQ ID NO: 1376029 - DNA, 15 bp, Homo sapiens
tcctcaacaggcact

SEQ ID NO: 1376030 - DNA, 15 bp, Homo sapiens
ttcctcaacaggcac

SEQ ID NO: 1376031 - DNA, 15 bp, Homo sapiens
tttcctcaacaggca

SEQ ID NO: 1376032 - DNA, 15 bp, Homo sapiens
ttttcctcaacaggc

SEQ ID NO: 1376033 - DNA, 15 bp, Homo sapiens
attttcctcaacagg

SEQ ID NO: 1376034 - DNA, 15 bp, Homo sapiens
aattttcctcaacag

SEQ ID NO: 1376035 - DNA, 15 bp, Homo sapiens
taattttcctcaaca

SEQ ID NO: 1376036 - DNA, 15 bp, Homo sapiens
gtaattttcctcaac

SEQ ID NO: 1376037 - DNA, 15 bp, Homo sapiens
ggtaattttcctcaa

SEQ ID NO: 1376038 - DNA, 15 bp, Homo sapiens
aggtaattttcctca

SEQ ID NO: 1376039 - DNA, 15 bp, Homo sapiens
aaggtaattttcctc

SEQ ID NO: 1376040 - DNA, 15 bp, Homo sapiens
taaggtaattttcct

SEQ ID NO: 1376041 - DNA, 15 bp, Homo sapiens
gtaaggtaattttcc

SEQ ID NO: 1376042 - DNA, 15 bp, Homo sapiens
ggtaaggtaattttc

SEQ ID NO: 1376043 - DNA, 15 bp, Homo sapiens
tggtaaggtaatttt

SEQ ID NO: 1376044 - DNA, 15 bp, Homo sapiens
ctggtaaggtaattt

SEQ ID NO: 1376045 - DNA, 15 bp, Homo sapiens
tctggtaaggtaatt

SEQ ID NO: 1376046 - DNA, 15 bp, Homo sapiens
ttctggtaaggtaat

SEQ ID NO: 1376047 - DNA, 15 bp, Homo sapiens
attctggtaaggtaa

SEQ ID NO: 1376048 - DNA, 15 bp, Homo sapiens
gattctggtaaggta

SEQ ID NO: 1376049 - DNA, 15 bp, Homo sapiens
tgattctggtaaggt

SEQ ID NO: 1376050 - DNA, 15 bp, Homo sapiens
gtgattctggtaagg

SEQ ID NO: 1376051 - DNA, 15 bp, Homo sapiens
ggtgattctggtaag

SEQ ID NO: 1376052 - DNA, 15 bp, Homo sapiens
gggtgattctggtaa

SEQ ID NO: 1376053 - DNA, 15 bp, Homo sapiens
ggggtgattctggta

SEQ ID NO: 1376054 - DNA, 15 bp, Homo sapiens
cggggtgattctggt

SEQ ID NO: 1376055 - DNA, 15 bp, Homo sapiens
ccggggtgattctgg

SEQ ID NO: 1376056 - DNA, 15 bp, Homo sapiens
gccggggtgattctg

SEQ ID NO: 1376057 - DNA, 15 bp, Homo sapiens
ggccggggtgattct

SEQ ID NO: 1376058 - DNA, 15 bp, Homo sapiens
gggccggggtgattc

SEQ ID NO: 1376059 - DNA, 15 bp, Homo sapiens
ggggccggggtgatt

SEQ ID NO: 1376060 - DNA, 15 bp, Homo sapiens
gggggccggggtgat

SEQ ID NO: 1376061 - DNA, 15 bp, Homo sapiens
tgggggccggggtga

SEQ ID NO: 1376062 - DNA, 15 bp, Homo sapiens
ctgggggccggggtg

SEQ ID NO: 1376063 - DNA, 15 bp, Homo sapiens
cctgggggccggggt

SEQ ID NO: 1376064 - DNA, 15 bp, Homo sapiens
gcctgggggccgggg

SEQ ID NO: 1376065 - DNA, 15 bp, Homo sapiens
agcctgggggccggg

SEQ ID NO: 1376066 - DNA, 15 bp, Homo sapiens
cagcctgggggccgg

SEQ ID NO: 1376067 - DNA, 15 bp, Homo sapiens
gcagcctgggggccg

SEQ ID NO: 1376068 - DNA, 15 bp, Homo sapiens
ggcagcctgggggcc

SEQ ID NO: 1376069 - DNA, 15 bp, Homo sapiens
aggcagcctgggggc

SEQ ID NO: 1376070 - DNA, 15 bp, Homo sapiens
caggcagcctggggg

SEQ ID NO: 1376071 - DNA, 15 bp, Homo sapiens
acaggcagcctgggg

SEQ ID NO: 1376072 - DNA, 15 bp, Homo sapiens
cacaggcagcctggg

SEQ ID NO: 1376073 - DNA, 15 bp, Homo sapiens
ccacaggcagcctgg

SEQ ID NO: 1376074 - DNA, 15 bp, Homo sapiens
cccacaggcagcctg

SEQ ID NO: 1376075 - DNA, 15 bp, Homo sapiens
tcccacaggcagcct

SEQ ID NO: 1376076 - DNA, 15 bp, Homo sapiens
ttcccacaggcagcc

SEQ ID NO: 1376077 - DNA, 15 bp, Homo sapiens
cttcccacaggcagc

SEQ ID NO: 1376078 - DNA, 15 bp, Homo sapiens
tcttcccacaggcag

SEQ ID NO: 1376079 - DNA, 15 bp, Homo sapiens
gtcttcccacaggca

SEQ ID NO: 1376080 - DNA, 15 bp, Homo sapiens
agtcttcccacaggc

SEQ ID NO: 1376081 - DNA, 15 bp, Homo sapiens
cagtcttcccacagg

SEQ ID NO: 1376082 - DNA, 15 bp, Homo sapiens
acagtcttcccacag

SEQ ID NO: 1376083 - DNA, 15 bp, Homo sapiens
cacagtcttcccaca

SEQ ID NO: 1376084 - DNA, 15 bp, Homo sapiens
acacagtcttcccac

SEQ ID NO: 1376085 - DNA, 15 bp, Homo sapiens
tacacagtcttccca

SEQ ID NO: 1376086 - DNA, 15 bp, Homo sapiens
ctacacagtcttccc

SEQ ID NO: 1376087 - DNA, 15 bp, Homo sapiens
cctacacagtcttcc

SEQ ID NO: 1376088 - DNA, 15 bp, Homo sapiens
ccctacacagtcttc

SEQ ID NO: 1376089 - DNA, 15 bp, Homo sapiens
tccctacacagtctt

SEQ ID NO: 1376090 - DNA, 15 bp, Homo sapiens
ttccctacacagtct

SEQ ID NO: 1376091 - DNA, 15 bp, Homo sapiens
cttccctacacagtc

SEQ ID NO: 1376092 - DNA, 15 bp, Homo sapiens
gcttccctacacagt

SEQ ID NO: 1376093 - DNA, 15 bp, Homo sapiens
cgcttccctacacag

SEQ ID NO: 1376094 - DNA, 15 bp, Homo sapiens
ccgcttccctacaca

SEQ ID NO: 1376095 - DNA, 15 bp, Homo sapiens
cccgcttccctacac

SEQ ID NO: 1376096 - DNA, 15 bp, Homo sapiens
ccccgcttccctaca

SEQ ID NO: 1376097 - DNA, 15 bp, Homo sapiens
gccccgcttccctac

SEQ ID NO: 1376098 - DNA, 15 bp, Homo sapiens
cgccccgcttcccta

SEQ ID NO: 1376099 - DNA, 15 bp, Homo sapiens
ccgccccgcttccct

SEQ ID NO: 1376100 - DNA, 15 bp, Homo sapiens
cccgccccgcttccc

SEQ ID NO: 1376101 - DNA, 15 bp, Homo sapiens
ccccgccccgcttcc

SEQ ID NO: 1376102 - DNA, 15 bp, Homo sapiens
gccccgccccgcttc

SEQ ID NO: 1376103 - DNA, 15 bp, Homo sapiens
ggccccgccccgctt

SEQ ID NO: 1376104 - DNA, 15 bp, Homo sapiens
aggccccgccccgct

SEQ ID NO: 1376105 - DNA, 15 bp, Homo sapiens
caggccccgccccgc

SEQ ID NO: 1376106 - DNA, 15 bp, Homo sapiens
gcaggccccgccccg

SEQ ID NO: 1376107 - DNA, 15 bp, Homo sapiens
tgcaggccccgcccc

SEQ ID NO: 1376108 - DNA, 15 bp, Homo sapiens
ctgcaggccccgccc

SEQ ID NO: 1376109 - DNA, 15 bp, Homo sapiens
cctgcaggccccgcc

SEQ ID NO: 1376110 - DNA, 15 bp, Homo sapiens
ccctgcaggccccgc

SEQ ID NO: 1376111 - DNA, 15 bp, Homo sapiens
cccctgcaggccccg

SEQ ID NO: 1376112 - DNA, 15 bp, Homo sapiens
tcccctgcaggcccc

SEQ ID NO: 1376113 - DNA, 15 bp, Homo sapiens
ctcccctgcaggccc

SEQ ID NO: 1376114 - DNA, 15 bp, Homo sapiens
cctcccctgcaggcc

SEQ ID NO: 1376115 - DNA, 15 bp, Homo sapiens
ccctcccctgcaggc

SEQ ID NO: 1376116 - DNA, 15 bp, Homo sapiens
tccctcccctgcagg

SEQ ID NO: 1376117 - DNA, 15 bp, Homo sapiens
atccctcccctgcag

SEQ ID NO: 1376118 - DNA, 15 bp, Homo sapiens
catccctcccctgca

SEQ ID NO: 1376119 - DNA, 15 bp, Homo sapiens
tcatccctcccctgc

SEQ ID NO: 1376120 - DNA, 15 bp, Homo sapiens
ctcatccctcccctg

SEQ ID NO: 1376121 - DNA, 15 bp, Homo sapiens
cctcatccctcccct

SEQ ID NO: 1376122 - DNA, 15 bp, Homo sapiens
ccctcatccctcccc

SEQ ID NO: 1376123 - DNA, 15 bp, Homo sapiens
gccctcatccctccc

SEQ ID NO: 1376124 - DNA, 15 bp, Homo sapiens
cgccctcatccctcc

SEQ ID NO: 1376125 - DNA, 15 bp, Homo sapiens
ccgccctcatccctc

SEQ ID NO: 1376126 - DNA, 15 bp, Homo sapiens
tccgccctcatccct

SEQ ID NO: 1376127 - DNA, 15 bp, Homo sapiens
ctccgccctcatccc

SEQ ID NO: 1376128 - DNA, 15 bp, Homo sapiens
gctccgccctcatcc

SEQ ID NO: 1376129 - DNA, 15 bp, Homo sapiens
tgctccgccctcatc

SEQ ID NO: 1376130 - DNA, 15 bp, Homo sapiens
ctgctccgccctcat

SEQ ID NO: 1376131 - DNA, 15 bp, Homo sapiens
cctgctccgccctca

SEQ ID NO: 1376132 - DNA, 15 bp, Homo sapiens
ccctgctccgccctc

SEQ ID NO: 1376133 - DNA, 15 bp, Homo sapiens
gccctgctccgccct

SEQ ID NO: 1376134 - DNA, 15 bp, Homo sapiens
cgccctgctccgccc

SEQ ID NO: 1376135 - DNA, 15 bp, Homo sapiens
gcgccctgctccgcc

SEQ ID NO: 1376136 - DNA, 15 bp, Homo sapiens
ggcgccctgctccgc

SEQ ID NO: 1376137 - DNA, 15 bp, Homo sapiens
gggcgccctgctccg

SEQ ID NO: 1376138 - DNA, 15 bp, Homo sapiens
agggcgccctgctcc

SEQ ID NO: 1376139 - DNA, 15 bp, Homo sapiens
cagggcgccctgctc

SEQ ID NO: 1376140 - DNA, 15 bp, Homo sapiens
gcagggcgccctgct

SEQ ID NO: 1376141 - DNA, 15 bp, Homo sapiens
tgcagggcgccctgc

SEQ ID NO: 1376142 - DNA, 15 bp, Homo sapiens
ctgcagggcgccctg

SEQ ID NO: 1376143 - DNA, 15 bp, Homo sapiens
cctgcagggcgccct

SEQ ID NO: 1376144 - DNA, 15 bp, Homo sapiens
gcctgcagggcgccc

SEQ ID NO: 1376145 - DNA, 15 bp, Homo sapiens
agcctgcagggcgcc

SEQ ID NO: 1376146 - DNA, 15 bp, Homo sapiens
gagcctgcagggcgc

SEQ ID NO: 1376147 - DNA, 15 bp, Homo sapiens
ggagcctgcagggcg

SEQ ID NO: 1376148 - DNA, 15 bp, Homo sapiens
tggagcctgcagggc

SEQ ID NO: 1376149 - DNA, 15 bp, Homo sapiens
ctggagcctgcaggg

SEQ ID NO: 1376150 - DNA, 15 bp, Homo sapiens
tctggagcctgcagg

SEQ ID NO: 1376151 - DNA, 15 bp, Homo sapiens
atctggagcctgcag

SEQ ID NO: 1376152 - DNA, 15 bp, Homo sapiens
catctggagcctgca

SEQ ID NO: 1376153 - DNA, 15 bp, Homo sapiens
gcatctggagcctgc

SEQ ID NO: 1376154 - DNA, 15 bp, Homo sapiens
agcatctggagcctg

SEQ ID NO: 1376155 - DNA, 15 bp, Homo sapiens
aagcatctggagcct

SEQ ID NO: 1376156 - DNA, 15 bp, Homo sapiens
gaagcatctggagcc

SEQ ID NO: 1376157 - DNA, 15 bp, Homo sapiens
agaagcatctggagc

SEQ ID NO: 1376158 - DNA, 15 bp, Homo sapiens
cagaagcatctggag

SEQ ID NO: 1376159 - DNA, 15 bp, Homo sapiens
acagaagcatctgga

SEQ ID NO: 1376160 - DNA, 15 bp, Homo sapiens
cacagaagcatctgg

SEQ ID NO: 1376161 - DNA, 15 bp, Homo sapiens
ccacagaagcatctg

SEQ ID NO: 1376162 - DNA, 15 bp, Homo sapiens
tccacagaagcatct

SEQ ID NO: 1376163 - DNA, 15 bp, Homo sapiens
ttccacagaagcatc

SEQ ID NO: 1376164 - DNA, 15 bp, Homo sapiens
cttccacagaagcat

SEQ ID NO: 1376165 - DNA, 15 bp, Homo sapiens
ccttccacagaagca

SEQ ID NO: 1376166 - DNA, 15 bp, Homo sapiens
tccttccacagaagc

SEQ ID NO: 1376167 - DNA, 15 bp, Homo sapiens
ctccttccacagaag

SEQ ID NO: 1376168 - DNA, 15 bp, Homo sapiens
cctccttccacagaa

SEQ ID NO: 1376169 - DNA, 15 bp, Homo sapiens
ccctccttccacaga

SEQ ID NO: 1376170 - DNA, 15 bp, Homo sapiens
cccctccttccacag

SEQ ID NO: 1376171 - DNA, 15 bp, Homo sapiens
tcccctccttccaca

SEQ ID NO: 1376172 - DNA, 15 bp, Homo sapiens
ctcccctccttccac

SEQ ID NO: 1376173 - DNA, 15 bp, Homo sapiens
tctcccctccttcca

SEQ ID NO: 1376174 - DNA, 15 bp, Homo sapiens
ctctcccctccttcc

SEQ ID NO: 1376175 - DNA, 15 bp, Homo sapiens
tctctcccctccttc

SEQ ID NO: 1376176 - DNA, 15 bp, Homo sapiens
ctctctcccctcctt

SEQ ID NO: 1376177 - DNA, 15 bp, Homo sapiens
cctctctcccctcct

SEQ ID NO: 1376178 - DNA, 15 bp, Homo sapiens
ccctctctcccctcc

SEQ ID NO: 1376179 - DNA, 15 bp, Homo sapiens
cccctctctcccctc

SEQ ID NO: 1376180 - DNA, 15 bp, Homo sapiens
ccccctctctcccct

SEQ ID NO: 1376181 - DNA, 15 bp, Homo sapiens
gccccctctctcccc

SEQ ID NO: 1376182 - DNA, 15 bp, Homo sapiens
tgccccctctctccc

SEQ ID NO: 1376183 - DNA, 15 bp, Homo sapiens
gtgccccctctctcc

SEQ ID NO: 1376184 - DNA, 15 bp, Homo sapiens
ggtgccccctctctc

SEQ ID NO: 1376185 - DNA, 15 bp, Homo sapiens
gggtgccccctctct

SEQ ID NO: 1376186 - DNA, 15 bp, Homo sapiens
ggggtgccccctctc

SEQ ID NO: 1376187 - DNA, 15 bp, Homo sapiens
aggggtgccccctct

SEQ ID NO: 1376188 - DNA, 15 bp, Homo sapiens
caggggtgccccctc

SEQ ID NO: 1376189 - DNA, 15 bp, Homo sapiens
ccaggggtgccccct

SEQ ID NO: 1376190 - DNA, 15 bp, Homo sapiens
cccaggggtgccccc

SEQ ID NO: 1376191 - DNA, 15 bp, Homo sapiens
ccccaggggtgcccc

SEQ ID NO: 1376192 - DNA, 15 bp, Homo sapiens
tccccaggggtgccc

SEQ ID NO: 1376193 - DNA, 15 bp, Homo sapiens
atccccaggggtgcc

SEQ ID NO: 1376194 - DNA, 15 bp, Homo sapiens
catccccaggggtgc

SEQ ID NO: 1376195 - DNA, 15 bp, Homo sapiens
ccatccccaggggtg

SEQ ID NO: 1376196 - DNA, 15 bp, Homo sapiens
cccatccccaggggt

SEQ ID NO: 1376197 - DNA, 15 bp, Homo sapiens
ccccatccccagggg

SEQ ID NO: 1376198 - DNA, 15 bp, Homo sapiens
cccccatccccaggg

SEQ ID NO: 1376199 - DNA, 15 bp, Homo sapiens
acccccatccccagg

SEQ ID NO: 1376200 - DNA, 15 bp, Homo sapiens
cacccccatccccag

SEQ ID NO: 1376201 - DNA, 15 bp, Homo sapiens
gcacccccatcccca

SEQ ID NO: 1376202 - DNA, 15 bp, Homo sapiens
ggcacccccatcccc

SEQ ID NO: 1376203 - DNA, 15 bp, Homo sapiens
cggcacccccatccc

SEQ ID NO: 1376204 - DNA, 15 bp, Homo sapiens
ccggcacccccatcc

SEQ ID NO: 1376205 - DNA, 15 bp, Homo sapiens
gccggcacccccatc

SEQ ID NO: 1376206 - DNA, 15 bp, Homo sapiens
tgccggcacccccat

SEQ ID NO: 1376207 - DNA, 15 bp, Homo sapiens
ctgccggcaccccca

SEQ ID NO: 1376208 - DNA, 15 bp, Homo sapiens
tctgccggcaccccc

SEQ ID NO: 1376209 - DNA, 15 bp, Homo sapiens
ctctgccggcacccc

SEQ ID NO: 1376210 - DNA, 15 bp, Homo sapiens
tctctgccggcaccc

SEQ ID NO: 1376211 - DNA, 15 bp, Homo sapiens
ttctctgccggcacc

SEQ ID NO: 1376212 - DNA, 15 bp, Homo sapiens
cttctctgccggcac

SEQ ID NO: 1376213 - DNA, 15 bp, Homo sapiens
ccttctctgccggca

SEQ ID NO: 1376214 - DNA, 15 bp, Homo sapiens
cccttctctgccggc

SEQ ID NO: 1376215 - DNA, 15 bp, Homo sapiens
ccccttctctgccgg

SEQ ID NO: 1376216 - DNA, 15 bp, Homo sapiens
tctccccttctctgc

SEQ ID NO: 1376217 - DNA, 15 bp, Homo sapiens
ttctccccttctctg

SEQ ID NO: 1376218 - DNA, 15 bp, Homo sapiens
cttctccccttctct

SEQ ID NO: 1376219 - DNA, 15 bp, Homo sapiens
ccttctccccttctc

SEQ ID NO: 1376220 - DNA, 15 bp, Homo sapiens
cccttctccccttct

SEQ ID NO: 1376221 - DNA, 15 bp, Homo sapiens
ccccttctccccttc

SEQ ID NO: 1376222 - DNA, 15 bp, Homo sapiens
cccccttctcccctt

SEQ ID NO: 1376223 - DNA, 15 bp, Homo sapiens
gtcccccttctcccc

SEQ ID NO: 1376224 - DNA, 15 bp, Homo sapiens
cgtcccccttctccc

SEQ ID NO: 1376225 - DNA, 15 bp, Homo sapiens
gcgtcccccttctcc

SEQ ID NO: 1376226 - DNA, 15 bp, Homo sapiens
tgcgtcccccttctc

SEQ ID NO: 1376227 - DNA, 15 bp, Homo sapiens
atgcgtcccccttct

SEQ ID NO: 1376228 - DNA, 15 bp, Homo sapiens
gatgcgtcccccttc

SEQ ID NO: 1376229 - DNA, 15 bp, Homo sapiens
agatgcgtccccctt

SEQ ID NO: 1376230 - DNA, 15 bp, Homo sapiens
tagatgcgtccccct

SEQ ID NO: 1376231 - DNA, 15 bp, Homo sapiens
atagatgcgtccccc

SEQ ID NO: 1376232 - DNA, 15 bp, Homo sapiens
aatagatgcgtcccc

SEQ ID NO: 1376233 - DNA, 15 bp, Homo sapiens
aaatagatgcgtccc

SEQ ID NO: 1376234 - DNA, 15 bp, Homo sapiens
caaatagatgcgtcc

SEQ ID NO: 1376235 - DNA, 15 bp, Homo sapiens
tcaaatagatgcgtc

SEQ ID NO: 1376236 - DNA, 15 bp, Homo sapiens
ctcaaatagatgcgt

SEQ ID NO: 1376237 - DNA, 15 bp, Homo sapiens
tctcaaatagatgcg

SEQ ID NO: 1376238 - DNA, 15 bp, Homo sapiens
gtctcaaatagatgc

SEQ ID NO: 1376239 - DNA, 15 bp, Homo sapiens
tgtctcaaatagatg

SEQ ID NO: 1376240 - DNA, 15 bp, Homo sapiens
gtgtctcaaatagat

SEQ ID NO: 1376241 - DNA, 15 bp, Homo sapiens
tgtgtctcaaataga

SEQ ID NO: 1376242 - DNA, 15 bp, Homo sapiens
atgtgtctcaaatag

SEQ ID NO: 1376243 - DNA, 15 bp, Homo sapiens
tatgtgtctcaaata

SEQ ID NO: 1376244 - DNA, 15 bp, Homo sapiens
ttatgtgtctcaaat

SEQ ID NO: 1376245 - DNA, 15 bp, Homo sapiens
attatgtgtctcaaa

SEQ ID NO: 1376246 - DNA, 15 bp, Homo sapiens
gattatgtgtctcaa

SEQ ID NO: 1376247 - DNA, 15 bp, Homo sapiens
agattatgtgtctca

SEQ ID NO: 1376248 - DNA, 15 bp, Homo sapiens
aagattatgtgtctc

SEQ ID NO: 1376249 - DNA, 15 bp, Homo sapiens
gaagattatgtgtct

SEQ ID NO: 1376250 - DNA, 15 bp, Homo sapiens
agaagattatgtgtc

SEQ ID NO: 1376251 - DNA, 15 bp, Homo sapiens
cagaagattatgtgt

SEQ ID NO: 1376252 - DNA, 15 bp, Homo sapiens
acagaagattatgtg

SEQ ID NO: 1376253 - DNA, 15 bp, Homo sapiens
gacagaagattatgt

SEQ ID NO: 1376254 - DNA, 15 bp, Homo sapiens
agacagaagattatg

SEQ ID NO: 1376255 - DNA, 15 bp, Homo sapiens
cagacagaagattat

SEQ ID NO: 1376256 - DNA, 15 bp, Homo sapiens
ccagacagaagatta

SEQ ID NO: 1376257 - DNA, 15 bp, Homo sapiens
cccagacagaagatt

SEQ ID NO: 1376258 - DNA, 15 bp, Homo sapiens
gcccagacagaagat

SEQ ID NO: 1376259 - DNA, 15 bp, Homo sapiens
agcccagacagaaga

SEQ ID NO: 1376260 - DNA, 15 bp, Homo sapiens
cagcccagacagaag

SEQ ID NO: 1376261 - DNA, 15 bp, Homo sapiens
ccagcccagacagaa

SEQ ID NO: 1376262 - DNA, 15 bp, Homo sapiens
tccagcccagacaga

SEQ ID NO: 1376263 - DNA, 15 bp, Homo sapiens
ctccagcccagacag

SEQ ID NO: 1376264 - DNA, 15 bp, Homo sapiens
cctccagcccagaca

SEQ ID NO: 1376265 - DNA, 15 bp, Homo sapiens
tcctccagcccagac

SEQ ID NO: 1376266 - DNA, 15 bp, Homo sapiens
ttcctccagcccaga

SEQ ID NO: 1376267 - DNA, 15 bp, Homo sapiens
cttcctccagcccag

SEQ ID NO: 1376268 - DNA, 15 bp, Homo sapiens
gcttcctccagccca

SEQ ID NO: 1376269 - DNA, 15 bp, Homo sapiens
agcttcctccagccc

SEQ ID NO: 1376270 - DNA, 15 bp, Homo sapiens
aagcttcctccagcc

SEQ ID NO: 1376271 - DNA, 15 bp, Homo sapiens
aaagcttcctccagc

SEQ ID NO: 1376272 - DNA, 15 bp, Homo sapiens
caaagcttcctccag

SEQ ID NO: 1376273 - DNA, 15 bp, Homo sapiens
acaaagcttcctcca

SEQ ID NO: 1376274 - DNA, 15 bp, Homo sapiens
aacaaagcttcctcc

SEQ ID NO: 1376275 - DNA, 15 bp, Homo sapiens
taacaaagcttcctc

SEQ ID NO: 1376276 - DNA, 15 bp, Homo sapiens
ttaacaaagcttcct

SEQ ID NO: 1376277 - DNA, 15 bp, Homo sapiens
cttaacaaagcttcc

SEQ ID NO: 1376278 - DNA, 15 bp, Homo sapiens
ccttaacaaagcttc

SEQ ID NO: 1376279 - DNA, 15 bp, Homo sapiens
accttaacaaagctt

SEQ ID NO: 1376280 - DNA, 15 bp, Homo sapiens
taccttaacaaagct

SEQ ID NO: 1376281 - DNA, 15 bp, Homo sapiens
ctaccttaacaaagc

SEQ ID NO: 1376282 - DNA, 15 bp, Homo sapiens
gctaccttaacaaag

SEQ ID NO: 1376283 - DNA, 15 bp, Homo sapiens
ggctaccttaacaaa

SEQ ID NO: 1376284 - DNA, 15 bp, Homo sapiens
gggctaccttaacaa

SEQ ID NO: 1376285 - DNA, 15 bp, Homo sapiens
cgggctaccttaaca

SEQ ID NO: 1376286 - DNA, 15 bp, Homo sapiens
ccgggctaccttaac

SEQ ID NO: 1376287 - DNA, 15 bp, Homo sapiens
cccgggctaccttaa

SEQ ID NO: 1376288 - DNA, 15 bp, Homo sapiens
acccgggctacctta

SEQ ID NO: 1376289 - DNA, 15 bp, Homo sapiens
aacccgggctacctt

SEQ ID NO: 1376290 - DNA, 15 bp, Homo sapiens
taacccgggctacct

SEQ ID NO: 1376291 - DNA, 15 bp, Homo sapiens
ttaacccgggctacc

SEQ ID NO: 1376292 - DNA, 15 bp, Homo sapiens
attaacccgggctac

SEQ ID NO: 1376293 - DNA, 15 bp, Homo sapiens
tattaacccgggcta

SEQ ID NO: 1376294 - DNA, 15 bp, Homo sapiens
gtattaacccgggct

SEQ ID NO: 1376295 - DNA, 15 bp, Homo sapiens
ggtattaacccgggc

SEQ ID NO: 1376296 - DNA, 15 bp, Homo sapiens
cggtattaacccggg

SEQ ID NO: 1376297 - DNA, 15 bp, Homo sapiens
ccggtattaacccgg

SEQ ID NO: 1376298 - DNA, 15 bp, Homo sapiens
accggtattaacccg

SEQ ID NO: 1376299 - DNA, 15 bp, Homo sapiens
gaccggtattaaccc

SEQ ID NO: 1376300 - DNA, 15 bp, Homo sapiens
agaccggtattaacc

SEQ ID NO: 1376301 - DNA, 15 bp, Homo sapiens
cagaccggtattaac

SEQ ID NO: 1376302 - DNA, 15 bp, Homo sapiens
gcagaccggtattaa

SEQ ID NO: 1376303 - DNA, 15 bp, Homo sapiens
tgcagaccggtatta

SEQ ID NO: 1376304 - DNA, 15 bp, Homo sapiens
atgcagaccggtatt

SEQ ID NO: 1376305 - DNA, 15 bp, Homo sapiens
catgcagaccggtat

SEQ ID NO: 1376306 - DNA, 15 bp, Homo sapiens
acatgcagaccggta

SEQ ID NO: 1376307 - DNA, 15 bp, Homo sapiens
aacatgcagaccggt

SEQ ID NO: 1376308 - DNA, 15 bp, Homo sapiens
caacatgcagaccgg

SEQ ID NO: 1376309 - DNA, 15 bp, Homo sapiens
acaacatgcagaccg

SEQ ID NO: 1376310 - DNA, 15 bp, Homo sapiens
cacaacatgcagacc

SEQ ID NO: 1376311 - DNA, 15 bp, Homo sapiens
tcacaacatgcagac

SEQ ID NO: 1376312 - DNA, 15 bp, Homo sapiens
atcacaacatgcaga

SEQ ID NO: 1376313 - DNA, 15 bp, Homo sapiens
aatcacaacatgcag

SEQ ID NO: 1376314 - DNA, 15 bp, Homo sapiens
aaatcacaacatgca

SEQ ID NO: 1376315 - DNA, 15 bp, Homo sapiens
caaatcacaacatgc

SEQ ID NO: 1376316 - DNA, 15 bp, Homo sapiens
ccaaatcacaacatg

SEQ ID NO: 1376317 - DNA, 15 bp, Homo sapiens
gccaaatcacaacat

SEQ ID NO: 1376318 - DNA, 15 bp, Homo sapiens
tgccaaatcacaaca

SEQ ID NO: 1376319 - DNA, 15 bp, Homo sapiens
atgccaaatcacaac

SEQ ID NO: 1376320 - DNA, 15 bp, Homo sapiens
aatgccaaatcacaa

SEQ ID NO: 1376321 - DNA, 15 bp, Homo sapiens
aaatgccaaatcaca

SEQ ID NO: 1376322 - DNA, 15 bp, Homo sapiens
aaaatgccaaatcac

SEQ ID NO: 1376323 - DNA, 15 bp, Homo sapiens
caaaatgccaaatca

SEQ ID NO: 1376324 - DNA, 15 bp, Homo sapiens
tcaaaatgccaaatc

SEQ ID NO: 1376325 - DNA, 15 bp, Homo sapiens
gtcaaaatgccaaat

SEQ ID NO: 1376326 - DNA, 15 bp, Homo sapiens
tgtcaaaatgccaaa

SEQ ID NO: 1376327 - DNA, 15 bp, Homo sapiens
atgtcaaaatgccaa

SEQ ID NO: 1376328 - DNA, 15 bp, Homo sapiens
catgtcaaaatgcca

SEQ ID NO: 1376329 - DNA, 15 bp, Homo sapiens
tcatgtcaaaatgcc

SEQ ID NO: 1376330 - DNA, 15 bp, Homo sapiens
ttcatgtcaaaatgc

SEQ ID NO: 1376331 - DNA, 15 bp, Homo sapiens
attcatgtcaaaatg

SEQ ID NO: 1376332 - DNA, 15 bp, Homo sapiens
aattcatgtcaaaat

SEQ ID NO: 1376333 - DNA, 15 bp, Homo sapiens
gaattcatgtcaaaa

SEQ ID NO: 1376334 - DNA, 15 bp, Homo sapiens
tgaattcatgtcaaa

SEQ ID NO: 1376335 - DNA, 15 bp, Homo sapiens
gtgaattcatgtcaa

SEQ ID NO: 1376336 - DNA, 15 bp, Homo sapiens
ggtgaattcatgtca

SEQ ID NO: 1376337 - DNA, 15 bp, Homo sapiens
gggtgaattcatgtc

SEQ ID NO: 1376338 - DNA, 15 bp, Homo sapiens
agggtgaattcatgt

SEQ ID NO: 1376339 - DNA, 15 bp, Homo sapiens
aagggtgaattcatg

SEQ ID NO: 1376340 - DNA, 15 bp, Homo sapiens
aaagggtgaattcat

SEQ ID NO: 1376341 - DNA, 15 bp, Homo sapiens
caaagggtgaattca

SEQ ID NO: 1376342 - DNA, 15 bp, Homo sapiens
acaaagggtgaattc

SEQ ID NO: 1376343 - DNA, 15 bp, Homo sapiens
cacaaagggtgaatt

SEQ ID NO: 1376344 - DNA, 15 bp, Homo sapiens
acacaaagggtgaat

SEQ ID NO: 1376345 - DNA, 15 bp, Homo sapiens
tacacaaagggtgaa

SEQ ID NO: 1376346 - DNA, 15 bp, Homo sapiens
gtacacaaagggtga

SEQ ID NO: 1376347 - DNA, 15 bp, Homo sapiens
tgtacacaaagggtg

SEQ ID NO: 1376348 - DNA, 15 bp, Homo sapiens
ctgtacacaaagggt

SEQ ID NO: 1376349 - DNA, 15 bp, Homo sapiens
cctgtacacaaaggg

SEQ ID NO: 1376350 - DNA, 15 bp, Homo sapiens
ccctgtacacaaagg

SEQ ID NO: 1376351 - DNA, 15 bp, Homo sapiens
gccctgtacacaaag

SEQ ID NO: 1376352 - DNA, 15 bp, Homo sapiens
agccctgtacacaaa

SEQ ID NO: 1376353 - DNA, 15 bp, Homo sapiens
cagccctgtacacaa

SEQ ID NO: 1376354 - DNA, 15 bp, Homo sapiens
gcagccctgtacaca

SEQ ID NO: 1376355 - DNA, 15 bp, Homo sapiens
agcagccctgtacac

SEQ ID NO: 1376356 - DNA, 15 bp, Homo sapiens
cagcagccctgtaca

SEQ ID NO: 1376357 - DNA, 15 bp, Homo sapiens
gcagcagccctgtac

SEQ ID NO: 1376358 - DNA, 15 bp, Homo sapiens
agcagcagccctgta

SEQ ID NO: 1376359 - DNA, 15 bp, Homo sapiens
cagcagcagccctgt

SEQ ID NO: 1376360 - DNA, 15 bp, Homo sapiens
tcagcagcagccctg

SEQ ID NO: 1376361 - DNA, 15 bp, Homo sapiens
gtcagcagcagccct

SEQ ID NO: 1376362 - DNA, 15 bp, Homo sapiens
tgtcagcagcagccc

SEQ ID NO: 1376363 - DNA, 15 bp, Homo sapiens
gtgtcagcagcagcc

SEQ ID NO: 1376364 - DNA, 15 bp, Homo sapiens
tgtgtcagcagcagc

SEQ ID NO: 1376365 - DNA, 15 bp, Homo sapiens
gtgtgtcagcagcag

SEQ ID NO: 1376366 - DNA, 15 bp, Homo sapiens
agtgtgtcagcagca

SEQ ID NO: 1376367 - DNA, 15 bp, Homo sapiens
cagtgtgtcagcagc

SEQ ID NO: 1376368 - DNA, 15 bp, Homo sapiens
tcagtgtgtcagcag

SEQ ID NO: 1376369 - DNA, 15 bp, Homo sapiens
ctcagtgtgtcagca

SEQ ID NO: 1376370 - DNA, 15 bp, Homo sapiens
tctcagtgtgtcagc

SEQ ID NO: 1376371 - DNA, 15 bp, Homo sapiens
gtctcagtgtgtcag

SEQ ID NO: 1376372 - DNA, 15 bp, Homo sapiens
agtctcagtgtgtca

SEQ ID NO: 1376373 - DNA, 15 bp, Homo sapiens
cagtctcagtgtgtc

SEQ ID NO: 1376374 - DNA, 15 bp, Homo sapiens
acagtctcagtgtgt

SEQ ID NO: 1376375 - DNA, 15 bp, Homo sapiens
aacagtctcagtgtg

SEQ ID NO: 1376376 - DNA, 15 bp, Homo sapiens
aaacagtctcagtgt

SEQ ID NO: 1376377 - DNA, 15 bp, Homo sapiens
aaaacagtctcagtg

SEQ ID NO: 1376378 - DNA, 15 bp, Homo sapiens
gaaaacagtctcagt

SEQ ID NO: 1376379 - DNA, 15 bp, Homo sapiens
ggaaaacagtctcag

SEQ ID NO: 1376380 - DNA, 15 bp, Homo sapiens
aggaaaacagtctca

SEQ ID NO: 1376381 - DNA, 15 bp, Homo sapiens
taggaaaacagtctc

SEQ ID NO: 1376382 - DNA, 15 bp, Homo sapiens
ataggaaaacagtct

SEQ ID NO: 1376383 - DNA, 15 bp, Homo sapiens
aataggaaaacagtc

SEQ ID NO: 1376384 - DNA, 15 bp, Homo sapiens
taataggaaaacagt

SEQ ID NO: 1376385 - DNA, 15 bp, Homo sapiens
ctaataggaaaacag

SEQ ID NO: 1376386 - DNA, 15 bp, Homo sapiens
cctaataggaaaaca

SEQ ID NO: 1376387 - DNA, 15 bp, Homo sapiens
tcctaataggaaaac

SEQ ID NO: 1376388 - DNA, 15 bp, Homo sapiens
ttcctaataggaaaa

SEQ ID NO: 1376389 - DNA, 15 bp, Homo sapiens
attcctaataggaaa

SEQ ID NO: 1376390 - DNA, 15 bp, Homo sapiens
tattcctaataggaa

SEQ ID NO: 1376391 - DNA, 15 bp, Homo sapiens
atattcctaatagga

SEQ ID NO: 1376392 - DNA, 15 bp, Homo sapiens
tatattcctaatagg

SEQ ID NO: 1376393 - DNA, 15 bp, Homo sapiens
ctatattcctaatag

SEQ ID NO: 1376394 - DNA, 15 bp, Homo sapiens
tctatattcctaata

SEQ ID NO: 1376395 - DNA, 15 bp, Homo sapiens
atctatattcctaat

SEQ ID NO: 1376396 - DNA, 15 bp, Homo sapiens
catctatattcctaa

SEQ ID NO: 1376397 - DNA, 15 bp, Homo sapiens
acatctatattccta

SEQ ID NO: 1376398 - DNA, 15 bp, Homo sapiens
aacatctatattcct

SEQ ID NO: 1376399 - DNA, 15 bp, Homo sapiens
aaacatctatattcc

SEQ ID NO: 1376400 - DNA, 15 bp, Homo sapiens
aaaacatctatattc

SEQ ID NO: 1376401 - DNA, 15 bp, Homo sapiens
aaaaacatctatatt

SEQ ID NO: 1376402 - DNA, 15 bp, Homo sapiens
caaaaacatctatat

SEQ ID NO: 1376403 - DNA, 15 bp, Homo sapiens
acaaaaacatctata

SEQ ID NO: 1376404 - DNA, 15 bp, Homo sapiens
gacaaaaacatctat

SEQ ID NO: 1376405 - DNA, 15 bp, Homo sapiens
ggacaaaaacatcta

SEQ ID NO: 1376406 - DNA, 15 bp, Homo sapiens
gggacaaaaacatct

SEQ ID NO: 1376407 - DNA, 15 bp, Homo sapiens
tgggacaaaaacatc

SEQ ID NO: 1376408 - DNA, 15 bp, Homo sapiens
ttgggacaaaaacat

SEQ ID NO: 1376409 - DNA, 15 bp, Homo sapiens
cttgggacaaaaaca

SEQ ID NO: 1376410 - DNA, 15 bp, Homo sapiens
gcttgggacaaaaac

SEQ ID NO: 1376411 - DNA, 15 bp, Homo sapiens
ggcttgggacaaaaa

SEQ ID NO: 1376412 - DNA, 15 bp, Homo sapiens
tggcttgggacaaaa

SEQ ID NO: 1376413 - DNA, 15 bp, Homo sapiens
gtggcttgggacaaa

SEQ ID NO: 1376414 - DNA, 15 bp, Homo sapiens
ggtggcttgggacaa

SEQ ID NO: 1376415 - DNA, 15 bp, Homo sapiens
gggtggcttgggaca

SEQ ID NO: 1376416 - DNA, 15 bp, Homo sapiens
agggtggcttgggac

SEQ ID NO: 1376417 - DNA, 15 bp, Homo sapiens
gagggtggcttggga

SEQ ID NO: 1376418 - DNA, 15 bp, Homo sapiens
tgagggtggcttggg

SEQ ID NO: 1376419 - DNA, 15 bp, Homo sapiens
atgagggtggcttgg

SEQ ID NO: 1376420 - DNA, 15 bp, Homo sapiens
aatgagggtggcttg

SEQ ID NO: 1376421 - DNA, 15 bp, Homo sapiens
aaatgagggtggctt

SEQ ID NO: 1376422 - DNA, 15 bp, Homo sapiens
aaaatgagggtggct

SEQ ID NO: 1376423 - DNA, 15 bp, Homo sapiens
aaaaatgagggtggc

SEQ ID NO: 1376424 - DNA, 15 bp, Homo sapiens
taaaaatgagggtgg

SEQ ID NO: 1376425 - DNA, 15 bp, Homo sapiens
ataaaaatgagggtg

SEQ ID NO: 1376426 - DNA, 15 bp, Homo sapiens
aataaaaatgagggt

SEQ ID NO: 1376427 - DNA, 15 bp, Homo sapiens
aaataaaaatgaggg

SEQ ID NO: 1376428 - DNA, 15 bp, Homo sapiens
aaaataaaaatgagg

SEQ ID NO: 1376429 - DNA, 15 bp, Homo sapiens
aaaaataaaaatgag

SEQ ID NO: 1376430 - DNA, 15 bp, Homo sapiens
taaaaataaaaatga

SEQ ID NO: 1376431 - DNA, 15 bp, Homo sapiens
gtaaaaataaaaatg

SEQ ID NO: 1376432 - DNA, 15 bp, Homo sapiens
ggtaaaaataaaaat

SEQ ID NO: 1376433 - DNA, 15 bp, Homo sapiens
tggtaaaaataaaaa

SEQ ID NO: 1376434 - DNA, 15 bp, Homo sapiens
ctggtaaaaataaaa

SEQ ID NO: 1376435 - DNA, 15 bp, Homo sapiens
tctggtaaaaataaa

SEQ ID NO: 1376436 - DNA, 15 bp, Homo sapiens
atctggtaaaaataa

SEQ ID NO: 1376437 - DNA, 15 bp, Homo sapiens
tatctggtaaaaata

SEQ ID NO: 1376438 - DNA, 15 bp, Homo sapiens
ctatctggtaaaaat

SEQ ID NO: 1376439 - DNA, 15 bp, Homo sapiens
cctatctggtaaaaa

SEQ ID NO: 1376440 - DNA, 15 bp, Homo sapiens
acctatctggtaaaa

SEQ ID NO: 1376441 - DNA, 15 bp, Homo sapiens
aacctatctggtaaa

SEQ ID NO: 1376442 - DNA, 15 bp, Homo sapiens
gaacctatctggtaa

SEQ ID NO: 1376443 - DNA, 15 bp, Homo sapiens
ggaacctatctggta

SEQ ID NO: 1376444 - DNA, 15 bp, Homo sapiens
aggaacctatctggt

SEQ ID NO: 1376445 - DNA, 15 bp, Homo sapiens
gaggaacctatctgg

SEQ ID NO: 1376446 - DNA, 15 bp, Homo sapiens
tgaggaacctatctg

SEQ ID NO: 1376447 - DNA, 15 bp, Homo sapiens
atgaggaacctatct

SEQ ID NO: 1376448 - DNA, 15 bp, Homo sapiens
catgaggaacctatc

SEQ ID NO: 1376449 - DNA, 15 bp, Homo sapiens
tcatgaggaacctat

SEQ ID NO: 1376450 - DNA, 15 bp, Homo sapiens
gtcatgaggaaccta

SEQ ID NO: 1376451 - DNA, 15 bp, Homo sapiens
ggtcatgaggaacct

SEQ ID NO: 1376452 - DNA, 15 bp, Homo sapiens
tggtcatgaggaacc

SEQ ID NO: 1376453 - DNA, 15 bp, Homo sapiens
gtggtcatgaggaac

SEQ ID NO: 1376454 - DNA, 15 bp, Homo sapiens
cgtggtcatgaggaa

SEQ ID NO: 1376455 - DNA, 15 bp, Homo sapiens
ccgtggtcatgagga

SEQ ID NO: 1376456 - DNA, 15 bp, Homo sapiens
gccgtggtcatgagg

SEQ ID NO: 1376457 - DNA, 15 bp, Homo sapiens
tgccgtggtcatgag

SEQ ID NO: 1376458 - DNA, 15 bp, Homo sapiens
gtgccgtggtcatga

SEQ ID NO: 1376459 - DNA, 15 bp, Homo sapiens
agtgccgtggtcatg

SEQ ID NO: 1376460 - DNA, 15 bp, Homo sapiens
cagtgccgtggtcat

SEQ ID NO: 1376461 - DNA, 15 bp, Homo sapiens
tcagtgccgtggtca

SEQ ID NO: 1376462 - DNA, 15 bp, Homo sapiens
atcagtgccgtggtc

SEQ ID NO: 1376463 - DNA, 15 bp, Homo sapiens
aatcagtgccgtggt

SEQ ID NO: 1376464 - DNA, 15 bp, Homo sapiens
aaatcagtgccgtgg

SEQ ID NO: 1376465 - DNA, 15 bp, Homo sapiens
caaatcagtgccgtg

SEQ ID NO: 1376466 - DNA, 15 bp, Homo sapiens
tcaaatcagtgccgt

SEQ ID NO: 1376467 - DNA, 15 bp, Homo sapiens
ctcaaatcagtgccg

SEQ ID NO: 1376468 - DNA, 15 bp, Homo sapiens
tctcaaatcagtgcc

SEQ ID NO: 1376469 - DNA, 15 bp, Homo sapiens
ctctcaaatcagtgc

SEQ ID NO: 1376470 - DNA, 15 bp, Homo sapiens
gctctcaaatcagtg

SEQ ID NO: 1376471 - DNA, 15 bp, Homo sapiens
agctctcaaatcagt

SEQ ID NO: 1376472 - DNA, 15 bp, Homo sapiens
cagctctcaaatcag

SEQ ID NO: 1376473 - DNA, 15 bp, Homo sapiens
ccagctctcaaatca

SEQ ID NO: 1376474 - DNA, 15 bp, Homo sapiens
cccagctctcaaatc

SEQ ID NO: 1376475 - DNA, 15 bp, Homo sapiens
acccagctctcaaat

SEQ ID NO: 1376476 - DNA, 15 bp, Homo sapiens
cacccagctctcaaa

SEQ ID NO: 1376477 - DNA, 15 bp, Homo sapiens
tcacccagctctcaa

SEQ ID NO: 1376478 - DNA, 15 bp, Homo sapiens
gtcacccagctctca

SEQ ID NO: 1376479 - DNA, 15 bp, Homo sapiens
tgtcacccagctctc

SEQ ID NO: 1376480 - DNA, 15 bp, Homo sapiens
ctgtcacccagctct

SEQ ID NO: 1376481 - DNA, 15 bp, Homo sapiens
cctgtcacccagctc

SEQ ID NO: 1376482 - DNA, 15 bp, Homo sapiens
gcctgtcacccagct

SEQ ID NO: 1376483 - DNA, 15 bp, Homo sapiens
tgcctgtcacccagc

SEQ ID NO: 1376484 - DNA, 15 bp, Homo sapiens
gtgcctgtcacccag

SEQ ID NO: 1376485 - DNA, 15 bp, Homo sapiens
ggtgcctgtcaccca

SEQ ID NO: 1376486 - DNA, 15 bp, Homo sapiens
gggtgcctgtcaccc

SEQ ID NO: 1376487 - DNA, 15 bp, Homo sapiens
tgggtgcctgtcacc

SEQ ID NO: 1376488 - DNA, 15 bp, Homo sapiens
ctgggtgcctgtcac

SEQ ID NO: 1376489 - DNA, 15 bp, Homo sapiens
tctgggtgcctgtca

SEQ ID NO: 1376490 - DNA, 15 bp, Homo sapiens
ctctgggtgcctgtc

SEQ ID NO: 1376491 - DNA, 15 bp, Homo sapiens
tctctgggtgcctgt

SEQ ID NO: 1376492 - DNA, 15 bp, Homo sapiens
gtctctgggtgcctg

SEQ ID NO: 1376493 - DNA, 15 bp, Homo sapiens
ggtctctgggtgcct

SEQ ID NO: 1376494 - DNA, 15 bp, Homo sapiens
tggtctctgggtgcc

SEQ ID NO: 1376495 - DNA, 15 bp, Homo sapiens
atggtctctgggtgc

SEQ ID NO: 1376496 - DNA, 15 bp, Homo sapiens
gatggtctctgggtg

SEQ ID NO: 1376497 - DNA, 15 bp, Homo sapiens
cgatggtctctgggt

SEQ ID NO: 1376498 - DNA, 15 bp, Homo sapiens
gcgatggtctctggg

SEQ ID NO: 1376499 - DNA, 15 bp, Homo sapiens
tgcgatggtctctgg

SEQ ID NO: 1376500 - DNA, 15 bp, Homo sapiens
atgcgatggtctctg

SEQ ID NO: 1376501 - DNA, 15 bp, Homo sapiens
tatgcgatggtctct

SEQ ID NO: 1376502 - DNA, 15 bp, Homo sapiens
ctatgcgatggtctc

SEQ ID NO: 1376503 - DNA, 15 bp, Homo sapiens
cctatgcgatggtct

SEQ ID NO: 1376504 - DNA, 15 bp, Homo sapiens
acctatgcgatggtc

SEQ ID NO: 1376505 - DNA, 15 bp, Homo sapiens
cacctatgcgatggt

SEQ ID NO: 1376506 - DNA, 15 bp, Homo sapiens
ccacctatgcgatgg

SEQ ID NO: 1376507 - DNA, 15 bp, Homo sapiens
accacctatgcgatg

SEQ ID NO: 1376508 - DNA, 15 bp, Homo sapiens
gaccacctatgcgat

SEQ ID NO: 1376509 - DNA, 15 bp, Homo sapiens
ggaccacctatgcga

SEQ ID NO: 1376510 - DNA, 15 bp, Homo sapiens
gggaccacctatgcg

SEQ ID NO: 1376511 - DNA, 15 bp, Homo sapiens
tgggaccacctatgc

SEQ ID NO: 1376512 - DNA, 15 bp, Homo sapiens
ctgggaccacctatg

SEQ ID NO: 1376513 - DNA, 15 bp, Homo sapiens
tctgggaccacctat

SEQ ID NO: 1376514 - DNA, 15 bp, Homo sapiens
ctctgggaccaccta

SEQ ID NO: 1376515 - DNA, 15 bp, Homo sapiens
actctgggaccacct

SEQ ID NO: 1376516 - DNA, 15 bp, Homo sapiens
gactctgggaccacc

SEQ ID NO: 1376517 - DNA, 15 bp, Homo sapiens
agactctgggaccac

SEQ ID NO: 1376518 - DNA, 15 bp, Homo sapiens
tagactctgggacca

SEQ ID NO: 1376519 - DNA, 15 bp, Homo sapiens
ctagactctgggacc

SEQ ID NO: 1376520 - DNA, 15 bp, Homo sapiens
tctagactctgggac

SEQ ID NO: 1376521 - DNA, 15 bp, Homo sapiens
gtctagactctggga

SEQ ID NO: 1376522 - DNA, 15 bp, Homo sapiens
tgtctagactctggg

SEQ ID NO: 1376523 - DNA, 15 bp, Homo sapiens
gtgtctagactctgg

SEQ ID NO: 1376524 - DNA, 15 bp, Homo sapiens
ggtgtctagactctg

SEQ ID NO: 1376525 - DNA, 15 bp, Homo sapiens
aggtgtctagactct

SEQ ID NO: 1376526 - DNA, 15 bp, Homo sapiens
caggtgtctagactc

SEQ ID NO: 1376527 - DNA, 15 bp, Homo sapiens
ccaggtgtctagact

SEQ ID NO: 1376528 - DNA, 15 bp, Homo sapiens
cccaggtgtctagac

SEQ ID NO: 1376529 - DNA, 15 bp, Homo sapiens
acccaggtgtctaga

SEQ ID NO: 1376530 - DNA, 15 bp, Homo sapiens
aacccaggtgtctag

SEQ ID NO: 1376531 - DNA, 15 bp, Homo sapiens
gaacccaggtgtcta

SEQ ID NO: 1376532 - DNA, 15 bp, Homo sapiens
agaacccaggtgtct

SEQ ID NO: 1376533 - DNA, 15 bp, Homo sapiens
tagaacccaggtgtc

SEQ ID NO: 1376534 - DNA, 15 bp, Homo sapiens
ctagaacccaggtgt

SEQ ID NO: 1376535 - DNA, 15 bp, Homo sapiens
gctagaacccaggtg

SEQ ID NO: 1376536 - DNA, 15 bp, Homo sapiens
agctagaacccaggt

SEQ ID NO: 1376537 - DNA, 15 bp, Homo sapiens
gagctagaacccagg

SEQ ID NO: 1376538 - DNA, 15 bp, Homo sapiens
agagctagaacccag

SEQ ID NO: 1376539 - DNA, 15 bp, Homo sapiens
cagagctagaaccca

SEQ ID NO: 1376540 - DNA, 15 bp, Homo sapiens
ccagagctagaaccc

SEQ ID NO: 1376541 - DNA, 15 bp, Homo sapiens
gccagagctagaacc

SEQ ID NO: 1376542 - DNA, 15 bp, Homo sapiens
agccagagctagaac

SEQ ID NO: 1376543 - DNA, 15 bp, Homo sapiens
cagccagagctagaa

SEQ ID NO: 1376544 - DNA, 15 bp, Homo sapiens
acagccagagctaga

SEQ ID NO: 1376545 - DNA, 15 bp, Homo sapiens
cacagccagagctag

SEQ ID NO: 1376546 - DNA, 15 bp, Homo sapiens
acacagccagagcta

SEQ ID NO: 1376547 - DNA, 15 bp, Homo sapiens
gacacagccagagct

SEQ ID NO: 1376548 - DNA, 15 bp, Homo sapiens
tgacacagccagagc

SEQ ID NO: 1376549 - DNA, 15 bp, Homo sapiens
atgacacagccagag

SEQ ID NO: 1376550 - DNA, 15 bp, Homo sapiens
gatgacacagccaga

SEQ ID NO: 1376551 - DNA, 15 bp, Homo sapiens
ggatgacacagccag

SEQ ID NO: 1376552 - DNA, 15 bp, Homo sapiens
gggatgacacagcca

SEQ ID NO: 1376553 - DNA, 15 bp, Homo sapiens
ggggatgacacagcc

SEQ ID NO: 1376554 - DNA, 15 bp, Homo sapiens
aggggatgacacagc

SEQ ID NO: 1376555 - DNA, 15 bp, Homo sapiens
caggggatgacacag

SEQ ID NO: 1376556 - DNA, 15 bp, Homo sapiens
ccaggggatgacaca

SEQ ID NO: 1376557 - DNA, 15 bp, Homo sapiens
accaggggatgacac

SEQ ID NO: 1376558 - DNA, 15 bp, Homo sapiens
taccaggggatgaca

SEQ ID NO: 1376559 - DNA, 15 bp, Homo sapiens
gtaccaggggatgac

SEQ ID NO: 1376560 - DNA, 15 bp, Homo sapiens
agtaccaggggatga

SEQ ID NO: 1376561 - DNA, 15 bp, Homo sapiens
gagtaccaggggatg

SEQ ID NO: 1376562 - DNA, 15 bp, Homo sapiens
ggagtaccaggggat

SEQ ID NO: 1376563 - DNA, 15 bp, Homo sapiens
tggagtaccagggga

SEQ ID NO: 1376564 - DNA, 15 bp, Homo sapiens
ctggagtaccagggg

SEQ ID NO: 1376565 - DNA, 15 bp, Homo sapiens
gctggagtaccaggg

SEQ ID NO: 1376566 - DNA, 15 bp, Homo sapiens
tgctggagtaccagg

SEQ ID NO: 1376567 - DNA, 15 bp, Homo sapiens
ctgctggagtaccag

SEQ ID NO: 1376568 - DNA, 15 bp, Homo sapiens
gctgctggagtacca

SEQ ID NO: 1376569 - DNA, 15 bp, Homo sapiens
tgctgctggagtacc

SEQ ID NO: 1376570 - DNA, 15 bp, Homo sapiens
ctgctgctggagtac

SEQ ID NO: 1376571 - DNA, 15 bp, Homo sapiens
cctgctgctggagta

SEQ ID NO: 1376572 - DNA, 15 bp, Homo sapiens
gcctgctgctggagt

SEQ ID NO: 1376573 - DNA, 15 bp, Homo sapiens
agcctgctgctggag

SEQ ID NO: 1376574 - DNA, 15 bp, Homo sapiens
aagcctgctgctgga

SEQ ID NO: 1376575 - DNA, 15 bp, Homo sapiens
aaagcctgctgctgg

SEQ ID NO: 1376576 - DNA, 15 bp, Homo sapiens
gaaagcctgctgctg

SEQ ID NO: 1376577 - DNA, 15 bp, Homo sapiens
agaaagcctgctgct

SEQ ID NO: 1376578 - DNA, 15 bp, Homo sapiens
cagaaagcctgctgc

SEQ ID NO: 1376579 - DNA, 15 bp, Homo sapiens
ccagaaagcctgctg

SEQ ID NO: 1376580 - DNA, 15 bp, Homo sapiens
cccagaaagcctgct

SEQ ID NO: 1376581 - DNA, 15 bp, Homo sapiens
acccagaaagcctgc

SEQ ID NO: 1376582 - DNA, 15 bp, Homo sapiens
aggggctggcaggaa

SEQ ID NO: 1376583 - DNA, 15 bp, Homo sapiens
caggggctggcagga

SEQ ID NO: 1376584 - DNA, 15 bp, Homo sapiens
gcaggggctggcagg

SEQ ID NO: 1376585 - DNA, 15 bp, Homo sapiens
ggcaggggctggcag

SEQ ID NO: 1376586 - DNA, 15 bp, Homo sapiens
tggcaggggctggca

SEQ ID NO: 1376587 - DNA, 15 bp, Homo sapiens
atggcaggggctggc

SEQ ID NO: 1376588 - DNA, 15 bp, Homo sapiens
aatggcaggggctgg

SEQ ID NO: 1376589 - DNA, 15 bp, Homo sapiens
caatggcaggggctg

SEQ ID NO: 1376590 - DNA, 15 bp, Homo sapiens
acaatggcaggggct

SEQ ID NO: 1376591 - DNA, 15 bp, Homo sapiens
tacaatggcaggggc

SEQ ID NO: 1376592 - DNA, 15 bp, Homo sapiens
ctacaatggcagggg

SEQ ID NO: 1376593 - DNA, 15 bp, Homo sapiens
gctacaatggcaggg

SEQ ID NO: 1376594 - DNA, 15 bp, Homo sapiens
cgctacaatggcagg

SEQ ID NO: 1376595 - DNA, 15 bp, Homo sapiens
acgctacaatggcag

SEQ ID NO: 1376596 - DNA, 15 bp, Homo sapiens
gacgctacaatggca

SEQ ID NO: 1376597 - DNA, 15 bp, Homo sapiens
agacgctacaatggc

SEQ ID NO: 1376598 - DNA, 15 bp, Homo sapiens
aagacgctacaatgg

SEQ ID NO: 1376599 - DNA, 15 bp, Homo sapiens
aaagacgctacaatg

SEQ ID NO: 1376600 - DNA, 15 bp, Homo sapiens
gaaagacgctacaat

SEQ ID NO: 1376601 - DNA, 15 bp, Homo sapiens
agaaagacgctacaa

SEQ ID NO: 1376602 - DNA, 15 bp, Homo sapiens
aagaaagacgctaca

SEQ ID NO: 1376603 - DNA, 15 bp, Homo sapiens
aaagaaagacgctac

SEQ ID NO: 1376604 - DNA, 15 bp, Homo sapiens
aaaagaaagacgcta

SEQ ID NO: 1376605 - DNA, 15 bp, Homo sapiens
aaaaagaaagacgct

SEQ ID NO: 1376606 - DNA, 15 bp, Homo sapiens
aaaaaagaaagacgc

SEQ ID NO: 1376607 - DNA, 15 bp, Homo sapiens
caaaaaagaaagacg

SEQ ID NO: 1376608 - DNA, 15 bp, Homo sapiens
ccaaaaaagaaagac

SEQ ID NO: 1376609 - DNA, 15 bp, Homo sapiens
gccaaaaaagaaaga

SEQ ID NO: 1376610 - DNA, 15 bp, Homo sapiens
ggccaaaaaagaaag

SEQ ID NO: 1376611 - DNA, 15 bp, Homo sapiens
tggccaaaaaagaaa

SEQ ID NO: 1376612 - DNA, 15 bp, Homo sapiens
atggccaaaaaagaa

SEQ ID NO: 1376613 - DNA, 15 bp, Homo sapiens
gatggccaaaaaaga

SEQ ID NO: 1376614 - DNA, 15 bp, Homo sapiens
agatggccaaaaaag

SEQ ID NO: 1376615 - DNA, 15 bp, Homo sapiens
cagatggccaaaaaa

SEQ ID NO: 1376616 - DNA, 15 bp, Homo sapiens
gcagatggccaaaaa

SEQ ID NO: 1376617 - DNA, 15 bp, Homo sapiens
agcagatggccaaaa

SEQ ID NO: 1376618 - DNA, 15 bp, Homo sapiens
gagcagatggccaaa

SEQ ID NO: 1376619 - DNA, 15 bp, Homo sapiens
ggagcagatggccaa

SEQ ID NO: 1376620 - DNA, 15 bp, Homo sapiens
aggagcagatggcca

SEQ ID NO: 1376621 - DNA, 15 bp, Homo sapiens
caggagcagatggcc

SEQ ID NO: 1376622 - DNA, 15 bp, Homo sapiens
ccaggagcagatggc

SEQ ID NO: 1376623 - DNA, 15 bp, Homo sapiens
tccaggagcagatgg

SEQ ID NO: 1376624 - DNA, 15 bp, Homo sapiens
atccaggagcagatg

SEQ ID NO: 1376625 - DNA, 15 bp, Homo sapiens
gatccaggagcagat

SEQ ID NO: 1376626 - DNA, 15 bp, Homo sapiens
agatccaggagcaga

SEQ ID NO: 1376627 - DNA, 15 bp, Homo sapiens
gagatccaggagcag

SEQ ID NO: 1376628 - DNA, 15 bp, Homo sapiens
ggagatccaggagca

SEQ ID NO: 1376629 - DNA, 15 bp, Homo sapiens
gggagatccaggagc

SEQ ID NO: 1376630 - DNA, 15 bp, Homo sapiens
agggagatccaggag

SEQ ID NO: 1376631 - DNA, 15 bp, Homo sapiens
cagggagatccagga

SEQ ID NO: 1376632 - DNA, 15 bp, Homo sapiens
tcagggagatccagg

SEQ ID NO: 1376633 - DNA, 15 bp, Homo sapiens
ctcagggagatccag

SEQ ID NO: 1376634 - DNA, 15 bp, Homo sapiens
tctcagggagatcca

SEQ ID NO: 1376635 - DNA, 15 bp, Homo sapiens
atctcagggagatcc

SEQ ID NO: 1376636 - DNA, 15 bp, Homo sapiens
catctcagggagatc

SEQ ID NO: 1376637 - DNA, 15 bp, Homo sapiens
ccatctcagggagat

SEQ ID NO: 1376638 - DNA, 15 bp, Homo sapiens
cccatctcagggaga

SEQ ID NO: 1376639 - DNA, 15 bp, Homo sapiens
gcccatctcagggag

SEQ ID NO: 1376640 - DNA, 15 bp, Homo sapiens
agcccatctcaggga

SEQ ID NO: 1376641 - DNA, 15 bp, Homo sapiens
aagcccatctcaggg

SEQ ID NO: 1376642 - DNA, 15 bp, Homo sapiens
gaagcccatctcagg

SEQ ID NO: 1376643 - DNA, 15 bp, Homo sapiens
ggaagcccatctcag

SEQ ID NO: 1376644 - DNA, 15 bp, Homo sapiens
gggaagcccatctca

SEQ ID NO: 1376645 - DNA, 15 bp, Homo sapiens
tgggaagcccatctc

SEQ ID NO: 1376646 - DNA, 15 bp, Homo sapiens
ttgggaagcccatct

SEQ ID NO: 1376647 - DNA, 15 bp, Homo sapiens
cttgggaagcccatc

SEQ ID NO: 1376648 - DNA, 15 bp, Homo sapiens
ccttgggaagcccat

SEQ ID NO: 1376649 - DNA, 15 bp, Homo sapiens
cccttgggaagccca

SEQ ID NO: 1376650 - DNA, 15 bp, Homo sapiens
gcccttgggaagccc

SEQ ID NO: 1376651 - DNA, 15 bp, Homo sapiens
agcccttgggaagcc

SEQ ID NO: 1376652 - DNA, 15 bp, Homo sapiens
cagcccttgggaagc

SEQ ID NO: 1376653 - DNA, 15 bp, Homo sapiens
gcagcccttgggaag

SEQ ID NO: 1376654 - DNA, 15 bp, Homo sapiens
ggcagcccttgggaa

SEQ ID NO: 1376655 - DNA, 15 bp, Homo sapiens
cggcagcccttggga

SEQ ID NO: 1376656 - DNA, 15 bp, Homo sapiens
ccggcagcccttggg

SEQ ID NO: 1376657 - DNA, 15 bp, Homo sapiens
cccggcagcccttgg

SEQ ID NO: 1376658 - DNA, 15 bp, Homo sapiens
ccccggcagcccttg

SEQ ID NO: 1376659 - DNA, 15 bp, Homo sapiens
gccccggcagccctt

SEQ ID NO: 1376660 - DNA, 15 bp, Homo sapiens
tgccccggcagccct

SEQ ID NO: 1376661 - DNA, 15 bp, Homo sapiens
ctgccccggcagccc

SEQ ID NO: 1376662 - DNA, 15 bp, Homo sapiens
gctgccccggcagcc

SEQ ID NO: 1376663 - DNA, 15 bp, Homo sapiens
ggctgccccggcagc

SEQ ID NO: 1376664 - DNA, 15 bp, Homo sapiens
gggctgccccggcag

SEQ ID NO: 1376665 - DNA, 15 bp, Homo sapiens
ggggctgccccggca

SEQ ID NO: 1376666 - DNA, 15 bp, Homo sapiens
gggggctgccccggc

SEQ ID NO: 1376667 - DNA, 15 bp, Homo sapiens
agggggctgccccgg

SEQ ID NO: 1376668 - DNA, 15 bp, Homo sapiens
gagggggctgccccg

SEQ ID NO: 1376669 - DNA, 15 bp, Homo sapiens
tgagggggctgcccc

SEQ ID NO: 1376670 - DNA, 15 bp, Homo sapiens
gtgagggggctgccc

SEQ ID NO: 1376671 - DNA, 15 bp, Homo sapiens
tgtgagggggctgcc

SEQ ID NO: 1376672 - DNA, 15 bp, Homo sapiens
ctgtgagggggctgc

SEQ ID NO: 1376673 - DNA, 15 bp, Homo sapiens
actgtgagggggctg

SEQ ID NO: 1376674 - DNA, 15 bp, Homo sapiens
tactgtgagggggct

SEQ ID NO: 1376675 - DNA, 15 bp, Homo sapiens
atactgtgagggggc

SEQ ID NO: 1376676 - DNA, 15 bp, Homo sapiens
aatactgtgaggggg

SEQ ID NO: 1376677 - DNA, 15 bp, Homo sapiens
caatactgtgagggg

SEQ ID NO: 1376678 - DNA, 15 bp, Homo sapiens
gcaatactgtgaggg

SEQ ID NO: 1376679 - DNA, 15 bp, Homo sapiens
agcaatactgtgagg

SEQ ID NO: 1376680 - DNA, 15 bp, Homo sapiens
gagcaatactgtgag

SEQ ID NO: 1376681 - DNA, 15 bp, Homo sapiens
tgagcaatactgtga

SEQ ID NO: 1376682 - DNA, 15 bp, Homo sapiens
gtgagcaatactgtg

SEQ ID NO: 1376683 - DNA, 15 bp, Homo sapiens
ggtgagcaatactgt

SEQ ID NO: 1376684 - DNA, 15 bp, Homo sapiens
gggtgagcaatactg

SEQ ID NO: 1376685 - DNA, 15 bp, Homo sapiens
tgggtgagcaatact

SEQ ID NO: 1376686 - DNA, 15 bp, Homo sapiens
ctgggtgagcaatac

SEQ ID NO: 1376687 - DNA, 15 bp, Homo sapiens
actgggtgagcaata

SEQ ID NO: 1376688 - DNA, 15 bp, Homo sapiens
cactgggtgagcaat

SEQ ID NO: 1376689 - DNA, 15 bp, Homo sapiens
gcactgggtgagcaa

SEQ ID NO: 1376690 - DNA, 15 bp, Homo sapiens
ggcactgggtgagca

SEQ ID NO: 1376691 - DNA, 15 bp, Homo sapiens
gggcactgggtgagc

SEQ ID NO: 1376692 - DNA, 15 bp, Homo sapiens
agggcactgggtgag

SEQ ID NO: 1376693 - DNA, 15 bp, Homo sapiens
gagggcactgggtga

SEQ ID NO: 1376694 - DNA, 15 bp, Homo sapiens
agagggcactgggtg

SEQ ID NO: 1376695 - DNA, 15 bp, Homo sapiens
gagagggcactgggt

SEQ ID NO: 1376696 - DNA, 15 bp, Homo sapiens
ggagagggcactggg

SEQ ID NO: 1376697 - DNA, 15 bp, Homo sapiens
gggagagggcactgg

SEQ ID NO: 1376698 - DNA, 15 bp, Homo sapiens
ggggagagggcactg

SEQ ID NO: 1376699 - DNA, 15 bp, Homo sapiens
aggggagagggcact

SEQ ID NO: 1376700 - DNA, 15 bp, Homo sapiens
gaggggagagggcac

SEQ ID NO: 1376701 - DNA, 15 bp, Homo sapiens
tgaggggagagggca

SEQ ID NO: 1376702 - DNA, 15 bp, Homo sapiens
ctgaggggagagggc

SEQ ID NO: 1376703 - DNA, 15 bp, Homo sapiens
gctgaggggagaggg

SEQ ID NO: 1376704 - DNA, 15 bp, Homo sapiens
ggctgaggggagagg

SEQ ID NO: 1376705 - DNA, 15 bp, Homo sapiens
aggctgaggggagag

SEQ ID NO: 1376706 - DNA, 15 bp, Homo sapiens
gaggctgaggggaga

SEQ ID NO: 1376707 - DNA, 15 bp, Homo sapiens
agaggctgaggggag

SEQ ID NO: 1376708 - DNA, 15 bp, Homo sapiens
gagaggctgagggga

SEQ ID NO: 1376709 - DNA, 15 bp, Homo sapiens
ggagaggctgagggg

SEQ ID NO: 1376710 - DNA, 15 bp, Homo sapiens
gggagaggctgaggg

SEQ ID NO: 1376711 - DNA, 15 bp, Homo sapiens
ggggagaggctgagg

SEQ ID NO: 1376712 - DNA, 15 bp, Homo sapiens
aggggagaggctgag

SEQ ID NO: 1376713 - DNA, 15 bp, Homo sapiens
caggggagaggctga

SEQ ID NO: 1376714 - DNA, 15 bp, Homo sapiens
gcaggggagaggctg

SEQ ID NO: 1376715 - DNA, 15 bp, Homo sapiens
ggcaggggagaggct

SEQ ID NO: 1376716 - DNA, 15 bp, Homo sapiens
aggcaggggagaggc

SEQ ID NO: 1376717 - DNA, 15 bp, Homo sapiens
caggcaggggagagg

SEQ ID NO: 1376718 - DNA, 15 bp, Homo sapiens
gcaggcaggggagag

SEQ ID NO: 1376719 - DNA, 15 bp, Homo sapiens
ggcaggcaggggaga

SEQ ID NO: 1376720 - DNA, 15 bp, Homo sapiens
gggcaggcaggggag

SEQ ID NO: 1376721 - DNA, 15 bp, Homo sapiens
agggcaggcagggga

SEQ ID NO: 1376722 - DNA, 15 bp, Homo sapiens
cagggcaggcagggg

SEQ ID NO: 1376723 - DNA, 15 bp, Homo sapiens
ccagggcaggcaggg

SEQ ID NO: 1376724 - DNA, 15 bp, Homo sapiens
accagggcaggcagg

SEQ ID NO: 1376725 - DNA, 15 bp, Homo sapiens
caccagggcaggcag

SEQ ID NO: 1376726 - DNA, 15 bp, Homo sapiens
tcaccagggcaggca

SEQ ID NO: 1376727 - DNA, 15 bp, Homo sapiens
gtcaccagggcaggc

SEQ ID NO: 1376728 - DNA, 15 bp, Homo sapiens
tgtcaccagggcagg

SEQ ID NO: 1376729 - DNA, 15 bp, Homo sapiens
atgtcaccagggcag

SEQ ID NO: 1376730 - DNA, 15 bp, Homo sapiens
gatgtcaccagggca

SEQ ID NO: 1376731 - DNA, 15 bp, Homo sapiens
tgatgtcaccagggc

SEQ ID NO: 1376732 - DNA, 15 bp, Homo sapiens
ctgatgtcaccaggg

SEQ ID NO: 1376733 - DNA, 15 bp, Homo sapiens
cctgatgtcaccagg

SEQ ID NO: 1376734 - DNA, 15 bp, Homo sapiens
acctgatgtcaccag

SEQ ID NO: 1376735 - DNA, 15 bp, Homo sapiens
aacctgatgtcacca

SEQ ID NO: 1376736 - DNA, 15 bp, Homo sapiens
aaacctgatgtcacc

SEQ ID NO: 1376737 - DNA, 15 bp, Homo sapiens
aaaacctgatgtcac

SEQ ID NO: 1376738 - DNA, 15 bp, Homo sapiens
aaaaacctgatgtca

SEQ ID NO: 1376739 - DNA, 15 bp, Homo sapiens
gaaaaacctgatgtc

SEQ ID NO: 1376740 - DNA, 15 bp, Homo sapiens
ggaaaaacctgatgt

SEQ ID NO: 1376741 - DNA, 15 bp, Homo sapiens
gggaaaaacctgatg

SEQ ID NO: 1376742 - DNA, 15 bp, Homo sapiens
cgggaaaaacctgat

SEQ ID NO: 1376743 - DNA, 15 bp, Homo sapiens
ccgggaaaaacctga

SEQ ID NO: 1376744 - DNA, 15 bp, Homo sapiens
tccgggaaaaacctg

SEQ ID NO: 1376745 - DNA, 15 bp, Homo sapiens
gtccgggaaaaacct

SEQ ID NO: 1376746 - DNA, 15 bp, Homo sapiens
agtccgggaaaaacc

SEQ ID NO: 1376747 - DNA, 15 bp, Homo sapiens
aagtccgggaaaaac

SEQ ID NO: 1376748 - DNA, 15 bp, Homo sapiens
taagtccgggaaaaa

SEQ ID NO: 1376749 - DNA, 15 bp, Homo sapiens
ctaagtccgggaaaa

SEQ ID NO: 1376750 - DNA, 15 bp, Homo sapiens
tctaagtccgggaaa

SEQ ID NO: 1376751 - DNA, 15 bp, Homo sapiens
ttctaagtccgggaa

SEQ ID NO: 1376752 - DNA, 15 bp, Homo sapiens
tttctaagtccggga

SEQ ID NO: 1376753 - DNA, 15 bp, Homo sapiens
ttttctaagtccggg

SEQ ID NO: 1376754 - DNA, 15 bp, Homo sapiens
gttttctaagtccgg

SEQ ID NO: 1376755 - DNA, 15 bp, Homo sapiens
ggttttctaagtccg

SEQ ID NO: 1376756 - DNA, 15 bp, Homo sapiens
tggttttctaagtcc

SEQ ID NO: 1376757 - DNA, 15 bp, Homo sapiens
ctggttttctaagtc

SEQ ID NO: 1376758 - DNA, 15 bp, Homo sapiens
gctggttttctaagt

SEQ ID NO: 1376759 - DNA, 15 bp, Homo sapiens
agctggttttctaag

SEQ ID NO: 1376760 - DNA, 15 bp, Homo sapiens
gagctggttttctaa

SEQ ID NO: 1376761 - DNA, 15 bp, Homo sapiens
tgagctggttttcta

SEQ ID NO: 1376762 - DNA, 15 bp, Homo sapiens
ctgagctggttttct

SEQ ID NO: 1376763 - DNA, 15 bp, Homo sapiens
gctgagctggttttc

SEQ ID NO: 1376764 - DNA, 15 bp, Homo sapiens
tgctgagctggtttt

SEQ ID NO: 1376765 - DNA, 15 bp, Homo sapiens
gtgctgagctggttt

SEQ ID NO: 1376766 - DNA, 15 bp, Homo sapiens
agtgctgagctggtt

SEQ ID NO: 1376767 - DNA, 15 bp, Homo sapiens
cagtgctgagctggt

SEQ ID NO: 1376768 - DNA, 15 bp, Homo sapiens
gcagtgctgagctgg

SEQ ID NO: 1376769 - DNA, 15 bp, Homo sapiens
ggcagtgctgagctg

SEQ ID NO: 1376770 - DNA, 15 bp, Homo sapiens
aggcagtgctgagct

SEQ ID NO: 1376771 - DNA, 15 bp, Homo sapiens
caggcagtgctgagc

SEQ ID NO: 1376772 - DNA, 15 bp, Homo sapiens
gcaggcagtgctgag

SEQ ID NO: 1376773 - DNA, 15 bp, Homo sapiens
agcaggcagtgctga

SEQ ID NO: 1376774 - DNA, 15 bp, Homo sapiens
gagcaggcagtgctg

SEQ ID NO: 1376775 - DNA, 15 bp, Homo sapiens
ggagcaggcagtgct

SEQ ID NO: 1376776 - DNA, 15 bp, Homo sapiens
gggagcaggcagtgc

SEQ ID NO: 1376777 - DNA, 15 bp, Homo sapiens
tgggagcaggcagtg

SEQ ID NO: 1376778 - DNA, 15 bp, Homo sapiens
atgggagcaggcagt

SEQ ID NO: 1376779 - DNA, 15 bp, Homo sapiens
gatgggagcaggcag

SEQ ID NO: 1376780 - DNA, 15 bp, Homo sapiens
ggatgggagcaggca

SEQ ID NO: 1376781 - DNA, 15 bp, Homo sapiens
aggatgggagcaggc

SEQ ID NO: 1376782 - DNA, 15 bp, Homo sapiens
caggatgggagcagg

SEQ ID NO: 1376783 - DNA, 15 bp, Homo sapiens
acaggatgggagcag

SEQ ID NO: 1376784 - DNA, 15 bp, Homo sapiens
cacaggatgggagca

SEQ ID NO: 1376785 - DNA, 15 bp, Homo sapiens
acacaggatgggagc

SEQ ID NO: 1376786 - DNA, 15 bp, Homo sapiens
cacacaggatgggag

SEQ ID NO: 1376787 - DNA, 15 bp, Homo sapiens
acacacaggatggga

SEQ ID NO: 1376788 - DNA, 15 bp, Homo sapiens
aacacacaggatggg

SEQ ID NO: 1376789 - DNA, 15 bp, Homo sapiens
taacacacaggatgg

SEQ ID NO: 1376790 - DNA, 15 bp, Homo sapiens
ttaacacacaggatg

SEQ ID NO: 1376791 - DNA, 15 bp, Homo sapiens
cttaacacacaggat

SEQ ID NO: 1376792 - DNA, 15 bp, Homo sapiens
gcttaacacacagga

SEQ ID NO: 1376793 - DNA, 15 bp, Homo sapiens
agcttaacacacagg

SEQ ID NO: 1376794 - DNA, 15 bp, Homo sapiens
gagcttaacacacag

SEQ ID NO: 1376795 - DNA, 15 bp, Homo sapiens
agagcttaacacaca

SEQ ID NO: 1376796 - DNA, 15 bp, Homo sapiens
cagagcttaacacac

SEQ ID NO: 1376797 - DNA, 15 bp, Homo sapiens
gcagagcttaacaca

SEQ ID NO: 1376798 - DNA, 15 bp, Homo sapiens
agcagagcttaacac

SEQ ID NO: 1376799 - DNA, 15 bp, Homo sapiens
tagcagagcttaaca

SEQ ID NO: 1376800 - DNA, 15 bp, Homo sapiens
atagcagagcttaac

SEQ ID NO: 1376801 - DNA, 15 bp, Homo sapiens
aatagcagagcttaa

SEQ ID NO: 1376802 - DNA, 15 bp, Homo sapiens
taatagcagagctta

SEQ ID NO: 1376803 - DNA, 15 bp, Homo sapiens
ctaatagcagagctt

SEQ ID NO: 1376804 - DNA, 15 bp, Homo sapiens
cctaatagcagagct

SEQ ID NO: 1376805 - DNA, 15 bp, Homo sapiens
gcctaatagcagagc

SEQ ID NO: 1376806 - DNA, 15 bp, Homo sapiens
ggcctaatagcagag

SEQ ID NO: 1376807 - DNA, 15 bp, Homo sapiens
tggcctaatagcaga

SEQ ID NO: 1376808 - DNA, 15 bp, Homo sapiens
ctggcctaatagcag

SEQ ID NO: 1376809 - DNA, 15 bp, Homo sapiens
gctggcctaatagca

SEQ ID NO: 1376810 - DNA, 15 bp, Homo sapiens
tgctggcctaatagc

SEQ ID NO: 1376811 - DNA, 15 bp, Homo sapiens
ttgctggcctaatag

SEQ ID NO: 1376812 - DNA, 15 bp, Homo sapiens
cttgctggcctaata

SEQ ID NO: 1376813 - DNA, 15 bp, Homo sapiens
gcttgctggcctaat

SEQ ID NO: 1376814 - DNA, 15 bp, Homo sapiens
cgcttgctggcctaa

SEQ ID NO: 1376815 - DNA, 15 bp, Homo sapiens
ccgcttgctggccta

SEQ ID NO: 1376816 - DNA, 15 bp, Homo sapiens
cccgcttgctggcct

SEQ ID NO: 1376817 - DNA, 15 bp, Homo sapiens
ccccgcttgctggcc

SEQ ID NO: 1376818 - DNA, 15 bp, Homo sapiens
tccccgcttgctggc

SEQ ID NO: 1376819 - DNA, 15 bp, Homo sapiens
atccccgcttgctgg

SEQ ID NO: 1376820 - DNA, 15 bp, Homo sapiens
catccccgcttgctg

SEQ ID NO: 1376821 - DNA, 15 bp, Homo sapiens
acatccccgcttgct

SEQ ID NO: 1376822 - DNA, 15 bp, Homo sapiens
gacatccccgcttgc

SEQ ID NO: 1376823 - DNA, 15 bp, Homo sapiens
ggacatccccgcttg

SEQ ID NO: 1376824 - DNA, 15 bp, Homo sapiens
gggacatccccgctt

SEQ ID NO: 1376825 - DNA, 15 bp, Homo sapiens
agggacatccccgct

SEQ ID NO: 1376826 - DNA, 15 bp, Homo sapiens
cagggacatccccgc

SEQ ID NO: 1376827 - DNA, 15 bp, Homo sapiens
ccagggacatccccg

SEQ ID NO: 1376828 - DNA, 15 bp, Homo sapiens
cccagggacatcccc

SEQ ID NO: 1376829 - DNA, 15 bp, Homo sapiens
tcccagggacatccc

SEQ ID NO: 1376830 - DNA, 15 bp, Homo sapiens
ctcccagggacatcc

SEQ ID NO: 1376831 - DNA, 15 bp, Homo sapiens
cctcccagggacatc

SEQ ID NO: 1376832 - DNA, 15 bp, Homo sapiens
ccctcccagggacat

SEQ ID NO: 1376833 - DNA, 15 bp, Homo sapiens
tccctcccagggaca

SEQ ID NO: 1376834 - DNA, 15 bp, Homo sapiens
gtccctcccagggac

SEQ ID NO: 1376835 - DNA, 15 bp, Homo sapiens
ggcccgccttgcggg

SEQ ID NO: 1376836 - DNA, 15 bp, Homo sapiens
cggcccgccttgcgg

SEQ ID NO: 1376837 - DNA, 15 bp, Homo sapiens
ccggcccgccttgcg

SEQ ID NO: 1376838 - DNA, 15 bp, Homo sapiens
cccggcccgccttgc

SEQ ID NO: 1376839 - DNA, 15 bp, Homo sapiens
gcccggcccgccttg

SEQ ID NO: 1376840 - DNA, 15 bp, Homo sapiens
ggcccggcccgcctt

SEQ ID NO: 1376841 - DNA, 15 bp, Homo sapiens
cggcccggcccgcct

SEQ ID NO: 1376842 - DNA, 15 bp, Homo sapiens
ccggcccggcccgcc

SEQ ID NO: 1376843 - DNA, 15 bp, Homo sapiens
cccggcccggcccgc

SEQ ID NO: 1376844 - DNA, 15 bp, Homo sapiens
gcccggcccggcccg

SEQ ID NO: 1376845 - DNA, 15 bp, Homo sapiens
ggcccggcccggccc

SEQ ID NO: 1376846 - DNA, 15 bp, Homo sapiens
cggcccggcccggcc

SEQ ID NO: 1376847 - DNA, 15 bp, Homo sapiens
ccggcccggcccggc

SEQ ID NO: 1376848 - DNA, 15 bp, Homo sapiens
gccggcccggcccgg

SEQ ID NO: 1376849 - DNA, 15 bp, Homo sapiens
tgccggcccggcccg

SEQ ID NO: 1376850 - DNA, 15 bp, Homo sapiens
ctgccggcccggccc

SEQ ID NO: 1376851 - DNA, 15 bp, Homo sapiens
gctgccggcccggcc

SEQ ID NO: 1376852 - DNA, 15 bp, Homo sapiens
ggctgccggcccggc

SEQ ID NO: 1376853 - DNA, 15 bp, Homo sapiens
cggctgccggcccgg

SEQ ID NO: 1376854 - DNA, 15 bp, Homo sapiens
gcggctgccggcccg

SEQ ID NO: 1376855 - DNA, 15 bp, Homo sapiens
ggcggctgccggccc

SEQ ID NO: 1376856 - DNA, 15 bp, Homo sapiens
gggcggctgccggcc

SEQ ID NO: 1376857 - DNA, 15 bp, Homo sapiens
agggcggctgccggc

SEQ ID NO: 1376858 - DNA, 15 bp, Homo sapiens
cagggcggctgccgg

SEQ ID NO: 1376859 - DNA, 15 bp, Homo sapiens
gcagggcggctgccg

SEQ ID NO: 1376860 - DNA, 15 bp, Homo sapiens
agcagggcggctgcc

SEQ ID NO: 1376861 - DNA, 15 bp, Homo sapiens
cagcagggcggctgc

SEQ ID NO: 1376862 - DNA, 15 bp, Homo sapiens
gcagcagggcggctg

SEQ ID NO: 1376863 - DNA, 15 bp, Homo sapiens
cgcagcagggcggct

SEQ ID NO: 1376864 - DNA, 15 bp, Homo sapiens
acgcagcagggcggc

SEQ ID NO: 1376865 - DNA, 15 bp, Homo sapiens
gacgcagcagggcgg

SEQ ID NO: 1376866 - DNA, 15 bp, Homo sapiens
cgacgcagcagggcg

SEQ ID NO: 1376867 - DNA, 15 bp, Homo sapiens
gcgacgcagcagggc

SEQ ID NO: 1376868 - DNA, 15 bp, Homo sapiens
agcgacgcagcaggg

SEQ ID NO: 1376869 - DNA, 15 bp, Homo sapiens
cagcgacgcagcagg

SEQ ID NO: 1376870 - DNA, 15 bp, Homo sapiens
ccagcgacgcagcag

SEQ ID NO: 1376871 - DNA, 15 bp, Homo sapiens
accagcgacgcagca

SEQ ID NO: 1376872 - DNA, 15 bp, Homo sapiens
caccagcgacgcagc

SEQ ID NO: 1376873 - DNA, 15 bp, Homo sapiens
ccaccagcgacgcag

SEQ ID NO: 1376874 - DNA, 15 bp, Homo sapiens
accaccagcgacgca

SEQ ID NO: 1376875 - DNA, 15 bp, Homo sapiens
gaccaccagcgacgc

SEQ ID NO: 1376876 - DNA, 15 bp, Homo sapiens
cgaccaccagcgacg

SEQ ID NO: 1376877 - DNA, 15 bp, Homo sapiens
ccgaccaccagcgac

SEQ ID NO: 1376878 - DNA, 15 bp, Homo sapiens
cccgaccaccagcga

SEQ ID NO: 1376879 - DNA, 15 bp, Homo sapiens
tcccgaccaccagcg

SEQ ID NO: 1376880 - DNA, 15 bp, Homo sapiens
ctcccgaccaccagc

SEQ ID NO: 1376881 - DNA, 15 bp, Homo sapiens
tctcccgaccaccag

SEQ ID NO: 1376882 - DNA, 15 bp, Homo sapiens
gtctcccgaccacca

SEQ ID NO: 1376883 - DNA, 15 bp, Homo sapiens
cgtctcccgaccacc

SEQ ID NO: 1376884 - DNA, 15 bp, Homo sapiens
ccgtctcccgaccac

SEQ ID NO: 1376885 - DNA, 15 bp, Homo sapiens
tccgtctcccgacca

SEQ ID NO: 1376886 - DNA, 15 bp, Homo sapiens
ctccgtctcccgacc

SEQ ID NO: 1376887 - DNA, 15 bp, Homo sapiens
tctccgtctcccgac

SEQ ID NO: 1376888 - DNA, 15 bp, Homo sapiens
ttctccgtctcccga

SEQ ID NO: 1376889 - DNA, 15 bp, Homo sapiens
cttctccgtctcccg

SEQ ID NO: 1376890 - DNA, 15 bp, Homo sapiens
tcttctccgtctccc

SEQ ID NO: 1376891 - DNA, 15 bp, Homo sapiens
ttcttctccgtctcc

SEQ ID NO: 1376892 - DNA, 15 bp, Homo sapiens
gttcttctccgtctc

SEQ ID NO: 1376893 - DNA, 15 bp, Homo sapiens
cgttcttctccgtct

SEQ ID NO: 1376894 - DNA, 15 bp, Homo sapiens
ccgttcttctccgtc

SEQ ID NO: 1376895 - DNA, 15 bp, Homo sapiens
cccgttcttctccgt

SEQ ID NO: 1376896 - DNA, 15 bp, Homo sapiens
acccgttcttctccg

SEQ ID NO: 1376897 - DNA, 15 bp, Homo sapiens
cacccgttcttctcc

SEQ ID NO: 1376898 - DNA, 15 bp, Homo sapiens
acacccgttcttctc

SEQ ID NO: 1376899 - DNA, 15 bp, Homo sapiens
gacacccgttcttct

SEQ ID NO: 1376900 - DNA, 15 bp, Homo sapiens
cgacacccgttcttc

SEQ ID NO: 1376901 - DNA, 15 bp, Homo sapiens
gcgacacccgttctt

SEQ ID NO: 1376902 - DNA, 15 bp, Homo sapiens
cgcgacacccgttct

SEQ ID NO: 1376903 - DNA, 15 bp, Homo sapiens
ccgcgacacccgttc

SEQ ID NO: 1376904 - DNA, 15 bp, Homo sapiens
cccgcgacacccgtt

SEQ ID NO: 1376905 - DNA, 15 bp, Homo sapiens
gcccgcgacacccgt

SEQ ID NO: 1376906 - DNA, 15 bp, Homo sapiens
cgcccgcgacacccg

SEQ ID NO: 1376907 - DNA, 15 bp, Homo sapiens
tcgcccgcgacaccc

SEQ ID NO: 1376908 - DNA, 15 bp, Homo sapiens
ttcgcccgcgacacc

SEQ ID NO: 1376909 - DNA, 15 bp, Homo sapiens
cttcgcccgcgacac

SEQ ID NO: 1376910 - DNA, 15 bp, Homo sapiens
ccttcgcccgcgaca

SEQ ID NO: 1376911 - DNA, 15 bp, Homo sapiens
tccttcgcccgcgac

SEQ ID NO: 1376912 - DNA, 15 bp, Homo sapiens
ctccttcgcccgcga

SEQ ID NO: 1376913 - DNA, 15 bp, Homo sapiens
actccttcgcccgcg

SEQ ID NO: 1376914 - DNA, 15 bp, Homo sapiens
aactccttcgcccgc

SEQ ID NO: 1376915 - DNA, 15 bp, Homo sapiens
gaactccttcgcccg

SEQ ID NO: 1376916 - DNA, 15 bp, Homo sapiens
ggaactccttcgccc

SEQ ID NO: 1376917 - DNA, 15 bp, Homo sapiens
gggaactccttcgcc

SEQ ID NO: 1376918 - DNA, 15 bp, Homo sapiens
tgggaactccttcgc

SEQ ID NO: 1376919 - DNA, 15 bp, Homo sapiens
ctgggaactccttcg

SEQ ID NO: 1376920 - DNA, 15 bp, Homo sapiens
cctgggaactccttc

SEQ ID NO: 1376921 - DNA, 15 bp, Homo sapiens
tcctgggaactcctt

SEQ ID NO: 1376922 - DNA, 15 bp, Homo sapiens
gtcctgggaactcct

SEQ ID NO: 1376923 - DNA, 15 bp, Homo sapiens
tgtcctgggaactcc

SEQ ID NO: 1376924 - DNA, 15 bp, Homo sapiens
gtgtcctgggaactc

SEQ ID NO: 1376925 - DNA, 15 bp, Homo sapiens
ggtgtcctgggaact

SEQ ID NO: 1376926 - DNA, 15 bp, Homo sapiens
gggtgtcctgggaac

SEQ ID NO: 1376927 - DNA, 15 bp, Homo sapiens
ggggtgtcctgggaa

SEQ ID NO: 1376928 - DNA, 15 bp, Homo sapiens
gggggtgtcctggga

SEQ ID NO: 1376929 - DNA, 15 bp, Homo sapiens
agggggtgtcctggg

SEQ ID NO: 1376930 - DNA, 15 bp, Homo sapiens
gagggggtgtcctgg

SEQ ID NO: 1376931 - DNA, 15 bp, Homo sapiens
cgagggggtgtcctg

SEQ ID NO: 1376932 - DNA, 15 bp, Homo sapiens
ccgagggggtgtcct

SEQ ID NO: 1376933 - DNA, 15 bp, Homo sapiens
cccgagggggtgtcc

SEQ ID NO: 1376934 - DNA, 15 bp, Homo sapiens
acccgagggggtgtc

SEQ ID NO: 1376935 - DNA, 15 bp, Homo sapiens
cacccgagggggtgt

SEQ ID NO: 1376936 - DNA, 15 bp, Homo sapiens
acacccgagggggtg

SEQ ID NO: 1376937 - DNA, 15 bp, Homo sapiens
gacacccgagggggt

SEQ ID NO: 1376938 - DNA, 15 bp, Homo sapiens
agacacccgaggggg

SEQ ID NO: 1376939 - DNA, 15 bp, Homo sapiens
cagacacccgagggg

SEQ ID NO: 1376940 - DNA, 15 bp, Homo sapiens
gcagacacccgaggg

SEQ ID NO: 1376941 - DNA, 15 bp, Homo sapiens
cgcagacacccgagg

SEQ ID NO: 1376942 - DNA, 15 bp, Homo sapiens
gcgcagacacccgag

SEQ ID NO: 1376943 - DNA, 15 bp, Homo sapiens
ggcgcagacacccga

SEQ ID NO: 1376944 - DNA, 15 bp, Homo sapiens
cggcgcagacacccg

SEQ ID NO: 1376945 - DNA, 15 bp, Homo sapiens
ccggcgcagacaccc

SEQ ID NO: 1376946 - DNA, 15 bp, Homo sapiens
tccggcgcagacacc

SEQ ID NO: 1376947 - DNA, 15 bp, Homo sapiens
ttccggcgcagacac

SEQ ID NO: 1376948 - DNA, 15 bp, Homo sapiens
gttccggcgcagaca

SEQ ID NO: 1376949 - DNA, 15 bp, Homo sapiens
agttccggcgcagac

SEQ ID NO: 1376950 - DNA, 15 bp, Homo sapiens
gagttccggcgcaga

SEQ ID NO: 1376951 - DNA, 15 bp, Homo sapiens
ggagttccggcgcag

SEQ ID NO: 1376952 - DNA, 15 bp, Homo sapiens
cggagttccggcgca

SEQ ID NO: 1376953 - DNA, 15 bp, Homo sapiens
tcggagttccggcgc

SEQ ID NO: 1376954 - DNA, 15 bp, Homo sapiens
ctcggagttccggcg

SEQ ID NO: 1376955 - DNA, 15 bp, Homo sapiens
cctcggagttccggc

SEQ ID NO: 1376956 - DNA, 15 bp, Homo sapiens
ccctcggagttccgg

SEQ ID NO: 1376957 - DNA, 15 bp, Homo sapiens
accctcggagttccg

SEQ ID NO: 1376958 - DNA, 15 bp, Homo sapiens
aaccctcggagttcc

SEQ ID NO: 1376959 - DNA, 15 bp, Homo sapiens
gaaccctcggagttc

SEQ ID NO: 1376960 - DNA, 15 bp, Homo sapiens
ggaaccctcggagtt

SEQ ID NO: 1376961 - DNA, 15 bp, Homo sapiens
gggaaccctcggagt

SEQ ID NO: 1376962 - DNA, 15 bp, Homo sapiens
ggggaaccctcggag

SEQ ID NO: 1376963 - DNA, 15 bp, Homo sapiens
cggggaaccctcgga

SEQ ID NO: 1376964 - DNA, 15 bp, Homo sapiens
ccggggaaccctcgg

SEQ ID NO: 1376965 - DNA, 15 bp, Homo sapiens
tccggggaaccctcg

SEQ ID NO: 1376966 - DNA, 15 bp, Homo sapiens
ctccggggaaccctc

SEQ ID NO: 1376967 - DNA, 15 bp, Homo sapiens
actccggggaaccct

SEQ ID NO: 1376968 - DNA, 15 bp, Homo sapiens
aactccggggaaccc

SEQ ID NO: 1376969 - DNA, 15 bp, Homo sapiens
taactccggggaacc

SEQ ID NO: 1376970 - DNA, 15 bp, Homo sapiens
ctaactccggggaac

SEQ ID NO: 1376971 - DNA, 15 bp, Homo sapiens
tctaactccggggaa

SEQ ID NO: 1376972 - DNA, 15 bp, Homo sapiens
gtctaactccgggga

SEQ ID NO: 1376973 - DNA, 15 bp, Homo sapiens
ggtctaactccgggg

SEQ ID NO: 1376974 - DNA, 15 bp, Homo sapiens
cggtctaactccggg

SEQ ID NO: 1376975 - DNA, 15 bp, Homo sapiens
tcggtctaactccgg

SEQ ID NO: 1376976 - DNA, 15 bp, Homo sapiens
ctcggtctaactccg

SEQ ID NO: 1376977 - DNA, 15 bp, Homo sapiens
actcggtctaactcc

SEQ ID NO: 1376978 - DNA, 15 bp, Homo sapiens
gactcggtctaactc

SEQ ID NO: 1376979 - DNA, 15 bp, Homo sapiens
ggactcggtctaact

SEQ ID NO: 1376980 - DNA, 15 bp, Homo sapiens
aggactcggtctaac

SEQ ID NO: 1376981 - DNA, 15 bp, Homo sapiens
aaggactcggtctaa

SEQ ID NO: 1376982 - DNA, 15 bp, Homo sapiens
gaaggactcggtcta

SEQ ID NO: 1376983 - DNA, 15 bp, Homo sapiens
ggaaggactcggtct

SEQ ID NO: 1376984 - DNA, 15 bp, Homo sapiens
aggaaggactcggtc

SEQ ID NO: 1376985 - DNA, 15 bp, Homo sapiens
gaggaaggactcggt

SEQ ID NO: 1376986 - DNA, 15 bp, Homo sapiens
tgaggaaggactcgg

SEQ ID NO: 1376987 - DNA, 15 bp, Homo sapiens
gtgaggaaggactcg

SEQ ID NO: 1376988 - DNA, 15 bp, Homo sapiens
cgtgaggaaggactc

SEQ ID NO: 1376989 - DNA, 15 bp, Homo sapiens
gcgtgaggaaggact

SEQ ID NO: 1376990 - DNA, 15 bp, Homo sapiens
ggcgtgaggaaggac

SEQ ID NO: 1376991 - DNA, 15 bp, Homo sapiens
gggcgtgaggaagga

SEQ ID NO: 1376992 - DNA, 15 bp, Homo sapiens
agggcgtgaggaagg

SEQ ID NO: 1376993 - DNA, 15 bp, Homo sapiens
gagggcgtgaggaag

SEQ ID NO: 1376994 - DNA, 15 bp, Homo sapiens
ggagggcgtgaggaa

SEQ ID NO: 1376995 - DNA, 15 bp, Homo sapiens
gggagggcgtgagga

SEQ ID NO: 1376996 - DNA, 15 bp, Homo sapiens
cgggagggcgtgagg

SEQ ID NO: 1376997 - DNA, 15 bp, Homo sapiens
ccgggagggcgtgag

SEQ ID NO: 1376998 - DNA, 15 bp, Homo sapiens
gccgggagggcgtga

SEQ ID NO: 1376999 - DNA, 15 bp, Homo sapiens
agccgggagggcgtg

SEQ ID NO: 1377000 - DNA, 15 bp, Homo sapiens
cagccgggagggcgt

SEQ ID NO: 1377001 - DNA, 15 bp, Homo sapiens
acagccgggagggcg

SEQ ID NO: 1377002 - DNA, 15 bp, Homo sapiens
cacagccgggagggc

SEQ ID NO: 1377003 - DNA, 15 bp, Homo sapiens
ccacagccgggaggg

SEQ ID NO: 1377004 - DNA, 15 bp, Homo sapiens
cccacagccgggagg

SEQ ID NO: 1377005 - DNA, 15 bp, Homo sapiens
acccacagccgggag

SEQ ID NO: 1377006 - DNA, 15 bp, Homo sapiens
cacccacagccggga

SEQ ID NO: 1377007 - DNA, 15 bp, Homo sapiens
gcacccacagccggg

SEQ ID NO: 1377008 - DNA, 15 bp, Homo sapiens
ggcacccacagccgg

SEQ ID NO: 1377009 - DNA, 15 bp, Homo sapiens
tggcacccacagccg

SEQ ID NO: 1377010 - DNA, 15 bp, Homo sapiens
ttggcacccacagcc

SEQ ID NO: 1377011 - DNA, 15 bp, Homo sapiens
cttggcacccacagc

SEQ ID NO: 1377012 - DNA, 15 bp, Homo sapiens
gcttggcacccacag

SEQ ID NO: 1377013 - DNA, 15 bp, Homo sapiens
cgcttggcacccaca

SEQ ID NO: 1377014 - DNA, 15 bp, Homo sapiens
ccgcttggcacccac

SEQ ID NO: 1377015 - DNA, 15 bp, Homo sapiens
gccgcttggcaccca

SEQ ID NO: 1377016 - DNA, 15 bp, Homo sapiens
ggccgcttggcaccc

SEQ ID NO: 1377017 - DNA, 15 bp, Homo sapiens
cggccgcttggcacc

SEQ ID NO: 1377018 - DNA, 15 bp, Homo sapiens
tcggccgcttggcac

SEQ ID NO: 1377019 - DNA, 15 bp, Homo sapiens
ttcggccgcttggca

SEQ ID NO: 1377020 - DNA, 15 bp, Homo sapiens
cttcggccgcttggc

SEQ ID NO: 1377021 - DNA, 15 bp, Homo sapiens
acttcggccgcttgg

SEQ ID NO: 1377022 - DNA, 15 bp, Homo sapiens
cacttcggccgcttg

SEQ ID NO: 1377023 - DNA, 15 bp, Homo sapiens
acacttcggccgctt

SEQ ID NO: 1377024 - DNA, 15 bp, Homo sapiens
cacacttcggccgct

SEQ ID NO: 1377025 - DNA, 15 bp, Homo sapiens
ccacacttcggccgc

SEQ ID NO: 1377026 - DNA, 15 bp, Homo sapiens
accacacttcggccg

SEQ ID NO: 1377027 - DNA, 15 bp, Homo sapiens
gaccacacttcggcc

SEQ ID NO: 1377028 - DNA, 15 bp, Homo sapiens
cgaccacacttcggc

SEQ ID NO: 1377029 - DNA, 15 bp, Homo sapiens
ccgaccacacttcgg

SEQ ID NO: 1377030 - DNA, 15 bp, Homo sapiens
cccgaccacacttcg

SEQ ID NO: 1377031 - DNA, 15 bp, Homo sapiens
ccccgaccacacttc

SEQ ID NO: 1377032 - DNA, 15 bp, Homo sapiens
tccccgaccacactt

SEQ ID NO: 1377033 - DNA, 15 bp, Homo sapiens
ctccccgaccacact

SEQ ID NO: 1377034 - DNA, 15 bp, Homo sapiens
cctccccgaccacac

SEQ ID NO: 1377035 - DNA, 15 bp, Homo sapiens
gcctccccgaccaca

SEQ ID NO: 1377036 - DNA, 15 bp, Homo sapiens
cgcctccccgaccac

SEQ ID NO: 1377037 - DNA, 15 bp, Homo sapiens
gcgcctccccgacca

SEQ ID NO: 1377038 - DNA, 15 bp, Homo sapiens
ggcgcctccccgacc

SEQ ID NO: 1377039 - DNA, 15 bp, Homo sapiens
gggcgcctccccgac

SEQ ID NO: 1377040 - DNA, 15 bp, Homo sapiens
agggcgcctccccga

SEQ ID NO: 1377041 - DNA, 15 bp, Homo sapiens
gagggcgcctccccg

SEQ ID NO: 1377042 - DNA, 15 bp, Homo sapiens
ggagggcgcctcccc

SEQ ID NO: 1377043 - DNA, 15 bp, Homo sapiens
gggagggcgcctccc

SEQ ID NO: 1377044 - DNA, 15 bp, Homo sapiens
cgggagggcgcctcc

SEQ ID NO: 1377045 - DNA, 15 bp, Homo sapiens
gcgggagggcgcctc

SEQ ID NO: 1377046 - DNA, 15 bp, Homo sapiens
ggcgggagggcgcct

SEQ ID NO: 1377047 - DNA, 15 bp, Homo sapiens
gggcgggagggcgcc

SEQ ID NO: 1377048 - DNA, 15 bp, Homo sapiens
cgggcgggagggcgc

SEQ ID NO: 1377049 - DNA, 15 bp, Homo sapiens
ccgggcgggagggcg

SEQ ID NO: 1377050 - DNA, 15 bp, Homo sapiens
gccgggcgggagggc

SEQ ID NO: 1377051 - DNA, 15 bp, Homo sapiens
ggccgggcgggaggg

SEQ ID NO: 1377052 - DNA, 15 bp, Homo sapiens
cggccgggcgggagg

SEQ ID NO: 1377053 - DNA, 15 bp, Homo sapiens
gcggccgggcgggag

SEQ ID NO: 1377054 - DNA, 15 bp, Homo sapiens
cgcggccgggcggga

SEQ ID NO: 1377055 - DNA, 15 bp, Homo sapiens
ccgcggccgggcggg

SEQ ID NO: 1377056 - DNA, 15 bp, Homo sapiens
tccgcggccgggcgg

SEQ ID NO: 1377057 - DNA, 15 bp, Homo sapiens
ctccgcggccgggcg

SEQ ID NO: 1377058 - DNA, 15 bp, Homo sapiens
cctccgcggccgggc

SEQ ID NO: 1377059 - DNA, 15 bp, Homo sapiens
gcctccgcggccggg

SEQ ID NO: 1377060 - DNA, 15 bp, Homo sapiens
ggcctccgcggccgg

SEQ ID NO: 1377061 - DNA, 15 bp, Homo sapiens
gggcctccgcggccg

SEQ ID NO: 1377062 - DNA, 15 bp, Homo sapiens
cgggcctccgcggcc

SEQ ID NO: 1377063 - DNA, 15 bp, Homo sapiens
tcgggcctccgcggc

SEQ ID NO: 1377064 - DNA, 15 bp, Homo sapiens
ctcgggcctccgcgg

SEQ ID NO: 1377065 - DNA, 15 bp, Homo sapiens
cctcgggcctccgcg

SEQ ID NO: 1377066 - DNA, 15 bp, Homo sapiens
ccctcgggcctccgc

SEQ ID NO: 1377067 - DNA, 15 bp, Homo sapiens
gccctcgggcctccg

SEQ ID NO: 1377068 - DNA, 15 bp, Homo sapiens
cgccctcgggcctcc

SEQ ID NO: 1377069 - DNA, 15 bp, Homo sapiens
ccgccctcgggcctc

SEQ ID NO: 1377070 - DNA, 15 bp, Homo sapiens
gccgccctcgggcct

SEQ ID NO: 1377071 - DNA, 15 bp, Homo sapiens
agccgccctcgggcc

SEQ ID NO: 1377072 - DNA, 15 bp, Homo sapiens
cagccgccctcgggc

SEQ ID NO: 1377073 - DNA, 15 bp, Homo sapiens
gcagccgccctcggg

SEQ ID NO: 1377074 - DNA, 15 bp, Homo sapiens
ggcagccgccctcgg

SEQ ID NO: 1377075 - DNA, 15 bp, Homo sapiens
cggcagccgccctcg

SEQ ID NO: 1377076 - DNA, 15 bp, Homo sapiens
ccggcagccgccctc

SEQ ID NO: 1377077 - DNA, 15 bp, Homo sapiens
tccggcagccgccct

SEQ ID NO: 1377078 - DNA, 15 bp, Homo sapiens
ctccggcagccgccc

SEQ ID NO: 1377079 - DNA, 15 bp, Homo sapiens
cctccggcagccgcc

SEQ ID NO: 1377080 - DNA, 15 bp, Homo sapiens
ccctccggcagccgc

SEQ ID NO: 1377081 - DNA, 15 bp, Homo sapiens
accctccggcagccg

SEQ ID NO: 1377082 - DNA, 15 bp, Homo sapiens
caccctccggcagcc

SEQ ID NO: 1377083 - DNA, 15 bp, Homo sapiens
gcaccctccggcagc

SEQ ID NO: 1377084 - DNA, 15 bp, Homo sapiens
agcaccctccggcag

SEQ ID NO: 1377085 - DNA, 15 bp, Homo sapiens
gagcaccctccggca

SEQ ID NO: 1377086 - DNA, 15 bp, Homo sapiens
cgagcaccctccggc

SEQ ID NO: 1377087 - DNA, 15 bp, Homo sapiens
ccgagcaccctccgg

SEQ ID NO: 1377088 - DNA, 15 bp, Homo sapiens
gccgagcaccctccg

SEQ ID NO: 1377089 - DNA, 15 bp, Homo sapiens
cgccgagcaccctcc

SEQ ID NO: 1377090 - DNA, 15 bp, Homo sapiens
ccgccgagcaccctc

SEQ ID NO: 1377091 - DNA, 15 bp, Homo sapiens
gccgccgagcaccct

SEQ ID NO: 1377092 - DNA, 15 bp, Homo sapiens
cgccgccgagcaccc

SEQ ID NO: 1377093 - DNA, 15 bp, Homo sapiens
tcgccgccgagcacc

SEQ ID NO: 1377094 - DNA, 15 bp, Homo sapiens
ttcgccgccgagcac

SEQ ID NO: 1377095 - DNA, 15 bp, Homo sapiens
cttcgccgccgagca

SEQ ID NO: 1377096 - DNA, 15 bp, Homo sapiens
gcttcgccgccgagc

SEQ ID NO: 1377097 - DNA, 15 bp, Homo sapiens
ggcttcgccgccgag

SEQ ID NO: 1377098 - DNA, 15 bp, Homo sapiens
gggcttcgccgccga

SEQ ID NO: 1377099 - DNA, 15 bp, Homo sapiens
ggggcttcgccgccg

SEQ ID NO: 1377100 - DNA, 15 bp, Homo sapiens
gggggcttcgccgcc

SEQ ID NO: 1377101 - DNA, 15 bp, Homo sapiens
agggggcttcgccgc

SEQ ID NO: 1377102 - DNA, 15 bp, Homo sapiens
cagggggcttcgccg

SEQ ID NO: 1377103 - DNA, 15 bp, Homo sapiens
tcagggggcttcgcc

SEQ ID NO: 1377104 - DNA, 15 bp, Homo sapiens
gtcagggggcttcgc

SEQ ID NO: 1377105 - DNA, 15 bp, Homo sapiens
ggtcagggggcttcg

SEQ ID NO: 1377106 - DNA, 15 bp, Homo sapiens
gggtcagggggcttc

SEQ ID NO: 1377107 - DNA, 15 bp, Homo sapiens
cgggtcagggggctt

SEQ ID NO: 1377108 - DNA, 15 bp, Homo sapiens
ccgggtcagggggct

SEQ ID NO: 1377109 - DNA, 15 bp, Homo sapiens
gccgggtcagggggc

SEQ ID NO: 1377110 - DNA, 15 bp, Homo sapiens
ggccgggtcaggggg

SEQ ID NO: 1377111 - DNA, 15 bp, Homo sapiens
cggccgggtcagggg

SEQ ID NO: 1377112 - DNA, 15 bp, Homo sapiens
ccggccgggtcaggg

SEQ ID NO: 1377113 - DNA, 15 bp, Homo sapiens
cccggccgggtcagg

SEQ ID NO: 1377114 - DNA, 15 bp, Homo sapiens
gcccggccgggtcag

SEQ ID NO: 1377115 - DNA, 15 bp, Homo sapiens
agcccggccgggtca

SEQ ID NO: 1377116 - DNA, 15 bp, Homo sapiens
cagcccggccgggtc

SEQ ID NO: 1377117 - DNA, 15 bp, Homo sapiens
acagcccggccgggt

SEQ ID NO: 1377118 - DNA, 15 bp, Homo sapiens
gacagcccggccggg

SEQ ID NO: 1377119 - DNA, 15 bp, Homo sapiens
ggacagcccggccgg

SEQ ID NO: 1377120 - DNA, 15 bp, Homo sapiens
cggacagcccggccg

SEQ ID NO: 1377121 - DNA, 15 bp, Homo sapiens
ccggacagcccggcc

SEQ ID NO: 1377122 - DNA, 15 bp, Homo sapiens
cccggacagcccggc

SEQ ID NO: 1377123 - DNA, 15 bp, Homo sapiens
gcccggacagcccgg

SEQ ID NO: 1377124 - DNA, 15 bp, Homo sapiens
cgcccggacagcccg

SEQ ID NO: 1377125 - DNA, 15 bp, Homo sapiens
ccgcccggacagccc

SEQ ID NO: 1377126 - DNA, 15 bp, Homo sapiens
gccgcccggacagcc

SEQ ID NO: 1377127 - DNA, 15 bp, Homo sapiens
cgccgcccggacagc

SEQ ID NO: 1377128 - DNA, 15 bp, Homo sapiens
gcgccgcccggacag

SEQ ID NO: 1377129 - DNA, 15 bp, Homo sapiens
ggcgccgcccggaca

SEQ ID NO: 1377130 - DNA, 15 bp, Homo sapiens
gggcgccgcccggac

SEQ ID NO: 1377131 - DNA, 15 bp, Homo sapiens
agggcgccgcccgga

SEQ ID NO: 1377132 - DNA, 15 bp, Homo sapiens
gagggcgccgcccgg

SEQ ID NO: 1377133 - DNA, 15 bp, Homo sapiens
ggagggcgccgcccg

SEQ ID NO: 1377134 - DNA, 15 bp, Homo sapiens
cggagggcgccgccc

SEQ ID NO: 1377135 - DNA, 15 bp, Homo sapiens
acggagggcgccgcc

SEQ ID NO: 1377136 - DNA, 15 bp, Homo sapiens
cacggagggcgccgc

SEQ ID NO: 1377137 - DNA, 15 bp, Homo sapiens
ccacggagggcgccg

SEQ ID NO: 1377138 - DNA, 15 bp, Homo sapiens
gccacggagggcgcc

SEQ ID NO: 1377139 - DNA, 15 bp, Homo sapiens
ggccacggagggcgc

SEQ ID NO: 1377140 - DNA, 15 bp, Homo sapiens
gggccacggagggcg

SEQ ID NO: 1377141 - DNA, 15 bp, Homo sapiens
cgggccacggagggc

SEQ ID NO: 1377142 - DNA, 15 bp, Homo sapiens
ccgggccacggaggg

SEQ ID NO: 1377143 - DNA, 15 bp, Homo sapiens
tccgggccacggagg

SEQ ID NO: 1377144 - DNA, 15 bp, Homo sapiens
ctccgggccacggag

SEQ ID NO: 1377145 - DNA, 15 bp, Homo sapiens
actccgggccacgga

SEQ ID NO: 1377146 - DNA, 15 bp, Homo sapiens
aactccgggccacgg

SEQ ID NO: 1377147 - DNA, 15 bp, Homo sapiens
caactccgggccacg

SEQ ID NO: 1377148 - DNA, 15 bp, Homo sapiens
gcaactccgggccac

SEQ ID NO: 1377149 - DNA, 15 bp, Homo sapiens
cgcaactccgggcca

SEQ ID NO: 1377150 - DNA, 15 bp, Homo sapiens
acgcaactccgggcc

SEQ ID NO: 1377151 - DNA, 15 bp, Homo sapiens
gacgcaactccgggc

SEQ ID NO: 1377152 - DNA, 15 bp, Homo sapiens
agacgcaactccggg

SEQ ID NO: 1377153 - DNA, 15 bp, Homo sapiens
aagacgcaactccgg

SEQ ID NO: 1377154 - DNA, 15 bp, Homo sapiens
caagacgcaactccg

SEQ ID NO: 1377155 - DNA, 15 bp, Homo sapiens
gcaagacgcaactcc

SEQ ID NO: 1377156 - DNA, 15 bp, Homo sapiens
ggcaagacgcaactc

SEQ ID NO: 1377157 - DNA, 15 bp, Homo sapiens
cggcaagacgcaact

SEQ ID NO: 1377158 - DNA, 15 bp, Homo sapiens
ccggcaagacgcaac

SEQ ID NO: 1377159 - DNA, 15 bp, Homo sapiens
cccggcaagacgcaa

SEQ ID NO: 1377160 - DNA, 15 bp, Homo sapiens
gcccggcaagacgca

SEQ ID NO: 1377161 - DNA, 15 bp, Homo sapiens
cgcccggcaagacgc

SEQ ID NO: 1377162 - DNA, 15 bp, Homo sapiens
acgcccggcaagacg

SEQ ID NO: 1377163 - DNA, 15 bp, Homo sapiens
cacgcccggcaagac

SEQ ID NO: 1377164 - DNA, 15 bp, Homo sapiens
ccacgcccggcaaga

SEQ ID NO: 1377165 - DNA, 15 bp, Homo sapiens
cccacgcccggcaag

SEQ ID NO: 1377166 - DNA, 15 bp, Homo sapiens
ccccacgcccggcaa

SEQ ID NO: 1377167 - DNA, 15 bp, Homo sapiens
gccccacgcccggca

SEQ ID NO: 1377168 - DNA, 15 bp, Homo sapiens
agccccacgcccggc

SEQ ID NO: 1377169 - DNA, 15 bp, Homo sapiens
cagccccacgcccgg

SEQ ID NO: 1377170 - DNA, 15 bp, Homo sapiens
acagccccacgcccg

SEQ ID NO: 1377171 - DNA, 15 bp, Homo sapiens
gacagccccacgccc

SEQ ID NO: 1377172 - DNA, 15 bp, Homo sapiens
agacagccccacgcc

SEQ ID NO: 1377173 - DNA, 15 bp, Homo sapiens
gagacagccccacgc

SEQ ID NO: 1377174 - DNA, 15 bp, Homo sapiens
agagacagccccacg

SEQ ID NO: 1377175 - DNA, 15 bp, Homo sapiens
gagagacagccccac

SEQ ID NO: 1377176 - DNA, 15 bp, Homo sapiens
agagagacagcccca

SEQ ID NO: 1377177 - DNA, 15 bp, Homo sapiens
cagagagacagcccc

SEQ ID NO: 1377178 - DNA, 15 bp, Homo sapiens
ccagagagacagccc

SEQ ID NO: 1377179 - DNA, 15 bp, Homo sapiens
accagagagacagcc

SEQ ID NO: 1377180 - DNA, 15 bp, Homo sapiens
aaccagagagacagc

SEQ ID NO: 1377181 - DNA, 15 bp, Homo sapiens
caaccagagagacag

SEQ ID NO: 1377182 - DNA, 15 bp, Homo sapiens
ccaaccagagagaca

SEQ ID NO: 1377183 - DNA, 15 bp, Homo sapiens
cccaaccagagagac

SEQ ID NO: 1377184 - DNA, 15 bp, Homo sapiens
acccaaccagagaga

SEQ ID NO: 1377185 - DNA, 15 bp, Homo sapiens
tacccaaccagagag

SEQ ID NO: 1377186 - DNA, 15 bp, Homo sapiens
ctacccaaccagaga

SEQ ID NO: 1377187 - DNA, 15 bp, Homo sapiens
actacccaaccagag

SEQ ID NO: 1377188 - DNA, 15 bp, Homo sapiens
cactacccaaccaga

SEQ ID NO: 1377189 - DNA, 15 bp, Homo sapiens
ccactacccaaccag

SEQ ID NO: 1377190 - DNA, 15 bp, Homo sapiens
cccactacccaacca

SEQ ID NO: 1377191 - DNA, 15 bp, Homo sapiens
ccccactacccaacc

SEQ ID NO: 1377192 - DNA, 15 bp, Homo sapiens
tccccactacccaac

SEQ ID NO: 1377193 - DNA, 15 bp, Homo sapiens
ctccccactacccaa

SEQ ID NO: 1377194 - DNA, 15 bp, Homo sapiens
tctccccactaccca

SEQ ID NO: 1377195 - DNA, 15 bp, Homo sapiens
ctctccccactaccc

SEQ ID NO: 1377196 - DNA, 15 bp, Homo sapiens
cctctccccactacc

SEQ ID NO: 1377197 - DNA, 15 bp, Homo sapiens
ccctctccccactac

SEQ ID NO: 1377198 - DNA, 15 bp, Homo sapiens
cccctctccccacta

SEQ ID NO: 1377199 - DNA, 15 bp, Homo sapiens
acccctctccccact

SEQ ID NO: 1377200 - DNA, 15 bp, Homo sapiens
aacccctctccccac

SEQ ID NO: 1377201 - DNA, 15 bp, Homo sapiens
gaacccctctcccca

SEQ ID NO: 1377202 - DNA, 15 bp, Homo sapiens
ggaacccctctcccc

SEQ ID NO: 1377203 - DNA, 15 bp, Homo sapiens
gggaacccctctccc

SEQ ID NO: 1377204 - DNA, 15 bp, Homo sapiens
cgggaacccctctcc

SEQ ID NO: 1377205 - DNA, 15 bp, Homo sapiens
tcgggaacccctctc

SEQ ID NO: 1377206 - DNA, 15 bp, Homo sapiens
ttcgggaacccctct

SEQ ID NO: 1377207 - DNA, 15 bp, Homo sapiens
cttcgggaacccctc

SEQ ID NO: 1377208 - DNA, 15 bp, Homo sapiens
ccttcgggaacccct

SEQ ID NO: 1377209 - DNA, 15 bp, Homo sapiens
gccttcgggaacccc

SEQ ID NO: 1377210 - DNA, 15 bp, Homo sapiens
tgccttcgggaaccc

SEQ ID NO: 1377211 - DNA, 15 bp, Homo sapiens
gtgccttcgggaacc

SEQ ID NO: 1377212 - DNA, 15 bp, Homo sapiens
agtgccttcgggaac

SEQ ID NO: 1377213 - DNA, 15 bp, Homo sapiens
gagtgccttcgggaa

SEQ ID NO: 1377214 - DNA, 15 bp, Homo sapiens
agagtgccttcggga

SEQ ID NO: 1377215 - DNA, 15 bp, Homo sapiens
aagagtgccttcggg

SEQ ID NO: 1377216 - DNA, 15 bp, Homo sapiens
caagagtgccttcgg

SEQ ID NO: 1377217 - DNA, 15 bp, Homo sapiens
ccaagagtgccttcg

SEQ ID NO: 1377218 - DNA, 15 bp, Homo sapiens
cccaagagtgccttc

SEQ ID NO: 1377219 - DNA, 15 bp, Homo sapiens
tcccaagagtgcctt

SEQ ID NO: 1377220 - DNA, 15 bp, Homo sapiens
ctcccaagagtgcct

SEQ ID NO: 1377221 - DNA, 15 bp, Homo sapiens
actcccaagagtgcc

SEQ ID NO: 1377222 - DNA, 15 bp, Homo sapiens
cactcccaagagtgc

SEQ ID NO: 1377223 - DNA, 15 bp, Homo sapiens
acactcccaagagtg

SEQ ID NO: 1377224 - DNA, 15 bp, Homo sapiens
tacactcccaagagt

SEQ ID NO: 1377225 - DNA, 15 bp, Homo sapiens
atacactcccaagag

SEQ ID NO: 1377226 - DNA, 15 bp, Homo sapiens
catacactcccaaga

SEQ ID NO: 1377227 - DNA, 15 bp, Homo sapiens
ccatacactcccaag

SEQ ID NO: 1377228 - DNA, 15 bp, Homo sapiens
tccatacactcccaa

SEQ ID NO: 1377229 - DNA, 15 bp, Homo sapiens
atccatacactccca

SEQ ID NO: 1377230 - DNA, 15 bp, Homo sapiens
catccatacactccc

SEQ ID NO: 1377231 - DNA, 15 bp, Homo sapiens
tcatccatacactcc

SEQ ID NO: 1377232 - DNA, 15 bp, Homo sapiens
gtcatccatacactc

SEQ ID NO: 1377233 - DNA, 15 bp, Homo sapiens
cgtcatccatacact

SEQ ID NO: 1377234 - DNA, 15 bp, Homo sapiens
acgtcatccatacac

SEQ ID NO: 1377235 - DNA, 15 bp, Homo sapiens
cacgtcatccataca

SEQ ID NO: 1377236 - DNA, 15 bp, Homo sapiens
acacgtcatccatac

SEQ ID NO: 1377237 - DNA, 15 bp, Homo sapiens
gacacgtcatccata

SEQ ID NO: 1377238 - DNA, 15 bp, Homo sapiens
tgacacgtcatccat

SEQ ID NO: 1377239 - DNA, 15 bp, Homo sapiens
ctgacacgtcatcca

SEQ ID NO: 1377240 - DNA, 15 bp, Homo sapiens
cctgacacgtcatcc

SEQ ID NO: 1377241 - DNA, 15 bp, Homo sapiens
acctgacacgtcatc

SEQ ID NO: 1377242 - DNA, 15 bp, Homo sapiens
gacctgacacgtcat

SEQ ID NO: 1377243 - DNA, 15 bp, Homo sapiens
tgacctgacacgtca

SEQ ID NO: 1377244 - DNA, 15 bp, Homo sapiens
gtgacctgacacgtc

SEQ ID NO: 1377245 - DNA, 15 bp, Homo sapiens
ggtgacctgacacgt

SEQ ID NO: 1377246 - DNA, 15 bp, Homo sapiens
tggtgacctgacacg

SEQ ID NO: 1377247 - DNA, 15 bp, Homo sapiens
ttggtgacctgacac

SEQ ID NO: 1377248 - DNA, 15 bp, Homo sapiens
tttggtgacctgaca

SEQ ID NO: 1377249 - DNA, 15 bp, Homo sapiens
atttggtgacctgac

SEQ ID NO: 1377250 - DNA, 15 bp, Homo sapiens
catttggtgacctga

SEQ ID NO: 1377251 - DNA, 15 bp, Homo sapiens
ccatttggtgacctg

SEQ ID NO: 1377252 - DNA, 15 bp, Homo sapiens
tccatttggtgacct

SEQ ID NO: 1377253 - DNA, 15 bp, Homo sapiens
atccatttggtgacc

SEQ ID NO: 1377254 - DNA, 15 bp, Homo sapiens
aatccatttggtgac

SEQ ID NO: 1377255 - DNA, 15 bp, Homo sapiens
caatccatttggtga

SEQ ID NO: 1377256 - DNA, 15 bp, Homo sapiens
acaatccatttggtg

SEQ ID NO: 1377257 - DNA, 15 bp, Homo sapiens
gacaatccatttggt

SEQ ID NO: 1377258 - DNA, 15 bp, Homo sapiens
cgacaatccatttgg

SEQ ID NO: 1377259 - DNA, 15 bp, Homo sapiens
tcgacaatccatttg

SEQ ID NO: 1377260 - DNA, 15 bp, Homo sapiens
ttcgacaatccattt

SEQ ID NO: 1377261 - DNA, 15 bp, Homo sapiens
cttcgacaatccatt

SEQ ID NO: 1377262 - DNA, 15 bp, Homo sapiens
ccttcgacaatccat

SEQ ID NO: 1377263 - DNA, 15 bp, Homo sapiens
cccttcgacaatcca

SEQ ID NO: 1377264 - DNA, 15 bp, Homo sapiens
tcccttcgacaatcc

SEQ ID NO: 1377265 - DNA, 15 bp, Homo sapiens
gtcccttcgacaatc

SEQ ID NO: 1377266 - DNA, 15 bp, Homo sapiens
ggtcccttcgacaat

SEQ ID NO: 1377267 - DNA, 15 bp, Homo sapiens
cggtcccttcgacaa

SEQ ID NO: 1377268 - DNA, 15 bp, Homo sapiens
ccggtcccttcgaca

SEQ ID NO: 1377269 - DNA, 15 bp, Homo sapiens
tccggtcccttcgac

SEQ ID NO: 1377270 - DNA, 15 bp, Homo sapiens
ctccggtcccttcga

SEQ ID NO: 1377271 - DNA, 15 bp, Homo sapiens
cctccggtcccttcg

SEQ ID NO: 1377272 - DNA, 15 bp, Homo sapiens
ccctccggtcccttc

SEQ ID NO: 1377273 - DNA, 15 bp, Homo sapiens
tccctccggtccctt

SEQ ID NO: 1377274 - DNA, 15 bp, Homo sapiens
ttccctccggtccct

SEQ ID NO: 1377275 - DNA, 15 bp, Homo sapiens
cttccctccggtccc

SEQ ID NO: 1377276 - DNA, 15 bp, Homo sapiens
tcttccctccggtcc

SEQ ID NO: 1377277 - DNA, 15 bp, Homo sapiens
ctcttccctccggtc

SEQ ID NO: 1377278 - DNA, 15 bp, Homo sapiens
cctcttccctccggt

SEQ ID NO: 1377279 - DNA, 15 bp, Homo sapiens
ccctcttccctccgg

SEQ ID NO: 1377280 - DNA, 15 bp, Homo sapiens
cccctcttccctccg

SEQ ID NO: 1377281 - DNA, 15 bp, Homo sapiens
tcccctcttccctcc

SEQ ID NO: 1377282 - DNA, 15 bp, Homo sapiens
ctcccctcttccctc

SEQ ID NO: 1377283 - DNA, 15 bp, Homo sapiens
tctcccctcttccct

SEQ ID NO: 1377284 - DNA, 15 bp, Homo sapiens
ctctcccctcttccc

SEQ ID NO: 1377285 - DNA, 15 bp, Homo sapiens
gctctcccctcttcc

SEQ ID NO: 1377286 - DNA, 15 bp, Homo sapiens
agctctcccctcttc

SEQ ID NO: 1377287 - DNA, 15 bp, Homo sapiens
cagctctcccctctt

SEQ ID NO: 1377288 - DNA, 15 bp, Homo sapiens
ccagctctcccctct

SEQ ID NO: 1377289 - DNA, 15 bp, Homo sapiens
tccagctctcccctc

SEQ ID NO: 1377290 - DNA, 15 bp, Homo sapiens
ttccagctctcccct

SEQ ID NO: 1377291 - DNA, 15 bp, Homo sapiens
attccagctctcccc

SEQ ID NO: 1377292 - DNA, 15 bp, Homo sapiens
aattccagctctccc

SEQ ID NO: 1377293 - DNA, 15 bp, Homo sapiens
aaattccagctctcc

SEQ ID NO: 1377294 - DNA, 15 bp, Homo sapiens
gaaattccagctctc

SEQ ID NO: 1377295 - DNA, 15 bp, Homo sapiens
agaaattccagctct

SEQ ID NO: 1377296 - DNA, 15 bp, Homo sapiens
cagaaattccagctc

SEQ ID NO: 1377297 - DNA, 15 bp, Homo sapiens
tcagaaattccagct

SEQ ID NO: 1377298 - DNA, 15 bp, Homo sapiens
ctcagaaattccagc

SEQ ID NO: 1377299 - DNA, 15 bp, Homo sapiens
cctcagaaattccag

SEQ ID NO: 1377300 - DNA, 15 bp, Homo sapiens
ccctcagaaattcca

SEQ ID NO: 1377301 - DNA, 15 bp, Homo sapiens
accctcagaaattcc

SEQ ID NO: 1377302 - DNA, 15 bp, Homo sapiens
aaccctcagaaattc

SEQ ID NO: 1377303 - DNA, 15 bp, Homo sapiens
aaaccctcagaaatt

SEQ ID NO: 1377304 - DNA, 15 bp, Homo sapiens
gaaaccctcagaaat

SEQ ID NO: 1377305 - DNA, 15 bp, Homo sapiens
cgaaaccctcagaaa

SEQ ID NO: 1377306 - DNA, 15 bp, Homo sapiens
ccgaaaccctcagaa

SEQ ID NO: 1377307 - DNA, 15 bp, Homo sapiens
accgaaaccctcaga

SEQ ID NO: 1377308 - DNA, 15 bp, Homo sapiens
aaccgaaaccctcag

SEQ ID NO: 1377309 - DNA, 15 bp, Homo sapiens
caaccgaaaccctca

SEQ ID NO: 1377310 - DNA, 15 bp, Homo sapiens
gcaaccgaaaccctc

SEQ ID NO: 1377311 - DNA, 15 bp, Homo sapiens
tgcaaccgaaaccct

SEQ ID NO: 1377312 - DNA, 15 bp, Homo sapiens
ctgcaaccgaaaccc

SEQ ID NO: 1377313 - DNA, 15 bp, Homo sapiens
actgcaaccgaaacc

SEQ ID NO: 1377314 - DNA, 15 bp, Homo sapiens
aactgcaaccgaaac

SEQ ID NO: 1377315 - DNA, 15 bp, Homo sapiens
aaactgcaaccgaaa

SEQ ID NO: 1377316 - DNA, 15 bp, Homo sapiens
aaaactgcaaccgaa

SEQ ID NO: 1377317 - DNA, 15 bp, Homo sapiens
gaaaactgcaaccga

SEQ ID NO: 1377318 - DNA, 15 bp, Homo sapiens
tgaaaactgcaaccg

SEQ ID NO: 1377319 - DNA, 15 bp, Homo sapiens
ctgaaaactgcaacc

SEQ ID NO: 1377320 - DNA, 15 bp, Homo sapiens
actgaaaactgcaac

SEQ ID NO: 1377321 - DNA, 15 bp, Homo sapiens
cactgaaaactgcaa

SEQ ID NO: 1377322 - DNA, 15 bp, Homo sapiens
tcactgaaaactgca

SEQ ID NO: 1377323 - DNA, 15 bp, Homo sapiens
atcactgaaaactgc

SEQ ID NO: 1377324 - DNA, 15 bp, Homo sapiens
gatcactgaaaactg

SEQ ID NO: 1377325 - DNA, 15 bp, Homo sapiens
agatcactgaaaact

SEQ ID NO: 1377326 - DNA, 15 bp, Homo sapiens
aagatcactgaaaac

SEQ ID NO: 1377327 - DNA, 15 bp, Homo sapiens
aaagatcactgaaaa

SEQ ID NO: 1377328 - DNA, 15 bp, Homo sapiens
caaagatcactgaaa

SEQ ID NO: 1377329 - DNA, 15 bp, Homo sapiens
gcaaagatcactgaa

SEQ ID NO: 1377330 - DNA, 15 bp, Homo sapiens
agcaaagatcactga

SEQ ID NO: 1377331 - DNA, 15 bp, Homo sapiens
gagcaaagatcactg

SEQ ID NO: 1377332 - DNA, 15 bp, Homo sapiens
cgagcaaagatcact

SEQ ID NO: 1377333 - DNA, 15 bp, Homo sapiens
acgagcaaagatcac

SEQ ID NO: 1377334 - DNA, 15 bp, Homo sapiens
gacgagcaaagatca

SEQ ID NO: 1377335 - DNA, 15 bp, Homo sapiens
agacgagcaaagatc

SEQ ID NO: 1377336 - DNA, 15 bp, Homo sapiens
gagacgagcaaagat

SEQ ID NO: 1377337 - DNA, 15 bp, Homo sapiens
ggagacgagcaaaga

SEQ ID NO: 1377338 - DNA, 15 bp, Homo sapiens
gggagacgagcaaag

SEQ ID NO: 1377339 - DNA, 15 bp, Homo sapiens
agggagacgagcaaa

SEQ ID NO: 1377340 - DNA, 15 bp, Homo sapiens
aagggagacgagcaa

SEQ ID NO: 1377341 - DNA, 15 bp, Homo sapiens
gaagggagacgagca

SEQ ID NO: 1377342 - DNA, 15 bp, Homo sapiens
ggaagggagacgagc

SEQ ID NO: 1377343 - DNA, 15 bp, Homo sapiens
gggaagggagacgag

SEQ ID NO: 1377344 - DNA, 15 bp, Homo sapiens
agggaagggagacga

SEQ ID NO: 1377345 - DNA, 15 bp, Homo sapiens
cagggaagggagacg

SEQ ID NO: 1377346 - DNA, 15 bp, Homo sapiens
acagggaagggagac

SEQ ID NO: 1377347 - DNA, 15 bp, Homo sapiens
tacagggaagggaga

SEQ ID NO: 1377348 - DNA, 15 bp, Homo sapiens
ttacagggaagggag

SEQ ID NO: 1377349 - DNA, 15 bp, Homo sapiens
tttacagggaaggga

SEQ ID NO: 1377350 - DNA, 15 bp, Homo sapiens
ctttacagggaaggg

SEQ ID NO: 1377351 - DNA, 15 bp, Homo sapiens
gctttacagggaagg

SEQ ID NO: 1377352 - DNA, 15 bp, Homo sapiens
agctttacagggaag

SEQ ID NO: 1377353 - DNA, 15 bp, Homo sapiens
tagctttacagggaa

SEQ ID NO: 1377354 - DNA, 15 bp, Homo sapiens
gtagctttacaggga

SEQ ID NO: 1377355 - DNA, 15 bp, Homo sapiens
tgtagctttacaggg

SEQ ID NO: 1377356 - DNA, 15 bp, Homo sapiens
atgtagctttacagg

SEQ ID NO: 1377357 - DNA, 15 bp, Homo sapiens
tatgtagctttacag

SEQ ID NO: 1377358 - DNA, 15 bp, Homo sapiens
atatgtagctttaca

SEQ ID NO: 1377359 - DNA, 15 bp, Homo sapiens
catatgtagctttac

SEQ ID NO: 1377360 - DNA, 15 bp, Homo sapiens
gcatatgtagcttta

SEQ ID NO: 1377361 - DNA, 15 bp, Homo sapiens
agcatatgtagcttt

SEQ ID NO: 1377362 - DNA, 15 bp, Homo sapiens
gagcatatgtagctt

SEQ ID NO: 1377363 - DNA, 15 bp, Homo sapiens
tgagcatatgtagct

SEQ ID NO: 1377364 - DNA, 15 bp, Homo sapiens
ctgagcatatgtagc

SEQ ID NO: 1377365 - DNA, 15 bp, Homo sapiens
gctgagcatatgtag

SEQ ID NO: 1377366 - DNA, 15 bp, Homo sapiens
tgctgagcatatgta

SEQ ID NO: 1377367 - DNA, 15 bp, Homo sapiens
ttgctgagcatatgt

SEQ ID NO: 1377368 - DNA, 15 bp, Homo sapiens
cttgctgagcatatg

SEQ ID NO: 1377369 - DNA, 15 bp, Homo sapiens
acttgctgagcatat

SEQ ID NO: 1377370 - DNA, 15 bp, Homo sapiens
cacttgctgagcata

SEQ ID NO: 1377371 - DNA, 15 bp, Homo sapiens
gcacttgctgagcat

SEQ ID NO: 1377372 - DNA, 15 bp, Homo sapiens
ggcacttgctgagca

SEQ ID NO: 1377373 - DNA, 15 bp, Homo sapiens
cggcacttgctgagc

SEQ ID NO: 1377374 - DNA, 15 bp, Homo sapiens
gcggcacttgctgag

SEQ ID NO: 1377375 - DNA, 15 bp, Homo sapiens
cgcggcacttgctga

SEQ ID NO: 1377376 - DNA, 15 bp, Homo sapiens
acgcggcacttgctg

SEQ ID NO: 1377377 - DNA, 15 bp, Homo sapiens
cacgcggcacttgct

SEQ ID NO: 1377378 - DNA, 15 bp, Homo sapiens
gcacgcggcacttgc

SEQ ID NO: 1377379 - DNA, 15 bp, Homo sapiens
ggcacgcggcacttg

SEQ ID NO: 1377380 - DNA, 15 bp, Homo sapiens
aggcacgcggcactt

SEQ ID NO: 1377381 - DNA, 15 bp, Homo sapiens
gaggcacgcggcact

SEQ ID NO: 1377382 - DNA, 15 bp, Homo sapiens
ggaggcacgcggcac

SEQ ID NO: 1377383 - DNA, 15 bp, Homo sapiens
gggaggcacgcggca

SEQ ID NO: 1377384 - DNA, 15 bp, Homo sapiens
tgggaggcacgcggc

SEQ ID NO: 1377385 - DNA, 15 bp, Homo sapiens
atgggaggcacgcgg

SEQ ID NO: 1377386 - DNA, 15 bp, Homo sapiens
gatgggaggcacgcg

SEQ ID NO: 1377387 - DNA, 15 bp, Homo sapiens
ggatgggaggcacgc

SEQ ID NO: 1377388 - DNA, 15 bp, Homo sapiens
aggatgggaggcacg

SEQ ID NO: 1377389 - DNA, 15 bp, Homo sapiens
aaggatgggaggcac

SEQ ID NO: 1377390 - DNA, 15 bp, Homo sapiens
caaggatgggaggca

SEQ ID NO: 1377391 - DNA, 15 bp, Homo sapiens
ccaaggatgggaggc

SEQ ID NO: 1377392 - DNA, 15 bp, Homo sapiens
accaaggatgggagg

SEQ ID NO: 1377393 - DNA, 15 bp, Homo sapiens
gaccaaggatgggag

SEQ ID NO: 1377394 - DNA, 15 bp, Homo sapiens
cgaccaaggatggga

SEQ ID NO: 1377395 - DNA, 15 bp, Homo sapiens
ccgaccaaggatggg

SEQ ID NO: 1377396 - DNA, 15 bp, Homo sapiens
accgaccaaggatgg

SEQ ID NO: 1377397 - DNA, 15 bp, Homo sapiens
caccgaccaaggatg

SEQ ID NO: 1377398 - DNA, 15 bp, Homo sapiens
ccaccgaccaaggat

SEQ ID NO: 1377399 - DNA, 15 bp, Homo sapiens
accaccgaccaagga

SEQ ID NO: 1377400 - DNA, 15 bp, Homo sapiens
taccaccgaccaagg

SEQ ID NO: 1377401 - DNA, 15 bp, Homo sapiens
ttaccaccgaccaag

SEQ ID NO: 1377402 - DNA, 15 bp, Homo sapiens
tttaccaccgaccaa

SEQ ID NO: 1377403 - DNA, 15 bp, Homo sapiens
atttaccaccgacca

SEQ ID NO: 1377404 - DNA, 15 bp, Homo sapiens
catttaccaccgacc

SEQ ID NO: 1377405 - DNA, 15 bp, Homo sapiens
gcatttaccaccgac

SEQ ID NO: 1377406 - DNA, 15 bp, Homo sapiens
tgcatttaccaccga

SEQ ID NO: 1377407 - DNA, 15 bp, Homo sapiens
ctgcatttaccaccg

SEQ ID NO: 1377408 - DNA, 15 bp, Homo sapiens
cctgcatttaccacc

SEQ ID NO: 1377409 - DNA, 15 bp, Homo sapiens
tcctgcatttaccac

SEQ ID NO: 1377410 - DNA, 15 bp, Homo sapiens
ctcctgcatttacca

SEQ ID NO: 1377411 - DNA, 15 bp, Homo sapiens
cctcctgcatttacc

SEQ ID NO: 1377412 - DNA, 15 bp, Homo sapiens
acctcctgcatttac

SEQ ID NO: 1377413 - DNA, 15 bp, Homo sapiens
tacctcctgcattta

SEQ ID NO: 1377414 - DNA, 15 bp, Homo sapiens
ttacctcctgcattt

SEQ ID NO: 1377415 - DNA, 15 bp, Homo sapiens
attacctcctgcatt

SEQ ID NO: 1377416 - DNA, 15 bp, Homo sapiens
aattacctcctgcat

SEQ ID NO: 1377417 - DNA, 15 bp, Homo sapiens
taattacctcctgca

SEQ ID NO: 1377418 - DNA, 15 bp, Homo sapiens
ttaattacctcctgc

SEQ ID NO: 1377419 - DNA, 15 bp, Homo sapiens
gttaattacctcctg

SEQ ID NO: 1377420 - DNA, 15 bp, Homo sapiens
tgttaattacctcct

SEQ ID NO: 1377421 - DNA, 15 bp, Homo sapiens
ctgttaattacctcc

SEQ ID NO: 1377422 - DNA, 15 bp, Homo sapiens
cctgttaattacctc

SEQ ID NO: 1377423 - DNA, 15 bp, Homo sapiens
tcctgttaattacct

SEQ ID NO: 1377424 - DNA, 15 bp, Homo sapiens
atcctgttaattacc

SEQ ID NO: 1377425 - DNA, 15 bp, Homo sapiens
gatcctgttaattac

SEQ ID NO: 1377426 - DNA, 15 bp, Homo sapiens
agatcctgttaatta

SEQ ID NO: 1377427 - DNA, 15 bp, Homo sapiens
aagatcctgttaatt

SEQ ID NO: 1377428 - DNA, 15 bp, Homo sapiens
gaagatcctgttaat

SEQ ID NO: 1377429 - DNA, 15 bp, Homo sapiens
tgaagatcctgttaa

SEQ ID NO: 1377430 - DNA, 15 bp, Homo sapiens
gtgaagatcctgtta

SEQ ID NO: 1377431 - DNA, 15 bp, Homo sapiens
tgtgaagatcctgtt

SEQ ID NO: 1377432 - DNA, 15 bp, Homo sapiens
ttgtgaagatcctgt

SEQ ID NO: 1377433 - DNA, 15 bp, Homo sapiens
tttgtgaagatcctg

SEQ ID NO: 1377434 - DNA, 15 bp, Homo sapiens
gtttgtgaagatcct

SEQ ID NO: 1377435 - DNA, 15 bp, Homo sapiens
agtttgtgaagatcc

SEQ ID NO: 1377436 - DNA, 15 bp, Homo sapiens
aagtttgtgaagatc

SEQ ID NO: 1377437 - DNA, 15 bp, Homo sapiens
caagtttgtgaagat

SEQ ID NO: 1377438 - DNA, 15 bp, Homo sapiens
ccaagtttgtgaaga

SEQ ID NO: 1377439 - DNA, 15 bp, Homo sapiens
tccaagtttgtgaag

SEQ ID NO: 1377440 - DNA, 15 bp, Homo sapiens
ctccaagtttgtgaa

SEQ ID NO: 1377441 - DNA, 15 bp, Homo sapiens
gctccaagtttgtga

SEQ ID NO: 1377442 - DNA, 15 bp, Homo sapiens
ggctccaagtttgtg

SEQ ID NO: 1377443 - DNA, 15 bp, Homo sapiens
tggctccaagtttgt

SEQ ID NO: 1377444 - DNA, 15 bp, Homo sapiens
ctggctccaagtttg

SEQ ID NO: 1377445 - DNA, 15 bp, Homo sapiens
gctggctccaagttt

SEQ ID NO: 1377446 - DNA, 15 bp, Homo sapiens
ggctggctccaagtt

SEQ ID NO: 1377447 - DNA, 15 bp, Homo sapiens
gggctggctccaagt

SEQ ID NO: 1377448 - DNA, 15 bp, Homo sapiens
tgggctggctccaag

SEQ ID NO: 1377449 - DNA, 15 bp, Homo sapiens
gtgggctggctccaa

SEQ ID NO: 1377450 - DNA, 15 bp, Homo sapiens
agtgggctggctcca

SEQ ID NO: 1377451 - DNA, 15 bp, Homo sapiens
cagtgggctggctcc

SEQ ID NO: 1377452 - DNA, 15 bp, Homo sapiens
tcagtgggctggctc

SEQ ID NO: 1377453 - DNA, 15 bp, Homo sapiens
ctcagtgggctggct

SEQ ID NO: 1377454 - DNA, 15 bp, Homo sapiens
actcagtgggctggc

SEQ ID NO: 1377455 - DNA, 15 bp, Homo sapiens
gactcagtgggctgg

SEQ ID NO: 1377456 - DNA, 15 bp, Homo sapiens
cgactcagtgggctg

SEQ ID NO: 1377457 - DNA, 15 bp, Homo sapiens
acgactcagtgggct

SEQ ID NO: 1377458 - DNA, 15 bp, Homo sapiens
aacgactcagtgggc

SEQ ID NO: 1377459 - DNA, 15 bp, Homo sapiens
taacgactcagtggg

SEQ ID NO: 1377460 - DNA, 15 bp, Homo sapiens
ttaacgactcagtgg

SEQ ID NO: 1377461 - DNA, 15 bp, Homo sapiens
tttaacgactcagtg

SEQ ID NO: 1377462 - DNA, 15 bp, Homo sapiens
ttttaacgactcagt

SEQ ID NO: 1377463 - DNA, 15 bp, Homo sapiens
tttttaacgactcag

SEQ ID NO: 1377464 - DNA, 15 bp, Homo sapiens
ttttttaacgactca

SEQ ID NO: 1377465 - DNA, 15 bp, Homo sapiens
tttttttaacgactc

SEQ ID NO: 1377466 - DNA, 15 bp, Homo sapiens
gtttttttaacgact

SEQ ID NO: 1377467 - DNA, 15 bp, Homo sapiens
tgtttttttaacgac

SEQ ID NO: 1377468 - DNA, 15 bp, Homo sapiens
gtgtttttttaacga

SEQ ID NO: 1377469 - DNA, 15 bp, Homo sapiens
ggtgtttttttaacg

SEQ ID NO: 1377470 - DNA, 15 bp, Homo sapiens
gggtgtttttttaac

SEQ ID NO: 1377471 - DNA, 15 bp, Homo sapiens
cgggtgtttttttaa

SEQ ID NO: 1377472 - DNA, 15 bp, Homo sapiens
gcgggtgttttttta

SEQ ID NO: 1377473 - DNA, 15 bp, Homo sapiens
tgcgggtgttttttt

SEQ ID NO: 1377474 - DNA, 15 bp, Homo sapiens
ttgcgggtgtttttt

SEQ ID NO: 1377475 - DNA, 15 bp, Homo sapiens
tttgcgggtgttttt

SEQ ID NO: 1377476 - DNA, 15 bp, Homo sapiens
ctttgcgggtgtttt

SEQ ID NO: 1377477 - DNA, 15 bp, Homo sapiens
tctttgcgggtgttt

SEQ ID NO: 1377478 - DNA, 15 bp, Homo sapiens
ttctttgcgggtgtt

SEQ ID NO: 1377479 - DNA, 15 bp, Homo sapiens
tttctttgcgggtgt

SEQ ID NO: 1377480 - DNA, 15 bp, Homo sapiens
ttttctttgcgggtg

SEQ ID NO: 1377481 - DNA, 15 bp, Homo sapiens
gttttctttgcgggt

SEQ ID NO: 1377482 - DNA, 15 bp, Homo sapiens
tgttttctttgcggg

SEQ ID NO: 1377483 - DNA, 15 bp, Homo sapiens
gtgttttctttgcgg

SEQ ID NO: 1377484 - DNA, 15 bp, Homo sapiens
tgtgttttctttgcg

SEQ ID NO: 1377485 - DNA, 15 bp, Homo sapiens
gtgtgttttctttgc

SEQ ID NO: 1377486 - DNA, 15 bp, Homo sapiens
cgtgtgttttctttg

SEQ ID NO: 1377487 - DNA, 15 bp, Homo sapiens
tcgtgtgttttcttt

SEQ ID NO: 1377488 - DNA, 15 bp, Homo sapiens
ctcgtgtgttttctt

SEQ ID NO: 1377489 - DNA, 15 bp, Homo sapiens
gctcgtgtgttttct

SEQ ID NO: 1377490 - DNA, 15 bp, Homo sapiens
ggctcgtgtgttttc

SEQ ID NO: 1377491 - DNA, 15 bp, Homo sapiens
aggctcgtgtgtttt

SEQ ID NO: 1377492 - DNA, 15 bp, Homo sapiens
aaggctcgtgtgttt

SEQ ID NO: 1377493 - DNA, 15 bp, Homo sapiens
taaggctcgtgtgtt

SEQ ID NO: 1377494 - DNA, 15 bp, Homo sapiens
ttaaggctcgtgtgt

SEQ ID NO: 1377495 - DNA, 15 bp, Homo sapiens
gttaaggctcgtgtg

SEQ ID NO: 1377496 - DNA, 15 bp, Homo sapiens
tgttaaggctcgtgt

SEQ ID NO: 1377497 - DNA, 15 bp, Homo sapiens
gtgttaaggctcgtg

SEQ ID NO: 1377498 - DNA, 15 bp, Homo sapiens
agtgttaaggctcgt

SEQ ID NO: 1377499 - DNA, 15 bp, Homo sapiens
gagtgttaaggctcg

SEQ ID NO: 1377500 - DNA, 15 bp, Homo sapiens
ggagtgttaaggctc

SEQ ID NO: 1377501 - DNA, 15 bp, Homo sapiens
tggagtgttaaggct

SEQ ID NO: 1377502 - DNA, 15 bp, Homo sapiens
ctggagtgttaaggc

SEQ ID NO: 1377503 - DNA, 15 bp, Homo sapiens
tctggagtgttaagg

SEQ ID NO: 1377504 - DNA, 15 bp, Homo sapiens
ctctggagtgttaag

SEQ ID NO: 1377505 - DNA, 15 bp, Homo sapiens
tctctggagtgttaa

SEQ ID NO: 1377506 - DNA, 15 bp, Homo sapiens
ctctctggagtgtta

SEQ ID NO: 1377507 - DNA, 15 bp, Homo sapiens
actctctggagtgtt

SEQ ID NO: 1377508 - DNA, 15 bp, Homo sapiens
aactctctggagtgt

SEQ ID NO: 1377509 - DNA, 15 bp, Homo sapiens
gaactctctggagtg

SEQ ID NO: 1377510 - DNA, 15 bp, Homo sapiens
ggaactctctggagt

SEQ ID NO: 1377511 - DNA, 15 bp, Homo sapiens
cggaactctctggag

SEQ ID NO: 1377512 - DNA, 15 bp, Homo sapiens
tcggaactctctgga

SEQ ID NO: 1377513 - DNA, 15 bp, Homo sapiens
ttcggaactctctgg

SEQ ID NO: 1377514 - DNA, 15 bp, Homo sapiens
tttcggaactctctg

SEQ ID NO: 1377515 - DNA, 15 bp, Homo sapiens
gtttcggaactctct

SEQ ID NO: 1377516 - DNA, 15 bp, Homo sapiens
tgtttcggaactctc

SEQ ID NO: 1377517 - DNA, 15 bp, Homo sapiens
gtgtttcggaactct

SEQ ID NO: 1377518 - DNA, 15 bp, Homo sapiens
tgtgtttcggaactc

SEQ ID NO: 1377519 - DNA, 15 bp, Homo sapiens
ttgtgtttcggaact

SEQ ID NO: 1377520 - DNA, 15 bp, Homo sapiens
tttgtgtttcggaac

SEQ ID NO: 1377521 - DNA, 15 bp, Homo sapiens
ctttgtgtttcggaa

SEQ ID NO: 1377522 - DNA, 15 bp, Homo sapiens
actttgtgtttcgga

SEQ ID NO: 1377523 - DNA, 15 bp, Homo sapiens
tactttgtgtttcgg

SEQ ID NO: 1377524 - DNA, 15 bp, Homo sapiens
ttactttgtgtttcg

SEQ ID NO: 1377525 - DNA, 15 bp, Homo sapiens
tttactttgtgtttc

SEQ ID NO: 1377526 - DNA, 15 bp, Homo sapiens
atttactttgtgttt

SEQ ID NO: 1377527 - DNA, 15 bp, Homo sapiens
aatttactttgtgtt

SEQ ID NO: 1377528 - DNA, 15 bp, Homo sapiens
aaatttactttgtgt

SEQ ID NO: 1377529 - DNA, 15 bp, Homo sapiens
gaaatttactttgtg

SEQ ID NO: 1377530 - DNA, 15 bp, Homo sapiens
cgaaatttactttgt

SEQ ID NO: 1377531 - DNA, 15 bp, Homo sapiens
tcgaaatttactttg

SEQ ID NO: 1377532 - DNA, 15 bp, Homo sapiens
ctcgaaatttacttt

SEQ ID NO: 1377533 - DNA, 15 bp, Homo sapiens
gctcgaaatttactt

SEQ ID NO: 1377534 - DNA, 15 bp, Homo sapiens
agctcgaaatttact

SEQ ID NO: 1377535 - DNA, 15 bp, Homo sapiens
tagctcgaaatttac

SEQ ID NO: 1377536 - DNA, 15 bp, Homo sapiens
ttagctcgaaattta

SEQ ID NO: 1377537 - DNA, 15 bp, Homo sapiens
cttagctcgaaattt

SEQ ID NO: 1377538 - DNA, 15 bp, Homo sapiens
ccttagctcgaaatt

SEQ ID NO: 1377539 - DNA, 15 bp, Homo sapiens
cccttagctcgaaat

SEQ ID NO: 1377540 - DNA, 15 bp, Homo sapiens
acccttagctcgaaa

SEQ ID NO: 1377541 - DNA, 15 bp, Homo sapiens
aacccttagctcgaa

SEQ ID NO: 1377542 - DNA, 15 bp, Homo sapiens
taacccttagctcga

SEQ ID NO: 1377543 - DNA, 15 bp, Homo sapiens
gtaacccttagctcg

SEQ ID NO: 1377544 - DNA, 15 bp, Homo sapiens
tgtaacccttagctc

SEQ ID NO: 1377545 - DNA, 15 bp, Homo sapiens
ctgtaacccttagct

SEQ ID NO: 1377546 - DNA, 15 bp, Homo sapiens
actgtaacccttagc

SEQ ID NO: 1377547 - DNA, 15 bp, Homo sapiens
gactgtaacccttag

SEQ ID NO: 1377548 - DNA, 15 bp, Homo sapiens
ggactgtaaccctta

SEQ ID NO: 1377549 - DNA, 15 bp, Homo sapiens
aggactgtaaccctt

SEQ ID NO: 1377550 - DNA, 15 bp, Homo sapiens
aaggactgtaaccct

SEQ ID NO: 1377551 - DNA, 15 bp, Homo sapiens
aaaggactgtaaccc

SEQ ID NO: 1377552 - DNA, 15 bp, Homo sapiens
taaaggactgtaacc

SEQ ID NO: 1377553 - DNA, 15 bp, Homo sapiens
ttaaaggactgtaac

SEQ ID NO: 1377554 - DNA, 15 bp, Homo sapiens
tttaaaggactgtaa

SEQ ID NO: 1377555 - DNA, 15 bp, Homo sapiens
atttaaaggactgta

SEQ ID NO: 1377556 - DNA, 15 bp, Homo sapiens
gatttaaaggactgt

SEQ ID NO: 1377557 - DNA, 15 bp, Homo sapiens
agatttaaaggactg

SEQ ID NO: 1377558 - DNA, 15 bp, Homo sapiens
cagatttaaaggact

SEQ ID NO: 1377559 - DNA, 15 bp, Homo sapiens
ccagatttaaaggac

SEQ ID NO: 1377560 - DNA, 15 bp, Homo sapiens
tccagatttaaagga

SEQ ID NO: 1377561 - DNA, 15 bp, Homo sapiens
ttccagatttaaagg

SEQ ID NO: 1377562 - DNA, 15 bp, Homo sapiens
tttccagatttaaag

SEQ ID NO: 1377563 - DNA, 15 bp, Homo sapiens
atttccagatttaaa

SEQ ID NO: 1377564 - DNA, 15 bp, Homo sapiens
aatttccagatttaa

SEQ ID NO: 1377565 - DNA, 15 bp, Homo sapiens
aaatttccagattta

SEQ ID NO: 1377566 - DNA, 15 bp, Homo sapiens
gaaatttccagattt

SEQ ID NO: 1377567 - DNA, 15 bp, Homo sapiens
tgaaatttccagatt

SEQ ID NO: 1377568 - DNA, 15 bp, Homo sapiens
ttgaaatttccagat

SEQ ID NO: 1377569 - DNA, 15 bp, Homo sapiens
cttgaaatttccaga

SEQ ID NO: 1377570 - DNA, 15 bp, Homo sapiens
ccttgaaatttccag

SEQ ID NO: 1377571 - DNA, 15 bp, Homo sapiens
accttgaaatttcca

SEQ ID NO: 1377572 - DNA, 15 bp, Homo sapiens
taccttgaaatttcc

SEQ ID NO: 1377573 - DNA, 15 bp, Homo sapiens
ctaccttgaaatttc

SEQ ID NO: 1377574 - DNA, 15 bp, Homo sapiens
tctaccttgaaattt

SEQ ID NO: 1377575 - DNA, 15 bp, Homo sapiens
ctctaccttgaaatt

SEQ ID NO: 1377576 - DNA, 15 bp, Homo sapiens
actctaccttgaaat

SEQ ID NO: 1377577 - DNA, 15 bp, Homo sapiens
cactctaccttgaaa

SEQ ID NO: 1377578 - DNA, 15 bp, Homo sapiens
acactctaccttgaa

SEQ ID NO: 1377579 - DNA, 15 bp, Homo sapiens
aacactctaccttga

SEQ ID NO: 1377580 - DNA, 15 bp, Homo sapiens
aaacactctaccttg

SEQ ID NO: 1377581 - DNA, 15 bp, Homo sapiens
aaaacactctacctt

SEQ ID NO: 1377582 - DNA, 15 bp, Homo sapiens
aaaaacactctacct

SEQ ID NO: 1377583 - DNA, 15 bp, Homo sapiens
caaaaacactctacc

SEQ ID NO: 1377584 - DNA, 15 bp, Homo sapiens
acaaaaacactctac

SEQ ID NO: 1377585 - DNA, 15 bp, Homo sapiens
aacaaaaacactcta

SEQ ID NO: 1377586 - DNA, 15 bp, Homo sapiens
aaacaaaaacactct

SEQ ID NO: 1377587 - DNA, 15 bp, Homo sapiens
aaaacaaaaacactc

SEQ ID NO: 1377588 - DNA, 15 bp, Homo sapiens
aaaaacaaaaacact

SEQ ID NO: 1377589 - DNA, 15 bp, Homo sapiens
caaaaacaaaaacac

SEQ ID NO: 1377590 - DNA, 15 bp, Homo sapiens
taaaacaaaaacaaa

SEQ ID NO: 1377591 - DNA, 15 bp, Homo sapiens
ttaaaacaaaaacaa

SEQ ID NO: 1377592 - DNA, 15 bp, Homo sapiens
tttaaaacaaaaaca

SEQ ID NO: 1377593 - DNA, 15 bp, Homo sapiens
atttaaaacaaaaac

SEQ ID NO: 1377594 - DNA, 15 bp, Homo sapiens
aatttaaaacaaaaa

SEQ ID NO: 1377595 - DNA, 15 bp, Homo sapiens
aaatttaaaacaaaa

SEQ ID NO: 1377596 - DNA, 15 bp, Homo sapiens
aaaatttaaaacaaa

SEQ ID NO: 1377597 - DNA, 15 bp, Homo sapiens
taaaatttaaaacaa

SEQ ID NO: 1377598 - DNA, 15 bp, Homo sapiens
ttaaaatttaaaaca

SEQ ID NO: 1377599 - DNA, 15 bp, Homo sapiens
attaaaatttaaaac

SEQ ID NO: 1377600 - DNA, 15 bp, Homo sapiens
aattaaaatttaaaa

SEQ ID NO: 1377601 - DNA, 15 bp, Homo sapiens
aaattaaaatttaaa

SEQ ID NO: 1377602 - DNA, 15 bp, Homo sapiens
gaaattaaaatttaa

SEQ ID NO: 1377603 - DNA, 15 bp, Homo sapiens
tgaaattaaaattta

SEQ ID NO: 1377604 - DNA, 15 bp, Homo sapiens
gtgaaattaaaattt

SEQ ID NO: 1377605 - DNA, 15 bp, Homo sapiens
tgtgaaattaaaatt

SEQ ID NO: 1377606 - DNA, 15 bp, Homo sapiens
ctgtgaaattaaaat

SEQ ID NO: 1377607 - DNA, 15 bp, Homo sapiens
actgtgaaattaaaa

SEQ ID NO: 1377608 - DNA, 15 bp, Homo sapiens
tactgtgaaattaaa

SEQ ID NO: 1377609 - DNA, 15 bp, Homo sapiens
gtactgtgaaattaa

SEQ ID NO: 1377610 - DNA, 15 bp, Homo sapiens
agtactgtgaaatta

SEQ ID NO: 1377611 - DNA, 15 bp, Homo sapiens
cagtactgtgaaatt

SEQ ID NO: 1377612 - DNA, 15 bp, Homo sapiens
ccagtactgtgaaat

SEQ ID NO: 1377613 - DNA, 15 bp, Homo sapiens
cccagtactgtgaaa

SEQ ID NO: 1377614 - DNA, 15 bp, Homo sapiens
tcccagtactgtgaa

SEQ ID NO: 1377615 - DNA, 15 bp, Homo sapiens
ttcccagtactgtga

SEQ ID NO: 1377616 - DNA, 15 bp, Homo sapiens
tttcccagtactgtg

SEQ ID NO: 1377617 - DNA, 15 bp, Homo sapiens
atttcccagtactgt

SEQ ID NO: 1377618 - DNA, 15 bp, Homo sapiens
aatttcccagtactg

SEQ ID NO: 1377619 - DNA, 15 bp, Homo sapiens
gaatttcccagtact

SEQ ID NO: 1377620 - DNA, 15 bp, Homo sapiens
agaatttcccagtac

SEQ ID NO: 1377621 - DNA, 15 bp, Homo sapiens
aagaatttcccagta

SEQ ID NO: 1377622 - DNA, 15 bp, Homo sapiens
taagaatttcccagt

SEQ ID NO: 1377623 - DNA, 15 bp, Homo sapiens
gtaagaatttcccag

SEQ ID NO: 1377624 - DNA, 15 bp, Homo sapiens
tgtaagaatttccca

SEQ ID NO: 1377625 - DNA, 15 bp, Homo sapiens
ctgtaagaatttccc

SEQ ID NO: 1377626 - DNA, 15 bp, Homo sapiens
actgtaagaatttcc

SEQ ID NO: 1377627 - DNA, 15 bp, Homo sapiens
gactgtaagaatttc

SEQ ID NO: 1377628 - DNA, 15 bp, Homo sapiens
ggactgtaagaattt

SEQ ID NO: 1377629 - DNA, 15 bp, Homo sapiens
aggactgtaagaatt

SEQ ID NO: 1377630 - DNA, 15 bp, Homo sapiens
caggactgtaagaat

SEQ ID NO: 1377631 - DNA, 15 bp, Homo sapiens
tcaggactgtaagaa

SEQ ID NO: 1377632 - DNA, 15 bp, Homo sapiens
ttcaggactgtaaga

SEQ ID NO: 1377633 - DNA, 15 bp, Homo sapiens
cttcaggactgtaag

SEQ ID NO: 1377634 - DNA, 15 bp, Homo sapiens
tcttcaggactgtaa

SEQ ID NO: 1377635 - DNA, 15 bp, Homo sapiens
atcttcaggactgta

SEQ ID NO: 1377636 - DNA, 15 bp, Homo sapiens
tatcttcaggactgt

SEQ ID NO: 1377637 - DNA, 15 bp, Homo sapiens
atatcttcaggactg

SEQ ID NO: 1377638 - DNA, 15 bp, Homo sapiens
tatatcttcaggact

SEQ ID NO: 1377639 - DNA, 15 bp, Homo sapiens
atatatcttcaggac

SEQ ID NO: 1377640 - DNA, 15 bp, Homo sapiens
tatatatcttcagga

SEQ ID NO: 1377641 - DNA, 15 bp, Homo sapiens
gtatatatcttcagg

SEQ ID NO: 1377642 - DNA, 15 bp, Homo sapiens
tgtatatatcttcag

SEQ ID NO: 1377643 - DNA, 15 bp, Homo sapiens
atgtatatatcttca

SEQ ID NO: 1377644 - DNA, 15 bp, Homo sapiens
tatgtatatatcttc

SEQ ID NO: 1377645 - DNA, 15 bp, Homo sapiens
atatgtatatatctt

SEQ ID NO: 1377646 - DNA, 15 bp, Homo sapiens
catatgtatatatct

SEQ ID NO: 1377647 - DNA, 15 bp, Homo sapiens
acatatgtatatatc

SEQ ID NO: 1377648 - DNA, 15 bp, Homo sapiens
gtacatatgtatata

SEQ ID NO: 1377649 - DNA, 15 bp, Homo sapiens
tgtacatatgtatat

SEQ ID NO: 1377650 - DNA, 15 bp, Homo sapiens
gtgtacatatgtata

SEQ ID NO: 1377651 - DNA, 15 bp, Homo sapiens
tgtgtacatatgtat

SEQ ID NO: 1377652 - DNA, 15 bp, Homo sapiens
atgtgtacatatgta

SEQ ID NO: 1377653 - DNA, 15 bp, Homo sapiens
tatgtgtacatatgt

SEQ ID NO: 1377654 - DNA, 15 bp, Homo sapiens
atatgtgtacatatg

SEQ ID NO: 1377655 - DNA, 15 bp, Homo sapiens
tatatgtgtacatat

SEQ ID NO: 1377656 - DNA, 15 bp, Homo sapiens
atatatgtgtacata

SEQ ID NO: 1377657 - DNA, 15 bp, Homo sapiens
tatatatgtgtacat

SEQ ID NO: 1377658 - DNA, 15 bp, Homo sapiens
atatatatgtgtaca

SEQ ID NO: 1377659 - DNA, 15 bp, Homo sapiens
gatatatatgtgtac

SEQ ID NO: 1377660 - DNA, 15 bp, Homo sapiens
agatatatatgtgta

SEQ ID NO: 1377661 - DNA, 15 bp, Homo sapiens
taggacaatttgagt

SEQ ID NO: 1377662 - DNA, 15 bp, Homo sapiens
ctaggacaatttgag

SEQ ID NO: 1377663 - DNA, 15 bp, Homo sapiens
tctaggacaatttga

SEQ ID NO: 1377664 - DNA, 15 bp, Homo sapiens
atctaggacaatttg

SEQ ID NO: 1377665 - DNA, 15 bp, Homo sapiens
aatctaggacaattt

SEQ ID NO: 1377666 - DNA, 15 bp, Homo sapiens
aaatctaggacaatt

SEQ ID NO: 1377667 - DNA, 15 bp, Homo sapiens
caaatctaggacaat

SEQ ID NO: 1377668 - DNA, 15 bp, Homo sapiens
ccaaatctaggacaa

SEQ ID NO: 1377669 - DNA, 15 bp, Homo sapiens
gccaaatctaggaca

SEQ ID NO: 1377670 - DNA, 15 bp, Homo sapiens
ggccaaatctaggac

SEQ ID NO: 1377671 - DNA, 15 bp, Homo sapiens
gggccaaatctagga

SEQ ID NO: 1377672 - DNA, 15 bp, Homo sapiens
tgggccaaatctagg

SEQ ID NO: 1377673 - DNA, 15 bp, Homo sapiens
atgggccaaatctag

SEQ ID NO: 1377674 - DNA, 15 bp, Homo sapiens
catgggccaaatcta

SEQ ID NO: 1377675 - DNA, 15 bp, Homo sapiens
ccatgggccaaatct

SEQ ID NO: 1377676 - DNA, 15 bp, Homo sapiens
cccatgggccaaatc

SEQ ID NO: 1377677 - DNA, 15 bp, Homo sapiens
tcccatgggccaaat

SEQ ID NO: 1377678 - DNA, 15 bp, Homo sapiens
ctcccatgggccaaa

SEQ ID NO: 1377679 - DNA, 15 bp, Homo sapiens
gctcccatgggccaa

SEQ ID NO: 1377680 - DNA, 15 bp, Homo sapiens
ggctcccatgggcca

SEQ ID NO: 1377681 - DNA, 15 bp, Homo sapiens
gggctcccatgggcc

SEQ ID NO: 1377682 - DNA, 15 bp, Homo sapiens
ggggctcccatgggc

SEQ ID NO: 1377683 - DNA, 15 bp, Homo sapiens
aggggctcccatggg

SEQ ID NO: 1377684 - DNA, 15 bp, Homo sapiens
aaggggctcccatgg

SEQ ID NO: 1377685 - DNA, 15 bp, Homo sapiens
gaaggggctcccatg

SEQ ID NO: 1377686 - DNA, 15 bp, Homo sapiens
tgaaggggctcccat

SEQ ID NO: 1377687 - DNA, 15 bp, Homo sapiens
ttgaaggggctccca

SEQ ID NO: 1377688 - DNA, 15 bp, Homo sapiens
cttgaaggggctccc

SEQ ID NO: 1377689 - DNA, 15 bp, Homo sapiens
gcttgaaggggctcc

SEQ ID NO: 1377690 - DNA, 15 bp, Homo sapiens
agcttgaaggggctc

SEQ ID NO: 1377691 - DNA, 15 bp, Homo sapiens
tagcttgaaggggct

SEQ ID NO: 1377692 - DNA, 15 bp, Homo sapiens
ttagcttgaaggggc

SEQ ID NO: 1377693 - DNA, 15 bp, Homo sapiens
gttagcttgaagggg

SEQ ID NO: 1377694 - DNA, 15 bp, Homo sapiens
agttagcttgaaggg

SEQ ID NO: 1377695 - DNA, 15 bp, Homo sapiens
aagttagcttgaagg

SEQ ID NO: 1377696 - DNA, 15 bp, Homo sapiens
gaagttagcttgaag

SEQ ID NO: 1377697 - DNA, 15 bp, Homo sapiens
agaagttagcttgaa

SEQ ID NO: 1377698 - DNA, 15 bp, Homo sapiens
gagaagttagcttga

SEQ ID NO: 1377699 - DNA, 15 bp, Homo sapiens
agagaagttagcttg

SEQ ID NO: 1377700 - DNA, 15 bp, Homo sapiens
tagagaagttagctt

SEQ ID NO: 1377701 - DNA, 15 bp, Homo sapiens
atagagaagttagct

SEQ ID NO: 1377702 - DNA, 15 bp, Homo sapiens
gatagagaagttagc

SEQ ID NO: 1377703 - DNA, 15 bp, Homo sapiens
ggatagagaagttag

SEQ ID NO: 1377704 - DNA, 15 bp, Homo sapiens
aggatagagaagtta

SEQ ID NO: 1377705 - DNA, 15 bp, Homo sapiens
aaggatagagaagtt

SEQ ID NO: 1377706 - DNA, 15 bp, Homo sapiens
aaaggatagagaagt

SEQ ID NO: 1377707 - DNA, 15 bp, Homo sapiens
aaaaggatagagaag

SEQ ID NO: 1377708 - DNA, 15 bp, Homo sapiens
caaaaggatagagaa

SEQ ID NO: 1377709 - DNA, 15 bp, Homo sapiens
tcaaaaggatagaga

SEQ ID NO: 1377710 - DNA, 15 bp, Homo sapiens
gtcaaaaggatagag

SEQ ID NO: 1377711 - DNA, 15 bp, Homo sapiens
tgtcaaaaggataga

SEQ ID NO: 1377712 - DNA, 15 bp, Homo sapiens
atgtcaaaaggatag

SEQ ID NO: 1377713 - DNA, 15 bp, Homo sapiens
catgtcaaaaggata

SEQ ID NO: 1377714 - DNA, 15 bp, Homo sapiens
acatgtcaaaaggat

SEQ ID NO: 1377715 - DNA, 15 bp, Homo sapiens
gacatgtcaaaagga

SEQ ID NO: 1377716 - DNA, 15 bp, Homo sapiens
ggacatgtcaaaagg

SEQ ID NO: 1377717 - DNA, 15 bp, Homo sapiens
gggacatgtcaaaag

SEQ ID NO: 1377718 - DNA, 15 bp, Homo sapiens
agggacatgtcaaaa

SEQ ID NO: 1377719 - DNA, 15 bp, Homo sapiens
tagggacatgtcaaa

SEQ ID NO: 1377720 - DNA, 15 bp, Homo sapiens
atagggacatgtcaa

SEQ ID NO: 1377721 - DNA, 15 bp, Homo sapiens
aatagggacatgtca

SEQ ID NO: 1377722 - DNA, 15 bp, Homo sapiens
taatagggacatgtc

SEQ ID NO: 1377723 - DNA, 15 bp, Homo sapiens
ataatagggacatgt

SEQ ID NO: 1377724 - DNA, 15 bp, Homo sapiens
aataatagggacatg

SEQ ID NO: 1377725 - DNA, 15 bp, Homo sapiens
gaataatagggacat

SEQ ID NO: 1377726 - DNA, 15 bp, Homo sapiens
agaataatagggaca

SEQ ID NO: 1377727 - DNA, 15 bp, Homo sapiens
aagaataatagggac

SEQ ID NO: 1377728 - DNA, 15 bp, Homo sapiens
caagaataataggga

SEQ ID NO: 1377729 - DNA, 15 bp, Homo sapiens
ccaagaataataggg

SEQ ID NO: 1377730 - DNA, 15 bp, Homo sapiens
tccaagaataatagg

SEQ ID NO: 1377731 - DNA, 15 bp, Homo sapiens
ctccaagaataatag

SEQ ID NO: 1377732 - DNA, 15 bp, Homo sapiens
cctccaagaataata

SEQ ID NO: 1377733 - DNA, 15 bp, Homo sapiens
tcctccaagaataat

SEQ ID NO: 1377734 - DNA, 15 bp, Homo sapiens
gtcctccaagaataa

SEQ ID NO: 1377735 - DNA, 15 bp, Homo sapiens
agtcctccaagaata

SEQ ID NO: 1377736 - DNA, 15 bp, Homo sapiens
aagtcctccaagaat

SEQ ID NO: 1377737 - DNA, 15 bp, Homo sapiens
caagtcctccaagaa

SEQ ID NO: 1377738 - DNA, 15 bp, Homo sapiens
tcaagtcctccaaga

SEQ ID NO: 1377739 - DNA, 15 bp, Homo sapiens
atcaagtcctccaag

SEQ ID NO: 1377740 - DNA, 15 bp, Homo sapiens
aatcaagtcctccaa

SEQ ID NO: 1377741 - DNA, 15 bp, Homo sapiens
taatcaagtcctcca

SEQ ID NO: 1377742 - DNA, 15 bp, Homo sapiens
gtaatcaagtcctcc

SEQ ID NO: 1377743 - DNA, 15 bp, Homo sapiens
agtaatcaagtcctc

SEQ ID NO: 1377744 - DNA, 15 bp, Homo sapiens
aagtaatcaagtcct

SEQ ID NO: 1377745 - DNA, 15 bp, Homo sapiens
aaagtaatcaagtcc

SEQ ID NO: 1377746 - DNA, 15 bp, Homo sapiens
gaaagtaatcaagtc

SEQ ID NO: 1377747 - DNA, 15 bp, Homo sapiens
agaaagtaatcaagt

SEQ ID NO: 1377748 - DNA, 15 bp, Homo sapiens
tagaaagtaatcaag

SEQ ID NO: 1377749 - DNA, 15 bp, Homo sapiens
ttagaaagtaatcaa

SEQ ID NO: 1377750 - DNA, 15 bp, Homo sapiens
cttagaaagtaatca

SEQ ID NO: 1377751 - DNA, 15 bp, Homo sapiens
tcttagaaagtaatc

SEQ ID NO: 1377752 - DNA, 15 bp, Homo sapiens
atcttagaaagtaat

SEQ ID NO: 1377753 - DNA, 15 bp, Homo sapiens
catcttagaaagtaa

SEQ ID NO: 1377754 - DNA, 15 bp, Homo sapiens
acatcttagaaagta

SEQ ID NO: 1377755 - DNA, 15 bp, Homo sapiens
gacatcttagaaagt

SEQ ID NO: 1377756 - DNA, 15 bp, Homo sapiens
ggacatcttagaaag

SEQ ID NO: 1377757 - DNA, 15 bp, Homo sapiens
gggacatcttagaaa

SEQ ID NO: 1377758 - DNA, 15 bp, Homo sapiens
tgggacatcttagaa

SEQ ID NO: 1377759 - DNA, 15 bp, Homo sapiens
ctgggacatcttaga

SEQ ID NO: 1377760 - DNA, 15 bp, Homo sapiens
actgggacatcttag

SEQ ID NO: 1377761 - DNA, 15 bp, Homo sapiens
gactgggacatctta

SEQ ID NO: 1377762 - DNA, 15 bp, Homo sapiens
agactgggacatctt

SEQ ID NO: 1377763 - DNA, 15 bp, Homo sapiens
gagactgggacatct

SEQ ID NO: 1377764 - DNA, 15 bp, Homo sapiens
tgagactgggacatc

SEQ ID NO: 1377765 - DNA, 15 bp, Homo sapiens
atgagactgggacat

SEQ ID NO: 1377766 - DNA, 15 bp, Homo sapiens
gatgagactgggaca

SEQ ID NO: 1377767 - DNA, 15 bp, Homo sapiens
agatgagactgggac

SEQ ID NO: 1377768 - DNA, 15 bp, Homo sapiens
aagatgagactggga

SEQ ID NO: 1377769 - DNA, 15 bp, Homo sapiens
caagatgagactggg

SEQ ID NO: 1377770 - DNA, 15 bp, Homo sapiens
gcaagatgagactgg

SEQ ID NO: 1377771 - DNA, 15 bp, Homo sapiens
tgcaagatgagactg

SEQ ID NO: 1377772 - DNA, 15 bp, Homo sapiens
gtgcaagatgagact

SEQ ID NO: 1377773 - DNA, 15 bp, Homo sapiens
agtgcaagatgagac

SEQ ID NO: 1377774 - DNA, 15 bp, Homo sapiens
aagtgcaagatgaga

SEQ ID NO: 1377775 - DNA, 15 bp, Homo sapiens
aaagtgcaagatgag

SEQ ID NO: 1377776 - DNA, 15 bp, Homo sapiens
aaaagtgcaagatga

SEQ ID NO: 1377777 - DNA, 15 bp, Homo sapiens
gaaaagtgcaagatg

SEQ ID NO: 1377778 - DNA, 15 bp, Homo sapiens
ggaaaagtgcaagat

SEQ ID NO: 1377779 - DNA, 15 bp, Homo sapiens
aggaaaagtgcaaga

SEQ ID NO: 1377780 - DNA, 15 bp, Homo sapiens
caggaaaagtgcaag

SEQ ID NO: 1377781 - DNA, 15 bp, Homo sapiens
acaggaaaagtgcaa

SEQ ID NO: 1377782 - DNA, 15 bp, Homo sapiens
aacaggaaaagtgca

SEQ ID NO: 1377783 - DNA, 15 bp, Homo sapiens
gaacaggaaaagtgc

SEQ ID NO: 1377784 - DNA, 15 bp, Homo sapiens
ggaacaggaaaagtg

SEQ ID NO: 1377785 - DNA, 15 bp, Homo sapiens
tggaacaggaaaagt

SEQ ID NO: 1377786 - DNA, 15 bp, Homo sapiens
atggaacaggaaaag

SEQ ID NO: 1377787 - DNA, 15 bp, Homo sapiens
aatggaacaggaaaa

SEQ ID NO: 1377788 - DNA, 15 bp, Homo sapiens
gaatggaacaggaaa

SEQ ID NO: 1377789 - DNA, 15 bp, Homo sapiens
agaatggaacaggaa

SEQ ID NO: 1377790 - DNA, 15 bp, Homo sapiens
aagaatggaacagga

SEQ ID NO: 1377791 - DNA, 15 bp, Homo sapiens
caagaatggaacagg

SEQ ID NO: 1377792 - DNA, 15 bp, Homo sapiens
ccaagaatggaacag

SEQ ID NO: 1377793 - DNA, 15 bp, Homo sapiens
tccaagaatggaaca

SEQ ID NO: 1377794 - DNA, 15 bp, Homo sapiens
ttccaagaatggaac

SEQ ID NO: 1377795 - DNA, 15 bp, Homo sapiens
attccaagaatggaa

SEQ ID NO: 1377796 - DNA, 15 bp, Homo sapiens
gattccaagaatgga

SEQ ID NO: 1377797 - DNA, 15 bp, Homo sapiens
tgattccaagaatgg

SEQ ID NO: 1377798 - DNA, 15 bp, Homo sapiens
ctgattccaagaatg

SEQ ID NO: 1377799 - DNA, 15 bp, Homo sapiens
gctgattccaagaat

SEQ ID NO: 1377800 - DNA, 15 bp, Homo sapiens
tgctgattccaagaa

SEQ ID NO: 1377801 - DNA, 15 bp, Homo sapiens
ctgctgattccaaga

SEQ ID NO: 1377802 - DNA, 15 bp, Homo sapiens
actgctgattccaag

SEQ ID NO: 1377803 - DNA, 15 bp, Homo sapiens
aactgctgattccaa

SEQ ID NO: 1377804 - DNA, 15 bp, Homo sapiens
aaactgctgattcca

SEQ ID NO: 1377805 - DNA, 15 bp, Homo sapiens
gaaactgctgattcc

SEQ ID NO: 1377806 - DNA, 15 bp, Homo sapiens
agaaactgctgattc

SEQ ID NO: 1377807 - DNA, 15 bp, Homo sapiens
gagaaactgctgatt

SEQ ID NO: 1377808 - DNA, 15 bp, Homo sapiens
agagaaactgctgat

SEQ ID NO: 1377809 - DNA, 15 bp, Homo sapiens
cagagaaactgctga

SEQ ID NO: 1377810 - DNA, 15 bp, Homo sapiens
tcagagaaactgctg

SEQ ID NO: 1377811 - DNA, 15 bp, Homo sapiens
ctcagagaaactgct

SEQ ID NO: 1377812 - DNA, 15 bp, Homo sapiens
cctcagagaaactgc

SEQ ID NO: 1377813 - DNA, 15 bp, Homo sapiens
tcctcagagaaactg

SEQ ID NO: 1377814 - DNA, 15 bp, Homo sapiens
atcctcagagaaact

SEQ ID NO: 1377815 - DNA, 15 bp, Homo sapiens
gatcctcagagaaac

SEQ ID NO: 1377816 - DNA, 15 bp, Homo sapiens
ggatcctcagagaaa

SEQ ID NO: 1377817 - DNA, 15 bp, Homo sapiens
gggatcctcagagaa

SEQ ID NO: 1377818 - DNA, 15 bp, Homo sapiens
agggatcctcagaga

SEQ ID NO: 1377819 - DNA, 15 bp, Homo sapiens
aagggatcctcagag

SEQ ID NO: 1377820 - DNA, 15 bp, Homo sapiens
aaagggatcctcaga

SEQ ID NO: 1377821 - DNA, 15 bp, Homo sapiens
aaaagggatcctcag

SEQ ID NO: 1377822 - DNA, 15 bp, Homo sapiens
aaaaagggatcctca

SEQ ID NO: 1377823 - DNA, 15 bp, Homo sapiens
gaaaaagggatcctc

SEQ ID NO: 1377824 - DNA, 15 bp, Homo sapiens
tgaaaaagggatcct

SEQ ID NO: 1377825 - DNA, 15 bp, Homo sapiens
atgaaaaagggatcc

SEQ ID NO: 1377826 - DNA, 15 bp, Homo sapiens
aatgaaaaagggatc

SEQ ID NO: 1377827 - DNA, 15 bp, Homo sapiens
aaatgaaaaagggat

SEQ ID NO: 1377828 - DNA, 15 bp, Homo sapiens
aaaatgaaaaaggga

SEQ ID NO: 1377829 - DNA, 15 bp, Homo sapiens
taaaatgaaaaaggg

SEQ ID NO: 1377830 - DNA, 15 bp, Homo sapiens
ctaaaatgaaaaagg

SEQ ID NO: 1377831 - DNA, 15 bp, Homo sapiens
actaaaatgaaaaag

SEQ ID NO: 1377832 - DNA, 15 bp, Homo sapiens
cactaaaatgaaaaa

SEQ ID NO: 1377833 - DNA, 15 bp, Homo sapiens
ccactaaaatgaaaa

SEQ ID NO: 1377834 - DNA, 15 bp, Homo sapiens
tccactaaaatgaaa

SEQ ID NO: 1377835 - DNA, 15 bp, Homo sapiens
ctccactaaaatgaa

SEQ ID NO: 1377836 - DNA, 15 bp, Homo sapiens
tctccactaaaatga

SEQ ID NO: 1377837 - DNA, 15 bp, Homo sapiens
ttctccactaaaatg

SEQ ID NO: 1377838 - DNA, 15 bp, Homo sapiens
tttctccactaaaat

SEQ ID NO: 1377839 - DNA, 15 bp, Homo sapiens
ttttctccactaaaa

SEQ ID NO: 1377840 - DNA, 15 bp, Homo sapiens
tttttctccactaaa

SEQ ID NO: 1377841 - DNA, 15 bp, Homo sapiens
atttttctccactaa

SEQ ID NO: 1377842 - DNA, 15 bp, Homo sapiens
tatttttctccacta

SEQ ID NO: 1377843 - DNA, 15 bp, Homo sapiens
atatttttctccact

SEQ ID NO: 1377844 - DNA, 15 bp, Homo sapiens
aatatttttctccac

SEQ ID NO: 1377845 - DNA, 15 bp, Homo sapiens
aaatatttttctcca

SEQ ID NO: 1377846 - DNA, 15 bp, Homo sapiens
taaatatttttctcc

SEQ ID NO: 1377847 - DNA, 15 bp, Homo sapiens
ctaaatatttttctc

SEQ ID NO: 1377848 - DNA, 15 bp, Homo sapiens
tctaaatatttttct

SEQ ID NO: 1377849 - DNA, 15 bp, Homo sapiens
ttctaaatatttttc

SEQ ID NO: 1377850 - DNA, 15 bp, Homo sapiens
cttctaaatattttt

SEQ ID NO: 1377851 - DNA, 15 bp, Homo sapiens
gcttctaaatatttt

SEQ ID NO: 1377852 - DNA, 15 bp, Homo sapiens
ggcttctaaatattt

SEQ ID NO: 1377853 - DNA, 15 bp, Homo sapiens
tggcttctaaatatt

SEQ ID NO: 1377854 - DNA, 15 bp, Homo sapiens
ttggcttctaaatat

SEQ ID NO: 1377855 - DNA, 15 bp, Homo sapiens
cttggcttctaaata

SEQ ID NO: 1377856 - DNA, 15 bp, Homo sapiens
tcttggcttctaaat

SEQ ID NO: 1377857 - DNA, 15 bp, Homo sapiens
atcttggcttctaaa

SEQ ID NO: 1377858 - DNA, 15 bp, Homo sapiens
gatcttggcttctaa

SEQ ID NO: 1377859 - DNA, 15 bp, Homo sapiens
agatcttggcttcta

SEQ ID NO: 1377860 - DNA, 15 bp, Homo sapiens
cagatcttggcttct

SEQ ID NO: 1377861 - DNA, 15 bp, Homo sapiens
ccagatcttggcttc

SEQ ID NO: 1377862 - DNA, 15 bp, Homo sapiens
cccagatcttggctt

SEQ ID NO: 1377863 - DNA, 15 bp, Homo sapiens
gcccagatcttggct

SEQ ID NO: 1377864 - DNA, 15 bp, Homo sapiens
tgcccagatcttggc

SEQ ID NO: 1377865 - DNA, 15 bp, Homo sapiens
gtgcccagatcttgg

SEQ ID NO: 1377866 - DNA, 15 bp, Homo sapiens
tgtgcccagatcttg

SEQ ID NO: 1377867 - DNA, 15 bp, Homo sapiens
ttgtgcccagatctt

SEQ ID NO: 1377868 - DNA, 15 bp, Homo sapiens
cttgtgcccagatct

SEQ ID NO: 1377869 - DNA, 15 bp, Homo sapiens
ccttgtgcccagatc

SEQ ID NO: 1377870 - DNA, 15 bp, Homo sapiens
accttgtgcccagat

SEQ ID NO: 1377871 - DNA, 15 bp, Homo sapiens
taccttgtgcccaga

SEQ ID NO: 1377872 - DNA, 15 bp, Homo sapiens
ataccttgtgcccag

SEQ ID NO: 1377873 - DNA, 15 bp, Homo sapiens
tataccttgtgccca

SEQ ID NO: 1377874 - DNA, 15 bp, Homo sapiens
gtataccttgtgccc

SEQ ID NO: 1377875 - DNA, 15 bp, Homo sapiens
agtataccttgtgcc

SEQ ID NO: 1377876 - DNA, 15 bp, Homo sapiens
aagtataccttgtgc

SEQ ID NO: 1377877 - DNA, 15 bp, Homo sapiens
caagtataccttgtg

SEQ ID NO: 1377878 - DNA, 15 bp, Homo sapiens
acaagtataccttgt

SEQ ID NO: 1377879 - DNA, 15 bp, Homo sapiens
aacaagtataccttg

SEQ ID NO: 1377880 - DNA, 15 bp, Homo sapiens
caacaagtatacctt

SEQ ID NO: 1377881 - DNA, 15 bp, Homo sapiens
gcaacaagtatacct

SEQ ID NO: 1377882 - DNA, 15 bp, Homo sapiens
ggcaacaagtatacc

SEQ ID NO: 1377883 - DNA, 15 bp, Homo sapiens
tggcaacaagtatac

SEQ ID NO: 1377884 - DNA, 15 bp, Homo sapiens
atggcaacaagtata

SEQ ID NO: 1377885 - DNA, 15 bp, Homo sapiens
aatggcaacaagtat

SEQ ID NO: 1377886 - DNA, 15 bp, Homo sapiens
caatggcaacaagta

SEQ ID NO: 1377887 - DNA, 15 bp, Homo sapiens
tcaatggcaacaagt

SEQ ID NO: 1377888 - DNA, 15 bp, Homo sapiens
ctcaatggcaacaag

SEQ ID NO: 1377889 - DNA, 15 bp, Homo sapiens
cctcaatggcaacaa

SEQ ID NO: 1377890 - DNA, 15 bp, Homo sapiens
tcctcaatggcaaca

SEQ ID NO: 1377891 - DNA, 15 bp, Homo sapiens
ctcctcaatggcaac

SEQ ID NO: 1377892 - DNA, 15 bp, Homo sapiens
actcctcaatggcaa

SEQ ID NO: 1377893 - DNA, 15 bp, Homo sapiens
aactcctcaatggca

SEQ ID NO: 1377894 - DNA, 15 bp, Homo sapiens
caactcctcaatggc

SEQ ID NO: 1377895 - DNA, 15 bp, Homo sapiens
gcaactcctcaatgg

SEQ ID NO: 1377896 - DNA, 15 bp, Homo sapiens
agcaactcctcaatg

SEQ ID NO: 1377897 - DNA, 15 bp, Homo sapiens
cagcaactcctcaat

SEQ ID NO: 1377898 - DNA, 15 bp, Homo sapiens
acagcaactcctcaa

SEQ ID NO: 1377899 - DNA, 15 bp, Homo sapiens
aacagcaactcctca

SEQ ID NO: 1377900 - DNA, 15 bp, Homo sapiens
gaacagcaactcctc

SEQ ID NO: 1377901 - DNA, 15 bp, Homo sapiens
ggaacagcaactcct

SEQ ID NO: 1377902 - DNA, 15 bp, Homo sapiens
gggaacagcaactcc

SEQ ID NO: 1377903 - DNA, 15 bp, Homo sapiens
tgggaacagcaactc

SEQ ID NO: 1377904 - DNA, 15 bp, Homo sapiens
ctgggaacagcaact

SEQ ID NO: 1377905 - DNA, 15 bp, Homo sapiens
actgggaacagcaac

SEQ ID NO: 1377906 - DNA, 15 bp, Homo sapiens
gactgggaacagcaa

SEQ ID NO: 1377907 - DNA, 15 bp, Homo sapiens
ggactgggaacagca

SEQ ID NO: 1377908 - DNA, 15 bp, Homo sapiens
aggactgggaacagc

SEQ ID NO: 1377909 - DNA, 15 bp, Homo sapiens
gaggactgggaacag

SEQ ID NO: 1377910 - DNA, 15 bp, Homo sapiens
agaggactgggaaca

SEQ ID NO: 1377911 - DNA, 15 bp, Homo sapiens
gagaggactgggaac

SEQ ID NO: 1377912 - DNA, 15 bp, Homo sapiens
tgagaggactgggaa

SEQ ID NO: 1377913 - DNA, 15 bp, Homo sapiens
ctgagaggactggga

SEQ ID NO: 1377914 - DNA, 15 bp, Homo sapiens
cctgagaggactggg

SEQ ID NO: 1377915 - DNA, 15 bp, Homo sapiens
ccctgagaggactgg

SEQ ID NO: 1377916 - DNA, 15 bp, Homo sapiens
cccctgagaggactg

SEQ ID NO: 1377917 - DNA, 15 bp, Homo sapiens
tcccctgagaggact

SEQ ID NO: 1377918 - DNA, 15 bp, Homo sapiens
ctcccctgagaggac

SEQ ID NO: 1377919 - DNA, 15 bp, Homo sapiens
tctcccctgagagga

SEQ ID NO: 1377920 - DNA, 15 bp, Homo sapiens
ctctcccctgagagg

SEQ ID NO: 1377921 - DNA, 15 bp, Homo sapiens
actctcccctgagag

SEQ ID NO: 1377922 - DNA, 15 bp, Homo sapiens
tactctcccctgaga

SEQ ID NO: 1377923 - DNA, 15 bp, Homo sapiens
ttactctcccctgag

SEQ ID NO: 1377924 - DNA, 15 bp, Homo sapiens
cttactctcccctga

SEQ ID NO: 1377925 - DNA, 15 bp, Homo sapiens
ccttactctcccctg

SEQ ID NO: 1377926 - DNA, 15 bp, Homo sapiens
cccttactctcccct

SEQ ID NO: 1377927 - DNA, 15 bp, Homo sapiens
tcccttactctcccc

SEQ ID NO: 1377928 - DNA, 15 bp, Homo sapiens
ttcccttactctccc

SEQ ID NO: 1377929 - DNA, 15 bp, Homo sapiens
attcccttactctcc

SEQ ID NO: 1377930 - DNA, 15 bp, Homo sapiens
tattcccttactctc

SEQ ID NO: 1377931 - DNA, 15 bp, Homo sapiens
atattcccttactct

SEQ ID NO: 1377932 - DNA, 15 bp, Homo sapiens
tatattcccttactc

SEQ ID NO: 1377933 - DNA, 15 bp, Homo sapiens
atatattcccttact

SEQ ID NO: 1377934 - DNA, 15 bp, Homo sapiens
catatattcccttac

SEQ ID NO: 1377935 - DNA, 15 bp, Homo sapiens
acatatattccctta

SEQ ID NO: 1377936 - DNA, 15 bp, Homo sapiens
tacatatattccctt

SEQ ID NO: 1377937 - DNA, 15 bp, Homo sapiens
atacatatattccct

SEQ ID NO: 1377938 - DNA, 15 bp, Homo sapiens
tatacatatattccc

SEQ ID NO: 1377939 - DNA, 15 bp, Homo sapiens
atatacatatattcc

SEQ ID NO: 1377940 - DNA, 15 bp, Homo sapiens
tatatacatatattc

SEQ ID NO: 1377941 - DNA, 15 bp, Homo sapiens
atatatacatatatt

SEQ ID NO: 1377942 - DNA, 15 bp, Homo sapiens
gaatatatacatata

SEQ ID NO: 1377943 - DNA, 15 bp, Homo sapiens
tgaatatatacatat

SEQ ID NO: 1377944 - DNA, 15 bp, Homo sapiens
atgaatatatacata

SEQ ID NO: 1377945 - DNA, 15 bp, Homo sapiens
tatgaatatatacat

SEQ ID NO: 1377946 - DNA, 15 bp, Homo sapiens
atatgaatatataca

SEQ ID NO: 1377947 - DNA, 15 bp, Homo sapiens
tatatgaatatatac

SEQ ID NO: 1377948 - DNA, 15 bp, Homo sapiens
atatatgaatatata

SEQ ID NO: 1377949 - DNA, 15 bp, Homo sapiens
tatatatgaatatat

SEQ ID NO: 1377950 - DNA, 15 bp, Homo sapiens
ctatatatgaatata

SEQ ID NO: 1377951 - DNA, 15 bp, Homo sapiens
tctatatatgaatat

SEQ ID NO: 1377952 - DNA, 15 bp, Homo sapiens
atctatatatgaata

SEQ ID NO: 1377953 - DNA, 15 bp, Homo sapiens
gatctatatatgaat

SEQ ID NO: 1377954 - DNA, 15 bp, Homo sapiens
agatctatatatgaa

SEQ ID NO: 1377955 - DNA, 15 bp, Homo sapiens
tagatctatatatga

SEQ ID NO: 1377956 - DNA, 15 bp, Homo sapiens
atagatctatatatg

SEQ ID NO: 1377957 - DNA, 15 bp, Homo sapiens
catagatctatatat

SEQ ID NO: 1377958 - DNA, 15 bp, Homo sapiens
gcatagatctatata

SEQ ID NO: 1377959 - DNA, 15 bp, Homo sapiens
tgcatagatctatat

SEQ ID NO: 1377960 - DNA, 15 bp, Homo sapiens
gtgcatagatctata

SEQ ID NO: 1377961 - DNA, 15 bp, Homo sapiens
agtgcatagatctat

SEQ ID NO: 1377962 - DNA, 15 bp, Homo sapiens
aagtgcatagatcta

SEQ ID NO: 1377963 - DNA, 15 bp, Homo sapiens
aaagtgcatagatct

SEQ ID NO: 1377964 - DNA, 15 bp, Homo sapiens
aaaagtgcatagatc

SEQ ID NO: 1377965 - DNA, 15 bp, Homo sapiens
taaaagtgcatagat

SEQ ID NO: 1377966 - DNA, 15 bp, Homo sapiens
gtaaaagtgcataga

SEQ ID NO: 1377967 - DNA, 15 bp, Homo sapiens
tgtaaaagtgcatag

SEQ ID NO: 1377968 - DNA, 15 bp, Homo sapiens
atgtaaaagtgcata

SEQ ID NO: 1377969 - DNA, 15 bp, Homo sapiens
catgtaaaagtgcat

SEQ ID NO: 1377970 - DNA, 15 bp, Homo sapiens
acatgtaaaagtgca

SEQ ID NO: 1377971 - DNA, 15 bp, Homo sapiens
tacatgtaaaagtgc

SEQ ID NO: 1377972 - DNA, 15 bp, Homo sapiens
atacatgtaaaagtg

SEQ ID NO: 1377973 - DNA, 15 bp, Homo sapiens
tatacatgtaaaagt

SEQ ID NO: 1377974 - DNA, 15 bp, Homo sapiens
atatacatgtaaaag

SEQ ID NO: 1377975 - DNA, 15 bp, Homo sapiens
tatatacatgtaaaa

SEQ ID NO: 1377976 - DNA, 15 bp, Homo sapiens
atatatacatgtaaa

SEQ ID NO: 1377977 - DNA, 15 bp, Homo sapiens
tatatatacatgtaa

SEQ ID NO: 1377978 - DNA, 15 bp, Homo sapiens
atatatatacatgta

SEQ ID NO: 1377979 - DNA, 15 bp, Homo sapiens
tatatatatacatgt

SEQ ID NO: 1377980 - DNA, 15 bp, Homo sapiens
atatatatatacatg

SEQ ID NO: 1377981 - DNA, 15 bp, Homo sapiens
caaaaaatatatata

SEQ ID NO: 1377982 - DNA, 15 bp, Homo sapiens
acaaaaaatatatat

SEQ ID NO: 1377983 - DNA, 15 bp, Homo sapiens
aacaaaaaatatata

SEQ ID NO: 1377984 - DNA, 15 bp, Homo sapiens
aaacaaaaaatatat

SEQ ID NO: 1377985 - DNA, 15 bp, Homo sapiens
aaaacaaaaaatata

SEQ ID NO: 1377986 - DNA, 15 bp, Homo sapiens
aaaaacaaaaaatat

SEQ ID NO: 1377987 - DNA, 15 bp, Homo sapiens
caaaaacaaaaaata

SEQ ID NO: 1377988 - DNA, 15 bp, Homo sapiens
tcaaaaacaaaaaat

SEQ ID NO: 1377989 - DNA, 15 bp, Homo sapiens
ctcaaaaacaaaaaa

SEQ ID NO: 1377990 - DNA, 15 bp, Homo sapiens
ctgcaccattgcact

SEQ ID NO: 1377991 - DNA, 15 bp, Homo sapiens
actgcaccattgcac

SEQ ID NO: 1377992 - DNA, 15 bp, Homo sapiens
gactgcaccattgca

SEQ ID NO: 1377993 - DNA, 15 bp, Homo sapiens
agactgcaccattgc

SEQ ID NO: 1377994 - DNA, 15 bp, Homo sapiens
gagactgcaccattg

SEQ ID NO: 1377995 - DNA, 15 bp, Homo sapiens
tgagactgcaccatt

SEQ ID NO: 1377996 - DNA, 15 bp, Homo sapiens
ctgagactgcaccat

SEQ ID NO: 1377997 - DNA, 15 bp, Homo sapiens
gctgagactgcacca

SEQ ID NO: 1377998 - DNA, 15 bp, Homo sapiens
agctgagactgcacc

SEQ ID NO: 1377999 - DNA, 15 bp, Homo sapiens
gagctgagactgcac

SEQ ID NO: 1378000 - DNA, 15 bp, Homo sapiens
tgagctgagactgca

SEQ ID NO: 1378001 - DNA, 15 bp, Homo sapiens
gtgagctgagactgc

SEQ ID NO: 1378002 - DNA, 15 bp, Homo sapiens
agtgagctgagactg

SEQ ID NO: 1378003 - DNA, 15 bp, Homo sapiens
cagtgagctgagact

SEQ ID NO: 1378004 - DNA, 15 bp, Homo sapiens
gcagtgagctgagac

SEQ ID NO: 1378005 - DNA, 15 bp, Homo sapiens
gaggctcaggcagga

SEQ ID NO: 1378006 - DNA, 15 bp, Homo sapiens
ggaggctcaggcagg

SEQ ID NO: 1378007 - DNA, 15 bp, Homo sapiens
gggaggctcaggcag

SEQ ID NO: 1378008 - DNA, 15 bp, Homo sapiens
tgggaggctcaggca

SEQ ID NO: 1378009 - DNA, 15 bp, Homo sapiens
ttgggaggctcaggc

SEQ ID NO: 1378010 - DNA, 15 bp, Homo sapiens
cttgggaggctcagg

SEQ ID NO: 1378011 - DNA, 15 bp, Homo sapiens
acttgggaggctcag

SEQ ID NO: 1378012 - DNA, 15 bp, Homo sapiens
tacttgggaggctca

SEQ ID NO: 1378013 - DNA, 15 bp, Homo sapiens
ctacttgggaggctc

SEQ ID NO: 1378014 - DNA, 15 bp, Homo sapiens
atatgcctgtaatcc

SEQ ID NO: 1378015 - DNA, 15 bp, Homo sapiens
catatgcctgtaatc

SEQ ID NO: 1378016 - DNA, 15 bp, Homo sapiens
gcatatgcctgtaat

SEQ ID NO: 1378017 - DNA, 15 bp, Homo sapiens
ggcatatgcctgtaa

SEQ ID NO: 1378018 - DNA, 15 bp, Homo sapiens
tggcatatgcctgta

SEQ ID NO: 1378019 - DNA, 15 bp, Homo sapiens
gtggcatatgcctgt

SEQ ID NO: 1378020 - DNA, 15 bp, Homo sapiens
ggtggcatatgcctg

SEQ ID NO: 1378021 - DNA, 15 bp, Homo sapiens
gtggtggcatatgcc

SEQ ID NO: 1378022 - DNA, 15 bp, Homo sapiens
cgtggtggcatatgc

SEQ ID NO: 1378023 - DNA, 15 bp, Homo sapiens
gcgtggtggcatatg

SEQ ID NO: 1378024 - DNA, 15 bp, Homo sapiens
ggcgtggtggcatat

SEQ ID NO: 1378025 - DNA, 15 bp, Homo sapiens
aggcgtggtggcata

SEQ ID NO: 1378026 - DNA, 15 bp, Homo sapiens
caggcgtggtggcat

SEQ ID NO: 1378027 - DNA, 15 bp, Homo sapiens
caaaatacaaaatta

SEQ ID NO: 1378028 - DNA, 15 bp, Homo sapiens
tcaaaatacaaaatt

SEQ ID NO: 1378029 - DNA, 15 bp, Homo sapiens
ctcaaaatacaaaat

SEQ ID NO: 1378030 - DNA, 15 bp, Homo sapiens
actcaaaatacaaaa

SEQ ID NO: 1378031 - DNA, 15 bp, Homo sapiens
tactcaaaatacaaa

SEQ ID NO: 1378032 - DNA, 15 bp, Homo sapiens
ctactcaaaatacaa

SEQ ID NO: 1378033 - DNA, 15 bp, Homo sapiens
tctactcaaaataca

SEQ ID NO: 1378034 - DNA, 15 bp, Homo sapiens
ctctactcaaaatac

SEQ ID NO: 1378035 - DNA, 15 bp, Homo sapiens
tctctactcaaaata

SEQ ID NO: 1378036 - DNA, 15 bp, Homo sapiens
atctctactcaaaat

SEQ ID NO: 1378037 - DNA, 15 bp, Homo sapiens
catctctactcaaaa

SEQ ID NO: 1378038 - DNA, 15 bp, Homo sapiens
acatctctactcaaa

SEQ ID NO: 1378039 - DNA, 15 bp, Homo sapiens
cacatctctactcaa

SEQ ID NO: 1378040 - DNA, 15 bp, Homo sapiens
ccacatctctactca

SEQ ID NO: 1378041 - DNA, 15 bp, Homo sapiens
accacatctctactc

SEQ ID NO: 1378042 - DNA, 15 bp, Homo sapiens
aaccacatctctact

SEQ ID NO: 1378043 - DNA, 15 bp, Homo sapiens
aaaccacatctctac

SEQ ID NO: 1378044 - DNA, 15 bp, Homo sapiens
gaaaccacatctcta

SEQ ID NO: 1378045 - DNA, 15 bp, Homo sapiens
tgaaaccacatctct

SEQ ID NO: 1378046 - DNA, 15 bp, Homo sapiens
atgaaaccacatctc

SEQ ID NO: 1378047 - DNA, 15 bp, Homo sapiens
gatgaaaccacatct

SEQ ID NO: 1378048 - DNA, 15 bp, Homo sapiens
tgatgaaaccacatc

SEQ ID NO: 1378049 - DNA, 15 bp, Homo sapiens
atgatgaaaccacat

SEQ ID NO: 1378050 - DNA, 15 bp, Homo sapiens
tatgatgaaaccaca

SEQ ID NO: 1378051 - DNA, 15 bp, Homo sapiens
atatgatgaaaccac

SEQ ID NO: 1378052 - DNA, 15 bp, Homo sapiens
aatatgatgaaacca

SEQ ID NO: 1378053 - DNA, 15 bp, Homo sapiens
caatatgatgaaacc

SEQ ID NO: 1378054 - DNA, 15 bp, Homo sapiens
ccaatatgatgaaac

SEQ ID NO: 1378055 - DNA, 15 bp, Homo sapiens
gccaatatgatgaaa

SEQ ID NO: 1378056 - DNA, 15 bp, Homo sapiens
ggccaatatgatgaa

SEQ ID NO: 1378057 - DNA, 15 bp, Homo sapiens
tggccaatatgatga

SEQ ID NO: 1378058 - DNA, 15 bp, Homo sapiens
ttggccaatatgatg

SEQ ID NO: 1378059 - DNA, 15 bp, Homo sapiens
cttggccaatatgat

SEQ ID NO: 1378060 - DNA, 15 bp, Homo sapiens
gcttggccaatatga

SEQ ID NO: 1378061 - DNA, 15 bp, Homo sapiens
agcttggccaatatg

SEQ ID NO: 1378062 - DNA, 15 bp, Homo sapiens
cagcttggccaatat

SEQ ID NO: 1378063 - DNA, 15 bp, Homo sapiens
ccagcttggccaata

SEQ ID NO: 1378064 - DNA, 15 bp, Homo sapiens
accagcttggccaat

SEQ ID NO: 1378065 - DNA, 15 bp, Homo sapiens
agagttcaagaccag

SEQ ID NO: 1378066 - DNA, 15 bp, Homo sapiens
aagagttcaagacca

SEQ ID NO: 1378067 - DNA, 15 bp, Homo sapiens
caagagttcaagacc

SEQ ID NO: 1378068 - DNA, 15 bp, Homo sapiens
tcaagagttcaagac

SEQ ID NO: 1378069 - DNA, 15 bp, Homo sapiens
gtcaagagttcaaga

SEQ ID NO: 1378070 - DNA, 15 bp, Homo sapiens
ggtcaagagttcaag

SEQ ID NO: 1378071 - DNA, 15 bp, Homo sapiens
aggtcaagagttcaa

SEQ ID NO: 1378072 - DNA, 15 bp, Homo sapiens
tggctgggcgtggtg

SEQ ID NO: 1378073 - DNA, 15 bp, Homo sapiens
gtggctgggcgtggt

SEQ ID NO: 1378074 - DNA, 15 bp, Homo sapiens
cgtggctgggcgtgg

SEQ ID NO: 1378075 - DNA, 15 bp, Homo sapiens
acgtggctgggcgtg

SEQ ID NO: 1378076 - DNA, 15 bp, Homo sapiens
tacgtggctgggcgt

SEQ ID NO: 1378077 - DNA, 15 bp, Homo sapiens
atacgtggctgggcg

SEQ ID NO: 1378078 - DNA, 15 bp, Homo sapiens
tatacgtggctgggc

SEQ ID NO: 1378079 - DNA, 15 bp, Homo sapiens
atatacgtggctggg

SEQ ID NO: 1378080 - DNA, 15 bp, Homo sapiens
aatatacgtggctgg

SEQ ID NO: 1378081 - DNA, 15 bp, Homo sapiens
caatatacgtggctg

SEQ ID NO: 1378082 - DNA, 15 bp, Homo sapiens
acaatatacgtggct

SEQ ID NO: 1378083 - DNA, 15 bp, Homo sapiens
aacaatatacgtggc

SEQ ID NO: 1378084 - DNA, 15 bp, Homo sapiens
aaacaatatacgtgg

SEQ ID NO: 1378085 - DNA, 15 bp, Homo sapiens
aaaacaatatacgtg

SEQ ID NO: 1378086 - DNA, 15 bp, Homo sapiens
aaaaacaatatacgt

SEQ ID NO: 1378087 - DNA, 15 bp, Homo sapiens
taaaaacaatatacg

SEQ ID NO: 1378088 - DNA, 15 bp, Homo sapiens
ataaaaacaatatac

SEQ ID NO: 1378089 - DNA, 15 bp, Homo sapiens
tataaaaacaatata

SEQ ID NO: 1378090 - DNA, 15 bp, Homo sapiens
atataaaaacaatat

SEQ ID NO: 1378091 - DNA, 15 bp, Homo sapiens
gatataaaaacaata

SEQ ID NO: 1378092 - DNA, 15 bp, Homo sapiens
agatataaaaacaat

SEQ ID NO: 1378093 - DNA, 15 bp, Homo sapiens
tagatataaaaacaa

SEQ ID NO: 1378094 - DNA, 15 bp, Homo sapiens
ctagatataaaaaca

SEQ ID NO: 1378095 - DNA, 15 bp, Homo sapiens
actagatataaaaac

SEQ ID NO: 1378096 - DNA, 15 bp, Homo sapiens
aactagatataaaaa

SEQ ID NO: 1378097 - DNA, 15 bp, Homo sapiens
gaactagatataaaa

SEQ ID NO: 1378098 - DNA, 15 bp, Homo sapiens
agaactagatataaa

SEQ ID NO: 1378099 - DNA, 15 bp, Homo sapiens
aagaactagatataa

SEQ ID NO: 1378100 - DNA, 15 bp, Homo sapiens
taagaactagatata

SEQ ID NO: 1378101 - DNA, 15 bp, Homo sapiens
ataagaactagatat

SEQ ID NO: 1378102 - DNA, 15 bp, Homo sapiens
gataagaactagata

SEQ ID NO: 1378103 - DNA, 15 bp, Homo sapiens
agataagaactagat

SEQ ID NO: 1378104 - DNA, 15 bp, Homo sapiens
tagataagaactaga

SEQ ID NO: 1378105 - DNA, 15 bp, Homo sapiens
atagataagaactag

SEQ ID NO: 1378106 - DNA, 15 bp, Homo sapiens
gatagataagaacta

SEQ ID NO: 1378107 - DNA, 15 bp, Homo sapiens
agatagataagaact

SEQ ID NO: 1378108 - DNA, 15 bp, Homo sapiens
gagatagataagaac

SEQ ID NO: 1378109 - DNA, 15 bp, Homo sapiens
agagatagataagaa

SEQ ID NO: 1378110 - DNA, 15 bp, Homo sapiens
gagagatagataaga

SEQ ID NO: 1378111 - DNA, 15 bp, Homo sapiens
agagagatagataag

SEQ ID NO: 1378112 - DNA, 15 bp, Homo sapiens
aagagagatagataa

SEQ ID NO: 1378113 - DNA, 15 bp, Homo sapiens
caagagagatagata

SEQ ID NO: 1378114 - DNA, 15 bp, Homo sapiens
tcaagagagatagat

SEQ ID NO: 1378115 - DNA, 15 bp, Homo sapiens
ttcaagagagataga

SEQ ID NO: 1378116 - DNA, 15 bp, Homo sapiens
tttcaagagagatag

SEQ ID NO: 1378117 - DNA, 15 bp, Homo sapiens
atttcaagagagata

SEQ ID NO: 1378118 - DNA, 15 bp, Homo sapiens
aatttcaagagagat

SEQ ID NO: 1378119 - DNA, 15 bp, Homo sapiens
taatttcaagagaga

SEQ ID NO: 1378120 - DNA, 15 bp, Homo sapiens
ataatttcaagagag

SEQ ID NO: 1378121 - DNA, 15 bp, Homo sapiens
tataatttcaagaga

SEQ ID NO: 1378122 - DNA, 15 bp, Homo sapiens
ttataatttcaagag

SEQ ID NO: 1378123 - DNA, 15 bp, Homo sapiens
cttataatttcaaga

SEQ ID NO: 1378124 - DNA, 15 bp, Homo sapiens
acttataatttcaag

SEQ ID NO: 1378125 - DNA, 15 bp, Homo sapiens
aacttataatttcaa

SEQ ID NO: 1378126 - DNA, 15 bp, Homo sapiens
gaacttataatttca

SEQ ID NO: 1378127 - DNA, 15 bp, Homo sapiens
tgaacttataatttc

SEQ ID NO: 1378128 - DNA, 15 bp, Homo sapiens
atgaacttataattt

SEQ ID NO: 1378129 - DNA, 15 bp, Homo sapiens
tatgaacttataatt

SEQ ID NO: 1378130 - DNA, 15 bp, Homo sapiens
atatgaacttataat

SEQ ID NO: 1378131 - DNA, 15 bp, Homo sapiens
aatatgaacttataa

SEQ ID NO: 1378132 - DNA, 15 bp, Homo sapiens
caatatgaacttata

SEQ ID NO: 1378133 - DNA, 15 bp, Homo sapiens
tcaatatgaacttat

SEQ ID NO: 1378134 - DNA, 15 bp, Homo sapiens
atcaatatgaactta

SEQ ID NO: 1378135 - DNA, 15 bp, Homo sapiens
tatcaatatgaactt

SEQ ID NO: 1378136 - DNA, 15 bp, Homo sapiens
atatcaatatgaact

SEQ ID NO: 1378137 - DNA, 15 bp, Homo sapiens
gatatcaatatgaac

SEQ ID NO: 1378138 - DNA, 15 bp, Homo sapiens
cgatatcaatatgaa

SEQ ID NO: 1378139 - DNA, 15 bp, Homo sapiens
gcgatatcaatatga

SEQ ID NO: 1378140 - DNA, 15 bp, Homo sapiens
tgcgatatcaatatg

SEQ ID NO: 1378141 - DNA, 15 bp, Homo sapiens
ctgcgatatcaatat

SEQ ID NO: 1378142 - DNA, 15 bp, Homo sapiens
tctgcgatatcaata

SEQ ID NO: 1378143 - DNA, 15 bp, Homo sapiens
atctgcgatatcaat

SEQ ID NO: 1378144 - DNA, 15 bp, Homo sapiens
gatctgcgatatcaa

SEQ ID NO: 1378145 - DNA, 15 bp, Homo sapiens
ggatctgcgatatca

SEQ ID NO: 1378146 - DNA, 15 bp, Homo sapiens
aggatctgcgatatc

SEQ ID NO: 1378147 - DNA, 15 bp, Homo sapiens
gaggatctgcgatat

SEQ ID NO: 1378148 - DNA, 15 bp, Homo sapiens
tgaggatctgcgata

SEQ ID NO: 1378149 - DNA, 15 bp, Homo sapiens
atgaggatctgcgat

SEQ ID NO: 1378150 - DNA, 15 bp, Homo sapiens
gatgaggatctgcga

SEQ ID NO: 1378151 - DNA, 15 bp, Homo sapiens
agatgaggatctgcg

SEQ ID NO: 1378152 - DNA, 15 bp, Homo sapiens
tagatgaggatctgc

SEQ ID NO: 1378153 - DNA, 15 bp, Homo sapiens
ttagatgaggatctg

SEQ ID NO: 1378154 - DNA, 15 bp, Homo sapiens
attagatgaggatct

SEQ ID NO: 1378155 - DNA, 15 bp, Homo sapiens
gattagatgaggatc

SEQ ID NO: 1378156 - DNA, 15 bp, Homo sapiens
agattagatgaggat

SEQ ID NO: 1378157 - DNA, 15 bp, Homo sapiens
gagattagatgagga

SEQ ID NO: 1378158 - DNA, 15 bp, Homo sapiens
agagattagatgagg

SEQ ID NO: 1378159 - DNA, 15 bp, Homo sapiens
gagagattagatgag

SEQ ID NO: 1378160 - DNA, 15 bp, Homo sapiens
agagagattagatga

SEQ ID NO: 1378161 - DNA, 15 bp, Homo sapiens
cagagagattagatg

SEQ ID NO: 1378162 - DNA, 15 bp, Homo sapiens
acagagagattagat

SEQ ID NO: 1378163 - DNA, 15 bp, Homo sapiens
aacagagagattaga

SEQ ID NO: 1378164 - DNA, 15 bp, Homo sapiens
aaacagagagattag

SEQ ID NO: 1378165 - DNA, 15 bp, Homo sapiens
gaaacagagagatta

SEQ ID NO: 1378166 - DNA, 15 bp, Homo sapiens
ggaaacagagagatt

SEQ ID NO: 1378167 - DNA, 15 bp, Homo sapiens
aggaaacagagagat

SEQ ID NO: 1378168 - DNA, 15 bp, Homo sapiens
aaggaaacagagaga

SEQ ID NO: 1378169 - DNA, 15 bp, Homo sapiens
gaaggaaacagagag

SEQ ID NO: 1378170 - DNA, 15 bp, Homo sapiens
agaaggaaacagaga

SEQ ID NO: 1378171 - DNA, 15 bp, Homo sapiens
aagaaggaaacagag

SEQ ID NO: 1378172 - DNA, 15 bp, Homo sapiens
aaagaaggaaacaga

SEQ ID NO: 1378173 - DNA, 15 bp, Homo sapiens
aaaagaaggaaacag

SEQ ID NO: 1378174 - DNA, 15 bp, Homo sapiens
gaaaagaaggaaaca

SEQ ID NO: 1378175 - DNA, 15 bp, Homo sapiens
tgaaaagaaggaaac

SEQ ID NO: 1378176 - DNA, 15 bp, Homo sapiens
atgaaaagaaggaaa

SEQ ID NO: 1378177 - DNA, 15 bp, Homo sapiens
tatgaaaagaaggaa

SEQ ID NO: 1378178 - DNA, 15 bp, Homo sapiens
atatgaaaagaagga

SEQ ID NO: 1378179 - DNA, 15 bp, Homo sapiens
aatatgaaaagaagg

SEQ ID NO: 1378180 - DNA, 15 bp, Homo sapiens
aaatatgaaaagaag

SEQ ID NO: 1378181 - DNA, 15 bp, Homo sapiens
caaatatgaaaagaa

SEQ ID NO: 1378182 - DNA, 15 bp, Homo sapiens
acaaatatgaaaaga

SEQ ID NO: 1378183 - DNA, 15 bp, Homo sapiens
aacaaatatgaaaag

SEQ ID NO: 1378184 - DNA, 15 bp, Homo sapiens
gaacaaatatgaaaa

SEQ ID NO: 1378185 - DNA, 15 bp, Homo sapiens
tgaacaaatatgaaa

SEQ ID NO: 1378186 - DNA, 15 bp, Homo sapiens
atgaacaaatatgaa

SEQ ID NO: 1378187 - DNA, 15 bp, Homo sapiens
aatgaacaaatatga

SEQ ID NO: 1378188 - DNA, 15 bp, Homo sapiens
aaatgaacaaatatg

SEQ ID NO: 1378189 - DNA, 15 bp, Homo sapiens
ggaaatgaacaaata

SEQ ID NO: 1378190 - DNA, 15 bp, Homo sapiens
aggaaatgaacaaat

SEQ ID NO: 1378191 - DNA, 15 bp, Homo sapiens
caggaaatgaacaaa

SEQ ID NO: 1378192 - DNA, 15 bp, Homo sapiens
tcaggaaatgaacaa

SEQ ID NO: 1378193 - DNA, 15 bp, Homo sapiens
ttcaggaaatgaaca

SEQ ID NO: 1378194 - DNA, 15 bp, Homo sapiens
tttcaggaaatgaac

SEQ ID NO: 1378195 - DNA, 15 bp, Homo sapiens
ttttcaggaaatgaa

SEQ ID NO: 1378196 - DNA, 15 bp, Homo sapiens
attttcaggaaatga

SEQ ID NO: 1378197 - DNA, 15 bp, Homo sapiens
gattttcaggaaatg

SEQ ID NO: 1378198 - DNA, 15 bp, Homo sapiens
tgattttcaggaaat

SEQ ID NO: 1378199 - DNA, 15 bp, Homo sapiens
ctgattttcaggaaa

SEQ ID NO: 1378200 - DNA, 15 bp, Homo sapiens
tctgattttcaggaa

SEQ ID NO: 1378201 - DNA, 15 bp, Homo sapiens
ttctgattttcagga

SEQ ID NO: 1378202 - DNA, 15 bp, Homo sapiens
tttctgattttcagg

SEQ ID NO: 1378203 - DNA, 15 bp, Homo sapiens
atttctgattttcag

SEQ ID NO: 1378204 - DNA, 15 bp, Homo sapiens
catttctgattttca

SEQ ID NO: 1378205 - DNA, 15 bp, Homo sapiens
acatttctgattttc

SEQ ID NO: 1378206 - DNA, 15 bp, Homo sapiens
cacatttctgatttt

SEQ ID NO: 1378207 - DNA, 15 bp, Homo sapiens
ccacatttctgattt

SEQ ID NO: 1378208 - DNA, 15 bp, Homo sapiens
cccacatttctgatt

SEQ ID NO: 1378209 - DNA, 15 bp, Homo sapiens
acccacatttctgat

SEQ ID NO: 1378210 - DNA, 15 bp, Homo sapiens
gacccacatttctga

SEQ ID NO: 1378211 - DNA, 15 bp, Homo sapiens
ggacccacatttctg

SEQ ID NO: 1378212 - DNA, 15 bp, Homo sapiens
gggacccacatttct

SEQ ID NO: 1378213 - DNA, 15 bp, Homo sapiens
tgggacccacatttc

SEQ ID NO: 1378214 - DNA, 15 bp, Homo sapiens
atgggacccacattt

SEQ ID NO: 1378215 - DNA, 15 bp, Homo sapiens
aatgggacccacatt

SEQ ID NO: 1378216 - DNA, 15 bp, Homo sapiens
taatgggacccacat

SEQ ID NO: 1378217 - DNA, 15 bp, Homo sapiens
ataatgggacccaca

SEQ ID NO: 1378218 - DNA, 15 bp, Homo sapiens
gataatgggacccac

SEQ ID NO: 1378219 - DNA, 15 bp, Homo sapiens
ggataatgggaccca

SEQ ID NO: 1378220 - DNA, 15 bp, Homo sapiens
aggataatgggaccc

SEQ ID NO: 1378221 - DNA, 15 bp, Homo sapiens
aaggataatgggacc

SEQ ID NO: 1378222 - DNA, 15 bp, Homo sapiens
taaggataatgggac

SEQ ID NO: 1378223 - DNA, 15 bp, Homo sapiens
ttaaggataatggga

SEQ ID NO: 1378224 - DNA, 15 bp, Homo sapiens
attaaggataatggg

SEQ ID NO: 1378225 - DNA, 15 bp, Homo sapiens
tattaaggataatgg

SEQ ID NO: 1378226 - DNA, 15 bp, Homo sapiens
atattaaggataatg

SEQ ID NO: 1378227 - DNA, 15 bp, Homo sapiens
tatattaaggataat

SEQ ID NO: 1378228 - DNA, 15 bp, Homo sapiens
atatattaaggataa

SEQ ID NO: 1378229 - DNA, 15 bp, Homo sapiens
aatatattaaggata

SEQ ID NO: 1378230 - DNA, 15 bp, Homo sapiens
aaatatattaaggat

SEQ ID NO: 1378231 - DNA, 15 bp, Homo sapiens
taaatatattaagga

SEQ ID NO: 1378232 - DNA, 15 bp, Homo sapiens
gtaaatatattaagg

SEQ ID NO: 1378233 - DNA, 15 bp, Homo sapiens
agtaaatatattaag

SEQ ID NO: 1378234 - DNA, 15 bp, Homo sapiens
aagtaaatatattaa

SEQ ID NO: 1378235 - DNA, 15 bp, Homo sapiens
taagtaaatatatta

SEQ ID NO: 1378236 - DNA, 15 bp, Homo sapiens
ataagtaaatatatt

SEQ ID NO: 1378237 - DNA, 15 bp, Homo sapiens
aataagtaaatatat

SEQ ID NO: 1378238 - DNA, 15 bp, Homo sapiens
aaataagtaaatata

SEQ ID NO: 1378239 - DNA, 15 bp, Homo sapiens
caaataagtaaatat

SEQ ID NO: 1378240 - DNA, 15 bp, Homo sapiens
gcaaataagtaaata

SEQ ID NO: 1378241 - DNA, 15 bp, Homo sapiens
agcaaataagtaaat

SEQ ID NO: 1378242 - DNA, 15 bp, Homo sapiens
aagcaaataagtaaa

SEQ ID NO: 1378243 - DNA, 15 bp, Homo sapiens
taagcaaataagtaa

SEQ ID NO: 1378244 - DNA, 15 bp, Homo sapiens
ttaagcaaataagta

SEQ ID NO: 1378245 - DNA, 15 bp, Homo sapiens
gttaagcaaataagt

SEQ ID NO: 1378246 - DNA, 15 bp, Homo sapiens
ggttaagcaaataag

SEQ ID NO: 1378247 - DNA, 15 bp, Homo sapiens
gggttaagcaaataa

SEQ ID NO: 1378248 - DNA, 15 bp, Homo sapiens
tgggttaagcaaata

SEQ ID NO: 1378249 - DNA, 15 bp, Homo sapiens
atgggttaagcaaat

SEQ ID NO: 1378250 - DNA, 15 bp, Homo sapiens
gatgggttaagcaaa

SEQ ID NO: 1378251 - DNA, 15 bp, Homo sapiens
agatgggttaagcaa

SEQ ID NO: 1378252 - DNA, 15 bp, Homo sapiens
cagatgggttaagca

SEQ ID NO: 1378253 - DNA, 15 bp, Homo sapiens
acagatgggttaagc

SEQ ID NO: 1378254 - DNA, 15 bp, Homo sapiens
tacagatgggttaag

SEQ ID NO: 1378255 - DNA, 15 bp, Homo sapiens
atacagatgggttaa

SEQ ID NO: 1378256 - DNA, 15 bp, Homo sapiens
catacagatgggtta

SEQ ID NO: 1378257 - DNA, 15 bp, Homo sapiens
acatacagatgggtt

SEQ ID NO: 1378258 - DNA, 15 bp, Homo sapiens
tacatacagatgggt

SEQ ID NO: 1378259 - DNA, 15 bp, Homo sapiens
ttacatacagatggg

SEQ ID NO: 1378260 - DNA, 15 bp, Homo sapiens
gttacatacagatgg

SEQ ID NO: 1378261 - DNA, 15 bp, Homo sapiens
ggttacatacagatg

SEQ ID NO: 1378262 - DNA, 15 bp, Homo sapiens
tggttacatacagat

SEQ ID NO: 1378263 - DNA, 15 bp, Homo sapiens
ctggttacatacaga

SEQ ID NO: 1378264 - DNA, 15 bp, Homo sapiens
actggttacatacag

SEQ ID NO: 1378265 - DNA, 15 bp, Homo sapiens
tactggttacataca

SEQ ID NO: 1378266 - DNA, 15 bp, Homo sapiens
atactggttacatac

SEQ ID NO: 1378267 - DNA, 15 bp, Homo sapiens
gatactggttacata

SEQ ID NO: 1378268 - DNA, 15 bp, Homo sapiens
agatactggttacat

SEQ ID NO: 1378269 - DNA, 15 bp, Homo sapiens
gagatactggttaca

SEQ ID NO: 1378270 - DNA, 15 bp, Homo sapiens
agagatactggttac

SEQ ID NO: 1378271 - DNA, 15 bp, Homo sapiens
aagagatactggtta

SEQ ID NO: 1378272 - DNA, 15 bp, Homo sapiens
taagagatactggtt

SEQ ID NO: 1378273 - DNA, 15 bp, Homo sapiens
ttaagagatactggt

SEQ ID NO: 1378274 - DNA, 15 bp, Homo sapiens
attaagagatactgg

SEQ ID NO: 1378275 - DNA, 15 bp, Homo sapiens
tattaagagatactg

SEQ ID NO: 1378276 - DNA, 15 bp, Homo sapiens
atattaagagatact

SEQ ID NO: 1378277 - DNA, 15 bp, Homo sapiens
gatattaagagatac

SEQ ID NO: 1378278 - DNA, 15 bp, Homo sapiens
ggatattaagagata

SEQ ID NO: 1378279 - DNA, 15 bp, Homo sapiens
gggatattaagagat

SEQ ID NO: 1378280 - DNA, 15 bp, Homo sapiens
ggggatattaagaga

SEQ ID NO: 1378281 - DNA, 15 bp, Homo sapiens
gggggatattaagag

SEQ ID NO: 1378282 - DNA, 15 bp, Homo sapiens
ggggggatattaaga

SEQ ID NO: 1378283 - DNA, 15 bp, Homo sapiens
aggggggatattaag

SEQ ID NO: 1378284 - DNA, 15 bp, Homo sapiens
gaggggggatattaa

SEQ ID NO: 1378285 - DNA, 15 bp, Homo sapiens
tgaggggggatatta

SEQ ID NO: 1378286 - DNA, 15 bp, Homo sapiens
gtgaggggggatatt

SEQ ID NO: 1378287 - DNA, 15 bp, Homo sapiens
ggtgaggggggatat

SEQ ID NO: 1378288 - DNA, 15 bp, Homo sapiens
aggtgaggggggata

SEQ ID NO: 1378289 - DNA, 15 bp, Homo sapiens
gaggtgaggggggat

SEQ ID NO: 1378290 - DNA, 15 bp, Homo sapiens
tgaggtgagggggga

SEQ ID NO: 1378291 - DNA, 15 bp, Homo sapiens
gtgaggtgagggggg

SEQ ID NO: 1378292 - DNA, 15 bp, Homo sapiens
agtgaggtgaggggg

SEQ ID NO: 1378293 - DNA, 15 bp, Homo sapiens
gagtgaggtgagggg

SEQ ID NO: 1378294 - DNA, 15 bp, Homo sapiens
agagtgaggtgaggg

SEQ ID NO: 1378295 - DNA, 15 bp, Homo sapiens
cagagtgaggtgagg

SEQ ID NO: 1378296 - DNA, 15 bp, Homo sapiens
ccagagtgaggtgag

SEQ ID NO: 1378297 - DNA, 15 bp, Homo sapiens
gccagagtgaggtga

SEQ ID NO: 1378298 - DNA, 15 bp, Homo sapiens
agccagagtgaggtg

SEQ ID NO: 1378299 - DNA, 15 bp, Homo sapiens
gagccagagtgaggt

SEQ ID NO: 1378300 - DNA, 15 bp, Homo sapiens
agagccagagtgagg

SEQ ID NO: 1378301 - DNA, 15 bp, Homo sapiens
cagagccagagtgag

SEQ ID NO: 1378302 - DNA, 15 bp, Homo sapiens
tcagagccagagtga

SEQ ID NO: 1378303 - DNA, 15 bp, Homo sapiens
atcagagccagagtg

SEQ ID NO: 1378304 - DNA, 15 bp, Homo sapiens
tatcagagccagagt

SEQ ID NO: 1378305 - DNA, 15 bp, Homo sapiens
atatcagagccagag

SEQ ID NO: 1378306 - DNA, 15 bp, Homo sapiens
gatatcagagccaga

SEQ ID NO: 1378307 - DNA, 15 bp, Homo sapiens
tgatatcagagccag

SEQ ID NO: 1378308 - DNA, 15 bp, Homo sapiens
gtgatatcagagcca

SEQ ID NO: 1378309 - DNA, 15 bp, Homo sapiens
tgtgatatcagagcc

SEQ ID NO: 1378310 - DNA, 15 bp, Homo sapiens
atgtgatatcagagc

SEQ ID NO: 1378311 - DNA, 15 bp, Homo sapiens
catgtgatatcagag

SEQ ID NO: 1378312 - DNA, 15 bp, Homo sapiens
gcatgtgatatcaga

SEQ ID NO: 1378313 - DNA, 15 bp, Homo sapiens
agcatgtgatatcag

SEQ ID NO: 1378314 - DNA, 15 bp, Homo sapiens
aagcatgtgatatca

SEQ ID NO: 1378315 - DNA, 15 bp, Homo sapiens
caagcatgtgatatc

SEQ ID NO: 1378316 - DNA, 15 bp, Homo sapiens
ccaagcatgtgatat

SEQ ID NO: 1378317 - DNA, 15 bp, Homo sapiens
cccaagcatgtgata

SEQ ID NO: 1378318 - DNA, 15 bp, Homo sapiens
acccaagcatgtgat

SEQ ID NO: 1378319 - DNA, 15 bp, Homo sapiens
aacccaagcatgtga

SEQ ID NO: 1378320 - DNA, 15 bp, Homo sapiens
aaacccaagcatgtg

SEQ ID NO: 1378321 - DNA, 15 bp, Homo sapiens
aaaacccaagcatgt

SEQ ID NO: 1378322 - DNA, 15 bp, Homo sapiens
caaaacccaagcatg

SEQ ID NO: 1378323 - DNA, 15 bp, Homo sapiens
tcaaaacccaagcat

SEQ ID NO: 1378324 - DNA, 15 bp, Homo sapiens
ttcaaaacccaagca

SEQ ID NO: 1378325 - DNA, 15 bp, Homo sapiens
tttcaaaacccaagc

SEQ ID NO: 1378326 - DNA, 15 bp, Homo sapiens
gtttcaaaacccaag

SEQ ID NO: 1378327 - DNA, 15 bp, Homo sapiens
ggtttcaaaacccaa

SEQ ID NO: 1378328 - DNA, 15 bp, Homo sapiens
tggtttcaaaaccca

SEQ ID NO: 1378329 - DNA, 15 bp, Homo sapiens
gtggtttcaaaaccc

SEQ ID NO: 1378330 - DNA, 15 bp, Homo sapiens
tgtggtttcaaaacc

SEQ ID NO: 1378331 - DNA, 15 bp, Homo sapiens
atgtggtttcaaaac

SEQ ID NO: 1378332 - DNA, 15 bp, Homo sapiens
catgtggtttcaaaa

SEQ ID NO: 1378333 - DNA, 15 bp, Homo sapiens
gcatgtggtttcaaa

SEQ ID NO: 1378334 - DNA, 15 bp, Homo sapiens
agcatgtggtttcaa

SEQ ID NO: 1378335 - DNA, 15 bp, Homo sapiens
cagcatgtggtttca

SEQ ID NO: 1378336 - DNA, 15 bp, Homo sapiens
tcagcatgtggtttc

SEQ ID NO: 1378337 - DNA, 15 bp, Homo sapiens
ctcagcatgtggttt

SEQ ID NO: 1378338 - DNA, 15 bp, Homo sapiens
gctcagcatgtggtt

SEQ ID NO: 1378339 - DNA, 15 bp, Homo sapiens
tgctcagcatgtggt

SEQ ID NO: 1378340 - DNA, 15 bp, Homo sapiens
atgctcagcatgtgg

SEQ ID NO: 1378341 - DNA, 15 bp, Homo sapiens
gatgctcagcatgtg

SEQ ID NO: 1378342 - DNA, 15 bp, Homo sapiens
ggatgctcagcatgt

SEQ ID NO: 1378343 - DNA, 15 bp, Homo sapiens
aggatgctcagcatg

SEQ ID NO: 1378344 - DNA, 15 bp, Homo sapiens
gaggatgctcagcat

SEQ ID NO: 1378345 - DNA, 15 bp, Homo sapiens
ggaggatgctcagca

SEQ ID NO: 1378346 - DNA, 15 bp, Homo sapiens
aggaggatgctcagc

SEQ ID NO: 1378347 - DNA, 15 bp, Homo sapiens
gaggaggatgctcag

SEQ ID NO: 1378348 - DNA, 15 bp, Homo sapiens
tgaggaggatgctca

SEQ ID NO: 1378349 - DNA, 15 bp, Homo sapiens
ctgaggaggatgctc

SEQ ID NO: 1378350 - DNA, 15 bp, Homo sapiens
tctgaggaggatgct

SEQ ID NO: 1378351 - DNA, 15 bp, Homo sapiens
ctctgaggaggatgc

SEQ ID NO: 1378352 - DNA, 15 bp, Homo sapiens
cctctgaggaggatg

SEQ ID NO: 1378353 - DNA, 15 bp, Homo sapiens
gcctctgaggaggat

SEQ ID NO: 1378354 - DNA, 15 bp, Homo sapiens
ggcctctgaggagga

SEQ ID NO: 1378355 - DNA, 15 bp, Homo sapiens
aggcctctgaggagg

SEQ ID NO: 1378356 - DNA, 15 bp, Homo sapiens
aaggcctctgaggag

SEQ ID NO: 1378357 - DNA, 15 bp, Homo sapiens
caaggcctctgagga

SEQ ID NO: 1378358 - DNA, 15 bp, Homo sapiens
gcaaggcctctgagg

SEQ ID NO: 1378359 - DNA, 15 bp, Homo sapiens
agcaaggcctctgag

SEQ ID NO: 1378360 - DNA, 15 bp, Homo sapiens
gagcaaggcctctga

SEQ ID NO: 1378361 - DNA, 15 bp, Homo sapiens
tgagcaaggcctctg

SEQ ID NO: 1378362 - DNA, 15 bp, Homo sapiens
ctgagcaaggcctct

SEQ ID NO: 1378363 - DNA, 15 bp, Homo sapiens
actgagcaaggcctc

SEQ ID NO: 1378364 - DNA, 15 bp, Homo sapiens
aactgagcaaggcct

SEQ ID NO: 1378365 - DNA, 15 bp, Homo sapiens
caactgagcaaggcc

SEQ ID NO: 1378366 - DNA, 15 bp, Homo sapiens
acaactgagcaaggc

SEQ ID NO: 1378367 - DNA, 15 bp, Homo sapiens
gacaactgagcaagg

SEQ ID NO: 1378368 - DNA, 15 bp, Homo sapiens
agacaactgagcaag

SEQ ID NO: 1378369 - DNA, 15 bp, Homo sapiens
cagacaactgagcaa

SEQ ID NO: 1378370 - DNA, 15 bp, Homo sapiens
ccagacaactgagca

SEQ ID NO: 1378371 - DNA, 15 bp, Homo sapiens
cccagacaactgagc

SEQ ID NO: 1378372 - DNA, 15 bp, Homo sapiens
gcccagacaactgag

SEQ ID NO: 1378373 - DNA, 15 bp, Homo sapiens
agcccagacaactga

SEQ ID NO: 1378374 - DNA, 15 bp, Homo sapiens
gagcccagacaactg

SEQ ID NO: 1378375 - DNA, 15 bp, Homo sapiens
ggagcccagacaact

SEQ ID NO: 1378376 - DNA, 15 bp, Homo sapiens
tggagcccagacaac

SEQ ID NO: 1378377 - DNA, 15 bp, Homo sapiens
ctggagcccagacaa

SEQ ID NO: 1378378 - DNA, 15 bp, Homo sapiens
gctggagcccagaca

SEQ ID NO: 1378379 - DNA, 15 bp, Homo sapiens
tgctggagcccagac

SEQ ID NO: 1378380 - DNA, 15 bp, Homo sapiens
gtgctggagcccaga

SEQ ID NO: 1378381 - DNA, 15 bp, Homo sapiens
ggtgctggagcccag

SEQ ID NO: 1378382 - DNA, 15 bp, Homo sapiens
gggtgctggagccca

SEQ ID NO: 1378383 - DNA, 15 bp, Homo sapiens
tgggtgctggagccc

SEQ ID NO: 1378384 - DNA, 15 bp, Homo sapiens
ttgggtgctggagcc

SEQ ID NO: 1378385 - DNA, 15 bp, Homo sapiens
attgggtgctggagc

SEQ ID NO: 1378386 - DNA, 15 bp, Homo sapiens
tattgggtgctggag

SEQ ID NO: 1378387 - DNA, 15 bp, Homo sapiens
atattgggtgctgga

SEQ ID NO: 1378388 - DNA, 15 bp, Homo sapiens
gatattgggtgctgg

SEQ ID NO: 1378389 - DNA, 15 bp, Homo sapiens
ggatattgggtgctg

SEQ ID NO: 1378390 - DNA, 15 bp, Homo sapiens
aggatattgggtgct

SEQ ID NO: 1378391 - DNA, 15 bp, Homo sapiens
gaggatattgggtgc

SEQ ID NO: 1378392 - DNA, 15 bp, Homo sapiens
agaggatattgggtg

SEQ ID NO: 1378393 - DNA, 15 bp, Homo sapiens
tagaggatattgggt

SEQ ID NO: 1378394 - DNA, 15 bp, Homo sapiens
gtagaggatattggg

SEQ ID NO: 1378395 - DNA, 15 bp, Homo sapiens
tgtagaggatattgg

SEQ ID NO: 1378396 - DNA, 15 bp, Homo sapiens
atgtagaggatattg

SEQ ID NO: 1378397 - DNA, 15 bp, Homo sapiens
gatgtagaggatatt

SEQ ID NO: 1378398 - DNA, 15 bp, Homo sapiens
ggatgtagaggatat

SEQ ID NO: 1378399 - DNA, 15 bp, Homo sapiens
tggatgtagaggata

SEQ ID NO: 1378400 - DNA, 15 bp, Homo sapiens
atggatgtagaggat

SEQ ID NO: 1378401 - DNA, 15 bp, Homo sapiens
gatggatgtagagga

SEQ ID NO: 1378402 - DNA, 15 bp, Homo sapiens
ggatggatgtagagg

SEQ ID NO: 1378403 - DNA, 15 bp, Homo sapiens
gggatggatgtagag

SEQ ID NO: 1378404 - DNA, 15 bp, Homo sapiens
ggggatggatgtaga

SEQ ID NO: 1378405 - DNA, 15 bp, Homo sapiens
gggggatggatgtag

SEQ ID NO: 1378406 - DNA, 15 bp, Homo sapiens
agggggatggatgta

SEQ ID NO: 1378407 - DNA, 15 bp, Homo sapiens
aagggggatggatgt

SEQ ID NO: 1378408 - DNA, 15 bp, Homo sapiens
gaagggggatggatg

SEQ ID NO: 1378409 - DNA, 15 bp, Homo sapiens
ggaagggggatggat

SEQ ID NO: 1378410 - DNA, 15 bp, Homo sapiens
gggaagggggatgga

SEQ ID NO: 1378411 - DNA, 15 bp, Homo sapiens
ggggaagggggatgg

SEQ ID NO: 1378412 - DNA, 15 bp, Homo sapiens
aggggaagggggatg

SEQ ID NO: 1378413 - DNA, 15 bp, Homo sapiens
taggggaagggggat

SEQ ID NO: 1378414 - DNA, 15 bp, Homo sapiens
ctaggggaaggggga

SEQ ID NO: 1378415 - DNA, 15 bp, Homo sapiens
cctaggggaaggggg

SEQ ID NO: 1378416 - DNA, 15 bp, Homo sapiens
ccctaggggaagggg

SEQ ID NO: 1378417 - DNA, 15 bp, Homo sapiens
cccctaggggaaggg

SEQ ID NO: 1378418 - DNA, 15 bp, Homo sapiens
tcccctaggggaagg

SEQ ID NO: 1378419 - DNA, 15 bp, Homo sapiens
atcccctaggggaag

SEQ ID NO: 1378420 - DNA, 15 bp, Homo sapiens
catcccctaggggaa

SEQ ID NO: 1378421 - DNA, 15 bp, Homo sapiens
gcatcccctagggga

SEQ ID NO: 1378422 - DNA, 15 bp, Homo sapiens
ggcatcccctagggg

SEQ ID NO: 1378423 - DNA, 15 bp, Homo sapiens
aggcatcccctaggg

SEQ ID NO: 1378424 - DNA, 15 bp, Homo sapiens
gaggcatcccctagg

SEQ ID NO: 1378425 - DNA, 15 bp, Homo sapiens
ggaggcatcccctag

SEQ ID NO: 1378426 - DNA, 15 bp, Homo sapiens
aggaggcatccccta

SEQ ID NO: 1378427 - DNA, 15 bp, Homo sapiens
aaggaggcatcccct

SEQ ID NO: 1378428 - DNA, 15 bp, Homo sapiens
taaggaggcatcccc

SEQ ID NO: 1378429 - DNA, 15 bp, Homo sapiens
ataaggaggcatccc

SEQ ID NO: 1378430 - DNA, 15 bp, Homo sapiens
tataaggaggcatcc

SEQ ID NO: 1378431 - DNA, 15 bp, Homo sapiens
gtataaggaggcatc

SEQ ID NO: 1378432 - DNA, 15 bp, Homo sapiens
tgtataaggaggcat

SEQ ID NO: 1378433 - DNA, 15 bp, Homo sapiens
gtgtataaggaggca

SEQ ID NO: 1378434 - DNA, 15 bp, Homo sapiens
tgtgtataaggaggc

SEQ ID NO: 1378435 - DNA, 15 bp, Homo sapiens
gtgtgtataaggagg

SEQ ID NO: 1378436 - DNA, 15 bp, Homo sapiens
agtgtgtataaggag

SEQ ID NO: 1378437 - DNA, 15 bp, Homo sapiens
cagtgtgtataagga

SEQ ID NO: 1378438 - DNA, 15 bp, Homo sapiens
ccagtgtgtataagg

SEQ ID NO: 1378439 - DNA, 15 bp, Homo sapiens
cccagtgtgtataag

SEQ ID NO: 1378440 - DNA, 15 bp, Homo sapiens
gcccagtgtgtataa

SEQ ID NO: 1378441 - DNA, 15 bp, Homo sapiens
agcccagtgtgtata

SEQ ID NO: 1378442 - DNA, 15 bp, Homo sapiens
gagcccagtgtgtat

SEQ ID NO: 1378443 - DNA, 15 bp, Homo sapiens
agagcccagtgtgta

SEQ ID NO: 1378444 - DNA, 15 bp, Homo sapiens
cagagcccagtgtgt

SEQ ID NO: 1378445 - DNA, 15 bp, Homo sapiens
tcagagcccagtgtg

SEQ ID NO: 1378446 - DNA, 15 bp, Homo sapiens
gtcagagcccagtgt

SEQ ID NO: 1378447 - DNA, 15 bp, Homo sapiens
tgtcagagcccagtg

SEQ ID NO: 1378448 - DNA, 15 bp, Homo sapiens
gtgtcagagcccagt

SEQ ID NO: 1378449 - DNA, 15 bp, Homo sapiens
ggtgtcagagcccag

SEQ ID NO: 1378450 - DNA, 15 bp, Homo sapiens
tggtgtcagagccca

SEQ ID NO: 1378451 - DNA, 15 bp, Homo sapiens
gtggtgtcagagccc

SEQ ID NO: 1378452 - DNA, 15 bp, Homo sapiens
tgtggtgtcagagcc

SEQ ID NO: 1378453 - DNA, 15 bp, Homo sapiens
atgtggtgtcagagc

SEQ ID NO: 1378454 - DNA, 15 bp, Homo sapiens
catgtggtgtcagag

SEQ ID NO: 1378455 - DNA, 15 bp, Homo sapiens
gcatgtggtgtcaga

SEQ ID NO: 1378456 - DNA, 15 bp, Homo sapiens
tgcatgtggtgtcag

SEQ ID NO: 1378457 - DNA, 15 bp, Homo sapiens
ctgcatgtggtgtca

SEQ ID NO: 1378458 - DNA, 15 bp, Homo sapiens
gctgcatgtggtgtc

SEQ ID NO: 1378459 - DNA, 15 bp, Homo sapiens
ggctgcatgtggtgt

SEQ ID NO: 1378460 - DNA, 15 bp, Homo sapiens
aggctgcatgtggtg

SEQ ID NO: 1378461 - DNA, 15 bp, Homo sapiens
caggctgcatgtggt

SEQ ID NO: 1378462 - DNA, 15 bp, Homo sapiens
gcaggctgcatgtgg

SEQ ID NO: 1378463 - DNA, 15 bp, Homo sapiens
ggcaggctgcatgtg

SEQ ID NO: 1378464 - DNA, 15 bp, Homo sapiens
gggcaggctgcatgt

SEQ ID NO: 1378465 - DNA, 15 bp, Homo sapiens
ggggcaggctgcatg

SEQ ID NO: 1378466 - DNA, 15 bp, Homo sapiens
gggggcaggctgcat

SEQ ID NO: 1378467 - DNA, 15 bp, Homo sapiens
agggggcaggctgca

SEQ ID NO: 1378468 - DNA, 15 bp, Homo sapiens
cagggggcaggctgc

SEQ ID NO: 1378469 - DNA, 15 bp, Homo sapiens
acagggggcaggctg

SEQ ID NO: 1378470 - DNA, 15 bp, Homo sapiens
aacagggggcaggct

SEQ ID NO: 1378471 - DNA, 15 bp, Homo sapiens
gaacagggggcaggc

SEQ ID NO: 1378472 - DNA, 15 bp, Homo sapiens
agaacagggggcagg

SEQ ID NO: 1378473 - DNA, 15 bp, Homo sapiens
aagaacagggggcag

SEQ ID NO: 1378474 - DNA, 15 bp, Homo sapiens
taagaacagggggca

SEQ ID NO: 1378475 - DNA, 15 bp, Homo sapiens
ataagaacagggggc

SEQ ID NO: 1378476 - DNA, 15 bp, Homo sapiens
tataagaacaggggg

SEQ ID NO: 1378477 - DNA, 15 bp, Homo sapiens
gtataagaacagggg

SEQ ID NO: 1378478 - DNA, 15 bp, Homo sapiens
ggtataagaacaggg

SEQ ID NO: 1378479 - DNA, 15 bp, Homo sapiens
gggtataagaacagg

SEQ ID NO: 1378480 - DNA, 15 bp, Homo sapiens
agggtataagaacag

SEQ ID NO: 1378481 - DNA, 15 bp, Homo sapiens
gagggtataagaaca

SEQ ID NO: 1378482 - DNA, 15 bp, Homo sapiens
ggagggtataagaac

SEQ ID NO: 1378483 - DNA, 15 bp, Homo sapiens
aggagggtataagaa

SEQ ID NO: 1378484 - DNA, 15 bp, Homo sapiens
aaggagggtataaga

SEQ ID NO: 1378485 - DNA, 15 bp, Homo sapiens
aaaggagggtataag

SEQ ID NO: 1378486 - DNA, 15 bp, Homo sapiens
gaaaggagggtataa

SEQ ID NO: 1378487 - DNA, 15 bp, Homo sapiens
agaaaggagggtata

SEQ ID NO: 1378488 - DNA, 15 bp, Homo sapiens
gagaaaggagggtat

SEQ ID NO: 1378489 - DNA, 15 bp, Homo sapiens
agagaaaggagggta

SEQ ID NO: 1378490 - DNA, 15 bp, Homo sapiens
cagagaaaggagggt

SEQ ID NO: 1378491 - DNA, 15 bp, Homo sapiens
gcagagaaaggaggg

SEQ ID NO: 1378492 - DNA, 15 bp, Homo sapiens
agcagagaaaggagg

SEQ ID NO: 1378493 - DNA, 15 bp, Homo sapiens
aagcagagaaaggag

SEQ ID NO: 1378494 - DNA, 15 bp, Homo sapiens
caagcagagaaagga

SEQ ID NO: 1378495 - DNA, 15 bp, Homo sapiens
ccaagcagagaaagg

SEQ ID NO: 1378496 - DNA, 15 bp, Homo sapiens
cccaagcagagaaag

SEQ ID NO: 1378497 - DNA, 15 bp, Homo sapiens
gcccaagcagagaaa

SEQ ID NO: 1378498 - DNA, 15 bp, Homo sapiens
ggcccaagcagagaa

SEQ ID NO: 1378499 - DNA, 15 bp, Homo sapiens
tggcccaagcagaga

SEQ ID NO: 1378500 - DNA, 15 bp, Homo sapiens
atggcccaagcagag

SEQ ID NO: 1378501 - DNA, 15 bp, Homo sapiens
catggcccaagcaga

SEQ ID NO: 1378502 - DNA, 15 bp, Homo sapiens
tcatggcccaagcag

SEQ ID NO: 1378503 - DNA, 15 bp, Homo sapiens
gtcatggcccaagca

SEQ ID NO: 1378504 - DNA, 15 bp, Homo sapiens
tgtcatggcccaagc

SEQ ID NO: 1378505 - DNA, 15 bp, Homo sapiens
gtgtcatggcccaag

SEQ ID NO: 1378506 - DNA, 15 bp, Homo sapiens
ggtgtcatggcccaa

SEQ ID NO: 1378507 - DNA, 15 bp, Homo sapiens
gggtgtcatggccca

SEQ ID NO: 1378508 - DNA, 15 bp, Homo sapiens
agggtgtcatggccc

SEQ ID NO: 1378509 - DNA, 15 bp, Homo sapiens
tagggtgtcatggcc

SEQ ID NO: 1378510 - DNA, 15 bp, Homo sapiens
ttagggtgtcatggc

SEQ ID NO: 1378511 - DNA, 15 bp, Homo sapiens
cttagggtgtcatgg

SEQ ID NO: 1378512 - DNA, 15 bp, Homo sapiens
gcttagggtgtcatg

SEQ ID NO: 1378513 - DNA, 15 bp, Homo sapiens
tgcttagggtgtcat

SEQ ID NO: 1378514 - DNA, 15 bp, Homo sapiens
ctgcttagggtgtca

SEQ ID NO: 1378515 - DNA, 15 bp, Homo sapiens
cctgcttagggtgtc

SEQ ID NO: 1378516 - DNA, 15 bp, Homo sapiens
ccctgcttagggtgt

SEQ ID NO: 1378517 - DNA, 15 bp, Homo sapiens
gccctgcttagggtg

SEQ ID NO: 1378518 - DNA, 15 bp, Homo sapiens
agccctgcttagggt

SEQ ID NO: 1378519 - DNA, 15 bp, Homo sapiens
cagccctgcttaggg

SEQ ID NO: 1378520 - DNA, 15 bp, Homo sapiens
gcagccctgcttagg

SEQ ID NO: 1378521 - DNA, 15 bp, Homo sapiens
ggcagccctgcttag

SEQ ID NO: 1378522 - DNA, 15 bp, Homo sapiens
cggcagccctgctta

SEQ ID NO: 1378523 - DNA, 15 bp, Homo sapiens
gcggcagccctgctt

SEQ ID NO: 1378524 - DNA, 15 bp, Homo sapiens
tgcggcagccctgct

SEQ ID NO: 1378525 - DNA, 15 bp, Homo sapiens
atgcggcagccctgc

SEQ ID NO: 1378526 - DNA, 15 bp, Homo sapiens
catgcggcagccctg

SEQ ID NO: 1378527 - DNA, 15 bp, Homo sapiens
gcatgcggcagccct

SEQ ID NO: 1378528 - DNA, 15 bp, Homo sapiens
tgcatgcggcagccc

SEQ ID NO: 1378529 - DNA, 15 bp, Homo sapiens
atgcatgcggcagcc

SEQ ID NO: 1378530 - DNA, 15 bp, Homo sapiens
gatgcatgcggcagc

SEQ ID NO: 1378531 - DNA, 15 bp, Homo sapiens
cgatgcatgcggcag

SEQ ID NO: 1378532 - DNA, 15 bp, Homo sapiens
tcgatgcatgcggca

SEQ ID NO: 1378533 - DNA, 15 bp, Homo sapiens
atcgatgcatgcggc

SEQ ID NO: 1378534 - DNA, 15 bp, Homo sapiens
catcgatgcatgcgg

SEQ ID NO: 1378535 - DNA, 15 bp, Homo sapiens
gcatcgatgcatgcg

SEQ ID NO: 1378536 - DNA, 15 bp, Homo sapiens
agcatcgatgcatgc

SEQ ID NO: 1378537 - DNA, 15 bp, Homo sapiens
cagcatcgatgcatg

SEQ ID NO: 1378538 - DNA, 15 bp, Homo sapiens
acagcatcgatgcat

SEQ ID NO: 1378539 - DNA, 15 bp, Homo sapiens
gacagcatcgatgca

SEQ ID NO: 1378540 - DNA, 15 bp, Homo sapiens
ggacagcatcgatgc

SEQ ID NO: 1378541 - DNA, 15 bp, Homo sapiens
aggacagcatcgatg

SEQ ID NO: 1378542 - DNA, 15 bp, Homo sapiens
gaggacagcatcgat

SEQ ID NO: 1378543 - DNA, 15 bp, Homo sapiens
tgaggacagcatcga

SEQ ID NO: 1378544 - DNA, 15 bp, Homo sapiens
gtgaggacagcatcg

SEQ ID NO: 1378545 - DNA, 15 bp, Homo sapiens
ggtgaggacagcatc

SEQ ID NO: 1378546 - DNA, 15 bp, Homo sapiens
aggtgaggacagcat

SEQ ID NO: 1378547 - DNA, 15 bp, Homo sapiens
aaggtgaggacagca

SEQ ID NO: 1378548 - DNA, 15 bp, Homo sapiens
caaggtgaggacagc

SEQ ID NO: 1378549 - DNA, 15 bp, Homo sapiens
gcaaggtgaggacag

SEQ ID NO: 1378550 - DNA, 15 bp, Homo sapiens
agcaaggtgaggaca

SEQ ID NO: 1378551 - DNA, 15 bp, Homo sapiens
cagcaaggtgaggac

SEQ ID NO: 1378552 - DNA, 15 bp, Homo sapiens
tcagcaaggtgagga

SEQ ID NO: 1378553 - DNA, 15 bp, Homo sapiens
ctcagcaaggtgagg

SEQ ID NO: 1378554 - DNA, 15 bp, Homo sapiens
actcagcaaggtgag

SEQ ID NO: 1378555 - DNA, 15 bp, Homo sapiens
gactcagcaaggtga

SEQ ID NO: 1378556 - DNA, 15 bp, Homo sapiens
agactcagcaaggtg

SEQ ID NO: 1378557 - DNA, 15 bp, Homo sapiens
gagactcagcaaggt

SEQ ID NO: 1378558 - DNA, 15 bp, Homo sapiens
tgagactcagcaagg

SEQ ID NO: 1378559 - DNA, 15 bp, Homo sapiens
ctgagactcagcaag

SEQ ID NO: 1378560 - DNA, 15 bp, Homo sapiens
actgagactcagcaa

SEQ ID NO: 1378561 - DNA, 15 bp, Homo sapiens
cactgagactcagca

SEQ ID NO: 1378562 - DNA, 15 bp, Homo sapiens
gcactgagactcagc

SEQ ID NO: 1378563 - DNA, 15 bp, Homo sapiens
ggcactgagactcag

SEQ ID NO: 1378564 - DNA, 15 bp, Homo sapiens
cggcactgagactca

SEQ ID NO: 1378565 - DNA, 15 bp, Homo sapiens
gcggcactgagactc

SEQ ID NO: 1378566 - DNA, 15 bp, Homo sapiens
agcggcactgagact

SEQ ID NO: 1378567 - DNA, 15 bp, Homo sapiens
tagcggcactgagac

SEQ ID NO: 1378568 - DNA, 15 bp, Homo sapiens
gtagcggcactgaga

SEQ ID NO: 1378569 - DNA, 15 bp, Homo sapiens
ggtagcggcactgag

SEQ ID NO: 1378570 - DNA, 15 bp, Homo sapiens
tggtagcggcactga

SEQ ID NO: 1378571 - DNA, 15 bp, Homo sapiens
ttggtagcggcactg

SEQ ID NO: 1378572 - DNA, 15 bp, Homo sapiens
gttggtagcggcact

SEQ ID NO: 1378573 - DNA, 15 bp, Homo sapiens
ggttggtagcggcac

SEQ ID NO: 1378574 - DNA, 15 bp, Homo sapiens
gggttggtagcggca

SEQ ID NO: 1378575 - DNA, 15 bp, Homo sapiens
ggggttggtagcggc

SEQ ID NO: 1378576 - DNA, 15 bp, Homo sapiens
gggggttggtagcgg

SEQ ID NO: 1378577 - DNA, 15 bp, Homo sapiens
tgggggttggtagcg

SEQ ID NO: 1378578 - DNA, 15 bp, Homo sapiens
gtgggggttggtagc

SEQ ID NO: 1378579 - DNA, 15 bp, Homo sapiens
agtgggggttggtag

SEQ ID NO: 1378580 - DNA, 15 bp, Homo sapiens
cagtgggggttggta

SEQ ID NO: 1378581 - DNA, 15 bp, Homo sapiens
acagtgggggttggt

SEQ ID NO: 1378582 - DNA, 15 bp, Homo sapiens
gacagtgggggttgg

SEQ ID NO: 1378583 - DNA, 15 bp, Homo sapiens
agacagtgggggttg

SEQ ID NO: 1378584 - DNA, 15 bp, Homo sapiens
cagacagtgggggtt

SEQ ID NO: 1378585 - DNA, 15 bp, Homo sapiens
acagacagtgggggt

SEQ ID NO: 1378586 - DNA, 15 bp, Homo sapiens
gacagacagtggggg

SEQ ID NO: 1378587 - DNA, 15 bp, Homo sapiens
agacagacagtgggg

SEQ ID NO: 1378588 - DNA, 15 bp, Homo sapiens
aagacagacagtggg

SEQ ID NO: 1378589 - DNA, 15 bp, Homo sapiens
gaagacagacagtgg

SEQ ID NO: 1378590 - DNA, 15 bp, Homo sapiens
tgaagacagacagtg

SEQ ID NO: 1378591 - DNA, 15 bp, Homo sapiens
gtgaagacagacagt

SEQ ID NO: 1378592 - DNA, 15 bp, Homo sapiens
ggtgaagacagacag

SEQ ID NO: 1378593 - DNA, 15 bp, Homo sapiens
gggtgaagacagaca

SEQ ID NO: 1378594 - DNA, 15 bp, Homo sapiens
tgggtgaagacagac

SEQ ID NO: 1378595 - DNA, 15 bp, Homo sapiens
ttgggtgaagacaga

SEQ ID NO: 1378596 - DNA, 15 bp, Homo sapiens
cttgggtgaagacag

SEQ ID NO: 1378597 - DNA, 15 bp, Homo sapiens
gcttgggtgaagaca

SEQ ID NO: 1378598 - DNA, 15 bp, Homo sapiens
tgcttgggtgaagac

SEQ ID NO: 1378599 - DNA, 15 bp, Homo sapiens
atgcttgggtgaaga

SEQ ID NO: 1378600 - DNA, 15 bp, Homo sapiens
tatgcttgggtgaag

SEQ ID NO: 1378601 - DNA, 15 bp, Homo sapiens
ctatgcttgggtgaa

SEQ ID NO: 1378602 - DNA, 15 bp, Homo sapiens
tctatgcttgggtga

SEQ ID NO: 1378603 - DNA, 15 bp, Homo sapiens
atctatgcttgggtg

SEQ ID NO: 1378604 - DNA, 15 bp, Homo sapiens
tatctatgcttgggt

SEQ ID NO: 1378605 - DNA, 15 bp, Homo sapiens
gtatctatgcttggg

SEQ ID NO: 1378606 - DNA, 15 bp, Homo sapiens
ggtatctatgcttgg

SEQ ID NO: 1378607 - DNA, 15 bp, Homo sapiens
aggtatctatgcttg

SEQ ID NO: 1378608 - DNA, 15 bp, Homo sapiens
taggtatctatgctt

SEQ ID NO: 1378609 - DNA, 15 bp, Homo sapiens
gtaggtatctatgct

SEQ ID NO: 1378610 - DNA, 15 bp, Homo sapiens
ggtaggtatctatgc

SEQ ID NO: 1378611 - DNA, 15 bp, Homo sapiens
aggtaggtatctatg

SEQ ID NO: 1378612 - DNA, 15 bp, Homo sapiens
gaggtaggtatctat

SEQ ID NO: 1378613 - DNA, 15 bp, Homo sapiens
cgaggtaggtatcta

SEQ ID NO: 1378614 - DNA, 15 bp, Homo sapiens
gcgaggtaggtatct

SEQ ID NO: 1378615 - DNA, 15 bp, Homo sapiens
agcgaggtaggtatc

SEQ ID NO: 1378616 - DNA, 15 bp, Homo sapiens
aagcgaggtaggtat

SEQ ID NO: 1378617 - DNA, 15 bp, Homo sapiens
caagcgaggtaggta

SEQ ID NO: 1378618 - DNA, 15 bp, Homo sapiens
ccaagcgaggtaggt

SEQ ID NO: 1378619 - DNA, 15 bp, Homo sapiens
gccaagcgaggtagg

SEQ ID NO: 1378620 - DNA, 15 bp, Homo sapiens
ggccaagcgaggtag

SEQ ID NO: 1378621 - DNA, 15 bp, Homo sapiens
gggccaagcgaggta

SEQ ID NO: 1378622 - DNA, 15 bp, Homo sapiens
ggggccaagcgaggt

SEQ ID NO: 1378623 - DNA, 15 bp, Homo sapiens
tggggccaagcgagg

SEQ ID NO: 1378624 - DNA, 15 bp, Homo sapiens
gtggggccaagcgag

SEQ ID NO: 1378625 - DNA, 15 bp, Homo sapiens
ggtggggccaagcga

SEQ ID NO: 1378626 - DNA, 15 bp, Homo sapiens
aggtggggccaagcg

SEQ ID NO: 1378627 - DNA, 15 bp, Homo sapiens
taggtggggccaagc

SEQ ID NO: 1378628 - DNA, 15 bp, Homo sapiens
ataggtggggccaag

SEQ ID NO: 1378629 - DNA, 15 bp, Homo sapiens
cataggtggggccaa

SEQ ID NO: 1378630 - DNA, 15 bp, Homo sapiens
tcataggtggggcca

SEQ ID NO: 1378631 - DNA, 15 bp, Homo sapiens
gtcataggtggggcc

SEQ ID NO: 1378632 - DNA, 15 bp, Homo sapiens
agtcataggtggggc

SEQ ID NO: 1378633 - DNA, 15 bp, Homo sapiens
aagtcataggtgggg

SEQ ID NO: 1378634 - DNA, 15 bp, Homo sapiens
aaagtcataggtggg

SEQ ID NO: 1378635 - DNA, 15 bp, Homo sapiens
taaagtcataggtgg

SEQ ID NO: 1378636 - DNA, 15 bp, Homo sapiens
ctaaagtcataggtg

SEQ ID NO: 1378637 - DNA, 15 bp, Homo sapiens
tctaaagtcataggt

SEQ ID NO: 1378638 - DNA, 15 bp, Homo sapiens
ttctaaagtcatagg

SEQ ID NO: 1378639 - DNA, 15 bp, Homo sapiens
gttctaaagtcatag

SEQ ID NO: 1378640 - DNA, 15 bp, Homo sapiens
agttctaaagtcata

SEQ ID NO: 1378641 - DNA, 15 bp, Homo sapiens
tagttctaaagtcat

SEQ ID NO: 1378642 - DNA, 15 bp, Homo sapiens
atagttctaaagtca

SEQ ID NO: 1378643 - DNA, 15 bp, Homo sapiens
catagttctaaagtc

SEQ ID NO: 1378644 - DNA, 15 bp, Homo sapiens
acatagttctaaagt

SEQ ID NO: 1378645 - DNA, 15 bp, Homo sapiens
tacatagttctaaag

SEQ ID NO: 1378646 - DNA, 15 bp, Homo sapiens
ctacatagttctaaa

SEQ ID NO: 1378647 - DNA, 15 bp, Homo sapiens
cctacatagttctaa

SEQ ID NO: 1378648 - DNA, 15 bp, Homo sapiens
tcctacatagttcta

SEQ ID NO: 1378649 - DNA, 15 bp, Homo sapiens
ttcctacatagttct

SEQ ID NO: 1378650 - DNA, 15 bp, Homo sapiens
cttcctacatagttc

SEQ ID NO: 1378651 - DNA, 15 bp, Homo sapiens
ccttcctacatagtt

SEQ ID NO: 1378652 - DNA, 15 bp, Homo sapiens
cccttcctacatagt

SEQ ID NO: 1378653 - DNA, 15 bp, Homo sapiens
ccccttcctacatag

SEQ ID NO: 1378654 - DNA, 15 bp, Homo sapiens
tccccttcctacata

SEQ ID NO: 1378655 - DNA, 15 bp, Homo sapiens
ttccccttcctacat

SEQ ID NO: 1378656 - DNA, 15 bp, Homo sapiens
cttccccttcctaca

SEQ ID NO: 1378657 - DNA, 15 bp, Homo sapiens
tcttccccttcctac

SEQ ID NO: 1378658 - DNA, 15 bp, Homo sapiens
gtcttccccttccta

SEQ ID NO: 1378659 - DNA, 15 bp, Homo sapiens
tgtcttccccttcct

SEQ ID NO: 1378660 - DNA, 15 bp, Homo sapiens
ttgtcttccccttcc

SEQ ID NO: 1378661 - DNA, 15 bp, Homo sapiens
tttgtcttccccttc

SEQ ID NO: 1378662 - DNA, 15 bp, Homo sapiens
ctttgtcttcccctt

SEQ ID NO: 1378663 - DNA, 15 bp, Homo sapiens
tctttgtcttcccct

SEQ ID NO: 1378664 - DNA, 15 bp, Homo sapiens
ctctttgtcttcccc

SEQ ID NO: 1378665 - DNA, 15 bp, Homo sapiens
cctctttgtcttccc

SEQ ID NO: 1378666 - DNA, 15 bp, Homo sapiens
tcctctttgtcttcc

SEQ ID NO: 1378667 - DNA, 15 bp, Homo sapiens
ctcctctttgtcttc

SEQ ID NO: 1378668 - DNA, 15 bp, Homo sapiens
cctcctctttgtctt

SEQ ID NO: 1378669 - DNA, 15 bp, Homo sapiens
acctcctctttgtct

SEQ ID NO: 1378670 - DNA, 15 bp, Homo sapiens
cacctcctctttgtc

SEQ ID NO: 1378671 - DNA, 15 bp, Homo sapiens
ccacctcctctttgt

SEQ ID NO: 1378672 - DNA, 15 bp, Homo sapiens
cccacctcctctttg

SEQ ID NO: 1378673 - DNA, 15 bp, Homo sapiens
gcccacctcctcttt

SEQ ID NO: 1378674 - DNA, 15 bp, Homo sapiens
ggcccacctcctctt

SEQ ID NO: 1378675 - DNA, 15 bp, Homo sapiens
gggcccacctcctct

SEQ ID NO: 1378676 - DNA, 15 bp, Homo sapiens
tgggcccacctcctc

SEQ ID NO: 1378677 - DNA, 15 bp, Homo sapiens
gtgggcccacctcct

SEQ ID NO: 1378678 - DNA, 15 bp, Homo sapiens
ggtgggcccacctcc

SEQ ID NO: 1378679 - DNA, 15 bp, Homo sapiens
aggtgggcccacctc

SEQ ID NO: 1378680 - DNA, 15 bp, Homo sapiens
aaggtgggcccacct

SEQ ID NO: 1378681 - DNA, 15 bp, Homo sapiens
aaaggtgggcccacc

SEQ ID NO: 1378682 - DNA, 15 bp, Homo sapiens
taaaggtgggcccac

SEQ ID NO: 1378683 - DNA, 15 bp, Homo sapiens
ataaaggtgggccca

SEQ ID NO: 1378684 - DNA, 15 bp, Homo sapiens
cataaaggtgggccc

SEQ ID NO: 1378685 - DNA, 15 bp, Homo sapiens
tcataaaggtgggcc

SEQ ID NO: 1378686 - DNA, 15 bp, Homo sapiens
atcataaaggtgggc

SEQ ID NO: 1378687 - DNA, 15 bp, Homo sapiens
aatcataaaggtggg

SEQ ID NO: 1378688 - DNA, 15 bp, Homo sapiens
caatcataaaggtgg

SEQ ID NO: 1378689 - DNA, 15 bp, Homo sapiens
tcaatcataaaggtg

SEQ ID NO: 1378690 - DNA, 15 bp, Homo sapiens
atcaatcataaaggt

SEQ ID NO: 1378691 - DNA, 15 bp, Homo sapiens
aatcaatcataaagg

SEQ ID NO: 1378692 - DNA, 15 bp, Homo sapiens
gaatcaatcataaag

SEQ ID NO: 1378693 - DNA, 15 bp, Homo sapiens
agaatcaatcataaa

SEQ ID NO: 1378694 - DNA, 15 bp, Homo sapiens
gagaatcaatcataa

SEQ ID NO: 1378695 - DNA, 15 bp, Homo sapiens
ggagaatcaatcata

SEQ ID NO: 1378696 - DNA, 15 bp, Homo sapiens
aggagaatcaatcat

SEQ ID NO: 1378697 - DNA, 15 bp, Homo sapiens
gaggagaatcaatca

SEQ ID NO: 1378698 - DNA, 15 bp, Homo sapiens
agaggagaatcaatc

SEQ ID NO: 1378699 - DNA, 15 bp, Homo sapiens
gagaggagaatcaat

SEQ ID NO: 1378700 - DNA, 15 bp, Homo sapiens
tgagaggagaatcaa

SEQ ID NO: 1378701 - DNA, 15 bp, Homo sapiens
gtgagaggagaatca

SEQ ID NO: 1378702 - DNA, 15 bp, Homo sapiens
ggtgagaggagaatc

SEQ ID NO: 1378703 - DNA, 15 bp, Homo sapiens
gggtgagaggagaat

SEQ ID NO: 1378704 - DNA, 15 bp, Homo sapiens
ggggtgagaggagaa

SEQ ID NO: 1378705 - DNA, 15 bp, Homo sapiens
aggggtgagaggaga

SEQ ID NO: 1378706 - DNA, 15 bp, Homo sapiens
aaggggtgagaggag

SEQ ID NO: 1378707 - DNA, 15 bp, Homo sapiens
aaaggggtgagagga

SEQ ID NO: 1378708 - DNA, 15 bp, Homo sapiens
gaaaggggtgagagg

SEQ ID NO: 1378709 - DNA, 15 bp, Homo sapiens
agaaaggggtgagag

SEQ ID NO: 1378710 - DNA, 15 bp, Homo sapiens
gagaaaggggtgaga

SEQ ID NO: 1378711 - DNA, 15 bp, Homo sapiens
agagaaaggggtgag

SEQ ID NO: 1378712 - DNA, 15 bp, Homo sapiens
aaagagaaaggggtg

SEQ ID NO: 1378713 - DNA, 15 bp, Homo sapiens
gaaagagaaaggggt

SEQ ID NO: 1378714 - DNA, 15 bp, Homo sapiens
agaaagagaaagggg

SEQ ID NO: 1378715 - DNA, 15 bp, Homo sapiens
aagaaagagaaaggg

SEQ ID NO: 1378716 - DNA, 15 bp, Homo sapiens
caagaaagagaaagg

SEQ ID NO: 1378717 - DNA, 15 bp, Homo sapiens
gcaagaaagagaaag

SEQ ID NO: 1378718 - DNA, 15 bp, Homo sapiens
agcaagaaagagaaa

SEQ ID NO: 1378719 - DNA, 15 bp, Homo sapiens
tagcaagaaagagaa

SEQ ID NO: 1378720 - DNA, 15 bp, Homo sapiens
gtagcaagaaagaga

SEQ ID NO: 1378721 - DNA, 15 bp, Homo sapiens
ggtagcaagaaagag

SEQ ID NO: 1378722 - DNA, 15 bp, Homo sapiens
aggtagcaagaaaga

SEQ ID NO: 1378723 - DNA, 15 bp, Homo sapiens
aaggtagcaagaaag

SEQ ID NO: 1378724 - DNA, 15 bp, Homo sapiens
aaaggtagcaagaaa

SEQ ID NO: 1378725 - DNA, 15 bp, Homo sapiens
taaaggtagcaagaa

SEQ ID NO: 1378726 - DNA, 15 bp, Homo sapiens
ttaaaggtagcaaga

SEQ ID NO: 1378727 - DNA, 15 bp, Homo sapiens
cttaaaggtagcaag

SEQ ID NO: 1378728 - DNA, 15 bp, Homo sapiens
tcttaaaggtagcaa

SEQ ID NO: 1378729 - DNA, 15 bp, Homo sapiens
ttcttaaaggtagca

SEQ ID NO: 1378730 - DNA, 15 bp, Homo sapiens
tttcttaaaggtagc

SEQ ID NO: 1378731 - DNA, 15 bp, Homo sapiens
ttttcttaaaggtag

SEQ ID NO: 1378732 - DNA, 15 bp, Homo sapiens
gattttcttaaaggt

SEQ ID NO: 1378733 - DNA, 15 bp, Homo sapiens
ggattttcttaaagg

SEQ ID NO: 1378734 - DNA, 15 bp, Homo sapiens
tggattttcttaaag

SEQ ID NO: 1378735 - DNA, 15 bp, Homo sapiens
ttggattttcttaaa

SEQ ID NO: 1378736 - DNA, 15 bp, Homo sapiens
tttggattttcttaa

SEQ ID NO: 1378737 - DNA, 15 bp, Homo sapiens
atttggattttctta

SEQ ID NO: 1378738 - DNA, 15 bp, Homo sapiens
tatttggattttctt

SEQ ID NO: 1378739 - DNA, 15 bp, Homo sapiens
ttatttggattttct

SEQ ID NO: 1378740 - DNA, 15 bp, Homo sapiens
attatttggattttc

SEQ ID NO: 1378741 - DNA, 15 bp, Homo sapiens
tattatttggatttt

SEQ ID NO: 1378742 - DNA, 15 bp, Homo sapiens
atattatttggattt

SEQ ID NO: 1378743 - DNA, 15 bp, Homo sapiens
tatattatttggatt

SEQ ID NO: 1378744 - DNA, 15 bp, Homo sapiens
atatattatttggat

SEQ ID NO: 1378745 - DNA, 15 bp, Homo sapiens
aatatattatttgga

SEQ ID NO: 1378746 - DNA, 15 bp, Homo sapiens
taatatattatttgg

SEQ ID NO: 1378747 - DNA, 15 bp, Homo sapiens
ttaatatattatttg

SEQ ID NO: 1378748 - DNA, 15 bp, Homo sapiens
attaatatattattt

SEQ ID NO: 1378749 - DNA, 15 bp, Homo sapiens
gattaatatattatt

SEQ ID NO: 1378750 - DNA, 15 bp, Homo sapiens
tgattaatatattat

SEQ ID NO: 1378751 - DNA, 15 bp, Homo sapiens
ctgattaatatatta

SEQ ID NO: 1378752 - DNA, 15 bp, Homo sapiens
actgattaatatatt

SEQ ID NO: 1378753 - DNA, 15 bp, Homo sapiens
aactgattaatatat

SEQ ID NO: 1378754 - DNA, 15 bp, Homo sapiens
taactgattaatata

SEQ ID NO: 1378755 - DNA, 15 bp, Homo sapiens
gtaactgattaatat

SEQ ID NO: 1378756 - DNA, 15 bp, Homo sapiens
agtaactgattaata

SEQ ID NO: 1378757 - DNA, 15 bp, Homo sapiens
tagtaactgattaat

SEQ ID NO: 1378758 - DNA, 15 bp, Homo sapiens
gtagtaactgattaa

SEQ ID NO: 1378759 - DNA, 15 bp, Homo sapiens
tgtagtaactgatta

SEQ ID NO: 1378760 - DNA, 15 bp, Homo sapiens
atgtagtaactgatt

SEQ ID NO: 1378761 - DNA, 15 bp, Homo sapiens
tatgtagtaactgat

SEQ ID NO: 1378762 - DNA, 15 bp, Homo sapiens
gtatgtagtaactga

SEQ ID NO: 1378763 - DNA, 15 bp, Homo sapiens
agtatgtagtaactg

SEQ ID NO: 1378764 - DNA, 15 bp, Homo sapiens
aagtatgtagtaact

SEQ ID NO: 1378765 - DNA, 15 bp, Homo sapiens
taagtatgtagtaac

SEQ ID NO: 1378766 - DNA, 15 bp, Homo sapiens
ttaagtatgtagtaa

SEQ ID NO: 1378767 - DNA, 15 bp, Homo sapiens
tttaagtatgtagta

SEQ ID NO: 1378768 - DNA, 15 bp, Homo sapiens
ctttaagtatgtagt

SEQ ID NO: 1378769 - DNA, 15 bp, Homo sapiens
actttaagtatgtag

SEQ ID NO: 1378770 - DNA, 15 bp, Homo sapiens
aactttaagtatgta

SEQ ID NO: 1378771 - DNA, 15 bp, Homo sapiens
aaactttaagtatgt

SEQ ID NO: 1378772 - DNA, 15 bp, Homo sapiens
aaaactttaagtatg

SEQ ID NO: 1378773 - DNA, 15 bp, Homo sapiens
aaaaactttaagtat

SEQ ID NO: 1378774 - DNA, 15 bp, Homo sapiens
caaaaactttaagta

SEQ ID NO: 1378775 - DNA, 15 bp, Homo sapiens
ccaaaaactttaagt

SEQ ID NO: 1378776 - DNA, 15 bp, Homo sapiens
accaaaaactttaag

SEQ ID NO: 1378777 - DNA, 15 bp, Homo sapiens
gaccaaaaactttaa

SEQ ID NO: 1378778 - DNA, 15 bp, Homo sapiens
agaccaaaaacttta

SEQ ID NO: 1378779 - DNA, 15 bp, Homo sapiens
gagaccaaaaacttt

SEQ ID NO: 1378780 - DNA, 15 bp, Homo sapiens
tgagaccaaaaactt

SEQ ID NO: 1378781 - DNA, 15 bp, Homo sapiens
atgagaccaaaaact

SEQ ID NO: 1378782 - DNA, 15 bp, Homo sapiens
aatgagaccaaaaac

SEQ ID NO: 1378783 - DNA, 15 bp, Homo sapiens
gaatgagaccaaaaa

SEQ ID NO: 1378784 - DNA, 15 bp, Homo sapiens
agaatgagaccaaaa

SEQ ID NO: 1378785 - DNA, 15 bp, Homo sapiens
aagaatgagaccaaa

SEQ ID NO: 1378786 - DNA, 15 bp, Homo sapiens
caagaatgagaccaa

SEQ ID NO: 1378787 - DNA, 15 bp, Homo sapiens
ccaagaatgagacca

SEQ ID NO: 1378788 - DNA, 15 bp, Homo sapiens
accaagaatgagacc

SEQ ID NO: 1378789 - DNA, 15 bp, Homo sapiens
aaccaagaatgagac

SEQ ID NO: 1378790 - DNA, 15 bp, Homo sapiens
gaaccaagaatgaga

SEQ ID NO: 1378791 - DNA, 15 bp, Homo sapiens
ggaaccaagaatgag

SEQ ID NO: 1378792 - DNA, 15 bp, Homo sapiens
tggaaccaagaatga

SEQ ID NO: 1378793 - DNA, 15 bp, Homo sapiens
ttggaaccaagaatg

SEQ ID NO: 1378794 - DNA, 15 bp, Homo sapiens
tttggaaccaagaat

SEQ ID NO: 1378795 - DNA, 15 bp, Homo sapiens
ctttggaaccaagaa

SEQ ID NO: 1378796 - DNA, 15 bp, Homo sapiens
actttggaaccaaga

SEQ ID NO: 1378797 - DNA, 15 bp, Homo sapiens
gactttggaaccaag

SEQ ID NO: 1378798 - DNA, 15 bp, Homo sapiens
tgactttggaaccaa

SEQ ID NO: 1378799 - DNA, 15 bp, Homo sapiens
atgactttggaacca

SEQ ID NO: 1378800 - DNA, 15 bp, Homo sapiens
catgactttggaacc

SEQ ID NO: 1378801 - DNA, 15 bp, Homo sapiens
acatgactttggaac

SEQ ID NO: 1378802 - DNA, 15 bp, Homo sapiens
gacatgactttggaa

SEQ ID NO: 1378803 - DNA, 15 bp, Homo sapiens
ggacatgactttgga

SEQ ID NO: 1378804 - DNA, 15 bp, Homo sapiens
aggacatgactttgg

SEQ ID NO: 1378805 - DNA, 15 bp, Homo sapiens
gaggacatgactttg

SEQ ID NO: 1378806 - DNA, 15 bp, Homo sapiens
agaggacatgacttt

SEQ ID NO: 1378807 - DNA, 15 bp, Homo sapiens
aagaggacatgactt

SEQ ID NO: 1378808 - DNA, 15 bp, Homo sapiens
aaagaggacatgact

SEQ ID NO: 1378809 - DNA, 15 bp, Homo sapiens
gaaagaggacatgac

SEQ ID NO: 1378810 - DNA, 15 bp, Homo sapiens
tgaaagaggacatga

SEQ ID NO: 1378811 - DNA, 15 bp, Homo sapiens
atgaaagaggacatg

SEQ ID NO: 1378812 - DNA, 15 bp, Homo sapiens
aatgaaagaggacat

SEQ ID NO: 1378813 - DNA, 15 bp, Homo sapiens
taatgaaagaggaca

SEQ ID NO: 1378814 - DNA, 15 bp, Homo sapiens
ttaatgaaagaggac

SEQ ID NO: 1378815 - DNA, 15 bp, Homo sapiens
cttaatgaaagagga

SEQ ID NO: 1378816 - DNA, 15 bp, Homo sapiens
gcttaatgaaagagg

SEQ ID NO: 1378817 - DNA, 15 bp, Homo sapiens
agcttaatgaaagag

SEQ ID NO: 1378818 - DNA, 15 bp, Homo sapiens
tagcttaatgaaaga

SEQ ID NO: 1378819 - DNA, 15 bp, Homo sapiens
ttagcttaatgaaag

SEQ ID NO: 1378820 - DNA, 15 bp, Homo sapiens
cttagcttaatgaaa

SEQ ID NO: 1378821 - DNA, 15 bp, Homo sapiens
gcttagcttaatgaa

SEQ ID NO: 1378822 - DNA, 15 bp, Homo sapiens
agcttagcttaatga

SEQ ID NO: 1378823 - DNA, 15 bp, Homo sapiens
gagcttagcttaatg

SEQ ID NO: 1378824 - DNA, 15 bp, Homo sapiens
agagcttagcttaat

SEQ ID NO: 1378825 - DNA, 15 bp, Homo sapiens
gagagcttagcttaa

SEQ ID NO: 1378826 - DNA, 15 bp, Homo sapiens
tgagagcttagctta

SEQ ID NO: 1378827 - DNA, 15 bp, Homo sapiens
atgagagcttagctt

SEQ ID NO: 1378828 - DNA, 15 bp, Homo sapiens
gatgagagcttagct

SEQ ID NO: 1378829 - DNA, 15 bp, Homo sapiens
agatgagagcttagc

SEQ ID NO: 1378830 - DNA, 15 bp, Homo sapiens
tagatgagagcttag

SEQ ID NO: 1378831 - DNA, 15 bp, Homo sapiens
atagatgagagctta

SEQ ID NO: 1378832 - DNA, 15 bp, Homo sapiens
aatagatgagagctt

SEQ ID NO: 1378833 - DNA, 15 bp, Homo sapiens
aaatagatgagagct

SEQ ID NO: 1378834 - DNA, 15 bp, Homo sapiens
caaatagatgagagc

SEQ ID NO: 1378835 - DNA, 15 bp, Homo sapiens
acaaatagatgagag

SEQ ID NO: 1378836 - DNA, 15 bp, Homo sapiens
gacaaatagatgaga

SEQ ID NO: 1378837 - DNA, 15 bp, Homo sapiens
tgacaaatagatgag

SEQ ID NO: 1378838 - DNA, 15 bp, Homo sapiens
gtgacaaatagatga

SEQ ID NO: 1378839 - DNA, 15 bp, Homo sapiens
tgtgacaaatagatg

SEQ ID NO: 1378840 - DNA, 15 bp, Homo sapiens
atgtgacaaatagat

SEQ ID NO: 1378841 - DNA, 15 bp, Homo sapiens
gatgtgacaaataga

SEQ ID NO: 1378842 - DNA, 15 bp, Homo sapiens
ggatgtgacaaatag

SEQ ID NO: 1378843 - DNA, 15 bp, Homo sapiens
aggatgtgacaaata

SEQ ID NO: 1378844 - DNA, 15 bp, Homo sapiens
aaggatgtgacaaat

SEQ ID NO: 1378845 - DNA, 15 bp, Homo sapiens
aaaggatgtgacaaa

SEQ ID NO: 1378846 - DNA, 15 bp, Homo sapiens
caaaggatgtgacaa

SEQ ID NO: 1378847 - DNA, 15 bp, Homo sapiens
ccaaaggatgtgaca

SEQ ID NO: 1378848 - DNA, 15 bp, Homo sapiens
accaaaggatgtgac

SEQ ID NO: 1378849 - DNA, 15 bp, Homo sapiens
aaccaaaggatgtga

SEQ ID NO: 1378850 - DNA, 15 bp, Homo sapiens
gaaccaaaggatgtg

SEQ ID NO: 1378851 - DNA, 15 bp, Homo sapiens
agaaccaaaggatgt

SEQ ID NO: 1378852 - DNA, 15 bp, Homo sapiens
aagaaccaaaggatg

SEQ ID NO: 1378853 - DNA, 15 bp, Homo sapiens
taagaaccaaaggat

SEQ ID NO: 1378854 - DNA, 15 bp, Homo sapiens
ttaagaaccaaagga

SEQ ID NO: 1378855 - DNA, 15 bp, Homo sapiens
cttaagaaccaaagg

SEQ ID NO: 1378856 - DNA, 15 bp, Homo sapiens
ccttaagaaccaaag

SEQ ID NO: 1378857 - DNA, 15 bp, Homo sapiens
accttaagaaccaaa

SEQ ID NO: 1378858 - DNA, 15 bp, Homo sapiens
caccttaagaaccaa

SEQ ID NO: 1378859 - DNA, 15 bp, Homo sapiens
tcaccttaagaacca

SEQ ID NO: 1378860 - DNA, 15 bp, Homo sapiens
atcaccttaagaacc

SEQ ID NO: 1378861 - DNA, 15 bp, Homo sapiens
tatcaccttaagaac

SEQ ID NO: 1378862 - DNA, 15 bp, Homo sapiens
atatcaccttaagaa

SEQ ID NO: 1378863 - DNA, 15 bp, Homo sapiens
gatatcaccttaaga

SEQ ID NO: 1378864 - DNA, 15 bp, Homo sapiens
cgatatcaccttaag

SEQ ID NO: 1378865 - DNA, 15 bp, Homo sapiens
tcgatatcaccttaa

SEQ ID NO: 1378866 - DNA, 15 bp, Homo sapiens
atcgatatcacctta

SEQ ID NO: 1378867 - DNA, 15 bp, Homo sapiens
gatcgatatcacctt

SEQ ID NO: 1378868 - DNA, 15 bp, Homo sapiens
tgatcgatatcacct

SEQ ID NO: 1378869 - DNA, 15 bp, Homo sapiens
ttgatcgatatcacc

SEQ ID NO: 1378870 - DNA, 15 bp, Homo sapiens
tttgatcgatatcac

SEQ ID NO: 1378871 - DNA, 15 bp, Homo sapiens
atttgatcgatatca

SEQ ID NO: 1378872 - DNA, 15 bp, Homo sapiens
aatttgatcgatatc

SEQ ID NO: 1378873 - DNA, 15 bp, Homo sapiens
taatttgatcgatat

SEQ ID NO: 1378874 - DNA, 15 bp, Homo sapiens
ataatttgatcgata

SEQ ID NO: 1378875 - DNA, 15 bp, Homo sapiens
cataatttgatcgat

SEQ ID NO: 1378876 - DNA, 15 bp, Homo sapiens
acataatttgatcga

SEQ ID NO: 1378877 - DNA, 15 bp, Homo sapiens
cacataatttgatcg

SEQ ID NO: 1378878 - DNA, 15 bp, Homo sapiens
tcacataatttgatc

SEQ ID NO: 1378879 - DNA, 15 bp, Homo sapiens
ttcacataatttgat

SEQ ID NO: 1378880 - DNA, 15 bp, Homo sapiens
cttcacataatttga

SEQ ID NO: 1378881 - DNA, 15 bp, Homo sapiens
tcttcacataatttg

SEQ ID NO: 1378882 - DNA, 15 bp, Homo sapiens
atcttcacataattt

SEQ ID NO: 1378883 - DNA, 15 bp, Homo sapiens
catcttcacataatt

SEQ ID NO: 1378884 - DNA, 15 bp, Homo sapiens
acatcttcacataat

SEQ ID NO: 1378885 - DNA, 15 bp, Homo sapiens
tacatcttcacataa

SEQ ID NO: 1378886 - DNA, 15 bp, Homo sapiens
ttacatcttcacata

SEQ ID NO: 1378887 - DNA, 15 bp, Homo sapiens
cttacatcttcacat

SEQ ID NO: 1378888 - DNA, 15 bp, Homo sapiens
ccttacatcttcaca

SEQ ID NO: 1378889 - DNA, 15 bp, Homo sapiens
gccttacatcttcac

SEQ ID NO: 1378890 - DNA, 15 bp, Homo sapiens
ggccttacatcttca

SEQ ID NO: 1378891 - DNA, 15 bp, Homo sapiens
aggccttacatcttc

SEQ ID NO: 1378892 - DNA, 15 bp, Homo sapiens
aaggccttacatctt

SEQ ID NO: 1378893 - DNA, 15 bp, Homo sapiens
caaggccttacatct

SEQ ID NO: 1378894 - DNA, 15 bp, Homo sapiens
tcaaggccttacatc

SEQ ID NO: 1378895 - DNA, 15 bp, Homo sapiens
ttcaaggccttacat

SEQ ID NO: 1378896 - DNA, 15 bp, Homo sapiens
cttcaaggccttaca

SEQ ID NO: 1378897 - DNA, 15 bp, Homo sapiens
tcttcaaggccttac

SEQ ID NO: 1378898 - DNA, 15 bp, Homo sapiens
ttcttcaaggcctta

SEQ ID NO: 1378899 - DNA, 15 bp, Homo sapiens
tttcttcaaggcctt

SEQ ID NO: 1378900 - DNA, 15 bp, Homo sapiens
gtttcttcaaggcct

SEQ ID NO: 1378901 - DNA, 15 bp, Homo sapiens
ggtttcttcaaggcc

SEQ ID NO: 1378902 - DNA, 15 bp, Homo sapiens
aggtttcttcaaggc

SEQ ID NO: 1378903 - DNA, 15 bp, Homo sapiens
aaggtttcttcaagg

SEQ ID NO: 1378904 - DNA, 15 bp, Homo sapiens
caaggtttcttcaag

SEQ ID NO: 1378905 - DNA, 15 bp, Homo sapiens
gcaaggtttcttcaa

SEQ ID NO: 1378906 - DNA, 15 bp, Homo sapiens
tgcaaggtttcttca

SEQ ID NO: 1378907 - DNA, 15 bp, Homo sapiens
ttgcaaggtttcttc

SEQ ID NO: 1378908 - DNA, 15 bp, Homo sapiens
tttgcaaggtttctt

SEQ ID NO: 1378909 - DNA, 15 bp, Homo sapiens
gtttgcaaggtttct

SEQ ID NO: 1378910 - DNA, 15 bp, Homo sapiens
ggtttgcaaggtttc

SEQ ID NO: 1378911 - DNA, 15 bp, Homo sapiens
aggtttgcaaggttt

SEQ ID NO: 1378912 - DNA, 15 bp, Homo sapiens
aaggtttgcaaggtt

SEQ ID NO: 1378913 - DNA, 15 bp, Homo sapiens
caaggtttgcaaggt

SEQ ID NO: 1378914 - DNA, 15 bp, Homo sapiens
gcaaggtttgcaagg

SEQ ID NO: 1378915 - DNA, 15 bp, Homo sapiens
ggcaaggtttgcaag

SEQ ID NO: 1378916 - DNA, 15 bp, Homo sapiens
tggcaaggtttgcaa

SEQ ID NO: 1378917 - DNA, 15 bp, Homo sapiens
gtggcaaggtttgca

SEQ ID NO: 1378918 - DNA, 15 bp, Homo sapiens
tgtggcaaggtttgc

SEQ ID NO: 1378919 - DNA, 15 bp, Homo sapiens
ttgtggcaaggtttg

SEQ ID NO: 1378920 - DNA, 15 bp, Homo sapiens
tttgtggcaaggttt

SEQ ID NO: 1378921 - DNA, 15 bp, Homo sapiens
ctttgtggcaaggtt

SEQ ID NO: 1378922 - DNA, 15 bp, Homo sapiens
tctttgtggcaaggt

SEQ ID NO: 1378923 - DNA, 15 bp, Homo sapiens
ctctttgtggcaagg

SEQ ID NO: 1378924 - DNA, 15 bp, Homo sapiens
gctctttgtggcaag

SEQ ID NO: 1378925 - DNA, 15 bp, Homo sapiens
tgctctttgtggcaa

SEQ ID NO: 1378926 - DNA, 15 bp, Homo sapiens
atgctctttgtggca

SEQ ID NO: 1378927 - DNA, 15 bp, Homo sapiens
catgctctttgtggc

SEQ ID NO: 1378928 - DNA, 15 bp, Homo sapiens
acatgctctttgtgg

SEQ ID NO: 1378929 - DNA, 15 bp, Homo sapiens
gacatgctctttgtg

SEQ ID NO: 1378930 - DNA, 15 bp, Homo sapiens
agacatgctctttgt

SEQ ID NO: 1378931 - DNA, 15 bp, Homo sapiens
tagacatgctctttg

SEQ ID NO: 1378932 - DNA, 15 bp, Homo sapiens
atagacatgctcttt

SEQ ID NO: 1378933 - DNA, 15 bp, Homo sapiens
aatagacatgctctt

SEQ ID NO: 1378934 - DNA, 15 bp, Homo sapiens
caatagacatgctct

SEQ ID NO: 1378935 - DNA, 15 bp, Homo sapiens
ccaatagacatgctc

SEQ ID NO: 1378936 - DNA, 15 bp, Homo sapiens
tccaatagacatgct

SEQ ID NO: 1378937 - DNA, 15 bp, Homo sapiens
ttccaatagacatgc

SEQ ID NO: 1378938 - DNA, 15 bp, Homo sapiens
tttccaatagacatg

SEQ ID NO: 1378939 - DNA, 15 bp, Homo sapiens
ctttccaatagacat

SEQ ID NO: 1378940 - DNA, 15 bp, Homo sapiens
gctttccaatagaca

SEQ ID NO: 1378941 - DNA, 15 bp, Homo sapiens
tgctttccaatagac

SEQ ID NO: 1378942 - DNA, 15 bp, Homo sapiens
ctgctttccaataga

SEQ ID NO: 1378943 - DNA, 15 bp, Homo sapiens
gctgctttccaatag

SEQ ID NO: 1378944 - DNA, 15 bp, Homo sapiens
tgctgctttccaata

SEQ ID NO: 1378945 - DNA, 15 bp, Homo sapiens
ctgctgctttccaat

SEQ ID NO: 1378946 - DNA, 15 bp, Homo sapiens
actgctgctttccaa

SEQ ID NO: 1378947 - DNA, 15 bp, Homo sapiens
aactgctgctttcca

SEQ ID NO: 1378948 - DNA, 15 bp, Homo sapiens
aaactgctgctttcc

SEQ ID NO: 1378949 - DNA, 15 bp, Homo sapiens
caaactgctgctttc

SEQ ID NO: 1378950 - DNA, 15 bp, Homo sapiens
tcaaactgctgcttt

SEQ ID NO: 1378951 - DNA, 15 bp, Homo sapiens
ttcaaactgctgctt

SEQ ID NO: 1378952 - DNA, 15 bp, Homo sapiens
attcaaactgctgct

SEQ ID NO: 1378953 - DNA, 15 bp, Homo sapiens
cattcaaactgctgc

SEQ ID NO: 1378954 - DNA, 15 bp, Homo sapiens
gcattcaaactgctg

SEQ ID NO: 1378955 - DNA, 15 bp, Homo sapiens
agcattcaaactgct

SEQ ID NO: 1378956 - DNA, 15 bp, Homo sapiens
tagcattcaaactgc

SEQ ID NO: 1378957 - DNA, 15 bp, Homo sapiens
ctagcattcaaactg

SEQ ID NO: 1378958 - DNA, 15 bp, Homo sapiens
gctagcattcaaact

SEQ ID NO: 1378959 - DNA, 15 bp, Homo sapiens
agctagcattcaaac

SEQ ID NO: 1378960 - DNA, 15 bp, Homo sapiens
gagctagcattcaaa

SEQ ID NO: 1378961 - DNA, 15 bp, Homo sapiens
ggagctagcattcaa

SEQ ID NO: 1378962 - DNA, 15 bp, Homo sapiens
tggagctagcattca

SEQ ID NO: 1378963 - DNA, 15 bp, Homo sapiens
ctggagctagcattc

SEQ ID NO: 1378964 - DNA, 15 bp, Homo sapiens
actggagctagcatt

SEQ ID NO: 1378965 - DNA, 15 bp, Homo sapiens
aactggagctagcat

SEQ ID NO: 1378966 - DNA, 15 bp, Homo sapiens
aaactggagctagca

SEQ ID NO: 1378967 - DNA, 15 bp, Homo sapiens
caaactggagctagc

SEQ ID NO: 1378968 - DNA, 15 bp, Homo sapiens
gcaaactggagctag

SEQ ID NO: 1378969 - DNA, 15 bp, Homo sapiens
tgcaaactggagcta

SEQ ID NO: 1378970 - DNA, 15 bp, Homo sapiens
gtgcaaactggagct

SEQ ID NO: 1378971 - DNA, 15 bp, Homo sapiens
cgtgcaaactggagc

SEQ ID NO: 1378972 - DNA, 15 bp, Homo sapiens
acgtgcaaactggag

SEQ ID NO: 1378973 - DNA, 15 bp, Homo sapiens
tacgtgcaaactgga

SEQ ID NO: 1378974 - DNA, 15 bp, Homo sapiens
atacgtgcaaactgg

SEQ ID NO: 1378975 - DNA, 15 bp, Homo sapiens
aatacgtgcaaactg

SEQ ID NO: 1378976 - DNA, 15 bp, Homo sapiens
aaatacgtgcaaact

SEQ ID NO: 1378977 - DNA, 15 bp, Homo sapiens
taaatacgtgcaaac

SEQ ID NO: 1378978 - DNA, 15 bp, Homo sapiens
ataaatacgtgcaaa

SEQ ID NO: 1378979 - DNA, 15 bp, Homo sapiens
cataaatacgtgcaa

SEQ ID NO: 1378980 - DNA, 15 bp, Homo sapiens
acataaatacgtgca

SEQ ID NO: 1378981 - DNA, 15 bp, Homo sapiens
gacataaatacgtgc

SEQ ID NO: 1378982 - DNA, 15 bp, Homo sapiens
tgacataaatacgtg

SEQ ID NO: 1378983 - DNA, 15 bp, Homo sapiens
ctgacataaatacgt

SEQ ID NO: 1378984 - DNA, 15 bp, Homo sapiens
gctgacataaatacg

SEQ ID NO: 1378985 - DNA, 15 bp, Homo sapiens
agctgacataaatac

SEQ ID NO: 1378986 - DNA, 15 bp, Homo sapiens
cagctgacataaata

SEQ ID NO: 1378987 - DNA, 15 bp, Homo sapiens
acagctgacataaat

SEQ ID NO: 1378988 - DNA, 15 bp, Homo sapiens
cacagctgacataaa

SEQ ID NO: 1378989 - DNA, 15 bp, Homo sapiens
acacagctgacataa

SEQ ID NO: 1378990 - DNA, 15 bp, Homo sapiens
cacacagctgacata

SEQ ID NO: 1378991 - DNA, 15 bp, Homo sapiens
acacacagctgacat

SEQ ID NO: 1378992 - DNA, 15 bp, Homo sapiens
cacacacagctgaca

SEQ ID NO: 1378993 - DNA, 15 bp, Homo sapiens
acacacacagctgac

SEQ ID NO: 1378994 - DNA, 15 bp, Homo sapiens
cacacacacagctga

SEQ ID NO: 1378995 - DNA, 15 bp, Homo sapiens
acacacacacagctg

SEQ ID NO: 1378996 - DNA, 15 bp, Homo sapiens
gggccttctctgcac

SEQ ID NO: 1378997 - DNA, 15 bp, Homo sapiens
agggccttctctgca

SEQ ID NO: 1378998 - DNA, 15 bp, Homo sapiens
cagggccttctctgc

SEQ ID NO: 1378999 - DNA, 15 bp, Homo sapiens
gcagggccttctctg

SEQ ID NO: 1379000 - DNA, 15 bp, Homo sapiens
tgcagggccttctct

SEQ ID NO: 1379001 - DNA, 15 bp, Homo sapiens
gtgcagggccttctc

SEQ ID NO: 1379002 - DNA, 15 bp, Homo sapiens
tgtgcagggccttct

SEQ ID NO: 1379003 - DNA, 15 bp, Homo sapiens
ttgtgcagggccttc

SEQ ID NO: 1379004 - DNA, 15 bp, Homo sapiens
attgtgcagggcctt

SEQ ID NO: 1379005 - DNA, 15 bp, Homo sapiens
cattgtgcagggcct

SEQ ID NO: 1379006 - DNA, 15 bp, Homo sapiens
ccattgtgcagggcc

SEQ ID NO: 1379007 - DNA, 15 bp, Homo sapiens
cccattgtgcagggc

SEQ ID NO: 1379008 - DNA, 15 bp, Homo sapiens
gcccattgtgcaggg

SEQ ID NO: 1379009 - DNA, 15 bp, Homo sapiens
agcccattgtgcagg

SEQ ID NO: 1379010 - DNA, 15 bp, Homo sapiens
tagcccattgtgcag

SEQ ID NO: 1379011 - DNA, 15 bp, Homo sapiens
ctagcccattgtgca

SEQ ID NO: 1379012 - DNA, 15 bp, Homo sapiens
cctagcccattgtgc

SEQ ID NO: 1379013 - DNA, 15 bp, Homo sapiens
gcctagcccattgtg

SEQ ID NO: 1379014 - DNA, 15 bp, Homo sapiens
tgcctagcccattgt

SEQ ID NO: 1379015 - DNA, 15 bp, Homo sapiens
ctgcctagcccattg

SEQ ID NO: 1379016 - DNA, 15 bp, Homo sapiens
cctgcctagcccatt

SEQ ID NO: 1379017 - DNA, 15 bp, Homo sapiens
tcctgcctagcccat

SEQ ID NO: 1379018 - DNA, 15 bp, Homo sapiens
gtcctgcctagccca

SEQ ID NO: 1379019 - DNA, 15 bp, Homo sapiens
tgtcctgcctagccc

SEQ ID NO: 1379020 - DNA, 15 bp, Homo sapiens
ctgtcctgcctagcc

SEQ ID NO: 1379021 - DNA, 15 bp, Homo sapiens
gctgtcctgcctagc

SEQ ID NO: 1379022 - DNA, 15 bp, Homo sapiens
tgctgtcctgcctag

SEQ ID NO: 1379023 - DNA, 15 bp, Homo sapiens
ctgctgtcctgccta

SEQ ID NO: 1379024 - DNA, 15 bp, Homo sapiens
actgctgtcctgcct

SEQ ID NO: 1379025 - DNA, 15 bp, Homo sapiens
aactgctgtcctgcc

SEQ ID NO: 1379026 - DNA, 15 bp, Homo sapiens
caactgctgtcctgc

SEQ ID NO: 1379027 - DNA, 15 bp, Homo sapiens
acaactgctgtcctg

SEQ ID NO: 1379028 - DNA, 15 bp, Homo sapiens
tacaactgctgtcct

SEQ ID NO: 1379029 - DNA, 15 bp, Homo sapiens
ctacaactgctgtcc

SEQ ID NO: 1379030 - DNA, 15 bp, Homo sapiens
tctacaactgctgtc

SEQ ID NO: 1379031 - DNA, 15 bp, Homo sapiens
gtctacaactgctgt

SEQ ID NO: 1379032 - DNA, 15 bp, Homo sapiens
tgtctacaactgctg

SEQ ID NO: 1379033 - DNA, 15 bp, Homo sapiens
ctgtctacaactgct

SEQ ID NO: 1379034 - DNA, 15 bp, Homo sapiens
gctgtctacaactgc

SEQ ID NO: 1379035 - DNA, 15 bp, Homo sapiens
agctgtctacaactg

SEQ ID NO: 1379036 - DNA, 15 bp, Homo sapiens
tagctgtctacaact

SEQ ID NO: 1379037 - DNA, 15 bp, Homo sapiens
gtagctgtctacaac

SEQ ID NO: 1379038 - DNA, 15 bp, Homo sapiens
tgtagctgtctacaa

SEQ ID NO: 1379039 - DNA, 15 bp, Homo sapiens
ttgtagctgtctaca

SEQ ID NO: 1379040 - DNA, 15 bp, Homo sapiens
attgtagctgtctac

SEQ ID NO: 1379041 - DNA, 15 bp, Homo sapiens
cattgtagctgtcta

SEQ ID NO: 1379042 - DNA, 15 bp, Homo sapiens
ccattgtagctgtct

SEQ ID NO: 1379043 - DNA, 15 bp, Homo sapiens
tccattgtagctgtc

SEQ ID NO: 1379044 - DNA, 15 bp, Homo sapiens
atccattgtagctgt

SEQ ID NO: 1379045 - DNA, 15 bp, Homo sapiens
tatccattgtagctg

SEQ ID NO: 1379046 - DNA, 15 bp, Homo sapiens
atatccattgtagct

SEQ ID NO: 1379047 - DNA, 15 bp, Homo sapiens
aatatccattgtagc

SEQ ID NO: 1379048 - DNA, 15 bp, Homo sapiens
aaatatccattgtag

SEQ ID NO: 1379049 - DNA, 15 bp, Homo sapiens
aaaatatccattgta

SEQ ID NO: 1379050 - DNA, 15 bp, Homo sapiens
taaaatatccattgt

SEQ ID NO: 1379051 - DNA, 15 bp, Homo sapiens
ttaaaatatccattg

SEQ ID NO: 1379052 - DNA, 15 bp, Homo sapiens
tttaaaatatccatt

SEQ ID NO: 1379053 - DNA, 15 bp, Homo sapiens
ttttaaaatatccat

SEQ ID NO: 1379054 - DNA, 15 bp, Homo sapiens
tttttaaaatatcca

SEQ ID NO: 1379055 - DNA, 15 bp, Homo sapiens
aatttttaaaatatc

SEQ ID NO: 1379056 - DNA, 15 bp, Homo sapiens
taatttttaaaatat

SEQ ID NO: 1379057 - DNA, 15 bp, Homo sapiens
gtaatttttaaaata

SEQ ID NO: 1379058 - DNA, 15 bp, Homo sapiens
tgtaatttttaaaat

SEQ ID NO: 1379059 - DNA, 15 bp, Homo sapiens
ttgtaatttttaaaa

SEQ ID NO: 1379060 - DNA, 15 bp, Homo sapiens
gttgtaatttttaaa

SEQ ID NO: 1379061 - DNA, 15 bp, Homo sapiens
ggttgtaatttttaa

SEQ ID NO: 1379062 - DNA, 15 bp, Homo sapiens
tggttgtaattttta

SEQ ID NO: 1379063 - DNA, 15 bp, Homo sapiens
ttggttgtaattttt

SEQ ID NO: 1379064 - DNA, 15 bp, Homo sapiens
tttggttgtaatttt

SEQ ID NO: 1379065 - DNA, 15 bp, Homo sapiens
gtttggttgtaattt

SEQ ID NO: 1379066 - DNA, 15 bp, Homo sapiens
agtttggttgtaatt

SEQ ID NO: 1379067 - DNA, 15 bp, Homo sapiens
tagtttggttgtaat

SEQ ID NO: 1379068 - DNA, 15 bp, Homo sapiens
atagtttggttgtaa

SEQ ID NO: 1379069 - DNA, 15 bp, Homo sapiens
catagtttggttgta

SEQ ID NO: 1379070 - DNA, 15 bp, Homo sapiens
acatagtttggttgt

SEQ ID NO: 1379071 - DNA, 15 bp, Homo sapiens
cacatagtttggttg

SEQ ID NO: 1379072 - DNA, 15 bp, Homo sapiens
tcacatagtttggtt

SEQ ID NO: 1379073 - DNA, 15 bp, Homo sapiens
ctcacatagtttggt

SEQ ID NO: 1379074 - DNA, 15 bp, Homo sapiens
cctcacatagtttgg

SEQ ID NO: 1379075 - DNA, 15 bp, Homo sapiens
tcctcacatagtttg

SEQ ID NO: 1379076 - DNA, 15 bp, Homo sapiens
atcctcacatagttt

SEQ ID NO: 1379077 - DNA, 15 bp, Homo sapiens
aatcctcacatagtt

SEQ ID NO: 1379078 - DNA, 15 bp, Homo sapiens
taatcctcacatagt

SEQ ID NO: 1379079 - DNA, 15 bp, Homo sapiens
ataatcctcacatag

SEQ ID NO: 1379080 - DNA, 15 bp, Homo sapiens
aataatcctcacata

SEQ ID NO: 1379081 - DNA, 15 bp, Homo sapiens
taaataatcctcaca

SEQ ID NO: 1379082 - DNA, 15 bp, Homo sapiens
ttaaataatcctcac

SEQ ID NO: 1379083 - DNA, 15 bp, Homo sapiens
attaaataatcctca

SEQ ID NO: 1379084 - DNA, 15 bp, Homo sapiens
cattaaataatcctc

SEQ ID NO: 1379085 - DNA, 15 bp, Homo sapiens
acattaaataatcct

SEQ ID NO: 1379086 - DNA, 15 bp, Homo sapiens
aacattaaataatcc

SEQ ID NO: 1379087 - DNA, 15 bp, Homo sapiens
caacattaaataatc

SEQ ID NO: 1379088 - DNA, 15 bp, Homo sapiens
tcaacattaaataat

SEQ ID NO: 1379089 - DNA, 15 bp, Homo sapiens
atcaacattaaataa

SEQ ID NO: 1379090 - DNA, 15 bp, Homo sapiens
tatcaacattaaata

SEQ ID NO: 1379091 - DNA, 15 bp, Homo sapiens
atatcaacattaaat

SEQ ID NO: 1379092 - DNA, 15 bp, Homo sapiens
tatatcaacattaaa

SEQ ID NO: 1379093 - DNA, 15 bp, Homo sapiens
ctatatcaacattaa

SEQ ID NO: 1379094 - DNA, 15 bp, Homo sapiens
tctatatcaacatta

SEQ ID NO: 1379095 - DNA, 15 bp, Homo sapiens
ttctatatcaacatt

SEQ ID NO: 1379096 - DNA, 15 bp, Homo sapiens
tttctatatcaacat

SEQ ID NO: 1379097 - DNA, 15 bp, Homo sapiens
atttctatatcaaca

SEQ ID NO: 1379098 - DNA, 15 bp, Homo sapiens
tatttctatatcaac

SEQ ID NO: 1379099 - DNA, 15 bp, Homo sapiens
atatttctatatcaa

SEQ ID NO: 1379100 - DNA, 15 bp, Homo sapiens
tatatttctatatca

SEQ ID NO: 1379101 - DNA, 15 bp, Homo sapiens
ttatatttctatatc

SEQ ID NO: 1379102 - DNA, 15 bp, Homo sapiens
gttatatttctatat

SEQ ID NO: 1379103 - DNA, 15 bp, Homo sapiens
cgttatatttctata

SEQ ID NO: 1379104 - DNA, 15 bp, Homo sapiens
acgttatatttctat

SEQ ID NO: 1379105 - DNA, 15 bp, Homo sapiens
gacgttatatttcta

SEQ ID NO: 1379106 - DNA, 15 bp, Homo sapiens
tgacgttatatttct

SEQ ID NO: 1379107 - DNA, 15 bp, Homo sapiens
ttgacgttatatttc

SEQ ID NO: 1379108 - DNA, 15 bp, Homo sapiens
attgacgttatattt

SEQ ID NO: 1379109 - DNA, 15 bp, Homo sapiens
cattgacgttatatt

SEQ ID NO: 1379110 - DNA, 15 bp, Homo sapiens
gcattgacgttatat

SEQ ID NO: 1379111 - DNA, 15 bp, Homo sapiens
tgcattgacgttata

SEQ ID NO: 1379112 - DNA, 15 bp, Homo sapiens
ctgcattgacgttat

SEQ ID NO: 1379113 - DNA, 15 bp, Homo sapiens
actgcattgacgtta

SEQ ID NO: 1379114 - DNA, 15 bp, Homo sapiens
aactgcattgacgtt

SEQ ID NO: 1379115 - DNA, 15 bp, Homo sapiens
caactgcattgacgt

SEQ ID NO: 1379116 - DNA, 15 bp, Homo sapiens
acaactgcattgacg

SEQ ID NO: 1379117 - DNA, 15 bp, Homo sapiens
tacaactgcattgac

SEQ ID NO: 1379118 - DNA, 15 bp, Homo sapiens
gtacaactgcattga

SEQ ID NO: 1379119 - DNA, 15 bp, Homo sapiens
tgtacaactgcattg

SEQ ID NO: 1379120 - DNA, 15 bp, Homo sapiens
ctgtacaactgcatt

SEQ ID NO: 1379121 - DNA, 15 bp, Homo sapiens
cctgtacaactgcat

SEQ ID NO: 1379122 - DNA, 15 bp, Homo sapiens
gcctgtacaactgca

SEQ ID NO: 1379123 - DNA, 15 bp, Homo sapiens
agcctgtacaactgc

SEQ ID NO: 1379124 - DNA, 15 bp, Homo sapiens
gagcctgtacaactg

SEQ ID NO: 1379125 - DNA, 15 bp, Homo sapiens
agagcctgtacaact

SEQ ID NO: 1379126 - DNA, 15 bp, Homo sapiens
cagagcctgtacaac

SEQ ID NO: 1379127 - DNA, 15 bp, Homo sapiens
gcagagcctgtacaa

SEQ ID NO: 1379128 - DNA, 15 bp, Homo sapiens
tgcagagcctgtaca

SEQ ID NO: 1379129 - DNA, 15 bp, Homo sapiens
ctgcagagcctgtac

SEQ ID NO: 1379130 - DNA, 15 bp, Homo sapiens
tctgcagagcctgta

SEQ ID NO: 1379131 - DNA, 15 bp, Homo sapiens
ttctgcagagcctgt

SEQ ID NO: 1379132 - DNA, 15 bp, Homo sapiens
attctgcagagcctg

SEQ ID NO: 1379133 - DNA, 15 bp, Homo sapiens
tattctgcagagcct

SEQ ID NO: 1379134 - DNA, 15 bp, Homo sapiens
atattctgcagagcc

SEQ ID NO: 1379135 - DNA, 15 bp, Homo sapiens
aatattctgcagagc

SEQ ID NO: 1379136 - DNA, 15 bp, Homo sapiens
aaatattctgcagag

SEQ ID NO: 1379137 - DNA, 15 bp, Homo sapiens
aaaatattctgcaga

SEQ ID NO: 1379138 - DNA, 15 bp, Homo sapiens
caaaatattctgcag

SEQ ID NO: 1379139 - DNA, 15 bp, Homo sapiens
acaaaatattctgca

SEQ ID NO: 1379140 - DNA, 15 bp, Homo sapiens
gacaaaatattctgc

SEQ ID NO: 1379141 - DNA, 15 bp, Homo sapiens
tgacaaaatattctg

SEQ ID NO: 1379142 - DNA, 15 bp, Homo sapiens
atgacaaaatattct

SEQ ID NO: 1379143 - DNA, 15 bp, Homo sapiens
aatgacaaaatattc

SEQ ID NO: 1379144 - DNA, 15 bp, Homo sapiens
caatgacaaaatatt

SEQ ID NO: 1379145 - DNA, 15 bp, Homo sapiens
acaatgacaaaatat

SEQ ID NO: 1379146 - DNA, 15 bp, Homo sapiens
gacaatgacaaaata

SEQ ID NO: 1379147 - DNA, 15 bp, Homo sapiens
agacaatgacaaaat

SEQ ID NO: 1379148 - DNA, 15 bp, Homo sapiens
tagacaatgacaaaa

SEQ ID NO: 1379149 - DNA, 15 bp, Homo sapiens
atagacaatgacaaa

SEQ ID NO: 1379150 - DNA, 15 bp, Homo sapiens
aatagacaatgacaa

SEQ ID NO: 1379151 - DNA, 15 bp, Homo sapiens
taatagacaatgaca

SEQ ID NO: 1379152 - DNA, 15 bp, Homo sapiens
ctaatagacaatgac

SEQ ID NO: 1379153 - DNA, 15 bp, Homo sapiens
gctaatagacaatga

SEQ ID NO: 1379154 - DNA, 15 bp, Homo sapiens
tgctaatagacaatg

SEQ ID NO: 1379155 - DNA, 15 bp, Homo sapiens
ttgctaatagacaat

SEQ ID NO: 1379156 - DNA, 15 bp, Homo sapiens
tttgctaatagacaa

SEQ ID NO: 1379157 - DNA, 15 bp, Homo sapiens
ttttgctaatagaca

SEQ ID NO: 1379158 - DNA, 15 bp, Homo sapiens
tttttgctaatagac

SEQ ID NO: 1379159 - DNA, 15 bp, Homo sapiens
atttttgctaataga

SEQ ID NO: 1379160 - DNA, 15 bp, Homo sapiens
catttttgctaatag

SEQ ID NO: 1379161 - DNA, 15 bp, Homo sapiens
tcatttttgctaata

SEQ ID NO: 1379162 - DNA, 15 bp, Homo sapiens
gtcatttttgctaat

SEQ ID NO: 1379163 - DNA, 15 bp, Homo sapiens
tgtcatttttgctaa

SEQ ID NO: 1379164 - DNA, 15 bp, Homo sapiens
ctgtcatttttgcta

SEQ ID NO: 1379165 - DNA, 15 bp, Homo sapiens
actgtcatttttgct

SEQ ID NO: 1379166 - DNA, 15 bp, Homo sapiens
aactgtcatttttgc

SEQ ID NO: 1379167 - DNA, 15 bp, Homo sapiens
taactgtcatttttg

SEQ ID NO: 1379168 - DNA, 15 bp, Homo sapiens
ttaactgtcattttt

SEQ ID NO: 1379169 - DNA, 15 bp, Homo sapiens
cttaactgtcatttt

SEQ ID NO: 1379170 - DNA, 15 bp, Homo sapiens
tcttaactgtcattt

SEQ ID NO: 1379171 - DNA, 15 bp, Homo sapiens
ttcttaactgtcatt

SEQ ID NO: 1379172 - DNA, 15 bp, Homo sapiens
attcttaactgtcat

SEQ ID NO: 1379173 - DNA, 15 bp, Homo sapiens
aattcttaactgtca

SEQ ID NO: 1379174 - DNA, 15 bp, Homo sapiens
aaattcttaactgtc

SEQ ID NO: 1379175 - DNA, 15 bp, Homo sapiens
gaaattcttaactgt

SEQ ID NO: 1379176 - DNA, 15 bp, Homo sapiens
agaaattcttaactg

SEQ ID NO: 1379177 - DNA, 15 bp, Homo sapiens
tagaaattcttaact

SEQ ID NO: 1379178 - DNA, 15 bp, Homo sapiens
ttagaaattcttaac

SEQ ID NO: 1379179 - DNA, 15 bp, Homo sapiens
cttagaaattcttaa

SEQ ID NO: 1379180 - DNA, 15 bp, Homo sapiens
tcttagaaattctta

SEQ ID NO: 1379181 - DNA, 15 bp, Homo sapiens
ctcttagaaattctt

SEQ ID NO: 1379182 - DNA, 15 bp, Homo sapiens
tctcttagaaattct

SEQ ID NO: 1379183 - DNA, 15 bp, Homo sapiens
atctcttagaaattc

SEQ ID NO: 1379184 - DNA, 15 bp, Homo sapiens
tatctcttagaaatt

SEQ ID NO: 1379185 - DNA, 15 bp, Homo sapiens
ttatctcttagaaat

SEQ ID NO: 1379186 - DNA, 15 bp, Homo sapiens
cttatctcttagaaa

SEQ ID NO: 1379187 - DNA, 15 bp, Homo sapiens
tcttatctcttagaa

SEQ ID NO: 1379188 - DNA, 15 bp, Homo sapiens
ttcttatctcttaga

SEQ ID NO: 1379189 - DNA, 15 bp, Homo sapiens
attcttatctcttag

SEQ ID NO: 1379190 - DNA, 15 bp, Homo sapiens
aattcttatctctta

SEQ ID NO: 1379191 - DNA, 15 bp, Homo sapiens
aaattcttatctctt

SEQ ID NO: 1379192 - DNA, 15 bp, Homo sapiens
gaaattcttatctct

SEQ ID NO: 1379193 - DNA, 15 bp, Homo sapiens
agaaattcttatctc

SEQ ID NO: 1379194 - DNA, 15 bp, Homo sapiens
tagaaattcttatct

SEQ ID NO: 1379195 - DNA, 15 bp, Homo sapiens
ttagaaattcttatc

SEQ ID NO: 1379196 - DNA, 15 bp, Homo sapiens
tttagaaattcttat

SEQ ID NO: 1379197 - DNA, 15 bp, Homo sapiens
ctttagaaattctta

SEQ ID NO: 1379198 - DNA, 15 bp, Homo sapiens
tctttagaaattctt

SEQ ID NO: 1379199 - DNA, 15 bp, Homo sapiens
ctctttagaaattct

SEQ ID NO: 1379200 - DNA, 15 bp, Homo sapiens
tctctttagaaattc

SEQ ID NO: 1379201 - DNA, 15 bp, Homo sapiens
gtctctttagaaatt

SEQ ID NO: 1379202 - DNA, 15 bp, Homo sapiens
agtctctttagaaat

SEQ ID NO: 1379203 - DNA, 15 bp, Homo sapiens
aagtctctttagaaa

SEQ ID NO: 1379204 - DNA, 15 bp, Homo sapiens
aaagtctctttagaa

SEQ ID NO: 1379205 - DNA, 15 bp, Homo sapiens
gaaagtctctttaga

SEQ ID NO: 1379206 - DNA, 15 bp, Homo sapiens
tgaaagtctctttag

SEQ ID NO: 1379207 - DNA, 15 bp, Homo sapiens
ttgaaagtctcttta

SEQ ID NO: 1379208 - DNA, 15 bp, Homo sapiens
gttgaaagtctcttt

SEQ ID NO: 1379209 - DNA, 15 bp, Homo sapiens
ggttgaaagtctctt

SEQ ID NO: 1379210 - DNA, 15 bp, Homo sapiens
aggttgaaagtctct

SEQ ID NO: 1379211 - DNA, 15 bp, Homo sapiens
caggttgaaagtctc

SEQ ID NO: 1379212 - DNA, 15 bp, Homo sapiens
gcaggttgaaagtct

SEQ ID NO: 1379213 - DNA, 15 bp, Homo sapiens
agcaggttgaaagtc

SEQ ID NO: 1379214 - DNA, 15 bp, Homo sapiens
cagcaggttgaaagt

SEQ ID NO: 1379215 - DNA, 15 bp, Homo sapiens
ccagcaggttgaaag

SEQ ID NO: 1379216 - DNA, 15 bp, Homo sapiens
gccagcaggttgaaa

SEQ ID NO: 1379217 - DNA, 15 bp, Homo sapiens
agccagcaggttgaa

SEQ ID NO: 1379218 - DNA, 15 bp, Homo sapiens
tagccagcaggttga

SEQ ID NO: 1379219 - DNA, 15 bp, Homo sapiens
ctagccagcaggttg

SEQ ID NO: 1379220 - DNA, 15 bp, Homo sapiens
tctagccagcaggtt

SEQ ID NO: 1379221 - DNA, 15 bp, Homo sapiens
ctctagccagcaggt

SEQ ID NO: 1379222 - DNA, 15 bp, Homo sapiens
gctctagccagcagg

SEQ ID NO: 1379223 - DNA, 15 bp, Homo sapiens
tgctctagccagcag

SEQ ID NO: 1379224 - DNA, 15 bp, Homo sapiens
atgctctagccagca

SEQ ID NO: 1379225 - DNA, 15 bp, Homo sapiens
aatgctctagccagc

SEQ ID NO: 1379226 - DNA, 15 bp, Homo sapiens
taatgctctagccag

SEQ ID NO: 1379227 - DNA, 15 bp, Homo sapiens
ttaatgctctagcca

SEQ ID NO: 1379228 - DNA, 15 bp, Homo sapiens
tttaatgctctagcc

SEQ ID NO: 1379229 - DNA, 15 bp, Homo sapiens
atttaatgctctagc

SEQ ID NO: 1379230 - DNA, 15 bp, Homo sapiens
tatttaatgctctag

SEQ ID NO: 1379231 - DNA, 15 bp, Homo sapiens
atatttaatgctcta

SEQ ID NO: 1379232 - DNA, 15 bp, Homo sapiens
aatatttaatgctct

SEQ ID NO: 1379233 - DNA, 15 bp, Homo sapiens
caatatttaatgctc

SEQ ID NO: 1379234 - DNA, 15 bp, Homo sapiens
ccaatatttaatgct

SEQ ID NO: 1379235 - DNA, 15 bp, Homo sapiens
gccaatatttaatgc

SEQ ID NO: 1379236 - DNA, 15 bp, Homo sapiens
tgccaatatttaatg

SEQ ID NO: 1379237 - DNA, 15 bp, Homo sapiens
ttgccaatatttaat

SEQ ID NO: 1379238 - DNA, 15 bp, Homo sapiens
cttgccaatatttaa

SEQ ID NO: 1379239 - DNA, 15 bp, Homo sapiens
gcttgccaatattta

SEQ ID NO: 1379240 - DNA, 15 bp, Homo sapiens
gtggcttgccaatat

SEQ ID NO: 1379241 - DNA, 15 bp, Homo sapiens
agtggcttgccaata

SEQ ID NO: 1379242 - DNA, 15 bp, Homo sapiens
tagtggcttgccaat

SEQ ID NO: 1379243 - DNA, 15 bp, Homo sapiens
atagtggcttgccaa

SEQ ID NO: 1379244 - DNA, 15 bp, Homo sapiens
gatagtggcttgcca

SEQ ID NO: 1379245 - DNA, 15 bp, Homo sapiens
agatagtggcttgcc

SEQ ID NO: 1379246 - DNA, 15 bp, Homo sapiens
aagatagtggcttgc

SEQ ID NO: 1379247 - DNA, 15 bp, Homo sapiens
aaagatagtggcttg

SEQ ID NO: 1379248 - DNA, 15 bp, Homo sapiens
caaagatagtggctt

SEQ ID NO: 1379249 - DNA, 15 bp, Homo sapiens
gcaaagatagtggct

SEQ ID NO: 1379250 - DNA, 15 bp, Homo sapiens
agcaaagatagtggc

SEQ ID NO: 1379251 - DNA, 15 bp, Homo sapiens
tagcaaagatagtgg

SEQ ID NO: 1379252 - DNA, 15 bp, Homo sapiens
ctagcaaagatagtg

SEQ ID NO: 1379253 - DNA, 15 bp, Homo sapiens
cctagcaaagatagt

SEQ ID NO: 1379254 - DNA, 15 bp, Homo sapiens
ccctagcaaagatag

SEQ ID NO: 1379255 - DNA, 15 bp, Homo sapiens
tccctagcaaagata

SEQ ID NO: 1379256 - DNA, 15 bp, Homo sapiens
ctccctagcaaagat

SEQ ID NO: 1379257 - DNA, 15 bp, Homo sapiens
tctccctagcaaaga

SEQ ID NO: 1379258 - DNA, 15 bp, Homo sapiens
ttctccctagcaaag

SEQ ID NO: 1379259 - DNA, 15 bp, Homo sapiens
cttctccctagcaaa

SEQ ID NO: 1379260 - DNA, 15 bp, Homo sapiens
ccttctccctagcaa

SEQ ID NO: 1379261 - DNA, 15 bp, Homo sapiens
cccttctccctagca

SEQ ID NO: 1379262 - DNA, 15 bp, Homo sapiens
ccccttctccctagc

SEQ ID NO: 1379263 - DNA, 15 bp, Homo sapiens
accccttctccctag

SEQ ID NO: 1379264 - DNA, 15 bp, Homo sapiens
aaccccttctcccta

SEQ ID NO: 1379265 - DNA, 15 bp, Homo sapiens
aaaccccttctccct

SEQ ID NO: 1379266 - DNA, 15 bp, Homo sapiens
taaaccccttctccc

SEQ ID NO: 1379267 - DNA, 15 bp, Homo sapiens
ctaaaccccttctcc

SEQ ID NO: 1379268 - DNA, 15 bp, Homo sapiens
cctaaaccccttctc

SEQ ID NO: 1379269 - DNA, 15 bp, Homo sapiens
ccctaaaccccttct

SEQ ID NO: 1379270 - DNA, 15 bp, Homo sapiens
cccctaaaccccttc

SEQ ID NO: 1379271 - DNA, 15 bp, Homo sapiens
tcccctaaacccctt

SEQ ID NO: 1379272 - DNA, 15 bp, Homo sapiens
ctcccctaaacccct

SEQ ID NO: 1379273 - DNA, 15 bp, Homo sapiens
cctcccctaaacccc

SEQ ID NO: 1379274 - DNA, 15 bp, Homo sapiens
tcctcccctaaaccc

SEQ ID NO: 1379275 - DNA, 15 bp, Homo sapiens
ttcctcccctaaacc

SEQ ID NO: 1379276 - DNA, 15 bp, Homo sapiens
attcctcccctaaac

SEQ ID NO: 1379277 - DNA, 15 bp, Homo sapiens
aattcctcccctaaa

SEQ ID NO: 1379278 - DNA, 15 bp, Homo sapiens
aaattcctcccctaa

SEQ ID NO: 1379279 - DNA, 15 bp, Homo sapiens
taaattcctccccta

SEQ ID NO: 1379280 - DNA, 15 bp, Homo sapiens
ctaaattcctcccct

SEQ ID NO: 1379281 - DNA, 15 bp, Homo sapiens
cctaaattcctcccc

SEQ ID NO: 1379282 - DNA, 15 bp, Homo sapiens
tcctaaattcctccc

SEQ ID NO: 1379283 - DNA, 15 bp, Homo sapiens
ttcctaaattcctcc

SEQ ID NO: 1379284 - DNA, 15 bp, Homo sapiens
tttcctaaattcctc

SEQ ID NO: 1379285 - DNA, 15 bp, Homo sapiens
gtttcctaaattcct

SEQ ID NO: 1379286 - DNA, 15 bp, Homo sapiens
agtttcctaaattcc

SEQ ID NO: 1379287 - DNA, 15 bp, Homo sapiens
cagtttcctaaattc

SEQ ID NO: 1379288 - DNA, 15 bp, Homo sapiens
tcagtttcctaaatt

SEQ ID NO: 1379289 - DNA, 15 bp, Homo sapiens
atcagtttcctaaat

SEQ ID NO: 1379290 - DNA, 15 bp, Homo sapiens
aatcagtttcctaaa

SEQ ID NO: 1379291 - DNA, 15 bp, Homo sapiens
aaatcagtttcctaa

SEQ ID NO: 1379292 - DNA, 15 bp, Homo sapiens
gaaatcagtttccta

SEQ ID NO: 1379293 - DNA, 15 bp, Homo sapiens
agaaatcagtttcct

SEQ ID NO: 1379294 - DNA, 15 bp, Homo sapiens
aagaaatcagtttcc

SEQ ID NO: 1379295 - DNA, 15 bp, Homo sapiens
taagaaatcagtttc

SEQ ID NO: 1379296 - DNA, 15 bp, Homo sapiens
gtaagaaatcagttt

SEQ ID NO: 1379297 - DNA, 15 bp, Homo sapiens
cgtaagaaatcagtt

SEQ ID NO: 1379298 - DNA, 15 bp, Homo sapiens
tcgtaagaaatcagt

SEQ ID NO: 1379299 - DNA, 15 bp, Homo sapiens
ttcgtaagaaatcag

SEQ ID NO: 1379300 - DNA, 15 bp, Homo sapiens
gttcgtaagaaatca

SEQ ID NO: 1379301 - DNA, 15 bp, Homo sapiens
agttcgtaagaaatc

SEQ ID NO: 1379302 - DNA, 15 bp, Homo sapiens
aagttcgtaagaaat

SEQ ID NO: 1379303 - DNA, 15 bp, Homo sapiens
caagttcgtaagaaa

SEQ ID NO: 1379304 - DNA, 15 bp, Homo sapiens
acaagttcgtaagaa

SEQ ID NO: 1379305 - DNA, 15 bp, Homo sapiens
tacaagttcgtaaga

SEQ ID NO: 1379306 - DNA, 15 bp, Homo sapiens
ttacaagttcgtaag

SEQ ID NO: 1379307 - DNA, 15 bp, Homo sapiens
attacaagttcgtaa

SEQ ID NO: 1379308 - DNA, 15 bp, Homo sapiens
aattacaagttcgta

SEQ ID NO: 1379309 - DNA, 15 bp, Homo sapiens
aaattacaagttcgt

SEQ ID NO: 1379310 - DNA, 15 bp, Homo sapiens
caaattacaagttcg

SEQ ID NO: 1379311 - DNA, 15 bp, Homo sapiens
tcaaattacaagttc

SEQ ID NO: 1379312 - DNA, 15 bp, Homo sapiens
gtcaaattacaagtt

SEQ ID NO: 1379313 - DNA, 15 bp, Homo sapiens
ggtcaaattacaagt

SEQ ID NO: 1379314 - DNA, 15 bp, Homo sapiens
aggtcaaattacaag

SEQ ID NO: 1379315 - DNA, 15 bp, Homo sapiens
aaggtcaaattacaa

SEQ ID NO: 1379316 - DNA, 15 bp, Homo sapiens
aaaggtcaaattaca

SEQ ID NO: 1379317 - DNA, 15 bp, Homo sapiens
caaaggtcaaattac

SEQ ID NO: 1379318 - DNA, 15 bp, Homo sapiens
acaaaggtcaaatta

SEQ ID NO: 1379319 - DNA, 15 bp, Homo sapiens
aacaaaggtcaaatt

SEQ ID NO: 1379320 - DNA, 15 bp, Homo sapiens
aaacaaaggtcaaat

SEQ ID NO: 1379321 - DNA, 15 bp, Homo sapiens
aaaacaaaggtcaaa

SEQ ID NO: 1379322 - DNA, 15 bp, Homo sapiens
aaaaacaaaggtcaa

SEQ ID NO: 1379323 - DNA, 15 bp, Homo sapiens
aaaaaacaaaggtca

SEQ ID NO: 1379324 - DNA, 15 bp, Homo sapiens
caaaaaacaaaggtc

SEQ ID NO: 1379325 - DNA, 15 bp, Homo sapiens
tcaaaaaacaaaggt

SEQ ID NO: 1379326 - DNA, 15 bp, Homo sapiens
atcaaaaaacaaagg

SEQ ID NO: 1379327 - DNA, 15 bp, Homo sapiens
gatcaaaaaacaaag

SEQ ID NO: 1379328 - DNA, 15 bp, Homo sapiens
agatcaaaaaacaaa

SEQ ID NO: 1379329 - DNA, 15 bp, Homo sapiens
gagatcaaaaaacaa

SEQ ID NO: 1379330 - DNA, 15 bp, Homo sapiens
tgagatcaaaaaaca

SEQ ID NO: 1379331 - DNA, 15 bp, Homo sapiens
ctgagatcaaaaaac

SEQ ID NO: 1379332 - DNA, 15 bp, Homo sapiens
cctgagatcaaaaaa

SEQ ID NO: 1379333 - DNA, 15 bp, Homo sapiens
acctgagatcaaaaa

SEQ ID NO: 1379334 - DNA, 15 bp, Homo sapiens
cacctgagatcaaaa

SEQ ID NO: 1379335 - DNA, 15 bp, Homo sapiens
tcacctgagatcaaa

SEQ ID NO: 1379336 - DNA, 15 bp, Homo sapiens
atcacctgagatcaa

SEQ ID NO: 1379337 - DNA, 15 bp, Homo sapiens
gatcacctgagatca

SEQ ID NO: 1379338 - DNA, 15 bp, Homo sapiens
tgatcacctgagatc

SEQ ID NO: 1379339 - DNA, 15 bp, Homo sapiens
ctgatcacctgagat

SEQ ID NO: 1379340 - DNA, 15 bp, Homo sapiens
actgatcacctgaga

SEQ ID NO: 1379341 - DNA, 15 bp, Homo sapiens
cactgatcacctgag

SEQ ID NO: 1379342 - DNA, 15 bp, Homo sapiens
acactgatcacctga

SEQ ID NO: 1379343 - DNA, 15 bp, Homo sapiens
cacactgatcacctg

SEQ ID NO: 1379344 - DNA, 15 bp, Homo sapiens
tcacactgatcacct

SEQ ID NO: 1379345 - DNA, 15 bp, Homo sapiens
gtcacactgatcacc

SEQ ID NO: 1379346 - DNA, 15 bp, Homo sapiens
agtcacactgatcac

SEQ ID NO: 1379347 - DNA, 15 bp, Homo sapiens
cagtcacactgatca

SEQ ID NO: 1379348 - DNA, 15 bp, Homo sapiens
acagtcacactgatc

SEQ ID NO: 1379349 - DNA, 15 bp, Homo sapiens
aacagtcacactgat

SEQ ID NO: 1379350 - DNA, 15 bp, Homo sapiens
aaacagtcacactga

SEQ ID NO: 1379351 - DNA, 15 bp, Homo sapiens
caaacagtcacactg

SEQ ID NO: 1379352 - DNA, 15 bp, Homo sapiens
acaaacagtcacact

SEQ ID NO: 1379353 - DNA, 15 bp, Homo sapiens
cacaaacagtcacac

SEQ ID NO: 1379354 - DNA, 15 bp, Homo sapiens
gcacaaacagtcaca

SEQ ID NO: 1379355 - DNA, 15 bp, Homo sapiens
tgcacaaacagtcac

SEQ ID NO: 1379356 - DNA, 15 bp, Homo sapiens
atgcacaaacagtca

SEQ ID NO: 1379357 - DNA, 15 bp, Homo sapiens
tatgcacaaacagtc

SEQ ID NO: 1379358 - DNA, 15 bp, Homo sapiens
ctatgcacaaacagt

SEQ ID NO: 1379359 - DNA, 15 bp, Homo sapiens
gctatgcacaaacag

SEQ ID NO: 1379360 - DNA, 15 bp, Homo sapiens
agctatgcacaaaca

SEQ ID NO: 1379361 - DNA, 15 bp, Homo sapiens
cagctatgcacaaac

SEQ ID NO: 1379362 - DNA, 15 bp, Homo sapiens
tcagctatgcacaaa

SEQ ID NO: 1379363 - DNA, 15 bp, Homo sapiens
atcagctatgcacaa

SEQ ID NO: 1379364 - DNA, 15 bp, Homo sapiens
aatcagctatgcaca

SEQ ID NO: 1379365 - DNA, 15 bp, Homo sapiens
taatcagctatgcac

SEQ ID NO: 1379366 - DNA, 15 bp, Homo sapiens
ataatcagctatgca

SEQ ID NO: 1379367 - DNA, 15 bp, Homo sapiens
aataatcagctatgc

SEQ ID NO: 1379368 - DNA, 15 bp, Homo sapiens
taataatcagctatg

SEQ ID NO: 1379369 - DNA, 15 bp, Homo sapiens
gtaataatcagctat

SEQ ID NO: 1379370 - DNA, 15 bp, Homo sapiens
tgtaataatcagcta

SEQ ID NO: 1379371 - DNA, 15 bp, Homo sapiens
ctgtaataatcagct

SEQ ID NO: 1379372 - DNA, 15 bp, Homo sapiens
tctgtaataatcagc

SEQ ID NO: 1379373 - DNA, 15 bp, Homo sapiens
ttctgtaataatcag

SEQ ID NO: 1379374 - DNA, 15 bp, Homo sapiens
attctgtaataatca

SEQ ID NO: 1379375 - DNA, 15 bp, Homo sapiens
tattctgtaataatc

SEQ ID NO: 1379376 - DNA, 15 bp, Homo sapiens
ctattctgtaataat

SEQ ID NO: 1379377 - DNA, 15 bp, Homo sapiens
actattctgtaataa

SEQ ID NO: 1379378 - DNA, 15 bp, Homo sapiens
tactattctgtaata

SEQ ID NO: 1379379 - DNA, 15 bp, Homo sapiens
ctactattctgtaat

SEQ ID NO: 1379380 - DNA, 15 bp, Homo sapiens
gctactattctgtaa

SEQ ID NO: 1379381 - DNA, 15 bp, Homo sapiens
tgctactattctgta

SEQ ID NO: 1379382 - DNA, 15 bp, Homo sapiens
atgctactattctgt

SEQ ID NO: 1379383 - DNA, 15 bp, Homo sapiens
aatgctactattctg

SEQ ID NO: 1379384 - DNA, 15 bp, Homo sapiens
aaatgctactattct

SEQ ID NO: 1379385 - DNA, 15 bp, Homo sapiens
gaaatgctactattc

SEQ ID NO: 1379386 - DNA, 15 bp, Homo sapiens
cgaaatgctactatt

SEQ ID NO: 1379387 - DNA, 15 bp, Homo sapiens
tcgaaatgctactat

SEQ ID NO: 1379388 - DNA, 15 bp, Homo sapiens
ctcgaaatgctacta

SEQ ID NO: 1379389 - DNA, 15 bp, Homo sapiens
tctcgaaatgctact

SEQ ID NO: 1379390 - DNA, 15 bp, Homo sapiens
ctctcgaaatgctac

SEQ ID NO: 1379391 - DNA, 15 bp, Homo sapiens
tctctcgaaatgcta

SEQ ID NO: 1379392 - DNA, 15 bp, Homo sapiens
ctctctcgaaatgct

SEQ ID NO: 1379393 - DNA, 15 bp, Homo sapiens
gctctctcgaaatgc

SEQ ID NO: 1379394 - DNA, 15 bp, Homo sapiens
agctctctcgaaatg

SEQ ID NO: 1379395 - DNA, 15 bp, Homo sapiens
tagctctctcgaaat

SEQ ID NO: 1379396 - DNA, 15 bp, Homo sapiens
ttagctctctcgaaa

SEQ ID NO: 1379397 - DNA, 15 bp, Homo sapiens
attagctctctcgaa

SEQ ID NO: 1379398 - DNA, 15 bp, Homo sapiens
tattagctctctcga

SEQ ID NO: 1379399 - DNA, 15 bp, Homo sapiens
ttattagctctctcg

SEQ ID NO: 1379400 - DNA, 15 bp, Homo sapiens
attattagctctctc

SEQ ID NO: 1379401 - DNA, 15 bp, Homo sapiens
gattattagctctct

SEQ ID NO: 1379402 - DNA, 15 bp, Homo sapiens
ggattattagctctc

SEQ ID NO: 1379403 - DNA, 15 bp, Homo sapiens
aggattattagctct

SEQ ID NO: 1379404 - DNA, 15 bp, Homo sapiens
gaggattattagctc

SEQ ID NO: 1379405 - DNA, 15 bp, Homo sapiens
tgaggattattagct

SEQ ID NO: 1379406 - DNA, 15 bp, Homo sapiens
ctgaggattattagc

SEQ ID NO: 1379407 - DNA, 15 bp, Homo sapiens
actgaggattattag

SEQ ID NO: 1379408 - DNA, 15 bp, Homo sapiens
aactgaggattatta

SEQ ID NO: 1379409 - DNA, 15 bp, Homo sapiens
gaactgaggattatt

SEQ ID NO: 1379410 - DNA, 15 bp, Homo sapiens
agaactgaggattat

SEQ ID NO: 1379411 - DNA, 15 bp, Homo sapiens
aagaactgaggatta

SEQ ID NO: 1379412 - DNA, 15 bp, Homo sapiens
aaagaactgaggatt

SEQ ID NO: 1379413 - DNA, 15 bp, Homo sapiens
aaaagaactgaggat

SEQ ID NO: 1379414 - DNA, 15 bp, Homo sapiens
caaaagaactgagga

SEQ ID NO: 1379415 - DNA, 15 bp, Homo sapiens
acaaaagaactgagg

SEQ ID NO: 1379416 - DNA, 15 bp, Homo sapiens
aacaaaagaactgag

SEQ ID NO: 1379417 - DNA, 15 bp, Homo sapiens
aaacaaaagaactga

SEQ ID NO: 1379418 - DNA, 15 bp, Homo sapiens
gaaacaaaagaactg

SEQ ID NO: 1379419 - DNA, 15 bp, Homo sapiens
agaaacaaaagaact

SEQ ID NO: 1379420 - DNA, 15 bp, Homo sapiens
aagaaacaaaagaac

SEQ ID NO: 1379421 - DNA, 15 bp, Homo sapiens
caagaaacaaaagaa

SEQ ID NO: 1379422 - DNA, 15 bp, Homo sapiens
tcaagaaacaaaaga

SEQ ID NO: 1379423 - DNA, 15 bp, Homo sapiens
atcaagaaacaaaag

SEQ ID NO: 1379424 - DNA, 15 bp, Homo sapiens
aatcaagaaacaaaa

SEQ ID NO: 1379425 - DNA, 15 bp, Homo sapiens
caatcaagaaacaaa

SEQ ID NO: 1379426 - DNA, 15 bp, Homo sapiens
ccaatcaagaaacaa

SEQ ID NO: 1379427 - DNA, 15 bp, Homo sapiens
gccaatcaagaaaca

SEQ ID NO: 1379428 - DNA, 15 bp, Homo sapiens
agccaatcaagaaac

SEQ ID NO: 1379429 - DNA, 15 bp, Homo sapiens
aagccaatcaagaaa

SEQ ID NO: 1379430 - DNA, 15 bp, Homo sapiens
aaagccaatcaagaa

SEQ ID NO: 1379431 - DNA, 15 bp, Homo sapiens
aaaagccaatcaaga

SEQ ID NO: 1379432 - DNA, 15 bp, Homo sapiens
aaaaagccaatcaag

SEQ ID NO: 1379433 - DNA, 15 bp, Homo sapiens
taaaaagccaatcaa

SEQ ID NO: 1379434 - DNA, 15 bp, Homo sapiens
ttaaaaagccaatca

SEQ ID NO: 1379435 - DNA, 15 bp, Homo sapiens
tttaaaaagccaatc

SEQ ID NO: 1379436 - DNA, 15 bp, Homo sapiens
ttttaaaaagccaat

SEQ ID NO: 1379437 - DNA, 15 bp, Homo sapiens
tttttaaaaagccaa

SEQ ID NO: 1379438 - DNA, 15 bp, Homo sapiens
ctttttaaaaagcca

SEQ ID NO: 1379439 - DNA, 15 bp, Homo sapiens
cctttttaaaaagcc

SEQ ID NO: 1379440 - DNA, 15 bp, Homo sapiens
acctttttaaaaagc

SEQ ID NO: 1379441 - DNA, 15 bp, Homo sapiens
aacctttttaaaaag

SEQ ID NO: 1379442 - DNA, 15 bp, Homo sapiens
taacctttttaaaaa

SEQ ID NO: 1379443 - DNA, 15 bp, Homo sapiens
ttaacctttttaaaa

SEQ ID NO: 1379444 - DNA, 15 bp, Homo sapiens
attaacctttttaaa

SEQ ID NO: 1379445 - DNA, 15 bp, Homo sapiens
aattaacctttttaa

SEQ ID NO: 1379446 - DNA, 15 bp, Homo sapiens
taattaaccttttta

SEQ ID NO: 1379447 - DNA, 15 bp, Homo sapiens
gtaattaaccttttt

SEQ ID NO: 1379448 - DNA, 15 bp, Homo sapiens
agtaattaacctttt

SEQ ID NO: 1379449 - DNA, 15 bp, Homo sapiens
aagtaattaaccttt

SEQ ID NO: 1379450 - DNA, 15 bp, Homo sapiens
aaagtaattaacctt

SEQ ID NO: 1379451 - DNA, 15 bp, Homo sapiens
aaaagtaattaacct

SEQ ID NO: 1379452 - DNA, 15 bp, Homo sapiens
caaaagtaattaacc

SEQ ID NO: 1379453 - DNA, 15 bp, Homo sapiens
acaaaagtaattaac

SEQ ID NO: 1379454 - DNA, 15 bp, Homo sapiens
aacaaaagtaattaa

SEQ ID NO: 1379455 - DNA, 15 bp, Homo sapiens
aaacaaaagtaatta

SEQ ID NO: 1379456 - DNA, 15 bp, Homo sapiens
gaaacaaaagtaatt

SEQ ID NO: 1379457 - DNA, 15 bp, Homo sapiens
tgaaacaaaagtaat

SEQ ID NO: 1379458 - DNA, 15 bp, Homo sapiens
gtgaaacaaaagtaa

SEQ ID NO: 1379459 - DNA, 15 bp, Homo sapiens
agtgaaacaaaagta

SEQ ID NO: 1379460 - DNA, 15 bp, Homo sapiens
cagtgaaacaaaagt

SEQ ID NO: 1379461 - DNA, 15 bp, Homo sapiens
acagtgaaacaaaag

SEQ ID NO: 1379462 - DNA, 15 bp, Homo sapiens
tacagtgaaacaaaa

SEQ ID NO: 1379463 - DNA, 15 bp, Homo sapiens
ctacagtgaaacaaa

SEQ ID NO: 1379464 - DNA, 15 bp, Homo sapiens
tctacagtgaaacaa

SEQ ID NO: 1379465 - DNA, 15 bp, Homo sapiens
ttctacagtgaaaca

SEQ ID NO: 1379466 - DNA, 15 bp, Homo sapiens
cttctacagtgaaac

SEQ ID NO: 1379467 - DNA, 15 bp, Homo sapiens
gcttctacagtgaaa

SEQ ID NO: 1379468 - DNA, 15 bp, Homo sapiens
agcttctacagtgaa

SEQ ID NO: 1379469 - DNA, 15 bp, Homo sapiens
aagcttctacagtga

SEQ ID NO: 1379470 - DNA, 15 bp, Homo sapiens
gaagcttctacagtg

SEQ ID NO: 1379471 - DNA, 15 bp, Homo sapiens
agaagcttctacagt

SEQ ID NO: 1379472 - DNA, 15 bp, Homo sapiens
gagaagcttctacag

SEQ ID NO: 1379473 - DNA, 15 bp, Homo sapiens
tgagaagcttctaca

SEQ ID NO: 1379474 - DNA, 15 bp, Homo sapiens
atgagaagcttctac

SEQ ID NO: 1379475 - DNA, 15 bp, Homo sapiens
gatgagaagcttcta

SEQ ID NO: 1379476 - DNA, 15 bp, Homo sapiens
agatgagaagcttct

SEQ ID NO: 1379477 - DNA, 15 bp, Homo sapiens
gagatgagaagcttc

SEQ ID NO: 1379478 - DNA, 15 bp, Homo sapiens
tgagatgagaagctt

SEQ ID NO: 1379479 - DNA, 15 bp, Homo sapiens
ctgagatgagaagct

SEQ ID NO: 1379480 - DNA, 15 bp, Homo sapiens
tctgagatgagaagc

SEQ ID NO: 1379481 - DNA, 15 bp, Homo sapiens
gtctgagatgagaag

SEQ ID NO: 1379482 - DNA, 15 bp, Homo sapiens
agtctgagatgagaa

SEQ ID NO: 1379483 - DNA, 15 bp, Homo sapiens
tagtctgagatgaga

SEQ ID NO: 1379484 - DNA, 15 bp, Homo sapiens
gtagtctgagatgag

SEQ ID NO: 1379485 - DNA, 15 bp, Homo sapiens
ggtagtctgagatga

SEQ ID NO: 1379486 - DNA, 15 bp, Homo sapiens
tggtagtctgagatg

SEQ ID NO: 1379487 - DNA, 15 bp, Homo sapiens
gtggtagtctgagat

SEQ ID NO: 1379488 - DNA, 15 bp, Homo sapiens
tgtggtagtctgaga

SEQ ID NO: 1379489 - DNA, 15 bp, Homo sapiens
atgtggtagtctgag

SEQ ID NO: 1379490 - DNA, 15 bp, Homo sapiens
aatgtggtagtctga

SEQ ID NO: 1379491 - DNA, 15 bp, Homo sapiens
caatgtggtagtctg

SEQ ID NO: 1379492 - DNA, 15 bp, Homo sapiens
gcaatgtggtagtct

SEQ ID NO: 1379493 - DNA, 15 bp, Homo sapiens
ggcaatgtggtagtc

SEQ ID NO: 1379494 - DNA, 15 bp, Homo sapiens
aggcaatgtggtagt

SEQ ID NO: 1379495 - DNA, 15 bp, Homo sapiens
taggcaatgtggtag

SEQ ID NO: 1379496 - DNA, 15 bp, Homo sapiens
ttaggcaatgtggta

SEQ ID NO: 1379497 - DNA, 15 bp, Homo sapiens
attaggcaatgtggt

SEQ ID NO: 1379498 - DNA, 15 bp, Homo sapiens
gattaggcaatgtgg

SEQ ID NO: 1379499 - DNA, 15 bp, Homo sapiens
tgattaggcaatgtg

SEQ ID NO: 1379500 - DNA, 15 bp, Homo sapiens
ttgattaggcaatgt

SEQ ID NO: 1379501 - DNA, 15 bp, Homo sapiens
tttgattaggcaatg

SEQ ID NO: 1379502 - DNA, 15 bp, Homo sapiens
ctttgattaggcaat

SEQ ID NO: 1379503 - DNA, 15 bp, Homo sapiens
actttgattaggcaa

SEQ ID NO: 1379504 - DNA, 15 bp, Homo sapiens
aactttgattaggca

SEQ ID NO: 1379505 - DNA, 15 bp, Homo sapiens
caactttgattaggc

SEQ ID NO: 1379506 - DNA, 15 bp, Homo sapiens
acaactttgattagg

SEQ ID NO: 1379507 - DNA, 15 bp, Homo sapiens
cacaactttgattag

SEQ ID NO: 1379508 - DNA, 15 bp, Homo sapiens
acacaactttgatta

SEQ ID NO: 1379509 - DNA, 15 bp, Homo sapiens
aacacaactttgatt

SEQ ID NO: 1379510 - DNA, 15 bp, Homo sapiens
taacacaactttgat

SEQ ID NO: 1379511 - DNA, 15 bp, Homo sapiens
ctaacacaactttga

SEQ ID NO: 1379512 - DNA, 15 bp, Homo sapiens
tctaacacaactttg

SEQ ID NO: 1379513 - DNA, 15 bp, Homo sapiens
ttctaacacaacttt

SEQ ID NO: 1379514 - DNA, 15 bp, Homo sapiens
attctaacacaactt

SEQ ID NO: 1379515 - DNA, 15 bp, Homo sapiens
tattctaacacaact

SEQ ID NO: 1379516 - DNA, 15 bp, Homo sapiens
ttattctaacacaac

SEQ ID NO: 1379517 - DNA, 15 bp, Homo sapiens
attattctaacacaa

SEQ ID NO: 1379518 - DNA, 15 bp, Homo sapiens
tattattctaacaca

SEQ ID NO: 1379519 - DNA, 15 bp, Homo sapiens
ctattattctaacac

SEQ ID NO: 1379520 - DNA, 15 bp, Homo sapiens
actattattctaaca

SEQ ID NO: 1379521 - DNA, 15 bp, Homo sapiens
cactattattctaac

SEQ ID NO: 1379522 - DNA, 15 bp, Homo sapiens
tcactattattctaa

SEQ ID NO: 1379523 - DNA, 15 bp, Homo sapiens
gtcactattattcta

SEQ ID NO: 1379524 - DNA, 15 bp, Homo sapiens
tgtcactattattct

SEQ ID NO: 1379525 - DNA, 15 bp, Homo sapiens
ctgtcactattattc

SEQ ID NO: 1379526 - DNA, 15 bp, Homo sapiens
cctgtcactattatt

SEQ ID NO: 1379527 - DNA, 15 bp, Homo sapiens
acctgtcactattat

SEQ ID NO: 1379528 - DNA, 15 bp, Homo sapiens
tacctgtcactatta

SEQ ID NO: 1379529 - DNA, 15 bp, Homo sapiens
ttacctgtcactatt

SEQ ID NO: 1379530 - DNA, 15 bp, Homo sapiens
attacctgtcactat

SEQ ID NO: 1379531 - DNA, 15 bp, Homo sapiens
cattacctgtcacta

SEQ ID NO: 1379532 - DNA, 15 bp, Homo sapiens
acattacctgtcact

SEQ ID NO: 1379533 - DNA, 15 bp, Homo sapiens
gacattacctgtcac

SEQ ID NO: 1379534 - DNA, 15 bp, Homo sapiens
ggacattacctgtca

SEQ ID NO: 1379535 - DNA, 15 bp, Homo sapiens
gggacattacctgtc

SEQ ID NO: 1379536 - DNA, 15 bp, Homo sapiens
tgggacattacctgt

SEQ ID NO: 1379537 - DNA, 15 bp, Homo sapiens
atgggacattacctg

SEQ ID NO: 1379538 - DNA, 15 bp, Homo sapiens
aatgggacattacct

SEQ ID NO: 1379539 - DNA, 15 bp, Homo sapiens
gaatgggacattacc

SEQ ID NO: 1379540 - DNA, 15 bp, Homo sapiens
tgaatgggacattac

SEQ ID NO: 1379541 - DNA, 15 bp, Homo sapiens
ctgaatgggacatta

SEQ ID NO: 1379542 - DNA, 15 bp, Homo sapiens
gctgaatgggacatt

SEQ ID NO: 1379543 - DNA, 15 bp, Homo sapiens
tgctgaatgggacat

SEQ ID NO: 1379544 - DNA, 15 bp, Homo sapiens
atgctgaatgggaca

SEQ ID NO: 1379545 - DNA, 15 bp, Homo sapiens
catgctgaatgggac

SEQ ID NO: 1379546 - DNA, 15 bp, Homo sapiens
acatgctgaatggga

SEQ ID NO: 1379547 - DNA, 15 bp, Homo sapiens
cacatgctgaatggg

SEQ ID NO: 1379548 - DNA, 15 bp, Homo sapiens
tcacatgctgaatgg

SEQ ID NO: 1379549 - DNA, 15 bp, Homo sapiens
gtcacatgctgaatg

SEQ ID NO: 1379550 - DNA, 15 bp, Homo sapiens
tgtcacatgctgaat

SEQ ID NO: 1379551 - DNA, 15 bp, Homo sapiens
ctgtcacatgctgaa

SEQ ID NO: 1379552 - DNA, 15 bp, Homo sapiens
actgtcacatgctga

SEQ ID NO: 1379553 - DNA, 15 bp, Homo sapiens
tactgtcacatgctg

SEQ ID NO: 1379554 - DNA, 15 bp, Homo sapiens
atactgtcacatgct

SEQ ID NO: 1379555 - DNA, 15 bp, Homo sapiens
aatactgtcacatgc

SEQ ID NO: 1379556 - DNA, 15 bp, Homo sapiens
taatactgtcacatg

SEQ ID NO: 1379557 - DNA, 15 bp, Homo sapiens
ataatactgtcacat

SEQ ID NO: 1379558 - DNA, 15 bp, Homo sapiens
aataatactgtcaca

SEQ ID NO: 1379559 - DNA, 15 bp, Homo sapiens
aaataatactgtcac

SEQ ID NO: 1379560 - DNA, 15 bp, Homo sapiens
gaaataatactgtca

SEQ ID NO: 1379561 - DNA, 15 bp, Homo sapiens
ggaaataatactgtc

SEQ ID NO: 1379562 - DNA, 15 bp, Homo sapiens
aggaaataatactgt

SEQ ID NO: 1379563 - DNA, 15 bp, Homo sapiens
taggaaataatactg

SEQ ID NO: 1379564 - DNA, 15 bp, Homo sapiens
ttaggaaataatact

SEQ ID NO: 1379565 - DNA, 15 bp, Homo sapiens
attaggaaataatac

SEQ ID NO: 1379566 - DNA, 15 bp, Homo sapiens
tattaggaaataata

SEQ ID NO: 1379567 - DNA, 15 bp, Homo sapiens
ttattaggaaataat

SEQ ID NO: 1379568 - DNA, 15 bp, Homo sapiens
attattaggaaataa

SEQ ID NO: 1379569 - DNA, 15 bp, Homo sapiens
aattattaggaaata

SEQ ID NO: 1379570 - DNA, 15 bp, Homo sapiens
aaattattaggaaat

SEQ ID NO: 1379571 - DNA, 15 bp, Homo sapiens
taaattattaggaaa

SEQ ID NO: 1379572 - DNA, 15 bp, Homo sapiens
ctaaattattaggaa

SEQ ID NO: 1379573 - DNA, 15 bp, Homo sapiens
cctaaattattagga

SEQ ID NO: 1379574 - DNA, 15 bp, Homo sapiens
gcctaaattattagg

SEQ ID NO: 1379575 - DNA, 15 bp, Homo sapiens
tgcctaaattattag

SEQ ID NO: 1379576 - DNA, 15 bp, Homo sapiens
atgcctaaattatta

SEQ ID NO: 1379577 - DNA, 15 bp, Homo sapiens
tatgcctaaattatt

SEQ ID NO: 1379578 - DNA, 15 bp, Homo sapiens
ttatgcctaaattat

SEQ ID NO: 1379579 - DNA, 15 bp, Homo sapiens
attatgcctaaatta

SEQ ID NO: 1379580 - DNA, 15 bp, Homo sapiens
aattatgcctaaatt

SEQ ID NO: 1379581 - DNA, 15 bp, Homo sapiens
aaattatgcctaaat

SEQ ID NO: 1379582 - DNA, 15 bp, Homo sapiens
aaaattatgcctaaa

SEQ ID NO: 1379583 - DNA, 15 bp, Homo sapiens
aaaaattatgcctaa

SEQ ID NO: 1379584 - DNA, 15 bp, Homo sapiens
aaaaaattatgccta

SEQ ID NO: 1379585 - DNA, 15 bp, Homo sapiens
taaaaaattatgcct

SEQ ID NO: 1379586 - DNA, 15 bp, Homo sapiens
ttaaaaaattatgcc

SEQ ID NO: 1379587 - DNA, 15 bp, Homo sapiens
attaaaaaattatgc

SEQ ID NO: 1379588 - DNA, 15 bp, Homo sapiens
gaattaaaaaattat

SEQ ID NO: 1379589 - DNA, 15 bp, Homo sapiens
tgaattaaaaaatta

SEQ ID NO: 1379590 - DNA, 15 bp, Homo sapiens
gtgaattaaaaaatt

SEQ ID NO: 1379591 - DNA, 15 bp, Homo sapiens
agtgaattaaaaaat

SEQ ID NO: 1379592 - DNA, 15 bp, Homo sapiens
aagtgaattaaaaaa

SEQ ID NO: 1379593 - DNA, 15 bp, Homo sapiens
taagtgaattaaaaa

SEQ ID NO: 1379594 - DNA, 15 bp, Homo sapiens
ttaagtgaattaaaa

SEQ ID NO: 1379595 - DNA, 15 bp, Homo sapiens
attaagtgaattaaa

SEQ ID NO: 1379596 - DNA, 15 bp, Homo sapiens
cattaagtgaattaa

SEQ ID NO: 1379597 - DNA, 15 bp, Homo sapiens
ccattaagtgaatta

SEQ ID NO: 1379598 - DNA, 15 bp, Homo sapiens
accattaagtgaatt

SEQ ID NO: 1379599 - DNA, 15 bp, Homo sapiens
taccattaagtgaat

SEQ ID NO: 1379600 - DNA, 15 bp, Homo sapiens
gtaccattaagtgaa

SEQ ID NO: 1379601 - DNA, 15 bp, Homo sapiens
tgtaccattaagtga

SEQ ID NO: 1379602 - DNA, 15 bp, Homo sapiens
atgtaccattaagtg

SEQ ID NO: 1379603 - DNA, 15 bp, Homo sapiens
aatgtaccattaagt

SEQ ID NO: 1379604 - DNA, 15 bp, Homo sapiens
aaatgtaccattaag

SEQ ID NO: 1379605 - DNA, 15 bp, Homo sapiens
taaatgtaccattaa

SEQ ID NO: 1379606 - DNA, 15 bp, Homo sapiens
ctaaatgtaccatta

SEQ ID NO: 1379607 - DNA, 15 bp, Homo sapiens
tctaaatgtaccatt

SEQ ID NO: 1379608 - DNA, 15 bp, Homo sapiens
ttctaaatgtaccat

SEQ ID NO: 1379609 - DNA, 15 bp, Homo sapiens
attctaaatgtacca

SEQ ID NO: 1379610 - DNA, 15 bp, Homo sapiens
aattctaaatgtacc

SEQ ID NO: 1379611 - DNA, 15 bp, Homo sapiens
caattctaaatgtac

SEQ ID NO: 1379612 - DNA, 15 bp, Homo sapiens
ccaattctaaatgta

SEQ ID NO: 1379613 - DNA, 15 bp, Homo sapiens
accaattctaaatgt

SEQ ID NO: 1379614 - DNA, 15 bp, Homo sapiens
aaccaattctaaatg

SEQ ID NO: 1379615 - DNA, 15 bp, Homo sapiens
taaccaattctaaat

SEQ ID NO: 1379616 - DNA, 15 bp, Homo sapiens
ataaccaattctaaa

SEQ ID NO: 1379617 - DNA, 15 bp, Homo sapiens
gataaccaattctaa

SEQ ID NO: 1379618 - DNA, 15 bp, Homo sapiens
agataaccaattcta

SEQ ID NO: 1379619 - DNA, 15 bp, Homo sapiens
tagataaccaattct

SEQ ID NO: 1379620 - DNA, 15 bp, Homo sapiens
ttagataaccaattc

SEQ ID NO: 1379621 - DNA, 15 bp, Homo sapiens
cttagataaccaatt

SEQ ID NO: 1379622 - DNA, 15 bp, Homo sapiens
tcttagataaccaat

SEQ ID NO: 1379623 - DNA, 15 bp, Homo sapiens
ttcttagataaccaa

SEQ ID NO: 1379624 - DNA, 15 bp, Homo sapiens
tttcttagataacca

SEQ ID NO: 1379625 - DNA, 15 bp, Homo sapiens
atttcttagataacc

SEQ ID NO: 1379626 - DNA, 15 bp, Homo sapiens
tatttcttagataac

SEQ ID NO: 1379627 - DNA, 15 bp, Homo sapiens
ctatttcttagataa

SEQ ID NO: 1379628 - DNA, 15 bp, Homo sapiens
tctatttcttagata

SEQ ID NO: 1379629 - DNA, 15 bp, Homo sapiens
ttctatttcttagat

SEQ ID NO: 1379630 - DNA, 15 bp, Homo sapiens
tttctatttcttaga

SEQ ID NO: 1379631 - DNA, 15 bp, Homo sapiens
atttctatttcttag

SEQ ID NO: 1379632 - DNA, 15 bp, Homo sapiens
tatttctatttctta

SEQ ID NO: 1379633 - DNA, 15 bp, Homo sapiens
ttatttctatttctt

SEQ ID NO: 1379634 - DNA, 15 bp, Homo sapiens
tttatttctatttct

SEQ ID NO: 1379635 - DNA, 15 bp, Homo sapiens
atttatttctatttc

SEQ ID NO: 1379636 - DNA, 15 bp, Homo sapiens
gatttatttctattt

SEQ ID NO: 1379637 - DNA, 15 bp, Homo sapiens
tgatttatttctatt

SEQ ID NO: 1379638 - DNA, 15 bp, Homo sapiens
gtgatttatttctat

SEQ ID NO: 1379639 - DNA, 15 bp, Homo sapiens
agtgatttatttcta

SEQ ID NO: 1379640 - DNA, 15 bp, Homo sapiens
tagtgatttatttct

SEQ ID NO: 1379641 - DNA, 15 bp, Homo sapiens
ttagtgatttatttc

SEQ ID NO: 1379642 - DNA, 15 bp, Homo sapiens
cttagtgatttattt

SEQ ID NO: 1379643 - DNA, 15 bp, Homo sapiens
acttagtgatttatt

SEQ ID NO: 1379644 - DNA, 15 bp, Homo sapiens
cacttagtgatttat

SEQ ID NO: 1379645 - DNA, 15 bp, Homo sapiens
acacttagtgattta

SEQ ID NO: 1379646 - DNA, 15 bp, Homo sapiens
gacacttagtgattt

SEQ ID NO: 1379647 - DNA, 15 bp, Homo sapiens
tgacacttagtgatt

SEQ ID NO: 1379648 - DNA, 15 bp, Homo sapiens
ttgacacttagtgat

SEQ ID NO: 1379649 - DNA, 15 bp, Homo sapiens
tttgacacttagtga

SEQ ID NO: 1379650 - DNA, 15 bp, Homo sapiens
ctttgacacttagtg

SEQ ID NO: 1379651 - DNA, 15 bp, Homo sapiens
tctttgacacttagt

SEQ ID NO: 1379652 - DNA, 15 bp, Homo sapiens
gtctttgacacttag

SEQ ID NO: 1379653 - DNA, 15 bp, Homo sapiens
ggtctttgacactta

SEQ ID NO: 1379654 - DNA, 15 bp, Homo sapiens
tggtctttgacactt

SEQ ID NO: 1379655 - DNA, 15 bp, Homo sapiens
atggtctttgacact

SEQ ID NO: 1379656 - DNA, 15 bp, Homo sapiens
gatggtctttgacac

SEQ ID NO: 1379657 - DNA, 15 bp, Homo sapiens
ggatggtctttgaca

SEQ ID NO: 1379658 - DNA, 15 bp, Homo sapiens
tggatggtctttgac

SEQ ID NO: 1379659 - DNA, 15 bp, Homo sapiens
ctggatggtctttga

SEQ ID NO: 1379660 - DNA, 15 bp, Homo sapiens
actggatggtctttg

SEQ ID NO: 1379661 - DNA, 15 bp, Homo sapiens
aactggatggtcttt

SEQ ID NO: 1379662 - DNA, 15 bp, Homo sapiens
aaactggatggtctt

SEQ ID NO: 1379663 - DNA, 15 bp, Homo sapiens
gaaactggatggtct

SEQ ID NO: 1379664 - DNA, 15 bp, Homo sapiens
tgaaactggatggtc

SEQ ID NO: 1379665 - DNA, 15 bp, Homo sapiens
atgaaactggatggt

SEQ ID NO: 1379666 - DNA, 15 bp, Homo sapiens
aatgaaactggatgg

SEQ ID NO: 1379667 - DNA, 15 bp, Homo sapiens
aaatgaaactggatg

SEQ ID NO: 1379668 - DNA, 15 bp, Homo sapiens
gaaatgaaactggat

SEQ ID NO: 1379669 - DNA, 15 bp, Homo sapiens
tgaaatgaaactgga

SEQ ID NO: 1379670 - DNA, 15 bp, Homo sapiens
ctgaaatgaaactgg

SEQ ID NO: 1379671 - DNA, 15 bp, Homo sapiens
actgaaatgaaactg

SEQ ID NO: 1379672 - DNA, 15 bp, Homo sapiens
gactgaaatgaaact

SEQ ID NO: 1379673 - DNA, 15 bp, Homo sapiens
tgactgaaatgaaac

SEQ ID NO: 1379674 - DNA, 15 bp, Homo sapiens
atgactgaaatgaaa

SEQ ID NO: 1379675 - DNA, 15 bp, Homo sapiens
catgactgaaatgaa

SEQ ID NO: 1379676 - DNA, 15 bp, Homo sapiens
ccatgactgaaatga

SEQ ID NO: 1379677 - DNA, 15 bp, Homo sapiens
tccatgactgaaatg

SEQ ID NO: 1379678 - DNA, 15 bp, Homo sapiens
ttccatgactgaaat

SEQ ID NO: 1379679 - DNA, 15 bp, Homo sapiens
attccatgactgaaa

SEQ ID NO: 1379680 - DNA, 15 bp, Homo sapiens
aattccatgactgaa

SEQ ID NO: 1379681 - DNA, 15 bp, Homo sapiens
aaattccatgactga

SEQ ID NO: 1379682 - DNA, 15 bp, Homo sapiens
aaaattccatgactg

SEQ ID NO: 1379683 - DNA, 15 bp, Homo sapiens
caaaattccatgact

SEQ ID NO: 1379684 - DNA, 15 bp, Homo sapiens
acaaaattccatgac

SEQ ID NO: 1379685 - DNA, 15 bp, Homo sapiens
aacaaaattccatga

SEQ ID NO: 1379686 - DNA, 15 bp, Homo sapiens
aaacaaaattccatg

SEQ ID NO: 1379687 - DNA, 15 bp, Homo sapiens
taaacaaaattccat

SEQ ID NO: 1379688 - DNA, 15 bp, Homo sapiens
ataaacaaaattcca

SEQ ID NO: 1379689 - DNA, 15 bp, Homo sapiens
cataaacaaaattcc

SEQ ID NO: 1379690 - DNA, 15 bp, Homo sapiens
gcataaacaaaattc

SEQ ID NO: 1379691 - DNA, 15 bp, Homo sapiens
tgcataaacaaaatt

SEQ ID NO: 1379692 - DNA, 15 bp, Homo sapiens
ctgcataaacaaaat

SEQ ID NO: 1379693 - DNA, 15 bp, Homo sapiens
cctgcataaacaaaa

SEQ ID NO: 1379694 - DNA, 15 bp, Homo sapiens
tcctgcataaacaaa

SEQ ID NO: 1379695 - DNA, 15 bp, Homo sapiens
ctcctgcataaacaa

SEQ ID NO: 1379696 - DNA, 15 bp, Homo sapiens
gctcctgcataaaca

SEQ ID NO: 1379697 - DNA, 15 bp, Homo sapiens
ggctcctgcataaac

SEQ ID NO: 1379698 - DNA, 15 bp, Homo sapiens
aggctcctgcataaa

SEQ ID NO: 1379699 - DNA, 15 bp, Homo sapiens
taggctcctgcataa

SEQ ID NO: 1379700 - DNA, 15 bp, Homo sapiens
ctaggctcctgcata

SEQ ID NO: 1379701 - DNA, 15 bp, Homo sapiens
cctaggctcctgcat

SEQ ID NO: 1379702 - DNA, 15 bp, Homo sapiens
acctaggctcctgca

SEQ ID NO: 1379703 - DNA, 15 bp, Homo sapiens
tacctaggctcctgc

SEQ ID NO: 1379704 - DNA, 15 bp, Homo sapiens
atacctaggctcctg

SEQ ID NO: 1379705 - DNA, 15 bp, Homo sapiens
catacctaggctcct

SEQ ID NO: 1379706 - DNA, 15 bp, Homo sapiens
ccatacctaggctcc

SEQ ID NO: 1379707 - DNA, 15 bp, Homo sapiens
tccatacctaggctc

SEQ ID NO: 1379708 - DNA, 15 bp, Homo sapiens
gtccatacctaggct

SEQ ID NO: 1379709 - DNA, 15 bp, Homo sapiens
tgtccatacctaggc

SEQ ID NO: 1379710 - DNA, 15 bp, Homo sapiens
ctgtccatacctagg

SEQ ID NO: 1379711 - DNA, 15 bp, Homo sapiens
tctgtccatacctag

SEQ ID NO: 1379712 - DNA, 15 bp, Homo sapiens
ttctgtccataccta

SEQ ID NO: 1379713 - DNA, 15 bp, Homo sapiens
tttctgtccatacct

SEQ ID NO: 1379714 - DNA, 15 bp, Homo sapiens
atttctgtccatacc

SEQ ID NO: 1379715 - DNA, 15 bp, Homo sapiens
tatttctgtccatac

SEQ ID NO: 1379716 - DNA, 15 bp, Homo sapiens
ttatttctgtccata

SEQ ID NO: 1379717 - DNA, 15 bp, Homo sapiens
attatttctgtccat

SEQ ID NO: 1379718 - DNA, 15 bp, Homo sapiens
aattatttctgtcca

SEQ ID NO: 1379719 - DNA, 15 bp, Homo sapiens
taattatttctgtcc

SEQ ID NO: 1379720 - DNA, 15 bp, Homo sapiens
ataattatttctgtc

SEQ ID NO: 1379721 - DNA, 15 bp, Homo sapiens
tataattatttctgt

SEQ ID NO: 1379722 - DNA, 15 bp, Homo sapiens
atataattatttctg

SEQ ID NO: 1379723 - DNA, 15 bp, Homo sapiens
tatataattatttct

SEQ ID NO: 1379724 - DNA, 15 bp, Homo sapiens
gtatataattatttc

SEQ ID NO: 1379725 - DNA, 15 bp, Homo sapiens
agtatataattattt

SEQ ID NO: 1379726 - DNA, 15 bp, Homo sapiens
tagtatataattatt

SEQ ID NO: 1379727 - DNA, 15 bp, Homo sapiens
ttagtatataattat

SEQ ID NO: 1379728 - DNA, 15 bp, Homo sapiens
tttagtatataatta

SEQ ID NO: 1379729 - DNA, 15 bp, Homo sapiens
ctttagtatataatt

SEQ ID NO: 1379730 - DNA, 15 bp, Homo sapiens
cctttagtatataat

SEQ ID NO: 1379731 - DNA, 15 bp, Homo sapiens
tcctttagtatataa

SEQ ID NO: 1379732 - DNA, 15 bp, Homo sapiens
ttcctttagtatata

SEQ ID NO: 1379733 - DNA, 15 bp, Homo sapiens
tttcctttagtatat

SEQ ID NO: 1379734 - DNA, 15 bp, Homo sapiens
ttttcctttagtata

SEQ ID NO: 1379735 - DNA, 15 bp, Homo sapiens
attttcctttagtat

SEQ ID NO: 1379736 - DNA, 15 bp, Homo sapiens
aattttcctttagta

SEQ ID NO: 1379737 - DNA, 15 bp, Homo sapiens
taattttcctttagt

SEQ ID NO: 1379738 - DNA, 15 bp, Homo sapiens
ctaattttcctttag

SEQ ID NO: 1379739 - DNA, 15 bp, Homo sapiens
tctaattttccttta

SEQ ID NO: 1379740 - DNA, 15 bp, Homo sapiens
gtctaattttccttt

SEQ ID NO: 1379741 - DNA, 15 bp, Homo sapiens
ggtctaattttcctt

SEQ ID NO: 1379742 - DNA, 15 bp, Homo sapiens
aggtctaattttcct

SEQ ID NO: 1379743 - DNA, 15 bp, Homo sapiens
caggtctaattttcc

SEQ ID NO: 1379744 - DNA, 15 bp, Homo sapiens
acaggtctaattttc

SEQ ID NO: 1379745 - DNA, 15 bp, Homo sapiens
aacaggtctaatttt

SEQ ID NO: 1379746 - DNA, 15 bp, Homo sapiens
taacaggtctaattt

SEQ ID NO: 1379747 - DNA, 15 bp, Homo sapiens
gtaacaggtctaatt

SEQ ID NO: 1379748 - DNA, 15 bp, Homo sapiens
agtaacaggtctaat

SEQ ID NO: 1379749 - DNA, 15 bp, Homo sapiens
aagtaacaggtctaa

SEQ ID NO: 1379750 - DNA, 15 bp, Homo sapiens
caagtaacaggtcta

SEQ ID NO: 1379751 - DNA, 15 bp, Homo sapiens
ccaagtaacaggtct

SEQ ID NO: 1379752 - DNA, 15 bp, Homo sapiens
accaagtaacaggtc

SEQ ID NO: 1379753 - DNA, 15 bp, Homo sapiens
aaccaagtaacaggt

SEQ ID NO: 1379754 - DNA, 15 bp, Homo sapiens
aaaccaagtaacagg

SEQ ID NO: 1379755 - DNA, 15 bp, Homo sapiens
taaaccaagtaacag

SEQ ID NO: 1379756 - DNA, 15 bp, Homo sapiens
ctaaaccaagtaaca

SEQ ID NO: 1379757 - DNA, 15 bp, Homo sapiens
gctaaaccaagtaac

SEQ ID NO: 1379758 - DNA, 15 bp, Homo sapiens
ggctaaaccaagtaa

SEQ ID NO: 1379759 - DNA, 15 bp, Homo sapiens
tggctaaaccaagta

SEQ ID NO: 1379760 - DNA, 15 bp, Homo sapiens
ttggctaaaccaagt

SEQ ID NO: 1379761 - DNA, 15 bp, Homo sapiens
tttggctaaaccaag

SEQ ID NO: 1379762 - DNA, 15 bp, Homo sapiens
ttttggctaaaccaa

SEQ ID NO: 1379763 - DNA, 15 bp, Homo sapiens
tttttggctaaacca

SEQ ID NO: 1379764 - DNA, 15 bp, Homo sapiens
atttttggctaaacc

SEQ ID NO: 1379765 - DNA, 15 bp, Homo sapiens
catttttggctaaac

SEQ ID NO: 1379766 - DNA, 15 bp, Homo sapiens
ccatttttggctaaa

SEQ ID NO: 1379767 - DNA, 15 bp, Homo sapiens
tccatttttggctaa

SEQ ID NO: 1379768 - DNA, 15 bp, Homo sapiens
ttccatttttggcta

SEQ ID NO: 1379769 - DNA, 15 bp, Homo sapiens
cttccatttttggct

SEQ ID NO: 1379770 - DNA, 15 bp, Homo sapiens
acttccatttttggc

SEQ ID NO: 1379771 - DNA, 15 bp, Homo sapiens
aacttccatttttgg

SEQ ID NO: 1379772 - DNA, 15 bp, Homo sapiens
taacttccatttttg

SEQ ID NO: 1379773 - DNA, 15 bp, Homo sapiens
ttaacttccattttt

SEQ ID NO: 1379774 - DNA, 15 bp, Homo sapiens
tttaacttccatttt

SEQ ID NO: 1379775 - DNA, 15 bp, Homo sapiens
ttttaacttccattt

SEQ ID NO: 1379776 - DNA, 15 bp, Homo sapiens
gttttaacttccatt

SEQ ID NO: 1379777 - DNA, 15 bp, Homo sapiens
agttttaacttccat

SEQ ID NO: 1379778 - DNA, 15 bp, Homo sapiens
gagttttaacttcca

SEQ ID NO: 1379779 - DNA, 15 bp, Homo sapiens
tgagttttaacttcc

SEQ ID NO: 1379780 - DNA, 15 bp, Homo sapiens
ctgagttttaacttc

SEQ ID NO: 1379781 - DNA, 15 bp, Homo sapiens
actgagttttaactt

SEQ ID NO: 1379782 - DNA, 15 bp, Homo sapiens
cactgagttttaact

SEQ ID NO: 1379783 - DNA, 15 bp, Homo sapiens
gcactgagttttaac

SEQ ID NO: 1379784 - DNA, 15 bp, Homo sapiens
tgcactgagttttaa

SEQ ID NO: 1379785 - DNA, 15 bp, Homo sapiens
ctgcactgagtttta

SEQ ID NO: 1379786 - DNA, 15 bp, Homo sapiens
tctgcactgagtttt

SEQ ID NO: 1379787 - DNA, 15 bp, Homo sapiens
ttctgcactgagttt

SEQ ID NO: 1379788 - DNA, 15 bp, Homo sapiens
cttctgcactgagtt

SEQ ID NO: 1379789 - DNA, 15 bp, Homo sapiens
acttctgcactgagt

SEQ ID NO: 1379790 - DNA, 15 bp, Homo sapiens
gacttctgcactgag

SEQ ID NO: 1379791 - DNA, 15 bp, Homo sapiens
agacttctgcactga

SEQ ID NO: 1379792 - DNA, 15 bp, Homo sapiens
aagacttctgcactg

SEQ ID NO: 1379793 - DNA, 15 bp, Homo sapiens
aaagacttctgcact

SEQ ID NO: 1379794 - DNA, 15 bp, Homo sapiens
caaagacttctgcac

SEQ ID NO: 1379795 - DNA, 15 bp, Homo sapiens
ccaaagacttctgca

SEQ ID NO: 1379796 - DNA, 15 bp, Homo sapiens
accaaagacttctgc

SEQ ID NO: 1379797 - DNA, 15 bp, Homo sapiens
aaccaaagacttctg

SEQ ID NO: 1379798 - DNA, 15 bp, Homo sapiens
gaaccaaagacttct

SEQ ID NO: 1379799 - DNA, 15 bp, Homo sapiens
agaaccaaagacttc

SEQ ID NO: 1379800 - DNA, 15 bp, Homo sapiens
aagaaccaaagactt

SEQ ID NO: 1379801 - DNA, 15 bp, Homo sapiens
caagaaccaaagact

SEQ ID NO: 1379802 - DNA, 15 bp, Homo sapiens
ccaagaaccaaagac

SEQ ID NO: 1379803 - DNA, 15 bp, Homo sapiens
tccaagaaccaaaga

SEQ ID NO: 1379804 - DNA, 15 bp, Homo sapiens
gtccaagaaccaaag

SEQ ID NO: 1379805 - DNA, 15 bp, Homo sapiens
agtccaagaaccaaa

SEQ ID NO: 1379806 - DNA, 15 bp, Homo sapiens
tagtccaagaaccaa

SEQ ID NO: 1379807 - DNA, 15 bp, Homo sapiens
ctagtccaagaacca

SEQ ID NO: 1379808 - DNA, 15 bp, Homo sapiens
cctagtccaagaacc

SEQ ID NO: 1379809 - DNA, 15 bp, Homo sapiens
ccctagtccaagaac

SEQ ID NO: 1379810 - DNA, 15 bp, Homo sapiens
tccctagtccaagaa

SEQ ID NO: 1379811 - DNA, 15 bp, Homo sapiens
gtccctagtccaaga

SEQ ID NO: 1379812 - DNA, 15 bp, Homo sapiens
agtccctagtccaag

SEQ ID NO: 1379813 - DNA, 15 bp, Homo sapiens
gagtccctagtccaa

SEQ ID NO: 1379814 - DNA, 15 bp, Homo sapiens
agagtccctagtcca

SEQ ID NO: 1379815 - DNA, 15 bp, Homo sapiens
tagagtccctagtcc

SEQ ID NO: 1379816 - DNA, 15 bp, Homo sapiens
ttagagtccctagtc

SEQ ID NO: 1379817 - DNA, 15 bp, Homo sapiens
gttagagtccctagt

SEQ ID NO: 1379818 - DNA, 15 bp, Homo sapiens
tgttagagtccctag

SEQ ID NO: 1379819 - DNA, 15 bp, Homo sapiens
atgttagagtcccta

SEQ ID NO: 1379820 - DNA, 15 bp, Homo sapiens
aatgttagagtccct

SEQ ID NO: 1379821 - DNA, 15 bp, Homo sapiens
caatgttagagtccc

SEQ ID NO: 1379822 - DNA, 15 bp, Homo sapiens
acaatgttagagtcc

SEQ ID NO: 1379823 - DNA, 15 bp, Homo sapiens
gacaatgttagagtc

SEQ ID NO: 1379824 - DNA, 15 bp, Homo sapiens
agacaatgttagagt

SEQ ID NO: 1379825 - DNA, 15 bp, Homo sapiens
cagacaatgttagag

SEQ ID NO: 1379826 - DNA, 15 bp, Homo sapiens
gcagacaatgttaga

SEQ ID NO: 1379827 - DNA, 15 bp, Homo sapiens
agcagacaatgttag

SEQ ID NO: 1379828 - DNA, 15 bp, Homo sapiens
gagcagacaatgtta

SEQ ID NO: 1379829 - DNA, 15 bp, Homo sapiens
tgagcagacaatgtt

SEQ ID NO: 1379830 - DNA, 15 bp, Homo sapiens
ctgagcagacaatgt

SEQ ID NO: 1379831 - DNA, 15 bp, Homo sapiens
actgagcagacaatg

SEQ ID NO: 1379832 - DNA, 15 bp, Homo sapiens
cactgagcagacaat

SEQ ID NO: 1379833 - DNA, 15 bp, Homo sapiens
acactgagcagacaa

SEQ ID NO: 1379834 - DNA, 15 bp, Homo sapiens
aacactgagcagaca

SEQ ID NO: 1379835 - DNA, 15 bp, Homo sapiens
taacactgagcagac

SEQ ID NO: 1379836 - DNA, 15 bp, Homo sapiens
gtaacactgagcaga

SEQ ID NO: 1379837 - DNA, 15 bp, Homo sapiens
ggtaacactgagcag

SEQ ID NO: 1379838 - DNA, 15 bp, Homo sapiens
tggtaacactgagca

SEQ ID NO: 1379839 - DNA, 15 bp, Homo sapiens
ttggtaacactgagc

SEQ ID NO: 1379840 - DNA, 15 bp, Homo sapiens
cttggtaacactgag

SEQ ID NO: 1379841 - DNA, 15 bp, Homo sapiens
gcttggtaacactga

SEQ ID NO: 1379842 - DNA, 15 bp, Homo sapiens
tgcttggtaacactg

SEQ ID NO: 1379843 - DNA, 15 bp, Homo sapiens
ctgcttggtaacact

SEQ ID NO: 1379844 - DNA, 15 bp, Homo sapiens
tctgcttggtaacac

SEQ ID NO: 1379845 - DNA, 15 bp, Homo sapiens
gtctgcttggtaaca

SEQ ID NO: 1379846 - DNA, 15 bp, Homo sapiens
tgtctgcttggtaac

SEQ ID NO: 1379847 - DNA, 15 bp, Homo sapiens
gtgtctgcttggtaa

SEQ ID NO: 1379848 - DNA, 15 bp, Homo sapiens
tgtgtctgcttggta

SEQ ID NO: 1379849 - DNA, 15 bp, Homo sapiens
atgtgtctgcttggt

SEQ ID NO: 1379850 - DNA, 15 bp, Homo sapiens
tatgtgtctgcttgg

SEQ ID NO: 1379851 - DNA, 15 bp, Homo sapiens
ctatgtgtctgcttg

SEQ ID NO: 1379852 - DNA, 15 bp, Homo sapiens
gctatgtgtctgctt

SEQ ID NO: 1379853 - DNA, 15 bp, Homo sapiens
ggctatgtgtctgct

SEQ ID NO: 1379854 - DNA, 15 bp, Homo sapiens
aggctatgtgtctgc

SEQ ID NO: 1379855 - DNA, 15 bp, Homo sapiens
aaggctatgtgtctg

SEQ ID NO: 1379856 - DNA, 15 bp, Homo sapiens
aaaggctatgtgtct

SEQ ID NO: 1379857 - DNA, 15 bp, Homo sapiens
gaaaggctatgtgtc

SEQ ID NO: 1379858 - DNA, 15 bp, Homo sapiens
ggaaaggctatgtgt

SEQ ID NO: 1379859 - DNA, 15 bp, Homo sapiens
aggaaaggctatgtg

SEQ ID NO: 1379860 - DNA, 15 bp, Homo sapiens
caggaaaggctatgt

SEQ ID NO: 1379861 - DNA, 15 bp, Homo sapiens
tcaggaaaggctatg

SEQ ID NO: 1379862 - DNA, 15 bp, Homo sapiens
atcaggaaaggctat

SEQ ID NO: 1379863 - DNA, 15 bp, Homo sapiens
gatcaggaaaggcta

SEQ ID NO: 1379864 - DNA, 15 bp, Homo sapiens
tgatcaggaaaggct

SEQ ID NO: 1379865 - DNA, 15 bp, Homo sapiens
atgatcaggaaaggc

SEQ ID NO: 1379866 - DNA, 15 bp, Homo sapiens
gatgatcaggaaagg

SEQ ID NO: 1379867 - DNA, 15 bp, Homo sapiens
tgatgatcaggaaag

SEQ ID NO: 1379868 - DNA, 15 bp, Homo sapiens
ttgatgatcaggaaa

SEQ ID NO: 1379869 - DNA, 15 bp, Homo sapiens
tttgatgatcaggaa

SEQ ID NO: 1379870 - DNA, 15 bp, Homo sapiens
gtttgatgatcagga

SEQ ID NO: 1379871 - DNA, 15 bp, Homo sapiens
ggtttgatgatcagg

SEQ ID NO: 1379872 - DNA, 15 bp, Homo sapiens
aggtttgatgatcag

SEQ ID NO: 1379873 - DNA, 15 bp, Homo sapiens
caggtttgatgatca

SEQ ID NO: 1379874 - DNA, 15 bp, Homo sapiens
tcaggtttgatgatc

SEQ ID NO: 1379875 - DNA, 15 bp, Homo sapiens
atcaggtttgatgat

SEQ ID NO: 1379876 - DNA, 15 bp, Homo sapiens
gatcaggtttgatga

SEQ ID NO: 1379877 - DNA, 15 bp, Homo sapiens
agatcaggtttgatg

SEQ ID NO: 1379878 - DNA, 15 bp, Homo sapiens
aagatcaggtttgat

SEQ ID NO: 1379879 - DNA, 15 bp, Homo sapiens
aaagatcaggtttga

SEQ ID NO: 1379880 - DNA, 15 bp, Homo sapiens
aaaagatcaggtttg

SEQ ID NO: 1379881 - DNA, 15 bp, Homo sapiens
caaaagatcaggttt

SEQ ID NO: 1379882 - DNA, 15 bp, Homo sapiens
tcaaaagatcaggtt

SEQ ID NO: 1379883 - DNA, 15 bp, Homo sapiens
atcaaaagatcaggt

SEQ ID NO: 1379884 - DNA, 15 bp, Homo sapiens
tatcaaaagatcagg

SEQ ID NO: 1379885 - DNA, 15 bp, Homo sapiens
ttatcaaaagatcag

SEQ ID NO: 1379886 - DNA, 15 bp, Homo sapiens
attatcaaaagatca

SEQ ID NO: 1379887 - DNA, 15 bp, Homo sapiens
tattatcaaaagatc

SEQ ID NO: 1379888 - DNA, 15 bp, Homo sapiens
atattatcaaaagat

SEQ ID NO: 1379889 - DNA, 15 bp, Homo sapiens
gatattatcaaaaga

SEQ ID NO: 1379890 - DNA, 15 bp, Homo sapiens
tgatattatcaaaag

SEQ ID NO: 1379891 - DNA, 15 bp, Homo sapiens
gtgatattatcaaaa

SEQ ID NO: 1379892 - DNA, 15 bp, Homo sapiens
ggtgatattatcaaa

SEQ ID NO: 1379893 - DNA, 15 bp, Homo sapiens
aggtgatattatcaa

SEQ ID NO: 1379894 - DNA, 15 bp, Homo sapiens
taggtgatattatca

SEQ ID NO: 1379895 - DNA, 15 bp, Homo sapiens
ataggtgatattatc

SEQ ID NO: 1379896 - DNA, 15 bp, Homo sapiens
cataggtgatattat

SEQ ID NO: 1379897 - DNA, 15 bp, Homo sapiens
gcataggtgatatta

SEQ ID NO: 1379898 - DNA, 15 bp, Homo sapiens
cgcataggtgatatt

SEQ ID NO: 1379899 - DNA, 15 bp, Homo sapiens
gcgcataggtgatat

SEQ ID NO: 1379900 - DNA, 15 bp, Homo sapiens
agcgcataggtgata

SEQ ID NO: 1379901 - DNA, 15 bp, Homo sapiens
cagcgcataggtgat

SEQ ID NO: 1379902 - DNA, 15 bp, Homo sapiens
acagcgcataggtga

SEQ ID NO: 1379903 - DNA, 15 bp, Homo sapiens
tacagcgcataggtg

SEQ ID NO: 1379904 - DNA, 15 bp, Homo sapiens
atacagcgcataggt

SEQ ID NO: 1379905 - DNA, 15 bp, Homo sapiens
catacagcgcatagg

SEQ ID NO: 1379906 - DNA, 15 bp, Homo sapiens
ccatacagcgcatag

SEQ ID NO: 1379907 - DNA, 15 bp, Homo sapiens
accatacagcgcata

SEQ ID NO: 1379908 - DNA, 15 bp, Homo sapiens
taccatacagcgcat

SEQ ID NO: 1379909 - DNA, 15 bp, Homo sapiens
ataccatacagcgca

SEQ ID NO: 1379910 - DNA, 15 bp, Homo sapiens
cataccatacagcgc

SEQ ID NO: 1379911 - DNA, 15 bp, Homo sapiens
acataccatacagcg

SEQ ID NO: 1379912 - DNA, 15 bp, Homo sapiens
cacataccatacagc

SEQ ID NO: 1379913 - DNA, 15 bp, Homo sapiens
acacataccatacag

SEQ ID NO: 1379914 - DNA, 15 bp, Homo sapiens
cacacataccataca

SEQ ID NO: 1379915 - DNA, 15 bp, Homo sapiens
tcacacataccatac

SEQ ID NO: 1379916 - DNA, 15 bp, Homo sapiens
ttcacacataccata

SEQ ID NO: 1379917 - DNA, 15 bp, Homo sapiens
tttcacacataccat

SEQ ID NO: 1379918 - DNA, 15 bp, Homo sapiens
ttttcacacatacca

SEQ ID NO: 1379919 - DNA, 15 bp, Homo sapiens
gttttcacacatacc

SEQ ID NO: 1379920 - DNA, 15 bp, Homo sapiens
agttttcacacatac

SEQ ID NO: 1379921 - DNA, 15 bp, Homo sapiens
cagttttcacacata

SEQ ID NO: 1379922 - DNA, 15 bp, Homo sapiens
gcagttttcacacat

SEQ ID NO: 1379923 - DNA, 15 bp, Homo sapiens
agcagttttcacaca

SEQ ID NO: 1379924 - DNA, 15 bp, Homo sapiens
cagcagttttcacac

SEQ ID NO: 1379925 - DNA, 15 bp, Homo sapiens
ccagcagttttcaca

SEQ ID NO: 1379926 - DNA, 15 bp, Homo sapiens
accagcagttttcac

SEQ ID NO: 1379927 - DNA, 15 bp, Homo sapiens
aaccagcagttttca

SEQ ID NO: 1379928 - DNA, 15 bp, Homo sapiens
caaccagcagttttc

SEQ ID NO: 1379929 - DNA, 15 bp, Homo sapiens
gcaaccagcagtttt

SEQ ID NO: 1379930 - DNA, 15 bp, Homo sapiens
agcaaccagcagttt

SEQ ID NO: 1379931 - DNA, 15 bp, Homo sapiens
aagcaaccagcagtt

SEQ ID NO: 1379932 - DNA, 15 bp, Homo sapiens
caagcaaccagcagt

SEQ ID NO: 1379933 - DNA, 15 bp, Homo sapiens
acaagcaaccagcag

SEQ ID NO: 1379934 - DNA, 15 bp, Homo sapiens
cacaagcaaccagca

SEQ ID NO: 1379935 - DNA, 15 bp, Homo sapiens
gcacaagcaaccagc

SEQ ID NO: 1379936 - DNA, 15 bp, Homo sapiens
ggcacaagcaaccag

SEQ ID NO: 1379937 - DNA, 15 bp, Homo sapiens
gggcacaagcaacca

SEQ ID NO: 1379938 - DNA, 15 bp, Homo sapiens
agggcacaagcaacc

SEQ ID NO: 1379939 - DNA, 15 bp, Homo sapiens
gagggcacaagcaac

SEQ ID NO: 1379940 - DNA, 15 bp, Homo sapiens
ggagggcacaagcaa

SEQ ID NO: 1379941 - DNA, 15 bp, Homo sapiens
tggagggcacaagca

SEQ ID NO: 1379942 - DNA, 15 bp, Homo sapiens
atggagggcacaagc

SEQ ID NO: 1379943 - DNA, 15 bp, Homo sapiens
tatggagggcacaag

SEQ ID NO: 1379944 - DNA, 15 bp, Homo sapiens
ctatggagggcacaa

SEQ ID NO: 1379945 - DNA, 15 bp, Homo sapiens
gctatggagggcaca

SEQ ID NO: 1379946 - DNA, 15 bp, Homo sapiens
agctatggagggcac

SEQ ID NO: 1379947 - DNA, 15 bp, Homo sapiens
cagctatggagggca

SEQ ID NO: 1379948 - DNA, 15 bp, Homo sapiens
gcagctatggagggc

SEQ ID NO: 1379949 - DNA, 15 bp, Homo sapiens
agcagctatggaggg

SEQ ID NO: 1379950 - DNA, 15 bp, Homo sapiens
tagcagctatggagg

SEQ ID NO: 1379951 - DNA, 15 bp, Homo sapiens
ttagcagctatggag

SEQ ID NO: 1379952 - DNA, 15 bp, Homo sapiens
tttagcagctatgga

SEQ ID NO: 1379953 - DNA, 15 bp, Homo sapiens
atttagcagctatgg

SEQ ID NO: 1379954 - DNA, 15 bp, Homo sapiens
aatttagcagctatg

SEQ ID NO: 1379955 - DNA, 15 bp, Homo sapiens
taatttagcagctat

SEQ ID NO: 1379956 - DNA, 15 bp, Homo sapiens
gtaatttagcagcta

SEQ ID NO: 1379957 - DNA, 15 bp, Homo sapiens
agtaatttagcagct

SEQ ID NO: 1379958 - DNA, 15 bp, Homo sapiens
cagtaatttagcagc

SEQ ID NO: 1379959 - DNA, 15 bp, Homo sapiens
tcagtaatttagcag

SEQ ID NO: 1379960 - DNA, 15 bp, Homo sapiens
ttcagtaatttagca

SEQ ID NO: 1379961 - DNA, 15 bp, Homo sapiens
cttcagtaatttagc

SEQ ID NO: 1379962 - DNA, 15 bp, Homo sapiens
tcttcagtaatttag

SEQ ID NO: 1379963 - DNA, 15 bp, Homo sapiens
ctcttcagtaattta

SEQ ID NO: 1379964 - DNA, 15 bp, Homo sapiens
tctcttcagtaattt

SEQ ID NO: 1379965 - DNA, 15 bp, Homo sapiens
ttctcttcagtaatt

SEQ ID NO: 1379966 - DNA, 15 bp, Homo sapiens
attctcttcagtaat

SEQ ID NO: 1379967 - DNA, 15 bp, Homo sapiens
tattctcttcagtaa

SEQ ID NO: 1379968 - DNA, 15 bp, Homo sapiens
ctattctcttcagta

SEQ ID NO: 1379969 - DNA, 15 bp, Homo sapiens
tctattctcttcagt

SEQ ID NO: 1379970 - DNA, 15 bp, Homo sapiens
ttctattctcttcag

SEQ ID NO: 1379971 - DNA, 15 bp, Homo sapiens
attctattctcttca

SEQ ID NO: 1379972 - DNA, 15 bp, Homo sapiens
tattctattctcttc

SEQ ID NO: 1379973 - DNA, 15 bp, Homo sapiens
atattctattctctt

SEQ ID NO: 1379974 - DNA, 15 bp, Homo sapiens
gatattctattctct

SEQ ID NO: 1379975 - DNA, 15 bp, Homo sapiens
ggatattctattctc

SEQ ID NO: 1379976 - DNA, 15 bp, Homo sapiens
aggatattctattct

SEQ ID NO: 1379977 - DNA, 15 bp, Homo sapiens
aaggatattctattc

SEQ ID NO: 1379978 - DNA, 15 bp, Homo sapiens
gaaggatattctatt

SEQ ID NO: 1379979 - DNA, 15 bp, Homo sapiens
tgaaggatattctat

SEQ ID NO: 1379980 - DNA, 15 bp, Homo sapiens
ctgaaggatattcta

SEQ ID NO: 1379981 - DNA, 15 bp, Homo sapiens
tctgaaggatattct

SEQ ID NO: 1379982 - DNA, 15 bp, Homo sapiens
ttctgaaggatattc

SEQ ID NO: 1379983 - DNA, 15 bp, Homo sapiens
cttctgaaggatatt

SEQ ID NO: 1379984 - DNA, 15 bp, Homo sapiens
tcttctgaaggatat

SEQ ID NO: 1379985 - DNA, 15 bp, Homo sapiens
gtcttctgaaggata

SEQ ID NO: 1379986 - DNA, 15 bp, Homo sapiens
tgtcttctgaaggat

SEQ ID NO: 1379987 - DNA, 15 bp, Homo sapiens
ctgtcttctgaagga

SEQ ID NO: 1379988 - DNA, 15 bp, Homo sapiens
tctgtcttctgaagg

SEQ ID NO: 1379989 - DNA, 15 bp, Homo sapiens
ttctgtcttctgaag

SEQ ID NO: 1379990 - DNA, 15 bp, Homo sapiens
attctgtcttctgaa

SEQ ID NO: 1379991 - DNA, 15 bp, Homo sapiens
tattctgtcttctga

SEQ ID NO: 1379992 - DNA, 15 bp, Homo sapiens
gtattctgtcttctg

SEQ ID NO: 1379993 - DNA, 15 bp, Homo sapiens
agtattctgtcttct

SEQ ID NO: 1379994 - DNA, 15 bp, Homo sapiens
tagtattctgtcttc

SEQ ID NO: 1379995 - DNA, 15 bp, Homo sapiens
atagtattctgtctt

SEQ ID NO: 1379996 - DNA, 15 bp, Homo sapiens
gatagtattctgtct

SEQ ID NO: 1379997 - DNA, 15 bp, Homo sapiens
tgatagtattctgtc

SEQ ID NO: 1379998 - DNA, 15 bp, Homo sapiens
atgatagtattctgt

SEQ ID NO: 1379999 - DNA, 15 bp, Homo sapiens
tatgatagtattctg

SEQ ID NO: 1380000 - DNA, 15 bp, Homo sapiens
gtatgatagtattct

SEQ ID NO: 1380001 - DNA, 15 bp, Homo sapiens
tgtatgatagtattc

SEQ ID NO: 1380002 - DNA, 15 bp, Homo sapiens
ctgtatgatagtatt

SEQ ID NO: 1380003 - DNA, 15 bp, Homo sapiens
cctgtatgatagtat

SEQ ID NO: 1380004 - DNA, 15 bp, Homo sapiens
acctgtatgatagta

SEQ ID NO: 1380005 - DNA, 15 bp, Homo sapiens
aacctgtatgatagt

SEQ ID NO: 1380006 - DNA, 15 bp, Homo sapiens
aaacctgtatgatag

SEQ ID NO: 1380007 - DNA, 15 bp, Homo sapiens
aaaacctgtatgata

SEQ ID NO: 1380008 - DNA, 15 bp, Homo sapiens
aaaaacctgtatgat

SEQ ID NO: 1380009 - DNA, 15 bp, Homo sapiens
taaaaacctgtatga

SEQ ID NO: 1380010 - DNA, 15 bp, Homo sapiens
ctaaaaacctgtatg

SEQ ID NO: 1380011 - DNA, 15 bp, Homo sapiens
gctaaaaacctgtat

SEQ ID NO: 1380012 - DNA, 15 bp, Homo sapiens
tgctaaaaacctgta

SEQ ID NO: 1380013 - DNA, 15 bp, Homo sapiens
atgctaaaaacctgt

SEQ ID NO: 1380014 - DNA, 15 bp, Homo sapiens
aatgctaaaaacctg

SEQ ID NO: 1380015 - DNA, 15 bp, Homo sapiens
aaatgctaaaaacct

SEQ ID NO: 1380016 - DNA, 15 bp, Homo sapiens
aaaatgctaaaaacc

SEQ ID NO: 1380017 - DNA, 15 bp, Homo sapiens
aaaaatgctaaaaac

SEQ ID NO: 1380018 - DNA, 15 bp, Homo sapiens
aaaaaatgctaaaaa

SEQ ID NO: 1380019 - DNA, 15 bp, Homo sapiens
caaaaaatgctaaaa

SEQ ID NO: 1380020 - DNA, 15 bp, Homo sapiens
acaaaaaatgctaaa

SEQ ID NO: 1380021 - DNA, 15 bp, Homo sapiens
gacaaaaaatgctaa

SEQ ID NO: 1380022 - DNA, 15 bp, Homo sapiens
agacaaaaaatgcta

SEQ ID NO: 1380023 - DNA, 15 bp, Homo sapiens
aagacaaaaaatgct

SEQ ID NO: 1380024 - DNA, 15 bp, Homo sapiens
aaagacaaaaaatgc

SEQ ID NO: 1380025 - DNA, 15 bp, Homo sapiens
gaaagacaaaaaatg

SEQ ID NO: 1380026 - DNA, 15 bp, Homo sapiens
cgaaagacaaaaaat

SEQ ID NO: 1380027 - DNA, 15 bp, Homo sapiens
acgaaagacaaaaaa

SEQ ID NO: 1380028 - DNA, 15 bp, Homo sapiens
cacgaaagacaaaaa

SEQ ID NO: 1380029 - DNA, 15 bp, Homo sapiens
tcacgaaagacaaaa

SEQ ID NO: 1380030 - DNA, 15 bp, Homo sapiens
ctcacgaaagacaaa

SEQ ID NO: 1380031 - DNA, 15 bp, Homo sapiens
actcacgaaagacaa

SEQ ID NO: 1380032 - DNA, 15 bp, Homo sapiens
cactcacgaaagaca

SEQ ID NO: 1380033 - DNA, 15 bp, Homo sapiens
acactcacgaaagac

SEQ ID NO: 1380034 - DNA, 15 bp, Homo sapiens
aacactcacgaaaga

SEQ ID NO: 1380035 - DNA, 15 bp, Homo sapiens
taacactcacgaaag

SEQ ID NO: 1380036 - DNA, 15 bp, Homo sapiens
ttaacactcacgaaa

SEQ ID NO: 1380037 - DNA, 15 bp, Homo sapiens
cttaacactcacgaa

SEQ ID NO: 1380038 - DNA, 15 bp, Homo sapiens
gcttaacactcacga

SEQ ID NO: 1380039 - DNA, 15 bp, Homo sapiens
agcttaacactcacg

SEQ ID NO: 1380040 - DNA, 15 bp, Homo sapiens
gagcttaacactcac

SEQ ID NO: 1380041 - DNA, 15 bp, Homo sapiens
agagcttaacactca

SEQ ID NO: 1380042 - DNA, 15 bp, Homo sapiens
cagagcttaacactc

SEQ ID NO: 1380043 - DNA, 15 bp, Homo sapiens
acagagcttaacact

SEQ ID NO: 1380044 - DNA, 15 bp, Homo sapiens
atcccagctacccgg

SEQ ID NO: 1380045 - DNA, 15 bp, Homo sapiens
aatcccagctacccg

SEQ ID NO: 1380046 - DNA, 15 bp, Homo sapiens
cgggcatggtggcgg

SEQ ID NO: 1380047 - DNA, 15 bp, Homo sapiens
ccgggcatggtggcg

SEQ ID NO: 1380048 - DNA, 15 bp, Homo sapiens
caaaaaaattagccg

SEQ ID NO: 1380049 - DNA, 15 bp, Homo sapiens
aggcagatcacgagg

SEQ ID NO: 1380050 - DNA, 15 bp, Homo sapiens
gcaggcagatcacga

SEQ ID NO: 1380051 - DNA, 15 bp, Homo sapiens
ggcaggcagatcacg

SEQ ID NO: 1380052 - DNA, 15 bp, Homo sapiens
atttgggaggccgag

SEQ ID NO: 1380053 - DNA, 15 bp, Homo sapiens
aatttgggaggccga

SEQ ID NO: 1380054 - DNA, 15 bp, Homo sapiens
caatttgggaggccg

SEQ ID NO: 1380055 - DNA, 15 bp, Homo sapiens
gcaatttgggaggcc

SEQ ID NO: 1380056 - DNA, 15 bp, Homo sapiens
agcaatttgggaggc

SEQ ID NO: 1380057 - DNA, 15 bp, Homo sapiens
cagcaatttgggagg

SEQ ID NO: 1380058 - DNA, 15 bp, Homo sapiens
ccagcaatttgggag

SEQ ID NO: 1380059 - DNA, 15 bp, Homo sapiens
cccagcaatttggga

SEQ ID NO: 1380060 - DNA, 15 bp, Homo sapiens
tcccagcaatttggg

SEQ ID NO: 1380061 - DNA, 15 bp, Homo sapiens
atcccagcaatttgg

SEQ ID NO: 1380062 - DNA, 15 bp, Homo sapiens
aatcccagcaatttg

SEQ ID NO: 1380063 - DNA, 15 bp, Homo sapiens
taatcccagcaattt

SEQ ID NO: 1380064 - DNA, 15 bp, Homo sapiens
gtaatcccagcaatt

SEQ ID NO: 1380065 - DNA, 15 bp, Homo sapiens
tgtaatcccagcaat

SEQ ID NO: 1380066 - DNA, 15 bp, Homo sapiens
ctgtaatcccagcaa

SEQ ID NO: 1380067 - DNA, 15 bp, Homo sapiens
caggccgggcgcagt

SEQ ID NO: 1380068 - DNA, 15 bp, Homo sapiens
tcaggccgggcgcag

SEQ ID NO: 1380069 - DNA, 15 bp, Homo sapiens
ttcaggccgggcgca

SEQ ID NO: 1380070 - DNA, 15 bp, Homo sapiens
cttcaggccgggcgc

SEQ ID NO: 1380071 - DNA, 15 bp, Homo sapiens
acttcaggccgggcg

SEQ ID NO: 1380072 - DNA, 15 bp, Homo sapiens
gacttcaggccgggc

SEQ ID NO: 1380073 - DNA, 15 bp, Homo sapiens
agacttcaggccggg

SEQ ID NO: 1380074 - DNA, 15 bp, Homo sapiens
aagacttcaggccgg

SEQ ID NO: 1380075 - DNA, 15 bp, Homo sapiens
aaagacttcaggccg

SEQ ID NO: 1380076 - DNA, 15 bp, Homo sapiens
aaaagacttcaggcc

SEQ ID NO: 1380077 - DNA, 15 bp, Homo sapiens
taaaagacttcaggc

SEQ ID NO: 1380078 - DNA, 15 bp, Homo sapiens
ataaaagacttcagg

SEQ ID NO: 1380079 - DNA, 15 bp, Homo sapiens
cataaaagacttcag

SEQ ID NO: 1380080 - DNA, 15 bp, Homo sapiens
ccataaaagacttca

SEQ ID NO: 1380081 - DNA, 15 bp, Homo sapiens
accataaaagacttc

SEQ ID NO: 1380082 - DNA, 15 bp, Homo sapiens
taccataaaagactt

SEQ ID NO: 1380083 - DNA, 15 bp, Homo sapiens
gtaccataaaagact

SEQ ID NO: 1380084 - DNA, 15 bp, Homo sapiens
tgtaccataaaagac

SEQ ID NO: 1380085 - DNA, 15 bp, Homo sapiens
gtgtaccataaaaga

SEQ ID NO: 1380086 - DNA, 15 bp, Homo sapiens
agtgtaccataaaag

SEQ ID NO: 1380087 - DNA, 15 bp, Homo sapiens
aagtgtaccataaaa

SEQ ID NO: 1380088 - DNA, 15 bp, Homo sapiens
aaagtgtaccataaa

SEQ ID NO: 1380089 - DNA, 15 bp, Homo sapiens
taaagtgtaccataa

SEQ ID NO: 1380090 - DNA, 15 bp, Homo sapiens
ataaagtgtaccata

SEQ ID NO: 1380091 - DNA, 15 bp, Homo sapiens
gtataaagtgtacca

SEQ ID NO: 1380092 - DNA, 15 bp, Homo sapiens
ggtataaagtgtacc

SEQ ID NO: 1380093 - DNA, 15 bp, Homo sapiens
tggtataaagtgtac

SEQ ID NO: 1380094 - DNA, 15 bp, Homo sapiens
ctggtataaagtgta

SEQ ID NO: 1380095 - DNA, 15 bp, Homo sapiens
actggtataaagtgt

SEQ ID NO: 1380096 - DNA, 15 bp, Homo sapiens
aactggtataaagtg

SEQ ID NO: 1380097 - DNA, 15 bp, Homo sapiens
gaactggtataaagt

SEQ ID NO: 1380098 - DNA, 15 bp, Homo sapiens
tgaactggtataaag

SEQ ID NO: 1380099 - DNA, 15 bp, Homo sapiens
gtgaactggtataaa

SEQ ID NO: 1380100 - DNA, 15 bp, Homo sapiens
agtgaactggtataa

SEQ ID NO: 1380101 - DNA, 15 bp, Homo sapiens
gagtgaactggtata

SEQ ID NO: 1380102 - DNA, 15 bp, Homo sapiens
agagtgaactggtat

SEQ ID NO: 1380103 - DNA, 15 bp, Homo sapiens
aagagtgaactggta

SEQ ID NO: 1380104 - DNA, 15 bp, Homo sapiens
gaagagtgaactggt

SEQ ID NO: 1380105 - DNA, 15 bp, Homo sapiens
ggaagagtgaactgg

SEQ ID NO: 1380106 - DNA, 15 bp, Homo sapiens
aggaagagtgaactg

SEQ ID NO: 1380107 - DNA, 15 bp, Homo sapiens
aaggaagagtgaact

SEQ ID NO: 1380108 - DNA, 15 bp, Homo sapiens
aaaggaagagtgaac

SEQ ID NO: 1380109 - DNA, 15 bp, Homo sapiens
aaaaggaagagtgaa

SEQ ID NO: 1380110 - DNA, 15 bp, Homo sapiens
caaaaggaagagtga

SEQ ID NO: 1380111 - DNA, 15 bp, Homo sapiens
acaaaaggaagagtg

SEQ ID NO: 1380112 - DNA, 15 bp, Homo sapiens
tacaaaaggaagagt

SEQ ID NO: 1380113 - DNA, 15 bp, Homo sapiens
atacaaaaggaagag

SEQ ID NO: 1380114 - DNA, 15 bp, Homo sapiens
aatacaaaaggaaga

SEQ ID NO: 1380115 - DNA, 15 bp, Homo sapiens
gaatacaaaaggaag

SEQ ID NO: 1380116 - DNA, 15 bp, Homo sapiens
agaatacaaaaggaa

SEQ ID NO: 1380117 - DNA, 15 bp, Homo sapiens
tagaatacaaaagga

SEQ ID NO: 1380118 - DNA, 15 bp, Homo sapiens
atagaatacaaaagg

SEQ ID NO: 1380119 - DNA, 15 bp, Homo sapiens
gatagaatacaaaag

SEQ ID NO: 1380120 - DNA, 15 bp, Homo sapiens
ggatagaatacaaaa

SEQ ID NO: 1380121 - DNA, 15 bp, Homo sapiens
tggatagaatacaaa

SEQ ID NO: 1380122 - DNA, 15 bp, Homo sapiens
ctggatagaatacaa

SEQ ID NO: 1380123 - DNA, 15 bp, Homo sapiens
actggatagaataca

SEQ ID NO: 1380124 - DNA, 15 bp, Homo sapiens
cactggatagaatac

SEQ ID NO: 1380125 - DNA, 15 bp, Homo sapiens
gcactggatagaata

SEQ ID NO: 1380126 - DNA, 15 bp, Homo sapiens
tgcactggatagaat

SEQ ID NO: 1380127 - DNA, 15 bp, Homo sapiens
ctgcactggatagaa

SEQ ID NO: 1380128 - DNA, 15 bp, Homo sapiens
cctgcactggataga

SEQ ID NO: 1380129 - DNA, 15 bp, Homo sapiens
gcctgcactggatag

SEQ ID NO: 1380130 - DNA, 15 bp, Homo sapiens
agcctgcactggata

SEQ ID NO: 1380131 - DNA, 15 bp, Homo sapiens
cagcctgcactggat

SEQ ID NO: 1380132 - DNA, 15 bp, Homo sapiens
gcagcctgcactgga

SEQ ID NO: 1380133 - DNA, 15 bp, Homo sapiens
tgcagcctgcactgg

SEQ ID NO: 1380134 - DNA, 15 bp, Homo sapiens
atgcagcctgcactg

SEQ ID NO: 1380135 - DNA, 15 bp, Homo sapiens
tatgcagcctgcact

SEQ ID NO: 1380136 - DNA, 15 bp, Homo sapiens
atatgcagcctgcac

SEQ ID NO: 1380137 - DNA, 15 bp, Homo sapiens
tatatgcagcctgca

SEQ ID NO: 1380138 - DNA, 15 bp, Homo sapiens
atatatgcagcctgc

SEQ ID NO: 1380139 - DNA, 15 bp, Homo sapiens
tatatatgcagcctg

SEQ ID NO: 1380140 - DNA, 15 bp, Homo sapiens
ctatatatgcagcct

SEQ ID NO: 1380141 - DNA, 15 bp, Homo sapiens
tctatatatgcagcc

SEQ ID NO: 1380142 - DNA, 15 bp, Homo sapiens
ctctatatatgcagc

SEQ ID NO: 1380143 - DNA, 15 bp, Homo sapiens
gctctatatatgcag

SEQ ID NO: 1380144 - DNA, 15 bp, Homo sapiens
tgctctatatatgca

SEQ ID NO: 1380145 - DNA, 15 bp, Homo sapiens
ctgctctatatatgc

SEQ ID NO: 1380146 - DNA, 15 bp, Homo sapiens
tctgctctatatatg

SEQ ID NO: 1380147 - DNA, 15 bp, Homo sapiens
ttctgctctatatat

SEQ ID NO: 1380148 - DNA, 15 bp, Homo sapiens
attctgctctatata

SEQ ID NO: 1380149 - DNA, 15 bp, Homo sapiens
tattctgctctatat

SEQ ID NO: 1380150 - DNA, 15 bp, Homo sapiens
ctattctgctctata

SEQ ID NO: 1380151 - DNA, 15 bp, Homo sapiens
cctattctgctctat

SEQ ID NO: 1380152 - DNA, 15 bp, Homo sapiens
tcctattctgctcta

SEQ ID NO: 1380153 - DNA, 15 bp, Homo sapiens
ttcctattctgctct

SEQ ID NO: 1380154 - DNA, 15 bp, Homo sapiens
cttcctattctgctc

SEQ ID NO: 1380155 - DNA, 15 bp, Homo sapiens
ccttcctattctgct

SEQ ID NO: 1380156 - DNA, 15 bp, Homo sapiens
tccttcctattctgc

SEQ ID NO: 1380157 - DNA, 15 bp, Homo sapiens
ttccttcctattctg

SEQ ID NO: 1380158 - DNA, 15 bp, Homo sapiens
attccttcctattct

SEQ ID NO: 1380159 - DNA, 15 bp, Homo sapiens
aattccttcctattc

SEQ ID NO: 1380160 - DNA, 15 bp, Homo sapiens
gaattccttcctatt

SEQ ID NO: 1380161 - DNA, 15 bp, Homo sapiens
agaattccttcctat

SEQ ID NO: 1380162 - DNA, 15 bp, Homo sapiens
cagaattccttccta

SEQ ID NO: 1380163 - DNA, 15 bp, Homo sapiens
gcagaattccttcct

SEQ ID NO: 1380164 - DNA, 15 bp, Homo sapiens
ggcagaattccttcc

SEQ ID NO: 1380165 - DNA, 15 bp, Homo sapiens
aggcagaattccttc

SEQ ID NO: 1380166 - DNA, 15 bp, Homo sapiens
gaggcagaattcctt

SEQ ID NO: 1380167 - DNA, 15 bp, Homo sapiens
tgaggcagaattcct

SEQ ID NO: 1380168 - DNA, 15 bp, Homo sapiens
ttgaggcagaattcc

SEQ ID NO: 1380169 - DNA, 15 bp, Homo sapiens
cttgaggcagaattc

SEQ ID NO: 1380170 - DNA, 15 bp, Homo sapiens
acttgaggcagaatt

SEQ ID NO: 1380171 - DNA, 15 bp, Homo sapiens
gacttgaggcagaat

SEQ ID NO: 1380172 - DNA, 15 bp, Homo sapiens
ggacttgaggcagaa

SEQ ID NO: 1380173 - DNA, 15 bp, Homo sapiens
aggacttgaggcaga

SEQ ID NO: 1380174 - DNA, 15 bp, Homo sapiens
aaggacttgaggcag

SEQ ID NO: 1380175 - DNA, 15 bp, Homo sapiens
aaaggacttgaggca

SEQ ID NO: 1380176 - DNA, 15 bp, Homo sapiens
aaaaggacttgaggc

SEQ ID NO: 1380177 - DNA, 15 bp, Homo sapiens
aaaaaggacttgagg

SEQ ID NO: 1380178 - DNA, 15 bp, Homo sapiens
taaaaaggacttgag

SEQ ID NO: 1380179 - DNA, 15 bp, Homo sapiens
ataaaaaggacttga

SEQ ID NO: 1380180 - DNA, 15 bp, Homo sapiens
aataaaaaggacttg

SEQ ID NO: 1380181 - DNA, 15 bp, Homo sapiens
aaataaaaaggactt

SEQ ID NO: 1380182 - DNA, 15 bp, Homo sapiens
gaaataaaaaggact

SEQ ID NO: 1380183 - DNA, 15 bp, Homo sapiens
agaaataaaaaggac

SEQ ID NO: 1380184 - DNA, 15 bp, Homo sapiens
cagaaataaaaagga

SEQ ID NO: 1380185 - DNA, 15 bp, Homo sapiens
acagaaataaaaagg

SEQ ID NO: 1380186 - DNA, 15 bp, Homo sapiens
cacagaaataaaaag

SEQ ID NO: 1380187 - DNA, 15 bp, Homo sapiens
acacagaaataaaaa

SEQ ID NO: 1380188 - DNA, 15 bp, Homo sapiens
tacacagaaataaaa

SEQ ID NO: 1380189 - DNA, 15 bp, Homo sapiens
atacacagaaataaa

SEQ ID NO: 1380190 - DNA, 15 bp, Homo sapiens
gatacacagaaataa

SEQ ID NO: 1380191 - DNA, 15 bp, Homo sapiens
agatacacagaaata

SEQ ID NO: 1380192 - DNA, 15 bp, Homo sapiens
cagatacacagaaat

SEQ ID NO: 1380193 - DNA, 15 bp, Homo sapiens
acagatacacagaaa

SEQ ID NO: 1380194 - DNA, 15 bp, Homo sapiens
gacagatacacagaa

SEQ ID NO: 1380195 - DNA, 15 bp, Homo sapiens
tgacagatacacaga

SEQ ID NO: 1380196 - DNA, 15 bp, Homo sapiens
ttgacagatacacag

SEQ ID NO: 1380197 - DNA, 15 bp, Homo sapiens
cttgacagatacaca

SEQ ID NO: 1380198 - DNA, 15 bp, Homo sapiens
ccttgacagatacac

SEQ ID NO: 1380199 - DNA, 15 bp, Homo sapiens
accttgacagataca

SEQ ID NO: 1380200 - DNA, 15 bp, Homo sapiens
aaccttgacagatac

SEQ ID NO: 1380201 - DNA, 15 bp, Homo sapiens
caaccttgacagata

SEQ ID NO: 1380202 - DNA, 15 bp, Homo sapiens
acaaccttgacagat

SEQ ID NO: 1380203 - DNA, 15 bp, Homo sapiens
aacaaccttgacaga

SEQ ID NO: 1380204 - DNA, 15 bp, Homo sapiens
taacaaccttgacag

SEQ ID NO: 1380205 - DNA, 15 bp, Homo sapiens
ctaacaaccttgaca

SEQ ID NO: 1380206 - DNA, 15 bp, Homo sapiens
tctaacaaccttgac

SEQ ID NO: 1380207 - DNA, 15 bp, Homo sapiens
ttctaacaaccttga

SEQ ID NO: 1380208 - DNA, 15 bp, Homo sapiens
attctaacaaccttg

SEQ ID NO: 1380209 - DNA, 15 bp, Homo sapiens
gattctaacaacctt

SEQ ID NO: 1380210 - DNA, 15 bp, Homo sapiens
agattctaacaacct

SEQ ID NO: 1380211 - DNA, 15 bp, Homo sapiens
gagattctaacaacc

SEQ ID NO: 1380212 - DNA, 15 bp, Homo sapiens
agagattctaacaac

SEQ ID NO: 1380213 - DNA, 15 bp, Homo sapiens
cagagattctaacaa

SEQ ID NO: 1380214 - DNA, 15 bp, Homo sapiens
gcagagattctaaca

SEQ ID NO: 1380215 - DNA, 15 bp, Homo sapiens
cgcagagattctaac

SEQ ID NO: 1380216 - DNA, 15 bp, Homo sapiens
tcgcagagattctaa

SEQ ID NO: 1380217 - DNA, 15 bp, Homo sapiens
atcgcagagattcta

SEQ ID NO: 1380218 - DNA, 15 bp, Homo sapiens
tatcgcagagattct

SEQ ID NO: 1380219 - DNA, 15 bp, Homo sapiens
ctatcgcagagattc

SEQ ID NO: 1380220 - DNA, 15 bp, Homo sapiens
gctatcgcagagatt

SEQ ID NO: 1380221 - DNA, 15 bp, Homo sapiens
tgctatcgcagagat

SEQ ID NO: 1380222 - DNA, 15 bp, Homo sapiens
atgctatcgcagaga

SEQ ID NO: 1380223 - DNA, 15 bp, Homo sapiens
tatgctatcgcagag

SEQ ID NO: 1380224 - DNA, 15 bp, Homo sapiens
ttatgctatcgcaga

SEQ ID NO: 1380225 - DNA, 15 bp, Homo sapiens
attatgctatcgcag

SEQ ID NO: 1380226 - DNA, 15 bp, Homo sapiens
gattatgctatcgca

SEQ ID NO: 1380227 - DNA, 15 bp, Homo sapiens
ggattatgctatcgc

SEQ ID NO: 1380228 - DNA, 15 bp, Homo sapiens
tggattatgctatcg

SEQ ID NO: 1380229 - DNA, 15 bp, Homo sapiens
ttggattatgctatc

SEQ ID NO: 1380230 - DNA, 15 bp, Homo sapiens
cttggattatgctat

SEQ ID NO: 1380231 - DNA, 15 bp, Homo sapiens
acttggattatgcta

SEQ ID NO: 1380232 - DNA, 15 bp, Homo sapiens
gacttggattatgct

SEQ ID NO: 1380233 - DNA, 15 bp, Homo sapiens
tgacttggattatgc

SEQ ID NO: 1380234 - DNA, 15 bp, Homo sapiens
atgacttggattatg

SEQ ID NO: 1380235 - DNA, 15 bp, Homo sapiens
aatgacttggattat

SEQ ID NO: 1380236 - DNA, 15 bp, Homo sapiens
taatgacttggatta

SEQ ID NO: 1380237 - DNA, 15 bp, Homo sapiens
ataatgacttggatt

SEQ ID NO: 1380238 - DNA, 15 bp, Homo sapiens
aataatgacttggat

SEQ ID NO: 1380239 - DNA, 15 bp, Homo sapiens
taataatgacttgga

SEQ ID NO: 1380240 - DNA, 15 bp, Homo sapiens
ataataatgacttgg

SEQ ID NO: 1380241 - DNA, 15 bp, Homo sapiens
tataataatgacttg

SEQ ID NO: 1380242 - DNA, 15 bp, Homo sapiens
atataataatgactt

SEQ ID NO: 1380243 - DNA, 15 bp, Homo sapiens
aatataataatgact

SEQ ID NO: 1380244 - DNA, 15 bp, Homo sapiens
aaatataataatgac

SEQ ID NO: 1380245 - DNA, 15 bp, Homo sapiens
gaaatataataatga

SEQ ID NO: 1380246 - DNA, 15 bp, Homo sapiens
ggaaatataataatg

SEQ ID NO: 1380247 - DNA, 15 bp, Homo sapiens
aggaaatataataat

SEQ ID NO: 1380248 - DNA, 15 bp, Homo sapiens
aaggaaatataataa

SEQ ID NO: 1380249 - DNA, 15 bp, Homo sapiens
gaaggaaatataata

SEQ ID NO: 1380250 - DNA, 15 bp, Homo sapiens
tgaaggaaatataat

SEQ ID NO: 1380251 - DNA, 15 bp, Homo sapiens
ctgaaggaaatataa

SEQ ID NO: 1380252 - DNA, 15 bp, Homo sapiens
tctgaaggaaatata

SEQ ID NO: 1380253 - DNA, 15 bp, Homo sapiens
ctctgaaggaaatat

SEQ ID NO: 1380254 - DNA, 15 bp, Homo sapiens
gctctgaaggaaata

SEQ ID NO: 1380255 - DNA, 15 bp, Homo sapiens
tgctctgaaggaaat

SEQ ID NO: 1380256 - DNA, 15 bp, Homo sapiens
gtgctctgaaggaaa

SEQ ID NO: 1380257 - DNA, 15 bp, Homo sapiens
tgtgctctgaaggaa

SEQ ID NO: 1380258 - DNA, 15 bp, Homo sapiens
ctgtgctctgaagga

SEQ ID NO: 1380259 - DNA, 15 bp, Homo sapiens
gctgtgctctgaagg

SEQ ID NO: 1380260 - DNA, 15 bp, Homo sapiens
tgctgtgctctgaag

SEQ ID NO: 1380261 - DNA, 15 bp, Homo sapiens
ctgctgtgctctgaa

SEQ ID NO: 1380262 - DNA, 15 bp, Homo sapiens
actgctgtgctctga

SEQ ID NO: 1380263 - DNA, 15 bp, Homo sapiens
cactgctgtgctctg

SEQ ID NO: 1380264 - DNA, 15 bp, Homo sapiens
ccactgctgtgctct

SEQ ID NO: 1380265 - DNA, 15 bp, Homo sapiens
gccactgctgtgctc

SEQ ID NO: 1380266 - DNA, 15 bp, Homo sapiens
ggccactgctgtgct

SEQ ID NO: 1380267 - DNA, 15 bp, Homo sapiens
aggccactgctgtgc

SEQ ID NO: 1380268 - DNA, 15 bp, Homo sapiens
aaggccactgctgtg

SEQ ID NO: 1380269 - DNA, 15 bp, Homo sapiens
gaaggccactgctgt

SEQ ID NO: 1380270 - DNA, 15 bp, Homo sapiens
agaaggccactgctg

SEQ ID NO: 1380271 - DNA, 15 bp, Homo sapiens
cagaaggccactgct

SEQ ID NO: 1380272 - DNA, 15 bp, Homo sapiens
tcagaaggccactgc

SEQ ID NO: 1380273 - DNA, 15 bp, Homo sapiens
gtcagaaggccactg

SEQ ID NO: 1380274 - DNA, 15 bp, Homo sapiens
agtcagaaggccact

SEQ ID NO: 1380275 - DNA, 15 bp, Homo sapiens
cagtcagaaggccac

SEQ ID NO: 1380276 - DNA, 15 bp, Homo sapiens
acagtcagaaggcca

SEQ ID NO: 1380277 - DNA, 15 bp, Homo sapiens
tacagtcagaaggcc

SEQ ID NO: 1380278 - DNA, 15 bp, Homo sapiens
gtacagtcagaaggc

SEQ ID NO: 1380279 - DNA, 15 bp, Homo sapiens
agtacagtcagaagg

SEQ ID NO: 1380280 - DNA, 15 bp, Homo sapiens
tagtacagtcagaag

SEQ ID NO: 1380281 - DNA, 15 bp, Homo sapiens
atagtacagtcagaa

SEQ ID NO: 1380282 - DNA, 15 bp, Homo sapiens
catagtacagtcaga

SEQ ID NO: 1380283 - DNA, 15 bp, Homo sapiens
gcatagtacagtcag

SEQ ID NO: 1380284 - DNA, 15 bp, Homo sapiens
agcatagtacagtca

SEQ ID NO: 1380285 - DNA, 15 bp, Homo sapiens
gagcatagtacagtc

SEQ ID NO: 1380286 - DNA, 15 bp, Homo sapiens
ggagcatagtacagt

SEQ ID NO: 1380287 - DNA, 15 bp, Homo sapiens
aggagcatagtacag

SEQ ID NO: 1380288 - DNA, 15 bp, Homo sapiens
gaggagcatagtaca

SEQ ID NO: 1380289 - DNA, 15 bp, Homo sapiens
tgaggagcatagtac

SEQ ID NO: 1380290 - DNA, 15 bp, Homo sapiens
gtgaggagcatagta

SEQ ID NO: 1380291 - DNA, 15 bp, Homo sapiens
ggtgaggagcatagt

SEQ ID NO: 1380292 - DNA, 15 bp, Homo sapiens
aggtgaggagcatag

SEQ ID NO: 1380293 - DNA, 15 bp, Homo sapiens
gaggtgaggagcata

SEQ ID NO: 1380294 - DNA, 15 bp, Homo sapiens
agaggtgaggagcat

SEQ ID NO: 1380295 - DNA, 15 bp, Homo sapiens
gagaggtgaggagca

SEQ ID NO: 1380296 - DNA, 15 bp, Homo sapiens
tgagaggtgaggagc

SEQ ID NO: 1380297 - DNA, 15 bp, Homo sapiens
ctgagaggtgaggag

SEQ ID NO: 1380298 - DNA, 15 bp, Homo sapiens
gctgagaggtgagga

SEQ ID NO: 1380299 - DNA, 15 bp, Homo sapiens
tgctgagaggtgagg

SEQ ID NO: 1380300 - DNA, 15 bp, Homo sapiens
ctgctgagaggtgag

SEQ ID NO: 1380301 - DNA, 15 bp, Homo sapiens
gctgctgagaggtga

SEQ ID NO: 1380302 - DNA, 15 bp, Homo sapiens
ggctgctgagaggtg

SEQ ID NO: 1380303 - DNA, 15 bp, Homo sapiens
tggctgctgagaggt

SEQ ID NO: 1380304 - DNA, 15 bp, Homo sapiens
ctggctgctgagagg

SEQ ID NO: 1380305 - DNA, 15 bp, Homo sapiens
actggctgctgagag

SEQ ID NO: 1380306 - DNA, 15 bp, Homo sapiens
gactggctgctgaga

SEQ ID NO: 1380307 - DNA, 15 bp, Homo sapiens
tgactggctgctgag

SEQ ID NO: 1380308 - DNA, 15 bp, Homo sapiens
atgactggctgctga

SEQ ID NO: 1380309 - DNA, 15 bp, Homo sapiens
gatgactggctgctg

SEQ ID NO: 1380310 - DNA, 15 bp, Homo sapiens
agatgactggctgct

SEQ ID NO: 1380311 - DNA, 15 bp, Homo sapiens
aagatgactggctgc

SEQ ID NO: 1380312 - DNA, 15 bp, Homo sapiens
aaagatgactggctg

SEQ ID NO: 1380313 - DNA, 15 bp, Homo sapiens
aaaagatgactggct

SEQ ID NO: 1380314 - DNA, 15 bp, Homo sapiens
aaaaagatgactggc

SEQ ID NO: 1380315 - DNA, 15 bp, Homo sapiens
caaaaagatgactgg

SEQ ID NO: 1380316 - DNA, 15 bp, Homo sapiens
tttcaaaaagatgac

SEQ ID NO: 1380317 - DNA, 15 bp, Homo sapiens
atttcaaaaagatga

SEQ ID NO: 1380318 - DNA, 15 bp, Homo sapiens
catttcaaaaagatg

SEQ ID NO: 1380319 - DNA, 15 bp, Homo sapiens
attacatttcaaaaa

SEQ ID NO: 1380320 - DNA, 15 bp, Homo sapiens
aattacatttcaaaa

SEQ ID NO: 1380321 - DNA, 15 bp, Homo sapiens
gaattacatttcaaa

SEQ ID NO: 1380322 - DNA, 15 bp, Homo sapiens
tgaattacatttcaa

SEQ ID NO: 1380323 - DNA, 15 bp, Homo sapiens
ctgaattacatttca

SEQ ID NO: 1380324 - DNA, 15 bp, Homo sapiens
tctgaattacatttc

SEQ ID NO: 1380325 - DNA, 15 bp, Homo sapiens
atctgaattacattt

SEQ ID NO: 1380326 - DNA, 15 bp, Homo sapiens
gatctgaattacatt

SEQ ID NO: 1380327 - DNA, 15 bp, Homo sapiens
tgatctgaattacat

SEQ ID NO: 1380328 - DNA, 15 bp, Homo sapiens
atgatctgaattaca

SEQ ID NO: 1380329 - DNA, 15 bp, Homo sapiens
catgatctgaattac

SEQ ID NO: 1380330 - DNA, 15 bp, Homo sapiens
gcatgatctgaatta

SEQ ID NO: 1380331 - DNA, 15 bp, Homo sapiens
ggcatgatctgaatt

SEQ ID NO: 1380332 - DNA, 15 bp, Homo sapiens
tggcatgatctgaat

SEQ ID NO: 1380333 - DNA, 15 bp, Homo sapiens
atggcatgatctgaa

SEQ ID NO: 1380334 - DNA, 15 bp, Homo sapiens
gatggcatgatctga

SEQ ID NO: 1380335 - DNA, 15 bp, Homo sapiens
ggatggcatgatctg

SEQ ID NO: 1380336 - DNA, 15 bp, Homo sapiens
aggatggcatgatct

SEQ ID NO: 1380337 - DNA, 15 bp, Homo sapiens
aaggatggcatgatc

SEQ ID NO: 1380338 - DNA, 15 bp, Homo sapiens
gaaggatggcatgat

SEQ ID NO: 1380339 - DNA, 15 bp, Homo sapiens
agaaggatggcatga

SEQ ID NO: 1380340 - DNA, 15 bp, Homo sapiens
cagaaggatggcatg

SEQ ID NO: 1380341 - DNA, 15 bp, Homo sapiens
acagaaggatggcat

SEQ ID NO: 1380342 - DNA, 15 bp, Homo sapiens
aacagaaggatggca

SEQ ID NO: 1380343 - DNA, 15 bp, Homo sapiens
gaacagaaggatggc

SEQ ID NO: 1380344 - DNA, 15 bp, Homo sapiens
tgaacagaaggatgg

SEQ ID NO: 1380345 - DNA, 15 bp, Homo sapiens
ttgaacagaaggatg

SEQ ID NO: 1380346 - DNA, 15 bp, Homo sapiens
tttgaacagaaggat

SEQ ID NO: 1380347 - DNA, 15 bp, Homo sapiens
ttttgaacagaagga

SEQ ID NO: 1380348 - DNA, 15 bp, Homo sapiens
tttttgaacagaagg

SEQ ID NO: 1380349 - DNA, 15 bp, Homo sapiens
gtttttgaacagaag

SEQ ID NO: 1380350 - DNA, 15 bp, Homo sapiens
ggtttttgaacagaa

SEQ ID NO: 1380351 - DNA, 15 bp, Homo sapiens
cggtttttgaacaga

SEQ ID NO: 1380352 - DNA, 15 bp, Homo sapiens
acggtttttgaacag

SEQ ID NO: 1380353 - DNA, 15 bp, Homo sapiens
gacggtttttgaaca

SEQ ID NO: 1380354 - DNA, 15 bp, Homo sapiens
tgacggtttttgaac

SEQ ID NO: 1380355 - DNA, 15 bp, Homo sapiens
ctgacggtttttgaa

SEQ ID NO: 1380356 - DNA, 15 bp, Homo sapiens
actgacggtttttga

SEQ ID NO: 1380357 - DNA, 15 bp, Homo sapiens
cactgacggtttttg

SEQ ID NO: 1380358 - DNA, 15 bp, Homo sapiens
tcactgacggttttt

SEQ ID NO: 1380359 - DNA, 15 bp, Homo sapiens
atcactgacggtttt

SEQ ID NO: 1380360 - DNA, 15 bp, Homo sapiens
aatcactgacggttt

SEQ ID NO: 1380361 - DNA, 15 bp, Homo sapiens
aaatcactgacggtt

SEQ ID NO: 1380362 - DNA, 15 bp, Homo sapiens
aaaatcactgacggt

SEQ ID NO: 1380363 - DNA, 15 bp, Homo sapiens
gaaaatcactgacgg

SEQ ID NO: 1380364 - DNA, 15 bp, Homo sapiens
ggaaaatcactgacg

SEQ ID NO: 1380365 - DNA, 15 bp, Homo sapiens
tggaaaatcactgac

SEQ ID NO: 1380366 - DNA, 15 bp, Homo sapiens
atggaaaatcactga

SEQ ID NO: 1380367 - DNA, 15 bp, Homo sapiens
aatggaaaatcactg

SEQ ID NO: 1380368 - DNA, 15 bp, Homo sapiens
caatggaaaatcact

SEQ ID NO: 1380369 - DNA, 15 bp, Homo sapiens
acaatggaaaatcac

SEQ ID NO: 1380370 - DNA, 15 bp, Homo sapiens
tacaatggaaaatca

SEQ ID NO: 1380371 - DNA, 15 bp, Homo sapiens
gtacaatggaaaatc

SEQ ID NO: 1380372 - DNA, 15 bp, Homo sapiens
agtacaatggaaaat

SEQ ID NO: 1380373 - DNA, 15 bp, Homo sapiens
aagtacaatggaaaa

SEQ ID NO: 1380374 - DNA, 15 bp, Homo sapiens
taagtacaatggaaa

SEQ ID NO: 1380375 - DNA, 15 bp, Homo sapiens
ctaagtacaatggaa

SEQ ID NO: 1380376 - DNA, 15 bp, Homo sapiens
tctaagtacaatgga

SEQ ID NO: 1380377 - DNA, 15 bp, Homo sapiens
ttctaagtacaatgg

SEQ ID NO: 1380378 - DNA, 15 bp, Homo sapiens
attctaagtacaatg

SEQ ID NO: 1380379 - DNA, 15 bp, Homo sapiens
tattctaagtacaat

SEQ ID NO: 1380380 - DNA, 15 bp, Homo sapiens
ttattctaagtacaa

SEQ ID NO: 1380381 - DNA, 15 bp, Homo sapiens
tttattctaagtaca

SEQ ID NO: 1380382 - DNA, 15 bp, Homo sapiens
ttttattctaagtac

SEQ ID NO: 1380383 - DNA, 15 bp, Homo sapiens
attttattctaagta

SEQ ID NO: 1380384 - DNA, 15 bp, Homo sapiens
gattttattctaagt

SEQ ID NO: 1380385 - DNA, 15 bp, Homo sapiens
ggattttattctaag

SEQ ID NO: 1380386 - DNA, 15 bp, Homo sapiens
tggattttattctaa

SEQ ID NO: 1380387 - DNA, 15 bp, Homo sapiens
ttggattttattcta

SEQ ID NO: 1380388 - DNA, 15 bp, Homo sapiens
tttggattttattct

SEQ ID NO: 1380389 - DNA, 15 bp, Homo sapiens
ctttggattttattc

SEQ ID NO: 1380390 - DNA, 15 bp, Homo sapiens
actttggattttatt

SEQ ID NO: 1380391 - DNA, 15 bp, Homo sapiens
tactttggattttat

SEQ ID NO: 1380392 - DNA, 15 bp, Homo sapiens
gtactttggatttta

SEQ ID NO: 1380393 - DNA, 15 bp, Homo sapiens
agtactttggatttt

SEQ ID NO: 1380394 - DNA, 15 bp, Homo sapiens
aagtactttggattt

SEQ ID NO: 1380395 - DNA, 15 bp, Homo sapiens
taagtactttggatt

SEQ ID NO: 1380396 - DNA, 15 bp, Homo sapiens
ataagtactttggat

SEQ ID NO: 1380397 - DNA, 15 bp, Homo sapiens
aataagtactttgga

SEQ ID NO: 1380398 - DNA, 15 bp, Homo sapiens
aaataagtactttgg

SEQ ID NO: 1380399 - DNA, 15 bp, Homo sapiens
aaaataagtactttg

SEQ ID NO: 1380400 - DNA, 15 bp, Homo sapiens
caaaataagtacttt

SEQ ID NO: 1380401 - DNA, 15 bp, Homo sapiens
ccaaaataagtactt

SEQ ID NO: 1380402 - DNA, 15 bp, Homo sapiens
accaaaataagtact

SEQ ID NO: 1380403 - DNA, 15 bp, Homo sapiens
gaccaaaataagtac

SEQ ID NO: 1380404 - DNA, 15 bp, Homo sapiens
agaccaaaataagta

SEQ ID NO: 1380405 - DNA, 15 bp, Homo sapiens
aagaccaaaataagt

SEQ ID NO: 1380406 - DNA, 15 bp, Homo sapiens
gaagaccaaaataag

SEQ ID NO: 1380407 - DNA, 15 bp, Homo sapiens
tgaagaccaaaataa

SEQ ID NO: 1380408 - DNA, 15 bp, Homo sapiens
ttgaagaccaaaata

SEQ ID NO: 1380409 - DNA, 15 bp, Homo sapiens
cttgaagaccaaaat

SEQ ID NO: 1380410 - DNA, 15 bp, Homo sapiens
tcttgaagaccaaaa

SEQ ID NO: 1380411 - DNA, 15 bp, Homo sapiens
gtcttgaagaccaaa

SEQ ID NO: 1380412 - DNA, 15 bp, Homo sapiens
ggtcttgaagaccaa

SEQ ID NO: 1380413 - DNA, 15 bp, Homo sapiens
gggtcttgaagacca

SEQ ID NO: 1380414 - DNA, 15 bp, Homo sapiens
tgggtcttgaagacc

SEQ ID NO: 1380415 - DNA, 15 bp, Homo sapiens
ctgggtcttgaagac

SEQ ID NO: 1380416 - DNA, 15 bp, Homo sapiens
gctgggtcttgaaga

SEQ ID NO: 1380417 - DNA, 15 bp, Homo sapiens
tgctgggtcttgaag

SEQ ID NO: 1380418 - DNA, 15 bp, Homo sapiens
gtgctgggtcttgaa

SEQ ID NO: 1380419 - DNA, 15 bp, Homo sapiens
cgtgctgggtcttga

SEQ ID NO: 1380420 - DNA, 15 bp, Homo sapiens
acgtgctgggtcttg

SEQ ID NO: 1380421 - DNA, 15 bp, Homo sapiens
aacgtgctgggtctt

SEQ ID NO: 1380422 - DNA, 15 bp, Homo sapiens
gaacgtgctgggtct

SEQ ID NO: 1380423 - DNA, 15 bp, Homo sapiens
agaacgtgctgggtc

SEQ ID NO: 1380424 - DNA, 15 bp, Homo sapiens
cagaacgtgctgggt

SEQ ID NO: 1380425 - DNA, 15 bp, Homo sapiens
ccagaacgtgctggg

SEQ ID NO: 1380426 - DNA, 15 bp, Homo sapiens
gccagaacgtgctgg

SEQ ID NO: 1380427 - DNA, 15 bp, Homo sapiens
agccagaacgtgctg

SEQ ID NO: 1380428 - DNA, 15 bp, Homo sapiens
gagccagaacgtgct

SEQ ID NO: 1380429 - DNA, 15 bp, Homo sapiens
ggagccagaacgtgc

SEQ ID NO: 1380430 - DNA, 15 bp, Homo sapiens
aggagccagaacgtg

SEQ ID NO: 1380431 - DNA, 15 bp, Homo sapiens
caggagccagaacgt

SEQ ID NO: 1380432 - DNA, 15 bp, Homo sapiens
gcaggagccagaacg

SEQ ID NO: 1380433 - DNA, 15 bp, Homo sapiens
agcaggagccagaac

SEQ ID NO: 1380434 - DNA, 15 bp, Homo sapiens
aagcaggagccagaa

SEQ ID NO: 1380435 - DNA, 15 bp, Homo sapiens
taagcaggagccaga

SEQ ID NO: 1380436 - DNA, 15 bp, Homo sapiens
gtaagcaggagccag

SEQ ID NO: 1380437 - DNA, 15 bp, Homo sapiens
ggtaagcaggagcca

SEQ ID NO: 1380438 - DNA, 15 bp, Homo sapiens
aggtaagcaggagcc

SEQ ID NO: 1380439 - DNA, 15 bp, Homo sapiens
gaggtaagcaggagc

SEQ ID NO: 1380440 - DNA, 15 bp, Homo sapiens
agaggtaagcaggag

SEQ ID NO: 1380441 - DNA, 15 bp, Homo sapiens
gagaggtaagcagga

SEQ ID NO: 1380442 - DNA, 15 bp, Homo sapiens
ggagaggtaagcagg

SEQ ID NO: 1380443 - DNA, 15 bp, Homo sapiens
gggagaggtaagcag

SEQ ID NO: 1380444 - DNA, 15 bp, Homo sapiens
agggagaggtaagca

SEQ ID NO: 1380445 - DNA, 15 bp, Homo sapiens
gagggagaggtaagc

SEQ ID NO: 1380446 - DNA, 15 bp, Homo sapiens
tgagggagaggtaag

SEQ ID NO: 1380447 - DNA, 15 bp, Homo sapiens
gtgagggagaggtaa

SEQ ID NO: 1380448 - DNA, 15 bp, Homo sapiens
agtgagggagaggta

SEQ ID NO: 1380449 - DNA, 15 bp, Homo sapiens
aagtgagggagaggt

SEQ ID NO: 1380450 - DNA, 15 bp, Homo sapiens
caagtgagggagagg

SEQ ID NO: 1380451 - DNA, 15 bp, Homo sapiens
gcaagtgagggagag

SEQ ID NO: 1380452 - DNA, 15 bp, Homo sapiens
agcaagtgagggaga

SEQ ID NO: 1380453 - DNA, 15 bp, Homo sapiens
gagcaagtgagggag

SEQ ID NO: 1380454 - DNA, 15 bp, Homo sapiens
tgagcaagtgaggga

SEQ ID NO: 1380455 - DNA, 15 bp, Homo sapiens
ctgagcaagtgaggg

SEQ ID NO: 1380456 - DNA, 15 bp, Homo sapiens
actgagcaagtgagg

SEQ ID NO: 1380457 - DNA, 15 bp, Homo sapiens
tactgagcaagtgag

SEQ ID NO: 1380458 - DNA, 15 bp, Homo sapiens
atactgagcaagtga

SEQ ID NO: 1380459 - DNA, 15 bp, Homo sapiens
gatactgagcaagtg

SEQ ID NO: 1380460 - DNA, 15 bp, Homo sapiens
tgatactgagcaagt

SEQ ID NO: 1380461 - DNA, 15 bp, Homo sapiens
atgatactgagcaag

SEQ ID NO: 1380462 - DNA, 15 bp, Homo sapiens
gatgatactgagcaa

SEQ ID NO: 1380463 - DNA, 15 bp, Homo sapiens
agatgatactgagca

SEQ ID NO: 1380464 - DNA, 15 bp, Homo sapiens
cagatgatactgagc

SEQ ID NO: 1380465 - DNA, 15 bp, Homo sapiens
tcagatgatactgag

SEQ ID NO: 1380466 - DNA, 15 bp, Homo sapiens
gtcagatgatactga

SEQ ID NO: 1380467 - DNA, 15 bp, Homo sapiens
ggtcagatgatactg

SEQ ID NO: 1380468 - DNA, 15 bp, Homo sapiens
tggtcagatgatact

SEQ ID NO: 1380469 - DNA, 15 bp, Homo sapiens
atggtcagatgatac

SEQ ID NO: 1380470 - DNA, 15 bp, Homo sapiens
catggtcagatgata

SEQ ID NO: 1380471 - DNA, 15 bp, Homo sapiens
ccatggtcagatgat

SEQ ID NO: 1380472 - DNA, 15 bp, Homo sapiens
accatggtcagatga

SEQ ID NO: 1380473 - DNA, 15 bp, Homo sapiens
aaccatggtcagatg

SEQ ID NO: 1380474 - DNA, 15 bp, Homo sapiens
gaaccatggtcagat

SEQ ID NO: 1380475 - DNA, 15 bp, Homo sapiens
ggaaccatggtcaga

SEQ ID NO: 1380476 - DNA, 15 bp, Homo sapiens
aggaaccatggtcag

SEQ ID NO: 1380477 - DNA, 15 bp, Homo sapiens
caggaaccatggtca

SEQ ID NO: 1380478 - DNA, 15 bp, Homo sapiens
tcaggaaccatggtc

SEQ ID NO: 1380479 - DNA, 15 bp, Homo sapiens
ttcaggaaccatggt

SEQ ID NO: 1380480 - DNA, 15 bp, Homo sapiens
tttcaggaaccatgg

SEQ ID NO: 1380481 - DNA, 15 bp, Homo sapiens
atttcaggaaccatg

SEQ ID NO: 1380482 - DNA, 15 bp, Homo sapiens
tatttcaggaaccat

SEQ ID NO: 1380483 - DNA, 15 bp, Homo sapiens
gtatttcaggaacca

SEQ ID NO: 1380484 - DNA, 15 bp, Homo sapiens
ggtatttcaggaacc

SEQ ID NO: 1380485 - DNA, 15 bp, Homo sapiens
aggtatttcaggaac

SEQ ID NO: 1380486 - DNA, 15 bp, Homo sapiens
aaggtatttcaggaa

SEQ ID NO: 1380487 - DNA, 15 bp, Homo sapiens
taaggtatttcagga

SEQ ID NO: 1380488 - DNA, 15 bp, Homo sapiens
ttaaggtatttcagg

SEQ ID NO: 1380489 - DNA, 15 bp, Homo sapiens
tttaaggtatttcag

SEQ ID NO: 1380490 - DNA, 15 bp, Homo sapiens
gtttaaggtatttca

SEQ ID NO: 1380491 - DNA, 15 bp, Homo sapiens
agtttaaggtatttc

SEQ ID NO: 1380492 - DNA, 15 bp, Homo sapiens
gagtttaaggtattt

SEQ ID NO: 1380493 - DNA, 15 bp, Homo sapiens
agagtttaaggtatt

SEQ ID NO: 1380494 - DNA, 15 bp, Homo sapiens
aagagtttaaggtat

SEQ ID NO: 1380495 - DNA, 15 bp, Homo sapiens
gaagagtttaaggta

SEQ ID NO: 1380496 - DNA, 15 bp, Homo sapiens
ggaagagtttaaggt

SEQ ID NO: 1380497 - DNA, 15 bp, Homo sapiens
aggaagagtttaagg

SEQ ID NO: 1380498 - DNA, 15 bp, Homo sapiens
aaggaagagtttaag

SEQ ID NO: 1380499 - DNA, 15 bp, Homo sapiens
caaggaagagtttaa

SEQ ID NO: 1380500 - DNA, 15 bp, Homo sapiens
gcaaggaagagttta

SEQ ID NO: 1380501 - DNA, 15 bp, Homo sapiens
ggcaaggaagagttt

SEQ ID NO: 1380502 - DNA, 15 bp, Homo sapiens
aggcaaggaagagtt

SEQ ID NO: 1380503 - DNA, 15 bp, Homo sapiens
gaggcaaggaagagt

SEQ ID NO: 1380504 - DNA, 15 bp, Homo sapiens
tgaggcaaggaagag

SEQ ID NO: 1380505 - DNA, 15 bp, Homo sapiens
ctgaggcaaggaaga

SEQ ID NO: 1380506 - DNA, 15 bp, Homo sapiens
cctgaggcaaggaag

SEQ ID NO: 1380507 - DNA, 15 bp, Homo sapiens
aaaatgctcctagcc

SEQ ID NO: 1380508 - DNA, 15 bp, Homo sapiens
aaaaatgctcctagc

SEQ ID NO: 1380509 - DNA, 15 bp, Homo sapiens
taaaaatgctcctag

SEQ ID NO: 1380510 - DNA, 15 bp, Homo sapiens
ataaaaatgctccta

SEQ ID NO: 1380511 - DNA, 15 bp, Homo sapiens
aataaaaatgctcct

SEQ ID NO: 1380512 - DNA, 15 bp, Homo sapiens
taataaaaatgctcc

SEQ ID NO: 1380513 - DNA, 15 bp, Homo sapiens
ctaataaaaatgctc

SEQ ID NO: 1380514 - DNA, 15 bp, Homo sapiens
cctaataaaaatgct

SEQ ID NO: 1380515 - DNA, 15 bp, Homo sapiens
ccctaataaaaatgc

SEQ ID NO: 1380516 - DNA, 15 bp, Homo sapiens
tccctaataaaaatg

SEQ ID NO: 1380517 - DNA, 15 bp, Homo sapiens
atccctaataaaaat

SEQ ID NO: 1380518 - DNA, 15 bp, Homo sapiens
catccctaataaaaa

SEQ ID NO: 1380519 - DNA, 15 bp, Homo sapiens
tcatccctaataaaa

SEQ ID NO: 1380520 - DNA, 15 bp, Homo sapiens
ttcatccctaataaa

SEQ ID NO: 1380521 - DNA, 15 bp, Homo sapiens
attcatccctaataa

SEQ ID NO: 1380522 - DNA, 15 bp, Homo sapiens
aattcatccctaata

SEQ ID NO: 1380523 - DNA, 15 bp, Homo sapiens
aaattcatccctaat

SEQ ID NO: 1380524 - DNA, 15 bp, Homo sapiens
taaattcatccctaa

SEQ ID NO: 1380525 - DNA, 15 bp, Homo sapiens
ctaaattcatcccta

SEQ ID NO: 1380526 - DNA, 15 bp, Homo sapiens
gctaaattcatccct

SEQ ID NO: 1380527 - DNA, 15 bp, Homo sapiens
agctaaattcatccc

SEQ ID NO: 1380528 - DNA, 15 bp, Homo sapiens
aagctaaattcatcc

SEQ ID NO: 1380529 - DNA, 15 bp, Homo sapiens
caagctaaattcatc

SEQ ID NO: 1380530 - DNA, 15 bp, Homo sapiens
tcaagctaaattcat

SEQ ID NO: 1380531 - DNA, 15 bp, Homo sapiens
ctcaagctaaattca

SEQ ID NO: 1380532 - DNA, 15 bp, Homo sapiens
tctcaagctaaattc

SEQ ID NO: 1380533 - DNA, 15 bp, Homo sapiens
atctcaagctaaatt

SEQ ID NO: 1380534 - DNA, 15 bp, Homo sapiens
aatctcaagctaaat

SEQ ID NO: 1380535 - DNA, 15 bp, Homo sapiens
aaatctcaagctaaa

SEQ ID NO: 1380536 - DNA, 15 bp, Homo sapiens
caaatctcaagctaa

SEQ ID NO: 1380537 - DNA, 15 bp, Homo sapiens
acaaatctcaagcta

SEQ ID NO: 1380538 - DNA, 15 bp, Homo sapiens
aacaaatctcaagct

SEQ ID NO: 1380539 - DNA, 15 bp, Homo sapiens
aaacaaatctcaagc

SEQ ID NO: 1380540 - DNA, 15 bp, Homo sapiens
caaacaaatctcaag

SEQ ID NO: 1380541 - DNA, 15 bp, Homo sapiens
ccaaacaaatctcaa

SEQ ID NO: 1380542 - DNA, 15 bp, Homo sapiens
accaaacaaatctca

SEQ ID NO: 1380543 - DNA, 15 bp, Homo sapiens
taccaaacaaatctc

SEQ ID NO: 1380544 - DNA, 15 bp, Homo sapiens
ttaccaaacaaatct

SEQ ID NO: 1380545 - DNA, 15 bp, Homo sapiens
gttaccaaacaaatc

SEQ ID NO: 1380546 - DNA, 15 bp, Homo sapiens
tgttaccaaacaaat

SEQ ID NO: 1380547 - DNA, 15 bp, Homo sapiens
ttgttaccaaacaaa

SEQ ID NO: 1380548 - DNA, 15 bp, Homo sapiens
tttgttaccaaacaa

SEQ ID NO: 1380549 - DNA, 15 bp, Homo sapiens
tttttgttaccaaac

SEQ ID NO: 1380550 - DNA, 15 bp, Homo sapiens
ctttttgttaccaaa

SEQ ID NO: 1380551 - DNA, 15 bp, Homo sapiens
gctttttgttaccaa

SEQ ID NO: 1380552 - DNA, 15 bp, Homo sapiens
tgctttttgttacca

SEQ ID NO: 1380553 - DNA, 15 bp, Homo sapiens
gtgctttttgttacc

SEQ ID NO: 1380554 - DNA, 15 bp, Homo sapiens
ggtgctttttgttac

SEQ ID NO: 1380555 - DNA, 15 bp, Homo sapiens
aggtgctttttgtta

SEQ ID NO: 1380556 - DNA, 15 bp, Homo sapiens
caggtgctttttgtt

SEQ ID NO: 1380557 - DNA, 15 bp, Homo sapiens
ccaggtgctttttgt

SEQ ID NO: 1380558 - DNA, 15 bp, Homo sapiens
tccaggtgctttttg

SEQ ID NO: 1380559 - DNA, 15 bp, Homo sapiens
ttccaggtgcttttt

SEQ ID NO: 1380560 - DNA, 15 bp, Homo sapiens
attccaggtgctttt

SEQ ID NO: 1380561 - DNA, 15 bp, Homo sapiens
aattccaggtgcttt

SEQ ID NO: 1380562 - DNA, 15 bp, Homo sapiens
aaattccaggtgctt

SEQ ID NO: 1380563 - DNA, 15 bp, Homo sapiens
taaattccaggtgct

SEQ ID NO: 1380564 - DNA, 15 bp, Homo sapiens
ctaaattccaggtgc

SEQ ID NO: 1380565 - DNA, 15 bp, Homo sapiens
tctaaattccaggtg

SEQ ID NO: 1380566 - DNA, 15 bp, Homo sapiens
atctaaattccaggt

SEQ ID NO: 1380567 - DNA, 15 bp, Homo sapiens
catctaaattccagg

SEQ ID NO: 1380568 - DNA, 15 bp, Homo sapiens
gcatctaaattccag

SEQ ID NO: 1380569 - DNA, 15 bp, Homo sapiens
tgcatctaaattcca

SEQ ID NO: 1380570 - DNA, 15 bp, Homo sapiens
atgcatctaaattcc

SEQ ID NO: 1380571 - DNA, 15 bp, Homo sapiens
gatgcatctaaattc

SEQ ID NO: 1380572 - DNA, 15 bp, Homo sapiens
agatgcatctaaatt

SEQ ID NO: 1380573 - DNA, 15 bp, Homo sapiens
aagatgcatctaaat

SEQ ID NO: 1380574 - DNA, 15 bp, Homo sapiens
aaagatgcatctaaa

SEQ ID NO: 1380575 - DNA, 15 bp, Homo sapiens
aaaagatgcatctaa

SEQ ID NO: 1380576 - DNA, 15 bp, Homo sapiens
taaaagatgcatcta

SEQ ID NO: 1380577 - DNA, 15 bp, Homo sapiens
ttaaaagatgcatct

SEQ ID NO: 1380578 - DNA, 15 bp, Homo sapiens
attaaaagatgcatc

SEQ ID NO: 1380579 - DNA, 15 bp, Homo sapiens
tattaaaagatgcat

SEQ ID NO: 1380580 - DNA, 15 bp, Homo sapiens
ctattaaaagatgca

SEQ ID NO: 1380581 - DNA, 15 bp, Homo sapiens
tctattaaaagatgc

SEQ ID NO: 1380582 - DNA, 15 bp, Homo sapiens
atctattaaaagatg

SEQ ID NO: 1380583 - DNA, 15 bp, Homo sapiens
aatctattaaaagat

SEQ ID NO: 1380584 - DNA, 15 bp, Homo sapiens
aaatctattaaaaga

SEQ ID NO: 1380585 - DNA, 15 bp, Homo sapiens
aaaatctattaaaag

SEQ ID NO: 1380586 - DNA, 15 bp, Homo sapiens
aaaaatctattaaaa

SEQ ID NO: 1380587 - DNA, 15 bp, Homo sapiens
aaaaaatctattaaa

SEQ ID NO: 1380588 - DNA, 15 bp, Homo sapiens
aaaaaaatctattaa

SEQ ID NO: 1380589 - DNA, 15 bp, Homo sapiens
aaaaaaaatctatta

SEQ ID NO: 1380590 - DNA, 15 bp, Homo sapiens
aaaaaaaaatctatt

SEQ ID NO: 1380591 - DNA, 15 bp, Homo sapiens
aaaaaaaaaatctat

SEQ ID NO: 1380592 - DNA, 15 bp, Homo sapiens
taaaaaaaaaatcta

SEQ ID NO: 1380593 - DNA, 15 bp, Homo sapiens
tttaaaaaaaaaatc

SEQ ID NO: 1380594 - DNA, 15 bp, Homo sapiens
agtttaaaaaaaaaa

SEQ ID NO: 1380595 - DNA, 15 bp, Homo sapiens
cagtttaaaaaaaaa

SEQ ID NO: 1380596 - DNA, 15 bp, Homo sapiens
ccagtttaaaaaaaa

SEQ ID NO: 1380597 - DNA, 15 bp, Homo sapiens
gccagtttaaaaaaa

SEQ ID NO: 1380598 - DNA, 15 bp, Homo sapiens
agccagtttaaaaaa

SEQ ID NO: 1380599 - DNA, 15 bp, Homo sapiens
aagccagtttaaaaa

SEQ ID NO: 1380600 - DNA, 15 bp, Homo sapiens
caagccagtttaaaa

SEQ ID NO: 1380601 - DNA, 15 bp, Homo sapiens
gcaagccagtttaaa

SEQ ID NO: 1380602 - DNA, 15 bp, Homo sapiens
ggcaagccagtttaa

SEQ ID NO: 1380603 - DNA, 15 bp, Homo sapiens
tggcaagccagttta

SEQ ID NO: 1380604 - DNA, 15 bp, Homo sapiens
ttggcaagccagttt

SEQ ID NO: 1380605 - DNA, 15 bp, Homo sapiens
attggcaagccagtt

SEQ ID NO: 1380606 - DNA, 15 bp, Homo sapiens
tattggcaagccagt

SEQ ID NO: 1380607 - DNA, 15 bp, Homo sapiens
atattggcaagccag

SEQ ID NO: 1380608 - DNA, 15 bp, Homo sapiens
caaatattggcaagc

SEQ ID NO: 1380609 - DNA, 15 bp, Homo sapiens
tcaaatattggcaag

SEQ ID NO: 1380610 - DNA, 15 bp, Homo sapiens
ttcaaatattggcaa

SEQ ID NO: 1380611 - DNA, 15 bp, Homo sapiens
tttcaaatattggca

SEQ ID NO: 1380612 - DNA, 15 bp, Homo sapiens
ttttcaaatattggc

SEQ ID NO: 1380613 - DNA, 15 bp, Homo sapiens
attttcaaatattgg

SEQ ID NO: 1380614 - DNA, 15 bp, Homo sapiens
tattttcaaatattg

SEQ ID NO: 1380615 - DNA, 15 bp, Homo sapiens
atattttcaaatatt

SEQ ID NO: 1380616 - DNA, 15 bp, Homo sapiens
gatattttcaaatat

SEQ ID NO: 1380617 - DNA, 15 bp, Homo sapiens
tgatattttcaaata

SEQ ID NO: 1380618 - DNA, 15 bp, Homo sapiens
ctgatattttcaaat

SEQ ID NO: 1380619 - DNA, 15 bp, Homo sapiens
actgatattttcaaa

SEQ ID NO: 1380620 - DNA, 15 bp, Homo sapiens
cactgatattttcaa

SEQ ID NO: 1380621 - DNA, 15 bp, Homo sapiens
gcactgatattttca

SEQ ID NO: 1380622 - DNA, 15 bp, Homo sapiens
agcactgatattttc

SEQ ID NO: 1380623 - DNA, 15 bp, Homo sapiens
gagcactgatatttt

SEQ ID NO: 1380624 - DNA, 15 bp, Homo sapiens
ggagcactgatattt

SEQ ID NO: 1380625 - DNA, 15 bp, Homo sapiens
tggagcactgatatt

SEQ ID NO: 1380626 - DNA, 15 bp, Homo sapiens
ctggagcactgatat

SEQ ID NO: 1380627 - DNA, 15 bp, Homo sapiens
actggagcactgata

SEQ ID NO: 1380628 - DNA, 15 bp, Homo sapiens
aactggagcactgat

SEQ ID NO: 1380629 - DNA, 15 bp, Homo sapiens
aaactggagcactga

SEQ ID NO: 1380630 - DNA, 15 bp, Homo sapiens
gaaactggagcactg

SEQ ID NO: 1380631 - DNA, 15 bp, Homo sapiens
ggaaactggagcact

SEQ ID NO: 1380632 - DNA, 15 bp, Homo sapiens
tggaaactggagcac

SEQ ID NO: 1380633 - DNA, 15 bp, Homo sapiens
gtggaaactggagca

SEQ ID NO: 1380634 - DNA, 15 bp, Homo sapiens
tatgaatgtgtctcc

SEQ ID NO: 1380635 - DNA, 15 bp, Homo sapiens
ttatgaatgtgtctc

SEQ ID NO: 1380636 - DNA, 15 bp, Homo sapiens
attatgaatgtgtct

SEQ ID NO: 1380637 - DNA, 15 bp, Homo sapiens
cattatgaatgtgtc

SEQ ID NO: 1380638 - DNA, 15 bp, Homo sapiens
tcattatgaatgtgt

SEQ ID NO: 1380639 - DNA, 15 bp, Homo sapiens
atcattatgaatgtg

SEQ ID NO: 1380640 - DNA, 15 bp, Homo sapiens
aatcattatgaatgt

SEQ ID NO: 1380641 - DNA, 15 bp, Homo sapiens
taatcattatgaatg

SEQ ID NO: 1380642 - DNA, 15 bp, Homo sapiens
ttaatcattatgaat

SEQ ID NO: 1380643 - DNA, 15 bp, Homo sapiens
gttaatcattatgaa

SEQ ID NO: 1380644 - DNA, 15 bp, Homo sapiens
ggttaatcattatga

SEQ ID NO: 1380645 - DNA, 15 bp, Homo sapiens
tggttaatcattatg

SEQ ID NO: 1380646 - DNA, 15 bp, Homo sapiens
atggttaatcattat

SEQ ID NO: 1380647 - DNA, 15 bp, Homo sapiens
tatggttaatcatta

SEQ ID NO: 1380648 - DNA, 15 bp, Homo sapiens
gtatggttaatcatt

SEQ ID NO: 1380649 - DNA, 15 bp, Homo sapiens
tgtatggttaatcat

SEQ ID NO: 1380650 - DNA, 15 bp, Homo sapiens
atgtatggttaatca

SEQ ID NO: 1380651 - DNA, 15 bp, Homo sapiens
tatgtatggttaatc

SEQ ID NO: 1380652 - DNA, 15 bp, Homo sapiens
gtatgtatggttaat

SEQ ID NO: 1380653 - DNA, 15 bp, Homo sapiens
tgtatgtatggttaa

SEQ ID NO: 1380654 - DNA, 15 bp, Homo sapiens
atgtatgtatggtta

SEQ ID NO: 1380655 - DNA, 15 bp, Homo sapiens
gatgtatgtatggtt

SEQ ID NO: 1380656 - DNA, 15 bp, Homo sapiens
agatgtatgtatggt

SEQ ID NO: 1380657 - DNA, 15 bp, Homo sapiens
aagatgtatgtatgg

SEQ ID NO: 1380658 - DNA, 15 bp, Homo sapiens
aaagatgtatgtatg

SEQ ID NO: 1380659 - DNA, 15 bp, Homo sapiens
taaagatgtatgtat

SEQ ID NO: 1380660 - DNA, 15 bp, Homo sapiens
ttaaagatgtatgta

SEQ ID NO: 1380661 - DNA, 15 bp, Homo sapiens
tttaaagatgtatgt

SEQ ID NO: 1380662 - DNA, 15 bp, Homo sapiens
ttttaaagatgtatg

SEQ ID NO: 1380663 - DNA, 15 bp, Homo sapiens
cttttaaagatgtat

SEQ ID NO: 1380664 - DNA, 15 bp, Homo sapiens
acttttaaagatgta

SEQ ID NO: 1380665 - DNA, 15 bp, Homo sapiens
aacttttaaagatgt

SEQ ID NO: 1380666 - DNA, 15 bp, Homo sapiens
aaacttttaaagatg

SEQ ID NO: 1380667 - DNA, 15 bp, Homo sapiens
caaacttttaaagat

SEQ ID NO: 1380668 - DNA, 15 bp, Homo sapiens
ccaaacttttaaaga

SEQ ID NO: 1380669 - DNA, 15 bp, Homo sapiens
accaaacttttaaag

SEQ ID NO: 1380670 - DNA, 15 bp, Homo sapiens
caccaaacttttaaa

SEQ ID NO: 1380671 - DNA, 15 bp, Homo sapiens
acaccaaacttttaa

SEQ ID NO: 1380672 - DNA, 15 bp, Homo sapiens
tacaccaaactttta

SEQ ID NO: 1380673 - DNA, 15 bp, Homo sapiens
ttacaccaaactttt

SEQ ID NO: 1380674 - DNA, 15 bp, Homo sapiens
cttacaccaaacttt

SEQ ID NO: 1380675 - DNA, 15 bp, Homo sapiens
tcttacaccaaactt

SEQ ID NO: 1380676 - DNA, 15 bp, Homo sapiens
ttcttacaccaaact

SEQ ID NO: 1380677 - DNA, 15 bp, Homo sapiens
attcttacaccaaac

SEQ ID NO: 1380678 - DNA, 15 bp, Homo sapiens
cattcttacaccaaa

SEQ ID NO: 1380679 - DNA, 15 bp, Homo sapiens
tcattcttacaccaa

SEQ ID NO: 1380680 - DNA, 15 bp, Homo sapiens
ttcattcttacacca

SEQ ID NO: 1380681 - DNA, 15 bp, Homo sapiens
gttcattcttacacc

SEQ ID NO: 1380682 - DNA, 15 bp, Homo sapiens
ggttcattcttacac

SEQ ID NO: 1380683 - DNA, 15 bp, Homo sapiens
tggttcattcttaca

SEQ ID NO: 1380684 - DNA, 15 bp, Homo sapiens
ctggttcattcttac

SEQ ID NO: 1380685 - DNA, 15 bp, Homo sapiens
actggttcattctta

SEQ ID NO: 1380686 - DNA, 15 bp, Homo sapiens
tactggttcattctt

SEQ ID NO: 1380687 - DNA, 15 bp, Homo sapiens
atactggttcattct

SEQ ID NO: 1380688 - DNA, 15 bp, Homo sapiens
aatactggttcattc

SEQ ID NO: 1380689 - DNA, 15 bp, Homo sapiens
taatactggttcatt

SEQ ID NO: 1380690 - DNA, 15 bp, Homo sapiens
ataatactggttcat

SEQ ID NO: 1380691 - DNA, 15 bp, Homo sapiens
tataatactggttca

SEQ ID NO: 1380692 - DNA, 15 bp, Homo sapiens
gtataatactggttc

SEQ ID NO: 1380693 - DNA, 15 bp, Homo sapiens
agtataatactggtt

SEQ ID NO: 1380694 - DNA, 15 bp, Homo sapiens
aagtataatactggt

SEQ ID NO: 1380695 - DNA, 15 bp, Homo sapiens
gaagtataatactgg

SEQ ID NO: 1380696 - DNA, 15 bp, Homo sapiens
tgaagtataatactg

SEQ ID NO: 1380697 - DNA, 15 bp, Homo sapiens
atgaagtataatact

SEQ ID NO: 1380698 - DNA, 15 bp, Homo sapiens
tatgaagtataatac

SEQ ID NO: 1380699 - DNA, 15 bp, Homo sapiens
ctatgaagtataata

SEQ ID NO: 1380700 - DNA, 15 bp, Homo sapiens
tctatgaagtataat

SEQ ID NO: 1380701 - DNA, 15 bp, Homo sapiens
ttctatgaagtataa

SEQ ID NO: 1380702 - DNA, 15 bp, Homo sapiens
cttctatgaagtata

SEQ ID NO: 1380703 - DNA, 15 bp, Homo sapiens
ccttctatgaagtat

SEQ ID NO: 1380704 - DNA, 15 bp, Homo sapiens
cccttctatgaagta

SEQ ID NO: 1380705 - DNA, 15 bp, Homo sapiens
gcccttctatgaagt

SEQ ID NO: 1380706 - DNA, 15 bp, Homo sapiens
agcccttctatgaag

SEQ ID NO: 1380707 - DNA, 15 bp, Homo sapiens
cagcccttctatgaa

SEQ ID NO: 1380708 - DNA, 15 bp, Homo sapiens
tcagcccttctatga

SEQ ID NO: 1380709 - DNA, 15 bp, Homo sapiens
atcagcccttctatg

SEQ ID NO: 1380710 - DNA, 15 bp, Homo sapiens
aatcagcccttctat

SEQ ID NO: 1380711 - DNA, 15 bp, Homo sapiens
caatcagcccttcta

SEQ ID NO: 1380712 - DNA, 15 bp, Homo sapiens
acaatcagcccttct

SEQ ID NO: 1380713 - DNA, 15 bp, Homo sapiens
aacaatcagcccttc

SEQ ID NO: 1380714 - DNA, 15 bp, Homo sapiens
gaacaatcagccctt

SEQ ID NO: 1380715 - DNA, 15 bp, Homo sapiens
agaacaatcagccct

SEQ ID NO: 1380716 - DNA, 15 bp, Homo sapiens
aagaacaatcagccc

SEQ ID NO: 1380717 - DNA, 15 bp, Homo sapiens
caagaacaatcagcc

SEQ ID NO: 1380718 - DNA, 15 bp, Homo sapiens
gcaagaacaatcagc

SEQ ID NO: 1380719 - DNA, 15 bp, Homo sapiens
tgcaagaacaatcag

SEQ ID NO: 1380720 - DNA, 15 bp, Homo sapiens
ctgcaagaacaatca

SEQ ID NO: 1380721 - DNA, 15 bp, Homo sapiens
gctgcaagaacaatc

SEQ ID NO: 1380722 - DNA, 15 bp, Homo sapiens
tgctgcaagaacaat

SEQ ID NO: 1380723 - DNA, 15 bp, Homo sapiens
ctgctgcaagaacaa

SEQ ID NO: 1380724 - DNA, 15 bp, Homo sapiens
tctgctgcaagaaca

SEQ ID NO: 1380725 - DNA, 15 bp, Homo sapiens
ttctgctgcaagaac

SEQ ID NO: 1380726 - DNA, 15 bp, Homo sapiens
tttctgctgcaagaa

SEQ ID NO: 1380727 - DNA, 15 bp, Homo sapiens
ttttctgctgcaaga

SEQ ID NO: 1380728 - DNA, 15 bp, Homo sapiens
tttttctgctgcaag

SEQ ID NO: 1380729 - DNA, 15 bp, Homo sapiens
ttttttctgctgcaa

SEQ ID NO: 1380730 - DNA, 15 bp, Homo sapiens
cttttttctgctgca

SEQ ID NO: 1380731 - DNA, 15 bp, Homo sapiens
tcttttttctgctgc

SEQ ID NO: 1380732 - DNA, 15 bp, Homo sapiens
atcttttttctgctg

SEQ ID NO: 1380733 - DNA, 15 bp, Homo sapiens
tatcttttttctgct

SEQ ID NO: 1380734 - DNA, 15 bp, Homo sapiens
atatcttttttctgc

SEQ ID NO: 1380735 - DNA, 15 bp, Homo sapiens
catatcttttttctg

SEQ ID NO: 1380736 - DNA, 15 bp, Homo sapiens
tcatatcttttttct

SEQ ID NO: 1380737 - DNA, 15 bp, Homo sapiens
ctcatatcttttttc

SEQ ID NO: 1380738 - DNA, 15 bp, Homo sapiens
actcatatctttttt

SEQ ID NO: 1380739 - DNA, 15 bp, Homo sapiens
aactcatatcttttt

SEQ ID NO: 1380740 - DNA, 15 bp, Homo sapiens
aaactcatatctttt

SEQ ID NO: 1380741 - DNA, 15 bp, Homo sapiens
aaaactcatatcttt

SEQ ID NO: 1380742 - DNA, 15 bp, Homo sapiens
taaaactcatatctt

SEQ ID NO: 1380743 - DNA, 15 bp, Homo sapiens
ataaaactcatatct

SEQ ID NO: 1380744 - DNA, 15 bp, Homo sapiens
aataaaactcatatc

SEQ ID NO: 1380745 - DNA, 15 bp, Homo sapiens
gaataaaactcatat

SEQ ID NO: 1380746 - DNA, 15 bp, Homo sapiens
tgaataaaactcata

SEQ ID NO: 1380747 - DNA, 15 bp, Homo sapiens
atgaataaaactcat

SEQ ID NO: 1380748 - DNA, 15 bp, Homo sapiens
tatgaataaaactca

SEQ ID NO: 1380749 - DNA, 15 bp, Homo sapiens
ttatgaataaaactc

SEQ ID NO: 1380750 - DNA, 15 bp, Homo sapiens
attatgaataaaact

SEQ ID NO: 1380751 - DNA, 15 bp, Homo sapiens
aattatgaataaaac

SEQ ID NO: 1380752 - DNA, 15 bp, Homo sapiens
aaattatgaataaaa

SEQ ID NO: 1380753 - DNA, 15 bp, Homo sapiens
taaattatgaataaa

SEQ ID NO: 1380754 - DNA, 15 bp, Homo sapiens
gtaaattatgaataa

SEQ ID NO: 1380755 - DNA, 15 bp, Homo sapiens
agtaaattatgaata

SEQ ID NO: 1380756 - DNA, 15 bp, Homo sapiens
aagtaaattatgaat

SEQ ID NO: 1380757 - DNA, 15 bp, Homo sapiens
taagtaaattatgaa

SEQ ID NO: 1380758 - DNA, 15 bp, Homo sapiens
gtaagtaaattatga

SEQ ID NO: 1380759 - DNA, 15 bp, Homo sapiens
agtaagtaaattatg

SEQ ID NO: 1380760 - DNA, 15 bp, Homo sapiens
tagtaagtaaattat

SEQ ID NO: 1380761 - DNA, 15 bp, Homo sapiens
ttagtaagtaaatta

SEQ ID NO: 1380762 - DNA, 15 bp, Homo sapiens
gttagtaagtaaatt

SEQ ID NO: 1380763 - DNA, 15 bp, Homo sapiens
agttagtaagtaaat

SEQ ID NO: 1380764 - DNA, 15 bp, Homo sapiens
gagttagtaagtaaa

SEQ ID NO: 1380765 - DNA, 15 bp, Homo sapiens
tgagttagtaagtaa

SEQ ID NO: 1380766 - DNA, 15 bp, Homo sapiens
atgagttagtaagta

SEQ ID NO: 1380767 - DNA, 15 bp, Homo sapiens
aatgagttagtaagt

SEQ ID NO: 1380768 - DNA, 15 bp, Homo sapiens
gaatgagttagtaag

SEQ ID NO: 1380769 - DNA, 15 bp, Homo sapiens
tgaatgagttagtaa

SEQ ID NO: 1380770 - DNA, 15 bp, Homo sapiens
ttgaatgagttagta

SEQ ID NO: 1380771 - DNA, 15 bp, Homo sapiens
attgaatgagttagt

SEQ ID NO: 1380772 - DNA, 15 bp, Homo sapiens
cattgaatgagttag

SEQ ID NO: 1380773 - DNA, 15 bp, Homo sapiens
gcattgaatgagtta

SEQ ID NO: 1380774 - DNA, 15 bp, Homo sapiens
ggcattgaatgagtt

SEQ ID NO: 1380775 - DNA, 15 bp, Homo sapiens
tggcattgaatgagt

SEQ ID NO: 1380776 - DNA, 15 bp, Homo sapiens
atggcattgaatgag

SEQ ID NO: 1380777 - DNA, 15 bp, Homo sapiens
aatggcattgaatga

SEQ ID NO: 1380778 - DNA, 15 bp, Homo sapiens
aaatggcattgaatg

SEQ ID NO: 1380779 - DNA, 15 bp, Homo sapiens
taaatggcattgaat

SEQ ID NO: 1380780 - DNA, 15 bp, Homo sapiens
ataaatggcattgaa

SEQ ID NO: 1380781 - DNA, 15 bp, Homo sapiens
gataaatggcattga

SEQ ID NO: 1380782 - DNA, 15 bp, Homo sapiens
agataaatggcattg

SEQ ID NO: 1380783 - DNA, 15 bp, Homo sapiens
aagataaatggcatt

SEQ ID NO: 1380784 - DNA, 15 bp, Homo sapiens
aaagataaatggcat

SEQ ID NO: 1380785 - DNA, 15 bp, Homo sapiens
taaagataaatggca

SEQ ID NO: 1380786 - DNA, 15 bp, Homo sapiens
ttaaagataaatggc

SEQ ID NO: 1380787 - DNA, 15 bp, Homo sapiens
gttaaagataaatgg

SEQ ID NO: 1380788 - DNA, 15 bp, Homo sapiens
agttaaagataaatg

SEQ ID NO: 1380789 - DNA, 15 bp, Homo sapiens
aagttaaagataaat

SEQ ID NO: 1380790 - DNA, 15 bp, Homo sapiens
taagttaaagataaa

SEQ ID NO: 1380791 - DNA, 15 bp, Homo sapiens
ttaagttaaagataa

SEQ ID NO: 1380792 - DNA, 15 bp, Homo sapiens
cttaagttaaagata

SEQ ID NO: 1380793 - DNA, 15 bp, Homo sapiens
acttaagttaaagat

SEQ ID NO: 1380794 - DNA, 15 bp, Homo sapiens
gacttaagttaaaga

SEQ ID NO: 1380795 - DNA, 15 bp, Homo sapiens
tgacttaagttaaag

SEQ ID NO: 1380796 - DNA, 15 bp, Homo sapiens
gtgacttaagttaaa

SEQ ID NO: 1380797 - DNA, 15 bp, Homo sapiens
tgtgacttaagttaa

SEQ ID NO: 1380798 - DNA, 15 bp, Homo sapiens
gtgtgacttaagtta

SEQ ID NO: 1380799 - DNA, 15 bp, Homo sapiens
agtgtgacttaagtt

SEQ ID NO: 1380800 - DNA, 15 bp, Homo sapiens
aagtgtgacttaagt

SEQ ID NO: 1380801 - DNA, 15 bp, Homo sapiens
taagtgtgacttaag

SEQ ID NO: 1380802 - DNA, 15 bp, Homo sapiens
ttaagtgtgacttaa

SEQ ID NO: 1380803 - DNA, 15 bp, Homo sapiens
attaagtgtgactta

SEQ ID NO: 1380804 - DNA, 15 bp, Homo sapiens
cattaagtgtgactt

SEQ ID NO: 1380805 - DNA, 15 bp, Homo sapiens
tcattaagtgtgact

SEQ ID NO: 1380806 - DNA, 15 bp, Homo sapiens
atcattaagtgtgac

SEQ ID NO: 1380807 - DNA, 15 bp, Homo sapiens
tatcattaagtgtga

SEQ ID NO: 1380808 - DNA, 15 bp, Homo sapiens
ttatcattaagtgtg

SEQ ID NO: 1380809 - DNA, 15 bp, Homo sapiens
tttatcattaagtgt

SEQ ID NO: 1380810 - DNA, 15 bp, Homo sapiens
atttatcattaagtg

SEQ ID NO: 1380811 - DNA, 15 bp, Homo sapiens
catttatcattaagt

SEQ ID NO: 1380812 - DNA, 15 bp, Homo sapiens
gcatttatcattaag

SEQ ID NO: 1380813 - DNA, 15 bp, Homo sapiens
agcatttatcattaa

SEQ ID NO: 1380814 - DNA, 15 bp, Homo sapiens
gagcatttatcatta

SEQ ID NO: 1380815 - DNA, 15 bp, Homo sapiens
agagcatttatcatt

SEQ ID NO: 1380816 - DNA, 15 bp, Homo sapiens
gagagcatttatcat

SEQ ID NO: 1380817 - DNA, 15 bp, Homo sapiens
ggagagcatttatca

SEQ ID NO: 1380818 - DNA, 15 bp, Homo sapiens
aggagagcatttatc

SEQ ID NO: 1380819 - DNA, 15 bp, Homo sapiens
gaggagagcatttat

SEQ ID NO: 1380820 - DNA, 15 bp, Homo sapiens
agaggagagcattta

SEQ ID NO: 1380821 - DNA, 15 bp, Homo sapiens
aagaggagagcattt

SEQ ID NO: 1380822 - DNA, 15 bp, Homo sapiens
aaagaggagagcatt

SEQ ID NO: 1380823 - DNA, 15 bp, Homo sapiens
taaagaggagagcat

SEQ ID NO: 1380824 - DNA, 15 bp, Homo sapiens
gtaaagaggagagca

SEQ ID NO: 1380825 - DNA, 15 bp, Homo sapiens
agtaaagaggagagc

SEQ ID NO: 1380826 - DNA, 15 bp, Homo sapiens
cagtaaagaggagag

SEQ ID NO: 1380827 - DNA, 15 bp, Homo sapiens
gcagtaaagaggaga

SEQ ID NO: 1380828 - DNA, 15 bp, Homo sapiens
ggcagtaaagaggag

SEQ ID NO: 1380829 - DNA, 15 bp, Homo sapiens
tggcagtaaagagga

SEQ ID NO: 1380830 - DNA, 15 bp, Homo sapiens
ctggcagtaaagagg

SEQ ID NO: 1380831 - DNA, 15 bp, Homo sapiens
tctggcagtaaagag

SEQ ID NO: 1380832 - DNA, 15 bp, Homo sapiens
gtctggcagtaaaga

SEQ ID NO: 1380833 - DNA, 15 bp, Homo sapiens
agtctggcagtaaag

SEQ ID NO: 1380834 - DNA, 15 bp, Homo sapiens
cagtctggcagtaaa

SEQ ID NO: 1380835 - DNA, 15 bp, Homo sapiens
gcagtctggcagtaa

SEQ ID NO: 1380836 - DNA, 15 bp, Homo sapiens
ggcagtctggcagta

SEQ ID NO: 1380837 - DNA, 15 bp, Homo sapiens
aggcagtctggcagt

SEQ ID NO: 1380838 - DNA, 15 bp, Homo sapiens
caggcagtctggcag

SEQ ID NO: 1380839 - DNA, 15 bp, Homo sapiens
acaggcagtctggca

SEQ ID NO: 1380840 - DNA, 15 bp, Homo sapiens
tacaggcagtctggc

SEQ ID NO: 1380841 - DNA, 15 bp, Homo sapiens
ctacaggcagtctgg

SEQ ID NO: 1380842 - DNA, 15 bp, Homo sapiens
tctacaggcagtctg

SEQ ID NO: 1380843 - DNA, 15 bp, Homo sapiens
ttctacaggcagtct

SEQ ID NO: 1380844 - DNA, 15 bp, Homo sapiens
cttctacaggcagtc

SEQ ID NO: 1380845 - DNA, 15 bp, Homo sapiens
acttctacaggcagt

SEQ ID NO: 1380846 - DNA, 15 bp, Homo sapiens
tacttctacaggcag

SEQ ID NO: 1380847 - DNA, 15 bp, Homo sapiens
ctacttctacaggca

SEQ ID NO: 1380848 - DNA, 15 bp, Homo sapiens
gctacttctacaggc

SEQ ID NO: 1380849 - DNA, 15 bp, Homo sapiens
agctacttctacagg

SEQ ID NO: 1380850 - DNA, 15 bp, Homo sapiens
cagctacttctacag

SEQ ID NO: 1380851 - DNA, 15 bp, Homo sapiens
tcagctacttctaca

SEQ ID NO: 1380852 - DNA, 15 bp, Homo sapiens
ctcagctacttctac

SEQ ID NO: 1380853 - DNA, 15 bp, Homo sapiens
gctcagctacttcta

SEQ ID NO: 1380854 - DNA, 15 bp, Homo sapiens
agctcagctacttct

SEQ ID NO: 1380855 - DNA, 15 bp, Homo sapiens
cagctcagctacttc

SEQ ID NO: 1380856 - DNA, 15 bp, Homo sapiens
ccagctcagctactt

SEQ ID NO: 1380857 - DNA, 15 bp, Homo sapiens
gccagctcagctact

SEQ ID NO: 1380858 - DNA, 15 bp, Homo sapiens
agccagctcagctac

SEQ ID NO: 1380859 - DNA, 15 bp, Homo sapiens
cagccagctcagcta

SEQ ID NO: 1380860 - DNA, 15 bp, Homo sapiens
gcagccagctcagct

SEQ ID NO: 1380861 - DNA, 15 bp, Homo sapiens
ggcagccagctcagc

SEQ ID NO: 1380862 - DNA, 15 bp, Homo sapiens
aggcagccagctcag

SEQ ID NO: 1380863 - DNA, 15 bp, Homo sapiens
aaggcagccagctca

SEQ ID NO: 1380864 - DNA, 15 bp, Homo sapiens
taaggcagccagctc

SEQ ID NO: 1380865 - DNA, 15 bp, Homo sapiens
ttaaggcagccagct

SEQ ID NO: 1380866 - DNA, 15 bp, Homo sapiens
attaaggcagccagc

SEQ ID NO: 1380867 - DNA, 15 bp, Homo sapiens
aattaaggcagccag

SEQ ID NO: 1380868 - DNA, 15 bp, Homo sapiens
aaattaaggcagcca

SEQ ID NO: 1380869 - DNA, 15 bp, Homo sapiens
gaaattaaggcagcc

SEQ ID NO: 1380870 - DNA, 15 bp, Homo sapiens
ggaaattaaggcagc

SEQ ID NO: 1380871 - DNA, 15 bp, Homo sapiens
aggaaattaaggcag

SEQ ID NO: 1380872 - DNA, 15 bp, Homo sapiens
aaggaaattaaggca

SEQ ID NO: 1380873 - DNA, 15 bp, Homo sapiens
taaggaaattaaggc

SEQ ID NO: 1380874 - DNA, 15 bp, Homo sapiens
gtaaggaaattaagg

SEQ ID NO: 1380875 - DNA, 15 bp, Homo sapiens
agtaaggaaattaag

SEQ ID NO: 1380876 - DNA, 15 bp, Homo sapiens
tagtaaggaaattaa

SEQ ID NO: 1380877 - DNA, 15 bp, Homo sapiens
atagtaaggaaatta

SEQ ID NO: 1380878 - DNA, 15 bp, Homo sapiens
aatagtaaggaaatt

SEQ ID NO: 1380879 - DNA, 15 bp, Homo sapiens
gaatagtaaggaaat

SEQ ID NO: 1380880 - DNA, 15 bp, Homo sapiens
tgaatagtaaggaaa

SEQ ID NO: 1380881 - DNA, 15 bp, Homo sapiens
gtgaatagtaaggaa

SEQ ID NO: 1380882 - DNA, 15 bp, Homo sapiens
agtgaatagtaagga

SEQ ID NO: 1380883 - DNA, 15 bp, Homo sapiens
cagtgaatagtaagg

SEQ ID NO: 1380884 - DNA, 15 bp, Homo sapiens
acagtgaatagtaag

SEQ ID NO: 1380885 - DNA, 15 bp, Homo sapiens
gacagtgaatagtaa

SEQ ID NO: 1380886 - DNA, 15 bp, Homo sapiens
agacagtgaatagta

SEQ ID NO: 1380887 - DNA, 15 bp, Homo sapiens
aagacagtgaatagt

SEQ ID NO: 1380888 - DNA, 15 bp, Homo sapiens
aaagacagtgaatag

SEQ ID NO: 1380889 - DNA, 15 bp, Homo sapiens
taaagacagtgaata

SEQ ID NO: 1380890 - DNA, 15 bp, Homo sapiens
ttaaagacagtgaat

SEQ ID NO: 1380891 - DNA, 15 bp, Homo sapiens
attaaagacagtgaa

SEQ ID NO: 1380892 - DNA, 15 bp, Homo sapiens
gattaaagacagtga

SEQ ID NO: 1380893 - DNA, 15 bp, Homo sapiens
tgattaaagacagtg

SEQ ID NO: 1380894 - DNA, 15 bp, Homo sapiens
gtgattaaagacagt

SEQ ID NO: 1380895 - DNA, 15 bp, Homo sapiens
agtgattaaagacag

SEQ ID NO: 1380896 - DNA, 15 bp, Homo sapiens
aagtgattaaagaca

SEQ ID NO: 1380897 - DNA, 15 bp, Homo sapiens
gaagtgattaaagac

SEQ ID NO: 1380898 - DNA, 15 bp, Homo sapiens
tgaagtgattaaaga

SEQ ID NO: 1380899 - DNA, 15 bp, Homo sapiens
ttgaagtgattaaag

SEQ ID NO: 1380900 - DNA, 15 bp, Homo sapiens
tttgaagtgattaaa

SEQ ID NO: 1380901 - DNA, 15 bp, Homo sapiens
atttgaagtgattaa

SEQ ID NO: 1380902 - DNA, 15 bp, Homo sapiens
aatttgaagtgatta

SEQ ID NO: 1380903 - DNA, 15 bp, Homo sapiens
aaatttgaagtgatt

SEQ ID NO: 1380904 - DNA, 15 bp, Homo sapiens
caaatttgaagtgat

SEQ ID NO: 1380905 - DNA, 15 bp, Homo sapiens
tcaaatttgaagtga

SEQ ID NO: 1380906 - DNA, 15 bp, Homo sapiens
gtcaaatttgaagtg

SEQ ID NO: 1380907 - DNA, 15 bp, Homo sapiens
agtcaaatttgaagt

SEQ ID NO: 1380908 - DNA, 15 bp, Homo sapiens
aagtcaaatttgaag

SEQ ID NO: 1380909 - DNA, 15 bp, Homo sapiens
aaagtcaaatttgaa

SEQ ID NO: 1380910 - DNA, 15 bp, Homo sapiens
caaagtcaaatttga

SEQ ID NO: 1380911 - DNA, 15 bp, Homo sapiens
ccaaagtcaaatttg

SEQ ID NO: 1380912 - DNA, 15 bp, Homo sapiens
gccaaagtcaaattt

SEQ ID NO: 1380913 - DNA, 15 bp, Homo sapiens
ggccaaagtcaaatt

SEQ ID NO: 1380914 - DNA, 15 bp, Homo sapiens
gggccaaagtcaaat

SEQ ID NO: 1380915 - DNA, 15 bp, Homo sapiens
ggggccaaagtcaaa

SEQ ID NO: 1380916 - DNA, 15 bp, Homo sapiens
tggggccaaagtcaa

SEQ ID NO: 1380917 - DNA, 15 bp, Homo sapiens
gtggggccaaagtca

SEQ ID NO: 1380918 - DNA, 15 bp, Homo sapiens
agtggggccaaagtc

SEQ ID NO: 1380919 - DNA, 15 bp, Homo sapiens
aagtggggccaaagt

SEQ ID NO: 1380920 - DNA, 15 bp, Homo sapiens
gaagtggggccaaag

SEQ ID NO: 1380921 - DNA, 15 bp, Homo sapiens
tgaagtggggccaaa

SEQ ID NO: 1380922 - DNA, 15 bp, Homo sapiens
gtgaagtggggccaa

SEQ ID NO: 1380923 - DNA, 15 bp, Homo sapiens
ggtgaagtggggcca

SEQ ID NO: 1380924 - DNA, 15 bp, Homo sapiens
tggtgaagtggggcc

SEQ ID NO: 1380925 - DNA, 15 bp, Homo sapiens
ttggtgaagtggggc

SEQ ID NO: 1380926 - DNA, 15 bp, Homo sapiens
gttggtgaagtgggg

SEQ ID NO: 1380927 - DNA, 15 bp, Homo sapiens
tgttggtgaagtggg

SEQ ID NO: 1380928 - DNA, 15 bp, Homo sapiens
atgttggtgaagtgg

SEQ ID NO: 1380929 - DNA, 15 bp, Homo sapiens
catgttggtgaagtg

SEQ ID NO: 1380930 - DNA, 15 bp, Homo sapiens
gcatgttggtgaagt

SEQ ID NO: 1380931 - DNA, 15 bp, Homo sapiens
ggcatgttggtgaag

SEQ ID NO: 1380932 - DNA, 15 bp, Homo sapiens
gggcatgttggtgaa

SEQ ID NO: 1380933 - DNA, 15 bp, Homo sapiens
tgggcatgttggtga

SEQ ID NO: 1380934 - DNA, 15 bp, Homo sapiens
ctgggcatgttggtg

SEQ ID NO: 1380935 - DNA, 15 bp, Homo sapiens
tctgggcatgttggt

SEQ ID NO: 1380936 - DNA, 15 bp, Homo sapiens
gtctgggcatgttgg

SEQ ID NO: 1380937 - DNA, 15 bp, Homo sapiens
agtctgggcatgttg

SEQ ID NO: 1380938 - DNA, 15 bp, Homo sapiens
gagtctgggcatgtt

SEQ ID NO: 1380939 - DNA, 15 bp, Homo sapiens
agagtctgggcatgt

SEQ ID NO: 1380940 - DNA, 15 bp, Homo sapiens
gagagtctgggcatg

SEQ ID NO: 1380941 - DNA, 15 bp, Homo sapiens
cgagagtctgggcat

SEQ ID NO: 1380942 - DNA, 15 bp, Homo sapiens
gcgagagtctgggca

SEQ ID NO: 1380943 - DNA, 15 bp, Homo sapiens
ggcgagagtctgggc

SEQ ID NO: 1380944 - DNA, 15 bp, Homo sapiens
gggcgagagtctggg

SEQ ID NO: 1380945 - DNA, 15 bp, Homo sapiens
agggcgagagtctgg

SEQ ID NO: 1380946 - DNA, 15 bp, Homo sapiens
aagggcgagagtctg

SEQ ID NO: 1380947 - DNA, 15 bp, Homo sapiens
aaagggcgagagtct

SEQ ID NO: 1380948 - DNA, 15 bp, Homo sapiens
taaagggcgagagtc

SEQ ID NO: 1380949 - DNA, 15 bp, Homo sapiens
ataaagggcgagagt

SEQ ID NO: 1380950 - DNA, 15 bp, Homo sapiens
cataaagggcgagag

SEQ ID NO: 1380951 - DNA, 15 bp, Homo sapiens
acataaagggcgaga

SEQ ID NO: 1380952 - DNA, 15 bp, Homo sapiens
gacataaagggcgag

SEQ ID NO: 1380953 - DNA, 15 bp, Homo sapiens
tgacataaagggcga

SEQ ID NO: 1380954 - DNA, 15 bp, Homo sapiens
gtgacataaagggcg

SEQ ID NO: 1380955 - DNA, 15 bp, Homo sapiens
tgtgacataaagggc

SEQ ID NO: 1380956 - DNA, 15 bp, Homo sapiens
atgtgacataaaggg

SEQ ID NO: 1380957 - DNA, 15 bp, Homo sapiens
aatgtgacataaagg

SEQ ID NO: 1380958 - DNA, 15 bp, Homo sapiens
caatgtgacataaag

SEQ ID NO: 1380959 - DNA, 15 bp, Homo sapiens
ccaatgtgacataaa

SEQ ID NO: 1380960 - DNA, 15 bp, Homo sapiens
cccaatgtgacataa

SEQ ID NO: 1380961 - DNA, 15 bp, Homo sapiens
tcccaatgtgacata

SEQ ID NO: 1380962 - DNA, 15 bp, Homo sapiens
ttcccaatgtgacat

SEQ ID NO: 1380963 - DNA, 15 bp, Homo sapiens
tttcccaatgtgaca

SEQ ID NO: 1380964 - DNA, 15 bp, Homo sapiens
ctttcccaatgtgac

SEQ ID NO: 1380965 - DNA, 15 bp, Homo sapiens
gctttcccaatgtga

SEQ ID NO: 1380966 - DNA, 15 bp, Homo sapiens
ggctttcccaatgtg

SEQ ID NO: 1380967 - DNA, 15 bp, Homo sapiens
tggctttcccaatgt

SEQ ID NO: 1380968 - DNA, 15 bp, Homo sapiens
gtggctttcccaatg

SEQ ID NO: 1380969 - DNA, 15 bp, Homo sapiens
tgtggctttcccaat

SEQ ID NO: 1380970 - DNA, 15 bp, Homo sapiens
atgtggctttcccaa

SEQ ID NO: 1380971 - DNA, 15 bp, Homo sapiens
gatgtggctttccca

SEQ ID NO: 1380972 - DNA, 15 bp, Homo sapiens
ggatgtggctttccc

SEQ ID NO: 1380973 - DNA, 15 bp, Homo sapiens
aggatgtggctttcc

SEQ ID NO: 1380974 - DNA, 15 bp, Homo sapiens
caggatgtggctttc

SEQ ID NO: 1380975 - DNA, 15 bp, Homo sapiens
acaggatgtggcttt

SEQ ID NO: 1380976 - DNA, 15 bp, Homo sapiens
aacaggatgtggctt

SEQ ID NO: 1380977 - DNA, 15 bp, Homo sapiens
caacaggatgtggct

SEQ ID NO: 1380978 - DNA, 15 bp, Homo sapiens
tcaacaggatgtggc

SEQ ID NO: 1380979 - DNA, 15 bp, Homo sapiens
ttcaacaggatgtgg

SEQ ID NO: 1380980 - DNA, 15 bp, Homo sapiens
attcaacaggatgtg

SEQ ID NO: 1380981 - DNA, 15 bp, Homo sapiens
aattcaacaggatgt

SEQ ID NO: 1380982 - DNA, 15 bp, Homo sapiens
aaattcaacaggatg

SEQ ID NO: 1380983 - DNA, 15 bp, Homo sapiens
taaattcaacaggat

SEQ ID NO: 1380984 - DNA, 15 bp, Homo sapiens
ttaaattcaacagga

SEQ ID NO: 1380985 - DNA, 15 bp, Homo sapiens
gttaaattcaacagg

SEQ ID NO: 1380986 - DNA, 15 bp, Homo sapiens
agttaaattcaacag

SEQ ID NO: 1380987 - DNA, 15 bp, Homo sapiens
gagttaaattcaaca

SEQ ID NO: 1380988 - DNA, 15 bp, Homo sapiens
agagttaaattcaac

SEQ ID NO: 1380989 - DNA, 15 bp, Homo sapiens
cagagttaaattcaa

SEQ ID NO: 1380990 - DNA, 15 bp, Homo sapiens
gcagagttaaattca

SEQ ID NO: 1380991 - DNA, 15 bp, Homo sapiens
tgcagagttaaattc

SEQ ID NO: 1380992 - DNA, 15 bp, Homo sapiens
ttgcagagttaaatt

SEQ ID NO: 1380993 - DNA, 15 bp, Homo sapiens
gttgcagagttaaat

SEQ ID NO: 1380994 - DNA, 15 bp, Homo sapiens
tgttgcagagttaaa

SEQ ID NO: 1380995 - DNA, 15 bp, Homo sapiens
atgttgcagagttaa

SEQ ID NO: 1380996 - DNA, 15 bp, Homo sapiens
gatgttgcagagtta

SEQ ID NO: 1380997 - DNA, 15 bp, Homo sapiens
agatgttgcagagtt

SEQ ID NO: 1380998 - DNA, 15 bp, Homo sapiens
cagatgttgcagagt

SEQ ID NO: 1380999 - DNA, 15 bp, Homo sapiens
tcagatgttgcagag

SEQ ID NO: 1381000 - DNA, 15 bp, Homo sapiens
atcagatgttgcaga

SEQ ID NO: 1381001 - DNA, 15 bp, Homo sapiens
tatcagatgttgcag

SEQ ID NO: 1381002 - DNA, 15 bp, Homo sapiens
atatcagatgttgca

SEQ ID NO: 1381003 - DNA, 15 bp, Homo sapiens
catatcagatgttgc

SEQ ID NO: 1381004 - DNA, 15 bp, Homo sapiens
gcatatcagatgttg

SEQ ID NO: 1381005 - DNA, 15 bp, Homo sapiens
agcatatcagatgtt

SEQ ID NO: 1381006 - DNA, 15 bp, Homo sapiens
gagcatatcagatgt

SEQ ID NO: 1381007 - DNA, 15 bp, Homo sapiens
tgagcatatcagatg

SEQ ID NO: 1381008 - DNA, 15 bp, Homo sapiens
ttgagcatatcagat

SEQ ID NO: 1381009 - DNA, 15 bp, Homo sapiens
gttgagcatatcaga

SEQ ID NO: 1381010 - DNA, 15 bp, Homo sapiens
agttgagcatatcag

SEQ ID NO: 1381011 - DNA, 15 bp, Homo sapiens
gagttgagcatatca

SEQ ID NO: 1381012 - DNA, 15 bp, Homo sapiens
ggagttgagcatatc

SEQ ID NO: 1381013 - DNA, 15 bp, Homo sapiens
gggagttgagcatat

SEQ ID NO: 1381014 - DNA, 15 bp, Homo sapiens
ggggagttgagcata

SEQ ID NO: 1381015 - DNA, 15 bp, Homo sapiens
aggggagttgagcat

SEQ ID NO: 1381016 - DNA, 15 bp, Homo sapiens
gaggggagttgagca

SEQ ID NO: 1381017 - DNA, 15 bp, Homo sapiens
agaggggagttgagc

SEQ ID NO: 1381018 - DNA, 15 bp, Homo sapiens
gagaggggagttgag

SEQ ID NO: 1381019 - DNA, 15 bp, Homo sapiens
agagaggggagttga

SEQ ID NO: 1381020 - DNA, 15 bp, Homo sapiens
cagagaggggagttg

SEQ ID NO: 1381021 - DNA, 15 bp, Homo sapiens
ccagagaggggagtt

SEQ ID NO: 1381022 - DNA, 15 bp, Homo sapiens
accagagaggggagt

SEQ ID NO: 1381023 - DNA, 15 bp, Homo sapiens
caccagagaggggag

SEQ ID NO: 1381024 - DNA, 15 bp, Homo sapiens
ccaccagagagggga

SEQ ID NO: 1381025 - DNA, 15 bp, Homo sapiens
accaccagagagggg

SEQ ID NO: 1381026 - DNA, 15 bp, Homo sapiens
taccaccagagaggg

SEQ ID NO: 1381027 - DNA, 15 bp, Homo sapiens
ataccaccagagagg

SEQ ID NO: 1381028 - DNA, 15 bp, Homo sapiens
aataccaccagagag

SEQ ID NO: 1381029 - DNA, 15 bp, Homo sapiens
taataccaccagaga

SEQ ID NO: 1381030 - DNA, 15 bp, Homo sapiens
ataataccaccagag

SEQ ID NO: 1381031 - DNA, 15 bp, Homo sapiens
tataataccaccaga

SEQ ID NO: 1381032 - DNA, 15 bp, Homo sapiens
ctataataccaccag

SEQ ID NO: 1381033 - DNA, 15 bp, Homo sapiens
cctataataccacca

SEQ ID NO: 1381034 - DNA, 15 bp, Homo sapiens
gcctataataccacc

SEQ ID NO: 1381035 - DNA, 15 bp, Homo sapiens
cgcctataataccac

SEQ ID NO: 1381036 - DNA, 15 bp, Homo sapiens
gcgcctataatacca

SEQ ID NO: 1381037 - DNA, 15 bp, Homo sapiens
agcgcctataatacc

SEQ ID NO: 1381038 - DNA, 15 bp, Homo sapiens
gagcgcctataatac

SEQ ID NO: 1381039 - DNA, 15 bp, Homo sapiens
ggagcgcctataata

SEQ ID NO: 1381040 - DNA, 15 bp, Homo sapiens
gggagcgcctataat

SEQ ID NO: 1381041 - DNA, 15 bp, Homo sapiens
ggggagcgcctataa

SEQ ID NO: 1381042 - DNA, 15 bp, Homo sapiens
aggggagcgcctata

SEQ ID NO: 1381043 - DNA, 15 bp, Homo sapiens
gaggggagcgcctat

SEQ ID NO: 1381044 - DNA, 15 bp, Homo sapiens
agaggggagcgccta

SEQ ID NO: 1381045 - DNA, 15 bp, Homo sapiens
cagaggggagcgcct

SEQ ID NO: 1381046 - DNA, 15 bp, Homo sapiens
tcagaggggagcgcc

SEQ ID NO: 1381047 - DNA, 15 bp, Homo sapiens
ttcagaggggagcgc

SEQ ID NO: 1381048 - DNA, 15 bp, Homo sapiens
tttcagaggggagcg

SEQ ID NO: 1381049 - DNA, 15 bp, Homo sapiens
atttcagaggggagc

SEQ ID NO: 1381050 - DNA, 15 bp, Homo sapiens
tatttcagaggggag

SEQ ID NO: 1381051 - DNA, 15 bp, Homo sapiens
ttatttcagagggga

SEQ ID NO: 1381052 - DNA, 15 bp, Homo sapiens
attatttcagagggg

SEQ ID NO: 1381053 - DNA, 15 bp, Homo sapiens
aattatttcagaggg

SEQ ID NO: 1381054 - DNA, 15 bp, Homo sapiens
gaattatttcagagg

SEQ ID NO: 1381055 - DNA, 15 bp, Homo sapiens
ggaattatttcagag

SEQ ID NO: 1381056 - DNA, 15 bp, Homo sapiens
gggaattatttcaga

SEQ ID NO: 1381057 - DNA, 15 bp, Homo sapiens
cgggaattatttcag

SEQ ID NO: 1381058 - DNA, 15 bp, Homo sapiens
gcgggaattatttca

SEQ ID NO: 1381059 - DNA, 15 bp, Homo sapiens
tgcgggaattatttc

SEQ ID NO: 1381060 - DNA, 15 bp, Homo sapiens
ctgcgggaattattt

SEQ ID NO: 1381061 - DNA, 15 bp, Homo sapiens
gctgcgggaattatt

SEQ ID NO: 1381062 - DNA, 15 bp, Homo sapiens
agctgcgggaattat

SEQ ID NO: 1381063 - DNA, 15 bp, Homo sapiens
cagctgcgggaatta

SEQ ID NO: 1381064 - DNA, 15 bp, Homo sapiens
gcagctgcgggaatt

SEQ ID NO: 1381065 - DNA, 15 bp, Homo sapiens
tgcagctgcgggaat

SEQ ID NO: 1381066 - DNA, 15 bp, Homo sapiens
gtgcagctgcgggaa

SEQ ID NO: 1381067 - DNA, 15 bp, Homo sapiens
tgtgcagctgcggga

SEQ ID NO: 1381068 - DNA, 15 bp, Homo sapiens
atgtgcagctgcggg

SEQ ID NO: 1381069 - DNA, 15 bp, Homo sapiens
aatgtgcagctgcgg

SEQ ID NO: 1381070 - DNA, 15 bp, Homo sapiens
aaatgtgcagctgcg

SEQ ID NO: 1381071 - DNA, 15 bp, Homo sapiens
aaaatgtgcagctgc

SEQ ID NO: 1381072 - DNA, 15 bp, Homo sapiens
taaaatgtgcagctg

SEQ ID NO: 1381073 - DNA, 15 bp, Homo sapiens
gtaaaatgtgcagct

SEQ ID NO: 1381074 - DNA, 15 bp, Homo sapiens
tgtaaaatgtgcagc

SEQ ID NO: 1381075 - DNA, 15 bp, Homo sapiens
gtgtaaaatgtgcag

SEQ ID NO: 1381076 - DNA, 15 bp, Homo sapiens
tgtgtaaaatgtgca

SEQ ID NO: 1381077 - DNA, 15 bp, Homo sapiens
gtgtgtaaaatgtgc

SEQ ID NO: 1381078 - DNA, 15 bp, Homo sapiens
agtgtgtaaaatgtg

SEQ ID NO: 1381079 - DNA, 15 bp, Homo sapiens
gagtgtgtaaaatgt

SEQ ID NO: 1381080 - DNA, 15 bp, Homo sapiens
agagtgtgtaaaatg

SEQ ID NO: 1381081 - DNA, 15 bp, Homo sapiens
tagagtgtgtaaaat

SEQ ID NO: 1381082 - DNA, 15 bp, Homo sapiens
gtagagtgtgtaaaa

SEQ ID NO: 1381083 - DNA, 15 bp, Homo sapiens
ggtagagtgtgtaaa

SEQ ID NO: 1381084 - DNA, 15 bp, Homo sapiens
gggtagagtgtgtaa

SEQ ID NO: 1381085 - DNA, 15 bp, Homo sapiens
ggggtagagtgtgta

SEQ ID NO: 1381086 - DNA, 15 bp, Homo sapiens
tggggtagagtgtgt

SEQ ID NO: 1381087 - DNA, 15 bp, Homo sapiens
atggggtagagtgtg

SEQ ID NO: 1381088 - DNA, 15 bp, Homo sapiens
aatggggtagagtgt

SEQ ID NO: 1381089 - DNA, 15 bp, Homo sapiens
caatggggtagagtg

SEQ ID NO: 1381090 - DNA, 15 bp, Homo sapiens
gcaatggggtagagt

SEQ ID NO: 1381091 - DNA, 15 bp, Homo sapiens
agcaatggggtagag

SEQ ID NO: 1381092 - DNA, 15 bp, Homo sapiens
tagcaatggggtaga

SEQ ID NO: 1381093 - DNA, 15 bp, Homo sapiens
gtagcaatggggtag

SEQ ID NO: 1381094 - DNA, 15 bp, Homo sapiens
ggtagcaatggggta

SEQ ID NO: 1381095 - DNA, 15 bp, Homo sapiens
tggtagcaatggggt

SEQ ID NO: 1381096 - DNA, 15 bp, Homo sapiens
ctggtagcaatgggg

SEQ ID NO: 1381097 - DNA, 15 bp, Homo sapiens
tctggtagcaatggg

SEQ ID NO: 1381098 - DNA, 15 bp, Homo sapiens
atctggtagcaatgg

SEQ ID NO: 1381099 - DNA, 15 bp, Homo sapiens
catctggtagcaatg

SEQ ID NO: 1381100 - DNA, 15 bp, Homo sapiens
acatctggtagcaat

SEQ ID NO: 1381101 - DNA, 15 bp, Homo sapiens
cacatctggtagcaa

SEQ ID NO: 1381102 - DNA, 15 bp, Homo sapiens
acacatctggtagca

SEQ ID NO: 1381103 - DNA, 15 bp, Homo sapiens
gacacatctggtagc

SEQ ID NO: 1381104 - DNA, 15 bp, Homo sapiens
agacacatctggtag

SEQ ID NO: 1381105 - DNA, 15 bp, Homo sapiens
cagacacatctggta

SEQ ID NO: 1381106 - DNA, 15 bp, Homo sapiens
acagacacatctggt

SEQ ID NO: 1381107 - DNA, 15 bp, Homo sapiens
gacagacacatctgg

SEQ ID NO: 1381108 - DNA, 15 bp, Homo sapiens
agacagacacatctg

SEQ ID NO: 1381109 - DNA, 15 bp, Homo sapiens
aagacagacacatct

SEQ ID NO: 1381110 - DNA, 15 bp, Homo sapiens
aaagacagacacatc

SEQ ID NO: 1381111 - DNA, 15 bp, Homo sapiens
caaagacagacacat

SEQ ID NO: 1381112 - DNA, 15 bp, Homo sapiens
acaaagacagacaca

SEQ ID NO: 1381113 - DNA, 15 bp, Homo sapiens
gacaaagacagacac

SEQ ID NO: 1381114 - DNA, 15 bp, Homo sapiens
tgacaaagacagaca

SEQ ID NO: 1381115 - DNA, 15 bp, Homo sapiens
gtgacaaagacagac

SEQ ID NO: 1381116 - DNA, 15 bp, Homo sapiens
tgtgacaaagacaga

SEQ ID NO: 1381117 - DNA, 15 bp, Homo sapiens
atgtgacaaagacag

SEQ ID NO: 1381118 - DNA, 15 bp, Homo sapiens
gatgtgacaaagaca

SEQ ID NO: 1381119 - DNA, 15 bp, Homo sapiens
agatgtgacaaagac

SEQ ID NO: 1381120 - DNA, 15 bp, Homo sapiens
gagatgtgacaaaga

SEQ ID NO: 1381121 - DNA, 15 bp, Homo sapiens
agagatgtgacaaag

SEQ ID NO: 1381122 - DNA, 15 bp, Homo sapiens
cagagatgtgacaaa

SEQ ID NO: 1381123 - DNA, 15 bp, Homo sapiens
ccagagatgtgacaa

SEQ ID NO: 1381124 - DNA, 15 bp, Homo sapiens
accagagatgtgaca

SEQ ID NO: 1381125 - DNA, 15 bp, Homo sapiens
aaccagagatgtgac

SEQ ID NO: 1381126 - DNA, 15 bp, Homo sapiens
taaccagagatgtga

SEQ ID NO: 1381127 - DNA, 15 bp, Homo sapiens
ataaccagagatgtg

SEQ ID NO: 1381128 - DNA, 15 bp, Homo sapiens
cataaccagagatgt

SEQ ID NO: 1381129 - DNA, 15 bp, Homo sapiens
tcataaccagagatg

SEQ ID NO: 1381130 - DNA, 15 bp, Homo sapiens
ttcataaccagagat

SEQ ID NO: 1381131 - DNA, 15 bp, Homo sapiens
attcataaccagaga

SEQ ID NO: 1381132 - DNA, 15 bp, Homo sapiens
cattcataaccagag

SEQ ID NO: 1381133 - DNA, 15 bp, Homo sapiens
ccattcataaccaga

SEQ ID NO: 1381134 - DNA, 15 bp, Homo sapiens
accattcataaccag

SEQ ID NO: 1381135 - DNA, 15 bp, Homo sapiens
taccattcataacca

SEQ ID NO: 1381136 - DNA, 15 bp, Homo sapiens
ataccattcataacc

SEQ ID NO: 1381137 - DNA, 15 bp, Homo sapiens
gataccattcataac

SEQ ID NO: 1381138 - DNA, 15 bp, Homo sapiens
agataccattcataa

SEQ ID NO: 1381139 - DNA, 15 bp, Homo sapiens
aagataccattcata

SEQ ID NO: 1381140 - DNA, 15 bp, Homo sapiens
gaagataccattcat

SEQ ID NO: 1381141 - DNA, 15 bp, Homo sapiens
agaagataccattca

SEQ ID NO: 1381142 - DNA, 15 bp, Homo sapiens
aagaagataccattc

SEQ ID NO: 1381143 - DNA, 15 bp, Homo sapiens
aaagaagataccatt

SEQ ID NO: 1381144 - DNA, 15 bp, Homo sapiens
gaaagaagataccat

SEQ ID NO: 1381145 - DNA, 15 bp, Homo sapiens
agaaagaagatacca

SEQ ID NO: 1381146 - DNA, 15 bp, Homo sapiens
cagaaagaagatacc

SEQ ID NO: 1381147 - DNA, 15 bp, Homo sapiens
gcagaaagaagatac

SEQ ID NO: 1381148 - DNA, 15 bp, Homo sapiens
ggcagaaagaagata

SEQ ID NO: 1381149 - DNA, 15 bp, Homo sapiens
aggcagaaagaagat

SEQ ID NO: 1381150 - DNA, 15 bp, Homo sapiens
caggcagaaagaaga

SEQ ID NO: 1381151 - DNA, 15 bp, Homo sapiens
gcaggcagaaagaag

SEQ ID NO: 1381152 - DNA, 15 bp, Homo sapiens
agcaggcagaaagaa

SEQ ID NO: 1381153 - DNA, 15 bp, Homo sapiens
tatagcaggcagaaa

SEQ ID NO: 1381154 - DNA, 15 bp, Homo sapiens
atatagcaggcagaa

SEQ ID NO: 1381155 - DNA, 15 bp, Homo sapiens
catatagcaggcaga

SEQ ID NO: 1381156 - DNA, 15 bp, Homo sapiens
tcatatagcaggcag

SEQ ID NO: 1381157 - DNA, 15 bp, Homo sapiens
ttcatatagcaggca

SEQ ID NO: 1381158 - DNA, 15 bp, Homo sapiens
cttcatatagcaggc

SEQ ID NO: 1381159 - DNA, 15 bp, Homo sapiens
acttcatatagcagg

SEQ ID NO: 1381160 - DNA, 15 bp, Homo sapiens
gacttcatatagcag

SEQ ID NO: 1381161 - DNA, 15 bp, Homo sapiens
ggacttcatatagca

SEQ ID NO: 1381162 - DNA, 15 bp, Homo sapiens
tggacttcatatagc

SEQ ID NO: 1381163 - DNA, 15 bp, Homo sapiens
gtggacttcatatag

SEQ ID NO: 1381164 - DNA, 15 bp, Homo sapiens
agtggacttcatata

SEQ ID NO: 1381165 - DNA, 15 bp, Homo sapiens
aagtggacttcatat

SEQ ID NO: 1381166 - DNA, 15 bp, Homo sapiens
aaagtggacttcata

SEQ ID NO: 1381167 - DNA, 15 bp, Homo sapiens
aaaagtggacttcat

SEQ ID NO: 1381168 - DNA, 15 bp, Homo sapiens
gaaaagtggacttca

SEQ ID NO: 1381169 - DNA, 15 bp, Homo sapiens
agaaaagtggacttc

SEQ ID NO: 1381170 - DNA, 15 bp, Homo sapiens
aagaaaagtggactt

SEQ ID NO: 1381171 - DNA, 15 bp, Homo sapiens
caagaaaagtggact

SEQ ID NO: 1381172 - DNA, 15 bp, Homo sapiens
ccaagaaaagtggac

SEQ ID NO: 1381173 - DNA, 15 bp, Homo sapiens
gccaagaaaagtgga

SEQ ID NO: 1381174 - DNA, 15 bp, Homo sapiens
agccaagaaaagtgg

SEQ ID NO: 1381175 - DNA, 15 bp, Homo sapiens
aagccaagaaaagtg

SEQ ID NO: 1381176 - DNA, 15 bp, Homo sapiens
caagccaagaaaagt

SEQ ID NO: 1381177 - DNA, 15 bp, Homo sapiens
ccaagccaagaaaag

SEQ ID NO: 1381178 - DNA, 15 bp, Homo sapiens
gccaagccaagaaaa

SEQ ID NO: 1381179 - DNA, 15 bp, Homo sapiens
tgccaagccaagaaa

SEQ ID NO: 1381180 - DNA, 15 bp, Homo sapiens
atgccaagccaagaa

SEQ ID NO: 1381181 - DNA, 15 bp, Homo sapiens
aatgccaagccaaga

SEQ ID NO: 1381182 - DNA, 15 bp, Homo sapiens
aaatgccaagccaag

SEQ ID NO: 1381183 - DNA, 15 bp, Homo sapiens
caaatgccaagccaa

SEQ ID NO: 1381184 - DNA, 15 bp, Homo sapiens
tcaaatgccaagcca

SEQ ID NO: 1381185 - DNA, 15 bp, Homo sapiens
ctcaaatgccaagcc

SEQ ID NO: 1381186 - DNA, 15 bp, Homo sapiens
gctcaaatgccaagc

SEQ ID NO: 1381187 - DNA, 15 bp, Homo sapiens
ggctcaaatgccaag

SEQ ID NO: 1381188 - DNA, 15 bp, Homo sapiens
tggctcaaatgccaa

SEQ ID NO: 1381189 - DNA, 15 bp, Homo sapiens
ctggctcaaatgcca

SEQ ID NO: 1381190 - DNA, 15 bp, Homo sapiens
gctggctcaaatgcc

SEQ ID NO: 1381191 - DNA, 15 bp, Homo sapiens
tgctggctcaaatgc

SEQ ID NO: 1381192 - DNA, 15 bp, Homo sapiens
atgctggctcaaatg

SEQ ID NO: 1381193 - DNA, 15 bp, Homo sapiens
aatgctggctcaaat

SEQ ID NO: 1381194 - DNA, 15 bp, Homo sapiens
gaatgctggctcaaa

SEQ ID NO: 1381195 - DNA, 15 bp, Homo sapiens
agaatgctggctcaa

SEQ ID NO: 1381196 - DNA, 15 bp, Homo sapiens
gagaatgctggctca

SEQ ID NO: 1381197 - DNA, 15 bp, Homo sapiens
agagaatgctggctc

SEQ ID NO: 1381198 - DNA, 15 bp, Homo sapiens
gagagaatgctggct

SEQ ID NO: 1381199 - DNA, 15 bp, Homo sapiens
ggagagaatgctggc

SEQ ID NO: 1381200 - DNA, 15 bp, Homo sapiens
gggagagaatgctgg

SEQ ID NO: 1381201 - DNA, 15 bp, Homo sapiens
tgggagagaatgctg

SEQ ID NO: 1381202 - DNA, 15 bp, Homo sapiens
gtgggagagaatgct

SEQ ID NO: 1381203 - DNA, 15 bp, Homo sapiens
agtgggagagaatgc

SEQ ID NO: 1381204 - DNA, 15 bp, Homo sapiens
cagtgggagagaatg

SEQ ID NO: 1381205 - DNA, 15 bp, Homo sapiens
gcagtgggagagaat

SEQ ID NO: 1381206 - DNA, 15 bp, Homo sapiens
agcagtgggagagaa

SEQ ID NO: 1381207 - DNA, 15 bp, Homo sapiens
gaagcagtgggagag

SEQ ID NO: 1381208 - DNA, 15 bp, Homo sapiens
agaagcagtgggaga

SEQ ID NO: 1381209 - DNA, 15 bp, Homo sapiens
gagaagcagtgggag

SEQ ID NO: 1381210 - DNA, 15 bp, Homo sapiens
tgagaagcagtggga

SEQ ID NO: 1381211 - DNA, 15 bp, Homo sapiens
atgagaagcagtggg

SEQ ID NO: 1381212 - DNA, 15 bp, Homo sapiens
gatgagaagcagtgg

SEQ ID NO: 1381213 - DNA, 15 bp, Homo sapiens
ggatgagaagcagtg

SEQ ID NO: 1381214 - DNA, 15 bp, Homo sapiens
cggatgagaagcagt

SEQ ID NO: 1381215 - DNA, 15 bp, Homo sapiens
gcggatgagaagcag

SEQ ID NO: 1381216 - DNA, 15 bp, Homo sapiens
ggcggatgagaagca

SEQ ID NO: 1381217 - DNA, 15 bp, Homo sapiens
gggcggatgagaagc

SEQ ID NO: 1381218 - DNA, 15 bp, Homo sapiens
agggcggatgagaag

SEQ ID NO: 1381219 - DNA, 15 bp, Homo sapiens
cagggcggatgagaa

SEQ ID NO: 1381220 - DNA, 15 bp, Homo sapiens
acagggcggatgaga

SEQ ID NO: 1381221 - DNA, 15 bp, Homo sapiens
aacagggcggatgag

SEQ ID NO: 1381222 - DNA, 15 bp, Homo sapiens
aaacagggcggatga

SEQ ID NO: 1381223 - DNA, 15 bp, Homo sapiens
aaaacagggcggatg

SEQ ID NO: 1381224 - DNA, 15 bp, Homo sapiens
gaaaacagggcggat

SEQ ID NO: 1381225 - DNA, 15 bp, Homo sapiens
ggaaaacagggcgga

SEQ ID NO: 1381226 - DNA, 15 bp, Homo sapiens
tggaaaacagggcgg

SEQ ID NO: 1381227 - DNA, 15 bp, Homo sapiens
ttggaaaacagggcg

SEQ ID NO: 1381228 - DNA, 15 bp, Homo sapiens
attggaaaacagggc

SEQ ID NO: 1381229 - DNA, 15 bp, Homo sapiens
gattggaaaacaggg

SEQ ID NO: 1381230 - DNA, 15 bp, Homo sapiens
ggattggaaaacagg

SEQ ID NO: 1381231 - DNA, 15 bp, Homo sapiens
tggattggaaaacag

SEQ ID NO: 1381232 - DNA, 15 bp, Homo sapiens
ttggattggaaaaca

SEQ ID NO: 1381233 - DNA, 15 bp, Homo sapiens
attggattggaaaac

SEQ ID NO: 1381234 - DNA, 15 bp, Homo sapiens
aattggattggaaaa

SEQ ID NO: 1381235 - DNA, 15 bp, Homo sapiens
gaattggattggaaa

SEQ ID NO: 1381236 - DNA, 15 bp, Homo sapiens
ggaattggattggaa

SEQ ID NO: 1381237 - DNA, 15 bp, Homo sapiens
aggaattggattgga

SEQ ID NO: 1381238 - DNA, 15 bp, Homo sapiens
aaggaattggattgg

SEQ ID NO: 1381239 - DNA, 15 bp, Homo sapiens
aaaggaattggattg

SEQ ID NO: 1381240 - DNA, 15 bp, Homo sapiens
taaaggaattggatt

SEQ ID NO: 1381241 - DNA, 15 bp, Homo sapiens
ataaaggaattggat

SEQ ID NO: 1381242 - DNA, 15 bp, Homo sapiens
cataaaggaattgga

SEQ ID NO: 1381243 - DNA, 15 bp, Homo sapiens
acataaaggaattgg

SEQ ID NO: 1381244 - DNA, 15 bp, Homo sapiens
tacataaaggaattg

SEQ ID NO: 1381245 - DNA, 15 bp, Homo sapiens
atacataaaggaatt

SEQ ID NO: 1381246 - DNA, 15 bp, Homo sapiens
catacataaaggaat

SEQ ID NO: 1381247 - DNA, 15 bp, Homo sapiens
gcatacataaaggaa

SEQ ID NO: 1381248 - DNA, 15 bp, Homo sapiens
agcatacataaagga

SEQ ID NO: 1381249 - DNA, 15 bp, Homo sapiens
cagcatacataaagg

SEQ ID NO: 1381250 - DNA, 15 bp, Homo sapiens
acagcatacataaag

SEQ ID NO: 1381251 - DNA, 15 bp, Homo sapiens
cacagcatacataaa

SEQ ID NO: 1381252 - DNA, 15 bp, Homo sapiens
tcacagcatacataa

SEQ ID NO: 1381253 - DNA, 15 bp, Homo sapiens
atcacagcatacata

SEQ ID NO: 1381254 - DNA, 15 bp, Homo sapiens
tatcacagcatacat

SEQ ID NO: 1381255 - DNA, 15 bp, Homo sapiens
atatcacagcataca

SEQ ID NO: 1381256 - DNA, 15 bp, Homo sapiens
gatatcacagcatac

SEQ ID NO: 1381257 - DNA, 15 bp, Homo sapiens
agatatcacagcata

SEQ ID NO: 1381258 - DNA, 15 bp, Homo sapiens
tagatatcacagcat

SEQ ID NO: 1381259 - DNA, 15 bp, Homo sapiens
gtagatatcacagca

SEQ ID NO: 1381260 - DNA, 15 bp, Homo sapiens
ggtagatatcacagc

SEQ ID NO: 1381261 - DNA, 15 bp, Homo sapiens
aggtagatatcacag

SEQ ID NO: 1381262 - DNA, 15 bp, Homo sapiens
taggtagatatcaca

SEQ ID NO: 1381263 - DNA, 15 bp, Homo sapiens
ctaggtagatatcac

SEQ ID NO: 1381264 - DNA, 15 bp, Homo sapiens
tctaggtagatatca

SEQ ID NO: 1381265 - DNA, 15 bp, Homo sapiens
ctctaggtagatatc

SEQ ID NO: 1381266 - DNA, 15 bp, Homo sapiens
actctaggtagatat

SEQ ID NO: 1381267 - DNA, 15 bp, Homo sapiens
gactctaggtagata

SEQ ID NO: 1381268 - DNA, 15 bp, Homo sapiens
ggactctaggtagat

SEQ ID NO: 1381269 - DNA, 15 bp, Homo sapiens
tggactctaggtaga

SEQ ID NO: 1381270 - DNA, 15 bp, Homo sapiens
atggactctaggtag

SEQ ID NO: 1381271 - DNA, 15 bp, Homo sapiens
tatggactctaggta

SEQ ID NO: 1381272 - DNA, 15 bp, Homo sapiens
gtatggactctaggt

SEQ ID NO: 1381273 - DNA, 15 bp, Homo sapiens
agtatggactctagg

SEQ ID NO: 1381274 - DNA, 15 bp, Homo sapiens
gagtatggactctag

SEQ ID NO: 1381275 - DNA, 15 bp, Homo sapiens
agagtatggactcta

SEQ ID NO: 1381276 - DNA, 15 bp, Homo sapiens
gagagtatggactct

SEQ ID NO: 1381277 - DNA, 15 bp, Homo sapiens
agagagtatggactc

SEQ ID NO: 1381278 - DNA, 15 bp, Homo sapiens
gagagagtatggact

SEQ ID NO: 1381279 - DNA, 15 bp, Homo sapiens
agagagagtatggac

SEQ ID NO: 1381280 - DNA, 15 bp, Homo sapiens
aagagagagtatgga

SEQ ID NO: 1381281 - DNA, 15 bp, Homo sapiens
gaagagagagtatgg

SEQ ID NO: 1381282 - DNA, 15 bp, Homo sapiens
agaagagagagtatg

SEQ ID NO: 1381283 - DNA, 15 bp, Homo sapiens
aagaagagagagtat

SEQ ID NO: 1381284 - DNA, 15 bp, Homo sapiens
aaagaagagagagta

SEQ ID NO: 1381285 - DNA, 15 bp, Homo sapiens
gaaagaagagagagt

SEQ ID NO: 1381286 - DNA, 15 bp, Homo sapiens
ggaaagaagagagag

SEQ ID NO: 1381287 - DNA, 15 bp, Homo sapiens
aggaaagaagagaga

SEQ ID NO: 1381288 - DNA, 15 bp, Homo sapiens
gaggaaagaagagag

SEQ ID NO: 1381289 - DNA, 15 bp, Homo sapiens
agaggaaagaagaga

SEQ ID NO: 1381290 - DNA, 15 bp, Homo sapiens
gagaggaaagaagag

SEQ ID NO: 1381291 - DNA, 15 bp, Homo sapiens
agagaggaaagaaga

SEQ ID NO: 1381292 - DNA, 15 bp, Homo sapiens
tagagaggaaagaag

SEQ ID NO: 1381293 - DNA, 15 bp, Homo sapiens
ttagagaggaaagaa

SEQ ID NO: 1381294 - DNA, 15 bp, Homo sapiens
attagagaggaaaga

SEQ ID NO: 1381295 - DNA, 15 bp, Homo sapiens
gattagagaggaaag

SEQ ID NO: 1381296 - DNA, 15 bp, Homo sapiens
agattagagaggaaa

SEQ ID NO: 1381297 - DNA, 15 bp, Homo sapiens
gagattagagaggaa

SEQ ID NO: 1381298 - DNA, 15 bp, Homo sapiens
tgagattagagagga

SEQ ID NO: 1381299 - DNA, 15 bp, Homo sapiens
atgagattagagagg

SEQ ID NO: 1381300 - DNA, 15 bp, Homo sapiens
catgagattagagag

SEQ ID NO: 1381301 - DNA, 15 bp, Homo sapiens
acatgagattagaga

SEQ ID NO: 1381302 - DNA, 15 bp, Homo sapiens
aacatgagattagag

SEQ ID NO: 1381303 - DNA, 15 bp, Homo sapiens
gaacatgagattaga

SEQ ID NO: 1381304 - DNA, 15 bp, Homo sapiens
tgaacatgagattag

SEQ ID NO: 1381305 - DNA, 15 bp, Homo sapiens
ttgaacatgagatta

SEQ ID NO: 1381306 - DNA, 15 bp, Homo sapiens
tttgaacatgagatt

SEQ ID NO: 1381307 - DNA, 15 bp, Homo sapiens
ctttgaacatgagat

SEQ ID NO: 1381308 - DNA, 15 bp, Homo sapiens
gctttgaacatgaga

SEQ ID NO: 1381309 - DNA, 15 bp, Homo sapiens
agctttgaacatgag

SEQ ID NO: 1381310 - DNA, 15 bp, Homo sapiens
aagctttgaacatga

SEQ ID NO: 1381311 - DNA, 15 bp, Homo sapiens
taagctttgaacatg

SEQ ID NO: 1381312 - DNA, 15 bp, Homo sapiens
ataagctttgaacat

SEQ ID NO: 1381313 - DNA, 15 bp, Homo sapiens
gataagctttgaaca

SEQ ID NO: 1381314 - DNA, 15 bp, Homo sapiens
ggataagctttgaac

SEQ ID NO: 1381315 - DNA, 15 bp, Homo sapiens
aggataagctttgaa

SEQ ID NO: 1381316 - DNA, 15 bp, Homo sapiens
aaggataagctttga

SEQ ID NO: 1381317 - DNA, 15 bp, Homo sapiens
gaaggataagctttg

SEQ ID NO: 1381318 - DNA, 15 bp, Homo sapiens
agaaggataagcttt

SEQ ID NO: 1381319 - DNA, 15 bp, Homo sapiens
aagaaggataagctt

SEQ ID NO: 1381320 - DNA, 15 bp, Homo sapiens
aaagaaggataagct

SEQ ID NO: 1381321 - DNA, 15 bp, Homo sapiens
gaaagaaggataagc

SEQ ID NO: 1381322 - DNA, 15 bp, Homo sapiens
ggaaagaaggataag

SEQ ID NO: 1381323 - DNA, 15 bp, Homo sapiens
tggaaagaaggataa

SEQ ID NO: 1381324 - DNA, 15 bp, Homo sapiens
ttggaaagaaggata

SEQ ID NO: 1381325 - DNA, 15 bp, Homo sapiens
cttggaaagaaggat

SEQ ID NO: 1381326 - DNA, 15 bp, Homo sapiens
gcttggaaagaagga

SEQ ID NO: 1381327 - DNA, 15 bp, Homo sapiens
ggcttggaaagaagg

SEQ ID NO: 1381328 - DNA, 15 bp, Homo sapiens
gggcttggaaagaag

SEQ ID NO: 1381329 - DNA, 15 bp, Homo sapiens
tgggcttggaaagaa

SEQ ID NO: 1381330 - DNA, 15 bp, Homo sapiens
ctgggcttggaaaga

SEQ ID NO: 1381331 - DNA, 15 bp, Homo sapiens
tctgggcttggaaag

SEQ ID NO: 1381332 - DNA, 15 bp, Homo sapiens
ttctgggcttggaaa

SEQ ID NO: 1381333 - DNA, 15 bp, Homo sapiens
cttctgggcttggaa

SEQ ID NO: 1381334 - DNA, 15 bp, Homo sapiens
ccttctgggcttgga

SEQ ID NO: 1381335 - DNA, 15 bp, Homo sapiens
tccttctgggcttgg

SEQ ID NO: 1381336 - DNA, 15 bp, Homo sapiens
ttccttctgggcttg

SEQ ID NO: 1381337 - DNA, 15 bp, Homo sapiens
cttccttctgggctt

SEQ ID NO: 1381338 - DNA, 15 bp, Homo sapiens
ccttccttctgggct

SEQ ID NO: 1381339 - DNA, 15 bp, Homo sapiens
tccttccttctgggc

SEQ ID NO: 1381340 - DNA, 15 bp, Homo sapiens
gtccttccttctggg

SEQ ID NO: 1381341 - DNA, 15 bp, Homo sapiens
tgtccttccttctgg

SEQ ID NO: 1381342 - DNA, 15 bp, Homo sapiens
atgtccttccttctg

SEQ ID NO: 1381343 - DNA, 15 bp, Homo sapiens
gatgtccttccttct

SEQ ID NO: 1381344 - DNA, 15 bp, Homo sapiens
ggatgtccttccttc

SEQ ID NO: 1381345 - DNA, 15 bp, Homo sapiens
gggatgtccttcctt

SEQ ID NO: 1381346 - DNA, 15 bp, Homo sapiens
tgggatgtccttcct

SEQ ID NO: 1381347 - DNA, 15 bp, Homo sapiens
atgggatgtccttcc

SEQ ID NO: 1381348 - DNA, 15 bp, Homo sapiens
aatgggatgtccttc

SEQ ID NO: 1381349 - DNA, 15 bp, Homo sapiens
gaatgggatgtcctt

SEQ ID NO: 1381350 - DNA, 15 bp, Homo sapiens
tgaatgggatgtcct

SEQ ID NO: 1381351 - DNA, 15 bp, Homo sapiens
atgaatgggatgtcc

SEQ ID NO: 1381352 - DNA, 15 bp, Homo sapiens
aatgaatgggatgtc

SEQ ID NO: 1381353 - DNA, 15 bp, Homo sapiens
taatgaatgggatgt

SEQ ID NO: 1381354 - DNA, 15 bp, Homo sapiens
ttaatgaatgggatg

SEQ ID NO: 1381355 - DNA, 15 bp, Homo sapiens
gttaatgaatgggat

SEQ ID NO: 1381356 - DNA, 15 bp, Homo sapiens
ggttaatgaatggga

SEQ ID NO: 1381357 - DNA, 15 bp, Homo sapiens
aggttaatgaatggg

SEQ ID NO: 1381358 - DNA, 15 bp, Homo sapiens
aaggttaatgaatgg

SEQ ID NO: 1381359 - DNA, 15 bp, Homo sapiens
gaaggttaatgaatg

SEQ ID NO: 1381360 - DNA, 15 bp, Homo sapiens
agaaggttaatgaat

SEQ ID NO: 1381361 - DNA, 15 bp, Homo sapiens
gagaaggttaatgaa

SEQ ID NO: 1381362 - DNA, 15 bp, Homo sapiens
agagaaggttaatga

SEQ ID NO: 1381363 - DNA, 15 bp, Homo sapiens
tagagaaggttaatg

SEQ ID NO: 1381364 - DNA, 15 bp, Homo sapiens
ttagagaaggttaat

SEQ ID NO: 1381365 - DNA, 15 bp, Homo sapiens
gttagagaaggttaa

SEQ ID NO: 1381366 - DNA, 15 bp, Homo sapiens
ggttagagaaggtta

SEQ ID NO: 1381367 - DNA, 15 bp, Homo sapiens
gggttagagaaggtt

SEQ ID NO: 1381368 - DNA, 15 bp, Homo sapiens
agggttagagaaggt

SEQ ID NO: 1381369 - DNA, 15 bp, Homo sapiens
gagggttagagaagg

SEQ ID NO: 1381370 - DNA, 15 bp, Homo sapiens
ggagggttagagaag

SEQ ID NO: 1381371 - DNA, 15 bp, Homo sapiens
aggagggttagagaa

SEQ ID NO: 1381372 - DNA, 15 bp, Homo sapiens
taggagggttagaga

SEQ ID NO: 1381373 - DNA, 15 bp, Homo sapiens
ctaggagggttagag

SEQ ID NO: 1381374 - DNA, 15 bp, Homo sapiens
gctaggagggttaga

SEQ ID NO: 1381375 - DNA, 15 bp, Homo sapiens
agctaggagggttag

SEQ ID NO: 1381376 - DNA, 15 bp, Homo sapiens
cagctaggagggtta

SEQ ID NO: 1381377 - DNA, 15 bp, Homo sapiens
ccagctaggagggtt

SEQ ID NO: 1381378 - DNA, 15 bp, Homo sapiens
tccagctaggagggt

SEQ ID NO: 1381379 - DNA, 15 bp, Homo sapiens
ttccagctaggaggg

SEQ ID NO: 1381380 - DNA, 15 bp, Homo sapiens
cttccagctaggagg

SEQ ID NO: 1381381 - DNA, 15 bp, Homo sapiens
acttccagctaggag

SEQ ID NO: 1381382 - DNA, 15 bp, Homo sapiens
tacttccagctagga

SEQ ID NO: 1381383 - DNA, 15 bp, Homo sapiens
ttacttccagctagg

SEQ ID NO: 1381384 - DNA, 15 bp, Homo sapiens
attacttccagctag

SEQ ID NO: 1381385 - DNA, 15 bp, Homo sapiens
cattacttccagcta

SEQ ID NO: 1381386 - DNA, 15 bp, Homo sapiens
acattacttccagct

SEQ ID NO: 1381387 - DNA, 15 bp, Homo sapiens
aacattacttccagc

SEQ ID NO: 1381388 - DNA, 15 bp, Homo sapiens
aaacattacttccag

SEQ ID NO: 1381389 - DNA, 15 bp, Homo sapiens
taaacattacttcca

SEQ ID NO: 1381390 - DNA, 15 bp, Homo sapiens
gtaaacattacttcc

SEQ ID NO: 1381391 - DNA, 15 bp, Homo sapiens
agtaaacattacttc

SEQ ID NO: 1381392 - DNA, 15 bp, Homo sapiens
aagtaaacattactt

SEQ ID NO: 1381393 - DNA, 15 bp, Homo sapiens
gaagtaaacattact

SEQ ID NO: 1381394 - DNA, 15 bp, Homo sapiens
ggaagtaaacattac

SEQ ID NO: 1381395 - DNA, 15 bp, Homo sapiens
aggaagtaaacatta

SEQ ID NO: 1381396 - DNA, 15 bp, Homo sapiens
gaggaagtaaacatt

SEQ ID NO: 1381397 - DNA, 15 bp, Homo sapiens
agaggaagtaaacat

SEQ ID NO: 1381398 - DNA, 15 bp, Homo sapiens
tagaggaagtaaaca

SEQ ID NO: 1381399 - DNA, 15 bp, Homo sapiens
ctagaggaagtaaac

SEQ ID NO: 1381400 - DNA, 15 bp, Homo sapiens
tctagaggaagtaaa

SEQ ID NO: 1381401 - DNA, 15 bp, Homo sapiens
atctagaggaagtaa

SEQ ID NO: 1381402 - DNA, 15 bp, Homo sapiens
aatctagaggaagta

SEQ ID NO: 1381403 - DNA, 15 bp, Homo sapiens
aaatctagaggaagt

SEQ ID NO: 1381404 - DNA, 15 bp, Homo sapiens
aaaatctagaggaag

SEQ ID NO: 1381405 - DNA, 15 bp, Homo sapiens
taaaatctagaggaa

SEQ ID NO: 1381406 - DNA, 15 bp, Homo sapiens
ataaaatctagagga

SEQ ID NO: 1381407 - DNA, 15 bp, Homo sapiens
gataaaatctagagg

SEQ ID NO: 1381408 - DNA, 15 bp, Homo sapiens
agataaaatctagag

SEQ ID NO: 1381409 - DNA, 15 bp, Homo sapiens
cagataaaatctaga

SEQ ID NO: 1381410 - DNA, 15 bp, Homo sapiens
acagataaaatctag

SEQ ID NO: 1381411 - DNA, 15 bp, Homo sapiens
tacagataaaatcta

SEQ ID NO: 1381412 - DNA, 15 bp, Homo sapiens
gtacagataaaatct

SEQ ID NO: 1381413 - DNA, 15 bp, Homo sapiens
agtacagataaaatc

SEQ ID NO: 1381414 - DNA, 15 bp, Homo sapiens
aagtacagataaaat

SEQ ID NO: 1381415 - DNA, 15 bp, Homo sapiens
gaagtacagataaaa

SEQ ID NO: 1381416 - DNA, 15 bp, Homo sapiens
agaagtacagataaa

SEQ ID NO: 1381417 - DNA, 15 bp, Homo sapiens
gagaagtacagataa

SEQ ID NO: 1381418 - DNA, 15 bp, Homo sapiens
agagaagtacagata

SEQ ID NO: 1381419 - DNA, 15 bp, Homo sapiens
aagagaagtacagat

SEQ ID NO: 1381420 - DNA, 15 bp, Homo sapiens
gaagagaagtacaga

SEQ ID NO: 1381421 - DNA, 15 bp, Homo sapiens
agaagagaagtacag

SEQ ID NO: 1381422 - DNA, 15 bp, Homo sapiens
cagaagagaagtaca

SEQ ID NO: 1381423 - DNA, 15 bp, Homo sapiens
tcagaagagaagtac

SEQ ID NO: 1381424 - DNA, 15 bp, Homo sapiens
ctcagaagagaagta

SEQ ID NO: 1381425 - DNA, 15 bp, Homo sapiens
tctcagaagagaagt

SEQ ID NO: 1381426 - DNA, 15 bp, Homo sapiens
atctcagaagagaag

SEQ ID NO: 1381427 - DNA, 15 bp, Homo sapiens
catctcagaagagaa

SEQ ID NO: 1381428 - DNA, 15 bp, Homo sapiens
acatctcagaagaga

SEQ ID NO: 1381429 - DNA, 15 bp, Homo sapiens
aacatctcagaagag

SEQ ID NO: 1381430 - DNA, 15 bp, Homo sapiens
aaacatctcagaaga

SEQ ID NO: 1381431 - DNA, 15 bp, Homo sapiens
gaaacatctcagaag

SEQ ID NO: 1381432 - DNA, 15 bp, Homo sapiens
tgaaacatctcagaa

SEQ ID NO: 1381433 - DNA, 15 bp, Homo sapiens
atgaaacatctcaga

SEQ ID NO: 1381434 - DNA, 15 bp, Homo sapiens
tatgaaacatctcag

SEQ ID NO: 1381435 - DNA, 15 bp, Homo sapiens
atatgaaacatctca

SEQ ID NO: 1381436 - DNA, 15 bp, Homo sapiens
aatatgaaacatctc

SEQ ID NO: 1381437 - DNA, 15 bp, Homo sapiens
gaatatgaaacatct

SEQ ID NO: 1381438 - DNA, 15 bp, Homo sapiens
agaatatgaaacatc

SEQ ID NO: 1381439 - DNA, 15 bp, Homo sapiens
cagaatatgaaacat

SEQ ID NO: 1381440 - DNA, 15 bp, Homo sapiens
acagaatatgaaaca

SEQ ID NO: 1381441 - DNA, 15 bp, Homo sapiens
cacagaatatgaaac

SEQ ID NO: 1381442 - DNA, 15 bp, Homo sapiens
acacagaatatgaaa

SEQ ID NO: 1381443 - DNA, 15 bp, Homo sapiens
aacacagaatatgaa

SEQ ID NO: 1381444 - DNA, 15 bp, Homo sapiens
taacacagaatatga

SEQ ID NO: 1381445 - DNA, 15 bp, Homo sapiens
ataacacagaatatg

SEQ ID NO: 1381446 - DNA, 15 bp, Homo sapiens
aataacacagaatat

SEQ ID NO: 1381447 - DNA, 15 bp, Homo sapiens
aaataacacagaata

SEQ ID NO: 1381448 - DNA, 15 bp, Homo sapiens
caaataacacagaat

SEQ ID NO: 1381449 - DNA, 15 bp, Homo sapiens
acaaataacacagaa

SEQ ID NO: 1381450 - DNA, 15 bp, Homo sapiens
cacaaataacacaga

SEQ ID NO: 1381451 - DNA, 15 bp, Homo sapiens
acacaaataacacag

SEQ ID NO: 1381452 - DNA, 15 bp, Homo sapiens
tacacaaataacaca

SEQ ID NO: 1381453 - DNA, 15 bp, Homo sapiens
ctacacaaataacac

SEQ ID NO: 1381454 - DNA, 15 bp, Homo sapiens
gctacacaaataaca

SEQ ID NO: 1381455 - DNA, 15 bp, Homo sapiens
ggctacacaaataac

SEQ ID NO: 1381456 - DNA, 15 bp, Homo sapiens
tggctacacaaataa

SEQ ID NO: 1381457 - DNA, 15 bp, Homo sapiens
atggctacacaaata

SEQ ID NO: 1381458 - DNA, 15 bp, Homo sapiens
gatggctacacaaat

SEQ ID NO: 1381459 - DNA, 15 bp, Homo sapiens
agatggctacacaaa

SEQ ID NO: 1381460 - DNA, 15 bp, Homo sapiens
gagatggctacacaa

SEQ ID NO: 1381461 - DNA, 15 bp, Homo sapiens
tgagatggctacaca

SEQ ID NO: 1381462 - DNA, 15 bp, Homo sapiens
atgagatggctacac

SEQ ID NO: 1381463 - DNA, 15 bp, Homo sapiens
aatgagatggctaca

SEQ ID NO: 1381464 - DNA, 15 bp, Homo sapiens
aaatgagatggctac

SEQ ID NO: 1381465 - DNA, 15 bp, Homo sapiens
aaaatgagatggcta

SEQ ID NO: 1381466 - DNA, 15 bp, Homo sapiens
gaaaatgagatggct

SEQ ID NO: 1381467 - DNA, 15 bp, Homo sapiens
ggaaaatgagatggc

SEQ ID NO: 1381468 - DNA, 15 bp, Homo sapiens
aggaaaatgagatgg

SEQ ID NO: 1381469 - DNA, 15 bp, Homo sapiens
caggaaaatgagatg

SEQ ID NO: 1381470 - DNA, 15 bp, Homo sapiens
acaggaaaatgagat

SEQ ID NO: 1381471 - DNA, 15 bp, Homo sapiens
gacaggaaaatgaga

SEQ ID NO: 1381472 - DNA, 15 bp, Homo sapiens
agacaggaaaatgag

SEQ ID NO: 1381473 - DNA, 15 bp, Homo sapiens
gagacaggaaaatga

SEQ ID NO: 1381474 - DNA, 15 bp, Homo sapiens
tgagacaggaaaatg

SEQ ID NO: 1381475 - DNA, 15 bp, Homo sapiens
ttgagacaggaaaat

SEQ ID NO: 1381476 - DNA, 15 bp, Homo sapiens
cttgagacaggaaaa

SEQ ID NO: 1381477 - DNA, 15 bp, Homo sapiens
ccttgagacaggaaa

SEQ ID NO: 1381478 - DNA, 15 bp, Homo sapiens
cccttgagacaggaa

SEQ ID NO: 1381479 - DNA, 15 bp, Homo sapiens
acccttgagacagga

SEQ ID NO: 1381480 - DNA, 15 bp, Homo sapiens
tacccttgagacagg

SEQ ID NO: 1381481 - DNA, 15 bp, Homo sapiens
ctacccttgagacag

SEQ ID NO: 1381482 - DNA, 15 bp, Homo sapiens
cctacccttgagaca

SEQ ID NO: 1381483 - DNA, 15 bp, Homo sapiens
tcctacccttgagac

SEQ ID NO: 1381484 - DNA, 15 bp, Homo sapiens
atcctacccttgaga

SEQ ID NO: 1381485 - DNA, 15 bp, Homo sapiens
gatcctacccttgag

SEQ ID NO: 1381486 - DNA, 15 bp, Homo sapiens
tgatcctacccttga

SEQ ID NO: 1381487 - DNA, 15 bp, Homo sapiens
ctgatcctacccttg

SEQ ID NO: 1381488 - DNA, 15 bp, Homo sapiens
actgatcctaccctt

SEQ ID NO: 1381489 - DNA, 15 bp, Homo sapiens
gactgatcctaccct

SEQ ID NO: 1381490 - DNA, 15 bp, Homo sapiens
agactgatcctaccc

SEQ ID NO: 1381491 - DNA, 15 bp, Homo sapiens
gagactgatcctacc

SEQ ID NO: 1381492 - DNA, 15 bp, Homo sapiens
tgagactgatcctac

SEQ ID NO: 1381493 - DNA, 15 bp, Homo sapiens
atgagactgatccta

SEQ ID NO: 1381494 - DNA, 15 bp, Homo sapiens
aatgagactgatcct

SEQ ID NO: 1381495 - DNA, 15 bp, Homo sapiens
taatgagactgatcc

SEQ ID NO: 1381496 - DNA, 15 bp, Homo sapiens
ataatgagactgatc

SEQ ID NO: 1381497 - DNA, 15 bp, Homo sapiens
gataatgagactgat

SEQ ID NO: 1381498 - DNA, 15 bp, Homo sapiens
tgataatgagactga

SEQ ID NO: 1381499 - DNA, 15 bp, Homo sapiens
atgataatgagactg

SEQ ID NO: 1381500 - DNA, 15 bp, Homo sapiens
catgataatgagact

SEQ ID NO: 1381501 - DNA, 15 bp, Homo sapiens
acatgataatgagac

SEQ ID NO: 1381502 - DNA, 15 bp, Homo sapiens
aacatgataatgaga

SEQ ID NO: 1381503 - DNA, 15 bp, Homo sapiens
taacatgataatgag

SEQ ID NO: 1381504 - DNA, 15 bp, Homo sapiens
ataacatgataatga

SEQ ID NO: 1381505 - DNA, 15 bp, Homo sapiens
aataacatgataatg

SEQ ID NO: 1381506 - DNA, 15 bp, Homo sapiens
aaataacatgataat

SEQ ID NO: 1381507 - DNA, 15 bp, Homo sapiens
aaaataacatgataa

SEQ ID NO: 1381508 - DNA, 15 bp, Homo sapiens
gaaaataacatgata

SEQ ID NO: 1381509 - DNA, 15 bp, Homo sapiens
agaaaataacatgat

SEQ ID NO: 1381510 - DNA, 15 bp, Homo sapiens
cagaaaataacatga

SEQ ID NO: 1381511 - DNA, 15 bp, Homo sapiens
gcagaaaataacatg

SEQ ID NO: 1381512 - DNA, 15 bp, Homo sapiens
ggcagaaaataacat

SEQ ID NO: 1381513 - DNA, 15 bp, Homo sapiens
gggcagaaaataaca

SEQ ID NO: 1381514 - DNA, 15 bp, Homo sapiens
ggggcagaaaataac

SEQ ID NO: 1381515 - DNA, 15 bp, Homo sapiens
gggggcagaaaataa

SEQ ID NO: 1381516 - DNA, 15 bp, Homo sapiens
tgggggcagaaaata

SEQ ID NO: 1381517 - DNA, 15 bp, Homo sapiens
ctgggggcagaaaat

SEQ ID NO: 1381518 - DNA, 15 bp, Homo sapiens
actgggggcagaaaa

SEQ ID NO: 1381519 - DNA, 15 bp, Homo sapiens
cactgggggcagaaa

SEQ ID NO: 1381520 - DNA, 15 bp, Homo sapiens
acactgggggcagaa

SEQ ID NO: 1381521 - DNA, 15 bp, Homo sapiens
gacactgggggcaga

SEQ ID NO: 1381522 - DNA, 15 bp, Homo sapiens
agacactgggggcag

SEQ ID NO: 1381523 - DNA, 15 bp, Homo sapiens
tagacactgggggca

SEQ ID NO: 1381524 - DNA, 15 bp, Homo sapiens
ctagacactgggggc

SEQ ID NO: 1381525 - DNA, 15 bp, Homo sapiens
actagacactggggg

SEQ ID NO: 1381526 - DNA, 15 bp, Homo sapiens
aactagacactgggg

SEQ ID NO: 1381527 - DNA, 15 bp, Homo sapiens
gaactagacactggg

SEQ ID NO: 1381528 - DNA, 15 bp, Homo sapiens
tgaactagacactgg

SEQ ID NO: 1381529 - DNA, 15 bp, Homo sapiens
ctgaactagacactg

SEQ ID NO: 1381530 - DNA, 15 bp, Homo sapiens
actgaactagacact

SEQ ID NO: 1381531 - DNA, 15 bp, Homo sapiens
cactgaactagacac

SEQ ID NO: 1381532 - DNA, 15 bp, Homo sapiens
acactgaactagaca

SEQ ID NO: 1381533 - DNA, 15 bp, Homo sapiens
tacactgaactagac

SEQ ID NO: 1381534 - DNA, 15 bp, Homo sapiens
atacactgaactaga

SEQ ID NO: 1381535 - DNA, 15 bp, Homo sapiens
catacactgaactag

SEQ ID NO: 1381536 - DNA, 15 bp, Homo sapiens
tcatacactgaacta

SEQ ID NO: 1381537 - DNA, 15 bp, Homo sapiens
atcatacactgaact

SEQ ID NO: 1381538 - DNA, 15 bp, Homo sapiens
tatcatacactgaac

SEQ ID NO: 1381539 - DNA, 15 bp, Homo sapiens
gtatcatacactgaa

SEQ ID NO: 1381540 - DNA, 15 bp, Homo sapiens
agtatcatacactga

SEQ ID NO: 1381541 - DNA, 15 bp, Homo sapiens
aagtatcatacactg

SEQ ID NO: 1381542 - DNA, 15 bp, Homo sapiens
aaagtatcatacact

SEQ ID NO: 1381543 - DNA, 15 bp, Homo sapiens
aaaagtatcatacac

SEQ ID NO: 1381544 - DNA, 15 bp, Homo sapiens
aaaaagtatcataca

SEQ ID NO: 1381545 - DNA, 15 bp, Homo sapiens
taaaaagtatcatac

SEQ ID NO: 1381546 - DNA, 15 bp, Homo sapiens
ataaaaagtatcata

SEQ ID NO: 1381547 - DNA, 15 bp, Homo sapiens
tataaaaagtatcat

SEQ ID NO: 1381548 - DNA, 15 bp, Homo sapiens
ttataaaaagtatca

SEQ ID NO: 1381549 - DNA, 15 bp, Homo sapiens
cttataaaaagtatc

SEQ ID NO: 1381550 - DNA, 15 bp, Homo sapiens
gcttataaaaagtat

SEQ ID NO: 1381551 - DNA, 15 bp, Homo sapiens
agcttataaaaagta

SEQ ID NO: 1381552 - DNA, 15 bp, Homo sapiens
tagcttataaaaagt

SEQ ID NO: 1381553 - DNA, 15 bp, Homo sapiens
ttagcttataaaaag

SEQ ID NO: 1381554 - DNA, 15 bp, Homo sapiens
atttagcttataaaa

SEQ ID NO: 1381555 - DNA, 15 bp, Homo sapiens
tatttagcttataaa

SEQ ID NO: 1381556 - DNA, 15 bp, Homo sapiens
atatttagcttataa

SEQ ID NO: 1381557 - DNA, 15 bp, Homo sapiens
tatatttagcttata

SEQ ID NO: 1381558 - DNA, 15 bp, Homo sapiens
atatatttagcttat

SEQ ID NO: 1381559 - DNA, 15 bp, Homo sapiens
aatatatttagctta

SEQ ID NO: 1381560 - DNA, 15 bp, Homo sapiens
aaatatatttagctt

SEQ ID NO: 1381561 - DNA, 15 bp, Homo sapiens
aaaatatatttagct

SEQ ID NO: 1381562 - DNA, 15 bp, Homo sapiens
taaaatatatttagc

SEQ ID NO: 1381563 - DNA, 15 bp, Homo sapiens
ctaaaatatatttag

SEQ ID NO: 1381564 - DNA, 15 bp, Homo sapiens
tctaaaatatattta

SEQ ID NO: 1381565 - DNA, 15 bp, Homo sapiens
atctaaaatatattt

SEQ ID NO: 1381566 - DNA, 15 bp, Homo sapiens
tatctaaaatatatt

SEQ ID NO: 1381567 - DNA, 15 bp, Homo sapiens
atatctaaaatatat

SEQ ID NO: 1381568 - DNA, 15 bp, Homo sapiens
aatatctaaaatata

SEQ ID NO: 1381569 - DNA, 15 bp, Homo sapiens
taatatctaaaatat

SEQ ID NO: 1381570 - DNA, 15 bp, Homo sapiens
ttaatatctaaaata

SEQ ID NO: 1381571 - DNA, 15 bp, Homo sapiens
attaatatctaaaat

SEQ ID NO: 1381572 - DNA, 15 bp, Homo sapiens
tattaatatctaaaa

SEQ ID NO: 1381573 - DNA, 15 bp, Homo sapiens
ttattaatatctaaa

SEQ ID NO: 1381574 - DNA, 15 bp, Homo sapiens
tttattaatatctaa

SEQ ID NO: 1381575 - DNA, 15 bp, Homo sapiens
atttattaatatcta

SEQ ID NO: 1381576 - DNA, 15 bp, Homo sapiens
catttattaatatct

SEQ ID NO: 1381577 - DNA, 15 bp, Homo sapiens
acatttattaatatc

SEQ ID NO: 1381578 - DNA, 15 bp, Homo sapiens
tacatttattaatat

SEQ ID NO: 1381579 - DNA, 15 bp, Homo sapiens
ctacatttattaata

SEQ ID NO: 1381580 - DNA, 15 bp, Homo sapiens
tctacatttattaat

SEQ ID NO: 1381581 - DNA, 15 bp, Homo sapiens
ctctacatttattaa

SEQ ID NO: 1381582 - DNA, 15 bp, Homo sapiens
gctctacatttatta

SEQ ID NO: 1381583 - DNA, 15 bp, Homo sapiens
tgctctacatttatt

SEQ ID NO: 1381584 - DNA, 15 bp, Homo sapiens
atgctctacatttat

SEQ ID NO: 1381585 - DNA, 15 bp, Homo sapiens
tatgctctacattta

SEQ ID NO: 1381586 - DNA, 15 bp, Homo sapiens
atatgctctacattt

SEQ ID NO: 1381587 - DNA, 15 bp, Homo sapiens
tatatgctctacatt

SEQ ID NO: 1381588 - DNA, 15 bp, Homo sapiens
atatatgctctacat

SEQ ID NO: 1381589 - DNA, 15 bp, Homo sapiens
catatatgctctaca

SEQ ID NO: 1381590 - DNA, 15 bp, Homo sapiens
tcatatatgctctac

SEQ ID NO: 1381591 - DNA, 15 bp, Homo sapiens
ttcatatatgctcta

SEQ ID NO: 1381592 - DNA, 15 bp, Homo sapiens
tttcatatatgctct

SEQ ID NO: 1381593 - DNA, 15 bp, Homo sapiens
ctttcatatatgctc

SEQ ID NO: 1381594 - DNA, 15 bp, Homo sapiens
tctttcatatatgct

SEQ ID NO: 1381595 - DNA, 15 bp, Homo sapiens
atctttcatatatgc

SEQ ID NO: 1381596 - DNA, 15 bp, Homo sapiens
catctttcatatatg

SEQ ID NO: 1381597 - DNA, 15 bp, Homo sapiens
acatctttcatatat

SEQ ID NO: 1381598 - DNA, 15 bp, Homo sapiens
aacatctttcatata

SEQ ID NO: 1381599 - DNA, 15 bp, Homo sapiens
aaacatctttcatat

SEQ ID NO: 1381600 - DNA, 15 bp, Homo sapiens
aaaacatctttcata

SEQ ID NO: 1381601 - DNA, 15 bp, Homo sapiens
taaaacatctttcat

SEQ ID NO: 1381602 - DNA, 15 bp, Homo sapiens
ctaaaacatctttca

SEQ ID NO: 1381603 - DNA, 15 bp, Homo sapiens
tctaaaacatctttc

SEQ ID NO: 1381604 - DNA, 15 bp, Homo sapiens
ttctaaaacatcttt

SEQ ID NO: 1381605 - DNA, 15 bp, Homo sapiens
attctaaaacatctt

SEQ ID NO: 1381606 - DNA, 15 bp, Homo sapiens
tattctaaaacatct

SEQ ID NO: 1381607 - DNA, 15 bp, Homo sapiens
atattctaaaacatc

SEQ ID NO: 1381608 - DNA, 15 bp, Homo sapiens
tatattctaaaacat

SEQ ID NO: 1381609 - DNA, 15 bp, Homo sapiens
ctatattctaaaaca

SEQ ID NO: 1381610 - DNA, 15 bp, Homo sapiens
tctatattctaaaac

SEQ ID NO: 1381611 - DNA, 15 bp, Homo sapiens
atctatattctaaaa

SEQ ID NO: 1381612 - DNA, 15 bp, Homo sapiens
catctatattctaaa

SEQ ID NO: 1381613 - DNA, 15 bp, Homo sapiens
acatctatattctaa

SEQ ID NO: 1381614 - DNA, 15 bp, Homo sapiens
aacatctatattcta

SEQ ID NO: 1381615 - DNA, 15 bp, Homo sapiens
taacatctatattct

SEQ ID NO: 1381616 - DNA, 15 bp, Homo sapiens
ataacatctatattc

SEQ ID NO: 1381617 - DNA, 15 bp, Homo sapiens
aataacatctatatt

SEQ ID NO: 1381618 - DNA, 15 bp, Homo sapiens
gaataacatctatat

SEQ ID NO: 1381619 - DNA, 15 bp, Homo sapiens
ggaataacatctata

SEQ ID NO: 1381620 - DNA, 15 bp, Homo sapiens
cggaataacatctat

SEQ ID NO: 1381621 - DNA, 15 bp, Homo sapiens
acggaataacatcta

SEQ ID NO: 1381622 - DNA, 15 bp, Homo sapiens
aacggaataacatct

SEQ ID NO: 1381623 - DNA, 15 bp, Homo sapiens
taacggaataacatc

SEQ ID NO: 1381624 - DNA, 15 bp, Homo sapiens
ataacggaataacat

SEQ ID NO: 1381625 - DNA, 15 bp, Homo sapiens
tataacggaataaca

SEQ ID NO: 1381626 - DNA, 15 bp, Homo sapiens
gtataacggaataac

SEQ ID NO: 1381627 - DNA, 15 bp, Homo sapiens
agtataacggaataa

SEQ ID NO: 1381628 - DNA, 15 bp, Homo sapiens
aagtataacggaata

SEQ ID NO: 1381629 - DNA, 15 bp, Homo sapiens
caagtataacggaat

SEQ ID NO: 1381630 - DNA, 15 bp, Homo sapiens
acaagtataacggaa

SEQ ID NO: 1381631 - DNA, 15 bp, Homo sapiens
aacaagtataacgga

SEQ ID NO: 1381632 - DNA, 15 bp, Homo sapiens
taacaagtataacgg

SEQ ID NO: 1381633 - DNA, 15 bp, Homo sapiens
ttaacaagtataacg

SEQ ID NO: 1381634 - DNA, 15 bp, Homo sapiens
attaacaagtataac

SEQ ID NO: 1381635 - DNA, 15 bp, Homo sapiens
tattaacaagtataa

SEQ ID NO: 1381636 - DNA, 15 bp, Homo sapiens
atattaacaagtata

SEQ ID NO: 1381637 - DNA, 15 bp, Homo sapiens
aatattaacaagtat

SEQ ID NO: 1381638 - DNA, 15 bp, Homo sapiens
gaatattaacaagta

SEQ ID NO: 1381639 - DNA, 15 bp, Homo sapiens
agaatattaacaagt

SEQ ID NO: 1381640 - DNA, 15 bp, Homo sapiens
aagaatattaacaag

SEQ ID NO: 1381641 - DNA, 15 bp, Homo sapiens
gaagaatattaacaa

SEQ ID NO: 1381642 - DNA, 15 bp, Homo sapiens
agaagaatattaaca

SEQ ID NO: 1381643 - DNA, 15 bp, Homo sapiens
aagaagaatattaac

SEQ ID NO: 1381644 - DNA, 15 bp, Homo sapiens
taagaagaatattaa

SEQ ID NO: 1381645 - DNA, 15 bp, Homo sapiens
gtaagaagaatatta

SEQ ID NO: 1381646 - DNA, 15 bp, Homo sapiens
tgtaagaagaatatt

SEQ ID NO: 1381647 - DNA, 15 bp, Homo sapiens
atgtaagaagaatat

SEQ ID NO: 1381648 - DNA, 15 bp, Homo sapiens
aatgtaagaagaata

SEQ ID NO: 1381649 - DNA, 15 bp, Homo sapiens
aaatgtaagaagaat

SEQ ID NO: 1381650 - DNA, 15 bp, Homo sapiens
gaaatgtaagaagaa

SEQ ID NO: 1381651 - DNA, 15 bp, Homo sapiens
agaaatgtaagaaga

SEQ ID NO: 1381652 - DNA, 15 bp, Homo sapiens
aagaaatgtaagaag

SEQ ID NO: 1381653 - DNA, 15 bp, Homo sapiens
taagaaatgtaagaa

SEQ ID NO: 1381654 - DNA, 15 bp, Homo sapiens
ctaagaaatgtaaga

SEQ ID NO: 1381655 - DNA, 15 bp, Homo sapiens
actaagaaatgtaag

SEQ ID NO: 1381656 - DNA, 15 bp, Homo sapiens
aactaagaaatgtaa

SEQ ID NO: 1381657 - DNA, 15 bp, Homo sapiens
taactaagaaatgta

SEQ ID NO: 1381658 - DNA, 15 bp, Homo sapiens
ataactaagaaatgt

SEQ ID NO: 1381659 - DNA, 15 bp, Homo sapiens
aataactaagaaatg

SEQ ID NO: 1381660 - DNA, 15 bp, Homo sapiens
aaataactaagaaat

SEQ ID NO: 1381661 - DNA, 15 bp, Homo sapiens
gaaataactaagaaa

SEQ ID NO: 1381662 - DNA, 15 bp, Homo sapiens
ggaaataactaagaa

SEQ ID NO: 1381663 - DNA, 15 bp, Homo sapiens
tggaaataactaaga

SEQ ID NO: 1381664 - DNA, 15 bp, Homo sapiens
atggaaataactaag

SEQ ID NO: 1381665 - DNA, 15 bp, Homo sapiens
catggaaataactaa

SEQ ID NO: 1381666 - DNA, 15 bp, Homo sapiens
gcatggaaataacta

SEQ ID NO: 1381667 - DNA, 15 bp, Homo sapiens
tgcatggaaataact

SEQ ID NO: 1381668 - DNA, 15 bp, Homo sapiens
atgcatggaaataac

SEQ ID NO: 1381669 - DNA, 15 bp, Homo sapiens
aatgcatggaaataa

SEQ ID NO: 1381670 - DNA, 15 bp, Homo sapiens
aaatgcatggaaata

SEQ ID NO: 1381671 - DNA, 15 bp, Homo sapiens
aaaatgcatggaaat

SEQ ID NO: 1381672 - DNA, 15 bp, Homo sapiens
taaaatgcatggaaa

SEQ ID NO: 1381673 - DNA, 15 bp, Homo sapiens
ctaaaatgcatggaa

SEQ ID NO: 1381674 - DNA, 15 bp, Homo sapiens
tctaaaatgcatgga

SEQ ID NO: 1381675 - DNA, 15 bp, Homo sapiens
atctaaaatgcatgg

SEQ ID NO: 1381676 - DNA, 15 bp, Homo sapiens
aatctaaaatgcatg

SEQ ID NO: 1381677 - DNA, 15 bp, Homo sapiens
aaatctaaaatgcat

SEQ ID NO: 1381678 - DNA, 15 bp, Homo sapiens
taaatctaaaatgca

SEQ ID NO: 1381679 - DNA, 15 bp, Homo sapiens
ttaaatctaaaatgc

SEQ ID NO: 1381680 - DNA, 15 bp, Homo sapiens
gttaaatctaaaatg

SEQ ID NO: 1381681 - DNA, 15 bp, Homo sapiens
tgttaaatctaaaat

SEQ ID NO: 1381682 - DNA, 15 bp, Homo sapiens
ttgttaaatctaaaa

SEQ ID NO: 1381683 - DNA, 15 bp, Homo sapiens
attgttaaatctaaa

SEQ ID NO: 1381684 - DNA, 15 bp, Homo sapiens
aattgttaaatctaa

SEQ ID NO: 1381685 - DNA, 15 bp, Homo sapiens
taattgttaaatcta

SEQ ID NO: 1381686 - DNA, 15 bp, Homo sapiens
ataattgttaaatct

SEQ ID NO: 1381687 - DNA, 15 bp, Homo sapiens
gataattgttaaatc

SEQ ID NO: 1381688 - DNA, 15 bp, Homo sapiens
agataattgttaaat

SEQ ID NO: 1381689 - DNA, 15 bp, Homo sapiens
cagataattgttaaa

SEQ ID NO: 1381690 - DNA, 15 bp, Homo sapiens
acagataattgttaa

SEQ ID NO: 1381691 - DNA, 15 bp, Homo sapiens
aacagataattgtta

SEQ ID NO: 1381692 - DNA, 15 bp, Homo sapiens
gaacagataattgtt

SEQ ID NO: 1381693 - DNA, 15 bp, Homo sapiens
tgaacagataattgt

SEQ ID NO: 1381694 - DNA, 15 bp, Homo sapiens
ttgaacagataattg

SEQ ID NO: 1381695 - DNA, 15 bp, Homo sapiens
tttgaacagataatt

SEQ ID NO: 1381696 - DNA, 15 bp, Homo sapiens
gtttgaacagataat

SEQ ID NO: 1381697 - DNA, 15 bp, Homo sapiens
tgtttgaacagataa

SEQ ID NO: 1381698 - DNA, 15 bp, Homo sapiens
ctgtttgaacagata

SEQ ID NO: 1381699 - DNA, 15 bp, Homo sapiens
actgtttgaacagat

SEQ ID NO: 1381700 - DNA, 15 bp, Homo sapiens
aactgtttgaacaga

SEQ ID NO: 1381701 - DNA, 15 bp, Homo sapiens
caactgtttgaacag

SEQ ID NO: 1381702 - DNA, 15 bp, Homo sapiens
tcaactgtttgaaca

SEQ ID NO: 1381703 - DNA, 15 bp, Homo sapiens
atcaactgtttgaac

SEQ ID NO: 1381704 - DNA, 15 bp, Homo sapiens
aatcaactgtttgaa

SEQ ID NO: 1381705 - DNA, 15 bp, Homo sapiens
taatcaactgtttga

SEQ ID NO: 1381706 - DNA, 15 bp, Homo sapiens
ataatcaactgtttg

SEQ ID NO: 1381707 - DNA, 15 bp, Homo sapiens
aataatcaactgttt

SEQ ID NO: 1381708 - DNA, 15 bp, Homo sapiens
caataatcaactgtt

SEQ ID NO: 1381709 - DNA, 15 bp, Homo sapiens
acaataatcaactgt

SEQ ID NO: 1381710 - DNA, 15 bp, Homo sapiens
cacaataatcaactg

SEQ ID NO: 1381711 - DNA, 15 bp, Homo sapiens
tcacaataatcaact

SEQ ID NO: 1381712 - DNA, 15 bp, Homo sapiens
ctcacaataatcaac

SEQ ID NO: 1381713 - DNA, 15 bp, Homo sapiens
actcacaataatcaa

SEQ ID NO: 1381714 - DNA, 15 bp, Homo sapiens
tactcacaataatca

SEQ ID NO: 1381715 - DNA, 15 bp, Homo sapiens
atactcacaataatc

SEQ ID NO: 1381716 - DNA, 15 bp, Homo sapiens
aatactcacaataat

SEQ ID NO: 1381717 - DNA, 15 bp, Homo sapiens
aaatactcacaataa

SEQ ID NO: 1381718 - DNA, 15 bp, Homo sapiens
aaaatactcacaata

SEQ ID NO: 1381719 - DNA, 15 bp, Homo sapiens
caaaatactcacaat

SEQ ID NO: 1381720 - DNA, 15 bp, Homo sapiens
tcaaaatactcacaa

SEQ ID NO: 1381721 - DNA, 15 bp, Homo sapiens
ttcaaaatactcaca

SEQ ID NO: 1381722 - DNA, 15 bp, Homo sapiens
gttcaaaatactcac

SEQ ID NO: 1381723 - DNA, 15 bp, Homo sapiens
ggttcaaaatactca

SEQ ID NO: 1381724 - DNA, 15 bp, Homo sapiens
gggttcaaaatactc

SEQ ID NO: 1381725 - DNA, 15 bp, Homo sapiens
agggttcaaaatact

SEQ ID NO: 1381726 - DNA, 15 bp, Homo sapiens
aagggttcaaaatac

SEQ ID NO: 1381727 - DNA, 15 bp, Homo sapiens
aaagggttcaaaata

SEQ ID NO: 1381728 - DNA, 15 bp, Homo sapiens
aaaagggttcaaaat

SEQ ID NO: 1381729 - DNA, 15 bp, Homo sapiens
taaaagggttcaaaa

SEQ ID NO: 1381730 - DNA, 15 bp, Homo sapiens
ataaaagggttcaaa

SEQ ID NO: 1381731 - DNA, 15 bp, Homo sapiens
aataaaagggttcaa

SEQ ID NO: 1381732 - DNA, 15 bp, Homo sapiens
taataaaagggttca

SEQ ID NO: 1381733 - DNA, 15 bp, Homo sapiens
ctaataaaagggttc

SEQ ID NO: 1381734 - DNA, 15 bp, Homo sapiens
cctaataaaagggtt

SEQ ID NO: 1381735 - DNA, 15 bp, Homo sapiens
acctaataaaagggt

SEQ ID NO: 1381736 - DNA, 15 bp, Homo sapiens
aacctaataaaaggg

SEQ ID NO: 1381737 - DNA, 15 bp, Homo sapiens
gaacctaataaaagg

SEQ ID NO: 1381738 - DNA, 15 bp, Homo sapiens
ggaacctaataaaag

SEQ ID NO: 1381739 - DNA, 15 bp, Homo sapiens
tggaacctaataaaa

SEQ ID NO: 1381740 - DNA, 15 bp, Homo sapiens
ctggaacctaataaa

SEQ ID NO: 1381741 - DNA, 15 bp, Homo sapiens
gctggaacctaataa

SEQ ID NO: 1381742 - DNA, 15 bp, Homo sapiens
tgctggaacctaata

SEQ ID NO: 1381743 - DNA, 15 bp, Homo sapiens
gtgctggaacctaat

SEQ ID NO: 1381744 - DNA, 15 bp, Homo sapiens
tgtgctggaacctaa

SEQ ID NO: 1381745 - DNA, 15 bp, Homo sapiens
atgtgctggaaccta

SEQ ID NO: 1381746 - DNA, 15 bp, Homo sapiens
aatgtgctggaacct

SEQ ID NO: 1381747 - DNA, 15 bp, Homo sapiens
taatgtgctggaacc

SEQ ID NO: 1381748 - DNA, 15 bp, Homo sapiens
ttaatgtgctggaac

SEQ ID NO: 1381749 - DNA, 15 bp, Homo sapiens
cttaatgtgctggaa

SEQ ID NO: 1381750 - DNA, 15 bp, Homo sapiens
acttaatgtgctgga

SEQ ID NO: 1381751 - DNA, 15 bp, Homo sapiens
tacttaatgtgctgg

SEQ ID NO: 1381752 - DNA, 15 bp, Homo sapiens
ttacttaatgtgctg

SEQ ID NO: 1381753 - DNA, 15 bp, Homo sapiens
gttacttaatgtgct

SEQ ID NO: 1381754 - DNA, 15 bp, Homo sapiens
cgttacttaatgtgc

SEQ ID NO: 1381755 - DNA, 15 bp, Homo sapiens
tcgttacttaatgtg

SEQ ID NO: 1381756 - DNA, 15 bp, Homo sapiens
ttcgttacttaatgt

SEQ ID NO: 1381757 - DNA, 15 bp, Homo sapiens
attcgttacttaatg

SEQ ID NO: 1381758 - DNA, 15 bp, Homo sapiens
aattcgttacttaat

SEQ ID NO: 1381759 - DNA, 15 bp, Homo sapiens
caattcgttacttaa

SEQ ID NO: 1381760 - DNA, 15 bp, Homo sapiens
gcaattcgttactta

SEQ ID NO: 1381761 - DNA, 15 bp, Homo sapiens
ggcaattcgttactt

SEQ ID NO: 1381762 - DNA, 15 bp, Homo sapiens
cggcaattcgttact

SEQ ID NO: 1381763 - DNA, 15 bp, Homo sapiens
acggcaattcgttac

SEQ ID NO: 1381764 - DNA, 15 bp, Homo sapiens
tacggcaattcgtta

SEQ ID NO: 1381765 - DNA, 15 bp, Homo sapiens
atacggcaattcgtt

SEQ ID NO: 1381766 - DNA, 15 bp, Homo sapiens
aatacggcaattcgt

SEQ ID NO: 1381767 - DNA, 15 bp, Homo sapiens
gaatacggcaattcg

SEQ ID NO: 1381768 - DNA, 15 bp, Homo sapiens
tgaatacggcaattc

SEQ ID NO: 1381769 - DNA, 15 bp, Homo sapiens
ctgaatacggcaatt

SEQ ID NO: 1381770 - DNA, 15 bp, Homo sapiens
gctgaatacggcaat

SEQ ID NO: 1381771 - DNA, 15 bp, Homo sapiens
agctgaatacggcaa

SEQ ID NO: 1381772 - DNA, 15 bp, Homo sapiens
aagctgaatacggca

SEQ ID NO: 1381773 - DNA, 15 bp, Homo sapiens
aaagctgaatacggc

SEQ ID NO: 1381774 - DNA, 15 bp, Homo sapiens
caaagctgaatacgg

SEQ ID NO: 1381775 - DNA, 15 bp, Homo sapiens
acaaagctgaatacg

SEQ ID NO: 1381776 - DNA, 15 bp, Homo sapiens
tacaaagctgaatac

SEQ ID NO: 1381777 - DNA, 15 bp, Homo sapiens
ctacaaagctgaata

SEQ ID NO: 1381778 - DNA, 15 bp, Homo sapiens
gctacaaagctgaat

SEQ ID NO: 1381779 - DNA, 15 bp, Homo sapiens
tgctacaaagctgaa

SEQ ID NO: 1381780 - DNA, 15 bp, Homo sapiens
atgctacaaagctga

SEQ ID NO: 1381781 - DNA, 15 bp, Homo sapiens
catgctacaaagctg

SEQ ID NO: 1381782 - DNA, 15 bp, Homo sapiens
acatgctacaaagct

SEQ ID NO: 1381783 - DNA, 15 bp, Homo sapiens
tacatgctacaaagc

SEQ ID NO: 1381784 - DNA, 15 bp, Homo sapiens
ttacatgctacaaag

SEQ ID NO: 1381785 - DNA, 15 bp, Homo sapiens
attacatgctacaaa

SEQ ID NO: 1381786 - DNA, 15 bp, Homo sapiens
gattacatgctacaa

SEQ ID NO: 1381787 - DNA, 15 bp, Homo sapiens
agattacatgctaca

SEQ ID NO: 1381788 - DNA, 15 bp, Homo sapiens
aagattacatgctac

SEQ ID NO: 1381789 - DNA, 15 bp, Homo sapiens
gaagattacatgcta

SEQ ID NO: 1381790 - DNA, 15 bp, Homo sapiens
ggaagattacatgct

SEQ ID NO: 1381791 - DNA, 15 bp, Homo sapiens
tggaagattacatgc

SEQ ID NO: 1381792 - DNA, 15 bp, Homo sapiens
ttggaagattacatg

SEQ ID NO: 1381793 - DNA, 15 bp, Homo sapiens
tttggaagattacat

SEQ ID NO: 1381794 - DNA, 15 bp, Homo sapiens
atttggaagattaca

SEQ ID NO: 1381795 - DNA, 15 bp, Homo sapiens
gatttggaagattac

SEQ ID NO: 1381796 - DNA, 15 bp, Homo sapiens
agatttggaagatta

SEQ ID NO: 1381797 - DNA, 15 bp, Homo sapiens
aagatttggaagatt

SEQ ID NO: 1381798 - DNA, 15 bp, Homo sapiens
taagatttggaagat

SEQ ID NO: 1381799 - DNA, 15 bp, Homo sapiens
gtaagatttggaaga

SEQ ID NO: 1381800 - DNA, 15 bp, Homo sapiens
agtaagatttggaag

SEQ ID NO: 1381801 - DNA, 15 bp, Homo sapiens
tagtaagatttggaa

SEQ ID NO: 1381802 - DNA, 15 bp, Homo sapiens
atagtaagatttgga

SEQ ID NO: 1381803 - DNA, 15 bp, Homo sapiens
aatagtaagatttgg

SEQ ID NO: 1381804 - DNA, 15 bp, Homo sapiens
taatagtaagatttg

SEQ ID NO: 1381805 - DNA, 15 bp, Homo sapiens
ttaatagtaagattt

SEQ ID NO: 1381806 - DNA, 15 bp, Homo sapiens
tttaatagtaagatt

SEQ ID NO: 1381807 - DNA, 15 bp, Homo sapiens
ctttaatagtaagat

SEQ ID NO: 1381808 - DNA, 15 bp, Homo sapiens
actttaatagtaaga

SEQ ID NO: 1381809 - DNA, 15 bp, Homo sapiens
aactttaatagtaag

SEQ ID NO: 1381810 - DNA, 15 bp, Homo sapiens
aaactttaatagtaa

SEQ ID NO: 1381811 - DNA, 15 bp, Homo sapiens
gaaactttaatagta

SEQ ID NO: 1381812 - DNA, 15 bp, Homo sapiens
agaaactttaatagt

SEQ ID NO: 1381813 - DNA, 15 bp, Homo sapiens
cagaaactttaatag

SEQ ID NO: 1381814 - DNA, 15 bp, Homo sapiens
acagaaactttaata

SEQ ID NO: 1381815 - DNA, 15 bp, Homo sapiens
tacagaaactttaat

SEQ ID NO: 1381816 - DNA, 15 bp, Homo sapiens
ttacagaaactttaa

SEQ ID NO: 1381817 - DNA, 15 bp, Homo sapiens
attacagaaacttta

SEQ ID NO: 1381818 - DNA, 15 bp, Homo sapiens
tattacagaaacttt

SEQ ID NO: 1381819 - DNA, 15 bp, Homo sapiens
atattacagaaactt

SEQ ID NO: 1381820 - DNA, 15 bp, Homo sapiens
aatattacagaaact

SEQ ID NO: 1381821 - DNA, 15 bp, Homo sapiens
aaatattacagaaac

SEQ ID NO: 1381822 - DNA, 15 bp, Homo sapiens
aaaatattacagaaa

SEQ ID NO: 1381823 - DNA, 15 bp, Homo sapiens
aaaaatattacagaa

SEQ ID NO: 1381824 - DNA, 15 bp, Homo sapiens
aaaaaatattacaga

SEQ ID NO: 1381825 - DNA, 15 bp, Homo sapiens
caaaaaatattacag

SEQ ID NO: 1381826 - DNA, 15 bp, Homo sapiens
ccaaaaaatattaca

SEQ ID NO: 1381827 - DNA, 15 bp, Homo sapiens
accaaaaaatattac

SEQ ID NO: 1381828 - DNA, 15 bp, Homo sapiens
taccaaaaaatatta

SEQ ID NO: 1381829 - DNA, 15 bp, Homo sapiens
ataccaaaaaatatt

SEQ ID NO: 1381830 - DNA, 15 bp, Homo sapiens
tataccaaaaaatat

SEQ ID NO: 1381831 - DNA, 15 bp, Homo sapiens
ttataccaaaaaata

SEQ ID NO: 1381832 - DNA, 15 bp, Homo sapiens
gttataccaaaaaat

SEQ ID NO: 1381833 - DNA, 15 bp, Homo sapiens
agttataccaaaaaa

SEQ ID NO: 1381834 - DNA, 15 bp, Homo sapiens
aagttataccaaaaa

SEQ ID NO: 1381835 - DNA, 15 bp, Homo sapiens
gaagttataccaaaa

SEQ ID NO: 1381836 - DNA, 15 bp, Homo sapiens
ggaagttataccaaa

SEQ ID NO: 1381837 - DNA, 15 bp, Homo sapiens
tggaagttataccaa

SEQ ID NO: 1381838 - DNA, 15 bp, Homo sapiens
ctggaagttatacca

SEQ ID NO: 1381839 - DNA, 15 bp, Homo sapiens
actggaagttatacc

SEQ ID NO: 1381840 - DNA, 15 bp, Homo sapiens
tactggaagttatac

SEQ ID NO: 1381841 - DNA, 15 bp, Homo sapiens
atactggaagttata

SEQ ID NO: 1381842 - DNA, 15 bp, Homo sapiens
tatactggaagttat

SEQ ID NO: 1381843 - DNA, 15 bp, Homo sapiens
ctatactggaagtta

SEQ ID NO: 1381844 - DNA, 15 bp, Homo sapiens
cctatactggaagtt

SEQ ID NO: 1381845 - DNA, 15 bp, Homo sapiens
tcctatactggaagt

SEQ ID NO: 1381846 - DNA, 15 bp, Homo sapiens
ttcctatactggaag

SEQ ID NO: 1381847 - DNA, 15 bp, Homo sapiens
cttcctatactggaa

SEQ ID NO: 1381848 - DNA, 15 bp, Homo sapiens
tcttcctatactgga

SEQ ID NO: 1381849 - DNA, 15 bp, Homo sapiens
ctcttcctatactgg

SEQ ID NO: 1381850 - DNA, 15 bp, Homo sapiens
actcttcctatactg

SEQ ID NO: 1381851 - DNA, 15 bp, Homo sapiens
tactcttcctatact

SEQ ID NO: 1381852 - DNA, 15 bp, Homo sapiens
ttactcttcctatac

SEQ ID NO: 1381853 - DNA, 15 bp, Homo sapiens
tttactcttcctata

SEQ ID NO: 1381854 - DNA, 15 bp, Homo sapiens
atttactcttcctat

SEQ ID NO: 1381855 - DNA, 15 bp, Homo sapiens
catttactcttccta

SEQ ID NO: 1381856 - DNA, 15 bp, Homo sapiens
tcatttactcttcct

SEQ ID NO: 1381857 - DNA, 15 bp, Homo sapiens
ctcatttactcttcc

SEQ ID NO: 1381858 - DNA, 15 bp, Homo sapiens
tctcatttactcttc

SEQ ID NO: 1381859 - DNA, 15 bp, Homo sapiens
ttctcatttactctt

SEQ ID NO: 1381860 - DNA, 15 bp, Homo sapiens
cttctcatttactct

SEQ ID NO: 1381861 - DNA, 15 bp, Homo sapiens
gcttctcatttactc

SEQ ID NO: 1381862 - DNA, 15 bp, Homo sapiens
agcttctcatttact

SEQ ID NO: 1381863 - DNA, 15 bp, Homo sapiens
tagcttctcatttac

SEQ ID NO: 1381864 - DNA, 15 bp, Homo sapiens
ctagcttctcattta

SEQ ID NO: 1381865 - DNA, 15 bp, Homo sapiens
actagcttctcattt

SEQ ID NO: 1381866 - DNA, 15 bp, Homo sapiens
cactagcttctcatt

SEQ ID NO: 1381867 - DNA, 15 bp, Homo sapiens
tcactagcttctcat

SEQ ID NO: 1381868 - DNA, 15 bp, Homo sapiens
ttcactagcttctca

SEQ ID NO: 1381869 - DNA, 15 bp, Homo sapiens
gttcactagcttctc

SEQ ID NO: 1381870 - DNA, 15 bp, Homo sapiens
tgttcactagcttct

SEQ ID NO: 1381871 - DNA, 15 bp, Homo sapiens
ttgttcactagcttc

SEQ ID NO: 1381872 - DNA, 15 bp, Homo sapiens
tttgttcactagctt

SEQ ID NO: 1381873 - DNA, 15 bp, Homo sapiens
atttgttcactagct

SEQ ID NO: 1381874 - DNA, 15 bp, Homo sapiens
aatttgttcactagc

SEQ ID NO: 1381875 - DNA, 15 bp, Homo sapiens
gaatttgttcactag

SEQ ID NO: 1381876 - DNA, 15 bp, Homo sapiens
ggaatttgttcacta

SEQ ID NO: 1381877 - DNA, 15 bp, Homo sapiens
gggaatttgttcact

SEQ ID NO: 1381878 - DNA, 15 bp, Homo sapiens
ggggaatttgttcac

SEQ ID NO: 1381879 - DNA, 15 bp, Homo sapiens
aggggaatttgttca

SEQ ID NO: 1381880 - DNA, 15 bp, Homo sapiens
aaggggaatttgttc

SEQ ID NO: 1381881 - DNA, 15 bp, Homo sapiens
taaggggaatttgtt

SEQ ID NO: 1381882 - DNA, 15 bp, Homo sapiens
ttaaggggaatttgt

SEQ ID NO: 1381883 - DNA, 15 bp, Homo sapiens
cttaaggggaatttg

SEQ ID NO: 1381884 - DNA, 15 bp, Homo sapiens
tcttaaggggaattt

SEQ ID NO: 1381885 - DNA, 15 bp, Homo sapiens
atcttaaggggaatt

SEQ ID NO: 1381886 - DNA, 15 bp, Homo sapiens
tatcttaaggggaat

SEQ ID NO: 1381887 - DNA, 15 bp, Homo sapiens
ttatcttaaggggaa

SEQ ID NO: 1381888 - DNA, 15 bp, Homo sapiens
attatcttaagggga

SEQ ID NO: 1381889 - DNA, 15 bp, Homo sapiens
cattatcttaagggg

SEQ ID NO: 1381890 - DNA, 15 bp, Homo sapiens
ccattatcttaaggg

SEQ ID NO: 1381891 - DNA, 15 bp, Homo sapiens
tccattatcttaagg

SEQ ID NO: 1381892 - DNA, 15 bp, Homo sapiens
ttccattatcttaag

SEQ ID NO: 1381893 - DNA, 15 bp, Homo sapiens
tttccattatcttaa

SEQ ID NO: 1381894 - DNA, 15 bp, Homo sapiens
ttttccattatctta

SEQ ID NO: 1381895 - DNA, 15 bp, Homo sapiens
cttttccattatctt

SEQ ID NO: 1381896 - DNA, 15 bp, Homo sapiens
acttttccattatct

SEQ ID NO: 1381897 - DNA, 15 bp, Homo sapiens
gacttttccattatc

SEQ ID NO: 1381898 - DNA, 15 bp, Homo sapiens
ggacttttccattat

SEQ ID NO: 1381899 - DNA, 15 bp, Homo sapiens
aggacttttccatta

SEQ ID NO: 1381900 - DNA, 15 bp, Homo sapiens
taggacttttccatt

SEQ ID NO: 1381901 - DNA, 15 bp, Homo sapiens
ctaggacttttccat

SEQ ID NO: 1381902 - DNA, 15 bp, Homo sapiens
gctaggacttttcca

SEQ ID NO: 1381903 - DNA, 15 bp, Homo sapiens
tgctaggacttttcc

SEQ ID NO: 1381904 - DNA, 15 bp, Homo sapiens
gtgctaggacttttc

SEQ ID NO: 1381905 - DNA, 15 bp, Homo sapiens
tgtgctaggactttt

SEQ ID NO: 1381906 - DNA, 15 bp, Homo sapiens
atgtgctaggacttt

SEQ ID NO: 1381907 - DNA, 15 bp, Homo sapiens
aatgtgctaggactt

SEQ ID NO: 1381908 - DNA, 15 bp, Homo sapiens
aaatgtgctaggact

SEQ ID NO: 1381909 - DNA, 15 bp, Homo sapiens
aaaatgtgctaggac

SEQ ID NO: 1381910 - DNA, 15 bp, Homo sapiens
caaaatgtgctagga

SEQ ID NO: 1381911 - DNA, 15 bp, Homo sapiens
gcaaaatgtgctagg

SEQ ID NO: 1381912 - DNA, 15 bp, Homo sapiens
tgcaaaatgtgctag

SEQ ID NO: 1381913 - DNA, 15 bp, Homo sapiens
atgcaaaatgtgcta

SEQ ID NO: 1381914 - DNA, 15 bp, Homo sapiens
catgcaaaatgtgct

SEQ ID NO: 1381915 - DNA, 15 bp, Homo sapiens
ccatgcaaaatgtgc

SEQ ID NO: 1381916 - DNA, 15 bp, Homo sapiens
gccatgcaaaatgtg

SEQ ID NO: 1381917 - DNA, 15 bp, Homo sapiens
agccatgcaaaatgt

SEQ ID NO: 1381918 - DNA, 15 bp, Homo sapiens
cagccatgcaaaatg

SEQ ID NO: 1381919 - DNA, 15 bp, Homo sapiens
tcagccatgcaaaat

SEQ ID NO: 1381920 - DNA, 15 bp, Homo sapiens
atcagccatgcaaaa

SEQ ID NO: 1381921 - DNA, 15 bp, Homo sapiens
catcagccatgcaaa

SEQ ID NO: 1381922 - DNA, 15 bp, Homo sapiens
gcatcagccatgcaa

SEQ ID NO: 1381923 - DNA, 15 bp, Homo sapiens
agcatcagccatgca

SEQ ID NO: 1381924 - DNA, 15 bp, Homo sapiens
cagcatcagccatgc

SEQ ID NO: 1381925 - DNA, 15 bp, Homo sapiens
acagcatcagccatg

SEQ ID NO: 1381926 - DNA, 15 bp, Homo sapiens
cacagcatcagccat

SEQ ID NO: 1381927 - DNA, 15 bp, Homo sapiens
tcacagcatcagcca

SEQ ID NO: 1381928 - DNA, 15 bp, Homo sapiens
ttcacagcatcagcc

SEQ ID NO: 1381929 - DNA, 15 bp, Homo sapiens
cttcacagcatcagc

SEQ ID NO: 1381930 - DNA, 15 bp, Homo sapiens
tcttcacagcatcag

SEQ ID NO: 1381931 - DNA, 15 bp, Homo sapiens
ctcttcacagcatca

SEQ ID NO: 1381932 - DNA, 15 bp, Homo sapiens
gctcttcacagcatc

SEQ ID NO: 1381933 - DNA, 15 bp, Homo sapiens
ggctcttcacagcat

SEQ ID NO: 1381934 - DNA, 15 bp, Homo sapiens
gggctcttcacagca

SEQ ID NO: 1381935 - DNA, 15 bp, Homo sapiens
agggctcttcacagc

SEQ ID NO: 1381936 - DNA, 15 bp, Homo sapiens
aagggctcttcacag

SEQ ID NO: 1381937 - DNA, 15 bp, Homo sapiens
aaagggctcttcaca

SEQ ID NO: 1381938 - DNA, 15 bp, Homo sapiens
caaagggctcttcac

SEQ ID NO: 1381939 - DNA, 15 bp, Homo sapiens
ccaaagggctcttca

SEQ ID NO: 1381940 - DNA, 15 bp, Homo sapiens
tccaaagggctcttc

SEQ ID NO: 1381941 - DNA, 15 bp, Homo sapiens
ctccaaagggctctt

SEQ ID NO: 1381942 - DNA, 15 bp, Homo sapiens
actccaaagggctct

SEQ ID NO: 1381943 - DNA, 15 bp, Homo sapiens
tactccaaagggctc

SEQ ID NO: 1381944 - DNA, 15 bp, Homo sapiens
gtactccaaagggct

SEQ ID NO: 1381945 - DNA, 15 bp, Homo sapiens
agtactccaaagggc

SEQ ID NO: 1381946 - DNA, 15 bp, Homo sapiens
gagtactccaaaggg

SEQ ID NO: 1381947 - DNA, 15 bp, Homo sapiens
ggagtactccaaagg

SEQ ID NO: 1381948 - DNA, 15 bp, Homo sapiens
tggagtactccaaag

SEQ ID NO: 1381949 - DNA, 15 bp, Homo sapiens
ctggagtactccaaa

SEQ ID NO: 1381950 - DNA, 15 bp, Homo sapiens
actggagtactccaa

SEQ ID NO: 1381951 - DNA, 15 bp, Homo sapiens
tactggagtactcca

SEQ ID NO: 1381952 - DNA, 15 bp, Homo sapiens
atactggagtactcc

SEQ ID NO: 1381953 - DNA, 15 bp, Homo sapiens
catactggagtactc

SEQ ID NO: 1381954 - DNA, 15 bp, Homo sapiens
tcatactggagtact

SEQ ID NO: 1381955 - DNA, 15 bp, Homo sapiens
ttcatactggagtac

SEQ ID NO: 1381956 - DNA, 15 bp, Homo sapiens
cttcatactggagta

SEQ ID NO: 1381957 - DNA, 15 bp, Homo sapiens
tcttcatactggagt

SEQ ID NO: 1381958 - DNA, 15 bp, Homo sapiens
gtcttcatactggag

SEQ ID NO: 1381959 - DNA, 15 bp, Homo sapiens
tgtcttcatactgga

SEQ ID NO: 1381960 - DNA, 15 bp, Homo sapiens
ttgtcttcatactgg

SEQ ID NO: 1381961 - DNA, 15 bp, Homo sapiens
cttgtcttcatactg

SEQ ID NO: 1381962 - DNA, 15 bp, Homo sapiens
tcttgtcttcatact

SEQ ID NO: 1381963 - DNA, 15 bp, Homo sapiens
ttcttgtcttcatac

SEQ ID NO: 1381964 - DNA, 15 bp, Homo sapiens
gttcttgtcttcata

SEQ ID NO: 1381965 - DNA, 15 bp, Homo sapiens
tgttcttgtcttcat

SEQ ID NO: 1381966 - DNA, 15 bp, Homo sapiens
ttgttcttgtcttca

SEQ ID NO: 1381967 - DNA, 15 bp, Homo sapiens
tttgttcttgtcttc

SEQ ID NO: 1381968 - DNA, 15 bp, Homo sapiens
atttgttcttgtctt

SEQ ID NO: 1381969 - DNA, 15 bp, Homo sapiens
catttgttcttgtct

SEQ ID NO: 1381970 - DNA, 15 bp, Homo sapiens
ccatttgttcttgtc

SEQ ID NO: 1381971 - DNA, 15 bp, Homo sapiens
cccatttgttcttgt

SEQ ID NO: 1381972 - DNA, 15 bp, Homo sapiens
tcccatttgttcttg

SEQ ID NO: 1381973 - DNA, 15 bp, Homo sapiens
ctcccatttgttctt

SEQ ID NO: 1381974 - DNA, 15 bp, Homo sapiens
actcccatttgttct

SEQ ID NO: 1381975 - DNA, 15 bp, Homo sapiens
cactcccatttgttc

SEQ ID NO: 1381976 - DNA, 15 bp, Homo sapiens
acactcccatttgtt

SEQ ID NO: 1381977 - DNA, 15 bp, Homo sapiens
gacactcccatttgt

SEQ ID NO: 1381978 - DNA, 15 bp, Homo sapiens
ggacactcccatttg

SEQ ID NO: 1381979 - DNA, 15 bp, Homo sapiens
aggacactcccattt

SEQ ID NO: 1381980 - DNA, 15 bp, Homo sapiens
aaggacactcccatt

SEQ ID NO: 1381981 - DNA, 15 bp, Homo sapiens
gtccatccccacctc

SEQ ID NO: 1381982 - DNA, 15 bp, Homo sapiens
ggtccatccccacct

SEQ ID NO: 1381983 - DNA, 15 bp, Homo sapiens
tggtccatccccacc

SEQ ID NO: 1381984 - DNA, 15 bp, Homo sapiens
atggtccatccccac

SEQ ID NO: 1381985 - DNA, 15 bp, Homo sapiens
aatggtccatcccca

SEQ ID NO: 1381986 - DNA, 15 bp, Homo sapiens
caatggtccatcccc

SEQ ID NO: 1381987 - DNA, 15 bp, Homo sapiens
ccaatggtccatccc

SEQ ID NO: 1381988 - DNA, 15 bp, Homo sapiens
gccaatggtccatcc

SEQ ID NO: 1381989 - DNA, 15 bp, Homo sapiens
agccaatggtccatc

SEQ ID NO: 1381990 - DNA, 15 bp, Homo sapiens
cagccaatggtccat

SEQ ID NO: 1381991 - DNA, 15 bp, Homo sapiens
acagccaatggtcca

SEQ ID NO: 1381992 - DNA, 15 bp, Homo sapiens
aacagccaatggtcc

SEQ ID NO: 1381993 - DNA, 15 bp, Homo sapiens
caacagccaatggtc

SEQ ID NO: 1381994 - DNA, 15 bp, Homo sapiens
tcaacagccaatggt

SEQ ID NO: 1381995 - DNA, 15 bp, Homo sapiens
gtcaacagccaatgg

SEQ ID NO: 1381996 - DNA, 15 bp, Homo sapiens
ggtcaacagccaatg

SEQ ID NO: 1381997 - DNA, 15 bp, Homo sapiens
aggtcaacagccaat

SEQ ID NO: 1381998 - DNA, 15 bp, Homo sapiens
aaggtcaacagccaa

SEQ ID NO: 1381999 - DNA, 15 bp, Homo sapiens
caaggtcaacagcca

SEQ ID NO: 1382000 - DNA, 15 bp, Homo sapiens
tcaaggtcaacagcc

SEQ ID NO: 1382001 - DNA, 15 bp, Homo sapiens
ttcaaggtcaacagc

SEQ ID NO: 1382002 - DNA, 15 bp, Homo sapiens
cttcaaggtcaacag

SEQ ID NO: 1382003 - DNA, 15 bp, Homo sapiens
tcttcaaggtcaaca

SEQ ID NO: 1382004 - DNA, 15 bp, Homo sapiens
ctcttcaaggtcaac

SEQ ID NO: 1382005 - DNA, 15 bp, Homo sapiens
tctcttcaaggtcaa

SEQ ID NO: 1382006 - DNA, 15 bp, Homo sapiens
ctctcttcaaggtca

SEQ ID NO: 1382007 - DNA, 15 bp, Homo sapiens
gctctcttcaaggtc

SEQ ID NO: 1382008 - DNA, 15 bp, Homo sapiens
ggctctcttcaaggt

SEQ ID NO: 1382009 - DNA, 15 bp, Homo sapiens
aggctctcttcaagg

SEQ ID NO: 1382010 - DNA, 15 bp, Homo sapiens
aaggctctcttcaag

SEQ ID NO: 1382011 - DNA, 15 bp, Homo sapiens
taaggctctcttcaa

SEQ ID NO: 1382012 - DNA, 15 bp, Homo sapiens
gtaaggctctcttca

SEQ ID NO: 1382013 - DNA, 15 bp, Homo sapiens
agtaaggctctcttc

SEQ ID NO: 1382014 - DNA, 15 bp, Homo sapiens
aagtaaggctctctt

SEQ ID NO: 1382015 - DNA, 15 bp, Homo sapiens
gaagtaaggctctct

SEQ ID NO: 1382016 - DNA, 15 bp, Homo sapiens
ggaagtaaggctctc

SEQ ID NO: 1382017 - DNA, 15 bp, Homo sapiens
gggaagtaaggctct

SEQ ID NO: 1382018 - DNA, 15 bp, Homo sapiens
agggaagtaaggctc

SEQ ID NO: 1382019 - DNA, 15 bp, Homo sapiens
cagggaagtaaggct

SEQ ID NO: 1382020 - DNA, 15 bp, Homo sapiens
acagggaagtaaggc

SEQ ID NO: 1382021 - DNA, 15 bp, Homo sapiens
cacagggaagtaagg

SEQ ID NO: 1382022 - DNA, 15 bp, Homo sapiens
acacagggaagtaag

SEQ ID NO: 1382023 - DNA, 15 bp, Homo sapiens
aacacagggaagtaa

SEQ ID NO: 1382024 - DNA, 15 bp, Homo sapiens
aaacacagggaagta

SEQ ID NO: 1382025 - DNA, 15 bp, Homo sapiens
aaaacacagggaagt

SEQ ID NO: 1382026 - DNA, 15 bp, Homo sapiens
gaaaacacagggaag

SEQ ID NO: 1382027 - DNA, 15 bp, Homo sapiens
agaaaacacagggaa

SEQ ID NO: 1382028 - DNA, 15 bp, Homo sapiens
aagaaaacacaggga

SEQ ID NO: 1382029 - DNA, 15 bp, Homo sapiens
taagaaaacacaggg

SEQ ID NO: 1382030 - DNA, 15 bp, Homo sapiens
ttaagaaaacacagg

SEQ ID NO: 1382031 - DNA, 15 bp, Homo sapiens
tttaagaaaacacag

SEQ ID NO: 1382032 - DNA, 15 bp, Homo sapiens
ctttaagaaaacaca

SEQ ID NO: 1382033 - DNA, 15 bp, Homo sapiens
actttaagaaaacac

SEQ ID NO: 1382034 - DNA, 15 bp, Homo sapiens
gactttaagaaaaca

SEQ ID NO: 1382035 - DNA, 15 bp, Homo sapiens
agactttaagaaaac

SEQ ID NO: 1382036 - DNA, 15 bp, Homo sapiens
gagactttaagaaaa

SEQ ID NO: 1382037 - DNA, 15 bp, Homo sapiens
cgagactttaagaaa

SEQ ID NO: 1382038 - DNA, 15 bp, Homo sapiens
ccgagactttaagaa

SEQ ID NO: 1382039 - DNA, 15 bp, Homo sapiens
gccgagactttaaga

SEQ ID NO: 1382040 - DNA, 15 bp, Homo sapiens
tgccgagactttaag

SEQ ID NO: 1382041 - DNA, 15 bp, Homo sapiens
ttgccgagactttaa

SEQ ID NO: 1382042 - DNA, 15 bp, Homo sapiens
gttgccgagacttta

SEQ ID NO: 1382043 - DNA, 15 bp, Homo sapiens
tgttgccgagacttt

SEQ ID NO: 1382044 - DNA, 15 bp, Homo sapiens
ctgttgccgagactt

SEQ ID NO: 1382045 - DNA, 15 bp, Homo sapiens
cctgttgccgagact

SEQ ID NO: 1382046 - DNA, 15 bp, Homo sapiens
acctgttgccgagac

SEQ ID NO: 1382047 - DNA, 15 bp, Homo sapiens
cacctgttgccgaga

SEQ ID NO: 1382048 - DNA, 15 bp, Homo sapiens
ccacctgttgccgag

SEQ ID NO: 1382049 - DNA, 15 bp, Homo sapiens
gccacctgttgccga

SEQ ID NO: 1382050 - DNA, 15 bp, Homo sapiens
ggccacctgttgccg

SEQ ID NO: 1382051 - DNA, 15 bp, Homo sapiens
tggccacctgttgcc

SEQ ID NO: 1382052 - DNA, 15 bp, Homo sapiens
gtggccacctgttgc

SEQ ID NO: 1382053 - DNA, 15 bp, Homo sapiens
tgtggccacctgttg

SEQ ID NO: 1382054 - DNA, 15 bp, Homo sapiens
ttgtggccacctgtt

SEQ ID NO: 1382055 - DNA, 15 bp, Homo sapiens
tttgtggccacctgt

SEQ ID NO: 1382056 - DNA, 15 bp, Homo sapiens
ctttgtggccacctg

SEQ ID NO: 1382057 - DNA, 15 bp, Homo sapiens
cctttgtggccacct

SEQ ID NO: 1382058 - DNA, 15 bp, Homo sapiens
gcctttgtggccacc

SEQ ID NO: 1382059 - DNA, 15 bp, Homo sapiens
cgcctttgtggccac

SEQ ID NO: 1382060 - DNA, 15 bp, Homo sapiens
ccgcctttgtggcca

SEQ ID NO: 1382061 - DNA, 15 bp, Homo sapiens
cccgcctttgtggcc

SEQ ID NO: 1382062 - DNA, 15 bp, Homo sapiens
acccgcctttgtggc

SEQ ID NO: 1382063 - DNA, 15 bp, Homo sapiens
cacccgcctttgtgg

SEQ ID NO: 1382064 - DNA, 15 bp, Homo sapiens
ccacccgcctttgtg

SEQ ID NO: 1382065 - DNA, 15 bp, Homo sapiens
tccacccgcctttgt

SEQ ID NO: 1382066 - DNA, 15 bp, Homo sapiens
ttccacccgcctttg

SEQ ID NO: 1382067 - DNA, 15 bp, Homo sapiens
cttccacccgccttt

SEQ ID NO: 1382068 - DNA, 15 bp, Homo sapiens
ccttccacccgcctt

SEQ ID NO: 1382069 - DNA, 15 bp, Homo sapiens
cccttccacccgcct

SEQ ID NO: 1382070 - DNA, 15 bp, Homo sapiens
gcccttccacccgcc

SEQ ID NO: 1382071 - DNA, 15 bp, Homo sapiens
tgcccttccacccgc

SEQ ID NO: 1382072 - DNA, 15 bp, Homo sapiens
ctgcccttccacccg

SEQ ID NO: 1382073 - DNA, 15 bp, Homo sapiens
tctgcccttccaccc

SEQ ID NO: 1382074 - DNA, 15 bp, Homo sapiens
ctctgcccttccacc

SEQ ID NO: 1382075 - DNA, 15 bp, Homo sapiens
actctgcccttccac

SEQ ID NO: 1382076 - DNA, 15 bp, Homo sapiens
cactctgcccttcca

SEQ ID NO: 1382077 - DNA, 15 bp, Homo sapiens
gcactctgcccttcc

SEQ ID NO: 1382078 - DNA, 15 bp, Homo sapiens
ggcactctgcccttc

SEQ ID NO: 1382079 - DNA, 15 bp, Homo sapiens
tggcactctgccctt

SEQ ID NO: 1382080 - DNA, 15 bp, Homo sapiens
ctggcactctgccct

SEQ ID NO: 1382081 - DNA, 15 bp, Homo sapiens
actggcactctgccc

SEQ ID NO: 1382082 - DNA, 15 bp, Homo sapiens
aactggcactctgcc

SEQ ID NO: 1382083 - DNA, 15 bp, Homo sapiens
aaactggcactctgc

SEQ ID NO: 1382084 - DNA, 15 bp, Homo sapiens
taaactggcactctg

SEQ ID NO: 1382085 - DNA, 15 bp, Homo sapiens
gtaaactggcactct

SEQ ID NO: 1382086 - DNA, 15 bp, Homo sapiens
tgtaaactggcactc

SEQ ID NO: 1382087 - DNA, 15 bp, Homo sapiens
atgtaaactggcact

SEQ ID NO: 1382088 - DNA, 15 bp, Homo sapiens
tatgtaaactggcac

SEQ ID NO: 1382089 - DNA, 15 bp, Homo sapiens
ctatgtaaactggca

SEQ ID NO: 1382090 - DNA, 15 bp, Homo sapiens
gctatgtaaactggc

SEQ ID NO: 1382091 - DNA, 15 bp, Homo sapiens
ggctatgtaaactgg

SEQ ID NO: 1382092 - DNA, 15 bp, Homo sapiens
gggctatgtaaactg

SEQ ID NO: 1382093 - DNA, 15 bp, Homo sapiens
ggggctatgtaaact

SEQ ID NO: 1382094 - DNA, 15 bp, Homo sapiens
gggggctatgtaaac

SEQ ID NO: 1382095 - DNA, 15 bp, Homo sapiens
cgggggctatgtaaa

SEQ ID NO: 1382096 - DNA, 15 bp, Homo sapiens
gcgggggctatgtaa

SEQ ID NO: 1382097 - DNA, 15 bp, Homo sapiens
tgcgggggctatgta

SEQ ID NO: 1382098 - DNA, 15 bp, Homo sapiens
ttgcgggggctatgt

SEQ ID NO: 1382099 - DNA, 15 bp, Homo sapiens
gttgcgggggctatg

SEQ ID NO: 1382100 - DNA, 15 bp, Homo sapiens
agttgcgggggctat

SEQ ID NO: 1382101 - DNA, 15 bp, Homo sapiens
cagttgcgggggcta

SEQ ID NO: 1382102 - DNA, 15 bp, Homo sapiens
acagttgcgggggct

SEQ ID NO: 1382103 - DNA, 15 bp, Homo sapiens
aacagttgcgggggc

SEQ ID NO: 1382104 - DNA, 15 bp, Homo sapiens
caacagttgcggggg

SEQ ID NO: 1382105 - DNA, 15 bp, Homo sapiens
tcaacagttgcgggg

SEQ ID NO: 1382106 - DNA, 15 bp, Homo sapiens
ctcaacagttgcggg

SEQ ID NO: 1382107 - DNA, 15 bp, Homo sapiens
cctcaacagttgcgg

SEQ ID NO: 1382108 - DNA, 15 bp, Homo sapiens
ccctcaacagttgcg

SEQ ID NO: 1382109 - DNA, 15 bp, Homo sapiens
cccctcaacagttgc

SEQ ID NO: 1382110 - DNA, 15 bp, Homo sapiens
tcccctcaacagttg

SEQ ID NO: 1382111 - DNA, 15 bp, Homo sapiens
ttcccctcaacagtt

SEQ ID NO: 1382112 - DNA, 15 bp, Homo sapiens
gttcccctcaacagt

SEQ ID NO: 1382113 - DNA, 15 bp, Homo sapiens
tgttcccctcaacag

SEQ ID NO: 1382114 - DNA, 15 bp, Homo sapiens
ctgttcccctcaaca

SEQ ID NO: 1382115 - DNA, 15 bp, Homo sapiens
cctgttcccctcaac

SEQ ID NO: 1382116 - DNA, 15 bp, Homo sapiens
acctgttcccctcaa

SEQ ID NO: 1382117 - DNA, 15 bp, Homo sapiens
cacctgttcccctca

SEQ ID NO: 1382118 - DNA, 15 bp, Homo sapiens
ccacctgttcccctc

SEQ ID NO: 1382119 - DNA, 15 bp, Homo sapiens
gccacctgttcccct

SEQ ID NO: 1382120 - DNA, 15 bp, Homo sapiens
agccacctgttcccc

SEQ ID NO: 1382121 - DNA, 15 bp, Homo sapiens
cagccacctgttccc

SEQ ID NO: 1382122 - DNA, 15 bp, Homo sapiens
gcagccacctgttcc

SEQ ID NO: 1382123 - DNA, 15 bp, Homo sapiens
tgcagccacctgttc

SEQ ID NO: 1382124 - DNA, 15 bp, Homo sapiens
ctgcagccacctgtt

SEQ ID NO: 1382125 - DNA, 15 bp, Homo sapiens
tctgcagccacctgt

SEQ ID NO: 1382126 - DNA, 15 bp, Homo sapiens
ctctgcagccacctg

SEQ ID NO: 1382127 - DNA, 15 bp, Homo sapiens
cctctgcagccacct

SEQ ID NO: 1382128 - DNA, 15 bp, Homo sapiens
ccctctgcagccacc

SEQ ID NO: 1382129 - DNA, 15 bp, Homo sapiens
tccctctgcagccac

SEQ ID NO: 1382130 - DNA, 15 bp, Homo sapiens
atccctctgcagcca

SEQ ID NO: 1382131 - DNA, 15 bp, Homo sapiens
aatccctctgcagcc

SEQ ID NO: 1382132 - DNA, 15 bp, Homo sapiens
caatccctctgcagc

SEQ ID NO: 1382133 - DNA, 15 bp, Homo sapiens
ccaatccctctgcag

SEQ ID NO: 1382134 - DNA, 15 bp, Homo sapiens
gccaatccctctgca

SEQ ID NO: 1382135 - DNA, 15 bp, Homo sapiens
agccaatccctctgc

SEQ ID NO: 1382136 - DNA, 15 bp, Homo sapiens
cagccaatccctctg

SEQ ID NO: 1382137 - DNA, 15 bp, Homo sapiens
tcagccaatccctct

SEQ ID NO: 1382138 - DNA, 15 bp, Homo sapiens
ctcagccaatccctc

SEQ ID NO: 1382139 - DNA, 15 bp, Homo sapiens
tctcagccaatccct

SEQ ID NO: 1382140 - DNA, 15 bp, Homo sapiens
atctcagccaatccc

SEQ ID NO: 1382141 - DNA, 15 bp, Homo sapiens
gatctcagccaatcc

SEQ ID NO: 1382142 - DNA, 15 bp, Homo sapiens
agatctcagccaatc

SEQ ID NO: 1382143 - DNA, 15 bp, Homo sapiens
tagatctcagccaat

SEQ ID NO: 1382144 - DNA, 15 bp, Homo sapiens
ctagatctcagccaa

SEQ ID NO: 1382145 - DNA, 15 bp, Homo sapiens
cctagatctcagcca

SEQ ID NO: 1382146 - DNA, 15 bp, Homo sapiens
tcctagatctcagcc

SEQ ID NO: 1382147 - DNA, 15 bp, Homo sapiens
ttcctagatctcagc

SEQ ID NO: 1382148 - DNA, 15 bp, Homo sapiens
cttcctagatctcag

SEQ ID NO: 1382149 - DNA, 15 bp, Homo sapiens
gcttcctagatctca

SEQ ID NO: 1382150 - DNA, 15 bp, Homo sapiens
tgcttcctagatctc

SEQ ID NO: 1382151 - DNA, 15 bp, Homo sapiens
ctgcttcctagatct

SEQ ID NO: 1382152 - DNA, 15 bp, Homo sapiens
cctgcttcctagatc

SEQ ID NO: 1382153 - DNA, 15 bp, Homo sapiens
tcctgcttcctagat

SEQ ID NO: 1382154 - DNA, 15 bp, Homo sapiens
ctcctgcttcctaga

SEQ ID NO: 1382155 - DNA, 15 bp, Homo sapiens
cctcctgcttcctag

SEQ ID NO: 1382156 - DNA, 15 bp, Homo sapiens
gcctcctgcttccta

SEQ ID NO: 1382157 - DNA, 15 bp, Homo sapiens
ggcctcctgcttcct

SEQ ID NO: 1382158 - DNA, 15 bp, Homo sapiens
tggcctcctgcttcc

SEQ ID NO: 1382159 - DNA, 15 bp, Homo sapiens
ttggcctcctgcttc

SEQ ID NO: 1382160 - DNA, 15 bp, Homo sapiens
cttggcctcctgctt

SEQ ID NO: 1382161 - DNA, 15 bp, Homo sapiens
tcttggcctcctgct

SEQ ID NO: 1382162 - DNA, 15 bp, Homo sapiens
gtcttggcctcctgc

SEQ ID NO: 1382163 - DNA, 15 bp, Homo sapiens
ggtcttggcctcctg

SEQ ID NO: 1382164 - DNA, 15 bp, Homo sapiens
gggtcttggcctcct

SEQ ID NO: 1382165 - DNA, 15 bp, Homo sapiens
tgggtcttggcctcc

SEQ ID NO: 1382166 - DNA, 15 bp, Homo sapiens
gtgggtcttggcctc

SEQ ID NO: 1382167 - DNA, 15 bp, Homo sapiens
agtgggtcttggcct

SEQ ID NO: 1382168 - DNA, 15 bp, Homo sapiens
gagtgggtcttggcc

SEQ ID NO: 1382169 - DNA, 15 bp, Homo sapiens
tgagtgggtcttggc

SEQ ID NO: 1382170 - DNA, 15 bp, Homo sapiens
ctgagtgggtcttgg

SEQ ID NO: 1382171 - DNA, 15 bp, Homo sapiens
actgagtgggtcttg

SEQ ID NO: 1382172 - DNA, 15 bp, Homo sapiens
aactgagtgggtctt

SEQ ID NO: 1382173 - DNA, 15 bp, Homo sapiens
caactgagtgggtct

SEQ ID NO: 1382174 - DNA, 15 bp, Homo sapiens
gcaactgagtgggtc

SEQ ID NO: 1382175 - DNA, 15 bp, Homo sapiens
agcaactgagtgggt

SEQ ID NO: 1382176 - DNA, 15 bp, Homo sapiens
tagcaactgagtggg

SEQ ID NO: 1382177 - DNA, 15 bp, Homo sapiens
atagcaactgagtgg

SEQ ID NO: 1382178 - DNA, 15 bp, Homo sapiens
aatagcaactgagtg

SEQ ID NO: 1382179 - DNA, 15 bp, Homo sapiens
gaatagcaactgagt

SEQ ID NO: 1382180 - DNA, 15 bp, Homo sapiens
ggaatagcaactgag

SEQ ID NO: 1382181 - DNA, 15 bp, Homo sapiens
tggaatagcaactga

SEQ ID NO: 1382182 - DNA, 15 bp, Homo sapiens
atggaatagcaactg

SEQ ID NO: 1382183 - DNA, 15 bp, Homo sapiens
tatggaatagcaact

SEQ ID NO: 1382184 - DNA, 15 bp, Homo sapiens
atatggaatagcaac

SEQ ID NO: 1382185 - DNA, 15 bp, Homo sapiens
aatatggaatagcaa

SEQ ID NO: 1382186 - DNA, 15 bp, Homo sapiens
gaatatggaatagca

SEQ ID NO: 1382187 - DNA, 15 bp, Homo sapiens
ggaatatggaatagc

SEQ ID NO: 1382188 - DNA, 15 bp, Homo sapiens
aggaatatggaatag

SEQ ID NO: 1382189 - DNA, 15 bp, Homo sapiens
taggaatatggaata

SEQ ID NO: 1382190 - DNA, 15 bp, Homo sapiens
ttaggaatatggaat

SEQ ID NO: 1382191 - DNA, 15 bp, Homo sapiens
tttaggaatatggaa

SEQ ID NO: 1382192 - DNA, 15 bp, Homo sapiens
gtttaggaatatgga

SEQ ID NO: 1382193 - DNA, 15 bp, Homo sapiens
tgtttaggaatatgg

SEQ ID NO: 1382194 - DNA, 15 bp, Homo sapiens
ttgtttaggaatatg

SEQ ID NO: 1382195 - DNA, 15 bp, Homo sapiens
tttgtttaggaatat

SEQ ID NO: 1382196 - DNA, 15 bp, Homo sapiens
ttttgtttaggaata

SEQ ID NO: 1382197 - DNA, 15 bp, Homo sapiens
attttgtttaggaat

SEQ ID NO: 1382198 - DNA, 15 bp, Homo sapiens
tattttgtttaggaa

SEQ ID NO: 1382199 - DNA, 15 bp, Homo sapiens
atattttgtttagga

SEQ ID NO: 1382200 - DNA, 15 bp, Homo sapiens
tatattttgtttagg

SEQ ID NO: 1382201 - DNA, 15 bp, Homo sapiens
gtatattttgtttag

SEQ ID NO: 1382202 - DNA, 15 bp, Homo sapiens
tgtatattttgttta

SEQ ID NO: 1382203 - DNA, 15 bp, Homo sapiens
ctgtatattttgttt

SEQ ID NO: 1382204 - DNA, 15 bp, Homo sapiens
tctgtatattttgtt

SEQ ID NO: 1382205 - DNA, 15 bp, Homo sapiens
gtttctgtatatttt

SEQ ID NO: 1382206 - DNA, 15 bp, Homo sapiens
ggtttctgtatattt

SEQ ID NO: 1382207 - DNA, 15 bp, Homo sapiens
tggtttctgtatatt

SEQ ID NO: 1382208 - DNA, 15 bp, Homo sapiens
ttggtttctgtatat

SEQ ID NO: 1382209 - DNA, 15 bp, Homo sapiens
cttggtttctgtata

SEQ ID NO: 1382210 - DNA, 15 bp, Homo sapiens
tcttggtttctgtat

SEQ ID NO: 1382211 - DNA, 15 bp, Homo sapiens
ttcttggtttctgta

SEQ ID NO: 1382212 - DNA, 15 bp, Homo sapiens
attcttggtttctgt

SEQ ID NO: 1382213 - DNA, 15 bp, Homo sapiens
cattcttggtttctg

SEQ ID NO: 1382214 - DNA, 15 bp, Homo sapiens
acattcttggtttct

SEQ ID NO: 1382215 - DNA, 15 bp, Homo sapiens
tacattcttggtttc

SEQ ID NO: 1382216 - DNA, 15 bp, Homo sapiens
ttacattcttggttt

SEQ ID NO: 1382217 - DNA, 15 bp, Homo sapiens
tttacattcttggtt

SEQ ID NO: 1382218 - DNA, 15 bp, Homo sapiens
ttttacattcttggt

SEQ ID NO: 1382219 - DNA, 15 bp, Homo sapiens
tttttacattcttgg

SEQ ID NO: 1382220 - DNA, 15 bp, Homo sapiens
ttttttacattcttg

SEQ ID NO: 1382221 - DNA, 15 bp, Homo sapiens
tttttttacattctt

SEQ ID NO: 1382222 - DNA, 15 bp, Homo sapiens
ttttttttacattct

SEQ ID NO: 1382223 - DNA, 15 bp, Homo sapiens
tttttttttacattc

SEQ ID NO: 1382224 - DNA, 15 bp, Homo sapiens
atcaaactttttttt

SEQ ID NO: 1382225 - DNA, 15 bp, Homo sapiens
gatcaaacttttttt

SEQ ID NO: 1382226 - DNA, 15 bp, Homo sapiens
agatcaaactttttt

SEQ ID NO: 1382227 - DNA, 15 bp, Homo sapiens
cagatcaaacttttt

SEQ ID NO: 1382228 - DNA, 15 bp, Homo sapiens
acagatcaaactttt

SEQ ID NO: 1382229 - DNA, 15 bp, Homo sapiens
gacagatcaaacttt

SEQ ID NO: 1382230 - DNA, 15 bp, Homo sapiens
tgacagatcaaactt

SEQ ID NO: 1382231 - DNA, 15 bp, Homo sapiens
atgacagatcaaact

SEQ ID NO: 1382232 - DNA, 15 bp, Homo sapiens
catgacagatcaaac

SEQ ID NO: 1382233 - DNA, 15 bp, Homo sapiens
tcatgacagatcaaa

SEQ ID NO: 1382234 - DNA, 15 bp, Homo sapiens
ctcatgacagatcaa

SEQ ID NO: 1382235 - DNA, 15 bp, Homo sapiens
cctcatgacagatca

SEQ ID NO: 1382236 - DNA, 15 bp, Homo sapiens
tcctcatgacagatc

SEQ ID NO: 1382237 - DNA, 15 bp, Homo sapiens
ttcctcatgacagat

SEQ ID NO: 1382238 - DNA, 15 bp, Homo sapiens
attcctcatgacaga

SEQ ID NO: 1382239 - DNA, 15 bp, Homo sapiens
aattcctcatgacag

SEQ ID NO: 1382240 - DNA, 15 bp, Homo sapiens
taattcctcatgaca

SEQ ID NO: 1382241 - DNA, 15 bp, Homo sapiens
ctaattcctcatgac

SEQ ID NO: 1382242 - DNA, 15 bp, Homo sapiens
cctaattcctcatga

SEQ ID NO: 1382243 - DNA, 15 bp, Homo sapiens
tcctaattcctcatg

SEQ ID NO: 1382244 - DNA, 15 bp, Homo sapiens
ttcctaattcctcat

SEQ ID NO: 1382245 - DNA, 15 bp, Homo sapiens
cttcctaattcctca

SEQ ID NO: 1382246 - DNA, 15 bp, Homo sapiens
ccttcctaattcctc

SEQ ID NO: 1382247 - DNA, 15 bp, Homo sapiens
tccttcctaattcct

SEQ ID NO: 1382248 - DNA, 15 bp, Homo sapiens
gtccttcctaattcc

SEQ ID NO: 1382249 - DNA, 15 bp, Homo sapiens
agtccttcctaattc

SEQ ID NO: 1382250 - DNA, 15 bp, Homo sapiens
aagtccttcctaatt

SEQ ID NO: 1382251 - DNA, 15 bp, Homo sapiens
aaagtccttcctaat

SEQ ID NO: 1382252 - DNA, 15 bp, Homo sapiens
caaagtccttcctaa

SEQ ID NO: 1382253 - DNA, 15 bp, Homo sapiens
tcaaagtccttccta

SEQ ID NO: 1382254 - DNA, 15 bp, Homo sapiens
ttcaaagtccttcct

SEQ ID NO: 1382255 - DNA, 15 bp, Homo sapiens
tttcaaagtccttcc

SEQ ID NO: 1382256 - DNA, 15 bp, Homo sapiens
ctttcaaagtccttc

SEQ ID NO: 1382257 - DNA, 15 bp, Homo sapiens
tctttcaaagtcctt

SEQ ID NO: 1382258 - DNA, 15 bp, Homo sapiens
ctctttcaaagtcct

SEQ ID NO: 1382259 - DNA, 15 bp, Homo sapiens
actctttcaaagtcc

SEQ ID NO: 1382260 - DNA, 15 bp, Homo sapiens
gactctttcaaagtc

SEQ ID NO: 1382261 - DNA, 15 bp, Homo sapiens
tgactctttcaaagt

SEQ ID NO: 1382262 - DNA, 15 bp, Homo sapiens
ttgactctttcaaag

SEQ ID NO: 1382263 - DNA, 15 bp, Homo sapiens
attgactctttcaaa

SEQ ID NO: 1382264 - DNA, 15 bp, Homo sapiens
tattgactctttcaa

SEQ ID NO: 1382265 - DNA, 15 bp, Homo sapiens
atattgactctttca

SEQ ID NO: 1382266 - DNA, 15 bp, Homo sapiens
catattgactctttc

SEQ ID NO: 1382267 - DNA, 15 bp, Homo sapiens
ccatattgactcttt

SEQ ID NO: 1382268 - DNA, 15 bp, Homo sapiens
accatattgactctt

SEQ ID NO: 1382269 - DNA, 15 bp, Homo sapiens
taccatattgactct

SEQ ID NO: 1382270 - DNA, 15 bp, Homo sapiens
ttaccatattgactc

SEQ ID NO: 1382271 - DNA, 15 bp, Homo sapiens
tttaccatattgact

SEQ ID NO: 1382272 - DNA, 15 bp, Homo sapiens
ttttaccatattgac

SEQ ID NO: 1382273 - DNA, 15 bp, Homo sapiens
tttttaccatattga

SEQ ID NO: 1382274 - DNA, 15 bp, Homo sapiens
ctttttaccatattg

SEQ ID NO: 1382275 - DNA, 15 bp, Homo sapiens
tctttttaccatatt

SEQ ID NO: 1382276 - DNA, 15 bp, Homo sapiens
ttctttttaccatat

SEQ ID NO: 1382277 - DNA, 15 bp, Homo sapiens
attctttttaccata

SEQ ID NO: 1382278 - DNA, 15 bp, Homo sapiens
tattctttttaccat

SEQ ID NO: 1382279 - DNA, 15 bp, Homo sapiens
atattctttttacca

SEQ ID NO: 1382280 - DNA, 15 bp, Homo sapiens
tatattctttttacc

SEQ ID NO: 1382281 - DNA, 15 bp, Homo sapiens
gtatattctttttac

SEQ ID NO: 1382282 - DNA, 15 bp, Homo sapiens
agtatattcttttta

SEQ ID NO: 1382283 - DNA, 15 bp, Homo sapiens
aagtatattcttttt

SEQ ID NO: 1382284 - DNA, 15 bp, Homo sapiens
aaagtatattctttt

SEQ ID NO: 1382285 - DNA, 15 bp, Homo sapiens
taaagtatattcttt

SEQ ID NO: 1382286 - DNA, 15 bp, Homo sapiens
ctaaagtatattctt

SEQ ID NO: 1382287 - DNA, 15 bp, Homo sapiens
cctaaagtatattct

SEQ ID NO: 1382288 - DNA, 15 bp, Homo sapiens
tcctaaagtatattc

SEQ ID NO: 1382289 - DNA, 15 bp, Homo sapiens
atcctaaagtatatt

SEQ ID NO: 1382290 - DNA, 15 bp, Homo sapiens
gatcctaaagtatat

SEQ ID NO: 1382291 - DNA, 15 bp, Homo sapiens
tgatcctaaagtata

SEQ ID NO: 1382292 - DNA, 15 bp, Homo sapiens
ttgatcctaaagtat

SEQ ID NO: 1382293 - DNA, 15 bp, Homo sapiens
tttgatcctaaagta

SEQ ID NO: 1382294 - DNA, 15 bp, Homo sapiens
ttttgatcctaaagt

SEQ ID NO: 1382295 - DNA, 15 bp, Homo sapiens
tttttgatcctaaag

SEQ ID NO: 1382296 - DNA, 15 bp, Homo sapiens
ttttttgatcctaaa

SEQ ID NO: 1382297 - DNA, 15 bp, Homo sapiens
cttttttgatcctaa

SEQ ID NO: 1382298 - DNA, 15 bp, Homo sapiens
tcttttttgatccta

SEQ ID NO: 1382299 - DNA, 15 bp, Homo sapiens
ttcttttttgatcct

SEQ ID NO: 1382300 - DNA, 15 bp, Homo sapiens
tttcttttttgatcc

SEQ ID NO: 1382301 - DNA, 15 bp, Homo sapiens
gtttcttttttgatc

SEQ ID NO: 1382302 - DNA, 15 bp, Homo sapiens
agtttcttttttgat

SEQ ID NO: 1382303 - DNA, 15 bp, Homo sapiens
tagtttcttttttga

SEQ ID NO: 1382304 - DNA, 15 bp, Homo sapiens
ttagtttcttttttg

SEQ ID NO: 1382305 - DNA, 15 bp, Homo sapiens
tttagtttctttttt

SEQ ID NO: 1382306 - DNA, 15 bp, Homo sapiens
ttttagtttcttttt

SEQ ID NO: 1382307 - DNA, 15 bp, Homo sapiens
tttttagtttctttt

SEQ ID NO: 1382308 - DNA, 15 bp, Homo sapiens
atttttagtttcttt

SEQ ID NO: 1382309 - DNA, 15 bp, Homo sapiens
catttttagtttctt

SEQ ID NO: 1382310 - DNA, 15 bp, Homo sapiens
acatttttagtttct

SEQ ID NO: 1382311 - DNA, 15 bp, Homo sapiens
aacatttttagtttc

SEQ ID NO: 1382312 - DNA, 15 bp, Homo sapiens
taacatttttagttt

SEQ ID NO: 1382313 - DNA, 15 bp, Homo sapiens
gtaacatttttagtt

SEQ ID NO: 1382314 - DNA, 15 bp, Homo sapiens
tgtaacatttttagt

SEQ ID NO: 1382315 - DNA, 15 bp, Homo sapiens
ctgtaacatttttag

SEQ ID NO: 1382316 - DNA, 15 bp, Homo sapiens
cctgtaacattttta

SEQ ID NO: 1382317 - DNA, 15 bp, Homo sapiens
acctgtaacattttt

SEQ ID NO: 1382318 - DNA, 15 bp, Homo sapiens
tacctgtaacatttt

SEQ ID NO: 1382319 - DNA, 15 bp, Homo sapiens
atacctgtaacattt

SEQ ID NO: 1382320 - DNA, 15 bp, Homo sapiens
aatacctgtaacatt

SEQ ID NO: 1382321 - DNA, 15 bp, Homo sapiens
taatacctgtaacat

SEQ ID NO: 1382322 - DNA, 15 bp, Homo sapiens
gtaatacctgtaaca

SEQ ID NO: 1382323 - DNA, 15 bp, Homo sapiens
agtaatacctgtaac

SEQ ID NO: 1382324 - DNA, 15 bp, Homo sapiens
cagtaatacctgtaa

SEQ ID NO: 1382325 - DNA, 15 bp, Homo sapiens
acagtaatacctgta

SEQ ID NO: 1382326 - DNA, 15 bp, Homo sapiens
tacagtaatacctgt

SEQ ID NO: 1382327 - DNA, 15 bp, Homo sapiens
ttacagtaatacctg

SEQ ID NO: 1382328 - DNA, 15 bp, Homo sapiens
gttacagtaatacct

SEQ ID NO: 1382329 - DNA, 15 bp, Homo sapiens
tgttacagtaatacc

SEQ ID NO: 1382330 - DNA, 15 bp, Homo sapiens
gtgttacagtaatac

SEQ ID NO: 1382331 - DNA, 15 bp, Homo sapiens
tgtgttacagtaata

SEQ ID NO: 1382332 - DNA, 15 bp, Homo sapiens
atgtgttacagtaat

SEQ ID NO: 1382333 - DNA, 15 bp, Homo sapiens
catgtgttacagtaa

SEQ ID NO: 1382334 - DNA, 15 bp, Homo sapiens
gcatgtgttacagta

SEQ ID NO: 1382335 - DNA, 15 bp, Homo sapiens
ggcatgtgttacagt

SEQ ID NO: 1382336 - DNA, 15 bp, Homo sapiens
tggcatgtgttacag

SEQ ID NO: 1382337 - DNA, 15 bp, Homo sapiens
ttggcatgtgttaca

SEQ ID NO: 1382338 - DNA, 15 bp, Homo sapiens
gttggcatgtgttac

SEQ ID NO: 1382339 - DNA, 15 bp, Homo sapiens
agttggcatgtgtta

SEQ ID NO: 1382340 - DNA, 15 bp, Homo sapiens
cagttggcatgtgtt

SEQ ID NO: 1382341 - DNA, 15 bp, Homo sapiens
gcagttggcatgtgt

SEQ ID NO: 1382342 - DNA, 15 bp, Homo sapiens
ggcagttggcatgtg

SEQ ID NO: 1382343 - DNA, 15 bp, Homo sapiens
aggcagttggcatgt

SEQ ID NO: 1382344 - DNA, 15 bp, Homo sapiens
caggcagttggcatg

SEQ ID NO: 1382345 - DNA, 15 bp, Homo sapiens
ccaggcagttggcat

SEQ ID NO: 1382346 - DNA, 15 bp, Homo sapiens
cccaggcagttggca

SEQ ID NO: 1382347 - DNA, 15 bp, Homo sapiens
acccaggcagttggc

SEQ ID NO: 1382348 - DNA, 15 bp, Homo sapiens
aacccaggcagttgg

SEQ ID NO: 1382349 - DNA, 15 bp, Homo sapiens
aaacccaggcagttg

SEQ ID NO: 1382350 - DNA, 15 bp, Homo sapiens
taaacccaggcagtt

SEQ ID NO: 1382351 - DNA, 15 bp, Homo sapiens
ataaacccaggcagt

SEQ ID NO: 1382352 - DNA, 15 bp, Homo sapiens
gataaacccaggcag

SEQ ID NO: 1382353 - DNA, 15 bp, Homo sapiens
agataaacccaggca

SEQ ID NO: 1382354 - DNA, 15 bp, Homo sapiens
aagataaacccaggc

SEQ ID NO: 1382355 - DNA, 15 bp, Homo sapiens
gaagataaacccagg

SEQ ID NO: 1382356 - DNA, 15 bp, Homo sapiens
agaagataaacccag

SEQ ID NO: 1382357 - DNA, 15 bp, Homo sapiens
aagaagataaaccca

SEQ ID NO: 1382358 - DNA, 15 bp, Homo sapiens
taagaagataaaccc

SEQ ID NO: 1382359 - DNA, 15 bp, Homo sapiens
ttaagaagataaacc

SEQ ID NO: 1382360 - DNA, 15 bp, Homo sapiens
cttaagaagataaac

SEQ ID NO: 1382361 - DNA, 15 bp, Homo sapiens
gcttaagaagataaa

SEQ ID NO: 1382362 - DNA, 15 bp, Homo sapiens
ggcttaagaagataa

SEQ ID NO: 1382363 - DNA, 15 bp, Homo sapiens
gggcttaagaagata

SEQ ID NO: 1382364 - DNA, 15 bp, Homo sapiens
tgggcttaagaagat

SEQ ID NO: 1382365 - DNA, 15 bp, Homo sapiens
ctgggcttaagaaga

SEQ ID NO: 1382366 - DNA, 15 bp, Homo sapiens
tctgggcttaagaag

SEQ ID NO: 1382367 - DNA, 15 bp, Homo sapiens
atctgggcttaagaa

SEQ ID NO: 1382368 - DNA, 15 bp, Homo sapiens
tatctgggcttaaga

SEQ ID NO: 1382369 - DNA, 15 bp, Homo sapiens
ttatctgggcttaag

SEQ ID NO: 1382370 - DNA, 15 bp, Homo sapiens
attatctgggcttaa

SEQ ID NO: 1382371 - DNA, 15 bp, Homo sapiens
gattatctgggctta

SEQ ID NO: 1382372 - DNA, 15 bp, Homo sapiens
ggattatctgggctt

SEQ ID NO: 1382373 - DNA, 15 bp, Homo sapiens
gggattatctgggct

SEQ ID NO: 1382374 - DNA, 15 bp, Homo sapiens
agggattatctgggc

SEQ ID NO: 1382375 - DNA, 15 bp, Homo sapiens
aagggattatctggg

SEQ ID NO: 1382376 - DNA, 15 bp, Homo sapiens
aaagggattatctgg

SEQ ID NO: 1382377 - DNA, 15 bp, Homo sapiens
aaaagggattatctg

SEQ ID NO: 1382378 - DNA, 15 bp, Homo sapiens
caaaagggattatct

SEQ ID NO: 1382379 - DNA, 15 bp, Homo sapiens
gcaaaagggattatc

SEQ ID NO: 1382380 - DNA, 15 bp, Homo sapiens
ggcaaaagggattat

SEQ ID NO: 1382381 - DNA, 15 bp, Homo sapiens
tggcaaaagggatta

SEQ ID NO: 1382382 - DNA, 15 bp, Homo sapiens
ttggcaaaagggatt

SEQ ID NO: 1382383 - DNA, 15 bp, Homo sapiens
tttggcaaaagggat

SEQ ID NO: 1382384 - DNA, 15 bp, Homo sapiens
ttttggcaaaaggga

SEQ ID NO: 1382385 - DNA, 15 bp, Homo sapiens
tttttggcaaaaggg

SEQ ID NO: 1382386 - DNA, 15 bp, Homo sapiens
ttttttggcaaaagg

SEQ ID NO: 1382387 - DNA, 15 bp, Homo sapiens
tttttttggcaaaag

SEQ ID NO: 1382388 - DNA, 15 bp, Homo sapiens
ttttttttggcaaaa

SEQ ID NO: 1382389 - DNA, 15 bp, Homo sapiens
tttttttttggcaaa

SEQ ID NO: 1382390 - DNA, 15 bp, Homo sapiens
ttttttttttggcaa

SEQ ID NO: 1382391 - DNA, 15 bp, Homo sapiens
gtttttttttttttg

SEQ ID NO: 1382392 - DNA, 15 bp, Homo sapiens
cagtttttttttttt

SEQ ID NO: 1382393 - DNA, 15 bp, Homo sapiens
acagttttttttttt

SEQ ID NO: 1382394 - DNA, 15 bp, Homo sapiens
aacagtttttttttt

SEQ ID NO: 1382395 - DNA, 15 bp, Homo sapiens
aaacagttttttttt

SEQ ID NO: 1382396 - DNA, 15 bp, Homo sapiens
taaacagtttttttt

SEQ ID NO: 1382397 - DNA, 15 bp, Homo sapiens
gtaaacagttttttt

SEQ ID NO: 1382398 - DNA, 15 bp, Homo sapiens
ggtaaacagtttttt

SEQ ID NO: 1382399 - DNA, 15 bp, Homo sapiens
tggtaaacagttttt

SEQ ID NO: 1382400 - DNA, 15 bp, Homo sapiens
gtggtaaacagtttt

SEQ ID NO: 1382401 - DNA, 15 bp, Homo sapiens
ggtggtaaacagttt

SEQ ID NO: 1382402 - DNA, 15 bp, Homo sapiens
tggtggtaaacagtt

SEQ ID NO: 1382403 - DNA, 15 bp, Homo sapiens
ctggtggtaaacagt

SEQ ID NO: 1382404 - DNA, 15 bp, Homo sapiens
tctggtggtaaacag

SEQ ID NO: 1382405 - DNA, 15 bp, Homo sapiens
atctggtggtaaaca

SEQ ID NO: 1382406 - DNA, 15 bp, Homo sapiens
tatctggtggtaaac

SEQ ID NO: 1382407 - DNA, 15 bp, Homo sapiens
atatctggtggtaaa

SEQ ID NO: 1382408 - DNA, 15 bp, Homo sapiens
tatatctggtggtaa

SEQ ID NO: 1382409 - DNA, 15 bp, Homo sapiens
atatatctggtggta

SEQ ID NO: 1382410 - DNA, 15 bp, Homo sapiens
aatatatctggtggt

SEQ ID NO: 1382411 - DNA, 15 bp, Homo sapiens
aaatatatctggtgg

SEQ ID NO: 1382412 - DNA, 15 bp, Homo sapiens
aaaatatatctggtg

SEQ ID NO: 1382413 - DNA, 15 bp, Homo sapiens
aaaaatatatctggt

SEQ ID NO: 1382414 - DNA, 15 bp, Homo sapiens
caaaaatatatctgg

SEQ ID NO: 1382415 - DNA, 15 bp, Homo sapiens
tcaaaaatatatctg

SEQ ID NO: 1382416 - DNA, 15 bp, Homo sapiens
ttcaaaaatatatct

SEQ ID NO: 1382417 - DNA, 15 bp, Homo sapiens
cttcaaaaatatatc

SEQ ID NO: 1382418 - DNA, 15 bp, Homo sapiens
tcttcaaaaatatat

SEQ ID NO: 1382419 - DNA, 15 bp, Homo sapiens
gtcttcaaaaatata

SEQ ID NO: 1382420 - DNA, 15 bp, Homo sapiens
agtcttcaaaaatat

SEQ ID NO: 1382421 - DNA, 15 bp, Homo sapiens
aagtcttcaaaaata

SEQ ID NO: 1382422 - DNA, 15 bp, Homo sapiens
caagtcttcaaaaat

SEQ ID NO: 1382423 - DNA, 15 bp, Homo sapiens
ccaagtcttcaaaaa

SEQ ID NO: 1382424 - DNA, 15 bp, Homo sapiens
tccaagtcttcaaaa

SEQ ID NO: 1382425 - DNA, 15 bp, Homo sapiens
ctccaagtcttcaaa

SEQ ID NO: 1382426 - DNA, 15 bp, Homo sapiens
gctccaagtcttcaa

SEQ ID NO: 1382427 - DNA, 15 bp, Homo sapiens
tgctccaagtcttca

SEQ ID NO: 1382428 - DNA, 15 bp, Homo sapiens
ctgctccaagtcttc

SEQ ID NO: 1382429 - DNA, 15 bp, Homo sapiens
cctgctccaagtctt

SEQ ID NO: 1382430 - DNA, 15 bp, Homo sapiens
acctgctccaagtct

SEQ ID NO: 1382431 - DNA, 15 bp, Homo sapiens
cacctgctccaagtc

SEQ ID NO: 1382432 - DNA, 15 bp, Homo sapiens
acacctgctccaagt

SEQ ID NO: 1382433 - DNA, 15 bp, Homo sapiens
aacacctgctccaag

SEQ ID NO: 1382434 - DNA, 15 bp, Homo sapiens
caacacctgctccaa

SEQ ID NO: 1382435 - DNA, 15 bp, Homo sapiens
tcaacacctgctcca

SEQ ID NO: 1382436 - DNA, 15 bp, Homo sapiens
atcaacacctgctcc

SEQ ID NO: 1382437 - DNA, 15 bp, Homo sapiens
aatcaacacctgctc

SEQ ID NO: 1382438 - DNA, 15 bp, Homo sapiens
aaatcaacacctgct

SEQ ID NO: 1382439 - DNA, 15 bp, Homo sapiens
caaatcaacacctgc

SEQ ID NO: 1382440 - DNA, 15 bp, Homo sapiens
ccaaatcaacacctg

SEQ ID NO: 1382441 - DNA, 15 bp, Homo sapiens
gccaaatcaacacct

SEQ ID NO: 1382442 - DNA, 15 bp, Homo sapiens
tgccaaatcaacacc

SEQ ID NO: 1382443 - DNA, 15 bp, Homo sapiens
ttgccaaatcaacac

SEQ ID NO: 1382444 - DNA, 15 bp, Homo sapiens
attgccaaatcaaca

SEQ ID NO: 1382445 - DNA, 15 bp, Homo sapiens
gattgccaaatcaac

SEQ ID NO: 1382446 - DNA, 15 bp, Homo sapiens
agattgccaaatcaa

SEQ ID NO: 1382447 - DNA, 15 bp, Homo sapiens
aagattgccaaatca

SEQ ID NO: 1382448 - DNA, 15 bp, Homo sapiens
aaagattgccaaatc

SEQ ID NO: 1382449 - DNA, 15 bp, Homo sapiens
gaaagattgccaaat

SEQ ID NO: 1382450 - DNA, 15 bp, Homo sapiens
agaaagattgccaaa

SEQ ID NO: 1382451 - DNA, 15 bp, Homo sapiens
tagaaagattgccaa

SEQ ID NO: 1382452 - DNA, 15 bp, Homo sapiens
atagaaagattgcca

SEQ ID NO: 1382453 - DNA, 15 bp, Homo sapiens
gatagaaagattgcc

SEQ ID NO: 1382454 - DNA, 15 bp, Homo sapiens
agatagaaagattgc

SEQ ID NO: 1382455 - DNA, 15 bp, Homo sapiens
tagatagaaagattg

SEQ ID NO: 1382456 - DNA, 15 bp, Homo sapiens
ctagatagaaagatt

SEQ ID NO: 1382457 - DNA, 15 bp, Homo sapiens
cctagatagaaagat

SEQ ID NO: 1382458 - DNA, 15 bp, Homo sapiens
tcctagatagaaaga

SEQ ID NO: 1382459 - DNA, 15 bp, Homo sapiens
ctcctagatagaaag

SEQ ID NO: 1382460 - DNA, 15 bp, Homo sapiens
actcctagatagaaa

SEQ ID NO: 1382461 - DNA, 15 bp, Homo sapiens
tactcctagatagaa

SEQ ID NO: 1382462 - DNA, 15 bp, Homo sapiens
ctactcctagataga

SEQ ID NO: 1382463 - DNA, 15 bp, Homo sapiens
tctactcctagatag

SEQ ID NO: 1382464 - DNA, 15 bp, Homo sapiens
gtctactcctagata

SEQ ID NO: 1382465 - DNA, 15 bp, Homo sapiens
agtctactcctagat

SEQ ID NO: 1382466 - DNA, 15 bp, Homo sapiens
cagtctactcctaga

SEQ ID NO: 1382467 - DNA, 15 bp, Homo sapiens
gcagtctactcctag

SEQ ID NO: 1382468 - DNA, 15 bp, Homo sapiens
ggcagtctactccta

SEQ ID NO: 1382469 - DNA, 15 bp, Homo sapiens
tggcagtctactcct

SEQ ID NO: 1382470 - DNA, 15 bp, Homo sapiens
atggcagtctactcc

SEQ ID NO: 1382471 - DNA, 15 bp, Homo sapiens
tatggcagtctactc

SEQ ID NO: 1382472 - DNA, 15 bp, Homo sapiens
ttatggcagtctact

SEQ ID NO: 1382473 - DNA, 15 bp, Homo sapiens
tttatggcagtctac

SEQ ID NO: 1382474 - DNA, 15 bp, Homo sapiens
ctttatggcagtcta

SEQ ID NO: 1382475 - DNA, 15 bp, Homo sapiens
actttatggcagtct

SEQ ID NO: 1382476 - DNA, 15 bp, Homo sapiens
aactttatggcagtc

SEQ ID NO: 1382477 - DNA, 15 bp, Homo sapiens
aaactttatggcagt

SEQ ID NO: 1382478 - DNA, 15 bp, Homo sapiens
gaaactttatggcag

SEQ ID NO: 1382479 - DNA, 15 bp, Homo sapiens
cgaaactttatggca

SEQ ID NO: 1382480 - DNA, 15 bp, Homo sapiens
acgaaactttatggc

SEQ ID NO: 1382481 - DNA, 15 bp, Homo sapiens
tacgaaactttatgg

SEQ ID NO: 1382482 - DNA, 15 bp, Homo sapiens
atacgaaactttatg

SEQ ID NO: 1382483 - DNA, 15 bp, Homo sapiens
aatacgaaactttat

SEQ ID NO: 1382484 - DNA, 15 bp, Homo sapiens
gaatacgaaacttta

SEQ ID NO: 1382485 - DNA, 15 bp, Homo sapiens
ggaatacgaaacttt

SEQ ID NO: 1382486 - DNA, 15 bp, Homo sapiens
aggaatacgaaactt

SEQ ID NO: 1382487 - DNA, 15 bp, Homo sapiens
aaggaatacgaaact

SEQ ID NO: 1382488 - DNA, 15 bp, Homo sapiens
gaaggaatacgaaac

SEQ ID NO: 1382489 - DNA, 15 bp, Homo sapiens
agaaggaatacgaaa

SEQ ID NO: 1382490 - DNA, 15 bp, Homo sapiens
aagaaggaatacgaa

SEQ ID NO: 1382491 - DNA, 15 bp, Homo sapiens
gaagaaggaatacga

SEQ ID NO: 1382492 - DNA, 15 bp, Homo sapiens
tgaagaaggaatacg

SEQ ID NO: 1382493 - DNA, 15 bp, Homo sapiens
ctgaagaaggaatac

SEQ ID NO: 1382494 - DNA, 15 bp, Homo sapiens
actgaagaaggaata

SEQ ID NO: 1382495 - DNA, 15 bp, Homo sapiens
gactgaagaaggaat

SEQ ID NO: 1382496 - DNA, 15 bp, Homo sapiens
agactgaagaaggaa

SEQ ID NO: 1382497 - DNA, 15 bp, Homo sapiens
gagactgaagaagga

SEQ ID NO: 1382498 - DNA, 15 bp, Homo sapiens
agagactgaagaagg

SEQ ID NO: 1382499 - DNA, 15 bp, Homo sapiens
cagagactgaagaag

SEQ ID NO: 1382500 - DNA, 15 bp, Homo sapiens
gcagagactgaagaa

SEQ ID NO: 1382501 - DNA, 15 bp, Homo sapiens
ggcagagactgaaga

SEQ ID NO: 1382502 - DNA, 15 bp, Homo sapiens
tggcagagactgaag

SEQ ID NO: 1382503 - DNA, 15 bp, Homo sapiens
atggcagagactgaa

SEQ ID NO: 1382504 - DNA, 15 bp, Homo sapiens
gatggcagagactga

SEQ ID NO: 1382505 - DNA, 15 bp, Homo sapiens
tgatggcagagactg

SEQ ID NO: 1382506 - DNA, 15 bp, Homo sapiens
gtgatggcagagact

SEQ ID NO: 1382507 - DNA, 15 bp, Homo sapiens
agtgatggcagagac

SEQ ID NO: 1382508 - DNA, 15 bp, Homo sapiens
cagtgatggcagaga

SEQ ID NO: 1382509 - DNA, 15 bp, Homo sapiens
acagtgatggcagag

SEQ ID NO: 1382510 - DNA, 15 bp, Homo sapiens
tacagtgatggcaga

SEQ ID NO: 1382511 - DNA, 15 bp, Homo sapiens
atacagtgatggcag

SEQ ID NO: 1382512 - DNA, 15 bp, Homo sapiens
gatacagtgatggca

SEQ ID NO: 1382513 - DNA, 15 bp, Homo sapiens
agatacagtgatggc

SEQ ID NO: 1382514 - DNA, 15 bp, Homo sapiens
tagatacagtgatgg

SEQ ID NO: 1382515 - DNA, 15 bp, Homo sapiens
atagatacagtgatg

SEQ ID NO: 1382516 - DNA, 15 bp, Homo sapiens
gatagatacagtgat

SEQ ID NO: 1382517 - DNA, 15 bp, Homo sapiens
ggatagatacagtga

SEQ ID NO: 1382518 - DNA, 15 bp, Homo sapiens
aggatagatacagtg

SEQ ID NO: 1382519 - DNA, 15 bp, Homo sapiens
gaggatagatacagt

SEQ ID NO: 1382520 - DNA, 15 bp, Homo sapiens
ggaggatagatacag

SEQ ID NO: 1382521 - DNA, 15 bp, Homo sapiens
aggaggatagataca

SEQ ID NO: 1382522 - DNA, 15 bp, Homo sapiens
caggaggatagatac

SEQ ID NO: 1382523 - DNA, 15 bp, Homo sapiens
acaggaggatagata

SEQ ID NO: 1382524 - DNA, 15 bp, Homo sapiens
cacaggaggatagat

SEQ ID NO: 1382525 - DNA, 15 bp, Homo sapiens
tcacaggaggataga

SEQ ID NO: 1382526 - DNA, 15 bp, Homo sapiens
gtcacaggaggatag

SEQ ID NO: 1382527 - DNA, 15 bp, Homo sapiens
tgtcacaggaggata

SEQ ID NO: 1382528 - DNA, 15 bp, Homo sapiens
atgtcacaggaggat

SEQ ID NO: 1382529 - DNA, 15 bp, Homo sapiens
gatgtcacaggagga

SEQ ID NO: 1382530 - DNA, 15 bp, Homo sapiens
tgatgtcacaggagg

SEQ ID NO: 1382531 - DNA, 15 bp, Homo sapiens
atgatgtcacaggag

SEQ ID NO: 1382532 - DNA, 15 bp, Homo sapiens
aatgatgtcacagga

SEQ ID NO: 1382533 - DNA, 15 bp, Homo sapiens
caatgatgtcacagg

SEQ ID NO: 1382534 - DNA, 15 bp, Homo sapiens
acaatgatgtcacag

SEQ ID NO: 1382535 - DNA, 15 bp, Homo sapiens
gacaatgatgtcaca

SEQ ID NO: 1382536 - DNA, 15 bp, Homo sapiens
agacaatgatgtcac

SEQ ID NO: 1382537 - DNA, 15 bp, Homo sapiens
tagacaatgatgtca

SEQ ID NO: 1382538 - DNA, 15 bp, Homo sapiens
gtagacaatgatgtc

SEQ ID NO: 1382539 - DNA, 15 bp, Homo sapiens
agtagacaatgatgt

SEQ ID NO: 1382540 - DNA, 15 bp, Homo sapiens
aagtagacaatgatg

SEQ ID NO: 1382541 - DNA, 15 bp, Homo sapiens
aaagtagacaatgat

SEQ ID NO: 1382542 - DNA, 15 bp, Homo sapiens
taaagtagacaatga

SEQ ID NO: 1382543 - DNA, 15 bp, Homo sapiens
ttaaagtagacaatg

SEQ ID NO: 1382544 - DNA, 15 bp, Homo sapiens
attaaagtagacaat

SEQ ID NO: 1382545 - DNA, 15 bp, Homo sapiens
aattaaagtagacaa

SEQ ID NO: 1382546 - DNA, 15 bp, Homo sapiens
gaattaaagtagaca

SEQ ID NO: 1382547 - DNA, 15 bp, Homo sapiens
agaattaaagtagac

SEQ ID NO: 1382548 - DNA, 15 bp, Homo sapiens
aagaattaaagtaga

SEQ ID NO: 1382549 - DNA, 15 bp, Homo sapiens
taagaattaaagtag

SEQ ID NO: 1382550 - DNA, 15 bp, Homo sapiens
ttaagaattaaagta

SEQ ID NO: 1382551 - DNA, 15 bp, Homo sapiens
cttaagaattaaagt

SEQ ID NO: 1382552 - DNA, 15 bp, Homo sapiens
tcttaagaattaaag

SEQ ID NO: 1382553 - DNA, 15 bp, Homo sapiens
ttcttaagaattaaa

SEQ ID NO: 1382554 - DNA, 15 bp, Homo sapiens
cttcttaagaattaa

SEQ ID NO: 1382555 - DNA, 15 bp, Homo sapiens
gcttcttaagaatta

SEQ ID NO: 1382556 - DNA, 15 bp, Homo sapiens
tgcttcttaagaatt

SEQ ID NO: 1382557 - DNA, 15 bp, Homo sapiens
gtgcttcttaagaat

SEQ ID NO: 1382558 - DNA, 15 bp, Homo sapiens
agtgcttcttaagaa

SEQ ID NO: 1382559 - DNA, 15 bp, Homo sapiens
aagtgcttcttaaga

SEQ ID NO: 1382560 - DNA, 15 bp, Homo sapiens
taagtgcttcttaag

SEQ ID NO: 1382561 - DNA, 15 bp, Homo sapiens
ctaagtgcttcttaa

SEQ ID NO: 1382562 - DNA, 15 bp, Homo sapiens
gctaagtgcttctta

SEQ ID NO: 1382563 - DNA, 15 bp, Homo sapiens
ggctaagtgcttctt

SEQ ID NO: 1382564 - DNA, 15 bp, Homo sapiens
tggctaagtgcttct

SEQ ID NO: 1382565 - DNA, 15 bp, Homo sapiens
ctggctaagtgcttc

SEQ ID NO: 1382566 - DNA, 15 bp, Homo sapiens
actggctaagtgctt

SEQ ID NO: 1382567 - DNA, 15 bp, Homo sapiens
aactggctaagtgct

SEQ ID NO: 1382568 - DNA, 15 bp, Homo sapiens
aaactggctaagtgc

SEQ ID NO: 1382569 - DNA, 15 bp, Homo sapiens
gaaactggctaagtg

SEQ ID NO: 1382570 - DNA, 15 bp, Homo sapiens
tgaaactggctaagt

SEQ ID NO: 1382571 - DNA, 15 bp, Homo sapiens
ttgaaactggctaag

SEQ ID NO: 1382572 - DNA, 15 bp, Homo sapiens
cttgaaactggctaa

SEQ ID NO: 1382573 - DNA, 15 bp, Homo sapiens
gcttgaaactggcta

SEQ ID NO: 1382574 - DNA, 15 bp, Homo sapiens
agcttgaaactggct

SEQ ID NO: 1382575 - DNA, 15 bp, Homo sapiens
aagcttgaaactggc

SEQ ID NO: 1382576 - DNA, 15 bp, Homo sapiens
aaagcttgaaactgg

SEQ ID NO: 1382577 - DNA, 15 bp, Homo sapiens
caaagcttgaaactg

SEQ ID NO: 1382578 - DNA, 15 bp, Homo sapiens
tcaaagcttgaaact

SEQ ID NO: 1382579 - DNA, 15 bp, Homo sapiens
gtcaaagcttgaaac

SEQ ID NO: 1382580 - DNA, 15 bp, Homo sapiens
tgtcaaagcttgaaa

SEQ ID NO: 1382581 - DNA, 15 bp, Homo sapiens
atgtcaaagcttgaa

SEQ ID NO: 1382582 - DNA, 15 bp, Homo sapiens
gatgtcaaagcttga

SEQ ID NO: 1382583 - DNA, 15 bp, Homo sapiens
agatgtcaaagcttg

SEQ ID NO: 1382584 - DNA, 15 bp, Homo sapiens
aagatgtcaaagctt

SEQ ID NO: 1382585 - DNA, 15 bp, Homo sapiens
aaagatgtcaaagct

SEQ ID NO: 1382586 - DNA, 15 bp, Homo sapiens
gaaagatgtcaaagc

SEQ ID NO: 1382587 - DNA, 15 bp, Homo sapiens
agaaagatgtcaaag

SEQ ID NO: 1382588 - DNA, 15 bp, Homo sapiens
tagaaagatgtcaaa

SEQ ID NO: 1382589 - DNA, 15 bp, Homo sapiens
atagaaagatgtcaa

SEQ ID NO: 1382590 - DNA, 15 bp, Homo sapiens
aatagaaagatgtca

SEQ ID NO: 1382591 - DNA, 15 bp, Homo sapiens
aaatagaaagatgtc

SEQ ID NO: 1382592 - DNA, 15 bp, Homo sapiens
gaaatagaaagatgt

SEQ ID NO: 1382593 - DNA, 15 bp, Homo sapiens
ggaaatagaaagatg

SEQ ID NO: 1382594 - DNA, 15 bp, Homo sapiens
gggaaatagaaagat

SEQ ID NO: 1382595 - DNA, 15 bp, Homo sapiens
tgggaaatagaaaga

SEQ ID NO: 1382596 - DNA, 15 bp, Homo sapiens
atgggaaatagaaag

SEQ ID NO: 1382597 - DNA, 15 bp, Homo sapiens
catgggaaatagaaa

SEQ ID NO: 1382598 - DNA, 15 bp, Homo sapiens
ccatgggaaatagaa

SEQ ID NO: 1382599 - DNA, 15 bp, Homo sapiens
cccatgggaaataga

SEQ ID NO: 1382600 - DNA, 15 bp, Homo sapiens
acccatgggaaatag

SEQ ID NO: 1382601 - DNA, 15 bp, Homo sapiens
aacccatgggaaata

SEQ ID NO: 1382602 - DNA, 15 bp, Homo sapiens
aaacccatgggaaat

SEQ ID NO: 1382603 - DNA, 15 bp, Homo sapiens
taaacccatgggaaa

SEQ ID NO: 1382604 - DNA, 15 bp, Homo sapiens
ttaaacccatgggaa

SEQ ID NO: 1382605 - DNA, 15 bp, Homo sapiens
attaaacccatggga

SEQ ID NO: 1382606 - DNA, 15 bp, Homo sapiens
cattaaacccatggg

SEQ ID NO: 1382607 - DNA, 15 bp, Homo sapiens
ccattaaacccatgg

SEQ ID NO: 1382608 - DNA, 15 bp, Homo sapiens
accattaaacccatg

SEQ ID NO: 1382609 - DNA, 15 bp, Homo sapiens
caccattaaacccat

SEQ ID NO: 1382610 - DNA, 15 bp, Homo sapiens
acaccattaaaccca

SEQ ID NO: 1382611 - DNA, 15 bp, Homo sapiens
aacaccattaaaccc

SEQ ID NO: 1382612 - DNA, 15 bp, Homo sapiens
caacaccattaaacc

SEQ ID NO: 1382613 - DNA, 15 bp, Homo sapiens
ccaacaccattaaac

SEQ ID NO: 1382614 - DNA, 15 bp, Homo sapiens
accaacaccattaaa

SEQ ID NO: 1382615 - DNA, 15 bp, Homo sapiens
caccaacaccattaa

SEQ ID NO: 1382616 - DNA, 15 bp, Homo sapiens
acaccaacaccatta

SEQ ID NO: 1382617 - DNA, 15 bp, Homo sapiens
cacaccaacaccatt

SEQ ID NO: 1382618 - DNA, 15 bp, Homo sapiens
ccacaccaacaccat

SEQ ID NO: 1382619 - DNA, 15 bp, Homo sapiens
tccacaccaacacca

SEQ ID NO: 1382620 - DNA, 15 bp, Homo sapiens
ttccacaccaacacc

SEQ ID NO: 1382621 - DNA, 15 bp, Homo sapiens
attccacaccaacac

SEQ ID NO: 1382622 - DNA, 15 bp, Homo sapiens
aattccacaccaaca

SEQ ID NO: 1382623 - DNA, 15 bp, Homo sapiens
taattccacaccaac

SEQ ID NO: 1382624 - DNA, 15 bp, Homo sapiens
gtaattccacaccaa

SEQ ID NO: 1382625 - DNA, 15 bp, Homo sapiens
agtaattccacacca

SEQ ID NO: 1382626 - DNA, 15 bp, Homo sapiens
tagtaattccacacc

SEQ ID NO: 1382627 - DNA, 15 bp, Homo sapiens
ttagtaattccacac

SEQ ID NO: 1382628 - DNA, 15 bp, Homo sapiens
cttagtaattccaca

SEQ ID NO: 1382629 - DNA, 15 bp, Homo sapiens
gcttagtaattccac

SEQ ID NO: 1382630 - DNA, 15 bp, Homo sapiens
agcttagtaattcca

SEQ ID NO: 1382631 - DNA, 15 bp, Homo sapiens
aagcttagtaattcc

SEQ ID NO: 1382632 - DNA, 15 bp, Homo sapiens
aaagcttagtaattc

SEQ ID NO: 1382633 - DNA, 15 bp, Homo sapiens
aaaagcttagtaatt

SEQ ID NO: 1382634 - DNA, 15 bp, Homo sapiens
caaaagcttagtaat

SEQ ID NO: 1382635 - DNA, 15 bp, Homo sapiens
gcaaaagcttagtaa

SEQ ID NO: 1382636 - DNA, 15 bp, Homo sapiens
agcaaaagcttagta

SEQ ID NO: 1382637 - DNA, 15 bp, Homo sapiens
cagcaaaagcttagt

SEQ ID NO: 1382638 - DNA, 15 bp, Homo sapiens
acagcaaaagcttag

SEQ ID NO: 1382639 - DNA, 15 bp, Homo sapiens
cacagcaaaagctta

SEQ ID NO: 1382640 - DNA, 15 bp, Homo sapiens
acacagcaaaagctt

SEQ ID NO: 1382641 - DNA, 15 bp, Homo sapiens
cacacagcaaaagct

SEQ ID NO: 1382642 - DNA, 15 bp, Homo sapiens
ccacacagcaaaagc

SEQ ID NO: 1382643 - DNA, 15 bp, Homo sapiens
tccacacagcaaaag

SEQ ID NO: 1382644 - DNA, 15 bp, Homo sapiens
ttccacacagcaaaa

SEQ ID NO: 1382645 - DNA, 15 bp, Homo sapiens
tttccacacagcaaa

SEQ ID NO: 1382646 - DNA, 15 bp, Homo sapiens
atttccacacagcaa

SEQ ID NO: 1382647 - DNA, 15 bp, Homo sapiens
gatttccacacagca

SEQ ID NO: 1382648 - DNA, 15 bp, Homo sapiens
agatttccacacagc

SEQ ID NO: 1382649 - DNA, 15 bp, Homo sapiens
cagatttccacacag

SEQ ID NO: 1382650 - DNA, 15 bp, Homo sapiens
ccagatttccacaca

SEQ ID NO: 1382651 - DNA, 15 bp, Homo sapiens
tccagatttccacac

SEQ ID NO: 1382652 - DNA, 15 bp, Homo sapiens
ctccagatttccaca

SEQ ID NO: 1382653 - DNA, 15 bp, Homo sapiens
cctccagatttccac

SEQ ID NO: 1382654 - DNA, 15 bp, Homo sapiens
gcctccagatttcca

SEQ ID NO: 1382655 - DNA, 15 bp, Homo sapiens
tgcctccagatttcc

SEQ ID NO: 1382656 - DNA, 15 bp, Homo sapiens
atgcctccagatttc

SEQ ID NO: 1382657 - DNA, 15 bp, Homo sapiens
aatgcctccagattt

SEQ ID NO: 1382658 - DNA, 15 bp, Homo sapiens
aaatgcctccagatt

SEQ ID NO: 1382659 - DNA, 15 bp, Homo sapiens
aaaatgcctccagat

SEQ ID NO: 1382660 - DNA, 15 bp, Homo sapiens
aaaaatgcctccaga

SEQ ID NO: 1382661 - DNA, 15 bp, Homo sapiens
caaaaatgcctccag

SEQ ID NO: 1382662 - DNA, 15 bp, Homo sapiens
tcaaaaatgcctcca

SEQ ID NO: 1382663 - DNA, 15 bp, Homo sapiens
ctcaaaaatgcctcc

SEQ ID NO: 1382664 - DNA, 15 bp, Homo sapiens
actcaaaaatgcctc

SEQ ID NO: 1382665 - DNA, 15 bp, Homo sapiens
cactcaaaaatgcct

SEQ ID NO: 1382666 - DNA, 15 bp, Homo sapiens
acactcaaaaatgcc

SEQ ID NO: 1382667 - DNA, 15 bp, Homo sapiens
cacactcaaaaatgc

SEQ ID NO: 1382668 - DNA, 15 bp, Homo sapiens
tcacactcaaaaatg

SEQ ID NO: 1382669 - DNA, 15 bp, Homo sapiens
atcacactcaaaaat

SEQ ID NO: 1382670 - DNA, 15 bp, Homo sapiens
tatcacactcaaaaa

SEQ ID NO: 1382671 - DNA, 15 bp, Homo sapiens
ttatcacactcaaaa

SEQ ID NO: 1382672 - DNA, 15 bp, Homo sapiens
attatcacactcaaa

SEQ ID NO: 1382673 - DNA, 15 bp, Homo sapiens
tattatcacactcaa

SEQ ID NO: 1382674 - DNA, 15 bp, Homo sapiens
ctattatcacactca

SEQ ID NO: 1382675 - DNA, 15 bp, Homo sapiens
cctattatcacactc

SEQ ID NO: 1382676 - DNA, 15 bp, Homo sapiens
ccctattatcacact

SEQ ID NO: 1382677 - DNA, 15 bp, Homo sapiens
gccctattatcacac

SEQ ID NO: 1382678 - DNA, 15 bp, Homo sapiens
tgccctattatcaca

SEQ ID NO: 1382679 - DNA, 15 bp, Homo sapiens
atgccctattatcac

SEQ ID NO: 1382680 - DNA, 15 bp, Homo sapiens
tatgccctattatca

SEQ ID NO: 1382681 - DNA, 15 bp, Homo sapiens
ctatgccctattatc

SEQ ID NO: 1382682 - DNA, 15 bp, Homo sapiens
cctatgccctattat

SEQ ID NO: 1382683 - DNA, 15 bp, Homo sapiens
ccctatgccctatta

SEQ ID NO: 1382684 - DNA, 15 bp, Homo sapiens
tccctatgccctatt

SEQ ID NO: 1382685 - DNA, 15 bp, Homo sapiens
ttccctatgccctat

SEQ ID NO: 1382686 - DNA, 15 bp, Homo sapiens
tttccctatgcccta

SEQ ID NO: 1382687 - DNA, 15 bp, Homo sapiens
atttccctatgccct

SEQ ID NO: 1382688 - DNA, 15 bp, Homo sapiens
aatttccctatgccc

SEQ ID NO: 1382689 - DNA, 15 bp, Homo sapiens
gaatttccctatgcc

SEQ ID NO: 1382690 - DNA, 15 bp, Homo sapiens
ggaatttccctatgc

SEQ ID NO: 1382691 - DNA, 15 bp, Homo sapiens
aggaatttccctatg

SEQ ID NO: 1382692 - DNA, 15 bp, Homo sapiens
caggaatttccctat

SEQ ID NO: 1382693 - DNA, 15 bp, Homo sapiens
tcaggaatttcccta

SEQ ID NO: 1382694 - DNA, 15 bp, Homo sapiens
gtcaggaatttccct

SEQ ID NO: 1382695 - DNA, 15 bp, Homo sapiens
tgtcaggaatttccc

SEQ ID NO: 1382696 - DNA, 15 bp, Homo sapiens
gtgtcaggaatttcc

SEQ ID NO: 1382697 - DNA, 15 bp, Homo sapiens
tgtgtcaggaatttc

SEQ ID NO: 1382698 - DNA, 15 bp, Homo sapiens
atgtgtcaggaattt

SEQ ID NO: 1382699 - DNA, 15 bp, Homo sapiens
catgtgtcaggaatt

SEQ ID NO: 1382700 - DNA, 15 bp, Homo sapiens
ccatgtgtcaggaat

SEQ ID NO: 1382701 - DNA, 15 bp, Homo sapiens
tccatgtgtcaggaa

SEQ ID NO: 1382702 - DNA, 15 bp, Homo sapiens
ctccatgtgtcagga

SEQ ID NO: 1382703 - DNA, 15 bp, Homo sapiens
actccatgtgtcagg

SEQ ID NO: 1382704 - DNA, 15 bp, Homo sapiens
cactccatgtgtcag

SEQ ID NO: 1382705 - DNA, 15 bp, Homo sapiens
acactccatgtgtca

SEQ ID NO: 1382706 - DNA, 15 bp, Homo sapiens
aacactccatgtgtc

SEQ ID NO: 1382707 - DNA, 15 bp, Homo sapiens
aaacactccatgtgt

SEQ ID NO: 1382708 - DNA, 15 bp, Homo sapiens
aaaacactccatgtg

SEQ ID NO: 1382709 - DNA, 15 bp, Homo sapiens
taaaacactccatgt

SEQ ID NO: 1382710 - DNA, 15 bp, Homo sapiens
ataaaacactccatg

SEQ ID NO: 1382711 - DNA, 15 bp, Homo sapiens
cataaaacactccat

SEQ ID NO: 1382712 - DNA, 15 bp, Homo sapiens
acataaaacactcca

SEQ ID NO: 1382713 - DNA, 15 bp, Homo sapiens
tacataaaacactcc

SEQ ID NO: 1382714 - DNA, 15 bp, Homo sapiens
atacataaaacactc

SEQ ID NO: 1382715 - DNA, 15 bp, Homo sapiens
tatacataaaacact

SEQ ID NO: 1382716 - DNA, 15 bp, Homo sapiens
ctatacataaaacac

SEQ ID NO: 1382717 - DNA, 15 bp, Homo sapiens
tctatacataaaaca

SEQ ID NO: 1382718 - DNA, 15 bp, Homo sapiens
ttctatacataaaac

SEQ ID NO: 1382719 - DNA, 15 bp, Homo sapiens
attctatacataaaa

SEQ ID NO: 1382720 - DNA, 15 bp, Homo sapiens
tattctatacataaa

SEQ ID NO: 1382721 - DNA, 15 bp, Homo sapiens
atattctatacataa

SEQ ID NO: 1382722 - DNA, 15 bp, Homo sapiens
catattctatacata

SEQ ID NO: 1382723 - DNA, 15 bp, Homo sapiens
gcatattctatacat

SEQ ID NO: 1382724 - DNA, 15 bp, Homo sapiens
tgcatattctataca

SEQ ID NO: 1382725 - DNA, 15 bp, Homo sapiens
ttgcatattctatac

SEQ ID NO: 1382726 - DNA, 15 bp, Homo sapiens
attgcatattctata

SEQ ID NO: 1382727 - DNA, 15 bp, Homo sapiens
aattgcatattctat

SEQ ID NO: 1382728 - DNA, 15 bp, Homo sapiens
gaattgcatattcta

SEQ ID NO: 1382729 - DNA, 15 bp, Homo sapiens
tgaattgcatattct

SEQ ID NO: 1382730 - DNA, 15 bp, Homo sapiens
ttgaattgcatattc

SEQ ID NO: 1382731 - DNA, 15 bp, Homo sapiens
tttgaattgcatatt

SEQ ID NO: 1382732 - DNA, 15 bp, Homo sapiens
ttttgaattgcatat

SEQ ID NO: 1382733 - DNA, 15 bp, Homo sapiens
cttttgaattgcata

SEQ ID NO: 1382734 - DNA, 15 bp, Homo sapiens
tcttttgaattgcat

SEQ ID NO: 1382735 - DNA, 15 bp, Homo sapiens
ttcttttgaattgca

SEQ ID NO: 1382736 - DNA, 15 bp, Homo sapiens
cttcttttgaattgc

SEQ ID NO: 1382737 - DNA, 15 bp, Homo sapiens
tcttcttttgaattg

SEQ ID NO: 1382738 - DNA, 15 bp, Homo sapiens
ctcttcttttgaatt

SEQ ID NO: 1382739 - DNA, 15 bp, Homo sapiens
cctcttcttttgaat

SEQ ID NO: 1382740 - DNA, 15 bp, Homo sapiens
tcctcttcttttgaa

SEQ ID NO: 1382741 - DNA, 15 bp, Homo sapiens
ctcctcttcttttga

SEQ ID NO: 1382742 - DNA, 15 bp, Homo sapiens
cctcctcttcttttg

SEQ ID NO: 1382743 - DNA, 15 bp, Homo sapiens
tcctcctcttctttt

SEQ ID NO: 1382744 - DNA, 15 bp, Homo sapiens
gtcctcctcttcttt

SEQ ID NO: 1382745 - DNA, 15 bp, Homo sapiens
agtcctcctcttctt

SEQ ID NO: 1382746 - DNA, 15 bp, Homo sapiens
aagtcctcctcttct

SEQ ID NO: 1382747 - DNA, 15 bp, Homo sapiens
taagtcctcctcttc

SEQ ID NO: 1382748 - DNA, 15 bp, Homo sapiens
ataagtcctcctctt

SEQ ID NO: 1382749 - DNA, 15 bp, Homo sapiens
aataagtcctcctct

SEQ ID NO: 1382750 - DNA, 15 bp, Homo sapiens
caataagtcctcctc

SEQ ID NO: 1382751 - DNA, 15 bp, Homo sapiens
ccaataagtcctcct

SEQ ID NO: 1382752 - DNA, 15 bp, Homo sapiens
tccaataagtcctcc

SEQ ID NO: 1382753 - DNA, 15 bp, Homo sapiens
atccaataagtcctc

SEQ ID NO: 1382754 - DNA, 15 bp, Homo sapiens
tatccaataagtcct

SEQ ID NO: 1382755 - DNA, 15 bp, Homo sapiens
ctatccaataagtcc

SEQ ID NO: 1382756 - DNA, 15 bp, Homo sapiens
cctatccaataagtc

SEQ ID NO: 1382757 - DNA, 15 bp, Homo sapiens
tcctatccaataagt

SEQ ID NO: 1382758 - DNA, 15 bp, Homo sapiens
ttcctatccaataag

SEQ ID NO: 1382759 - DNA, 15 bp, Homo sapiens
cttcctatccaataa

SEQ ID NO: 1382760 - DNA, 15 bp, Homo sapiens
tcttcctatccaata

SEQ ID NO: 1382761 - DNA, 15 bp, Homo sapiens
ttcttcctatccaat

SEQ ID NO: 1382762 - DNA, 15 bp, Homo sapiens
gttcttcctatccaa

SEQ ID NO: 1382763 - DNA, 15 bp, Homo sapiens
ggttcttcctatcca

SEQ ID NO: 1382764 - DNA, 15 bp, Homo sapiens
aggttcttcctatcc

SEQ ID NO: 1382765 - DNA, 15 bp, Homo sapiens
taggttcttcctatc

SEQ ID NO: 1382766 - DNA, 15 bp, Homo sapiens
ctaggttcttcctat

SEQ ID NO: 1382767 - DNA, 15 bp, Homo sapiens
cctaggttcttccta

SEQ ID NO: 1382768 - DNA, 15 bp, Homo sapiens
gcctaggttcttcct

SEQ ID NO: 1382769 - DNA, 15 bp, Homo sapiens
tgcctaggttcttcc

SEQ ID NO: 1382770 - DNA, 15 bp, Homo sapiens
atgcctaggttcttc

SEQ ID NO: 1382771 - DNA, 15 bp, Homo sapiens
gatgcctaggttctt

SEQ ID NO: 1382772 - DNA, 15 bp, Homo sapiens
agatgcctaggttct

SEQ ID NO: 1382773 - DNA, 15 bp, Homo sapiens
aagatgcctaggttc

SEQ ID NO: 1382774 - DNA, 15 bp, Homo sapiens
caagatgcctaggtt

SEQ ID NO: 1382775 - DNA, 15 bp, Homo sapiens
tcaagatgcctaggt

SEQ ID NO: 1382776 - DNA, 15 bp, Homo sapiens
ttcaagatgcctagg

SEQ ID NO: 1382777 - DNA, 15 bp, Homo sapiens
gttcaagatgcctag

SEQ ID NO: 1382778 - DNA, 15 bp, Homo sapiens
tgttcaagatgccta

SEQ ID NO: 1382779 - DNA, 15 bp, Homo sapiens
ttgttcaagatgcct

SEQ ID NO: 1382780 - DNA, 15 bp, Homo sapiens
tttgttcaagatgcc

SEQ ID NO: 1382781 - DNA, 15 bp, Homo sapiens
ctttgttcaagatgc

SEQ ID NO: 1382782 - DNA, 15 bp, Homo sapiens
tctttgttcaagatg

SEQ ID NO: 1382783 - DNA, 15 bp, Homo sapiens
ctctttgttcaagat

SEQ ID NO: 1382784 - DNA, 15 bp, Homo sapiens
actctttgttcaaga

SEQ ID NO: 1382785 - DNA, 15 bp, Homo sapiens
gactctttgttcaag

SEQ ID NO: 1382786 - DNA, 15 bp, Homo sapiens
agactctttgttcaa

SEQ ID NO: 1382787 - DNA, 15 bp, Homo sapiens
tagactctttgttca

SEQ ID NO: 1382788 - DNA, 15 bp, Homo sapiens
gtagactctttgttc

SEQ ID NO: 1382789 - DNA, 15 bp, Homo sapiens
agtagactctttgtt

SEQ ID NO: 1382790 - DNA, 15 bp, Homo sapiens
aagtagactctttgt

SEQ ID NO: 1382791 - DNA, 15 bp, Homo sapiens
aaagtagactctttg

SEQ ID NO: 1382792 - DNA, 15 bp, Homo sapiens
aaaagtagactcttt

SEQ ID NO: 1382793 - DNA, 15 bp, Homo sapiens
taaaagtagactctt

SEQ ID NO: 1382794 - DNA, 15 bp, Homo sapiens
ctaaaagtagactct

SEQ ID NO: 1382795 - DNA, 15 bp, Homo sapiens
cctaaaagtagactc

SEQ ID NO: 1382796 - DNA, 15 bp, Homo sapiens
acctaaaagtagact

SEQ ID NO: 1382797 - DNA, 15 bp, Homo sapiens
gacctaaaagtagac

SEQ ID NO: 1382798 - DNA, 15 bp, Homo sapiens
agacctaaaagtaga

SEQ ID NO: 1382799 - DNA, 15 bp, Homo sapiens
cagacctaaaagtag

SEQ ID NO: 1382800 - DNA, 15 bp, Homo sapiens
gcagacctaaaagta

SEQ ID NO: 1382801 - DNA, 15 bp, Homo sapiens
tgcagacctaaaagt

SEQ ID NO: 1382802 - DNA, 15 bp, Homo sapiens
ttgcagacctaaaag

SEQ ID NO: 1382803 - DNA, 15 bp, Homo sapiens
cttgcagacctaaaa

SEQ ID NO: 1382804 - DNA, 15 bp, Homo sapiens
tcttgcagacctaaa

SEQ ID NO: 1382805 - DNA, 15 bp, Homo sapiens
atcttgcagacctaa

SEQ ID NO: 1382806 - DNA, 15 bp, Homo sapiens
aatcttgcagaccta

SEQ ID NO: 1382807 - DNA, 15 bp, Homo sapiens
caatcttgcagacct

SEQ ID NO: 1382808 - DNA, 15 bp, Homo sapiens
tcaatcttgcagacc

SEQ ID NO: 1382809 - DNA, 15 bp, Homo sapiens
atcaatcttgcagac

SEQ ID NO: 1382810 - DNA, 15 bp, Homo sapiens
catcaatcttgcaga

SEQ ID NO: 1382811 - DNA, 15 bp, Homo sapiens
ccatcaatcttgcag

SEQ ID NO: 1382812 - DNA, 15 bp, Homo sapiens
tccatcaatcttgca

SEQ ID NO: 1382813 - DNA, 15 bp, Homo sapiens
ttccatcaatcttgc

SEQ ID NO: 1382814 - DNA, 15 bp, Homo sapiens
tttccatcaatcttg

SEQ ID NO: 1382815 - DNA, 15 bp, Homo sapiens
ctttccatcaatctt

SEQ ID NO: 1382816 - DNA, 15 bp, Homo sapiens
cctttccatcaatct

SEQ ID NO: 1382817 - DNA, 15 bp, Homo sapiens
gcctttccatcaatc

SEQ ID NO: 1382818 - DNA, 15 bp, Homo sapiens
ggcctttccatcaat

SEQ ID NO: 1382819 - DNA, 15 bp, Homo sapiens
aggcctttccatcaa

SEQ ID NO: 1382820 - DNA, 15 bp, Homo sapiens
aaggcctttccatca

SEQ ID NO: 1382821 - DNA, 15 bp, Homo sapiens
caaggcctttccatc

SEQ ID NO: 1382822 - DNA, 15 bp, Homo sapiens
acaaggcctttccat

SEQ ID NO: 1382823 - DNA, 15 bp, Homo sapiens
aacaaggcctttcca

SEQ ID NO: 1382824 - DNA, 15 bp, Homo sapiens
aaacaaggcctttcc

SEQ ID NO: 1382825 - DNA, 15 bp, Homo sapiens
taaacaaggcctttc

SEQ ID NO: 1382826 - DNA, 15 bp, Homo sapiens
ataaacaaggccttt

SEQ ID NO: 1382827 - DNA, 15 bp, Homo sapiens
aataaacaaggcctt

SEQ ID NO: 1382828 - DNA, 15 bp, Homo sapiens
caataaacaaggcct

SEQ ID NO: 1382829 - DNA, 15 bp, Homo sapiens
acaataaacaaggcc

SEQ ID NO: 1382830 - DNA, 15 bp, Homo sapiens
aacaataaacaaggc

SEQ ID NO: 1382831 - DNA, 15 bp, Homo sapiens
gaacaataaacaagg

SEQ ID NO: 1382832 - DNA, 15 bp, Homo sapiens
ggaacaataaacaag

SEQ ID NO: 1382833 - DNA, 15 bp, Homo sapiens
aggaacaataaacaa

SEQ ID NO: 1382834 - DNA, 15 bp, Homo sapiens
aaggaacaataaaca

SEQ ID NO: 1382835 - DNA, 15 bp, Homo sapiens
aaaggaacaataaac

SEQ ID NO: 1382836 - DNA, 15 bp, Homo sapiens
caaaggaacaataaa

SEQ ID NO: 1382837 - DNA, 15 bp, Homo sapiens
acaaaggaacaataa

SEQ ID NO: 1382838 - DNA, 15 bp, Homo sapiens
gacaaaggaacaata

SEQ ID NO: 1382839 - DNA, 15 bp, Homo sapiens
agacaaaggaacaat

SEQ ID NO: 1382840 - DNA, 15 bp, Homo sapiens
cagacaaaggaacaa

SEQ ID NO: 1382841 - DNA, 15 bp, Homo sapiens
tcagacaaaggaaca

SEQ ID NO: 1382842 - DNA, 15 bp, Homo sapiens
atcagacaaaggaac

SEQ ID NO: 1382843 - DNA, 15 bp, Homo sapiens
aatcagacaaaggaa

SEQ ID NO: 1382844 - DNA, 15 bp, Homo sapiens
aaatcagacaaagga

SEQ ID NO: 1382845 - DNA, 15 bp, Homo sapiens
aaaatcagacaaagg

SEQ ID NO: 1382846 - DNA, 15 bp, Homo sapiens
aaaaatcagacaaag

SEQ ID NO: 1382847 - DNA, 15 bp, Homo sapiens
caaaaatcagacaaa

SEQ ID NO: 1382848 - DNA, 15 bp, Homo sapiens
acaaaaatcagacaa

SEQ ID NO: 1382849 - DNA, 15 bp, Homo sapiens
aacaaaaatcagaca

SEQ ID NO: 1382850 - DNA, 15 bp, Homo sapiens
gaacaaaaatcagac

SEQ ID NO: 1382851 - DNA, 15 bp, Homo sapiens
ggaacaaaaatcaga

SEQ ID NO: 1382852 - DNA, 15 bp, Homo sapiens
gggaacaaaaatcag

SEQ ID NO: 1382853 - DNA, 15 bp, Homo sapiens
agggaacaaaaatca

SEQ ID NO: 1382854 - DNA, 15 bp, Homo sapiens
cagggaacaaaaatc

SEQ ID NO: 1382855 - DNA, 15 bp, Homo sapiens
gcagggaacaaaaat

SEQ ID NO: 1382856 - DNA, 15 bp, Homo sapiens
tgcagggaacaaaaa

SEQ ID NO: 1382857 - DNA, 15 bp, Homo sapiens
ctgcagggaacaaaa

SEQ ID NO: 1382858 - DNA, 15 bp, Homo sapiens
cctgcagggaacaaa

SEQ ID NO: 1382859 - DNA, 15 bp, Homo sapiens
acctgcagggaacaa

SEQ ID NO: 1382860 - DNA, 15 bp, Homo sapiens
tacctgcagggaaca

SEQ ID NO: 1382861 - DNA, 15 bp, Homo sapiens
ttacctgcagggaac

SEQ ID NO: 1382862 - DNA, 15 bp, Homo sapiens
tttacctgcagggaa

SEQ ID NO: 1382863 - DNA, 15 bp, Homo sapiens
atttacctgcaggga

SEQ ID NO: 1382864 - DNA, 15 bp, Homo sapiens
tatttacctgcaggg

SEQ ID NO: 1382865 - DNA, 15 bp, Homo sapiens
atatttacctgcagg

SEQ ID NO: 1382866 - DNA, 15 bp, Homo sapiens
catatttacctgcag

SEQ ID NO: 1382867 - DNA, 15 bp, Homo sapiens
tcatatttacctgca

SEQ ID NO: 1382868 - DNA, 15 bp, Homo sapiens
ctcatatttacctgc

SEQ ID NO: 1382869 - DNA, 15 bp, Homo sapiens
tctcatatttacctg

SEQ ID NO: 1382870 - DNA, 15 bp, Homo sapiens
gtctcatatttacct

SEQ ID NO: 1382871 - DNA, 15 bp, Homo sapiens
tgtctcatatttacc

SEQ ID NO: 1382872 - DNA, 15 bp, Homo sapiens
ttgtctcatatttac

SEQ ID NO: 1382873 - DNA, 15 bp, Homo sapiens
cttgtctcatattta

SEQ ID NO: 1382874 - DNA, 15 bp, Homo sapiens
acttgtctcatattt

SEQ ID NO: 1382875 - DNA, 15 bp, Homo sapiens
aacttgtctcatatt

SEQ ID NO: 1382876 - DNA, 15 bp, Homo sapiens
aaacttgtctcatat

SEQ ID NO: 1382877 - DNA, 15 bp, Homo sapiens
caaacttgtctcata

SEQ ID NO: 1382878 - DNA, 15 bp, Homo sapiens
tcaaacttgtctcat

SEQ ID NO: 1382879 - DNA, 15 bp, Homo sapiens
ttcaaacttgtctca

SEQ ID NO: 1382880 - DNA, 15 bp, Homo sapiens
cttcaaacttgtctc

SEQ ID NO: 1382881 - DNA, 15 bp, Homo sapiens
gcttcaaacttgtct

SEQ ID NO: 1382882 - DNA, 15 bp, Homo sapiens
agcttcaaacttgtc

SEQ ID NO: 1382883 - DNA, 15 bp, Homo sapiens
aagcttcaaacttgt

SEQ ID NO: 1382884 - DNA, 15 bp, Homo sapiens
taagcttcaaacttg

SEQ ID NO: 1382885 - DNA, 15 bp, Homo sapiens
ctaagcttcaaactt

SEQ ID NO: 1382886 - DNA, 15 bp, Homo sapiens
cctaagcttcaaact

SEQ ID NO: 1382887 - DNA, 15 bp, Homo sapiens
gcctaagcttcaaac

SEQ ID NO: 1382888 - DNA, 15 bp, Homo sapiens
ggcctaagcttcaaa

SEQ ID NO: 1382889 - DNA, 15 bp, Homo sapiens
tggcctaagcttcaa

SEQ ID NO: 1382890 - DNA, 15 bp, Homo sapiens
ctggcctaagcttca

SEQ ID NO: 1382891 - DNA, 15 bp, Homo sapiens
gctggcctaagcttc

SEQ ID NO: 1382892 - DNA, 15 bp, Homo sapiens
agctggcctaagctt

SEQ ID NO: 1382893 - DNA, 15 bp, Homo sapiens
cagctggcctaagct

SEQ ID NO: 1382894 - DNA, 15 bp, Homo sapiens
ccagctggcctaagc

SEQ ID NO: 1382895 - DNA, 15 bp, Homo sapiens
tccagctggcctaag

SEQ ID NO: 1382896 - DNA, 15 bp, Homo sapiens
ttccagctggcctaa

SEQ ID NO: 1382897 - DNA, 15 bp, Homo sapiens
tttccagctggccta

SEQ ID NO: 1382898 - DNA, 15 bp, Homo sapiens
gtttccagctggcct

SEQ ID NO: 1382899 - DNA, 15 bp, Homo sapiens
ggtttccagctggcc

SEQ ID NO: 1382900 - DNA, 15 bp, Homo sapiens
aggtttccagctggc

SEQ ID NO: 1382901 - DNA, 15 bp, Homo sapiens
caggtttccagctgg

SEQ ID NO: 1382902 - DNA, 15 bp, Homo sapiens
ccaggtttccagctg

SEQ ID NO: 1382903 - DNA, 15 bp, Homo sapiens
cccaggtttccagct

SEQ ID NO: 1382904 - DNA, 15 bp, Homo sapiens
acccaggtttccagc

SEQ ID NO: 1382905 - DNA, 15 bp, Homo sapiens
gacccaggtttccag

SEQ ID NO: 1382906 - DNA, 15 bp, Homo sapiens
agacccaggtttcca

SEQ ID NO: 1382907 - DNA, 15 bp, Homo sapiens
gagacccaggtttcc

SEQ ID NO: 1382908 - DNA, 15 bp, Homo sapiens
agagacccaggtttc

SEQ ID NO: 1382909 - DNA, 15 bp, Homo sapiens
cagagacccaggttt

SEQ ID NO: 1382910 - DNA, 15 bp, Homo sapiens
gcagagacccaggtt

SEQ ID NO: 1382911 - DNA, 15 bp, Homo sapiens
ggcagagacccaggt

SEQ ID NO: 1382912 - DNA, 15 bp, Homo sapiens
gggcagagacccagg

SEQ ID NO: 1382913 - DNA, 15 bp, Homo sapiens
ggggcagagacccag

SEQ ID NO: 1382914 - DNA, 15 bp, Homo sapiens
gggggcagagaccca

SEQ ID NO: 1382915 - DNA, 15 bp, Homo sapiens
tgggggcagagaccc

SEQ ID NO: 1382916 - DNA, 15 bp, Homo sapiens
ctgggggcagagacc

SEQ ID NO: 1382917 - DNA, 15 bp, Homo sapiens
gctgggggcagagac

SEQ ID NO: 1382918 - DNA, 15 bp, Homo sapiens
agctgggggcagaga

SEQ ID NO: 1382919 - DNA, 15 bp, Homo sapiens
gagctgggggcagag

SEQ ID NO: 1382920 - DNA, 15 bp, Homo sapiens
ggagctgggggcaga

SEQ ID NO: 1382921 - DNA, 15 bp, Homo sapiens
gggagctgggggcag

SEQ ID NO: 1382922 - DNA, 15 bp, Homo sapiens
tgggagctgggggca

SEQ ID NO: 1382923 - DNA, 15 bp, Homo sapiens
ctgggagctgggggc

SEQ ID NO: 1382924 - DNA, 15 bp, Homo sapiens
ggctgggagctgggg

SEQ ID NO: 1382925 - DNA, 15 bp, Homo sapiens
gggctgggagctggg

SEQ ID NO: 1382926 - DNA, 15 bp, Homo sapiens
ggggctgggagctgg

SEQ ID NO: 1382927 - DNA, 15 bp, Homo sapiens
tggggctgggagctg

SEQ ID NO: 1382928 - DNA, 15 bp, Homo sapiens
actggggctgggagc

SEQ ID NO: 1382929 - DNA, 15 bp, Homo sapiens
cactggggctgggag

SEQ ID NO: 1382930 - DNA, 15 bp, Homo sapiens
gcactggggctggga

SEQ ID NO: 1382931 - DNA, 15 bp, Homo sapiens
agcactggggctggg

SEQ ID NO: 1382932 - DNA, 15 bp, Homo sapiens
gagcactggggctgg

SEQ ID NO: 1382933 - DNA, 15 bp, Homo sapiens
ggagcactggggctg

SEQ ID NO: 1382934 - DNA, 15 bp, Homo sapiens
aggagcactggggct

SEQ ID NO: 1382935 - DNA, 15 bp, Homo sapiens
aaggagcactggggc

SEQ ID NO: 1382936 - DNA, 15 bp, Homo sapiens
caaggagcactgggg

SEQ ID NO: 1382937 - DNA, 15 bp, Homo sapiens
ccaaggagcactggg

SEQ ID NO: 1382938 - DNA, 15 bp, Homo sapiens
accaaggagcactgg

SEQ ID NO: 1382939 - DNA, 15 bp, Homo sapiens
aaccaaggagcactg

SEQ ID NO: 1382940 - DNA, 15 bp, Homo sapiens
taaccaaggagcact

SEQ ID NO: 1382941 - DNA, 15 bp, Homo sapiens
ataaccaaggagcac

SEQ ID NO: 1382942 - DNA, 15 bp, Homo sapiens
gataaccaaggagca

SEQ ID NO: 1382943 - DNA, 15 bp, Homo sapiens
ggataaccaaggagc

SEQ ID NO: 1382944 - DNA, 15 bp, Homo sapiens
aggataaccaaggag

SEQ ID NO: 1382945 - DNA, 15 bp, Homo sapiens
aaggataaccaagga

SEQ ID NO: 1382946 - DNA, 15 bp, Homo sapiens
aaaggataaccaagg

SEQ ID NO: 1382947 - DNA, 15 bp, Homo sapiens
gaaaggataaccaag

SEQ ID NO: 1382948 - DNA, 15 bp, Homo sapiens
agaaaggataaccaa

SEQ ID NO: 1382949 - DNA, 15 bp, Homo sapiens
cagaaaggataacca

SEQ ID NO: 1382950 - DNA, 15 bp, Homo sapiens
gcagaaaggataacc

SEQ ID NO: 1382951 - DNA, 15 bp, Homo sapiens
agcagaaaggataac

SEQ ID NO: 1382952 - DNA, 15 bp, Homo sapiens
aagcagaaaggataa

SEQ ID NO: 1382953 - DNA, 15 bp, Homo sapiens
gaagcagaaaggata

SEQ ID NO: 1382954 - DNA, 15 bp, Homo sapiens
agaagcagaaaggat

SEQ ID NO: 1382955 - DNA, 15 bp, Homo sapiens
cagaagcagaaagga

SEQ ID NO: 1382956 - DNA, 15 bp, Homo sapiens
acagaagcagaaagg

SEQ ID NO: 1382957 - DNA, 15 bp, Homo sapiens
gacagaagcagaaag

SEQ ID NO: 1382958 - DNA, 15 bp, Homo sapiens
tgacagaagcagaaa

SEQ ID NO: 1382959 - DNA, 15 bp, Homo sapiens
ttgacagaagcagaa

SEQ ID NO: 1382960 - DNA, 15 bp, Homo sapiens
tttgacagaagcaga

SEQ ID NO: 1382961 - DNA, 15 bp, Homo sapiens
atttgacagaagcag

SEQ ID NO: 1382962 - DNA, 15 bp, Homo sapiens
tatttgacagaagca

SEQ ID NO: 1382963 - DNA, 15 bp, Homo sapiens
ttatttgacagaagc

SEQ ID NO: 1382964 - DNA, 15 bp, Homo sapiens
attatttgacagaag

SEQ ID NO: 1382965 - DNA, 15 bp, Homo sapiens
tattatttgacagaa

SEQ ID NO: 1382966 - DNA, 15 bp, Homo sapiens
ttattatttgacaga

SEQ ID NO: 1382967 - DNA, 15 bp, Homo sapiens
attattatttgacag

SEQ ID NO: 1382968 - DNA, 15 bp, Homo sapiens
cattattatttgaca

SEQ ID NO: 1382969 - DNA, 15 bp, Homo sapiens
tcattattatttgac

SEQ ID NO: 1382970 - DNA, 15 bp, Homo sapiens
ttcattattatttga

SEQ ID NO: 1382971 - DNA, 15 bp, Homo sapiens
cttcattattatttg

SEQ ID NO: 1382972 - DNA, 15 bp, Homo sapiens
ccttcattattattt

SEQ ID NO: 1382973 - DNA, 15 bp, Homo sapiens
tccttcattattatt

SEQ ID NO: 1382974 - DNA, 15 bp, Homo sapiens
ctccttcattattat

SEQ ID NO: 1382975 - DNA, 15 bp, Homo sapiens
gctccttcattatta

SEQ ID NO: 1382976 - DNA, 15 bp, Homo sapiens
agctccttcattatt

SEQ ID NO: 1382977 - DNA, 15 bp, Homo sapiens
gagctccttcattat

SEQ ID NO: 1382978 - DNA, 15 bp, Homo sapiens
tgagctccttcatta

SEQ ID NO: 1382979 - DNA, 15 bp, Homo sapiens
gtgagctccttcatt

SEQ ID NO: 1382980 - DNA, 15 bp, Homo sapiens
agtgagctccttcat

SEQ ID NO: 1382981 - DNA, 15 bp, Homo sapiens
cagtgagctccttca

SEQ ID NO: 1382982 - DNA, 15 bp, Homo sapiens
ccagtgagctccttc

SEQ ID NO: 1382983 - DNA, 15 bp, Homo sapiens
cccagtgagctcctt

SEQ ID NO: 1382984 - DNA, 15 bp, Homo sapiens
gcccagtgagctcct

SEQ ID NO: 1382985 - DNA, 15 bp, Homo sapiens
tgcccagtgagctcc

SEQ ID NO: 1382986 - DNA, 15 bp, Homo sapiens
atgcccagtgagctc

SEQ ID NO: 1382987 - DNA, 15 bp, Homo sapiens
aatgcccagtgagct

SEQ ID NO: 1382988 - DNA, 15 bp, Homo sapiens
caatgcccagtgagc

SEQ ID NO: 1382989 - DNA, 15 bp, Homo sapiens
ccaatgcccagtgag

SEQ ID NO: 1382990 - DNA, 15 bp, Homo sapiens
accaatgcccagtga

SEQ ID NO: 1382991 - DNA, 15 bp, Homo sapiens
taccaatgcccagtg

SEQ ID NO: 1382992 - DNA, 15 bp, Homo sapiens
ttaccaatgcccagt

SEQ ID NO: 1382993 - DNA, 15 bp, Homo sapiens
gttaccaatgcccag

SEQ ID NO: 1382994 - DNA, 15 bp, Homo sapiens
agttaccaatgccca

SEQ ID NO: 1382995 - DNA, 15 bp, Homo sapiens
cagttaccaatgccc

SEQ ID NO: 1382996 - DNA, 15 bp, Homo sapiens
ccagttaccaatgcc

SEQ ID NO: 1382997 - DNA, 15 bp, Homo sapiens
cccagttaccaatgc

SEQ ID NO: 1382998 - DNA, 15 bp, Homo sapiens
acccagttaccaatg

SEQ ID NO: 1382999 - DNA, 15 bp, Homo sapiens
gacccagttaccaat

SEQ ID NO: 1383000 - DNA, 15 bp, Homo sapiens
ggacccagttaccaa

SEQ ID NO: 1383001 - DNA, 15 bp, Homo sapiens
aggacccagttacca

SEQ ID NO: 1383002 - DNA, 15 bp, Homo sapiens
aaggacccagttacc

SEQ ID NO: 1383003 - DNA, 15 bp, Homo sapiens
caaggacccagttac

SEQ ID NO: 1383004 - DNA, 15 bp, Homo sapiens
gcaaggacccagtta

SEQ ID NO: 1383005 - DNA, 15 bp, Homo sapiens
ggcaaggacccagtt

SEQ ID NO: 1383006 - DNA, 15 bp, Homo sapiens
tggcaaggacccagt

SEQ ID NO: 1383007 - DNA, 15 bp, Homo sapiens
ttggcaaggacccag

SEQ ID NO: 1383008 - DNA, 15 bp, Homo sapiens
tttggcaaggaccca

SEQ ID NO: 1383009 - DNA, 15 bp, Homo sapiens
atttggcaaggaccc

SEQ ID NO: 1383010 - DNA, 15 bp, Homo sapiens
catttggcaaggacc

SEQ ID NO: 1383011 - DNA, 15 bp, Homo sapiens
ccatttggcaaggac

SEQ ID NO: 1383012 - DNA, 15 bp, Homo sapiens
tccatttggcaagga

SEQ ID NO: 1383013 - DNA, 15 bp, Homo sapiens
atccatttggcaagg

SEQ ID NO: 1383014 - DNA, 15 bp, Homo sapiens
gatccatttggcaag

SEQ ID NO: 1383015 - DNA, 15 bp, Homo sapiens
agatccatttggcaa

SEQ ID NO: 1383016 - DNA, 15 bp, Homo sapiens
aagatccatttggca

SEQ ID NO: 1383017 - DNA, 15 bp, Homo sapiens
aaagatccatttggc

SEQ ID NO: 1383018 - DNA, 15 bp, Homo sapiens
caaagatccatttgg

SEQ ID NO: 1383019 - DNA, 15 bp, Homo sapiens
acaaagatccatttg

SEQ ID NO: 1383020 - DNA, 15 bp, Homo sapiens
aacaaagatccattt

SEQ ID NO: 1383021 - DNA, 15 bp, Homo sapiens
aaacaaagatccatt

SEQ ID NO: 1383022 - DNA, 15 bp, Homo sapiens
aaaacaaagatccat

SEQ ID NO: 1383023 - DNA, 15 bp, Homo sapiens
taaaacaaagatcca

SEQ ID NO: 1383024 - DNA, 15 bp, Homo sapiens
ttaaaacaaagatcc

SEQ ID NO: 1383025 - DNA, 15 bp, Homo sapiens
tttaaaacaaagatc

SEQ ID NO: 1383026 - DNA, 15 bp, Homo sapiens
atttaaaacaaagat

SEQ ID NO: 1383027 - DNA, 15 bp, Homo sapiens
tatttaaaacaaaga

SEQ ID NO: 1383028 - DNA, 15 bp, Homo sapiens
gtatttaaaacaaag

SEQ ID NO: 1383029 - DNA, 15 bp, Homo sapiens
cgtatttaaaacaaa

SEQ ID NO: 1383030 - DNA, 15 bp, Homo sapiens
tcgtatttaaaacaa

SEQ ID NO: 1383031 - DNA, 15 bp, Homo sapiens
atcgtatttaaaaca

SEQ ID NO: 1383032 - DNA, 15 bp, Homo sapiens
gatcgtatttaaaac

SEQ ID NO: 1383033 - DNA, 15 bp, Homo sapiens
agatcgtatttaaaa

SEQ ID NO: 1383034 - DNA, 15 bp, Homo sapiens
cagatcgtatttaaa

SEQ ID NO: 1383035 - DNA, 15 bp, Homo sapiens
ccagatcgtatttaa

SEQ ID NO: 1383036 - DNA, 15 bp, Homo sapiens
cccagatcgtattta

SEQ ID NO: 1383037 - DNA, 15 bp, Homo sapiens
gcccagatcgtattt

SEQ ID NO: 1383038 - DNA, 15 bp, Homo sapiens
ggcccagatcgtatt

SEQ ID NO: 1383039 - DNA, 15 bp, Homo sapiens
gggcccagatcgtat

SEQ ID NO: 1383040 - DNA, 15 bp, Homo sapiens
agggcccagatcgta

SEQ ID NO: 1383041 - DNA, 15 bp, Homo sapiens
cagggcccagatcgt

SEQ ID NO: 1383042 - DNA, 15 bp, Homo sapiens
tcagggcccagatcg

SEQ ID NO: 1383043 - DNA, 15 bp, Homo sapiens
ctcagggcccagatc

SEQ ID NO: 1383044 - DNA, 15 bp, Homo sapiens
actcagggcccagat

SEQ ID NO: 1383045 - DNA, 15 bp, Homo sapiens
tactcagggcccaga

SEQ ID NO: 1383046 - DNA, 15 bp, Homo sapiens
atactcagggcccag

SEQ ID NO: 1383047 - DNA, 15 bp, Homo sapiens
tatactcagggccca

SEQ ID NO: 1383048 - DNA, 15 bp, Homo sapiens
ctatactcagggccc

SEQ ID NO: 1383049 - DNA, 15 bp, Homo sapiens
gctatactcagggcc

SEQ ID NO: 1383050 - DNA, 15 bp, Homo sapiens
agctatactcagggc

SEQ ID NO: 1383051 - DNA, 15 bp, Homo sapiens
aagctatactcaggg

SEQ ID NO: 1383052 - DNA, 15 bp, Homo sapiens
gaagctatactcagg

SEQ ID NO: 1383053 - DNA, 15 bp, Homo sapiens
agaagctatactcag

SEQ ID NO: 1383054 - DNA, 15 bp, Homo sapiens
cagaagctatactca

SEQ ID NO: 1383055 - DNA, 15 bp, Homo sapiens
ccagaagctatactc

SEQ ID NO: 1383056 - DNA, 15 bp, Homo sapiens
gccagaagctatact

SEQ ID NO: 1383057 - DNA, 15 bp, Homo sapiens
ggccagaagctatac

SEQ ID NO: 1383058 - DNA, 15 bp, Homo sapiens
gggccagaagctata

SEQ ID NO: 1383059 - DNA, 15 bp, Homo sapiens
agggccagaagctat

SEQ ID NO: 1383060 - DNA, 15 bp, Homo sapiens
aagggccagaagcta

SEQ ID NO: 1383061 - DNA, 15 bp, Homo sapiens
gaagggccagaagct

SEQ ID NO: 1383062 - DNA, 15 bp, Homo sapiens
agaagggccagaagc

SEQ ID NO: 1383063 - DNA, 15 bp, Homo sapiens
cagaagggccagaag

SEQ ID NO: 1383064 - DNA, 15 bp, Homo sapiens
gcagaagggccagaa

SEQ ID NO: 1383065 - DNA, 15 bp, Homo sapiens
ggcagaagggccaga

SEQ ID NO: 1383066 - DNA, 15 bp, Homo sapiens
aggcagaagggccag

SEQ ID NO: 1383067 - DNA, 15 bp, Homo sapiens
aaggcagaagggcca

SEQ ID NO: 1383068 - DNA, 15 bp, Homo sapiens
caaggcagaagggcc

SEQ ID NO: 1383069 - DNA, 15 bp, Homo sapiens
acaaggcagaagggc

SEQ ID NO: 1383070 - DNA, 15 bp, Homo sapiens
tacaaggcagaaggg

SEQ ID NO: 1383071 - DNA, 15 bp, Homo sapiens
ttacaaggcagaagg

SEQ ID NO: 1383072 - DNA, 15 bp, Homo sapiens
cttacaaggcagaag

SEQ ID NO: 1383073 - DNA, 15 bp, Homo sapiens
tcttacaaggcagaa

SEQ ID NO: 1383074 - DNA, 15 bp, Homo sapiens
atcttacaaggcaga

SEQ ID NO: 1383075 - DNA, 15 bp, Homo sapiens
tatcttacaaggcag

SEQ ID NO: 1383076 - DNA, 15 bp, Homo sapiens
atatcttacaaggca

SEQ ID NO: 1383077 - DNA, 15 bp, Homo sapiens
tatatcttacaaggc

SEQ ID NO: 1383078 - DNA, 15 bp, Homo sapiens
ctatatcttacaagg

SEQ ID NO: 1383079 - DNA, 15 bp, Homo sapiens
cctatatcttacaag

SEQ ID NO: 1383080 - DNA, 15 bp, Homo sapiens
acctatatcttacaa

SEQ ID NO: 1383081 - DNA, 15 bp, Homo sapiens
gacctatatcttaca

SEQ ID NO: 1383082 - DNA, 15 bp, Homo sapiens
ggacctatatcttac

SEQ ID NO: 1383083 - DNA, 15 bp, Homo sapiens
tggacctatatctta

SEQ ID NO: 1383084 - DNA, 15 bp, Homo sapiens
ttggacctatatctt

SEQ ID NO: 1383085 - DNA, 15 bp, Homo sapiens
tttggacctatatct

SEQ ID NO: 1383086 - DNA, 15 bp, Homo sapiens
gtttggacctatatc

SEQ ID NO: 1383087 - DNA, 15 bp, Homo sapiens
ggtttggacctatat

SEQ ID NO: 1383088 - DNA, 15 bp, Homo sapiens
tggtttggacctata

SEQ ID NO: 1383089 - DNA, 15 bp, Homo sapiens
gtggtttggacctat

SEQ ID NO: 1383090 - DNA, 15 bp, Homo sapiens
agtggtttggaccta

SEQ ID NO: 1383091 - DNA, 15 bp, Homo sapiens
aagtggtttggacct

SEQ ID NO: 1383092 - DNA, 15 bp, Homo sapiens
gaagtggtttggacc

SEQ ID NO: 1383093 - DNA, 15 bp, Homo sapiens
ggaagtggtttggac

SEQ ID NO: 1383094 - DNA, 15 bp, Homo sapiens
aggaagtggtttgga

SEQ ID NO: 1383095 - DNA, 15 bp, Homo sapiens
gaggaagtggtttgg

SEQ ID NO: 1383096 - DNA, 15 bp, Homo sapiens
tgaggaagtggtttg

SEQ ID NO: 1383097 - DNA, 15 bp, Homo sapiens
ctgaggaagtggttt

SEQ ID NO: 1383098 - DNA, 15 bp, Homo sapiens
gctgaggaagtggtt

SEQ ID NO: 1383099 - DNA, 15 bp, Homo sapiens
ggctgaggaagtggt

SEQ ID NO: 1383100 - DNA, 15 bp, Homo sapiens
gggctgaggaagtgg

SEQ ID NO: 1383101 - DNA, 15 bp, Homo sapiens
agggctgaggaagtg

SEQ ID NO: 1383102 - DNA, 15 bp, Homo sapiens
gagggctgaggaagt

SEQ ID NO: 1383103 - DNA, 15 bp, Homo sapiens
agagggctgaggaag

SEQ ID NO: 1383104 - DNA, 15 bp, Homo sapiens
gagagggctgaggaa

SEQ ID NO: 1383105 - DNA, 15 bp, Homo sapiens
tgagagggctgagga

SEQ ID NO: 1383106 - DNA, 15 bp, Homo sapiens
atgagagggctgagg

SEQ ID NO: 1383107 - DNA, 15 bp, Homo sapiens
aatgagagggctgag

SEQ ID NO: 1383108 - DNA, 15 bp, Homo sapiens
gaatgagagggctga

SEQ ID NO: 1383109 - DNA, 15 bp, Homo sapiens
ggaatgagagggctg

SEQ ID NO: 1383110 - DNA, 15 bp, Homo sapiens
gggaatgagagggct

SEQ ID NO: 1383111 - DNA, 15 bp, Homo sapiens
tgggaatgagagggc

SEQ ID NO: 1383112 - DNA, 15 bp, Homo sapiens
ttgggaatgagaggg

SEQ ID NO: 1383113 - DNA, 15 bp, Homo sapiens
attgggaatgagagg

SEQ ID NO: 1383114 - DNA, 15 bp, Homo sapiens
aattgggaatgagag

SEQ ID NO: 1383115 - DNA, 15 bp, Homo sapiens
gaattgggaatgaga

SEQ ID NO: 1383116 - DNA, 15 bp, Homo sapiens
ggaattgggaatgag

SEQ ID NO: 1383117 - DNA, 15 bp, Homo sapiens
tggaattgggaatga

SEQ ID NO: 1383118 - DNA, 15 bp, Homo sapiens
atggaattgggaatg

SEQ ID NO: 1383119 - DNA, 15 bp, Homo sapiens
gatggaattgggaat

SEQ ID NO: 1383120 - DNA, 15 bp, Homo sapiens
ggatggaattgggaa

SEQ ID NO: 1383121 - DNA, 15 bp, Homo sapiens
gggatggaattggga

SEQ ID NO: 1383122 - DNA, 15 bp, Homo sapiens
ggggatggaattggg

SEQ ID NO: 1383123 - DNA, 15 bp, Homo sapiens
tggggatggaattgg

SEQ ID NO: 1383124 - DNA, 15 bp, Homo sapiens
gtggggatggaattg

SEQ ID NO: 1383125 - DNA, 15 bp, Homo sapiens
agtggggatggaatt

SEQ ID NO: 1383126 - DNA, 15 bp, Homo sapiens
aagtggggatggaat

SEQ ID NO: 1383127 - DNA, 15 bp, Homo sapiens
gaagtggggatggaa

SEQ ID NO: 1383128 - DNA, 15 bp, Homo sapiens
ggaagtggggatgga

SEQ ID NO: 1383129 - DNA, 15 bp, Homo sapiens
gggaagtggggatgg

SEQ ID NO: 1383130 - DNA, 15 bp, Homo sapiens
agggaagtggggatg

SEQ ID NO: 1383131 - DNA, 15 bp, Homo sapiens
aagggaagtggggat

SEQ ID NO: 1383132 - DNA, 15 bp, Homo sapiens
taagggaagtgggga

SEQ ID NO: 1383133 - DNA, 15 bp, Homo sapiens
ataagggaagtgggg

SEQ ID NO: 1383134 - DNA, 15 bp, Homo sapiens
aataagggaagtggg

SEQ ID NO: 1383135 - DNA, 15 bp, Homo sapiens
gaataagggaagtgg

SEQ ID NO: 1383136 - DNA, 15 bp, Homo sapiens
ggaataagggaagtg

SEQ ID NO: 1383137 - DNA, 15 bp, Homo sapiens
gggaataagggaagt

SEQ ID NO: 1383138 - DNA, 15 bp, Homo sapiens
tgggaataagggaag

SEQ ID NO: 1383139 - DNA, 15 bp, Homo sapiens
ctgggaataagggaa

SEQ ID NO: 1383140 - DNA, 15 bp, Homo sapiens
tctgggaataaggga

SEQ ID NO: 1383141 - DNA, 15 bp, Homo sapiens
ttctgggaataaggg

SEQ ID NO: 1383142 - DNA, 15 bp, Homo sapiens
cttctgggaataagg

SEQ ID NO: 1383143 - DNA, 15 bp, Homo sapiens
tcttctgggaataag

SEQ ID NO: 1383144 - DNA, 15 bp, Homo sapiens
atcttctgggaataa

SEQ ID NO: 1383145 - DNA, 15 bp, Homo sapiens
tatcttctgggaata

SEQ ID NO: 1383146 - DNA, 15 bp, Homo sapiens
atatcttctgggaat

SEQ ID NO: 1383147 - DNA, 15 bp, Homo sapiens
tatatcttctgggaa

SEQ ID NO: 1383148 - DNA, 15 bp, Homo sapiens
gtatatcttctggga

SEQ ID NO: 1383149 - DNA, 15 bp, Homo sapiens
ggtatatcttctggg

SEQ ID NO: 1383150 - DNA, 15 bp, Homo sapiens
aggtatatcttctgg

SEQ ID NO: 1383151 - DNA, 15 bp, Homo sapiens
taggtatatcttctg

SEQ ID NO: 1383152 - DNA, 15 bp, Homo sapiens
ttaggtatatcttct

SEQ ID NO: 1383153 - DNA, 15 bp, Homo sapiens
gttaggtatatcttc

SEQ ID NO: 1383154 - DNA, 15 bp, Homo sapiens
ggttaggtatatctt

SEQ ID NO: 1383155 - DNA, 15 bp, Homo sapiens
aggttaggtatatct

SEQ ID NO: 1383156 - DNA, 15 bp, Homo sapiens
caggttaggtatatc

SEQ ID NO: 1383157 - DNA, 15 bp, Homo sapiens
gcaggttaggtatat

SEQ ID NO: 1383158 - DNA, 15 bp, Homo sapiens
tgcaggttaggtata

SEQ ID NO: 1383159 - DNA, 15 bp, Homo sapiens
gtgcaggttaggtat

SEQ ID NO: 1383160 - DNA, 15 bp, Homo sapiens
ggtgcaggttaggta

SEQ ID NO: 1383161 - DNA, 15 bp, Homo sapiens
aggtgcaggttaggt

SEQ ID NO: 1383162 - DNA, 15 bp, Homo sapiens
gaggtgcaggttagg

SEQ ID NO: 1383163 - DNA, 15 bp, Homo sapiens
ggaggtgcaggttag

SEQ ID NO: 1383164 - DNA, 15 bp, Homo sapiens
tggaggtgcaggtta

SEQ ID NO: 1383165 - DNA, 15 bp, Homo sapiens
gtggaggtgcaggtt

SEQ ID NO: 1383166 - DNA, 15 bp, Homo sapiens
agtggaggtgcaggt

SEQ ID NO: 1383167 - DNA, 15 bp, Homo sapiens
cagtggaggtgcagg

SEQ ID NO: 1383168 - DNA, 15 bp, Homo sapiens
tcagtggaggtgcag

SEQ ID NO: 1383169 - DNA, 15 bp, Homo sapiens
ctcagtggaggtgca

SEQ ID NO: 1383170 - DNA, 15 bp, Homo sapiens
tctcagtggaggtgc

SEQ ID NO: 1383171 - DNA, 15 bp, Homo sapiens
atctcagtggaggtg

SEQ ID NO: 1383172 - DNA, 15 bp, Homo sapiens
gatctcagtggaggt

SEQ ID NO: 1383173 - DNA, 15 bp, Homo sapiens
tgatctcagtggagg

SEQ ID NO: 1383174 - DNA, 15 bp, Homo sapiens
ctgatctcagtggag

SEQ ID NO: 1383175 - DNA, 15 bp, Homo sapiens
actgatctcagtgga

SEQ ID NO: 1383176 - DNA, 15 bp, Homo sapiens
cactgatctcagtgg

SEQ ID NO: 1383177 - DNA, 15 bp, Homo sapiens
acactgatctcagtg

SEQ ID NO: 1383178 - DNA, 15 bp, Homo sapiens
gacactgatctcagt

SEQ ID NO: 1383179 - DNA, 15 bp, Homo sapiens
tgacactgatctcag

SEQ ID NO: 1383180 - DNA, 15 bp, Homo sapiens
gtgacactgatctca

SEQ ID NO: 1383181 - DNA, 15 bp, Homo sapiens
ggtgacactgatctc

SEQ ID NO: 1383182 - DNA, 15 bp, Homo sapiens
gggtgacactgatct

SEQ ID NO: 1383183 - DNA, 15 bp, Homo sapiens
tgggtgacactgatc

SEQ ID NO: 1383184 - DNA, 15 bp, Homo sapiens
ctgggtgacactgat

SEQ ID NO: 1383185 - DNA, 15 bp, Homo sapiens
actgggtgacactga

SEQ ID NO: 1383186 - DNA, 15 bp, Homo sapiens
aactgggtgacactg

SEQ ID NO: 1383187 - DNA, 15 bp, Homo sapiens
aaactgggtgacact

SEQ ID NO: 1383188 - DNA, 15 bp, Homo sapiens
aaaactgggtgacac

SEQ ID NO: 1383189 - DNA, 15 bp, Homo sapiens
aaaaactgggtgaca

SEQ ID NO: 1383190 - DNA, 15 bp, Homo sapiens
taaaaactgggtgac

SEQ ID NO: 1383191 - DNA, 15 bp, Homo sapiens
ataaaaactgggtga

SEQ ID NO: 1383192 - DNA, 15 bp, Homo sapiens
gataaaaactgggtg

SEQ ID NO: 1383193 - DNA, 15 bp, Homo sapiens
ggataaaaactgggt

SEQ ID NO: 1383194 - DNA, 15 bp, Homo sapiens
tggataaaaactggg

SEQ ID NO: 1383195 - DNA, 15 bp, Homo sapiens
ctggataaaaactgg

SEQ ID NO: 1383196 - DNA, 15 bp, Homo sapiens
actggataaaaactg

SEQ ID NO: 1383197 - DNA, 15 bp, Homo sapiens
aactggataaaaact

SEQ ID NO: 1383198 - DNA, 15 bp, Homo sapiens
taactggataaaaac

SEQ ID NO: 1383199 - DNA, 15 bp, Homo sapiens
ataactggataaaaa

SEQ ID NO: 1383200 - DNA, 15 bp, Homo sapiens
aataactggataaaa

SEQ ID NO: 1383201 - DNA, 15 bp, Homo sapiens
caataactggataaa

SEQ ID NO: 1383202 - DNA, 15 bp, Homo sapiens
gcaataactggataa

SEQ ID NO: 1383203 - DNA, 15 bp, Homo sapiens
ggcaataactggata

SEQ ID NO: 1383204 - DNA, 15 bp, Homo sapiens
aggcaataactggat

SEQ ID NO: 1383205 - DNA, 15 bp, Homo sapiens
aaggcaataactgga

SEQ ID NO: 1383206 - DNA, 15 bp, Homo sapiens
gaaggcaataactgg

SEQ ID NO: 1383207 - DNA, 15 bp, Homo sapiens
agaaggcaataactg

SEQ ID NO: 1383208 - DNA, 15 bp, Homo sapiens
tagaaggcaataact

SEQ ID NO: 1383209 - DNA, 15 bp, Homo sapiens
ttagaaggcaataac

SEQ ID NO: 1383210 - DNA, 15 bp, Homo sapiens
gttagaaggcaataa

SEQ ID NO: 1383211 - DNA, 15 bp, Homo sapiens
ggttagaaggcaata

SEQ ID NO: 1383212 - DNA, 15 bp, Homo sapiens
aggttagaaggcaat

SEQ ID NO: 1383213 - DNA, 15 bp, Homo sapiens
caggttagaaggcaa

SEQ ID NO: 1383214 - DNA, 15 bp, Homo sapiens
ccaggttagaaggca

SEQ ID NO: 1383215 - DNA, 15 bp, Homo sapiens
cccaggttagaaggc

SEQ ID NO: 1383216 - DNA, 15 bp, Homo sapiens
tcccaggttagaagg

SEQ ID NO: 1383217 - DNA, 15 bp, Homo sapiens
ttcccaggttagaag

SEQ ID NO: 1383218 - DNA, 15 bp, Homo sapiens
tttcccaggttagaa

SEQ ID NO: 1383219 - DNA, 15 bp, Homo sapiens
gtttcccaggttaga

SEQ ID NO: 1383220 - DNA, 15 bp, Homo sapiens
tgtttcccaggttag

SEQ ID NO: 1383221 - DNA, 15 bp, Homo sapiens
ctgtttcccaggtta

SEQ ID NO: 1383222 - DNA, 15 bp, Homo sapiens
gctgtttcccaggtt

SEQ ID NO: 1383223 - DNA, 15 bp, Homo sapiens
agctgtttcccaggt

SEQ ID NO: 1383224 - DNA, 15 bp, Homo sapiens
gagctgtttcccagg

SEQ ID NO: 1383225 - DNA, 15 bp, Homo sapiens
tgagctgtttcccag

SEQ ID NO: 1383226 - DNA, 15 bp, Homo sapiens
atgagctgtttccca

SEQ ID NO: 1383227 - DNA, 15 bp, Homo sapiens
tatgagctgtttccc

SEQ ID NO: 1383228 - DNA, 15 bp, Homo sapiens
atatgagctgtttcc

SEQ ID NO: 1383229 - DNA, 15 bp, Homo sapiens
gatatgagctgtttc

SEQ ID NO: 1383230 - DNA, 15 bp, Homo sapiens
tgatatgagctgttt

SEQ ID NO: 1383231 - DNA, 15 bp, Homo sapiens
gtgatatgagctgtt

SEQ ID NO: 1383232 - DNA, 15 bp, Homo sapiens
tgtgatatgagctgt

SEQ ID NO: 1383233 - DNA, 15 bp, Homo sapiens
gtgtgatatgagctg

SEQ ID NO: 1383234 - DNA, 15 bp, Homo sapiens
agtgtgatatgagct

SEQ ID NO: 1383235 - DNA, 15 bp, Homo sapiens
gagtgtgatatgagc

SEQ ID NO: 1383236 - DNA, 15 bp, Homo sapiens
agagtgtgatatgag

SEQ ID NO: 1383237 - DNA, 15 bp, Homo sapiens
tagagtgtgatatga

SEQ ID NO: 1383238 - DNA, 15 bp, Homo sapiens
gtagagtgtgatatg

SEQ ID NO: 1383239 - DNA, 15 bp, Homo sapiens
agtagagtgtgatat

SEQ ID NO: 1383240 - DNA, 15 bp, Homo sapiens
aagtagagtgtgata

SEQ ID NO: 1383241 - DNA, 15 bp, Homo sapiens
aaagtagagtgtgat

SEQ ID NO: 1383242 - DNA, 15 bp, Homo sapiens
gaaagtagagtgtga

SEQ ID NO: 1383243 - DNA, 15 bp, Homo sapiens
ggaaagtagagtgtg

SEQ ID NO: 1383244 - DNA, 15 bp, Homo sapiens
tggaaagtagagtgt

SEQ ID NO: 1383245 - DNA, 15 bp, Homo sapiens
ttggaaagtagagtg

SEQ ID NO: 1383246 - DNA, 15 bp, Homo sapiens
tttggaaagtagagt

SEQ ID NO: 1383247 - DNA, 15 bp, Homo sapiens
ttttggaaagtagag

SEQ ID NO: 1383248 - DNA, 15 bp, Homo sapiens
attttggaaagtaga

SEQ ID NO: 1383249 - DNA, 15 bp, Homo sapiens
tattttggaaagtag

SEQ ID NO: 1383250 - DNA, 15 bp, Homo sapiens
ctattttggaaagta

SEQ ID NO: 1383251 - DNA, 15 bp, Homo sapiens
tctattttggaaagt

SEQ ID NO: 1383252 - DNA, 15 bp, Homo sapiens
ttctattttggaaag

SEQ ID NO: 1383253 - DNA, 15 bp, Homo sapiens
attctattttggaaa

SEQ ID NO: 1383254 - DNA, 15 bp, Homo sapiens
cattctattttggaa

SEQ ID NO: 1383255 - DNA, 15 bp, Homo sapiens
acattctattttgga

SEQ ID NO: 1383256 - DNA, 15 bp, Homo sapiens
gacattctattttgg

SEQ ID NO: 1383257 - DNA, 15 bp, Homo sapiens
agacattctattttg

SEQ ID NO: 1383258 - DNA, 15 bp, Homo sapiens
gagacattctatttt

SEQ ID NO: 1383259 - DNA, 15 bp, Homo sapiens
ggagacattctattt

SEQ ID NO: 1383260 - DNA, 15 bp, Homo sapiens
gggagacattctatt

SEQ ID NO: 1383261 - DNA, 15 bp, Homo sapiens
ggggagacattctat

SEQ ID NO: 1383262 - DNA, 15 bp, Homo sapiens
gggggagacattcta

SEQ ID NO: 1383263 - DNA, 15 bp, Homo sapiens
agggggagacattct

SEQ ID NO: 1383264 - DNA, 15 bp, Homo sapiens
tagggggagacattc

SEQ ID NO: 1383265 - DNA, 15 bp, Homo sapiens
atagggggagacatt

SEQ ID NO: 1383266 - DNA, 15 bp, Homo sapiens
aatagggggagacat

SEQ ID NO: 1383267 - DNA, 15 bp, Homo sapiens
gaatagggggagaca

SEQ ID NO: 1383268 - DNA, 15 bp, Homo sapiens
tgaatagggggagac

SEQ ID NO: 1383269 - DNA, 15 bp, Homo sapiens
atgaatagggggaga

SEQ ID NO: 1383270 - DNA, 15 bp, Homo sapiens
aatgaatagggggag

SEQ ID NO: 1383271 - DNA, 15 bp, Homo sapiens
gaatgaataggggga

SEQ ID NO: 1383272 - DNA, 15 bp, Homo sapiens
agaatgaataggggg

SEQ ID NO: 1383273 - DNA, 15 bp, Homo sapiens
aagaatgaatagggg

SEQ ID NO: 1383274 - DNA, 15 bp, Homo sapiens
gaagaatgaataggg

SEQ ID NO: 1383275 - DNA, 15 bp, Homo sapiens
agaagaatgaatagg

SEQ ID NO: 1383276 - DNA, 15 bp, Homo sapiens
aagaagaatgaatag

SEQ ID NO: 1383277 - DNA, 15 bp, Homo sapiens
aaagaagaatgaata

SEQ ID NO: 1383278 - DNA, 15 bp, Homo sapiens
gaaagaagaatgaat

SEQ ID NO: 1383279 - DNA, 15 bp, Homo sapiens
agaaagaagaatgaa

SEQ ID NO: 1383280 - DNA, 15 bp, Homo sapiens
gagaaagaagaatga

SEQ ID NO: 1383281 - DNA, 15 bp, Homo sapiens
agagaaagaagaatg

SEQ ID NO: 1383282 - DNA, 15 bp, Homo sapiens
aagagaaagaagaat

SEQ ID NO: 1383283 - DNA, 15 bp, Homo sapiens
aaagagaaagaagaa

SEQ ID NO: 1383284 - DNA, 15 bp, Homo sapiens
gaaagagaaagaaga

SEQ ID NO: 1383285 - DNA, 15 bp, Homo sapiens
agaaagagaaagaag

SEQ ID NO: 1383286 - DNA, 15 bp, Homo sapiens
aagaaagagaaagaa

SEQ ID NO: 1383287 - DNA, 15 bp, Homo sapiens
gaagaaagagaaaga

SEQ ID NO: 1383288 - DNA, 15 bp, Homo sapiens
ggaagaaagagaaag

SEQ ID NO: 1383289 - DNA, 15 bp, Homo sapiens
aggaagaaagagaaa

SEQ ID NO: 1383290 - DNA, 15 bp, Homo sapiens
taggaagaaagagaa

SEQ ID NO: 1383291 - DNA, 15 bp, Homo sapiens
ataggaagaaagaga

SEQ ID NO: 1383292 - DNA, 15 bp, Homo sapiens
gataggaagaaagag

SEQ ID NO: 1383293 - DNA, 15 bp, Homo sapiens
agataggaagaaaga

SEQ ID NO: 1383294 - DNA, 15 bp, Homo sapiens
aagataggaagaaag

SEQ ID NO: 1383295 - DNA, 15 bp, Homo sapiens
taagataggaagaaa

SEQ ID NO: 1383296 - DNA, 15 bp, Homo sapiens
ctaagataggaagaa

SEQ ID NO: 1383297 - DNA, 15 bp, Homo sapiens
tctaagataggaaga

SEQ ID NO: 1383298 - DNA, 15 bp, Homo sapiens
ctctaagataggaag

SEQ ID NO: 1383299 - DNA, 15 bp, Homo sapiens
gctctaagataggaa

SEQ ID NO: 1383300 - DNA, 15 bp, Homo sapiens
tgctctaagatagga

SEQ ID NO: 1383301 - DNA, 15 bp, Homo sapiens
ttgctctaagatagg

SEQ ID NO: 1383302 - DNA, 15 bp, Homo sapiens
cttgctctaagatag

SEQ ID NO: 1383303 - DNA, 15 bp, Homo sapiens
tcttgctctaagata

SEQ ID NO: 1383304 - DNA, 15 bp, Homo sapiens
ttcttgctctaagat

SEQ ID NO: 1383305 - DNA, 15 bp, Homo sapiens
cttcttgctctaaga

SEQ ID NO: 1383306 - DNA, 15 bp, Homo sapiens
acttcttgctctaag

SEQ ID NO: 1383307 - DNA, 15 bp, Homo sapiens
cacttcttgctctaa

SEQ ID NO: 1383308 - DNA, 15 bp, Homo sapiens
tcacttcttgctcta

SEQ ID NO: 1383309 - DNA, 15 bp, Homo sapiens
ctcacttcttgctct

SEQ ID NO: 1383310 - DNA, 15 bp, Homo sapiens
tctcacttcttgctc

SEQ ID NO: 1383311 - DNA, 15 bp, Homo sapiens
ttctcacttcttgct

SEQ ID NO: 1383312 - DNA, 15 bp, Homo sapiens
cttctcacttcttgc

SEQ ID NO: 1383313 - DNA, 15 bp, Homo sapiens
acttctcacttcttg

SEQ ID NO: 1383314 - DNA, 15 bp, Homo sapiens
cacttctcacttctt

SEQ ID NO: 1383315 - DNA, 15 bp, Homo sapiens
ccacttctcacttct

SEQ ID NO: 1383316 - DNA, 15 bp, Homo sapiens
accacttctcacttc

SEQ ID NO: 1383317 - DNA, 15 bp, Homo sapiens
taccacttctcactt

SEQ ID NO: 1383318 - DNA, 15 bp, Homo sapiens
ctaccacttctcact

SEQ ID NO: 1383319 - DNA, 15 bp, Homo sapiens
cctaccacttctcac

SEQ ID NO: 1383320 - DNA, 15 bp, Homo sapiens
acctaccacttctca

SEQ ID NO: 1383321 - DNA, 15 bp, Homo sapiens
aacctaccacttctc

SEQ ID NO: 1383322 - DNA, 15 bp, Homo sapiens
taacctaccacttct

SEQ ID NO: 1383323 - DNA, 15 bp, Homo sapiens
gtaacctaccacttc

SEQ ID NO: 1383324 - DNA, 15 bp, Homo sapiens
agtaacctaccactt

SEQ ID NO: 1383325 - DNA, 15 bp, Homo sapiens
aagtaacctaccact

SEQ ID NO: 1383326 - DNA, 15 bp, Homo sapiens
aaagtaacctaccac

SEQ ID NO: 1383327 - DNA, 15 bp, Homo sapiens
aaaagtaacctacca

SEQ ID NO: 1383328 - DNA, 15 bp, Homo sapiens
aaaaagtaacctacc

SEQ ID NO: 1383329 - DNA, 15 bp, Homo sapiens
aaaaaagtaacctac

SEQ ID NO: 1383330 - DNA, 15 bp, Homo sapiens
aaaaaaagtaaccta

SEQ ID NO: 1383331 - DNA, 15 bp, Homo sapiens
aaaaaaaagtaacct

SEQ ID NO: 1383332 - DNA, 15 bp, Homo sapiens
aaaaaaaaagtaacc

SEQ ID NO: 1383333 - DNA, 15 bp, Homo sapiens
aaaaaaaaaagtaac

SEQ ID NO: 1383334 - DNA, 15 bp, Homo sapiens
tagactgtgtctcaa

SEQ ID NO: 1383335 - DNA, 15 bp, Homo sapiens
ttagactgtgtctca

SEQ ID NO: 1383336 - DNA, 15 bp, Homo sapiens
gttagactgtgtctc

SEQ ID NO: 1383337 - DNA, 15 bp, Homo sapiens
agttagactgtgtct

SEQ ID NO: 1383338 - DNA, 15 bp, Homo sapiens
gagttagactgtgtc

SEQ ID NO: 1383339 - DNA, 15 bp, Homo sapiens
agagttagactgtgt

SEQ ID NO: 1383340 - DNA, 15 bp, Homo sapiens
cagagttagactgtg

SEQ ID NO: 1383341 - DNA, 15 bp, Homo sapiens
acagagttagactgt

SEQ ID NO: 1383342 - DNA, 15 bp, Homo sapiens
gacagagttagactg

SEQ ID NO: 1383343 - DNA, 15 bp, Homo sapiens
tgacagagttagact

SEQ ID NO: 1383344 - DNA, 15 bp, Homo sapiens
gtgacagagttagac

SEQ ID NO: 1383345 - DNA, 15 bp, Homo sapiens
ggtgacagagttaga

SEQ ID NO: 1383346 - DNA, 15 bp, Homo sapiens
gggtgacagagttag

SEQ ID NO: 1383347 - DNA, 15 bp, Homo sapiens
tgggtgacagagtta

SEQ ID NO: 1383348 - DNA, 15 bp, Homo sapiens
ctgggtgacagagtt

SEQ ID NO: 1383349 - DNA, 15 bp, Homo sapiens
gactgtactccagcc

SEQ ID NO: 1383350 - DNA, 15 bp, Homo sapiens
ggactgtactccagc

SEQ ID NO: 1383351 - DNA, 15 bp, Homo sapiens
gggactgtactccag

SEQ ID NO: 1383352 - DNA, 15 bp, Homo sapiens
cgggactgtactcca

SEQ ID NO: 1383353 - DNA, 15 bp, Homo sapiens
gcgggactgtactcc

SEQ ID NO: 1383354 - DNA, 15 bp, Homo sapiens
cgcgggactgtactc

SEQ ID NO: 1383355 - DNA, 15 bp, Homo sapiens
tcgcgggactgtact

SEQ ID NO: 1383356 - DNA, 15 bp, Homo sapiens
atcgcgggactgtac

SEQ ID NO: 1383357 - DNA, 15 bp, Homo sapiens
gatcgcgggactgta

SEQ ID NO: 1383358 - DNA, 15 bp, Homo sapiens
agatcgcgggactgt

SEQ ID NO: 1383359 - DNA, 15 bp, Homo sapiens
gagatcgcgggactg

SEQ ID NO: 1383360 - DNA, 15 bp, Homo sapiens
tgagatcgcgggact

SEQ ID NO: 1383361 - DNA, 15 bp, Homo sapiens
ctgagatcgcgggac

SEQ ID NO: 1383362 - DNA, 15 bp, Homo sapiens
gctgagatcgcggga

SEQ ID NO: 1383363 - DNA, 15 bp, Homo sapiens
agctgagatcgcggg

SEQ ID NO: 1383364 - DNA, 15 bp, Homo sapiens
gagctgagatcgcgg

SEQ ID NO: 1383365 - DNA, 15 bp, Homo sapiens
atgagctgagatcgc

SEQ ID NO: 1383366 - DNA, 15 bp, Homo sapiens
aatgagctgagatcg

SEQ ID NO: 1383367 - DNA, 15 bp, Homo sapiens
caatgagctgagatc

SEQ ID NO: 1383368 - DNA, 15 bp, Homo sapiens
ggaagttgcaatgag

SEQ ID NO: 1383369 - DNA, 15 bp, Homo sapiens
cggaagttgcaatga

SEQ ID NO: 1383370 - DNA, 15 bp, Homo sapiens
acggaagttgcaatg

SEQ ID NO: 1383371 - DNA, 15 bp, Homo sapiens
gacggaagttgcaat

SEQ ID NO: 1383372 - DNA, 15 bp, Homo sapiens
agacggaagttgcaa

SEQ ID NO: 1383373 - DNA, 15 bp, Homo sapiens
gagacggaagttgca

SEQ ID NO: 1383374 - DNA, 15 bp, Homo sapiens
ggagacggaagttgc

SEQ ID NO: 1383375 - DNA, 15 bp, Homo sapiens
gggagacggaagttg

SEQ ID NO: 1383376 - DNA, 15 bp, Homo sapiens
tgggagacggaagtt

SEQ ID NO: 1383377 - DNA, 15 bp, Homo sapiens
ctgggagacggaagt

SEQ ID NO: 1383378 - DNA, 15 bp, Homo sapiens
cctgggagacggaag

SEQ ID NO: 1383379 - DNA, 15 bp, Homo sapiens
acctgggagacggaa

SEQ ID NO: 1383380 - DNA, 15 bp, Homo sapiens
aacctgggagacgga

SEQ ID NO: 1383381 - DNA, 15 bp, Homo sapiens
gaacctgggagacgg

SEQ ID NO: 1383382 - DNA, 15 bp, Homo sapiens
tgaacctgggagacg

SEQ ID NO: 1383383 - DNA, 15 bp, Homo sapiens
cagaattgcttgaac

SEQ ID NO: 1383384 - DNA, 15 bp, Homo sapiens
gcagaattgcttgaa

SEQ ID NO: 1383385 - DNA, 15 bp, Homo sapiens
agcagaattgcttga

SEQ ID NO: 1383386 - DNA, 15 bp, Homo sapiens
cagcagaattgcttg

SEQ ID NO: 1383387 - DNA, 15 bp, Homo sapiens
gcagcagaattgctt

SEQ ID NO: 1383388 - DNA, 15 bp, Homo sapiens
ggcagcagaattgct

SEQ ID NO: 1383389 - DNA, 15 bp, Homo sapiens
aggcagcagaattgc

SEQ ID NO: 1383390 - DNA, 15 bp, Homo sapiens
gaggcagcagaattg

SEQ ID NO: 1383391 - DNA, 15 bp, Homo sapiens
tgaggcagcagaatt

SEQ ID NO: 1383392 - DNA, 15 bp, Homo sapiens
ctgaggcagcagaat

SEQ ID NO: 1383393 - DNA, 15 bp, Homo sapiens
gctgaggcagcagaa

SEQ ID NO: 1383394 - DNA, 15 bp, Homo sapiens
ggctgaggcagcaga

SEQ ID NO: 1383395 - DNA, 15 bp, Homo sapiens
tggctgaggcagcag

SEQ ID NO: 1383396 - DNA, 15 bp, Homo sapiens
gtggctgaggcagca

SEQ ID NO: 1383397 - DNA, 15 bp, Homo sapiens
ggtggctgaggcagc

SEQ ID NO: 1383398 - DNA, 15 bp, Homo sapiens
gggtggctgaggcag

SEQ ID NO: 1383399 - DNA, 15 bp, Homo sapiens
cgggtggctgaggca

SEQ ID NO: 1383400 - DNA, 15 bp, Homo sapiens
tcgggtggctgaggc

SEQ ID NO: 1383401 - DNA, 15 bp, Homo sapiens
ctcgggtggctgagg

SEQ ID NO: 1383402 - DNA, 15 bp, Homo sapiens
actcgggtggctgag

SEQ ID NO: 1383403 - DNA, 15 bp, Homo sapiens
tactcgggtggctga

SEQ ID NO: 1383404 - DNA, 15 bp, Homo sapiens
ctactcgggtggctg

SEQ ID NO: 1383405 - DNA, 15 bp, Homo sapiens
gctactcgggtggct

SEQ ID NO: 1383406 - DNA, 15 bp, Homo sapiens
agctactcgggtggc

SEQ ID NO: 1383407 - DNA, 15 bp, Homo sapiens
cagctactcgggtgg

SEQ ID NO: 1383408 - DNA, 15 bp, Homo sapiens
ccagctactcgggtg

SEQ ID NO: 1383409 - DNA, 15 bp, Homo sapiens
cccagctactcgggt

SEQ ID NO: 1383410 - DNA, 15 bp, Homo sapiens
catcccagctactcg

SEQ ID NO: 1383411 - DNA, 15 bp, Homo sapiens
tcatcccagctactc

SEQ ID NO: 1383412 - DNA, 15 bp, Homo sapiens
gtcatcccagctact

SEQ ID NO: 1383413 - DNA, 15 bp, Homo sapiens
tgtcatcccagctac

SEQ ID NO: 1383414 - DNA, 15 bp, Homo sapiens
ctgtcatcccagcta

SEQ ID NO: 1383415 - DNA, 15 bp, Homo sapiens
cctgtcatcccagct

SEQ ID NO: 1383416 - DNA, 15 bp, Homo sapiens
tgcctgtcatcccag

SEQ ID NO: 1383417 - DNA, 15 bp, Homo sapiens
gtgcctgtcatccca

SEQ ID NO: 1383418 - DNA, 15 bp, Homo sapiens
ggtgcctgtcatccc

SEQ ID NO: 1383419 - DNA, 15 bp, Homo sapiens
gggtgcctgtcatcc

SEQ ID NO: 1383420 - DNA, 15 bp, Homo sapiens
tgggtgcctgtcatc

SEQ ID NO: 1383421 - DNA, 15 bp, Homo sapiens
gtgggtgcctgtcat

SEQ ID NO: 1383422 - DNA, 15 bp, Homo sapiens
ggtgggtgcctgtca

SEQ ID NO: 1383423 - DNA, 15 bp, Homo sapiens
tggtgggtgcctgtc

SEQ ID NO: 1383424 - DNA, 15 bp, Homo sapiens
ataaaaattagccag

SEQ ID NO: 1383425 - DNA, 15 bp, Homo sapiens
tataaaaattagcca

SEQ ID NO: 1383426 - DNA, 15 bp, Homo sapiens
caaaaatataaaaat

SEQ ID NO: 1383427 - DNA, 15 bp, Homo sapiens
acaaaaatataaaaa

SEQ ID NO: 1383428 - DNA, 15 bp, Homo sapiens
tacaaaaatataaaa

SEQ ID NO: 1383429 - DNA, 15 bp, Homo sapiens
ctacaaaaatataaa

SEQ ID NO: 1383430 - DNA, 15 bp, Homo sapiens
tctacaaaaatataa

SEQ ID NO: 1383431 - DNA, 15 bp, Homo sapiens
ctctacaaaaatata

SEQ ID NO: 1383432 - DNA, 15 bp, Homo sapiens
tctctacaaaaatat

SEQ ID NO: 1383433 - DNA, 15 bp, Homo sapiens
atctctacaaaaata

SEQ ID NO: 1383434 - DNA, 15 bp, Homo sapiens
catctctacaaaaat

SEQ ID NO: 1383435 - DNA, 15 bp, Homo sapiens
cgggcagatcacctg

SEQ ID NO: 1383436 - DNA, 15 bp, Homo sapiens
gcgggcagatcacct

SEQ ID NO: 1383437 - DNA, 15 bp, Homo sapiens
ggcgggcagatcacc

SEQ ID NO: 1383438 - DNA, 15 bp, Homo sapiens
gcaacactttgggag

SEQ ID NO: 1383439 - DNA, 15 bp, Homo sapiens
cgcaacactttggga

SEQ ID NO: 1383440 - DNA, 15 bp, Homo sapiens
tcgcaacactttggg

SEQ ID NO: 1383441 - DNA, 15 bp, Homo sapiens
atcgcaacactttgg

SEQ ID NO: 1383442 - DNA, 15 bp, Homo sapiens
aatcgcaacactttg

SEQ ID NO: 1383443 - DNA, 15 bp, Homo sapiens
taatcgcaacacttt

SEQ ID NO: 1383444 - DNA, 15 bp, Homo sapiens
gtaatcgcaacactt

SEQ ID NO: 1383445 - DNA, 15 bp, Homo sapiens
tgtaatcgcaacact

SEQ ID NO: 1383446 - DNA, 15 bp, Homo sapiens
ctgtaatcgcaacac

SEQ ID NO: 1383447 - DNA, 15 bp, Homo sapiens
cctgtaatcgcaaca

SEQ ID NO: 1383448 - DNA, 15 bp, Homo sapiens
gcctgtaatcgcaac

SEQ ID NO: 1383449 - DNA, 15 bp, Homo sapiens
tgcctgtaatcgcaa

SEQ ID NO: 1383450 - DNA, 15 bp, Homo sapiens
ccggctgggcgcggt

SEQ ID NO: 1383451 - DNA, 15 bp, Homo sapiens
accggctgggcgcgg

SEQ ID NO: 1383452 - DNA, 15 bp, Homo sapiens
taccggctgggcgcg

SEQ ID NO: 1383453 - DNA, 15 bp, Homo sapiens
ctaccggctgggcgc

SEQ ID NO: 1383454 - DNA, 15 bp, Homo sapiens
cctaccggctgggcg

SEQ ID NO: 1383455 - DNA, 15 bp, Homo sapiens
acctaccggctgggc

SEQ ID NO: 1383456 - DNA, 15 bp, Homo sapiens
aacctaccggctggg

SEQ ID NO: 1383457 - DNA, 15 bp, Homo sapiens
taacctaccggctgg

SEQ ID NO: 1383458 - DNA, 15 bp, Homo sapiens
gtaacctaccggctg

SEQ ID NO: 1383459 - DNA, 15 bp, Homo sapiens
agtaacctaccggct

SEQ ID NO: 1383460 - DNA, 15 bp, Homo sapiens
aagtaacctaccggc

SEQ ID NO: 1383461 - DNA, 15 bp, Homo sapiens
aaagtaacctaccgg

SEQ ID NO: 1383462 - DNA, 15 bp, Homo sapiens
aaaagtaacctaccg

SEQ ID NO: 1383463 - DNA, 15 bp, Homo sapiens
taaaaagtaacctac

SEQ ID NO: 1383464 - DNA, 15 bp, Homo sapiens
ttaaaaagtaaccta

SEQ ID NO: 1383465 - DNA, 15 bp, Homo sapiens
tttaaaaagtaacct

SEQ ID NO: 1383466 - DNA, 15 bp, Homo sapiens
ctttaaaaagtaacc

SEQ ID NO: 1383467 - DNA, 15 bp, Homo sapiens
cctttaaaaagtaac

SEQ ID NO: 1383468 - DNA, 15 bp, Homo sapiens
gcctttaaaaagtaa

SEQ ID NO: 1383469 - DNA, 15 bp, Homo sapiens
tgcctttaaaaagta

SEQ ID NO: 1383470 - DNA, 15 bp, Homo sapiens
ctgcctttaaaaagt

SEQ ID NO: 1383471 - DNA, 15 bp, Homo sapiens
tctgcctttaaaaag

SEQ ID NO: 1383472 - DNA, 15 bp, Homo sapiens
ttctgcctttaaaaa

SEQ ID NO: 1383473 - DNA, 15 bp, Homo sapiens
attctgcctttaaaa

SEQ ID NO: 1383474 - DNA, 15 bp, Homo sapiens
cattctgcctttaaa

SEQ ID NO: 1383475 - DNA, 15 bp, Homo sapiens
ccattctgcctttaa

SEQ ID NO: 1383476 - DNA, 15 bp, Homo sapiens
tccattctgccttta

SEQ ID NO: 1383477 - DNA, 15 bp, Homo sapiens
gtccattctgccttt

SEQ ID NO: 1383478 - DNA, 15 bp, Homo sapiens
agtccattctgcctt

SEQ ID NO: 1383479 - DNA, 15 bp, Homo sapiens
aagtccattctgcct

SEQ ID NO: 1383480 - DNA, 15 bp, Homo sapiens
caagtccattctgcc

SEQ ID NO: 1383481 - DNA, 15 bp, Homo sapiens
ccaagtccattctgc

SEQ ID NO: 1383482 - DNA, 15 bp, Homo sapiens
cccaagtccattctg

SEQ ID NO: 1383483 - DNA, 15 bp, Homo sapiens
tcccaagtccattct

SEQ ID NO: 1383484 - DNA, 15 bp, Homo sapiens
atcccaagtccattc

SEQ ID NO: 1383485 - DNA, 15 bp, Homo sapiens
gatcccaagtccatt

SEQ ID NO: 1383486 - DNA, 15 bp, Homo sapiens
tgatcccaagtccat

SEQ ID NO: 1383487 - DNA, 15 bp, Homo sapiens
atgatcccaagtcca

SEQ ID NO: 1383488 - DNA, 15 bp, Homo sapiens
catgatcccaagtcc

SEQ ID NO: 1383489 - DNA, 15 bp, Homo sapiens
acatgatcccaagtc

SEQ ID NO: 1383490 - DNA, 15 bp, Homo sapiens
gacatgatcccaagt

SEQ ID NO: 1383491 - DNA, 15 bp, Homo sapiens
agacatgatcccaag

SEQ ID NO: 1383492 - DNA, 15 bp, Homo sapiens
gagacatgatcccaa

SEQ ID NO: 1383493 - DNA, 15 bp, Homo sapiens
agagacatgatccca

SEQ ID NO: 1383494 - DNA, 15 bp, Homo sapiens
cagagacatgatccc

SEQ ID NO: 1383495 - DNA, 15 bp, Homo sapiens
ccagagacatgatcc

SEQ ID NO: 1383496 - DNA, 15 bp, Homo sapiens
cccagagacatgatc

SEQ ID NO: 1383497 - DNA, 15 bp, Homo sapiens
acccagagacatgat

SEQ ID NO: 1383498 - DNA, 15 bp, Homo sapiens
tacccagagacatga

SEQ ID NO: 1383499 - DNA, 15 bp, Homo sapiens
ttacccagagacatg

SEQ ID NO: 1383500 - DNA, 15 bp, Homo sapiens
attacccagagacat

SEQ ID NO: 1383501 - DNA, 15 bp, Homo sapiens
aattacccagagaca

SEQ ID NO: 1383502 - DNA, 15 bp, Homo sapiens
aaattacccagagac

SEQ ID NO: 1383503 - DNA, 15 bp, Homo sapiens
caaattacccagaga

SEQ ID NO: 1383504 - DNA, 15 bp, Homo sapiens
acaaattacccagag

SEQ ID NO: 1383505 - DNA, 15 bp, Homo sapiens
tacaaattacccaga

SEQ ID NO: 1383506 - DNA, 15 bp, Homo sapiens
gtacaaattacccag

SEQ ID NO: 1383507 - DNA, 15 bp, Homo sapiens
agtacaaattaccca

SEQ ID NO: 1383508 - DNA, 15 bp, Homo sapiens
gagtacaaattaccc

SEQ ID NO: 1383509 - DNA, 15 bp, Homo sapiens
agagtacaaattacc

SEQ ID NO: 1383510 - DNA, 15 bp, Homo sapiens
aagagtacaaattac

SEQ ID NO: 1383511 - DNA, 15 bp, Homo sapiens
aaagagtacaaatta

SEQ ID NO: 1383512 - DNA, 15 bp, Homo sapiens
gaaagagtacaaatt

SEQ ID NO: 1383513 - DNA, 15 bp, Homo sapiens
ggaaagagtacaaat

SEQ ID NO: 1383514 - DNA, 15 bp, Homo sapiens
gggaaagagtacaaa

SEQ ID NO: 1383515 - DNA, 15 bp, Homo sapiens
tgggaaagagtacaa

SEQ ID NO: 1383516 - DNA, 15 bp, Homo sapiens
gtgggaaagagtaca

SEQ ID NO: 1383517 - DNA, 15 bp, Homo sapiens
ggtgggaaagagtac

SEQ ID NO: 1383518 - DNA, 15 bp, Homo sapiens
tggtgggaaagagta

SEQ ID NO: 1383519 - DNA, 15 bp, Homo sapiens
atggtgggaaagagt

SEQ ID NO: 1383520 - DNA, 15 bp, Homo sapiens
gatggtgggaaagag

SEQ ID NO: 1383521 - DNA, 15 bp, Homo sapiens
tgatggtgggaaaga

SEQ ID NO: 1383522 - DNA, 15 bp, Homo sapiens
ctgatggtgggaaag

SEQ ID NO: 1383523 - DNA, 15 bp, Homo sapiens
actgatggtgggaaa

SEQ ID NO: 1383524 - DNA, 15 bp, Homo sapiens
aactgatggtgggaa

SEQ ID NO: 1383525 - DNA, 15 bp, Homo sapiens
aaactgatggtggga

SEQ ID NO: 1383526 - DNA, 15 bp, Homo sapiens
gaaactgatggtggg

SEQ ID NO: 1383527 - DNA, 15 bp, Homo sapiens
agaaactgatggtgg

SEQ ID NO: 1383528 - DNA, 15 bp, Homo sapiens
gagaaactgatggtg

SEQ ID NO: 1383529 - DNA, 15 bp, Homo sapiens
agagaaactgatggt

SEQ ID NO: 1383530 - DNA, 15 bp, Homo sapiens
gagagaaactgatgg

SEQ ID NO: 1383531 - DNA, 15 bp, Homo sapiens
agagagaaactgatg

SEQ ID NO: 1383532 - DNA, 15 bp, Homo sapiens
aagagagaaactgat

SEQ ID NO: 1383533 - DNA, 15 bp, Homo sapiens
aaagagagaaactga

SEQ ID NO: 1383534 - DNA, 15 bp, Homo sapiens
gaaagagagaaactg

SEQ ID NO: 1383535 - DNA, 15 bp, Homo sapiens
ggaaagagagaaact

SEQ ID NO: 1383536 - DNA, 15 bp, Homo sapiens
tggaaagagagaaac

SEQ ID NO: 1383537 - DNA, 15 bp, Homo sapiens
gtggaaagagagaaa

SEQ ID NO: 1383538 - DNA, 15 bp, Homo sapiens
agtggaaagagagaa

SEQ ID NO: 1383539 - DNA, 15 bp, Homo sapiens
cagtggaaagagaga

SEQ ID NO: 1383540 - DNA, 15 bp, Homo sapiens
ccagtggaaagagag

SEQ ID NO: 1383541 - DNA, 15 bp, Homo sapiens
tccagtggaaagaga

SEQ ID NO: 1383542 - DNA, 15 bp, Homo sapiens
atccagtggaaagag

SEQ ID NO: 1383543 - DNA, 15 bp, Homo sapiens
aatccagtggaaaga

SEQ ID NO: 1383544 - DNA, 15 bp, Homo sapiens
aaatccagtggaaag

SEQ ID NO: 1383545 - DNA, 15 bp, Homo sapiens
aaaatccagtggaaa

SEQ ID NO: 1383546 - DNA, 15 bp, Homo sapiens
aaaaatccagtggaa

SEQ ID NO: 1383547 - DNA, 15 bp, Homo sapiens
aaaaaatccagtgga

SEQ ID NO: 1383548 - DNA, 15 bp, Homo sapiens
aaaaaaatccagtgg

SEQ ID NO: 1383549 - DNA, 15 bp, Homo sapiens
gaaaaaaatccagtg

SEQ ID NO: 1383550 - DNA, 15 bp, Homo sapiens
ggaaaaaaatccagt

SEQ ID NO: 1383551 - DNA, 15 bp, Homo sapiens
gggaaaaaaatccag

SEQ ID NO: 1383552 - DNA, 15 bp, Homo sapiens
ggggaaaaaaatcca

SEQ ID NO: 1383553 - DNA, 15 bp, Homo sapiens
aggggaaaaaaatcc

SEQ ID NO: 1383554 - DNA, 15 bp, Homo sapiens
taggggaaaaaaatc

SEQ ID NO: 1383555 - DNA, 15 bp, Homo sapiens
ttaggggaaaaaaat

SEQ ID NO: 1383556 - DNA, 15 bp, Homo sapiens
gttaggggaaaaaaa

SEQ ID NO: 1383557 - DNA, 15 bp, Homo sapiens
tgttaggggaaaaaa

SEQ ID NO: 1383558 - DNA, 15 bp, Homo sapiens
gtgttaggggaaaaa

SEQ ID NO: 1383559 - DNA, 15 bp, Homo sapiens
tgtgttaggggaaaa

SEQ ID NO: 1383560 - DNA, 15 bp, Homo sapiens
ttgtgttaggggaaa

SEQ ID NO: 1383561 - DNA, 15 bp, Homo sapiens
tttgtgttaggggaa

SEQ ID NO: 1383562 - DNA, 15 bp, Homo sapiens
gtttgtgttagggga

SEQ ID NO: 1383563 - DNA, 15 bp, Homo sapiens
tgtttgtgttagggg

SEQ ID NO: 1383564 - DNA, 15 bp, Homo sapiens
atgtttgtgttaggg

SEQ ID NO: 1383565 - DNA, 15 bp, Homo sapiens
catgtttgtgttagg

SEQ ID NO: 1383566 - DNA, 15 bp, Homo sapiens
acatgtttgtgttag

SEQ ID NO: 1383567 - DNA, 15 bp, Homo sapiens
cacatgtttgtgtta

SEQ ID NO: 1383568 - DNA, 15 bp, Homo sapiens
acacatgtttgtgtt

SEQ ID NO: 1383569 - DNA, 15 bp, Homo sapiens
cacacatgtttgtgt

SEQ ID NO: 1383570 - DNA, 15 bp, Homo sapiens
tcacacatgtttgtg

SEQ ID NO: 1383571 - DNA, 15 bp, Homo sapiens
ttcacacatgtttgt

SEQ ID NO: 1383572 - DNA, 15 bp, Homo sapiens
gttcacacatgtttg

SEQ ID NO: 1383573 - DNA, 15 bp, Homo sapiens
ggttcacacatgttt

SEQ ID NO: 1383574 - DNA, 15 bp, Homo sapiens
aggttcacacatgtt

SEQ ID NO: 1383575 - DNA, 15 bp, Homo sapiens
gaggttcacacatgt

SEQ ID NO: 1383576 - DNA, 15 bp, Homo sapiens
agaggttcacacatg

SEQ ID NO: 1383577 - DNA, 15 bp, Homo sapiens
gagaggttcacacat

SEQ ID NO: 1383578 - DNA, 15 bp, Homo sapiens
agagaggttcacaca

SEQ ID NO: 1383579 - DNA, 15 bp, Homo sapiens
aagagaggttcacac

SEQ ID NO: 1383580 - DNA, 15 bp, Homo sapiens
aaagagaggttcaca

SEQ ID NO: 1383581 - DNA, 15 bp, Homo sapiens
aaaagagaggttcac

SEQ ID NO: 1383582 - DNA, 15 bp, Homo sapiens
aaaaagagaggttca

SEQ ID NO: 1383583 - DNA, 15 bp, Homo sapiens
gaaaaagagaggttc

SEQ ID NO: 1383584 - DNA, 15 bp, Homo sapiens
tgaaaaagagaggtt

SEQ ID NO: 1383585 - DNA, 15 bp, Homo sapiens
atgaaaaagagaggt

SEQ ID NO: 1383586 - DNA, 15 bp, Homo sapiens
tatgaaaaagagagg

SEQ ID NO: 1383587 - DNA, 15 bp, Homo sapiens
ttatgaaaaagagag

SEQ ID NO: 1383588 - DNA, 15 bp, Homo sapiens
tttatgaaaaagaga

SEQ ID NO: 1383589 - DNA, 15 bp, Homo sapiens
ttttatgaaaaagag

SEQ ID NO: 1383590 - DNA, 15 bp, Homo sapiens
tttttatgaaaaaga

SEQ ID NO: 1383591 - DNA, 15 bp, Homo sapiens
ttttttatgaaaaag

SEQ ID NO: 1383592 - DNA, 15 bp, Homo sapiens
gttttttatgaaaaa

SEQ ID NO: 1383593 - DNA, 15 bp, Homo sapiens
tgttttttatgaaaa

SEQ ID NO: 1383594 - DNA, 15 bp, Homo sapiens
ttgttttttatgaaa

SEQ ID NO: 1383595 - DNA, 15 bp, Homo sapiens
tttgttttttatgaa

SEQ ID NO: 1383596 - DNA, 15 bp, Homo sapiens
ttttgttttttatga

SEQ ID NO: 1383597 - DNA, 15 bp, Homo sapiens
attttgttttttatg

SEQ ID NO: 1383598 - DNA, 15 bp, Homo sapiens
cattttgttttttat

SEQ ID NO: 1383599 - DNA, 15 bp, Homo sapiens
tcattttgtttttta

SEQ ID NO: 1383600 - DNA, 15 bp, Homo sapiens
ttcattttgtttttt

SEQ ID NO: 1383601 - DNA, 15 bp, Homo sapiens
gttcattttgttttt

SEQ ID NO: 1383602 - DNA, 15 bp, Homo sapiens
tgttcattttgtttt

SEQ ID NO: 1383603 - DNA, 15 bp, Homo sapiens
gtgttcattttgttt

SEQ ID NO: 1383604 - DNA, 15 bp, Homo sapiens
tgtgttcattttgtt

SEQ ID NO: 1383605 - DNA, 15 bp, Homo sapiens
ttgtgttcattttgt

SEQ ID NO: 1383606 - DNA, 15 bp, Homo sapiens
tttgtgttcattttg

SEQ ID NO: 1383607 - DNA, 15 bp, Homo sapiens
ttttgtgttcatttt

SEQ ID NO: 1383608 - DNA, 15 bp, Homo sapiens
gttttgtgttcattt

SEQ ID NO: 1383609 - DNA, 15 bp, Homo sapiens
ggttttgtgttcatt

SEQ ID NO: 1383610 - DNA, 15 bp, Homo sapiens
aggttttgtgttcat

SEQ ID NO: 1383611 - DNA, 15 bp, Homo sapiens
aaggttttgtgttca

SEQ ID NO: 1383612 - DNA, 15 bp, Homo sapiens
aaaggttttgtgttc

SEQ ID NO: 1383613 - DNA, 15 bp, Homo sapiens
aaaaggttttgtgtt

SEQ ID NO: 1383614 - DNA, 15 bp, Homo sapiens
taaaaggttttgtgt

SEQ ID NO: 1383615 - DNA, 15 bp, Homo sapiens
ataaaaggttttgtg

SEQ ID NO: 1383616 - DNA, 15 bp, Homo sapiens
aataaaaggttttgt

SEQ ID NO: 1383617 - DNA, 15 bp, Homo sapiens
caataaaaggttttg

SEQ ID NO: 1383618 - DNA, 15 bp, Homo sapiens
tcaataaaaggtttt

SEQ ID NO: 1383619 - DNA, 15 bp, Homo sapiens
atcaataaaaggttt

SEQ ID NO: 1383620 - DNA, 15 bp, Homo sapiens
gatcaataaaaggtt

SEQ ID NO: 1383621 - DNA, 15 bp, Homo sapiens
ggatcaataaaaggt

SEQ ID NO: 1383622 - DNA, 15 bp, Homo sapiens
gggatcaataaaagg

SEQ ID NO: 1383623 - DNA, 15 bp, Homo sapiens
tgggatcaataaaag

SEQ ID NO: 1383624 - DNA, 15 bp, Homo sapiens
gtgggatcaataaaa

SEQ ID NO: 1383625 - DNA, 15 bp, Homo sapiens
agtgggatcaataaa

SEQ ID NO: 1383626 - DNA, 15 bp, Homo sapiens
cagtgggatcaataa

SEQ ID NO: 1383627 - DNA, 15 bp, Homo sapiens
acagtgggatcaata

SEQ ID NO: 1383628 - DNA, 15 bp, Homo sapiens
aacagtgggatcaat

SEQ ID NO: 1383629 - DNA, 15 bp, Homo sapiens
caacagtgggatcaa

SEQ ID NO: 1383630 - DNA, 15 bp, Homo sapiens
tcaacagtgggatca

SEQ ID NO: 1383631 - DNA, 15 bp, Homo sapiens
atcaacagtgggatc

SEQ ID NO: 1383632 - DNA, 15 bp, Homo sapiens
aatcaacagtgggat

SEQ ID NO: 1383633 - DNA, 15 bp, Homo sapiens
aaatcaacagtggga

SEQ ID NO: 1383634 - DNA, 15 bp, Homo sapiens
taaatcaacagtggg

SEQ ID NO: 1383635 - DNA, 15 bp, Homo sapiens
ctaaatcaacagtgg

SEQ ID NO: 1383636 - DNA, 15 bp, Homo sapiens
tctaaatcaacagtg

SEQ ID NO: 1383637 - DNA, 15 bp, Homo sapiens
gtctaaatcaacagt

SEQ ID NO: 1383638 - DNA, 15 bp, Homo sapiens
tgtctaaatcaacag

SEQ ID NO: 1383639 - DNA, 15 bp, Homo sapiens
ttgtctaaatcaaca

SEQ ID NO: 1383640 - DNA, 15 bp, Homo sapiens
attgtctaaatcaac

SEQ ID NO: 1383641 - DNA, 15 bp, Homo sapiens
gattgtctaaatcaa

SEQ ID NO: 1383642 - DNA, 15 bp, Homo sapiens
agattgtctaaatca

SEQ ID NO: 1383643 - DNA, 15 bp, Homo sapiens
gagattgtctaaatc

SEQ ID NO: 1383644 - DNA, 15 bp, Homo sapiens
ggagattgtctaaat

SEQ ID NO: 1383645 - DNA, 15 bp, Homo sapiens
aggagattgtctaaa

SEQ ID NO: 1383646 - DNA, 15 bp, Homo sapiens
caggagattgtctaa

SEQ ID NO: 1383647 - DNA, 15 bp, Homo sapiens
acaggagattgtcta

SEQ ID NO: 1383648 - DNA, 15 bp, Homo sapiens
aacaggagattgtct

SEQ ID NO: 1383649 - DNA, 15 bp, Homo sapiens
taacaggagattgtc

SEQ ID NO: 1383650 - DNA, 15 bp, Homo sapiens
gtaacaggagattgt

SEQ ID NO: 1383651 - DNA, 15 bp, Homo sapiens
tgtaacaggagattg

SEQ ID NO: 1383652 - DNA, 15 bp, Homo sapiens
atgtaacaggagatt

SEQ ID NO: 1383653 - DNA, 15 bp, Homo sapiens
gatgtaacaggagat

SEQ ID NO: 1383654 - DNA, 15 bp, Homo sapiens
tgatgtaacaggaga

SEQ ID NO: 1383655 - DNA, 15 bp, Homo sapiens
ttgatgtaacaggag

SEQ ID NO: 1383656 - DNA, 15 bp, Homo sapiens
gttgatgtaacagga

SEQ ID NO: 1383657 - DNA, 15 bp, Homo sapiens
ggttgatgtaacagg

SEQ ID NO: 1383658 - DNA, 15 bp, Homo sapiens
tggttgatgtaacag

SEQ ID NO: 1383659 - DNA, 15 bp, Homo sapiens
ctggttgatgtaaca

SEQ ID NO: 1383660 - DNA, 15 bp, Homo sapiens
cctggttgatgtaac

SEQ ID NO: 1383661 - DNA, 15 bp, Homo sapiens
gcctggttgatgtaa

SEQ ID NO: 1383662 - DNA, 15 bp, Homo sapiens
ggcctggttgatgta

SEQ ID NO: 1383663 - DNA, 15 bp, Homo sapiens
tggcctggttgatgt

SEQ ID NO: 1383664 - DNA, 15 bp, Homo sapiens
ctggcctggttgatg

SEQ ID NO: 1383665 - DNA, 15 bp, Homo sapiens
gctggcctggttgat

SEQ ID NO: 1383666 - DNA, 15 bp, Homo sapiens
ggctggcctggttga

SEQ ID NO: 1383667 - DNA, 15 bp, Homo sapiens
gggctggcctggttg

SEQ ID NO: 1383668 - DNA, 15 bp, Homo sapiens
agggctggcctggtt

SEQ ID NO: 1383669 - DNA, 15 bp, Homo sapiens
aagggctggcctggt

SEQ ID NO: 1383670 - DNA, 15 bp, Homo sapiens
taagggctggcctgg

SEQ ID NO: 1383671 - DNA, 15 bp, Homo sapiens
ataagggctggcctg

SEQ ID NO: 1383672 - DNA, 15 bp, Homo sapiens
gataagggctggcct

SEQ ID NO: 1383673 - DNA, 15 bp, Homo sapiens
tgataagggctggcc

SEQ ID NO: 1383674 - DNA, 15 bp, Homo sapiens
atgataagggctggc

SEQ ID NO: 1383675 - DNA, 15 bp, Homo sapiens
gatgataagggctgg

SEQ ID NO: 1383676 - DNA, 15 bp, Homo sapiens
ggatgataagggctg

SEQ ID NO: 1383677 - DNA, 15 bp, Homo sapiens
tggatgataagggct

SEQ ID NO: 1383678 - DNA, 15 bp, Homo sapiens
gtggatgataagggc

SEQ ID NO: 1383679 - DNA, 15 bp, Homo sapiens
ggtggatgataaggg

SEQ ID NO: 1383680 - DNA, 15 bp, Homo sapiens
gggtggatgataagg

SEQ ID NO: 1383681 - DNA, 15 bp, Homo sapiens
tgggtggatgataag

SEQ ID NO: 1383682 - DNA, 15 bp, Homo sapiens
ctgggtggatgataa

SEQ ID NO: 1383683 - DNA, 15 bp, Homo sapiens
actgggtggatgata

SEQ ID NO: 1383684 - DNA, 15 bp, Homo sapiens
gactgggtggatgat

SEQ ID NO: 1383685 - DNA, 15 bp, Homo sapiens
tgactgggtggatga

SEQ ID NO: 1383686 - DNA, 15 bp, Homo sapiens
ttgactgggtggatg

SEQ ID NO: 1383687 - DNA, 15 bp, Homo sapiens
gttgactgggtggat

SEQ ID NO: 1383688 - DNA, 15 bp, Homo sapiens
ggttgactgggtgga

SEQ ID NO: 1383689 - DNA, 15 bp, Homo sapiens
aggttgactgggtgg

SEQ ID NO: 1383690 - DNA, 15 bp, Homo sapiens
aaggttgactgggtg

SEQ ID NO: 1383691 - DNA, 15 bp, Homo sapiens
gaaggttgactgggt

SEQ ID NO: 1383692 - DNA, 15 bp, Homo sapiens
ggaaggttgactggg

SEQ ID NO: 1383693 - DNA, 15 bp, Homo sapiens
tggaaggttgactgg

SEQ ID NO: 1383694 - DNA, 15 bp, Homo sapiens
ttggaaggttgactg

SEQ ID NO: 1383695 - DNA, 15 bp, Homo sapiens
tttggaaggttgact

SEQ ID NO: 1383696 - DNA, 15 bp, Homo sapiens
atttggaaggttgac

SEQ ID NO: 1383697 - DNA, 15 bp, Homo sapiens
tatttggaaggttga

SEQ ID NO: 1383698 - DNA, 15 bp, Homo sapiens
atatttggaaggttg

SEQ ID NO: 1383699 - DNA, 15 bp, Homo sapiens
gatatttggaaggtt

SEQ ID NO: 1383700 - DNA, 15 bp, Homo sapiens
ggatatttggaaggt

SEQ ID NO: 1383701 - DNA, 15 bp, Homo sapiens
aggatatttggaagg

SEQ ID NO: 1383702 - DNA, 15 bp, Homo sapiens
aaggatatttggaag

SEQ ID NO: 1383703 - DNA, 15 bp, Homo sapiens
gaaggatatttggaa

SEQ ID NO: 1383704 - DNA, 15 bp, Homo sapiens
ggaaggatatttgga

SEQ ID NO: 1383705 - DNA, 15 bp, Homo sapiens
tggaaggatatttgg

SEQ ID NO: 1383706 - DNA, 15 bp, Homo sapiens
atggaaggatatttg

SEQ ID NO: 1383707 - DNA, 15 bp, Homo sapiens
aatggaaggatattt

SEQ ID NO: 1383708 - DNA, 15 bp, Homo sapiens
gaatggaaggatatt

SEQ ID NO: 1383709 - DNA, 15 bp, Homo sapiens
tgaatggaaggatat

SEQ ID NO: 1383710 - DNA, 15 bp, Homo sapiens
ctgaatggaaggata

SEQ ID NO: 1383711 - DNA, 15 bp, Homo sapiens
actgaatggaaggat

SEQ ID NO: 1383712 - DNA, 15 bp, Homo sapiens
gactgaatggaagga

SEQ ID NO: 1383713 - DNA, 15 bp, Homo sapiens
agactgaatggaagg

SEQ ID NO: 1383714 - DNA, 15 bp, Homo sapiens
aagactgaatggaag

SEQ ID NO: 1383715 - DNA, 15 bp, Homo sapiens
gaagactgaatggaa

SEQ ID NO: 1383716 - DNA, 15 bp, Homo sapiens
agaagactgaatgga

SEQ ID NO: 1383717 - DNA, 15 bp, Homo sapiens
tagaagactgaatgg

SEQ ID NO: 1383718 - DNA, 15 bp, Homo sapiens
ctagaagactgaatg

SEQ ID NO: 1383719 - DNA, 15 bp, Homo sapiens
actagaagactgaat

SEQ ID NO: 1383720 - DNA, 15 bp, Homo sapiens
gactagaagactgaa

SEQ ID NO: 1383721 - DNA, 15 bp, Homo sapiens
tgactagaagactga

SEQ ID NO: 1383722 - DNA, 15 bp, Homo sapiens
atgactagaagactg

SEQ ID NO: 1383723 - DNA, 15 bp, Homo sapiens
gatgactagaagact

SEQ ID NO: 1383724 - DNA, 15 bp, Homo sapiens
ggatgactagaagac

SEQ ID NO: 1383725 - DNA, 15 bp, Homo sapiens
gggatgactagaaga

SEQ ID NO: 1383726 - DNA, 15 bp, Homo sapiens
agggatgactagaag

SEQ ID NO: 1383727 - DNA, 15 bp, Homo sapiens
gagggatgactagaa

SEQ ID NO: 1383728 - DNA, 15 bp, Homo sapiens
ggagggatgactaga

SEQ ID NO: 1383729 - DNA, 15 bp, Homo sapiens
gggagggatgactag

SEQ ID NO: 1383730 - DNA, 15 bp, Homo sapiens
agggagggatgacta

SEQ ID NO: 1383731 - DNA, 15 bp, Homo sapiens
aagggagggatgact

SEQ ID NO: 1383732 - DNA, 15 bp, Homo sapiens
aaagggagggatgac

SEQ ID NO: 1383733 - DNA, 15 bp, Homo sapiens
gaaagggagggatga

SEQ ID NO: 1383734 - DNA, 15 bp, Homo sapiens
agaaagggagggatg

SEQ ID NO: 1383735 - DNA, 15 bp, Homo sapiens
gagaaagggagggat

SEQ ID NO: 1383736 - DNA, 15 bp, Homo sapiens
agagaaagggaggga

SEQ ID NO: 1383737 - DNA, 15 bp, Homo sapiens
gagagaaagggaggg

SEQ ID NO: 1383738 - DNA, 15 bp, Homo sapiens
agagagaaagggagg

SEQ ID NO: 1383739 - DNA, 15 bp, Homo sapiens
ggagagagaaaggga

SEQ ID NO: 1383740 - DNA, 15 bp, Homo sapiens
tggagagagaaaggg

SEQ ID NO: 1383741 - DNA, 15 bp, Homo sapiens
atggagagagaaagg

SEQ ID NO: 1383742 - DNA, 15 bp, Homo sapiens
gatggagagagaaag

SEQ ID NO: 1383743 - DNA, 15 bp, Homo sapiens
agatggagagagaaa

SEQ ID NO: 1383744 - DNA, 15 bp, Homo sapiens
gagatggagagagaa

SEQ ID NO: 1383745 - DNA, 15 bp, Homo sapiens
agagatggagagaga

SEQ ID NO: 1383746 - DNA, 15 bp, Homo sapiens
aagagatggagagag

SEQ ID NO: 1383747 - DNA, 15 bp, Homo sapiens
gaagagatggagaga

SEQ ID NO: 1383748 - DNA, 15 bp, Homo sapiens
tgaagagatggagag

SEQ ID NO: 1383749 - DNA, 15 bp, Homo sapiens
atgaagagatggaga

SEQ ID NO: 1383750 - DNA, 15 bp, Homo sapiens
gatgaagagatggag

SEQ ID NO: 1383751 - DNA, 15 bp, Homo sapiens
ggatgaagagatgga

SEQ ID NO: 1383752 - DNA, 15 bp, Homo sapiens
tggatgaagagatgg

SEQ ID NO: 1383753 - DNA, 15 bp, Homo sapiens
ttggatgaagagatg

SEQ ID NO: 1383754 - DNA, 15 bp, Homo sapiens
gttggatgaagagat

SEQ ID NO: 1383755 - DNA, 15 bp, Homo sapiens
tgttggatgaagaga

SEQ ID NO: 1383756 - DNA, 15 bp, Homo sapiens
atgttggatgaagag

SEQ ID NO: 1383757 - DNA, 15 bp, Homo sapiens
gatgttggatgaaga

SEQ ID NO: 1383758 - DNA, 15 bp, Homo sapiens
tgatgttggatgaag

SEQ ID NO: 1383759 - DNA, 15 bp, Homo sapiens
ttgatgttggatgaa

SEQ ID NO: 1383760 - DNA, 15 bp, Homo sapiens
gttgatgttggatga

SEQ ID NO: 1383761 - DNA, 15 bp, Homo sapiens
acctttagcaacact

SEQ ID NO: 1383762 - DNA, 15 bp, Homo sapiens
tacctttagcaacac

SEQ ID NO: 1383763 - DNA, 15 bp, Homo sapiens
ttacctttagcaaca

SEQ ID NO: 1383764 - DNA, 15 bp, Homo sapiens
tttacctttagcaac

SEQ ID NO: 1383765 - DNA, 15 bp, Homo sapiens
ttttacctttagcaa

SEQ ID NO: 1383766 - DNA, 15 bp, Homo sapiens
tttttacctttagca

SEQ ID NO: 1383767 - DNA, 15 bp, Homo sapiens
atttttacctttagc

SEQ ID NO: 1383768 - DNA, 15 bp, Homo sapiens
tatttttacctttag

SEQ ID NO: 1383769 - DNA, 15 bp, Homo sapiens
atatttttaccttta

SEQ ID NO: 1383770 - DNA, 15 bp, Homo sapiens
aatatttttaccttt

SEQ ID NO: 1383771 - DNA, 15 bp, Homo sapiens
taatatttttacctt

SEQ ID NO: 1383772 - DNA, 15 bp, Homo sapiens
ttaatatttttacct

SEQ ID NO: 1383773 - DNA, 15 bp, Homo sapiens
tttaatatttttacc

SEQ ID NO: 1383774 - DNA, 15 bp, Homo sapiens
ctttaatatttttac

SEQ ID NO: 1383775 - DNA, 15 bp, Homo sapiens
tctttaatattttta

SEQ ID NO: 1383776 - DNA, 15 bp, Homo sapiens
atctttaatattttt

SEQ ID NO: 1383777 - DNA, 15 bp, Homo sapiens
aatctttaatatttt

SEQ ID NO: 1383778 - DNA, 15 bp, Homo sapiens
taatctttaatattt

SEQ ID NO: 1383779 - DNA, 15 bp, Homo sapiens
ttaatctttaatatt

SEQ ID NO: 1383780 - DNA, 15 bp, Homo sapiens
attaatctttaatat

SEQ ID NO: 1383781 - DNA, 15 bp, Homo sapiens
cattaatctttaata

SEQ ID NO: 1383782 - DNA, 15 bp, Homo sapiens
ccattaatctttaat

SEQ ID NO: 1383783 - DNA, 15 bp, Homo sapiens
tccattaatctttaa

SEQ ID NO: 1383784 - DNA, 15 bp, Homo sapiens
ttccattaatcttta

SEQ ID NO: 1383785 - DNA, 15 bp, Homo sapiens
cttccattaatcttt

SEQ ID NO: 1383786 - DNA, 15 bp, Homo sapiens
acttccattaatctt

SEQ ID NO: 1383787 - DNA, 15 bp, Homo sapiens
tacttccattaatct

SEQ ID NO: 1383788 - DNA, 15 bp, Homo sapiens
ctacttccattaatc

SEQ ID NO: 1383789 - DNA, 15 bp, Homo sapiens
tctacttccattaat

SEQ ID NO: 1383790 - DNA, 15 bp, Homo sapiens
ctctacttccattaa

SEQ ID NO: 1383791 - DNA, 15 bp, Homo sapiens
tctctacttccatta

SEQ ID NO: 1383792 - DNA, 15 bp, Homo sapiens
ctctctacttccatt

SEQ ID NO: 1383793 - DNA, 15 bp, Homo sapiens
tctctctacttccat

SEQ ID NO: 1383794 - DNA, 15 bp, Homo sapiens
atctctctacttcca

SEQ ID NO: 1383795 - DNA, 15 bp, Homo sapiens
tatctctctacttcc

SEQ ID NO: 1383796 - DNA, 15 bp, Homo sapiens
ctatctctctacttc

SEQ ID NO: 1383797 - DNA, 15 bp, Homo sapiens
actatctctctactt

SEQ ID NO: 1383798 - DNA, 15 bp, Homo sapiens
cactatctctctact

SEQ ID NO: 1383799 - DNA, 15 bp, Homo sapiens
acactatctctctac

SEQ ID NO: 1383800 - DNA, 15 bp, Homo sapiens
tacactatctctcta

SEQ ID NO: 1383801 - DNA, 15 bp, Homo sapiens
gtacactatctctct

SEQ ID NO: 1383802 - DNA, 15 bp, Homo sapiens
tgtacactatctctc

SEQ ID NO: 1383803 - DNA, 15 bp, Homo sapiens
ctgtacactatctct

SEQ ID NO: 1383804 - DNA, 15 bp, Homo sapiens
tctgtacactatctc

SEQ ID NO: 1383805 - DNA, 15 bp, Homo sapiens
gtctgtacactatct

SEQ ID NO: 1383806 - DNA, 15 bp, Homo sapiens
agtctgtacactatc

SEQ ID NO: 1383807 - DNA, 15 bp, Homo sapiens
tagtctgtacactat

SEQ ID NO: 1383808 - DNA, 15 bp, Homo sapiens
atagtctgtacacta

SEQ ID NO: 1383809 - DNA, 15 bp, Homo sapiens
gatagtctgtacact

SEQ ID NO: 1383810 - DNA, 15 bp, Homo sapiens
tgatagtctgtacac

SEQ ID NO: 1383811 - DNA, 15 bp, Homo sapiens
ctgatagtctgtaca

SEQ ID NO: 1383812 - DNA, 15 bp, Homo sapiens
tctgatagtctgtac

SEQ ID NO: 1383813 - DNA, 15 bp, Homo sapiens
ctctgatagtctgta

SEQ ID NO: 1383814 - DNA, 15 bp, Homo sapiens
tctctgatagtctgt

SEQ ID NO: 1383815 - DNA, 15 bp, Homo sapiens
ttctctgatagtctg

SEQ ID NO: 1383816 - DNA, 15 bp, Homo sapiens
cttctctgatagtct

SEQ ID NO: 1383817 - DNA, 15 bp, Homo sapiens
ccttctctgatagtc

SEQ ID NO: 1383818 - DNA, 15 bp, Homo sapiens
gccttctctgatagt

SEQ ID NO: 1383819 - DNA, 15 bp, Homo sapiens
agccttctctgatag

SEQ ID NO: 1383820 - DNA, 15 bp, Homo sapiens
aagccttctctgata

SEQ ID NO: 1383821 - DNA, 15 bp, Homo sapiens
gaagccttctctgat

SEQ ID NO: 1383822 - DNA, 15 bp, Homo sapiens
ggaagccttctctga

SEQ ID NO: 1383823 - DNA, 15 bp, Homo sapiens
gggaagccttctctg

SEQ ID NO: 1383824 - DNA, 15 bp, Homo sapiens
tgggaagccttctct

SEQ ID NO: 1383825 - DNA, 15 bp, Homo sapiens
ctgggaagccttctc

SEQ ID NO: 1383826 - DNA, 15 bp, Homo sapiens
cctgggaagccttct

SEQ ID NO: 1383827 - DNA, 15 bp, Homo sapiens
tcctgggaagccttc

SEQ ID NO: 1383828 - DNA, 15 bp, Homo sapiens
ctcctgggaagcctt

SEQ ID NO: 1383829 - DNA, 15 bp, Homo sapiens
cctcctgggaagcct

SEQ ID NO: 1383830 - DNA, 15 bp, Homo sapiens
acctcctgggaagcc

SEQ ID NO: 1383831 - DNA, 15 bp, Homo sapiens
cacctcctgggaagc

SEQ ID NO: 1383832 - DNA, 15 bp, Homo sapiens
tcacctcctgggaag

SEQ ID NO: 1383833 - DNA, 15 bp, Homo sapiens
gtcacctcctgggaa

SEQ ID NO: 1383834 - DNA, 15 bp, Homo sapiens
tgtcacctcctggga

SEQ ID NO: 1383835 - DNA, 15 bp, Homo sapiens
atgtcacctcctggg

SEQ ID NO: 1383836 - DNA, 15 bp, Homo sapiens
aatgtcacctcctgg

SEQ ID NO: 1383837 - DNA, 15 bp, Homo sapiens
aaatgtcacctcctg

SEQ ID NO: 1383838 - DNA, 15 bp, Homo sapiens
caaatgtcacctcct

SEQ ID NO: 1383839 - DNA, 15 bp, Homo sapiens
tcaaatgtcacctcc

SEQ ID NO: 1383840 - DNA, 15 bp, Homo sapiens
atcaaatgtcacctc

SEQ ID NO: 1383841 - DNA, 15 bp, Homo sapiens
aatcaaatgtcacct

SEQ ID NO: 1383842 - DNA, 15 bp, Homo sapiens
aaatcaaatgtcacc

SEQ ID NO: 1383843 - DNA, 15 bp, Homo sapiens
caaatcaaatgtcac

SEQ ID NO: 1383844 - DNA, 15 bp, Homo sapiens
ccaaatcaaatgtca

SEQ ID NO: 1383845 - DNA, 15 bp, Homo sapiens
tccaaatcaaatgtc

SEQ ID NO: 1383846 - DNA, 15 bp, Homo sapiens
atccaaatcaaatgt

SEQ ID NO: 1383847 - DNA, 15 bp, Homo sapiens
tatccaaatcaaatg

SEQ ID NO: 1383848 - DNA, 15 bp, Homo sapiens
ctatccaaatcaaat

SEQ ID NO: 1383849 - DNA, 15 bp, Homo sapiens
actatccaaatcaaa

SEQ ID NO: 1383850 - DNA, 15 bp, Homo sapiens
cactatccaaatcaa

SEQ ID NO: 1383851 - DNA, 15 bp, Homo sapiens
tcactatccaaatca

SEQ ID NO: 1383852 - DNA, 15 bp, Homo sapiens
atcactatccaaatc

SEQ ID NO: 1383853 - DNA, 15 bp, Homo sapiens
aatcactatccaaat

SEQ ID NO: 1383854 - DNA, 15 bp, Homo sapiens
aaatcactatccaaa

SEQ ID NO: 1383855 - DNA, 15 bp, Homo sapiens
caaatcactatccaa

SEQ ID NO: 1383856 - DNA, 15 bp, Homo sapiens
ccaaatcactatcca

SEQ ID NO: 1383857 - DNA, 15 bp, Homo sapiens
tccaaatcactatcc

SEQ ID NO: 1383858 - DNA, 15 bp, Homo sapiens
atccaaatcactatc

SEQ ID NO: 1383859 - DNA, 15 bp, Homo sapiens
catccaaatcactat

SEQ ID NO: 1383860 - DNA, 15 bp, Homo sapiens
ccatccaaatcacta

SEQ ID NO: 1383861 - DNA, 15 bp, Homo sapiens
tccatccaaatcact

SEQ ID NO: 1383862 - DNA, 15 bp, Homo sapiens
atccatccaaatcac

SEQ ID NO: 1383863 - DNA, 15 bp, Homo sapiens
catccatccaaatca

SEQ ID NO: 1383864 - DNA, 15 bp, Homo sapiens
tcatccatccaaatc

SEQ ID NO: 1383865 - DNA, 15 bp, Homo sapiens
ttcatccatccaaat

SEQ ID NO: 1383866 - DNA, 15 bp, Homo sapiens
attcatccatccaaa

SEQ ID NO: 1383867 - DNA, 15 bp, Homo sapiens
tattcatccatccaa

SEQ ID NO: 1383868 - DNA, 15 bp, Homo sapiens
ttattcatccatcca

SEQ ID NO: 1383869 - DNA, 15 bp, Homo sapiens
cttattcatccatcc

SEQ ID NO: 1383870 - DNA, 15 bp, Homo sapiens
ccttattcatccatc

SEQ ID NO: 1383871 - DNA, 15 bp, Homo sapiens
cccttattcatccat

SEQ ID NO: 1383872 - DNA, 15 bp, Homo sapiens
tcccttattcatcca

SEQ ID NO: 1383873 - DNA, 15 bp, Homo sapiens
ttcccttattcatcc

SEQ ID NO: 1383874 - DNA, 15 bp, Homo sapiens
tttcccttattcatc

SEQ ID NO: 1383875 - DNA, 15 bp, Homo sapiens
ttttcccttattcat

SEQ ID NO: 1383876 - DNA, 15 bp, Homo sapiens
cttttcccttattca

SEQ ID NO: 1383877 - DNA, 15 bp, Homo sapiens
ccttttcccttattc

SEQ ID NO: 1383878 - DNA, 15 bp, Homo sapiens
cccttttcccttatt

SEQ ID NO: 1383879 - DNA, 15 bp, Homo sapiens
tcccttttcccttat

SEQ ID NO: 1383880 - DNA, 15 bp, Homo sapiens
ctcccttttccctta

SEQ ID NO: 1383881 - DNA, 15 bp, Homo sapiens
tctcccttttccctt

SEQ ID NO: 1383882 - DNA, 15 bp, Homo sapiens
gtctcccttttccct

SEQ ID NO: 1383883 - DNA, 15 bp, Homo sapiens
agtctcccttttccc

SEQ ID NO: 1383884 - DNA, 15 bp, Homo sapiens
aagtctcccttttcc

SEQ ID NO: 1383885 - DNA, 15 bp, Homo sapiens
caagtctcccttttc

SEQ ID NO: 1383886 - DNA, 15 bp, Homo sapiens
acaagtctccctttt

SEQ ID NO: 1383887 - DNA, 15 bp, Homo sapiens
tacaagtctcccttt

SEQ ID NO: 1383888 - DNA, 15 bp, Homo sapiens
ctacaagtctccctt

SEQ ID NO: 1383889 - DNA, 15 bp, Homo sapiens
cctacaagtctccct

SEQ ID NO: 1383890 - DNA, 15 bp, Homo sapiens
gcctacaagtctccc

SEQ ID NO: 1383891 - DNA, 15 bp, Homo sapiens
tgcctacaagtctcc

SEQ ID NO: 1383892 - DNA, 15 bp, Homo sapiens
ctgcctacaagtctc

SEQ ID NO: 1383893 - DNA, 15 bp, Homo sapiens
tctgcctacaagtct

SEQ ID NO: 1383894 - DNA, 15 bp, Homo sapiens
ctctgcctacaagtc

SEQ ID NO: 1383895 - DNA, 15 bp, Homo sapiens
gctctgcctacaagt

SEQ ID NO: 1383896 - DNA, 15 bp, Homo sapiens
tgctctgcctacaag

SEQ ID NO: 1383897 - DNA, 15 bp, Homo sapiens
atgctctgcctacaa

SEQ ID NO: 1383898 - DNA, 15 bp, Homo sapiens
gatgctctgcctaca

SEQ ID NO: 1383899 - DNA, 15 bp, Homo sapiens
tgatgctctgcctac

SEQ ID NO: 1383900 - DNA, 15 bp, Homo sapiens
atgatgctctgccta

SEQ ID NO: 1383901 - DNA, 15 bp, Homo sapiens
catgatgctctgcct

SEQ ID NO: 1383902 - DNA, 15 bp, Homo sapiens
tcatgatgctctgcc

SEQ ID NO: 1383903 - DNA, 15 bp, Homo sapiens
ctcatgatgctctgc

SEQ ID NO: 1383904 - DNA, 15 bp, Homo sapiens
tctcatgatgctctg

SEQ ID NO: 1383905 - DNA, 15 bp, Homo sapiens
ttctcatgatgctct

SEQ ID NO: 1383906 - DNA, 15 bp, Homo sapiens
tttctcatgatgctc

SEQ ID NO: 1383907 - DNA, 15 bp, Homo sapiens
gtttctcatgatgct

SEQ ID NO: 1383908 - DNA, 15 bp, Homo sapiens
tgtttctcatgatgc

SEQ ID NO: 1383909 - DNA, 15 bp, Homo sapiens
atgtttctcatgatg

SEQ ID NO: 1383910 - DNA, 15 bp, Homo sapiens
catgtttctcatgat

SEQ ID NO: 1383911 - DNA, 15 bp, Homo sapiens
ccatgtttctcatga

SEQ ID NO: 1383912 - DNA, 15 bp, Homo sapiens
gccatgtttctcatg

SEQ ID NO: 1383913 - DNA, 15 bp, Homo sapiens
tgccatgtttctcat

SEQ ID NO: 1383914 - DNA, 15 bp, Homo sapiens
atgccatgtttctca

SEQ ID NO: 1383915 - DNA, 15 bp, Homo sapiens
catgccatgtttctc

SEQ ID NO: 1383916 - DNA, 15 bp, Homo sapiens
acatgccatgtttct

SEQ ID NO: 1383917 - DNA, 15 bp, Homo sapiens
aacatgccatgtttc

SEQ ID NO: 1383918 - DNA, 15 bp, Homo sapiens
gaacatgccatgttt

SEQ ID NO: 1383919 - DNA, 15 bp, Homo sapiens
cgaacatgccatgtt

SEQ ID NO: 1383920 - DNA, 15 bp, Homo sapiens
tcgaacatgccatgt

SEQ ID NO: 1383921 - DNA, 15 bp, Homo sapiens
ctcgaacatgccatg

SEQ ID NO: 1383922 - DNA, 15 bp, Homo sapiens
tctcgaacatgccat

SEQ ID NO: 1383923 - DNA, 15 bp, Homo sapiens
ttctcgaacatgcca

SEQ ID NO: 1383924 - DNA, 15 bp, Homo sapiens
tttctcgaacatgcc

SEQ ID NO: 1383925 - DNA, 15 bp, Homo sapiens
atttctcgaacatgc

SEQ ID NO: 1383926 - DNA, 15 bp, Homo sapiens
tatttctcgaacatg

SEQ ID NO: 1383927 - DNA, 15 bp, Homo sapiens
ttatttctcgaacat

SEQ ID NO: 1383928 - DNA, 15 bp, Homo sapiens
tttatttctcgaaca

SEQ ID NO: 1383929 - DNA, 15 bp, Homo sapiens
ttttatttctcgaac

SEQ ID NO: 1383930 - DNA, 15 bp, Homo sapiens
tttttatttctcgaa

SEQ ID NO: 1383931 - DNA, 15 bp, Homo sapiens
atttttatttctcga

SEQ ID NO: 1383932 - DNA, 15 bp, Homo sapiens
aatttttatttctcg

SEQ ID NO: 1383933 - DNA, 15 bp, Homo sapiens
caatttttatttctc

SEQ ID NO: 1383934 - DNA, 15 bp, Homo sapiens
ccaatttttatttct

SEQ ID NO: 1383935 - DNA, 15 bp, Homo sapiens
gccaatttttatttc

SEQ ID NO: 1383936 - DNA, 15 bp, Homo sapiens
agccaatttttattt

SEQ ID NO: 1383937 - DNA, 15 bp, Homo sapiens
aagccaatttttatt

SEQ ID NO: 1383938 - DNA, 15 bp, Homo sapiens
gaagccaatttttat

SEQ ID NO: 1383939 - DNA, 15 bp, Homo sapiens
tgaagccaattttta

SEQ ID NO: 1383940 - DNA, 15 bp, Homo sapiens
atgaagccaattttt

SEQ ID NO: 1383941 - DNA, 15 bp, Homo sapiens
catgaagccaatttt

SEQ ID NO: 1383942 - DNA, 15 bp, Homo sapiens
acatgaagccaattt

SEQ ID NO: 1383943 - DNA, 15 bp, Homo sapiens
cacatgaagccaatt

SEQ ID NO: 1383944 - DNA, 15 bp, Homo sapiens
tcacatgaagccaat

SEQ ID NO: 1383945 - DNA, 15 bp, Homo sapiens
gtcacatgaagccaa

SEQ ID NO: 1383946 - DNA, 15 bp, Homo sapiens
agtcacatgaagcca

SEQ ID NO: 1383947 - DNA, 15 bp, Homo sapiens
tagtcacatgaagcc

SEQ ID NO: 1383948 - DNA, 15 bp, Homo sapiens
ctagtcacatgaagc

SEQ ID NO: 1383949 - DNA, 15 bp, Homo sapiens
tctagtcacatgaag

SEQ ID NO: 1383950 - DNA, 15 bp, Homo sapiens
ttctagtcacatgaa

SEQ ID NO: 1383951 - DNA, 15 bp, Homo sapiens
tttctagtcacatga

SEQ ID NO: 1383952 - DNA, 15 bp, Homo sapiens
ttttctagtcacatg

SEQ ID NO: 1383953 - DNA, 15 bp, Homo sapiens
gttttctagtcacat

SEQ ID NO: 1383954 - DNA, 15 bp, Homo sapiens
tgttttctagtcaca

SEQ ID NO: 1383955 - DNA, 15 bp, Homo sapiens
ctgttttctagtcac

SEQ ID NO: 1383956 - DNA, 15 bp, Homo sapiens
cctgttttctagtca

SEQ ID NO: 1383957 - DNA, 15 bp, Homo sapiens
tcctgttttctagtc

SEQ ID NO: 1383958 - DNA, 15 bp, Homo sapiens
gtcctgttttctagt

SEQ ID NO: 1383959 - DNA, 15 bp, Homo sapiens
tgtcctgttttctag

SEQ ID NO: 1383960 - DNA, 15 bp, Homo sapiens
atgtcctgttttcta

SEQ ID NO: 1383961 - DNA, 15 bp, Homo sapiens
tatgtcctgttttct

SEQ ID NO: 1383962 - DNA, 15 bp, Homo sapiens
atatgtcctgttttc

SEQ ID NO: 1383963 - DNA, 15 bp, Homo sapiens
catatgtcctgtttt

SEQ ID NO: 1383964 - DNA, 15 bp, Homo sapiens
ccatatgtcctgttt

SEQ ID NO: 1383965 - DNA, 15 bp, Homo sapiens
cccatatgtcctgtt

SEQ ID NO: 1383966 - DNA, 15 bp, Homo sapiens
tcccatatgtcctgt

SEQ ID NO: 1383967 - DNA, 15 bp, Homo sapiens
ttcccatatgtcctg

SEQ ID NO: 1383968 - DNA, 15 bp, Homo sapiens
tttcccatatgtcct

SEQ ID NO: 1383969 - DNA, 15 bp, Homo sapiens
ctttcccatatgtcc

SEQ ID NO: 1383970 - DNA, 15 bp, Homo sapiens
cctttcccatatgtc

SEQ ID NO: 1383971 - DNA, 15 bp, Homo sapiens
ccctttcccatatgt

SEQ ID NO: 1383972 - DNA, 15 bp, Homo sapiens
tccctttcccatatg

SEQ ID NO: 1383973 - DNA, 15 bp, Homo sapiens
gtccctttcccatat

SEQ ID NO: 1383974 - DNA, 15 bp, Homo sapiens
agtccctttcccata

SEQ ID NO: 1383975 - DNA, 15 bp, Homo sapiens
cagtccctttcccat

SEQ ID NO: 1383976 - DNA, 15 bp, Homo sapiens
ccagtccctttccca

SEQ ID NO: 1383977 - DNA, 15 bp, Homo sapiens
tccagtccctttccc

SEQ ID NO: 1383978 - DNA, 15 bp, Homo sapiens
atccagtccctttcc

SEQ ID NO: 1383979 - DNA, 15 bp, Homo sapiens
aatccagtccctttc

SEQ ID NO: 1383980 - DNA, 15 bp, Homo sapiens
caatccagtcccttt

SEQ ID NO: 1383981 - DNA, 15 bp, Homo sapiens
acaatccagtccctt

SEQ ID NO: 1383982 - DNA, 15 bp, Homo sapiens
cacaatccagtccct

SEQ ID NO: 1383983 - DNA, 15 bp, Homo sapiens
tcacaatccagtccc

SEQ ID NO: 1383984 - DNA, 15 bp, Homo sapiens
gtcacaatccagtcc

SEQ ID NO: 1383985 - DNA, 15 bp, Homo sapiens
tgtcacaatccagtc

SEQ ID NO: 1383986 - DNA, 15 bp, Homo sapiens
ctgtcacaatccagt

SEQ ID NO: 1383987 - DNA, 15 bp, Homo sapiens
tctgtcacaatccag

SEQ ID NO: 1383988 - DNA, 15 bp, Homo sapiens
ttctgtcacaatcca

SEQ ID NO: 1383989 - DNA, 15 bp, Homo sapiens
cttctgtcacaatcc

SEQ ID NO: 1383990 - DNA, 15 bp, Homo sapiens
gcttctgtcacaatc

SEQ ID NO: 1383991 - DNA, 15 bp, Homo sapiens
ggcttctgtcacaat

SEQ ID NO: 1383992 - DNA, 15 bp, Homo sapiens
tggcttctgtcacaa

SEQ ID NO: 1383993 - DNA, 15 bp, Homo sapiens
ttggcttctgtcaca

SEQ ID NO: 1383994 - DNA, 15 bp, Homo sapiens
tttggcttctgtcac

SEQ ID NO: 1383995 - DNA, 15 bp, Homo sapiens
ctttggcttctgtca

SEQ ID NO: 1383996 - DNA, 15 bp, Homo sapiens
actttggcttctgtc

SEQ ID NO: 1383997 - DNA, 15 bp, Homo sapiens
aactttggcttctgt

SEQ ID NO: 1383998 - DNA, 15 bp, Homo sapiens
caactttggcttctg

SEQ ID NO: 1383999 - DNA, 15 bp, Homo sapiens
gcaactttggcttct

SEQ ID NO: 1384000 - DNA, 15 bp, Homo sapiens
ggcaactttggcttc

SEQ ID NO: 1384001 - DNA, 15 bp, Homo sapiens
tggcaactttggctt

SEQ ID NO: 1384002 - DNA, 15 bp, Homo sapiens
ttggcaactttggct

SEQ ID NO: 1384003 - DNA, 15 bp, Homo sapiens
cttggcaactttggc

SEQ ID NO: 1384004 - DNA, 15 bp, Homo sapiens
acttggcaactttgg

SEQ ID NO: 1384005 - DNA, 15 bp, Homo sapiens
tacttggcaactttg

SEQ ID NO: 1384006 - DNA, 15 bp, Homo sapiens
ctacttggcaacttt

SEQ ID NO: 1384007 - DNA, 15 bp, Homo sapiens
gctacttggcaactt

SEQ ID NO: 1384008 - DNA, 15 bp, Homo sapiens
agctacttggcaact

SEQ ID NO: 1384009 - DNA, 15 bp, Homo sapiens
gagctacttggcaac

SEQ ID NO: 1384010 - DNA, 15 bp, Homo sapiens
tgagctacttggcaa

SEQ ID NO: 1384011 - DNA, 15 bp, Homo sapiens
atgagctacttggca

SEQ ID NO: 1384012 - DNA, 15 bp, Homo sapiens
catgagctacttggc

SEQ ID NO: 1384013 - DNA, 15 bp, Homo sapiens
gcatgagctacttgg

SEQ ID NO: 1384014 - DNA, 15 bp, Homo sapiens
agcatgagctacttg

SEQ ID NO: 1384015 - DNA, 15 bp, Homo sapiens
cagcatgagctactt

SEQ ID NO: 1384016 - DNA, 15 bp, Homo sapiens
acagcatgagctact

SEQ ID NO: 1384017 - DNA, 15 bp, Homo sapiens
cacagcatgagctac

SEQ ID NO: 1384018 - DNA, 15 bp, Homo sapiens
gcacagcatgagcta

SEQ ID NO: 1384019 - DNA, 15 bp, Homo sapiens
agcacagcatgagct

SEQ ID NO: 1384020 - DNA, 15 bp, Homo sapiens
tagcacagcatgagc

SEQ ID NO: 1384021 - DNA, 15 bp, Homo sapiens
ttagcacagcatgag

SEQ ID NO: 1384022 - DNA, 15 bp, Homo sapiens
cttagcacagcatga

SEQ ID NO: 1384023 - DNA, 15 bp, Homo sapiens
ccttagcacagcatg

SEQ ID NO: 1384024 - DNA, 15 bp, Homo sapiens
tccttagcacagcat

SEQ ID NO: 1384025 - DNA, 15 bp, Homo sapiens
ttccttagcacagca

SEQ ID NO: 1384026 - DNA, 15 bp, Homo sapiens
attccttagcacagc

SEQ ID NO: 1384027 - DNA, 15 bp, Homo sapiens
gattccttagcacag

SEQ ID NO: 1384028 - DNA, 15 bp, Homo sapiens
agattccttagcaca

SEQ ID NO: 1384029 - DNA, 15 bp, Homo sapiens
cagattccttagcac

SEQ ID NO: 1384030 - DNA, 15 bp, Homo sapiens
ccagattccttagca

SEQ ID NO: 1384031 - DNA, 15 bp, Homo sapiens
tccagattccttagc

SEQ ID NO: 1384032 - DNA, 15 bp, Homo sapiens
ttccagattccttag

SEQ ID NO: 1384033 - DNA, 15 bp, Homo sapiens
gttccagattcctta

SEQ ID NO: 1384034 - DNA, 15 bp, Homo sapiens
ggttccagattcctt

SEQ ID NO: 1384035 - DNA, 15 bp, Homo sapiens
aggttccagattcct

SEQ ID NO: 1384036 - DNA, 15 bp, Homo sapiens
caggttccagattcc

SEQ ID NO: 1384037 - DNA, 15 bp, Homo sapiens
ccaggttccagattc

SEQ ID NO: 1384038 - DNA, 15 bp, Homo sapiens
cccaggttccagatt

SEQ ID NO: 1384039 - DNA, 15 bp, Homo sapiens
gcccaggttccagat

SEQ ID NO: 1384040 - DNA, 15 bp, Homo sapiens
ggcccaggttccaga

SEQ ID NO: 1384041 - DNA, 15 bp, Homo sapiens
aggcccaggttccag

SEQ ID NO: 1384042 - DNA, 15 bp, Homo sapiens
aaggcccaggttcca

SEQ ID NO: 1384043 - DNA, 15 bp, Homo sapiens
taaggcccaggttcc

SEQ ID NO: 1384044 - DNA, 15 bp, Homo sapiens
ataaggcccaggttc

SEQ ID NO: 1384045 - DNA, 15 bp, Homo sapiens
gataaggcccaggtt

SEQ ID NO: 1384046 - DNA, 15 bp, Homo sapiens
agataaggcccaggt

SEQ ID NO: 1384047 - DNA, 15 bp, Homo sapiens
aagataaggcccagg

SEQ ID NO: 1384048 - DNA, 15 bp, Homo sapiens
gaagataaggcccag

SEQ ID NO: 1384049 - DNA, 15 bp, Homo sapiens
tgaagataaggccca

SEQ ID NO: 1384050 - DNA, 15 bp, Homo sapiens
ctgaagataaggccc

SEQ ID NO: 1384051 - DNA, 15 bp, Homo sapiens
actgaagataaggcc

SEQ ID NO: 1384052 - DNA, 15 bp, Homo sapiens
cactgaagataaggc

SEQ ID NO: 1384053 - DNA, 15 bp, Homo sapiens
ccactgaagataagg

SEQ ID NO: 1384054 - DNA, 15 bp, Homo sapiens
tccactgaagataag

SEQ ID NO: 1384055 - DNA, 15 bp, Homo sapiens
ttccactgaagataa

SEQ ID NO: 1384056 - DNA, 15 bp, Homo sapiens
attccactgaagata

SEQ ID NO: 1384057 - DNA, 15 bp, Homo sapiens
cattccactgaagat

SEQ ID NO: 1384058 - DNA, 15 bp, Homo sapiens
ccattccactgaaga

SEQ ID NO: 1384059 - DNA, 15 bp, Homo sapiens
cccattccactgaag

SEQ ID NO: 1384060 - DNA, 15 bp, Homo sapiens
tcccattccactgaa

SEQ ID NO: 1384061 - DNA, 15 bp, Homo sapiens
ttcccattccactga

SEQ ID NO: 1384062 - DNA, 15 bp, Homo sapiens
gttcccattccactg

SEQ ID NO: 1384063 - DNA, 15 bp, Homo sapiens
ggttcccattccact

SEQ ID NO: 1384064 - DNA, 15 bp, Homo sapiens
tggttcccattccac

SEQ ID NO: 1384065 - DNA, 15 bp, Homo sapiens
ttggttcccattcca

SEQ ID NO: 1384066 - DNA, 15 bp, Homo sapiens
attggttcccattcc

SEQ ID NO: 1384067 - DNA, 15 bp, Homo sapiens
cattggttcccattc

SEQ ID NO: 1384068 - DNA, 15 bp, Homo sapiens
tcattggttcccatt

SEQ ID NO: 1384069 - DNA, 15 bp, Homo sapiens
atcattggttcccat

SEQ ID NO: 1384070 - DNA, 15 bp, Homo sapiens
tatcattggttccca

SEQ ID NO: 1384071 - DNA, 15 bp, Homo sapiens
gtatcattggttccc

SEQ ID NO: 1384072 - DNA, 15 bp, Homo sapiens
agtatcattggttcc

SEQ ID NO: 1384073 - DNA, 15 bp, Homo sapiens
aagtatcattggttc

SEQ ID NO: 1384074 - DNA, 15 bp, Homo sapiens
aaagtatcattggtt

SEQ ID NO: 1384075 - DNA, 15 bp, Homo sapiens
aaaagtatcattggt

SEQ ID NO: 1384076 - DNA, 15 bp, Homo sapiens
aaaaagtatcattgg

SEQ ID NO: 1384077 - DNA, 15 bp, Homo sapiens
taaaaagtatcattg

SEQ ID NO: 1384078 - DNA, 15 bp, Homo sapiens
ttaaaaagtatcatt

SEQ ID NO: 1384079 - DNA, 15 bp, Homo sapiens
tttaaaaagtatcat

SEQ ID NO: 1384080 - DNA, 15 bp, Homo sapiens
gtttaaaaagtatca

SEQ ID NO: 1384081 - DNA, 15 bp, Homo sapiens
tgtttaaaaagtatc

SEQ ID NO: 1384082 - DNA, 15 bp, Homo sapiens
ctgtttaaaaagtat

SEQ ID NO: 1384083 - DNA, 15 bp, Homo sapiens
tctgtttaaaaagta

SEQ ID NO: 1384084 - DNA, 15 bp, Homo sapiens
ctctgtttaaaaagt

SEQ ID NO: 1384085 - DNA, 15 bp, Homo sapiens
cctctgtttaaaaag

SEQ ID NO: 1384086 - DNA, 15 bp, Homo sapiens
tcctctgtttaaaaa

SEQ ID NO: 1384087 - DNA, 15 bp, Homo sapiens
ctcctctgtttaaaa

SEQ ID NO: 1384088 - DNA, 15 bp, Homo sapiens
actcctctgtttaaa

SEQ ID NO: 1384089 - DNA, 15 bp, Homo sapiens
cactcctctgtttaa

SEQ ID NO: 1384090 - DNA, 15 bp, Homo sapiens
tcactcctctgttta

SEQ ID NO: 1384091 - DNA, 15 bp, Homo sapiens
atcactcctctgttt

SEQ ID NO: 1384092 - DNA, 15 bp, Homo sapiens
catcactcctctgtt

SEQ ID NO: 1384093 - DNA, 15 bp, Homo sapiens
acatcactcctctgt

SEQ ID NO: 1384094 - DNA, 15 bp, Homo sapiens
cacatcactcctctg

SEQ ID NO: 1384095 - DNA, 15 bp, Homo sapiens
tcacatcactcctct

SEQ ID NO: 1384096 - DNA, 15 bp, Homo sapiens
atcacatcactcctc

SEQ ID NO: 1384097 - DNA, 15 bp, Homo sapiens
gatcacatcactcct

SEQ ID NO: 1384098 - DNA, 15 bp, Homo sapiens
tgatcacatcactcc

SEQ ID NO: 1384099 - DNA, 15 bp, Homo sapiens
ctgatcacatcactc

SEQ ID NO: 1384100 - DNA, 15 bp, Homo sapiens
tctgatcacatcact

SEQ ID NO: 1384101 - DNA, 15 bp, Homo sapiens
atctgatcacatcac

SEQ ID NO: 1384102 - DNA, 15 bp, Homo sapiens
gatctgatcacatca

SEQ ID NO: 1384103 - DNA, 15 bp, Homo sapiens
agatctgatcacatc

SEQ ID NO: 1384104 - DNA, 15 bp, Homo sapiens
tagatctgatcacat

SEQ ID NO: 1384105 - DNA, 15 bp, Homo sapiens
ctagatctgatcaca

SEQ ID NO: 1384106 - DNA, 15 bp, Homo sapiens
actagatctgatcac

SEQ ID NO: 1384107 - DNA, 15 bp, Homo sapiens
aactagatctgatca

SEQ ID NO: 1384108 - DNA, 15 bp, Homo sapiens
taactagatctgatc

SEQ ID NO: 1384109 - DNA, 15 bp, Homo sapiens
ctaactagatctgat

SEQ ID NO: 1384110 - DNA, 15 bp, Homo sapiens
tctaactagatctga

SEQ ID NO: 1384111 - DNA, 15 bp, Homo sapiens
gtctaactagatctg

SEQ ID NO: 1384112 - DNA, 15 bp, Homo sapiens
tgtctaactagatct

SEQ ID NO: 1384113 - DNA, 15 bp, Homo sapiens
gtgtctaactagatc

SEQ ID NO: 1384114 - DNA, 15 bp, Homo sapiens
tgtgtctaactagat

SEQ ID NO: 1384115 - DNA, 15 bp, Homo sapiens
ttgtgtctaactaga

SEQ ID NO: 1384116 - DNA, 15 bp, Homo sapiens
cttgtgtctaactag

SEQ ID NO: 1384117 - DNA, 15 bp, Homo sapiens
ccttgtgtctaacta

SEQ ID NO: 1384118 - DNA, 15 bp, Homo sapiens
accttgtgtctaact

SEQ ID NO: 1384119 - DNA, 15 bp, Homo sapiens
aaccttgtgtctaac

SEQ ID NO: 1384120 - DNA, 15 bp, Homo sapiens
gaaccttgtgtctaa

SEQ ID NO: 1384121 - DNA, 15 bp, Homo sapiens
agaaccttgtgtcta

SEQ ID NO: 1384122 - DNA, 15 bp, Homo sapiens
cagaaccttgtgtct

SEQ ID NO: 1384123 - DNA, 15 bp, Homo sapiens
gcagaaccttgtgtc

SEQ ID NO: 1384124 - DNA, 15 bp, Homo sapiens
tgcagaaccttgtgt

SEQ ID NO: 1384125 - DNA, 15 bp, Homo sapiens
ttgcagaaccttgtg

SEQ ID NO: 1384126 - DNA, 15 bp, Homo sapiens
attgcagaaccttgt

SEQ ID NO: 1384127 - DNA, 15 bp, Homo sapiens
aattgcagaaccttg

SEQ ID NO: 1384128 - DNA, 15 bp, Homo sapiens
taattgcagaacctt

SEQ ID NO: 1384129 - DNA, 15 bp, Homo sapiens
ataattgcagaacct

SEQ ID NO: 1384130 - DNA, 15 bp, Homo sapiens
gataattgcagaacc

SEQ ID NO: 1384131 - DNA, 15 bp, Homo sapiens
tgataattgcagaac

SEQ ID NO: 1384132 - DNA, 15 bp, Homo sapiens
atgataattgcagaa

SEQ ID NO: 1384133 - DNA, 15 bp, Homo sapiens
catgataattgcaga

SEQ ID NO: 1384134 - DNA, 15 bp, Homo sapiens
ccatgataattgcag

SEQ ID NO: 1384135 - DNA, 15 bp, Homo sapiens
tccatgataattgca

SEQ ID NO: 1384136 - DNA, 15 bp, Homo sapiens
ttccatgataattgc

SEQ ID NO: 1384137 - DNA, 15 bp, Homo sapiens
cttccatgataattg

SEQ ID NO: 1384138 - DNA, 15 bp, Homo sapiens
tcttccatgataatt

SEQ ID NO: 1384139 - DNA, 15 bp, Homo sapiens
ttcttccatgataat

SEQ ID NO: 1384140 - DNA, 15 bp, Homo sapiens
tttcttccatgataa

SEQ ID NO: 1384141 - DNA, 15 bp, Homo sapiens
atttcttccatgata

SEQ ID NO: 1384142 - DNA, 15 bp, Homo sapiens
catttcttccatgat

SEQ ID NO: 1384143 - DNA, 15 bp, Homo sapiens
tcatttcttccatga

SEQ ID NO: 1384144 - DNA, 15 bp, Homo sapiens
ttcatttcttccatg

SEQ ID NO: 1384145 - DNA, 15 bp, Homo sapiens
attcatttcttccat

SEQ ID NO: 1384146 - DNA, 15 bp, Homo sapiens
aattcatttcttcca

SEQ ID NO: 1384147 - DNA, 15 bp, Homo sapiens
gaattcatttcttcc

SEQ ID NO: 1384148 - DNA, 15 bp, Homo sapiens
tgaattcatttcttc

SEQ ID NO: 1384149 - DNA, 15 bp, Homo sapiens
atgaattcatttctt

SEQ ID NO: 1384150 - DNA, 15 bp, Homo sapiens
aatgaattcatttct

SEQ ID NO: 1384151 - DNA, 15 bp, Homo sapiens
gaatgaattcatttc

SEQ ID NO: 1384152 - DNA, 15 bp, Homo sapiens
tgaatgaattcattt

SEQ ID NO: 1384153 - DNA, 15 bp, Homo sapiens
gtgaatgaattcatt

SEQ ID NO: 1384154 - DNA, 15 bp, Homo sapiens
agtgaatgaattcat

SEQ ID NO: 1384155 - DNA, 15 bp, Homo sapiens
cagtgaatgaattca

SEQ ID NO: 1384156 - DNA, 15 bp, Homo sapiens
tcagtgaatgaattc

SEQ ID NO: 1384157 - DNA, 15 bp, Homo sapiens
ctcagtgaatgaatt

SEQ ID NO: 1384158 - DNA, 15 bp, Homo sapiens
cctcagtgaatgaat

SEQ ID NO: 1384159 - DNA, 15 bp, Homo sapiens
tcctcagtgaatgaa

SEQ ID NO: 1384160 - DNA, 15 bp, Homo sapiens
atcctcagtgaatga

SEQ ID NO: 1384161 - DNA, 15 bp, Homo sapiens
tatcctcagtgaatg

SEQ ID NO: 1384162 - DNA, 15 bp, Homo sapiens
ttatcctcagtgaat

SEQ ID NO: 1384163 - DNA, 15 bp, Homo sapiens
gttatcctcagtgaa

SEQ ID NO: 1384164 - DNA, 15 bp, Homo sapiens
ggttatcctcagtga

SEQ ID NO: 1384165 - DNA, 15 bp, Homo sapiens
aggttatcctcagtg

SEQ ID NO: 1384166 - DNA, 15 bp, Homo sapiens
caggttatcctcagt

SEQ ID NO: 1384167 - DNA, 15 bp, Homo sapiens
acaggttatcctcag

SEQ ID NO: 1384168 - DNA, 15 bp, Homo sapiens
cacaggttatcctca

SEQ ID NO: 1384169 - DNA, 15 bp, Homo sapiens
ccacaggttatcctc

SEQ ID NO: 1384170 - DNA, 15 bp, Homo sapiens
tccacaggttatcct

SEQ ID NO: 1384171 - DNA, 15 bp, Homo sapiens
ttccacaggttatcc

SEQ ID NO: 1384172 - DNA, 15 bp, Homo sapiens
tttccacaggttatc

SEQ ID NO: 1384173 - DNA, 15 bp, Homo sapiens
atttccacaggttat

SEQ ID NO: 1384174 - DNA, 15 bp, Homo sapiens
aatttccacaggtta

SEQ ID NO: 1384175 - DNA, 15 bp, Homo sapiens
gaatttccacaggtt

SEQ ID NO: 1384176 - DNA, 15 bp, Homo sapiens
agaatttccacaggt

SEQ ID NO: 1384177 - DNA, 15 bp, Homo sapiens
gagaatttccacagg

SEQ ID NO: 1384178 - DNA, 15 bp, Homo sapiens
tgagaatttccacag

SEQ ID NO: 1384179 - DNA, 15 bp, Homo sapiens
gtgagaatttccaca

SEQ ID NO: 1384180 - DNA, 15 bp, Homo sapiens
agtgagaatttccac

SEQ ID NO: 1384181 - DNA, 15 bp, Homo sapiens
aagtgagaatttcca

SEQ ID NO: 1384182 - DNA, 15 bp, Homo sapiens
aaagtgagaatttcc

SEQ ID NO: 1384183 - DNA, 15 bp, Homo sapiens
aaaagtgagaatttc

SEQ ID NO: 1384184 - DNA, 15 bp, Homo sapiens
caaaagtgagaattt

SEQ ID NO: 1384185 - DNA, 15 bp, Homo sapiens
acaaaagtgagaatt

SEQ ID NO: 1384186 - DNA, 15 bp, Homo sapiens
aacaaaagtgagaat

SEQ ID NO: 1384187 - DNA, 15 bp, Homo sapiens
aaacaaaagtgagaa

SEQ ID NO: 1384188 - DNA, 15 bp, Homo sapiens
caaacaaaagtgaga

SEQ ID NO: 1384189 - DNA, 15 bp, Homo sapiens
acaaacaaaagtgag

SEQ ID NO: 1384190 - DNA, 15 bp, Homo sapiens
tacaaacaaaagtga

SEQ ID NO: 1384191 - DNA, 15 bp, Homo sapiens
atacaaacaaaagtg

SEQ ID NO: 1384192 - DNA, 15 bp, Homo sapiens
aatacaaacaaaagt

SEQ ID NO: 1384193 - DNA, 15 bp, Homo sapiens
aaatacaaacaaaag

SEQ ID NO: 1384194 - DNA, 15 bp, Homo sapiens
aaaaaatacaaacaa

SEQ ID NO: 1384195 - DNA, 15 bp, Homo sapiens
taaaaaatacaaaca

SEQ ID NO: 1384196 - DNA, 15 bp, Homo sapiens
gtaaaaaatacaaac

SEQ ID NO: 1384197 - DNA, 15 bp, Homo sapiens
agtaaaaaatacaaa

SEQ ID NO: 1384198 - DNA, 15 bp, Homo sapiens
aagtaaaaaatacaa

SEQ ID NO: 1384199 - DNA, 15 bp, Homo sapiens
caagtaaaaaataca

SEQ ID NO: 1384200 - DNA, 15 bp, Homo sapiens
ccaagtaaaaaatac

SEQ ID NO: 1384201 - DNA, 15 bp, Homo sapiens
gccaagtaaaaaata

SEQ ID NO: 1384202 - DNA, 15 bp, Homo sapiens
agccaagtaaaaaat

SEQ ID NO: 1384203 - DNA, 15 bp, Homo sapiens
tagccaagtaaaaaa

SEQ ID NO: 1384204 - DNA, 15 bp, Homo sapiens
ttagccaagtaaaaa

SEQ ID NO: 1384205 - DNA, 15 bp, Homo sapiens
cttagccaagtaaaa

SEQ ID NO: 1384206 - DNA, 15 bp, Homo sapiens
tcttagccaagtaaa

SEQ ID NO: 1384207 - DNA, 15 bp, Homo sapiens
gtcttagccaagtaa

SEQ ID NO: 1384208 - DNA, 15 bp, Homo sapiens
agtcttagccaagta

SEQ ID NO: 1384209 - DNA, 15 bp, Homo sapiens
cagtcttagccaagt

SEQ ID NO: 1384210 - DNA, 15 bp, Homo sapiens
tcagtcttagccaag

SEQ ID NO: 1384211 - DNA, 15 bp, Homo sapiens
ctcagtcttagccaa

SEQ ID NO: 1384212 - DNA, 15 bp, Homo sapiens
gctcagtcttagcca

SEQ ID NO: 1384213 - DNA, 15 bp, Homo sapiens
agctcagtcttagcc

SEQ ID NO: 1384214 - DNA, 15 bp, Homo sapiens
aagctcagtcttagc

SEQ ID NO: 1384215 - DNA, 15 bp, Homo sapiens
aaagctcagtcttag

SEQ ID NO: 1384216 - DNA, 15 bp, Homo sapiens
aaaagctcagtctta

SEQ ID NO: 1384217 - DNA, 15 bp, Homo sapiens
caaaagctcagtctt

SEQ ID NO: 1384218 - DNA, 15 bp, Homo sapiens
ccaaaagctcagtct

SEQ ID NO: 1384219 - DNA, 15 bp, Homo sapiens
tccaaaagctcagtc

SEQ ID NO: 1384220 - DNA, 15 bp, Homo sapiens
atccaaaagctcagt

SEQ ID NO: 1384221 - DNA, 15 bp, Homo sapiens
tatccaaaagctcag

SEQ ID NO: 1384222 - DNA, 15 bp, Homo sapiens
atatccaaaagctca

SEQ ID NO: 1384223 - DNA, 15 bp, Homo sapiens
aatatccaaaagctc

SEQ ID NO: 1384224 - DNA, 15 bp, Homo sapiens
taatatccaaaagct

SEQ ID NO: 1384225 - DNA, 15 bp, Homo sapiens
ataatatccaaaagc

SEQ ID NO: 1384226 - DNA, 15 bp, Homo sapiens
aataatatccaaaag

SEQ ID NO: 1384227 - DNA, 15 bp, Homo sapiens
taataatatccaaaa

SEQ ID NO: 1384228 - DNA, 15 bp, Homo sapiens
gtaataatatccaaa

SEQ ID NO: 1384229 - DNA, 15 bp, Homo sapiens
agtaataatatccaa

SEQ ID NO: 1384230 - DNA, 15 bp, Homo sapiens
tagtaataatatcca

SEQ ID NO: 1384231 - DNA, 15 bp, Homo sapiens
ctagtaataatatcc

SEQ ID NO: 1384232 - DNA, 15 bp, Homo sapiens
actagtaataatatc

SEQ ID NO: 1384233 - DNA, 15 bp, Homo sapiens
aactagtaataatat

SEQ ID NO: 1384234 - DNA, 15 bp, Homo sapiens
gaactagtaataata

SEQ ID NO: 1384235 - DNA, 15 bp, Homo sapiens
tgaactagtaataat

SEQ ID NO: 1384236 - DNA, 15 bp, Homo sapiens
ttgaactagtaataa

SEQ ID NO: 1384237 - DNA, 15 bp, Homo sapiens
attgaactagtaata

SEQ ID NO: 1384238 - DNA, 15 bp, Homo sapiens
cattgaactagtaat

SEQ ID NO: 1384239 - DNA, 15 bp, Homo sapiens
tcattgaactagtaa

SEQ ID NO: 1384240 - DNA, 15 bp, Homo sapiens
atcattgaactagta

SEQ ID NO: 1384241 - DNA, 15 bp, Homo sapiens
tatcattgaactagt

SEQ ID NO: 1384242 - DNA, 15 bp, Homo sapiens
ttatcattgaactag

SEQ ID NO: 1384243 - DNA, 15 bp, Homo sapiens
attatcattgaacta

SEQ ID NO: 1384244 - DNA, 15 bp, Homo sapiens
tattatcattgaact

SEQ ID NO: 1384245 - DNA, 15 bp, Homo sapiens
atattatcattgaac

SEQ ID NO: 1384246 - DNA, 15 bp, Homo sapiens
aatattatcattgaa

SEQ ID NO: 1384247 - DNA, 15 bp, Homo sapiens
taatattatcattga

SEQ ID NO: 1384248 - DNA, 15 bp, Homo sapiens
ataatattatcattg

SEQ ID NO: 1384249 - DNA, 15 bp, Homo sapiens
gataatattatcatt

SEQ ID NO: 1384250 - DNA, 15 bp, Homo sapiens
agataatattatcat

SEQ ID NO: 1384251 - DNA, 15 bp, Homo sapiens
tagataatattatca

SEQ ID NO: 1384252 - DNA, 15 bp, Homo sapiens
gtagataatattatc

SEQ ID NO: 1384253 - DNA, 15 bp, Homo sapiens
ggtagataatattat

SEQ ID NO: 1384254 - DNA, 15 bp, Homo sapiens
tggtagataatatta

SEQ ID NO: 1384255 - DNA, 15 bp, Homo sapiens
ctggtagataatatt

SEQ ID NO: 1384256 - DNA, 15 bp, Homo sapiens
actggtagataatat

SEQ ID NO: 1384257 - DNA, 15 bp, Homo sapiens
tactggtagataata

SEQ ID NO: 1384258 - DNA, 15 bp, Homo sapiens
atactggtagataat

SEQ ID NO: 1384259 - DNA, 15 bp, Homo sapiens
aatactggtagataa

SEQ ID NO: 1384260 - DNA, 15 bp, Homo sapiens
gaatactggtagata

SEQ ID NO: 1384261 - DNA, 15 bp, Homo sapiens
tgaatactggtagat

SEQ ID NO: 1384262 - DNA, 15 bp, Homo sapiens
atgaatactggtaga

SEQ ID NO: 1384263 - DNA, 15 bp, Homo sapiens
aatgaatactggtag

SEQ ID NO: 1384264 - DNA, 15 bp, Homo sapiens
aaatgaatactggta

SEQ ID NO: 1384265 - DNA, 15 bp, Homo sapiens
taaatgaatactggt

SEQ ID NO: 1384266 - DNA, 15 bp, Homo sapiens
ttaaatgaatactgg

SEQ ID NO: 1384267 - DNA, 15 bp, Homo sapiens
attaaatgaatactg

SEQ ID NO: 1384268 - DNA, 15 bp, Homo sapiens
tattaaatgaatact

SEQ ID NO: 1384269 - DNA, 15 bp, Homo sapiens
atattaaatgaatac

SEQ ID NO: 1384270 - DNA, 15 bp, Homo sapiens
aatattaaatgaata

SEQ ID NO: 1384271 - DNA, 15 bp, Homo sapiens
taatattaaatgaat

SEQ ID NO: 1384272 - DNA, 15 bp, Homo sapiens
ttaatattaaatgaa

SEQ ID NO: 1384273 - DNA, 15 bp, Homo sapiens
atgttaatattaaat

SEQ ID NO: 1384274 - DNA, 15 bp, Homo sapiens
gatgttaatattaaa

SEQ ID NO: 1384275 - DNA, 15 bp, Homo sapiens
agatgttaatattaa

SEQ ID NO: 1384276 - DNA, 15 bp, Homo sapiens
tagatgttaatatta

SEQ ID NO: 1384277 - DNA, 15 bp, Homo sapiens
gtagatgttaatatt

SEQ ID NO: 1384278 - DNA, 15 bp, Homo sapiens
agtagatgttaatat

SEQ ID NO: 1384279 - DNA, 15 bp, Homo sapiens
tagtagatgttaata

SEQ ID NO: 1384280 - DNA, 15 bp, Homo sapiens
ctagtagatgttaat

SEQ ID NO: 1384281 - DNA, 15 bp, Homo sapiens
actagtagatgttaa

SEQ ID NO: 1384282 - DNA, 15 bp, Homo sapiens
tactagtagatgtta

SEQ ID NO: 1384283 - DNA, 15 bp, Homo sapiens
atactagtagatgtt

SEQ ID NO: 1384284 - DNA, 15 bp, Homo sapiens
aatactagtagatgt

SEQ ID NO: 1384285 - DNA, 15 bp, Homo sapiens
aaatactagtagatg

SEQ ID NO: 1384286 - DNA, 15 bp, Homo sapiens
taaatactagtagat

SEQ ID NO: 1384287 - DNA, 15 bp, Homo sapiens
gtaaatactagtaga

SEQ ID NO: 1384288 - DNA, 15 bp, Homo sapiens
agtaaatactagtag

SEQ ID NO: 1384289 - DNA, 15 bp, Homo sapiens
cagtaaatactagta

SEQ ID NO: 1384290 - DNA, 15 bp, Homo sapiens
tcagtaaatactagt

SEQ ID NO: 1384291 - DNA, 15 bp, Homo sapiens
ctcagtaaatactag

SEQ ID NO: 1384292 - DNA, 15 bp, Homo sapiens
actcagtaaatacta

SEQ ID NO: 1384293 - DNA, 15 bp, Homo sapiens
cactcagtaaatact

SEQ ID NO: 1384294 - DNA, 15 bp, Homo sapiens
gcactcagtaaatac

SEQ ID NO: 1384295 - DNA, 15 bp, Homo sapiens
ggcactcagtaaata

SEQ ID NO: 1384296 - DNA, 15 bp, Homo sapiens
aggcactcagtaaat

SEQ ID NO: 1384297 - DNA, 15 bp, Homo sapiens
taggcactcagtaaa

SEQ ID NO: 1384298 - DNA, 15 bp, Homo sapiens
gtaggcactcagtaa

SEQ ID NO: 1384299 - DNA, 15 bp, Homo sapiens
agtaggcactcagta

SEQ ID NO: 1384300 - DNA, 15 bp, Homo sapiens
tagtaggcactcagt

SEQ ID NO: 1384301 - DNA, 15 bp, Homo sapiens
gcatagtaggcactc

SEQ ID NO: 1384302 - DNA, 15 bp, Homo sapiens
tgcatagtaggcact

SEQ ID NO: 1384303 - DNA, 15 bp, Homo sapiens
atgcatagtaggcac

SEQ ID NO: 1384304 - DNA, 15 bp, Homo sapiens
aatgcatagtaggca

SEQ ID NO: 1384305 - DNA, 15 bp, Homo sapiens
gaatgcatagtaggc

SEQ ID NO: 1384306 - DNA, 15 bp, Homo sapiens
agaatgcatagtagg

SEQ ID NO: 1384307 - DNA, 15 bp, Homo sapiens
tagaatgcatagtag

SEQ ID NO: 1384308 - DNA, 15 bp, Homo sapiens
atagaatgcatagta

SEQ ID NO: 1384309 - DNA, 15 bp, Homo sapiens
tatagaatgcatagt

SEQ ID NO: 1384310 - DNA, 15 bp, Homo sapiens
atatagaatgcatag

SEQ ID NO: 1384311 - DNA, 15 bp, Homo sapiens
aatatagaatgcata

SEQ ID NO: 1384312 - DNA, 15 bp, Homo sapiens
aaatatagaatgcat

SEQ ID NO: 1384313 - DNA, 15 bp, Homo sapiens
gaaatatagaatgca

SEQ ID NO: 1384314 - DNA, 15 bp, Homo sapiens
ggaaatatagaatgc

SEQ ID NO: 1384315 - DNA, 15 bp, Homo sapiens
tggaaatatagaatg

SEQ ID NO: 1384316 - DNA, 15 bp, Homo sapiens
atggaaatatagaat

SEQ ID NO: 1384317 - DNA, 15 bp, Homo sapiens
aatggaaatatagaa

SEQ ID NO: 1384318 - DNA, 15 bp, Homo sapiens
gaatggaaatataga

SEQ ID NO: 1384319 - DNA, 15 bp, Homo sapiens
tgaatggaaatatag

SEQ ID NO: 1384320 - DNA, 15 bp, Homo sapiens
atgaatggaaatata

SEQ ID NO: 1384321 - DNA, 15 bp, Homo sapiens
aatgaatggaaatat

SEQ ID NO: 1384322 - DNA, 15 bp, Homo sapiens
aaatgaatggaaata

SEQ ID NO: 1384323 - DNA, 15 bp, Homo sapiens
gaaatgaatggaaat

SEQ ID NO: 1384324 - DNA, 15 bp, Homo sapiens
aagaaatgaatggaa

SEQ ID NO: 1384325 - DNA, 15 bp, Homo sapiens
caagaaatgaatgga

SEQ ID NO: 1384326 - DNA, 15 bp, Homo sapiens
acaagaaatgaatgg

SEQ ID NO: 1384327 - DNA, 15 bp, Homo sapiens
tacaagaaatgaatg

SEQ ID NO: 1384328 - DNA, 15 bp, Homo sapiens
atacaagaaatgaat

SEQ ID NO: 1384329 - DNA, 15 bp, Homo sapiens
tatacaagaaatgaa

SEQ ID NO: 1384330 - DNA, 15 bp, Homo sapiens
ttatacaagaaatga

SEQ ID NO: 1384331 - DNA, 15 bp, Homo sapiens
attatacaagaaatg

SEQ ID NO: 1384332 - DNA, 15 bp, Homo sapiens
tattatacaagaaat

SEQ ID NO: 1384333 - DNA, 15 bp, Homo sapiens
ctattatacaagaaa

SEQ ID NO: 1384334 - DNA, 15 bp, Homo sapiens
tctattatacaagaa

SEQ ID NO: 1384335 - DNA, 15 bp, Homo sapiens
atctattatacaaga

SEQ ID NO: 1384336 - DNA, 15 bp, Homo sapiens
tatctattatacaag

SEQ ID NO: 1384337 - DNA, 15 bp, Homo sapiens
ttatctattatacaa

SEQ ID NO: 1384338 - DNA, 15 bp, Homo sapiens
gttatctattataca

SEQ ID NO: 1384339 - DNA, 15 bp, Homo sapiens
tgttatctattatac

SEQ ID NO: 1384340 - DNA, 15 bp, Homo sapiens
ctgttatctattata

SEQ ID NO: 1384341 - DNA, 15 bp, Homo sapiens
gctgttatctattat

SEQ ID NO: 1384342 - DNA, 15 bp, Homo sapiens
tgctgttatctatta

SEQ ID NO: 1384343 - DNA, 15 bp, Homo sapiens
atgctgttatctatt

SEQ ID NO: 1384344 - DNA, 15 bp, Homo sapiens
aatgctgttatctat

SEQ ID NO: 1384345 - DNA, 15 bp, Homo sapiens
aaatgctgttatcta

SEQ ID NO: 1384346 - DNA, 15 bp, Homo sapiens
taaatgctgttatct

SEQ ID NO: 1384347 - DNA, 15 bp, Homo sapiens
ataaatgctgttatc

SEQ ID NO: 1384348 - DNA, 15 bp, Homo sapiens
aataaatgctgttat

SEQ ID NO: 1384349 - DNA, 15 bp, Homo sapiens
aaataaatgctgtta

SEQ ID NO: 1384350 - DNA, 15 bp, Homo sapiens
aaaataaatgctgtt

SEQ ID NO: 1384351 - DNA, 15 bp, Homo sapiens
gaaaataaatgctgt

SEQ ID NO: 1384352 - DNA, 15 bp, Homo sapiens
agaaaataaatgctg

SEQ ID NO: 1384353 - DNA, 15 bp, Homo sapiens
cagaaaataaatgct

SEQ ID NO: 1384354 - DNA, 15 bp, Homo sapiens
ccagaaaataaatgc

SEQ ID NO: 1384355 - DNA, 15 bp, Homo sapiens
accagaaaataaatg

SEQ ID NO: 1384356 - DNA, 15 bp, Homo sapiens
taccagaaaataaat

SEQ ID NO: 1384357 - DNA, 15 bp, Homo sapiens
ataccagaaaataaa

SEQ ID NO: 1384358 - DNA, 15 bp, Homo sapiens
gataccagaaaataa

SEQ ID NO: 1384359 - DNA, 15 bp, Homo sapiens
tgataccagaaaata

SEQ ID NO: 1384360 - DNA, 15 bp, Homo sapiens
atgataccagaaaat

SEQ ID NO: 1384361 - DNA, 15 bp, Homo sapiens
tatgataccagaaaa

SEQ ID NO: 1384362 - DNA, 15 bp, Homo sapiens
ttatgataccagaaa

SEQ ID NO: 1384363 - DNA, 15 bp, Homo sapiens
gttatgataccagaa

SEQ ID NO: 1384364 - DNA, 15 bp, Homo sapiens
tgttatgataccaga

SEQ ID NO: 1384365 - DNA, 15 bp, Homo sapiens
ctgttatgataccag

SEQ ID NO: 1384366 - DNA, 15 bp, Homo sapiens
actgttatgatacca

SEQ ID NO: 1384367 - DNA, 15 bp, Homo sapiens
cactgttatgatacc

SEQ ID NO: 1384368 - DNA, 15 bp, Homo sapiens
acactgttatgatac

SEQ ID NO: 1384369 - DNA, 15 bp, Homo sapiens
aacactgttatgata

SEQ ID NO: 1384370 - DNA, 15 bp, Homo sapiens
gaacactgttatgat

SEQ ID NO: 1384371 - DNA, 15 bp, Homo sapiens
tgaacactgttatga

SEQ ID NO: 1384372 - DNA, 15 bp, Homo sapiens
ttgaacactgttatg

SEQ ID NO: 1384373 - DNA, 15 bp, Homo sapiens
tttgaacactgttat

SEQ ID NO: 1384374 - DNA, 15 bp, Homo sapiens
atttgaacactgtta

SEQ ID NO: 1384375 - DNA, 15 bp, Homo sapiens
tatttgaacactgtt

SEQ ID NO: 1384376 - DNA, 15 bp, Homo sapiens
ctatttgaacactgt

SEQ ID NO: 1384377 - DNA, 15 bp, Homo sapiens
actatttgaacactg

SEQ ID NO: 1384378 - DNA, 15 bp, Homo sapiens
aactatttgaacact

SEQ ID NO: 1384379 - DNA, 15 bp, Homo sapiens
taactatttgaacac

SEQ ID NO: 1384380 - DNA, 15 bp, Homo sapiens
ataactatttgaaca

SEQ ID NO: 1384381 - DNA, 15 bp, Homo sapiens
gataactatttgaac

SEQ ID NO: 1384382 - DNA, 15 bp, Homo sapiens
ggataactatttgaa

SEQ ID NO: 1384383 - DNA, 15 bp, Homo sapiens
aggataactatttga

SEQ ID NO: 1384384 - DNA, 15 bp, Homo sapiens
aaggataactatttg

SEQ ID NO: 1384385 - DNA, 15 bp, Homo sapiens
taaggataactattt

SEQ ID NO: 1384386 - DNA, 15 bp, Homo sapiens
ctaaggataactatt

SEQ ID NO: 1384387 - DNA, 15 bp, Homo sapiens
tctaaggataactat

SEQ ID NO: 1384388 - DNA, 15 bp, Homo sapiens
ttctaaggataacta

SEQ ID NO: 1384389 - DNA, 15 bp, Homo sapiens
tttctaaggataact

SEQ ID NO: 1384390 - DNA, 15 bp, Homo sapiens
ttttctaaggataac

SEQ ID NO: 1384391 - DNA, 15 bp, Homo sapiens
tttttctaaggataa

SEQ ID NO: 1384392 - DNA, 15 bp, Homo sapiens
atttttctaaggata

SEQ ID NO: 1384393 - DNA, 15 bp, Homo sapiens
catttttctaaggat

SEQ ID NO: 1384394 - DNA, 15 bp, Homo sapiens
ccatttttctaagga

SEQ ID NO: 1384395 - DNA, 15 bp, Homo sapiens
tccatttttctaagg

SEQ ID NO: 1384396 - DNA, 15 bp, Homo sapiens
ttccatttttctaag

SEQ ID NO: 1384397 - DNA, 15 bp, Homo sapiens
tttccatttttctaa

SEQ ID NO: 1384398 - DNA, 15 bp, Homo sapiens
atttccatttttcta

SEQ ID NO: 1384399 - DNA, 15 bp, Homo sapiens
aatttccatttttct

SEQ ID NO: 1384400 - DNA, 15 bp, Homo sapiens
taatttccatttttc

SEQ ID NO: 1384401 - DNA, 15 bp, Homo sapiens
ttaatttccattttt

SEQ ID NO: 1384402 - DNA, 15 bp, Homo sapiens
gttaatttccatttt

SEQ ID NO: 1384403 - DNA, 15 bp, Homo sapiens
agttaatttccattt

SEQ ID NO: 1384404 - DNA, 15 bp, Homo sapiens
aagttaatttccatt

SEQ ID NO: 1384405 - DNA, 15 bp, Homo sapiens
caagttaatttccat

SEQ ID NO: 1384406 - DNA, 15 bp, Homo sapiens
acaagttaatttcca

SEQ ID NO: 1384407 - DNA, 15 bp, Homo sapiens
gacaagttaatttcc

SEQ ID NO: 1384408 - DNA, 15 bp, Homo sapiens
agacaagttaatttc

SEQ ID NO: 1384409 - DNA, 15 bp, Homo sapiens
aagacaagttaattt

SEQ ID NO: 1384410 - DNA, 15 bp, Homo sapiens
taagacaagttaatt

SEQ ID NO: 1384411 - DNA, 15 bp, Homo sapiens
ttaagacaagttaat

SEQ ID NO: 1384412 - DNA, 15 bp, Homo sapiens
cttaagacaagttaa

SEQ ID NO: 1384413 - DNA, 15 bp, Homo sapiens
acttaagacaagtta

SEQ ID NO: 1384414 - DNA, 15 bp, Homo sapiens
tacttaagacaagtt

SEQ ID NO: 1384415 - DNA, 15 bp, Homo sapiens
atacttaagacaagt

SEQ ID NO: 1384416 - DNA, 15 bp, Homo sapiens
tatacttaagacaag

SEQ ID NO: 1384417 - DNA, 15 bp, Homo sapiens
atatacttaagacaa

SEQ ID NO: 1384418 - DNA, 15 bp, Homo sapiens
aatatacttaagaca

SEQ ID NO: 1384419 - DNA, 15 bp, Homo sapiens
aaatatacttaagac

SEQ ID NO: 1384420 - DNA, 15 bp, Homo sapiens
taaatatacttaaga

SEQ ID NO: 1384421 - DNA, 15 bp, Homo sapiens
ctaaatatacttaag

SEQ ID NO: 1384422 - DNA, 15 bp, Homo sapiens
cctaaatatacttaa

SEQ ID NO: 1384423 - DNA, 15 bp, Homo sapiens
acctaaatatactta

SEQ ID NO: 1384424 - DNA, 15 bp, Homo sapiens
gacctaaatatactt

SEQ ID NO: 1384425 - DNA, 15 bp, Homo sapiens
agacctaaatatact

SEQ ID NO: 1384426 - DNA, 15 bp, Homo sapiens
gagacctaaatatac

SEQ ID NO: 1384427 - DNA, 15 bp, Homo sapiens
ggagacctaaatata

SEQ ID NO: 1384428 - DNA, 15 bp, Homo sapiens
tggagacctaaatat

SEQ ID NO: 1384429 - DNA, 15 bp, Homo sapiens
atggagacctaaata

SEQ ID NO: 1384430 - DNA, 15 bp, Homo sapiens
gatggagacctaaat

SEQ ID NO: 1384431 - DNA, 15 bp, Homo sapiens
agatggagacctaaa

SEQ ID NO: 1384432 - DNA, 15 bp, Homo sapiens
cagatggagacctaa

SEQ ID NO: 1384433 - DNA, 15 bp, Homo sapiens
gcagatggagaccta

SEQ ID NO: 1384434 - DNA, 15 bp, Homo sapiens
ggcagatggagacct

SEQ ID NO: 1384435 - DNA, 15 bp, Homo sapiens
gggcagatggagacc

SEQ ID NO: 1384436 - DNA, 15 bp, Homo sapiens
tgggcagatggagac

SEQ ID NO: 1384437 - DNA, 15 bp, Homo sapiens
gtgggcagatggaga

SEQ ID NO: 1384438 - DNA, 15 bp, Homo sapiens
agtgggcagatggag

SEQ ID NO: 1384439 - DNA, 15 bp, Homo sapiens
aagtgggcagatgga

SEQ ID NO: 1384440 - DNA, 15 bp, Homo sapiens
gaagtgggcagatgg

SEQ ID NO: 1384441 - DNA, 15 bp, Homo sapiens
agaagtgggcagatg

SEQ ID NO: 1384442 - DNA, 15 bp, Homo sapiens
aagaagtgggcagat

SEQ ID NO: 1384443 - DNA, 15 bp, Homo sapiens
caagaagtgggcaga

SEQ ID NO: 1384444 - DNA, 15 bp, Homo sapiens
tcaagaagtgggcag

SEQ ID NO: 1384445 - DNA, 15 bp, Homo sapiens
gtcaagaagtgggca

SEQ ID NO: 1384446 - DNA, 15 bp, Homo sapiens
tgtcaagaagtgggc

SEQ ID NO: 1384447 - DNA, 15 bp, Homo sapiens
atgtcaagaagtggg

SEQ ID NO: 1384448 - DNA, 15 bp, Homo sapiens
aatgtcaagaagtgg

SEQ ID NO: 1384449 - DNA, 15 bp, Homo sapiens
aaatgtcaagaagtg

SEQ ID NO: 1384450 - DNA, 15 bp, Homo sapiens
caaatgtcaagaagt

SEQ ID NO: 1384451 - DNA, 15 bp, Homo sapiens
ccaaatgtcaagaag

SEQ ID NO: 1384452 - DNA, 15 bp, Homo sapiens
cccaaatgtcaagaa

SEQ ID NO: 1384453 - DNA, 15 bp, Homo sapiens
gcccaaatgtcaaga

SEQ ID NO: 1384454 - DNA, 15 bp, Homo sapiens
agcccaaatgtcaag

SEQ ID NO: 1384455 - DNA, 15 bp, Homo sapiens
aagcccaaatgtcaa

SEQ ID NO: 1384456 - DNA, 15 bp, Homo sapiens
gaagcccaaatgtca

SEQ ID NO: 1384457 - DNA, 15 bp, Homo sapiens
agaagcccaaatgtc

SEQ ID NO: 1384458 - DNA, 15 bp, Homo sapiens
cagaagcccaaatgt

SEQ ID NO: 1384459 - DNA, 15 bp, Homo sapiens
tcagaagcccaaatg

SEQ ID NO: 1384460 - DNA, 15 bp, Homo sapiens
atcagaagcccaaat

SEQ ID NO: 1384461 - DNA, 15 bp, Homo sapiens
tatcagaagcccaaa

SEQ ID NO: 1384462 - DNA, 15 bp, Homo sapiens
atatcagaagcccaa

SEQ ID NO: 1384463 - DNA, 15 bp, Homo sapiens
aatatcagaagccca

SEQ ID NO: 1384464 - DNA, 15 bp, Homo sapiens
aaatatcagaagccc

SEQ ID NO: 1384465 - DNA, 15 bp, Homo sapiens
caaatatcagaagcc

SEQ ID NO: 1384466 - DNA, 15 bp, Homo sapiens
ccaaatatcagaagc

SEQ ID NO: 1384467 - DNA, 15 bp, Homo sapiens
gccaaatatcagaag

SEQ ID NO: 1384468 - DNA, 15 bp, Homo sapiens
agccaaatatcagaa

SEQ ID NO: 1384469 - DNA, 15 bp, Homo sapiens
cagccaaatatcaga

SEQ ID NO: 1384470 - DNA, 15 bp, Homo sapiens
tcagccaaatatcag

SEQ ID NO: 1384471 - DNA, 15 bp, Homo sapiens
gtcagccaaatatca

SEQ ID NO: 1384472 - DNA, 15 bp, Homo sapiens
agtcagccaaatatc

SEQ ID NO: 1384473 - DNA, 15 bp, Homo sapiens
gagtcagccaaatat

SEQ ID NO: 1384474 - DNA, 15 bp, Homo sapiens
tgagtcagccaaata

SEQ ID NO: 1384475 - DNA, 15 bp, Homo sapiens
ctgagtcagccaaat

SEQ ID NO: 1384476 - DNA, 15 bp, Homo sapiens
gctgagtcagccaaa

SEQ ID NO: 1384477 - DNA, 15 bp, Homo sapiens
agctgagtcagccaa

SEQ ID NO: 1384478 - DNA, 15 bp, Homo sapiens
tagctgagtcagcca

SEQ ID NO: 1384479 - DNA, 15 bp, Homo sapiens
ttagctgagtcagcc

SEQ ID NO: 1384480 - DNA, 15 bp, Homo sapiens
tttagctgagtcagc

SEQ ID NO: 1384481 - DNA, 15 bp, Homo sapiens
gtttagctgagtcag

SEQ ID NO: 1384482 - DNA, 15 bp, Homo sapiens
tgtttagctgagtca

SEQ ID NO: 1384483 - DNA, 15 bp, Homo sapiens
ttgtttagctgagtc

SEQ ID NO: 1384484 - DNA, 15 bp, Homo sapiens
tttgtttagctgagt

SEQ ID NO: 1384485 - DNA, 15 bp, Homo sapiens
gtttgtttagctgag

SEQ ID NO: 1384486 - DNA, 15 bp, Homo sapiens
tgtttgtttagctga

SEQ ID NO: 1384487 - DNA, 15 bp, Homo sapiens
atgtttgtttagctg

SEQ ID NO: 1384488 - DNA, 15 bp, Homo sapiens
catgtttgtttagct

SEQ ID NO: 1384489 - DNA, 15 bp, Homo sapiens
acatgtttgtttagc

SEQ ID NO: 1384490 - DNA, 15 bp, Homo sapiens
tacatgtttgtttag

SEQ ID NO: 1384491 - DNA, 15 bp, Homo sapiens
atacatgtttgttta

SEQ ID NO: 1384492 - DNA, 15 bp, Homo sapiens
catacatgtttgttt

SEQ ID NO: 1384493 - DNA, 15 bp, Homo sapiens
gcatacatgtttgtt

SEQ ID NO: 1384494 - DNA, 15 bp, Homo sapiens
agcatacatgtttgt

SEQ ID NO: 1384495 - DNA, 15 bp, Homo sapiens
tagcatacatgtttg

SEQ ID NO: 1384496 - DNA, 15 bp, Homo sapiens
ctagcatacatgttt

SEQ ID NO: 1384497 - DNA, 15 bp, Homo sapiens
actagcatacatgtt

SEQ ID NO: 1384498 - DNA, 15 bp, Homo sapiens
aactagcatacatgt

SEQ ID NO: 1384499 - DNA, 15 bp, Homo sapiens
aaactagcatacatg

SEQ ID NO: 1384500 - DNA, 15 bp, Homo sapiens
caaactagcatacat

SEQ ID NO: 1384501 - DNA, 15 bp, Homo sapiens
ccaaactagcataca

SEQ ID NO: 1384502 - DNA, 15 bp, Homo sapiens
tccaaactagcatac

SEQ ID NO: 1384503 - DNA, 15 bp, Homo sapiens
ttccaaactagcata

SEQ ID NO: 1384504 - DNA, 15 bp, Homo sapiens
cttccaaactagcat

SEQ ID NO: 1384505 - DNA, 15 bp, Homo sapiens
acttccaaactagca

SEQ ID NO: 1384506 - DNA, 15 bp, Homo sapiens
cacttccaaactagc

SEQ ID NO: 1384507 - DNA, 15 bp, Homo sapiens
gcacttccaaactag

SEQ ID NO: 1384508 - DNA, 15 bp, Homo sapiens
ggcacttccaaacta

SEQ ID NO: 1384509 - DNA, 15 bp, Homo sapiens
tggcacttccaaact

SEQ ID NO: 1384510 - DNA, 15 bp, Homo sapiens
ctggcacttccaaac

SEQ ID NO: 1384511 - DNA, 15 bp, Homo sapiens
tctggcacttccaaa

SEQ ID NO: 1384512 - DNA, 15 bp, Homo sapiens
atctggcacttccaa

SEQ ID NO: 1384513 - DNA, 15 bp, Homo sapiens
tatctggcacttcca

SEQ ID NO: 1384514 - DNA, 15 bp, Homo sapiens
gtatctggcacttcc

SEQ ID NO: 1384515 - DNA, 15 bp, Homo sapiens
ggtatctggcacttc

SEQ ID NO: 1384516 - DNA, 15 bp, Homo sapiens
tggtatctggcactt

SEQ ID NO: 1384517 - DNA, 15 bp, Homo sapiens
gtggtatctggcact

SEQ ID NO: 1384518 - DNA, 15 bp, Homo sapiens
agtggtatctggcac

SEQ ID NO: 1384519 - DNA, 15 bp, Homo sapiens
cagtggtatctggca

SEQ ID NO: 1384520 - DNA, 15 bp, Homo sapiens
ccagtggtatctggc

SEQ ID NO: 1384521 - DNA, 15 bp, Homo sapiens
tccagtggtatctgg

SEQ ID NO: 1384522 - DNA, 15 bp, Homo sapiens
ttccagtggtatctg

SEQ ID NO: 1384523 - DNA, 15 bp, Homo sapiens
attccagtggtatct

SEQ ID NO: 1384524 - DNA, 15 bp, Homo sapiens
tattccagtggtatc

SEQ ID NO: 1384525 - DNA, 15 bp, Homo sapiens
ttattccagtggtat

SEQ ID NO: 1384526 - DNA, 15 bp, Homo sapiens
attattccagtggta

SEQ ID NO: 1384527 - DNA, 15 bp, Homo sapiens
tattattccagtggt

SEQ ID NO: 1384528 - DNA, 15 bp, Homo sapiens
gtattattccagtgg

SEQ ID NO: 1384529 - DNA, 15 bp, Homo sapiens
ggtattattccagtg

SEQ ID NO: 1384530 - DNA, 15 bp, Homo sapiens
tggtattattccagt

SEQ ID NO: 1384531 - DNA, 15 bp, Homo sapiens
atggtattattccag

SEQ ID NO: 1384532 - DNA, 15 bp, Homo sapiens
aatggtattattcca

SEQ ID NO: 1384533 - DNA, 15 bp, Homo sapiens
caatggtattattcc

SEQ ID NO: 1384534 - DNA, 15 bp, Homo sapiens
gcaatggtattattc

SEQ ID NO: 1384535 - DNA, 15 bp, Homo sapiens
agcaatggtattatt

SEQ ID NO: 1384536 - DNA, 15 bp, Homo sapiens
cagcaatggtattat

SEQ ID NO: 1384537 - DNA, 15 bp, Homo sapiens
acagcaatggtatta

SEQ ID NO: 1384538 - DNA, 15 bp, Homo sapiens
aacagcaatggtatt

SEQ ID NO: 1384539 - DNA, 15 bp, Homo sapiens
aaacagcaatggtat

SEQ ID NO: 1384540 - DNA, 15 bp, Homo sapiens
gaaacagcaatggta

SEQ ID NO: 1384541 - DNA, 15 bp, Homo sapiens
agaaacagcaatggt

SEQ ID NO: 1384542 - DNA, 15 bp, Homo sapiens
cagaaacagcaatgg

SEQ ID NO: 1384543 - DNA, 15 bp, Homo sapiens
acagaaacagcaatg

SEQ ID NO: 1384544 - DNA, 15 bp, Homo sapiens
aacagaaacagcaat

SEQ ID NO: 1384545 - DNA, 15 bp, Homo sapiens
aaacagaaacagcaa

SEQ ID NO: 1384546 - DNA, 15 bp, Homo sapiens
aaaacagaaacagca

SEQ ID NO: 1384547 - DNA, 15 bp, Homo sapiens
aaaaacagaaacagc

SEQ ID NO: 1384548 - DNA, 15 bp, Homo sapiens
aaaaaacagaaacag

SEQ ID NO: 1384549 - DNA, 15 bp, Homo sapiens
aaaaaaacagaaaca

SEQ ID NO: 1384550 - DNA, 15 bp, Homo sapiens
caaaaaaacagaaac

SEQ ID NO: 1384551 - DNA, 15 bp, Homo sapiens
acaaaaaaacagaaa

SEQ ID NO: 1384552 - DNA, 15 bp, Homo sapiens
cacaaaaaaacagaa

SEQ ID NO: 1384553 - DNA, 15 bp, Homo sapiens
ccacaaaaaaacaga

SEQ ID NO: 1384554 - DNA, 15 bp, Homo sapiens
accacaaaaaaacag

SEQ ID NO: 1384555 - DNA, 15 bp, Homo sapiens
caccacaaaaaaaca

SEQ ID NO: 1384556 - DNA, 15 bp, Homo sapiens
tcaccacaaaaaaac

SEQ ID NO: 1384557 - DNA, 15 bp, Homo sapiens
atcaccacaaaaaaa

SEQ ID NO: 1384558 - DNA, 15 bp, Homo sapiens
aatcaccacaaaaaa

SEQ ID NO: 1384559 - DNA, 15 bp, Homo sapiens
aaatcaccacaaaaa

SEQ ID NO: 1384560 - DNA, 15 bp, Homo sapiens
aaaatcaccacaaaa

SEQ ID NO: 1384561 - DNA, 15 bp, Homo sapiens
caaaatcaccacaaa

SEQ ID NO: 1384562 - DNA, 15 bp, Homo sapiens
tcaaaatcaccacaa

SEQ ID NO: 1384563 - DNA, 15 bp, Homo sapiens
atcaaaatcaccaca

SEQ ID NO: 1384564 - DNA, 15 bp, Homo sapiens
aatcaaaatcaccac

SEQ ID NO: 1384565 - DNA, 15 bp, Homo sapiens
aaatcaaaatcacca

SEQ ID NO: 1384566 - DNA, 15 bp, Homo sapiens
aaaatcaaaatcacc

SEQ ID NO: 1384567 - DNA, 15 bp, Homo sapiens
aaaaatcaaaatcac

SEQ ID NO: 1384568 - DNA, 15 bp, Homo sapiens
caaaaatcaaaatca

SEQ ID NO: 1384569 - DNA, 15 bp, Homo sapiens
tcaaaaatcaaaatc

SEQ ID NO: 1384570 - DNA, 15 bp, Homo sapiens
ttcaaaaatcaaaat

SEQ ID NO: 1384571 - DNA, 15 bp, Homo sapiens
attcaaaaatcaaaa

SEQ ID NO: 1384572 - DNA, 15 bp, Homo sapiens
tattcaaaaatcaaa

SEQ ID NO: 1384573 - DNA, 15 bp, Homo sapiens
ttattcaaaaatcaa

SEQ ID NO: 1384574 - DNA, 15 bp, Homo sapiens
cttattcaaaaatca

SEQ ID NO: 1384575 - DNA, 15 bp, Homo sapiens
tcttattcaaaaatc

SEQ ID NO: 1384576 - DNA, 15 bp, Homo sapiens
ttcttattcaaaaat

SEQ ID NO: 1384577 - DNA, 15 bp, Homo sapiens
tttcttattcaaaaa

SEQ ID NO: 1384578 - DNA, 15 bp, Homo sapiens
ttttcttattcaaaa

SEQ ID NO: 1384579 - DNA, 15 bp, Homo sapiens
tttttcttattcaaa

SEQ ID NO: 1384580 - DNA, 15 bp, Homo sapiens
atttttcttattcaa

SEQ ID NO: 1384581 - DNA, 15 bp, Homo sapiens
tatttttcttattca

SEQ ID NO: 1384582 - DNA, 15 bp, Homo sapiens
gtatttttcttattc

SEQ ID NO: 1384583 - DNA, 15 bp, Homo sapiens
agtatttttcttatt

SEQ ID NO: 1384584 - DNA, 15 bp, Homo sapiens
tagtatttttcttat

SEQ ID NO: 1384585 - DNA, 15 bp, Homo sapiens
ttagtatttttctta

SEQ ID NO: 1384586 - DNA, 15 bp, Homo sapiens
tttagtatttttctt

SEQ ID NO: 1384587 - DNA, 15 bp, Homo sapiens
ttttagtatttttct

SEQ ID NO: 1384588 - DNA, 15 bp, Homo sapiens
cttttagtatttttc

SEQ ID NO: 1384589 - DNA, 15 bp, Homo sapiens
ccttttagtattttt

SEQ ID NO: 1384590 - DNA, 15 bp, Homo sapiens
cccttttagtatttt

SEQ ID NO: 1384591 - DNA, 15 bp, Homo sapiens
acccttttagtattt

SEQ ID NO: 1384592 - DNA, 15 bp, Homo sapiens
tacccttttagtatt

SEQ ID NO: 1384593 - DNA, 15 bp, Homo sapiens
gtacccttttagtat

SEQ ID NO: 1384594 - DNA, 15 bp, Homo sapiens
tgtacccttttagta

SEQ ID NO: 1384595 - DNA, 15 bp, Homo sapiens
atgtacccttttagt

SEQ ID NO: 1384596 - DNA, 15 bp, Homo sapiens
aatgtacccttttag

SEQ ID NO: 1384597 - DNA, 15 bp, Homo sapiens
taatgtaccctttta

SEQ ID NO: 1384598 - DNA, 15 bp, Homo sapiens
ctaatgtaccctttt

SEQ ID NO: 1384599 - DNA, 15 bp, Homo sapiens
cctaatgtacccttt

SEQ ID NO: 1384600 - DNA, 15 bp, Homo sapiens
acctaatgtaccctt

SEQ ID NO: 1384601 - DNA, 15 bp, Homo sapiens
tacctaatgtaccct

SEQ ID NO: 1384602 - DNA, 15 bp, Homo sapiens
gtacctaatgtaccc

SEQ ID NO: 1384603 - DNA, 15 bp, Homo sapiens
tgtacctaatgtacc

SEQ ID NO: 1384604 - DNA, 15 bp, Homo sapiens
atgtacctaatgtac

SEQ ID NO: 1384605 - DNA, 15 bp, Homo sapiens
aatgtacctaatgta

SEQ ID NO: 1384606 - DNA, 15 bp, Homo sapiens
caatgtacctaatgt

SEQ ID NO: 1384607 - DNA, 15 bp, Homo sapiens
acaatgtacctaatg

SEQ ID NO: 1384608 - DNA, 15 bp, Homo sapiens
gacaatgtacctaat

SEQ ID NO: 1384609 - DNA, 15 bp, Homo sapiens
agacaatgtacctaa

SEQ ID NO: 1384610 - DNA, 15 bp, Homo sapiens
cagacaatgtaccta

SEQ ID NO: 1384611 - DNA, 15 bp, Homo sapiens
tcagacaatgtacct

SEQ ID NO: 1384612 - DNA, 15 bp, Homo sapiens
ttcagacaatgtacc

SEQ ID NO: 1384613 - DNA, 15 bp, Homo sapiens
attcagacaatgtac

SEQ ID NO: 1384614 - DNA, 15 bp, Homo sapiens
aattcagacaatgta

SEQ ID NO: 1384615 - DNA, 15 bp, Homo sapiens
aaattcagacaatgt

SEQ ID NO: 1384616 - DNA, 15 bp, Homo sapiens
taaattcagacaatg

SEQ ID NO: 1384617 - DNA, 15 bp, Homo sapiens
ataaattcagacaat

SEQ ID NO: 1384618 - DNA, 15 bp, Homo sapiens
gataaattcagacaa

SEQ ID NO: 1384619 - DNA, 15 bp, Homo sapiens
agataaattcagaca

SEQ ID NO: 1384620 - DNA, 15 bp, Homo sapiens
gagataaattcagac

SEQ ID NO: 1384621 - DNA, 15 bp, Homo sapiens
agagataaattcaga

SEQ ID NO: 1384622 - DNA, 15 bp, Homo sapiens
tagagataaattcag

SEQ ID NO: 1384623 - DNA, 15 bp, Homo sapiens
gtagagataaattca

SEQ ID NO: 1384624 - DNA, 15 bp, Homo sapiens
agtagagataaattc

SEQ ID NO: 1384625 - DNA, 15 bp, Homo sapiens
aagtagagataaatt

SEQ ID NO: 1384626 - DNA, 15 bp, Homo sapiens
aaagtagagataaat

SEQ ID NO: 1384627 - DNA, 15 bp, Homo sapiens
aaaagtagagataaa

SEQ ID NO: 1384628 - DNA, 15 bp, Homo sapiens
taaaagtagagataa

SEQ ID NO: 1384629 - DNA, 15 bp, Homo sapiens
ttaaaagtagagata

SEQ ID NO: 1384630 - DNA, 15 bp, Homo sapiens
gattaaaagtagaga

SEQ ID NO: 1384631 - DNA, 15 bp, Homo sapiens
tgattaaaagtagag

SEQ ID NO: 1384632 - DNA, 15 bp, Homo sapiens
gtgattaaaagtaga

SEQ ID NO: 1384633 - DNA, 15 bp, Homo sapiens
agtgattaaaagtag

SEQ ID NO: 1384634 - DNA, 15 bp, Homo sapiens
aagtgattaaaagta

SEQ ID NO: 1384635 - DNA, 15 bp, Homo sapiens
aaagtgattaaaagt

SEQ ID NO: 1384636 - DNA, 15 bp, Homo sapiens
gaaagtgattaaaag

SEQ ID NO: 1384637 - DNA, 15 bp, Homo sapiens
agaaagtgattaaaa

SEQ ID NO: 1384638 - DNA, 15 bp, Homo sapiens
tagaaagtgattaaa

SEQ ID NO: 1384639 - DNA, 15 bp, Homo sapiens
atagaaagtgattaa

SEQ ID NO: 1384640 - DNA, 15 bp, Homo sapiens
aatagaaagtgatta

SEQ ID NO: 1384641 - DNA, 15 bp, Homo sapiens
aaatagaaagtgatt

SEQ ID NO: 1384642 - DNA, 15 bp, Homo sapiens
gaaatagaaagtgat

SEQ ID NO: 1384643 - DNA, 15 bp, Homo sapiens
tgaaatagaaagtga

SEQ ID NO: 1384644 - DNA, 15 bp, Homo sapiens
atgaaatagaaagtg

SEQ ID NO: 1384645 - DNA, 15 bp, Homo sapiens
tatgaaatagaaagt

SEQ ID NO: 1384646 - DNA, 15 bp, Homo sapiens
ctatgaaatagaaag

SEQ ID NO: 1384647 - DNA, 15 bp, Homo sapiens
actatgaaatagaaa

SEQ ID NO: 1384648 - DNA, 15 bp, Homo sapiens
gactatgaaatagaa

SEQ ID NO: 1384649 - DNA, 15 bp, Homo sapiens
agactatgaaataga

SEQ ID NO: 1384650 - DNA, 15 bp, Homo sapiens
gagactatgaaatag

SEQ ID NO: 1384651 - DNA, 15 bp, Homo sapiens
tgagactatgaaata

SEQ ID NO: 1384652 - DNA, 15 bp, Homo sapiens
atgagactatgaaat

SEQ ID NO: 1384653 - DNA, 15 bp, Homo sapiens
aatgagactatgaaa

SEQ ID NO: 1384654 - DNA, 15 bp, Homo sapiens
aaatgagactatgaa

SEQ ID NO: 1384655 - DNA, 15 bp, Homo sapiens
gaaatgagactatga

SEQ ID NO: 1384656 - DNA, 15 bp, Homo sapiens
tgaaatgagactatg

SEQ ID NO: 1384657 - DNA, 15 bp, Homo sapiens
ttgaaatgagactat

SEQ ID NO: 1384658 - DNA, 15 bp, Homo sapiens
tttgaaatgagacta

SEQ ID NO: 1384659 - DNA, 15 bp, Homo sapiens
atttgaaatgagact

SEQ ID NO: 1384660 - DNA, 15 bp, Homo sapiens
catttgaaatgagac

SEQ ID NO: 1384661 - DNA, 15 bp, Homo sapiens
gcatttgaaatgaga

SEQ ID NO: 1384662 - DNA, 15 bp, Homo sapiens
agcatttgaaatgag

SEQ ID NO: 1384663 - DNA, 15 bp, Homo sapiens
tagcatttgaaatga

SEQ ID NO: 1384664 - DNA, 15 bp, Homo sapiens
ttagcatttgaaatg

SEQ ID NO: 1384665 - DNA, 15 bp, Homo sapiens
cttagcatttgaaat

SEQ ID NO: 1384666 - DNA, 15 bp, Homo sapiens
acttagcatttgaaa

SEQ ID NO: 1384667 - DNA, 15 bp, Homo sapiens
tacttagcatttgaa

SEQ ID NO: 1384668 - DNA, 15 bp, Homo sapiens
atacttagcatttga

SEQ ID NO: 1384669 - DNA, 15 bp, Homo sapiens
gatacttagcatttg

SEQ ID NO: 1384670 - DNA, 15 bp, Homo sapiens
tgatacttagcattt

SEQ ID NO: 1384671 - DNA, 15 bp, Homo sapiens
ttgatacttagcatt

SEQ ID NO: 1384672 - DNA, 15 bp, Homo sapiens
cttgatacttagcat

SEQ ID NO: 1384673 - DNA, 15 bp, Homo sapiens
tcttgatacttagca

SEQ ID NO: 1384674 - DNA, 15 bp, Homo sapiens
ttcttgatacttagc

SEQ ID NO: 1384675 - DNA, 15 bp, Homo sapiens
cttcttgatacttag

SEQ ID NO: 1384676 - DNA, 15 bp, Homo sapiens
ccttcttgatactta

SEQ ID NO: 1384677 - DNA, 15 bp, Homo sapiens
accttcttgatactt

SEQ ID NO: 1384678 - DNA, 15 bp, Homo sapiens
gaccttcttgatact

SEQ ID NO: 1384679 - DNA, 15 bp, Homo sapiens
ggaccttcttgatac

SEQ ID NO: 1384680 - DNA, 15 bp, Homo sapiens
tggaccttcttgata

SEQ ID NO: 1384681 - DNA, 15 bp, Homo sapiens
ttggaccttcttgat

SEQ ID NO: 1384682 - DNA, 15 bp, Homo sapiens
tttggaccttcttga

SEQ ID NO: 1384683 - DNA, 15 bp, Homo sapiens
ctttggaccttcttg

SEQ ID NO: 1384684 - DNA, 15 bp, Homo sapiens
gctttggaccttctt

SEQ ID NO: 1384685 - DNA, 15 bp, Homo sapiens
agctttggaccttct

SEQ ID NO: 1384686 - DNA, 15 bp, Homo sapiens
cagctttggaccttc

SEQ ID NO: 1384687 - DNA, 15 bp, Homo sapiens
tcagctttggacctt

SEQ ID NO: 1384688 - DNA, 15 bp, Homo sapiens
ctcagctttggacct

SEQ ID NO: 1384689 - DNA, 15 bp, Homo sapiens
cctcagctttggacc

SEQ ID NO: 1384690 - DNA, 15 bp, Homo sapiens
ccctcagctttggac

SEQ ID NO: 1384691 - DNA, 15 bp, Homo sapiens
accctcagctttgga

SEQ ID NO: 1384692 - DNA, 15 bp, Homo sapiens
aaccctcagctttgg

SEQ ID NO: 1384693 - DNA, 15 bp, Homo sapiens
taaccctcagctttg

SEQ ID NO: 1384694 - DNA, 15 bp, Homo sapiens
ataaccctcagcttt

SEQ ID NO: 1384695 - DNA, 15 bp, Homo sapiens
gataaccctcagctt

SEQ ID NO: 1384696 - DNA, 15 bp, Homo sapiens
tgataaccctcagct

SEQ ID NO: 1384697 - DNA, 15 bp, Homo sapiens
ctgataaccctcagc

SEQ ID NO: 1384698 - DNA, 15 bp, Homo sapiens
actgataaccctcag

SEQ ID NO: 1384699 - DNA, 15 bp, Homo sapiens
cactgataaccctca

SEQ ID NO: 1384700 - DNA, 15 bp, Homo sapiens
acactgataaccctc

SEQ ID NO: 1384701 - DNA, 15 bp, Homo sapiens
tacactgataaccct

SEQ ID NO: 1384702 - DNA, 15 bp, Homo sapiens
atacactgataaccc

SEQ ID NO: 1384703 - DNA, 15 bp, Homo sapiens
aatacactgataacc

SEQ ID NO: 1384704 - DNA, 15 bp, Homo sapiens
aaatacactgataac

SEQ ID NO: 1384705 - DNA, 15 bp, Homo sapiens
aaaatacactgataa

SEQ ID NO: 1384706 - DNA, 15 bp, Homo sapiens
gaaaatacactgata

SEQ ID NO: 1384707 - DNA, 15 bp, Homo sapiens
agaaaatacactgat

SEQ ID NO: 1384708 - DNA, 15 bp, Homo sapiens
aagaaaatacactga

SEQ ID NO: 1384709 - DNA, 15 bp, Homo sapiens
taagaaaatacactg

SEQ ID NO: 1384710 - DNA, 15 bp, Homo sapiens
ttaagaaaatacact

SEQ ID NO: 1384711 - DNA, 15 bp, Homo sapiens
tttaagaaaatacac

SEQ ID NO: 1384712 - DNA, 15 bp, Homo sapiens
gtttaagaaaataca

SEQ ID NO: 1384713 - DNA, 15 bp, Homo sapiens
agtttaagaaaatac

SEQ ID NO: 1384714 - DNA, 15 bp, Homo sapiens
aagtttaagaaaata

SEQ ID NO: 1384715 - DNA, 15 bp, Homo sapiens
caagtttaagaaaat

SEQ ID NO: 1384716 - DNA, 15 bp, Homo sapiens
acaagtttaagaaaa

SEQ ID NO: 1384717 - DNA, 15 bp, Homo sapiens
aacaagtttaagaaa

SEQ ID NO: 1384718 - DNA, 15 bp, Homo sapiens
aaacaagtttaagaa

SEQ ID NO: 1384719 - DNA, 15 bp, Homo sapiens
taaacaagtttaaga

SEQ ID NO: 1384720 - DNA, 15 bp, Homo sapiens
gtaaacaagtttaag

SEQ ID NO: 1384721 - DNA, 15 bp, Homo sapiens
tgtaaacaagtttaa

SEQ ID NO: 1384722 - DNA, 15 bp, Homo sapiens
ttgtaaacaagttta

SEQ ID NO: 1384723 - DNA, 15 bp, Homo sapiens
tttgtaaacaagttt

SEQ ID NO: 1384724 - DNA, 15 bp, Homo sapiens
atttgtaaacaagtt

SEQ ID NO: 1384725 - DNA, 15 bp, Homo sapiens
aatttgtaaacaagt

SEQ ID NO: 1384726 - DNA, 15 bp, Homo sapiens
gaatttgtaaacaag

SEQ ID NO: 1384727 - DNA, 15 bp, Homo sapiens
ggaatttgtaaacaa

SEQ ID NO: 1384728 - DNA, 15 bp, Homo sapiens
gggaatttgtaaaca

SEQ ID NO: 1384729 - DNA, 15 bp, Homo sapiens
tgggaatttgtaaac

SEQ ID NO: 1384730 - DNA, 15 bp, Homo sapiens
atgggaatttgtaaa

SEQ ID NO: 1384731 - DNA, 15 bp, Homo sapiens
aatgggaatttgtaa

SEQ ID NO: 1384732 - DNA, 15 bp, Homo sapiens
caatgggaatttgta

SEQ ID NO: 1384733 - DNA, 15 bp, Homo sapiens
gcaatgggaatttgt

SEQ ID NO: 1384734 - DNA, 15 bp, Homo sapiens
ggcaatgggaatttg

SEQ ID NO: 1384735 - DNA, 15 bp, Homo sapiens
aggcaatgggaattt

SEQ ID NO: 1384736 - DNA, 15 bp, Homo sapiens
aaggcaatgggaatt

SEQ ID NO: 1384737 - DNA, 15 bp, Homo sapiens
gaaggcaatgggaat

SEQ ID NO: 1384738 - DNA, 15 bp, Homo sapiens
tgaaggcaatgggaa

SEQ ID NO: 1384739 - DNA, 15 bp, Homo sapiens
atgaaggcaatggga

SEQ ID NO: 1384740 - DNA, 15 bp, Homo sapiens
tatgaaggcaatggg

SEQ ID NO: 1384741 - DNA, 15 bp, Homo sapiens
ttatgaaggcaatgg

SEQ ID NO: 1384742 - DNA, 15 bp, Homo sapiens
attatgaaggcaatg

SEQ ID NO: 1384743 - DNA, 15 bp, Homo sapiens
tattatgaaggcaat

SEQ ID NO: 1384744 - DNA, 15 bp, Homo sapiens
ttattatgaaggcaa

SEQ ID NO: 1384745 - DNA, 15 bp, Homo sapiens
attattatgaaggca

SEQ ID NO: 1384746 - DNA, 15 bp, Homo sapiens
tattattatgaaggc

SEQ ID NO: 1384747 - DNA, 15 bp, Homo sapiens
ttattattatgaagg

SEQ ID NO: 1384748 - DNA, 15 bp, Homo sapiens
tttattattatgaag

SEQ ID NO: 1384749 - DNA, 15 bp, Homo sapiens
ttttattattatgaa

SEQ ID NO: 1384750 - DNA, 15 bp, Homo sapiens
attttattattatga

SEQ ID NO: 1384751 - DNA, 15 bp, Homo sapiens
cattttattattatg

SEQ ID NO: 1384752 - DNA, 15 bp, Homo sapiens
tcattttattattat

SEQ ID NO: 1384753 - DNA, 15 bp, Homo sapiens
gtcattttattatta

SEQ ID NO: 1384754 - DNA, 15 bp, Homo sapiens
agtcattttattatt

SEQ ID NO: 1384755 - DNA, 15 bp, Homo sapiens
tagtcattttattat

SEQ ID NO: 1384756 - DNA, 15 bp, Homo sapiens
atagtcattttatta

SEQ ID NO: 1384757 - DNA, 15 bp, Homo sapiens
aatagtcattttatt

SEQ ID NO: 1384758 - DNA, 15 bp, Homo sapiens
caatagtcattttat

SEQ ID NO: 1384759 - DNA, 15 bp, Homo sapiens
gcaatagtcatttta

SEQ ID NO: 1384760 - DNA, 15 bp, Homo sapiens
ggcaatagtcatttt

SEQ ID NO: 1384761 - DNA, 15 bp, Homo sapiens
aggcaatagtcattt

SEQ ID NO: 1384762 - DNA, 15 bp, Homo sapiens
aaggcaatagtcatt

SEQ ID NO: 1384763 - DNA, 15 bp, Homo sapiens
taaggcaatagtcat

SEQ ID NO: 1384764 - DNA, 15 bp, Homo sapiens
ttaaggcaatagtca

SEQ ID NO: 1384765 - DNA, 15 bp, Homo sapiens
attaaggcaatagtc

SEQ ID NO: 1384766 - DNA, 15 bp, Homo sapiens
tattaaggcaatagt

SEQ ID NO: 1384767 - DNA, 15 bp, Homo sapiens
ttattaaggcaatag

SEQ ID NO: 1384768 - DNA, 15 bp, Homo sapiens
gttattaaggcaata

SEQ ID NO: 1384769 - DNA, 15 bp, Homo sapiens
tgttattaaggcaat

SEQ ID NO: 1384770 - DNA, 15 bp, Homo sapiens
ctgttattaaggcaa

SEQ ID NO: 1384771 - DNA, 15 bp, Homo sapiens
tctgttattaaggca

SEQ ID NO: 1384772 - DNA, 15 bp, Homo sapiens
ttctgttattaaggc

SEQ ID NO: 1384773 - DNA, 15 bp, Homo sapiens
cttctgttattaagg

SEQ ID NO: 1384774 - DNA, 15 bp, Homo sapiens
ccttctgttattaag

SEQ ID NO: 1384775 - DNA, 15 bp, Homo sapiens
cccttctgttattaa

SEQ ID NO: 1384776 - DNA, 15 bp, Homo sapiens
acccttctgttatta

SEQ ID NO: 1384777 - DNA, 15 bp, Homo sapiens
cacccttctgttatt

SEQ ID NO: 1384778 - DNA, 15 bp, Homo sapiens
tcacccttctgttat

SEQ ID NO: 1384779 - DNA, 15 bp, Homo sapiens
ttcacccttctgtta

SEQ ID NO: 1384780 - DNA, 15 bp, Homo sapiens
attcacccttctgtt

SEQ ID NO: 1384781 - DNA, 15 bp, Homo sapiens
gattcacccttctgt

SEQ ID NO: 1384782 - DNA, 15 bp, Homo sapiens
agattcacccttctg

SEQ ID NO: 1384783 - DNA, 15 bp, Homo sapiens
tagattcacccttct

SEQ ID NO: 1384784 - DNA, 15 bp, Homo sapiens
atagattcacccttc

SEQ ID NO: 1384785 - DNA, 15 bp, Homo sapiens
aatagattcaccctt

SEQ ID NO: 1384786 - DNA, 15 bp, Homo sapiens
caatagattcaccct

SEQ ID NO: 1384787 - DNA, 15 bp, Homo sapiens
tcaatagattcaccc

SEQ ID NO: 1384788 - DNA, 15 bp, Homo sapiens
atcaatagattcacc

SEQ ID NO: 1384789 - DNA, 15 bp, Homo sapiens
aatcaatagattcac

SEQ ID NO: 1384790 - DNA, 15 bp, Homo sapiens
aaatcaatagattca

SEQ ID NO: 1384791 - DNA, 15 bp, Homo sapiens
aaaatcaatagattc

SEQ ID NO: 1384792 - DNA, 15 bp, Homo sapiens
gaaaatcaatagatt

SEQ ID NO: 1384793 - DNA, 15 bp, Homo sapiens
agaaaatcaatagat

SEQ ID NO: 1384794 - DNA, 15 bp, Homo sapiens
aagaaaatcaataga

SEQ ID NO: 1384795 - DNA, 15 bp, Homo sapiens
caagaaaatcaatag

SEQ ID NO: 1384796 - DNA, 15 bp, Homo sapiens
ccaagaaaatcaata

SEQ ID NO: 1384797 - DNA, 15 bp, Homo sapiens
tccaagaaaatcaat

SEQ ID NO: 1384798 - DNA, 15 bp, Homo sapiens
ctccaagaaaatcaa

SEQ ID NO: 1384799 - DNA, 15 bp, Homo sapiens
gctccaagaaaatca

SEQ ID NO: 1384800 - DNA, 15 bp, Homo sapiens
tgctccaagaaaatc

SEQ ID NO: 1384801 - DNA, 15 bp, Homo sapiens
atgctccaagaaaat

SEQ ID NO: 1384802 - DNA, 15 bp, Homo sapiens
gatgctccaagaaaa

SEQ ID NO: 1384803 - DNA, 15 bp, Homo sapiens
tgatgctccaagaaa

SEQ ID NO: 1384804 - DNA, 15 bp, Homo sapiens
atgatgctccaagaa

SEQ ID NO: 1384805 - DNA, 15 bp, Homo sapiens
tatgatgctccaaga

SEQ ID NO: 1384806 - DNA, 15 bp, Homo sapiens
ttatgatgctccaag

SEQ ID NO: 1384807 - DNA, 15 bp, Homo sapiens
cttatgatgctccaa

SEQ ID NO: 1384808 - DNA, 15 bp, Homo sapiens
tcttatgatgctcca

SEQ ID NO: 1384809 - DNA, 15 bp, Homo sapiens
atcttatgatgctcc

SEQ ID NO: 1384810 - DNA, 15 bp, Homo sapiens
catcttatgatgctc

SEQ ID NO: 1384811 - DNA, 15 bp, Homo sapiens
ccatcttatgatgct

SEQ ID NO: 1384812 - DNA, 15 bp, Homo sapiens
gccatcttatgatgc

SEQ ID NO: 1384813 - DNA, 15 bp, Homo sapiens
ggccatcttatgatg

SEQ ID NO: 1384814 - DNA, 15 bp, Homo sapiens
gggccatcttatgat

SEQ ID NO: 1384815 - DNA, 15 bp, Homo sapiens
agggccatcttatga

SEQ ID NO: 1384816 - DNA, 15 bp, Homo sapiens
aagggccatcttatg

SEQ ID NO: 1384817 - DNA, 15 bp, Homo sapiens
aaagggccatcttat

SEQ ID NO: 1384818 - DNA, 15 bp, Homo sapiens
caaagggccatctta

SEQ ID NO: 1384819 - DNA, 15 bp, Homo sapiens
gcaaagggccatctt

SEQ ID NO: 1384820 - DNA, 15 bp, Homo sapiens
agcaaagggccatct

SEQ ID NO: 1384821 - DNA, 15 bp, Homo sapiens
cagcaaagggccatc

SEQ ID NO: 1384822 - DNA, 15 bp, Homo sapiens
tcagcaaagggccat

SEQ ID NO: 1384823 - DNA, 15 bp, Homo sapiens
ttcagcaaagggcca

SEQ ID NO: 1384824 - DNA, 15 bp, Homo sapiens
attcagcaaagggcc

SEQ ID NO: 1384825 - DNA, 15 bp, Homo sapiens
aattcagcaaagggc

SEQ ID NO: 1384826 - DNA, 15 bp, Homo sapiens
caattcagcaaaggg

SEQ ID NO: 1384827 - DNA, 15 bp, Homo sapiens
acaattcagcaaagg

SEQ ID NO: 1384828 - DNA, 15 bp, Homo sapiens
tacaattcagcaaag

SEQ ID NO: 1384829 - DNA, 15 bp, Homo sapiens
gtacaattcagcaaa

SEQ ID NO: 1384830 - DNA, 15 bp, Homo sapiens
tgtacaattcagcaa

SEQ ID NO: 1384831 - DNA, 15 bp, Homo sapiens
atgtacaattcagca

SEQ ID NO: 1384832 - DNA, 15 bp, Homo sapiens
catgtacaattcagc

SEQ ID NO: 1384833 - DNA, 15 bp, Homo sapiens
tcatgtacaattcag

SEQ ID NO: 1384834 - DNA, 15 bp, Homo sapiens
ttcatgtacaattca

SEQ ID NO: 1384835 - DNA, 15 bp, Homo sapiens
tttcatgtacaattc

SEQ ID NO: 1384836 - DNA, 15 bp, Homo sapiens
atttcatgtacaatt

SEQ ID NO: 1384837 - DNA, 15 bp, Homo sapiens
tatttcatgtacaat

SEQ ID NO: 1384838 - DNA, 15 bp, Homo sapiens
atatttcatgtacaa

SEQ ID NO: 1384839 - DNA, 15 bp, Homo sapiens
tatatttcatgtaca

SEQ ID NO: 1384840 - DNA, 15 bp, Homo sapiens
ttatatttcatgtac

SEQ ID NO: 1384841 - DNA, 15 bp, Homo sapiens
gttatatttcatgta

SEQ ID NO: 1384842 - DNA, 15 bp, Homo sapiens
tgttatatttcatgt

SEQ ID NO: 1384843 - DNA, 15 bp, Homo sapiens
atgttatatttcatg

SEQ ID NO: 1384844 - DNA, 15 bp, Homo sapiens
catgttatatttcat

SEQ ID NO: 1384845 - DNA, 15 bp, Homo sapiens
ccatgttatatttca

SEQ ID NO: 1384846 - DNA, 15 bp, Homo sapiens
gccatgttatatttc

SEQ ID NO: 1384847 - DNA, 15 bp, Homo sapiens
agccatgttatattt

SEQ ID NO: 1384848 - DNA, 15 bp, Homo sapiens
gagccatgttatatt

SEQ ID NO: 1384849 - DNA, 15 bp, Homo sapiens
tgagccatgttatat

SEQ ID NO: 1384850 - DNA, 15 bp, Homo sapiens
gtgagccatgttata

SEQ ID NO: 1384851 - DNA, 15 bp, Homo sapiens
tgtgagccatgttat

SEQ ID NO: 1384852 - DNA, 15 bp, Homo sapiens
ttgtgagccatgtta

SEQ ID NO: 1384853 - DNA, 15 bp, Homo sapiens
tttgtgagccatgtt

SEQ ID NO: 1384854 - DNA, 15 bp, Homo sapiens
ctttgtgagccatgt

SEQ ID NO: 1384855 - DNA, 15 bp, Homo sapiens
actttgtgagccatg

SEQ ID NO: 1384856 - DNA, 15 bp, Homo sapiens
gactttgtgagccat

SEQ ID NO: 1384857 - DNA, 15 bp, Homo sapiens
agactttgtgagcca

SEQ ID NO: 1384858 - DNA, 15 bp, Homo sapiens
gagactttgtgagcc

SEQ ID NO: 1384859 - DNA, 15 bp, Homo sapiens
tgagactttgtgagc

SEQ ID NO: 1384860 - DNA, 15 bp, Homo sapiens
atgagactttgtgag

SEQ ID NO: 1384861 - DNA, 15 bp, Homo sapiens
catgagactttgtga

SEQ ID NO: 1384862 - DNA, 15 bp, Homo sapiens
ccatgagactttgtg

SEQ ID NO: 1384863 - DNA, 15 bp, Homo sapiens
tccatgagactttgt

SEQ ID NO: 1384864 - DNA, 15 bp, Homo sapiens
atccatgagactttg

SEQ ID NO: 1384865 - DNA, 15 bp, Homo sapiens
catccatgagacttt

SEQ ID NO: 1384866 - DNA, 15 bp, Homo sapiens
acatccatgagactt

SEQ ID NO: 1384867 - DNA, 15 bp, Homo sapiens
aacatccatgagact

SEQ ID NO: 1384868 - DNA, 15 bp, Homo sapiens
caacatccatgagac

SEQ ID NO: 1384869 - DNA, 15 bp, Homo sapiens
ccaacatccatgaga

SEQ ID NO: 1384870 - DNA, 15 bp, Homo sapiens
gccaacatccatgag

SEQ ID NO: 1384871 - DNA, 15 bp, Homo sapiens
tgccaacatccatga

SEQ ID NO: 1384872 - DNA, 15 bp, Homo sapiens
ttgccaacatccatg

SEQ ID NO: 1384873 - DNA, 15 bp, Homo sapiens
tttgccaacatccat

SEQ ID NO: 1384874 - DNA, 15 bp, Homo sapiens
ctttgccaacatcca

SEQ ID NO: 1384875 - DNA, 15 bp, Homo sapiens
cctttgccaacatcc

SEQ ID NO: 1384876 - DNA, 15 bp, Homo sapiens
gcctttgccaacatc

SEQ ID NO: 1384877 - DNA, 15 bp, Homo sapiens
tgcctttgccaacat

SEQ ID NO: 1384878 - DNA, 15 bp, Homo sapiens
ctgcctttgccaaca

SEQ ID NO: 1384879 - DNA, 15 bp, Homo sapiens
actgcctttgccaac

SEQ ID NO: 1384880 - DNA, 15 bp, Homo sapiens
cactgcctttgccaa

SEQ ID NO: 1384881 - DNA, 15 bp, Homo sapiens
acactgcctttgcca

SEQ ID NO: 1384882 - DNA, 15 bp, Homo sapiens
tacactgcctttgcc

SEQ ID NO: 1384883 - DNA, 15 bp, Homo sapiens
ttacactgcctttgc

SEQ ID NO: 1384884 - DNA, 15 bp, Homo sapiens
attacactgcctttg

SEQ ID NO: 1384885 - DNA, 15 bp, Homo sapiens
cattacactgccttt

SEQ ID NO: 1384886 - DNA, 15 bp, Homo sapiens
ccattacactgcctt

SEQ ID NO: 1384887 - DNA, 15 bp, Homo sapiens
accattacactgcct

SEQ ID NO: 1384888 - DNA, 15 bp, Homo sapiens
taccattacactgcc

SEQ ID NO: 1384889 - DNA, 15 bp, Homo sapiens
ataccattacactgc

SEQ ID NO: 1384890 - DNA, 15 bp, Homo sapiens
aataccattacactg

SEQ ID NO: 1384891 - DNA, 15 bp, Homo sapiens
aaataccattacact

SEQ ID NO: 1384892 - DNA, 15 bp, Homo sapiens
aaaataccattacac

SEQ ID NO: 1384893 - DNA, 15 bp, Homo sapiens
taaaataccattaca

SEQ ID NO: 1384894 - DNA, 15 bp, Homo sapiens
ataaaataccattac

SEQ ID NO: 1384895 - DNA, 15 bp, Homo sapiens
aataaaataccatta

SEQ ID NO: 1384896 - DNA, 15 bp, Homo sapiens
caataaaataccatt

SEQ ID NO: 1384897 - DNA, 15 bp, Homo sapiens
tcaataaaataccat

SEQ ID NO: 1384898 - DNA, 15 bp, Homo sapiens
atcaataaaatacca

SEQ ID NO: 1384899 - DNA, 15 bp, Homo sapiens
aatcaataaaatacc

SEQ ID NO: 1384900 - DNA, 15 bp, Homo sapiens
taatcaataaaatac

SEQ ID NO: 1384901 - DNA, 15 bp, Homo sapiens
ataatcaataaaata

SEQ ID NO: 1384902 - DNA, 15 bp, Homo sapiens
aataatcaataaaat

SEQ ID NO: 1384903 - DNA, 15 bp, Homo sapiens
caaataatcaataaa

SEQ ID NO: 1384904 - DNA, 15 bp, Homo sapiens
tcaaataatcaataa

SEQ ID NO: 1384905 - DNA, 15 bp, Homo sapiens
ctcaaataatcaata

SEQ ID NO: 1384906 - DNA, 15 bp, Homo sapiens
tctcaaataatcaat

SEQ ID NO: 1384907 - DNA, 15 bp, Homo sapiens
ttctcaaataatcaa

SEQ ID NO: 1384908 - DNA, 15 bp, Homo sapiens
tttctcaaataatca

SEQ ID NO: 1384909 - DNA, 15 bp, Homo sapiens
ttttctcaaataatc

SEQ ID NO: 1384910 - DNA, 15 bp, Homo sapiens
attttctcaaataat

SEQ ID NO: 1384911 - DNA, 15 bp, Homo sapiens
gattttctcaaataa

SEQ ID NO: 1384912 - DNA, 15 bp, Homo sapiens
tgattttctcaaata

SEQ ID NO: 1384913 - DNA, 15 bp, Homo sapiens
atgattttctcaaat

SEQ ID NO: 1384914 - DNA, 15 bp, Homo sapiens
aatgattttctcaaa

SEQ ID NO: 1384915 - DNA, 15 bp, Homo sapiens
caatgattttctcaa

SEQ ID NO: 1384916 - DNA, 15 bp, Homo sapiens
tcaatgattttctca

SEQ ID NO: 1384917 - DNA, 15 bp, Homo sapiens
ttcaatgattttctc

SEQ ID NO: 1384918 - DNA, 15 bp, Homo sapiens
tttcaatgattttct

SEQ ID NO: 1384919 - DNA, 15 bp, Homo sapiens
ttttcaatgattttc

SEQ ID NO: 1384920 - DNA, 15 bp, Homo sapiens
tttttcaatgatttt

SEQ ID NO: 1384921 - DNA, 15 bp, Homo sapiens
ttttttcaatgattt

SEQ ID NO: 1384922 - DNA, 15 bp, Homo sapiens
cttttttcaatgatt

SEQ ID NO: 1384923 - DNA, 15 bp, Homo sapiens
acttttttcaatgat

SEQ ID NO: 1384924 - DNA, 15 bp, Homo sapiens
tacttttttcaatga

SEQ ID NO: 1384925 - DNA, 15 bp, Homo sapiens
ttacttttttcaatg

SEQ ID NO: 1384926 - DNA, 15 bp, Homo sapiens
cttacttttttcaat

SEQ ID NO: 1384927 - DNA, 15 bp, Homo sapiens
tcttacttttttcaa

SEQ ID NO: 1384928 - DNA, 15 bp, Homo sapiens
ttcttacttttttca

SEQ ID NO: 1384929 - DNA, 15 bp, Homo sapiens
attcttacttttttc

SEQ ID NO: 1384930 - DNA, 15 bp, Homo sapiens
tattcttactttttt

SEQ ID NO: 1384931 - DNA, 15 bp, Homo sapiens
ttattcttacttttt

SEQ ID NO: 1384932 - DNA, 15 bp, Homo sapiens
tttattcttactttt

SEQ ID NO: 1384933 - DNA, 15 bp, Homo sapiens
ctttattcttacttt

SEQ ID NO: 1384934 - DNA, 15 bp, Homo sapiens
cctttattcttactt

SEQ ID NO: 1384935 - DNA, 15 bp, Homo sapiens
ccctttattcttact

SEQ ID NO: 1384936 - DNA, 15 bp, Homo sapiens
cccctttattcttac

SEQ ID NO: 1384937 - DNA, 15 bp, Homo sapiens
tcccctttattctta

SEQ ID NO: 1384938 - DNA, 15 bp, Homo sapiens
ttcccctttattctt

SEQ ID NO: 1384939 - DNA, 15 bp, Homo sapiens
tttcccctttattct

SEQ ID NO: 1384940 - DNA, 15 bp, Homo sapiens
atttcccctttattc

SEQ ID NO: 1384941 - DNA, 15 bp, Homo sapiens
tatttcccctttatt

SEQ ID NO: 1384942 - DNA, 15 bp, Homo sapiens
atatttcccctttat

SEQ ID NO: 1384943 - DNA, 15 bp, Homo sapiens
gatatttccccttta

SEQ ID NO: 1384944 - DNA, 15 bp, Homo sapiens
tgatatttccccttt

SEQ ID NO: 1384945 - DNA, 15 bp, Homo sapiens
ctgatatttcccctt

SEQ ID NO: 1384946 - DNA, 15 bp, Homo sapiens
actgatatttcccct

SEQ ID NO: 1384947 - DNA, 15 bp, Homo sapiens
aactgatatttcccc

SEQ ID NO: 1384948 - DNA, 15 bp, Homo sapiens
taactgatatttccc

SEQ ID NO: 1384949 - DNA, 15 bp, Homo sapiens
ataactgatatttcc

SEQ ID NO: 1384950 - DNA, 15 bp, Homo sapiens
tataactgatatttc

SEQ ID NO: 1384951 - DNA, 15 bp, Homo sapiens
ttataactgatattt

SEQ ID NO: 1384952 - DNA, 15 bp, Homo sapiens
tttataactgatatt

SEQ ID NO: 1384953 - DNA, 15 bp, Homo sapiens
gtttataactgatat

SEQ ID NO: 1384954 - DNA, 15 bp, Homo sapiens
tgtttataactgata

SEQ ID NO: 1384955 - DNA, 15 bp, Homo sapiens
atgtttataactgat

SEQ ID NO: 1384956 - DNA, 15 bp, Homo sapiens
aatgtttataactga

SEQ ID NO: 1384957 - DNA, 15 bp, Homo sapiens
caatgtttataactg

SEQ ID NO: 1384958 - DNA, 15 bp, Homo sapiens
acaatgtttataact

SEQ ID NO: 1384959 - DNA, 15 bp, Homo sapiens
aacaatgtttataac

SEQ ID NO: 1384960 - DNA, 15 bp, Homo sapiens
gaacaatgtttataa

SEQ ID NO: 1384961 - DNA, 15 bp, Homo sapiens
agaacaatgtttata

SEQ ID NO: 1384962 - DNA, 15 bp, Homo sapiens
tagaacaatgtttat

SEQ ID NO: 1384963 - DNA, 15 bp, Homo sapiens
atagaacaatgttta

SEQ ID NO: 1384964 - DNA, 15 bp, Homo sapiens
tatagaacaatgttt

SEQ ID NO: 1384965 - DNA, 15 bp, Homo sapiens
atatagaacaatgtt

SEQ ID NO: 1384966 - DNA, 15 bp, Homo sapiens
catatagaacaatgt

SEQ ID NO: 1384967 - DNA, 15 bp, Homo sapiens
tcatatagaacaatg

SEQ ID NO: 1384968 - DNA, 15 bp, Homo sapiens
ttcatatagaacaat

SEQ ID NO: 1384969 - DNA, 15 bp, Homo sapiens
tttcatatagaacaa

SEQ ID NO: 1384970 - DNA, 15 bp, Homo sapiens
ttttcatatagaaca

SEQ ID NO: 1384971 - DNA, 15 bp, Homo sapiens
attttcatatagaac

SEQ ID NO: 1384972 - DNA, 15 bp, Homo sapiens
aattttcatatagaa

SEQ ID NO: 1384973 - DNA, 15 bp, Homo sapiens
gaattttcatataga

SEQ ID NO: 1384974 - DNA, 15 bp, Homo sapiens
tgaattttcatatag

SEQ ID NO: 1384975 - DNA, 15 bp, Homo sapiens
ctgaattttcatata

SEQ ID NO: 1384976 - DNA, 15 bp, Homo sapiens
cactgaattttcata

SEQ ID NO: 1384977 - DNA, 15 bp, Homo sapiens
acactgaattttcat

SEQ ID NO: 1384978 - DNA, 15 bp, Homo sapiens
tacactgaattttca

SEQ ID NO: 1384979 - DNA, 15 bp, Homo sapiens
ctacactgaattttc

SEQ ID NO: 1384980 - DNA, 15 bp, Homo sapiens
gctacactgaatttt

SEQ ID NO: 1384981 - DNA, 15 bp, Homo sapiens
agctacactgaattt

SEQ ID NO: 1384982 - DNA, 15 bp, Homo sapiens
gagctacactgaatt

SEQ ID NO: 1384983 - DNA, 15 bp, Homo sapiens
agagctacactgaat

SEQ ID NO: 1384984 - DNA, 15 bp, Homo sapiens
aagagctacactgaa

SEQ ID NO: 1384985 - DNA, 15 bp, Homo sapiens
aaagagctacactga

SEQ ID NO: 1384986 - DNA, 15 bp, Homo sapiens
gaaagagctacactg

SEQ ID NO: 1384987 - DNA, 15 bp, Homo sapiens
ggaaagagctacact

SEQ ID NO: 1384988 - DNA, 15 bp, Homo sapiens
aggaaagagctacac

SEQ ID NO: 1384989 - DNA, 15 bp, Homo sapiens
aaggaaagagctaca

SEQ ID NO: 1384990 - DNA, 15 bp, Homo sapiens
taaggaaagagctac

SEQ ID NO: 1384991 - DNA, 15 bp, Homo sapiens
ttaaggaaagagcta

SEQ ID NO: 1384992 - DNA, 15 bp, Homo sapiens
cttaaggaaagagct

SEQ ID NO: 1384993 - DNA, 15 bp, Homo sapiens
ccttaaggaaagagc

SEQ ID NO: 1384994 - DNA, 15 bp, Homo sapiens
tccttaaggaaagag

SEQ ID NO: 1384995 - DNA, 15 bp, Homo sapiens
ttccttaaggaaaga

SEQ ID NO: 1384996 - DNA, 15 bp, Homo sapiens
attccttaaggaaag

SEQ ID NO: 1384997 - DNA, 15 bp, Homo sapiens
tattccttaaggaaa

SEQ ID NO: 1384998 - DNA, 15 bp, Homo sapiens
ttattccttaaggaa

SEQ ID NO: 1384999 - DNA, 15 bp, Homo sapiens
attattccttaagga

SEQ ID NO: 1385000 - DNA, 15 bp, Homo sapiens
aattattccttaagg

SEQ ID NO: 1385001 - DNA, 15 bp, Homo sapiens
aaattattccttaag

SEQ ID NO: 1385002 - DNA, 15 bp, Homo sapiens
caaattattccttaa

SEQ ID NO: 1385003 - DNA, 15 bp, Homo sapiens
acaaattattcctta

SEQ ID NO: 1385004 - DNA, 15 bp, Homo sapiens
aacaaattattcctt

SEQ ID NO: 1385005 - DNA, 15 bp, Homo sapiens
aaacaaattattcct

SEQ ID NO: 1385006 - DNA, 15 bp, Homo sapiens
aaaacaaattattcc

SEQ ID NO: 1385007 - DNA, 15 bp, Homo sapiens
caaaacaaattattc

SEQ ID NO: 1385008 - DNA, 15 bp, Homo sapiens
tcaaaacaaattatt

SEQ ID NO: 1385009 - DNA, 15 bp, Homo sapiens
ttcaaaacaaattat

SEQ ID NO: 1385010 - DNA, 15 bp, Homo sapiens
attcaaaacaaatta

SEQ ID NO: 1385011 - DNA, 15 bp, Homo sapiens
tattcaaaacaaatt

SEQ ID NO: 1385012 - DNA, 15 bp, Homo sapiens
ttattcaaaacaaat

SEQ ID NO: 1385013 - DNA, 15 bp, Homo sapiens
tttattcaaaacaaa

SEQ ID NO: 1385014 - DNA, 15 bp, Homo sapiens
ttttattcaaaacaa

SEQ ID NO: 1385015 - DNA, 15 bp, Homo sapiens
cttttattcaaaaca

SEQ ID NO: 1385016 - DNA, 15 bp, Homo sapiens
gcttttattcaaaac

SEQ ID NO: 1385017 - DNA, 15 bp, Homo sapiens
agcttttattcaaaa

SEQ ID NO: 1385018 - DNA, 15 bp, Homo sapiens
cagcttttattcaaa

SEQ ID NO: 1385019 - DNA, 15 bp, Homo sapiens
tcagcttttattcaa

SEQ ID NO: 1385020 - DNA, 15 bp, Homo sapiens
ttcagcttttattca

SEQ ID NO: 1385021 - DNA, 15 bp, Homo sapiens
tttcagcttttattc

SEQ ID NO: 1385022 - DNA, 15 bp, Homo sapiens
ttttcagcttttatt

SEQ ID NO: 1385023 - DNA, 15 bp, Homo sapiens
tttttcagcttttat

SEQ ID NO: 1385024 - DNA, 15 bp, Homo sapiens
gtttttcagctttta

SEQ ID NO: 1385025 - DNA, 15 bp, Homo sapiens
tgtttttcagctttt

SEQ ID NO: 1385026 - DNA, 15 bp, Homo sapiens
atgtttttcagcttt

SEQ ID NO: 1385027 - DNA, 15 bp, Homo sapiens
catgtttttcagctt

SEQ ID NO: 1385028 - DNA, 15 bp, Homo sapiens
ccatgtttttcagct

SEQ ID NO: 1385029 - DNA, 15 bp, Homo sapiens
gccatgtttttcagc

SEQ ID NO: 1385030 - DNA, 15 bp, Homo sapiens
ggccatgtttttcag

SEQ ID NO: 1385031 - DNA, 15 bp, Homo sapiens
aggccatgtttttca

SEQ ID NO: 1385032 - DNA, 15 bp, Homo sapiens
taggccatgtttttc

SEQ ID NO: 1385033 - DNA, 15 bp, Homo sapiens
gtaggccatgttttt

SEQ ID NO: 1385034 - DNA, 15 bp, Homo sapiens
ggtaggccatgtttt

SEQ ID NO: 1385035 - DNA, 15 bp, Homo sapiens
aggtaggccatgttt

SEQ ID NO: 1385036 - DNA, 15 bp, Homo sapiens
taggtaggccatgtt

SEQ ID NO: 1385037 - DNA, 15 bp, Homo sapiens
ttaggtaggccatgt

SEQ ID NO: 1385038 - DNA, 15 bp, Homo sapiens
cttaggtaggccatg

SEQ ID NO: 1385039 - DNA, 15 bp, Homo sapiens
tcttaggtaggccat

SEQ ID NO: 1385040 - DNA, 15 bp, Homo sapiens
ttcttaggtaggcca

SEQ ID NO: 1385041 - DNA, 15 bp, Homo sapiens
gttcttaggtaggcc

SEQ ID NO: 1385042 - DNA, 15 bp, Homo sapiens
cgttcttaggtaggc

SEQ ID NO: 1385043 - DNA, 15 bp, Homo sapiens
tcgttcttaggtagg

SEQ ID NO: 1385044 - DNA, 15 bp, Homo sapiens
gtcgttcttaggtag

SEQ ID NO: 1385045 - DNA, 15 bp, Homo sapiens
agtcgttcttaggta

SEQ ID NO: 1385046 - DNA, 15 bp, Homo sapiens
aagtcgttcttaggt

SEQ ID NO: 1385047 - DNA, 15 bp, Homo sapiens
caagtcgttcttagg

SEQ ID NO: 1385048 - DNA, 15 bp, Homo sapiens
ccaagtcgttcttag

SEQ ID NO: 1385049 - DNA, 15 bp, Homo sapiens
cccaagtcgttctta

SEQ ID NO: 1385050 - DNA, 15 bp, Homo sapiens
tcccaagtcgttctt

SEQ ID NO: 1385051 - DNA, 15 bp, Homo sapiens
atcccaagtcgttct

SEQ ID NO: 1385052 - DNA, 15 bp, Homo sapiens
catcccaagtcgttc

SEQ ID NO: 1385053 - DNA, 15 bp, Homo sapiens
ccatcccaagtcgtt

SEQ ID NO: 1385054 - DNA, 15 bp, Homo sapiens
cccatcccaagtcgt

SEQ ID NO: 1385055 - DNA, 15 bp, Homo sapiens
ccccatcccaagtcg

SEQ ID NO: 1385056 - DNA, 15 bp, Homo sapiens
cccccatcccaagtc

SEQ ID NO: 1385057 - DNA, 15 bp, Homo sapiens
acccccatcccaagt

SEQ ID NO: 1385058 - DNA, 15 bp, Homo sapiens
cacccccatcccaag

SEQ ID NO: 1385059 - DNA, 15 bp, Homo sapiens
ccacccccatcccaa

SEQ ID NO: 1385060 - DNA, 15 bp, Homo sapiens
accacccccatccca

SEQ ID NO: 1385061 - DNA, 15 bp, Homo sapiens
caccacccccatccc

SEQ ID NO: 1385062 - DNA, 15 bp, Homo sapiens
ccaccacccccatcc

SEQ ID NO: 1385063 - DNA, 15 bp, Homo sapiens
tccaccacccccatc

SEQ ID NO: 1385064 - DNA, 15 bp, Homo sapiens
ctccaccacccccat

SEQ ID NO: 1385065 - DNA, 15 bp, Homo sapiens
actccaccaccccca

SEQ ID NO: 1385066 - DNA, 15 bp, Homo sapiens
cactccaccaccccc

SEQ ID NO: 1385067 - DNA, 15 bp, Homo sapiens
tcactccaccacccc

SEQ ID NO: 1385068 - DNA, 15 bp, Homo sapiens
ctcactccaccaccc

SEQ ID NO: 1385069 - DNA, 15 bp, Homo sapiens
cctcactccaccacc

SEQ ID NO: 1385070 - DNA, 15 bp, Homo sapiens
tcctcactccaccac

SEQ ID NO: 1385071 - DNA, 15 bp, Homo sapiens
ctcctcactccacca

SEQ ID NO: 1385072 - DNA, 15 bp, Homo sapiens
actcctcactccacc

SEQ ID NO: 1385073 - DNA, 15 bp, Homo sapiens
cactcctcactccac

SEQ ID NO: 1385074 - DNA, 15 bp, Homo sapiens
tcactcctcactcca

SEQ ID NO: 1385075 - DNA, 15 bp, Homo sapiens
ctcactcctcactcc

SEQ ID NO: 1385076 - DNA, 15 bp, Homo sapiens
tctcactcctcactc

SEQ ID NO: 1385077 - DNA, 15 bp, Homo sapiens
ttctcactcctcact

SEQ ID NO: 1385078 - DNA, 15 bp, Homo sapiens
tttctcactcctcac

SEQ ID NO: 1385079 - DNA, 15 bp, Homo sapiens
ctttctcactcctca

SEQ ID NO: 1385080 - DNA, 15 bp, Homo sapiens
cctttctcactcctc

SEQ ID NO: 1385081 - DNA, 15 bp, Homo sapiens
acctttctcactcct

SEQ ID NO: 1385082 - DNA, 15 bp, Homo sapiens
aacctttctcactcc

SEQ ID NO: 1385083 - DNA, 15 bp, Homo sapiens
caacctttctcactc

SEQ ID NO: 1385084 - DNA, 15 bp, Homo sapiens
acaacctttctcact

SEQ ID NO: 1385085 - DNA, 15 bp, Homo sapiens
aacaacctttctcac

SEQ ID NO: 1385086 - DNA, 15 bp, Homo sapiens
taacaacctttctca

SEQ ID NO: 1385087 - DNA, 15 bp, Homo sapiens
ataacaacctttctc

SEQ ID NO: 1385088 - DNA, 15 bp, Homo sapiens
cataacaacctttct

SEQ ID NO: 1385089 - DNA, 15 bp, Homo sapiens
ccataacaacctttc

SEQ ID NO: 1385090 - DNA, 15 bp, Homo sapiens
accataacaaccttt

SEQ ID NO: 1385091 - DNA, 15 bp, Homo sapiens
aaccataacaacctt

SEQ ID NO: 1385092 - DNA, 15 bp, Homo sapiens
taaccataacaacct

SEQ ID NO: 1385093 - DNA, 15 bp, Homo sapiens
gtaaccataacaacc

SEQ ID NO: 1385094 - DNA, 15 bp, Homo sapiens
tgtaaccataacaac

SEQ ID NO: 1385095 - DNA, 15 bp, Homo sapiens
ctgtaaccataacaa

SEQ ID NO: 1385096 - DNA, 15 bp, Homo sapiens
cctgtaaccataaca

SEQ ID NO: 1385097 - DNA, 15 bp, Homo sapiens
gcctgtaaccataac

SEQ ID NO: 1385098 - DNA, 15 bp, Homo sapiens
tgcctgtaaccataa

SEQ ID NO: 1385099 - DNA, 15 bp, Homo sapiens
ctgcctgtaaccata

SEQ ID NO: 1385100 - DNA, 15 bp, Homo sapiens
tctgcctgtaaccat

SEQ ID NO: 1385101 - DNA, 15 bp, Homo sapiens
atctgcctgtaacca

SEQ ID NO: 1385102 - DNA, 15 bp, Homo sapiens
aatctgcctgtaacc

SEQ ID NO: 1385103 - DNA, 15 bp, Homo sapiens
caatctgcctgtaac

SEQ ID NO: 1385104 - DNA, 15 bp, Homo sapiens
acaatctgcctgtaa

SEQ ID NO: 1385105 - DNA, 15 bp, Homo sapiens
cacaatctgcctgta

SEQ ID NO: 1385106 - DNA, 15 bp, Homo sapiens
gcacaatctgcctgt

SEQ ID NO: 1385107 - DNA, 15 bp, Homo sapiens
tgcacaatctgcctg

SEQ ID NO: 1385108 - DNA, 15 bp, Homo sapiens
atgcacaatctgcct

SEQ ID NO: 1385109 - DNA, 15 bp, Homo sapiens
tatgcacaatctgcc

SEQ ID NO: 1385110 - DNA, 15 bp, Homo sapiens
atatgcacaatctgc

SEQ ID NO: 1385111 - DNA, 15 bp, Homo sapiens
tatatgcacaatctg

SEQ ID NO: 1385112 - DNA, 15 bp, Homo sapiens
atatatgcacaatct

SEQ ID NO: 1385113 - DNA, 15 bp, Homo sapiens
aatatatgcacaatc

SEQ ID NO: 1385114 - DNA, 15 bp, Homo sapiens
aaatatatgcacaat

SEQ ID NO: 1385115 - DNA, 15 bp, Homo sapiens
aaaatatatgcacaa

SEQ ID NO: 1385116 - DNA, 15 bp, Homo sapiens
aaaaatatatgcaca

SEQ ID NO: 1385117 - DNA, 15 bp, Homo sapiens
taaaaatatatgcac

SEQ ID NO: 1385118 - DNA, 15 bp, Homo sapiens
ttaaaaatatatgca

SEQ ID NO: 1385119 - DNA, 15 bp, Homo sapiens
tttaaaaatatatgc

SEQ ID NO: 1385120 - DNA, 15 bp, Homo sapiens
gtttaaaaatatatg

SEQ ID NO: 1385121 - DNA, 15 bp, Homo sapiens
agtttaaaaatatat

SEQ ID NO: 1385122 - DNA, 15 bp, Homo sapiens
aagtttaaaaatata

SEQ ID NO: 1385123 - DNA, 15 bp, Homo sapiens
gaagtttaaaaatat

SEQ ID NO: 1385124 - DNA, 15 bp, Homo sapiens
agaagtttaaaaata

SEQ ID NO: 1385125 - DNA, 15 bp, Homo sapiens
cagaagtttaaaaat

SEQ ID NO: 1385126 - DNA, 15 bp, Homo sapiens
ccagaagtttaaaaa

SEQ ID NO: 1385127 - DNA, 15 bp, Homo sapiens
tccagaagtttaaaa

SEQ ID NO: 1385128 - DNA, 15 bp, Homo sapiens
atccagaagtttaaa

SEQ ID NO: 1385129 - DNA, 15 bp, Homo sapiens
aatccagaagtttaa

SEQ ID NO: 1385130 - DNA, 15 bp, Homo sapiens
aaatccagaagttta

SEQ ID NO: 1385131 - DNA, 15 bp, Homo sapiens
caaatccagaagttt

SEQ ID NO: 1385132 - DNA, 15 bp, Homo sapiens
acaaatccagaagtt

SEQ ID NO: 1385133 - DNA, 15 bp, Homo sapiens
tacaaatccagaagt

SEQ ID NO: 1385134 - DNA, 15 bp, Homo sapiens
gtacaaatccagaag

SEQ ID NO: 1385135 - DNA, 15 bp, Homo sapiens
tgtacaaatccagaa

SEQ ID NO: 1385136 - DNA, 15 bp, Homo sapiens
ttgtacaaatccaga

SEQ ID NO: 1385137 - DNA, 15 bp, Homo sapiens
tttgtacaaatccag

SEQ ID NO: 1385138 - DNA, 15 bp, Homo sapiens
ctttgtacaaatcca

SEQ ID NO: 1385139 - DNA, 15 bp, Homo sapiens
actttgtacaaatcc

SEQ ID NO: 1385140 - DNA, 15 bp, Homo sapiens
cactttgtacaaatc

SEQ ID NO: 1385141 - DNA, 15 bp, Homo sapiens
ccactttgtacaaat

SEQ ID NO: 1385142 - DNA, 15 bp, Homo sapiens
gccactttgtacaaa

SEQ ID NO: 1385143 - DNA, 15 bp, Homo sapiens
ggccactttgtacaa

SEQ ID NO: 1385144 - DNA, 15 bp, Homo sapiens
aggccactttgtaca

SEQ ID NO: 1385145 - DNA, 15 bp, Homo sapiens
caggccactttgtac

SEQ ID NO: 1385146 - DNA, 15 bp, Homo sapiens
tcaggccactttgta

SEQ ID NO: 1385147 - DNA, 15 bp, Homo sapiens
ttcaggccactttgt

SEQ ID NO: 1385148 - DNA, 15 bp, Homo sapiens
attcaggccactttg

SEQ ID NO: 1385149 - DNA, 15 bp, Homo sapiens
cattcaggccacttt

SEQ ID NO: 1385150 - DNA, 15 bp, Homo sapiens
gcattcaggccactt

SEQ ID NO: 1385151 - DNA, 15 bp, Homo sapiens
tgcattcaggccact

SEQ ID NO: 1385152 - DNA, 15 bp, Homo sapiens
ctgcattcaggccac

SEQ ID NO: 1385153 - DNA, 15 bp, Homo sapiens
tctgcattcaggcca

SEQ ID NO: 1385154 - DNA, 15 bp, Homo sapiens
gtctgcattcaggcc

SEQ ID NO: 1385155 - DNA, 15 bp, Homo sapiens
agtctgcattcaggc

SEQ ID NO: 1385156 - DNA, 15 bp, Homo sapiens
aagtctgcattcagg

SEQ ID NO: 1385157 - DNA, 15 bp, Homo sapiens
caagtctgcattcag

SEQ ID NO: 1385158 - DNA, 15 bp, Homo sapiens
gcaagtctgcattca

SEQ ID NO: 1385159 - DNA, 15 bp, Homo sapiens
agcaagtctgcattc

SEQ ID NO: 1385160 - DNA, 15 bp, Homo sapiens
gagcaagtctgcatt

SEQ ID NO: 1385161 - DNA, 15 bp, Homo sapiens
tgagcaagtctgcat

SEQ ID NO: 1385162 - DNA, 15 bp, Homo sapiens
gtgagcaagtctgca

SEQ ID NO: 1385163 - DNA, 15 bp, Homo sapiens
tgtgagcaagtctgc

SEQ ID NO: 1385164 - DNA, 15 bp, Homo sapiens
ttgtgagcaagtctg

SEQ ID NO: 1385165 - DNA, 15 bp, Homo sapiens
attgtgagcaagtct

SEQ ID NO: 1385166 - DNA, 15 bp, Homo sapiens
aattgtgagcaagtc

SEQ ID NO: 1385167 - DNA, 15 bp, Homo sapiens
aaattgtgagcaagt

SEQ ID NO: 1385168 - DNA, 15 bp, Homo sapiens
caaattgtgagcaag

SEQ ID NO: 1385169 - DNA, 15 bp, Homo sapiens
gcaaattgtgagcaa

SEQ ID NO: 1385170 - DNA, 15 bp, Homo sapiens
tgcaaattgtgagca

SEQ ID NO: 1385171 - DNA, 15 bp, Homo sapiens
ctgcaaattgtgagc

SEQ ID NO: 1385172 - DNA, 15 bp, Homo sapiens
actgcaaattgtgag

SEQ ID NO: 1385173 - DNA, 15 bp, Homo sapiens
cactgcaaattgtga

SEQ ID NO: 1385174 - DNA, 15 bp, Homo sapiens
tcactgcaaattgtg

SEQ ID NO: 1385175 - DNA, 15 bp, Homo sapiens
atcactgcaaattgt

SEQ ID NO: 1385176 - DNA, 15 bp, Homo sapiens
gatcactgcaaattg

SEQ ID NO: 1385177 - DNA, 15 bp, Homo sapiens
agatcactgcaaatt

SEQ ID NO: 1385178 - DNA, 15 bp, Homo sapiens
aagatcactgcaaat

SEQ ID NO: 1385179 - DNA, 15 bp, Homo sapiens
aaagatcactgcaaa

SEQ ID NO: 1385180 - DNA, 15 bp, Homo sapiens
taaagatcactgcaa

SEQ ID NO: 1385181 - DNA, 15 bp, Homo sapiens
ataaagatcactgca

SEQ ID NO: 1385182 - DNA, 15 bp, Homo sapiens
gataaagatcactgc

SEQ ID NO: 1385183 - DNA, 15 bp, Homo sapiens
agataaagatcactg

SEQ ID NO: 1385184 - DNA, 15 bp, Homo sapiens
cagataaagatcact

SEQ ID NO: 1385185 - DNA, 15 bp, Homo sapiens
gcagataaagatcac

SEQ ID NO: 1385186 - DNA, 15 bp, Homo sapiens
cgcagataaagatca

SEQ ID NO: 1385187 - DNA, 15 bp, Homo sapiens
ccgcagataaagatc

SEQ ID NO: 1385188 - DNA, 15 bp, Homo sapiens
cccgcagataaagat

SEQ ID NO: 1385189 - DNA, 15 bp, Homo sapiens
gcccgcagataaaga

SEQ ID NO: 1385190 - DNA, 15 bp, Homo sapiens
ggcccgcagataaag

SEQ ID NO: 1385191 - DNA, 15 bp, Homo sapiens
tggcccgcagataaa

SEQ ID NO: 1385192 - DNA, 15 bp, Homo sapiens
ctggcccgcagataa

SEQ ID NO: 1385193 - DNA, 15 bp, Homo sapiens
actggcccgcagata

SEQ ID NO: 1385194 - DNA, 15 bp, Homo sapiens
cactggcccgcagat

SEQ ID NO: 1385195 - DNA, 15 bp, Homo sapiens
ccactggcccgcaga

SEQ ID NO: 1385196 - DNA, 15 bp, Homo sapiens
tccactggcccgcag

SEQ ID NO: 1385197 - DNA, 15 bp, Homo sapiens
ctccactggcccgca

SEQ ID NO: 1385198 - DNA, 15 bp, Homo sapiens
tctccactggcccgc

SEQ ID NO: 1385199 - DNA, 15 bp, Homo sapiens
ttctccactggcccg

SEQ ID NO: 1385200 - DNA, 15 bp, Homo sapiens
tttctccactggccc

SEQ ID NO: 1385201 - DNA, 15 bp, Homo sapiens
atttctccactggcc

SEQ ID NO: 1385202 - DNA, 15 bp, Homo sapiens
catttctccactggc

SEQ ID NO: 1385203 - DNA, 15 bp, Homo sapiens
acatttctccactgg

SEQ ID NO: 1385204 - DNA, 15 bp, Homo sapiens
tacatttctccactg

SEQ ID NO: 1385205 - DNA, 15 bp, Homo sapiens
ctacatttctccact

SEQ ID NO: 1385206 - DNA, 15 bp, Homo sapiens
actacatttctccac

SEQ ID NO: 1385207 - DNA, 15 bp, Homo sapiens
aactacatttctcca

SEQ ID NO: 1385208 - DNA, 15 bp, Homo sapiens
taactacatttctcc

SEQ ID NO: 1385209 - DNA, 15 bp, Homo sapiens
ttaactacatttctc

SEQ ID NO: 1385210 - DNA, 15 bp, Homo sapiens
attaactacatttct

SEQ ID NO: 1385211 - DNA, 15 bp, Homo sapiens
aattaactacatttc

SEQ ID NO: 1385212 - DNA, 15 bp, Homo sapiens
taattaactacattt

SEQ ID NO: 1385213 - DNA, 15 bp, Homo sapiens
ataattaactacatt

SEQ ID NO: 1385214 - DNA, 15 bp, Homo sapiens
tataattaactacat

SEQ ID NO: 1385215 - DNA, 15 bp, Homo sapiens
gtataattaactaca

SEQ ID NO: 1385216 - DNA, 15 bp, Homo sapiens
tgtataattaactac

SEQ ID NO: 1385217 - DNA, 15 bp, Homo sapiens
ctgtataattaacta

SEQ ID NO: 1385218 - DNA, 15 bp, Homo sapiens
actgtataattaact

SEQ ID NO: 1385219 - DNA, 15 bp, Homo sapiens
aactgtataattaac

SEQ ID NO: 1385220 - DNA, 15 bp, Homo sapiens
aaactgtataattaa

SEQ ID NO: 1385221 - DNA, 15 bp, Homo sapiens
gaaactgtataatta

SEQ ID NO: 1385222 - DNA, 15 bp, Homo sapiens
agaaactgtataatt

SEQ ID NO: 1385223 - DNA, 15 bp, Homo sapiens
aagaaactgtataat

SEQ ID NO: 1385224 - DNA, 15 bp, Homo sapiens
taagaaactgtataa

SEQ ID NO: 1385225 - DNA, 15 bp, Homo sapiens
gtaagaaactgtata

SEQ ID NO: 1385226 - DNA, 15 bp, Homo sapiens
agtaagaaactgtat

SEQ ID NO: 1385227 - DNA, 15 bp, Homo sapiens
aagtaagaaactgta

SEQ ID NO: 1385228 - DNA, 15 bp, Homo sapiens
gaagtaagaaactgt

SEQ ID NO: 1385229 - DNA, 15 bp, Homo sapiens
tgaagtaagaaactg

SEQ ID NO: 1385230 - DNA, 15 bp, Homo sapiens
ttgaagtaagaaact

SEQ ID NO: 1385231 - DNA, 15 bp, Homo sapiens
tttgaagtaagaaac

SEQ ID NO: 1385232 - DNA, 15 bp, Homo sapiens
gtttgaagtaagaaa

SEQ ID NO: 1385233 - DNA, 15 bp, Homo sapiens
agtttgaagtaagaa

SEQ ID NO: 1385234 - DNA, 15 bp, Homo sapiens
aagtttgaagtaaga

SEQ ID NO: 1385235 - DNA, 15 bp, Homo sapiens
gaagtttgaagtaag

SEQ ID NO: 1385236 - DNA, 15 bp, Homo sapiens
tgaagtttgaagtaa

SEQ ID NO: 1385237 - DNA, 15 bp, Homo sapiens
ctgaagtttgaagta

SEQ ID NO: 1385238 - DNA, 15 bp, Homo sapiens
tctgaagtttgaagt

SEQ ID NO: 1385239 - DNA, 15 bp, Homo sapiens
atctgaagtttgaag

SEQ ID NO: 1385240 - DNA, 15 bp, Homo sapiens
aatctgaagtttgaa

SEQ ID NO: 1385241 - DNA, 15 bp, Homo sapiens
caatctgaagtttga

SEQ ID NO: 1385242 - DNA, 15 bp, Homo sapiens
acaatctgaagtttg

SEQ ID NO: 1385243 - DNA, 15 bp, Homo sapiens
aacaatctgaagttt

SEQ ID NO: 1385244 - DNA, 15 bp, Homo sapiens
aaacaatctgaagtt

SEQ ID NO: 1385245 - DNA, 15 bp, Homo sapiens
caaacaatctgaagt

SEQ ID NO: 1385246 - DNA, 15 bp, Homo sapiens
ccaaacaatctgaag

SEQ ID NO: 1385247 - DNA, 15 bp, Homo sapiens
gccaaacaatctgaa

SEQ ID NO: 1385248 - DNA, 15 bp, Homo sapiens
agccaaacaatctga

SEQ ID NO: 1385249 - DNA, 15 bp, Homo sapiens
cagccaaacaatctg

SEQ ID NO: 1385250 - DNA, 15 bp, Homo sapiens
tcagccaaacaatct

SEQ ID NO: 1385251 - DNA, 15 bp, Homo sapiens
ttcagccaaacaatc

SEQ ID NO: 1385252 - DNA, 15 bp, Homo sapiens
cttcagccaaacaat

SEQ ID NO: 1385253 - DNA, 15 bp, Homo sapiens
acttcagccaaacaa

SEQ ID NO: 1385254 - DNA, 15 bp, Homo sapiens
aacttcagccaaaca

SEQ ID NO: 1385255 - DNA, 15 bp, Homo sapiens
taacttcagccaaac

SEQ ID NO: 1385256 - DNA, 15 bp, Homo sapiens
ctaacttcagccaaa

SEQ ID NO: 1385257 - DNA, 15 bp, Homo sapiens
gctaacttcagccaa

SEQ ID NO: 1385258 - DNA, 15 bp, Homo sapiens
tgctaacttcagcca

SEQ ID NO: 1385259 - DNA, 15 bp, Homo sapiens
atgctaacttcagcc

SEQ ID NO: 1385260 - DNA, 15 bp, Homo sapiens
aatgctaacttcagc

SEQ ID NO: 1385261 - DNA, 15 bp, Homo sapiens
aaatgctaacttcag

SEQ ID NO: 1385262 - DNA, 15 bp, Homo sapiens
caaatgctaacttca

SEQ ID NO: 1385263 - DNA, 15 bp, Homo sapiens
acaaatgctaacttc

SEQ ID NO: 1385264 - DNA, 15 bp, Homo sapiens
cacaaatgctaactt

SEQ ID NO: 1385265 - DNA, 15 bp, Homo sapiens
acacaaatgctaact

SEQ ID NO: 1385266 - DNA, 15 bp, Homo sapiens
gacacaaatgctaac

SEQ ID NO: 1385267 - DNA, 15 bp, Homo sapiens
ggacacaaatgctaa

SEQ ID NO: 1385268 - DNA, 15 bp, Homo sapiens
tggacacaaatgcta

SEQ ID NO: 1385269 - DNA, 15 bp, Homo sapiens
atggacacaaatgct

SEQ ID NO: 1385270 - DNA, 15 bp, Homo sapiens
aatggacacaaatgc

SEQ ID NO: 1385271 - DNA, 15 bp, Homo sapiens
gaatggacacaaatg

SEQ ID NO: 1385272 - DNA, 15 bp, Homo sapiens
ggaatggacacaaat

SEQ ID NO: 1385273 - DNA, 15 bp, Homo sapiens
tggaatggacacaaa

SEQ ID NO: 1385274 - DNA, 15 bp, Homo sapiens
gtggaatggacacaa

SEQ ID NO: 1385275 - DNA, 15 bp, Homo sapiens
agtggaatggacaca

SEQ ID NO: 1385276 - DNA, 15 bp, Homo sapiens
cagtggaatggacac

SEQ ID NO: 1385277 - DNA, 15 bp, Homo sapiens
ccagtggaatggaca

SEQ ID NO: 1385278 - DNA, 15 bp, Homo sapiens
accagtggaatggac

SEQ ID NO: 1385279 - DNA, 15 bp, Homo sapiens
aaccagtggaatgga

SEQ ID NO: 1385280 - DNA, 15 bp, Homo sapiens
aaaccagtggaatgg

SEQ ID NO: 1385281 - DNA, 15 bp, Homo sapiens
aaaaccagtggaatg

SEQ ID NO: 1385282 - DNA, 15 bp, Homo sapiens
caaaaccagtggaat

SEQ ID NO: 1385283 - DNA, 15 bp, Homo sapiens
gcaaaaccagtggaa

SEQ ID NO: 1385284 - DNA, 15 bp, Homo sapiens
agcaaaaccagtgga

SEQ ID NO: 1385285 - DNA, 15 bp, Homo sapiens
aagcaaaaccagtgg

SEQ ID NO: 1385286 - DNA, 15 bp, Homo sapiens
aaagcaaaaccagtg

SEQ ID NO: 1385287 - DNA, 15 bp, Homo sapiens
taaagcaaaaccagt

SEQ ID NO: 1385288 - DNA, 15 bp, Homo sapiens
ataaagcaaaaccag

SEQ ID NO: 1385289 - DNA, 15 bp, Homo sapiens
aataaagcaaaacca

SEQ ID NO: 1385290 - DNA, 15 bp, Homo sapiens
aaataaagcaaaacc

SEQ ID NO: 1385291 - DNA, 15 bp, Homo sapiens
caaataaagcaaaac

SEQ ID NO: 1385292 - DNA, 15 bp, Homo sapiens
ccaaataaagcaaaa

SEQ ID NO: 1385293 - DNA, 15 bp, Homo sapiens
cccaaataaagcaaa

SEQ ID NO: 1385294 - DNA, 15 bp, Homo sapiens
tcccaaataaagcaa

SEQ ID NO: 1385295 - DNA, 15 bp, Homo sapiens
ctcccaaataaagca

SEQ ID NO: 1385296 - DNA, 15 bp, Homo sapiens
gctcccaaataaagc

SEQ ID NO: 1385297 - DNA, 15 bp, Homo sapiens
agctcccaaataaag

SEQ ID NO: 1385298 - DNA, 15 bp, Homo sapiens
tagctcccaaataaa

SEQ ID NO: 1385299 - DNA, 15 bp, Homo sapiens
ttagctcccaaataa

SEQ ID NO: 1385300 - DNA, 15 bp, Homo sapiens
tttagctcccaaata

SEQ ID NO: 1385301 - DNA, 15 bp, Homo sapiens
gtttagctcccaaat

SEQ ID NO: 1385302 - DNA, 15 bp, Homo sapiens
agtttagctcccaaa

SEQ ID NO: 1385303 - DNA, 15 bp, Homo sapiens
cagtttagctcccaa

SEQ ID NO: 1385304 - DNA, 15 bp, Homo sapiens
gcagtttagctccca

SEQ ID NO: 1385305 - DNA, 15 bp, Homo sapiens
agcagtttagctccc

SEQ ID NO: 1385306 - DNA, 15 bp, Homo sapiens
cagcagtttagctcc

SEQ ID NO: 1385307 - DNA, 15 bp, Homo sapiens
acagcagtttagctc

SEQ ID NO: 1385308 - DNA, 15 bp, Homo sapiens
aacagcagtttagct

SEQ ID NO: 1385309 - DNA, 15 bp, Homo sapiens
aaacagcagtttagc

SEQ ID NO: 1385310 - DNA, 15 bp, Homo sapiens
aaaacagcagtttag

SEQ ID NO: 1385311 - DNA, 15 bp, Homo sapiens
gaaaacagcagttta

SEQ ID NO: 1385312 - DNA, 15 bp, Homo sapiens
ggaaaacagcagttt

SEQ ID NO: 1385313 - DNA, 15 bp, Homo sapiens
aggaaaacagcagtt

SEQ ID NO: 1385314 - DNA, 15 bp, Homo sapiens
gaggaaaacagcagt

SEQ ID NO: 1385315 - DNA, 15 bp, Homo sapiens
agaggaaaacagcag

SEQ ID NO: 1385316 - DNA, 15 bp, Homo sapiens
gagaggaaaacagca

SEQ ID NO: 1385317 - DNA, 15 bp, Homo sapiens
tgagaggaaaacagc

SEQ ID NO: 1385318 - DNA, 15 bp, Homo sapiens
ctgagaggaaaacag

SEQ ID NO: 1385319 - DNA, 15 bp, Homo sapiens
tctgagaggaaaaca

SEQ ID NO: 1385320 - DNA, 15 bp, Homo sapiens
atctgagaggaaaac

SEQ ID NO: 1385321 - DNA, 15 bp, Homo sapiens
tatctgagaggaaaa

SEQ ID NO: 1385322 - DNA, 15 bp, Homo sapiens
atatctgagaggaaa

SEQ ID NO: 1385323 - DNA, 15 bp, Homo sapiens
catatctgagaggaa

SEQ ID NO: 1385324 - DNA, 15 bp, Homo sapiens
gcatatctgagagga

SEQ ID NO: 1385325 - DNA, 15 bp, Homo sapiens
tgcatatctgagagg

SEQ ID NO: 1385326 - DNA, 15 bp, Homo sapiens
ctgcatatctgagag

SEQ ID NO: 1385327 - DNA, 15 bp, Homo sapiens
actgcatatctgaga

SEQ ID NO: 1385328 - DNA, 15 bp, Homo sapiens
aactgcatatctgag

SEQ ID NO: 1385329 - DNA, 15 bp, Homo sapiens
aaactgcatatctga

SEQ ID NO: 1385330 - DNA, 15 bp, Homo sapiens
gaaactgcatatctg

SEQ ID NO: 1385331 - DNA, 15 bp, Homo sapiens
agaaactgcatatct

SEQ ID NO: 1385332 - DNA, 15 bp, Homo sapiens
cagaaactgcatatc

SEQ ID NO: 1385333 - DNA, 15 bp, Homo sapiens
tcagaaactgcatat

SEQ ID NO: 1385334 - DNA, 15 bp, Homo sapiens
atcagaaactgcata

SEQ ID NO: 1385335 - DNA, 15 bp, Homo sapiens
tatcagaaactgcat

SEQ ID NO: 1385336 - DNA, 15 bp, Homo sapiens
ttatcagaaactgca

SEQ ID NO: 1385337 - DNA, 15 bp, Homo sapiens
tttatcagaaactgc

SEQ ID NO: 1385338 - DNA, 15 bp, Homo sapiens
gtttatcagaaactg

SEQ ID NO: 1385339 - DNA, 15 bp, Homo sapiens
ggtttatcagaaact

SEQ ID NO: 1385340 - DNA, 15 bp, Homo sapiens
gggtttatcagaaac

SEQ ID NO: 1385341 - DNA, 15 bp, Homo sapiens
agggtttatcagaaa

SEQ ID NO: 1385342 - DNA, 15 bp, Homo sapiens
cagggtttatcagaa

SEQ ID NO: 1385343 - DNA, 15 bp, Homo sapiens
gcagggtttatcaga

SEQ ID NO: 1385344 - DNA, 15 bp, Homo sapiens
agcagggtttatcag

SEQ ID NO: 1385345 - DNA, 15 bp, Homo sapiens
cagcagggtttatca

SEQ ID NO: 1385346 - DNA, 15 bp, Homo sapiens
tcagcagggtttatc

SEQ ID NO: 1385347 - DNA, 15 bp, Homo sapiens
atcagcagggtttat

SEQ ID NO: 1385348 - DNA, 15 bp, Homo sapiens
tatcagcagggttta

SEQ ID NO: 1385349 - DNA, 15 bp, Homo sapiens
atatcagcagggttt

SEQ ID NO: 1385350 - DNA, 15 bp, Homo sapiens
tatatcagcagggtt

SEQ ID NO: 1385351 - DNA, 15 bp, Homo sapiens
atatatcagcagggt

SEQ ID NO: 1385352 - DNA, 15 bp, Homo sapiens
aatatatcagcaggg

SEQ ID NO: 1385353 - DNA, 15 bp, Homo sapiens
gaatatatcagcagg

SEQ ID NO: 1385354 - DNA, 15 bp, Homo sapiens
agaatatatcagcag

SEQ ID NO: 1385355 - DNA, 15 bp, Homo sapiens
cagaatatatcagca

SEQ ID NO: 1385356 - DNA, 15 bp, Homo sapiens
gcagaatatatcagc

SEQ ID NO: 1385357 - DNA, 15 bp, Homo sapiens
ggcagaatatatcag

SEQ ID NO: 1385358 - DNA, 15 bp, Homo sapiens
tggcagaatatatca

SEQ ID NO: 1385359 - DNA, 15 bp, Homo sapiens
gtggcagaatatatc

SEQ ID NO: 1385360 - DNA, 15 bp, Homo sapiens
tgtggcagaatatat

SEQ ID NO: 1385361 - DNA, 15 bp, Homo sapiens
atgtggcagaatata

SEQ ID NO: 1385362 - DNA, 15 bp, Homo sapiens
gatgtggcagaatat

SEQ ID NO: 1385363 - DNA, 15 bp, Homo sapiens
tgatgtggcagaata

SEQ ID NO: 1385364 - DNA, 15 bp, Homo sapiens
gtgatgtggcagaat

SEQ ID NO: 1385365 - DNA, 15 bp, Homo sapiens
ggtgatgtggcagaa

SEQ ID NO: 1385366 - DNA, 15 bp, Homo sapiens
tggtgatgtggcaga

SEQ ID NO: 1385367 - DNA, 15 bp, Homo sapiens
atggtgatgtggcag

SEQ ID NO: 1385368 - DNA, 15 bp, Homo sapiens
catggtgatgtggca

SEQ ID NO: 1385369 - DNA, 15 bp, Homo sapiens
acatggtgatgtggc

SEQ ID NO: 1385370 - DNA, 15 bp, Homo sapiens
aacatggtgatgtgg

SEQ ID NO: 1385371 - DNA, 15 bp, Homo sapiens
aaacatggtgatgtg

SEQ ID NO: 1385372 - DNA, 15 bp, Homo sapiens
gaaacatggtgatgt

SEQ ID NO: 1385373 - DNA, 15 bp, Homo sapiens
agaaacatggtgatg

SEQ ID NO: 1385374 - DNA, 15 bp, Homo sapiens
gagaaacatggtgat

SEQ ID NO: 1385375 - DNA, 15 bp, Homo sapiens
tgagaaacatggtga

SEQ ID NO: 1385376 - DNA, 15 bp, Homo sapiens
gtgagaaacatggtg

SEQ ID NO: 1385377 - DNA, 15 bp, Homo sapiens
agtgagaaacatggt

SEQ ID NO: 1385378 - DNA, 15 bp, Homo sapiens
tagtgagaaacatgg

SEQ ID NO: 1385379 - DNA, 15 bp, Homo sapiens
gtagtgagaaacatg

SEQ ID NO: 1385380 - DNA, 15 bp, Homo sapiens
ggtagtgagaaacat

SEQ ID NO: 1385381 - DNA, 15 bp, Homo sapiens
tggtagtgagaaaca

SEQ ID NO: 1385382 - DNA, 15 bp, Homo sapiens
atggtagtgagaaac

SEQ ID NO: 1385383 - DNA, 15 bp, Homo sapiens
aatggtagtgagaaa

SEQ ID NO: 1385384 - DNA, 15 bp, Homo sapiens
aaatggtagtgagaa

SEQ ID NO: 1385385 - DNA, 15 bp, Homo sapiens
gaaatggtagtgaga

SEQ ID NO: 1385386 - DNA, 15 bp, Homo sapiens
agaaatggtagtgag

SEQ ID NO: 1385387 - DNA, 15 bp, Homo sapiens
aagaaatggtagtga

SEQ ID NO: 1385388 - DNA, 15 bp, Homo sapiens
taagaaatggtagtg

SEQ ID NO: 1385389 - DNA, 15 bp, Homo sapiens
ttaagaaatggtagt

SEQ ID NO: 1385390 - DNA, 15 bp, Homo sapiens
attaagaaatggtag

SEQ ID NO: 1385391 - DNA, 15 bp, Homo sapiens
aattaagaaatggta

SEQ ID NO: 1385392 - DNA, 15 bp, Homo sapiens
gaattaagaaatggt

SEQ ID NO: 1385393 - DNA, 15 bp, Homo sapiens
tgaattaagaaatgg

SEQ ID NO: 1385394 - DNA, 15 bp, Homo sapiens
ctgaattaagaaatg

SEQ ID NO: 1385395 - DNA, 15 bp, Homo sapiens
gctgaattaagaaat

SEQ ID NO: 1385396 - DNA, 15 bp, Homo sapiens
agctgaattaagaaa

SEQ ID NO: 1385397 - DNA, 15 bp, Homo sapiens
aagctgaattaagaa

SEQ ID NO: 1385398 - DNA, 15 bp, Homo sapiens
taagctgaattaaga

SEQ ID NO: 1385399 - DNA, 15 bp, Homo sapiens
ctaagctgaattaag

SEQ ID NO: 1385400 - DNA, 15 bp, Homo sapiens
actaagctgaattaa

SEQ ID NO: 1385401 - DNA, 15 bp, Homo sapiens
aactaagctgaatta

SEQ ID NO: 1385402 - DNA, 15 bp, Homo sapiens
aaactaagctgaatt

SEQ ID NO: 1385403 - DNA, 15 bp, Homo sapiens
taaactaagctgaat

SEQ ID NO: 1385404 - DNA, 15 bp, Homo sapiens
ataaactaagctgaa

SEQ ID NO: 1385405 - DNA, 15 bp, Homo sapiens
cataaactaagctga

SEQ ID NO: 1385406 - DNA, 15 bp, Homo sapiens
tcataaactaagctg

SEQ ID NO: 1385407 - DNA, 15 bp, Homo sapiens
ctcataaactaagct

SEQ ID NO: 1385408 - DNA, 15 bp, Homo sapiens
gctcataaactaagc

SEQ ID NO: 1385409 - DNA, 15 bp, Homo sapiens
agctcataaactaag

SEQ ID NO: 1385410 - DNA, 15 bp, Homo sapiens
cagctcataaactaa

SEQ ID NO: 1385411 - DNA, 15 bp, Homo sapiens
tcagctcataaacta

SEQ ID NO: 1385412 - DNA, 15 bp, Homo sapiens
atcagctcataaact

SEQ ID NO: 1385413 - DNA, 15 bp, Homo sapiens
catcagctcataaac

SEQ ID NO: 1385414 - DNA, 15 bp, Homo sapiens
tcatcagctcataaa

SEQ ID NO: 1385415 - DNA, 15 bp, Homo sapiens
atcatcagctcataa

SEQ ID NO: 1385416 - DNA, 15 bp, Homo sapiens
tatcatcagctcata

SEQ ID NO: 1385417 - DNA, 15 bp, Homo sapiens
ttatcatcagctcat

SEQ ID NO: 1385418 - DNA, 15 bp, Homo sapiens
tttatcatcagctca

SEQ ID NO: 1385419 - DNA, 15 bp, Homo sapiens
atttatcatcagctc

SEQ ID NO: 1385420 - DNA, 15 bp, Homo sapiens
tatttatcatcagct

SEQ ID NO: 1385421 - DNA, 15 bp, Homo sapiens
ctatttatcatcagc

SEQ ID NO: 1385422 - DNA, 15 bp, Homo sapiens
cctatttatcatcag

SEQ ID NO: 1385423 - DNA, 15 bp, Homo sapiens
gcctatttatcatca

SEQ ID NO: 1385424 - DNA, 15 bp, Homo sapiens
tgcctatttatcatc

SEQ ID NO: 1385425 - DNA, 15 bp, Homo sapiens
atgcctatttatcat

SEQ ID NO: 1385426 - DNA, 15 bp, Homo sapiens
aatgcctatttatca

SEQ ID NO: 1385427 - DNA, 15 bp, Homo sapiens
aaatgcctatttatc

SEQ ID NO: 1385428 - DNA, 15 bp, Homo sapiens
taaatgcctatttat

SEQ ID NO: 1385429 - DNA, 15 bp, Homo sapiens
ttaaatgcctattta

SEQ ID NO: 1385430 - DNA, 15 bp, Homo sapiens
tttaaatgcctattt

SEQ ID NO: 1385431 - DNA, 15 bp, Homo sapiens
ttttaaatgcctatt

SEQ ID NO: 1385432 - DNA, 15 bp, Homo sapiens
cttttaaatgcctat

SEQ ID NO: 1385433 - DNA, 15 bp, Homo sapiens
ccttttaaatgccta

SEQ ID NO: 1385434 - DNA, 15 bp, Homo sapiens
cccttttaaatgcct

SEQ ID NO: 1385435 - DNA, 15 bp, Homo sapiens
gcccttttaaatgcc

SEQ ID NO: 1385436 - DNA, 15 bp, Homo sapiens
ggcccttttaaatgc

SEQ ID NO: 1385437 - DNA, 15 bp, Homo sapiens
gggcccttttaaatg

SEQ ID NO: 1385438 - DNA, 15 bp, Homo sapiens
tgggcccttttaaat

SEQ ID NO: 1385439 - DNA, 15 bp, Homo sapiens
ctgggcccttttaaa

SEQ ID NO: 1385440 - DNA, 15 bp, Homo sapiens
actgggcccttttaa

SEQ ID NO: 1385441 - DNA, 15 bp, Homo sapiens
tactgggccctttta

SEQ ID NO: 1385442 - DNA, 15 bp, Homo sapiens
ttactgggccctttt

SEQ ID NO: 1385443 - DNA, 15 bp, Homo sapiens
gttactgggcccttt

SEQ ID NO: 1385444 - DNA, 15 bp, Homo sapiens
tgttactgggccctt

SEQ ID NO: 1385445 - DNA, 15 bp, Homo sapiens
atgttactgggccct

SEQ ID NO: 1385446 - DNA, 15 bp, Homo sapiens
aatgttactgggccc

SEQ ID NO: 1385447 - DNA, 15 bp, Homo sapiens
gaatgttactgggcc

SEQ ID NO: 1385448 - DNA, 15 bp, Homo sapiens
agaatgttactgggc

SEQ ID NO: 1385449 - DNA, 15 bp, Homo sapiens
cagaatgttactggg

SEQ ID NO: 1385450 - DNA, 15 bp, Homo sapiens
tcagaatgttactgg

SEQ ID NO: 1385451 - DNA, 15 bp, Homo sapiens
ttcagaatgttactg

SEQ ID NO: 1385452 - DNA, 15 bp, Homo sapiens
attcagaatgttact

SEQ ID NO: 1385453 - DNA, 15 bp, Homo sapiens
aattcagaatgttac

SEQ ID NO: 1385454 - DNA, 15 bp, Homo sapiens
aaattcagaatgtta

SEQ ID NO: 1385455 - DNA, 15 bp, Homo sapiens
caaattcagaatgtt

SEQ ID NO: 1385456 - DNA, 15 bp, Homo sapiens
tcaaattcagaatgt

SEQ ID NO: 1385457 - DNA, 15 bp, Homo sapiens
ctcaaattcagaatg

SEQ ID NO: 1385458 - DNA, 15 bp, Homo sapiens
actcaaattcagaat

SEQ ID NO: 1385459 - DNA, 15 bp, Homo sapiens
aactcaaattcagaa

SEQ ID NO: 1385460 - DNA, 15 bp, Homo sapiens
aaactcaaattcaga

SEQ ID NO: 1385461 - DNA, 15 bp, Homo sapiens
taaactcaaattcag

SEQ ID NO: 1385462 - DNA, 15 bp, Homo sapiens
ataaactcaaattca

SEQ ID NO: 1385463 - DNA, 15 bp, Homo sapiens
tataaactcaaattc

SEQ ID NO: 1385464 - DNA, 15 bp, Homo sapiens
ctataaactcaaatt

SEQ ID NO: 1385465 - DNA, 15 bp, Homo sapiens
cctataaactcaaat

SEQ ID NO: 1385466 - DNA, 15 bp, Homo sapiens
tcctataaactcaaa

SEQ ID NO: 1385467 - DNA, 15 bp, Homo sapiens
ttcctataaactcaa

SEQ ID NO: 1385468 - DNA, 15 bp, Homo sapiens
gttcctataaactca

SEQ ID NO: 1385469 - DNA, 15 bp, Homo sapiens
tgttcctataaactc

SEQ ID NO: 1385470 - DNA, 15 bp, Homo sapiens
atgttcctataaact

SEQ ID NO: 1385471 - DNA, 15 bp, Homo sapiens
gatgttcctataaac

SEQ ID NO: 1385472 - DNA, 15 bp, Homo sapiens
agatgttcctataaa

SEQ ID NO: 1385473 - DNA, 15 bp, Homo sapiens
cagatgttcctataa

SEQ ID NO: 1385474 - DNA, 15 bp, Homo sapiens
acagatgttcctata

SEQ ID NO: 1385475 - DNA, 15 bp, Homo sapiens
aacagatgttcctat

SEQ ID NO: 1385476 - DNA, 15 bp, Homo sapiens
aaacagatgttccta

SEQ ID NO: 1385477 - DNA, 15 bp, Homo sapiens
caaacagatgttcct

SEQ ID NO: 1385478 - DNA, 15 bp, Homo sapiens
tcaaacagatgttcc

SEQ ID NO: 1385479 - DNA, 15 bp, Homo sapiens
atcaaacagatgttc

SEQ ID NO: 1385480 - DNA, 15 bp, Homo sapiens
tatcaaacagatgtt

SEQ ID NO: 1385481 - DNA, 15 bp, Homo sapiens
ttatcaaacagatgt

SEQ ID NO: 1385482 - DNA, 15 bp, Homo sapiens
attatcaaacagatg

SEQ ID NO: 1385483 - DNA, 15 bp, Homo sapiens
aattatcaaacagat

SEQ ID NO: 1385484 - DNA, 15 bp, Homo sapiens
aaattatcaaacaga

SEQ ID NO: 1385485 - DNA, 15 bp, Homo sapiens
caaattatcaaacag

SEQ ID NO: 1385486 - DNA, 15 bp, Homo sapiens
gcaaattatcaaaca

SEQ ID NO: 1385487 - DNA, 15 bp, Homo sapiens
ggcaaattatcaaac

SEQ ID NO: 1385488 - DNA, 15 bp, Homo sapiens
aggcaaattatcaaa

SEQ ID NO: 1385489 - DNA, 15 bp, Homo sapiens
aaggcaaattatcaa

SEQ ID NO: 1385490 - DNA, 15 bp, Homo sapiens
caaggcaaattatca

SEQ ID NO: 1385491 - DNA, 15 bp, Homo sapiens
acaaggcaaattatc

SEQ ID NO: 1385492 - DNA, 15 bp, Homo sapiens
aacaaggcaaattat

SEQ ID NO: 1385493 - DNA, 15 bp, Homo sapiens
gaacaaggcaaatta

SEQ ID NO: 1385494 - DNA, 15 bp, Homo sapiens
agaacaaggcaaatt

SEQ ID NO: 1385495 - DNA, 15 bp, Homo sapiens
gagaacaaggcaaat

SEQ ID NO: 1385496 - DNA, 15 bp, Homo sapiens
tgagaacaaggcaaa

SEQ ID NO: 1385497 - DNA, 15 bp, Homo sapiens
ttgagaacaaggcaa

SEQ ID NO: 1385498 - DNA, 15 bp, Homo sapiens
tttgagaacaaggca

SEQ ID NO: 1385499 - DNA, 15 bp, Homo sapiens
atttgagaacaaggc

SEQ ID NO: 1385500 - DNA, 15 bp, Homo sapiens
tatttgagaacaagg

SEQ ID NO: 1385501 - DNA, 15 bp, Homo sapiens
ttatttgagaacaag

SEQ ID NO: 1385502 - DNA, 15 bp, Homo sapiens
cttatttgagaacaa

SEQ ID NO: 1385503 - DNA, 15 bp, Homo sapiens
tcttatttgagaaca

SEQ ID NO: 1385504 - DNA, 15 bp, Homo sapiens
atcttatttgagaac

SEQ ID NO: 1385505 - DNA, 15 bp, Homo sapiens
catcttatttgagaa

SEQ ID NO: 1385506 - DNA, 15 bp, Homo sapiens
gcatcttatttgaga

SEQ ID NO: 1385507 - DNA, 15 bp, Homo sapiens
ggcatcttatttgag

SEQ ID NO: 1385508 - DNA, 15 bp, Homo sapiens
tggcatcttatttga

SEQ ID NO: 1385509 - DNA, 15 bp, Homo sapiens
atggcatcttatttg

SEQ ID NO: 1385510 - DNA, 15 bp, Homo sapiens
tatggcatcttattt

SEQ ID NO: 1385511 - DNA, 15 bp, Homo sapiens
ttatggcatcttatt

SEQ ID NO: 1385512 - DNA, 15 bp, Homo sapiens
tttatggcatcttat

SEQ ID NO: 1385513 - DNA, 15 bp, Homo sapiens
ctttatggcatctta

SEQ ID NO: 1385514 - DNA, 15 bp, Homo sapiens
tctttatggcatctt

SEQ ID NO: 1385515 - DNA, 15 bp, Homo sapiens
gtctttatggcatct

SEQ ID NO: 1385516 - DNA, 15 bp, Homo sapiens
tgtctttatggcatc

SEQ ID NO: 1385517 - DNA, 15 bp, Homo sapiens
ttgtctttatggcat

SEQ ID NO: 1385518 - DNA, 15 bp, Homo sapiens
tttgtctttatggca

SEQ ID NO: 1385519 - DNA, 15 bp, Homo sapiens
ctttgtctttatggc

SEQ ID NO: 1385520 - DNA, 15 bp, Homo sapiens
cctttgtctttatgg

SEQ ID NO: 1385521 - DNA, 15 bp, Homo sapiens
acctttgtctttatg

SEQ ID NO: 1385522 - DNA, 15 bp, Homo sapiens
aacctttgtctttat

SEQ ID NO: 1385523 - DNA, 15 bp, Homo sapiens
aaacctttgtcttta

SEQ ID NO: 1385524 - DNA, 15 bp, Homo sapiens
caaacctttgtcttt

SEQ ID NO: 1385525 - DNA, 15 bp, Homo sapiens
gcaaacctttgtctt

SEQ ID NO: 1385526 - DNA, 15 bp, Homo sapiens
tgcaaacctttgtct

SEQ ID NO: 1385527 - DNA, 15 bp, Homo sapiens
ctgcaaacctttgtc

SEQ ID NO: 1385528 - DNA, 15 bp, Homo sapiens
actgcaaacctttgt

SEQ ID NO: 1385529 - DNA, 15 bp, Homo sapiens
cactgcaaacctttg

SEQ ID NO: 1385530 - DNA, 15 bp, Homo sapiens
acactgcaaaccttt

SEQ ID NO: 1385531 - DNA, 15 bp, Homo sapiens
aacactgcaaacctt

SEQ ID NO: 1385532 - DNA, 15 bp, Homo sapiens
aaacactgcaaacct

SEQ ID NO: 1385533 - DNA, 15 bp, Homo sapiens
taaacactgcaaacc

SEQ ID NO: 1385534 - DNA, 15 bp, Homo sapiens
gtaaacactgcaaac

SEQ ID NO: 1385535 - DNA, 15 bp, Homo sapiens
ggtaaacactgcaaa

SEQ ID NO: 1385536 - DNA, 15 bp, Homo sapiens
aggtaaacactgcaa

SEQ ID NO: 1385537 - DNA, 15 bp, Homo sapiens
aaggtaaacactgca

SEQ ID NO: 1385538 - DNA, 15 bp, Homo sapiens
gaaggtaaacactgc

SEQ ID NO: 1385539 - DNA, 15 bp, Homo sapiens
agaaggtaaacactg

SEQ ID NO: 1385540 - DNA, 15 bp, Homo sapiens
aagaaggtaaacact

SEQ ID NO: 1385541 - DNA, 15 bp, Homo sapiens
gaagaaggtaaacac

SEQ ID NO: 1385542 - DNA, 15 bp, Homo sapiens
tgaagaaggtaaaca

SEQ ID NO: 1385543 - DNA, 15 bp, Homo sapiens
ctgaagaaggtaaac

SEQ ID NO: 1385544 - DNA, 15 bp, Homo sapiens
cctgaagaaggtaaa

SEQ ID NO: 1385545 - DNA, 15 bp, Homo sapiens
tcctgaagaaggtaa

SEQ ID NO: 1385546 - DNA, 15 bp, Homo sapiens
atcctgaagaaggta

SEQ ID NO: 1385547 - DNA, 15 bp, Homo sapiens
tatcctgaagaaggt

SEQ ID NO: 1385548 - DNA, 15 bp, Homo sapiens
ttatcctgaagaagg

SEQ ID NO: 1385549 - DNA, 15 bp, Homo sapiens
attatcctgaagaag

SEQ ID NO: 1385550 - DNA, 15 bp, Homo sapiens
cattatcctgaagaa

SEQ ID NO: 1385551 - DNA, 15 bp, Homo sapiens
ccattatcctgaaga

SEQ ID NO: 1385552 - DNA, 15 bp, Homo sapiens
cccattatcctgaag

SEQ ID NO: 1385553 - DNA, 15 bp, Homo sapiens
tcccattatcctgaa

SEQ ID NO: 1385554 - DNA, 15 bp, Homo sapiens
ttcccattatcctga

SEQ ID NO: 1385555 - DNA, 15 bp, Homo sapiens
tttcccattatcctg

SEQ ID NO: 1385556 - DNA, 15 bp, Homo sapiens
ttttcccattatcct

SEQ ID NO: 1385557 - DNA, 15 bp, Homo sapiens
cttttcccattatcc

SEQ ID NO: 1385558 - DNA, 15 bp, Homo sapiens
acttttcccattatc

SEQ ID NO: 1385559 - DNA, 15 bp, Homo sapiens
cacttttcccattat

SEQ ID NO: 1385560 - DNA, 15 bp, Homo sapiens
ccacttttcccatta

SEQ ID NO: 1385561 - DNA, 15 bp, Homo sapiens
tccacttttcccatt

SEQ ID NO: 1385562 - DNA, 15 bp, Homo sapiens
ctccacttttcccat

SEQ ID NO: 1385563 - DNA, 15 bp, Homo sapiens
tctccacttttccca

SEQ ID NO: 1385564 - DNA, 15 bp, Homo sapiens
ctctccacttttccc

SEQ ID NO: 1385565 - DNA, 15 bp, Homo sapiens
actctccacttttcc

SEQ ID NO: 1385566 - DNA, 15 bp, Homo sapiens
cactctccacttttc

SEQ ID NO: 1385567 - DNA, 15 bp, Homo sapiens
gcactctccactttt

SEQ ID NO: 1385568 - DNA, 15 bp, Homo sapiens
agcactctccacttt

SEQ ID NO: 1385569 - DNA, 15 bp, Homo sapiens
gagcactctccactt

SEQ ID NO: 1385570 - DNA, 15 bp, Homo sapiens
agagcactctccact

SEQ ID NO: 1385571 - DNA, 15 bp, Homo sapiens
cagagcactctccac

SEQ ID NO: 1385572 - DNA, 15 bp, Homo sapiens
acagagcactctcca

SEQ ID NO: 1385573 - DNA, 15 bp, Homo sapiens
gacagagcactctcc

SEQ ID NO: 1385574 - DNA, 15 bp, Homo sapiens
tgacagagcactctc

SEQ ID NO: 1385575 - DNA, 15 bp, Homo sapiens
gtgacagagcactct

SEQ ID NO: 1385576 - DNA, 15 bp, Homo sapiens
tgtgacagagcactc

SEQ ID NO: 1385577 - DNA, 15 bp, Homo sapiens
atgtgacagagcact

SEQ ID NO: 1385578 - DNA, 15 bp, Homo sapiens
catgtgacagagcac

SEQ ID NO: 1385579 - DNA, 15 bp, Homo sapiens
tcatgtgacagagca

SEQ ID NO: 1385580 - DNA, 15 bp, Homo sapiens
ttcatgtgacagagc

SEQ ID NO: 1385581 - DNA, 15 bp, Homo sapiens
tttcatgtgacagag

SEQ ID NO: 1385582 - DNA, 15 bp, Homo sapiens
ttttcatgtgacaga

SEQ ID NO: 1385583 - DNA, 15 bp, Homo sapiens
tttttcatgtgacag

SEQ ID NO: 1385584 - DNA, 15 bp, Homo sapiens
atttttcatgtgaca

SEQ ID NO: 1385585 - DNA, 15 bp, Homo sapiens
tatttttcatgtgac

SEQ ID NO: 1385586 - DNA, 15 bp, Homo sapiens
atatttttcatgtga

SEQ ID NO: 1385587 - DNA, 15 bp, Homo sapiens
gatatttttcatgtg

SEQ ID NO: 1385588 - DNA, 15 bp, Homo sapiens
ggatatttttcatgt

SEQ ID NO: 1385589 - DNA, 15 bp, Homo sapiens
gggatatttttcatg

SEQ ID NO: 1385590 - DNA, 15 bp, Homo sapiens
agggatatttttcat

SEQ ID NO: 1385591 - DNA, 15 bp, Homo sapiens
cagggatatttttca

SEQ ID NO: 1385592 - DNA, 15 bp, Homo sapiens
gcagggatatttttc

SEQ ID NO: 1385593 - DNA, 15 bp, Homo sapiens
ggcagggatattttt

SEQ ID NO: 1385594 - DNA, 15 bp, Homo sapiens
tggcagggatatttt

SEQ ID NO: 1385595 - DNA, 15 bp, Homo sapiens
ttggcagggatattt

SEQ ID NO: 1385596 - DNA, 15 bp, Homo sapiens
tttggcagggatatt

SEQ ID NO: 1385597 - DNA, 15 bp, Homo sapiens
ctttggcagggatat

SEQ ID NO: 1385598 - DNA, 15 bp, Homo sapiens
actttggcagggata

SEQ ID NO: 1385599 - DNA, 15 bp, Homo sapiens
gactttggcagggat

SEQ ID NO: 1385600 - DNA, 15 bp, Homo sapiens
tgactttggcaggga

SEQ ID NO: 1385601 - DNA, 15 bp, Homo sapiens
ttgactttggcaggg

SEQ ID NO: 1385602 - DNA, 15 bp, Homo sapiens
cttgactttggcagg

SEQ ID NO: 1385603 - DNA, 15 bp, Homo sapiens
acttgactttggcag

SEQ ID NO: 1385604 - DNA, 15 bp, Homo sapiens
aacttgactttggca

SEQ ID NO: 1385605 - DNA, 15 bp, Homo sapiens
aaacttgactttggc

SEQ ID NO: 1385606 - DNA, 15 bp, Homo sapiens
taaacttgactttgg

SEQ ID NO: 1385607 - DNA, 15 bp, Homo sapiens
ttaaacttgactttg

SEQ ID NO: 1385608 - DNA, 15 bp, Homo sapiens
tttaaacttgacttt

SEQ ID NO: 1385609 - DNA, 15 bp, Homo sapiens
atttaaacttgactt

SEQ ID NO: 1385610 - DNA, 15 bp, Homo sapiens
aatttaaacttgact

SEQ ID NO: 1385611 - DNA, 15 bp, Homo sapiens
gaatttaaacttgac

SEQ ID NO: 1385612 - DNA, 15 bp, Homo sapiens
agaatttaaacttga

SEQ ID NO: 1385613 - DNA, 15 bp, Homo sapiens
gagaatttaaacttg

SEQ ID NO: 1385614 - DNA, 15 bp, Homo sapiens
agagaatttaaactt

SEQ ID NO: 1385615 - DNA, 15 bp, Homo sapiens
cagagaatttaaact

SEQ ID NO: 1385616 - DNA, 15 bp, Homo sapiens
tcagagaatttaaac

SEQ ID NO: 1385617 - DNA, 15 bp, Homo sapiens
ctcagagaatttaaa

SEQ ID NO: 1385618 - DNA, 15 bp, Homo sapiens
tctcagagaatttaa

SEQ ID NO: 1385619 - DNA, 15 bp, Homo sapiens
atctcagagaattta

SEQ ID NO: 1385620 - DNA, 15 bp, Homo sapiens
tatctcagagaattt

SEQ ID NO: 1385621 - DNA, 15 bp, Homo sapiens
gtatctcagagaatt

SEQ ID NO: 1385622 - DNA, 15 bp, Homo sapiens
agtatctcagagaat

SEQ ID NO: 1385623 - DNA, 15 bp, Homo sapiens
aagtatctcagagaa

SEQ ID NO: 1385624 - DNA, 15 bp, Homo sapiens
aaagtatctcagaga

SEQ ID NO: 1385625 - DNA, 15 bp, Homo sapiens
taaagtatctcagag

SEQ ID NO: 1385626 - DNA, 15 bp, Homo sapiens
ttaaagtatctcaga

SEQ ID NO: 1385627 - DNA, 15 bp, Homo sapiens
attaaagtatctcag

SEQ ID NO: 1385628 - DNA, 15 bp, Homo sapiens
tattaaagtatctca

SEQ ID NO: 1385629 - DNA, 15 bp, Homo sapiens
ctattaaagtatctc

SEQ ID NO: 1385630 - DNA, 15 bp, Homo sapiens
gctattaaagtatct

SEQ ID NO: 1385631 - DNA, 15 bp, Homo sapiens
ggctattaaagtatc

SEQ ID NO: 1385632 - DNA, 15 bp, Homo sapiens
aggctattaaagtat

SEQ ID NO: 1385633 - DNA, 15 bp, Homo sapiens
gaggctattaaagta

SEQ ID NO: 1385634 - DNA, 15 bp, Homo sapiens
agaggctattaaagt

SEQ ID NO: 1385635 - DNA, 15 bp, Homo sapiens
aagaggctattaaag

SEQ ID NO: 1385636 - DNA, 15 bp, Homo sapiens
caagaggctattaaa

SEQ ID NO: 1385637 - DNA, 15 bp, Homo sapiens
gcaagaggctattaa

SEQ ID NO: 1385638 - DNA, 15 bp, Homo sapiens
tgcaagaggctatta

SEQ ID NO: 1385639 - DNA, 15 bp, Homo sapiens
atgcaagaggctatt

SEQ ID NO: 1385640 - DNA, 15 bp, Homo sapiens
tatgcaagaggctat

SEQ ID NO: 1385641 - DNA, 15 bp, Homo sapiens
ctatgcaagaggcta

SEQ ID NO: 1385642 - DNA, 15 bp, Homo sapiens
tctatgcaagaggct

SEQ ID NO: 1385643 - DNA, 15 bp, Homo sapiens
ttctatgcaagaggc

SEQ ID NO: 1385644 - DNA, 15 bp, Homo sapiens
attctatgcaagagg

SEQ ID NO: 1385645 - DNA, 15 bp, Homo sapiens
aattctatgcaagag

SEQ ID NO: 1385646 - DNA, 15 bp, Homo sapiens
caattctatgcaaga

SEQ ID NO: 1385647 - DNA, 15 bp, Homo sapiens
ccaattctatgcaag

SEQ ID NO: 1385648 - DNA, 15 bp, Homo sapiens
tccaattctatgcaa

SEQ ID NO: 1385649 - DNA, 15 bp, Homo sapiens
atccaattctatgca

SEQ ID NO: 1385650 - DNA, 15 bp, Homo sapiens
gatccaattctatgc

SEQ ID NO: 1385651 - DNA, 15 bp, Homo sapiens
agatccaattctatg

SEQ ID NO: 1385652 - DNA, 15 bp, Homo sapiens
aagatccaattctat

SEQ ID NO: 1385653 - DNA, 15 bp, Homo sapiens
aaagatccaattcta

SEQ ID NO: 1385654 - DNA, 15 bp, Homo sapiens
taaagatccaattct

SEQ ID NO: 1385655 - DNA, 15 bp, Homo sapiens
ttaaagatccaattc

SEQ ID NO: 1385656 - DNA, 15 bp, Homo sapiens
tttaaagatccaatt

SEQ ID NO: 1385657 - DNA, 15 bp, Homo sapiens
gtttaaagatccaat

SEQ ID NO: 1385658 - DNA, 15 bp, Homo sapiens
tgtttaaagatccaa

SEQ ID NO: 1385659 - DNA, 15 bp, Homo sapiens
ttgtttaaagatcca

SEQ ID NO: 1385660 - DNA, 15 bp, Homo sapiens
tttgtttaaagatcc

SEQ ID NO: 1385661 - DNA, 15 bp, Homo sapiens
gtttgtttaaagatc

SEQ ID NO: 1385662 - DNA, 15 bp, Homo sapiens
agtttgtttaaagat

SEQ ID NO: 1385663 - DNA, 15 bp, Homo sapiens
cagtttgtttaaaga

SEQ ID NO: 1385664 - DNA, 15 bp, Homo sapiens
ccagtttgtttaaag

SEQ ID NO: 1385665 - DNA, 15 bp, Homo sapiens
tccagtttgtttaaa

SEQ ID NO: 1385666 - DNA, 15 bp, Homo sapiens
atccagtttgtttaa

SEQ ID NO: 1385667 - DNA, 15 bp, Homo sapiens
tatccagtttgttta

SEQ ID NO: 1385668 - DNA, 15 bp, Homo sapiens
ctatccagtttgttt

SEQ ID NO: 1385669 - DNA, 15 bp, Homo sapiens
actatccagtttgtt

SEQ ID NO: 1385670 - DNA, 15 bp, Homo sapiens
gactatccagtttgt

SEQ ID NO: 1385671 - DNA, 15 bp, Homo sapiens
tgactatccagtttg

SEQ ID NO: 1385672 - DNA, 15 bp, Homo sapiens
gtgactatccagttt

SEQ ID NO: 1385673 - DNA, 15 bp, Homo sapiens
agtgactatccagtt

SEQ ID NO: 1385674 - DNA, 15 bp, Homo sapiens
aagtgactatccagt

SEQ ID NO: 1385675 - DNA, 15 bp, Homo sapiens
caagtgactatccag

SEQ ID NO: 1385676 - DNA, 15 bp, Homo sapiens
ccaagtgactatcca

SEQ ID NO: 1385677 - DNA, 15 bp, Homo sapiens
gccaagtgactatcc

SEQ ID NO: 1385678 - DNA, 15 bp, Homo sapiens
agccaagtgactatc

SEQ ID NO: 1385679 - DNA, 15 bp, Homo sapiens
aagccaagtgactat

SEQ ID NO: 1385680 - DNA, 15 bp, Homo sapiens
gaagccaagtgacta

SEQ ID NO: 1385681 - DNA, 15 bp, Homo sapiens
ggaagccaagtgact

SEQ ID NO: 1385682 - DNA, 15 bp, Homo sapiens
aggaagccaagtgac

SEQ ID NO: 1385683 - DNA, 15 bp, Homo sapiens
caggaagccaagtga

SEQ ID NO: 1385684 - DNA, 15 bp, Homo sapiens
acaggaagccaagtg

SEQ ID NO: 1385685 - DNA, 15 bp, Homo sapiens
gacaggaagccaagt

SEQ ID NO: 1385686 - DNA, 15 bp, Homo sapiens
tgacaggaagccaag

SEQ ID NO: 1385687 - DNA, 15 bp, Homo sapiens
gtgacaggaagccaa

SEQ ID NO: 1385688 - DNA, 15 bp, Homo sapiens
cgtgacaggaagcca

SEQ ID NO: 1385689 - DNA, 15 bp, Homo sapiens
tcgtgacaggaagcc

SEQ ID NO: 1385690 - DNA, 15 bp, Homo sapiens
ttcgtgacaggaagc

SEQ ID NO: 1385691 - DNA, 15 bp, Homo sapiens
attcgtgacaggaag

SEQ ID NO: 1385692 - DNA, 15 bp, Homo sapiens
gattcgtgacaggaa

SEQ ID NO: 1385693 - DNA, 15 bp, Homo sapiens
tgattcgtgacagga

SEQ ID NO: 1385694 - DNA, 15 bp, Homo sapiens
atgattcgtgacagg

SEQ ID NO: 1385695 - DNA, 15 bp, Homo sapiens
gatgattcgtgacag

SEQ ID NO: 1385696 - DNA, 15 bp, Homo sapiens
agatgattcgtgaca

SEQ ID NO: 1385697 - DNA, 15 bp, Homo sapiens
gagatgattcgtgac

SEQ ID NO: 1385698 - DNA, 15 bp, Homo sapiens
ggagatgattcgtga

SEQ ID NO: 1385699 - DNA, 15 bp, Homo sapiens
aggagatgattcgtg

SEQ ID NO: 1385700 - DNA, 15 bp, Homo sapiens
aaggagatgattcgt

SEQ ID NO: 1385701 - DNA, 15 bp, Homo sapiens
aaaggagatgattcg

SEQ ID NO: 1385702 - DNA, 15 bp, Homo sapiens
aaaaggagatgattc

SEQ ID NO: 1385703 - DNA, 15 bp, Homo sapiens
taaaaggagatgatt

SEQ ID NO: 1385704 - DNA, 15 bp, Homo sapiens
ttaaaaggagatgat

SEQ ID NO: 1385705 - DNA, 15 bp, Homo sapiens
attaaaaggagatga

SEQ ID NO: 1385706 - DNA, 15 bp, Homo sapiens
gattaaaaggagatg

SEQ ID NO: 1385707 - DNA, 15 bp, Homo sapiens
agattaaaaggagat

SEQ ID NO: 1385708 - DNA, 15 bp, Homo sapiens
aagattaaaaggaga

SEQ ID NO: 1385709 - DNA, 15 bp, Homo sapiens
gaagattaaaaggag

SEQ ID NO: 1385710 - DNA, 15 bp, Homo sapiens
tgaagattaaaagga

SEQ ID NO: 1385711 - DNA, 15 bp, Homo sapiens
atgaagattaaaagg

SEQ ID NO: 1385712 - DNA, 15 bp, Homo sapiens
tatgaagattaaaag

SEQ ID NO: 1385713 - DNA, 15 bp, Homo sapiens
ttatgaagattaaaa

SEQ ID NO: 1385714 - DNA, 15 bp, Homo sapiens
cttatgaagattaaa

SEQ ID NO: 1385715 - DNA, 15 bp, Homo sapiens
acttatgaagattaa

SEQ ID NO: 1385716 - DNA, 15 bp, Homo sapiens
tacttatgaagatta

SEQ ID NO: 1385717 - DNA, 15 bp, Homo sapiens
atacttatgaagatt

SEQ ID NO: 1385718 - DNA, 15 bp, Homo sapiens
tatacttatgaagat

SEQ ID NO: 1385719 - DNA, 15 bp, Homo sapiens
atatacttatgaaga

SEQ ID NO: 1385720 - DNA, 15 bp, Homo sapiens
tatatacttatgaag

SEQ ID NO: 1385721 - DNA, 15 bp, Homo sapiens
atatatacttatgaa

SEQ ID NO: 1385722 - DNA, 15 bp, Homo sapiens
catatatacttatga

SEQ ID NO: 1385723 - DNA, 15 bp, Homo sapiens
acatatatacttatg

SEQ ID NO: 1385724 - DNA, 15 bp, Homo sapiens
tacatatatacttat

SEQ ID NO: 1385725 - DNA, 15 bp, Homo sapiens
atacatatatactta

SEQ ID NO: 1385726 - DNA, 15 bp, Homo sapiens
tatacatatatactt

SEQ ID NO: 1385727 - DNA, 15 bp, Homo sapiens
atatacatatatact

SEQ ID NO: 1385728 - DNA, 15 bp, Homo sapiens
aatatacatatatac

SEQ ID NO: 1385729 - DNA, 15 bp, Homo sapiens
gaatatacatatata

SEQ ID NO: 1385730 - DNA, 15 bp, Homo sapiens
ggaatatacatatat

SEQ ID NO: 1385731 - DNA, 15 bp, Homo sapiens
tggaatatacatata

SEQ ID NO: 1385732 - DNA, 15 bp, Homo sapiens
ttggaatatacatat

SEQ ID NO: 1385733 - DNA, 15 bp, Homo sapiens
tttggaatatacata

SEQ ID NO: 1385734 - DNA, 15 bp, Homo sapiens
cacatctgtctgacc

SEQ ID NO: 1385735 - DNA, 15 bp, Homo sapiens
ccacatctgtctgac

SEQ ID NO: 1385736 - DNA, 15 bp, Homo sapiens
accacatctgtctga

SEQ ID NO: 1385737 - DNA, 15 bp, Homo sapiens
gaccacatctgtctg

SEQ ID NO: 1385738 - DNA, 15 bp, Homo sapiens
ggaccacatctgtct

SEQ ID NO: 1385739 - DNA, 15 bp, Homo sapiens
aggaccacatctgtc

SEQ ID NO: 1385740 - DNA, 15 bp, Homo sapiens
taggaccacatctgt

SEQ ID NO: 1385741 - DNA, 15 bp, Homo sapiens
ttaggaccacatctg

SEQ ID NO: 1385742 - DNA, 15 bp, Homo sapiens
attaggaccacatct

SEQ ID NO: 1385743 - DNA, 15 bp, Homo sapiens
gattaggaccacatc

SEQ ID NO: 1385744 - DNA, 15 bp, Homo sapiens
agattaggaccacat

SEQ ID NO: 1385745 - DNA, 15 bp, Homo sapiens
aagattaggaccaca

SEQ ID NO: 1385746 - DNA, 15 bp, Homo sapiens
gaagattaggaccac

SEQ ID NO: 1385747 - DNA, 15 bp, Homo sapiens
agaagattaggacca

SEQ ID NO: 1385748 - DNA, 15 bp, Homo sapiens
cagaagattaggacc

SEQ ID NO: 1385749 - DNA, 15 bp, Homo sapiens
acagaagattaggac

SEQ ID NO: 1385750 - DNA, 15 bp, Homo sapiens
cacagaagattagga

SEQ ID NO: 1385751 - DNA, 15 bp, Homo sapiens
acacagaagattagg

SEQ ID NO: 1385752 - DNA, 15 bp, Homo sapiens
cacacagaagattag

SEQ ID NO: 1385753 - DNA, 15 bp, Homo sapiens
acacacagaagatta

SEQ ID NO: 1385754 - DNA, 15 bp, Homo sapiens
cacacacagaagatt

SEQ ID NO: 1385755 - DNA, 15 bp, Homo sapiens
tcacacacagaagat

SEQ ID NO: 1385756 - DNA, 15 bp, Homo sapiens
gtcacacacagaaga

SEQ ID NO: 1385757 - DNA, 15 bp, Homo sapiens
ggtcacacacagaag

SEQ ID NO: 1385758 - DNA, 15 bp, Homo sapiens
aggtcacacacagaa

SEQ ID NO: 1385759 - DNA, 15 bp, Homo sapiens
aaggtcacacacaga

SEQ ID NO: 1385760 - DNA, 15 bp, Homo sapiens
caaggtcacacacag

SEQ ID NO: 1385761 - DNA, 15 bp, Homo sapiens
ccaaggtcacacaca

SEQ ID NO: 1385762 - DNA, 15 bp, Homo sapiens
cccaaggtcacacac

SEQ ID NO: 1385763 - DNA, 15 bp, Homo sapiens
gcccaaggtcacaca

SEQ ID NO: 1385764 - DNA, 15 bp, Homo sapiens
tgcccaaggtcacac

SEQ ID NO: 1385765 - DNA, 15 bp, Homo sapiens
ttgcccaaggtcaca

SEQ ID NO: 1385766 - DNA, 15 bp, Homo sapiens
cttgcccaaggtcac

SEQ ID NO: 1385767 - DNA, 15 bp, Homo sapiens
caacttgcccaaggt

SEQ ID NO: 1385768 - DNA, 15 bp, Homo sapiens
acaacttgcccaagg

SEQ ID NO: 1385769 - DNA, 15 bp, Homo sapiens
aacaacttgcccaag

SEQ ID NO: 1385770 - DNA, 15 bp, Homo sapiens
aaacaacttgcccaa

SEQ ID NO: 1385771 - DNA, 15 bp, Homo sapiens
taaacaacttgccca

SEQ ID NO: 1385772 - DNA, 15 bp, Homo sapiens
ttaaacaacttgccc

SEQ ID NO: 1385773 - DNA, 15 bp, Homo sapiens
gttaaacaacttgcc

SEQ ID NO: 1385774 - DNA, 15 bp, Homo sapiens
agttaaacaacttgc

SEQ ID NO: 1385775 - DNA, 15 bp, Homo sapiens
aagttaaacaacttg

SEQ ID NO: 1385776 - DNA, 15 bp, Homo sapiens
aaagttaaacaactt

SEQ ID NO: 1385777 - DNA, 15 bp, Homo sapiens
caaagttaaacaact

SEQ ID NO: 1385778 - DNA, 15 bp, Homo sapiens
gcaaagttaaacaac

SEQ ID NO: 1385779 - DNA, 15 bp, Homo sapiens
agcaaagttaaacaa

SEQ ID NO: 1385780 - DNA, 15 bp, Homo sapiens
tagcaaagttaaaca

SEQ ID NO: 1385781 - DNA, 15 bp, Homo sapiens
atagcaaagttaaac

SEQ ID NO: 1385782 - DNA, 15 bp, Homo sapiens
catagcaaagttaaa

SEQ ID NO: 1385783 - DNA, 15 bp, Homo sapiens
acatagcaaagttaa

SEQ ID NO: 1385784 - DNA, 15 bp, Homo sapiens
gacatagcaaagtta

SEQ ID NO: 1385785 - DNA, 15 bp, Homo sapiens
agacatagcaaagtt

SEQ ID NO: 1385786 - DNA, 15 bp, Homo sapiens
aagacatagcaaagt

SEQ ID NO: 1385787 - DNA, 15 bp, Homo sapiens
taagacatagcaaag

SEQ ID NO: 1385788 - DNA, 15 bp, Homo sapiens
ctaagacatagcaaa

SEQ ID NO: 1385789 - DNA, 15 bp, Homo sapiens
actaagacatagcaa

SEQ ID NO: 1385790 - DNA, 15 bp, Homo sapiens
tactaagacatagca

SEQ ID NO: 1385791 - DNA, 15 bp, Homo sapiens
atactaagacatagc

SEQ ID NO: 1385792 - DNA, 15 bp, Homo sapiens
gatactaagacatag

SEQ ID NO: 1385793 - DNA, 15 bp, Homo sapiens
agatactaagacata

SEQ ID NO: 1385794 - DNA, 15 bp, Homo sapiens
aagatactaagacat

SEQ ID NO: 1385795 - DNA, 15 bp, Homo sapiens
taagatactaagaca

SEQ ID NO: 1385796 - DNA, 15 bp, Homo sapiens
ttaagatactaagac

SEQ ID NO: 1385797 - DNA, 15 bp, Homo sapiens
attaagatactaaga

SEQ ID NO: 1385798 - DNA, 15 bp, Homo sapiens
gattaagatactaag

SEQ ID NO: 1385799 - DNA, 15 bp, Homo sapiens
agattaagatactaa

SEQ ID NO: 1385800 - DNA, 15 bp, Homo sapiens
cagattaagatacta

SEQ ID NO: 1385801 - DNA, 15 bp, Homo sapiens
gcagattaagatact

SEQ ID NO: 1385802 - DNA, 15 bp, Homo sapiens
tgcagattaagatac

SEQ ID NO: 1385803 - DNA, 15 bp, Homo sapiens
ttgcagattaagata

SEQ ID NO: 1385804 - DNA, 15 bp, Homo sapiens
tttgcagattaagat

SEQ ID NO: 1385805 - DNA, 15 bp, Homo sapiens
gtttgcagattaaga

SEQ ID NO: 1385806 - DNA, 15 bp, Homo sapiens
tgtttgcagattaag

SEQ ID NO: 1385807 - DNA, 15 bp, Homo sapiens
atgtttgcagattaa

SEQ ID NO: 1385808 - DNA, 15 bp, Homo sapiens
catgtttgcagatta

SEQ ID NO: 1385809 - DNA, 15 bp, Homo sapiens
ccatgtttgcagatt

SEQ ID NO: 1385810 - DNA, 15 bp, Homo sapiens
cccatgtttgcagat

SEQ ID NO: 1385811 - DNA, 15 bp, Homo sapiens
tcccatgtttgcaga

SEQ ID NO: 1385812 - DNA, 15 bp, Homo sapiens
ttcccatgtttgcag

SEQ ID NO: 1385813 - DNA, 15 bp, Homo sapiens
attcccatgtttgca

SEQ ID NO: 1385814 - DNA, 15 bp, Homo sapiens
tattcccatgtttgc

SEQ ID NO: 1385815 - DNA, 15 bp, Homo sapiens
ctattcccatgtttg

SEQ ID NO: 1385816 - DNA, 15 bp, Homo sapiens
gctattcccatgttt

SEQ ID NO: 1385817 - DNA, 15 bp, Homo sapiens
tgctattcccatgtt

SEQ ID NO: 1385818 - DNA, 15 bp, Homo sapiens
ctgctattcccatgt

SEQ ID NO: 1385819 - DNA, 15 bp, Homo sapiens
actgctattcccatg

SEQ ID NO: 1385820 - DNA, 15 bp, Homo sapiens
tactgctattcccat

SEQ ID NO: 1385821 - DNA, 15 bp, Homo sapiens
ttactgctattccca

SEQ ID NO: 1385822 - DNA, 15 bp, Homo sapiens
attactgctattccc

SEQ ID NO: 1385823 - DNA, 15 bp, Homo sapiens
cattactgctattcc

SEQ ID NO: 1385824 - DNA, 15 bp, Homo sapiens
acattactgctattc

SEQ ID NO: 1385825 - DNA, 15 bp, Homo sapiens
gacattactgctatt

SEQ ID NO: 1385826 - DNA, 15 bp, Homo sapiens
agacattactgctat

SEQ ID NO: 1385827 - DNA, 15 bp, Homo sapiens
tagacattactgcta

SEQ ID NO: 1385828 - DNA, 15 bp, Homo sapiens
gtagacattactgct

SEQ ID NO: 1385829 - DNA, 15 bp, Homo sapiens
agtagacattactgc

SEQ ID NO: 1385830 - DNA, 15 bp, Homo sapiens
cagtagacattactg

SEQ ID NO: 1385831 - DNA, 15 bp, Homo sapiens
gcagtagacattact

SEQ ID NO: 1385832 - DNA, 15 bp, Homo sapiens
tgcagtagacattac

SEQ ID NO: 1385833 - DNA, 15 bp, Homo sapiens
atgcagtagacatta

SEQ ID NO: 1385834 - DNA, 15 bp, Homo sapiens
tatgcagtagacatt

SEQ ID NO: 1385835 - DNA, 15 bp, Homo sapiens
ttatgcagtagacat

SEQ ID NO: 1385836 - DNA, 15 bp, Homo sapiens
tttatgcagtagaca

SEQ ID NO: 1385837 - DNA, 15 bp, Homo sapiens
ctttatgcagtagac

SEQ ID NO: 1385838 - DNA, 15 bp, Homo sapiens
actttatgcagtaga

SEQ ID NO: 1385839 - DNA, 15 bp, Homo sapiens
gactttatgcagtag

SEQ ID NO: 1385840 - DNA, 15 bp, Homo sapiens
tgactttatgcagta

SEQ ID NO: 1385841 - DNA, 15 bp, Homo sapiens
atgactttatgcagt

SEQ ID NO: 1385842 - DNA, 15 bp, Homo sapiens
aatgactttatgcag

SEQ ID NO: 1385843 - DNA, 15 bp, Homo sapiens
aaatgactttatgca

SEQ ID NO: 1385844 - DNA, 15 bp, Homo sapiens
gaaatgactttatgc

SEQ ID NO: 1385845 - DNA, 15 bp, Homo sapiens
tgaaatgactttatg

SEQ ID NO: 1385846 - DNA, 15 bp, Homo sapiens
ctgaaatgactttat

SEQ ID NO: 1385847 - DNA, 15 bp, Homo sapiens
gctgaaatgacttta

SEQ ID NO: 1385848 - DNA, 15 bp, Homo sapiens
tgctgaaatgacttt

SEQ ID NO: 1385849 - DNA, 15 bp, Homo sapiens
atgctgaaatgactt

SEQ ID NO: 1385850 - DNA, 15 bp, Homo sapiens
aatgctgaaatgact

SEQ ID NO: 1385851 - DNA, 15 bp, Homo sapiens
taatgctgaaatgac

SEQ ID NO: 1385852 - DNA, 15 bp, Homo sapiens
tttaatgctgaaatg

SEQ ID NO: 1385853 - DNA, 15 bp, Homo sapiens
atttaatgctgaaat

SEQ ID NO: 1385854 - DNA, 15 bp, Homo sapiens
catttaatgctgaaa

SEQ ID NO: 1385855 - DNA, 15 bp, Homo sapiens
tcatttaatgctgaa

SEQ ID NO: 1385856 - DNA, 15 bp, Homo sapiens
ctcatttaatgctga

SEQ ID NO: 1385857 - DNA, 15 bp, Homo sapiens
cctcatttaatgctg

SEQ ID NO: 1385858 - DNA, 15 bp, Homo sapiens
acctcatttaatgct

SEQ ID NO: 1385859 - DNA, 15 bp, Homo sapiens
gacctcatttaatgc

SEQ ID NO: 1385860 - DNA, 15 bp, Homo sapiens
tgacctcatttaatg

SEQ ID NO: 1385861 - DNA, 15 bp, Homo sapiens
atgacctcatttaat

SEQ ID NO: 1385862 - DNA, 15 bp, Homo sapiens
catgacctcatttaa

SEQ ID NO: 1385863 - DNA, 15 bp, Homo sapiens
acatgacctcattta

SEQ ID NO: 1385864 - DNA, 15 bp, Homo sapiens
cacatgacctcattt

SEQ ID NO: 1385865 - DNA, 15 bp, Homo sapiens
ccacatgacctcatt

SEQ ID NO: 1385866 - DNA, 15 bp, Homo sapiens
tccacatgacctcat

SEQ ID NO: 1385867 - DNA, 15 bp, Homo sapiens
ttccacatgacctca

SEQ ID NO: 1385868 - DNA, 15 bp, Homo sapiens
tttccacatgacctc

SEQ ID NO: 1385869 - DNA, 15 bp, Homo sapiens
atttccacatgacct

SEQ ID NO: 1385870 - DNA, 15 bp, Homo sapiens
catttccacatgacc

SEQ ID NO: 1385871 - DNA, 15 bp, Homo sapiens
acatttccacatgac

SEQ ID NO: 1385872 - DNA, 15 bp, Homo sapiens
gacatttccacatga

SEQ ID NO: 1385873 - DNA, 15 bp, Homo sapiens
tgacatttccacatg

SEQ ID NO: 1385874 - DNA, 15 bp, Homo sapiens
ctgacatttccacat

SEQ ID NO: 1385875 - DNA, 15 bp, Homo sapiens
cctgacatttccaca

SEQ ID NO: 1385876 - DNA, 15 bp, Homo sapiens
acctgacatttccac

SEQ ID NO: 1385877 - DNA, 15 bp, Homo sapiens
gacctgacatttcca

SEQ ID NO: 1385878 - DNA, 15 bp, Homo sapiens
tgacctgacatttcc

SEQ ID NO: 1385879 - DNA, 15 bp, Homo sapiens
ctgacctgacatttc

SEQ ID NO: 1385880 - DNA, 15 bp, Homo sapiens
tctgacctgacattt

SEQ ID NO: 1385881 - DNA, 15 bp, Homo sapiens
ctctgacctgacatt

SEQ ID NO: 1385882 - DNA, 15 bp, Homo sapiens
cctctgacctgacat

SEQ ID NO: 1385883 - DNA, 15 bp, Homo sapiens
tcctctgacctgaca

SEQ ID NO: 1385884 - DNA, 15 bp, Homo sapiens
gtcctctgacctgac

SEQ ID NO: 1385885 - DNA, 15 bp, Homo sapiens
tgtcctctgacctga

SEQ ID NO: 1385886 - DNA, 15 bp, Homo sapiens
ctgtcctctgacctg

SEQ ID NO: 1385887 - DNA, 15 bp, Homo sapiens
gctgtcctctgacct

SEQ ID NO: 1385888 - DNA, 15 bp, Homo sapiens
ggctgtcctctgacc

SEQ ID NO: 1385889 - DNA, 15 bp, Homo sapiens
tggctgtcctctgac

SEQ ID NO: 1385890 - DNA, 15 bp, Homo sapiens
atggctgtcctctga

SEQ ID NO: 1385891 - DNA, 15 bp, Homo sapiens
aatggctgtcctctg

SEQ ID NO: 1385892 - DNA, 15 bp, Homo sapiens
aaatggctgtcctct

SEQ ID NO: 1385893 - DNA, 15 bp, Homo sapiens
caaatggctgtcctc

SEQ ID NO: 1385894 - DNA, 15 bp, Homo sapiens
ccaaatggctgtcct

SEQ ID NO: 1385895 - DNA, 15 bp, Homo sapiens
gccaaatggctgtcc

SEQ ID NO: 1385896 - DNA, 15 bp, Homo sapiens
tgccaaatggctgtc

SEQ ID NO: 1385897 - DNA, 15 bp, Homo sapiens
ctgccaaatggctgt

SEQ ID NO: 1385898 - DNA, 15 bp, Homo sapiens
actgccaaatggctg

SEQ ID NO: 1385899 - DNA, 15 bp, Homo sapiens
cactgccaaatggct

SEQ ID NO: 1385900 - DNA, 15 bp, Homo sapiens
acactgccaaatggc

SEQ ID NO: 1385901 - DNA, 15 bp, Homo sapiens
cacactgccaaatgg

SEQ ID NO: 1385902 - DNA, 15 bp, Homo sapiens
gcacactgccaaatg

SEQ ID NO: 1385903 - DNA, 15 bp, Homo sapiens
ggcacactgccaaat

SEQ ID NO: 1385904 - DNA, 15 bp, Homo sapiens
gggcacactgccaaa

SEQ ID NO: 1385905 - DNA, 15 bp, Homo sapiens
tgggcacactgccaa

SEQ ID NO: 1385906 - DNA, 15 bp, Homo sapiens
ctgggcacactgcca

SEQ ID NO: 1385907 - DNA, 15 bp, Homo sapiens
tctgggcacactgcc

SEQ ID NO: 1385908 - DNA, 15 bp, Homo sapiens
atctgggcacactgc

SEQ ID NO: 1385909 - DNA, 15 bp, Homo sapiens
catctgggcacactg

SEQ ID NO: 1385910 - DNA, 15 bp, Homo sapiens
tcatctgggcacact

SEQ ID NO: 1385911 - DNA, 15 bp, Homo sapiens
ctcatctgggcacac

SEQ ID NO: 1385912 - DNA, 15 bp, Homo sapiens
gctcatctgggcaca

SEQ ID NO: 1385913 - DNA, 15 bp, Homo sapiens
agctcatctgggcac

SEQ ID NO: 1385914 - DNA, 15 bp, Homo sapiens
cagctcatctgggca

SEQ ID NO: 1385915 - DNA, 15 bp, Homo sapiens
tcagctcatctgggc

SEQ ID NO: 1385916 - DNA, 15 bp, Homo sapiens
atcagctcatctggg

SEQ ID NO: 1385917 - DNA, 15 bp, Homo sapiens
aatcagctcatctgg

SEQ ID NO: 1385918 - DNA, 15 bp, Homo sapiens
aaatcagctcatctg

SEQ ID NO: 1385919 - DNA, 15 bp, Homo sapiens
gaaatcagctcatct

SEQ ID NO: 1385920 - DNA, 15 bp, Homo sapiens
agaaatcagctcatc

SEQ ID NO: 1385921 - DNA, 15 bp, Homo sapiens
gagaaatcagctcat

SEQ ID NO: 1385922 - DNA, 15 bp, Homo sapiens
agagaaatcagctca

SEQ ID NO: 1385923 - DNA, 15 bp, Homo sapiens
tagagaaatcagctc

SEQ ID NO: 1385924 - DNA, 15 bp, Homo sapiens
gtagagaaatcagct

SEQ ID NO: 1385925 - DNA, 15 bp, Homo sapiens
tgtagagaaatcagc

SEQ ID NO: 1385926 - DNA, 15 bp, Homo sapiens
ttgtagagaaatcag

SEQ ID NO: 1385927 - DNA, 15 bp, Homo sapiens
tttgtagagaaatca

SEQ ID NO: 1385928 - DNA, 15 bp, Homo sapiens
atttgtagagaaatc

SEQ ID NO: 1385929 - DNA, 15 bp, Homo sapiens
tatttgtagagaaat

SEQ ID NO: 1385930 - DNA, 15 bp, Homo sapiens
gtatttgtagagaaa

SEQ ID NO: 1385931 - DNA, 15 bp, Homo sapiens
cgtatttgtagagaa

SEQ ID NO: 1385932 - DNA, 15 bp, Homo sapiens
tcgtatttgtagaga

SEQ ID NO: 1385933 - DNA, 15 bp, Homo sapiens
gtcgtatttgtagag

SEQ ID NO: 1385934 - DNA, 15 bp, Homo sapiens
agtcgtatttgtaga

SEQ ID NO: 1385935 - DNA, 15 bp, Homo sapiens
cagtcgtatttgtag

SEQ ID NO: 1385936 - DNA, 15 bp, Homo sapiens
acagtcgtatttgta

SEQ ID NO: 1385937 - DNA, 15 bp, Homo sapiens
cacagtcgtatttgt

SEQ ID NO: 1385938 - DNA, 15 bp, Homo sapiens
ccacagtcgtatttg

SEQ ID NO: 1385939 - DNA, 15 bp, Homo sapiens
tccacagtcgtattt

SEQ ID NO: 1385940 - DNA, 15 bp, Homo sapiens
ctccacagtcgtatt

SEQ ID NO: 1385941 - DNA, 15 bp, Homo sapiens
tctccacagtcgtat

SEQ ID NO: 1385942 - DNA, 15 bp, Homo sapiens
ttctccacagtcgta

SEQ ID NO: 1385943 - DNA, 15 bp, Homo sapiens
attctccacagtcgt

SEQ ID NO: 1385944 - DNA, 15 bp, Homo sapiens
cattctccacagtcg

SEQ ID NO: 1385945 - DNA, 15 bp, Homo sapiens
ccattctccacagtc

SEQ ID NO: 1385946 - DNA, 15 bp, Homo sapiens
gccattctccacagt

SEQ ID NO: 1385947 - DNA, 15 bp, Homo sapiens
tgccattctccacag

SEQ ID NO: 1385948 - DNA, 15 bp, Homo sapiens
ctgccattctccaca

SEQ ID NO: 1385949 - DNA, 15 bp, Homo sapiens
actgccattctccac

SEQ ID NO: 1385950 - DNA, 15 bp, Homo sapiens
gactgccattctcca

SEQ ID NO: 1385951 - DNA, 15 bp, Homo sapiens
tgactgccattctcc

SEQ ID NO: 1385952 - DNA, 15 bp, Homo sapiens
gtgactgccattctc

SEQ ID NO: 1385953 - DNA, 15 bp, Homo sapiens
agtgactgccattct

SEQ ID NO: 1385954 - DNA, 15 bp, Homo sapiens
aagtgactgccattc

SEQ ID NO: 1385955 - DNA, 15 bp, Homo sapiens
caagtgactgccatt

SEQ ID NO: 1385956 - DNA, 15 bp, Homo sapiens
ccaagtgactgccat

SEQ ID NO: 1385957 - DNA, 15 bp, Homo sapiens
tccaagtgactgcca

SEQ ID NO: 1385958 - DNA, 15 bp, Homo sapiens
ctccaagtgactgcc

SEQ ID NO: 1385959 - DNA, 15 bp, Homo sapiens
cctccaagtgactgc

SEQ ID NO: 1385960 - DNA, 15 bp, Homo sapiens
acctccaagtgactg

SEQ ID NO: 1385961 - DNA, 15 bp, Homo sapiens
tacctccaagtgact

SEQ ID NO: 1385962 - DNA, 15 bp, Homo sapiens
atacctccaagtgac

SEQ ID NO: 1385963 - DNA, 15 bp, Homo sapiens
catacctccaagtga

SEQ ID NO: 1385964 - DNA, 15 bp, Homo sapiens
ccatacctccaagtg

SEQ ID NO: 1385965 - DNA, 15 bp, Homo sapiens
gccatacctccaagt

SEQ ID NO: 1385966 - DNA, 15 bp, Homo sapiens
agccatacctccaag

SEQ ID NO: 1385967 - DNA, 15 bp, Homo sapiens
aagccatacctccaa

SEQ ID NO: 1385968 - DNA, 15 bp, Homo sapiens
aaagccatacctcca

SEQ ID NO: 1385969 - DNA, 15 bp, Homo sapiens
caaagccatacctcc

SEQ ID NO: 1385970 - DNA, 15 bp, Homo sapiens
acaaagccatacctc

SEQ ID NO: 1385971 - DNA, 15 bp, Homo sapiens
cacaaagccatacct

SEQ ID NO: 1385972 - DNA, 15 bp, Homo sapiens
ccacaaagccatacc

SEQ ID NO: 1385973 - DNA, 15 bp, Homo sapiens
accacaaagccatac

SEQ ID NO: 1385974 - DNA, 15 bp, Homo sapiens
gaccacaaagccata

SEQ ID NO: 1385975 - DNA, 15 bp, Homo sapiens
tgaccacaaagccat

SEQ ID NO: 1385976 - DNA, 15 bp, Homo sapiens
ctgaccacaaagcca

SEQ ID NO: 1385977 - DNA, 15 bp, Homo sapiens
gctgaccacaaagcc

SEQ ID NO: 1385978 - DNA, 15 bp, Homo sapiens
ggctgaccacaaagc

SEQ ID NO: 1385979 - DNA, 15 bp, Homo sapiens
cggctgaccacaaag

SEQ ID NO: 1385980 - DNA, 15 bp, Homo sapiens
ccggctgaccacaaa

SEQ ID NO: 1385981 - DNA, 15 bp, Homo sapiens
cccggctgaccacaa

SEQ ID NO: 1385982 - DNA, 15 bp, Homo sapiens
gcccggctgaccaca

SEQ ID NO: 1385983 - DNA, 15 bp, Homo sapiens
agcccggctgaccac

SEQ ID NO: 1385984 - DNA, 15 bp, Homo sapiens
aagcccggctgacca

SEQ ID NO: 1385985 - DNA, 15 bp, Homo sapiens
taagcccggctgacc

SEQ ID NO: 1385986 - DNA, 15 bp, Homo sapiens
gtaagcccggctgac

SEQ ID NO: 1385987 - DNA, 15 bp, Homo sapiens
agtaagcccggctga

SEQ ID NO: 1385988 - DNA, 15 bp, Homo sapiens
gagtaagcccggctg

SEQ ID NO: 1385989 - DNA, 15 bp, Homo sapiens
tgagtaagcccggct

SEQ ID NO: 1385990 - DNA, 15 bp, Homo sapiens
gtgagtaagcccggc

SEQ ID NO: 1385991 - DNA, 15 bp, Homo sapiens
agtgagtaagcccgg

SEQ ID NO: 1385992 - DNA, 15 bp, Homo sapiens
tagtgagtaagcccg

SEQ ID NO: 1385993 - DNA, 15 bp, Homo sapiens
ctagtgagtaagccc

SEQ ID NO: 1385994 - DNA, 15 bp, Homo sapiens
gctagtgagtaagcc

SEQ ID NO: 1385995 - DNA, 15 bp, Homo sapiens
agctagtgagtaagc

SEQ ID NO: 1385996 - DNA, 15 bp, Homo sapiens
cagctagtgagtaag

SEQ ID NO: 1385997 - DNA, 15 bp, Homo sapiens
tcagctagtgagtaa

SEQ ID NO: 1385998 - DNA, 15 bp, Homo sapiens
ctcagctagtgagta

SEQ ID NO: 1385999 - DNA, 15 bp, Homo sapiens
actcagctagtgagt

SEQ ID NO: 1386000 - DNA, 15 bp, Homo sapiens
cactcagctagtgag

SEQ ID NO: 1386001 - DNA, 15 bp, Homo sapiens
tcactcagctagtga

SEQ ID NO: 1386002 - DNA, 15 bp, Homo sapiens
gtcactcagctagtg

SEQ ID NO: 1386003 - DNA, 15 bp, Homo sapiens
agtcactcagctagt

SEQ ID NO: 1386004 - DNA, 15 bp, Homo sapiens
gagtcactcagctag

SEQ ID NO: 1386005 - DNA, 15 bp, Homo sapiens
agagtcactcagcta

SEQ ID NO: 1386006 - DNA, 15 bp, Homo sapiens
aagagtcactcagct

SEQ ID NO: 1386007 - DNA, 15 bp, Homo sapiens
aaagagtcactcagc

SEQ ID NO: 1386008 - DNA, 15 bp, Homo sapiens
taaagagtcactcag

SEQ ID NO: 1386009 - DNA, 15 bp, Homo sapiens
ataaagagtcactca

SEQ ID NO: 1386010 - DNA, 15 bp, Homo sapiens
tataaagagtcactc

SEQ ID NO: 1386011 - DNA, 15 bp, Homo sapiens
atataaagagtcact

SEQ ID NO: 1386012 - DNA, 15 bp, Homo sapiens
gatataaagagtcac

SEQ ID NO: 1386013 - DNA, 15 bp, Homo sapiens
ggatataaagagtca

SEQ ID NO: 1386014 - DNA, 15 bp, Homo sapiens
tggatataaagagtc

SEQ ID NO: 1386015 - DNA, 15 bp, Homo sapiens
ctggatataaagagt

SEQ ID NO: 1386016 - DNA, 15 bp, Homo sapiens
cctggatataaagag

SEQ ID NO: 1386017 - DNA, 15 bp, Homo sapiens
gcctggatataaaga

SEQ ID NO: 1386018 - DNA, 15 bp, Homo sapiens
ggcctggatataaag

SEQ ID NO: 1386019 - DNA, 15 bp, Homo sapiens
tggcctggatataaa

SEQ ID NO: 1386020 - DNA, 15 bp, Homo sapiens
atggcctggatataa

SEQ ID NO: 1386021 - DNA, 15 bp, Homo sapiens
aatggcctggatata

SEQ ID NO: 1386022 - DNA, 15 bp, Homo sapiens
gaatggcctggatat

SEQ ID NO: 1386023 - DNA, 15 bp, Homo sapiens
tgaatggcctggata

SEQ ID NO: 1386024 - DNA, 15 bp, Homo sapiens
ctgaatggcctggat

SEQ ID NO: 1386025 - DNA, 15 bp, Homo sapiens
actgaatggcctgga

SEQ ID NO: 1386026 - DNA, 15 bp, Homo sapiens
cactgaatggcctgg

SEQ ID NO: 1386027 - DNA, 15 bp, Homo sapiens
gcactgaatggcctg

SEQ ID NO: 1386028 - DNA, 15 bp, Homo sapiens
agcactgaatggcct

SEQ ID NO: 1386029 - DNA, 15 bp, Homo sapiens
aagcactgaatggcc

SEQ ID NO: 1386030 - DNA, 15 bp, Homo sapiens
aaagcactgaatggc

SEQ ID NO: 1386031 - DNA, 15 bp, Homo sapiens
gaaagcactgaatgg

SEQ ID NO: 1386032 - DNA, 15 bp, Homo sapiens
tgaaagcactgaatg

SEQ ID NO: 1386033 - DNA, 15 bp, Homo sapiens
atgaaagcactgaat

SEQ ID NO: 1386034 - DNA, 15 bp, Homo sapiens
aatgaaagcactgaa

SEQ ID NO: 1386035 - DNA, 15 bp, Homo sapiens
aaatgaaagcactga

SEQ ID NO: 1386036 - DNA, 15 bp, Homo sapiens
gaaatgaaagcactg

SEQ ID NO: 1386037 - DNA, 15 bp, Homo sapiens
tgaaatgaaagcact

SEQ ID NO: 1386038 - DNA, 15 bp, Homo sapiens
ttgaaatgaaagcac

SEQ ID NO: 1386039 - DNA, 15 bp, Homo sapiens
tttgaaatgaaagca

SEQ ID NO: 1386040 - DNA, 15 bp, Homo sapiens
atttgaaatgaaagc

SEQ ID NO: 1386041 - DNA, 15 bp, Homo sapiens
tatttgaaatgaaag

SEQ ID NO: 1386042 - DNA, 15 bp, Homo sapiens
atatttgaaatgaaa

SEQ ID NO: 1386043 - DNA, 15 bp, Homo sapiens
tatatttgaaatgaa

SEQ ID NO: 1386044 - DNA, 15 bp, Homo sapiens
atatatttgaaatga

SEQ ID NO: 1386045 - DNA, 15 bp, Homo sapiens
gatatatttgaaatg

SEQ ID NO: 1386046 - DNA, 15 bp, Homo sapiens
ggatatatttgaaat

SEQ ID NO: 1386047 - DNA, 15 bp, Homo sapiens
gggatatatttgaaa

SEQ ID NO: 1386048 - DNA, 15 bp, Homo sapiens
agggatatatttgaa

SEQ ID NO: 1386049 - DNA, 15 bp, Homo sapiens
gagggatatatttga

SEQ ID NO: 1386050 - DNA, 15 bp, Homo sapiens
tgagggatatatttg

SEQ ID NO: 1386051 - DNA, 15 bp, Homo sapiens
ctgagggatatattt

SEQ ID NO: 1386052 - DNA, 15 bp, Homo sapiens
gctgagggatatatt

SEQ ID NO: 1386053 - DNA, 15 bp, Homo sapiens
tgctgagggatatat

SEQ ID NO: 1386054 - DNA, 15 bp, Homo sapiens
ttgctgagggatata

SEQ ID NO: 1386055 - DNA, 15 bp, Homo sapiens
tttgctgagggatat

SEQ ID NO: 1386056 - DNA, 15 bp, Homo sapiens
ttttgctgagggata

SEQ ID NO: 1386057 - DNA, 15 bp, Homo sapiens
gttttgctgagggat

SEQ ID NO: 1386058 - DNA, 15 bp, Homo sapiens
agttttgctgaggga

SEQ ID NO: 1386059 - DNA, 15 bp, Homo sapiens
cagttttgctgaggg

SEQ ID NO: 1386060 - DNA, 15 bp, Homo sapiens
gcagttttgctgagg

SEQ ID NO: 1386061 - DNA, 15 bp, Homo sapiens
tgcagttttgctgag

SEQ ID NO: 1386062 - DNA, 15 bp, Homo sapiens
ttgcagttttgctga

SEQ ID NO: 1386063 - DNA, 15 bp, Homo sapiens
tttgcagttttgctg

SEQ ID NO: 1386064 - DNA, 15 bp, Homo sapiens
ttttgcagttttgct

SEQ ID NO: 1386065 - DNA, 15 bp, Homo sapiens
attttgcagttttgc

SEQ ID NO: 1386066 - DNA, 15 bp, Homo sapiens
cattttgcagttttg

SEQ ID NO: 1386067 - DNA, 15 bp, Homo sapiens
gcattttgcagtttt

SEQ ID NO: 1386068 - DNA, 15 bp, Homo sapiens
agcattttgcagttt

SEQ ID NO: 1386069 - DNA, 15 bp, Homo sapiens
tagcattttgcagtt

SEQ ID NO: 1386070 - DNA, 15 bp, Homo sapiens
gtagcattttgcagt

SEQ ID NO: 1386071 - DNA, 15 bp, Homo sapiens
tgtagcattttgcag

SEQ ID NO: 1386072 - DNA, 15 bp, Homo sapiens
atgtagcattttgca

SEQ ID NO: 1386073 - DNA, 15 bp, Homo sapiens
catgtagcattttgc

SEQ ID NO: 1386074 - DNA, 15 bp, Homo sapiens
acatgtagcattttg

SEQ ID NO: 1386075 - DNA, 15 bp, Homo sapiens
gacatgtagcatttt

SEQ ID NO: 1386076 - DNA, 15 bp, Homo sapiens
tgacatgtagcattt

SEQ ID NO: 1386077 - DNA, 15 bp, Homo sapiens
ttgacatgtagcatt

SEQ ID NO: 1386078 - DNA, 15 bp, Homo sapiens
cttgacatgtagcat

SEQ ID NO: 1386079 - DNA, 15 bp, Homo sapiens
ccttgacatgtagca

SEQ ID NO: 1386080 - DNA, 15 bp, Homo sapiens
tccttgacatgtagc

SEQ ID NO: 1386081 - DNA, 15 bp, Homo sapiens
gtccttgacatgtag

SEQ ID NO: 1386082 - DNA, 15 bp, Homo sapiens
ggtccttgacatgta

SEQ ID NO: 1386083 - DNA, 15 bp, Homo sapiens
aggtccttgacatgt

SEQ ID NO: 1386084 - DNA, 15 bp, Homo sapiens
aaggtccttgacatg

SEQ ID NO: 1386085 - DNA, 15 bp, Homo sapiens
aaaggtccttgacat

SEQ ID NO: 1386086 - DNA, 15 bp, Homo sapiens
gaaaggtccttgaca

SEQ ID NO: 1386087 - DNA, 15 bp, Homo sapiens
cgaaaggtccttgac

SEQ ID NO: 1386088 - DNA, 15 bp, Homo sapiens
ccgaaaggtccttga

SEQ ID NO: 1386089 - DNA, 15 bp, Homo sapiens
cccgaaaggtccttg

SEQ ID NO: 1386090 - DNA, 15 bp, Homo sapiens
gcccgaaaggtcctt

SEQ ID NO: 1386091 - DNA, 15 bp, Homo sapiens
agcccgaaaggtcct

SEQ ID NO: 1386092 - DNA, 15 bp, Homo sapiens
cagcccgaaaggtcc

SEQ ID NO: 1386093 - DNA, 15 bp, Homo sapiens
gcagcccgaaaggtc

SEQ ID NO: 1386094 - DNA, 15 bp, Homo sapiens
agcagcccgaaaggt

SEQ ID NO: 1386095 - DNA, 15 bp, Homo sapiens
gagcagcccgaaagg

SEQ ID NO: 1386096 - DNA, 15 bp, Homo sapiens
agagcagcccgaaag

SEQ ID NO: 1386097 - DNA, 15 bp, Homo sapiens
gagagcagcccgaaa

SEQ ID NO: 1386098 - DNA, 15 bp, Homo sapiens
agagagcagcccgaa

SEQ ID NO: 1386099 - DNA, 15 bp, Homo sapiens
tagagagcagcccga

SEQ ID NO: 1386100 - DNA, 15 bp, Homo sapiens
ttagagagcagcccg

SEQ ID NO: 1386101 - DNA, 15 bp, Homo sapiens
attagagagcagccc

SEQ ID NO: 1386102 - DNA, 15 bp, Homo sapiens
tattagagagcagcc

SEQ ID NO: 1386103 - DNA, 15 bp, Homo sapiens
ctattagagagcagc

SEQ ID NO: 1386104 - DNA, 15 bp, Homo sapiens
actattagagagcag

SEQ ID NO: 1386105 - DNA, 15 bp, Homo sapiens
gactattagagagca

SEQ ID NO: 1386106 - DNA, 15 bp, Homo sapiens
agactattagagagc

SEQ ID NO: 1386107 - DNA, 15 bp, Homo sapiens
aagactattagagag

SEQ ID NO: 1386108 - DNA, 15 bp, Homo sapiens
taagactattagaga

SEQ ID NO: 1386109 - DNA, 15 bp, Homo sapiens
ttaagactattagag

SEQ ID NO: 1386110 - DNA, 15 bp, Homo sapiens
attaagactattaga

SEQ ID NO: 1386111 - DNA, 15 bp, Homo sapiens
cattaagactattag

SEQ ID NO: 1386112 - DNA, 15 bp, Homo sapiens
tcattaagactatta

SEQ ID NO: 1386113 - DNA, 15 bp, Homo sapiens
ctcattaagactatt

SEQ ID NO: 1386114 - DNA, 15 bp, Homo sapiens
cctcattaagactat

SEQ ID NO: 1386115 - DNA, 15 bp, Homo sapiens
ccctcattaagacta

SEQ ID NO: 1386116 - DNA, 15 bp, Homo sapiens
accctcattaagact

SEQ ID NO: 1386117 - DNA, 15 bp, Homo sapiens
taccctcattaagac

SEQ ID NO: 1386118 - DNA, 15 bp, Homo sapiens
ttaccctcattaaga

SEQ ID NO: 1386119 - DNA, 15 bp, Homo sapiens
tttaccctcattaag

SEQ ID NO: 1386120 - DNA, 15 bp, Homo sapiens
gtttaccctcattaa

SEQ ID NO: 1386121 - DNA, 15 bp, Homo sapiens
agtttaccctcatta

SEQ ID NO: 1386122 - DNA, 15 bp, Homo sapiens
gagtttaccctcatt

SEQ ID NO: 1386123 - DNA, 15 bp, Homo sapiens
tgagtttaccctcat

SEQ ID NO: 1386124 - DNA, 15 bp, Homo sapiens
gtgagtttaccctca

SEQ ID NO: 1386125 - DNA, 15 bp, Homo sapiens
ggtgagtttaccctc

SEQ ID NO: 1386126 - DNA, 15 bp, Homo sapiens
tggtgagtttaccct

SEQ ID NO: 1386127 - DNA, 15 bp, Homo sapiens
ttggtgagtttaccc

SEQ ID NO: 1386128 - DNA, 15 bp, Homo sapiens
tttggtgagtttacc

SEQ ID NO: 1386129 - DNA, 15 bp, Homo sapiens
ttttggtgagtttac

SEQ ID NO: 1386130 - DNA, 15 bp, Homo sapiens
attttggtgagttta

SEQ ID NO: 1386131 - DNA, 15 bp, Homo sapiens
gattttggtgagttt

SEQ ID NO: 1386132 - DNA, 15 bp, Homo sapiens
agattttggtgagtt

SEQ ID NO: 1386133 - DNA, 15 bp, Homo sapiens
tagattttggtgagt

SEQ ID NO: 1386134 - DNA, 15 bp, Homo sapiens
ttagattttggtgag

SEQ ID NO: 1386135 - DNA, 15 bp, Homo sapiens
attagattttggtga

SEQ ID NO: 1386136 - DNA, 15 bp, Homo sapiens
cattagattttggtg

SEQ ID NO: 1386137 - DNA, 15 bp, Homo sapiens
ccattagattttggt

SEQ ID NO: 1386138 - DNA, 15 bp, Homo sapiens
tccattagattttgg

SEQ ID NO: 1386139 - DNA, 15 bp, Homo sapiens
atccattagattttg

SEQ ID NO: 1386140 - DNA, 15 bp, Homo sapiens
catccattagatttt

SEQ ID NO: 1386141 - DNA, 15 bp, Homo sapiens
acatccattagattt

SEQ ID NO: 1386142 - DNA, 15 bp, Homo sapiens
cacatccattagatt

SEQ ID NO: 1386143 - DNA, 15 bp, Homo sapiens
acacatccattagat

SEQ ID NO: 1386144 - DNA, 15 bp, Homo sapiens
aacacatccattaga

SEQ ID NO: 1386145 - DNA, 15 bp, Homo sapiens
caacacatccattag

SEQ ID NO: 1386146 - DNA, 15 bp, Homo sapiens
tcaacacatccatta

SEQ ID NO: 1386147 - DNA, 15 bp, Homo sapiens
ttcaacacatccatt

SEQ ID NO: 1386148 - DNA, 15 bp, Homo sapiens
tttcaacacatccat

SEQ ID NO: 1386149 - DNA, 15 bp, Homo sapiens
ctttcaacacatcca

SEQ ID NO: 1386150 - DNA, 15 bp, Homo sapiens
actttcaacacatcc

SEQ ID NO: 1386151 - DNA, 15 bp, Homo sapiens
cactttcaacacatc

SEQ ID NO: 1386152 - DNA, 15 bp, Homo sapiens
tcactttcaacacat

SEQ ID NO: 1386153 - DNA, 15 bp, Homo sapiens
atcactttcaacaca

SEQ ID NO: 1386154 - DNA, 15 bp, Homo sapiens
aatcactttcaacac

SEQ ID NO: 1386155 - DNA, 15 bp, Homo sapiens
taatcactttcaaca

SEQ ID NO: 1386156 - DNA, 15 bp, Homo sapiens
ataatcactttcaac

SEQ ID NO: 1386157 - DNA, 15 bp, Homo sapiens
gataatcactttcaa

SEQ ID NO: 1386158 - DNA, 15 bp, Homo sapiens
agataatcactttca

SEQ ID NO: 1386159 - DNA, 15 bp, Homo sapiens
aagataatcactttc

SEQ ID NO: 1386160 - DNA, 15 bp, Homo sapiens
taagataatcacttt

SEQ ID NO: 1386161 - DNA, 15 bp, Homo sapiens
ctaagataatcactt

SEQ ID NO: 1386162 - DNA, 15 bp, Homo sapiens
gctaagataatcact

SEQ ID NO: 1386163 - DNA, 15 bp, Homo sapiens
ggctaagataatcac

SEQ ID NO: 1386164 - DNA, 15 bp, Homo sapiens
tggctaagataatca

SEQ ID NO: 1386165 - DNA, 15 bp, Homo sapiens
ctggctaagataatc

SEQ ID NO: 1386166 - DNA, 15 bp, Homo sapiens
actggctaagataat

SEQ ID NO: 1386167 - DNA, 15 bp, Homo sapiens
cactggctaagataa

SEQ ID NO: 1386168 - DNA, 15 bp, Homo sapiens
acactggctaagata

SEQ ID NO: 1386169 - DNA, 15 bp, Homo sapiens
aacactggctaagat

SEQ ID NO: 1386170 - DNA, 15 bp, Homo sapiens
aaacactggctaaga

SEQ ID NO: 1386171 - DNA, 15 bp, Homo sapiens
aaaacactggctaag

SEQ ID NO: 1386172 - DNA, 15 bp, Homo sapiens
aaaaacactggctaa

SEQ ID NO: 1386173 - DNA, 15 bp, Homo sapiens
gaaaaacactggcta

SEQ ID NO: 1386174 - DNA, 15 bp, Homo sapiens
tgaaaaacactggct

SEQ ID NO: 1386175 - DNA, 15 bp, Homo sapiens
gtgaaaaacactggc

SEQ ID NO: 1386176 - DNA, 15 bp, Homo sapiens
tgtgaaaaacactgg

SEQ ID NO: 1386177 - DNA, 15 bp, Homo sapiens
atgtgaaaaacactg

SEQ ID NO: 1386178 - DNA, 15 bp, Homo sapiens
gatgtgaaaaacact

SEQ ID NO: 1386179 - DNA, 15 bp, Homo sapiens
agatgtgaaaaacac

SEQ ID NO: 1386180 - DNA, 15 bp, Homo sapiens
aagatgtgaaaaaca

SEQ ID NO: 1386181 - DNA, 15 bp, Homo sapiens
aaagatgtgaaaaac

SEQ ID NO: 1386182 - DNA, 15 bp, Homo sapiens
aaaagatgtgaaaaa

SEQ ID NO: 1386183 - DNA, 15 bp, Homo sapiens
aaaaagatgtgaaaa

SEQ ID NO: 1386184 - DNA, 15 bp, Homo sapiens
taaaaagatgtgaaa

SEQ ID NO: 1386185 - DNA, 15 bp, Homo sapiens
ttaaaaagatgtgaa

SEQ ID NO: 1386186 - DNA, 15 bp, Homo sapiens
tttaaaaagatgtga

SEQ ID NO: 1386187 - DNA, 15 bp, Homo sapiens
ttttaaaaagatgtg

SEQ ID NO: 1386188 - DNA, 15 bp, Homo sapiens
attttaaaaagatgt

SEQ ID NO: 1386189 - DNA, 15 bp, Homo sapiens
gattttaaaaagatg

SEQ ID NO: 1386190 - DNA, 15 bp, Homo sapiens
ggattttaaaaagat

SEQ ID NO: 1386191 - DNA, 15 bp, Homo sapiens
aggattttaaaaaga

SEQ ID NO: 1386192 - DNA, 15 bp, Homo sapiens
aaggattttaaaaag

SEQ ID NO: 1386193 - DNA, 15 bp, Homo sapiens
aaaggattttaaaaa

SEQ ID NO: 1386194 - DNA, 15 bp, Homo sapiens
caaaggattttaaaa

SEQ ID NO: 1386195 - DNA, 15 bp, Homo sapiens
tcaaaggattttaaa

SEQ ID NO: 1386196 - DNA, 15 bp, Homo sapiens
gtcaaaggattttaa

SEQ ID NO: 1386197 - DNA, 15 bp, Homo sapiens
tgtcaaaggatttta

SEQ ID NO: 1386198 - DNA, 15 bp, Homo sapiens
gtgtcaaaggatttt

SEQ ID NO: 1386199 - DNA, 15 bp, Homo sapiens
agtgtcaaaggattt

SEQ ID NO: 1386200 - DNA, 15 bp, Homo sapiens
tagtgtcaaaggatt

SEQ ID NO: 1386201 - DNA, 15 bp, Homo sapiens
ttagtgtcaaaggat

SEQ ID NO: 1386202 - DNA, 15 bp, Homo sapiens
tttagtgtcaaagga

SEQ ID NO: 1386203 - DNA, 15 bp, Homo sapiens
ttttagtgtcaaagg

SEQ ID NO: 1386204 - DNA, 15 bp, Homo sapiens
attttagtgtcaaag

SEQ ID NO: 1386205 - DNA, 15 bp, Homo sapiens
aattttagtgtcaaa

SEQ ID NO: 1386206 - DNA, 15 bp, Homo sapiens
aaattttagtgtcaa

SEQ ID NO: 1386207 - DNA, 15 bp, Homo sapiens
caaattttagtgtca

SEQ ID NO: 1386208 - DNA, 15 bp, Homo sapiens
acaaattttagtgtc

SEQ ID NO: 1386209 - DNA, 15 bp, Homo sapiens
cacaaattttagtgt

SEQ ID NO: 1386210 - DNA, 15 bp, Homo sapiens
gcacaaattttagtg

SEQ ID NO: 1386211 - DNA, 15 bp, Homo sapiens
agcacaaattttagt

SEQ ID NO: 1386212 - DNA, 15 bp, Homo sapiens
gagcacaaattttag

SEQ ID NO: 1386213 - DNA, 15 bp, Homo sapiens
agagcacaaatttta

SEQ ID NO: 1386214 - DNA, 15 bp, Homo sapiens
tagagcacaaatttt

SEQ ID NO: 1386215 - DNA, 15 bp, Homo sapiens
ctagagcacaaattt

SEQ ID NO: 1386216 - DNA, 15 bp, Homo sapiens
actagagcacaaatt

SEQ ID NO: 1386217 - DNA, 15 bp, Homo sapiens
tactagagcacaaat

SEQ ID NO: 1386218 - DNA, 15 bp, Homo sapiens
gtactagagcacaaa

SEQ ID NO: 1386219 - DNA, 15 bp, Homo sapiens
tgtactagagcacaa

SEQ ID NO: 1386220 - DNA, 15 bp, Homo sapiens
ttgtactagagcaca

SEQ ID NO: 1386221 - DNA, 15 bp, Homo sapiens
tttgtactagagcac

SEQ ID NO: 1386222 - DNA, 15 bp, Homo sapiens
atttgtactagagca

SEQ ID NO: 1386223 - DNA, 15 bp, Homo sapiens
aatttgtactagagc

SEQ ID NO: 1386224 - DNA, 15 bp, Homo sapiens
taatttgtactagag

SEQ ID NO: 1386225 - DNA, 15 bp, Homo sapiens
ctaatttgtactaga

SEQ ID NO: 1386226 - DNA, 15 bp, Homo sapiens
cctaatttgtactag

SEQ ID NO: 1386227 - DNA, 15 bp, Homo sapiens
acctaatttgtacta

SEQ ID NO: 1386228 - DNA, 15 bp, Homo sapiens
gacctaatttgtact

SEQ ID NO: 1386229 - DNA, 15 bp, Homo sapiens
agacctaatttgtac

SEQ ID NO: 1386230 - DNA, 15 bp, Homo sapiens
gagacctaatttgta

SEQ ID NO: 1386231 - DNA, 15 bp, Homo sapiens
ggagacctaatttgt

SEQ ID NO: 1386232 - DNA, 15 bp, Homo sapiens
tggagacctaatttg

SEQ ID NO: 1386233 - DNA, 15 bp, Homo sapiens
ctggagacctaattt

SEQ ID NO: 1386234 - DNA, 15 bp, Homo sapiens
actggagacctaatt

SEQ ID NO: 1386235 - DNA, 15 bp, Homo sapiens
aactggagacctaat

SEQ ID NO: 1386236 - DNA, 15 bp, Homo sapiens
taactggagacctaa

SEQ ID NO: 1386237 - DNA, 15 bp, Homo sapiens
ttaactggagaccta

SEQ ID NO: 1386238 - DNA, 15 bp, Homo sapiens
tttaactggagacct

SEQ ID NO: 1386239 - DNA, 15 bp, Homo sapiens
atttaactggagacc

SEQ ID NO: 1386240 - DNA, 15 bp, Homo sapiens
catttaactggagac

SEQ ID NO: 1386241 - DNA, 15 bp, Homo sapiens
tcatttaactggaga

SEQ ID NO: 1386242 - DNA, 15 bp, Homo sapiens
atcatttaactggag

SEQ ID NO: 1386243 - DNA, 15 bp, Homo sapiens
catcatttaactgga

SEQ ID NO: 1386244 - DNA, 15 bp, Homo sapiens
tcatcatttaactgg

SEQ ID NO: 1386245 - DNA, 15 bp, Homo sapiens
atcatcatttaactg

SEQ ID NO: 1386246 - DNA, 15 bp, Homo sapiens
tatcatcatttaact

SEQ ID NO: 1386247 - DNA, 15 bp, Homo sapiens
ttatcatcatttaac

SEQ ID NO: 1386248 - DNA, 15 bp, Homo sapiens
attatcatcatttaa

SEQ ID NO: 1386249 - DNA, 15 bp, Homo sapiens
tattatcatcattta

SEQ ID NO: 1386250 - DNA, 15 bp, Homo sapiens
gtattatcatcattt

SEQ ID NO: 1386251 - DNA, 15 bp, Homo sapiens
ggtattatcatcatt

SEQ ID NO: 1386252 - DNA, 15 bp, Homo sapiens
aggtattatcatcat

SEQ ID NO: 1386253 - DNA, 15 bp, Homo sapiens
taggtattatcatca

SEQ ID NO: 1386254 - DNA, 15 bp, Homo sapiens
ttaggtattatcatc

SEQ ID NO: 1386255 - DNA, 15 bp, Homo sapiens
tttaggtattatcat

SEQ ID NO: 1386256 - DNA, 15 bp, Homo sapiens
ttttaggtattatca

SEQ ID NO: 1386257 - DNA, 15 bp, Homo sapiens
attttaggtattatc

SEQ ID NO: 1386258 - DNA, 15 bp, Homo sapiens
tattttaggtattat

SEQ ID NO: 1386259 - DNA, 15 bp, Homo sapiens
ctattttaggtatta

SEQ ID NO: 1386260 - DNA, 15 bp, Homo sapiens
actattttaggtatt

SEQ ID NO: 1386261 - DNA, 15 bp, Homo sapiens
aactattttaggtat

SEQ ID NO: 1386262 - DNA, 15 bp, Homo sapiens
aaactattttaggta

SEQ ID NO: 1386263 - DNA, 15 bp, Homo sapiens
aaaactattttaggt

SEQ ID NO: 1386264 - DNA, 15 bp, Homo sapiens
taaaactattttagg

SEQ ID NO: 1386265 - DNA, 15 bp, Homo sapiens
ctaaaactattttag

SEQ ID NO: 1386266 - DNA, 15 bp, Homo sapiens
actaaaactatttta

SEQ ID NO: 1386267 - DNA, 15 bp, Homo sapiens
tactaaaactatttt

SEQ ID NO: 1386268 - DNA, 15 bp, Homo sapiens
ctactaaaactattt

SEQ ID NO: 1386269 - DNA, 15 bp, Homo sapiens
gctactaaaactatt

SEQ ID NO: 1386270 - DNA, 15 bp, Homo sapiens
agctactaaaactat

SEQ ID NO: 1386271 - DNA, 15 bp, Homo sapiens
tagctactaaaacta

SEQ ID NO: 1386272 - DNA, 15 bp, Homo sapiens
cactagctactaaaa

SEQ ID NO: 1386273 - DNA, 15 bp, Homo sapiens
tcactagctactaaa

SEQ ID NO: 1386274 - DNA, 15 bp, Homo sapiens
ttcactagctactaa

SEQ ID NO: 1386275 - DNA, 15 bp, Homo sapiens
gttcactagctacta

SEQ ID NO: 1386276 - DNA, 15 bp, Homo sapiens
tgttcactagctact

SEQ ID NO: 1386277 - DNA, 15 bp, Homo sapiens
gtgttcactagctac

SEQ ID NO: 1386278 - DNA, 15 bp, Homo sapiens
agtgttcactagcta

SEQ ID NO: 1386279 - DNA, 15 bp, Homo sapiens
aagtgttcactagct

SEQ ID NO: 1386280 - DNA, 15 bp, Homo sapiens
taagtgttcactagc

SEQ ID NO: 1386281 - DNA, 15 bp, Homo sapiens
gtaagtgttcactag

SEQ ID NO: 1386282 - DNA, 15 bp, Homo sapiens
agtaagtgttcacta

SEQ ID NO: 1386283 - DNA, 15 bp, Homo sapiens
aagtaagtgttcact

SEQ ID NO: 1386284 - DNA, 15 bp, Homo sapiens
taagtaagtgttcac

SEQ ID NO: 1386285 - DNA, 15 bp, Homo sapiens
ctaagtaagtgttca

SEQ ID NO: 1386286 - DNA, 15 bp, Homo sapiens
actaagtaagtgttc

SEQ ID NO: 1386287 - DNA, 15 bp, Homo sapiens
tactaagtaagtgtt

SEQ ID NO: 1386288 - DNA, 15 bp, Homo sapiens
ttactaagtaagtgt

SEQ ID NO: 1386289 - DNA, 15 bp, Homo sapiens
tttactaagtaagtg

SEQ ID NO: 1386290 - DNA, 15 bp, Homo sapiens
ctttactaagtaagt

SEQ ID NO: 1386291 - DNA, 15 bp, Homo sapiens
actttactaagtaag

SEQ ID NO: 1386292 - DNA, 15 bp, Homo sapiens
aactttactaagtaa

SEQ ID NO: 1386293 - DNA, 15 bp, Homo sapiens
taactttactaagta

SEQ ID NO: 1386294 - DNA, 15 bp, Homo sapiens
ataactttactaagt

SEQ ID NO: 1386295 - DNA, 15 bp, Homo sapiens
aataactttactaag

SEQ ID NO: 1386296 - DNA, 15 bp, Homo sapiens
aaataactttactaa

SEQ ID NO: 1386297 - DNA, 15 bp, Homo sapiens
gaaataactttacta

SEQ ID NO: 1386298 - DNA, 15 bp, Homo sapiens
tgaaataactttact

SEQ ID NO: 1386299 - DNA, 15 bp, Homo sapiens
atgaaataactttac

SEQ ID NO: 1386300 - DNA, 15 bp, Homo sapiens
tatgaaataacttta

SEQ ID NO: 1386301 - DNA, 15 bp, Homo sapiens
ttatgaaataacttt

SEQ ID NO: 1386302 - DNA, 15 bp, Homo sapiens
attatgaaataactt

SEQ ID NO: 1386303 - DNA, 15 bp, Homo sapiens
aattatgaaataact

SEQ ID NO: 1386304 - DNA, 15 bp, Homo sapiens
aaattatgaaataac

SEQ ID NO: 1386305 - DNA, 15 bp, Homo sapiens
gaaattatgaaataa

SEQ ID NO: 1386306 - DNA, 15 bp, Homo sapiens
ggaaattatgaaata

SEQ ID NO: 1386307 - DNA, 15 bp, Homo sapiens
tggaaattatgaaat

SEQ ID NO: 1386308 - DNA, 15 bp, Homo sapiens
gtggaaattatgaaa

SEQ ID NO: 1386309 - DNA, 15 bp, Homo sapiens
tgtggaaattatgaa

SEQ ID NO: 1386310 - DNA, 15 bp, Homo sapiens
atgtggaaattatga

SEQ ID NO: 1386311 - DNA, 15 bp, Homo sapiens
aatgtggaaattatg

SEQ ID NO: 1386312 - DNA, 15 bp, Homo sapiens
taatgtggaaattat

SEQ ID NO: 1386313 - DNA, 15 bp, Homo sapiens
ataatgtggaaatta

SEQ ID NO: 1386314 - DNA, 15 bp, Homo sapiens
aataatgtggaaatt

SEQ ID NO: 1386315 - DNA, 15 bp, Homo sapiens
aaataatgtggaaat

SEQ ID NO: 1386316 - DNA, 15 bp, Homo sapiens
caaataatgtggaaa

SEQ ID NO: 1386317 - DNA, 15 bp, Homo sapiens
ccaaataatgtggaa

SEQ ID NO: 1386318 - DNA, 15 bp, Homo sapiens
accaaataatgtgga

SEQ ID NO: 1386319 - DNA, 15 bp, Homo sapiens
taccaaataatgtgg

SEQ ID NO: 1386320 - DNA, 15 bp, Homo sapiens
ctaccaaataatgtg

SEQ ID NO: 1386321 - DNA, 15 bp, Homo sapiens
cctaccaaataatgt

SEQ ID NO: 1386322 - DNA, 15 bp, Homo sapiens
ccctaccaaataatg

SEQ ID NO: 1386323 - DNA, 15 bp, Homo sapiens
accctaccaaataat

SEQ ID NO: 1386324 - DNA, 15 bp, Homo sapiens
aaccctaccaaataa

SEQ ID NO: 1386325 - DNA, 15 bp, Homo sapiens
caaccctaccaaata

SEQ ID NO: 1386326 - DNA, 15 bp, Homo sapiens
ccaaccctaccaaat

SEQ ID NO: 1386327 - DNA, 15 bp, Homo sapiens
accaaccctaccaaa

SEQ ID NO: 1386328 - DNA, 15 bp, Homo sapiens
aaccaaccctaccaa

SEQ ID NO: 1386329 - DNA, 15 bp, Homo sapiens
caaccaaccctacca

SEQ ID NO: 1386330 - DNA, 15 bp, Homo sapiens
tcaaccaaccctacc

SEQ ID NO: 1386331 - DNA, 15 bp, Homo sapiens
gtcaaccaaccctac

SEQ ID NO: 1386332 - DNA, 15 bp, Homo sapiens
agtcaaccaacccta

SEQ ID NO: 1386333 - DNA, 15 bp, Homo sapiens
aagtcaaccaaccct

SEQ ID NO: 1386334 - DNA, 15 bp, Homo sapiens
taagtcaaccaaccc

SEQ ID NO: 1386335 - DNA, 15 bp, Homo sapiens
ctaagtcaaccaacc

SEQ ID NO: 1386336 - DNA, 15 bp, Homo sapiens
cctaagtcaaccaac

SEQ ID NO: 1386337 - DNA, 15 bp, Homo sapiens
acctaagtcaaccaa

SEQ ID NO: 1386338 - DNA, 15 bp, Homo sapiens
cacctaagtcaacca

SEQ ID NO: 1386339 - DNA, 15 bp, Homo sapiens
tcacctaagtcaacc

SEQ ID NO: 1386340 - DNA, 15 bp, Homo sapiens
ttcacctaagtcaac

SEQ ID NO: 1386341 - DNA, 15 bp, Homo sapiens
tttcacctaagtcaa

SEQ ID NO: 1386342 - DNA, 15 bp, Homo sapiens
ttttcacctaagtca

SEQ ID NO: 1386343 - DNA, 15 bp, Homo sapiens
tttttcacctaagtc

SEQ ID NO: 1386344 - DNA, 15 bp, Homo sapiens
atttttcacctaagt

SEQ ID NO: 1386345 - DNA, 15 bp, Homo sapiens
catttttcacctaag

SEQ ID NO: 1386346 - DNA, 15 bp, Homo sapiens
tcatttttcacctaa

SEQ ID NO: 1386347 - DNA, 15 bp, Homo sapiens
gtcatttttcaccta

SEQ ID NO: 1386348 - DNA, 15 bp, Homo sapiens
ggtcatttttcacct

SEQ ID NO: 1386349 - DNA, 15 bp, Homo sapiens
tggtcatttttcacc

SEQ ID NO: 1386350 - DNA, 15 bp, Homo sapiens
ttggtcatttttcac

SEQ ID NO: 1386351 - DNA, 15 bp, Homo sapiens
attggtcatttttca

SEQ ID NO: 1386352 - DNA, 15 bp, Homo sapiens
cattggtcatttttc

SEQ ID NO: 1386353 - DNA, 15 bp, Homo sapiens
tcattggtcattttt

SEQ ID NO: 1386354 - DNA, 15 bp, Homo sapiens
ctcattggtcatttt

SEQ ID NO: 1386355 - DNA, 15 bp, Homo sapiens
tctcattggtcattt

SEQ ID NO: 1386356 - DNA, 15 bp, Homo sapiens
ttctcattggtcatt

SEQ ID NO: 1386357 - DNA, 15 bp, Homo sapiens
cttctcattggtcat

SEQ ID NO: 1386358 - DNA, 15 bp, Homo sapiens
acttctcattggtca

SEQ ID NO: 1386359 - DNA, 15 bp, Homo sapiens
cacttctcattggtc

SEQ ID NO: 1386360 - DNA, 15 bp, Homo sapiens
gcacttctcattggt

SEQ ID NO: 1386361 - DNA, 15 bp, Homo sapiens
tgcacttctcattgg

SEQ ID NO: 1386362 - DNA, 15 bp, Homo sapiens
atgcacttctcattg

SEQ ID NO: 1386363 - DNA, 15 bp, Homo sapiens
catgcacttctcatt

SEQ ID NO: 1386364 - DNA, 15 bp, Homo sapiens
tcatgcacttctcat

SEQ ID NO: 1386365 - DNA, 15 bp, Homo sapiens
gtcatgcacttctca

SEQ ID NO: 1386366 - DNA, 15 bp, Homo sapiens
tgtcatgcacttctc

SEQ ID NO: 1386367 - DNA, 15 bp, Homo sapiens
ctgtcatgcacttct

SEQ ID NO: 1386368 - DNA, 15 bp, Homo sapiens
tctgtcatgcacttc

SEQ ID NO: 1386369 - DNA, 15 bp, Homo sapiens
atctgtcatgcactt

SEQ ID NO: 1386370 - DNA, 15 bp, Homo sapiens
catctgtcatgcact

SEQ ID NO: 1386371 - DNA, 15 bp, Homo sapiens
gcatctgtcatgcac

SEQ ID NO: 1386372 - DNA, 15 bp, Homo sapiens
agcatctgtcatgca

SEQ ID NO: 1386373 - DNA, 15 bp, Homo sapiens
cagcatctgtcatgc

SEQ ID NO: 1386374 - DNA, 15 bp, Homo sapiens
acagcatctgtcatg

SEQ ID NO: 1386375 - DNA, 15 bp, Homo sapiens
aacagcatctgtcat

SEQ ID NO: 1386376 - DNA, 15 bp, Homo sapiens
taacagcatctgtca

SEQ ID NO: 1386377 - DNA, 15 bp, Homo sapiens
gtaacagcatctgtc

SEQ ID NO: 1386378 - DNA, 15 bp, Homo sapiens
tgtaacagcatctgt

SEQ ID NO: 1386379 - DNA, 15 bp, Homo sapiens
ctgtaacagcatctg

SEQ ID NO: 1386380 - DNA, 15 bp, Homo sapiens
tctgtaacagcatct

SEQ ID NO: 1386381 - DNA, 15 bp, Homo sapiens
atctgtaacagcatc

SEQ ID NO: 1386382 - DNA, 15 bp, Homo sapiens
aatctgtaacagcat

SEQ ID NO: 1386383 - DNA, 15 bp, Homo sapiens
aaatctgtaacagca

SEQ ID NO: 1386384 - DNA, 15 bp, Homo sapiens
taaatctgtaacagc

SEQ ID NO: 1386385 - DNA, 15 bp, Homo sapiens
ttaaatctgtaacag

SEQ ID NO: 1386386 - DNA, 15 bp, Homo sapiens
gttaaatctgtaaca

SEQ ID NO: 1386387 - DNA, 15 bp, Homo sapiens
ggttaaatctgtaac

SEQ ID NO: 1386388 - DNA, 15 bp, Homo sapiens
tggttaaatctgtaa

SEQ ID NO: 1386389 - DNA, 15 bp, Homo sapiens
atggttaaatctgta

SEQ ID NO: 1386390 - DNA, 15 bp, Homo sapiens
gatggttaaatctgt

SEQ ID NO: 1386391 - DNA, 15 bp, Homo sapiens
agatggttaaatctg

SEQ ID NO: 1386392 - DNA, 15 bp, Homo sapiens
gagatggttaaatct

SEQ ID NO: 1386393 - DNA, 15 bp, Homo sapiens
cgagatggttaaatc

SEQ ID NO: 1386394 - DNA, 15 bp, Homo sapiens
tcgagatggttaaat

SEQ ID NO: 1386395 - DNA, 15 bp, Homo sapiens
gtcgagatggttaaa

SEQ ID NO: 1386396 - DNA, 15 bp, Homo sapiens
tgtcgagatggttaa

SEQ ID NO: 1386397 - DNA, 15 bp, Homo sapiens
ctgtcgagatggtta

SEQ ID NO: 1386398 - DNA, 15 bp, Homo sapiens
actgtcgagatggtt

SEQ ID NO: 1386399 - DNA, 15 bp, Homo sapiens
tactgtcgagatggt

SEQ ID NO: 1386400 - DNA, 15 bp, Homo sapiens
atactgtcgagatgg

SEQ ID NO: 1386401 - DNA, 15 bp, Homo sapiens
aatactgtcgagatg

SEQ ID NO: 1386402 - DNA, 15 bp, Homo sapiens
gaatactgtcgagat

SEQ ID NO: 1386403 - DNA, 15 bp, Homo sapiens
agaatactgtcgaga

SEQ ID NO: 1386404 - DNA, 15 bp, Homo sapiens
aagaatactgtcgag

SEQ ID NO: 1386405 - DNA, 15 bp, Homo sapiens
caagaatactgtcga

SEQ ID NO: 1386406 - DNA, 15 bp, Homo sapiens
tcaagaatactgtcg

SEQ ID NO: 1386407 - DNA, 15 bp, Homo sapiens
ttcaagaatactgtc

SEQ ID NO: 1386408 - DNA, 15 bp, Homo sapiens
cttcaagaatactgt

SEQ ID NO: 1386409 - DNA, 15 bp, Homo sapiens
tcttcaagaatactg

SEQ ID NO: 1386410 - DNA, 15 bp, Homo sapiens
ttcttcaagaatact

SEQ ID NO: 1386411 - DNA, 15 bp, Homo sapiens
tttcttcaagaatac

SEQ ID NO: 1386412 - DNA, 15 bp, Homo sapiens
ctttcttcaagaata

SEQ ID NO: 1386413 - DNA, 15 bp, Homo sapiens
actttcttcaagaat

SEQ ID NO: 1386414 - DNA, 15 bp, Homo sapiens
cactttcttcaagaa

SEQ ID NO: 1386415 - DNA, 15 bp, Homo sapiens
ccactttcttcaaga

SEQ ID NO: 1386416 - DNA, 15 bp, Homo sapiens
accactttcttcaag

SEQ ID NO: 1386417 - DNA, 15 bp, Homo sapiens
taccactttcttcaa

SEQ ID NO: 1386418 - DNA, 15 bp, Homo sapiens
gtaccactttcttca

SEQ ID NO: 1386419 - DNA, 15 bp, Homo sapiens
tgtaccactttcttc

SEQ ID NO: 1386420 - DNA, 15 bp, Homo sapiens
atgtaccactttctt

SEQ ID NO: 1386421 - DNA, 15 bp, Homo sapiens
aatgtaccactttct

SEQ ID NO: 1386422 - DNA, 15 bp, Homo sapiens
taatgtaccactttc

SEQ ID NO: 1386423 - DNA, 15 bp, Homo sapiens
ataatgtaccacttt

SEQ ID NO: 1386424 - DNA, 15 bp, Homo sapiens
gataatgtaccactt

SEQ ID NO: 1386425 - DNA, 15 bp, Homo sapiens
agataatgtaccact

SEQ ID NO: 1386426 - DNA, 15 bp, Homo sapiens
aagataatgtaccac

SEQ ID NO: 1386427 - DNA, 15 bp, Homo sapiens
caagataatgtacca

SEQ ID NO: 1386428 - DNA, 15 bp, Homo sapiens
tcaagataatgtacc

SEQ ID NO: 1386429 - DNA, 15 bp, Homo sapiens
ttcaagataatgtac

SEQ ID NO: 1386430 - DNA, 15 bp, Homo sapiens
attcaagataatgta

SEQ ID NO: 1386431 - DNA, 15 bp, Homo sapiens
tattcaagataatgt

SEQ ID NO: 1386432 - DNA, 15 bp, Homo sapiens
ctattcaagataatg

SEQ ID NO: 1386433 - DNA, 15 bp, Homo sapiens
cctattcaagataat

SEQ ID NO: 1386434 - DNA, 15 bp, Homo sapiens
tcctattcaagataa

SEQ ID NO: 1386435 - DNA, 15 bp, Homo sapiens
ctcctattcaagata

SEQ ID NO: 1386436 - DNA, 15 bp, Homo sapiens
cctcctattcaagat

SEQ ID NO: 1386437 - DNA, 15 bp, Homo sapiens
gcctcctattcaaga

SEQ ID NO: 1386438 - DNA, 15 bp, Homo sapiens
ggcctcctattcaag

SEQ ID NO: 1386439 - DNA, 15 bp, Homo sapiens
tggcctcctattcaa

SEQ ID NO: 1386440 - DNA, 15 bp, Homo sapiens
ttggcctcctattca

SEQ ID NO: 1386441 - DNA, 15 bp, Homo sapiens
tttggcctcctattc

SEQ ID NO: 1386442 - DNA, 15 bp, Homo sapiens
ttttggcctcctatt

SEQ ID NO: 1386443 - DNA, 15 bp, Homo sapiens
attttggcctcctat

SEQ ID NO: 1386444 - DNA, 15 bp, Homo sapiens
tattttggcctccta

SEQ ID NO: 1386445 - DNA, 15 bp, Homo sapiens
ttattttggcctcct

SEQ ID NO: 1386446 - DNA, 15 bp, Homo sapiens
attattttggcctcc

SEQ ID NO: 1386447 - DNA, 15 bp, Homo sapiens
cattattttggcctc

SEQ ID NO: 1386448 - DNA, 15 bp, Homo sapiens
ccattattttggcct

SEQ ID NO: 1386449 - DNA, 15 bp, Homo sapiens
accattattttggcc

SEQ ID NO: 1386450 - DNA, 15 bp, Homo sapiens
gaccattattttggc

SEQ ID NO: 1386451 - DNA, 15 bp, Homo sapiens
agaccattattttgg

SEQ ID NO: 1386452 - DNA, 15 bp, Homo sapiens
aagaccattattttg

SEQ ID NO: 1386453 - DNA, 15 bp, Homo sapiens
taagaccattatttt

SEQ ID NO: 1386454 - DNA, 15 bp, Homo sapiens
ttaagaccattattt

SEQ ID NO: 1386455 - DNA, 15 bp, Homo sapiens
tttaagaccattatt

SEQ ID NO: 1386456 - DNA, 15 bp, Homo sapiens
ttttaagaccattat

SEQ ID NO: 1386457 - DNA, 15 bp, Homo sapiens
attttaagaccatta

SEQ ID NO: 1386458 - DNA, 15 bp, Homo sapiens
aattttaagaccatt

SEQ ID NO: 1386459 - DNA, 15 bp, Homo sapiens
gaattttaagaccat

SEQ ID NO: 1386460 - DNA, 15 bp, Homo sapiens
tgaattttaagacca

SEQ ID NO: 1386461 - DNA, 15 bp, Homo sapiens
gtgaattttaagacc

SEQ ID NO: 1386462 - DNA, 15 bp, Homo sapiens
tgtgaattttaagac

SEQ ID NO: 1386463 - DNA, 15 bp, Homo sapiens
atgtgaattttaaga

SEQ ID NO: 1386464 - DNA, 15 bp, Homo sapiens
aatgtgaattttaag

SEQ ID NO: 1386465 - DNA, 15 bp, Homo sapiens
aaatgtgaattttaa

SEQ ID NO: 1386466 - DNA, 15 bp, Homo sapiens
taaatgtgaatttta

SEQ ID NO: 1386467 - DNA, 15 bp, Homo sapiens
gtaaatgtgaatttt

SEQ ID NO: 1386468 - DNA, 15 bp, Homo sapiens
agtaaatgtgaattt

SEQ ID NO: 1386469 - DNA, 15 bp, Homo sapiens
aagtaaatgtgaatt

SEQ ID NO: 1386470 - DNA, 15 bp, Homo sapiens
taagtaaatgtgaat

SEQ ID NO: 1386471 - DNA, 15 bp, Homo sapiens
ataagtaaatgtgaa

SEQ ID NO: 1386472 - DNA, 15 bp, Homo sapiens
tataagtaaatgtga

SEQ ID NO: 1386473 - DNA, 15 bp, Homo sapiens
atataagtaaatgtg

SEQ ID NO: 1386474 - DNA, 15 bp, Homo sapiens
gatataagtaaatgt

SEQ ID NO: 1386475 - DNA, 15 bp, Homo sapiens
agatataagtaaatg

SEQ ID NO: 1386476 - DNA, 15 bp, Homo sapiens
aagatataagtaaat

SEQ ID NO: 1386477 - DNA, 15 bp, Homo sapiens
aaagatataagtaaa

SEQ ID NO: 1386478 - DNA, 15 bp, Homo sapiens
aaaagatataagtaa

SEQ ID NO: 1386479 - DNA, 15 bp, Homo sapiens
caaaagatataagta

SEQ ID NO: 1386480 - DNA, 15 bp, Homo sapiens
acaaaagatataagt

SEQ ID NO: 1386481 - DNA, 15 bp, Homo sapiens
aacaaaagatataag

SEQ ID NO: 1386482 - DNA, 15 bp, Homo sapiens
ataacaaaagatata

SEQ ID NO: 1386483 - DNA, 15 bp, Homo sapiens
aataacaaaagatat

SEQ ID NO: 1386484 - DNA, 15 bp, Homo sapiens
aaataacaaaagata

SEQ ID NO: 1386485 - DNA, 15 bp, Homo sapiens
gaaataacaaaagat

SEQ ID NO: 1386486 - DNA, 15 bp, Homo sapiens
tgaaataacaaaaga

SEQ ID NO: 1386487 - DNA, 15 bp, Homo sapiens
atgaaataacaaaag

SEQ ID NO: 1386488 - DNA, 15 bp, Homo sapiens
tatgaaataacaaaa

SEQ ID NO: 1386489 - DNA, 15 bp, Homo sapiens
ttatgaaataacaaa

SEQ ID NO: 1386490 - DNA, 15 bp, Homo sapiens
tttatgaaataacaa

SEQ ID NO: 1386491 - DNA, 15 bp, Homo sapiens
ctttatgaaataaca

SEQ ID NO: 1386492 - DNA, 15 bp, Homo sapiens
tctttatgaaataac

SEQ ID NO: 1386493 - DNA, 15 bp, Homo sapiens
ttctttatgaaataa

SEQ ID NO: 1386494 - DNA, 15 bp, Homo sapiens
attctttatgaaata

SEQ ID NO: 1386495 - DNA, 15 bp, Homo sapiens
aattctttatgaaat

SEQ ID NO: 1386496 - DNA, 15 bp, Homo sapiens
aaattctttatgaaa

SEQ ID NO: 1386497 - DNA, 15 bp, Homo sapiens
caaattctttatgaa

SEQ ID NO: 1386498 - DNA, 15 bp, Homo sapiens
tcaaattctttatga

SEQ ID NO: 1386499 - DNA, 15 bp, Homo sapiens
ctcaaattctttatg

SEQ ID NO: 1386500 - DNA, 15 bp, Homo sapiens
tctcaaattctttat

SEQ ID NO: 1386501 - DNA, 15 bp, Homo sapiens
atctcaaattcttta

SEQ ID NO: 1386502 - DNA, 15 bp, Homo sapiens
tatctcaaattcttt

SEQ ID NO: 1386503 - DNA, 15 bp, Homo sapiens
ctatctcaaattctt

SEQ ID NO: 1386504 - DNA, 15 bp, Homo sapiens
actatctcaaattct

SEQ ID NO: 1386505 - DNA, 15 bp, Homo sapiens
tactatctcaaattc

SEQ ID NO: 1386506 - DNA, 15 bp, Homo sapiens
ttactatctcaaatt

SEQ ID NO: 1386507 - DNA, 15 bp, Homo sapiens
gttactatctcaaat

SEQ ID NO: 1386508 - DNA, 15 bp, Homo sapiens
tgttactatctcaaa

SEQ ID NO: 1386509 - DNA, 15 bp, Homo sapiens
atgttactatctcaa

SEQ ID NO: 1386510 - DNA, 15 bp, Homo sapiens
tatgttactatctca

SEQ ID NO: 1386511 - DNA, 15 bp, Homo sapiens
atatgttactatctc

SEQ ID NO: 1386512 - DNA, 15 bp, Homo sapiens
aatatgttactatct

SEQ ID NO: 1386513 - DNA, 15 bp, Homo sapiens
aaatatgttactatc

SEQ ID NO: 1386514 - DNA, 15 bp, Homo sapiens
caaatatgttactat

SEQ ID NO: 1386515 - DNA, 15 bp, Homo sapiens
acaaatatgttacta

SEQ ID NO: 1386516 - DNA, 15 bp, Homo sapiens
aacaaatatgttact

SEQ ID NO: 1386517 - DNA, 15 bp, Homo sapiens
caacaaatatgttac

SEQ ID NO: 1386518 - DNA, 15 bp, Homo sapiens
tcaacaaatatgtta

SEQ ID NO: 1386519 - DNA, 15 bp, Homo sapiens
ttcaacaaatatgtt

SEQ ID NO: 1386520 - DNA, 15 bp, Homo sapiens
attcaacaaatatgt

SEQ ID NO: 1386521 - DNA, 15 bp, Homo sapiens
aattcaacaaatatg

SEQ ID NO: 1386522 - DNA, 15 bp, Homo sapiens
caattcaacaaatat

SEQ ID NO: 1386523 - DNA, 15 bp, Homo sapiens
tcaattcaacaaata

SEQ ID NO: 1386524 - DNA, 15 bp, Homo sapiens
ttcaattcaacaaat

SEQ ID NO: 1386525 - DNA, 15 bp, Homo sapiens
tttcaattcaacaaa

SEQ ID NO: 1386526 - DNA, 15 bp, Homo sapiens
ctttcaattcaacaa

SEQ ID NO: 1386527 - DNA, 15 bp, Homo sapiens
gctttcaattcaaca

SEQ ID NO: 1386528 - DNA, 15 bp, Homo sapiens
agctttcaattcaac

SEQ ID NO: 1386529 - DNA, 15 bp, Homo sapiens
tagctttcaattcaa

SEQ ID NO: 1386530 - DNA, 15 bp, Homo sapiens
gtagctttcaattca

SEQ ID NO: 1386531 - DNA, 15 bp, Homo sapiens
ggtagctttcaattc

SEQ ID NO: 1386532 - DNA, 15 bp, Homo sapiens
aggtagctttcaatt

SEQ ID NO: 1386533 - DNA, 15 bp, Homo sapiens
taggtagctttcaat

SEQ ID NO: 1386534 - DNA, 15 bp, Homo sapiens
gtaggtagctttcaa

SEQ ID NO: 1386535 - DNA, 15 bp, Homo sapiens
tgtaggtagctttca

SEQ ID NO: 1386536 - DNA, 15 bp, Homo sapiens
atgtaggtagctttc

SEQ ID NO: 1386537 - DNA, 15 bp, Homo sapiens
tatgtaggtagcttt

SEQ ID NO: 1386538 - DNA, 15 bp, Homo sapiens
atatgtaggtagctt

SEQ ID NO: 1386539 - DNA, 15 bp, Homo sapiens
aatatgtaggtagct

SEQ ID NO: 1386540 - DNA, 15 bp, Homo sapiens
aaatatgtaggtagc

SEQ ID NO: 1386541 - DNA, 15 bp, Homo sapiens
aaaatatgtaggtag

SEQ ID NO: 1386542 - DNA, 15 bp, Homo sapiens
aaaaatatgtaggta

SEQ ID NO: 1386543 - DNA, 15 bp, Homo sapiens
caaaaatatgtaggt

SEQ ID NO: 1386544 - DNA, 15 bp, Homo sapiens
acaaaaatatgtagg

SEQ ID NO: 1386545 - DNA, 15 bp, Homo sapiens
cacaaaaatatgtag

SEQ ID NO: 1386546 - DNA, 15 bp, Homo sapiens
gcacaaaaatatgta

SEQ ID NO: 1386547 - DNA, 15 bp, Homo sapiens
ggcacaaaaatatgt

SEQ ID NO: 1386548 - DNA, 15 bp, Homo sapiens
aggcacaaaaatatg

SEQ ID NO: 1386549 - DNA, 15 bp, Homo sapiens
aaggcacaaaaatat

SEQ ID NO: 1386550 - DNA, 15 bp, Homo sapiens
aaaggcacaaaaata

SEQ ID NO: 1386551 - DNA, 15 bp, Homo sapiens
taaaggcacaaaaat

SEQ ID NO: 1386552 - DNA, 15 bp, Homo sapiens
gtaaaggcacaaaaa

SEQ ID NO: 1386553 - DNA, 15 bp, Homo sapiens
agtaaaggcacaaaa

SEQ ID NO: 1386554 - DNA, 15 bp, Homo sapiens
aagtaaaggcacaaa

SEQ ID NO: 1386555 - DNA, 15 bp, Homo sapiens
gaagtaaaggcacaa

SEQ ID NO: 1386556 - DNA, 15 bp, Homo sapiens
agaagtaaaggcaca

SEQ ID NO: 1386557 - DNA, 15 bp, Homo sapiens
tagaagtaaaggcac

SEQ ID NO: 1386558 - DNA, 15 bp, Homo sapiens
ttagaagtaaaggca

SEQ ID NO: 1386559 - DNA, 15 bp, Homo sapiens
attagaagtaaaggc

SEQ ID NO: 1386560 - DNA, 15 bp, Homo sapiens
gattagaagtaaagg

SEQ ID NO: 1386561 - DNA, 15 bp, Homo sapiens
tgattagaagtaaag

SEQ ID NO: 1386562 - DNA, 15 bp, Homo sapiens
atgattagaagtaaa

SEQ ID NO: 1386563 - DNA, 15 bp, Homo sapiens
aatgattagaagtaa

SEQ ID NO: 1386564 - DNA, 15 bp, Homo sapiens
caatgattagaagta

SEQ ID NO: 1386565 - DNA, 15 bp, Homo sapiens
acaatgattagaagt

SEQ ID NO: 1386566 - DNA, 15 bp, Homo sapiens
aacaatgattagaag

SEQ ID NO: 1386567 - DNA, 15 bp, Homo sapiens
aaacaatgattagaa

SEQ ID NO: 1386568 - DNA, 15 bp, Homo sapiens
gaaacaatgattaga

SEQ ID NO: 1386569 - DNA, 15 bp, Homo sapiens
tgaaacaatgattag

SEQ ID NO: 1386570 - DNA, 15 bp, Homo sapiens
ttgaaacaatgatta

SEQ ID NO: 1386571 - DNA, 15 bp, Homo sapiens
tttgaaacaatgatt

SEQ ID NO: 1386572 - DNA, 15 bp, Homo sapiens
ttttgaaacaatgat

SEQ ID NO: 1386573 - DNA, 15 bp, Homo sapiens
attttgaaacaatga

SEQ ID NO: 1386574 - DNA, 15 bp, Homo sapiens
tattttgaaacaatg

SEQ ID NO: 1386575 - DNA, 15 bp, Homo sapiens
ttattttgaaacaat

SEQ ID NO: 1386576 - DNA, 15 bp, Homo sapiens
gttattttgaaacaa

SEQ ID NO: 1386577 - DNA, 15 bp, Homo sapiens
tgttattttgaaaca

SEQ ID NO: 1386578 - DNA, 15 bp, Homo sapiens
atgttattttgaaac

SEQ ID NO: 1386579 - DNA, 15 bp, Homo sapiens
aatgttattttgaaa

SEQ ID NO: 1386580 - DNA, 15 bp, Homo sapiens
aaatgttattttgaa

SEQ ID NO: 1386581 - DNA, 15 bp, Homo sapiens
aaaatgttattttga

SEQ ID NO: 1386582 - DNA, 15 bp, Homo sapiens
caaaatgttattttg

SEQ ID NO: 1386583 - DNA, 15 bp, Homo sapiens
tcaaaatgttatttt

SEQ ID NO: 1386584 - DNA, 15 bp, Homo sapiens
ttcaaaatgttattt

SEQ ID NO: 1386585 - DNA, 15 bp, Homo sapiens
cttcaaaatgttatt

SEQ ID NO: 1386586 - DNA, 15 bp, Homo sapiens
acttcaaaatgttat

SEQ ID NO: 1386587 - DNA, 15 bp, Homo sapiens
aacttcaaaatgtta

SEQ ID NO: 1386588 - DNA, 15 bp, Homo sapiens
taacttcaaaatgtt

SEQ ID NO: 1386589 - DNA, 15 bp, Homo sapiens
ataacttcaaaatgt

SEQ ID NO: 1386590 - DNA, 15 bp, Homo sapiens
cataacttcaaaatg

SEQ ID NO: 1386591 - DNA, 15 bp, Homo sapiens
tcataacttcaaaat

SEQ ID NO: 1386592 - DNA, 15 bp, Homo sapiens
ttcataacttcaaaa

SEQ ID NO: 1386593 - DNA, 15 bp, Homo sapiens
tttcataacttcaaa

SEQ ID NO: 1386594 - DNA, 15 bp, Homo sapiens
gtttcataacttcaa

SEQ ID NO: 1386595 - DNA, 15 bp, Homo sapiens
tgtttcataacttca

SEQ ID NO: 1386596 - DNA, 15 bp, Homo sapiens
ctgtttcataacttc

SEQ ID NO: 1386597 - DNA, 15 bp, Homo sapiens
actgtttcataactt

SEQ ID NO: 1386598 - DNA, 15 bp, Homo sapiens
aactgtttcataact

SEQ ID NO: 1386599 - DNA, 15 bp, Homo sapiens
taactgtttcataac

SEQ ID NO: 1386600 - DNA, 15 bp, Homo sapiens
ttaactgtttcataa

SEQ ID NO: 1386601 - DNA, 15 bp, Homo sapiens
tttaactgtttcata

SEQ ID NO: 1386602 - DNA, 15 bp, Homo sapiens
ctttaactgtttcat

SEQ ID NO: 1386603 - DNA, 15 bp, Homo sapiens
gctttaactgtttca

SEQ ID NO: 1386604 - DNA, 15 bp, Homo sapiens
agctttaactgtttc

SEQ ID NO: 1386605 - DNA, 15 bp, Homo sapiens
aagctttaactgttt

SEQ ID NO: 1386606 - DNA, 15 bp, Homo sapiens
taagctttaactgtt

SEQ ID NO: 1386607 - DNA, 15 bp, Homo sapiens
ttaagctttaactgt

SEQ ID NO: 1386608 - DNA, 15 bp, Homo sapiens
attaagctttaactg

SEQ ID NO: 1386609 - DNA, 15 bp, Homo sapiens
aattaagctttaact

SEQ ID NO: 1386610 - DNA, 15 bp, Homo sapiens
taattaagctttaac

SEQ ID NO: 1386611 - DNA, 15 bp, Homo sapiens
ataattaagctttaa

SEQ ID NO: 1386612 - DNA, 15 bp, Homo sapiens
aataattaagcttta

SEQ ID NO: 1386613 - DNA, 15 bp, Homo sapiens
aaataattaagcttt

SEQ ID NO: 1386614 - DNA, 15 bp, Homo sapiens
taaataattaagctt

SEQ ID NO: 1386615 - DNA, 15 bp, Homo sapiens
ttaaataattaagct

SEQ ID NO: 1386616 - DNA, 15 bp, Homo sapiens
cttaaataattaagc

SEQ ID NO: 1386617 - DNA, 15 bp, Homo sapiens
tcttaaataattaag

SEQ ID NO: 1386618 - DNA, 15 bp, Homo sapiens
ttcttaaataattaa

SEQ ID NO: 1386619 - DNA, 15 bp, Homo sapiens
attcttaaataatta

SEQ ID NO: 1386620 - DNA, 15 bp, Homo sapiens
tattcttaaataatt

SEQ ID NO: 1386621 - DNA, 15 bp, Homo sapiens
atattcttaaataat

SEQ ID NO: 1386622 - DNA, 15 bp, Homo sapiens
catattcttaaataa

SEQ ID NO: 1386623 - DNA, 15 bp, Homo sapiens
ccatattcttaaata

SEQ ID NO: 1386624 - DNA, 15 bp, Homo sapiens
tccatattcttaaat

SEQ ID NO: 1386625 - DNA, 15 bp, Homo sapiens
atccatattcttaaa

SEQ ID NO: 1386626 - DNA, 15 bp, Homo sapiens
tatccatattcttaa

SEQ ID NO: 1386627 - DNA, 15 bp, Homo sapiens
atatccatattctta

SEQ ID NO: 1386628 - DNA, 15 bp, Homo sapiens
aatatccatattctt

SEQ ID NO: 1386629 - DNA, 15 bp, Homo sapiens
aaatatccatattct

SEQ ID NO: 1386630 - DNA, 15 bp, Homo sapiens
aaaatatccatattc

SEQ ID NO: 1386631 - DNA, 15 bp, Homo sapiens
aaaaatatccatatt

SEQ ID NO: 1386632 - DNA, 15 bp, Homo sapiens
taaaaatatccatat

SEQ ID NO: 1386633 - DNA, 15 bp, Homo sapiens
gtaaaaatatccata

SEQ ID NO: 1386634 - DNA, 15 bp, Homo sapiens
agtaaaaatatccat

SEQ ID NO: 1386635 - DNA, 15 bp, Homo sapiens
tagtaaaaatatcca

SEQ ID NO: 1386636 - DNA, 15 bp, Homo sapiens
ttagtaaaaatatcc

SEQ ID NO: 1386637 - DNA, 15 bp, Homo sapiens
attagtaaaaatatc

SEQ ID NO: 1386638 - DNA, 15 bp, Homo sapiens
tattagtaaaaatat

SEQ ID NO: 1386639 - DNA, 15 bp, Homo sapiens
ttattagtaaaaata

SEQ ID NO: 1386640 - DNA, 15 bp, Homo sapiens
attattagtaaaaat

SEQ ID NO: 1386641 - DNA, 15 bp, Homo sapiens
cattattagtaaaaa

SEQ ID NO: 1386642 - DNA, 15 bp, Homo sapiens
tcattattagtaaaa

SEQ ID NO: 1386643 - DNA, 15 bp, Homo sapiens
atcattattagtaaa

SEQ ID NO: 1386644 - DNA, 15 bp, Homo sapiens
aatcattattagtaa

SEQ ID NO: 1386645 - DNA, 15 bp, Homo sapiens
caatcattattagta

SEQ ID NO: 1386646 - DNA, 15 bp, Homo sapiens
gcaatcattattagt

SEQ ID NO: 1386647 - DNA, 15 bp, Homo sapiens
agcaatcattattag

SEQ ID NO: 1386648 - DNA, 15 bp, Homo sapiens
aagcaatcattatta

SEQ ID NO: 1386649 - DNA, 15 bp, Homo sapiens
aaagcaatcattatt

SEQ ID NO: 1386650 - DNA, 15 bp, Homo sapiens
taaagcaatcattat

SEQ ID NO: 1386651 - DNA, 15 bp, Homo sapiens
ttaaagcaatcatta

SEQ ID NO: 1386652 - DNA, 15 bp, Homo sapiens
tttaaagcaatcatt

SEQ ID NO: 1386653 - DNA, 15 bp, Homo sapiens
atttaaagcaatcat

SEQ ID NO: 1386654 - DNA, 15 bp, Homo sapiens
aatttaaagcaatca

SEQ ID NO: 1386655 - DNA, 15 bp, Homo sapiens
caatttaaagcaatc

SEQ ID NO: 1386656 - DNA, 15 bp, Homo sapiens
tcaatttaaagcaat

SEQ ID NO: 1386657 - DNA, 15 bp, Homo sapiens
atcaatttaaagcaa

SEQ ID NO: 1386658 - DNA, 15 bp, Homo sapiens
gatcaatttaaagca

SEQ ID NO: 1386659 - DNA, 15 bp, Homo sapiens
agatcaatttaaagc

SEQ ID NO: 1386660 - DNA, 15 bp, Homo sapiens
cagatcaatttaaag

SEQ ID NO: 1386661 - DNA, 15 bp, Homo sapiens
tcagatcaatttaaa

SEQ ID NO: 1386662 - DNA, 15 bp, Homo sapiens
ttcagatcaatttaa

SEQ ID NO: 1386663 - DNA, 15 bp, Homo sapiens
attcagatcaattta

SEQ ID NO: 1386664 - DNA, 15 bp, Homo sapiens
tattcagatcaattt

SEQ ID NO: 1386665 - DNA, 15 bp, Homo sapiens
ttattcagatcaatt

SEQ ID NO: 1386666 - DNA, 15 bp, Homo sapiens
attattcagatcaat

SEQ ID NO: 1386667 - DNA, 15 bp, Homo sapiens
cattattcagatcaa

SEQ ID NO: 1386668 - DNA, 15 bp, Homo sapiens
acattattcagatca

SEQ ID NO: 1386669 - DNA, 15 bp, Homo sapiens
tacattattcagatc

SEQ ID NO: 1386670 - DNA, 15 bp, Homo sapiens
ctacattattcagat

SEQ ID NO: 1386671 - DNA, 15 bp, Homo sapiens
tctacattattcaga

SEQ ID NO: 1386672 - DNA, 15 bp, Homo sapiens
ctctacattattcag

SEQ ID NO: 1386673 - DNA, 15 bp, Homo sapiens
tctctacattattca

SEQ ID NO: 1386674 - DNA, 15 bp, Homo sapiens
ttctctacattattc

SEQ ID NO: 1386675 - DNA, 15 bp, Homo sapiens
attctctacattatt

SEQ ID NO: 1386676 - DNA, 15 bp, Homo sapiens
aattctctacattat

SEQ ID NO: 1386677 - DNA, 15 bp, Homo sapiens
caattctctacatta

SEQ ID NO: 1386678 - DNA, 15 bp, Homo sapiens
ccaattctctacatt

SEQ ID NO: 1386679 - DNA, 15 bp, Homo sapiens
cccaattctctacat

SEQ ID NO: 1386680 - DNA, 15 bp, Homo sapiens
acccaattctctaca

SEQ ID NO: 1386681 - DNA, 15 bp, Homo sapiens
tacccaattctctac

SEQ ID NO: 1386682 - DNA, 15 bp, Homo sapiens
atacccaattctcta

SEQ ID NO: 1386683 - DNA, 15 bp, Homo sapiens
aatacccaattctct

SEQ ID NO: 1386684 - DNA, 15 bp, Homo sapiens
gaatacccaattctc

SEQ ID NO: 1386685 - DNA, 15 bp, Homo sapiens
tgaatacccaattct

SEQ ID NO: 1386686 - DNA, 15 bp, Homo sapiens
atgaatacccaattc

SEQ ID NO: 1386687 - DNA, 15 bp, Homo sapiens
aatgaatacccaatt

SEQ ID NO: 1386688 - DNA, 15 bp, Homo sapiens
aaatgaatacccaat

SEQ ID NO: 1386689 - DNA, 15 bp, Homo sapiens
gaaatgaatacccaa

SEQ ID NO: 1386690 - DNA, 15 bp, Homo sapiens
agaaatgaataccca

SEQ ID NO: 1386691 - DNA, 15 bp, Homo sapiens
cagaaatgaataccc

SEQ ID NO: 1386692 - DNA, 15 bp, Homo sapiens
tcagaaatgaatacc

SEQ ID NO: 1386693 - DNA, 15 bp, Homo sapiens
ctcagaaatgaatac

SEQ ID NO: 1386694 - DNA, 15 bp, Homo sapiens
tctcagaaatgaata

SEQ ID NO: 1386695 - DNA, 15 bp, Homo sapiens
atctcagaaatgaat

SEQ ID NO: 1386696 - DNA, 15 bp, Homo sapiens
tatctcagaaatgaa

SEQ ID NO: 1386697 - DNA, 15 bp, Homo sapiens
atatctcagaaatga

SEQ ID NO: 1386698 - DNA, 15 bp, Homo sapiens
gatatctcagaaatg

SEQ ID NO: 1386699 - DNA, 15 bp, Homo sapiens
tgatatctcagaaat

SEQ ID NO: 1386700 - DNA, 15 bp, Homo sapiens
ttgatatctcagaaa

SEQ ID NO: 1386701 - DNA, 15 bp, Homo sapiens
tttgatatctcagaa

SEQ ID NO: 1386702 - DNA, 15 bp, Homo sapiens
ctttgatatctcaga

SEQ ID NO: 1386703 - DNA, 15 bp, Homo sapiens
gctttgatatctcag

SEQ ID NO: 1386704 - DNA, 15 bp, Homo sapiens
agctttgatatctca

SEQ ID NO: 1386705 - DNA, 15 bp, Homo sapiens
tagctttgatatctc

SEQ ID NO: 1386706 - DNA, 15 bp, Homo sapiens
ttagctttgatatct

SEQ ID NO: 1386707 - DNA, 15 bp, Homo sapiens
attagctttgatatc

SEQ ID NO: 1386708 - DNA, 15 bp, Homo sapiens
tattagctttgatat

SEQ ID NO: 1386709 - DNA, 15 bp, Homo sapiens
ttattagctttgata

SEQ ID NO: 1386710 - DNA, 15 bp, Homo sapiens
tttattagctttgat

SEQ ID NO: 1386711 - DNA, 15 bp, Homo sapiens
gtttattagctttga

SEQ ID NO: 1386712 - DNA, 15 bp, Homo sapiens
tgtttattagctttg

SEQ ID NO: 1386713 - DNA, 15 bp, Homo sapiens
atgtttattagcttt

SEQ ID NO: 1386714 - DNA, 15 bp, Homo sapiens
tatgtttattagctt

SEQ ID NO: 1386715 - DNA, 15 bp, Homo sapiens
atatgtttattagct

SEQ ID NO: 1386716 - DNA, 15 bp, Homo sapiens
catatgtttattagc

SEQ ID NO: 1386717 - DNA, 15 bp, Homo sapiens
gcatatgtttattag

SEQ ID NO: 1386718 - DNA, 15 bp, Homo sapiens
tgcatatgtttatta

SEQ ID NO: 1386719 - DNA, 15 bp, Homo sapiens
gtgcatatgtttatt

SEQ ID NO: 1386720 - DNA, 15 bp, Homo sapiens
tgtgcatatgtttat

SEQ ID NO: 1386721 - DNA, 15 bp, Homo sapiens
ttgtgcatatgttta

SEQ ID NO: 1386722 - DNA, 15 bp, Homo sapiens
attgtgcatatgttt

SEQ ID NO: 1386723 - DNA, 15 bp, Homo sapiens
gattgtgcatatgtt

SEQ ID NO: 1386724 - DNA, 15 bp, Homo sapiens
tgattgtgcatatgt

SEQ ID NO: 1386725 - DNA, 15 bp, Homo sapiens
gtgattgtgcatatg

SEQ ID NO: 1386726 - DNA, 15 bp, Homo sapiens
agtgattgtgcatat

SEQ ID NO: 1386727 - DNA, 15 bp, Homo sapiens
aagtgattgtgcata

SEQ ID NO: 1386728 - DNA, 15 bp, Homo sapiens
caagtgattgtgcat

SEQ ID NO: 1386729 - DNA, 15 bp, Homo sapiens
acaagtgattgtgca

SEQ ID NO: 1386730 - DNA, 15 bp, Homo sapiens
gacaagtgattgtgc

SEQ ID NO: 1386731 - DNA, 15 bp, Homo sapiens
tgacaagtgattgtg

SEQ ID NO: 1386732 - DNA, 15 bp, Homo sapiens
ctgacaagtgattgt

SEQ ID NO: 1386733 - DNA, 15 bp, Homo sapiens
tctgacaagtgattg

SEQ ID NO: 1386734 - DNA, 15 bp, Homo sapiens
ttctgacaagtgatt

SEQ ID NO: 1386735 - DNA, 15 bp, Homo sapiens
tttctgacaagtgat

SEQ ID NO: 1386736 - DNA, 15 bp, Homo sapiens
atttctgacaagtga

SEQ ID NO: 1386737 - DNA, 15 bp, Homo sapiens
aatttctgacaagtg

SEQ ID NO: 1386738 - DNA, 15 bp, Homo sapiens
caatttctgacaagt

SEQ ID NO: 1386739 - DNA, 15 bp, Homo sapiens
tcaatttctgacaag

SEQ ID NO: 1386740 - DNA, 15 bp, Homo sapiens
gtcaatttctgacaa

SEQ ID NO: 1386741 - DNA, 15 bp, Homo sapiens
agtcaatttctgaca

SEQ ID NO: 1386742 - DNA, 15 bp, Homo sapiens
cagtcaatttctgac

SEQ ID NO: 1386743 - DNA, 15 bp, Homo sapiens
ccagtcaatttctga

SEQ ID NO: 1386744 - DNA, 15 bp, Homo sapiens
gccagtcaatttctg

SEQ ID NO: 1386745 - DNA, 15 bp, Homo sapiens
agccagtcaatttct

SEQ ID NO: 1386746 - DNA, 15 bp, Homo sapiens
aagccagtcaatttc

SEQ ID NO: 1386747 - DNA, 15 bp, Homo sapiens
caagccagtcaattt

SEQ ID NO: 1386748 - DNA, 15 bp, Homo sapiens
ccaagccagtcaatt

SEQ ID NO: 1386749 - DNA, 15 bp, Homo sapiens
cccaagccagtcaat

SEQ ID NO: 1386750 - DNA, 15 bp, Homo sapiens
ccccaagccagtcaa

SEQ ID NO: 1386751 - DNA, 15 bp, Homo sapiens
accccaagccagtca

SEQ ID NO: 1386752 - DNA, 15 bp, Homo sapiens
aaccccaagccagtc

SEQ ID NO: 1386753 - DNA, 15 bp, Homo sapiens
taaccccaagccagt

SEQ ID NO: 1386754 - DNA, 15 bp, Homo sapiens
ttaaccccaagccag

SEQ ID NO: 1386755 - DNA, 15 bp, Homo sapiens
attaaccccaagcca

SEQ ID NO: 1386756 - DNA, 15 bp, Homo sapiens
aattaaccccaagcc

SEQ ID NO: 1386757 - DNA, 15 bp, Homo sapiens
aaattaaccccaagc

SEQ ID NO: 1386758 - DNA, 15 bp, Homo sapiens
aaaattaaccccaag

SEQ ID NO: 1386759 - DNA, 15 bp, Homo sapiens
taaaattaaccccaa

SEQ ID NO: 1386760 - DNA, 15 bp, Homo sapiens
ataaaattaacccca

SEQ ID NO: 1386761 - DNA, 15 bp, Homo sapiens
tataaaattaacccc

SEQ ID NO: 1386762 - DNA, 15 bp, Homo sapiens
ttataaaattaaccc

SEQ ID NO: 1386763 - DNA, 15 bp, Homo sapiens
attataaaattaacc

SEQ ID NO: 1386764 - DNA, 15 bp, Homo sapiens
tattataaaattaac

SEQ ID NO: 1386765 - DNA, 15 bp, Homo sapiens
gtattataaaattaa

SEQ ID NO: 1386766 - DNA, 15 bp, Homo sapiens
tgtattataaaatta

SEQ ID NO: 1386767 - DNA, 15 bp, Homo sapiens
ttgtattataaaatt

SEQ ID NO: 1386768 - DNA, 15 bp, Homo sapiens
cttgtattataaaat

SEQ ID NO: 1386769 - DNA, 15 bp, Homo sapiens
gcttgtattataaaa

SEQ ID NO: 1386770 - DNA, 15 bp, Homo sapiens
ggcttgtattataaa

SEQ ID NO: 1386771 - DNA, 15 bp, Homo sapiens
tggcttgtattataa

SEQ ID NO: 1386772 - DNA, 15 bp, Homo sapiens
ttggcttgtattata

SEQ ID NO: 1386773 - DNA, 15 bp, Homo sapiens
attggcttgtattat

SEQ ID NO: 1386774 - DNA, 15 bp, Homo sapiens
cattggcttgtatta

SEQ ID NO: 1386775 - DNA, 15 bp, Homo sapiens
tcattggcttgtatt

SEQ ID NO: 1386776 - DNA, 15 bp, Homo sapiens
ttcattggcttgtat

SEQ ID NO: 1386777 - DNA, 15 bp, Homo sapiens
tttcattggcttgta

SEQ ID NO: 1386778 - DNA, 15 bp, Homo sapiens
gtttcattggcttgt

SEQ ID NO: 1386779 - DNA, 15 bp, Homo sapiens
agtttcattggcttg

SEQ ID NO: 1386780 - DNA, 15 bp, Homo sapiens
aagtttcattggctt

SEQ ID NO: 1386781 - DNA, 15 bp, Homo sapiens
aaagtttcattggct

SEQ ID NO: 1386782 - DNA, 15 bp, Homo sapiens
taaagtttcattggc

SEQ ID NO: 1386783 - DNA, 15 bp, Homo sapiens
ctaaagtttcattgg

SEQ ID NO: 1386784 - DNA, 15 bp, Homo sapiens
gctaaagtttcattg

SEQ ID NO: 1386785 - DNA, 15 bp, Homo sapiens
agctaaagtttcatt

SEQ ID NO: 1386786 - DNA, 15 bp, Homo sapiens
tagctaaagtttcat

SEQ ID NO: 1386787 - DNA, 15 bp, Homo sapiens
ctagctaaagtttca

SEQ ID NO: 1386788 - DNA, 15 bp, Homo sapiens
gctagctaaagtttc

SEQ ID NO: 1386789 - DNA, 15 bp, Homo sapiens
tgctagctaaagttt

SEQ ID NO: 1386790 - DNA, 15 bp, Homo sapiens
gtgctagctaaagtt

SEQ ID NO: 1386791 - DNA, 15 bp, Homo sapiens
ggtgctagctaaagt

SEQ ID NO: 1386792 - DNA, 15 bp, Homo sapiens
gggtgctagctaaag

SEQ ID NO: 1386793 - DNA, 15 bp, Homo sapiens
agggtgctagctaaa

SEQ ID NO: 1386794 - DNA, 15 bp, Homo sapiens
aagggtgctagctaa

SEQ ID NO: 1386795 - DNA, 15 bp, Homo sapiens
aaagggtgctagcta

SEQ ID NO: 1386796 - DNA, 15 bp, Homo sapiens
aaaagggtgctagct

SEQ ID NO: 1386797 - DNA, 15 bp, Homo sapiens
gaaaagggtgctagc

SEQ ID NO: 1386798 - DNA, 15 bp, Homo sapiens
agaaaagggtgctag

SEQ ID NO: 1386799 - DNA, 15 bp, Homo sapiens
cagaaaagggtgcta

SEQ ID NO: 1386800 - DNA, 15 bp, Homo sapiens
acagaaaagggtgct

SEQ ID NO: 1386801 - DNA, 15 bp, Homo sapiens
aacagaaaagggtgc

SEQ ID NO: 1386802 - DNA, 15 bp, Homo sapiens
caacagaaaagggtg

SEQ ID NO: 1386803 - DNA, 15 bp, Homo sapiens
acaacagaaaagggt

SEQ ID NO: 1386804 - DNA, 15 bp, Homo sapiens
tacaacagaaaaggg

SEQ ID NO: 1386805 - DNA, 15 bp, Homo sapiens
gtacaacagaaaagg

SEQ ID NO: 1386806 - DNA, 15 bp, Homo sapiens
agtacaacagaaaag

SEQ ID NO: 1386807 - DNA, 15 bp, Homo sapiens
aagtacaacagaaaa

SEQ ID NO: 1386808 - DNA, 15 bp, Homo sapiens
aaagtacaacagaaa

SEQ ID NO: 1386809 - DNA, 15 bp, Homo sapiens
caaagtacaacagaa

SEQ ID NO: 1386810 - DNA, 15 bp, Homo sapiens
tcaaagtacaacaga

SEQ ID NO: 1386811 - DNA, 15 bp, Homo sapiens
ttcaaagtacaacag

SEQ ID NO: 1386812 - DNA, 15 bp, Homo sapiens
tttcaaagtacaaca

SEQ ID NO: 1386813 - DNA, 15 bp, Homo sapiens
gtttcaaagtacaac

SEQ ID NO: 1386814 - DNA, 15 bp, Homo sapiens
agtttcaaagtacaa

SEQ ID NO: 1386815 - DNA, 15 bp, Homo sapiens
tagtttcaaagtaca

SEQ ID NO: 1386816 - DNA, 15 bp, Homo sapiens
ttagtttcaaagtac

SEQ ID NO: 1386817 - DNA, 15 bp, Homo sapiens
tttagtttcaaagta

SEQ ID NO: 1386818 - DNA, 15 bp, Homo sapiens
ctttagtttcaaagt

SEQ ID NO: 1386819 - DNA, 15 bp, Homo sapiens
actttagtttcaaag

SEQ ID NO: 1386820 - DNA, 15 bp, Homo sapiens
cactttagtttcaaa

SEQ ID NO: 1386821 - DNA, 15 bp, Homo sapiens
acactttagtttcaa

SEQ ID NO: 1386822 - DNA, 15 bp, Homo sapiens
aacactttagtttca

SEQ ID NO: 1386823 - DNA, 15 bp, Homo sapiens
aaacactttagtttc

SEQ ID NO: 1386824 - DNA, 15 bp, Homo sapiens
taaacactttagttt

SEQ ID NO: 1386825 - DNA, 15 bp, Homo sapiens
ttaaacactttagtt

SEQ ID NO: 1386826 - DNA, 15 bp, Homo sapiens
tttaaacactttagt

SEQ ID NO: 1386827 - DNA, 15 bp, Homo sapiens
ttttaaacactttag

SEQ ID NO: 1386828 - DNA, 15 bp, Homo sapiens
cttttaaacacttta

SEQ ID NO: 1386829 - DNA, 15 bp, Homo sapiens
acttttaaacacttt

SEQ ID NO: 1386830 - DNA, 15 bp, Homo sapiens
cacttttaaacactt

SEQ ID NO: 1386831 - DNA, 15 bp, Homo sapiens
acacttttaaacact

SEQ ID NO: 1386832 - DNA, 15 bp, Homo sapiens
aacacttttaaacac

SEQ ID NO: 1386833 - DNA, 15 bp, Homo sapiens
taacacttttaaaca

SEQ ID NO: 1386834 - DNA, 15 bp, Homo sapiens
ttaacacttttaaac

SEQ ID NO: 1386835 - DNA, 15 bp, Homo sapiens
tttaacacttttaaa

SEQ ID NO: 1386836 - DNA, 15 bp, Homo sapiens
ttttaacacttttaa

SEQ ID NO: 1386837 - DNA, 15 bp, Homo sapiens
tttttaacactttta

SEQ ID NO: 1386838 - DNA, 15 bp, Homo sapiens
ctttttaacactttt

SEQ ID NO: 1386839 - DNA, 15 bp, Homo sapiens
actttttaacacttt

SEQ ID NO: 1386840 - DNA, 15 bp, Homo sapiens
aactttttaacactt

SEQ ID NO: 1386841 - DNA, 15 bp, Homo sapiens
gaactttttaacact

SEQ ID NO: 1386842 - DNA, 15 bp, Homo sapiens
ggaactttttaacac

SEQ ID NO: 1386843 - DNA, 15 bp, Homo sapiens
aggaactttttaaca

SEQ ID NO: 1386844 - DNA, 15 bp, Homo sapiens
taggaactttttaac

SEQ ID NO: 1386845 - DNA, 15 bp, Homo sapiens
ttaggaactttttaa

SEQ ID NO: 1386846 - DNA, 15 bp, Homo sapiens
attaggaacttttta

SEQ ID NO: 1386847 - DNA, 15 bp, Homo sapiens
cattaggaacttttt

SEQ ID NO: 1386848 - DNA, 15 bp, Homo sapiens
acattaggaactttt

SEQ ID NO: 1386849 - DNA, 15 bp, Homo sapiens
aacattaggaacttt

SEQ ID NO: 1386850 - DNA, 15 bp, Homo sapiens
aaacattaggaactt

SEQ ID NO: 1386851 - DNA, 15 bp, Homo sapiens
aaaacattaggaact

SEQ ID NO: 1386852 - DNA, 15 bp, Homo sapiens
aaaaacattaggaac

SEQ ID NO: 1386853 - DNA, 15 bp, Homo sapiens
gaaaaacattaggaa

SEQ ID NO: 1386854 - DNA, 15 bp, Homo sapiens
ggaaaaacattagga

SEQ ID NO: 1386855 - DNA, 15 bp, Homo sapiens
tggaaaaacattagg

SEQ ID NO: 1386856 - DNA, 15 bp, Homo sapiens
ctggaaaaacattag

SEQ ID NO: 1386857 - DNA, 15 bp, Homo sapiens
cctggaaaaacatta

SEQ ID NO: 1386858 - DNA, 15 bp, Homo sapiens
ccctggaaaaacatt

SEQ ID NO: 1386859 - DNA, 15 bp, Homo sapiens
cccctggaaaaacat

SEQ ID NO: 1386860 - DNA, 15 bp, Homo sapiens
tcccctggaaaaaca

SEQ ID NO: 1386861 - DNA, 15 bp, Homo sapiens
ctcccctggaaaaac

SEQ ID NO: 1386862 - DNA, 15 bp, Homo sapiens
actcccctggaaaaa

SEQ ID NO: 1386863 - DNA, 15 bp, Homo sapiens
aactcccctggaaaa

SEQ ID NO: 1386864 - DNA, 15 bp, Homo sapiens
aaactcccctggaaa

SEQ ID NO: 1386865 - DNA, 15 bp, Homo sapiens
aaaactcccctggaa

SEQ ID NO: 1386866 - DNA, 15 bp, Homo sapiens
aaaaactcccctgga

SEQ ID NO: 1386867 - DNA, 15 bp, Homo sapiens
taaaaactcccctgg

SEQ ID NO: 1386868 - DNA, 15 bp, Homo sapiens
ttaaaaactcccctg

SEQ ID NO: 1386869 - DNA, 15 bp, Homo sapiens
tttaaaaactcccct

SEQ ID NO: 1386870 - DNA, 15 bp, Homo sapiens
ttttaaaaactcccc

SEQ ID NO: 1386871 - DNA, 15 bp, Homo sapiens
tttttaaaaactccc

SEQ ID NO: 1386872 - DNA, 15 bp, Homo sapiens
atttttaaaaactcc

SEQ ID NO: 1386873 - DNA, 15 bp, Homo sapiens
aatttttaaaaactc

SEQ ID NO: 1386874 - DNA, 15 bp, Homo sapiens
caatttttaaaaact

SEQ ID NO: 1386875 - DNA, 15 bp, Homo sapiens
acaatttttaaaaac

SEQ ID NO: 1386876 - DNA, 15 bp, Homo sapiens
gaaacaatttttaaa

SEQ ID NO: 1386877 - DNA, 15 bp, Homo sapiens
agaaacaatttttaa

SEQ ID NO: 1386878 - DNA, 15 bp, Homo sapiens
aagaaacaattttta

SEQ ID NO: 1386879 - DNA, 15 bp, Homo sapiens
aaagaaacaattttt

SEQ ID NO: 1386880 - DNA, 15 bp, Homo sapiens
taaagaaacaatttt

SEQ ID NO: 1386881 - DNA, 15 bp, Homo sapiens
ctaaagaaacaattt

SEQ ID NO: 1386882 - DNA, 15 bp, Homo sapiens
actaaagaaacaatt

SEQ ID NO: 1386883 - DNA, 15 bp, Homo sapiens
cactaaagaaacaat

SEQ ID NO: 1386884 - DNA, 15 bp, Homo sapiens
tcactaaagaaacaa

SEQ ID NO: 1386885 - DNA, 15 bp, Homo sapiens
ttcactaaagaaaca

SEQ ID NO: 1386886 - DNA, 15 bp, Homo sapiens
tttcactaaagaaac

SEQ ID NO: 1386887 - DNA, 15 bp, Homo sapiens
ttttcactaaagaaa

SEQ ID NO: 1386888 - DNA, 15 bp, Homo sapiens
tttttcactaaagaa

SEQ ID NO: 1386889 - DNA, 15 bp, Homo sapiens
atttttcactaaaga

SEQ ID NO: 1386890 - DNA, 15 bp, Homo sapiens
gatttttcactaaag

SEQ ID NO: 1386891 - DNA, 15 bp, Homo sapiens
agatttttcactaaa

SEQ ID NO: 1386892 - DNA, 15 bp, Homo sapiens
tagatttttcactaa

SEQ ID NO: 1386893 - DNA, 15 bp, Homo sapiens
ttagatttttcacta

SEQ ID NO: 1386894 - DNA, 15 bp, Homo sapiens
gttagatttttcact

SEQ ID NO: 1386895 - DNA, 15 bp, Homo sapiens
agttagatttttcac

SEQ ID NO: 1386896 - DNA, 15 bp, Homo sapiens
cagttagatttttca

SEQ ID NO: 1386897 - DNA, 15 bp, Homo sapiens
tcagttagatttttc

SEQ ID NO: 1386898 - DNA, 15 bp, Homo sapiens
atcagttagattttt

SEQ ID NO: 1386899 - DNA, 15 bp, Homo sapiens
catcagttagatttt

SEQ ID NO: 1386900 - DNA, 15 bp, Homo sapiens
ccatcagttagattt

SEQ ID NO: 1386901 - DNA, 15 bp, Homo sapiens
tccatcagttagatt

SEQ ID NO: 1386902 - DNA, 15 bp, Homo sapiens
atccatcagttagat

SEQ ID NO: 1386903 - DNA, 15 bp, Homo sapiens
aatccatcagttaga

SEQ ID NO: 1386904 - DNA, 15 bp, Homo sapiens
gaatccatcagttag

SEQ ID NO: 1386905 - DNA, 15 bp, Homo sapiens
tgaatccatcagtta

SEQ ID NO: 1386906 - DNA, 15 bp, Homo sapiens
gtgaatccatcagtt

SEQ ID NO: 1386907 - DNA, 15 bp, Homo sapiens
tgtgaatccatcagt

SEQ ID NO: 1386908 - DNA, 15 bp, Homo sapiens
ttgtgaatccatcag

SEQ ID NO: 1386909 - DNA, 15 bp, Homo sapiens
attgtgaatccatca

SEQ ID NO: 1386910 - DNA, 15 bp, Homo sapiens
tattgtgaatccatc

SEQ ID NO: 1386911 - DNA, 15 bp, Homo sapiens
atattgtgaatccat

SEQ ID NO: 1386912 - DNA, 15 bp, Homo sapiens
aatattgtgaatcca

SEQ ID NO: 1386913 - DNA, 15 bp, Homo sapiens
aaatattgtgaatcc

SEQ ID NO: 1386914 - DNA, 15 bp, Homo sapiens
gaaatattgtgaatc

SEQ ID NO: 1386915 - DNA, 15 bp, Homo sapiens
ggaaatattgtgaat

SEQ ID NO: 1386916 - DNA, 15 bp, Homo sapiens
tggaaatattgtgaa

SEQ ID NO: 1386917 - DNA, 15 bp, Homo sapiens
ttggaaatattgtga

SEQ ID NO: 1386918 - DNA, 15 bp, Homo sapiens
tttggaaatattgtg

SEQ ID NO: 1386919 - DNA, 15 bp, Homo sapiens
ttttggaaatattgt

SEQ ID NO: 1386920 - DNA, 15 bp, Homo sapiens
attttggaaatattg

SEQ ID NO: 1386921 - DNA, 15 bp, Homo sapiens
tattttggaaatatt

SEQ ID NO: 1386922 - DNA, 15 bp, Homo sapiens
atattttggaaatat

SEQ ID NO: 1386923 - DNA, 15 bp, Homo sapiens
catattttggaaata

SEQ ID NO: 1386924 - DNA, 15 bp, Homo sapiens
tcatattttggaaat

SEQ ID NO: 1386925 - DNA, 15 bp, Homo sapiens
atcatattttggaaa

SEQ ID NO: 1386926 - DNA, 15 bp, Homo sapiens
catcatattttggaa

SEQ ID NO: 1386927 - DNA, 15 bp, Homo sapiens
acatcatattttgga

SEQ ID NO: 1386928 - DNA, 15 bp, Homo sapiens
aacatcatattttgg

SEQ ID NO: 1386929 - DNA, 15 bp, Homo sapiens
caacatcatattttg

SEQ ID NO: 1386930 - DNA, 15 bp, Homo sapiens
gcaacatcatatttt

SEQ ID NO: 1386931 - DNA, 15 bp, Homo sapiens
tgcaacatcatattt

SEQ ID NO: 1386932 - DNA, 15 bp, Homo sapiens
ctgcaacatcatatt

SEQ ID NO: 1386933 - DNA, 15 bp, Homo sapiens
cctgcaacatcatat

SEQ ID NO: 1386934 - DNA, 15 bp, Homo sapiens
ccctgcaacatcata

SEQ ID NO: 1386935 - DNA, 15 bp, Homo sapiens
accctgcaacatcat

SEQ ID NO: 1386936 - DNA, 15 bp, Homo sapiens
aaccctgcaacatca

SEQ ID NO: 1386937 - DNA, 15 bp, Homo sapiens
aaaccctgcaacatc

SEQ ID NO: 1386938 - DNA, 15 bp, Homo sapiens
taaaccctgcaacat

SEQ ID NO: 1386939 - DNA, 15 bp, Homo sapiens
ttaaaccctgcaaca

SEQ ID NO: 1386940 - DNA, 15 bp, Homo sapiens
gttaaaccctgcaac

SEQ ID NO: 1386941 - DNA, 15 bp, Homo sapiens
tgttaaaccctgcaa

SEQ ID NO: 1386942 - DNA, 15 bp, Homo sapiens
ctgttaaaccctgca

SEQ ID NO: 1386943 - DNA, 15 bp, Homo sapiens
cctgttaaaccctgc

SEQ ID NO: 1386944 - DNA, 15 bp, Homo sapiens
acctgttaaaccctg

SEQ ID NO: 1386945 - DNA, 15 bp, Homo sapiens
aacctgttaaaccct

SEQ ID NO: 1386946 - DNA, 15 bp, Homo sapiens
aaacctgttaaaccc

SEQ ID NO: 1386947 - DNA, 15 bp, Homo sapiens
caaacctgttaaacc

SEQ ID NO: 1386948 - DNA, 15 bp, Homo sapiens
acaaacctgttaaac

SEQ ID NO: 1386949 - DNA, 15 bp, Homo sapiens
aacaaacctgttaaa

SEQ ID NO: 1386950 - DNA, 15 bp, Homo sapiens
caacaaacctgttaa

SEQ ID NO: 1386951 - DNA, 15 bp, Homo sapiens
gcaacaaacctgtta

SEQ ID NO: 1386952 - DNA, 15 bp, Homo sapiens
tgcaacaaacctgtt

SEQ ID NO: 1386953 - DNA, 15 bp, Homo sapiens
atgcaacaaacctgt

SEQ ID NO: 1386954 - DNA, 15 bp, Homo sapiens
catgcaacaaacctg

SEQ ID NO: 1386955 - DNA, 15 bp, Homo sapiens
acatgcaacaaacct

SEQ ID NO: 1386956 - DNA, 15 bp, Homo sapiens
tacatgcaacaaacc

SEQ ID NO: 1386957 - DNA, 15 bp, Homo sapiens
ttacatgcaacaaac

SEQ ID NO: 1386958 - DNA, 15 bp, Homo sapiens
attacatgcaacaaa

SEQ ID NO: 1386959 - DNA, 15 bp, Homo sapiens
cattacatgcaacaa

SEQ ID NO: 1386960 - DNA, 15 bp, Homo sapiens
ccattacatgcaaca

SEQ ID NO: 1386961 - DNA, 15 bp, Homo sapiens
tccattacatgcaac

SEQ ID NO: 1386962 - DNA, 15 bp, Homo sapiens
atccattacatgcaa

SEQ ID NO: 1386963 - DNA, 15 bp, Homo sapiens
tatccattacatgca

SEQ ID NO: 1386964 - DNA, 15 bp, Homo sapiens
ttatccattacatgc

SEQ ID NO: 1386965 - DNA, 15 bp, Homo sapiens
cttatccattacatg

SEQ ID NO: 1386966 - DNA, 15 bp, Homo sapiens
tcttatccattacat

SEQ ID NO: 1386967 - DNA, 15 bp, Homo sapiens
ctcttatccattaca

SEQ ID NO: 1386968 - DNA, 15 bp, Homo sapiens
actcttatccattac

SEQ ID NO: 1386969 - DNA, 15 bp, Homo sapiens
gactcttatccatta

SEQ ID NO: 1386970 - DNA, 15 bp, Homo sapiens
cgactcttatccatt

SEQ ID NO: 1386971 - DNA, 15 bp, Homo sapiens
ccgactcttatccat

SEQ ID NO: 1386972 - DNA, 15 bp, Homo sapiens
cccgactcttatcca

SEQ ID NO: 1386973 - DNA, 15 bp, Homo sapiens
gcccgactcttatcc

SEQ ID NO: 1386974 - DNA, 15 bp, Homo sapiens
tgcccgactcttatc

SEQ ID NO: 1386975 - DNA, 15 bp, Homo sapiens
ctgcccgactcttat

SEQ ID NO: 1386976 - DNA, 15 bp, Homo sapiens
actgcccgactctta

SEQ ID NO: 1386977 - DNA, 15 bp, Homo sapiens
gactgcccgactctt

SEQ ID NO: 1386978 - DNA, 15 bp, Homo sapiens
agactgcccgactct

SEQ ID NO: 1386979 - DNA, 15 bp, Homo sapiens
cagactgcccgactc

SEQ ID NO: 1386980 - DNA, 15 bp, Homo sapiens
ccagactgcccgact

SEQ ID NO: 1386981 - DNA, 15 bp, Homo sapiens
tccagactgcccgac

SEQ ID NO: 1386982 - DNA, 15 bp, Homo sapiens
gtccagactgcccga

SEQ ID NO: 1386983 - DNA, 15 bp, Homo sapiens
tgtccagactgcccg

SEQ ID NO: 1386984 - DNA, 15 bp, Homo sapiens
gtgtccagactgccc

SEQ ID NO: 1386985 - DNA, 15 bp, Homo sapiens
ggtgtccagactgcc

SEQ ID NO: 1386986 - DNA, 15 bp, Homo sapiens
tggtgtccagactgc

SEQ ID NO: 1386987 - DNA, 15 bp, Homo sapiens
ctggtgtccagactg

SEQ ID NO: 1386988 - DNA, 15 bp, Homo sapiens
cctggtgtccagact

SEQ ID NO: 1386989 - DNA, 15 bp, Homo sapiens
gcctggtgtccagac

SEQ ID NO: 1386990 - DNA, 15 bp, Homo sapiens
ggcctggtgtccaga

SEQ ID NO: 1386991 - DNA, 15 bp, Homo sapiens
aggcctggtgtccag

SEQ ID NO: 1386992 - DNA, 15 bp, Homo sapiens
aaggcctggtgtcca

SEQ ID NO: 1386993 - DNA, 15 bp, Homo sapiens
taaggcctggtgtcc

SEQ ID NO: 1386994 - DNA, 15 bp, Homo sapiens
ttaaggcctggtgtc

SEQ ID NO: 1386995 - DNA, 15 bp, Homo sapiens
attaaggcctggtgt

SEQ ID NO: 1386996 - DNA, 15 bp, Homo sapiens
gattaaggcctggtg

SEQ ID NO: 1386997 - DNA, 15 bp, Homo sapiens
agattaaggcctggt

SEQ ID NO: 1386998 - DNA, 15 bp, Homo sapiens
gagattaaggcctgg

SEQ ID NO: 1386999 - DNA, 15 bp, Homo sapiens
tgagattaaggcctg

SEQ ID NO: 1387000 - DNA, 15 bp, Homo sapiens
atgagattaaggcct

SEQ ID NO: 1387001 - DNA, 15 bp, Homo sapiens
aatgagattaaggcc

SEQ ID NO: 1387002 - DNA, 15 bp, Homo sapiens
aaatgagattaaggc

SEQ ID NO: 1387003 - DNA, 15 bp, Homo sapiens
taaatgagattaagg

SEQ ID NO: 1387004 - DNA, 15 bp, Homo sapiens
gtaaatgagattaag

SEQ ID NO: 1387005 - DNA, 15 bp, Homo sapiens
ggtaaatgagattaa

SEQ ID NO: 1387006 - DNA, 15 bp, Homo sapiens
tggtaaatgagatta

SEQ ID NO: 1387007 - DNA, 15 bp, Homo sapiens
atggtaaatgagatt

SEQ ID NO: 1387008 - DNA, 15 bp, Homo sapiens
tatggtaaatgagat

SEQ ID NO: 1387009 - DNA, 15 bp, Homo sapiens
ctatggtaaatgaga

SEQ ID NO: 1387010 - DNA, 15 bp, Homo sapiens
tctatggtaaatgag

SEQ ID NO: 1387011 - DNA, 15 bp, Homo sapiens
gtctatggtaaatga

SEQ ID NO: 1387012 - DNA, 15 bp, Homo sapiens
ggtctatggtaaatg

SEQ ID NO: 1387013 - DNA, 15 bp, Homo sapiens
aggtctatggtaaat

SEQ ID NO: 1387014 - DNA, 15 bp, Homo sapiens
aaggtctatggtaaa

SEQ ID NO: 1387015 - DNA, 15 bp, Homo sapiens
taaggtctatggtaa

SEQ ID NO: 1387016 - DNA, 15 bp, Homo sapiens
ctaaggtctatggta

SEQ ID NO: 1387017 - DNA, 15 bp, Homo sapiens
cctaaggtctatggt

SEQ ID NO: 1387018 - DNA, 15 bp, Homo sapiens
ccctaaggtctatgg

SEQ ID NO: 1387019 - DNA, 15 bp, Homo sapiens
tccctaaggtctatg

SEQ ID NO: 1387020 - DNA, 15 bp, Homo sapiens
ttccctaaggtctat

SEQ ID NO: 1387021 - DNA, 15 bp, Homo sapiens
tttccctaaggtcta

SEQ ID NO: 1387022 - DNA, 15 bp, Homo sapiens
atttccctaaggtct

SEQ ID NO: 1387023 - DNA, 15 bp, Homo sapiens
aatttccctaaggtc

SEQ ID NO: 1387024 - DNA, 15 bp, Homo sapiens
taatttccctaaggt

SEQ ID NO: 1387025 - DNA, 15 bp, Homo sapiens
ctaatttccctaagg

SEQ ID NO: 1387026 - DNA, 15 bp, Homo sapiens
gctaatttccctaag

SEQ ID NO: 1387027 - DNA, 15 bp, Homo sapiens
agctaatttccctaa

SEQ ID NO: 1387028 - DNA, 15 bp, Homo sapiens
aagctaatttcccta

SEQ ID NO: 1387029 - DNA, 15 bp, Homo sapiens
aaagctaatttccct

SEQ ID NO: 1387030 - DNA, 15 bp, Homo sapiens
aaaagctaatttccc

SEQ ID NO: 1387031 - DNA, 15 bp, Homo sapiens
gaaaagctaatttcc

SEQ ID NO: 1387032 - DNA, 15 bp, Homo sapiens
agaaaagctaatttc

SEQ ID NO: 1387033 - DNA, 15 bp, Homo sapiens
cagaaaagctaattt

SEQ ID NO: 1387034 - DNA, 15 bp, Homo sapiens
acagaaaagctaatt

SEQ ID NO: 1387035 - DNA, 15 bp, Homo sapiens
tacagaaaagctaat

SEQ ID NO: 1387036 - DNA, 15 bp, Homo sapiens
gtacagaaaagctaa

SEQ ID NO: 1387037 - DNA, 15 bp, Homo sapiens
agtacagaaaagcta

SEQ ID NO: 1387038 - DNA, 15 bp, Homo sapiens
aagtacagaaaagct

SEQ ID NO: 1387039 - DNA, 15 bp, Homo sapiens
aaagtacagaaaagc

SEQ ID NO: 1387040 - DNA, 15 bp, Homo sapiens
aaaagtacagaaaag

SEQ ID NO: 1387041 - DNA, 15 bp, Homo sapiens
aaaaagtacagaaaa

SEQ ID NO: 1387042 - DNA, 15 bp, Homo sapiens
taaaaagtacagaaa

SEQ ID NO: 1387043 - DNA, 15 bp, Homo sapiens
gtaaaaagtacagaa

SEQ ID NO: 1387044 - DNA, 15 bp, Homo sapiens
agtaaaaagtacaga

SEQ ID NO: 1387045 - DNA, 15 bp, Homo sapiens
aagtaaaaagtacag

SEQ ID NO: 1387046 - DNA, 15 bp, Homo sapiens
taagtaaaaagtaca

SEQ ID NO: 1387047 - DNA, 15 bp, Homo sapiens
ataagtaaaaagtac

SEQ ID NO: 1387048 - DNA, 15 bp, Homo sapiens
cataagtaaaaagta

SEQ ID NO: 1387049 - DNA, 15 bp, Homo sapiens
acataagtaaaaagt

SEQ ID NO: 1387050 - DNA, 15 bp, Homo sapiens
tacataagtaaaaag

SEQ ID NO: 1387051 - DNA, 15 bp, Homo sapiens
ttacataagtaaaaa

SEQ ID NO: 1387052 - DNA, 15 bp, Homo sapiens
tttacataagtaaaa

SEQ ID NO: 1387053 - DNA, 15 bp, Homo sapiens
ttttacataagtaaa

SEQ ID NO: 1387054 - DNA, 15 bp, Homo sapiens
tttttacataagtaa

SEQ ID NO: 1387055 - DNA, 15 bp, Homo sapiens
ctttttacataagta

SEQ ID NO: 1387056 - DNA, 15 bp, Homo sapiens
cctttttacataagt

SEQ ID NO: 1387057 - DNA, 15 bp, Homo sapiens
ccctttttacataag

SEQ ID NO: 1387058 - DNA, 15 bp, Homo sapiens
accctttttacataa

SEQ ID NO: 1387059 - DNA, 15 bp, Homo sapiens
caccctttttacata

SEQ ID NO: 1387060 - DNA, 15 bp, Homo sapiens
acaccctttttacat

SEQ ID NO: 1387061 - DNA, 15 bp, Homo sapiens
tacaccctttttaca

SEQ ID NO: 1387062 - DNA, 15 bp, Homo sapiens
ttacaccctttttac

SEQ ID NO: 1387063 - DNA, 15 bp, Homo sapiens
attacacccttttta

SEQ ID NO: 1387064 - DNA, 15 bp, Homo sapiens
tattacacccttttt

SEQ ID NO: 1387065 - DNA, 15 bp, Homo sapiens
atattacaccctttt

SEQ ID NO: 1387066 - DNA, 15 bp, Homo sapiens
tatattacacccttt

SEQ ID NO: 1387067 - DNA, 15 bp, Homo sapiens
atatattacaccctt

SEQ ID NO: 1387068 - DNA, 15 bp, Homo sapiens
tatatattacaccct

SEQ ID NO: 1387069 - DNA, 15 bp, Homo sapiens
gtatatattacaccc

SEQ ID NO: 1387070 - DNA, 15 bp, Homo sapiens
ggtatatattacacc

SEQ ID NO: 1387071 - DNA, 15 bp, Homo sapiens
gggtatatattacac

SEQ ID NO: 1387072 - DNA, 15 bp, Homo sapiens
ggggtatatattaca

SEQ ID NO: 1387073 - DNA, 15 bp, Homo sapiens
aggggtatatattac

SEQ ID NO: 1387074 - DNA, 15 bp, Homo sapiens
taggggtatatatta

SEQ ID NO: 1387075 - DNA, 15 bp, Homo sapiens
ttaggggtatatatt

SEQ ID NO: 1387076 - DNA, 15 bp, Homo sapiens
gttaggggtatatat

SEQ ID NO: 1387077 - DNA, 15 bp, Homo sapiens
agttaggggtatata

SEQ ID NO: 1387078 - DNA, 15 bp, Homo sapiens
tagttaggggtatat

SEQ ID NO: 1387079 - DNA, 15 bp, Homo sapiens
ttagttaggggtata

SEQ ID NO: 1387080 - DNA, 15 bp, Homo sapiens
attagttaggggtat

SEQ ID NO: 1387081 - DNA, 15 bp, Homo sapiens
cattagttaggggta

SEQ ID NO: 1387082 - DNA, 15 bp, Homo sapiens
acattagttaggggt

SEQ ID NO: 1387083 - DNA, 15 bp, Homo sapiens
tacattagttagggg

SEQ ID NO: 1387084 - DNA, 15 bp, Homo sapiens
atacattagttaggg

SEQ ID NO: 1387085 - DNA, 15 bp, Homo sapiens
catacattagttagg

SEQ ID NO: 1387086 - DNA, 15 bp, Homo sapiens
acatacattagttag

SEQ ID NO: 1387087 - DNA, 15 bp, Homo sapiens
tacatacattagtta

SEQ ID NO: 1387088 - DNA, 15 bp, Homo sapiens
ttacatacattagtt

SEQ ID NO: 1387089 - DNA, 15 bp, Homo sapiens
cttacatacattagt

SEQ ID NO: 1387090 - DNA, 15 bp, Homo sapiens
ccttacatacattag

SEQ ID NO: 1387091 - DNA, 15 bp, Homo sapiens
tccttacatacatta

SEQ ID NO: 1387092 - DNA, 15 bp, Homo sapiens
ttccttacatacatt

SEQ ID NO: 1387093 - DNA, 15 bp, Homo sapiens
attccttacatacat

SEQ ID NO: 1387094 - DNA, 15 bp, Homo sapiens
cattccttacataca

SEQ ID NO: 1387095 - DNA, 15 bp, Homo sapiens
acattccttacatac

SEQ ID NO: 1387096 - DNA, 15 bp, Homo sapiens
tacattccttacata

SEQ ID NO: 1387097 - DNA, 15 bp, Homo sapiens
ctacattccttacat

SEQ ID NO: 1387098 - DNA, 15 bp, Homo sapiens
tctacattccttaca

SEQ ID NO: 1387099 - DNA, 15 bp, Homo sapiens
atctacattccttac

SEQ ID NO: 1387100 - DNA, 15 bp, Homo sapiens
tatctacattcctta

SEQ ID NO: 1387101 - DNA, 15 bp, Homo sapiens
ttatctacattcctt

SEQ ID NO: 1387102 - DNA, 15 bp, Homo sapiens
tttatctacattcct

SEQ ID NO: 1387103 - DNA, 15 bp, Homo sapiens
atttatctacattcc

SEQ ID NO: 1387104 - DNA, 15 bp, Homo sapiens
gatttatctacattc

SEQ ID NO: 1387105 - DNA, 15 bp, Homo sapiens
cgatttatctacatt

SEQ ID NO: 1387106 - DNA, 15 bp, Homo sapiens
tcgatttatctacat

SEQ ID NO: 1387107 - DNA, 15 bp, Homo sapiens
ctcgatttatctaca

SEQ ID NO: 1387108 - DNA, 15 bp, Homo sapiens
gctcgatttatctac

SEQ ID NO: 1387109 - DNA, 15 bp, Homo sapiens
agctcgatttatcta

SEQ ID NO: 1387110 - DNA, 15 bp, Homo sapiens
aagctcgatttatct

SEQ ID NO: 1387111 - DNA, 15 bp, Homo sapiens
aaagctcgatttatc

SEQ ID NO: 1387112 - DNA, 15 bp, Homo sapiens
taaagctcgatttat

SEQ ID NO: 1387113 - DNA, 15 bp, Homo sapiens
ttaaagctcgattta

SEQ ID NO: 1387114 - DNA, 15 bp, Homo sapiens
cttaaagctcgattt

SEQ ID NO: 1387115 - DNA, 15 bp, Homo sapiens
gcttaaagctcgatt

SEQ ID NO: 1387116 - DNA, 15 bp, Homo sapiens
ggcttaaagctcgat

SEQ ID NO: 1387117 - DNA, 15 bp, Homo sapiens
gggcttaaagctcga

SEQ ID NO: 1387118 - DNA, 15 bp, Homo sapiens
ggggcttaaagctcg

SEQ ID NO: 1387119 - DNA, 15 bp, Homo sapiens
aggggcttaaagctc

SEQ ID NO: 1387120 - DNA, 15 bp, Homo sapiens
aaggggcttaaagct

SEQ ID NO: 1387121 - DNA, 15 bp, Homo sapiens
aaaggggcttaaagc

SEQ ID NO: 1387122 - DNA, 15 bp, Homo sapiens
gtaaaggggcttaaa

SEQ ID NO: 1387123 - DNA, 15 bp, Homo sapiens
tgtaaaggggcttaa

SEQ ID NO: 1387124 - DNA, 15 bp, Homo sapiens
ctgtaaaggggctta

SEQ ID NO: 1387125 - DNA, 15 bp, Homo sapiens
tctgtaaaggggctt

SEQ ID NO: 1387126 - DNA, 15 bp, Homo sapiens
ttctgtaaaggggct

SEQ ID NO: 1387127 - DNA, 15 bp, Homo sapiens
tttctgtaaaggggc

SEQ ID NO: 1387128 - DNA, 15 bp, Homo sapiens
ctttctgtaaagggg

SEQ ID NO: 1387129 - DNA, 15 bp, Homo sapiens
cctttctgtaaaggg

SEQ ID NO: 1387130 - DNA, 15 bp, Homo sapiens
tcctttctgtaaagg

SEQ ID NO: 1387131 - DNA, 15 bp, Homo sapiens
atcctttctgtaaag

SEQ ID NO: 1387132 - DNA, 15 bp, Homo sapiens
gatcctttctgtaaa

SEQ ID NO: 1387133 - DNA, 15 bp, Homo sapiens
ggatcctttctgtaa

SEQ ID NO: 1387134 - DNA, 15 bp, Homo sapiens
tggatcctttctgta

SEQ ID NO: 1387135 - DNA, 15 bp, Homo sapiens
atggatcctttctgt

SEQ ID NO: 1387136 - DNA, 15 bp, Homo sapiens
catggatcctttctg

SEQ ID NO: 1387137 - DNA, 15 bp, Homo sapiens
tcatggatcctttct

SEQ ID NO: 1387138 - DNA, 15 bp, Homo sapiens
ttcatggatcctttc

SEQ ID NO: 1387139 - DNA, 15 bp, Homo sapiens
tttcatggatccttt

SEQ ID NO: 1387140 - DNA, 15 bp, Homo sapiens
ttttcatggatcctt

SEQ ID NO: 1387141 - DNA, 15 bp, Homo sapiens
attttcatggatcct

SEQ ID NO: 1387142 - DNA, 15 bp, Homo sapiens
gattttcatggatcc

SEQ ID NO: 1387143 - DNA, 15 bp, Homo sapiens
tctaggtaacatacc

SEQ ID NO: 1387144 - DNA, 15 bp, Homo sapiens
ctctaggtaacatac

SEQ ID NO: 1387145 - DNA, 15 bp, Homo sapiens
actctaggtaacata

SEQ ID NO: 1387146 - DNA, 15 bp, Homo sapiens
cactctaggtaacat

SEQ ID NO: 1387147 - DNA, 15 bp, Homo sapiens
tcactctaggtaaca

SEQ ID NO: 1387148 - DNA, 15 bp, Homo sapiens
atcactctaggtaac

SEQ ID NO: 1387149 - DNA, 15 bp, Homo sapiens
aatcactctaggtaa

SEQ ID NO: 1387150 - DNA, 15 bp, Homo sapiens
gaatcactctaggta

SEQ ID NO: 1387151 - DNA, 15 bp, Homo sapiens
agaatcactctaggt

SEQ ID NO: 1387152 - DNA, 15 bp, Homo sapiens
tagaatcactctagg

SEQ ID NO: 1387153 - DNA, 15 bp, Homo sapiens
ctagaatcactctag

SEQ ID NO: 1387154 - DNA, 15 bp, Homo sapiens
tctagaatcactcta

SEQ ID NO: 1387155 - DNA, 15 bp, Homo sapiens
atctagaatcactct

SEQ ID NO: 1387156 - DNA, 15 bp, Homo sapiens
aatctagaatcactc

SEQ ID NO: 1387157 - DNA, 15 bp, Homo sapiens
caatctagaatcact

SEQ ID NO: 1387158 - DNA, 15 bp, Homo sapiens
tcaatctagaatcac

SEQ ID NO: 1387159 - DNA, 15 bp, Homo sapiens
ctcaatctagaatca

SEQ ID NO: 1387160 - DNA, 15 bp, Homo sapiens
actcaatctagaatc

SEQ ID NO: 1387161 - DNA, 15 bp, Homo sapiens
aactcaatctagaat

SEQ ID NO: 1387162 - DNA, 15 bp, Homo sapiens
aaactcaatctagaa

SEQ ID NO: 1387163 - DNA, 15 bp, Homo sapiens
aaaactcaatctaga

SEQ ID NO: 1387164 - DNA, 15 bp, Homo sapiens
aaaaactcaatctag

SEQ ID NO: 1387165 - DNA, 15 bp, Homo sapiens
caaaaactcaatcta

SEQ ID NO: 1387166 - DNA, 15 bp, Homo sapiens
gcaaaaactcaatct

SEQ ID NO: 1387167 - DNA, 15 bp, Homo sapiens
tgcaaaaactcaatc

SEQ ID NO: 1387168 - DNA, 15 bp, Homo sapiens
ctgcaaaaactcaat

SEQ ID NO: 1387169 - DNA, 15 bp, Homo sapiens
tctgcaaaaactcaa

SEQ ID NO: 1387170 - DNA, 15 bp, Homo sapiens
gtctgcaaaaactca

SEQ ID NO: 1387171 - DNA, 15 bp, Homo sapiens
tgtctgcaaaaactc

SEQ ID NO: 1387172 - DNA, 15 bp, Homo sapiens
ttgtctgcaaaaact

SEQ ID NO: 1387173 - DNA, 15 bp, Homo sapiens
cttgtctgcaaaaac

SEQ ID NO: 1387174 - DNA, 15 bp, Homo sapiens
tcttgtctgcaaaaa

SEQ ID NO: 1387175 - DNA, 15 bp, Homo sapiens
atcttgtctgcaaaa

SEQ ID NO: 1387176 - DNA, 15 bp, Homo sapiens
tatcttgtctgcaaa

SEQ ID NO: 1387177 - DNA, 15 bp, Homo sapiens
ttatcttgtctgcaa

SEQ ID NO: 1387178 - DNA, 15 bp, Homo sapiens
cttatcttgtctgca

SEQ ID NO: 1387179 - DNA, 15 bp, Homo sapiens
tcttatcttgtctgc

SEQ ID NO: 1387180 - DNA, 15 bp, Homo sapiens
atcttatcttgtctg

SEQ ID NO: 1387181 - DNA, 15 bp, Homo sapiens
aatcttatcttgtct

SEQ ID NO: 1387182 - DNA, 15 bp, Homo sapiens
taatcttatcttgtc

SEQ ID NO: 1387183 - DNA, 15 bp, Homo sapiens
ataatcttatcttgt

SEQ ID NO: 1387184 - DNA, 15 bp, Homo sapiens
cataatcttatcttg

SEQ ID NO: 1387185 - DNA, 15 bp, Homo sapiens
ccataatcttatctt

SEQ ID NO: 1387186 - DNA, 15 bp, Homo sapiens
tccataatcttatct

SEQ ID NO: 1387187 - DNA, 15 bp, Homo sapiens
ttccataatcttatc

SEQ ID NO: 1387188 - DNA, 15 bp, Homo sapiens
gttccataatcttat

SEQ ID NO: 1387189 - DNA, 15 bp, Homo sapiens
tgttccataatctta

SEQ ID NO: 1387190 - DNA, 15 bp, Homo sapiens
ctgttccataatctt

SEQ ID NO: 1387191 - DNA, 15 bp, Homo sapiens
tctgttccataatct

SEQ ID NO: 1387192 - DNA, 15 bp, Homo sapiens
ctctgttccataatc

SEQ ID NO: 1387193 - DNA, 15 bp, Homo sapiens
cctctgttccataat

SEQ ID NO: 1387194 - DNA, 15 bp, Homo sapiens
ccctctgttccataa

SEQ ID NO: 1387195 - DNA, 15 bp, Homo sapiens
tccctctgttccata

SEQ ID NO: 1387196 - DNA, 15 bp, Homo sapiens
gtccctctgttccat

SEQ ID NO: 1387197 - DNA, 15 bp, Homo sapiens
tgtccctctgttcca

SEQ ID NO: 1387198 - DNA, 15 bp, Homo sapiens
ttgtccctctgttcc

SEQ ID NO: 1387199 - DNA, 15 bp, Homo sapiens
tttgtccctctgttc

SEQ ID NO: 1387200 - DNA, 15 bp, Homo sapiens
ctttgtccctctgtt

SEQ ID NO: 1387201 - DNA, 15 bp, Homo sapiens
tctttgtccctctgt

SEQ ID NO: 1387202 - DNA, 15 bp, Homo sapiens
ttctttgtccctctg

SEQ ID NO: 1387203 - DNA, 15 bp, Homo sapiens
cttctttgtccctct

SEQ ID NO: 1387204 - DNA, 15 bp, Homo sapiens
tcttctttgtccctc

SEQ ID NO: 1387205 - DNA, 15 bp, Homo sapiens
ttcttctttgtccct

SEQ ID NO: 1387206 - DNA, 15 bp, Homo sapiens
tttcttctttgtccc

SEQ ID NO: 1387207 - DNA, 15 bp, Homo sapiens
atttcttctttgtcc

SEQ ID NO: 1387208 - DNA, 15 bp, Homo sapiens
aatttcttctttgtc

SEQ ID NO: 1387209 - DNA, 15 bp, Homo sapiens
taatttcttctttgt

SEQ ID NO: 1387210 - DNA, 15 bp, Homo sapiens
ttaatttcttctttg

SEQ ID NO: 1387211 - DNA, 15 bp, Homo sapiens
gttaatttcttcttt

SEQ ID NO: 1387212 - DNA, 15 bp, Homo sapiens
tgttaatttcttctt

SEQ ID NO: 1387213 - DNA, 15 bp, Homo sapiens
atgttaatttcttct

SEQ ID NO: 1387214 - DNA, 15 bp, Homo sapiens
tatgttaatttcttc

SEQ ID NO: 1387215 - DNA, 15 bp, Homo sapiens
ctatgttaatttctt

SEQ ID NO: 1387216 - DNA, 15 bp, Homo sapiens
gctatgttaatttct

SEQ ID NO: 1387217 - DNA, 15 bp, Homo sapiens
agctatgttaatttc

SEQ ID NO: 1387218 - DNA, 15 bp, Homo sapiens
cagctatgttaattt

SEQ ID NO: 1387219 - DNA, 15 bp, Homo sapiens
acagctatgttaatt

SEQ ID NO: 1387220 - DNA, 15 bp, Homo sapiens
cacagctatgttaat

SEQ ID NO: 1387221 - DNA, 15 bp, Homo sapiens
ccacagctatgttaa

SEQ ID NO: 1387222 - DNA, 15 bp, Homo sapiens
gccacagctatgtta

SEQ ID NO: 1387223 - DNA, 15 bp, Homo sapiens
ggccacagctatgtt

SEQ ID NO: 1387224 - DNA, 15 bp, Homo sapiens
aggccacagctatgt

SEQ ID NO: 1387225 - DNA, 15 bp, Homo sapiens
taggccacagctatg

SEQ ID NO: 1387226 - DNA, 15 bp, Homo sapiens
ttaggccacagctat

SEQ ID NO: 1387227 - DNA, 15 bp, Homo sapiens
attaggccacagcta

SEQ ID NO: 1387228 - DNA, 15 bp, Homo sapiens
aattaggccacagct

SEQ ID NO: 1387229 - DNA, 15 bp, Homo sapiens
aaattaggccacagc

SEQ ID NO: 1387230 - DNA, 15 bp, Homo sapiens
aaaattaggccacag

SEQ ID NO: 1387231 - DNA, 15 bp, Homo sapiens
taaaattaggccaca

SEQ ID NO: 1387232 - DNA, 15 bp, Homo sapiens
ccgagtcacaagtaa

SEQ ID NO: 1387233 - DNA, 15 bp, Homo sapiens
tccgagtcacaagta

SEQ ID NO: 1387234 - DNA, 15 bp, Homo sapiens
gtccgagtcacaagt

SEQ ID NO: 1387235 - DNA, 15 bp, Homo sapiens
ggtccgagtcacaag

SEQ ID NO: 1387236 - DNA, 15 bp, Homo sapiens
tggtccgagtcacaa

SEQ ID NO: 1387237 - DNA, 15 bp, Homo sapiens
atggtccgagtcaca

SEQ ID NO: 1387238 - DNA, 15 bp, Homo sapiens
gatggtccgagtcac

SEQ ID NO: 1387239 - DNA, 15 bp, Homo sapiens
agatggtccgagtca

SEQ ID NO: 1387240 - DNA, 15 bp, Homo sapiens
cagatggtccgagtc

SEQ ID NO: 1387241 - DNA, 15 bp, Homo sapiens
gcagatggtccgagt

SEQ ID NO: 1387242 - DNA, 15 bp, Homo sapiens
cgcagatggtccgag

SEQ ID NO: 1387243 - DNA, 15 bp, Homo sapiens
acgcagatggtccga

SEQ ID NO: 1387244 - DNA, 15 bp, Homo sapiens
gacgcagatggtccg

SEQ ID NO: 1387245 - DNA, 15 bp, Homo sapiens
ggacgcagatggtcc

SEQ ID NO: 1387246 - DNA, 15 bp, Homo sapiens
gggacgcagatggtc

SEQ ID NO: 1387247 - DNA, 15 bp, Homo sapiens
cgggacgcagatggt

SEQ ID NO: 1387248 - DNA, 15 bp, Homo sapiens
gcgggacgcagatgg

SEQ ID NO: 1387249 - DNA, 15 bp, Homo sapiens
tgcgggacgcagatg

SEQ ID NO: 1387250 - DNA, 15 bp, Homo sapiens
ctgcgggacgcagat

SEQ ID NO: 1387251 - DNA, 15 bp, Homo sapiens
tctgcgggacgcaga

SEQ ID NO: 1387252 - DNA, 15 bp, Homo sapiens
atctgcgggacgcag

SEQ ID NO: 1387253 - DNA, 15 bp, Homo sapiens
catctgcgggacgca

SEQ ID NO: 1387254 - DNA, 15 bp, Homo sapiens
gcatctgcgggacgc

SEQ ID NO: 1387255 - DNA, 15 bp, Homo sapiens
tgcatctgcgggacg

SEQ ID NO: 1387256 - DNA, 15 bp, Homo sapiens
ttgcatctgcgggac

SEQ ID NO: 1387257 - DNA, 15 bp, Homo sapiens
cttgcatctgcggga

SEQ ID NO: 1387258 - DNA, 15 bp, Homo sapiens
acttgcatctgcggg

SEQ ID NO: 1387259 - DNA, 15 bp, Homo sapiens
tacttgcatctgcgg

SEQ ID NO: 1387260 - DNA, 15 bp, Homo sapiens
atacttgcatctgcg

SEQ ID NO: 1387261 - DNA, 15 bp, Homo sapiens
catacttgcatctgc

SEQ ID NO: 1387262 - DNA, 15 bp, Homo sapiens
tcatacttgcatctg

SEQ ID NO: 1387263 - DNA, 15 bp, Homo sapiens
ttcatacttgcatct

SEQ ID NO: 1387264 - DNA, 15 bp, Homo sapiens
tttcatacttgcatc

SEQ ID NO: 1387265 - DNA, 15 bp, Homo sapiens
ttttcatacttgcat

SEQ ID NO: 1387266 - DNA, 15 bp, Homo sapiens
tttttcatacttgca

SEQ ID NO: 1387267 - DNA, 15 bp, Homo sapiens
atttttcatacttgc

SEQ ID NO: 1387268 - DNA, 15 bp, Homo sapiens
gatttttcatacttg

SEQ ID NO: 1387269 - DNA, 15 bp, Homo sapiens
ggatttttcatactt

SEQ ID NO: 1387270 - DNA, 15 bp, Homo sapiens
tggatttttcatact

SEQ ID NO: 1387271 - DNA, 15 bp, Homo sapiens
atggatttttcatac

SEQ ID NO: 1387272 - DNA, 15 bp, Homo sapiens
tatggatttttcata

SEQ ID NO: 1387273 - DNA, 15 bp, Homo sapiens
gtatggatttttcat

SEQ ID NO: 1387274 - DNA, 15 bp, Homo sapiens
tgtatggatttttca

SEQ ID NO: 1387275 - DNA, 15 bp, Homo sapiens
atgtatggatttttc

SEQ ID NO: 1387276 - DNA, 15 bp, Homo sapiens
gatgtatggattttt

SEQ ID NO: 1387277 - DNA, 15 bp, Homo sapiens
ggatgtatggatttt

SEQ ID NO: 1387278 - DNA, 15 bp, Homo sapiens
aggatgtatggattt

SEQ ID NO: 1387279 - DNA, 15 bp, Homo sapiens
aaggatgtatggatt

SEQ ID NO: 1387280 - DNA, 15 bp, Homo sapiens
gaaggatgtatggat

SEQ ID NO: 1387281 - DNA, 15 bp, Homo sapiens
agaaggatgtatgga

SEQ ID NO: 1387282 - DNA, 15 bp, Homo sapiens
cagaaggatgtatgg

SEQ ID NO: 1387283 - DNA, 15 bp, Homo sapiens
tcagaaggatgtatg

SEQ ID NO: 1387284 - DNA, 15 bp, Homo sapiens
ttcagaaggatgtat

SEQ ID NO: 1387285 - DNA, 15 bp, Homo sapiens
attcagaaggatgta

SEQ ID NO: 1387286 - DNA, 15 bp, Homo sapiens
cattcagaaggatgt

SEQ ID NO: 1387287 - DNA, 15 bp, Homo sapiens
ccattcagaaggatg

SEQ ID NO: 1387288 - DNA, 15 bp, Homo sapiens
cccattcagaaggat

SEQ ID NO: 1387289 - DNA, 15 bp, Homo sapiens
tcccattcagaagga

SEQ ID NO: 1387290 - DNA, 15 bp, Homo sapiens
ctcccattcagaagg

SEQ ID NO: 1387291 - DNA, 15 bp, Homo sapiens
cctcccattcagaag

SEQ ID NO: 1387292 - DNA, 15 bp, Homo sapiens
ccctcccattcagaa

SEQ ID NO: 1387293 - DNA, 15 bp, Homo sapiens
gccctcccattcaga

SEQ ID NO: 1387294 - DNA, 15 bp, Homo sapiens
agccctcccattcag

SEQ ID NO: 1387295 - DNA, 15 bp, Homo sapiens
aagccctcccattca

SEQ ID NO: 1387296 - DNA, 15 bp, Homo sapiens
aaagccctcccattc

SEQ ID NO: 1387297 - DNA, 15 bp, Homo sapiens
aaaagccctcccatt

SEQ ID NO: 1387298 - DNA, 15 bp, Homo sapiens
aaaaagccctcccat

SEQ ID NO: 1387299 - DNA, 15 bp, Homo sapiens
caaaaagccctccca

SEQ ID NO: 1387300 - DNA, 15 bp, Homo sapiens
ccaaaaagccctccc

SEQ ID NO: 1387301 - DNA, 15 bp, Homo sapiens
gccaaaaagccctcc

SEQ ID NO: 1387302 - DNA, 15 bp, Homo sapiens
agccaaaaagccctc

SEQ ID NO: 1387303 - DNA, 15 bp, Homo sapiens
aagccaaaaagccct

SEQ ID NO: 1387304 - DNA, 15 bp, Homo sapiens
taagccaaaaagccc

SEQ ID NO: 1387305 - DNA, 15 bp, Homo sapiens
ttaagccaaaaagcc

SEQ ID NO: 1387306 - DNA, 15 bp, Homo sapiens
cttaagccaaaaagc

SEQ ID NO: 1387307 - DNA, 15 bp, Homo sapiens
acttaagccaaaaag

SEQ ID NO: 1387308 - DNA, 15 bp, Homo sapiens
cacttaagccaaaaa

SEQ ID NO: 1387309 - DNA, 15 bp, Homo sapiens
acacttaagccaaaa

SEQ ID NO: 1387310 - DNA, 15 bp, Homo sapiens
gacacttaagccaaa

SEQ ID NO: 1387311 - DNA, 15 bp, Homo sapiens
tgacacttaagccaa

SEQ ID NO: 1387312 - DNA, 15 bp, Homo sapiens
ttgacacttaagcca

SEQ ID NO: 1387313 - DNA, 15 bp, Homo sapiens
cttgacacttaagcc

SEQ ID NO: 1387314 - DNA, 15 bp, Homo sapiens
tcttgacacttaagc

SEQ ID NO: 1387315 - DNA, 15 bp, Homo sapiens
atcttgacacttaag

SEQ ID NO: 1387316 - DNA, 15 bp, Homo sapiens
aatcttgacacttaa

SEQ ID NO: 1387317 - DNA, 15 bp, Homo sapiens
aaatcttgacactta

SEQ ID NO: 1387318 - DNA, 15 bp, Homo sapiens
gaaatcttgacactt

SEQ ID NO: 1387319 - DNA, 15 bp, Homo sapiens
agaaatcttgacact

SEQ ID NO: 1387320 - DNA, 15 bp, Homo sapiens
cagaaatcttgacac

SEQ ID NO: 1387321 - DNA, 15 bp, Homo sapiens
gcagaaatcttgaca

SEQ ID NO: 1387322 - DNA, 15 bp, Homo sapiens
agcagaaatcttgac

SEQ ID NO: 1387323 - DNA, 15 bp, Homo sapiens
aagcagaaatcttga

SEQ ID NO: 1387324 - DNA, 15 bp, Homo sapiens
aaagcagaaatcttg

SEQ ID NO: 1387325 - DNA, 15 bp, Homo sapiens
aaaagcagaaatctt

SEQ ID NO: 1387326 - DNA, 15 bp, Homo sapiens
taaaagcagaaatct

SEQ ID NO: 1387327 - DNA, 15 bp, Homo sapiens
ctaaaagcagaaatc

SEQ ID NO: 1387328 - DNA, 15 bp, Homo sapiens
tctaaaagcagaaat

SEQ ID NO: 1387329 - DNA, 15 bp, Homo sapiens
ttctaaaagcagaaa

SEQ ID NO: 1387330 - DNA, 15 bp, Homo sapiens
attctaaaagcagaa

SEQ ID NO: 1387331 - DNA, 15 bp, Homo sapiens
tattctaaaagcaga

SEQ ID NO: 1387332 - DNA, 15 bp, Homo sapiens
atattctaaaagcag

SEQ ID NO: 1387333 - DNA, 15 bp, Homo sapiens
gatattctaaaagca

SEQ ID NO: 1387334 - DNA, 15 bp, Homo sapiens
ggatattctaaaagc

SEQ ID NO: 1387335 - DNA, 15 bp, Homo sapiens
tggatattctaaaag

SEQ ID NO: 1387336 - DNA, 15 bp, Homo sapiens
gtggatattctaaaa

SEQ ID NO: 1387337 - DNA, 15 bp, Homo sapiens
agtggatattctaaa

SEQ ID NO: 1387338 - DNA, 15 bp, Homo sapiens
gagtggatattctaa

SEQ ID NO: 1387339 - DNA, 15 bp, Homo sapiens
agagtggatattcta

SEQ ID NO: 1387340 - DNA, 15 bp, Homo sapiens
cagagtggatattct

SEQ ID NO: 1387341 - DNA, 15 bp, Homo sapiens
acagagtggatattc

SEQ ID NO: 1387342 - DNA, 15 bp, Homo sapiens
tacagagtggatatt

SEQ ID NO: 1387343 - DNA, 15 bp, Homo sapiens
ttacagagtggatat

SEQ ID NO: 1387344 - DNA, 15 bp, Homo sapiens
tttacagagtggata

SEQ ID NO: 1387345 - DNA, 15 bp, Homo sapiens
ttttacagagtggat

SEQ ID NO: 1387346 - DNA, 15 bp, Homo sapiens
gttttacagagtgga

SEQ ID NO: 1387347 - DNA, 15 bp, Homo sapiens
agttttacagagtgg

SEQ ID NO: 1387348 - DNA, 15 bp, Homo sapiens
gagttttacagagtg

SEQ ID NO: 1387349 - DNA, 15 bp, Homo sapiens
ggagttttacagagt

SEQ ID NO: 1387350 - DNA, 15 bp, Homo sapiens
tggagttttacagag

SEQ ID NO: 1387351 - DNA, 15 bp, Homo sapiens
ttggagttttacaga

SEQ ID NO: 1387352 - DNA, 15 bp, Homo sapiens
attggagttttacag

SEQ ID NO: 1387353 - DNA, 15 bp, Homo sapiens
cattggagttttaca

SEQ ID NO: 1387354 - DNA, 15 bp, Homo sapiens
tcattggagttttac

SEQ ID NO: 1387355 - DNA, 15 bp, Homo sapiens
ttcattggagtttta

SEQ ID NO: 1387356 - DNA, 15 bp, Homo sapiens
attcattggagtttt

SEQ ID NO: 1387357 - DNA, 15 bp, Homo sapiens
tattcattggagttt

SEQ ID NO: 1387358 - DNA, 15 bp, Homo sapiens
ttattcattggagtt

SEQ ID NO: 1387359 - DNA, 15 bp, Homo sapiens
tttattcattggagt

SEQ ID NO: 1387360 - DNA, 15 bp, Homo sapiens
ttttattcattggag

SEQ ID NO: 1387361 - DNA, 15 bp, Homo sapiens
attttattcattgga

SEQ ID NO: 1387362 - DNA, 15 bp, Homo sapiens
tattttattcattgg

SEQ ID NO: 1387363 - DNA, 15 bp, Homo sapiens
atattttattcattg

SEQ ID NO: 1387364 - DNA, 15 bp, Homo sapiens
aatattttattcatt

SEQ ID NO: 1387365 - DNA, 15 bp, Homo sapiens
taatattttattcat

SEQ ID NO: 1387366 - DNA, 15 bp, Homo sapiens
ttaatattttattca

SEQ ID NO: 1387367 - DNA, 15 bp, Homo sapiens
tttaatattttattc

SEQ ID NO: 1387368 - DNA, 15 bp, Homo sapiens
atttaatattttatt

SEQ ID NO: 1387369 - DNA, 15 bp, Homo sapiens
aatttaatattttat

SEQ ID NO: 1387370 - DNA, 15 bp, Homo sapiens
caatttaatatttta

SEQ ID NO: 1387371 - DNA, 15 bp, Homo sapiens
acaatttaatatttt

SEQ ID NO: 1387372 - DNA, 15 bp, Homo sapiens
aacaatttaatattt

SEQ ID NO: 1387373 - DNA, 15 bp, Homo sapiens
caacaatttaatatt

SEQ ID NO: 1387374 - DNA, 15 bp, Homo sapiens
tcaacaatttaatat

SEQ ID NO: 1387375 - DNA, 15 bp, Homo sapiens
atcaacaatttaata

SEQ ID NO: 1387376 - DNA, 15 bp, Homo sapiens
aatcaacaatttaat

SEQ ID NO: 1387377 - DNA, 15 bp, Homo sapiens
caatcaacaatttaa

SEQ ID NO: 1387378 - DNA, 15 bp, Homo sapiens
tcaatcaacaattta

SEQ ID NO: 1387379 - DNA, 15 bp, Homo sapiens
gtcaatcaacaattt

SEQ ID NO: 1387380 - DNA, 15 bp, Homo sapiens
agtcaatcaacaatt

SEQ ID NO: 1387381 - DNA, 15 bp, Homo sapiens
tagtcaatcaacaat

SEQ ID NO: 1387382 - DNA, 15 bp, Homo sapiens
ttagtcaatcaacaa

SEQ ID NO: 1387383 - DNA, 15 bp, Homo sapiens
attagtcaatcaaca

SEQ ID NO: 1387384 - DNA, 15 bp, Homo sapiens
tattagtcaatcaac

SEQ ID NO: 1387385 - DNA, 15 bp, Homo sapiens
ttattagtcaatcaa

SEQ ID NO: 1387386 - DNA, 15 bp, Homo sapiens
cttattagtcaatca

SEQ ID NO: 1387387 - DNA, 15 bp, Homo sapiens
tcttattagtcaatc

SEQ ID NO: 1387388 - DNA, 15 bp, Homo sapiens
ttcttattagtcaat

SEQ ID NO: 1387389 - DNA, 15 bp, Homo sapiens
gttcttattagtcaa

SEQ ID NO: 1387390 - DNA, 15 bp, Homo sapiens
ggttcttattagtca

SEQ ID NO: 1387391 - DNA, 15 bp, Homo sapiens
gggttcttattagtc

SEQ ID NO: 1387392 - DNA, 15 bp, Homo sapiens
tgggttcttattagt

SEQ ID NO: 1387393 - DNA, 15 bp, Homo sapiens
ctgggttcttattag

SEQ ID NO: 1387394 - DNA, 15 bp, Homo sapiens
tctgggttcttatta

SEQ ID NO: 1387395 - DNA, 15 bp, Homo sapiens
ttctgggttcttatt

SEQ ID NO: 1387396 - DNA, 15 bp, Homo sapiens
gttctgggttcttat

SEQ ID NO: 1387397 - DNA, 15 bp, Homo sapiens
agttctgggttctta

SEQ ID NO: 1387398 - DNA, 15 bp, Homo sapiens
gagttctgggttctt

SEQ ID NO: 1387399 - DNA, 15 bp, Homo sapiens
agagttctgggttct

SEQ ID NO: 1387400 - DNA, 15 bp, Homo sapiens
cagagttctgggttc

SEQ ID NO: 1387401 - DNA, 15 bp, Homo sapiens
tcagagttctgggtt

SEQ ID NO: 1387402 - DNA, 15 bp, Homo sapiens
atcagagttctgggt

SEQ ID NO: 1387403 - DNA, 15 bp, Homo sapiens
tatcagagttctggg

SEQ ID NO: 1387404 - DNA, 15 bp, Homo sapiens
ttatcagagttctgg

SEQ ID NO: 1387405 - DNA, 15 bp, Homo sapiens
attatcagagttctg

SEQ ID NO: 1387406 - DNA, 15 bp, Homo sapiens
aattatcagagttct

SEQ ID NO: 1387407 - DNA, 15 bp, Homo sapiens
taattatcagagttc

SEQ ID NO: 1387408 - DNA, 15 bp, Homo sapiens
ttaattatcagagtt

SEQ ID NO: 1387409 - DNA, 15 bp, Homo sapiens
cttaattatcagagt

SEQ ID NO: 1387410 - DNA, 15 bp, Homo sapiens
acttaattatcagag

SEQ ID NO: 1387411 - DNA, 15 bp, Homo sapiens
tacttaattatcaga

SEQ ID NO: 1387412 - DNA, 15 bp, Homo sapiens
ttacttaattatcag

SEQ ID NO: 1387413 - DNA, 15 bp, Homo sapiens
tttacttaattatca

SEQ ID NO: 1387414 - DNA, 15 bp, Homo sapiens
gtttacttaattatc

SEQ ID NO: 1387415 - DNA, 15 bp, Homo sapiens
ggtttacttaattat

SEQ ID NO: 1387416 - DNA, 15 bp, Homo sapiens
aggtttacttaatta

SEQ ID NO: 1387417 - DNA, 15 bp, Homo sapiens
aaggtttacttaatt

SEQ ID NO: 1387418 - DNA, 15 bp, Homo sapiens
aaaggtttacttaat

SEQ ID NO: 1387419 - DNA, 15 bp, Homo sapiens
taaaggtttacttaa

SEQ ID NO: 1387420 - DNA, 15 bp, Homo sapiens
ataaaggtttactta

SEQ ID NO: 1387421 - DNA, 15 bp, Homo sapiens
gataaaggtttactt

SEQ ID NO: 1387422 - DNA, 15 bp, Homo sapiens
tgataaaggtttact

SEQ ID NO: 1387423 - DNA, 15 bp, Homo sapiens
gtgataaaggtttac

SEQ ID NO: 1387424 - DNA, 15 bp, Homo sapiens
tgtgataaaggttta

SEQ ID NO: 1387425 - DNA, 15 bp, Homo sapiens
ttgtgataaaggttt

SEQ ID NO: 1387426 - DNA, 15 bp, Homo sapiens
attgtgataaaggtt

SEQ ID NO: 1387427 - DNA, 15 bp, Homo sapiens
cattgtgataaaggt

SEQ ID NO: 1387428 - DNA, 15 bp, Homo sapiens
tcattgtgataaagg

SEQ ID NO: 1387429 - DNA, 15 bp, Homo sapiens
ttcattgtgataaag

SEQ ID NO: 1387430 - DNA, 15 bp, Homo sapiens
cttcattgtgataaa

SEQ ID NO: 1387431 - DNA, 15 bp, Homo sapiens
acttcattgtgataa

SEQ ID NO: 1387432 - DNA, 15 bp, Homo sapiens
tacttcattgtgata

SEQ ID NO: 1387433 - DNA, 15 bp, Homo sapiens
atacttcattgtgat

SEQ ID NO: 1387434 - DNA, 15 bp, Homo sapiens
aatacttcattgtga

SEQ ID NO: 1387435 - DNA, 15 bp, Homo sapiens
aaatacttcattgtg

SEQ ID NO: 1387436 - DNA, 15 bp, Homo sapiens
taaatacttcattgt

SEQ ID NO: 1387437 - DNA, 15 bp, Homo sapiens
ataaatacttcattg

SEQ ID NO: 1387438 - DNA, 15 bp, Homo sapiens
cataaatacttcatt

SEQ ID NO: 1387439 - DNA, 15 bp, Homo sapiens
acataaatacttcat

SEQ ID NO: 1387440 - DNA, 15 bp, Homo sapiens
aacataaatacttca

SEQ ID NO: 1387441 - DNA, 15 bp, Homo sapiens
caacataaatacttc

SEQ ID NO: 1387442 - DNA, 15 bp, Homo sapiens
tcaacataaatactt

SEQ ID NO: 1387443 - DNA, 15 bp, Homo sapiens
ttcaacataaatact

SEQ ID NO: 1387444 - DNA, 15 bp, Homo sapiens
tttcaacataaatac

SEQ ID NO: 1387445 - DNA, 15 bp, Homo sapiens
atttcaacataaata

SEQ ID NO: 1387446 - DNA, 15 bp, Homo sapiens
catttcaacataaat

SEQ ID NO: 1387447 - DNA, 15 bp, Homo sapiens
tcatttcaacataaa

SEQ ID NO: 1387448 - DNA, 15 bp, Homo sapiens
ctcatttcaacataa

SEQ ID NO: 1387449 - DNA, 15 bp, Homo sapiens
actcatttcaacata

SEQ ID NO: 1387450 - DNA, 15 bp, Homo sapiens
gactcatttcaacat

SEQ ID NO: 1387451 - DNA, 15 bp, Homo sapiens
ggactcatttcaaca

SEQ ID NO: 1387452 - DNA, 15 bp, Homo sapiens
gggactcatttcaac

SEQ ID NO: 1387453 - DNA, 15 bp, Homo sapiens
ggggactcatttcaa

SEQ ID NO: 1387454 - DNA, 15 bp, Homo sapiens
aggggactcatttca

SEQ ID NO: 1387455 - DNA, 15 bp, Homo sapiens
gaggggactcatttc

SEQ ID NO: 1387456 - DNA, 15 bp, Homo sapiens
tgaggggactcattt

SEQ ID NO: 1387457 - DNA, 15 bp, Homo sapiens
atgaggggactcatt

SEQ ID NO: 1387458 - DNA, 15 bp, Homo sapiens
tatgaggggactcat

SEQ ID NO: 1387459 - DNA, 15 bp, Homo sapiens
ttatgaggggactca

SEQ ID NO: 1387460 - DNA, 15 bp, Homo sapiens
attatgaggggactc

SEQ ID NO: 1387461 - DNA, 15 bp, Homo sapiens
tattatgaggggact

SEQ ID NO: 1387462 - DNA, 15 bp, Homo sapiens
ttattatgaggggac

SEQ ID NO: 1387463 - DNA, 15 bp, Homo sapiens
attattatgagggga

SEQ ID NO: 1387464 - DNA, 15 bp, Homo sapiens
aattattatgagggg

SEQ ID NO: 1387465 - DNA, 15 bp, Homo sapiens
aaattattatgaggg

SEQ ID NO: 1387466 - DNA, 15 bp, Homo sapiens
caaattattatgagg

SEQ ID NO: 1387467 - DNA, 15 bp, Homo sapiens
tcaaattattatgag

SEQ ID NO: 1387468 - DNA, 15 bp, Homo sapiens
ttcaaattattatga

SEQ ID NO: 1387469 - DNA, 15 bp, Homo sapiens
attcaaattattatg

SEQ ID NO: 1387470 - DNA, 15 bp, Homo sapiens
gattcaaattattat

SEQ ID NO: 1387471 - DNA, 15 bp, Homo sapiens
tgattcaaattatta

SEQ ID NO: 1387472 - DNA, 15 bp, Homo sapiens
atgattcaaattatt

SEQ ID NO: 1387473 - DNA, 15 bp, Homo sapiens
catgattcaaattat

SEQ ID NO: 1387474 - DNA, 15 bp, Homo sapiens
tcatgattcaaatta

SEQ ID NO: 1387475 - DNA, 15 bp, Homo sapiens
atcatgattcaaatt

SEQ ID NO: 1387476 - DNA, 15 bp, Homo sapiens
aatcatgattcaaat

SEQ ID NO: 1387477 - DNA, 15 bp, Homo sapiens
aaatcatgattcaaa

SEQ ID NO: 1387478 - DNA, 15 bp, Homo sapiens
aaaatcatgattcaa

SEQ ID NO: 1387479 - DNA, 15 bp, Homo sapiens
aaaaatcatgattca

SEQ ID NO: 1387480 - DNA, 15 bp, Homo sapiens
taaaaatcatgattc

SEQ ID NO: 1387481 - DNA, 15 bp, Homo sapiens
ttaaaaatcatgatt

SEQ ID NO: 1387482 - DNA, 15 bp, Homo sapiens
tttaaaaatcatgat

SEQ ID NO: 1387483 - DNA, 15 bp, Homo sapiens
ttttaaaaatcatga

SEQ ID NO: 1387484 - DNA, 15 bp, Homo sapiens
tttttaaaaatcatg

SEQ ID NO: 1387485 - DNA, 15 bp, Homo sapiens
tatttttaaaaatca

SEQ ID NO: 1387486 - DNA, 15 bp, Homo sapiens
atatttttaaaaatc

SEQ ID NO: 1387487 - DNA, 15 bp, Homo sapiens
tatatttttaaaaat

SEQ ID NO: 1387488 - DNA, 15 bp, Homo sapiens
atatatttttaaaaa

SEQ ID NO: 1387489 - DNA, 15 bp, Homo sapiens
gatatatttttaaaa

SEQ ID NO: 1387490 - DNA, 15 bp, Homo sapiens
cgatatatttttaaa

SEQ ID NO: 1387491 - DNA, 15 bp, Homo sapiens
tcgatatatttttaa

SEQ ID NO: 1387492 - DNA, 15 bp, Homo sapiens
ttcgatatattttta

SEQ ID NO: 1387493 - DNA, 15 bp, Homo sapiens
cttcgatatattttt

SEQ ID NO: 1387494 - DNA, 15 bp, Homo sapiens
acttcgatatatttt

SEQ ID NO: 1387495 - DNA, 15 bp, Homo sapiens
aacttcgatatattt

SEQ ID NO: 1387496 - DNA, 15 bp, Homo sapiens
caacttcgatatatt

SEQ ID NO: 1387497 - DNA, 15 bp, Homo sapiens
ccaacttcgatatat

SEQ ID NO: 1387498 - DNA, 15 bp, Homo sapiens
accaacttcgatata

SEQ ID NO: 1387499 - DNA, 15 bp, Homo sapiens
aaccaacttcgatat

SEQ ID NO: 1387500 - DNA, 15 bp, Homo sapiens
aaaccaacttcgata

SEQ ID NO: 1387501 - DNA, 15 bp, Homo sapiens
aaaaccaacttcgat

SEQ ID NO: 1387502 - DNA, 15 bp, Homo sapiens
taaaaccaacttcga

SEQ ID NO: 1387503 - DNA, 15 bp, Homo sapiens
ataaaaccaacttcg

SEQ ID NO: 1387504 - DNA, 15 bp, Homo sapiens
tataaaaccaacttc

SEQ ID NO: 1387505 - DNA, 15 bp, Homo sapiens
atataaaaccaactt

SEQ ID NO: 1387506 - DNA, 15 bp, Homo sapiens
tatataaaaccaact

SEQ ID NO: 1387507 - DNA, 15 bp, Homo sapiens
atatataaaaccaac

SEQ ID NO: 1387508 - DNA, 15 bp, Homo sapiens
aatatataaaaccaa

SEQ ID NO: 1387509 - DNA, 15 bp, Homo sapiens
aaatatataaaacca

SEQ ID NO: 1387510 - DNA, 15 bp, Homo sapiens
aaaatatataaaacc

SEQ ID NO: 1387511 - DNA, 15 bp, Homo sapiens
taaaatatataaaac

SEQ ID NO: 1387512 - DNA, 15 bp, Homo sapiens
tttaaaatatataaa

SEQ ID NO: 1387513 - DNA, 15 bp, Homo sapiens
ctttaaaatatataa

SEQ ID NO: 1387514 - DNA, 15 bp, Homo sapiens
tctttaaaatatata

SEQ ID NO: 1387515 - DNA, 15 bp, Homo sapiens
ttctttaaaatatat

SEQ ID NO: 1387516 - DNA, 15 bp, Homo sapiens
tttctttaaaatata

SEQ ID NO: 1387517 - DNA, 15 bp, Homo sapiens
atttctttaaaatat

SEQ ID NO: 1387518 - DNA, 15 bp, Homo sapiens
tatttctttaaaata

SEQ ID NO: 1387519 - DNA, 15 bp, Homo sapiens
atatttctttaaaat

SEQ ID NO: 1387520 - DNA, 15 bp, Homo sapiens
catatttctttaaaa

SEQ ID NO: 1387521 - DNA, 15 bp, Homo sapiens
tcatatttctttaaa

SEQ ID NO: 1387522 - DNA, 15 bp, Homo sapiens
ttcatatttctttaa

SEQ ID NO: 1387523 - DNA, 15 bp, Homo sapiens
attcatatttcttta

SEQ ID NO: 1387524 - DNA, 15 bp, Homo sapiens
gattcatatttcttt

SEQ ID NO: 1387525 - DNA, 15 bp, Homo sapiens
agattcatatttctt

SEQ ID NO: 1387526 - DNA, 15 bp, Homo sapiens
aagattcatatttct

SEQ ID NO: 1387527 - DNA, 15 bp, Homo sapiens
taagattcatatttc

SEQ ID NO: 1387528 - DNA, 15 bp, Homo sapiens
ataagattcatattt

SEQ ID NO: 1387529 - DNA, 15 bp, Homo sapiens
tataagattcatatt

SEQ ID NO: 1387530 - DNA, 15 bp, Homo sapiens
atataagattcatat

SEQ ID NO: 1387531 - DNA, 15 bp, Homo sapiens
catataagattcata

SEQ ID NO: 1387532 - DNA, 15 bp, Homo sapiens
tcatataagattcat

SEQ ID NO: 1387533 - DNA, 15 bp, Homo sapiens
ttcatataagattca

SEQ ID NO: 1387534 - DNA, 15 bp, Homo sapiens
cttcatataagattc

SEQ ID NO: 1387535 - DNA, 15 bp, Homo sapiens
gcttcatataagatt

SEQ ID NO: 1387536 - DNA, 15 bp, Homo sapiens
agcttcatataagat

SEQ ID NO: 1387537 - DNA, 15 bp, Homo sapiens
tagcttcatataaga

SEQ ID NO: 1387538 - DNA, 15 bp, Homo sapiens
ttagcttcatataag

SEQ ID NO: 1387539 - DNA, 15 bp, Homo sapiens
attagcttcatataa

SEQ ID NO: 1387540 - DNA, 15 bp, Homo sapiens
cattagcttcatata

SEQ ID NO: 1387541 - DNA, 15 bp, Homo sapiens
tcattagcttcatat

SEQ ID NO: 1387542 - DNA, 15 bp, Homo sapiens
ttcattagcttcata

SEQ ID NO: 1387543 - DNA, 15 bp, Homo sapiens
cttcattagcttcat

SEQ ID NO: 1387544 - DNA, 15 bp, Homo sapiens
acttcattagcttca

SEQ ID NO: 1387545 - DNA, 15 bp, Homo sapiens
aacttcattagcttc

SEQ ID NO: 1387546 - DNA, 15 bp, Homo sapiens
gaacttcattagctt

SEQ ID NO: 1387547 - DNA, 15 bp, Homo sapiens
agaacttcattagct

SEQ ID NO: 1387548 - DNA, 15 bp, Homo sapiens
aagaacttcattagc

SEQ ID NO: 1387549 - DNA, 15 bp, Homo sapiens
caagaacttcattag

SEQ ID NO: 1387550 - DNA, 15 bp, Homo sapiens
ccaagaacttcatta

SEQ ID NO: 1387551 - DNA, 15 bp, Homo sapiens
accaagaacttcatt

SEQ ID NO: 1387552 - DNA, 15 bp, Homo sapiens
aaccaagaacttcat

SEQ ID NO: 1387553 - DNA, 15 bp, Homo sapiens
caaccaagaacttca

SEQ ID NO: 1387554 - DNA, 15 bp, Homo sapiens
tcaaccaagaacttc

SEQ ID NO: 1387555 - DNA, 15 bp, Homo sapiens
ctcaaccaagaactt

SEQ ID NO: 1387556 - DNA, 15 bp, Homo sapiens
actcaaccaagaact

SEQ ID NO: 1387557 - DNA, 15 bp, Homo sapiens
aactcaaccaagaac

SEQ ID NO: 1387558 - DNA, 15 bp, Homo sapiens
taactcaaccaagaa

SEQ ID NO: 1387559 - DNA, 15 bp, Homo sapiens
ctaactcaaccaaga

SEQ ID NO: 1387560 - DNA, 15 bp, Homo sapiens
gctaactcaaccaag

SEQ ID NO: 1387561 - DNA, 15 bp, Homo sapiens
tgctaactcaaccaa

SEQ ID NO: 1387562 - DNA, 15 bp, Homo sapiens
atgctaactcaacca

SEQ ID NO: 1387563 - DNA, 15 bp, Homo sapiens
catgctaactcaacc

SEQ ID NO: 1387564 - DNA, 15 bp, Homo sapiens
tcatgctaactcaac

SEQ ID NO: 1387565 - DNA, 15 bp, Homo sapiens
ttcatgctaactcaa

SEQ ID NO: 1387566 - DNA, 15 bp, Homo sapiens
cttcatgctaactca

SEQ ID NO: 1387567 - DNA, 15 bp, Homo sapiens
ccttcatgctaactc

SEQ ID NO: 1387568 - DNA, 15 bp, Homo sapiens
gccttcatgctaact

SEQ ID NO: 1387569 - DNA, 15 bp, Homo sapiens
ggccttcatgctaac

SEQ ID NO: 1387570 - DNA, 15 bp, Homo sapiens
aggccttcatgctaa

SEQ ID NO: 1387571 - DNA, 15 bp, Homo sapiens
aaggccttcatgcta

SEQ ID NO: 1387572 - DNA, 15 bp, Homo sapiens
taaggccttcatgct

SEQ ID NO: 1387573 - DNA, 15 bp, Homo sapiens
ataaggccttcatgc

SEQ ID NO: 1387574 - DNA, 15 bp, Homo sapiens
gataaggccttcatg

SEQ ID NO: 1387575 - DNA, 15 bp, Homo sapiens
agataaggccttcat

SEQ ID NO: 1387576 - DNA, 15 bp, Homo sapiens
gagataaggccttca

SEQ ID NO: 1387577 - DNA, 15 bp, Homo sapiens
ggagataaggccttc

SEQ ID NO: 1387578 - DNA, 15 bp, Homo sapiens
aggagataaggcctt

SEQ ID NO: 1387579 - DNA, 15 bp, Homo sapiens
aaggagataaggcct

SEQ ID NO: 1387580 - DNA, 15 bp, Homo sapiens
aaaggagataaggcc

SEQ ID NO: 1387581 - DNA, 15 bp, Homo sapiens
taaaggagataaggc

SEQ ID NO: 1387582 - DNA, 15 bp, Homo sapiens
ataaaggagataagg

SEQ ID NO: 1387583 - DNA, 15 bp, Homo sapiens
cataaaggagataag

SEQ ID NO: 1387584 - DNA, 15 bp, Homo sapiens
tcataaaggagataa

SEQ ID NO: 1387585 - DNA, 15 bp, Homo sapiens
atcataaaggagata

SEQ ID NO: 1387586 - DNA, 15 bp, Homo sapiens
tatcataaaggagat

SEQ ID NO: 1387587 - DNA, 15 bp, Homo sapiens
atatcataaaggaga

SEQ ID NO: 1387588 - DNA, 15 bp, Homo sapiens
aatatcataaaggag

SEQ ID NO: 1387589 - DNA, 15 bp, Homo sapiens
gaatatcataaagga

SEQ ID NO: 1387590 - DNA, 15 bp, Homo sapiens
tgaatatcataaagg

SEQ ID NO: 1387591 - DNA, 15 bp, Homo sapiens
ttgaatatcataaag

SEQ ID NO: 1387592 - DNA, 15 bp, Homo sapiens
tttgaatatcataaa

SEQ ID NO: 1387593 - DNA, 15 bp, Homo sapiens
ctttgaatatcataa

SEQ ID NO: 1387594 - DNA, 15 bp, Homo sapiens
actttgaatatcata

SEQ ID NO: 1387595 - DNA, 15 bp, Homo sapiens
tactttgaatatcat

SEQ ID NO: 1387596 - DNA, 15 bp, Homo sapiens
ctactttgaatatca

SEQ ID NO: 1387597 - DNA, 15 bp, Homo sapiens
tctactttgaatatc

SEQ ID NO: 1387598 - DNA, 15 bp, Homo sapiens
ttctactttgaatat

SEQ ID NO: 1387599 - DNA, 15 bp, Homo sapiens
tttctactttgaata

SEQ ID NO: 1387600 - DNA, 15 bp, Homo sapiens
atttctactttgaat

SEQ ID NO: 1387601 - DNA, 15 bp, Homo sapiens
aatttctactttgaa

SEQ ID NO: 1387602 - DNA, 15 bp, Homo sapiens
caatttctactttga

SEQ ID NO: 1387603 - DNA, 15 bp, Homo sapiens
ccaatttctactttg

SEQ ID NO: 1387604 - DNA, 15 bp, Homo sapiens
tccaatttctacttt

SEQ ID NO: 1387605 - DNA, 15 bp, Homo sapiens
ttccaatttctactt

SEQ ID NO: 1387606 - DNA, 15 bp, Homo sapiens
attccaatttctact

SEQ ID NO: 1387607 - DNA, 15 bp, Homo sapiens
aattccaatttctac

SEQ ID NO: 1387608 - DNA, 15 bp, Homo sapiens
aaattccaatttcta

SEQ ID NO: 1387609 - DNA, 15 bp, Homo sapiens
taaattccaatttct

SEQ ID NO: 1387610 - DNA, 15 bp, Homo sapiens
gtaaattccaatttc

SEQ ID NO: 1387611 - DNA, 15 bp, Homo sapiens
agtaaattccaattt

SEQ ID NO: 1387612 - DNA, 15 bp, Homo sapiens
cagtaaattccaatt

SEQ ID NO: 1387613 - DNA, 15 bp, Homo sapiens
ccagtaaattccaat

SEQ ID NO: 1387614 - DNA, 15 bp, Homo sapiens
tccagtaaattccaa

SEQ ID NO: 1387615 - DNA, 15 bp, Homo sapiens
atccagtaaattcca

SEQ ID NO: 1387616 - DNA, 15 bp, Homo sapiens
aatccagtaaattcc

SEQ ID NO: 1387617 - DNA, 15 bp, Homo sapiens
gaatccagtaaattc

SEQ ID NO: 1387618 - DNA, 15 bp, Homo sapiens
tgaatccagtaaatt

SEQ ID NO: 1387619 - DNA, 15 bp, Homo sapiens
ctgaatccagtaaat

SEQ ID NO: 1387620 - DNA, 15 bp, Homo sapiens
tctgaatccagtaaa

SEQ ID NO: 1387621 - DNA, 15 bp, Homo sapiens
atctgaatccagtaa

SEQ ID NO: 1387622 - DNA, 15 bp, Homo sapiens
catctgaatccagta

SEQ ID NO: 1387623 - DNA, 15 bp, Homo sapiens
tcatctgaatccagt

SEQ ID NO: 1387624 - DNA, 15 bp, Homo sapiens
atcatctgaatccag

SEQ ID NO: 1387625 - DNA, 15 bp, Homo sapiens
aatcatctgaatcca

SEQ ID NO: 1387626 - DNA, 15 bp, Homo sapiens
taatcatctgaatcc

SEQ ID NO: 1387627 - DNA, 15 bp, Homo sapiens
ttaatcatctgaatc

SEQ ID NO: 1387628 - DNA, 15 bp, Homo sapiens
attaatcatctgaat

SEQ ID NO: 1387629 - DNA, 15 bp, Homo sapiens
cattaatcatctgaa

SEQ ID NO: 1387630 - DNA, 15 bp, Homo sapiens
tcattaatcatctga

SEQ ID NO: 1387631 - DNA, 15 bp, Homo sapiens
ttcattaatcatctg

SEQ ID NO: 1387632 - DNA, 15 bp, Homo sapiens
attcattaatcatct

SEQ ID NO: 1387633 - DNA, 15 bp, Homo sapiens
tattcattaatcatc

SEQ ID NO: 1387634 - DNA, 15 bp, Homo sapiens
atattcattaatcat

SEQ ID NO: 1387635 - DNA, 15 bp, Homo sapiens
tatattcattaatca

SEQ ID NO: 1387636 - DNA, 15 bp, Homo sapiens
atatattcattaatc

SEQ ID NO: 1387637 - DNA, 15 bp, Homo sapiens
aatatattcattaat

SEQ ID NO: 1387638 - DNA, 15 bp, Homo sapiens
aaatatattcattaa

SEQ ID NO: 1387639 - DNA, 15 bp, Homo sapiens
aaaatatattcatta

SEQ ID NO: 1387640 - DNA, 15 bp, Homo sapiens
taaaatatattcatt

SEQ ID NO: 1387641 - DNA, 15 bp, Homo sapiens
ctaaaatatattcat

SEQ ID NO: 1387642 - DNA, 15 bp, Homo sapiens
actaaaatatattca

SEQ ID NO: 1387643 - DNA, 15 bp, Homo sapiens
cactaaaatatattc

SEQ ID NO: 1387644 - DNA, 15 bp, Homo sapiens
tcactaaaatatatt

SEQ ID NO: 1387645 - DNA, 15 bp, Homo sapiens
gtcactaaaatatat

SEQ ID NO: 1387646 - DNA, 15 bp, Homo sapiens
agtcactaaaatata

SEQ ID NO: 1387647 - DNA, 15 bp, Homo sapiens
aagtcactaaaatat

SEQ ID NO: 1387648 - DNA, 15 bp, Homo sapiens
aaagtcactaaaata

SEQ ID NO: 1387649 - DNA, 15 bp, Homo sapiens
aaaagtcactaaaat

SEQ ID NO: 1387650 - DNA, 15 bp, Homo sapiens
taaaagtcactaaaa

SEQ ID NO: 1387651 - DNA, 15 bp, Homo sapiens
ataaaagtcactaaa

SEQ ID NO: 1387652 - DNA, 15 bp, Homo sapiens
aataaaagtcactaa

SEQ ID NO: 1387653 - DNA, 15 bp, Homo sapiens
aaataaaagtcacta

SEQ ID NO: 1387654 - DNA, 15 bp, Homo sapiens
caaataaaagtcact

SEQ ID NO: 1387655 - DNA, 15 bp, Homo sapiens
gcaaataaaagtcac

SEQ ID NO: 1387656 - DNA, 15 bp, Homo sapiens
ggcaaataaaagtca

SEQ ID NO: 1387657 - DNA, 15 bp, Homo sapiens
aggcaaataaaagtc

SEQ ID NO: 1387658 - DNA, 15 bp, Homo sapiens
taggcaaataaaagt

SEQ ID NO: 1387659 - DNA, 15 bp, Homo sapiens
ataggcaaataaaag

SEQ ID NO: 1387660 - DNA, 15 bp, Homo sapiens
aataggcaaataaaa

SEQ ID NO: 1387661 - DNA, 15 bp, Homo sapiens
aaataggcaaataaa

SEQ ID NO: 1387662 - DNA, 15 bp, Homo sapiens
taaataggcaaataa

SEQ ID NO: 1387663 - DNA, 15 bp, Homo sapiens
ataaataggcaaata

SEQ ID NO: 1387664 - DNA, 15 bp, Homo sapiens
tataaataggcaaat

SEQ ID NO: 1387665 - DNA, 15 bp, Homo sapiens
ctataaataggcaaa

SEQ ID NO: 1387666 - DNA, 15 bp, Homo sapiens
cctataaataggcaa

SEQ ID NO: 1387667 - DNA, 15 bp, Homo sapiens
acctataaataggca

SEQ ID NO: 1387668 - DNA, 15 bp, Homo sapiens
aacctataaataggc

SEQ ID NO: 1387669 - DNA, 15 bp, Homo sapiens
taacctataaatagg

SEQ ID NO: 1387670 - DNA, 15 bp, Homo sapiens
ttaacctataaatag

SEQ ID NO: 1387671 - DNA, 15 bp, Homo sapiens
gttaacctataaata

SEQ ID NO: 1387672 - DNA, 15 bp, Homo sapiens
agttaacctataaat

SEQ ID NO: 1387673 - DNA, 15 bp, Homo sapiens
tagttaacctataaa

SEQ ID NO: 1387674 - DNA, 15 bp, Homo sapiens
ctagttaacctataa

SEQ ID NO: 1387675 - DNA, 15 bp, Homo sapiens
gctagttaacctata

SEQ ID NO: 1387676 - DNA, 15 bp, Homo sapiens
tgctagttaacctat

SEQ ID NO: 1387677 - DNA, 15 bp, Homo sapiens
atgctagttaaccta

SEQ ID NO: 1387678 - DNA, 15 bp, Homo sapiens
gatgctagttaacct

SEQ ID NO: 1387679 - DNA, 15 bp, Homo sapiens
cgatgctagttaacc

SEQ ID NO: 1387680 - DNA, 15 bp, Homo sapiens
tcgatgctagttaac

SEQ ID NO: 1387681 - DNA, 15 bp, Homo sapiens
ttcgatgctagttaa

SEQ ID NO: 1387682 - DNA, 15 bp, Homo sapiens
attcgatgctagtta

SEQ ID NO: 1387683 - DNA, 15 bp, Homo sapiens
cattcgatgctagtt

SEQ ID NO: 1387684 - DNA, 15 bp, Homo sapiens
ccattcgatgctagt

SEQ ID NO: 1387685 - DNA, 15 bp, Homo sapiens
cccattcgatgctag

SEQ ID NO: 1387686 - DNA, 15 bp, Homo sapiens
ccccattcgatgcta

SEQ ID NO: 1387687 - DNA, 15 bp, Homo sapiens
accccattcgatgct

SEQ ID NO: 1387688 - DNA, 15 bp, Homo sapiens
gaccccattcgatgc

SEQ ID NO: 1387689 - DNA, 15 bp, Homo sapiens
tgaccccattcgatg

SEQ ID NO: 1387690 - DNA, 15 bp, Homo sapiens
atgaccccattcgat

SEQ ID NO: 1387691 - DNA, 15 bp, Homo sapiens
catgaccccattcga

SEQ ID NO: 1387692 - DNA, 15 bp, Homo sapiens
ccatgaccccattcg

SEQ ID NO: 1387693 - DNA, 15 bp, Homo sapiens
gccatgaccccattc

SEQ ID NO: 1387694 - DNA, 15 bp, Homo sapiens
ggccatgaccccatt

SEQ ID NO: 1387695 - DNA, 15 bp, Homo sapiens
aggccatgaccccat

SEQ ID NO: 1387696 - DNA, 15 bp, Homo sapiens
aaggccatgacccca

SEQ ID NO: 1387697 - DNA, 15 bp, Homo sapiens
caaggccatgacccc

SEQ ID NO: 1387698 - DNA, 15 bp, Homo sapiens
ccaaggccatgaccc

SEQ ID NO: 1387699 - DNA, 15 bp, Homo sapiens
gccaaggccatgacc

SEQ ID NO: 1387700 - DNA, 15 bp, Homo sapiens
agccaaggccatgac

SEQ ID NO: 1387701 - DNA, 15 bp, Homo sapiens
tagccaaggccatga

SEQ ID NO: 1387702 - DNA, 15 bp, Homo sapiens
atagccaaggccatg

SEQ ID NO: 1387703 - DNA, 15 bp, Homo sapiens
aatagccaaggccat

SEQ ID NO: 1387704 - DNA, 15 bp, Homo sapiens
caatagccaaggcca

SEQ ID NO: 1387705 - DNA, 15 bp, Homo sapiens
ccaatagccaaggcc

SEQ ID NO: 1387706 - DNA, 15 bp, Homo sapiens
tccaatagccaaggc

SEQ ID NO: 1387707 - DNA, 15 bp, Homo sapiens
ctccaatagccaagg

SEQ ID NO: 1387708 - DNA, 15 bp, Homo sapiens
actccaatagccaag

SEQ ID NO: 1387709 - DNA, 15 bp, Homo sapiens
gactccaatagccaa

SEQ ID NO: 1387710 - DNA, 15 bp, Homo sapiens
agactccaatagcca

SEQ ID NO: 1387711 - DNA, 15 bp, Homo sapiens
tagactccaatagcc

SEQ ID NO: 1387712 - DNA, 15 bp, Homo sapiens
ctagactccaatagc

SEQ ID NO: 1387713 - DNA, 15 bp, Homo sapiens
tctagactccaatag

SEQ ID NO: 1387714 - DNA, 15 bp, Homo sapiens
atctagactccaata

SEQ ID NO: 1387715 - DNA, 15 bp, Homo sapiens
catctagactccaat

SEQ ID NO: 1387716 - DNA, 15 bp, Homo sapiens
acatctagactccaa

SEQ ID NO: 1387717 - DNA, 15 bp, Homo sapiens
cacatctagactcca

SEQ ID NO: 1387718 - DNA, 15 bp, Homo sapiens
acacatctagactcc

SEQ ID NO: 1387719 - DNA, 15 bp, Homo sapiens
cacacatctagactc

SEQ ID NO: 1387720 - DNA, 15 bp, Homo sapiens
acacacatctagact

SEQ ID NO: 1387721 - DNA, 15 bp, Homo sapiens
aacacacatctagac

SEQ ID NO: 1387722 - DNA, 15 bp, Homo sapiens
gaacacacatctaga

SEQ ID NO: 1387723 - DNA, 15 bp, Homo sapiens
ggaacacacatctag

SEQ ID NO: 1387724 - DNA, 15 bp, Homo sapiens
tggaacacacatcta

SEQ ID NO: 1387725 - DNA, 15 bp, Homo sapiens
atggaacacacatct

SEQ ID NO: 1387726 - DNA, 15 bp, Homo sapiens
gatggaacacacatc

SEQ ID NO: 1387727 - DNA, 15 bp, Homo sapiens
agatggaacacacat

SEQ ID NO: 1387728 - DNA, 15 bp, Homo sapiens
cagatggaacacaca

SEQ ID NO: 1387729 - DNA, 15 bp, Homo sapiens
tcagatggaacacac

SEQ ID NO: 1387730 - DNA, 15 bp, Homo sapiens
ctcagatggaacaca

SEQ ID NO: 1387731 - DNA, 15 bp, Homo sapiens
tctcagatggaacac

SEQ ID NO: 1387732 - DNA, 15 bp, Homo sapiens
ttctcagatggaaca

SEQ ID NO: 1387733 - DNA, 15 bp, Homo sapiens
tttctcagatggaac

SEQ ID NO: 1387734 - DNA, 15 bp, Homo sapiens
ttttctcagatggaa

SEQ ID NO: 1387735 - DNA, 15 bp, Homo sapiens
attttctcagatgga

SEQ ID NO: 1387736 - DNA, 15 bp, Homo sapiens
tattttctcagatgg

SEQ ID NO: 1387737 - DNA, 15 bp, Homo sapiens
gtattttctcagatg

SEQ ID NO: 1387738 - DNA, 15 bp, Homo sapiens
agtattttctcagat

SEQ ID NO: 1387739 - DNA, 15 bp, Homo sapiens
aagtattttctcaga

SEQ ID NO: 1387740 - DNA, 15 bp, Homo sapiens
aaagtattttctcag

SEQ ID NO: 1387741 - DNA, 15 bp, Homo sapiens
caaagtattttctca

SEQ ID NO: 1387742 - DNA, 15 bp, Homo sapiens
acaaagtattttctc

SEQ ID NO: 1387743 - DNA, 15 bp, Homo sapiens
aacaaagtattttct

SEQ ID NO: 1387744 - DNA, 15 bp, Homo sapiens
aaacaaagtattttc

SEQ ID NO: 1387745 - DNA, 15 bp, Homo sapiens
taaacaaagtatttt

SEQ ID NO: 1387746 - DNA, 15 bp, Homo sapiens
ctaaacaaagtattt

SEQ ID NO: 1387747 - DNA, 15 bp, Homo sapiens
actaaacaaagtatt

SEQ ID NO: 1387748 - DNA, 15 bp, Homo sapiens
cactaaacaaagtat

SEQ ID NO: 1387749 - DNA, 15 bp, Homo sapiens
acactaaacaaagta

SEQ ID NO: 1387750 - DNA, 15 bp, Homo sapiens
cacactaaacaaagt

SEQ ID NO: 1387751 - DNA, 15 bp, Homo sapiens
acacactaaacaaag

SEQ ID NO: 1387752 - DNA, 15 bp, Homo sapiens
tacacactaaacaaa

SEQ ID NO: 1387753 - DNA, 15 bp, Homo sapiens
atacacactaaacaa

SEQ ID NO: 1387754 - DNA, 15 bp, Homo sapiens
aatacacactaaaca

SEQ ID NO: 1387755 - DNA, 15 bp, Homo sapiens
aaatacacactaaac

SEQ ID NO: 1387756 - DNA, 15 bp, Homo sapiens
aaaatacacactaaa

SEQ ID NO: 1387757 - DNA, 15 bp, Homo sapiens
taaaatacacactaa

SEQ ID NO: 1387758 - DNA, 15 bp, Homo sapiens
gtaaaatacacacta

SEQ ID NO: 1387759 - DNA, 15 bp, Homo sapiens
tgtaaaatacacact

SEQ ID NO: 1387760 - DNA, 15 bp, Homo sapiens
atgtaaaatacacac

SEQ ID NO: 1387761 - DNA, 15 bp, Homo sapiens
aatgtaaaatacaca

SEQ ID NO: 1387762 - DNA, 15 bp, Homo sapiens
taatgtaaaatacac

SEQ ID NO: 1387763 - DNA, 15 bp, Homo sapiens
gtaatgtaaaataca

SEQ ID NO: 1387764 - DNA, 15 bp, Homo sapiens
agtaatgtaaaatac

SEQ ID NO: 1387765 - DNA, 15 bp, Homo sapiens
aagtaatgtaaaata

SEQ ID NO: 1387766 - DNA, 15 bp, Homo sapiens
caagtaatgtaaaat

SEQ ID NO: 1387767 - DNA, 15 bp, Homo sapiens
tcaagtaatgtaaaa

SEQ ID NO: 1387768 - DNA, 15 bp, Homo sapiens
ctcaagtaatgtaaa

SEQ ID NO: 1387769 - DNA, 15 bp, Homo sapiens
actcaagtaatgtaa

SEQ ID NO: 1387770 - DNA, 15 bp, Homo sapiens
aactcaagtaatgta

SEQ ID NO: 1387771 - DNA, 15 bp, Homo sapiens
aaactcaagtaatgt

SEQ ID NO: 1387772 - DNA, 15 bp, Homo sapiens
gaaactcaagtaatg

SEQ ID NO: 1387773 - DNA, 15 bp, Homo sapiens
tgaaactcaagtaat

SEQ ID NO: 1387774 - DNA, 15 bp, Homo sapiens
ctgaaactcaagtaa

SEQ ID NO: 1387775 - DNA, 15 bp, Homo sapiens
tctgaaactcaagta

SEQ ID NO: 1387776 - DNA, 15 bp, Homo sapiens
atctgaaactcaagt

SEQ ID NO: 1387777 - DNA, 15 bp, Homo sapiens
tatctgaaactcaag

SEQ ID NO: 1387778 - DNA, 15 bp, Homo sapiens
ttatctgaaactcaa

SEQ ID NO: 1387779 - DNA, 15 bp, Homo sapiens
attatctgaaactca

SEQ ID NO: 1387780 - DNA, 15 bp, Homo sapiens
aattatctgaaactc

SEQ ID NO: 1387781 - DNA, 15 bp, Homo sapiens
gaattatctgaaact

SEQ ID NO: 1387782 - DNA, 15 bp, Homo sapiens
tgaattatctgaaac

SEQ ID NO: 1387783 - DNA, 15 bp, Homo sapiens
ttgaattatctgaaa

SEQ ID NO: 1387784 - DNA, 15 bp, Homo sapiens
gttgaattatctgaa

SEQ ID NO: 1387785 - DNA, 15 bp, Homo sapiens
agttgaattatctga

SEQ ID NO: 1387786 - DNA, 15 bp, Homo sapiens
cagttgaattatctg

SEQ ID NO: 1387787 - DNA, 15 bp, Homo sapiens
tcagttgaattatct

SEQ ID NO: 1387788 - DNA, 15 bp, Homo sapiens
ttcagttgaattatc

SEQ ID NO: 1387789 - DNA, 15 bp, Homo sapiens
tttcagttgaattat

SEQ ID NO: 1387790 - DNA, 15 bp, Homo sapiens
atttcagttgaatta

SEQ ID NO: 1387791 - DNA, 15 bp, Homo sapiens
aatttcagttgaatt

SEQ ID NO: 1387792 - DNA, 15 bp, Homo sapiens
aaatttcagttgaat

SEQ ID NO: 1387793 - DNA, 15 bp, Homo sapiens
aaaatttcagttgaa

SEQ ID NO: 1387794 - DNA, 15 bp, Homo sapiens
aaaaatttcagttga

SEQ ID NO: 1387795 - DNA, 15 bp, Homo sapiens
aaaaaatttcagttg

SEQ ID NO: 1387796 - DNA, 15 bp, Homo sapiens
caaaaaatttcagtt

SEQ ID NO: 1387797 - DNA, 15 bp, Homo sapiens
acaaaaaatttcagt

SEQ ID NO: 1387798 - DNA, 15 bp, Homo sapiens
aacaaaaaatttcag

SEQ ID NO: 1387799 - DNA, 15 bp, Homo sapiens
taacaaaaaatttca

SEQ ID NO: 1387800 - DNA, 15 bp, Homo sapiens
ataacaaaaaatttc

SEQ ID NO: 1387801 - DNA, 15 bp, Homo sapiens
tataacaaaaaattt

SEQ ID NO: 1387802 - DNA, 15 bp, Homo sapiens
ttataacaaaaaatt

SEQ ID NO: 1387803 - DNA, 15 bp, Homo sapiens
tttataacaaaaaat

SEQ ID NO: 1387804 - DNA, 15 bp, Homo sapiens
ttttataacaaaaaa

SEQ ID NO: 1387805 - DNA, 15 bp, Homo sapiens
attttataacaaaaa

SEQ ID NO: 1387806 - DNA, 15 bp, Homo sapiens
aattttataacaaaa

SEQ ID NO: 1387807 - DNA, 15 bp, Homo sapiens
aaattttataacaaa

SEQ ID NO: 1387808 - DNA, 15 bp, Homo sapiens
taaattttataacaa

SEQ ID NO: 1387809 - DNA, 15 bp, Homo sapiens
ataaattttataaca

SEQ ID NO: 1387810 - DNA, 15 bp, Homo sapiens
aataaattttataac

SEQ ID NO: 1387811 - DNA, 15 bp, Homo sapiens
gaataaattttataa

SEQ ID NO: 1387812 - DNA, 15 bp, Homo sapiens
tgaataaattttata

SEQ ID NO: 1387813 - DNA, 15 bp, Homo sapiens
ttgaataaattttat

SEQ ID NO: 1387814 - DNA, 15 bp, Homo sapiens
tttgaataaatttta

SEQ ID NO: 1387815 - DNA, 15 bp, Homo sapiens
ctttgaataaatttt

SEQ ID NO: 1387816 - DNA, 15 bp, Homo sapiens
actttgaataaattt

SEQ ID NO: 1387817 - DNA, 15 bp, Homo sapiens
tactttgaataaatt

SEQ ID NO: 1387818 - DNA, 15 bp, Homo sapiens
ttactttgaataaat

SEQ ID NO: 1387819 - DNA, 15 bp, Homo sapiens
tttactttgaataaa

SEQ ID NO: 1387820 - DNA, 15 bp, Homo sapiens
atttactttgaataa

SEQ ID NO: 1387821 - DNA, 15 bp, Homo sapiens
tatttactttgaata

SEQ ID NO: 1387822 - DNA, 15 bp, Homo sapiens
ctatttactttgaat

SEQ ID NO: 1387823 - DNA, 15 bp, Homo sapiens
cctatttactttgaa

SEQ ID NO: 1387824 - DNA, 15 bp, Homo sapiens
acctatttactttga

SEQ ID NO: 1387825 - DNA, 15 bp, Homo sapiens
cacctatttactttg

SEQ ID NO: 1387826 - DNA, 15 bp, Homo sapiens
tcacctatttacttt

SEQ ID NO: 1387827 - DNA, 15 bp, Homo sapiens
ttcacctatttactt

SEQ ID NO: 1387828 - DNA, 15 bp, Homo sapiens
tttcacctatttact

SEQ ID NO: 1387829 - DNA, 15 bp, Homo sapiens
ttttcacctatttac

SEQ ID NO: 1387830 - DNA, 15 bp, Homo sapiens
tttttcacctattta

SEQ ID NO: 1387831 - DNA, 15 bp, Homo sapiens
ttttttcacctattt

SEQ ID NO: 1387832 - DNA, 15 bp, Homo sapiens
attttttcacctatt

SEQ ID NO: 1387833 - DNA, 15 bp, Homo sapiens
cattttttcacctat

SEQ ID NO: 1387834 - DNA, 15 bp, Homo sapiens
acattttttcaccta

SEQ ID NO: 1387835 - DNA, 15 bp, Homo sapiens
aacattttttcacct

SEQ ID NO: 1387836 - DNA, 15 bp, Homo sapiens
aaacattttttcacc

SEQ ID NO: 1387837 - DNA, 15 bp, Homo sapiens
aaaacattttttcac

SEQ ID NO: 1387838 - DNA, 15 bp, Homo sapiens
aaaaacattttttca

SEQ ID NO: 1387839 - DNA, 15 bp, Homo sapiens
caaaaacattttttc

SEQ ID NO: 1387840 - DNA, 15 bp, Homo sapiens
tcaaaaacatttttt

SEQ ID NO: 1387841 - DNA, 15 bp, Homo sapiens
ttcaaaaacattttt

SEQ ID NO: 1387842 - DNA, 15 bp, Homo sapiens
tttcaaaaacatttt

SEQ ID NO: 1387843 - DNA, 15 bp, Homo sapiens
ctttcaaaaacattt

SEQ ID NO: 1387844 - DNA, 15 bp, Homo sapiens
cctttcaaaaacatt

SEQ ID NO: 1387845 - DNA, 15 bp, Homo sapiens
ccctttcaaaaacat

SEQ ID NO: 1387846 - DNA, 15 bp, Homo sapiens
tccctttcaaaaaca

SEQ ID NO: 1387847 - DNA, 15 bp, Homo sapiens
ttccctttcaaaaac

SEQ ID NO: 1387848 - DNA, 15 bp, Homo sapiens
gttccctttcaaaaa

SEQ ID NO: 1387849 - DNA, 15 bp, Homo sapiens
ggttccctttcaaaa

SEQ ID NO: 1387850 - DNA, 15 bp, Homo sapiens
aggttccctttcaaa

SEQ ID NO: 1387851 - DNA, 15 bp, Homo sapiens
gaggttccctttcaa

SEQ ID NO: 1387852 - DNA, 15 bp, Homo sapiens
agaggttccctttca

SEQ ID NO: 1387853 - DNA, 15 bp, Homo sapiens
tagaggttccctttc

SEQ ID NO: 1387854 - DNA, 15 bp, Homo sapiens
gtagaggttcccttt

SEQ ID NO: 1387855 - DNA, 15 bp, Homo sapiens
tgtagaggttccctt

SEQ ID NO: 1387856 - DNA, 15 bp, Homo sapiens
gtgtagaggttccct

SEQ ID NO: 1387857 - DNA, 15 bp, Homo sapiens
tgtgtagaggttccc

SEQ ID NO: 1387858 - DNA, 15 bp, Homo sapiens
gtgtgtagaggttcc

SEQ ID NO: 1387859 - DNA, 15 bp, Homo sapiens
agtgtgtagaggttc

SEQ ID NO: 1387860 - DNA, 15 bp, Homo sapiens
gagtgtgtagaggtt

SEQ ID NO: 1387861 - DNA, 15 bp, Homo sapiens
agagtgtgtagaggt

SEQ ID NO: 1387862 - DNA, 15 bp, Homo sapiens
tagagtgtgtagagg

SEQ ID NO: 1387863 - DNA, 15 bp, Homo sapiens
ttagagtgtgtagag

SEQ ID NO: 1387864 - DNA, 15 bp, Homo sapiens
tttagagtgtgtaga

SEQ ID NO: 1387865 - DNA, 15 bp, Homo sapiens
ttttagagtgtgtag

SEQ ID NO: 1387866 - DNA, 15 bp, Homo sapiens
attttagagtgtgta

SEQ ID NO: 1387867 - DNA, 15 bp, Homo sapiens
tattttagagtgtgt

SEQ ID NO: 1387868 - DNA, 15 bp, Homo sapiens
ttattttagagtgtg

SEQ ID NO: 1387869 - DNA, 15 bp, Homo sapiens
aattattttagagtg

SEQ ID NO: 1387870 - DNA, 15 bp, Homo sapiens
aaattattttagagt

SEQ ID NO: 1387871 - DNA, 15 bp, Homo sapiens
taaattattttagag

SEQ ID NO: 1387872 - DNA, 15 bp, Homo sapiens
ataaattattttaga

SEQ ID NO: 1387873 - DNA, 15 bp, Homo sapiens
tataaattattttag

SEQ ID NO: 1387874 - DNA, 15 bp, Homo sapiens
ttataaattatttta

SEQ ID NO: 1387875 - DNA, 15 bp, Homo sapiens
tttataaattatttt

SEQ ID NO: 1387876 - DNA, 15 bp, Homo sapiens
ttttataaattattt

SEQ ID NO: 1387877 - DNA, 15 bp, Homo sapiens
attttataaattatt

SEQ ID NO: 1387878 - DNA, 15 bp, Homo sapiens
tattttataaattat

SEQ ID NO: 1387879 - DNA, 15 bp, Homo sapiens
gtattttataaatta

SEQ ID NO: 1387880 - DNA, 15 bp, Homo sapiens
tgtattttataaatt

SEQ ID NO: 1387881 - DNA, 15 bp, Homo sapiens
ttgtattttataaat

SEQ ID NO: 1387882 - DNA, 15 bp, Homo sapiens
tttgtattttataaa

SEQ ID NO: 1387883 - DNA, 15 bp, Homo sapiens
atttgtattttataa

SEQ ID NO: 1387884 - DNA, 15 bp, Homo sapiens
aatttgtattttata

SEQ ID NO: 1387885 - DNA, 15 bp, Homo sapiens
aaatttgtattttat

SEQ ID NO: 1387886 - DNA, 15 bp, Homo sapiens
taaatttgtatttta

SEQ ID NO: 1387887 - DNA, 15 bp, Homo sapiens
ataaatttgtatttt

SEQ ID NO: 1387888 - DNA, 15 bp, Homo sapiens
tataaatttgtattt

SEQ ID NO: 1387889 - DNA, 15 bp, Homo sapiens
ttataaatttgtatt

SEQ ID NO: 1387890 - DNA, 15 bp, Homo sapiens
tttataaatttgtat

SEQ ID NO: 1387891 - DNA, 15 bp, Homo sapiens
ttttataaatttgta

SEQ ID NO: 1387892 - DNA, 15 bp, Homo sapiens
attttataaatttgt

SEQ ID NO: 1387893 - DNA, 15 bp, Homo sapiens
tattttataaatttg

SEQ ID NO: 1387894 - DNA, 15 bp, Homo sapiens
ttattttataaattt

SEQ ID NO: 1387895 - DNA, 15 bp, Homo sapiens
tttattttataaatt

SEQ ID NO: 1387896 - DNA, 15 bp, Homo sapiens
atttattttataaat

SEQ ID NO: 1387897 - DNA, 15 bp, Homo sapiens
tatttattttataaa

SEQ ID NO: 1387898 - DNA, 15 bp, Homo sapiens
ttatttattttataa

SEQ ID NO: 1387899 - DNA, 15 bp, Homo sapiens
cttatttattttata

SEQ ID NO: 1387900 - DNA, 15 bp, Homo sapiens
ccttatttattttat

SEQ ID NO: 1387901 - DNA, 15 bp, Homo sapiens
ctccttatttatttt

SEQ ID NO: 1387902 - DNA, 15 bp, Homo sapiens
tctccttatttattt

SEQ ID NO: 1387903 - DNA, 15 bp, Homo sapiens
atctccttatttatt

SEQ ID NO: 1387904 - DNA, 15 bp, Homo sapiens
aatctccttatttat

SEQ ID NO: 1387905 - DNA, 15 bp, Homo sapiens
caatctccttattta

SEQ ID NO: 1387906 - DNA, 15 bp, Homo sapiens
acaatctccttattt

SEQ ID NO: 1387907 - DNA, 15 bp, Homo sapiens
aacaatctccttatt

SEQ ID NO: 1387908 - DNA, 15 bp, Homo sapiens
taacaatctccttat

SEQ ID NO: 1387909 - DNA, 15 bp, Homo sapiens
gtaacaatctcctta

SEQ ID NO: 1387910 - DNA, 15 bp, Homo sapiens
agtaacaatctcctt

SEQ ID NO: 1387911 - DNA, 15 bp, Homo sapiens
gagtaacaatctcct

SEQ ID NO: 1387912 - DNA, 15 bp, Homo sapiens
ggagtaacaatctcc

SEQ ID NO: 1387913 - DNA, 15 bp, Homo sapiens
aggagtaacaatctc

SEQ ID NO: 1387914 - DNA, 15 bp, Homo sapiens
aaggagtaacaatct

SEQ ID NO: 1387915 - DNA, 15 bp, Homo sapiens
aaaggagtaacaatc

SEQ ID NO: 1387916 - DNA, 15 bp, Homo sapiens
caaaggagtaacaat

SEQ ID NO: 1387917 - DNA, 15 bp, Homo sapiens
acaaaggagtaacaa

SEQ ID NO: 1387918 - DNA, 15 bp, Homo sapiens
tacaaaggagtaaca

SEQ ID NO: 1387919 - DNA, 15 bp, Homo sapiens
ttacaaaggagtaac

SEQ ID NO: 1387920 - DNA, 15 bp, Homo sapiens
tttacaaaggagtaa

SEQ ID NO: 1387921 - DNA, 15 bp, Homo sapiens
ttttacaaaggagta

SEQ ID NO: 1387922 - DNA, 15 bp, Homo sapiens
attttacaaaggagt

SEQ ID NO: 1387923 - DNA, 15 bp, Homo sapiens
cattttacaaaggag

SEQ ID NO: 1387924 - DNA, 15 bp, Homo sapiens
ccattttacaaagga

SEQ ID NO: 1387925 - DNA, 15 bp, Homo sapiens
accattttacaaagg

SEQ ID NO: 1387926 - DNA, 15 bp, Homo sapiens
taccattttacaaag

SEQ ID NO: 1387927 - DNA, 15 bp, Homo sapiens
gtaccattttacaaa

SEQ ID NO: 1387928 - DNA, 15 bp, Homo sapiens
agtaccattttacaa

SEQ ID NO: 1387929 - DNA, 15 bp, Homo sapiens
gagtaccattttaca

SEQ ID NO: 1387930 - DNA, 15 bp, Homo sapiens
agagtaccattttac

SEQ ID NO: 1387931 - DNA, 15 bp, Homo sapiens
aagagtaccatttta

SEQ ID NO: 1387932 - DNA, 15 bp, Homo sapiens
aaagagtaccatttt

SEQ ID NO: 1387933 - DNA, 15 bp, Homo sapiens
caaagagtaccattt

SEQ ID NO: 1387934 - DNA, 15 bp, Homo sapiens
gcaaagagtaccatt

SEQ ID NO: 1387935 - DNA, 15 bp, Homo sapiens
agcaaagagtaccat

SEQ ID NO: 1387936 - DNA, 15 bp, Homo sapiens
tagcaaagagtacca

SEQ ID NO: 1387937 - DNA, 15 bp, Homo sapiens
atagcaaagagtacc

SEQ ID NO: 1387938 - DNA, 15 bp, Homo sapiens
catagcaaagagtac

SEQ ID NO: 1387939 - DNA, 15 bp, Homo sapiens
ccatagcaaagagta

SEQ ID NO: 1387940 - DNA, 15 bp, Homo sapiens
accatagcaaagagt

SEQ ID NO: 1387941 - DNA, 15 bp, Homo sapiens
taccatagcaaagag

SEQ ID NO: 1387942 - DNA, 15 bp, Homo sapiens
ctaccatagcaaaga

SEQ ID NO: 1387943 - DNA, 15 bp, Homo sapiens
tctaccatagcaaag

SEQ ID NO: 1387944 - DNA, 15 bp, Homo sapiens
ttctaccatagcaaa

SEQ ID NO: 1387945 - DNA, 15 bp, Homo sapiens
tttctaccatagcaa

SEQ ID NO: 1387946 - DNA, 15 bp, Homo sapiens
gtttctaccatagca

SEQ ID NO: 1387947 - DNA, 15 bp, Homo sapiens
tgtttctaccatagc

SEQ ID NO: 1387948 - DNA, 15 bp, Homo sapiens
atgtttctaccatag

SEQ ID NO: 1387949 - DNA, 15 bp, Homo sapiens
gatgtttctaccata

SEQ ID NO: 1387950 - DNA, 15 bp, Homo sapiens
tgatgtttctaccat

SEQ ID NO: 1387951 - DNA, 15 bp, Homo sapiens
atgatgtttctacca

SEQ ID NO: 1387952 - DNA, 15 bp, Homo sapiens
catgatgtttctacc

SEQ ID NO: 1387953 - DNA, 15 bp, Homo sapiens
ccatgatgtttctac

SEQ ID NO: 1387954 - DNA, 15 bp, Homo sapiens
accatgatgtttcta

SEQ ID NO: 1387955 - DNA, 15 bp, Homo sapiens
taccatgatgtttct

SEQ ID NO: 1387956 - DNA, 15 bp, Homo sapiens
gtaccatgatgtttc

SEQ ID NO: 1387957 - DNA, 15 bp, Homo sapiens
tgtaccatgatgttt

SEQ ID NO: 1387958 - DNA, 15 bp, Homo sapiens
ctgtaccatgatgtt

SEQ ID NO: 1387959 - DNA, 15 bp, Homo sapiens
actgtaccatgatgt

SEQ ID NO: 1387960 - DNA, 15 bp, Homo sapiens
tactgtaccatgatg

SEQ ID NO: 1387961 - DNA, 15 bp, Homo sapiens
ttactgtaccatgat

SEQ ID NO: 1387962 - DNA, 15 bp, Homo sapiens
tttactgtaccatga

SEQ ID NO: 1387963 - DNA, 15 bp, Homo sapiens
atttactgtaccatg

SEQ ID NO: 1387964 - DNA, 15 bp, Homo sapiens
tatttactgtaccat

SEQ ID NO: 1387965 - DNA, 15 bp, Homo sapiens
atatttactgtacca

SEQ ID NO: 1387966 - DNA, 15 bp, Homo sapiens
aatatttactgtacc

SEQ ID NO: 1387967 - DNA, 15 bp, Homo sapiens
gaatatttactgtac

SEQ ID NO: 1387968 - DNA, 15 bp, Homo sapiens
ggaatatttactgta

SEQ ID NO: 1387969 - DNA, 15 bp, Homo sapiens
gggaatatttactgt

SEQ ID NO: 1387970 - DNA, 15 bp, Homo sapiens
tgggaatatttactg

SEQ ID NO: 1387971 - DNA, 15 bp, Homo sapiens
atgggaatatttact

SEQ ID NO: 1387972 - DNA, 15 bp, Homo sapiens
aatgggaatatttac

SEQ ID NO: 1387973 - DNA, 15 bp, Homo sapiens
caatgggaatattta

SEQ ID NO: 1387974 - DNA, 15 bp, Homo sapiens
tcaatgggaatattt

SEQ ID NO: 1387975 - DNA, 15 bp, Homo sapiens
ctcaatgggaatatt

SEQ ID NO: 1387976 - DNA, 15 bp, Homo sapiens
gctcaatgggaatat

SEQ ID NO: 1387977 - DNA, 15 bp, Homo sapiens
agctcaatgggaata

SEQ ID NO: 1387978 - DNA, 15 bp, Homo sapiens
aagctcaatgggaat

SEQ ID NO: 1387979 - DNA, 15 bp, Homo sapiens
gaagctcaatgggaa

SEQ ID NO: 1387980 - DNA, 15 bp, Homo sapiens
ggaagctcaatggga

SEQ ID NO: 1387981 - DNA, 15 bp, Homo sapiens
gggaagctcaatggg

SEQ ID NO: 1387982 - DNA, 15 bp, Homo sapiens
tgggaagctcaatgg

SEQ ID NO: 1387983 - DNA, 15 bp, Homo sapiens
gtgggaagctcaatg

SEQ ID NO: 1387984 - DNA, 15 bp, Homo sapiens
ggtgggaagctcaat

SEQ ID NO: 1387985 - DNA, 15 bp, Homo sapiens
tggtgggaagctcaa

SEQ ID NO: 1387986 - DNA, 15 bp, Homo sapiens
atggtgggaagctca

SEQ ID NO: 1387987 - DNA, 15 bp, Homo sapiens
tatggtgggaagctc

SEQ ID NO: 1387988 - DNA, 15 bp, Homo sapiens
atatggtgggaagct

SEQ ID NO: 1387989 - DNA, 15 bp, Homo sapiens
catatggtgggaagc

SEQ ID NO: 1387990 - DNA, 15 bp, Homo sapiens
acatatggtgggaag

SEQ ID NO: 1387991 - DNA, 15 bp, Homo sapiens
aacatatggtgggaa

SEQ ID NO: 1387992 - DNA, 15 bp, Homo sapiens
gaacatatggtggga

SEQ ID NO: 1387993 - DNA, 15 bp, Homo sapiens
tgaacatatggtggg

SEQ ID NO: 1387994 - DNA, 15 bp, Homo sapiens
ctgaacatatggtgg

SEQ ID NO: 1387995 - DNA, 15 bp, Homo sapiens
tctgaacatatggtg

SEQ ID NO: 1387996 - DNA, 15 bp, Homo sapiens
ttctgaacatatggt

SEQ ID NO: 1387997 - DNA, 15 bp, Homo sapiens
tttctgaacatatgg

SEQ ID NO: 1387998 - DNA, 15 bp, Homo sapiens
gtttctgaacatatg

SEQ ID NO: 1387999 - DNA, 15 bp, Homo sapiens
agtttctgaacatat

SEQ ID NO: 1388000 - DNA, 15 bp, Homo sapiens
cagtttctgaacata

SEQ ID NO: 1388001 - DNA, 15 bp, Homo sapiens
gcagtttctgaacat

SEQ ID NO: 1388002 - DNA, 15 bp, Homo sapiens
agcagtttctgaaca

SEQ ID NO: 1388003 - DNA, 15 bp, Homo sapiens
gagcagtttctgaac

SEQ ID NO: 1388004 - DNA, 15 bp, Homo sapiens
agagcagtttctgaa

SEQ ID NO: 1388005 - DNA, 15 bp, Homo sapiens
cagagcagtttctga

SEQ ID NO: 1388006 - DNA, 15 bp, Homo sapiens
tcagagcagtttctg

SEQ ID NO: 1388007 - DNA, 15 bp, Homo sapiens
atcagagcagtttct

SEQ ID NO: 1388008 - DNA, 15 bp, Homo sapiens
catcagagcagtttc

SEQ ID NO: 1388009 - DNA, 15 bp, Homo sapiens
acatcagagcagttt

SEQ ID NO: 1388010 - DNA, 15 bp, Homo sapiens
tacatcagagcagtt

SEQ ID NO: 1388011 - DNA, 15 bp, Homo sapiens
atacatcagagcagt

SEQ ID NO: 1388012 - DNA, 15 bp, Homo sapiens
tatacatcagagcag

SEQ ID NO: 1388013 - DNA, 15 bp, Homo sapiens
ttatacatcagagca

SEQ ID NO: 1388014 - DNA, 15 bp, Homo sapiens
tttatacatcagagc

SEQ ID NO: 1388015 - DNA, 15 bp, Homo sapiens
ttttatacatcagag

SEQ ID NO: 1388016 - DNA, 15 bp, Homo sapiens
cttttatacatcaga

SEQ ID NO: 1388017 - DNA, 15 bp, Homo sapiens
gcttttatacatcag

SEQ ID NO: 1388018 - DNA, 15 bp, Homo sapiens
agcttttatacatca

SEQ ID NO: 1388019 - DNA, 15 bp, Homo sapiens
tagcttttatacatc

SEQ ID NO: 1388020 - DNA, 15 bp, Homo sapiens
ctagcttttatacat

SEQ ID NO: 1388021 - DNA, 15 bp, Homo sapiens
cctagcttttataca

SEQ ID NO: 1388022 - DNA, 15 bp, Homo sapiens
acctagcttttatac

SEQ ID NO: 1388023 - DNA, 15 bp, Homo sapiens
aacctagcttttata

SEQ ID NO: 1388024 - DNA, 15 bp, Homo sapiens
aaacctagcttttat

SEQ ID NO: 1388025 - DNA, 15 bp, Homo sapiens
caaacctagctttta

SEQ ID NO: 1388026 - DNA, 15 bp, Homo sapiens
gcaaacctagctttt

SEQ ID NO: 1388027 - DNA, 15 bp, Homo sapiens
tgcaaacctagcttt

SEQ ID NO: 1388028 - DNA, 15 bp, Homo sapiens
ctgcaaacctagctt

SEQ ID NO: 1388029 - DNA, 15 bp, Homo sapiens
cctgcaaacctagct

SEQ ID NO: 1388030 - DNA, 15 bp, Homo sapiens
acctgcaaacctagc

SEQ ID NO: 1388031 - DNA, 15 bp, Homo sapiens
tacctgcaaacctag

SEQ ID NO: 1388032 - DNA, 15 bp, Homo sapiens
ttacctgcaaaccta

SEQ ID NO: 1388033 - DNA, 15 bp, Homo sapiens
tttacctgcaaacct

SEQ ID NO: 1388034 - DNA, 15 bp, Homo sapiens
atttacctgcaaacc

SEQ ID NO: 1388035 - DNA, 15 bp, Homo sapiens
aatttacctgcaaac

SEQ ID NO: 1388036 - DNA, 15 bp, Homo sapiens
aaatttacctgcaaa

SEQ ID NO: 1388037 - DNA, 15 bp, Homo sapiens
caaatttacctgcaa

SEQ ID NO: 1388038 - DNA, 15 bp, Homo sapiens
ccaaatttacctgca

SEQ ID NO: 1388039 - DNA, 15 bp, Homo sapiens
cccaaatttacctgc

SEQ ID NO: 1388040 - DNA, 15 bp, Homo sapiens
tcccaaatttacctg

SEQ ID NO: 1388041 - DNA, 15 bp, Homo sapiens
atcccaaatttacct

SEQ ID NO: 1388042 - DNA, 15 bp, Homo sapiens
tatcccaaatttacc

SEQ ID NO: 1388043 - DNA, 15 bp, Homo sapiens
atatcccaaatttac

SEQ ID NO: 1388044 - DNA, 15 bp, Homo sapiens
tatatcccaaattta

SEQ ID NO: 1388045 - DNA, 15 bp, Homo sapiens
ttatatcccaaattt

SEQ ID NO: 1388046 - DNA, 15 bp, Homo sapiens
cttatatcccaaatt

SEQ ID NO: 1388047 - DNA, 15 bp, Homo sapiens
acttatatcccaaat

SEQ ID NO: 1388048 - DNA, 15 bp, Homo sapiens
tacttatatcccaaa

SEQ ID NO: 1388049 - DNA, 15 bp, Homo sapiens
gtacttatatcccaa

SEQ ID NO: 1388050 - DNA, 15 bp, Homo sapiens
tgtacttatatccca

SEQ ID NO: 1388051 - DNA, 15 bp, Homo sapiens
gtgtacttatatccc

SEQ ID NO: 1388052 - DNA, 15 bp, Homo sapiens
tgtgtacttatatcc

SEQ ID NO: 1388053 - DNA, 15 bp, Homo sapiens
atgtgtacttatatc

SEQ ID NO: 1388054 - DNA, 15 bp, Homo sapiens
catgtgtacttatat

SEQ ID NO: 1388055 - DNA, 15 bp, Homo sapiens
acatgtgtacttata

SEQ ID NO: 1388056 - DNA, 15 bp, Homo sapiens
aacatgtgtacttat

SEQ ID NO: 1388057 - DNA, 15 bp, Homo sapiens
taacatgtgtactta

SEQ ID NO: 1388058 - DNA, 15 bp, Homo sapiens
ttaacatgtgtactt

SEQ ID NO: 1388059 - DNA, 15 bp, Homo sapiens
cttaacatgtgtact

SEQ ID NO: 1388060 - DNA, 15 bp, Homo sapiens
gcttaacatgtgtac

SEQ ID NO: 1388061 - DNA, 15 bp, Homo sapiens
tgcttaacatgtgta

SEQ ID NO: 1388062 - DNA, 15 bp, Homo sapiens
ttgcttaacatgtgt

SEQ ID NO: 1388063 - DNA, 15 bp, Homo sapiens
tttgcttaacatgtg

SEQ ID NO: 1388064 - DNA, 15 bp, Homo sapiens
ttttgcttaacatgt

SEQ ID NO: 1388065 - DNA, 15 bp, Homo sapiens
cttttgcttaacatg

SEQ ID NO: 1388066 - DNA, 15 bp, Homo sapiens
gcttttgcttaacat

SEQ ID NO: 1388067 - DNA, 15 bp, Homo sapiens
agcttttgcttaaca

SEQ ID NO: 1388068 - DNA, 15 bp, Homo sapiens
aagcttttgcttaac

SEQ ID NO: 1388069 - DNA, 15 bp, Homo sapiens
taagcttttgcttaa

SEQ ID NO: 1388070 - DNA, 15 bp, Homo sapiens
ttaagcttttgctta

SEQ ID NO: 1388071 - DNA, 15 bp, Homo sapiens
cttaagcttttgctt

SEQ ID NO: 1388072 - DNA, 15 bp, Homo sapiens
gcttaagcttttgct

SEQ ID NO: 1388073 - DNA, 15 bp, Homo sapiens
tgcttaagcttttgc

SEQ ID NO: 1388074 - DNA, 15 bp, Homo sapiens
atgcttaagcttttg

SEQ ID NO: 1388075 - DNA, 15 bp, Homo sapiens
aatgcttaagctttt

SEQ ID NO: 1388076 - DNA, 15 bp, Homo sapiens
aaatgcttaagcttt

SEQ ID NO: 1388077 - DNA, 15 bp, Homo sapiens
aaaatgcttaagctt

SEQ ID NO: 1388078 - DNA, 15 bp, Homo sapiens
aaaaatgcttaagct

SEQ ID NO: 1388079 - DNA, 15 bp, Homo sapiens
aaaaaatgcttaagc

SEQ ID NO: 1388080 - DNA, 15 bp, Homo sapiens
taaaaaatgcttaag

SEQ ID NO: 1388081 - DNA, 15 bp, Homo sapiens
gtaaaaaatgcttaa

SEQ ID NO: 1388082 - DNA, 15 bp, Homo sapiens
agtaaaaaatgctta

SEQ ID NO: 1388083 - DNA, 15 bp, Homo sapiens
cagtaaaaaatgctt

SEQ ID NO: 1388084 - DNA, 15 bp, Homo sapiens
tcagtaaaaaatgct

SEQ ID NO: 1388085 - DNA, 15 bp, Homo sapiens
gtcagtaaaaaatgc

SEQ ID NO: 1388086 - DNA, 15 bp, Homo sapiens
ggtcagtaaaaaatg

SEQ ID NO: 1388087 - DNA, 15 bp, Homo sapiens
gggtcagtaaaaaat

SEQ ID NO: 1388088 - DNA, 15 bp, Homo sapiens
tgggtcagtaaaaaa

SEQ ID NO: 1388089 - DNA, 15 bp, Homo sapiens
gtgggtcagtaaaaa

SEQ ID NO: 1388090 - DNA, 15 bp, Homo sapiens
cgtgggtcagtaaaa

SEQ ID NO: 1388091 - DNA, 15 bp, Homo sapiens
gcgtgggtcagtaaa

SEQ ID NO: 1388092 - DNA, 15 bp, Homo sapiens
tgcgtgggtcagtaa

SEQ ID NO: 1388093 - DNA, 15 bp, Homo sapiens
atgcgtgggtcagta

SEQ ID NO: 1388094 - DNA, 15 bp, Homo sapiens
tatgcgtgggtcagt

SEQ ID NO: 1388095 - DNA, 15 bp, Homo sapiens
ttatgcgtgggtcag

SEQ ID NO: 1388096 - DNA, 15 bp, Homo sapiens
attatgcgtgggtca

SEQ ID NO: 1388097 - DNA, 15 bp, Homo sapiens
aattatgcgtgggtc

SEQ ID NO: 1388098 - DNA, 15 bp, Homo sapiens
gaattatgcgtgggt

SEQ ID NO: 1388099 - DNA, 15 bp, Homo sapiens
agaattatgcgtggg

SEQ ID NO: 1388100 - DNA, 15 bp, Homo sapiens
aagaattatgcgtgg

SEQ ID NO: 1388101 - DNA, 15 bp, Homo sapiens
caagaattatgcgtg

SEQ ID NO: 1388102 - DNA, 15 bp, Homo sapiens
tcaagaattatgcgt

SEQ ID NO: 1388103 - DNA, 15 bp, Homo sapiens
ttcaagaattatgcg

SEQ ID NO: 1388104 - DNA, 15 bp, Homo sapiens
tttcaagaattatgc

SEQ ID NO: 1388105 - DNA, 15 bp, Homo sapiens
atttcaagaattatg

SEQ ID NO: 1388106 - DNA, 15 bp, Homo sapiens
catttcaagaattat

SEQ ID NO: 1388107 - DNA, 15 bp, Homo sapiens
ccatttcaagaatta

SEQ ID NO: 1388108 - DNA, 15 bp, Homo sapiens
accatttcaagaatt

SEQ ID NO: 1388109 - DNA, 15 bp, Homo sapiens
aaccatttcaagaat

SEQ ID NO: 1388110 - DNA, 15 bp, Homo sapiens
aaaccatttcaagaa

SEQ ID NO: 1388111 - DNA, 15 bp, Homo sapiens
gaaaccatttcaaga

SEQ ID NO: 1388112 - DNA, 15 bp, Homo sapiens
tgaaaccatttcaag

SEQ ID NO: 1388113 - DNA, 15 bp, Homo sapiens
ctgaaaccatttcaa

SEQ ID NO: 1388114 - DNA, 15 bp, Homo sapiens
tctgaaaccatttca

SEQ ID NO: 1388115 - DNA, 15 bp, Homo sapiens
ttctgaaaccatttc

SEQ ID NO: 1388116 - DNA, 15 bp, Homo sapiens
attctgaaaccattt

SEQ ID NO: 1388117 - DNA, 15 bp, Homo sapiens
cattctgaaaccatt

SEQ ID NO: 1388118 - DNA, 15 bp, Homo sapiens
acattctgaaaccat

SEQ ID NO: 1388119 - DNA, 15 bp, Homo sapiens
aacattctgaaacca

SEQ ID NO: 1388120 - DNA, 15 bp, Homo sapiens
gaacattctgaaacc

SEQ ID NO: 1388121 - DNA, 15 bp, Homo sapiens
agaacattctgaaac

SEQ ID NO: 1388122 - DNA, 15 bp, Homo sapiens
tagaacattctgaaa

SEQ ID NO: 1388123 - DNA, 15 bp, Homo sapiens
ttagaacattctgaa

SEQ ID NO: 1388124 - DNA, 15 bp, Homo sapiens
gttagaacattctga

SEQ ID NO: 1388125 - DNA, 15 bp, Homo sapiens
tgttagaacattctg

SEQ ID NO: 1388126 - DNA, 15 bp, Homo sapiens
gtgttagaacattct

SEQ ID NO: 1388127 - DNA, 15 bp, Homo sapiens
ggtgttagaacattc

SEQ ID NO: 1388128 - DNA, 15 bp, Homo sapiens
tggtgttagaacatt

SEQ ID NO: 1388129 - DNA, 15 bp, Homo sapiens
ttggtgttagaacat

SEQ ID NO: 1388130 - DNA, 15 bp, Homo sapiens
cttggtgttagaaca

SEQ ID NO: 1388131 - DNA, 15 bp, Homo sapiens
tcttggtgttagaac

SEQ ID NO: 1388132 - DNA, 15 bp, Homo sapiens
ctcttggtgttagaa

SEQ ID NO: 1388133 - DNA, 15 bp, Homo sapiens
actcttggtgttaga

SEQ ID NO: 1388134 - DNA, 15 bp, Homo sapiens
gactcttggtgttag

SEQ ID NO: 1388135 - DNA, 15 bp, Homo sapiens
agactcttggtgtta

SEQ ID NO: 1388136 - DNA, 15 bp, Homo sapiens
cagactcttggtgtt

SEQ ID NO: 1388137 - DNA, 15 bp, Homo sapiens
acagactcttggtgt

SEQ ID NO: 1388138 - DNA, 15 bp, Homo sapiens
cacagactcttggtg

SEQ ID NO: 1388139 - DNA, 15 bp, Homo sapiens
acacagactcttggt

SEQ ID NO: 1388140 - DNA, 15 bp, Homo sapiens
aacacagactcttgg

SEQ ID NO: 1388141 - DNA, 15 bp, Homo sapiens
taacacagactcttg

SEQ ID NO: 1388142 - DNA, 15 bp, Homo sapiens
ttaacacagactctt

SEQ ID NO: 1388143 - DNA, 15 bp, Homo sapiens
cttaacacagactct

SEQ ID NO: 1388144 - DNA, 15 bp, Homo sapiens
acttaacacagactc

SEQ ID NO: 1388145 - DNA, 15 bp, Homo sapiens
cacttaacacagact

SEQ ID NO: 1388146 - DNA, 15 bp, Homo sapiens
gcacttaacacagac

SEQ ID NO: 1388147 - DNA, 15 bp, Homo sapiens
agcacttaacacaga

SEQ ID NO: 1388148 - DNA, 15 bp, Homo sapiens
aagcacttaacacag

SEQ ID NO: 1388149 - DNA, 15 bp, Homo sapiens
gaagcacttaacaca

SEQ ID NO: 1388150 - DNA, 15 bp, Homo sapiens
cgaagcacttaacac

SEQ ID NO: 1388151 - DNA, 15 bp, Homo sapiens
ccgaagcacttaaca

SEQ ID NO: 1388152 - DNA, 15 bp, Homo sapiens
tccgaagcacttaac

SEQ ID NO: 1388153 - DNA, 15 bp, Homo sapiens
ttccgaagcacttaa

SEQ ID NO: 1388154 - DNA, 15 bp, Homo sapiens
tttccgaagcactta

SEQ ID NO: 1388155 - DNA, 15 bp, Homo sapiens
ttttccgaagcactt

SEQ ID NO: 1388156 - DNA, 15 bp, Homo sapiens
attttccgaagcact

SEQ ID NO: 1388157 - DNA, 15 bp, Homo sapiens
cattttccgaagcac

SEQ ID NO: 1388158 - DNA, 15 bp, Homo sapiens
tcattttccgaagca

SEQ ID NO: 1388159 - DNA, 15 bp, Homo sapiens
gtcattttccgaagc

SEQ ID NO: 1388160 - DNA, 15 bp, Homo sapiens
ggtcattttccgaag

SEQ ID NO: 1388161 - DNA, 15 bp, Homo sapiens
tggtcattttccgaa

SEQ ID NO: 1388162 - DNA, 15 bp, Homo sapiens
ttggtcattttccga

SEQ ID NO: 1388163 - DNA, 15 bp, Homo sapiens
attggtcattttccg

SEQ ID NO: 1388164 - DNA, 15 bp, Homo sapiens
aattggtcattttcc

SEQ ID NO: 1388165 - DNA, 15 bp, Homo sapiens
taattggtcattttc

SEQ ID NO: 1388166 - DNA, 15 bp, Homo sapiens
ataattggtcatttt

SEQ ID NO: 1388167 - DNA, 15 bp, Homo sapiens
cataattggtcattt

SEQ ID NO: 1388168 - DNA, 15 bp, Homo sapiens
acataattggtcatt

SEQ ID NO: 1388169 - DNA, 15 bp, Homo sapiens
aacataattggtcat

SEQ ID NO: 1388170 - DNA, 15 bp, Homo sapiens
caacataattggtca

SEQ ID NO: 1388171 - DNA, 15 bp, Homo sapiens
acaacataattggtc

SEQ ID NO: 1388172 - DNA, 15 bp, Homo sapiens
tacaacataattggt

SEQ ID NO: 1388173 - DNA, 15 bp, Homo sapiens
atacaacataattgg

SEQ ID NO: 1388174 - DNA, 15 bp, Homo sapiens
gatacaacataattg

SEQ ID NO: 1388175 - DNA, 15 bp, Homo sapiens
agatacaacataatt

SEQ ID NO: 1388176 - DNA, 15 bp, Homo sapiens
tagatacaacataat

SEQ ID NO: 1388177 - DNA, 15 bp, Homo sapiens
ttagatacaacataa

SEQ ID NO: 1388178 - DNA, 15 bp, Homo sapiens
cttagatacaacata

SEQ ID NO: 1388179 - DNA, 15 bp, Homo sapiens
acttagatacaacat

SEQ ID NO: 1388180 - DNA, 15 bp, Homo sapiens
tcacttagatacaac

SEQ ID NO: 1388181 - DNA, 15 bp, Homo sapiens
ttcacttagatacaa

SEQ ID NO: 1388182 - DNA, 15 bp, Homo sapiens
attcacttagataca

SEQ ID NO: 1388183 - DNA, 15 bp, Homo sapiens
cattcacttagatac

SEQ ID NO: 1388184 - DNA, 15 bp, Homo sapiens
tcattcacttagata

SEQ ID NO: 1388185 - DNA, 15 bp, Homo sapiens
ttcattcacttagat

SEQ ID NO: 1388186 - DNA, 15 bp, Homo sapiens
tttcattcacttaga

SEQ ID NO: 1388187 - DNA, 15 bp, Homo sapiens
ttttcattcacttag

SEQ ID NO: 1388188 - DNA, 15 bp, Homo sapiens
cttttcattcactta

SEQ ID NO: 1388189 - DNA, 15 bp, Homo sapiens
ccttttcattcactt

SEQ ID NO: 1388190 - DNA, 15 bp, Homo sapiens
accttttcattcact

SEQ ID NO: 1388191 - DNA, 15 bp, Homo sapiens
aaccttttcattcac

SEQ ID NO: 1388192 - DNA, 15 bp, Homo sapiens
caaccttttcattca

SEQ ID NO: 1388193 - DNA, 15 bp, Homo sapiens
ccaaccttttcattc

SEQ ID NO: 1388194 - DNA, 15 bp, Homo sapiens
accaaccttttcatt

SEQ ID NO: 1388195 - DNA, 15 bp, Homo sapiens
taccaaccttttcat

SEQ ID NO: 1388196 - DNA, 15 bp, Homo sapiens
ctaccaaccttttca

SEQ ID NO: 1388197 - DNA, 15 bp, Homo sapiens
gctaccaaccttttc

SEQ ID NO: 1388198 - DNA, 15 bp, Homo sapiens
tgctaccaacctttt

SEQ ID NO: 1388199 - DNA, 15 bp, Homo sapiens
ttgctaccaaccttt

SEQ ID NO: 1388200 - DNA, 15 bp, Homo sapiens
attgctaccaacctt

SEQ ID NO: 1388201 - DNA, 15 bp, Homo sapiens
cattgctaccaacct

SEQ ID NO: 1388202 - DNA, 15 bp, Homo sapiens
acattgctaccaacc

SEQ ID NO: 1388203 - DNA, 15 bp, Homo sapiens
gacattgctaccaac

SEQ ID NO: 1388204 - DNA, 15 bp, Homo sapiens
tgacattgctaccaa

SEQ ID NO: 1388205 - DNA, 15 bp, Homo sapiens
atgacattgctacca

SEQ ID NO: 1388206 - DNA, 15 bp, Homo sapiens
gatgacattgctacc

SEQ ID NO: 1388207 - DNA, 15 bp, Homo sapiens
agatgacattgctac

SEQ ID NO: 1388208 - DNA, 15 bp, Homo sapiens
gagatgacattgcta

SEQ ID NO: 1388209 - DNA, 15 bp, Homo sapiens
tgagatgacattgct

SEQ ID NO: 1388210 - DNA, 15 bp, Homo sapiens
ttgagatgacattgc

SEQ ID NO: 1388211 - DNA, 15 bp, Homo sapiens
tttgagatgacattg

SEQ ID NO: 1388212 - DNA, 15 bp, Homo sapiens
ttttgagatgacatt

SEQ ID NO: 1388213 - DNA, 15 bp, Homo sapiens
attttgagatgacat

SEQ ID NO: 1388214 - DNA, 15 bp, Homo sapiens
cattttgagatgaca

SEQ ID NO: 1388215 - DNA, 15 bp, Homo sapiens
gcattttgagatgac

SEQ ID NO: 1388216 - DNA, 15 bp, Homo sapiens
tgcattttgagatga

SEQ ID NO: 1388217 - DNA, 15 bp, Homo sapiens
atgcattttgagatg

SEQ ID NO: 1388218 - DNA, 15 bp, Homo sapiens
tatgcattttgagat

SEQ ID NO: 1388219 - DNA, 15 bp, Homo sapiens
ttatgcattttgaga

SEQ ID NO: 1388220 - DNA, 15 bp, Homo sapiens
tttatgcattttgag

SEQ ID NO: 1388221 - DNA, 15 bp, Homo sapiens
ttttatgcattttga

SEQ ID NO: 1388222 - DNA, 15 bp, Homo sapiens
attttatgcattttg

SEQ ID NO: 1388223 - DNA, 15 bp, Homo sapiens
tattttatgcatttt

SEQ ID NO: 1388224 - DNA, 15 bp, Homo sapiens
atattttatgcattt

SEQ ID NO: 1388225 - DNA, 15 bp, Homo sapiens
tatattttatgcatt

SEQ ID NO: 1388226 - DNA, 15 bp, Homo sapiens
atatattttatgcat

SEQ ID NO: 1388227 - DNA, 15 bp, Homo sapiens
aatatattttatgca

SEQ ID NO: 1388228 - DNA, 15 bp, Homo sapiens
gaatatattttatgc

SEQ ID NO: 1388229 - DNA, 15 bp, Homo sapiens
agaatatattttatg

SEQ ID NO: 1388230 - DNA, 15 bp, Homo sapiens
gagaatatattttat

SEQ ID NO: 1388231 - DNA, 15 bp, Homo sapiens
ggagaatatatttta

SEQ ID NO: 1388232 - DNA, 15 bp, Homo sapiens
tggagaatatatttt

SEQ ID NO: 1388233 - DNA, 15 bp, Homo sapiens
ttggagaatatattt

SEQ ID NO: 1388234 - DNA, 15 bp, Homo sapiens
cttggagaatatatt

SEQ ID NO: 1388235 - DNA, 15 bp, Homo sapiens
tcttggagaatatat

SEQ ID NO: 1388236 - DNA, 15 bp, Homo sapiens
ttcttggagaatata

SEQ ID NO: 1388237 - DNA, 15 bp, Homo sapiens
gttcttggagaatat

SEQ ID NO: 1388238 - DNA, 15 bp, Homo sapiens
tgttcttggagaata

SEQ ID NO: 1388239 - DNA, 15 bp, Homo sapiens
ttgttcttggagaat

SEQ ID NO: 1388240 - DNA, 15 bp, Homo sapiens
tttgttcttggagaa

SEQ ID NO: 1388241 - DNA, 15 bp, Homo sapiens
atttgttcttggaga

SEQ ID NO: 1388242 - DNA, 15 bp, Homo sapiens
catttgttcttggag

SEQ ID NO: 1388243 - DNA, 15 bp, Homo sapiens
tcatttgttcttgga

SEQ ID NO: 1388244 - DNA, 15 bp, Homo sapiens
gtcatttgttcttgg

SEQ ID NO: 1388245 - DNA, 15 bp, Homo sapiens
tgtcatttgttcttg

SEQ ID NO: 1388246 - DNA, 15 bp, Homo sapiens
atgtcatttgttctt

SEQ ID NO: 1388247 - DNA, 15 bp, Homo sapiens
aatgtcatttgttct

SEQ ID NO: 1388248 - DNA, 15 bp, Homo sapiens
taatgtcatttgttc

SEQ ID NO: 1388249 - DNA, 15 bp, Homo sapiens
ttaatgtcatttgtt

SEQ ID NO: 1388250 - DNA, 15 bp, Homo sapiens
attaatgtcatttgt

SEQ ID NO: 1388251 - DNA, 15 bp, Homo sapiens
cattaatgtcatttg

SEQ ID NO: 1388252 - DNA, 15 bp, Homo sapiens
acattaatgtcattt

SEQ ID NO: 1388253 - DNA, 15 bp, Homo sapiens
cacattaatgtcatt

SEQ ID NO: 1388254 - DNA, 15 bp, Homo sapiens
gcacattaatgtcat

SEQ ID NO: 1388255 - DNA, 15 bp, Homo sapiens
tgcacattaatgtca

SEQ ID NO: 1388256 - DNA, 15 bp, Homo sapiens
ttgcacattaatgtc

SEQ ID NO: 1388257 - DNA, 15 bp, Homo sapiens
tttgcacattaatgt

SEQ ID NO: 1388258 - DNA, 15 bp, Homo sapiens
ttttgcacattaatg

SEQ ID NO: 1388259 - DNA, 15 bp, Homo sapiens
cttttgcacattaat

SEQ ID NO: 1388260 - DNA, 15 bp, Homo sapiens
tcttttgcacattaa

SEQ ID NO: 1388261 - DNA, 15 bp, Homo sapiens
gtcttttgcacatta

SEQ ID NO: 1388262 - DNA, 15 bp, Homo sapiens
tgtcttttgcacatt

SEQ ID NO: 1388263 - DNA, 15 bp, Homo sapiens
gtgtcttttgcacat

SEQ ID NO: 1388264 - DNA, 15 bp, Homo sapiens
cgtgtcttttgcaca

SEQ ID NO: 1388265 - DNA, 15 bp, Homo sapiens
gcgtgtcttttgcac

SEQ ID NO: 1388266 - DNA, 15 bp, Homo sapiens
tgcgtgtcttttgca

SEQ ID NO: 1388267 - DNA, 15 bp, Homo sapiens
ttgcgtgtcttttgc

SEQ ID NO: 1388268 - DNA, 15 bp, Homo sapiens
tttgcgtgtcttttg

SEQ ID NO: 1388269 - DNA, 15 bp, Homo sapiens
ttttgcgtgtctttt

SEQ ID NO: 1388270 - DNA, 15 bp, Homo sapiens
attttgcgtgtcttt

SEQ ID NO: 1388271 - DNA, 15 bp, Homo sapiens
gattttgcgtgtctt

SEQ ID NO: 1388272 - DNA, 15 bp, Homo sapiens
agattttgcgtgtct

SEQ ID NO: 1388273 - DNA, 15 bp, Homo sapiens
gagattttgcgtgtc

SEQ ID NO: 1388274 - DNA, 15 bp, Homo sapiens
agagattttgcgtgt

SEQ ID NO: 1388275 - DNA, 15 bp, Homo sapiens
cagagattttgcgtg

SEQ ID NO: 1388276 - DNA, 15 bp, Homo sapiens
acagagattttgcgt

SEQ ID NO: 1388277 - DNA, 15 bp, Homo sapiens
aacagagattttgcg

SEQ ID NO: 1388278 - DNA, 15 bp, Homo sapiens
taacagagattttgc

SEQ ID NO: 1388279 - DNA, 15 bp, Homo sapiens
ctaacagagattttg

SEQ ID NO: 1388280 - DNA, 15 bp, Homo sapiens
tctaacagagatttt

SEQ ID NO: 1388281 - DNA, 15 bp, Homo sapiens
ctctaacagagattt

SEQ ID NO: 1388282 - DNA, 15 bp, Homo sapiens
actctaacagagatt

SEQ ID NO: 1388283 - DNA, 15 bp, Homo sapiens
cactctaacagagat

SEQ ID NO: 1388284 - DNA, 15 bp, Homo sapiens
gcactctaacagaga

SEQ ID NO: 1388285 - DNA, 15 bp, Homo sapiens
ggcactctaacagag

SEQ ID NO: 1388286 - DNA, 15 bp, Homo sapiens
aggcactctaacaga

SEQ ID NO: 1388287 - DNA, 15 bp, Homo sapiens
aaggcactctaacag

SEQ ID NO: 1388288 - DNA, 15 bp, Homo sapiens
aaaggcactctaaca

SEQ ID NO: 1388289 - DNA, 15 bp, Homo sapiens
aaaaggcactctaac

SEQ ID NO: 1388290 - DNA, 15 bp, Homo sapiens
gaaaaggcactctaa

SEQ ID NO: 1388291 - DNA, 15 bp, Homo sapiens
agaaaaggcactcta

SEQ ID NO: 1388292 - DNA, 15 bp, Homo sapiens
aagaaaaggcactct

SEQ ID NO: 1388293 - DNA, 15 bp, Homo sapiens
caagaaaaggcactc

SEQ ID NO: 1388294 - DNA, 15 bp, Homo sapiens
tcaagaaaaggcact

SEQ ID NO: 1388295 - DNA, 15 bp, Homo sapiens
atcaagaaaaggcac

SEQ ID NO: 1388296 - DNA, 15 bp, Homo sapiens
aatcaagaaaaggca

SEQ ID NO: 1388297 - DNA, 15 bp, Homo sapiens
aaatcaagaaaaggc

SEQ ID NO: 1388298 - DNA, 15 bp, Homo sapiens
gaaatcaagaaaagg

SEQ ID NO: 1388299 - DNA, 15 bp, Homo sapiens
ggaaatcaagaaaag

SEQ ID NO: 1388300 - DNA, 15 bp, Homo sapiens
aggaaatcaagaaaa

SEQ ID NO: 1388301 - DNA, 15 bp, Homo sapiens
aaggaaatcaagaaa

SEQ ID NO: 1388302 - DNA, 15 bp, Homo sapiens
taaggaaatcaagaa

SEQ ID NO: 1388303 - DNA, 15 bp, Homo sapiens
ctaaggaaatcaaga

SEQ ID NO: 1388304 - DNA, 15 bp, Homo sapiens
gctaaggaaatcaag

SEQ ID NO: 1388305 - DNA, 15 bp, Homo sapiens
ggctaaggaaatcaa

SEQ ID NO: 1388306 - DNA, 15 bp, Homo sapiens
aggctaaggaaatca

SEQ ID NO: 1388307 - DNA, 15 bp, Homo sapiens
caggctaaggaaatc

SEQ ID NO: 1388308 - DNA, 15 bp, Homo sapiens
acaggctaaggaaat

SEQ ID NO: 1388309 - DNA, 15 bp, Homo sapiens
tacaggctaaggaaa

SEQ ID NO: 1388310 - DNA, 15 bp, Homo sapiens
ctacaggctaaggaa

SEQ ID NO: 1388311 - DNA, 15 bp, Homo sapiens
actacaggctaagga

SEQ ID NO: 1388312 - DNA, 15 bp, Homo sapiens
aactacaggctaagg

SEQ ID NO: 1388313 - DNA, 15 bp, Homo sapiens
aaactacaggctaag

SEQ ID NO: 1388314 - DNA, 15 bp, Homo sapiens
aaaactacaggctaa

SEQ ID NO: 1388315 - DNA, 15 bp, Homo sapiens
caaaactacaggcta

SEQ ID NO: 1388316 - DNA, 15 bp, Homo sapiens
acaaaactacaggct

SEQ ID NO: 1388317 - DNA, 15 bp, Homo sapiens
cacaaaactacaggc

SEQ ID NO: 1388318 - DNA, 15 bp, Homo sapiens
tcacaaaactacagg

SEQ ID NO: 1388319 - DNA, 15 bp, Homo sapiens
ctcacaaaactacag

SEQ ID NO: 1388320 - DNA, 15 bp, Homo sapiens
gctcacaaaactaca

SEQ ID NO: 1388321 - DNA, 15 bp, Homo sapiens
tgctcacaaaactac

SEQ ID NO: 1388322 - DNA, 15 bp, Homo sapiens
gtgctcacaaaacta

SEQ ID NO: 1388323 - DNA, 15 bp, Homo sapiens
tgtgctcacaaaact

SEQ ID NO: 1388324 - DNA, 15 bp, Homo sapiens
ttgtgctcacaaaac

SEQ ID NO: 1388325 - DNA, 15 bp, Homo sapiens
tttgtgctcacaaaa

SEQ ID NO: 1388326 - DNA, 15 bp, Homo sapiens
ttttgtgctcacaaa

SEQ ID NO: 1388327 - DNA, 15 bp, Homo sapiens
tttttgtgctcacaa

SEQ ID NO: 1388328 - DNA, 15 bp, Homo sapiens
ttttttgtgctcaca

SEQ ID NO: 1388329 - DNA, 15 bp, Homo sapiens
cttttttgtgctcac

SEQ ID NO: 1388330 - DNA, 15 bp, Homo sapiens
ccttttttgtgctca

SEQ ID NO: 1388331 - DNA, 15 bp, Homo sapiens
accttttttgtgctc

SEQ ID NO: 1388332 - DNA, 15 bp, Homo sapiens
aaccttttttgtgct

SEQ ID NO: 1388333 - DNA, 15 bp, Homo sapiens
aaaccttttttgtgc

SEQ ID NO: 1388334 - DNA, 15 bp, Homo sapiens
caaaccttttttgtg

SEQ ID NO: 1388335 - DNA, 15 bp, Homo sapiens
gcaaaccttttttgt

SEQ ID NO: 1388336 - DNA, 15 bp, Homo sapiens
agcaaaccttttttg

SEQ ID NO: 1388337 - DNA, 15 bp, Homo sapiens
tagcaaacctttttt

SEQ ID NO: 1388338 - DNA, 15 bp, Homo sapiens
atagcaaaccttttt

SEQ ID NO: 1388339 - DNA, 15 bp, Homo sapiens
gatagcaaacctttt

SEQ ID NO: 1388340 - DNA, 15 bp, Homo sapiens
tgatagcaaaccttt

SEQ ID NO: 1388341 - DNA, 15 bp, Homo sapiens
ctgatagcaaacctt

SEQ ID NO: 1388342 - DNA, 15 bp, Homo sapiens
gctgatagcaaacct

SEQ ID NO: 1388343 - DNA, 15 bp, Homo sapiens
tgctgatagcaaacc

SEQ ID NO: 1388344 - DNA, 15 bp, Homo sapiens
ctgctgatagcaaac

SEQ ID NO: 1388345 - DNA, 15 bp, Homo sapiens
actgctgatagcaaa

SEQ ID NO: 1388346 - DNA, 15 bp, Homo sapiens
aactgctgatagcaa

SEQ ID NO: 1388347 - DNA, 15 bp, Homo sapiens
caactgctgatagca

SEQ ID NO: 1388348 - DNA, 15 bp, Homo sapiens
tcaactgctgatagc

SEQ ID NO: 1388349 - DNA, 15 bp, Homo sapiens
ttcaactgctgatag

SEQ ID NO: 1388350 - DNA, 15 bp, Homo sapiens
tttcaactgctgata

SEQ ID NO: 1388351 - DNA, 15 bp, Homo sapiens
atttcaactgctgat

SEQ ID NO: 1388352 - DNA, 15 bp, Homo sapiens
tatttcaactgctga

SEQ ID NO: 1388353 - DNA, 15 bp, Homo sapiens
gtatttcaactgctg

SEQ ID NO: 1388354 - DNA, 15 bp, Homo sapiens
agtatttcaactgct

SEQ ID NO: 1388355 - DNA, 15 bp, Homo sapiens
cagtatttcaactgc

SEQ ID NO: 1388356 - DNA, 15 bp, Homo sapiens
acagtatttcaactg

SEQ ID NO: 1388357 - DNA, 15 bp, Homo sapiens
cacagtatttcaact

SEQ ID NO: 1388358 - DNA, 15 bp, Homo sapiens
ccacagtatttcaac

SEQ ID NO: 1388359 - DNA, 15 bp, Homo sapiens
tccacagtatttcaa

SEQ ID NO: 1388360 - DNA, 15 bp, Homo sapiens
ttccacagtatttca

SEQ ID NO: 1388361 - DNA, 15 bp, Homo sapiens
attccacagtatttc

SEQ ID NO: 1388362 - DNA, 15 bp, Homo sapiens
tattccacagtattt

SEQ ID NO: 1388363 - DNA, 15 bp, Homo sapiens
ctattccacagtatt

SEQ ID NO: 1388364 - DNA, 15 bp, Homo sapiens
gctattccacagtat

SEQ ID NO: 1388365 - DNA, 15 bp, Homo sapiens
tgctattccacagta

SEQ ID NO: 1388366 - DNA, 15 bp, Homo sapiens
gtgctattccacagt

SEQ ID NO: 1388367 - DNA, 15 bp, Homo sapiens
tgtgctattccacag

SEQ ID NO: 1388368 - DNA, 15 bp, Homo sapiens
atgtgctattccaca

SEQ ID NO: 1388369 - DNA, 15 bp, Homo sapiens
aatgtgctattccac

SEQ ID NO: 1388370 - DNA, 15 bp, Homo sapiens
taatgtgctattcca

SEQ ID NO: 1388371 - DNA, 15 bp, Homo sapiens
ttaatgtgctattcc

SEQ ID NO: 1388372 - DNA, 15 bp, Homo sapiens
attaatgtgctattc

SEQ ID NO: 1388373 - DNA, 15 bp, Homo sapiens
tattaatgtgctatt

SEQ ID NO: 1388374 - DNA, 15 bp, Homo sapiens
gtattaatgtgctat

SEQ ID NO: 1388375 - DNA, 15 bp, Homo sapiens
tgtattaatgtgcta

SEQ ID NO: 1388376 - DNA, 15 bp, Homo sapiens
gtgtattaatgtgct

SEQ ID NO: 1388377 - DNA, 15 bp, Homo sapiens
agtgtattaatgtgc

SEQ ID NO: 1388378 - DNA, 15 bp, Homo sapiens
tagtgtattaatgtg

SEQ ID NO: 1388379 - DNA, 15 bp, Homo sapiens
ttagtgtattaatgt

SEQ ID NO: 1388380 - DNA, 15 bp, Homo sapiens
attagtgtattaatg

SEQ ID NO: 1388381 - DNA, 15 bp, Homo sapiens
tattagtgtattaat

SEQ ID NO: 1388382 - DNA, 15 bp, Homo sapiens
atattagtgtattaa

SEQ ID NO: 1388383 - DNA, 15 bp, Homo sapiens
catattagtgtatta

SEQ ID NO: 1388384 - DNA, 15 bp, Homo sapiens
tcatattagtgtatt

SEQ ID NO: 1388385 - DNA, 15 bp, Homo sapiens
gtcatattagtgtat

SEQ ID NO: 1388386 - DNA, 15 bp, Homo sapiens
agtcatattagtgta

SEQ ID NO: 1388387 - DNA, 15 bp, Homo sapiens
aagtcatattagtgt

SEQ ID NO: 1388388 - DNA, 15 bp, Homo sapiens
aaagtcatattagtg

SEQ ID NO: 1388389 - DNA, 15 bp, Homo sapiens
caaagtcatattagt

SEQ ID NO: 1388390 - DNA, 15 bp, Homo sapiens
ccaaagtcatattag

SEQ ID NO: 1388391 - DNA, 15 bp, Homo sapiens
tccaaagtcatatta

SEQ ID NO: 1388392 - DNA, 15 bp, Homo sapiens
ctccaaagtcatatt

SEQ ID NO: 1388393 - DNA, 15 bp, Homo sapiens
tctccaaagtcatat

SEQ ID NO: 1388394 - DNA, 15 bp, Homo sapiens
atctccaaagtcata

SEQ ID NO: 1388395 - DNA, 15 bp, Homo sapiens
aatctccaaagtcat

SEQ ID NO: 1388396 - DNA, 15 bp, Homo sapiens
aaatctccaaagtca

SEQ ID NO: 1388397 - DNA, 15 bp, Homo sapiens
aaaatctccaaagtc

SEQ ID NO: 1388398 - DNA, 15 bp, Homo sapiens
caaaatctccaaagt

SEQ ID NO: 1388399 - DNA, 15 bp, Homo sapiens
ccaaaatctccaaag

SEQ ID NO: 1388400 - DNA, 15 bp, Homo sapiens
gccaaaatctccaaa

SEQ ID NO: 1388401 - DNA, 15 bp, Homo sapiens
ggccaaaatctccaa

SEQ ID NO: 1388402 - DNA, 15 bp, Homo sapiens
tggccaaaatctcca

SEQ ID NO: 1388403 - DNA, 15 bp, Homo sapiens
ttggccaaaatctcc

SEQ ID NO: 1388404 - DNA, 15 bp, Homo sapiens
gttggccaaaatctc

SEQ ID NO: 1388405 - DNA, 15 bp, Homo sapiens
ggttggccaaaatct

SEQ ID NO: 1388406 - DNA, 15 bp, Homo sapiens
gggttggccaaaatc

SEQ ID NO: 1388407 - DNA, 15 bp, Homo sapiens
agggttggccaaaat

SEQ ID NO: 1388408 - DNA, 15 bp, Homo sapiens
gagggttggccaaaa

SEQ ID NO: 1388409 - DNA, 15 bp, Homo sapiens
agagggttggccaaa

SEQ ID NO: 1388410 - DNA, 15 bp, Homo sapiens
aagagggttggccaa

SEQ ID NO: 1388411 - DNA, 15 bp, Homo sapiens
taagagggttggcca

SEQ ID NO: 1388412 - DNA, 15 bp, Homo sapiens
ctaagagggttggcc

SEQ ID NO: 1388413 - DNA, 15 bp, Homo sapiens
gctaagagggttggc

SEQ ID NO: 1388414 - DNA, 15 bp, Homo sapiens
tgctaagagggttgg

SEQ ID NO: 1388415 - DNA, 15 bp, Homo sapiens
ttgctaagagggttg

SEQ ID NO: 1388416 - DNA, 15 bp, Homo sapiens
attgctaagagggtt

SEQ ID NO: 1388417 - DNA, 15 bp, Homo sapiens
cattgctaagagggt

SEQ ID NO: 1388418 - DNA, 15 bp, Homo sapiens
tcattgctaagaggg

SEQ ID NO: 1388419 - DNA, 15 bp, Homo sapiens
ttcattgctaagagg

SEQ ID NO: 1388420 - DNA, 15 bp, Homo sapiens
tttcattgctaagag

SEQ ID NO: 1388421 - DNA, 15 bp, Homo sapiens
atttcattgctaaga

SEQ ID NO: 1388422 - DNA, 15 bp, Homo sapiens
tatttcattgctaag

SEQ ID NO: 1388423 - DNA, 15 bp, Homo sapiens
atatttcattgctaa

SEQ ID NO: 1388424 - DNA, 15 bp, Homo sapiens
catatttcattgcta

SEQ ID NO: 1388425 - DNA, 15 bp, Homo sapiens
acatatttcattgct

SEQ ID NO: 1388426 - DNA, 15 bp, Homo sapiens
aacatatttcattgc

SEQ ID NO: 1388427 - DNA, 15 bp, Homo sapiens
gaacatatttcattg

SEQ ID NO: 1388428 - DNA, 15 bp, Homo sapiens
agaacatatttcatt

SEQ ID NO: 1388429 - DNA, 15 bp, Homo sapiens
aagaacatatttcat

SEQ ID NO: 1388430 - DNA, 15 bp, Homo sapiens
caagaacatatttca

SEQ ID NO: 1388431 - DNA, 15 bp, Homo sapiens
acaagaacatatttc

SEQ ID NO: 1388432 - DNA, 15 bp, Homo sapiens
tacaagaacatattt

SEQ ID NO: 1388433 - DNA, 15 bp, Homo sapiens
ttacaagaacatatt

SEQ ID NO: 1388434 - DNA, 15 bp, Homo sapiens
attacaagaacatat

SEQ ID NO: 1388435 - DNA, 15 bp, Homo sapiens
aattacaagaacata

SEQ ID NO: 1388436 - DNA, 15 bp, Homo sapiens
aaattacaagaacat

SEQ ID NO: 1388437 - DNA, 15 bp, Homo sapiens
taaattacaagaaca

SEQ ID NO: 1388438 - DNA, 15 bp, Homo sapiens
ttaaattacaagaac

SEQ ID NO: 1388439 - DNA, 15 bp, Homo sapiens
cttaaattacaagaa

SEQ ID NO: 1388440 - DNA, 15 bp, Homo sapiens
gcttaaattacaaga

SEQ ID NO: 1388441 - DNA, 15 bp, Homo sapiens
agcttaaattacaag

SEQ ID NO: 1388442 - DNA, 15 bp, Homo sapiens
cagcttaaattacaa

SEQ ID NO: 1388443 - DNA, 15 bp, Homo sapiens
tcagcttaaattaca

SEQ ID NO: 1388444 - DNA, 15 bp, Homo sapiens
gtcagcttaaattac

SEQ ID NO: 1388445 - DNA, 15 bp, Homo sapiens
tgtcagcttaaatta

SEQ ID NO: 1388446 - DNA, 15 bp, Homo sapiens
gtgtcagcttaaatt

SEQ ID NO: 1388447 - DNA, 15 bp, Homo sapiens
agtgtcagcttaaat

SEQ ID NO: 1388448 - DNA, 15 bp, Homo sapiens
gagtgtcagcttaaa

SEQ ID NO: 1388449 - DNA, 15 bp, Homo sapiens
ggagtgtcagcttaa

SEQ ID NO: 1388450 - DNA, 15 bp, Homo sapiens
aggagtgtcagctta

SEQ ID NO: 1388451 - DNA, 15 bp, Homo sapiens
taggagtgtcagctt

SEQ ID NO: 1388452 - DNA, 15 bp, Homo sapiens
ttaggagtgtcagct

SEQ ID NO: 1388453 - DNA, 15 bp, Homo sapiens
attaggagtgtcagc

SEQ ID NO: 1388454 - DNA, 15 bp, Homo sapiens
aattaggagtgtcag

SEQ ID NO: 1388455 - DNA, 15 bp, Homo sapiens
aaattaggagtgtca

SEQ ID NO: 1388456 - DNA, 15 bp, Homo sapiens
taaattaggagtgtc

SEQ ID NO: 1388457 - DNA, 15 bp, Homo sapiens
ctaaattaggagtgt

SEQ ID NO: 1388458 - DNA, 15 bp, Homo sapiens
gctaaattaggagtg

SEQ ID NO: 1388459 - DNA, 15 bp, Homo sapiens
agctaaattaggagt

SEQ ID NO: 1388460 - DNA, 15 bp, Homo sapiens
gagctaaattaggag

SEQ ID NO: 1388461 - DNA, 15 bp, Homo sapiens
agagctaaattagga

SEQ ID NO: 1388462 - DNA, 15 bp, Homo sapiens
aagagctaaattagg

SEQ ID NO: 1388463 - DNA, 15 bp, Homo sapiens
caagagctaaattag

SEQ ID NO: 1388464 - DNA, 15 bp, Homo sapiens
acaagagctaaatta

SEQ ID NO: 1388465 - DNA, 15 bp, Homo sapiens
gacaagagctaaatt

SEQ ID NO: 1388466 - DNA, 15 bp, Homo sapiens
ggacaagagctaaat

SEQ ID NO: 1388467 - DNA, 15 bp, Homo sapiens
aggacaagagctaaa

SEQ ID NO: 1388468 - DNA, 15 bp, Homo sapiens
gaggacaagagctaa

SEQ ID NO: 1388469 - DNA, 15 bp, Homo sapiens
agaggacaagagcta

SEQ ID NO: 1388470 - DNA, 15 bp, Homo sapiens
tagaggacaagagct

SEQ ID NO: 1388471 - DNA, 15 bp, Homo sapiens
gtagaggacaagagc

SEQ ID NO: 1388472 - DNA, 15 bp, Homo sapiens
agtagaggacaagag

SEQ ID NO: 1388473 - DNA, 15 bp, Homo sapiens
cagtagaggacaaga

SEQ ID NO: 1388474 - DNA, 15 bp, Homo sapiens
tcagtagaggacaag

SEQ ID NO: 1388475 - DNA, 15 bp, Homo sapiens
ctcagtagaggacaa

SEQ ID NO: 1388476 - DNA, 15 bp, Homo sapiens
actcagtagaggaca

SEQ ID NO: 1388477 - DNA, 15 bp, Homo sapiens
gactcagtagaggac

SEQ ID NO: 1388478 - DNA, 15 bp, Homo sapiens
agactcagtagagga

SEQ ID NO: 1388479 - DNA, 15 bp, Homo sapiens
tagactcagtagagg

SEQ ID NO: 1388480 - DNA, 15 bp, Homo sapiens
gtagactcagtagag

SEQ ID NO: 1388481 - DNA, 15 bp, Homo sapiens
ggtagactcagtaga

SEQ ID NO: 1388482 - DNA, 15 bp, Homo sapiens
aggtagactcagtag

SEQ ID NO: 1388483 - DNA, 15 bp, Homo sapiens
taggtagactcagta

SEQ ID NO: 1388484 - DNA, 15 bp, Homo sapiens
ttaggtagactcagt

SEQ ID NO: 1388485 - DNA, 15 bp, Homo sapiens
attaggtagactcag

SEQ ID NO: 1388486 - DNA, 15 bp, Homo sapiens
aattaggtagactca

SEQ ID NO: 1388487 - DNA, 15 bp, Homo sapiens
taattaggtagactc

SEQ ID NO: 1388488 - DNA, 15 bp, Homo sapiens
ataattaggtagact

SEQ ID NO: 1388489 - DNA, 15 bp, Homo sapiens
tataattaggtagac

SEQ ID NO: 1388490 - DNA, 15 bp, Homo sapiens
atataattaggtaga

SEQ ID NO: 1388491 - DNA, 15 bp, Homo sapiens
catataattaggtag

SEQ ID NO: 1388492 - DNA, 15 bp, Homo sapiens
acatataattaggta

SEQ ID NO: 1388493 - DNA, 15 bp, Homo sapiens
tacatataattaggt

SEQ ID NO: 1388494 - DNA, 15 bp, Homo sapiens
atacatataattagg

SEQ ID NO: 1388495 - DNA, 15 bp, Homo sapiens
catacatataattag

SEQ ID NO: 1388496 - DNA, 15 bp, Homo sapiens
ccatacatataatta

SEQ ID NO: 1388497 - DNA, 15 bp, Homo sapiens
tccatacatataatt

SEQ ID NO: 1388498 - DNA, 15 bp, Homo sapiens
atccatacatataat

SEQ ID NO: 1388499 - DNA, 15 bp, Homo sapiens
aatccatacatataa

SEQ ID NO: 1388500 - DNA, 15 bp, Homo sapiens
caatccatacatata

SEQ ID NO: 1388501 - DNA, 15 bp, Homo sapiens
tcaatccatacatat

SEQ ID NO: 1388502 - DNA, 15 bp, Homo sapiens
gtcaatccatacata

SEQ ID NO: 1388503 - DNA, 15 bp, Homo sapiens
agtcaatccatacat

SEQ ID NO: 1388504 - DNA, 15 bp, Homo sapiens
aagtcaatccataca

SEQ ID NO: 1388505 - DNA, 15 bp, Homo sapiens
caagtcaatccatac

SEQ ID NO: 1388506 - DNA, 15 bp, Homo sapiens
ccaagtcaatccata

SEQ ID NO: 1388507 - DNA, 15 bp, Homo sapiens
accaagtcaatccat

SEQ ID NO: 1388508 - DNA, 15 bp, Homo sapiens
caccaagtcaatcca

SEQ ID NO: 1388509 - DNA, 15 bp, Homo sapiens
acaccaagtcaatcc

SEQ ID NO: 1388510 - DNA, 15 bp, Homo sapiens
aacaccaagtcaatc

SEQ ID NO: 1388511 - DNA, 15 bp, Homo sapiens
aaacaccaagtcaat

SEQ ID NO: 1388512 - DNA, 15 bp, Homo sapiens
aaaacaccaagtcaa

SEQ ID NO: 1388513 - DNA, 15 bp, Homo sapiens
gaaaacaccaagtca

SEQ ID NO: 1388514 - DNA, 15 bp, Homo sapiens
agaaaacaccaagtc

SEQ ID NO: 1388515 - DNA, 15 bp, Homo sapiens
gagaaaacaccaagt

SEQ ID NO: 1388516 - DNA, 15 bp, Homo sapiens
agagaaaacaccaag

SEQ ID NO: 1388517 - DNA, 15 bp, Homo sapiens
aagagaaaacaccaa

SEQ ID NO: 1388518 - DNA, 15 bp, Homo sapiens
aaagagaaaacacca

SEQ ID NO: 1388519 - DNA, 15 bp, Homo sapiens
aaaagagaaaacacc

SEQ ID NO: 1388520 - DNA, 15 bp, Homo sapiens
aaaaagagaaaacac

SEQ ID NO: 1388521 - DNA, 15 bp, Homo sapiens
gaaaaagagaaaaca

SEQ ID NO: 1388522 - DNA, 15 bp, Homo sapiens
agaaaaagagaaaac

SEQ ID NO: 1388523 - DNA, 15 bp, Homo sapiens
aagaaaaagagaaaa

SEQ ID NO: 1388524 - DNA, 15 bp, Homo sapiens
taagaaaaagagaaa

SEQ ID NO: 1388525 - DNA, 15 bp, Homo sapiens
ttaagaaaaagagaa

SEQ ID NO: 1388526 - DNA, 15 bp, Homo sapiens
tttaagaaaaagaga

SEQ ID NO: 1388527 - DNA, 15 bp, Homo sapiens
atttaagaaaaagag

SEQ ID NO: 1388528 - DNA, 15 bp, Homo sapiens
tatttaagaaaaaga

SEQ ID NO: 1388529 - DNA, 15 bp, Homo sapiens
ctatttaagaaaaag

SEQ ID NO: 1388530 - DNA, 15 bp, Homo sapiens
actatttaagaaaaa

SEQ ID NO: 1388531 - DNA, 15 bp, Homo sapiens
tactatttaagaaaa

SEQ ID NO: 1388532 - DNA, 15 bp, Homo sapiens
ttactatttaagaaa

SEQ ID NO: 1388533 - DNA, 15 bp, Homo sapiens
attactatttaagaa

SEQ ID NO: 1388534 - DNA, 15 bp, Homo sapiens
cattactatttaaga

SEQ ID NO: 1388535 - DNA, 15 bp, Homo sapiens
gcattactatttaag

SEQ ID NO: 1388536 - DNA, 15 bp, Homo sapiens
tgcattactatttaa

SEQ ID NO: 1388537 - DNA, 15 bp, Homo sapiens
ctgcattactattta

SEQ ID NO: 1388538 - DNA, 15 bp, Homo sapiens
tctgcattactattt

SEQ ID NO: 1388539 - DNA, 15 bp, Homo sapiens
ttctgcattactatt

SEQ ID NO: 1388540 - DNA, 15 bp, Homo sapiens
tttctgcattactat

SEQ ID NO: 1388541 - DNA, 15 bp, Homo sapiens
ctttctgcattacta

SEQ ID NO: 1388542 - DNA, 15 bp, Homo sapiens
gctttctgcattact

SEQ ID NO: 1388543 - DNA, 15 bp, Homo sapiens
ggctttctgcattac

SEQ ID NO: 1388544 - DNA, 15 bp, Homo sapiens
aggctttctgcatta

SEQ ID NO: 1388545 - DNA, 15 bp, Homo sapiens
caggctttctgcatt

SEQ ID NO: 1388546 - DNA, 15 bp, Homo sapiens
ccaggctttctgcat

SEQ ID NO: 1388547 - DNA, 15 bp, Homo sapiens
tccaggctttctgca

SEQ ID NO: 1388548 - DNA, 15 bp, Homo sapiens
ctccaggctttctgc

SEQ ID NO: 1388549 - DNA, 15 bp, Homo sapiens
tctccaggctttctg

SEQ ID NO: 1388550 - DNA, 15 bp, Homo sapiens
ctctccaggctttct

SEQ ID NO: 1388551 - DNA, 15 bp, Homo sapiens
tctctccaggctttc

SEQ ID NO: 1388552 - DNA, 15 bp, Homo sapiens
ctctctccaggcttt

SEQ ID NO: 1388553 - DNA, 15 bp, Homo sapiens
tctctctccaggctt

SEQ ID NO: 1388554 - DNA, 15 bp, Homo sapiens
ctctctctccaggct

SEQ ID NO: 1388555 - DNA, 15 bp, Homo sapiens
tctctctctccaggc

SEQ ID NO: 1388556 - DNA, 15 bp, Homo sapiens
ttctctctctccagg

SEQ ID NO: 1388557 - DNA, 15 bp, Homo sapiens
tttctctctctccag

SEQ ID NO: 1388558 - DNA, 15 bp, Homo sapiens
gtttctctctctcca

SEQ ID NO: 1388559 - DNA, 15 bp, Homo sapiens
ggtttctctctctcc

SEQ ID NO: 1388560 - DNA, 15 bp, Homo sapiens
gggtttctctctctc

SEQ ID NO: 1388561 - DNA, 15 bp, Homo sapiens
ggggtttctctctct

SEQ ID NO: 1388562 - DNA, 15 bp, Homo sapiens
gggggtttctctctc

SEQ ID NO: 1388563 - DNA, 15 bp, Homo sapiens
tgggggtttctctct

SEQ ID NO: 1388564 - DNA, 15 bp, Homo sapiens
ttgggggtttctctc

SEQ ID NO: 1388565 - DNA, 15 bp, Homo sapiens
cttgggggtttctct

SEQ ID NO: 1388566 - DNA, 15 bp, Homo sapiens
gcttgggggtttctc

SEQ ID NO: 1388567 - DNA, 15 bp, Homo sapiens
agcttgggggtttct

SEQ ID NO: 1388568 - DNA, 15 bp, Homo sapiens
tagcttgggggtttc

SEQ ID NO: 1388569 - DNA, 15 bp, Homo sapiens
ctagcttgggggttt

SEQ ID NO: 1388570 - DNA, 15 bp, Homo sapiens
cctagcttgggggtt

SEQ ID NO: 1388571 - DNA, 15 bp, Homo sapiens
tcctagcttgggggt

SEQ ID NO: 1388572 - DNA, 15 bp, Homo sapiens
atcctagcttggggg

SEQ ID NO: 1388573 - DNA, 15 bp, Homo sapiens
aatcctagcttgggg

SEQ ID NO: 1388574 - DNA, 15 bp, Homo sapiens
aaatcctagcttggg

SEQ ID NO: 1388575 - DNA, 15 bp, Homo sapiens
gaaatcctagcttgg

SEQ ID NO: 1388576 - DNA, 15 bp, Homo sapiens
agaaatcctagcttg

SEQ ID NO: 1388577 - DNA, 15 bp, Homo sapiens
cagaaatcctagctt

SEQ ID NO: 1388578 - DNA, 15 bp, Homo sapiens
gcagaaatcctagct

SEQ ID NO: 1388579 - DNA, 15 bp, Homo sapiens
tgcagaaatcctagc

SEQ ID NO: 1388580 - DNA, 15 bp, Homo sapiens
ctgcagaaatcctag

SEQ ID NO: 1388581 - DNA, 15 bp, Homo sapiens
gctgcagaaatccta

SEQ ID NO: 1388582 - DNA, 15 bp, Homo sapiens
agctgcagaaatcct

SEQ ID NO: 1388583 - DNA, 15 bp, Homo sapiens
gagctgcagaaatcc

SEQ ID NO: 1388584 - DNA, 15 bp, Homo sapiens
tgagctgcagaaatc

SEQ ID NO: 1388585 - DNA, 15 bp, Homo sapiens
atgagctgcagaaat

SEQ ID NO: 1388586 - DNA, 15 bp, Homo sapiens
catgagctgcagaaa

SEQ ID NO: 1388587 - DNA, 15 bp, Homo sapiens
tcatgagctgcagaa

SEQ ID NO: 1388588 - DNA, 15 bp, Homo sapiens
ttcatgagctgcaga

SEQ ID NO: 1388589 - DNA, 15 bp, Homo sapiens
cttcatgagctgcag

SEQ ID NO: 1388590 - DNA, 15 bp, Homo sapiens
gcttcatgagctgca

SEQ ID NO: 1388591 - DNA, 15 bp, Homo sapiens
ggcttcatgagctgc

SEQ ID NO: 1388592 - DNA, 15 bp, Homo sapiens
aggcttcatgagctg

SEQ ID NO: 1388593 - DNA, 15 bp, Homo sapiens
aaggcttcatgagct

SEQ ID NO: 1388594 - DNA, 15 bp, Homo sapiens
caaggcttcatgagc

SEQ ID NO: 1388595 - DNA, 15 bp, Homo sapiens
ccaaggcttcatgag

SEQ ID NO: 1388596 - DNA, 15 bp, Homo sapiens
tccaaggcttcatga

SEQ ID NO: 1388597 - DNA, 15 bp, Homo sapiens
ctccaaggcttcatg

SEQ ID NO: 1388598 - DNA, 15 bp, Homo sapiens
tctccaaggcttcat

SEQ ID NO: 1388599 - DNA, 15 bp, Homo sapiens
atctccaaggcttca

SEQ ID NO: 1388600 - DNA, 15 bp, Homo sapiens
tatctccaaggcttc

SEQ ID NO: 1388601 - DNA, 15 bp, Homo sapiens
ttatctccaaggctt

SEQ ID NO: 1388602 - DNA, 15 bp, Homo sapiens
tttatctccaaggct

SEQ ID NO: 1388603 - DNA, 15 bp, Homo sapiens
atttatctccaaggc

SEQ ID NO: 1388604 - DNA, 15 bp, Homo sapiens
catttatctccaagg

SEQ ID NO: 1388605 - DNA, 15 bp, Homo sapiens
tcatttatctccaag

SEQ ID NO: 1388606 - DNA, 15 bp, Homo sapiens
ctcatttatctccaa

SEQ ID NO: 1388607 - DNA, 15 bp, Homo sapiens
actcatttatctcca

SEQ ID NO: 1388608 - DNA, 15 bp, Homo sapiens
tactcatttatctcc

SEQ ID NO: 1388609 - DNA, 15 bp, Homo sapiens
ttactcatttatctc

SEQ ID NO: 1388610 - DNA, 15 bp, Homo sapiens
cttactcatttatct

SEQ ID NO: 1388611 - DNA, 15 bp, Homo sapiens
acttactcatttatc

SEQ ID NO: 1388612 - DNA, 15 bp, Homo sapiens
cacttactcatttat

SEQ ID NO: 1388613 - DNA, 15 bp, Homo sapiens
ccacttactcattta

SEQ ID NO: 1388614 - DNA, 15 bp, Homo sapiens
cccacttactcattt

SEQ ID NO: 1388615 - DNA, 15 bp, Homo sapiens
ccccacttactcatt

SEQ ID NO: 1388616 - DNA, 15 bp, Homo sapiens
cccccacttactcat

SEQ ID NO: 1388617 - DNA, 15 bp, Homo sapiens
tcccccacttactca

SEQ ID NO: 1388618 - DNA, 15 bp, Homo sapiens
ttcccccacttactc

SEQ ID NO: 1388619 - DNA, 15 bp, Homo sapiens
tttcccccacttact

SEQ ID NO: 1388620 - DNA, 15 bp, Homo sapiens
ttttcccccacttac

SEQ ID NO: 1388621 - DNA, 15 bp, Homo sapiens
attttcccccactta

SEQ ID NO: 1388622 - DNA, 15 bp, Homo sapiens
gattttcccccactt

SEQ ID NO: 1388623 - DNA, 15 bp, Homo sapiens
agattttcccccact

SEQ ID NO: 1388624 - DNA, 15 bp, Homo sapiens
aagattttcccccac

SEQ ID NO: 1388625 - DNA, 15 bp, Homo sapiens
caagattttccccca

SEQ ID NO: 1388626 - DNA, 15 bp, Homo sapiens
gcaagattttccccc

SEQ ID NO: 1388627 - DNA, 15 bp, Homo sapiens
agcaagattttcccc

SEQ ID NO: 1388628 - DNA, 15 bp, Homo sapiens
cagcaagattttccc

SEQ ID NO: 1388629 - DNA, 15 bp, Homo sapiens
acagcaagattttcc

SEQ ID NO: 1388630 - DNA, 15 bp, Homo sapiens
aacagcaagattttc

SEQ ID NO: 1388631 - DNA, 15 bp, Homo sapiens
taacagcaagatttt

SEQ ID NO: 1388632 - DNA, 15 bp, Homo sapiens
ttaacagcaagattt

SEQ ID NO: 1388633 - DNA, 15 bp, Homo sapiens
tttaacagcaagatt

SEQ ID NO: 1388634 - DNA, 15 bp, Homo sapiens
ttttaacagcaagat

SEQ ID NO: 1388635 - DNA, 15 bp, Homo sapiens
tttttaacagcaaga

SEQ ID NO: 1388636 - DNA, 15 bp, Homo sapiens
ctttttaacagcaag

SEQ ID NO: 1388637 - DNA, 15 bp, Homo sapiens
cctttttaacagcaa

SEQ ID NO: 1388638 - DNA, 15 bp, Homo sapiens
tcctttttaacagca

SEQ ID NO: 1388639 - DNA, 15 bp, Homo sapiens
ttcctttttaacagc

SEQ ID NO: 1388640 - DNA, 15 bp, Homo sapiens
tttcctttttaacag

SEQ ID NO: 1388641 - DNA, 15 bp, Homo sapiens
atttcctttttaaca

SEQ ID NO: 1388642 - DNA, 15 bp, Homo sapiens
gatttcctttttaac

SEQ ID NO: 1388643 - DNA, 15 bp, Homo sapiens
agatttcctttttaa

SEQ ID NO: 1388644 - DNA, 15 bp, Homo sapiens
gagatttccttttta

SEQ ID NO: 1388645 - DNA, 15 bp, Homo sapiens
tgagatttccttttt

SEQ ID NO: 1388646 - DNA, 15 bp, Homo sapiens
atgagatttcctttt

SEQ ID NO: 1388647 - DNA, 15 bp, Homo sapiens
gatgagatttccttt

SEQ ID NO: 1388648 - DNA, 15 bp, Homo sapiens
ggatgagatttcctt

SEQ ID NO: 1388649 - DNA, 15 bp, Homo sapiens
aggatgagatttcct

SEQ ID NO: 1388650 - DNA, 15 bp, Homo sapiens
aaggatgagatttcc

SEQ ID NO: 1388651 - DNA, 15 bp, Homo sapiens
aaaggatgagatttc

SEQ ID NO: 1388652 - DNA, 15 bp, Homo sapiens
caaaggatgagattt

SEQ ID NO: 1388653 - DNA, 15 bp, Homo sapiens
gcaaaggatgagatt

SEQ ID NO: 1388654 - DNA, 15 bp, Homo sapiens
agcaaaggatgagat

SEQ ID NO: 1388655 - DNA, 15 bp, Homo sapiens
cagcaaaggatgaga

SEQ ID NO: 1388656 - DNA, 15 bp, Homo sapiens
tcagcaaaggatgag

SEQ ID NO: 1388657 - DNA, 15 bp, Homo sapiens
ttcagcaaaggatga

SEQ ID NO: 1388658 - DNA, 15 bp, Homo sapiens
attcagcaaaggatg

SEQ ID NO: 1388659 - DNA, 15 bp, Homo sapiens
tattcagcaaaggat

SEQ ID NO: 1388660 - DNA, 15 bp, Homo sapiens
atattcagcaaagga

SEQ ID NO: 1388661 - DNA, 15 bp, Homo sapiens
tatattcagcaaagg

SEQ ID NO: 1388662 - DNA, 15 bp, Homo sapiens
atatattcagcaaag

SEQ ID NO: 1388663 - DNA, 15 bp, Homo sapiens
aatatattcagcaaa

SEQ ID NO: 1388664 - DNA, 15 bp, Homo sapiens
gaatatattcagcaa

SEQ ID NO: 1388665 - DNA, 15 bp, Homo sapiens
tgaatatattcagca

SEQ ID NO: 1388666 - DNA, 15 bp, Homo sapiens
ctgaatatattcagc

SEQ ID NO: 1388667 - DNA, 15 bp, Homo sapiens
actgaatatattcag

SEQ ID NO: 1388668 - DNA, 15 bp, Homo sapiens
aactgaatatattca

SEQ ID NO: 1388669 - DNA, 15 bp, Homo sapiens
caactgaatatattc

SEQ ID NO: 1388670 - DNA, 15 bp, Homo sapiens
gcaactgaatatatt

SEQ ID NO: 1388671 - DNA, 15 bp, Homo sapiens
ggcaactgaatatat

SEQ ID NO: 1388672 - DNA, 15 bp, Homo sapiens
tggcaactgaatata

SEQ ID NO: 1388673 - DNA, 15 bp, Homo sapiens
atggcaactgaatat

SEQ ID NO: 1388674 - DNA, 15 bp, Homo sapiens
aatggcaactgaata

SEQ ID NO: 1388675 - DNA, 15 bp, Homo sapiens
caatggcaactgaat

SEQ ID NO: 1388676 - DNA, 15 bp, Homo sapiens
tcaatggcaactgaa

SEQ ID NO: 1388677 - DNA, 15 bp, Homo sapiens
atcaatggcaactga

SEQ ID NO: 1388678 - DNA, 15 bp, Homo sapiens
tatcaatggcaactg

SEQ ID NO: 1388679 - DNA, 15 bp, Homo sapiens
ctatcaatggcaact

SEQ ID NO: 1388680 - DNA, 15 bp, Homo sapiens
cctatcaatggcaac

SEQ ID NO: 1388681 - DNA, 15 bp, Homo sapiens
tcctatcaatggcaa

SEQ ID NO: 1388682 - DNA, 15 bp, Homo sapiens
atcctatcaatggca

SEQ ID NO: 1388683 - DNA, 15 bp, Homo sapiens
tatcctatcaatggc

SEQ ID NO: 1388684 - DNA, 15 bp, Homo sapiens
gtatcctatcaatgg

SEQ ID NO: 1388685 - DNA, 15 bp, Homo sapiens
agtatcctatcaatg

SEQ ID NO: 1388686 - DNA, 15 bp, Homo sapiens
aagtatcctatcaat

SEQ ID NO: 1388687 - DNA, 15 bp, Homo sapiens
taagtatcctatcaa

SEQ ID NO: 1388688 - DNA, 15 bp, Homo sapiens
ttaagtatcctatca

SEQ ID NO: 1388689 - DNA, 15 bp, Homo sapiens
tttaagtatcctatc

SEQ ID NO: 1388690 - DNA, 15 bp, Homo sapiens
atttaagtatcctat

SEQ ID NO: 1388691 - DNA, 15 bp, Homo sapiens
aatttaagtatccta

SEQ ID NO: 1388692 - DNA, 15 bp, Homo sapiens
taatttaagtatcct

SEQ ID NO: 1388693 - DNA, 15 bp, Homo sapiens
ttaatttaagtatcc

SEQ ID NO: 1388694 - DNA, 15 bp, Homo sapiens
tttaatttaagtatc

SEQ ID NO: 1388695 - DNA, 15 bp, Homo sapiens
gtttaatttaagtat

SEQ ID NO: 1388696 - DNA, 15 bp, Homo sapiens
agtttaatttaagta

SEQ ID NO: 1388697 - DNA, 15 bp, Homo sapiens
cagtttaatttaagt

SEQ ID NO: 1388698 - DNA, 15 bp, Homo sapiens
gcagtttaatttaag

SEQ ID NO: 1388699 - DNA, 15 bp, Homo sapiens
tgcagtttaatttaa

SEQ ID NO: 1388700 - DNA, 15 bp, Homo sapiens
atgcagtttaattta

SEQ ID NO: 1388701 - DNA, 15 bp, Homo sapiens
aatgcagtttaattt

SEQ ID NO: 1388702 - DNA, 15 bp, Homo sapiens
aaatgcagtttaatt

SEQ ID NO: 1388703 - DNA, 15 bp, Homo sapiens
caaatgcagtttaat

SEQ ID NO: 1388704 - DNA, 15 bp, Homo sapiens
tcaaatgcagtttaa

SEQ ID NO: 1388705 - DNA, 15 bp, Homo sapiens
ttcaaatgcagttta

SEQ ID NO: 1388706 - DNA, 15 bp, Homo sapiens
gttcaaatgcagttt

SEQ ID NO: 1388707 - DNA, 15 bp, Homo sapiens
agttcaaatgcagtt

SEQ ID NO: 1388708 - DNA, 15 bp, Homo sapiens
cagttcaaatgcagt

SEQ ID NO: 1388709 - DNA, 15 bp, Homo sapiens
ccagttcaaatgcag

SEQ ID NO: 1388710 - DNA, 15 bp, Homo sapiens
tccagttcaaatgca

SEQ ID NO: 1388711 - DNA, 15 bp, Homo sapiens
ctccagttcaaatgc

SEQ ID NO: 1388712 - DNA, 15 bp, Homo sapiens
cctccagttcaaatg

SEQ ID NO: 1388713 - DNA, 15 bp, Homo sapiens
tcctccagttcaaat

SEQ ID NO: 1388714 - DNA, 15 bp, Homo sapiens
atcctccagttcaaa

SEQ ID NO: 1388715 - DNA, 15 bp, Homo sapiens
aatcctccagttcaa

SEQ ID NO: 1388716 - DNA, 15 bp, Homo sapiens
taatcctccagttca

SEQ ID NO: 1388717 - DNA, 15 bp, Homo sapiens
ataatcctccagttc

SEQ ID NO: 1388718 - DNA, 15 bp, Homo sapiens
aataatcctccagtt

SEQ ID NO: 1388719 - DNA, 15 bp, Homo sapiens
aaataatcctccagt

SEQ ID NO: 1388720 - DNA, 15 bp, Homo sapiens
caaataatcctccag

SEQ ID NO: 1388721 - DNA, 15 bp, Homo sapiens
ccaaataatcctcca

SEQ ID NO: 1388722 - DNA, 15 bp, Homo sapiens
cccaaataatcctcc

SEQ ID NO: 1388723 - DNA, 15 bp, Homo sapiens
ccccaaataatcctc

SEQ ID NO: 1388724 - DNA, 15 bp, Homo sapiens
tccccaaataatcct

SEQ ID NO: 1388725 - DNA, 15 bp, Homo sapiens
ctccccaaataatcc

SEQ ID NO: 1388726 - DNA, 15 bp, Homo sapiens
actccccaaataatc

SEQ ID NO: 1388727 - DNA, 15 bp, Homo sapiens
aactccccaaataat

SEQ ID NO: 1388728 - DNA, 15 bp, Homo sapiens
taactccccaaataa

SEQ ID NO: 1388729 - DNA, 15 bp, Homo sapiens
ataactccccaaata

SEQ ID NO: 1388730 - DNA, 15 bp, Homo sapiens
aataactccccaaat

SEQ ID NO: 1388731 - DNA, 15 bp, Homo sapiens
taataactccccaaa

SEQ ID NO: 1388732 - DNA, 15 bp, Homo sapiens
gtaataactccccaa

SEQ ID NO: 1388733 - DNA, 15 bp, Homo sapiens
agtaataactcccca

SEQ ID NO: 1388734 - DNA, 15 bp, Homo sapiens
gagtaataactcccc

SEQ ID NO: 1388735 - DNA, 15 bp, Homo sapiens
agagtaataactccc

SEQ ID NO: 1388736 - DNA, 15 bp, Homo sapiens
tagagtaataactcc

SEQ ID NO: 1388737 - DNA, 15 bp, Homo sapiens
atagagtaataactc

SEQ ID NO: 1388738 - DNA, 15 bp, Homo sapiens
aatagagtaataact

SEQ ID NO: 1388739 - DNA, 15 bp, Homo sapiens
aaatagagtaataac

SEQ ID NO: 1388740 - DNA, 15 bp, Homo sapiens
taaatagagtaataa

SEQ ID NO: 1388741 - DNA, 15 bp, Homo sapiens
ttaaatagagtaata

SEQ ID NO: 1388742 - DNA, 15 bp, Homo sapiens
tttaaatagagtaat

SEQ ID NO: 1388743 - DNA, 15 bp, Homo sapiens
ttttaaatagagtaa

SEQ ID NO: 1388744 - DNA, 15 bp, Homo sapiens
ttttttaaatagagt

SEQ ID NO: 1388745 - DNA, 15 bp, Homo sapiens
cttttttaaatagag

SEQ ID NO: 1388746 - DNA, 15 bp, Homo sapiens
acttttttaaataga

SEQ ID NO: 1388747 - DNA, 15 bp, Homo sapiens
aacttttttaaatag

SEQ ID NO: 1388748 - DNA, 15 bp, Homo sapiens
aaacttttttaaata

SEQ ID NO: 1388749 - DNA, 15 bp, Homo sapiens
aaaacttttttaaat

SEQ ID NO: 1388750 - DNA, 15 bp, Homo sapiens
aaaaacttttttaaa

SEQ ID NO: 1388751 - DNA, 15 bp, Homo sapiens
aaaaaacttttttaa

SEQ ID NO: 1388752 - DNA, 15 bp, Homo sapiens
aaaaaaactttttta

SEQ ID NO: 1388753 - DNA, 15 bp, Homo sapiens
aaaaaaaactttttt

SEQ ID NO: 1388754 - DNA, 15 bp, Homo sapiens
aaaaaaaaacttttt

SEQ ID NO: 1388755 - DNA, 15 bp, Homo sapiens
aaaaaaaaaactttt

SEQ ID NO: 1388756 - DNA, 15 bp, Homo sapiens
taaaaaaaaaacttt

SEQ ID NO: 1388757 - DNA, 15 bp, Homo sapiens
ttaaaaaaaaaactt

SEQ ID NO: 1388758 - DNA, 15 bp, Homo sapiens
tttaaaaaaaaaact

SEQ ID NO: 1388759 - DNA, 15 bp, Homo sapiens
atttaaaaaaaaaac

SEQ ID NO: 1388760 - DNA, 15 bp, Homo sapiens
ttcatttaaaaaaaa

SEQ ID NO: 1388761 - DNA, 15 bp, Homo sapiens
cttcatttaaaaaaa

SEQ ID NO: 1388762 - DNA, 15 bp, Homo sapiens
ccttcatttaaaaaa

SEQ ID NO: 1388763 - DNA, 15 bp, Homo sapiens
tccttcatttaaaaa

SEQ ID NO: 1388764 - DNA, 15 bp, Homo sapiens
gtccttcatttaaaa

SEQ ID NO: 1388765 - DNA, 15 bp, Homo sapiens
tgtccttcatttaaa

SEQ ID NO: 1388766 - DNA, 15 bp, Homo sapiens
ctgtccttcatttaa

SEQ ID NO: 1388767 - DNA, 15 bp, Homo sapiens
gctgtccttcattta

SEQ ID NO: 1388768 - DNA, 15 bp, Homo sapiens
ggctgtccttcattt

SEQ ID NO: 1388769 - DNA, 15 bp, Homo sapiens
tggctgtccttcatt

SEQ ID NO: 1388770 - DNA, 15 bp, Homo sapiens
gtggctgtccttcat

SEQ ID NO: 1388771 - DNA, 15 bp, Homo sapiens
ggtggctgtccttca

SEQ ID NO: 1388772 - DNA, 15 bp, Homo sapiens
tggtggctgtccttc

SEQ ID NO: 1388773 - DNA, 15 bp, Homo sapiens
atggtggctgtcctt

SEQ ID NO: 1388774 - DNA, 15 bp, Homo sapiens
catggtggctgtcct

SEQ ID NO: 1388775 - DNA, 15 bp, Homo sapiens
acatggtggctgtcc

SEQ ID NO: 1388776 - DNA, 15 bp, Homo sapiens
cacatggtggctgtc

SEQ ID NO: 1388777 - DNA, 15 bp, Homo sapiens
ccacatggtggctgt

SEQ ID NO: 1388778 - DNA, 15 bp, Homo sapiens
tccacatggtggctg

SEQ ID NO: 1388779 - DNA, 15 bp, Homo sapiens
ctccacatggtggct

SEQ ID NO: 1388780 - DNA, 15 bp, Homo sapiens
cctccacatggtggc

SEQ ID NO: 1388781 - DNA, 15 bp, Homo sapiens
acctccacatggtgg

SEQ ID NO: 1388782 - DNA, 15 bp, Homo sapiens
cacctccacatggtg

SEQ ID NO: 1388783 - DNA, 15 bp, Homo sapiens
ccacctccacatggt

SEQ ID NO: 1388784 - DNA, 15 bp, Homo sapiens
accacctccacatgg

SEQ ID NO: 1388785 - DNA, 15 bp, Homo sapiens
aaccacctccacatg

SEQ ID NO: 1388786 - DNA, 15 bp, Homo sapiens
aaaccacctccacat

SEQ ID NO: 1388787 - DNA, 15 bp, Homo sapiens
aaaaccacctccaca

SEQ ID NO: 1388788 - DNA, 15 bp, Homo sapiens
taaaaccacctccac

SEQ ID NO: 1388789 - DNA, 15 bp, Homo sapiens
ctaaaaccacctcca

SEQ ID NO: 1388790 - DNA, 15 bp, Homo sapiens
actaaaaccacctcc

SEQ ID NO: 1388791 - DNA, 15 bp, Homo sapiens
gactaaaaccacctc

SEQ ID NO: 1388792 - DNA, 15 bp, Homo sapiens
tgactaaaaccacct

SEQ ID NO: 1388793 - DNA, 15 bp, Homo sapiens
atgactaaaaccacc

SEQ ID NO: 1388794 - DNA, 15 bp, Homo sapiens
aatgactaaaaccac

SEQ ID NO: 1388795 - DNA, 15 bp, Homo sapiens
aaatgactaaaacca

SEQ ID NO: 1388796 - DNA, 15 bp, Homo sapiens
aaaatgactaaaacc

SEQ ID NO: 1388797 - DNA, 15 bp, Homo sapiens
taaaatgactaaaac

SEQ ID NO: 1388798 - DNA, 15 bp, Homo sapiens
ataaaatgactaaaa

SEQ ID NO: 1388799 - DNA, 15 bp, Homo sapiens
cataaaatgactaaa

SEQ ID NO: 1388800 - DNA, 15 bp, Homo sapiens
tcataaaatgactaa

SEQ ID NO: 1388801 - DNA, 15 bp, Homo sapiens
ttcataaaatgacta

SEQ ID NO: 1388802 - DNA, 15 bp, Homo sapiens
attcataaaatgact

SEQ ID NO: 1388803 - DNA, 15 bp, Homo sapiens
aattcataaaatgac

SEQ ID NO: 1388804 - DNA, 15 bp, Homo sapiens
gaattcataaaatga

SEQ ID NO: 1388805 - DNA, 15 bp, Homo sapiens
tgaattcataaaatg

SEQ ID NO: 1388806 - DNA, 15 bp, Homo sapiens
ttgaattcataaaat

SEQ ID NO: 1388807 - DNA, 15 bp, Homo sapiens
attgaattcataaaa

SEQ ID NO: 1388808 - DNA, 15 bp, Homo sapiens
cattgaattcataaa

SEQ ID NO: 1388809 - DNA, 15 bp, Homo sapiens
ccattgaattcataa

SEQ ID NO: 1388810 - DNA, 15 bp, Homo sapiens
gccattgaattcata

SEQ ID NO: 1388811 - DNA, 15 bp, Homo sapiens
agccattgaattcat

SEQ ID NO: 1388812 - DNA, 15 bp, Homo sapiens
aagccattgaattca

SEQ ID NO: 1388813 - DNA, 15 bp, Homo sapiens
aaagccattgaattc

SEQ ID NO: 1388814 - DNA, 15 bp, Homo sapiens
caaagccattgaatt

SEQ ID NO: 1388815 - DNA, 15 bp, Homo sapiens
gcaaagccattgaat

SEQ ID NO: 1388816 - DNA, 15 bp, Homo sapiens
agcaaagccattgaa

SEQ ID NO: 1388817 - DNA, 15 bp, Homo sapiens
cagcaaagccattga

SEQ ID NO: 1388818 - DNA, 15 bp, Homo sapiens
acagcaaagccattg

SEQ ID NO: 1388819 - DNA, 15 bp, Homo sapiens
cacagcaaagccatt

SEQ ID NO: 1388820 - DNA, 15 bp, Homo sapiens
tcacagcaaagccat

SEQ ID NO: 1388821 - DNA, 15 bp, Homo sapiens
atcacagcaaagcca

SEQ ID NO: 1388822 - DNA, 15 bp, Homo sapiens
gatcacagcaaagcc

SEQ ID NO: 1388823 - DNA, 15 bp, Homo sapiens
ggatcacagcaaagc

SEQ ID NO: 1388824 - DNA, 15 bp, Homo sapiens
aggatcacagcaaag

SEQ ID NO: 1388825 - DNA, 15 bp, Homo sapiens
taggatcacagcaaa

SEQ ID NO: 1388826 - DNA, 15 bp, Homo sapiens
ttaggatcacagcaa

SEQ ID NO: 1388827 - DNA, 15 bp, Homo sapiens
tttaggatcacagca

SEQ ID NO: 1388828 - DNA, 15 bp, Homo sapiens
atttaggatcacagc

SEQ ID NO: 1388829 - DNA, 15 bp, Homo sapiens
aatttaggatcacag

SEQ ID NO: 1388830 - DNA, 15 bp, Homo sapiens
taatttaggatcaca

SEQ ID NO: 1388831 - DNA, 15 bp, Homo sapiens
ttaatttaggatcac

SEQ ID NO: 1388832 - DNA, 15 bp, Homo sapiens
attaatttaggatca

SEQ ID NO: 1388833 - DNA, 15 bp, Homo sapiens
aattaatttaggatc

SEQ ID NO: 1388834 - DNA, 15 bp, Homo sapiens
aaattaatttaggat

SEQ ID NO: 1388835 - DNA, 15 bp, Homo sapiens
gaaattaatttagga

SEQ ID NO: 1388836 - DNA, 15 bp, Homo sapiens
agaaattaatttagg

SEQ ID NO: 1388837 - DNA, 15 bp, Homo sapiens
aagaaattaatttag

SEQ ID NO: 1388838 - DNA, 15 bp, Homo sapiens
caagaaattaattta

SEQ ID NO: 1388839 - DNA, 15 bp, Homo sapiens
tcaagaaattaattt

SEQ ID NO: 1388840 - DNA, 15 bp, Homo sapiens
ttcaagaaattaatt

SEQ ID NO: 1388841 - DNA, 15 bp, Homo sapiens
cttcaagaaattaat

SEQ ID NO: 1388842 - DNA, 15 bp, Homo sapiens
ccttcaagaaattaa

SEQ ID NO: 1388843 - DNA, 15 bp, Homo sapiens
cccttcaagaaatta

SEQ ID NO: 1388844 - DNA, 15 bp, Homo sapiens
gcccttcaagaaatt

SEQ ID NO: 1388845 - DNA, 15 bp, Homo sapiens
agcccttcaagaaat

SEQ ID NO: 1388846 - DNA, 15 bp, Homo sapiens
tagcccttcaagaaa

SEQ ID NO: 1388847 - DNA, 15 bp, Homo sapiens
atagcccttcaagaa

SEQ ID NO: 1388848 - DNA, 15 bp, Homo sapiens
gatagcccttcaaga

SEQ ID NO: 1388849 - DNA, 15 bp, Homo sapiens
ggatagcccttcaag

SEQ ID NO: 1388850 - DNA, 15 bp, Homo sapiens
gggatagcccttcaa

SEQ ID NO: 1388851 - DNA, 15 bp, Homo sapiens
agggatagcccttca

SEQ ID NO: 1388852 - DNA, 15 bp, Homo sapiens
tagggatagcccttc

SEQ ID NO: 1388853 - DNA, 15 bp, Homo sapiens
ctagggatagccctt

SEQ ID NO: 1388854 - DNA, 15 bp, Homo sapiens
cctagggatagccct

SEQ ID NO: 1388855 - DNA, 15 bp, Homo sapiens
tcctagggatagccc

SEQ ID NO: 1388856 - DNA, 15 bp, Homo sapiens
atcctagggatagcc

SEQ ID NO: 1388857 - DNA, 15 bp, Homo sapiens
tatcctagggatagc

SEQ ID NO: 1388858 - DNA, 15 bp, Homo sapiens
atatcctagggatag

SEQ ID NO: 1388859 - DNA, 15 bp, Homo sapiens
aatatcctagggata

SEQ ID NO: 1388860 - DNA, 15 bp, Homo sapiens
caatatcctagggat

SEQ ID NO: 1388861 - DNA, 15 bp, Homo sapiens
acaatatcctaggga

SEQ ID NO: 1388862 - DNA, 15 bp, Homo sapiens
cacaatatcctaggg

SEQ ID NO: 1388863 - DNA, 15 bp, Homo sapiens
tcacaatatcctagg

SEQ ID NO: 1388864 - DNA, 15 bp, Homo sapiens
ctcacaatatcctag

SEQ ID NO: 1388865 - DNA, 15 bp, Homo sapiens
cctcacaatatccta

SEQ ID NO: 1388866 - DNA, 15 bp, Homo sapiens
tcctcacaatatcct

SEQ ID NO: 1388867 - DNA, 15 bp, Homo sapiens
atcctcacaatatcc

SEQ ID NO: 1388868 - DNA, 15 bp, Homo sapiens
tatcctcacaatatc

SEQ ID NO: 1388869 - DNA, 15 bp, Homo sapiens
atatcctcacaatat

SEQ ID NO: 1388870 - DNA, 15 bp, Homo sapiens
tatatcctcacaata

SEQ ID NO: 1388871 - DNA, 15 bp, Homo sapiens
ttatatcctcacaat

SEQ ID NO: 1388872 - DNA, 15 bp, Homo sapiens
tttatatcctcacaa

SEQ ID NO: 1388873 - DNA, 15 bp, Homo sapiens
ttttatatcctcaca

SEQ ID NO: 1388874 - DNA, 15 bp, Homo sapiens
attttatatcctcac

SEQ ID NO: 1388875 - DNA, 15 bp, Homo sapiens
tattttatatcctca

SEQ ID NO: 1388876 - DNA, 15 bp, Homo sapiens
ttattttatatcctc

SEQ ID NO: 1388877 - DNA, 15 bp, Homo sapiens
tttattttatatcct

SEQ ID NO: 1388878 - DNA, 15 bp, Homo sapiens
atttattttatatcc

SEQ ID NO: 1388879 - DNA, 15 bp, Homo sapiens
tatttattttatatc

SEQ ID NO: 1388880 - DNA, 15 bp, Homo sapiens
gtatttattttatat

SEQ ID NO: 1388881 - DNA, 15 bp, Homo sapiens
tgtatttattttata

SEQ ID NO: 1388882 - DNA, 15 bp, Homo sapiens
ttgtatttattttat

SEQ ID NO: 1388883 - DNA, 15 bp, Homo sapiens
attgtatttatttta

SEQ ID NO: 1388884 - DNA, 15 bp, Homo sapiens
aattgtatttatttt

SEQ ID NO: 1388885 - DNA, 15 bp, Homo sapiens
gaattgtatttattt

SEQ ID NO: 1388886 - DNA, 15 bp, Homo sapiens
agaattgtatttatt

SEQ ID NO: 1388887 - DNA, 15 bp, Homo sapiens
aagaattgtatttat

SEQ ID NO: 1388888 - DNA, 15 bp, Homo sapiens
aaagaattgtattta

SEQ ID NO: 1388889 - DNA, 15 bp, Homo sapiens
taaagaattgtattt

SEQ ID NO: 1388890 - DNA, 15 bp, Homo sapiens
gtaaagaattgtatt

SEQ ID NO: 1388891 - DNA, 15 bp, Homo sapiens
tgtaaagaattgtat

SEQ ID NO: 1388892 - DNA, 15 bp, Homo sapiens
atgtaaagaattgta

SEQ ID NO: 1388893 - DNA, 15 bp, Homo sapiens
tatgtaaagaattgt

SEQ ID NO: 1388894 - DNA, 15 bp, Homo sapiens
atatgtaaagaattg

SEQ ID NO: 1388895 - DNA, 15 bp, Homo sapiens
gatatgtaaagaatt

SEQ ID NO: 1388896 - DNA, 15 bp, Homo sapiens
agatatgtaaagaat

SEQ ID NO: 1388897 - DNA, 15 bp, Homo sapiens
tagatatgtaaagaa

SEQ ID NO: 1388898 - DNA, 15 bp, Homo sapiens
ttagatatgtaaaga

SEQ ID NO: 1388899 - DNA, 15 bp, Homo sapiens
tttagatatgtaaag

SEQ ID NO: 1388900 - DNA, 15 bp, Homo sapiens
ttttagatatgtaaa

SEQ ID NO: 1388901 - DNA, 15 bp, Homo sapiens
gttttagatatgtaa

SEQ ID NO: 1388902 - DNA, 15 bp, Homo sapiens
tgttttagatatgta

SEQ ID NO: 1388903 - DNA, 15 bp, Homo sapiens
atgttttagatatgt

SEQ ID NO: 1388904 - DNA, 15 bp, Homo sapiens
aatgttttagatatg

SEQ ID NO: 1388905 - DNA, 15 bp, Homo sapiens
gaatgttttagatat

SEQ ID NO: 1388906 - DNA, 15 bp, Homo sapiens
agaatgttttagata

SEQ ID NO: 1388907 - DNA, 15 bp, Homo sapiens
cagaatgttttagat

SEQ ID NO: 1388908 - DNA, 15 bp, Homo sapiens
tcagaatgttttaga

SEQ ID NO: 1388909 - DNA, 15 bp, Homo sapiens
gtcagaatgttttag

SEQ ID NO: 1388910 - DNA, 15 bp, Homo sapiens
tgtcagaatgtttta

SEQ ID NO: 1388911 - DNA, 15 bp, Homo sapiens
ctgtcagaatgtttt

SEQ ID NO: 1388912 - DNA, 15 bp, Homo sapiens
cctgtcagaatgttt

SEQ ID NO: 1388913 - DNA, 15 bp, Homo sapiens
ccctgtcagaatgtt

SEQ ID NO: 1388914 - DNA, 15 bp, Homo sapiens
tccctgtcagaatgt

SEQ ID NO: 1388915 - DNA, 15 bp, Homo sapiens
ttccctgtcagaatg

SEQ ID NO: 1388916 - DNA, 15 bp, Homo sapiens
tttccctgtcagaat

SEQ ID NO: 1388917 - DNA, 15 bp, Homo sapiens
ttttccctgtcagaa

SEQ ID NO: 1388918 - DNA, 15 bp, Homo sapiens
attttccctgtcaga

SEQ ID NO: 1388919 - DNA, 15 bp, Homo sapiens
aattttccctgtcag

SEQ ID NO: 1388920 - DNA, 15 bp, Homo sapiens
aaattttccctgtca

SEQ ID NO: 1388921 - DNA, 15 bp, Homo sapiens
aaaattttccctgtc

SEQ ID NO: 1388922 - DNA, 15 bp, Homo sapiens
gaaaattttccctgt

SEQ ID NO: 1388923 - DNA, 15 bp, Homo sapiens
ggaaaattttccctg

SEQ ID NO: 1388924 - DNA, 15 bp, Homo sapiens
tggaaaattttccct

SEQ ID NO: 1388925 - DNA, 15 bp, Homo sapiens
ctggaaaattttccc

SEQ ID NO: 1388926 - DNA, 15 bp, Homo sapiens
tctggaaaattttcc

SEQ ID NO: 1388927 - DNA, 15 bp, Homo sapiens
atctggaaaattttc

SEQ ID NO: 1388928 - DNA, 15 bp, Homo sapiens
catctggaaaatttt

SEQ ID NO: 1388929 - DNA, 15 bp, Homo sapiens
acatctggaaaattt

SEQ ID NO: 1388930 - DNA, 15 bp, Homo sapiens
tacatctggaaaatt

SEQ ID NO: 1388931 - DNA, 15 bp, Homo sapiens
ctacatctggaaaat

SEQ ID NO: 1388932 - DNA, 15 bp, Homo sapiens
tctacatctggaaaa

SEQ ID NO: 1388933 - DNA, 15 bp, Homo sapiens
ttctacatctggaaa

SEQ ID NO: 1388934 - DNA, 15 bp, Homo sapiens
attctacatctggaa

SEQ ID NO: 1388935 - DNA, 15 bp, Homo sapiens
cattctacatctgga

SEQ ID NO: 1388936 - DNA, 15 bp, Homo sapiens
gcattctacatctgg

SEQ ID NO: 1388937 - DNA, 15 bp, Homo sapiens
agcattctacatctg

SEQ ID NO: 1388938 - DNA, 15 bp, Homo sapiens
gagcattctacatct

SEQ ID NO: 1388939 - DNA, 15 bp, Homo sapiens
tgagcattctacatc

SEQ ID NO: 1388940 - DNA, 15 bp, Homo sapiens
atgagcattctacat

SEQ ID NO: 1388941 - DNA, 15 bp, Homo sapiens
gatgagcattctaca

SEQ ID NO: 1388942 - DNA, 15 bp, Homo sapiens
agatgagcattctac

SEQ ID NO: 1388943 - DNA, 15 bp, Homo sapiens
cagatgagcattcta

SEQ ID NO: 1388944 - DNA, 15 bp, Homo sapiens
gcagatgagcattct

SEQ ID NO: 1388945 - DNA, 15 bp, Homo sapiens
tgcagatgagcattc

SEQ ID NO: 1388946 - DNA, 15 bp, Homo sapiens
gtgcagatgagcatt

SEQ ID NO: 1388947 - DNA, 15 bp, Homo sapiens
agtgcagatgagcat

SEQ ID NO: 1388948 - DNA, 15 bp, Homo sapiens
tagtgcagatgagca

SEQ ID NO: 1388949 - DNA, 15 bp, Homo sapiens
ctagtgcagatgagc

SEQ ID NO: 1388950 - DNA, 15 bp, Homo sapiens
tctagtgcagatgag

SEQ ID NO: 1388951 - DNA, 15 bp, Homo sapiens
ttctagtgcagatga

SEQ ID NO: 1388952 - DNA, 15 bp, Homo sapiens
gttctagtgcagatg

SEQ ID NO: 1388953 - DNA, 15 bp, Homo sapiens
tgttctagtgcagat

SEQ ID NO: 1388954 - DNA, 15 bp, Homo sapiens
atgttctagtgcaga

SEQ ID NO: 1388955 - DNA, 15 bp, Homo sapiens
aatgttctagtgcag

SEQ ID NO: 1388956 - DNA, 15 bp, Homo sapiens
aaatgttctagtgca

SEQ ID NO: 1388957 - DNA, 15 bp, Homo sapiens
aaaatgttctagtgc

SEQ ID NO: 1388958 - DNA, 15 bp, Homo sapiens
gaaaatgttctagtg

SEQ ID NO: 1388959 - DNA, 15 bp, Homo sapiens
agaaaatgttctagt

SEQ ID NO: 1388960 - DNA, 15 bp, Homo sapiens
tagaaaatgttctag

SEQ ID NO: 1388961 - DNA, 15 bp, Homo sapiens
ctagaaaatgttcta

SEQ ID NO: 1388962 - DNA, 15 bp, Homo sapiens
actagaaaatgttct

SEQ ID NO: 1388963 - DNA, 15 bp, Homo sapiens
tactagaaaatgttc

SEQ ID NO: 1388964 - DNA, 15 bp, Homo sapiens
ctactagaaaatgtt

SEQ ID NO: 1388965 - DNA, 15 bp, Homo sapiens
tctactagaaaatgt

SEQ ID NO: 1388966 - DNA, 15 bp, Homo sapiens
ttctactagaaaatg

SEQ ID NO: 1388967 - DNA, 15 bp, Homo sapiens
gttctactagaaaat

SEQ ID NO: 1388968 - DNA, 15 bp, Homo sapiens
agttctactagaaaa

SEQ ID NO: 1388969 - DNA, 15 bp, Homo sapiens
aagttctactagaaa

SEQ ID NO: 1388970 - DNA, 15 bp, Homo sapiens
gaagttctactagaa

SEQ ID NO: 1388971 - DNA, 15 bp, Homo sapiens
agaagttctactaga

SEQ ID NO: 1388972 - DNA, 15 bp, Homo sapiens
cagaagttctactag

SEQ ID NO: 1388973 - DNA, 15 bp, Homo sapiens
gcagaagttctacta

SEQ ID NO: 1388974 - DNA, 15 bp, Homo sapiens
agcagaagttctact

SEQ ID NO: 1388975 - DNA, 15 bp, Homo sapiens
tagcagaagttctac

SEQ ID NO: 1388976 - DNA, 15 bp, Homo sapiens
ctagcagaagttcta

SEQ ID NO: 1388977 - DNA, 15 bp, Homo sapiens
actagcagaagttct

SEQ ID NO: 1388978 - DNA, 15 bp, Homo sapiens
cactagcagaagttc

SEQ ID NO: 1388979 - DNA, 15 bp, Homo sapiens
ccactagcagaagtt

SEQ ID NO: 1388980 - DNA, 15 bp, Homo sapiens
cccactagcagaagt

SEQ ID NO: 1388981 - DNA, 15 bp, Homo sapiens
ccccactagcagaag

SEQ ID NO: 1388982 - DNA, 15 bp, Homo sapiens
tccccactagcagaa

SEQ ID NO: 1388983 - DNA, 15 bp, Homo sapiens
ttccccactagcaga

SEQ ID NO: 1388984 - DNA, 15 bp, Homo sapiens
tttccccactagcag

SEQ ID NO: 1388985 - DNA, 15 bp, Homo sapiens
ttttccccactagca

SEQ ID NO: 1388986 - DNA, 15 bp, Homo sapiens
gttttccccactagc

SEQ ID NO: 1388987 - DNA, 15 bp, Homo sapiens
tgttttccccactag

SEQ ID NO: 1388988 - DNA, 15 bp, Homo sapiens
atgttttccccacta

SEQ ID NO: 1388989 - DNA, 15 bp, Homo sapiens
catgttttccccact

SEQ ID NO: 1388990 - DNA, 15 bp, Homo sapiens
tcatgttttccccac

SEQ ID NO: 1388991 - DNA, 15 bp, Homo sapiens
atcatgttttcccca

SEQ ID NO: 1388992 - DNA, 15 bp, Homo sapiens
tatcatgttttcccc

SEQ ID NO: 1388993 - DNA, 15 bp, Homo sapiens
ttatcatgttttccc

SEQ ID NO: 1388994 - DNA, 15 bp, Homo sapiens
gttatcatgttttcc

SEQ ID NO: 1388995 - DNA, 15 bp, Homo sapiens
tgttatcatgttttc

SEQ ID NO: 1388996 - DNA, 15 bp, Homo sapiens
ttgttatcatgtttt

SEQ ID NO: 1388997 - DNA, 15 bp, Homo sapiens
gttgttatcatgttt

SEQ ID NO: 1388998 - DNA, 15 bp, Homo sapiens
tgttgttatcatgtt

SEQ ID NO: 1388999 - DNA, 15 bp, Homo sapiens
atgttgttatcatgt

SEQ ID NO: 1389000 - DNA, 15 bp, Homo sapiens
tatgttgttatcatg

SEQ ID NO: 1389001 - DNA, 15 bp, Homo sapiens
ttatgttgttatcat

SEQ ID NO: 1389002 - DNA, 15 bp, Homo sapiens
cttatgttgttatca

SEQ ID NO: 1389003 - DNA, 15 bp, Homo sapiens
ccttatgttgttatc

SEQ ID NO: 1389004 - DNA, 15 bp, Homo sapiens
accttatgttgttat

SEQ ID NO: 1389005 - DNA, 15 bp, Homo sapiens
aaccttatgttgtta

SEQ ID NO: 1389006 - DNA, 15 bp, Homo sapiens
aaaccttatgttgtt

SEQ ID NO: 1389007 - DNA, 15 bp, Homo sapiens
taaaccttatgttgt

SEQ ID NO: 1389008 - DNA, 15 bp, Homo sapiens
ttaaaccttatgttg

SEQ ID NO: 1389009 - DNA, 15 bp, Homo sapiens
tttaaaccttatgtt

SEQ ID NO: 1389010 - DNA, 15 bp, Homo sapiens
ttttaaaccttatgt

SEQ ID NO: 1389011 - DNA, 15 bp, Homo sapiens
tttttaaaccttatg

SEQ ID NO: 1389012 - DNA, 15 bp, Homo sapiens
ttttttaaaccttat

SEQ ID NO: 1389013 - DNA, 15 bp, Homo sapiens
tttttttaaacctta

SEQ ID NO: 1389014 - DNA, 15 bp, Homo sapiens
ttttttttaaacctt

SEQ ID NO: 1389015 - DNA, 15 bp, Homo sapiens
tttttttttaaacct

SEQ ID NO: 1389016 - DNA, 15 bp, Homo sapiens
ttttttttttaaacc

SEQ ID NO: 1389017 - DNA, 15 bp, Homo sapiens
aaattttttttttaa

SEQ ID NO: 1389018 - DNA, 15 bp, Homo sapiens
aaaatttttttttta

SEQ ID NO: 1389019 - DNA, 15 bp, Homo sapiens
ctaaaattttttttt

SEQ ID NO: 1389020 - DNA, 15 bp, Homo sapiens
tctaaaatttttttt

SEQ ID NO: 1389021 - DNA, 15 bp, Homo sapiens
ttctaaaattttttt

SEQ ID NO: 1389022 - DNA, 15 bp, Homo sapiens
tttctaaaatttttt

SEQ ID NO: 1389023 - DNA, 15 bp, Homo sapiens
ttttctaaaattttt

SEQ ID NO: 1389024 - DNA, 15 bp, Homo sapiens
attttctaaaatttt

SEQ ID NO: 1389025 - DNA, 15 bp, Homo sapiens
tattttctaaaattt

SEQ ID NO: 1389026 - DNA, 15 bp, Homo sapiens
gtattttctaaaatt

SEQ ID NO: 1389027 - DNA, 15 bp, Homo sapiens
agtattttctaaaat

SEQ ID NO: 1389028 - DNA, 15 bp, Homo sapiens
aagtattttctaaaa

SEQ ID NO: 1389029 - DNA, 15 bp, Homo sapiens
gaagtattttctaaa

SEQ ID NO: 1389030 - DNA, 15 bp, Homo sapiens
tgaagtattttctaa

SEQ ID NO: 1389031 - DNA, 15 bp, Homo sapiens
ttgaagtattttcta

SEQ ID NO: 1389032 - DNA, 15 bp, Homo sapiens
cttgaagtattttct

SEQ ID NO: 1389033 - DNA, 15 bp, Homo sapiens
tcttgaagtattttc

SEQ ID NO: 1389034 - DNA, 15 bp, Homo sapiens
atcttgaagtatttt

SEQ ID NO: 1389035 - DNA, 15 bp, Homo sapiens
aatcttgaagtattt

SEQ ID NO: 1389036 - DNA, 15 bp, Homo sapiens
taatcttgaagtatt

SEQ ID NO: 1389037 - DNA, 15 bp, Homo sapiens
ttaatcttgaagtat

SEQ ID NO: 1389038 - DNA, 15 bp, Homo sapiens
cttaatcttgaagta

SEQ ID NO: 1389039 - DNA, 15 bp, Homo sapiens
tcttaatcttgaagt

SEQ ID NO: 1389040 - DNA, 15 bp, Homo sapiens
gtcttaatcttgaag

SEQ ID NO: 1389041 - DNA, 15 bp, Homo sapiens
tgtcttaatcttgaa

SEQ ID NO: 1389042 - DNA, 15 bp, Homo sapiens
ttgtcttaatcttga

SEQ ID NO: 1389043 - DNA, 15 bp, Homo sapiens
tttgtcttaatcttg

SEQ ID NO: 1389044 - DNA, 15 bp, Homo sapiens
ctttgtcttaatctt

SEQ ID NO: 1389045 - DNA, 15 bp, Homo sapiens
tctttgtcttaatct

SEQ ID NO: 1389046 - DNA, 15 bp, Homo sapiens
atctttgtcttaatc

SEQ ID NO: 1389047 - DNA, 15 bp, Homo sapiens
tatctttgtcttaat

SEQ ID NO: 1389048 - DNA, 15 bp, Homo sapiens
ttatctttgtcttaa

SEQ ID NO: 1389049 - DNA, 15 bp, Homo sapiens
cttatctttgtctta

SEQ ID NO: 1389050 - DNA, 15 bp, Homo sapiens
tcttatctttgtctt

SEQ ID NO: 1389051 - DNA, 15 bp, Homo sapiens
ctcttatctttgtct

SEQ ID NO: 1389052 - DNA, 15 bp, Homo sapiens
cctcttatctttgtc

SEQ ID NO: 1389053 - DNA, 15 bp, Homo sapiens
tcctcttatctttgt

SEQ ID NO: 1389054 - DNA, 15 bp, Homo sapiens
ttcctcttatctttg

SEQ ID NO: 1389055 - DNA, 15 bp, Homo sapiens
tttcctcttatcttt

SEQ ID NO: 1389056 - DNA, 15 bp, Homo sapiens
atttcctcttatctt

SEQ ID NO: 1389057 - DNA, 15 bp, Homo sapiens
catttcctcttatct

SEQ ID NO: 1389058 - DNA, 15 bp, Homo sapiens
gcatttcctcttatc

SEQ ID NO: 1389059 - DNA, 15 bp, Homo sapiens
agcatttcctcttat

SEQ ID NO: 1389060 - DNA, 15 bp, Homo sapiens
cagcatttcctctta

SEQ ID NO: 1389061 - DNA, 15 bp, Homo sapiens
acagcatttcctctt

SEQ ID NO: 1389062 - DNA, 15 bp, Homo sapiens
gacagcatttcctct

SEQ ID NO: 1389063 - DNA, 15 bp, Homo sapiens
agacagcatttcctc

SEQ ID NO: 1389064 - DNA, 15 bp, Homo sapiens
aagacagcatttcct

SEQ ID NO: 1389065 - DNA, 15 bp, Homo sapiens
caagacagcatttcc

SEQ ID NO: 1389066 - DNA, 15 bp, Homo sapiens
tcaagacagcatttc

SEQ ID NO: 1389067 - DNA, 15 bp, Homo sapiens
ctcaagacagcattt

SEQ ID NO: 1389068 - DNA, 15 bp, Homo sapiens
actcaagacagcatt

SEQ ID NO: 1389069 - DNA, 15 bp, Homo sapiens
cactcaagacagcat

SEQ ID NO: 1389070 - DNA, 15 bp, Homo sapiens
acactcaagacagca

SEQ ID NO: 1389071 - DNA, 15 bp, Homo sapiens
aacactcaagacagc

SEQ ID NO: 1389072 - DNA, 15 bp, Homo sapiens
caacactcaagacag

SEQ ID NO: 1389073 - DNA, 15 bp, Homo sapiens
acaacactcaagaca

SEQ ID NO: 1389074 - DNA, 15 bp, Homo sapiens
aacaacactcaagac

SEQ ID NO: 1389075 - DNA, 15 bp, Homo sapiens
taacaacactcaaga

SEQ ID NO: 1389076 - DNA, 15 bp, Homo sapiens
ttaacaacactcaag

SEQ ID NO: 1389077 - DNA, 15 bp, Homo sapiens
tttaacaacactcaa

SEQ ID NO: 1389078 - DNA, 15 bp, Homo sapiens
gtttaacaacactca

SEQ ID NO: 1389079 - DNA, 15 bp, Homo sapiens
tgtttaacaacactc

SEQ ID NO: 1389080 - DNA, 15 bp, Homo sapiens
atgtttaacaacact

SEQ ID NO: 1389081 - DNA, 15 bp, Homo sapiens
aatgtttaacaacac

SEQ ID NO: 1389082 - DNA, 15 bp, Homo sapiens
gaatgtttaacaaca

SEQ ID NO: 1389083 - DNA, 15 bp, Homo sapiens
agaatgtttaacaac

SEQ ID NO: 1389084 - DNA, 15 bp, Homo sapiens
cagaatgtttaacaa

SEQ ID NO: 1389085 - DNA, 15 bp, Homo sapiens
acagaatgtttaaca

SEQ ID NO: 1389086 - DNA, 15 bp, Homo sapiens
cacagaatgtttaac

SEQ ID NO: 1389087 - DNA, 15 bp, Homo sapiens
ccacagaatgtttaa

SEQ ID NO: 1389088 - DNA, 15 bp, Homo sapiens
cccacagaatgttta

SEQ ID NO: 1389089 - DNA, 15 bp, Homo sapiens
acccacagaatgttt

SEQ ID NO: 1389090 - DNA, 15 bp, Homo sapiens
aacccacagaatgtt

SEQ ID NO: 1389091 - DNA, 15 bp, Homo sapiens
taacccacagaatgt

SEQ ID NO: 1389092 - DNA, 15 bp, Homo sapiens
gtaacccacagaatg

SEQ ID NO: 1389093 - DNA, 15 bp, Homo sapiens
ggtaacccacagaat

SEQ ID NO: 1389094 - DNA, 15 bp, Homo sapiens
tggtaacccacagaa

SEQ ID NO: 1389095 - DNA, 15 bp, Homo sapiens
ttggtaacccacaga

SEQ ID NO: 1389096 - DNA, 15 bp, Homo sapiens
cttggtaacccacag

SEQ ID NO: 1389097 - DNA, 15 bp, Homo sapiens
ccttggtaacccaca

SEQ ID NO: 1389098 - DNA, 15 bp, Homo sapiens
tccttggtaacccac

SEQ ID NO: 1389099 - DNA, 15 bp, Homo sapiens
ttccttggtaaccca

SEQ ID NO: 1389100 - DNA, 15 bp, Homo sapiens
cttccttggtaaccc

SEQ ID NO: 1389101 - DNA, 15 bp, Homo sapiens
ccttccttggtaacc

SEQ ID NO: 1389102 - DNA, 15 bp, Homo sapiens
gccttccttggtaac

SEQ ID NO: 1389103 - DNA, 15 bp, Homo sapiens
agccttccttggtaa

SEQ ID NO: 1389104 - DNA, 15 bp, Homo sapiens
cagccttccttggta

SEQ ID NO: 1389105 - DNA, 15 bp, Homo sapiens
ccagccttccttggt

SEQ ID NO: 1389106 - DNA, 15 bp, Homo sapiens
cccagccttccttgg

SEQ ID NO: 1389107 - DNA, 15 bp, Homo sapiens
tcccagccttccttg

SEQ ID NO: 1389108 - DNA, 15 bp, Homo sapiens
ttcccagccttcctt

SEQ ID NO: 1389109 - DNA, 15 bp, Homo sapiens
tttcccagccttcct

SEQ ID NO: 1389110 - DNA, 15 bp, Homo sapiens
atttcccagccttcc

SEQ ID NO: 1389111 - DNA, 15 bp, Homo sapiens
gatttcccagccttc

SEQ ID NO: 1389112 - DNA, 15 bp, Homo sapiens
agatttcccagcctt

SEQ ID NO: 1389113 - DNA, 15 bp, Homo sapiens
gagatttcccagcct

SEQ ID NO: 1389114 - DNA, 15 bp, Homo sapiens
agagatttcccagcc

SEQ ID NO: 1389115 - DNA, 15 bp, Homo sapiens
aagagatttcccagc

SEQ ID NO: 1389116 - DNA, 15 bp, Homo sapiens
gaagagatttcccag

SEQ ID NO: 1389117 - DNA, 15 bp, Homo sapiens
agaagagatttccca

SEQ ID NO: 1389118 - DNA, 15 bp, Homo sapiens
cagaagagatttccc

SEQ ID NO: 1389119 - DNA, 15 bp, Homo sapiens
ccagaagagatttcc

SEQ ID NO: 1389120 - DNA, 15 bp, Homo sapiens
tccagaagagatttc

SEQ ID NO: 1389121 - DNA, 15 bp, Homo sapiens
ctccagaagagattt

SEQ ID NO: 1389122 - DNA, 15 bp, Homo sapiens
tctccagaagagatt

SEQ ID NO: 1389123 - DNA, 15 bp, Homo sapiens
atctccagaagagat

SEQ ID NO: 1389124 - DNA, 15 bp, Homo sapiens
gatctccagaagaga

SEQ ID NO: 1389125 - DNA, 15 bp, Homo sapiens
agatctccagaagag

SEQ ID NO: 1389126 - DNA, 15 bp, Homo sapiens
gagatctccagaaga

SEQ ID NO: 1389127 - DNA, 15 bp, Homo sapiens
tgagatctccagaag

SEQ ID NO: 1389128 - DNA, 15 bp, Homo sapiens
ctgagatctccagaa

SEQ ID NO: 1389129 - DNA, 15 bp, Homo sapiens
tctgagatctccaga

SEQ ID NO: 1389130 - DNA, 15 bp, Homo sapiens
ttctgagatctccag

SEQ ID NO: 1389131 - DNA, 15 bp, Homo sapiens
tttctgagatctcca

SEQ ID NO: 1389132 - DNA, 15 bp, Homo sapiens
ttttctgagatctcc

SEQ ID NO: 1389133 - DNA, 15 bp, Homo sapiens
attttctgagatctc

SEQ ID NO: 1389134 - DNA, 15 bp, Homo sapiens
cattttctgagatct

SEQ ID NO: 1389135 - DNA, 15 bp, Homo sapiens
tcattttctgagatc

SEQ ID NO: 1389136 - DNA, 15 bp, Homo sapiens
ctcattttctgagat

SEQ ID NO: 1389137 - DNA, 15 bp, Homo sapiens
tctcattttctgaga

SEQ ID NO: 1389138 - DNA, 15 bp, Homo sapiens
ttctcattttctgag

SEQ ID NO: 1389139 - DNA, 15 bp, Homo sapiens
tttctcattttctga

SEQ ID NO: 1389140 - DNA, 15 bp, Homo sapiens
ctttctcattttctg

SEQ ID NO: 1389141 - DNA, 15 bp, Homo sapiens
tctttctcattttct

SEQ ID NO: 1389142 - DNA, 15 bp, Homo sapiens
atctttctcattttc

SEQ ID NO: 1389143 - DNA, 15 bp, Homo sapiens
aatctttctcatttt

SEQ ID NO: 1389144 - DNA, 15 bp, Homo sapiens
gaatctttctcattt

SEQ ID NO: 1389145 - DNA, 15 bp, Homo sapiens
agaatctttctcatt

SEQ ID NO: 1389146 - DNA, 15 bp, Homo sapiens
aagaatctttctcat

SEQ ID NO: 1389147 - DNA, 15 bp, Homo sapiens
taagaatctttctca

SEQ ID NO: 1389148 - DNA, 15 bp, Homo sapiens
ttaagaatctttctc

SEQ ID NO: 1389149 - DNA, 15 bp, Homo sapiens
tttaagaatctttct

SEQ ID NO: 1389150 - DNA, 15 bp, Homo sapiens
ctttaagaatctttc

SEQ ID NO: 1389151 - DNA, 15 bp, Homo sapiens
actttaagaatcttt

SEQ ID NO: 1389152 - DNA, 15 bp, Homo sapiens
aactttaagaatctt

SEQ ID NO: 1389153 - DNA, 15 bp, Homo sapiens
caactttaagaatct

SEQ ID NO: 1389154 - DNA, 15 bp, Homo sapiens
ccaactttaagaatc

SEQ ID NO: 1389155 - DNA, 15 bp, Homo sapiens
tccaactttaagaat

SEQ ID NO: 1389156 - DNA, 15 bp, Homo sapiens
ctccaactttaagaa

SEQ ID NO: 1389157 - DNA, 15 bp, Homo sapiens
actccaactttaaga

SEQ ID NO: 1389158 - DNA, 15 bp, Homo sapiens
gactccaactttaag

SEQ ID NO: 1389159 - DNA, 15 bp, Homo sapiens
tgactccaactttaa

SEQ ID NO: 1389160 - DNA, 15 bp, Homo sapiens
atgactccaacttta

SEQ ID NO: 1389161 - DNA, 15 bp, Homo sapiens
tatgactccaacttt

SEQ ID NO: 1389162 - DNA, 15 bp, Homo sapiens
ttatgactccaactt

SEQ ID NO: 1389163 - DNA, 15 bp, Homo sapiens
tttatgactccaact

SEQ ID NO: 1389164 - DNA, 15 bp, Homo sapiens
ttttatgactccaac

SEQ ID NO: 1389165 - DNA, 15 bp, Homo sapiens
tttttatgactccaa

SEQ ID NO: 1389166 - DNA, 15 bp, Homo sapiens
gtttttatgactcca

SEQ ID NO: 1389167 - DNA, 15 bp, Homo sapiens
agtttttatgactcc

SEQ ID NO: 1389168 - DNA, 15 bp, Homo sapiens
gagtttttatgactc

SEQ ID NO: 1389169 - DNA, 15 bp, Homo sapiens
tgagtttttatgact

SEQ ID NO: 1389170 - DNA, 15 bp, Homo sapiens
ctgagtttttatgac

SEQ ID NO: 1389171 - DNA, 15 bp, Homo sapiens
cctgagtttttatga

SEQ ID NO: 1389172 - DNA, 15 bp, Homo sapiens
ccctgagtttttatg

SEQ ID NO: 1389173 - DNA, 15 bp, Homo sapiens
accctgagtttttat

SEQ ID NO: 1389174 - DNA, 15 bp, Homo sapiens
aaccctgagttttta

SEQ ID NO: 1389175 - DNA, 15 bp, Homo sapiens
caaccctgagttttt

SEQ ID NO: 1389176 - DNA, 15 bp, Homo sapiens
ccaaccctgagtttt

SEQ ID NO: 1389177 - DNA, 15 bp, Homo sapiens
gccaaccctgagttt

SEQ ID NO: 1389178 - DNA, 15 bp, Homo sapiens
tgccaaccctgagtt

SEQ ID NO: 1389179 - DNA, 15 bp, Homo sapiens
ctgccaaccctgagt

SEQ ID NO: 1389180 - DNA, 15 bp, Homo sapiens
tctgccaaccctgag

SEQ ID NO: 1389181 - DNA, 15 bp, Homo sapiens
ctctgccaaccctga

SEQ ID NO: 1389182 - DNA, 15 bp, Homo sapiens
tctctgccaaccctg

SEQ ID NO: 1389183 - DNA, 15 bp, Homo sapiens
gtctctgccaaccct

SEQ ID NO: 1389184 - DNA, 15 bp, Homo sapiens
ggtctctgccaaccc

SEQ ID NO: 1389185 - DNA, 15 bp, Homo sapiens
aggtctctgccaacc

SEQ ID NO: 1389186 - DNA, 15 bp, Homo sapiens
aaggtctctgccaac

SEQ ID NO: 1389187 - DNA, 15 bp, Homo sapiens
taaggtctctgccaa

SEQ ID NO: 1389188 - DNA, 15 bp, Homo sapiens
ttaaggtctctgcca

SEQ ID NO: 1389189 - DNA, 15 bp, Homo sapiens
tttaaggtctctgcc

SEQ ID NO: 1389190 - DNA, 15 bp, Homo sapiens
ctttaaggtctctgc

SEQ ID NO: 1389191 - DNA, 15 bp, Homo sapiens
cctttaaggtctctg

SEQ ID NO: 1389192 - DNA, 15 bp, Homo sapiens
acctttaaggtctct

SEQ ID NO: 1389193 - DNA, 15 bp, Homo sapiens
gacctttaaggtctc

SEQ ID NO: 1389194 - DNA, 15 bp, Homo sapiens
tgacctttaaggtct

SEQ ID NO: 1389195 - DNA, 15 bp, Homo sapiens
gtgacctttaaggtc

SEQ ID NO: 1389196 - DNA, 15 bp, Homo sapiens
agtgacctttaaggt

SEQ ID NO: 1389197 - DNA, 15 bp, Homo sapiens
aagtgacctttaagg

SEQ ID NO: 1389198 - DNA, 15 bp, Homo sapiens
taagtgacctttaag

SEQ ID NO: 1389199 - DNA, 15 bp, Homo sapiens
ctaagtgacctttaa

SEQ ID NO: 1389200 - DNA, 15 bp, Homo sapiens
gctaagtgaccttta

SEQ ID NO: 1389201 - DNA, 15 bp, Homo sapiens
agctaagtgaccttt

SEQ ID NO: 1389202 - DNA, 15 bp, Homo sapiens
cagctaagtgacctt

SEQ ID NO: 1389203 - DNA, 15 bp, Homo sapiens
tcagctaagtgacct

SEQ ID NO: 1389204 - DNA, 15 bp, Homo sapiens
ttcagctaagtgacc

SEQ ID NO: 1389205 - DNA, 15 bp, Homo sapiens
gttcagctaagtgac

SEQ ID NO: 1389206 - DNA, 15 bp, Homo sapiens
ggttcagctaagtga

SEQ ID NO: 1389207 - DNA, 15 bp, Homo sapiens
tggttcagctaagtg

SEQ ID NO: 1389208 - DNA, 15 bp, Homo sapiens
gtggttcagctaagt

SEQ ID NO: 1389209 - DNA, 15 bp, Homo sapiens
ggtggttcagctaag

SEQ ID NO: 1389210 - DNA, 15 bp, Homo sapiens
gggtggttcagctaa

SEQ ID NO: 1389211 - DNA, 15 bp, Homo sapiens
tgggtggttcagcta

SEQ ID NO: 1389212 - DNA, 15 bp, Homo sapiens
atgggtggttcagct

SEQ ID NO: 1389213 - DNA, 15 bp, Homo sapiens
gatgggtggttcagc

SEQ ID NO: 1389214 - DNA, 15 bp, Homo sapiens
agatgggtggttcag

SEQ ID NO: 1389215 - DNA, 15 bp, Homo sapiens
cagatgggtggttca

SEQ ID NO: 1389216 - DNA, 15 bp, Homo sapiens
ccagatgggtggttc

SEQ ID NO: 1389217 - DNA, 15 bp, Homo sapiens
accagatgggtggtt

SEQ ID NO: 1389218 - DNA, 15 bp, Homo sapiens
caccagatgggtggt

SEQ ID NO: 1389219 - DNA, 15 bp, Homo sapiens
gcaccagatgggtgg

SEQ ID NO: 1389220 - DNA, 15 bp, Homo sapiens
agcaccagatgggtg

SEQ ID NO: 1389221 - DNA, 15 bp, Homo sapiens
aagcaccagatgggt

SEQ ID NO: 1389222 - DNA, 15 bp, Homo sapiens
caagcaccagatggg

SEQ ID NO: 1389223 - DNA, 15 bp, Homo sapiens
tcaagcaccagatgg

SEQ ID NO: 1389224 - DNA, 15 bp, Homo sapiens
ttcaagcaccagatg

SEQ ID NO: 1389225 - DNA, 15 bp, Homo sapiens
attcaagcaccagat

SEQ ID NO: 1389226 - DNA, 15 bp, Homo sapiens
gattcaagcaccaga

SEQ ID NO: 1389227 - DNA, 15 bp, Homo sapiens
tgattcaagcaccag

SEQ ID NO: 1389228 - DNA, 15 bp, Homo sapiens
gtgattcaagcacca

SEQ ID NO: 1389229 - DNA, 15 bp, Homo sapiens
ggtgattcaagcacc

SEQ ID NO: 1389230 - DNA, 15 bp, Homo sapiens
aggtgattcaagcac

SEQ ID NO: 1389231 - DNA, 15 bp, Homo sapiens
gaggtgattcaagca

SEQ ID NO: 1389232 - DNA, 15 bp, Homo sapiens
tgaggtgattcaagc

SEQ ID NO: 1389233 - DNA, 15 bp, Homo sapiens
ttgaggtgattcaag

SEQ ID NO: 1389234 - DNA, 15 bp, Homo sapiens
gttgaggtgattcaa

SEQ ID NO: 1389235 - DNA, 15 bp, Homo sapiens
tgttgaggtgattca

SEQ ID NO: 1389236 - DNA, 15 bp, Homo sapiens
gtgttgaggtgattc

SEQ ID NO: 1389237 - DNA, 15 bp, Homo sapiens
agtgttgaggtgatt

SEQ ID NO: 1389238 - DNA, 15 bp, Homo sapiens
tagtgttgaggtgat

SEQ ID NO: 1389239 - DNA, 15 bp, Homo sapiens
atagtgttgaggtga

SEQ ID NO: 1389240 - DNA, 15 bp, Homo sapiens
gatagtgttgaggtg

SEQ ID NO: 1389241 - DNA, 15 bp, Homo sapiens
ggatagtgttgaggt

SEQ ID NO: 1389242 - DNA, 15 bp, Homo sapiens
aggatagtgttgagg

SEQ ID NO: 1389243 - DNA, 15 bp, Homo sapiens
aaggatagtgttgag

SEQ ID NO: 1389244 - DNA, 15 bp, Homo sapiens
caaggatagtgttga

SEQ ID NO: 1389245 - DNA, 15 bp, Homo sapiens
gcaaggatagtgttg

SEQ ID NO: 1389246 - DNA, 15 bp, Homo sapiens
ggcaaggatagtgtt

SEQ ID NO: 1389247 - DNA, 15 bp, Homo sapiens
tggcaaggatagtgt

SEQ ID NO: 1389248 - DNA, 15 bp, Homo sapiens
ttggcaaggatagtg

SEQ ID NO: 1389249 - DNA, 15 bp, Homo sapiens
cttggcaaggatagt

SEQ ID NO: 1389250 - DNA, 15 bp, Homo sapiens
acttggcaaggatag

SEQ ID NO: 1389251 - DNA, 15 bp, Homo sapiens
cacttggcaaggata

SEQ ID NO: 1389252 - DNA, 15 bp, Homo sapiens
ccacttggcaaggat

SEQ ID NO: 1389253 - DNA, 15 bp, Homo sapiens
accacttggcaagga

SEQ ID NO: 1389254 - DNA, 15 bp, Homo sapiens
gaccacttggcaagg

SEQ ID NO: 1389255 - DNA, 15 bp, Homo sapiens
tgaccacttggcaag

SEQ ID NO: 1389256 - DNA, 15 bp, Homo sapiens
atgaccacttggcaa

SEQ ID NO: 1389257 - DNA, 15 bp, Homo sapiens
aatgaccacttggca

SEQ ID NO: 1389258 - DNA, 15 bp, Homo sapiens
caatgaccacttggc

SEQ ID NO: 1389259 - DNA, 15 bp, Homo sapiens
acaatgaccacttgg

SEQ ID NO: 1389260 - DNA, 15 bp, Homo sapiens
aacaatgaccacttg

SEQ ID NO: 1389261 - DNA, 15 bp, Homo sapiens
taacaatgaccactt

SEQ ID NO: 1389262 - DNA, 15 bp, Homo sapiens
ttaacaatgaccact

SEQ ID NO: 1389263 - DNA, 15 bp, Homo sapiens
tttaacaatgaccac

SEQ ID NO: 1389264 - DNA, 15 bp, Homo sapiens
gtttaacaatgacca

SEQ ID NO: 1389265 - DNA, 15 bp, Homo sapiens
agtttaacaatgacc

SEQ ID NO: 1389266 - DNA, 15 bp, Homo sapiens
tagtttaacaatgac

SEQ ID NO: 1389267 - DNA, 15 bp, Homo sapiens
atagtttaacaatga

SEQ ID NO: 1389268 - DNA, 15 bp, Homo sapiens
aatagtttaacaatg

SEQ ID NO: 1389269 - DNA, 15 bp, Homo sapiens
aaatagtttaacaat

SEQ ID NO: 1389270 - DNA, 15 bp, Homo sapiens
aaaatagtttaacaa

SEQ ID NO: 1389271 - DNA, 15 bp, Homo sapiens
taaaatagtttaaca

SEQ ID NO: 1389272 - DNA, 15 bp, Homo sapiens
ataaaatagtttaac

SEQ ID NO: 1389273 - DNA, 15 bp, Homo sapiens
cataaaatagtttaa

SEQ ID NO: 1389274 - DNA, 15 bp, Homo sapiens
tcataaaatagttta

SEQ ID NO: 1389275 - DNA, 15 bp, Homo sapiens
atcataaaatagttt

SEQ ID NO: 1389276 - DNA, 15 bp, Homo sapiens
aatcataaaatagtt

SEQ ID NO: 1389277 - DNA, 15 bp, Homo sapiens
aaatcataaaatagt

SEQ ID NO: 1389278 - DNA, 15 bp, Homo sapiens
aaaatcataaaatag

SEQ ID NO: 1389279 - DNA, 15 bp, Homo sapiens
aaaaatcataaaata

SEQ ID NO: 1389280 - DNA, 15 bp, Homo sapiens
gaaaaatcataaaat

SEQ ID NO: 1389281 - DNA, 15 bp, Homo sapiens
agaaaaatcataaaa

SEQ ID NO: 1389282 - DNA, 15 bp, Homo sapiens
cagaaaaatcataaa

SEQ ID NO: 1389283 - DNA, 15 bp, Homo sapiens
tcagaaaaatcataa

SEQ ID NO: 1389284 - DNA, 15 bp, Homo sapiens
ttcagaaaaatcata

SEQ ID NO: 1389285 - DNA, 15 bp, Homo sapiens
cttcagaaaaatcat

SEQ ID NO: 1389286 - DNA, 15 bp, Homo sapiens
ttcttcagaaaaatc

SEQ ID NO: 1389287 - DNA, 15 bp, Homo sapiens
cttcttcagaaaaat

SEQ ID NO: 1389288 - DNA, 15 bp, Homo sapiens
ccttcttcagaaaaa

SEQ ID NO: 1389289 - DNA, 15 bp, Homo sapiens
accttcttcagaaaa

SEQ ID NO: 1389290 - DNA, 15 bp, Homo sapiens
aaccttcttcagaaa

SEQ ID NO: 1389291 - DNA, 15 bp, Homo sapiens
taaccttcttcagaa

SEQ ID NO: 1389292 - DNA, 15 bp, Homo sapiens
gtaaccttcttcaga

SEQ ID NO: 1389293 - DNA, 15 bp, Homo sapiens
tgtaaccttcttcag

SEQ ID NO: 1389294 - DNA, 15 bp, Homo sapiens
ctgtaaccttcttca

SEQ ID NO: 1389295 - DNA, 15 bp, Homo sapiens
tctgtaaccttcttc

SEQ ID NO: 1389296 - DNA, 15 bp, Homo sapiens
ttctgtaaccttctt

SEQ ID NO: 1389297 - DNA, 15 bp, Homo sapiens
attctgtaaccttct

SEQ ID NO: 1389298 - DNA, 15 bp, Homo sapiens
gattctgtaaccttc

SEQ ID NO: 1389299 - DNA, 15 bp, Homo sapiens
agattctgtaacctt

SEQ ID NO: 1389300 - DNA, 15 bp, Homo sapiens
aagattctgtaacct

SEQ ID NO: 1389301 - DNA, 15 bp, Homo sapiens
gaagattctgtaacc

SEQ ID NO: 1389302 - DNA, 15 bp, Homo sapiens
agaagattctgtaac

SEQ ID NO: 1389303 - DNA, 15 bp, Homo sapiens
aagaagattctgtaa

SEQ ID NO: 1389304 - DNA, 15 bp, Homo sapiens
gaagaagattctgta

SEQ ID NO: 1389305 - DNA, 15 bp, Homo sapiens
tgaagaagattctgt

SEQ ID NO: 1389306 - DNA, 15 bp, Homo sapiens
ctgaagaagattctg

SEQ ID NO: 1389307 - DNA, 15 bp, Homo sapiens
tctgaagaagattct

SEQ ID NO: 1389308 - DNA, 15 bp, Homo sapiens
ctctgaagaagattc

SEQ ID NO: 1389309 - DNA, 15 bp, Homo sapiens
tctctgaagaagatt

SEQ ID NO: 1389310 - DNA, 15 bp, Homo sapiens
atctctgaagaagat

SEQ ID NO: 1389311 - DNA, 15 bp, Homo sapiens
gatctctgaagaaga

SEQ ID NO: 1389312 - DNA, 15 bp, Homo sapiens
agatctctgaagaag

SEQ ID NO: 1389313 - DNA, 15 bp, Homo sapiens
aagatctctgaagaa

SEQ ID NO: 1389314 - DNA, 15 bp, Homo sapiens
taagatctctgaaga

SEQ ID NO: 1389315 - DNA, 15 bp, Homo sapiens
ctaagatctctgaag

SEQ ID NO: 1389316 - DNA, 15 bp, Homo sapiens
cctaagatctctgaa

SEQ ID NO: 1389317 - DNA, 15 bp, Homo sapiens
ccctaagatctctga

SEQ ID NO: 1389318 - DNA, 15 bp, Homo sapiens
tccctaagatctctg

SEQ ID NO: 1389319 - DNA, 15 bp, Homo sapiens
ttccctaagatctct

SEQ ID NO: 1389320 - DNA, 15 bp, Homo sapiens
tttccctaagatctc

SEQ ID NO: 1389321 - DNA, 15 bp, Homo sapiens
ttttccctaagatct

SEQ ID NO: 1389322 - DNA, 15 bp, Homo sapiens
tttttccctaagatc

SEQ ID NO: 1389323 - DNA, 15 bp, Homo sapiens
ttttttccctaagat

SEQ ID NO: 1389324 - DNA, 15 bp, Homo sapiens
tttttttccctaaga

SEQ ID NO: 1389325 - DNA, 15 bp, Homo sapiens
tttttttttccctaa

SEQ ID NO: 1389326 - DNA, 15 bp, Homo sapiens
ttttttttttcccta

SEQ ID NO: 1389327 - DNA, 15 bp, Homo sapiens
cttttttttttttcc

SEQ ID NO: 1389328 - DNA, 15 bp, Homo sapiens
caatctttttttttt

SEQ ID NO: 1389329 - DNA, 15 bp, Homo sapiens
acaatcttttttttt

SEQ ID NO: 1389330 - DNA, 15 bp, Homo sapiens
gacaatctttttttt

SEQ ID NO: 1389331 - DNA, 15 bp, Homo sapiens
cgacaatcttttttt

SEQ ID NO: 1389332 - DNA, 15 bp, Homo sapiens
acgacaatctttttt

SEQ ID NO: 1389333 - DNA, 15 bp, Homo sapiens
cacgacaatcttttt

SEQ ID NO: 1389334 - DNA, 15 bp, Homo sapiens
tcacgacaatctttt

SEQ ID NO: 1389335 - DNA, 15 bp, Homo sapiens
ctcacgacaatcttt

SEQ ID NO: 1389336 - DNA, 15 bp, Homo sapiens
tctcacgacaatctt

SEQ ID NO: 1389337 - DNA, 15 bp, Homo sapiens
ctctcacgacaatct

SEQ ID NO: 1389338 - DNA, 15 bp, Homo sapiens
actctcacgacaatc

SEQ ID NO: 1389339 - DNA, 15 bp, Homo sapiens
aactctcacgacaat

SEQ ID NO: 1389340 - DNA, 15 bp, Homo sapiens
caactctcacgacaa

SEQ ID NO: 1389341 - DNA, 15 bp, Homo sapiens
tcaactctcacgaca

SEQ ID NO: 1389342 - DNA, 15 bp, Homo sapiens
ttcaactctcacgac

SEQ ID NO: 1389343 - DNA, 15 bp, Homo sapiens
tttcaactctcacga

SEQ ID NO: 1389344 - DNA, 15 bp, Homo sapiens
ttttcaactctcacg

SEQ ID NO: 1389345 - DNA, 15 bp, Homo sapiens
attttcaactctcac

SEQ ID NO: 1389346 - DNA, 15 bp, Homo sapiens
gattttcaactctca

SEQ ID NO: 1389347 - DNA, 15 bp, Homo sapiens
ggattttcaactctc

SEQ ID NO: 1389348 - DNA, 15 bp, Homo sapiens
aggattttcaactct

SEQ ID NO: 1389349 - DNA, 15 bp, Homo sapiens
caggattttcaactc

SEQ ID NO: 1389350 - DNA, 15 bp, Homo sapiens
gcaggattttcaact

SEQ ID NO: 1389351 - DNA, 15 bp, Homo sapiens
ggcaggattttcaac

SEQ ID NO: 1389352 - DNA, 15 bp, Homo sapiens
tggcaggattttcaa

SEQ ID NO: 1389353 - DNA, 15 bp, Homo sapiens
atggcaggattttca

SEQ ID NO: 1389354 - DNA, 15 bp, Homo sapiens
aatggcaggattttc

SEQ ID NO: 1389355 - DNA, 15 bp, Homo sapiens
caatggcaggatttt

SEQ ID NO: 1389356 - DNA, 15 bp, Homo sapiens
acaatggcaggattt

SEQ ID NO: 1389357 - DNA, 15 bp, Homo sapiens
tacaatggcaggatt

SEQ ID NO: 1389358 - DNA, 15 bp, Homo sapiens
ttacaatggcaggat

SEQ ID NO: 1389359 - DNA, 15 bp, Homo sapiens
gttacaatggcagga

SEQ ID NO: 1389360 - DNA, 15 bp, Homo sapiens
ggttacaatggcagg

SEQ ID NO: 1389361 - DNA, 15 bp, Homo sapiens
tggttacaatggcag

SEQ ID NO: 1389362 - DNA, 15 bp, Homo sapiens
ctggttacaatggca

SEQ ID NO: 1389363 - DNA, 15 bp, Homo sapiens
actggttacaatggc

SEQ ID NO: 1389364 - DNA, 15 bp, Homo sapiens
aactggttacaatgg

SEQ ID NO: 1389365 - DNA, 15 bp, Homo sapiens
caactggttacaatg

SEQ ID NO: 1389366 - DNA, 15 bp, Homo sapiens
tcaactggttacaat

SEQ ID NO: 1389367 - DNA, 15 bp, Homo sapiens
atcaactggttacaa

SEQ ID NO: 1389368 - DNA, 15 bp, Homo sapiens
gatcaactggttaca

SEQ ID NO: 1389369 - DNA, 15 bp, Homo sapiens
agatcaactggttac

SEQ ID NO: 1389370 - DNA, 15 bp, Homo sapiens
tagatcaactggtta

SEQ ID NO: 1389371 - DNA, 15 bp, Homo sapiens
gtagatcaactggtt

SEQ ID NO: 1389372 - DNA, 15 bp, Homo sapiens
cgtagatcaactggt

SEQ ID NO: 1389373 - DNA, 15 bp, Homo sapiens
ccgtagatcaactgg

SEQ ID NO: 1389374 - DNA, 15 bp, Homo sapiens
accgtagatcaactg

SEQ ID NO: 1389375 - DNA, 15 bp, Homo sapiens
aaccgtagatcaact

SEQ ID NO: 1389376 - DNA, 15 bp, Homo sapiens
aaaccgtagatcaac

SEQ ID NO: 1389377 - DNA, 15 bp, Homo sapiens
gaaaccgtagatcaa

SEQ ID NO: 1389378 - DNA, 15 bp, Homo sapiens
agaaaccgtagatca

SEQ ID NO: 1389379 - DNA, 15 bp, Homo sapiens
cagaaaccgtagatc

SEQ ID NO: 1389380 - DNA, 15 bp, Homo sapiens
tcagaaaccgtagat

SEQ ID NO: 1389381 - DNA, 15 bp, Homo sapiens
atcagaaaccgtaga

SEQ ID NO: 1389382 - DNA, 15 bp, Homo sapiens
aatcagaaaccgtag

SEQ ID NO: 1389383 - DNA, 15 bp, Homo sapiens
gaatcagaaaccgta

SEQ ID NO: 1389384 - DNA, 15 bp, Homo sapiens
agaatcagaaaccgt

SEQ ID NO: 1389385 - DNA, 15 bp, Homo sapiens
cagaatcagaaaccg

SEQ ID NO: 1389386 - DNA, 15 bp, Homo sapiens
acagaatcagaaacc

SEQ ID NO: 1389387 - DNA, 15 bp, Homo sapiens
gacagaatcagaaac

SEQ ID NO: 1389388 - DNA, 15 bp, Homo sapiens
tgacagaatcagaaa

SEQ ID NO: 1389389 - DNA, 15 bp, Homo sapiens
atgacagaatcagaa

SEQ ID NO: 1389390 - DNA, 15 bp, Homo sapiens
catgacagaatcaga

SEQ ID NO: 1389391 - DNA, 15 bp, Homo sapiens
gcatgacagaatcag

SEQ ID NO: 1389392 - DNA, 15 bp, Homo sapiens
tgcatgacagaatca

SEQ ID NO: 1389393 - DNA, 15 bp, Homo sapiens
ttgcatgacagaatc

SEQ ID NO: 1389394 - DNA, 15 bp, Homo sapiens
gttgcatgacagaat

SEQ ID NO: 1389395 - DNA, 15 bp, Homo sapiens
tgttgcatgacagaa

SEQ ID NO: 1389396 - DNA, 15 bp, Homo sapiens
atgttgcatgacaga

SEQ ID NO: 1389397 - DNA, 15 bp, Homo sapiens
tatgttgcatgacag

SEQ ID NO: 1389398 - DNA, 15 bp, Homo sapiens
atatgttgcatgaca

SEQ ID NO: 1389399 - DNA, 15 bp, Homo sapiens
aatatgttgcatgac

SEQ ID NO: 1389400 - DNA, 15 bp, Homo sapiens
aaatatgttgcatga

SEQ ID NO: 1389401 - DNA, 15 bp, Homo sapiens
taaatatgttgcatg

SEQ ID NO: 1389402 - DNA, 15 bp, Homo sapiens
ataaatatgttgcat

SEQ ID NO: 1389403 - DNA, 15 bp, Homo sapiens
aataaatatgttgca

SEQ ID NO: 1389404 - DNA, 15 bp, Homo sapiens
aaataaatatgttgc

SEQ ID NO: 1389405 - DNA, 15 bp, Homo sapiens
aaaataaatatgttg

SEQ ID NO: 1389406 - DNA, 15 bp, Homo sapiens
gaaaataaatatgtt

SEQ ID NO: 1389407 - DNA, 15 bp, Homo sapiens
ggaaaataaatatgt

SEQ ID NO: 1389408 - DNA, 15 bp, Homo sapiens
tggaaaataaatatg

SEQ ID NO: 1389409 - DNA, 15 bp, Homo sapiens
ctggaaaataaatat

SEQ ID NO: 1389410 - DNA, 15 bp, Homo sapiens
actggaaaataaata

SEQ ID NO: 1389411 - DNA, 15 bp, Homo sapiens
aactggaaaataaat

SEQ ID NO: 1389412 - DNA, 15 bp, Homo sapiens
aaactggaaaataaa

SEQ ID NO: 1389413 - DNA, 15 bp, Homo sapiens
gaaactggaaaataa

SEQ ID NO: 1389414 - DNA, 15 bp, Homo sapiens
agaaactggaaaata

SEQ ID NO: 1389415 - DNA, 15 bp, Homo sapiens
aagaaactggaaaat

SEQ ID NO: 1389416 - DNA, 15 bp, Homo sapiens
caagaaactggaaaa

SEQ ID NO: 1389417 - DNA, 15 bp, Homo sapiens
acaagaaactggaaa

SEQ ID NO: 1389418 - DNA, 15 bp, Homo sapiens
gacaagaaactggaa

SEQ ID NO: 1389419 - DNA, 15 bp, Homo sapiens
tgacaagaaactgga

SEQ ID NO: 1389420 - DNA, 15 bp, Homo sapiens
atgacaagaaactgg

SEQ ID NO: 1389421 - DNA, 15 bp, Homo sapiens
gatgacaagaaactg

SEQ ID NO: 1389422 - DNA, 15 bp, Homo sapiens
agatgacaagaaact

SEQ ID NO: 1389423 - DNA, 15 bp, Homo sapiens
tagatgacaagaaac

SEQ ID NO: 1389424 - DNA, 15 bp, Homo sapiens
gtagatgacaagaaa

SEQ ID NO: 1389425 - DNA, 15 bp, Homo sapiens
tgtagatgacaagaa

SEQ ID NO: 1389426 - DNA, 15 bp, Homo sapiens
ttgtagatgacaaga

SEQ ID NO: 1389427 - DNA, 15 bp, Homo sapiens
tttgtagatgacaag

SEQ ID NO: 1389428 - DNA, 15 bp, Homo sapiens
atttgtagatgacaa

SEQ ID NO: 1389429 - DNA, 15 bp, Homo sapiens
aatttgtagatgaca

SEQ ID NO: 1389430 - DNA, 15 bp, Homo sapiens
gaatttgtagatgac

SEQ ID NO: 1389431 - DNA, 15 bp, Homo sapiens
cgaatttgtagatga

SEQ ID NO: 1389432 - DNA, 15 bp, Homo sapiens
tcgaatttgtagatg

SEQ ID NO: 1389433 - DNA, 15 bp, Homo sapiens
atcgaatttgtagat

SEQ ID NO: 1389434 - DNA, 15 bp, Homo sapiens
tatcgaatttgtaga

SEQ ID NO: 1389435 - DNA, 15 bp, Homo sapiens
atatcgaatttgtag

SEQ ID NO: 1389436 - DNA, 15 bp, Homo sapiens
catatcgaatttgta

SEQ ID NO: 1389437 - DNA, 15 bp, Homo sapiens
gcatatcgaatttgt

SEQ ID NO: 1389438 - DNA, 15 bp, Homo sapiens
ggcatatcgaatttg

SEQ ID NO: 1389439 - DNA, 15 bp, Homo sapiens
aggcatatcgaattt

SEQ ID NO: 1389440 - DNA, 15 bp, Homo sapiens
caggcatatcgaatt

SEQ ID NO: 1389441 - DNA, 15 bp, Homo sapiens
gcaggcatatcgaat

SEQ ID NO: 1389442 - DNA, 15 bp, Homo sapiens
ggcaggcatatcgaa

SEQ ID NO: 1389443 - DNA, 15 bp, Homo sapiens
aggcaggcatatcga

SEQ ID NO: 1389444 - DNA, 15 bp, Homo sapiens
aaggcaggcatatcg

SEQ ID NO: 1389445 - DNA, 15 bp, Homo sapiens
gaaggcaggcatatc

SEQ ID NO: 1389446 - DNA, 15 bp, Homo sapiens
agaaggcaggcatat

SEQ ID NO: 1389447 - DNA, 15 bp, Homo sapiens
cagaaggcaggcata

SEQ ID NO: 1389448 - DNA, 15 bp, Homo sapiens
acagaaggcaggcat

SEQ ID NO: 1389449 - DNA, 15 bp, Homo sapiens
cacagaaggcaggca

SEQ ID NO: 1389450 - DNA, 15 bp, Homo sapiens
acacagaaggcaggc

SEQ ID NO: 1389451 - DNA, 15 bp, Homo sapiens
cacacagaaggcagg

SEQ ID NO: 1389452 - DNA, 15 bp, Homo sapiens
acacacagaaggcag

SEQ ID NO: 1389453 - DNA, 15 bp, Homo sapiens
gacacacagaaggca

SEQ ID NO: 1389454 - DNA, 15 bp, Homo sapiens
tgacacacagaaggc

SEQ ID NO: 1389455 - DNA, 15 bp, Homo sapiens
atgacacacagaagg

SEQ ID NO: 1389456 - DNA, 15 bp, Homo sapiens
gatgacacacagaag

SEQ ID NO: 1389457 - DNA, 15 bp, Homo sapiens
ggatgacacacagaa

SEQ ID NO: 1389458 - DNA, 15 bp, Homo sapiens
tggatgacacacaga

SEQ ID NO: 1389459 - DNA, 15 bp, Homo sapiens
atggatgacacacag

SEQ ID NO: 1389460 - DNA, 15 bp, Homo sapiens
tatggatgacacaca

SEQ ID NO: 1389461 - DNA, 15 bp, Homo sapiens
atatggatgacacac

SEQ ID NO: 1389462 - DNA, 15 bp, Homo sapiens
aatatggatgacaca

SEQ ID NO: 1389463 - DNA, 15 bp, Homo sapiens
aaatatggatgacac

SEQ ID NO: 1389464 - DNA, 15 bp, Homo sapiens
gaaatatggatgaca

SEQ ID NO: 1389465 - DNA, 15 bp, Homo sapiens
agaaatatggatgac

SEQ ID NO: 1389466 - DNA, 15 bp, Homo sapiens
cagaaatatggatga

SEQ ID NO: 1389467 - DNA, 15 bp, Homo sapiens
tcagaaatatggatg

SEQ ID NO: 1389468 - DNA, 15 bp, Homo sapiens
ctcagaaatatggat

SEQ ID NO: 1389469 - DNA, 15 bp, Homo sapiens
tctcagaaatatgga

SEQ ID NO: 1389470 - DNA, 15 bp, Homo sapiens
ttctcagaaatatgg

SEQ ID NO: 1389471 - DNA, 15 bp, Homo sapiens
tttctcagaaatatg

SEQ ID NO: 1389472 - DNA, 15 bp, Homo sapiens
ttttctcagaaatat

SEQ ID NO: 1389473 - DNA, 15 bp, Homo sapiens
atttttctcagaaat

SEQ ID NO: 1389474 - DNA, 15 bp, Homo sapiens
tatttttctcagaaa

SEQ ID NO: 1389475 - DNA, 15 bp, Homo sapiens
atatttttctcagaa

SEQ ID NO: 1389476 - DNA, 15 bp, Homo sapiens
catatttttctcaga

SEQ ID NO: 1389477 - DNA, 15 bp, Homo sapiens
tcatatttttctcag

SEQ ID NO: 1389478 - DNA, 15 bp, Homo sapiens
ttcatatttttctca

SEQ ID NO: 1389479 - DNA, 15 bp, Homo sapiens
cttcatatttttctc

SEQ ID NO: 1389480 - DNA, 15 bp, Homo sapiens
ccttcatatttttct

SEQ ID NO: 1389481 - DNA, 15 bp, Homo sapiens
gccttcatatttttc

SEQ ID NO: 1389482 - DNA, 15 bp, Homo sapiens
ggccttcatattttt

SEQ ID NO: 1389483 - DNA, 15 bp, Homo sapiens
tggccttcatatttt

SEQ ID NO: 1389484 - DNA, 15 bp, Homo sapiens
ctggccttcatattt

SEQ ID NO: 1389485 - DNA, 15 bp, Homo sapiens
cctggccttcatatt

SEQ ID NO: 1389486 - DNA, 15 bp, Homo sapiens
tcctggccttcatat

SEQ ID NO: 1389487 - DNA, 15 bp, Homo sapiens
ttcctggccttcata

SEQ ID NO: 1389488 - DNA, 15 bp, Homo sapiens
attcctggccttcat

SEQ ID NO: 1389489 - DNA, 15 bp, Homo sapiens
tattcctggccttca

SEQ ID NO: 1389490 - DNA, 15 bp, Homo sapiens
ctattcctggccttc

SEQ ID NO: 1389491 - DNA, 15 bp, Homo sapiens
tctattcctggcctt

SEQ ID NO: 1389492 - DNA, 15 bp, Homo sapiens
ctctattcctggcct

SEQ ID NO: 1389493 - DNA, 15 bp, Homo sapiens
gctctattcctggcc

SEQ ID NO: 1389494 - DNA, 15 bp, Homo sapiens
ggctctattcctggc

SEQ ID NO: 1389495 - DNA, 15 bp, Homo sapiens
gggctctattcctgg

SEQ ID NO: 1389496 - DNA, 15 bp, Homo sapiens
agggctctattcctg

SEQ ID NO: 1389497 - DNA, 15 bp, Homo sapiens
cagggctctattcct

SEQ ID NO: 1389498 - DNA, 15 bp, Homo sapiens
acagggctctattcc

SEQ ID NO: 1389499 - DNA, 15 bp, Homo sapiens
cacagggctctattc

SEQ ID NO: 1389500 - DNA, 15 bp, Homo sapiens
tcacagggctctatt

SEQ ID NO: 1389501 - DNA, 15 bp, Homo sapiens
gtcacagggctctat

SEQ ID NO: 1389502 - DNA, 15 bp, Homo sapiens
tgtcacagggctcta

SEQ ID NO: 1389503 - DNA, 15 bp, Homo sapiens
atgtcacagggctct

SEQ ID NO: 1389504 - DNA, 15 bp, Homo sapiens
catgtcacagggctc

SEQ ID NO: 1389505 - DNA, 15 bp, Homo sapiens
tcatgtcacagggct

SEQ ID NO: 1389506 - DNA, 15 bp, Homo sapiens
gtcatgtcacagggc

SEQ ID NO: 1389507 - DNA, 15 bp, Homo sapiens
tgtcatgtcacaggg

SEQ ID NO: 1389508 - DNA, 15 bp, Homo sapiens
atgtcatgtcacagg

SEQ ID NO: 1389509 - DNA, 15 bp, Homo sapiens
tatgtcatgtcacag

SEQ ID NO: 1389510 - DNA, 15 bp, Homo sapiens
ctatgtcatgtcaca

SEQ ID NO: 1389511 - DNA, 15 bp, Homo sapiens
tctatgtcatgtcac

SEQ ID NO: 1389512 - DNA, 15 bp, Homo sapiens
ttctatgtcatgtca

SEQ ID NO: 1389513 - DNA, 15 bp, Homo sapiens
tttctatgtcatgtc

SEQ ID NO: 1389514 - DNA, 15 bp, Homo sapiens
gtttctatgtcatgt

SEQ ID NO: 1389515 - DNA, 15 bp, Homo sapiens
agtttctatgtcatg

SEQ ID NO: 1389516 - DNA, 15 bp, Homo sapiens
tagtttctatgtcat

SEQ ID NO: 1389517 - DNA, 15 bp, Homo sapiens
gtagtttctatgtca

SEQ ID NO: 1389518 - DNA, 15 bp, Homo sapiens
ggtagtttctatgtc

SEQ ID NO: 1389519 - DNA, 15 bp, Homo sapiens
gggtagtttctatgt

SEQ ID NO: 1389520 - DNA, 15 bp, Homo sapiens
agggtagtttctatg

SEQ ID NO: 1389521 - DNA, 15 bp, Homo sapiens
gagggtagtttctat

SEQ ID NO: 1389522 - DNA, 15 bp, Homo sapiens
ggagggtagtttcta

SEQ ID NO: 1389523 - DNA, 15 bp, Homo sapiens
tggagggtagtttct

SEQ ID NO: 1389524 - DNA, 15 bp, Homo sapiens
ctggagggtagtttc

SEQ ID NO: 1389525 - DNA, 15 bp, Homo sapiens
cctggagggtagttt

SEQ ID NO: 1389526 - DNA, 15 bp, Homo sapiens
acctggagggtagtt

SEQ ID NO: 1389527 - DNA, 15 bp, Homo sapiens
aacctggagggtagt

SEQ ID NO: 1389528 - DNA, 15 bp, Homo sapiens
gaacctggagggtag

SEQ ID NO: 1389529 - DNA, 15 bp, Homo sapiens
tgaacctggagggta

SEQ ID NO: 1389530 - DNA, 15 bp, Homo sapiens
atgaacctggagggt

SEQ ID NO: 1389531 - DNA, 15 bp, Homo sapiens
catgaacctggaggg

SEQ ID NO: 1389532 - DNA, 15 bp, Homo sapiens
acatgaacctggagg

SEQ ID NO: 1389533 - DNA, 15 bp, Homo sapiens
gacatgaacctggag

SEQ ID NO: 1389534 - DNA, 15 bp, Homo sapiens
agacatgaacctgga

SEQ ID NO: 1389535 - DNA, 15 bp, Homo sapiens
aagacatgaacctgg

SEQ ID NO: 1389536 - DNA, 15 bp, Homo sapiens
gaagacatgaacctg

SEQ ID NO: 1389537 - DNA, 15 bp, Homo sapiens
tgaagacatgaacct

SEQ ID NO: 1389538 - DNA, 15 bp, Homo sapiens
atgaagacatgaacc

SEQ ID NO: 1389539 - DNA, 15 bp, Homo sapiens
catgaagacatgaac

SEQ ID NO: 1389540 - DNA, 15 bp, Homo sapiens
tcatgaagacatgaa

SEQ ID NO: 1389541 - DNA, 15 bp, Homo sapiens
ttcatgaagacatga

SEQ ID NO: 1389542 - DNA, 15 bp, Homo sapiens
attcatgaagacatg

SEQ ID NO: 1389543 - DNA, 15 bp, Homo sapiens
gattcatgaagacat

SEQ ID NO: 1389544 - DNA, 15 bp, Homo sapiens
tgattcatgaagaca

SEQ ID NO: 1389545 - DNA, 15 bp, Homo sapiens
gtgattcatgaagac

SEQ ID NO: 1389546 - DNA, 15 bp, Homo sapiens
ggtgattcatgaaga

SEQ ID NO: 1389547 - DNA, 15 bp, Homo sapiens
tggtgattcatgaag

SEQ ID NO: 1389548 - DNA, 15 bp, Homo sapiens
atggtgattcatgaa

SEQ ID NO: 1389549 - DNA, 15 bp, Homo sapiens
gatggtgattcatga

SEQ ID NO: 1389550 - DNA, 15 bp, Homo sapiens
agatggtgattcatg

SEQ ID NO: 1389551 - DNA, 15 bp, Homo sapiens
aagatggtgattcat

SEQ ID NO: 1389552 - DNA, 15 bp, Homo sapiens
aaagatggtgattca

SEQ ID NO: 1389553 - DNA, 15 bp, Homo sapiens
aaaagatggtgattc

SEQ ID NO: 1389554 - DNA, 15 bp, Homo sapiens
caaaagatggtgatt

SEQ ID NO: 1389555 - DNA, 15 bp, Homo sapiens
acaaaagatggtgat

SEQ ID NO: 1389556 - DNA, 15 bp, Homo sapiens
tacaaaagatggtga

SEQ ID NO: 1389557 - DNA, 15 bp, Homo sapiens
atacaaaagatggtg

SEQ ID NO: 1389558 - DNA, 15 bp, Homo sapiens
aatacaaaagatggt

SEQ ID NO: 1389559 - DNA, 15 bp, Homo sapiens
caatacaaaagatgg

SEQ ID NO: 1389560 - DNA, 15 bp, Homo sapiens
acaatacaaaagatg

SEQ ID NO: 1389561 - DNA, 15 bp, Homo sapiens
aacaatacaaaagat

SEQ ID NO: 1389562 - DNA, 15 bp, Homo sapiens
gaacaatacaaaaga

SEQ ID NO: 1389563 - DNA, 15 bp, Homo sapiens
tgaacaatacaaaag

SEQ ID NO: 1389564 - DNA, 15 bp, Homo sapiens
gtgaacaatacaaaa

SEQ ID NO: 1389565 - DNA, 15 bp, Homo sapiens
agtgaacaatacaaa

SEQ ID NO: 1389566 - DNA, 15 bp, Homo sapiens
gagtgaacaatacaa

SEQ ID NO: 1389567 - DNA, 15 bp, Homo sapiens
tgagtgaacaataca

SEQ ID NO: 1389568 - DNA, 15 bp, Homo sapiens
ttgagtgaacaatac

SEQ ID NO: 1389569 - DNA, 15 bp, Homo sapiens
attgagtgaacaata

SEQ ID NO: 1389570 - DNA, 15 bp, Homo sapiens
aattgagtgaacaat

SEQ ID NO: 1389571 - DNA, 15 bp, Homo sapiens
taattgagtgaacaa

SEQ ID NO: 1389572 - DNA, 15 bp, Homo sapiens
gtaattgagtgaaca

SEQ ID NO: 1389573 - DNA, 15 bp, Homo sapiens
agtaattgagtgaac

SEQ ID NO: 1389574 - DNA, 15 bp, Homo sapiens
tagtaattgagtgaa

SEQ ID NO: 1389575 - DNA, 15 bp, Homo sapiens
ttagtaattgagtga

SEQ ID NO: 1389576 - DNA, 15 bp, Homo sapiens
cttagtaattgagtg

SEQ ID NO: 1389577 - DNA, 15 bp, Homo sapiens
gcttagtaattgagt

SEQ ID NO: 1389578 - DNA, 15 bp, Homo sapiens
ggcttagtaattgag

SEQ ID NO: 1389579 - DNA, 15 bp, Homo sapiens
tggcttagtaattga

SEQ ID NO: 1389580 - DNA, 15 bp, Homo sapiens
gtggcttagtaattg

SEQ ID NO: 1389581 - DNA, 15 bp, Homo sapiens
ggtggcttagtaatt

SEQ ID NO: 1389582 - DNA, 15 bp, Homo sapiens
gggtggcttagtaat

SEQ ID NO: 1389583 - DNA, 15 bp, Homo sapiens
tgggtggcttagtaa

SEQ ID NO: 1389584 - DNA, 15 bp, Homo sapiens
ctgggtggcttagta

SEQ ID NO: 1389585 - DNA, 15 bp, Homo sapiens
actgggtggcttagt

SEQ ID NO: 1389586 - DNA, 15 bp, Homo sapiens
aactgggtggcttag

SEQ ID NO: 1389587 - DNA, 15 bp, Homo sapiens
taactgggtggctta

SEQ ID NO: 1389588 - DNA, 15 bp, Homo sapiens
gtaactgggtggctt

SEQ ID NO: 1389589 - DNA, 15 bp, Homo sapiens
tgtaactgggtggct

SEQ ID NO: 1389590 - DNA, 15 bp, Homo sapiens
gtgtaactgggtggc

SEQ ID NO: 1389591 - DNA, 15 bp, Homo sapiens
agtgtaactgggtgg

SEQ ID NO: 1389592 - DNA, 15 bp, Homo sapiens
cagtgtaactgggtg

SEQ ID NO: 1389593 - DNA, 15 bp, Homo sapiens
acagtgtaactgggt

SEQ ID NO: 1389594 - DNA, 15 bp, Homo sapiens
cacagtgtaactggg

SEQ ID NO: 1389595 - DNA, 15 bp, Homo sapiens
tcacagtgtaactgg

SEQ ID NO: 1389596 - DNA, 15 bp, Homo sapiens
gtcacagtgtaactg

SEQ ID NO: 1389597 - DNA, 15 bp, Homo sapiens
agtcacagtgtaact

SEQ ID NO: 1389598 - DNA, 15 bp, Homo sapiens
gagtcacagtgtaac

SEQ ID NO: 1389599 - DNA, 15 bp, Homo sapiens
tgagtcacagtgtaa

SEQ ID NO: 1389600 - DNA, 15 bp, Homo sapiens
ctgagtcacagtgta

SEQ ID NO: 1389601 - DNA, 15 bp, Homo sapiens
gctgagtcacagtgt

SEQ ID NO: 1389602 - DNA, 15 bp, Homo sapiens
agctgagtcacagtg

SEQ ID NO: 1389603 - DNA, 15 bp, Homo sapiens
gagctgagtcacagt

SEQ ID NO: 1389604 - DNA, 15 bp, Homo sapiens
tgagctgagtcacag

SEQ ID NO: 1389605 - DNA, 15 bp, Homo sapiens
atgagctgagtcaca

SEQ ID NO: 1389606 - DNA, 15 bp, Homo sapiens
tatgagctgagtcac

SEQ ID NO: 1389607 - DNA, 15 bp, Homo sapiens
atatgagctgagtca

SEQ ID NO: 1389608 - DNA, 15 bp, Homo sapiens
aatatgagctgagtc

SEQ ID NO: 1389609 - DNA, 15 bp, Homo sapiens
aaatatgagctgagt

SEQ ID NO: 1389610 - DNA, 15 bp, Homo sapiens
gaaatatgagctgag

SEQ ID NO: 1389611 - DNA, 15 bp, Homo sapiens
agaaatatgagctga

SEQ ID NO: 1389612 - DNA, 15 bp, Homo sapiens
gagaaatatgagctg

SEQ ID NO: 1389613 - DNA, 15 bp, Homo sapiens
ggagaaatatgagct

SEQ ID NO: 1389614 - DNA, 15 bp, Homo sapiens
tggagaaatatgagc

SEQ ID NO: 1389615 - DNA, 15 bp, Homo sapiens
atggagaaatatgag

SEQ ID NO: 1389616 - DNA, 15 bp, Homo sapiens
aatggagaaatatga

SEQ ID NO: 1389617 - DNA, 15 bp, Homo sapiens
aaatggagaaatatg

SEQ ID NO: 1389618 - DNA, 15 bp, Homo sapiens
caaatggagaaatat

SEQ ID NO: 1389619 - DNA, 15 bp, Homo sapiens
ccaaatggagaaata

SEQ ID NO: 1389620 - DNA, 15 bp, Homo sapiens
tccaaatggagaaat

SEQ ID NO: 1389621 - DNA, 15 bp, Homo sapiens
atccaaatggagaaa

SEQ ID NO: 1389622 - DNA, 15 bp, Homo sapiens
gatccaaatggagaa

SEQ ID NO: 1389623 - DNA, 15 bp, Homo sapiens
agatccaaatggaga

SEQ ID NO: 1389624 - DNA, 15 bp, Homo sapiens
aagatccaaatggag

SEQ ID NO: 1389625 - DNA, 15 bp, Homo sapiens
taagatccaaatgga

SEQ ID NO: 1389626 - DNA, 15 bp, Homo sapiens
ttaagatccaaatgg

SEQ ID NO: 1389627 - DNA, 15 bp, Homo sapiens
cttaagatccaaatg

SEQ ID NO: 1389628 - DNA, 15 bp, Homo sapiens
tcttaagatccaaat

SEQ ID NO: 1389629 - DNA, 15 bp, Homo sapiens
ttcttaagatccaaa

SEQ ID NO: 1389630 - DNA, 15 bp, Homo sapiens
attcttaagatccaa

SEQ ID NO: 1389631 - DNA, 15 bp, Homo sapiens
cattcttaagatcca

SEQ ID NO: 1389632 - DNA, 15 bp, Homo sapiens
gcattcttaagatcc

SEQ ID NO: 1389633 - DNA, 15 bp, Homo sapiens
ggcattcttaagatc

SEQ ID NO: 1389634 - DNA, 15 bp, Homo sapiens
tggcattcttaagat

SEQ ID NO: 1389635 - DNA, 15 bp, Homo sapiens
ttggcattcttaaga

SEQ ID NO: 1389636 - DNA, 15 bp, Homo sapiens
attggcattcttaag

SEQ ID NO: 1389637 - DNA, 15 bp, Homo sapiens
gattggcattcttaa

SEQ ID NO: 1389638 - DNA, 15 bp, Homo sapiens
cgattggcattctta

SEQ ID NO: 1389639 - DNA, 15 bp, Homo sapiens
acgattggcattctt

SEQ ID NO: 1389640 - DNA, 15 bp, Homo sapiens
tacgattggcattct

SEQ ID NO: 1389641 - DNA, 15 bp, Homo sapiens
ctacgattggcattc

SEQ ID NO: 1389642 - DNA, 15 bp, Homo sapiens
gctacgattggcatt

SEQ ID NO: 1389643 - DNA, 15 bp, Homo sapiens
agctacgattggcat

SEQ ID NO: 1389644 - DNA, 15 bp, Homo sapiens
cagctacgattggca

SEQ ID NO: 1389645 - DNA, 15 bp, Homo sapiens
gcagctacgattggc

SEQ ID NO: 1389646 - DNA, 15 bp, Homo sapiens
cgcagctacgattgg

SEQ ID NO: 1389647 - DNA, 15 bp, Homo sapiens
ccgcagctacgattg

SEQ ID NO: 1389648 - DNA, 15 bp, Homo sapiens
tccgcagctacgatt

SEQ ID NO: 1389649 - DNA, 15 bp, Homo sapiens
atccgcagctacgat

SEQ ID NO: 1389650 - DNA, 15 bp, Homo sapiens
gatccgcagctacga

SEQ ID NO: 1389651 - DNA, 15 bp, Homo sapiens
agatccgcagctacg

SEQ ID NO: 1389652 - DNA, 15 bp, Homo sapiens
aagatccgcagctac

SEQ ID NO: 1389653 - DNA, 15 bp, Homo sapiens
taagatccgcagcta

SEQ ID NO: 1389654 - DNA, 15 bp, Homo sapiens
ttaagatccgcagct

SEQ ID NO: 1389655 - DNA, 15 bp, Homo sapiens
tttaagatccgcagc

SEQ ID NO: 1389656 - DNA, 15 bp, Homo sapiens
atttaagatccgcag

SEQ ID NO: 1389657 - DNA, 15 bp, Homo sapiens
aatttaagatccgca

SEQ ID NO: 1389658 - DNA, 15 bp, Homo sapiens
aaatttaagatccgc

SEQ ID NO: 1389659 - DNA, 15 bp, Homo sapiens
taaatttaagatccg

SEQ ID NO: 1389660 - DNA, 15 bp, Homo sapiens
ataaatttaagatcc

SEQ ID NO: 1389661 - DNA, 15 bp, Homo sapiens
tataaatttaagatc

SEQ ID NO: 1389662 - DNA, 15 bp, Homo sapiens
ctataaatttaagat

SEQ ID NO: 1389663 - DNA, 15 bp, Homo sapiens
actataaatttaaga

SEQ ID NO: 1389664 - DNA, 15 bp, Homo sapiens
tactataaatttaag

SEQ ID NO: 1389665 - DNA, 15 bp, Homo sapiens
ttactataaatttaa

SEQ ID NO: 1389666 - DNA, 15 bp, Homo sapiens
tttactataaattta

SEQ ID NO: 1389667 - DNA, 15 bp, Homo sapiens
atttactataaattt

SEQ ID NO: 1389668 - DNA, 15 bp, Homo sapiens
gatttactataaatt

SEQ ID NO: 1389669 - DNA, 15 bp, Homo sapiens
agatttactataaat

SEQ ID NO: 1389670 - DNA, 15 bp, Homo sapiens
tagatttactataaa

SEQ ID NO: 1389671 - DNA, 15 bp, Homo sapiens
atagatttactataa

SEQ ID NO: 1389672 - DNA, 15 bp, Homo sapiens
aatagatttactata

SEQ ID NO: 1389673 - DNA, 15 bp, Homo sapiens
taatagatttactat

SEQ ID NO: 1389674 - DNA, 15 bp, Homo sapiens
gtaatagatttacta

SEQ ID NO: 1389675 - DNA, 15 bp, Homo sapiens
tgtaatagatttact

SEQ ID NO: 1389676 - DNA, 15 bp, Homo sapiens
ctgtaatagatttac

SEQ ID NO: 1389677 - DNA, 15 bp, Homo sapiens
actgtaatagattta

SEQ ID NO: 1389678 - DNA, 15 bp, Homo sapiens
tactgtaatagattt

SEQ ID NO: 1389679 - DNA, 15 bp, Homo sapiens
ttactgtaatagatt

SEQ ID NO: 1389680 - DNA, 15 bp, Homo sapiens
tttactgtaatagat

SEQ ID NO: 1389681 - DNA, 15 bp, Homo sapiens
atttactgtaataga

SEQ ID NO: 1389682 - DNA, 15 bp, Homo sapiens
aatttactgtaatag

SEQ ID NO: 1389683 - DNA, 15 bp, Homo sapiens
taatttactgtaata

SEQ ID NO: 1389684 - DNA, 15 bp, Homo sapiens
ttaatttactgtaat

SEQ ID NO: 1389685 - DNA, 15 bp, Homo sapiens
cttaatttactgtaa

SEQ ID NO: 1389686 - DNA, 15 bp, Homo sapiens
gcttaatttactgta

SEQ ID NO: 1389687 - DNA, 15 bp, Homo sapiens
agcttaatttactgt

SEQ ID NO: 1389688 - DNA, 15 bp, Homo sapiens
tagcttaatttactg

SEQ ID NO: 1389689 - DNA, 15 bp, Homo sapiens
ctagcttaatttact

SEQ ID NO: 1389690 - DNA, 15 bp, Homo sapiens
gctagcttaatttac

SEQ ID NO: 1389691 - DNA, 15 bp, Homo sapiens
tgctagcttaattta

SEQ ID NO: 1389692 - DNA, 15 bp, Homo sapiens
gtgctagcttaattt

SEQ ID NO: 1389693 - DNA, 15 bp, Homo sapiens
tgtgctagcttaatt

SEQ ID NO: 1389694 - DNA, 15 bp, Homo sapiens
ttgtgctagcttaat

SEQ ID NO: 1389695 - DNA, 15 bp, Homo sapiens
attgtgctagcttaa

SEQ ID NO: 1389696 - DNA, 15 bp, Homo sapiens
gattgtgctagctta

SEQ ID NO: 1389697 - DNA, 15 bp, Homo sapiens
agattgtgctagctt

SEQ ID NO: 1389698 - DNA, 15 bp, Homo sapiens
cagattgtgctagct

SEQ ID NO: 1389699 - DNA, 15 bp, Homo sapiens
tcagattgtgctagc

SEQ ID NO: 1389700 - DNA, 15 bp, Homo sapiens
atcagattgtgctag

SEQ ID NO: 1389701 - DNA, 15 bp, Homo sapiens
aatcagattgtgcta

SEQ ID NO: 1389702 - DNA, 15 bp, Homo sapiens
aaatcagattgtgct

SEQ ID NO: 1389703 - DNA, 15 bp, Homo sapiens
taaatcagattgtgc

SEQ ID NO: 1389704 - DNA, 15 bp, Homo sapiens
ataaatcagattgtg

SEQ ID NO: 1389705 - DNA, 15 bp, Homo sapiens
aataaatcagattgt

SEQ ID NO: 1389706 - DNA, 15 bp, Homo sapiens
aaataaatcagattg

SEQ ID NO: 1389707 - DNA, 15 bp, Homo sapiens
taaataaatcagatt

SEQ ID NO: 1389708 - DNA, 15 bp, Homo sapiens
ataaataaatcagat

SEQ ID NO: 1389709 - DNA, 15 bp, Homo sapiens
aataaataaatcaga

SEQ ID NO: 1389710 - DNA, 15 bp, Homo sapiens
gaataaataaatcag

SEQ ID NO: 1389711 - DNA, 15 bp, Homo sapiens
agaataaataaatca

SEQ ID NO: 1389712 - DNA, 15 bp, Homo sapiens
aagaataaataaatc

SEQ ID NO: 1389713 - DNA, 15 bp, Homo sapiens
taagaataaataaat

SEQ ID NO: 1389714 - DNA, 15 bp, Homo sapiens
ctaagaataaataaa

SEQ ID NO: 1389715 - DNA, 15 bp, Homo sapiens
actaagaataaataa

SEQ ID NO: 1389716 - DNA, 15 bp, Homo sapiens
cactaagaataaata

SEQ ID NO: 1389717 - DNA, 15 bp, Homo sapiens
tcactaagaataaat

SEQ ID NO: 1389718 - DNA, 15 bp, Homo sapiens
ttcactaagaataaa

SEQ ID NO: 1389719 - DNA, 15 bp, Homo sapiens
attcactaagaataa

SEQ ID NO: 1389720 - DNA, 15 bp, Homo sapiens
atattcactaagaat

SEQ ID NO: 1389721 - DNA, 15 bp, Homo sapiens
tatattcactaagaa

SEQ ID NO: 1389722 - DNA, 15 bp, Homo sapiens
ttatattcactaaga

SEQ ID NO: 1389723 - DNA, 15 bp, Homo sapiens
cttatattcactaag

SEQ ID NO: 1389724 - DNA, 15 bp, Homo sapiens
gcttatattcactaa

SEQ ID NO: 1389725 - DNA, 15 bp, Homo sapiens
agcttatattcacta

SEQ ID NO: 1389726 - DNA, 15 bp, Homo sapiens
cagcttatattcact

SEQ ID NO: 1389727 - DNA, 15 bp, Homo sapiens
ccagcttatattcac

SEQ ID NO: 1389728 - DNA, 15 bp, Homo sapiens
gccagcttatattca

SEQ ID NO: 1389729 - DNA, 15 bp, Homo sapiens
agccagcttatattc

SEQ ID NO: 1389730 - DNA, 15 bp, Homo sapiens
aagccagcttatatt

SEQ ID NO: 1389731 - DNA, 15 bp, Homo sapiens
gaagccagcttatat

SEQ ID NO: 1389732 - DNA, 15 bp, Homo sapiens
agaagccagcttata

SEQ ID NO: 1389733 - DNA, 15 bp, Homo sapiens
tagaagccagcttat

SEQ ID NO: 1389734 - DNA, 15 bp, Homo sapiens
ctagaagccagctta

SEQ ID NO: 1389735 - DNA, 15 bp, Homo sapiens
actagaagccagctt

SEQ ID NO: 1389736 - DNA, 15 bp, Homo sapiens
gactagaagccagct

SEQ ID NO: 1389737 - DNA, 15 bp, Homo sapiens
cgactagaagccagc

SEQ ID NO: 1389738 - DNA, 15 bp, Homo sapiens
acgactagaagccag

SEQ ID NO: 1389739 - DNA, 15 bp, Homo sapiens
gacgactagaagcca

SEQ ID NO: 1389740 - DNA, 15 bp, Homo sapiens
tgacgactagaagcc

SEQ ID NO: 1389741 - DNA, 15 bp, Homo sapiens
gtgacgactagaagc

SEQ ID NO: 1389742 - DNA, 15 bp, Homo sapiens
agtgacgactagaag

SEQ ID NO: 1389743 - DNA, 15 bp, Homo sapiens
tagtgacgactagaa

SEQ ID NO: 1389744 - DNA, 15 bp, Homo sapiens
gtagtgacgactaga

SEQ ID NO: 1389745 - DNA, 15 bp, Homo sapiens
agtagtgacgactag

SEQ ID NO: 1389746 - DNA, 15 bp, Homo sapiens
aagtagtgacgacta

SEQ ID NO: 1389747 - DNA, 15 bp, Homo sapiens
aaagtagtgacgact

SEQ ID NO: 1389748 - DNA, 15 bp, Homo sapiens
gaaagtagtgacgac

SEQ ID NO: 1389749 - DNA, 15 bp, Homo sapiens
agaaagtagtgacga

SEQ ID NO: 1389750 - DNA, 15 bp, Homo sapiens
aagaaagtagtgacg

SEQ ID NO: 1389751 - DNA, 15 bp, Homo sapiens
aaagaaagtagtgac

SEQ ID NO: 1389752 - DNA, 15 bp, Homo sapiens
aaaagaaagtagtga

SEQ ID NO: 1389753 - DNA, 15 bp, Homo sapiens
aaaaagaaagtagtg

SEQ ID NO: 1389754 - DNA, 15 bp, Homo sapiens
taaaaagaaagtagt

SEQ ID NO: 1389755 - DNA, 15 bp, Homo sapiens
ttaaaaagaaagtag

SEQ ID NO: 1389756 - DNA, 15 bp, Homo sapiens
ctttaaaaagaaagt

SEQ ID NO: 1389757 - DNA, 15 bp, Homo sapiens
actttaaaaagaaag

SEQ ID NO: 1389758 - DNA, 15 bp, Homo sapiens
cactttaaaaagaaa

SEQ ID NO: 1389759 - DNA, 15 bp, Homo sapiens
gcactttaaaaagaa

SEQ ID NO: 1389760 - DNA, 15 bp, Homo sapiens
agcactttaaaaaga

SEQ ID NO: 1389761 - DNA, 15 bp, Homo sapiens
aagcactttaaaaag

SEQ ID NO: 1389762 - DNA, 15 bp, Homo sapiens
caagcactttaaaaa

SEQ ID NO: 1389763 - DNA, 15 bp, Homo sapiens
ccaagcactttaaaa

SEQ ID NO: 1389764 - DNA, 15 bp, Homo sapiens
tccaagcactttaaa

SEQ ID NO: 1389765 - DNA, 15 bp, Homo sapiens
ctccaagcactttaa

SEQ ID NO: 1389766 - DNA, 15 bp, Homo sapiens
tctccaagcacttta

SEQ ID NO: 1389767 - DNA, 15 bp, Homo sapiens
gtctccaagcacttt

SEQ ID NO: 1389768 - DNA, 15 bp, Homo sapiens
ggtctccaagcactt

SEQ ID NO: 1389769 - DNA, 15 bp, Homo sapiens
tggtctccaagcact

SEQ ID NO: 1389770 - DNA, 15 bp, Homo sapiens
atggtctccaagcac

SEQ ID NO: 1389771 - DNA, 15 bp, Homo sapiens
aatggtctccaagca

SEQ ID NO: 1389772 - DNA, 15 bp, Homo sapiens
gaatggtctccaagc

SEQ ID NO: 1389773 - DNA, 15 bp, Homo sapiens
ggaatggtctccaag

SEQ ID NO: 1389774 - DNA, 15 bp, Homo sapiens
aggaatggtctccaa

SEQ ID NO: 1389775 - DNA, 15 bp, Homo sapiens
aaggaatggtctcca

SEQ ID NO: 1389776 - DNA, 15 bp, Homo sapiens
aaaggaatggtctcc

SEQ ID NO: 1389777 - DNA, 15 bp, Homo sapiens
taaaggaatggtctc

SEQ ID NO: 1389778 - DNA, 15 bp, Homo sapiens
ttaaaggaatggtct

SEQ ID NO: 1389779 - DNA, 15 bp, Homo sapiens
attaaaggaatggtc

SEQ ID NO: 1389780 - DNA, 15 bp, Homo sapiens
tattaaaggaatggt

SEQ ID NO: 1389781 - DNA, 15 bp, Homo sapiens
ttattaaaggaatgg

SEQ ID NO: 1389782 - DNA, 15 bp, Homo sapiens
attattaaaggaatg

SEQ ID NO: 1389783 - DNA, 15 bp, Homo sapiens
gattattaaaggaat

SEQ ID NO: 1389784 - DNA, 15 bp, Homo sapiens
ggattattaaaggaa

SEQ ID NO: 1389785 - DNA, 15 bp, Homo sapiens
tggattattaaagga

SEQ ID NO: 1389786 - DNA, 15 bp, Homo sapiens
atggattattaaagg

SEQ ID NO: 1389787 - DNA, 15 bp, Homo sapiens
aatggattattaaag

SEQ ID NO: 1389788 - DNA, 15 bp, Homo sapiens
taatggattattaaa

SEQ ID NO: 1389789 - DNA, 15 bp, Homo sapiens
ctaatggattattaa

SEQ ID NO: 1389790 - DNA, 15 bp, Homo sapiens
tctaatggattatta

SEQ ID NO: 1389791 - DNA, 15 bp, Homo sapiens
ttctaatggattatt

SEQ ID NO: 1389792 - DNA, 15 bp, Homo sapiens
attctaatggattat

SEQ ID NO: 1389793 - DNA, 15 bp, Homo sapiens
tattctaatggatta

SEQ ID NO: 1389794 - DNA, 15 bp, Homo sapiens
atattctaatggatt

SEQ ID NO: 1389795 - DNA, 15 bp, Homo sapiens
gatattctaatggat

SEQ ID NO: 1389796 - DNA, 15 bp, Homo sapiens
agatattctaatgga

SEQ ID NO: 1389797 - DNA, 15 bp, Homo sapiens
aagatattctaatgg

SEQ ID NO: 1389798 - DNA, 15 bp, Homo sapiens
aaagatattctaatg

SEQ ID NO: 1389799 - DNA, 15 bp, Homo sapiens
gaaagatattctaat

SEQ ID NO: 1389800 - DNA, 15 bp, Homo sapiens
ggaaagatattctaa

SEQ ID NO: 1389801 - DNA, 15 bp, Homo sapiens
tggaaagatattcta

SEQ ID NO: 1389802 - DNA, 15 bp, Homo sapiens
ttggaaagatattct

SEQ ID NO: 1389803 - DNA, 15 bp, Homo sapiens
tttggaaagatattc

SEQ ID NO: 1389804 - DNA, 15 bp, Homo sapiens
atttggaaagatatt

SEQ ID NO: 1389805 - DNA, 15 bp, Homo sapiens
gatttggaaagatat

SEQ ID NO: 1389806 - DNA, 15 bp, Homo sapiens
tgatttggaaagata

SEQ ID NO: 1389807 - DNA, 15 bp, Homo sapiens
gtgatttggaaagat

SEQ ID NO: 1389808 - DNA, 15 bp, Homo sapiens
agtgatttggaaaga

SEQ ID NO: 1389809 - DNA, 15 bp, Homo sapiens
cagtgatttggaaag

SEQ ID NO: 1389810 - DNA, 15 bp, Homo sapiens
acagtgatttggaaa

SEQ ID NO: 1389811 - DNA, 15 bp, Homo sapiens
cacagtgatttggaa

SEQ ID NO: 1389812 - DNA, 15 bp, Homo sapiens
acacagtgatttgga

SEQ ID NO: 1389813 - DNA, 15 bp, Homo sapiens
aacacagtgatttgg

SEQ ID NO: 1389814 - DNA, 15 bp, Homo sapiens
gaacacagtgatttg

SEQ ID NO: 1389815 - DNA, 15 bp, Homo sapiens
agaacacagtgattt

SEQ ID NO: 1389816 - DNA, 15 bp, Homo sapiens
cagaacacagtgatt

SEQ ID NO: 1389817 - DNA, 15 bp, Homo sapiens
acagaacacagtgat

SEQ ID NO: 1389818 - DNA, 15 bp, Homo sapiens
tacagaacacagtga

SEQ ID NO: 1389819 - DNA, 15 bp, Homo sapiens
ctacagaacacagtg

SEQ ID NO: 1389820 - DNA, 15 bp, Homo sapiens
actacagaacacagt

SEQ ID NO: 1389821 - DNA, 15 bp, Homo sapiens
aactacagaacacag

SEQ ID NO: 1389822 - DNA, 15 bp, Homo sapiens
aaactacagaacaca

SEQ ID NO: 1389823 - DNA, 15 bp, Homo sapiens
caaactacagaacac

SEQ ID NO: 1389824 - DNA, 15 bp, Homo sapiens
ccaaactacagaaca

SEQ ID NO: 1389825 - DNA, 15 bp, Homo sapiens
cccaaactacagaac

SEQ ID NO: 1389826 - DNA, 15 bp, Homo sapiens
tcccaaactacagaa

SEQ ID NO: 1389827 - DNA, 15 bp, Homo sapiens
ttcccaaactacaga

SEQ ID NO: 1389828 - DNA, 15 bp, Homo sapiens
cttcccaaactacag

SEQ ID NO: 1389829 - DNA, 15 bp, Homo sapiens
acttcccaaactaca

SEQ ID NO: 1389830 - DNA, 15 bp, Homo sapiens
gacttcccaaactac

SEQ ID NO: 1389831 - DNA, 15 bp, Homo sapiens
agacttcccaaacta

SEQ ID NO: 1389832 - DNA, 15 bp, Homo sapiens
cagacttcccaaact

SEQ ID NO: 1389833 - DNA, 15 bp, Homo sapiens
gcagacttcccaaac

SEQ ID NO: 1389834 - DNA, 15 bp, Homo sapiens
ggcagacttcccaaa

SEQ ID NO: 1389835 - DNA, 15 bp, Homo sapiens
aggcagacttcccaa

SEQ ID NO: 1389836 - DNA, 15 bp, Homo sapiens
aaggcagacttccca

SEQ ID NO: 1389837 - DNA, 15 bp, Homo sapiens
gaaggcagacttccc

SEQ ID NO: 1389838 - DNA, 15 bp, Homo sapiens
agaaggcagacttcc

SEQ ID NO: 1389839 - DNA, 15 bp, Homo sapiens
aagaaggcagacttc

SEQ ID NO: 1389840 - DNA, 15 bp, Homo sapiens
gaagaaggcagactt

SEQ ID NO: 1389841 - DNA, 15 bp, Homo sapiens
ggaagaaggcagact

SEQ ID NO: 1389842 - DNA, 15 bp, Homo sapiens
gggaagaaggcagac

SEQ ID NO: 1389843 - DNA, 15 bp, Homo sapiens
ggggaagaaggcaga

SEQ ID NO: 1389844 - DNA, 15 bp, Homo sapiens
aggggaagaaggcag

SEQ ID NO: 1389845 - DNA, 15 bp, Homo sapiens
aaggggaagaaggca

SEQ ID NO: 1389846 - DNA, 15 bp, Homo sapiens
aaaggggaagaaggc

SEQ ID NO: 1389847 - DNA, 15 bp, Homo sapiens
aaaaggggaagaagg

SEQ ID NO: 1389848 - DNA, 15 bp, Homo sapiens
aaaaaggggaagaag

SEQ ID NO: 1389849 - DNA, 15 bp, Homo sapiens
caaaaaggggaagaa

SEQ ID NO: 1389850 - DNA, 15 bp, Homo sapiens
tcaaaaaggggaaga

SEQ ID NO: 1389851 - DNA, 15 bp, Homo sapiens
ttcaaaaaggggaag

SEQ ID NO: 1389852 - DNA, 15 bp, Homo sapiens
tttcaaaaaggggaa

SEQ ID NO: 1389853 - DNA, 15 bp, Homo sapiens
ttttcaaaaagggga

SEQ ID NO: 1389854 - DNA, 15 bp, Homo sapiens
attttcaaaaagggg

SEQ ID NO: 1389855 - DNA, 15 bp, Homo sapiens
aattttcaaaaaggg

SEQ ID NO: 1389856 - DNA, 15 bp, Homo sapiens
aaattttcaaaaagg

SEQ ID NO: 1389857 - DNA, 15 bp, Homo sapiens
taaattttcaaaaag

SEQ ID NO: 1389858 - DNA, 15 bp, Homo sapiens
ataaattttcaaaaa

SEQ ID NO: 1389859 - DNA, 15 bp, Homo sapiens
cataaattttcaaaa

SEQ ID NO: 1389860 - DNA, 15 bp, Homo sapiens
gcataaattttcaaa

SEQ ID NO: 1389861 - DNA, 15 bp, Homo sapiens
agcataaattttcaa

SEQ ID NO: 1389862 - DNA, 15 bp, Homo sapiens
tagcataaattttca

SEQ ID NO: 1389863 - DNA, 15 bp, Homo sapiens
gtagcataaattttc

SEQ ID NO: 1389864 - DNA, 15 bp, Homo sapiens
tgtagcataaatttt

SEQ ID NO: 1389865 - DNA, 15 bp, Homo sapiens
atgtagcataaattt

SEQ ID NO: 1389866 - DNA, 15 bp, Homo sapiens
aatgtagcataaatt

SEQ ID NO: 1389867 - DNA, 15 bp, Homo sapiens
aaatgtagcataaat

SEQ ID NO: 1389868 - DNA, 15 bp, Homo sapiens
taaatgtagcataaa

SEQ ID NO: 1389869 - DNA, 15 bp, Homo sapiens
ataaatgtagcataa

SEQ ID NO: 1389870 - DNA, 15 bp, Homo sapiens
gataaatgtagcata

SEQ ID NO: 1389871 - DNA, 15 bp, Homo sapiens
tgataaatgtagcat

SEQ ID NO: 1389872 - DNA, 15 bp, Homo sapiens
atgataaatgtagca

SEQ ID NO: 1389873 - DNA, 15 bp, Homo sapiens
gatgataaatgtagc

SEQ ID NO: 1389874 - DNA, 15 bp, Homo sapiens
agatgataaatgtag

SEQ ID NO: 1389875 - DNA, 15 bp, Homo sapiens
gagatgataaatgta

SEQ ID NO: 1389876 - DNA, 15 bp, Homo sapiens
tgagatgataaatgt

SEQ ID NO: 1389877 - DNA, 15 bp, Homo sapiens
atgagatgataaatg

SEQ ID NO: 1389878 - DNA, 15 bp, Homo sapiens
gatgagatgataaat

SEQ ID NO: 1389879 - DNA, 15 bp, Homo sapiens
agatgagatgataaa

SEQ ID NO: 1389880 - DNA, 15 bp, Homo sapiens
aagatgagatgataa

SEQ ID NO: 1389881 - DNA, 15 bp, Homo sapiens
gaagatgagatgata

SEQ ID NO: 1389882 - DNA, 15 bp, Homo sapiens
agaagatgagatgat

SEQ ID NO: 1389883 - DNA, 15 bp, Homo sapiens
tagaagatgagatga

SEQ ID NO: 1389884 - DNA, 15 bp, Homo sapiens
ctagaagatgagatg

SEQ ID NO: 1389885 - DNA, 15 bp, Homo sapiens
gctagaagatgagat

SEQ ID NO: 1389886 - DNA, 15 bp, Homo sapiens
tgctagaagatgaga

SEQ ID NO: 1389887 - DNA, 15 bp, Homo sapiens
gtgctagaagatgag

SEQ ID NO: 1389888 - DNA, 15 bp, Homo sapiens
ggtgctagaagatga

SEQ ID NO: 1389889 - DNA, 15 bp, Homo sapiens
aggtgctagaagatg

SEQ ID NO: 1389890 - DNA, 15 bp, Homo sapiens
gaggtgctagaagat

SEQ ID NO: 1389891 - DNA, 15 bp, Homo sapiens
agaggtgctagaaga

SEQ ID NO: 1389892 - DNA, 15 bp, Homo sapiens
gagaggtgctagaag

SEQ ID NO: 1389893 - DNA, 15 bp, Homo sapiens
ggagaggtgctagaa

SEQ ID NO: 1389894 - DNA, 15 bp, Homo sapiens
tggagaggtgctaga

SEQ ID NO: 1389895 - DNA, 15 bp, Homo sapiens
atggagaggtgctag

SEQ ID NO: 1389896 - DNA, 15 bp, Homo sapiens
aatggagaggtgcta

SEQ ID NO: 1389897 - DNA, 15 bp, Homo sapiens
gaatggagaggtgct

SEQ ID NO: 1389898 - DNA, 15 bp, Homo sapiens
agaatggagaggtgc

SEQ ID NO: 1389899 - DNA, 15 bp, Homo sapiens
aagaatggagaggtg

SEQ ID NO: 1389900 - DNA, 15 bp, Homo sapiens
aaagaatggagaggt

SEQ ID NO: 1389901 - DNA, 15 bp, Homo sapiens
caaagaatggagagg

SEQ ID NO: 1389902 - DNA, 15 bp, Homo sapiens
acaaagaatggagag

SEQ ID NO: 1389903 - DNA, 15 bp, Homo sapiens
cacaaagaatggaga

SEQ ID NO: 1389904 - DNA, 15 bp, Homo sapiens
tcacaaagaatggag

SEQ ID NO: 1389905 - DNA, 15 bp, Homo sapiens
atcacaaagaatgga

SEQ ID NO: 1389906 - DNA, 15 bp, Homo sapiens
aatcacaaagaatgg

SEQ ID NO: 1389907 - DNA, 15 bp, Homo sapiens
gaatcacaaagaatg

SEQ ID NO: 1389908 - DNA, 15 bp, Homo sapiens
ggaatcacaaagaat

SEQ ID NO: 1389909 - DNA, 15 bp, Homo sapiens
aggaatcacaaagaa

SEQ ID NO: 1389910 - DNA, 15 bp, Homo sapiens
gaggaatcacaaaga

SEQ ID NO: 1389911 - DNA, 15 bp, Homo sapiens
tgaggaatcacaaag

SEQ ID NO: 1389912 - DNA, 15 bp, Homo sapiens
ttgaggaatcacaaa

SEQ ID NO: 1389913 - DNA, 15 bp, Homo sapiens
gttgaggaatcacaa

SEQ ID NO: 1389914 - DNA, 15 bp, Homo sapiens
agttgaggaatcaca

SEQ ID NO: 1389915 - DNA, 15 bp, Homo sapiens
tagttgaggaatcac

SEQ ID NO: 1389916 - DNA, 15 bp, Homo sapiens
atagttgaggaatca

SEQ ID NO: 1389917 - DNA, 15 bp, Homo sapiens
gatagttgaggaatc

SEQ ID NO: 1389918 - DNA, 15 bp, Homo sapiens
ggatagttgaggaat

SEQ ID NO: 1389919 - DNA, 15 bp, Homo sapiens
tggatagttgaggaa

SEQ ID NO: 1389920 - DNA, 15 bp, Homo sapiens
gtggatagttgagga

SEQ ID NO: 1389921 - DNA, 15 bp, Homo sapiens
tgtggatagttgagg

SEQ ID NO: 1389922 - DNA, 15 bp, Homo sapiens
ctgtggatagttgag

SEQ ID NO: 1389923 - DNA, 15 bp, Homo sapiens
tctgtggatagttga

SEQ ID NO: 1389924 - DNA, 15 bp, Homo sapiens
ctctgtggatagttg

SEQ ID NO: 1389925 - DNA, 15 bp, Homo sapiens
tctctgtggatagtt

SEQ ID NO: 1389926 - DNA, 15 bp, Homo sapiens
ctctctgtggatagt

SEQ ID NO: 1389927 - DNA, 15 bp, Homo sapiens
gctctctgtggatag

SEQ ID NO: 1389928 - DNA, 15 bp, Homo sapiens
tgctctctgtggata

SEQ ID NO: 1389929 - DNA, 15 bp, Homo sapiens
ttgctctctgtggat

SEQ ID NO: 1389930 - DNA, 15 bp, Homo sapiens
attgctctctgtgga

SEQ ID NO: 1389931 - DNA, 15 bp, Homo sapiens
aattgctctctgtgg

SEQ ID NO: 1389932 - DNA, 15 bp, Homo sapiens
gaattgctctctgtg

SEQ ID NO: 1389933 - DNA, 15 bp, Homo sapiens
ggaattgctctctgt

SEQ ID NO: 1389934 - DNA, 15 bp, Homo sapiens
tggaattgctctctg

SEQ ID NO: 1389935 - DNA, 15 bp, Homo sapiens
atggaattgctctct

SEQ ID NO: 1389936 - DNA, 15 bp, Homo sapiens
catggaattgctctc

SEQ ID NO: 1389937 - DNA, 15 bp, Homo sapiens
ccatggaattgctct

SEQ ID NO: 1389938 - DNA, 15 bp, Homo sapiens
gccatggaattgctc

SEQ ID NO: 1389939 - DNA, 15 bp, Homo sapiens
ggccatggaattgct

SEQ ID NO: 1389940 - DNA, 15 bp, Homo sapiens
aggccatggaattgc

SEQ ID NO: 1389941 - DNA, 15 bp, Homo sapiens
caggccatggaattg

SEQ ID NO: 1389942 - DNA, 15 bp, Homo sapiens
gcaggccatggaatt

SEQ ID NO: 1389943 - DNA, 15 bp, Homo sapiens
ggcaggccatggaat

SEQ ID NO: 1389944 - DNA, 15 bp, Homo sapiens
aggcaggccatggaa

SEQ ID NO: 1389945 - DNA, 15 bp, Homo sapiens
taggcaggccatgga

SEQ ID NO: 1389946 - DNA, 15 bp, Homo sapiens
gtaggcaggccatgg

SEQ ID NO: 1389947 - DNA, 15 bp, Homo sapiens
tgtaggcaggccatg

SEQ ID NO: 1389948 - DNA, 15 bp, Homo sapiens
ttgtaggcaggccat

SEQ ID NO: 1389949 - DNA, 15 bp, Homo sapiens
cttgtaggcaggcca

SEQ ID NO: 1389950 - DNA, 15 bp, Homo sapiens
ccttgtaggcaggcc

SEQ ID NO: 1389951 - DNA, 15 bp, Homo sapiens
accttgtaggcaggc

SEQ ID NO: 1389952 - DNA, 15 bp, Homo sapiens
gaccttgtaggcagg

SEQ ID NO: 1389953 - DNA, 15 bp, Homo sapiens
agaccttgtaggcag

SEQ ID NO: 1389954 - DNA, 15 bp, Homo sapiens
aagaccttgtaggca

SEQ ID NO: 1389955 - DNA, 15 bp, Homo sapiens
aaagaccttgtaggc

SEQ ID NO: 1389956 - DNA, 15 bp, Homo sapiens
gaaagaccttgtagg

SEQ ID NO: 1389957 - DNA, 15 bp, Homo sapiens
cgaaagaccttgtag

SEQ ID NO: 1389958 - DNA, 15 bp, Homo sapiens
ccgaaagaccttgta

SEQ ID NO: 1389959 - DNA, 15 bp, Homo sapiens
accgaaagaccttgt

SEQ ID NO: 1389960 - DNA, 15 bp, Homo sapiens
aaccgaaagaccttg

SEQ ID NO: 1389961 - DNA, 15 bp, Homo sapiens
aaaccgaaagacctt

SEQ ID NO: 1389962 - DNA, 15 bp, Homo sapiens
gaaaccgaaagacct

SEQ ID NO: 1389963 - DNA, 15 bp, Homo sapiens
ggaaaccgaaagacc

SEQ ID NO: 1389964 - DNA, 15 bp, Homo sapiens
aggaaaccgaaagac

SEQ ID NO: 1389965 - DNA, 15 bp, Homo sapiens
caggaaaccgaaaga

SEQ ID NO: 1389966 - DNA, 15 bp, Homo sapiens
ccaggaaaccgaaag

SEQ ID NO: 1389967 - DNA, 15 bp, Homo sapiens
cccaggaaaccgaaa

SEQ ID NO: 1389968 - DNA, 15 bp, Homo sapiens
tcccaggaaaccgaa

SEQ ID NO: 1389969 - DNA, 15 bp, Homo sapiens
atcccaggaaaccga

SEQ ID NO: 1389970 - DNA, 15 bp, Homo sapiens
aatcccaggaaaccg

SEQ ID NO: 1389971 - DNA, 15 bp, Homo sapiens
aaatcccaggaaacc

SEQ ID NO: 1389972 - DNA, 15 bp, Homo sapiens
caaatcccaggaaac

SEQ ID NO: 1389973 - DNA, 15 bp, Homo sapiens
gcaaatcccaggaaa

SEQ ID NO: 1389974 - DNA, 15 bp, Homo sapiens
ggcaaatcccaggaa

SEQ ID NO: 1389975 - DNA, 15 bp, Homo sapiens
gggcaaatcccagga

SEQ ID NO: 1389976 - DNA, 15 bp, Homo sapiens
tgggcaaatcccagg

SEQ ID NO: 1389977 - DNA, 15 bp, Homo sapiens
atgggcaaatcccag

SEQ ID NO: 1389978 - DNA, 15 bp, Homo sapiens
gatgggcaaatccca

SEQ ID NO: 1389979 - DNA, 15 bp, Homo sapiens
ggatgggcaaatccc

SEQ ID NO: 1389980 - DNA, 15 bp, Homo sapiens
tggatgggcaaatcc

SEQ ID NO: 1389981 - DNA, 15 bp, Homo sapiens
ctggatgggcaaatc

SEQ ID NO: 1389982 - DNA, 15 bp, Homo sapiens
actggatgggcaaat

SEQ ID NO: 1389983 - DNA, 15 bp, Homo sapiens
gactggatgggcaaa

SEQ ID NO: 1389984 - DNA, 15 bp, Homo sapiens
ggactggatgggcaa

SEQ ID NO: 1389985 - DNA, 15 bp, Homo sapiens
tggactggatgggca

SEQ ID NO: 1389986 - DNA, 15 bp, Homo sapiens
ctggactggatgggc

SEQ ID NO: 1389987 - DNA, 15 bp, Homo sapiens
actggactggatggg

SEQ ID NO: 1389988 - DNA, 15 bp, Homo sapiens
tactggactggatgg

SEQ ID NO: 1389989 - DNA, 15 bp, Homo sapiens
ttactggactggatg

SEQ ID NO: 1389990 - DNA, 15 bp, Homo sapiens
attactggactggat

SEQ ID NO: 1389991 - DNA, 15 bp, Homo sapiens
aattactggactgga

SEQ ID NO: 1389992 - DNA, 15 bp, Homo sapiens
gaattactggactgg

SEQ ID NO: 1389993 - DNA, 15 bp, Homo sapiens
tgaattactggactg

SEQ ID NO: 1389994 - DNA, 15 bp, Homo sapiens
atgaattactggact

SEQ ID NO: 1389995 - DNA, 15 bp, Homo sapiens
aatgaattactggac

SEQ ID NO: 1389996 - DNA, 15 bp, Homo sapiens
aaatgaattactgga

SEQ ID NO: 1389997 - DNA, 15 bp, Homo sapiens
taaatgaattactgg

SEQ ID NO: 1389998 - DNA, 15 bp, Homo sapiens
ctaaatgaattactg

SEQ ID NO: 1389999 - DNA, 15 bp, Homo sapiens
tctaaatgaattact

SEQ ID NO: 1390000 - DNA, 15 bp, Homo sapiens
ttctaaatgaattac

SEQ ID NO: 1390001 - DNA, 15 bp, Homo sapiens
attctaaatgaatta

SEQ ID NO: 1390002 - DNA, 15 bp, Homo sapiens
cattctaaatgaatt

SEQ ID NO: 1390003 - DNA, 15 bp, Homo sapiens
ccattctaaatgaat

SEQ ID NO: 1390004 - DNA, 15 bp, Homo sapiens
tccattctaaatgaa

SEQ ID NO: 1390005 - DNA, 15 bp, Homo sapiens
atccattctaaatga

SEQ ID NO: 1390006 - DNA, 15 bp, Homo sapiens
gatccattctaaatg

SEQ ID NO: 1390007 - DNA, 15 bp, Homo sapiens
tgatccattctaaat

SEQ ID NO: 1390008 - DNA, 15 bp, Homo sapiens
ttgatccattctaaa

SEQ ID NO: 1390009 - DNA, 15 bp, Homo sapiens
attgatccattctaa

SEQ ID NO: 1390010 - DNA, 15 bp, Homo sapiens
aattgatccattcta

SEQ ID NO: 1390011 - DNA, 15 bp, Homo sapiens
taattgatccattct

SEQ ID NO: 1390012 - DNA, 15 bp, Homo sapiens
ataattgatccattc

SEQ ID NO: 1390013 - DNA, 15 bp, Homo sapiens
aataattgatccatt

SEQ ID NO: 1390014 - DNA, 15 bp, Homo sapiens
aaataattgatccat

SEQ ID NO: 1390015 - DNA, 15 bp, Homo sapiens
caaataattgatcca

SEQ ID NO: 1390016 - DNA, 15 bp, Homo sapiens
gcaaataattgatcc

SEQ ID NO: 1390017 - DNA, 15 bp, Homo sapiens
agcaaataattgatc

SEQ ID NO: 1390018 - DNA, 15 bp, Homo sapiens
tagcaaataattgat

SEQ ID NO: 1390019 - DNA, 15 bp, Homo sapiens
atagcaaataattga

SEQ ID NO: 1390020 - DNA, 15 bp, Homo sapiens
gatagcaaataattg

SEQ ID NO: 1390021 - DNA, 15 bp, Homo sapiens
agatagcaaataatt

SEQ ID NO: 1390022 - DNA, 15 bp, Homo sapiens
aagatagcaaataat

SEQ ID NO: 1390023 - DNA, 15 bp, Homo sapiens
taagatagcaaataa

SEQ ID NO: 1390024 - DNA, 15 bp, Homo sapiens
gtaagatagcaaata

SEQ ID NO: 1390025 - DNA, 15 bp, Homo sapiens
tgtaagatagcaaat

SEQ ID NO: 1390026 - DNA, 15 bp, Homo sapiens
atgtaagatagcaaa

SEQ ID NO: 1390027 - DNA, 15 bp, Homo sapiens
gatgtaagatagcaa

SEQ ID NO: 1390028 - DNA, 15 bp, Homo sapiens
agatgtaagatagca

SEQ ID NO: 1390029 - DNA, 15 bp, Homo sapiens
aagatgtaagatagc

SEQ ID NO: 1390030 - DNA, 15 bp, Homo sapiens
aaagatgtaagatag

SEQ ID NO: 1390031 - DNA, 15 bp, Homo sapiens
aaaagatgtaagata

SEQ ID NO: 1390032 - DNA, 15 bp, Homo sapiens
aaaaagatgtaagat

SEQ ID NO: 1390033 - DNA, 15 bp, Homo sapiens
taaaaagatgtaaga

SEQ ID NO: 1390034 - DNA, 15 bp, Homo sapiens
gtaaaaagatgtaag

SEQ ID NO: 1390035 - DNA, 15 bp, Homo sapiens
ggtaaaaagatgtaa

SEQ ID NO: 1390036 - DNA, 15 bp, Homo sapiens
gggtaaaaagatgta

SEQ ID NO: 1390037 - DNA, 15 bp, Homo sapiens
tgggtaaaaagatgt

SEQ ID NO: 1390038 - DNA, 15 bp, Homo sapiens
atgggtaaaaagatg

SEQ ID NO: 1390039 - DNA, 15 bp, Homo sapiens
aatgggtaaaaagat

SEQ ID NO: 1390040 - DNA, 15 bp, Homo sapiens
aaatgggtaaaaaga

SEQ ID NO: 1390041 - DNA, 15 bp, Homo sapiens
aaaatgggtaaaaag

SEQ ID NO: 1390042 - DNA, 15 bp, Homo sapiens
taaaatgggtaaaaa

SEQ ID NO: 1390043 - DNA, 15 bp, Homo sapiens
ctaaaatgggtaaaa

SEQ ID NO: 1390044 - DNA, 15 bp, Homo sapiens
tctaaaatgggtaaa

SEQ ID NO: 1390045 - DNA, 15 bp, Homo sapiens
ctctaaaatgggtaa

SEQ ID NO: 1390046 - DNA, 15 bp, Homo sapiens
actctaaaatgggta

SEQ ID NO: 1390047 - DNA, 15 bp, Homo sapiens
aactctaaaatgggt

SEQ ID NO: 1390048 - DNA, 15 bp, Homo sapiens
aaactctaaaatggg

SEQ ID NO: 1390049 - DNA, 15 bp, Homo sapiens
taaactctaaaatgg

SEQ ID NO: 1390050 - DNA, 15 bp, Homo sapiens
ttaaactctaaaatg

SEQ ID NO: 1390051 - DNA, 15 bp, Homo sapiens
attaaactctaaaat

SEQ ID NO: 1390052 - DNA, 15 bp, Homo sapiens
aattaaactctaaaa

SEQ ID NO: 1390053 - DNA, 15 bp, Homo sapiens
aaattaaactctaaa

SEQ ID NO: 1390054 - DNA, 15 bp, Homo sapiens
gaaattaaactctaa

SEQ ID NO: 1390055 - DNA, 15 bp, Homo sapiens
agaaattaaactcta

SEQ ID NO: 1390056 - DNA, 15 bp, Homo sapiens
aagaaattaaactct

SEQ ID NO: 1390057 - DNA, 15 bp, Homo sapiens
gaagaaattaaactc

SEQ ID NO: 1390058 - DNA, 15 bp, Homo sapiens
agaagaaattaaact

SEQ ID NO: 1390059 - DNA, 15 bp, Homo sapiens
gagaagaaattaaac

SEQ ID NO: 1390060 - DNA, 15 bp, Homo sapiens
ggagaagaaattaaa

SEQ ID NO: 1390061 - DNA, 15 bp, Homo sapiens
gggagaagaaattaa

SEQ ID NO: 1390062 - DNA, 15 bp, Homo sapiens
agggagaagaaatta

SEQ ID NO: 1390063 - DNA, 15 bp, Homo sapiens
aagggagaagaaatt

SEQ ID NO: 1390064 - DNA, 15 bp, Homo sapiens
aaagggagaagaaat

SEQ ID NO: 1390065 - DNA, 15 bp, Homo sapiens
aaaagggagaagaaa

SEQ ID NO: 1390066 - DNA, 15 bp, Homo sapiens
aaaaagggagaagaa

SEQ ID NO: 1390067 - DNA, 15 bp, Homo sapiens
gaaaaagggagaaga

SEQ ID NO: 1390068 - DNA, 15 bp, Homo sapiens
tgaaaaagggagaag

SEQ ID NO: 1390069 - DNA, 15 bp, Homo sapiens
ctgaaaaagggagaa

SEQ ID NO: 1390070 - DNA, 15 bp, Homo sapiens
actgaaaaagggaga

SEQ ID NO: 1390071 - DNA, 15 bp, Homo sapiens
gactgaaaaagggag

SEQ ID NO: 1390072 - DNA, 15 bp, Homo sapiens
agactgaaaaaggga

SEQ ID NO: 1390073 - DNA, 15 bp, Homo sapiens
cagactgaaaaaggg

SEQ ID NO: 1390074 - DNA, 15 bp, Homo sapiens
tcagactgaaaaagg

SEQ ID NO: 1390075 - DNA, 15 bp, Homo sapiens
gtcagactgaaaaag

SEQ ID NO: 1390076 - DNA, 15 bp, Homo sapiens
tgtcagactgaaaaa

SEQ ID NO: 1390077 - DNA, 15 bp, Homo sapiens
ctgtcagactgaaaa

SEQ ID NO: 1390078 - DNA, 15 bp, Homo sapiens
actgtcagactgaaa

SEQ ID NO: 1390079 - DNA, 15 bp, Homo sapiens
gactgtcagactgaa

SEQ ID NO: 1390080 - DNA, 15 bp, Homo sapiens
tgactgtcagactga

SEQ ID NO: 1390081 - DNA, 15 bp, Homo sapiens
atgactgtcagactg

SEQ ID NO: 1390082 - DNA, 15 bp, Homo sapiens
aatgactgtcagact

SEQ ID NO: 1390083 - DNA, 15 bp, Homo sapiens
gaatgactgtcagac

SEQ ID NO: 1390084 - DNA, 15 bp, Homo sapiens
agaatgactgtcaga

SEQ ID NO: 1390085 - DNA, 15 bp, Homo sapiens
gagaatgactgtcag

SEQ ID NO: 1390086 - DNA, 15 bp, Homo sapiens
ggagaatgactgtca

SEQ ID NO: 1390087 - DNA, 15 bp, Homo sapiens
aggagaatgactgtc

SEQ ID NO: 1390088 - DNA, 15 bp, Homo sapiens
aaggagaatgactgt

SEQ ID NO: 1390089 - DNA, 15 bp, Homo sapiens
caaggagaatgactg

SEQ ID NO: 1390090 - DNA, 15 bp, Homo sapiens
tcaaggagaatgact

SEQ ID NO: 1390091 - DNA, 15 bp, Homo sapiens
atcaaggagaatgac

SEQ ID NO: 1390092 - DNA, 15 bp, Homo sapiens
tatcaaggagaatga

SEQ ID NO: 1390093 - DNA, 15 bp, Homo sapiens
ctatcaaggagaatg

SEQ ID NO: 1390094 - DNA, 15 bp, Homo sapiens
tctatcaaggagaat

SEQ ID NO: 1390095 - DNA, 15 bp, Homo sapiens
ctctatcaaggagaa

SEQ ID NO: 1390096 - DNA, 15 bp, Homo sapiens
tctctatcaaggaga

SEQ ID NO: 1390097 - DNA, 15 bp, Homo sapiens
ttctctatcaaggag

SEQ ID NO: 1390098 - DNA, 15 bp, Homo sapiens
cttctctatcaagga

SEQ ID NO: 1390099 - DNA, 15 bp, Homo sapiens
gcttctctatcaagg

SEQ ID NO: 1390100 - DNA, 15 bp, Homo sapiens
ggcttctctatcaag

SEQ ID NO: 1390101 - DNA, 15 bp, Homo sapiens
tggcttctctatcaa

SEQ ID NO: 1390102 - DNA, 15 bp, Homo sapiens
ctggcttctctatca

SEQ ID NO: 1390103 - DNA, 15 bp, Homo sapiens
cctggcttctctatc

SEQ ID NO: 1390104 - DNA, 15 bp, Homo sapiens
tcctggcttctctat

SEQ ID NO: 1390105 - DNA, 15 bp, Homo sapiens
ttcctggcttctcta

SEQ ID NO: 1390106 - DNA, 15 bp, Homo sapiens
gttcctggcttctct

SEQ ID NO: 1390107 - DNA, 15 bp, Homo sapiens
tgttcctggcttctc

SEQ ID NO: 1390108 - DNA, 15 bp, Homo sapiens
ttgttcctggcttct

SEQ ID NO: 1390109 - DNA, 15 bp, Homo sapiens
tttgttcctggcttc

SEQ ID NO: 1390110 - DNA, 15 bp, Homo sapiens
ttttgttcctggctt

SEQ ID NO: 1390111 - DNA, 15 bp, Homo sapiens
attttgttcctggct

SEQ ID NO: 1390112 - DNA, 15 bp, Homo sapiens
tattttgttcctggc

SEQ ID NO: 1390113 - DNA, 15 bp, Homo sapiens
ctattttgttcctgg

SEQ ID NO: 1390114 - DNA, 15 bp, Homo sapiens
cctattttgttcctg

SEQ ID NO: 1390115 - DNA, 15 bp, Homo sapiens
tcctattttgttcct

SEQ ID NO: 1390116 - DNA, 15 bp, Homo sapiens
ctcctattttgttcc

SEQ ID NO: 1390117 - DNA, 15 bp, Homo sapiens
cctcctattttgttc

SEQ ID NO: 1390118 - DNA, 15 bp, Homo sapiens
ccctcctattttgtt

SEQ ID NO: 1390119 - DNA, 15 bp, Homo sapiens
tccctcctattttgt

SEQ ID NO: 1390120 - DNA, 15 bp, Homo sapiens
ctccctcctattttg

SEQ ID NO: 1390121 - DNA, 15 bp, Homo sapiens
tctccctcctatttt

SEQ ID NO: 1390122 - DNA, 15 bp, Homo sapiens
ctctccctcctattt

SEQ ID NO: 1390123 - DNA, 15 bp, Homo sapiens
tctctccctcctatt

SEQ ID NO: 1390124 - DNA, 15 bp, Homo sapiens
ctctctccctcctat

SEQ ID NO: 1390125 - DNA, 15 bp, Homo sapiens
actctctccctccta

SEQ ID NO: 1390126 - DNA, 15 bp, Homo sapiens
aactctctccctcct

SEQ ID NO: 1390127 - DNA, 15 bp, Homo sapiens
aaactctctccctcc

SEQ ID NO: 1390128 - DNA, 15 bp, Homo sapiens
aaaactctctccctc

SEQ ID NO: 1390129 - DNA, 15 bp, Homo sapiens
caaaactctctccct

SEQ ID NO: 1390130 - DNA, 15 bp, Homo sapiens
gcaaaactctctccc

SEQ ID NO: 1390131 - DNA, 15 bp, Homo sapiens
agcaaaactctctcc

SEQ ID NO: 1390132 - DNA, 15 bp, Homo sapiens
aagcaaaactctctc

SEQ ID NO: 1390133 - DNA, 15 bp, Homo sapiens
aaagcaaaactctct

SEQ ID NO: 1390134 - DNA, 15 bp, Homo sapiens
aaaagcaaaactctc

SEQ ID NO: 1390135 - DNA, 15 bp, Homo sapiens
aaaaagcaaaactct

SEQ ID NO: 1390136 - DNA, 15 bp, Homo sapiens
gaaaaagcaaaactc

SEQ ID NO: 1390137 - DNA, 15 bp, Homo sapiens
agaaaaagcaaaact

SEQ ID NO: 1390138 - DNA, 15 bp, Homo sapiens
aagaaaaagcaaaac

SEQ ID NO: 1390139 - DNA, 15 bp, Homo sapiens
aaagaaaaagcaaaa

SEQ ID NO: 1390140 - DNA, 15 bp, Homo sapiens
taaagaaaaagcaaa

SEQ ID NO: 1390141 - DNA, 15 bp, Homo sapiens
ataaagaaaaagcaa

SEQ ID NO: 1390142 - DNA, 15 bp, Homo sapiens
aataaagaaaaagca

SEQ ID NO: 1390143 - DNA, 15 bp, Homo sapiens
taataaagaaaaagc

SEQ ID NO: 1390144 - DNA, 15 bp, Homo sapiens
ataataaagaaaaag

SEQ ID NO: 1390145 - DNA, 15 bp, Homo sapiens
gataataaagaaaaa

SEQ ID NO: 1390146 - DNA, 15 bp, Homo sapiens
agataataaagaaaa

SEQ ID NO: 1390147 - DNA, 15 bp, Homo sapiens
tagataataaagaaa

SEQ ID NO: 1390148 - DNA, 15 bp, Homo sapiens
gtagataataaagaa

SEQ ID NO: 1390149 - DNA, 15 bp, Homo sapiens
agtagataataaaga

SEQ ID NO: 1390150 - DNA, 15 bp, Homo sapiens
cagtagataataaag

SEQ ID NO: 1390151 - DNA, 15 bp, Homo sapiens
gcagtagataataaa

SEQ ID NO: 1390152 - DNA, 15 bp, Homo sapiens
agcagtagataataa

SEQ ID NO: 1390153 - DNA, 15 bp, Homo sapiens
aagcagtagataata

SEQ ID NO: 1390154 - DNA, 15 bp, Homo sapiens
aaagcagtagataat

SEQ ID NO: 1390155 - DNA, 15 bp, Homo sapiens
aaaagcagtagataa

SEQ ID NO: 1390156 - DNA, 15 bp, Homo sapiens
taaaagcagtagata

SEQ ID NO: 1390157 - DNA, 15 bp, Homo sapiens
ttaaaagcagtagat

SEQ ID NO: 1390158 - DNA, 15 bp, Homo sapiens
gttaaaagcagtaga

SEQ ID NO: 1390159 - DNA, 15 bp, Homo sapiens
tgttaaaagcagtag

SEQ ID NO: 1390160 - DNA, 15 bp, Homo sapiens
ttgttaaaagcagta

SEQ ID NO: 1390161 - DNA, 15 bp, Homo sapiens
attgttaaaagcagt

SEQ ID NO: 1390162 - DNA, 15 bp, Homo sapiens
tattgttaaaagcag

SEQ ID NO: 1390163 - DNA, 15 bp, Homo sapiens
ttattgttaaaagca

SEQ ID NO: 1390164 - DNA, 15 bp, Homo sapiens
tttattgttaaaagc

SEQ ID NO: 1390165 - DNA, 15 bp, Homo sapiens
gtttattgttaaaag

SEQ ID NO: 1390166 - DNA, 15 bp, Homo sapiens
ggtttattgttaaaa

SEQ ID NO: 1390167 - DNA, 15 bp, Homo sapiens
aggtttattgttaaa

SEQ ID NO: 1390168 - DNA, 15 bp, Homo sapiens
aaggtttattgttaa

SEQ ID NO: 1390169 - DNA, 15 bp, Homo sapiens
gaaggtttattgtta

SEQ ID NO: 1390170 - DNA, 15 bp, Homo sapiens
ggaaggtttattgtt

SEQ ID NO: 1390171 - DNA, 15 bp, Homo sapiens
aggaaggtttattgt

SEQ ID NO: 1390172 - DNA, 15 bp, Homo sapiens
aaggaaggtttattg

SEQ ID NO: 1390173 - DNA, 15 bp, Homo sapiens
caaggaaggtttatt

SEQ ID NO: 1390174 - DNA, 15 bp, Homo sapiens
acaaggaaggtttat

SEQ ID NO: 1390175 - DNA, 15 bp, Homo sapiens
aacaaggaaggttta

SEQ ID NO: 1390176 - DNA, 15 bp, Homo sapiens
aaacaaggaaggttt

SEQ ID NO: 1390177 - DNA, 15 bp, Homo sapiens
aaaacaaggaaggtt

SEQ ID NO: 1390178 - DNA, 15 bp, Homo sapiens
caaaacaaggaaggt

SEQ ID NO: 1390179 - DNA, 15 bp, Homo sapiens
tcaaaacaaggaagg

SEQ ID NO: 1390180 - DNA, 15 bp, Homo sapiens
atcaaaacaaggaag

SEQ ID NO: 1390181 - DNA, 15 bp, Homo sapiens
catcaaaacaaggaa

SEQ ID NO: 1390182 - DNA, 15 bp, Homo sapiens
acatcaaaacaagga

SEQ ID NO: 1390183 - DNA, 15 bp, Homo sapiens
aacatcaaaacaagg

SEQ ID NO: 1390184 - DNA, 15 bp, Homo sapiens
taacatcaaaacaag

SEQ ID NO: 1390185 - DNA, 15 bp, Homo sapiens
ataacatcaaaacaa

SEQ ID NO: 1390186 - DNA, 15 bp, Homo sapiens
aataacatcaaaaca

SEQ ID NO: 1390187 - DNA, 15 bp, Homo sapiens
taataacatcaaaac

SEQ ID NO: 1390188 - DNA, 15 bp, Homo sapiens
ataataacatcaaaa

SEQ ID NO: 1390189 - DNA, 15 bp, Homo sapiens
cataataacatcaaa

SEQ ID NO: 1390190 - DNA, 15 bp, Homo sapiens
acataataacatcaa

SEQ ID NO: 1390191 - DNA, 15 bp, Homo sapiens
aacataataacatca

SEQ ID NO: 1390192 - DNA, 15 bp, Homo sapiens
caacataataacatc

SEQ ID NO: 1390193 - DNA, 15 bp, Homo sapiens
acaacataataacat

SEQ ID NO: 1390194 - DNA, 15 bp, Homo sapiens
aacaacataataaca

SEQ ID NO: 1390195 - DNA, 15 bp, Homo sapiens
aaacaacataataac

SEQ ID NO: 1390196 - DNA, 15 bp, Homo sapiens
caaacaacataataa

SEQ ID NO: 1390197 - DNA, 15 bp, Homo sapiens
acaaacaacataata

SEQ ID NO: 1390198 - DNA, 15 bp, Homo sapiens
gacaaacaacataat

SEQ ID NO: 1390199 - DNA, 15 bp, Homo sapiens
agacaaacaacataa

SEQ ID NO: 1390200 - DNA, 15 bp, Homo sapiens
aagacaaacaacata

SEQ ID NO: 1390201 - DNA, 15 bp, Homo sapiens
aaagacaaacaacat

SEQ ID NO: 1390202 - DNA, 15 bp, Homo sapiens
aaaagacaaacaaca

SEQ ID NO: 1390203 - DNA, 15 bp, Homo sapiens
aaaaagacaaacaac

SEQ ID NO: 1390204 - DNA, 15 bp, Homo sapiens
aaaaaagacaaacaa

SEQ ID NO: 1390205 - DNA, 15 bp, Homo sapiens
aaaaaaagacaaaca

SEQ ID NO: 1390206 - DNA, 15 bp, Homo sapiens
aaaaaaaagacaaac

SEQ ID NO: 1390207 - DNA, 15 bp, Homo sapiens
taaaaaaaaaagaca

SEQ ID NO: 1390208 - DNA, 15 bp, Homo sapiens
gtaaaaaaaaaagac

SEQ ID NO: 1390209 - DNA, 15 bp, Homo sapiens
agtaaaaaaaaaaga

SEQ ID NO: 1390210 - DNA, 15 bp, Homo sapiens
aagtaaaaaaaaaag

SEQ ID NO: 1390211 - DNA, 15 bp, Homo sapiens
taagtaaaaaaaaaa

SEQ ID NO: 1390212 - DNA, 15 bp, Homo sapiens
ataagtaaaaaaaaa

SEQ ID NO: 1390213 - DNA, 15 bp, Homo sapiens
aataagtaaaaaaaa

SEQ ID NO: 1390214 - DNA, 15 bp, Homo sapiens
aaataagtaaaaaaa

SEQ ID NO: 1390215 - DNA, 15 bp, Homo sapiens
caaataagtaaaaaa

SEQ ID NO: 1390216 - DNA, 15 bp, Homo sapiens
gcaaataagtaaaaa

SEQ ID NO: 1390217 - DNA, 15 bp, Homo sapiens
ggcaaataagtaaaa

SEQ ID NO: 1390218 - DNA, 15 bp, Homo sapiens
aggcaaataagtaaa

SEQ ID NO: 1390219 - DNA, 15 bp, Homo sapiens
aaggcaaataagtaa

SEQ ID NO: 1390220 - DNA, 15 bp, Homo sapiens
aaaggcaaataagta

SEQ ID NO: 1390221 - DNA, 15 bp, Homo sapiens
caaaggcaaataagt

SEQ ID NO: 1390222 - DNA, 15 bp, Homo sapiens
acaaaggcaaataag

SEQ ID NO: 1390223 - DNA, 15 bp, Homo sapiens
cacaaaggcaaataa

SEQ ID NO: 1390224 - DNA, 15 bp, Homo sapiens
tcacaaaggcaaata

SEQ ID NO: 1390225 - DNA, 15 bp, Homo sapiens
gtcacaaaggcaaat

SEQ ID NO: 1390226 - DNA, 15 bp, Homo sapiens
tgtcacaaaggcaaa

SEQ ID NO: 1390227 - DNA, 15 bp, Homo sapiens
atgtcacaaaggcaa

SEQ ID NO: 1390228 - DNA, 15 bp, Homo sapiens
catgtcacaaaggca

SEQ ID NO: 1390229 - DNA, 15 bp, Homo sapiens
ccatgtcacaaaggc

SEQ ID NO: 1390230 - DNA, 15 bp, Homo sapiens
cccatgtcacaaagg

SEQ ID NO: 1390231 - DNA, 15 bp, Homo sapiens
ccccatgtcacaaag

SEQ ID NO: 1390232 - DNA, 15 bp, Homo sapiens
tccccatgtcacaaa

SEQ ID NO: 1390233 - DNA, 15 bp, Homo sapiens
gtccccatgtcacaa

SEQ ID NO: 1390234 - DNA, 15 bp, Homo sapiens
cgtccccatgtcaca

SEQ ID NO: 1390235 - DNA, 15 bp, Homo sapiens
ccgtccccatgtcac

SEQ ID NO: 1390236 - DNA, 15 bp, Homo sapiens
accgtccccatgtca

SEQ ID NO: 1390237 - DNA, 15 bp, Homo sapiens
caccgtccccatgtc

SEQ ID NO: 1390238 - DNA, 15 bp, Homo sapiens
tcaccgtccccatgt

SEQ ID NO: 1390239 - DNA, 15 bp, Homo sapiens
atcaccgtccccatg

SEQ ID NO: 1390240 - DNA, 15 bp, Homo sapiens
tatcaccgtccccat

SEQ ID NO: 1390241 - DNA, 15 bp, Homo sapiens
ctatcaccgtcccca

SEQ ID NO: 1390242 - DNA, 15 bp, Homo sapiens
cctatcaccgtcccc

SEQ ID NO: 1390243 - DNA, 15 bp, Homo sapiens
ccctatcaccgtccc

SEQ ID NO: 1390244 - DNA, 15 bp, Homo sapiens
gccctatcaccgtcc

SEQ ID NO: 1390245 - DNA, 15 bp, Homo sapiens
ggccctatcaccgtc

SEQ ID NO: 1390246 - DNA, 15 bp, Homo sapiens
aggccctatcaccgt

SEQ ID NO: 1390247 - DNA, 15 bp, Homo sapiens
aaggccctatcaccg

SEQ ID NO: 1390248 - DNA, 15 bp, Homo sapiens
taaggccctatcacc

SEQ ID NO: 1390249 - DNA, 15 bp, Homo sapiens
ttaaggccctatcac

SEQ ID NO: 1390250 - DNA, 15 bp, Homo sapiens
tttaaggccctatca

SEQ ID NO: 1390251 - DNA, 15 bp, Homo sapiens
atttaaggccctatc

SEQ ID NO: 1390252 - DNA, 15 bp, Homo sapiens
tatttaaggccctat

SEQ ID NO: 1390253 - DNA, 15 bp, Homo sapiens
atatttaaggcccta

SEQ ID NO: 1390254 - DNA, 15 bp, Homo sapiens
tatatttaaggccct

SEQ ID NO: 1390255 - DNA, 15 bp, Homo sapiens
ttatatttaaggccc

SEQ ID NO: 1390256 - DNA, 15 bp, Homo sapiens
attatatttaaggcc

SEQ ID NO: 1390257 - DNA, 15 bp, Homo sapiens
aattatatttaaggc

SEQ ID NO: 1390258 - DNA, 15 bp, Homo sapiens
taaaattatatttaa

SEQ ID NO: 1390259 - DNA, 15 bp, Homo sapiens
ttaaaattatattta

SEQ ID NO: 1390260 - DNA, 15 bp, Homo sapiens
tttaaaattatattt

SEQ ID NO: 1390261 - DNA, 15 bp, Homo sapiens
ttttaaaattatatt

SEQ ID NO: 1390262 - DNA, 15 bp, Homo sapiens
attttaaaattatat

SEQ ID NO: 1390263 - DNA, 15 bp, Homo sapiens
ctattttaaaattat

SEQ ID NO: 1390264 - DNA, 15 bp, Homo sapiens
cctattttaaaatta

SEQ ID NO: 1390265 - DNA, 15 bp, Homo sapiens
ccctattttaaaatt

SEQ ID NO: 1390266 - DNA, 15 bp, Homo sapiens
tccctattttaaaat

SEQ ID NO: 1390267 - DNA, 15 bp, Homo sapiens
ttccctattttaaaa

SEQ ID NO: 1390268 - DNA, 15 bp, Homo sapiens
attccctattttaaa

SEQ ID NO: 1390269 - DNA, 15 bp, Homo sapiens
tattccctattttaa

SEQ ID NO: 1390270 - DNA, 15 bp, Homo sapiens
ttattccctatttta

SEQ ID NO: 1390271 - DNA, 15 bp, Homo sapiens
tttattccctatttt

SEQ ID NO: 1390272 - DNA, 15 bp, Homo sapiens
atttattccctattt

SEQ ID NO: 1390273 - DNA, 15 bp, Homo sapiens
catttattccctatt

SEQ ID NO: 1390274 - DNA, 15 bp, Homo sapiens
ccatttattccctat

SEQ ID NO: 1390275 - DNA, 15 bp, Homo sapiens
accatttattcccta

SEQ ID NO: 1390276 - DNA, 15 bp, Homo sapiens
aaccatttattccct

SEQ ID NO: 1390277 - DNA, 15 bp, Homo sapiens
caaccatttattccc

SEQ ID NO: 1390278 - DNA, 15 bp, Homo sapiens
acaaccatttattcc

SEQ ID NO: 1390279 - DNA, 15 bp, Homo sapiens
gacaaccatttattc

SEQ ID NO: 1390280 - DNA, 15 bp, Homo sapiens
agacaaccatttatt

SEQ ID NO: 1390281 - DNA, 15 bp, Homo sapiens
aagacaaccatttat

SEQ ID NO: 1390282 - DNA, 15 bp, Homo sapiens
aaagacaaccattta

SEQ ID NO: 1390283 - DNA, 15 bp, Homo sapiens
taaagacaaccattt

SEQ ID NO: 1390284 - DNA, 15 bp, Homo sapiens
ctaaagacaaccatt

SEQ ID NO: 1390285 - DNA, 15 bp, Homo sapiens
actaaagacaaccat

SEQ ID NO: 1390286 - DNA, 15 bp, Homo sapiens
tactaaagacaacca

SEQ ID NO: 1390287 - DNA, 15 bp, Homo sapiens
atactaaagacaacc

SEQ ID NO: 1390288 - DNA, 15 bp, Homo sapiens
aatactaaagacaac

SEQ ID NO: 1390289 - DNA, 15 bp, Homo sapiens
aaatactaaagacaa

SEQ ID NO: 1390290 - DNA, 15 bp, Homo sapiens
aaaatactaaagaca

SEQ ID NO: 1390291 - DNA, 15 bp, Homo sapiens
taaaatactaaagac

SEQ ID NO: 1390292 - DNA, 15 bp, Homo sapiens
ataaaatactaaaga

SEQ ID NO: 1390293 - DNA, 15 bp, Homo sapiens
aataaaatactaaag

SEQ ID NO: 1390294 - DNA, 15 bp, Homo sapiens
aaataaaatactaaa

SEQ ID NO: 1390295 - DNA, 15 bp, Homo sapiens
aaaataaaatactaa

SEQ ID NO: 1390296 - DNA, 15 bp, Homo sapiens
caaaataaaatacta

SEQ ID NO: 1390297 - DNA, 15 bp, Homo sapiens
acaaaataaaatact

SEQ ID NO: 1390298 - DNA, 15 bp, Homo sapiens
aacaaaataaaatac

SEQ ID NO: 1390299 - DNA, 15 bp, Homo sapiens
aaacaaaataaaata

SEQ ID NO: 1390300 - DNA, 15 bp, Homo sapiens
aaaacaaaataaaat

SEQ ID NO: 1390301 - DNA, 15 bp, Homo sapiens
taaaacaaaataaaa

SEQ ID NO: 1390302 - DNA, 15 bp, Homo sapiens
ataaaacaaaataaa

SEQ ID NO: 1390303 - DNA, 15 bp, Homo sapiens
aataaaacaaaataa

SEQ ID NO: 1390304 - DNA, 15 bp, Homo sapiens
taataaaacaaaata

SEQ ID NO: 1390305 - DNA, 15 bp, Homo sapiens
ataataaaacaaaat

SEQ ID NO: 1390306 - DNA, 15 bp, Homo sapiens
aataataaaacaaaa

SEQ ID NO: 1390307 - DNA, 15 bp, Homo sapiens
taataataaaacaaa

SEQ ID NO: 1390308 - DNA, 15 bp, Homo sapiens
ataataataaaacaa

SEQ ID NO: 1390309 - DNA, 15 bp, Homo sapiens
aataataataaaaca

SEQ ID NO: 1390310 - DNA, 15 bp, Homo sapiens
taataataataaaac

SEQ ID NO: 1390311 - DNA, 15 bp, Homo sapiens
ataataataataaaa

SEQ ID NO: 1390312 - DNA, 15 bp, Homo sapiens
caataataataataa

SEQ ID NO: 1390313 - DNA, 15 bp, Homo sapiens
taacaataataataa

SEQ ID NO: 1390314 - DNA, 15 bp, Homo sapiens
ataacaataataata

SEQ ID NO: 1390315 - DNA, 15 bp, Homo sapiens
aataacaataataat

SEQ ID NO: 1390316 - DNA, 15 bp, Homo sapiens
aaataacaataataa

SEQ ID NO: 1390317 - DNA, 15 bp, Homo sapiens
aaaataacaataata

SEQ ID NO: 1390318 - DNA, 15 bp, Homo sapiens
aaaaataacaataat

SEQ ID NO: 1390319 - DNA, 15 bp, Homo sapiens
caaaaataacaataa

SEQ ID NO: 1390320 - DNA, 15 bp, Homo sapiens
gcaaaaataacaata

SEQ ID NO: 1390321 - DNA, 15 bp, Homo sapiens
tgcaaaaataacaat

SEQ ID NO: 1390322 - DNA, 15 bp, Homo sapiens
ttgcaaaaataacaa

SEQ ID NO: 1390323 - DNA, 15 bp, Homo sapiens
cttgcaaaaataaca

SEQ ID NO: 1390324 - DNA, 15 bp, Homo sapiens
gcttgcaaaaataac

SEQ ID NO: 1390325 - DNA, 15 bp, Homo sapiens
agcttgcaaaaataa

SEQ ID NO: 1390326 - DNA, 15 bp, Homo sapiens
aagcttgcaaaaata

SEQ ID NO: 1390327 - DNA, 15 bp, Homo sapiens
gaagcttgcaaaaat

SEQ ID NO: 1390328 - DNA, 15 bp, Homo sapiens
tgaagcttgcaaaaa

SEQ ID NO: 1390329 - DNA, 15 bp, Homo sapiens
ctgaagcttgcaaaa

SEQ ID NO: 1390330 - DNA, 15 bp, Homo sapiens
gctgaagcttgcaaa

SEQ ID NO: 1390331 - DNA, 15 bp, Homo sapiens
agctgaagcttgcaa

SEQ ID NO: 1390332 - DNA, 15 bp, Homo sapiens
tagctgaagcttgca

SEQ ID NO: 1390333 - DNA, 15 bp, Homo sapiens
ttagctgaagcttgc

SEQ ID NO: 1390334 - DNA, 15 bp, Homo sapiens
attagctgaagcttg

SEQ ID NO: 1390335 - DNA, 15 bp, Homo sapiens
aattagctgaagctt

SEQ ID NO: 1390336 - DNA, 15 bp, Homo sapiens
aaattagctgaagct

SEQ ID NO: 1390337 - DNA, 15 bp, Homo sapiens
caaattagctgaagc

SEQ ID NO: 1390338 - DNA, 15 bp, Homo sapiens
ccaaattagctgaag

SEQ ID NO: 1390339 - DNA, 15 bp, Homo sapiens
tccaaattagctgaa

SEQ ID NO: 1390340 - DNA, 15 bp, Homo sapiens
ttccaaattagctga

SEQ ID NO: 1390341 - DNA, 15 bp, Homo sapiens
attccaaattagctg

SEQ ID NO: 1390342 - DNA, 15 bp, Homo sapiens
aattccaaattagct

SEQ ID NO: 1390343 - DNA, 15 bp, Homo sapiens
caattccaaattagc

SEQ ID NO: 1390344 - DNA, 15 bp, Homo sapiens
acaattccaaattag

SEQ ID NO: 1390345 - DNA, 15 bp, Homo sapiens
tacaattccaaatta

SEQ ID NO: 1390346 - DNA, 15 bp, Homo sapiens
ctacaattccaaatt

SEQ ID NO: 1390347 - DNA, 15 bp, Homo sapiens
gctacaattccaaat

SEQ ID NO: 1390348 - DNA, 15 bp, Homo sapiens
agctacaattccaaa

SEQ ID NO: 1390349 - DNA, 15 bp, Homo sapiens
gagctacaattccaa

SEQ ID NO: 1390350 - DNA, 15 bp, Homo sapiens
agagctacaattcca

SEQ ID NO: 1390351 - DNA, 15 bp, Homo sapiens
gagagctacaattcc

SEQ ID NO: 1390352 - DNA, 15 bp, Homo sapiens
ggagagctacaattc

SEQ ID NO: 1390353 - DNA, 15 bp, Homo sapiens
aggagagctacaatt

SEQ ID NO: 1390354 - DNA, 15 bp, Homo sapiens
caggagagctacaat

SEQ ID NO: 1390355 - DNA, 15 bp, Homo sapiens
tcaggagagctacaa

SEQ ID NO: 1390356 - DNA, 15 bp, Homo sapiens
gtcaggagagctaca

SEQ ID NO: 1390357 - DNA, 15 bp, Homo sapiens
tgtcaggagagctac

SEQ ID NO: 1390358 - DNA, 15 bp, Homo sapiens
atgtcaggagagcta

SEQ ID NO: 1390359 - DNA, 15 bp, Homo sapiens
aatgtcaggagagct

SEQ ID NO: 1390360 - DNA, 15 bp, Homo sapiens
taatgtcaggagagc

SEQ ID NO: 1390361 - DNA, 15 bp, Homo sapiens
ataatgtcaggagag

SEQ ID NO: 1390362 - DNA, 15 bp, Homo sapiens
aataatgtcaggaga

SEQ ID NO: 1390363 - DNA, 15 bp, Homo sapiens
gaataatgtcaggag

SEQ ID NO: 1390364 - DNA, 15 bp, Homo sapiens
agaataatgtcagga

SEQ ID NO: 1390365 - DNA, 15 bp, Homo sapiens
aagaataatgtcagg

SEQ ID NO: 1390366 - DNA, 15 bp, Homo sapiens
taagaataatgtcag

SEQ ID NO: 1390367 - DNA, 15 bp, Homo sapiens
ataagaataatgtca

SEQ ID NO: 1390368 - DNA, 15 bp, Homo sapiens
tataagaataatgtc

SEQ ID NO: 1390369 - DNA, 15 bp, Homo sapiens
ttataagaataatgt

SEQ ID NO: 1390370 - DNA, 15 bp, Homo sapiens
cttataagaataatg

SEQ ID NO: 1390371 - DNA, 15 bp, Homo sapiens
gcttataagaataat

SEQ ID NO: 1390372 - DNA, 15 bp, Homo sapiens
agcttataagaataa

SEQ ID NO: 1390373 - DNA, 15 bp, Homo sapiens
gagcttataagaata

SEQ ID NO: 1390374 - DNA, 15 bp, Homo sapiens
tgagcttataagaat

SEQ ID NO: 1390375 - DNA, 15 bp, Homo sapiens
atgagcttataagaa

SEQ ID NO: 1390376 - DNA, 15 bp, Homo sapiens
aatgagcttataaga

SEQ ID NO: 1390377 - DNA, 15 bp, Homo sapiens
gaatgagcttataag

SEQ ID NO: 1390378 - DNA, 15 bp, Homo sapiens
ggaatgagcttataa

SEQ ID NO: 1390379 - DNA, 15 bp, Homo sapiens
tggaatgagcttata

SEQ ID NO: 1390380 - DNA, 15 bp, Homo sapiens
gtggaatgagcttat

SEQ ID NO: 1390381 - DNA, 15 bp, Homo sapiens
agtggaatgagctta

SEQ ID NO: 1390382 - DNA, 15 bp, Homo sapiens
gagtggaatgagctt

SEQ ID NO: 1390383 - DNA, 15 bp, Homo sapiens
agagtggaatgagct

SEQ ID NO: 1390384 - DNA, 15 bp, Homo sapiens
gagagtggaatgagc

SEQ ID NO: 1390385 - DNA, 15 bp, Homo sapiens
agagagtggaatgag

SEQ ID NO: 1390386 - DNA, 15 bp, Homo sapiens
aagagagtggaatga

SEQ ID NO: 1390387 - DNA, 15 bp, Homo sapiens
taagagagtggaatg

SEQ ID NO: 1390388 - DNA, 15 bp, Homo sapiens
ataagagagtggaat

SEQ ID NO: 1390389 - DNA, 15 bp, Homo sapiens
tataagagagtggaa

SEQ ID NO: 1390390 - DNA, 15 bp, Homo sapiens
ctataagagagtgga

SEQ ID NO: 1390391 - DNA, 15 bp, Homo sapiens
tctataagagagtgg

SEQ ID NO: 1390392 - DNA, 15 bp, Homo sapiens
gtctataagagagtg

SEQ ID NO: 1390393 - DNA, 15 bp, Homo sapiens
ggtctataagagagt

SEQ ID NO: 1390394 - DNA, 15 bp, Homo sapiens
tggtctataagagag

SEQ ID NO: 1390395 - DNA, 15 bp, Homo sapiens
atggtctataagaga

SEQ ID NO: 1390396 - DNA, 15 bp, Homo sapiens
gatggtctataagag

SEQ ID NO: 1390397 - DNA, 15 bp, Homo sapiens
tgatggtctataaga

SEQ ID NO: 1390398 - DNA, 15 bp, Homo sapiens
atgatggtctataag

SEQ ID NO: 1390399 - DNA, 15 bp, Homo sapiens
aatgatggtctataa

SEQ ID NO: 1390400 - DNA, 15 bp, Homo sapiens
taatgatggtctata

SEQ ID NO: 1390401 - DNA, 15 bp, Homo sapiens
gtaatgatggtctat

SEQ ID NO: 1390402 - DNA, 15 bp, Homo sapiens
tgtaatgatggtcta

SEQ ID NO: 1390403 - DNA, 15 bp, Homo sapiens
atgtaatgatggtct

SEQ ID NO: 1390404 - DNA, 15 bp, Homo sapiens
catgtaatgatggtc

SEQ ID NO: 1390405 - DNA, 15 bp, Homo sapiens
gcatgtaatgatggt

SEQ ID NO: 1390406 - DNA, 15 bp, Homo sapiens
ggcatgtaatgatgg

SEQ ID NO: 1390407 - DNA, 15 bp, Homo sapiens
gggcatgtaatgatg

SEQ ID NO: 1390408 - DNA, 15 bp, Homo sapiens
agggcatgtaatgat

SEQ ID NO: 1390409 - DNA, 15 bp, Homo sapiens
gagggcatgtaatga

SEQ ID NO: 1390410 - DNA, 15 bp, Homo sapiens
agagggcatgtaatg

SEQ ID NO: 1390411 - DNA, 15 bp, Homo sapiens
aagagggcatgtaat

SEQ ID NO: 1390412 - DNA, 15 bp, Homo sapiens
aaagagggcatgtaa

SEQ ID NO: 1390413 - DNA, 15 bp, Homo sapiens
gaaagagggcatgta

SEQ ID NO: 1390414 - DNA, 15 bp, Homo sapiens
ggaaagagggcatgt

SEQ ID NO: 1390415 - DNA, 15 bp, Homo sapiens
tggaaagagggcatg

SEQ ID NO: 1390416 - DNA, 15 bp, Homo sapiens
atggaaagagggcat

SEQ ID NO: 1390417 - DNA, 15 bp, Homo sapiens
gatggaaagagggca

SEQ ID NO: 1390418 - DNA, 15 bp, Homo sapiens
agatggaaagagggc

SEQ ID NO: 1390419 - DNA, 15 bp, Homo sapiens
aagatggaaagaggg

SEQ ID NO: 1390420 - DNA, 15 bp, Homo sapiens
aaagatggaaagagg

SEQ ID NO: 1390421 - DNA, 15 bp, Homo sapiens
aaaagatggaaagag

SEQ ID NO: 1390422 - DNA, 15 bp, Homo sapiens
taaaagatggaaaga

SEQ ID NO: 1390423 - DNA, 15 bp, Homo sapiens
ttaaaagatggaaag

SEQ ID NO: 1390424 - DNA, 15 bp, Homo sapiens
tttaaaagatggaaa

SEQ ID NO: 1390425 - DNA, 15 bp, Homo sapiens
ttttaaaagatggaa

SEQ ID NO: 1390426 - DNA, 15 bp, Homo sapiens
attttaaaagatgga

SEQ ID NO: 1390427 - DNA, 15 bp, Homo sapiens
tattttaaaagatgg

SEQ ID NO: 1390428 - DNA, 15 bp, Homo sapiens
atattttaaaagatg

SEQ ID NO: 1390429 - DNA, 15 bp, Homo sapiens
catattttaaaagat

SEQ ID NO: 1390430 - DNA, 15 bp, Homo sapiens
acatattttaaaaga

SEQ ID NO: 1390431 - DNA, 15 bp, Homo sapiens
gacatattttaaaag

SEQ ID NO: 1390432 - DNA, 15 bp, Homo sapiens
ggacatattttaaaa

SEQ ID NO: 1390433 - DNA, 15 bp, Homo sapiens
aggacatattttaaa

SEQ ID NO: 1390434 - DNA, 15 bp, Homo sapiens
aaggacatattttaa

SEQ ID NO: 1390435 - DNA, 15 bp, Homo sapiens
aaaggacatatttta

SEQ ID NO: 1390436 - DNA, 15 bp, Homo sapiens
taaaggacatatttt

SEQ ID NO: 1390437 - DNA, 15 bp, Homo sapiens
ttaaaggacatattt

SEQ ID NO: 1390438 - DNA, 15 bp, Homo sapiens
tttaaaggacatatt

SEQ ID NO: 1390439 - DNA, 15 bp, Homo sapiens
ttttaaaggacatat

SEQ ID NO: 1390440 - DNA, 15 bp, Homo sapiens
tttttaaaggacata

SEQ ID NO: 1390441 - DNA, 15 bp, Homo sapiens
atttttaaaggacat

SEQ ID NO: 1390442 - DNA, 15 bp, Homo sapiens
gatttttaaaggaca

SEQ ID NO: 1390443 - DNA, 15 bp, Homo sapiens
agatttttaaaggac

SEQ ID NO: 1390444 - DNA, 15 bp, Homo sapiens
cagatttttaaagga

SEQ ID NO: 1390445 - DNA, 15 bp, Homo sapiens
tcagatttttaaagg

SEQ ID NO: 1390446 - DNA, 15 bp, Homo sapiens
gtcagatttttaaag

SEQ ID NO: 1390447 - DNA, 15 bp, Homo sapiens
ggtcagatttttaaa

SEQ ID NO: 1390448 - DNA, 15 bp, Homo sapiens
aggtcagatttttaa

SEQ ID NO: 1390449 - DNA, 15 bp, Homo sapiens
caggtcagattttta

SEQ ID NO: 1390450 - DNA, 15 bp, Homo sapiens
ccaggtcagattttt

SEQ ID NO: 1390451 - DNA, 15 bp, Homo sapiens
cccaggtcagatttt

SEQ ID NO: 1390452 - DNA, 15 bp, Homo sapiens
tcccaggtcagattt

SEQ ID NO: 1390453 - DNA, 15 bp, Homo sapiens
ctcccaggtcagatt

SEQ ID NO: 1390454 - DNA, 15 bp, Homo sapiens
tctcccaggtcagat

SEQ ID NO: 1390455 - DNA, 15 bp, Homo sapiens
ttctcccaggtcaga

SEQ ID NO: 1390456 - DNA, 15 bp, Homo sapiens
tttctcccaggtcag

SEQ ID NO: 1390457 - DNA, 15 bp, Homo sapiens
atttctcccaggtca

SEQ ID NO: 1390458 - DNA, 15 bp, Homo sapiens
gatttctcccaggtc

SEQ ID NO: 1390459 - DNA, 15 bp, Homo sapiens
agatttctcccaggt

SEQ ID NO: 1390460 - DNA, 15 bp, Homo sapiens
gagatttctcccagg

SEQ ID NO: 1390461 - DNA, 15 bp, Homo sapiens
agagatttctcccag

SEQ ID NO: 1390462 - DNA, 15 bp, Homo sapiens
cagagatttctccca

SEQ ID NO: 1390463 - DNA, 15 bp, Homo sapiens
acagagatttctccc

SEQ ID NO: 1390464 - DNA, 15 bp, Homo sapiens
cacagagatttctcc

SEQ ID NO: 1390465 - DNA, 15 bp, Homo sapiens
tcacagagatttctc

SEQ ID NO: 1390466 - DNA, 15 bp, Homo sapiens
ttcacagagatttct

SEQ ID NO: 1390467 - DNA, 15 bp, Homo sapiens
cttcacagagatttc

SEQ ID NO: 1390468 - DNA, 15 bp, Homo sapiens
gcttcacagagattt

SEQ ID NO: 1390469 - DNA, 15 bp, Homo sapiens
ggcttcacagagatt

SEQ ID NO: 1390470 - DNA, 15 bp, Homo sapiens
cggcttcacagagat

SEQ ID NO: 1390471 - DNA, 15 bp, Homo sapiens
acggcttcacagaga

SEQ ID NO: 1390472 - DNA, 15 bp, Homo sapiens
cacggcttcacagag

SEQ ID NO: 1390473 - DNA, 15 bp, Homo sapiens
acacggcttcacaga

SEQ ID NO: 1390474 - DNA, 15 bp, Homo sapiens
aacacggcttcacag

SEQ ID NO: 1390475 - DNA, 15 bp, Homo sapiens
caacacggcttcaca

SEQ ID NO: 1390476 - DNA, 15 bp, Homo sapiens
ccaacacggcttcac

SEQ ID NO: 1390477 - DNA, 15 bp, Homo sapiens
accaacacggcttca

SEQ ID NO: 1390478 - DNA, 15 bp, Homo sapiens
aaccaacacggcttc

SEQ ID NO: 1390479 - DNA, 15 bp, Homo sapiens
taaccaacacggctt

SEQ ID NO: 1390480 - DNA, 15 bp, Homo sapiens
gtaaccaacacggct

SEQ ID NO: 1390481 - DNA, 15 bp, Homo sapiens
agtaaccaacacggc

SEQ ID NO: 1390482 - DNA, 15 bp, Homo sapiens
aagtaaccaacacgg

SEQ ID NO: 1390483 - DNA, 15 bp, Homo sapiens
taagtaaccaacacg

SEQ ID NO: 1390484 - DNA, 15 bp, Homo sapiens
ttaagtaaccaacac

SEQ ID NO: 1390485 - DNA, 15 bp, Homo sapiens
cttaagtaaccaaca

SEQ ID NO: 1390486 - DNA, 15 bp, Homo sapiens
acttaagtaaccaac

SEQ ID NO: 1390487 - DNA, 15 bp, Homo sapiens
cacttaagtaaccaa

SEQ ID NO: 1390488 - DNA, 15 bp, Homo sapiens
gcacttaagtaacca

SEQ ID NO: 1390489 - DNA, 15 bp, Homo sapiens
ggcacttaagtaacc

SEQ ID NO: 1390490 - DNA, 15 bp, Homo sapiens
tggcacttaagtaac

SEQ ID NO: 1390491 - DNA, 15 bp, Homo sapiens
gtggcacttaagtaa

SEQ ID NO: 1390492 - DNA, 15 bp, Homo sapiens
ggtggcacttaagta

SEQ ID NO: 1390493 - DNA, 15 bp, Homo sapiens
gggtggcacttaagt

SEQ ID NO: 1390494 - DNA, 15 bp, Homo sapiens
ggggtggcacttaag

SEQ ID NO: 1390495 - DNA, 15 bp, Homo sapiens
aggggtggcacttaa

SEQ ID NO: 1390496 - DNA, 15 bp, Homo sapiens
gaggggtggcactta

SEQ ID NO: 1390497 - DNA, 15 bp, Homo sapiens
agaggggtggcactt

SEQ ID NO: 1390498 - DNA, 15 bp, Homo sapiens
aagaggggtggcact

SEQ ID NO: 1390499 - DNA, 15 bp, Homo sapiens
aaagaggggtggcac

SEQ ID NO: 1390500 - DNA, 15 bp, Homo sapiens
aaaagaggggtggca

SEQ ID NO: 1390501 - DNA, 15 bp, Homo sapiens
gaaaagaggggtggc

SEQ ID NO: 1390502 - DNA, 15 bp, Homo sapiens
agaaaagaggggtgg

SEQ ID NO: 1390503 - DNA, 15 bp, Homo sapiens
aagaaaagaggggtg

SEQ ID NO: 1390504 - DNA, 15 bp, Homo sapiens
gaagaaaagaggggt

SEQ ID NO: 1390505 - DNA, 15 bp, Homo sapiens
ggaagaaaagagggg

SEQ ID NO: 1390506 - DNA, 15 bp, Homo sapiens
aggaagaaaagaggg

SEQ ID NO: 1390507 - DNA, 15 bp, Homo sapiens
caggaagaaaagagg

SEQ ID NO: 1390508 - DNA, 15 bp, Homo sapiens
tcaggaagaaaagag

SEQ ID NO: 1390509 - DNA, 15 bp, Homo sapiens
ctcaggaagaaaaga

SEQ ID NO: 1390510 - DNA, 15 bp, Homo sapiens
tctcaggaagaaaag

SEQ ID NO: 1390511 - DNA, 15 bp, Homo sapiens
ctctcaggaagaaaa

SEQ ID NO: 1390512 - DNA, 15 bp, Homo sapiens
cctctcaggaagaaa

SEQ ID NO: 1390513 - DNA, 15 bp, Homo sapiens
tcctctcaggaagaa

SEQ ID NO: 1390514 - DNA, 15 bp, Homo sapiens
atcctctcaggaaga

SEQ ID NO: 1390515 - DNA, 15 bp, Homo sapiens
gatcctctcaggaag

SEQ ID NO: 1390516 - DNA, 15 bp, Homo sapiens
tgatcctctcaggaa

SEQ ID NO: 1390517 - DNA, 15 bp, Homo sapiens
atgatcctctcagga

SEQ ID NO: 1390518 - DNA, 15 bp, Homo sapiens
aatgatcctctcagg

SEQ ID NO: 1390519 - DNA, 15 bp, Homo sapiens
aaatgatcctctcag

SEQ ID NO: 1390520 - DNA, 15 bp, Homo sapiens
caaatgatcctctca

SEQ ID NO: 1390521 - DNA, 15 bp, Homo sapiens
acaaatgatcctctc

SEQ ID NO: 1390522 - DNA, 15 bp, Homo sapiens
cacaaatgatcctct

SEQ ID NO: 1390523 - DNA, 15 bp, Homo sapiens
tcacaaatgatcctc

SEQ ID NO: 1390524 - DNA, 15 bp, Homo sapiens
atcacaaatgatcct

SEQ ID NO: 1390525 - DNA, 15 bp, Homo sapiens
aatcacaaatgatcc

SEQ ID NO: 1390526 - DNA, 15 bp, Homo sapiens
caatcacaaatgatc

SEQ ID NO: 1390527 - DNA, 15 bp, Homo sapiens
gcaatcacaaatgat

SEQ ID NO: 1390528 - DNA, 15 bp, Homo sapiens
tgcaatcacaaatga

SEQ ID NO: 1390529 - DNA, 15 bp, Homo sapiens
ctgcaatcacaaatg

SEQ ID NO: 1390530 - DNA, 15 bp, Homo sapiens
actgcaatcacaaat

SEQ ID NO: 1390531 - DNA, 15 bp, Homo sapiens
aactgcaatcacaaa

SEQ ID NO: 1390532 - DNA, 15 bp, Homo sapiens
taactgcaatcacaa

SEQ ID NO: 1390533 - DNA, 15 bp, Homo sapiens
gtaactgcaatcaca

SEQ ID NO: 1390534 - DNA, 15 bp, Homo sapiens
tgtaactgcaatcac

SEQ ID NO: 1390535 - DNA, 15 bp, Homo sapiens
ctgtaactgcaatca

SEQ ID NO: 1390536 - DNA, 15 bp, Homo sapiens
actgtaactgcaatc

SEQ ID NO: 1390537 - DNA, 15 bp, Homo sapiens
aactgtaactgcaat

SEQ ID NO: 1390538 - DNA, 15 bp, Homo sapiens
caactgtaactgcaa

SEQ ID NO: 1390539 - DNA, 15 bp, Homo sapiens
tcaactgtaactgca

SEQ ID NO: 1390540 - DNA, 15 bp, Homo sapiens
ttcaactgtaactgc

SEQ ID NO: 1390541 - DNA, 15 bp, Homo sapiens
gttcaactgtaactg

SEQ ID NO: 1390542 - DNA, 15 bp, Homo sapiens
tgttcaactgtaact

SEQ ID NO: 1390543 - DNA, 15 bp, Homo sapiens
atgttcaactgtaac

SEQ ID NO: 1390544 - DNA, 15 bp, Homo sapiens
aatgttcaactgtaa

SEQ ID NO: 1390545 - DNA, 15 bp, Homo sapiens
aaatgttcaactgta

SEQ ID NO: 1390546 - DNA, 15 bp, Homo sapiens
caaatgttcaactgt

SEQ ID NO: 1390547 - DNA, 15 bp, Homo sapiens
ccaaatgttcaactg

SEQ ID NO: 1390548 - DNA, 15 bp, Homo sapiens
tccaaatgttcaact

SEQ ID NO: 1390549 - DNA, 15 bp, Homo sapiens
ttccaaatgttcaac

SEQ ID NO: 1390550 - DNA, 15 bp, Homo sapiens
cttccaaatgttcaa

SEQ ID NO: 1390551 - DNA, 15 bp, Homo sapiens
gcttccaaatgttca

SEQ ID NO: 1390552 - DNA, 15 bp, Homo sapiens
agcttccaaatgttc

SEQ ID NO: 1390553 - DNA, 15 bp, Homo sapiens
cagcttccaaatgtt

SEQ ID NO: 1390554 - DNA, 15 bp, Homo sapiens
gcagcttccaaatgt

SEQ ID NO: 1390555 - DNA, 15 bp, Homo sapiens
agcagcttccaaatg

SEQ ID NO: 1390556 - DNA, 15 bp, Homo sapiens
gagcagcttccaaat

SEQ ID NO: 1390557 - DNA, 15 bp, Homo sapiens
tgagcagcttccaaa

SEQ ID NO: 1390558 - DNA, 15 bp, Homo sapiens
ttgagcagcttccaa

SEQ ID NO: 1390559 - DNA, 15 bp, Homo sapiens
gttgagcagcttcca

SEQ ID NO: 1390560 - DNA, 15 bp, Homo sapiens
ggttgagcagcttcc

SEQ ID NO: 1390561 - DNA, 15 bp, Homo sapiens
gggttgagcagcttc

SEQ ID NO: 1390562 - DNA, 15 bp, Homo sapiens
agggttgagcagctt

SEQ ID NO: 1390563 - DNA, 15 bp, Homo sapiens
gagggttgagcagct

SEQ ID NO: 1390564 - DNA, 15 bp, Homo sapiens
agagggttgagcagc

SEQ ID NO: 1390565 - DNA, 15 bp, Homo sapiens
aagagggttgagcag

SEQ ID NO: 1390566 - DNA, 15 bp, Homo sapiens
taagagggttgagca

SEQ ID NO: 1390567 - DNA, 15 bp, Homo sapiens
ttaagagggttgagc

SEQ ID NO: 1390568 - DNA, 15 bp, Homo sapiens
tttaagagggttgag

SEQ ID NO: 1390569 - DNA, 15 bp, Homo sapiens
gtttaagagggttga

SEQ ID NO: 1390570 - DNA, 15 bp, Homo sapiens
ggtttaagagggttg

SEQ ID NO: 1390571 - DNA, 15 bp, Homo sapiens
tggtttaagagggtt

SEQ ID NO: 1390572 - DNA, 15 bp, Homo sapiens
atggtttaagagggt

SEQ ID NO: 1390573 - DNA, 15 bp, Homo sapiens
aatggtttaagaggg

SEQ ID NO: 1390574 - DNA, 15 bp, Homo sapiens
aaatggtttaagagg

SEQ ID NO: 1390575 - DNA, 15 bp, Homo sapiens
aaaatggtttaagag

SEQ ID NO: 1390576 - DNA, 15 bp, Homo sapiens
aaaaatggtttaaga

SEQ ID NO: 1390577 - DNA, 15 bp, Homo sapiens
gaaaaatggtttaag

SEQ ID NO: 1390578 - DNA, 15 bp, Homo sapiens
ggaaaaatggtttaa

SEQ ID NO: 1390579 - DNA, 15 bp, Homo sapiens
aggaaaaatggttta

SEQ ID NO: 1390580 - DNA, 15 bp, Homo sapiens
aaggaaaaatggttt

SEQ ID NO: 1390581 - DNA, 15 bp, Homo sapiens
gaaggaaaaatggtt

SEQ ID NO: 1390582 - DNA, 15 bp, Homo sapiens
agaaggaaaaatggt

SEQ ID NO: 1390583 - DNA, 15 bp, Homo sapiens
cagaaggaaaaatgg

SEQ ID NO: 1390584 - DNA, 15 bp, Homo sapiens
tcagaaggaaaaatg

SEQ ID NO: 1390585 - DNA, 15 bp, Homo sapiens
ttcagaaggaaaaat

SEQ ID NO: 1390586 - DNA, 15 bp, Homo sapiens
attcagaaggaaaaa

SEQ ID NO: 1390587 - DNA, 15 bp, Homo sapiens
gattcagaaggaaaa

SEQ ID NO: 1390588 - DNA, 15 bp, Homo sapiens
agattcagaaggaaa

SEQ ID NO: 1390589 - DNA, 15 bp, Homo sapiens
gagattcagaaggaa

SEQ ID NO: 1390590 - DNA, 15 bp, Homo sapiens
tgagattcagaagga

SEQ ID NO: 1390591 - DNA, 15 bp, Homo sapiens
atgagattcagaagg

SEQ ID NO: 1390592 - DNA, 15 bp, Homo sapiens
catgagattcagaag

SEQ ID NO: 1390593 - DNA, 15 bp, Homo sapiens
gcatgagattcagaa

SEQ ID NO: 1390594 - DNA, 15 bp, Homo sapiens
ggcatgagattcaga

SEQ ID NO: 1390595 - DNA, 15 bp, Homo sapiens
tggcatgagattcag

SEQ ID NO: 1390596 - DNA, 15 bp, Homo sapiens
atggcatgagattca

SEQ ID NO: 1390597 - DNA, 15 bp, Homo sapiens
aatggcatgagattc

SEQ ID NO: 1390598 - DNA, 15 bp, Homo sapiens
caatggcatgagatt

SEQ ID NO: 1390599 - DNA, 15 bp, Homo sapiens
tcaatggcatgagat

SEQ ID NO: 1390600 - DNA, 15 bp, Homo sapiens
ttcaatggcatgaga

SEQ ID NO: 1390601 - DNA, 15 bp, Homo sapiens
attcaatggcatgag

SEQ ID NO: 1390602 - DNA, 15 bp, Homo sapiens
gattcaatggcatga

SEQ ID NO: 1390603 - DNA, 15 bp, Homo sapiens
tgattcaatggcatg

SEQ ID NO: 1390604 - DNA, 15 bp, Homo sapiens
atgattcaatggcat

SEQ ID NO: 1390605 - DNA, 15 bp, Homo sapiens
catgattcaatggca

SEQ ID NO: 1390606 - DNA, 15 bp, Homo sapiens
gcatgattcaatggc

SEQ ID NO: 1390607 - DNA, 15 bp, Homo sapiens
ggcatgattcaatgg

SEQ ID NO: 1390608 - DNA, 15 bp, Homo sapiens
aggcatgattcaatg

SEQ ID NO: 1390609 - DNA, 15 bp, Homo sapiens
gaggcatgattcaat

SEQ ID NO: 1390610 - DNA, 15 bp, Homo sapiens
agaggcatgattcaa

SEQ ID NO: 1390611 - DNA, 15 bp, Homo sapiens
aagaggcatgattca

SEQ ID NO: 1390612 - DNA, 15 bp, Homo sapiens
aaagaggcatgattc

SEQ ID NO: 1390613 - DNA, 15 bp, Homo sapiens
aaaagaggcatgatt

SEQ ID NO: 1390614 - DNA, 15 bp, Homo sapiens
gaaaagaggcatgat

SEQ ID NO: 1390615 - DNA, 15 bp, Homo sapiens
agaaaagaggcatga

SEQ ID NO: 1390616 - DNA, 15 bp, Homo sapiens
aagaaaagaggcatg

SEQ ID NO: 1390617 - DNA, 15 bp, Homo sapiens
aaagaaaagaggcat

SEQ ID NO: 1390618 - DNA, 15 bp, Homo sapiens
caaagaaaagaggca

SEQ ID NO: 1390619 - DNA, 15 bp, Homo sapiens
tcaaagaaaagaggc

SEQ ID NO: 1390620 - DNA, 15 bp, Homo sapiens
ttcaaagaaaagagg

SEQ ID NO: 1390621 - DNA, 15 bp, Homo sapiens
attcaaagaaaagag

SEQ ID NO: 1390622 - DNA, 15 bp, Homo sapiens
aattcaaagaaaaga

SEQ ID NO: 1390623 - DNA, 15 bp, Homo sapiens
aaattcaaagaaaag

SEQ ID NO: 1390624 - DNA, 15 bp, Homo sapiens
aaaattcaaagaaaa

SEQ ID NO: 1390625 - DNA, 15 bp, Homo sapiens
aaaaattcaaagaaa

SEQ ID NO: 1390626 - DNA, 15 bp, Homo sapiens
caaaaaattcaaaga

SEQ ID NO: 1390627 - DNA, 15 bp, Homo sapiens
tcaaaaaattcaaag

SEQ ID NO: 1390628 - DNA, 15 bp, Homo sapiens
ttcaaaaaattcaaa

SEQ ID NO: 1390629 - DNA, 15 bp, Homo sapiens
cttcaaaaaattcaa

SEQ ID NO: 1390630 - DNA, 15 bp, Homo sapiens
acttcaaaaaattca

SEQ ID NO: 1390631 - DNA, 15 bp, Homo sapiens
gacttcaaaaaattc

SEQ ID NO: 1390632 - DNA, 15 bp, Homo sapiens
ggacttcaaaaaatt

SEQ ID NO: 1390633 - DNA, 15 bp, Homo sapiens
tggacttcaaaaaat

SEQ ID NO: 1390634 - DNA, 15 bp, Homo sapiens
gtggacttcaaaaaa

SEQ ID NO: 1390635 - DNA, 15 bp, Homo sapiens
ggtggacttcaaaaa

SEQ ID NO: 1390636 - DNA, 15 bp, Homo sapiens
aggtggacttcaaaa

SEQ ID NO: 1390637 - DNA, 15 bp, Homo sapiens
aaggtggacttcaaa

SEQ ID NO: 1390638 - DNA, 15 bp, Homo sapiens
gaaggtggacttcaa

SEQ ID NO: 1390639 - DNA, 15 bp, Homo sapiens
ggaaggtggacttca

SEQ ID NO: 1390640 - DNA, 15 bp, Homo sapiens
gggaaggtggacttc

SEQ ID NO: 1390641 - DNA, 15 bp, Homo sapiens
ggggaaggtggactt

SEQ ID NO: 1390642 - DNA, 15 bp, Homo sapiens
aggggaaggtggact

SEQ ID NO: 1390643 - DNA, 15 bp, Homo sapiens
gaggggaaggtggac

SEQ ID NO: 1390644 - DNA, 15 bp, Homo sapiens
agaggggaaggtgga

SEQ ID NO: 1390645 - DNA, 15 bp, Homo sapiens
aagaggggaaggtgg

SEQ ID NO: 1390646 - DNA, 15 bp, Homo sapiens
aaagaggggaaggtg

SEQ ID NO: 1390647 - DNA, 15 bp, Homo sapiens
caaagaggggaaggt

SEQ ID NO: 1390648 - DNA, 15 bp, Homo sapiens
tcaaagaggggaagg

SEQ ID NO: 1390649 - DNA, 15 bp, Homo sapiens
atcaaagaggggaag

SEQ ID NO: 1390650 - DNA, 15 bp, Homo sapiens
aatcaaagaggggaa

SEQ ID NO: 1390651 - DNA, 15 bp, Homo sapiens
taatcaaagagggga

SEQ ID NO: 1390652 - DNA, 15 bp, Homo sapiens
gtaatcaaagagggg

SEQ ID NO: 1390653 - DNA, 15 bp, Homo sapiens
ggtaatcaaagaggg

SEQ ID NO: 1390654 - DNA, 15 bp, Homo sapiens
gggtaatcaaagagg

SEQ ID NO: 1390655 - DNA, 15 bp, Homo sapiens
agggtaatcaaagag

SEQ ID NO: 1390656 - DNA, 15 bp, Homo sapiens
cagggtaatcaaaga

SEQ ID NO: 1390657 - DNA, 15 bp, Homo sapiens
tcagggtaatcaaag

SEQ ID NO: 1390658 - DNA, 15 bp, Homo sapiens
ttcagggtaatcaaa

SEQ ID NO: 1390659 - DNA, 15 bp, Homo sapiens
gttcagggtaatcaa

SEQ ID NO: 1390660 - DNA, 15 bp, Homo sapiens
agttcagggtaatca

SEQ ID NO: 1390661 - DNA, 15 bp, Homo sapiens
gagttcagggtaatc

SEQ ID NO: 1390662 - DNA, 15 bp, Homo sapiens
ggagttcagggtaat

SEQ ID NO: 1390663 - DNA, 15 bp, Homo sapiens
cggagttcagggtaa

SEQ ID NO: 1390664 - DNA, 15 bp, Homo sapiens
tcggagttcagggta

SEQ ID NO: 1390665 - DNA, 15 bp, Homo sapiens
ttcggagttcagggt

SEQ ID NO: 1390666 - DNA, 15 bp, Homo sapiens
tttcggagttcaggg

SEQ ID NO: 1390667 - DNA, 15 bp, Homo sapiens
atttcggagttcagg

SEQ ID NO: 1390668 - DNA, 15 bp, Homo sapiens
catttcggagttcag

SEQ ID NO: 1390669 - DNA, 15 bp, Homo sapiens
tcatttcggagttca

SEQ ID NO: 1390670 - DNA, 15 bp, Homo sapiens
gtcatttcggagttc

SEQ ID NO: 1390671 - DNA, 15 bp, Homo sapiens
tgtcatttcggagtt

SEQ ID NO: 1390672 - DNA, 15 bp, Homo sapiens
atgtcatttcggagt

SEQ ID NO: 1390673 - DNA, 15 bp, Homo sapiens
tatgtcatttcggag

SEQ ID NO: 1390674 - DNA, 15 bp, Homo sapiens
ctatgtcatttcgga

SEQ ID NO: 1390675 - DNA, 15 bp, Homo sapiens
actatgtcatttcgg

SEQ ID NO: 1390676 - DNA, 15 bp, Homo sapiens
cactatgtcatttcg

SEQ ID NO: 1390677 - DNA, 15 bp, Homo sapiens
tcactatgtcatttc

SEQ ID NO: 1390678 - DNA, 15 bp, Homo sapiens
gtcactatgtcattt

SEQ ID NO: 1390679 - DNA, 15 bp, Homo sapiens
agtcactatgtcatt

SEQ ID NO: 1390680 - DNA, 15 bp, Homo sapiens
gagtcactatgtcat

SEQ ID NO: 1390681 - DNA, 15 bp, Homo sapiens
agagtcactatgtca

SEQ ID NO: 1390682 - DNA, 15 bp, Homo sapiens
gagagtcactatgtc

SEQ ID NO: 1390683 - DNA, 15 bp, Homo sapiens
agagagtcactatgt

SEQ ID NO: 1390684 - DNA, 15 bp, Homo sapiens
gagagagtcactatg

SEQ ID NO: 1390685 - DNA, 15 bp, Homo sapiens
agagagagtcactat

SEQ ID NO: 1390686 - DNA, 15 bp, Homo sapiens
cagagagagtcacta

SEQ ID NO: 1390687 - DNA, 15 bp, Homo sapiens
tcagagagagtcact

SEQ ID NO: 1390688 - DNA, 15 bp, Homo sapiens
ttcagagagagtcac

SEQ ID NO: 1390689 - DNA, 15 bp, Homo sapiens
attcagagagagtca

SEQ ID NO: 1390690 - DNA, 15 bp, Homo sapiens
cattcagagagagtc

SEQ ID NO: 1390691 - DNA, 15 bp, Homo sapiens
acattcagagagagt

SEQ ID NO: 1390692 - DNA, 15 bp, Homo sapiens
aacattcagagagag

SEQ ID NO: 1390693 - DNA, 15 bp, Homo sapiens
gaacattcagagaga

SEQ ID NO: 1390694 - DNA, 15 bp, Homo sapiens
ggaacattcagagag

SEQ ID NO: 1390695 - DNA, 15 bp, Homo sapiens
aggaacattcagaga

SEQ ID NO: 1390696 - DNA, 15 bp, Homo sapiens
taggaacattcagag

SEQ ID NO: 1390697 - DNA, 15 bp, Homo sapiens
ataggaacattcaga

SEQ ID NO: 1390698 - DNA, 15 bp, Homo sapiens
gataggaacattcag

SEQ ID NO: 1390699 - DNA, 15 bp, Homo sapiens
tgataggaacattca

SEQ ID NO: 1390700 - DNA, 15 bp, Homo sapiens
ttgataggaacattc

SEQ ID NO: 1390701 - DNA, 15 bp, Homo sapiens
attgataggaacatt

SEQ ID NO: 1390702 - DNA, 15 bp, Homo sapiens
aattgataggaacat

SEQ ID NO: 1390703 - DNA, 15 bp, Homo sapiens
aaattgataggaaca

SEQ ID NO: 1390704 - DNA, 15 bp, Homo sapiens
aaaattgataggaac

SEQ ID NO: 1390705 - DNA, 15 bp, Homo sapiens
gaaaattgataggaa

SEQ ID NO: 1390706 - DNA, 15 bp, Homo sapiens
tgaaaattgatagga

SEQ ID NO: 1390707 - DNA, 15 bp, Homo sapiens
atgaaaattgatagg

SEQ ID NO: 1390708 - DNA, 15 bp, Homo sapiens
aatgaaaattgatag

SEQ ID NO: 1390709 - DNA, 15 bp, Homo sapiens
aaatgaaaattgata

SEQ ID NO: 1390710 - DNA, 15 bp, Homo sapiens
aaaatgaaaattgat

SEQ ID NO: 1390711 - DNA, 15 bp, Homo sapiens
taaaatgaaaattga

SEQ ID NO: 1390712 - DNA, 15 bp, Homo sapiens
gtaaaatgaaaattg

SEQ ID NO: 1390713 - DNA, 15 bp, Homo sapiens
ggtaaaatgaaaatt

SEQ ID NO: 1390714 - DNA, 15 bp, Homo sapiens
tggtaaaatgaaaat

SEQ ID NO: 1390715 - DNA, 15 bp, Homo sapiens
ttggtaaaatgaaaa

SEQ ID NO: 1390716 - DNA, 15 bp, Homo sapiens
gttggtaaaatgaaa

SEQ ID NO: 1390717 - DNA, 15 bp, Homo sapiens
agttggtaaaatgaa

SEQ ID NO: 1390718 - DNA, 15 bp, Homo sapiens
tagttggtaaaatga

SEQ ID NO: 1390719 - DNA, 15 bp, Homo sapiens
atagttggtaaaatg

SEQ ID NO: 1390720 - DNA, 15 bp, Homo sapiens
aatagttggtaaaat

SEQ ID NO: 1390721 - DNA, 15 bp, Homo sapiens
aaatagttggtaaaa

SEQ ID NO: 1390722 - DNA, 15 bp, Homo sapiens
aaaatagttggtaaa

SEQ ID NO: 1390723 - DNA, 15 bp, Homo sapiens
aaaaatagttggtaa

SEQ ID NO: 1390724 - DNA, 15 bp, Homo sapiens
aaaaaatagttggta

SEQ ID NO: 1390725 - DNA, 15 bp, Homo sapiens
aaaaaaatagttggt

SEQ ID NO: 1390726 - DNA, 15 bp, Homo sapiens
gaaaaaaatagttgg

SEQ ID NO: 1390727 - DNA, 15 bp, Homo sapiens
agaaaaaaatagttg

SEQ ID NO: 1390728 - DNA, 15 bp, Homo sapiens
aagaaaaaaatagtt

SEQ ID NO: 1390729 - DNA, 15 bp, Homo sapiens
gaagaaaaaaatagt

SEQ ID NO: 1390730 - DNA, 15 bp, Homo sapiens
agaagaaaaaaatag

SEQ ID NO: 1390731 - DNA, 15 bp, Homo sapiens
aagaagaaaaaaata

SEQ ID NO: 1390732 - DNA, 15 bp, Homo sapiens
caagaagaaaaaaat

SEQ ID NO: 1390733 - DNA, 15 bp, Homo sapiens
ccaagaagaaaaaaa

SEQ ID NO: 1390734 - DNA, 15 bp, Homo sapiens
accaagaagaaaaaa

SEQ ID NO: 1390735 - DNA, 15 bp, Homo sapiens
gaccaagaagaaaaa

SEQ ID NO: 1390736 - DNA, 15 bp, Homo sapiens
tgaccaagaagaaaa

SEQ ID NO: 1390737 - DNA, 15 bp, Homo sapiens
ctgaccaagaagaaa

SEQ ID NO: 1390738 - DNA, 15 bp, Homo sapiens
tctgaccaagaagaa

SEQ ID NO: 1390739 - DNA, 15 bp, Homo sapiens
ttctgaccaagaaga

SEQ ID NO: 1390740 - DNA, 15 bp, Homo sapiens
attctgaccaagaag

SEQ ID NO: 1390741 - DNA, 15 bp, Homo sapiens
aattctgaccaagaa

SEQ ID NO: 1390742 - DNA, 15 bp, Homo sapiens
taattctgaccaaga

SEQ ID NO: 1390743 - DNA, 15 bp, Homo sapiens
ctaattctgaccaag

SEQ ID NO: 1390744 - DNA, 15 bp, Homo sapiens
cctaattctgaccaa

SEQ ID NO: 1390745 - DNA, 15 bp, Homo sapiens
acctaattctgacca

SEQ ID NO: 1390746 - DNA, 15 bp, Homo sapiens
gacctaattctgacc

SEQ ID NO: 1390747 - DNA, 15 bp, Homo sapiens
ggacctaattctgac

SEQ ID NO: 1390748 - DNA, 15 bp, Homo sapiens
tggacctaattctga

SEQ ID NO: 1390749 - DNA, 15 bp, Homo sapiens
ctggacctaattctg

SEQ ID NO: 1390750 - DNA, 15 bp, Homo sapiens
tctggacctaattct

SEQ ID NO: 1390751 - DNA, 15 bp, Homo sapiens
ctctggacctaattc

SEQ ID NO: 1390752 - DNA, 15 bp, Homo sapiens
actctggacctaatt

SEQ ID NO: 1390753 - DNA, 15 bp, Homo sapiens
aactctggacctaat

SEQ ID NO: 1390754 - DNA, 15 bp, Homo sapiens
caactctggacctaa

SEQ ID NO: 1390755 - DNA, 15 bp, Homo sapiens
tcaactctggaccta

SEQ ID NO: 1390756 - DNA, 15 bp, Homo sapiens
ttcaactctggacct

SEQ ID NO: 1390757 - DNA, 15 bp, Homo sapiens
cttcaactctggacc

SEQ ID NO: 1390758 - DNA, 15 bp, Homo sapiens
acttcaactctggac

SEQ ID NO: 1390759 - DNA, 15 bp, Homo sapiens
aacttcaactctgga

SEQ ID NO: 1390760 - DNA, 15 bp, Homo sapiens
gaacttcaactctgg

SEQ ID NO: 1390761 - DNA, 15 bp, Homo sapiens
ggaacttcaactctg

SEQ ID NO: 1390762 - DNA, 15 bp, Homo sapiens
gggaacttcaactct

SEQ ID NO: 1390763 - DNA, 15 bp, Homo sapiens
ggggaacttcaactc

SEQ ID NO: 1390764 - DNA, 15 bp, Homo sapiens
aggggaacttcaact

SEQ ID NO: 1390765 - DNA, 15 bp, Homo sapiens
taggggaacttcaac

SEQ ID NO: 1390766 - DNA, 15 bp, Homo sapiens
ttaggggaacttcaa

SEQ ID NO: 1390767 - DNA, 15 bp, Homo sapiens
attaggggaacttca

SEQ ID NO: 1390768 - DNA, 15 bp, Homo sapiens
aattaggggaacttc

SEQ ID NO: 1390769 - DNA, 15 bp, Homo sapiens
caattaggggaactt

SEQ ID NO: 1390770 - DNA, 15 bp, Homo sapiens
gcaattaggggaact

SEQ ID NO: 1390771 - DNA, 15 bp, Homo sapiens
agcaattaggggaac

SEQ ID NO: 1390772 - DNA, 15 bp, Homo sapiens
aagcaattaggggaa

SEQ ID NO: 1390773 - DNA, 15 bp, Homo sapiens
gaagcaattagggga

SEQ ID NO: 1390774 - DNA, 15 bp, Homo sapiens
ggaagcaattagggg

SEQ ID NO: 1390775 - DNA, 15 bp, Homo sapiens
aggaagcaattaggg

SEQ ID NO: 1390776 - DNA, 15 bp, Homo sapiens
gaggaagcaattagg

SEQ ID NO: 1390777 - DNA, 15 bp, Homo sapiens
agaggaagcaattag

SEQ ID NO: 1390778 - DNA, 15 bp, Homo sapiens
tagaggaagcaatta

SEQ ID NO: 1390779 - DNA, 15 bp, Homo sapiens
gtagaggaagcaatt

SEQ ID NO: 1390780 - DNA, 15 bp, Homo sapiens
ggtagaggaagcaat

SEQ ID NO: 1390781 - DNA, 15 bp, Homo sapiens
tggtagaggaagcaa

SEQ ID NO: 1390782 - DNA, 15 bp, Homo sapiens
atggtagaggaagca

SEQ ID NO: 1390783 - DNA, 15 bp, Homo sapiens
gatggtagaggaagc

SEQ ID NO: 1390784 - DNA, 15 bp, Homo sapiens
agatggtagaggaag

SEQ ID NO: 1390785 - DNA, 15 bp, Homo sapiens
cagatggtagaggaa

SEQ ID NO: 1390786 - DNA, 15 bp, Homo sapiens
ccagatggtagagga

SEQ ID NO: 1390787 - DNA, 15 bp, Homo sapiens
cccagatggtagagg

SEQ ID NO: 1390788 - DNA, 15 bp, Homo sapiens
tcccagatggtagag

SEQ ID NO: 1390789 - DNA, 15 bp, Homo sapiens
ctcccagatggtaga

SEQ ID NO: 1390790 - DNA, 15 bp, Homo sapiens
tctcccagatggtag

SEQ ID NO: 1390791 - DNA, 15 bp, Homo sapiens
atctcccagatggta

SEQ ID NO: 1390792 - DNA, 15 bp, Homo sapiens
tatctcccagatggt

SEQ ID NO: 1390793 - DNA, 15 bp, Homo sapiens
ttatctcccagatgg

SEQ ID NO: 1390794 - DNA, 15 bp, Homo sapiens
tttatctcccagatg

SEQ ID NO: 1390795 - DNA, 15 bp, Homo sapiens
ttttatctcccagat

SEQ ID NO: 1390796 - DNA, 15 bp, Homo sapiens
attttatctcccaga

SEQ ID NO: 1390797 - DNA, 15 bp, Homo sapiens
aattttatctcccag

SEQ ID NO: 1390798 - DNA, 15 bp, Homo sapiens
caattttatctccca

SEQ ID NO: 1390799 - DNA, 15 bp, Homo sapiens
acaattttatctccc

SEQ ID NO: 1390800 - DNA, 15 bp, Homo sapiens
aacaattttatctcc

SEQ ID NO: 1390801 - DNA, 15 bp, Homo sapiens
taacaattttatctc

SEQ ID NO: 1390802 - DNA, 15 bp, Homo sapiens
gtaacaattttatct

SEQ ID NO: 1390803 - DNA, 15 bp, Homo sapiens
ggtaacaattttatc

SEQ ID NO: 1390804 - DNA, 15 bp, Homo sapiens
tggtaacaattttat

SEQ ID NO: 1390805 - DNA, 15 bp, Homo sapiens
ttggtaacaatttta

SEQ ID NO: 1390806 - DNA, 15 bp, Homo sapiens
tttggtaacaatttt

SEQ ID NO: 1390807 - DNA, 15 bp, Homo sapiens
ctttggtaacaattt

SEQ ID NO: 1390808 - DNA, 15 bp, Homo sapiens
actttggtaacaatt

SEQ ID NO: 1390809 - DNA, 15 bp, Homo sapiens
tactttggtaacaat

SEQ ID NO: 1390810 - DNA, 15 bp, Homo sapiens
ttactttggtaacaa

SEQ ID NO: 1390811 - DNA, 15 bp, Homo sapiens
cttactttggtaaca

SEQ ID NO: 1390812 - DNA, 15 bp, Homo sapiens
acttactttggtaac

SEQ ID NO: 1390813 - DNA, 15 bp, Homo sapiens
gacttactttggtaa

SEQ ID NO: 1390814 - DNA, 15 bp, Homo sapiens
tgacttactttggta

SEQ ID NO: 1390815 - DNA, 15 bp, Homo sapiens
ttgacttactttggt

SEQ ID NO: 1390816 - DNA, 15 bp, Homo sapiens
cttgacttactttgg

SEQ ID NO: 1390817 - DNA, 15 bp, Homo sapiens
tcttgacttactttg

SEQ ID NO: 1390818 - DNA, 15 bp, Homo sapiens
ttcttgacttacttt

SEQ ID NO: 1390819 - DNA, 15 bp, Homo sapiens
gttcttgacttactt

SEQ ID NO: 1390820 - DNA, 15 bp, Homo sapiens
ggttcttgacttact

SEQ ID NO: 1390821 - DNA, 15 bp, Homo sapiens
aggttcttgacttac

SEQ ID NO: 1390822 - DNA, 15 bp, Homo sapiens
caggttcttgactta

SEQ ID NO: 1390823 - DNA, 15 bp, Homo sapiens
acaggttcttgactt

SEQ ID NO: 1390824 - DNA, 15 bp, Homo sapiens
aacaggttcttgact

SEQ ID NO: 1390825 - DNA, 15 bp, Homo sapiens
caacaggttcttgac

SEQ ID NO: 1390826 - DNA, 15 bp, Homo sapiens
ccaacaggttcttga

SEQ ID NO: 1390827 - DNA, 15 bp, Homo sapiens
cccaacaggttcttg

SEQ ID NO: 1390828 - DNA, 15 bp, Homo sapiens
acccaacaggttctt

SEQ ID NO: 1390829 - DNA, 15 bp, Homo sapiens
cacccaacaggttct

SEQ ID NO: 1390830 - DNA, 15 bp, Homo sapiens
gcacccaacaggttc

SEQ ID NO: 1390831 - DNA, 15 bp, Homo sapiens
ggcacccaacaggtt

SEQ ID NO: 1390832 - DNA, 15 bp, Homo sapiens
gggcacccaacaggt

SEQ ID NO: 1390833 - DNA, 15 bp, Homo sapiens
agggcacccaacagg

SEQ ID NO: 1390834 - DNA, 15 bp, Homo sapiens
tagggcacccaacag

SEQ ID NO: 1390835 - DNA, 15 bp, Homo sapiens
gtagggcacccaaca

SEQ ID NO: 1390836 - DNA, 15 bp, Homo sapiens
agtagggcacccaac

SEQ ID NO: 1390837 - DNA, 15 bp, Homo sapiens
aagtagggcacccaa

SEQ ID NO: 1390838 - DNA, 15 bp, Homo sapiens
gaagtagggcaccca

SEQ ID NO: 1390839 - DNA, 15 bp, Homo sapiens
agaagtagggcaccc

SEQ ID NO: 1390840 - DNA, 15 bp, Homo sapiens
tagaagtagggcacc

SEQ ID NO: 1390841 - DNA, 15 bp, Homo sapiens
ttagaagtagggcac

SEQ ID NO: 1390842 - DNA, 15 bp, Homo sapiens
gttagaagtagggca

SEQ ID NO: 1390843 - DNA, 15 bp, Homo sapiens
ggttagaagtagggc

SEQ ID NO: 1390844 - DNA, 15 bp, Homo sapiens
tggttagaagtaggg

SEQ ID NO: 1390845 - DNA, 15 bp, Homo sapiens
ttggttagaagtagg

SEQ ID NO: 1390846 - DNA, 15 bp, Homo sapiens
tttggttagaagtag

SEQ ID NO: 1390847 - DNA, 15 bp, Homo sapiens
atttggttagaagta

SEQ ID NO: 1390848 - DNA, 15 bp, Homo sapiens
catttggttagaagt

SEQ ID NO: 1390849 - DNA, 15 bp, Homo sapiens
tcatttggttagaag

SEQ ID NO: 1390850 - DNA, 15 bp, Homo sapiens
ctcatttggttagaa

SEQ ID NO: 1390851 - DNA, 15 bp, Homo sapiens
tctcatttggttaga

SEQ ID NO: 1390852 - DNA, 15 bp, Homo sapiens
gtctcatttggttag

SEQ ID NO: 1390853 - DNA, 15 bp, Homo sapiens
agtctcatttggtta

SEQ ID NO: 1390854 - DNA, 15 bp, Homo sapiens
aagtctcatttggtt

SEQ ID NO: 1390855 - DNA, 15 bp, Homo sapiens
gaagtctcatttggt

SEQ ID NO: 1390856 - DNA, 15 bp, Homo sapiens
agaagtctcatttgg

SEQ ID NO: 1390857 - DNA, 15 bp, Homo sapiens
tagaagtctcatttg

SEQ ID NO: 1390858 - DNA, 15 bp, Homo sapiens
ctagaagtctcattt

SEQ ID NO: 1390859 - DNA, 15 bp, Homo sapiens
actagaagtctcatt

SEQ ID NO: 1390860 - DNA, 15 bp, Homo sapiens
cactagaagtctcat

SEQ ID NO: 1390861 - DNA, 15 bp, Homo sapiens
ccactagaagtctca

SEQ ID NO: 1390862 - DNA, 15 bp, Homo sapiens
tccactagaagtctc

SEQ ID NO: 1390863 - DNA, 15 bp, Homo sapiens
atccactagaagtct

SEQ ID NO: 1390864 - DNA, 15 bp, Homo sapiens
tatccactagaagtc

SEQ ID NO: 1390865 - DNA, 15 bp, Homo sapiens
atatccactagaagt

SEQ ID NO: 1390866 - DNA, 15 bp, Homo sapiens
gatatccactagaag

SEQ ID NO: 1390867 - DNA, 15 bp, Homo sapiens
agatatccactagaa

SEQ ID NO: 1390868 - DNA, 15 bp, Homo sapiens
cagatatccactaga

SEQ ID NO: 1390869 - DNA, 15 bp, Homo sapiens
ccagatatccactag

SEQ ID NO: 1390870 - DNA, 15 bp, Homo sapiens
tccagatatccacta

SEQ ID NO: 1390871 - DNA, 15 bp, Homo sapiens
atccagatatccact

SEQ ID NO: 1390872 - DNA, 15 bp, Homo sapiens
catccagatatccac

SEQ ID NO: 1390873 - DNA, 15 bp, Homo sapiens
ccatccagatatcca

SEQ ID NO: 1390874 - DNA, 15 bp, Homo sapiens
accatccagatatcc

SEQ ID NO: 1390875 - DNA, 15 bp, Homo sapiens
aaccatccagatatc

SEQ ID NO: 1390876 - DNA, 15 bp, Homo sapiens
caaccatccagatat

SEQ ID NO: 1390877 - DNA, 15 bp, Homo sapiens
tcaaccatccagata

SEQ ID NO: 1390878 - DNA, 15 bp, Homo sapiens
gtcaaccatccagat

SEQ ID NO: 1390879 - DNA, 15 bp, Homo sapiens
taaaagcatgggtct

SEQ ID NO: 1390880 - DNA, 15 bp, Homo sapiens
ttaaaagcatgggtc

SEQ ID NO: 1390881 - DNA, 15 bp, Homo sapiens
gttaaaagcatgggt

SEQ ID NO: 1390882 - DNA, 15 bp, Homo sapiens
ggttaaaagcatggg

SEQ ID NO: 1390883 - DNA, 15 bp, Homo sapiens
tggttaaaagcatgg

SEQ ID NO: 1390884 - DNA, 15 bp, Homo sapiens
gtggttaaaagcatg

SEQ ID NO: 1390885 - DNA, 15 bp, Homo sapiens
ggtggttaaaagcat

SEQ ID NO: 1390886 - DNA, 15 bp, Homo sapiens
tggtggttaaaagca

SEQ ID NO: 1390887 - DNA, 15 bp, Homo sapiens
gtggtggttaaaagc

SEQ ID NO: 1390888 - DNA, 15 bp, Homo sapiens
tgtggtggttaaaag

SEQ ID NO: 1390889 - DNA, 15 bp, Homo sapiens
gtgtggtggttaaaa

SEQ ID NO: 1390890 - DNA, 15 bp, Homo sapiens
agtgtggtggttaaa

SEQ ID NO: 1390891 - DNA, 15 bp, Homo sapiens
aagtgtggtggttaa

SEQ ID NO: 1390892 - DNA, 15 bp, Homo sapiens
taagtgtggtggtta

SEQ ID NO: 1390893 - DNA, 15 bp, Homo sapiens
gtaagtgtggtggtt

SEQ ID NO: 1390894 - DNA, 15 bp, Homo sapiens
tgtaagtgtggtggt

SEQ ID NO: 1390895 - DNA, 15 bp, Homo sapiens
gtgtaagtgtggtgg

SEQ ID NO: 1390896 - DNA, 15 bp, Homo sapiens
agtgtaagtgtggtg

SEQ ID NO: 1390897 - DNA, 15 bp, Homo sapiens
gagtgtaagtgtggt

SEQ ID NO: 1390898 - DNA, 15 bp, Homo sapiens
agagtgtaagtgtgg

SEQ ID NO: 1390899 - DNA, 15 bp, Homo sapiens
aagagtgtaagtgtg

SEQ ID NO: 1390900 - DNA, 15 bp, Homo sapiens
aaagagtgtaagtgt

SEQ ID NO: 1390901 - DNA, 15 bp, Homo sapiens
gaaagagtgtaagtg

SEQ ID NO: 1390902 - DNA, 15 bp, Homo sapiens
agaaagagtgtaagt

SEQ ID NO: 1390903 - DNA, 15 bp, Homo sapiens
cagaaagagtgtaag

SEQ ID NO: 1390904 - DNA, 15 bp, Homo sapiens
gcagaaagagtgtaa

SEQ ID NO: 1390905 - DNA, 15 bp, Homo sapiens
agcagaaagagtgta

SEQ ID NO: 1390906 - DNA, 15 bp, Homo sapiens
cagcagaaagagtgt

SEQ ID NO: 1390907 - DNA, 15 bp, Homo sapiens
acagcagaaagagtg

SEQ ID NO: 1390908 - DNA, 15 bp, Homo sapiens
aacagcagaaagagt

SEQ ID NO: 1390909 - DNA, 15 bp, Homo sapiens
caacagcagaaagag

SEQ ID NO: 1390910 - DNA, 15 bp, Homo sapiens
ccaacagcagaaaga

SEQ ID NO: 1390911 - DNA, 15 bp, Homo sapiens
accaacagcagaaag

SEQ ID NO: 1390912 - DNA, 15 bp, Homo sapiens
taccaacagcagaaa

SEQ ID NO: 1390913 - DNA, 15 bp, Homo sapiens
ctaccaacagcagaa

SEQ ID NO: 1390914 - DNA, 15 bp, Homo sapiens
actaccaacagcaga

SEQ ID NO: 1390915 - DNA, 15 bp, Homo sapiens
tactaccaacagcag

SEQ ID NO: 1390916 - DNA, 15 bp, Homo sapiens
atactaccaacagca

SEQ ID NO: 1390917 - DNA, 15 bp, Homo sapiens
aatactaccaacagc

SEQ ID NO: 1390918 - DNA, 15 bp, Homo sapiens
aaatactaccaacag

SEQ ID NO: 1390919 - DNA, 15 bp, Homo sapiens
taaatactaccaaca

SEQ ID NO: 1390920 - DNA, 15 bp, Homo sapiens
ataaatactaccaac

SEQ ID NO: 1390921 - DNA, 15 bp, Homo sapiens
aataaatactaccaa

SEQ ID NO: 1390922 - DNA, 15 bp, Homo sapiens
aaataaatactacca

SEQ ID NO: 1390923 - DNA, 15 bp, Homo sapiens
taaataaatactacc

SEQ ID NO: 1390924 - DNA, 15 bp, Homo sapiens
ttaaataaatactac

SEQ ID NO: 1390925 - DNA, 15 bp, Homo sapiens
tttaaataaatacta

SEQ ID NO: 1390926 - DNA, 15 bp, Homo sapiens
atttaaataaatact

SEQ ID NO: 1390927 - DNA, 15 bp, Homo sapiens
aatttaaataaatac

SEQ ID NO: 1390928 - DNA, 15 bp, Homo sapiens
caatttaaataaata

SEQ ID NO: 1390929 - DNA, 15 bp, Homo sapiens
acaatttaaataaat

SEQ ID NO: 1390930 - DNA, 15 bp, Homo sapiens
aacaatttaaataaa

SEQ ID NO: 1390931 - DNA, 15 bp, Homo sapiens
aaacaatttaaataa

SEQ ID NO: 1390932 - DNA, 15 bp, Homo sapiens
aaaaacaatttaaat

SEQ ID NO: 1390933 - DNA, 15 bp, Homo sapiens
taaaaacaatttaaa

SEQ ID NO: 1390934 - DNA, 15 bp, Homo sapiens
ataaaaacaatttaa

SEQ ID NO: 1390935 - DNA, 15 bp, Homo sapiens
aataaaaacaattta

SEQ ID NO: 1390936 - DNA, 15 bp, Homo sapiens
taataaaaacaattt

SEQ ID NO: 1390937 - DNA, 15 bp, Homo sapiens
ttaataaaaacaatt

SEQ ID NO: 1390938 - DNA, 15 bp, Homo sapiens
attaataaaaacaat

SEQ ID NO: 1390939 - DNA, 15 bp, Homo sapiens
tattaataaaaacaa

SEQ ID NO: 1390940 - DNA, 15 bp, Homo sapiens
gtattaataaaaaca

SEQ ID NO: 1390941 - DNA, 15 bp, Homo sapiens
ggtattaataaaaac

SEQ ID NO: 1390942 - DNA, 15 bp, Homo sapiens
tggtattaataaaaa

SEQ ID NO: 1390943 - DNA, 15 bp, Homo sapiens
atggtattaataaaa

SEQ ID NO: 1390944 - DNA, 15 bp, Homo sapiens
aatggtattaataaa

SEQ ID NO: 1390945 - DNA, 15 bp, Homo sapiens
caatggtattaataa

SEQ ID NO: 1390946 - DNA, 15 bp, Homo sapiens
acaatggtattaata

SEQ ID NO: 1390947 - DNA, 15 bp, Homo sapiens
aacaatggtattaat

SEQ ID NO: 1390948 - DNA, 15 bp, Homo sapiens
gaacaatggtattaa

SEQ ID NO: 1390949 - DNA, 15 bp, Homo sapiens
agaacaatggtatta

SEQ ID NO: 1390950 - DNA, 15 bp, Homo sapiens
aagaacaatggtatt

SEQ ID NO: 1390951 - DNA, 15 bp, Homo sapiens
caagaacaatggtat

SEQ ID NO: 1390952 - DNA, 15 bp, Homo sapiens
acaagaacaatggta

SEQ ID NO: 1390953 - DNA, 15 bp, Homo sapiens
aacaagaacaatggt

SEQ ID NO: 1390954 - DNA, 15 bp, Homo sapiens
caacaagaacaatgg

SEQ ID NO: 1390955 - DNA, 15 bp, Homo sapiens
acaacaagaacaatg

SEQ ID NO: 1390956 - DNA, 15 bp, Homo sapiens
aacaacaagaacaat

SEQ ID NO: 1390957 - DNA, 15 bp, Homo sapiens
caacaacaagaacaa

SEQ ID NO: 1390958 - DNA, 15 bp, Homo sapiens
acaacaacaagaaca

SEQ ID NO: 1390959 - DNA, 15 bp, Homo sapiens
aacaacaacaagaac

SEQ ID NO: 1390960 - DNA, 15 bp, Homo sapiens
taacaacaacaagaa

SEQ ID NO: 1390961 - DNA, 15 bp, Homo sapiens
ataacaacaacaaga

SEQ ID NO: 1390962 - DNA, 15 bp, Homo sapiens
aataacaacaacaag

SEQ ID NO: 1390963 - DNA, 15 bp, Homo sapiens
taataacaacaacaa

SEQ ID NO: 1390964 - DNA, 15 bp, Homo sapiens
ctaataacaacaaca

SEQ ID NO: 1390965 - DNA, 15 bp, Homo sapiens
gctaataacaacaac

SEQ ID NO: 1390966 - DNA, 15 bp, Homo sapiens
ggctaataacaacaa

SEQ ID NO: 1390967 - DNA, 15 bp, Homo sapiens
tggctaataacaaca

SEQ ID NO: 1390968 - DNA, 15 bp, Homo sapiens
gtggctaataacaac

SEQ ID NO: 1390969 - DNA, 15 bp, Homo sapiens
tgtggctaataacaa

SEQ ID NO: 1390970 - DNA, 15 bp, Homo sapiens
ttgtggctaataaca

SEQ ID NO: 1390971 - DNA, 15 bp, Homo sapiens
attgtggctaataac

SEQ ID NO: 1390972 - DNA, 15 bp, Homo sapiens
gattgtggctaataa

SEQ ID NO: 1390973 - DNA, 15 bp, Homo sapiens
agattgtggctaata

SEQ ID NO: 1390974 - DNA, 15 bp, Homo sapiens
tagattgtggctaat

SEQ ID NO: 1390975 - DNA, 15 bp, Homo sapiens
atagattgtggctaa

SEQ ID NO: 1390976 - DNA, 15 bp, Homo sapiens
aatagattgtggcta

SEQ ID NO: 1390977 - DNA, 15 bp, Homo sapiens
caatagattgtggct

SEQ ID NO: 1390978 - DNA, 15 bp, Homo sapiens
tcaatagattgtggc

SEQ ID NO: 1390979 - DNA, 15 bp, Homo sapiens
ctcaatagattgtgg

SEQ ID NO: 1390980 - DNA, 15 bp, Homo sapiens
tctcaatagattgtg

SEQ ID NO: 1390981 - DNA, 15 bp, Homo sapiens
ttctcaatagattgt

SEQ ID NO: 1390982 - DNA, 15 bp, Homo sapiens
gttctcaatagattg

SEQ ID NO: 1390983 - DNA, 15 bp, Homo sapiens
ggttctcaatagatt

SEQ ID NO: 1390984 - DNA, 15 bp, Homo sapiens
aggttctcaatagat

SEQ ID NO: 1390985 - DNA, 15 bp, Homo sapiens
taggttctcaataga

SEQ ID NO: 1390986 - DNA, 15 bp, Homo sapiens
gtaggttctcaatag

SEQ ID NO: 1390987 - DNA, 15 bp, Homo sapiens
ggtaggttctcaata

SEQ ID NO: 1390988 - DNA, 15 bp, Homo sapiens
tggtaggttctcaat

SEQ ID NO: 1390989 - DNA, 15 bp, Homo sapiens
atggtaggttctcaa

SEQ ID NO: 1390990 - DNA, 15 bp, Homo sapiens
catggtaggttctca

SEQ ID NO: 1390991 - DNA, 15 bp, Homo sapiens
acatggtaggttctc

SEQ ID NO: 1390992 - DNA, 15 bp, Homo sapiens
cacatggtaggttct

SEQ ID NO: 1390993 - DNA, 15 bp, Homo sapiens
gcacatggtaggttc

SEQ ID NO: 1390994 - DNA, 15 bp, Homo sapiens
ggcacatggtaggtt

SEQ ID NO: 1390995 - DNA, 15 bp, Homo sapiens
tggcacatggtaggt

SEQ ID NO: 1390996 - DNA, 15 bp, Homo sapiens
ttggcacatggtagg

SEQ ID NO: 1390997 - DNA, 15 bp, Homo sapiens
cttggcacatggtag

SEQ ID NO: 1390998 - DNA, 15 bp, Homo sapiens
gcttggcacatggta

SEQ ID NO: 1390999 - DNA, 15 bp, Homo sapiens
tgcttggcacatggt

SEQ ID NO: 1391000 - DNA, 15 bp, Homo sapiens
atgcttggcacatgg

SEQ ID NO: 1391001 - DNA, 15 bp, Homo sapiens
catgcttggcacatg

SEQ ID NO: 1391002 - DNA, 15 bp, Homo sapiens
acatgcttggcacat

SEQ ID NO: 1391003 - DNA, 15 bp, Homo sapiens
aacatgcttggcaca

SEQ ID NO: 1391004 - DNA, 15 bp, Homo sapiens
taacatgcttggcac

SEQ ID NO: 1391005 - DNA, 15 bp, Homo sapiens
ataacatgcttggca

SEQ ID NO: 1391006 - DNA, 15 bp, Homo sapiens
aataacatgcttggc

SEQ ID NO: 1391007 - DNA, 15 bp, Homo sapiens
taataacatgcttgg

SEQ ID NO: 1391008 - DNA, 15 bp, Homo sapiens
ctaataacatgcttg

SEQ ID NO: 1391009 - DNA, 15 bp, Homo sapiens
gctaataacatgctt

SEQ ID NO: 1391010 - DNA, 15 bp, Homo sapiens
agctaataacatgct

SEQ ID NO: 1391011 - DNA, 15 bp, Homo sapiens
aagctaataacatgc

SEQ ID NO: 1391012 - DNA, 15 bp, Homo sapiens
caagctaataacatg

SEQ ID NO: 1391013 - DNA, 15 bp, Homo sapiens
ccaagctaataacat

SEQ ID NO: 1391014 - DNA, 15 bp, Homo sapiens
gccaagctaataaca

SEQ ID NO: 1391015 - DNA, 15 bp, Homo sapiens
tgccaagctaataac

SEQ ID NO: 1391016 - DNA, 15 bp, Homo sapiens
atgccaagctaataa

SEQ ID NO: 1391017 - DNA, 15 bp, Homo sapiens
aatgccaagctaata

SEQ ID NO: 1391018 - DNA, 15 bp, Homo sapiens
taatgccaagctaat

SEQ ID NO: 1391019 - DNA, 15 bp, Homo sapiens
ctaatgccaagctaa

SEQ ID NO: 1391020 - DNA, 15 bp, Homo sapiens
gctaatgccaagcta

SEQ ID NO: 1391021 - DNA, 15 bp, Homo sapiens
agctaatgccaagct

SEQ ID NO: 1391022 - DNA, 15 bp, Homo sapiens
aagctaatgccaagc

SEQ ID NO: 1391023 - DNA, 15 bp, Homo sapiens
aaagctaatgccaag

SEQ ID NO: 1391024 - DNA, 15 bp, Homo sapiens
taaagctaatgccaa

SEQ ID NO: 1391025 - DNA, 15 bp, Homo sapiens
gtaaagctaatgcca

SEQ ID NO: 1391026 - DNA, 15 bp, Homo sapiens
ggtaaagctaatgcc

SEQ ID NO: 1391027 - DNA, 15 bp, Homo sapiens
gggtaaagctaatgc

SEQ ID NO: 1391028 - DNA, 15 bp, Homo sapiens
agggtaaagctaatg

SEQ ID NO: 1391029 - DNA, 15 bp, Homo sapiens
gagggtaaagctaat

SEQ ID NO: 1391030 - DNA, 15 bp, Homo sapiens
tgagggtaaagctaa

SEQ ID NO: 1391031 - DNA, 15 bp, Homo sapiens
gtgagggtaaagcta

SEQ ID NO: 1391032 - DNA, 15 bp, Homo sapiens
tgtgagggtaaagct

SEQ ID NO: 1391033 - DNA, 15 bp, Homo sapiens
ttgtgagggtaaagc

SEQ ID NO: 1391034 - DNA, 15 bp, Homo sapiens
attgtgagggtaaag

SEQ ID NO: 1391035 - DNA, 15 bp, Homo sapiens
tattgtgagggtaaa

SEQ ID NO: 1391036 - DNA, 15 bp, Homo sapiens
ttattgtgagggtaa

SEQ ID NO: 1391037 - DNA, 15 bp, Homo sapiens
gttattgtgagggta

SEQ ID NO: 1391038 - DNA, 15 bp, Homo sapiens
ggttattgtgagggt

SEQ ID NO: 1391039 - DNA, 15 bp, Homo sapiens
gggttattgtgaggg

SEQ ID NO: 1391040 - DNA, 15 bp, Homo sapiens
agggttattgtgagg

SEQ ID NO: 1391041 - DNA, 15 bp, Homo sapiens
cagggttattgtgag

SEQ ID NO: 1391042 - DNA, 15 bp, Homo sapiens
gcagggttattgtga

SEQ ID NO: 1391043 - DNA, 15 bp, Homo sapiens
tgcagggttattgtg

SEQ ID NO: 1391044 - DNA, 15 bp, Homo sapiens
ttgcagggttattgt

SEQ ID NO: 1391045 - DNA, 15 bp, Homo sapiens
cttgcagggttattg

SEQ ID NO: 1391046 - DNA, 15 bp, Homo sapiens
ccttgcagggttatt

SEQ ID NO: 1391047 - DNA, 15 bp, Homo sapiens
tccttgcagggttat

SEQ ID NO: 1391048 - DNA, 15 bp, Homo sapiens
ctccttgcagggtta

SEQ ID NO: 1391049 - DNA, 15 bp, Homo sapiens
cctccttgcagggtt

SEQ ID NO: 1391050 - DNA, 15 bp, Homo sapiens
gcctccttgcagggt

SEQ ID NO: 1391051 - DNA, 15 bp, Homo sapiens
tgcctccttgcaggg

SEQ ID NO: 1391052 - DNA, 15 bp, Homo sapiens
ctgcctccttgcagg

SEQ ID NO: 1391053 - DNA, 15 bp, Homo sapiens
actgcctccttgcag

SEQ ID NO: 1391054 - DNA, 15 bp, Homo sapiens
aactgcctccttgca

SEQ ID NO: 1391055 - DNA, 15 bp, Homo sapiens
taactgcctccttgc

SEQ ID NO: 1391056 - DNA, 15 bp, Homo sapiens
ataactgcctccttg

SEQ ID NO: 1391057 - DNA, 15 bp, Homo sapiens
aataactgcctcctt

SEQ ID NO: 1391058 - DNA, 15 bp, Homo sapiens
gaataactgcctcct

SEQ ID NO: 1391059 - DNA, 15 bp, Homo sapiens
ggaataactgcctcc

SEQ ID NO: 1391060 - DNA, 15 bp, Homo sapiens
tggaataactgcctc

SEQ ID NO: 1391061 - DNA, 15 bp, Homo sapiens
atggaataactgcct

SEQ ID NO: 1391062 - DNA, 15 bp, Homo sapiens
aatggaataactgcc

SEQ ID NO: 1391063 - DNA, 15 bp, Homo sapiens
aaatggaataactgc

SEQ ID NO: 1391064 - DNA, 15 bp, Homo sapiens
aaaatggaataactg

SEQ ID NO: 1391065 - DNA, 15 bp, Homo sapiens
taaaatggaataact

SEQ ID NO: 1391066 - DNA, 15 bp, Homo sapiens
ctaaaatggaataac

SEQ ID NO: 1391067 - DNA, 15 bp, Homo sapiens
gctaaaatggaataa

SEQ ID NO: 1391068 - DNA, 15 bp, Homo sapiens
tgctaaaatggaata

SEQ ID NO: 1391069 - DNA, 15 bp, Homo sapiens
ctgctaaaatggaat

SEQ ID NO: 1391070 - DNA, 15 bp, Homo sapiens
tctgctaaaatggaa

SEQ ID NO: 1391071 - DNA, 15 bp, Homo sapiens
atctgctaaaatgga

SEQ ID NO: 1391072 - DNA, 15 bp, Homo sapiens
catctgctaaaatgg

SEQ ID NO: 1391073 - DNA, 15 bp, Homo sapiens
gcatctgctaaaatg

SEQ ID NO: 1391074 - DNA, 15 bp, Homo sapiens
tgcatctgctaaaat

SEQ ID NO: 1391075 - DNA, 15 bp, Homo sapiens
ctgcatctgctaaaa

SEQ ID NO: 1391076 - DNA, 15 bp, Homo sapiens
tctgcatctgctaaa

SEQ ID NO: 1391077 - DNA, 15 bp, Homo sapiens
ttctgcatctgctaa

SEQ ID NO: 1391078 - DNA, 15 bp, Homo sapiens
tttctgcatctgcta

SEQ ID NO: 1391079 - DNA, 15 bp, Homo sapiens
gtttctgcatctgct

SEQ ID NO: 1391080 - DNA, 15 bp, Homo sapiens
agtttctgcatctgc

SEQ ID NO: 1391081 - DNA, 15 bp, Homo sapiens
cagtttctgcatctg

SEQ ID NO: 1391082 - DNA, 15 bp, Homo sapiens
tcagtttctgcatct

SEQ ID NO: 1391083 - DNA, 15 bp, Homo sapiens
ctcagtttctgcatc

SEQ ID NO: 1391084 - DNA, 15 bp, Homo sapiens
cctcagtttctgcat

SEQ ID NO: 1391085 - DNA, 15 bp, Homo sapiens
gcctcagtttctgca

SEQ ID NO: 1391086 - DNA, 15 bp, Homo sapiens
agcctcagtttctgc

SEQ ID NO: 1391087 - DNA, 15 bp, Homo sapiens
aagcctcagtttctg

SEQ ID NO: 1391088 - DNA, 15 bp, Homo sapiens
aaagcctcagtttct

SEQ ID NO: 1391089 - DNA, 15 bp, Homo sapiens
caaagcctcagtttc

SEQ ID NO: 1391090 - DNA, 15 bp, Homo sapiens
acaaagcctcagttt

SEQ ID NO: 1391091 - DNA, 15 bp, Homo sapiens
cacaaagcctcagtt

SEQ ID NO: 1391092 - DNA, 15 bp, Homo sapiens
tcacaaagcctcagt

SEQ ID NO: 1391093 - DNA, 15 bp, Homo sapiens
ctcacaaagcctcag

SEQ ID NO: 1391094 - DNA, 15 bp, Homo sapiens
tctcacaaagcctca

SEQ ID NO: 1391095 - DNA, 15 bp, Homo sapiens
atctcacaaagcctc

SEQ ID NO: 1391096 - DNA, 15 bp, Homo sapiens
aatctcacaaagcct

SEQ ID NO: 1391097 - DNA, 15 bp, Homo sapiens
taatctcacaaagcc

SEQ ID NO: 1391098 - DNA, 15 bp, Homo sapiens
ttaatctcacaaagc

SEQ ID NO: 1391099 - DNA, 15 bp, Homo sapiens
tttaatctcacaaag

SEQ ID NO: 1391100 - DNA, 15 bp, Homo sapiens
atttaatctcacaaa

SEQ ID NO: 1391101 - DNA, 15 bp, Homo sapiens
tatttaatctcacaa

SEQ ID NO: 1391102 - DNA, 15 bp, Homo sapiens
ttatttaatctcaca

SEQ ID NO: 1391103 - DNA, 15 bp, Homo sapiens
gttatttaatctcac

SEQ ID NO: 1391104 - DNA, 15 bp, Homo sapiens
agttatttaatctca

SEQ ID NO: 1391105 - DNA, 15 bp, Homo sapiens
aagttatttaatctc

SEQ ID NO: 1391106 - DNA, 15 bp, Homo sapiens
taagttatttaatct

SEQ ID NO: 1391107 - DNA, 15 bp, Homo sapiens
gtaagttatttaatc

SEQ ID NO: 1391108 - DNA, 15 bp, Homo sapiens
tgtaagttatttaat

SEQ ID NO: 1391109 - DNA, 15 bp, Homo sapiens
ttgtaagttatttaa

SEQ ID NO: 1391110 - DNA, 15 bp, Homo sapiens
cttgtaagttattta

SEQ ID NO: 1391111 - DNA, 15 bp, Homo sapiens
tcttgtaagttattt

SEQ ID NO: 1391112 - DNA, 15 bp, Homo sapiens
gtcttgtaagttatt

SEQ ID NO: 1391113 - DNA, 15 bp, Homo sapiens
ggtcttgtaagttat

SEQ ID NO: 1391114 - DNA, 15 bp, Homo sapiens
tggtcttgtaagtta

SEQ ID NO: 1391115 - DNA, 15 bp, Homo sapiens
gtggtcttgtaagtt

SEQ ID NO: 1391116 - DNA, 15 bp, Homo sapiens
tgtggtcttgtaagt

SEQ ID NO: 1391117 - DNA, 15 bp, Homo sapiens
atgtggtcttgtaag

SEQ ID NO: 1391118 - DNA, 15 bp, Homo sapiens
aatgtggtcttgtaa

SEQ ID NO: 1391119 - DNA, 15 bp, Homo sapiens
gaatgtggtcttgta

SEQ ID NO: 1391120 - DNA, 15 bp, Homo sapiens
agaatgtggtcttgt

SEQ ID NO: 1391121 - DNA, 15 bp, Homo sapiens
aagaatgtggtcttg

SEQ ID NO: 1391122 - DNA, 15 bp, Homo sapiens
taagaatgtggtctt

SEQ ID NO: 1391123 - DNA, 15 bp, Homo sapiens
ctaagaatgtggtct

SEQ ID NO: 1391124 - DNA, 15 bp, Homo sapiens
tctaagaatgtggtc

SEQ ID NO: 1391125 - DNA, 15 bp, Homo sapiens
ttctaagaatgtggt

SEQ ID NO: 1391126 - DNA, 15 bp, Homo sapiens
tttctaagaatgtgg

SEQ ID NO: 1391127 - DNA, 15 bp, Homo sapiens
ttttctaagaatgtg

SEQ ID NO: 1391128 - DNA, 15 bp, Homo sapiens
gttttctaagaatgt

SEQ ID NO: 1391129 - DNA, 15 bp, Homo sapiens
agttttctaagaatg

SEQ ID NO: 1391130 - DNA, 15 bp, Homo sapiens
cagttttctaagaat

SEQ ID NO: 1391131 - DNA, 15 bp, Homo sapiens
gcagttttctaagaa

SEQ ID NO: 1391132 - DNA, 15 bp, Homo sapiens
tgcagttttctaaga

SEQ ID NO: 1391133 - DNA, 15 bp, Homo sapiens
ctgcagttttctaag

SEQ ID NO: 1391134 - DNA, 15 bp, Homo sapiens
tctgcagttttctaa

SEQ ID NO: 1391135 - DNA, 15 bp, Homo sapiens
ctctgcagttttcta

SEQ ID NO: 1391136 - DNA, 15 bp, Homo sapiens
gctctgcagttttct

SEQ ID NO: 1391137 - DNA, 15 bp, Homo sapiens
agctctgcagttttc

SEQ ID NO: 1391138 - DNA, 15 bp, Homo sapiens
cagctctgcagtttt

SEQ ID NO: 1391139 - DNA, 15 bp, Homo sapiens
ccagctctgcagttt

SEQ ID NO: 1391140 - DNA, 15 bp, Homo sapiens
cccagctctgcagtt

SEQ ID NO: 1391141 - DNA, 15 bp, Homo sapiens
tcccagctctgcagt

SEQ ID NO: 1391142 - DNA, 15 bp, Homo sapiens
atcccagctctgcag

SEQ ID NO: 1391143 - DNA, 15 bp, Homo sapiens
aatcccagctctgca

SEQ ID NO: 1391144 - DNA, 15 bp, Homo sapiens
gaatcccagctctgc

SEQ ID NO: 1391145 - DNA, 15 bp, Homo sapiens
tgaatcccagctctg

SEQ ID NO: 1391146 - DNA, 15 bp, Homo sapiens
ttgaatcccagctct

SEQ ID NO: 1391147 - DNA, 15 bp, Homo sapiens
tttgaatcccagctc

SEQ ID NO: 1391148 - DNA, 15 bp, Homo sapiens
atttgaatcccagct

SEQ ID NO: 1391149 - DNA, 15 bp, Homo sapiens
gatttgaatcccagc

SEQ ID NO: 1391150 - DNA, 15 bp, Homo sapiens
ggatttgaatcccag

SEQ ID NO: 1391151 - DNA, 15 bp, Homo sapiens
tggatttgaatccca

SEQ ID NO: 1391152 - DNA, 15 bp, Homo sapiens
ctggatttgaatccc

SEQ ID NO: 1391153 - DNA, 15 bp, Homo sapiens
tctggatttgaatcc

SEQ ID NO: 1391154 - DNA, 15 bp, Homo sapiens
atctggatttgaatc

SEQ ID NO: 1391155 - DNA, 15 bp, Homo sapiens
gatctggatttgaat

SEQ ID NO: 1391156 - DNA, 15 bp, Homo sapiens
ggatctggatttgaa

SEQ ID NO: 1391157 - DNA, 15 bp, Homo sapiens
tggatctggatttga

SEQ ID NO: 1391158 - DNA, 15 bp, Homo sapiens
ctggatctggatttg

SEQ ID NO: 1391159 - DNA, 15 bp, Homo sapiens
gctggatctggattt

SEQ ID NO: 1391160 - DNA, 15 bp, Homo sapiens
agctggatctggatt

SEQ ID NO: 1391161 - DNA, 15 bp, Homo sapiens
cagctggatctggat

SEQ ID NO: 1391162 - DNA, 15 bp, Homo sapiens
ccagctggatctgga

SEQ ID NO: 1391163 - DNA, 15 bp, Homo sapiens
gccagctggatctgg

SEQ ID NO: 1391164 - DNA, 15 bp, Homo sapiens
agccagctggatctg

SEQ ID NO: 1391165 - DNA, 15 bp, Homo sapiens
gagccagctggatct

SEQ ID NO: 1391166 - DNA, 15 bp, Homo sapiens
agagccagctggatc

SEQ ID NO: 1391167 - DNA, 15 bp, Homo sapiens
tagagccagctggat

SEQ ID NO: 1391168 - DNA, 15 bp, Homo sapiens
ttagagccagctgga

SEQ ID NO: 1391169 - DNA, 15 bp, Homo sapiens
tttagagccagctgg

SEQ ID NO: 1391170 - DNA, 15 bp, Homo sapiens
atttagagccagctg

SEQ ID NO: 1391171 - DNA, 15 bp, Homo sapiens
gatttagagccagct

SEQ ID NO: 1391172 - DNA, 15 bp, Homo sapiens
ggatttagagccagc

SEQ ID NO: 1391173 - DNA, 15 bp, Homo sapiens
gggatttagagccag

SEQ ID NO: 1391174 - DNA, 15 bp, Homo sapiens
tgggatttagagcca

SEQ ID NO: 1391175 - DNA, 15 bp, Homo sapiens
atgggatttagagcc

SEQ ID NO: 1391176 - DNA, 15 bp, Homo sapiens
catgggatttagagc

SEQ ID NO: 1391177 - DNA, 15 bp, Homo sapiens
acatgggatttagag

SEQ ID NO: 1391178 - DNA, 15 bp, Homo sapiens
cacatgggatttaga

SEQ ID NO: 1391179 - DNA, 15 bp, Homo sapiens
acacatgggatttag

SEQ ID NO: 1391180 - DNA, 15 bp, Homo sapiens
aacacatgggattta

SEQ ID NO: 1391181 - DNA, 15 bp, Homo sapiens
aaacacatgggattt

SEQ ID NO: 1391182 - DNA, 15 bp, Homo sapiens
aaaacacatgggatt

SEQ ID NO: 1391183 - DNA, 15 bp, Homo sapiens
caaaacacatgggat

SEQ ID NO: 1391184 - DNA, 15 bp, Homo sapiens
gcaaaacacatggga

SEQ ID NO: 1391185 - DNA, 15 bp, Homo sapiens
tgcaaaacacatggg

SEQ ID NO: 1391186 - DNA, 15 bp, Homo sapiens
atgcaaaacacatgg

SEQ ID NO: 1391187 - DNA, 15 bp, Homo sapiens
tatgcaaaacacatg

SEQ ID NO: 1391188 - DNA, 15 bp, Homo sapiens
ttatgcaaaacacat

SEQ ID NO: 1391189 - DNA, 15 bp, Homo sapiens
tttatgcaaaacaca

SEQ ID NO: 1391190 - DNA, 15 bp, Homo sapiens
atttatgcaaaacac

SEQ ID NO: 1391191 - DNA, 15 bp, Homo sapiens
catttatgcaaaaca

SEQ ID NO: 1391192 - DNA, 15 bp, Homo sapiens
acatttatgcaaaac

SEQ ID NO: 1391193 - DNA, 15 bp, Homo sapiens
tacatttatgcaaaa

SEQ ID NO: 1391194 - DNA, 15 bp, Homo sapiens
ttacatttatgcaaa

SEQ ID NO: 1391195 - DNA, 15 bp, Homo sapiens
cttacatttatgcaa

SEQ ID NO: 1391196 - DNA, 15 bp, Homo sapiens
gcttacatttatgca

SEQ ID NO: 1391197 - DNA, 15 bp, Homo sapiens
ggcttacatttatgc

SEQ ID NO: 1391198 - DNA, 15 bp, Homo sapiens
aggcttacatttatg

SEQ ID NO: 1391199 - DNA, 15 bp, Homo sapiens
gaggcttacatttat

SEQ ID NO: 1391200 - DNA, 15 bp, Homo sapiens
ggaggcttacattta

SEQ ID NO: 1391201 - DNA, 15 bp, Homo sapiens
gggaggcttacattt

SEQ ID NO: 1391202 - DNA, 15 bp, Homo sapiens
tgggaggcttacatt

SEQ ID NO: 1391203 - DNA, 15 bp, Homo sapiens
ttgggaggcttacat

SEQ ID NO: 1391204 - DNA, 15 bp, Homo sapiens
tttgggaggcttaca

SEQ ID NO: 1391205 - DNA, 15 bp, Homo sapiens
ttttgggaggcttac

SEQ ID NO: 1391206 - DNA, 15 bp, Homo sapiens
cttttgggaggctta

SEQ ID NO: 1391207 - DNA, 15 bp, Homo sapiens
acttttgggaggctt

SEQ ID NO: 1391208 - DNA, 15 bp, Homo sapiens
cacttttgggaggct

SEQ ID NO: 1391209 - DNA, 15 bp, Homo sapiens
tcacttttgggaggc

SEQ ID NO: 1391210 - DNA, 15 bp, Homo sapiens
atcacttttgggagg

SEQ ID NO: 1391211 - DNA, 15 bp, Homo sapiens
catcacttttgggag

SEQ ID NO: 1391212 - DNA, 15 bp, Homo sapiens
acatcacttttggga

SEQ ID NO: 1391213 - DNA, 15 bp, Homo sapiens
cacatcacttttggg

SEQ ID NO: 1391214 - DNA, 15 bp, Homo sapiens
gcacatcacttttgg

SEQ ID NO: 1391215 - DNA, 15 bp, Homo sapiens
agcacatcacttttg

SEQ ID NO: 1391216 - DNA, 15 bp, Homo sapiens
cagcacatcactttt

SEQ ID NO: 1391217 - DNA, 15 bp, Homo sapiens
ccagcacatcacttt

SEQ ID NO: 1391218 - DNA, 15 bp, Homo sapiens
cccagcacatcactt

SEQ ID NO: 1391219 - DNA, 15 bp, Homo sapiens
gcccagcacatcact

SEQ ID NO: 1391220 - DNA, 15 bp, Homo sapiens
ggcccagcacatcac

SEQ ID NO: 1391221 - DNA, 15 bp, Homo sapiens
aggcccagcacatca

SEQ ID NO: 1391222 - DNA, 15 bp, Homo sapiens
gaggcccagcacatc

SEQ ID NO: 1391223 - DNA, 15 bp, Homo sapiens
agaggcccagcacat

SEQ ID NO: 1391224 - DNA, 15 bp, Homo sapiens
gagaggcccagcaca

SEQ ID NO: 1391225 - DNA, 15 bp, Homo sapiens
agagaggcccagcac

SEQ ID NO: 1391226 - DNA, 15 bp, Homo sapiens
gagagaggcccagca

SEQ ID NO: 1391227 - DNA, 15 bp, Homo sapiens
tgagagaggcccagc

SEQ ID NO: 1391228 - DNA, 15 bp, Homo sapiens
gtgagagaggcccag

SEQ ID NO: 1391229 - DNA, 15 bp, Homo sapiens
agtgagagaggccca

SEQ ID NO: 1391230 - DNA, 15 bp, Homo sapiens
gagtgagagaggccc

SEQ ID NO: 1391231 - DNA, 15 bp, Homo sapiens
ggagtgagagaggcc

SEQ ID NO: 1391232 - DNA, 15 bp, Homo sapiens
aggagtgagagaggc

SEQ ID NO: 1391233 - DNA, 15 bp, Homo sapiens
gaggagtgagagagg

SEQ ID NO: 1391234 - DNA, 15 bp, Homo sapiens
agaggagtgagagag

SEQ ID NO: 1391235 - DNA, 15 bp, Homo sapiens
aagaggagtgagaga

SEQ ID NO: 1391236 - DNA, 15 bp, Homo sapiens
taagaggagtgagag

SEQ ID NO: 1391237 - DNA, 15 bp, Homo sapiens
gtaagaggagtgaga

SEQ ID NO: 1391238 - DNA, 15 bp, Homo sapiens
tgtaagaggagtgag

SEQ ID NO: 1391239 - DNA, 15 bp, Homo sapiens
ttgtaagaggagtga

SEQ ID NO: 1391240 - DNA, 15 bp, Homo sapiens
tttgtaagaggagtg

SEQ ID NO: 1391241 - DNA, 15 bp, Homo sapiens
ctttgtaagaggagt

SEQ ID NO: 1391242 - DNA, 15 bp, Homo sapiens
cctttgtaagaggag

SEQ ID NO: 1391243 - DNA, 15 bp, Homo sapiens
gcctttgtaagagga

SEQ ID NO: 1391244 - DNA, 15 bp, Homo sapiens
tgcctttgtaagagg

SEQ ID NO: 1391245 - DNA, 15 bp, Homo sapiens
atgcctttgtaagag

SEQ ID NO: 1391246 - DNA, 15 bp, Homo sapiens
catgcctttgtaaga

SEQ ID NO: 1391247 - DNA, 15 bp, Homo sapiens
tcatgcctttgtaag

SEQ ID NO: 1391248 - DNA, 15 bp, Homo sapiens
gtcatgcctttgtaa

SEQ ID NO: 1391249 - DNA, 15 bp, Homo sapiens
agtcatgcctttgta

SEQ ID NO: 1391250 - DNA, 15 bp, Homo sapiens
aagtcatgcctttgt

SEQ ID NO: 1391251 - DNA, 15 bp, Homo sapiens
taagtcatgcctttg

SEQ ID NO: 1391252 - DNA, 15 bp, Homo sapiens
ctaagtcatgccttt

SEQ ID NO: 1391253 - DNA, 15 bp, Homo sapiens
cctaagtcatgcctt

SEQ ID NO: 1391254 - DNA, 15 bp, Homo sapiens
acctaagtcatgcct

SEQ ID NO: 1391255 - DNA, 15 bp, Homo sapiens
cacctaagtcatgcc

SEQ ID NO: 1391256 - DNA, 15 bp, Homo sapiens
ccacctaagtcatgc

SEQ ID NO: 1391257 - DNA, 15 bp, Homo sapiens
cccacctaagtcatg

SEQ ID NO: 1391258 - DNA, 15 bp, Homo sapiens
gcccacctaagtcat

SEQ ID NO: 1391259 - DNA, 15 bp, Homo sapiens
agcccacctaagtca

SEQ ID NO: 1391260 - DNA, 15 bp, Homo sapiens
cagcccacctaagtc

SEQ ID NO: 1391261 - DNA, 15 bp, Homo sapiens
tcagcccacctaagt

SEQ ID NO: 1391262 - DNA, 15 bp, Homo sapiens
ttcagcccacctaag

SEQ ID NO: 1391263 - DNA, 15 bp, Homo sapiens
cttcagcccacctaa

SEQ ID NO: 1391264 - DNA, 15 bp, Homo sapiens
gcttcagcccaccta

SEQ ID NO: 1391265 - DNA, 15 bp, Homo sapiens
ggcttcagcccacct

SEQ ID NO: 1391266 - DNA, 15 bp, Homo sapiens
tggcttcagcccacc

SEQ ID NO: 1391267 - DNA, 15 bp, Homo sapiens
atggcttcagcccac

SEQ ID NO: 1391268 - DNA, 15 bp, Homo sapiens
catggcttcagccca

SEQ ID NO: 1391269 - DNA, 15 bp, Homo sapiens
ccatggcttcagccc

SEQ ID NO: 1391270 - DNA, 15 bp, Homo sapiens
accatggcttcagcc

SEQ ID NO: 1391271 - DNA, 15 bp, Homo sapiens
caccatggcttcagc

SEQ ID NO: 1391272 - DNA, 15 bp, Homo sapiens
gcaccatggcttcag

SEQ ID NO: 1391273 - DNA, 15 bp, Homo sapiens
tgcaccatggcttca

SEQ ID NO: 1391274 - DNA, 15 bp, Homo sapiens
ctgcaccatggcttc

SEQ ID NO: 1391275 - DNA, 15 bp, Homo sapiens
tctgcaccatggctt

SEQ ID NO: 1391276 - DNA, 15 bp, Homo sapiens
ttctgcaccatggct

SEQ ID NO: 1391277 - DNA, 15 bp, Homo sapiens
attctgcaccatggc

SEQ ID NO: 1391278 - DNA, 15 bp, Homo sapiens
aattctgcaccatgg

SEQ ID NO: 1391279 - DNA, 15 bp, Homo sapiens
aaattctgcaccatg

SEQ ID NO: 1391280 - DNA, 15 bp, Homo sapiens
gaaattctgcaccat

SEQ ID NO: 1391281 - DNA, 15 bp, Homo sapiens
tgaaattctgcacca

SEQ ID NO: 1391282 - DNA, 15 bp, Homo sapiens
ctgaaattctgcacc

SEQ ID NO: 1391283 - DNA, 15 bp, Homo sapiens
actgaaattctgcac

SEQ ID NO: 1391284 - DNA, 15 bp, Homo sapiens
cactgaaattctgca

SEQ ID NO: 1391285 - DNA, 15 bp, Homo sapiens
tcactgaaattctgc

SEQ ID NO: 1391286 - DNA, 15 bp, Homo sapiens
gtcactgaaattctg

SEQ ID NO: 1391287 - DNA, 15 bp, Homo sapiens
cgtcactgaaattct

SEQ ID NO: 1391288 - DNA, 15 bp, Homo sapiens
gcgtcactgaaattc

SEQ ID NO: 1391289 - DNA, 15 bp, Homo sapiens
ggcgtcactgaaatt

SEQ ID NO: 1391290 - DNA, 15 bp, Homo sapiens
aggcgtcactgaaat

SEQ ID NO: 1391291 - DNA, 15 bp, Homo sapiens
gaggcgtcactgaaa

SEQ ID NO: 1391292 - DNA, 15 bp, Homo sapiens
tgaggcgtcactgaa

SEQ ID NO: 1391293 - DNA, 15 bp, Homo sapiens
atgaggcgtcactga

SEQ ID NO: 1391294 - DNA, 15 bp, Homo sapiens
aatgaggcgtcactg

SEQ ID NO: 1391295 - DNA, 15 bp, Homo sapiens
caatgaggcgtcact

SEQ ID NO: 1391296 - DNA, 15 bp, Homo sapiens
acaatgaggcgtcac

SEQ ID NO: 1391297 - DNA, 15 bp, Homo sapiens
gacaatgaggcgtca

SEQ ID NO: 1391298 - DNA, 15 bp, Homo sapiens
agacaatgaggcgtc

SEQ ID NO: 1391299 - DNA, 15 bp, Homo sapiens
aagacaatgaggcgt

SEQ ID NO: 1391300 - DNA, 15 bp, Homo sapiens
caagacaatgaggcg

SEQ ID NO: 1391301 - DNA, 15 bp, Homo sapiens
gcaagacaatgaggc

SEQ ID NO: 1391302 - DNA, 15 bp, Homo sapiens
tgcaagacaatgagg

SEQ ID NO: 1391303 - DNA, 15 bp, Homo sapiens
ttgcaagacaatgag

SEQ ID NO: 1391304 - DNA, 15 bp, Homo sapiens
cttgcaagacaatga

SEQ ID NO: 1391305 - DNA, 15 bp, Homo sapiens
tcttgcaagacaatg

SEQ ID NO: 1391306 - DNA, 15 bp, Homo sapiens
atcttgcaagacaat

SEQ ID NO: 1391307 - DNA, 15 bp, Homo sapiens
aatcttgcaagacaa

SEQ ID NO: 1391308 - DNA, 15 bp, Homo sapiens
gaatcttgcaagaca

SEQ ID NO: 1391309 - DNA, 15 bp, Homo sapiens
ggaatcttgcaagac

SEQ ID NO: 1391310 - DNA, 15 bp, Homo sapiens
aggaatcttgcaaga

SEQ ID NO: 1391311 - DNA, 15 bp, Homo sapiens
aaggaatcttgcaag

SEQ ID NO: 1391312 - DNA, 15 bp, Homo sapiens
aaaggaatcttgcaa

SEQ ID NO: 1391313 - DNA, 15 bp, Homo sapiens
gaaaggaatcttgca

SEQ ID NO: 1391314 - DNA, 15 bp, Homo sapiens
agaaaggaatcttgc

SEQ ID NO: 1391315 - DNA, 15 bp, Homo sapiens
tagaaaggaatcttg

SEQ ID NO: 1391316 - DNA, 15 bp, Homo sapiens
ttagaaaggaatctt

SEQ ID NO: 1391317 - DNA, 15 bp, Homo sapiens
attagaaaggaatct

SEQ ID NO: 1391318 - DNA, 15 bp, Homo sapiens
gattagaaaggaatc

SEQ ID NO: 1391319 - DNA, 15 bp, Homo sapiens
tgattagaaaggaat

SEQ ID NO: 1391320 - DNA, 15 bp, Homo sapiens
atgattagaaaggaa

SEQ ID NO: 1391321 - DNA, 15 bp, Homo sapiens
aatgattagaaagga

SEQ ID NO: 1391322 - DNA, 15 bp, Homo sapiens
gaatgattagaaagg

SEQ ID NO: 1391323 - DNA, 15 bp, Homo sapiens
agaatgattagaaag

SEQ ID NO: 1391324 - DNA, 15 bp, Homo sapiens
aagaatgattagaaa

SEQ ID NO: 1391325 - DNA, 15 bp, Homo sapiens
aaagaatgattagaa

SEQ ID NO: 1391326 - DNA, 15 bp, Homo sapiens
taaagaatgattaga

SEQ ID NO: 1391327 - DNA, 15 bp, Homo sapiens
ttaaagaatgattag

SEQ ID NO: 1391328 - DNA, 15 bp, Homo sapiens
cttaaagaatgatta

SEQ ID NO: 1391329 - DNA, 15 bp, Homo sapiens
tcttaaagaatgatt

SEQ ID NO: 1391330 - DNA, 15 bp, Homo sapiens
ttcttaaagaatgat

SEQ ID NO: 1391331 - DNA, 15 bp, Homo sapiens
gttcttaaagaatga

SEQ ID NO: 1391332 - DNA, 15 bp, Homo sapiens
agttcttaaagaatg

SEQ ID NO: 1391333 - DNA, 15 bp, Homo sapiens
cagttcttaaagaat

SEQ ID NO: 1391334 - DNA, 15 bp, Homo sapiens
tcagttcttaaagaa

SEQ ID NO: 1391335 - DNA, 15 bp, Homo sapiens
ctcagttcttaaaga

SEQ ID NO: 1391336 - DNA, 15 bp, Homo sapiens
actcagttcttaaag

SEQ ID NO: 1391337 - DNA, 15 bp, Homo sapiens
cactcagttcttaaa

SEQ ID NO: 1391338 - DNA, 15 bp, Homo sapiens
acactcagttcttaa

SEQ ID NO: 1391339 - DNA, 15 bp, Homo sapiens
tacactcagttctta

SEQ ID NO: 1391340 - DNA, 15 bp, Homo sapiens
atacactcagttctt

SEQ ID NO: 1391341 - DNA, 15 bp, Homo sapiens
gatacactcagttct

SEQ ID NO: 1391342 - DNA, 15 bp, Homo sapiens
agatacactcagttc

SEQ ID NO: 1391343 - DNA, 15 bp, Homo sapiens
tagatacactcagtt

SEQ ID NO: 1391344 - DNA, 15 bp, Homo sapiens
atagatacactcagt

SEQ ID NO: 1391345 - DNA, 15 bp, Homo sapiens
tatagatacactcag

SEQ ID NO: 1391346 - DNA, 15 bp, Homo sapiens
atatagatacactca

SEQ ID NO: 1391347 - DNA, 15 bp, Homo sapiens
aatatagatacactc

SEQ ID NO: 1391348 - DNA, 15 bp, Homo sapiens
aaatatagatacact

SEQ ID NO: 1391349 - DNA, 15 bp, Homo sapiens
caaatatagatacac

SEQ ID NO: 1391350 - DNA, 15 bp, Homo sapiens
gcaaatatagataca

SEQ ID NO: 1391351 - DNA, 15 bp, Homo sapiens
agcaaatatagatac

SEQ ID NO: 1391352 - DNA, 15 bp, Homo sapiens
aagcaaatatagata

SEQ ID NO: 1391353 - DNA, 15 bp, Homo sapiens
caagcaaatatagat

SEQ ID NO: 1391354 - DNA, 15 bp, Homo sapiens
acaagcaaatataga

SEQ ID NO: 1391355 - DNA, 15 bp, Homo sapiens
gacaagcaaatatag

SEQ ID NO: 1391356 - DNA, 15 bp, Homo sapiens
agacaagcaaatata

SEQ ID NO: 1391357 - DNA, 15 bp, Homo sapiens
aagacaagcaaatat

SEQ ID NO: 1391358 - DNA, 15 bp, Homo sapiens
aaagacaagcaaata

SEQ ID NO: 1391359 - DNA, 15 bp, Homo sapiens
gaaagacaagcaaat

SEQ ID NO: 1391360 - DNA, 15 bp, Homo sapiens
agaaagacaagcaaa

SEQ ID NO: 1391361 - DNA, 15 bp, Homo sapiens
cagaaagacaagcaa

SEQ ID NO: 1391362 - DNA, 15 bp, Homo sapiens
tcagaaagacaagca

SEQ ID NO: 1391363 - DNA, 15 bp, Homo sapiens
ttcagaaagacaagc

SEQ ID NO: 1391364 - DNA, 15 bp, Homo sapiens
tttcagaaagacaag

SEQ ID NO: 1391365 - DNA, 15 bp, Homo sapiens
gtttcagaaagacaa

SEQ ID NO: 1391366 - DNA, 15 bp, Homo sapiens
agtttcagaaagaca

SEQ ID NO: 1391367 - DNA, 15 bp, Homo sapiens
cagtttcagaaagac

SEQ ID NO: 1391368 - DNA, 15 bp, Homo sapiens
acagtttcagaaaga

SEQ ID NO: 1391369 - DNA, 15 bp, Homo sapiens
gacagtttcagaaag

SEQ ID NO: 1391370 - DNA, 15 bp, Homo sapiens
agacagtttcagaaa

SEQ ID NO: 1391371 - DNA, 15 bp, Homo sapiens
aagacagtttcagaa

SEQ ID NO: 1391372 - DNA, 15 bp, Homo sapiens
gaagacagtttcaga

SEQ ID NO: 1391373 - DNA, 15 bp, Homo sapiens
ggaagacagtttcag

SEQ ID NO: 1391374 - DNA, 15 bp, Homo sapiens
tggaagacagtttca

SEQ ID NO: 1391375 - DNA, 15 bp, Homo sapiens
ttggaagacagtttc

SEQ ID NO: 1391376 - DNA, 15 bp, Homo sapiens
tttggaagacagttt

SEQ ID NO: 1391377 - DNA, 15 bp, Homo sapiens
gtttggaagacagtt

SEQ ID NO: 1391378 - DNA, 15 bp, Homo sapiens
tgtttggaagacagt

SEQ ID NO: 1391379 - DNA, 15 bp, Homo sapiens
atgtttggaagacag

SEQ ID NO: 1391380 - DNA, 15 bp, Homo sapiens
catgtttggaagaca

SEQ ID NO: 1391381 - DNA, 15 bp, Homo sapiens
ccatgtttggaagac

SEQ ID NO: 1391382 - DNA, 15 bp, Homo sapiens
gccatgtttggaaga

SEQ ID NO: 1391383 - DNA, 15 bp, Homo sapiens
agccatgtttggaag

SEQ ID NO: 1391384 - DNA, 15 bp, Homo sapiens
aagccatgtttggaa

SEQ ID NO: 1391385 - DNA, 15 bp, Homo sapiens
aaagccatgtttgga

SEQ ID NO: 1391386 - DNA, 15 bp, Homo sapiens
gaaagccatgtttgg

SEQ ID NO: 1391387 - DNA, 15 bp, Homo sapiens
ggaaagccatgtttg

SEQ ID NO: 1391388 - DNA, 15 bp, Homo sapiens
tggaaagccatgttt

SEQ ID NO: 1391389 - DNA, 15 bp, Homo sapiens
atggaaagccatgtt

SEQ ID NO: 1391390 - DNA, 15 bp, Homo sapiens
gatggaaagccatgt

SEQ ID NO: 1391391 - DNA, 15 bp, Homo sapiens
agatggaaagccatg

SEQ ID NO: 1391392 - DNA, 15 bp, Homo sapiens
aagatggaaagccat

SEQ ID NO: 1391393 - DNA, 15 bp, Homo sapiens
gaagatggaaagcca

SEQ ID NO: 1391394 - DNA, 15 bp, Homo sapiens
tgaagatggaaagcc

SEQ ID NO: 1391395 - DNA, 15 bp, Homo sapiens
ttgaagatggaaagc

SEQ ID NO: 1391396 - DNA, 15 bp, Homo sapiens
attgaagatggaaag

SEQ ID NO: 1391397 - DNA, 15 bp, Homo sapiens
gattgaagatggaaa

SEQ ID NO: 1391398 - DNA, 15 bp, Homo sapiens
tgattgaagatggaa

SEQ ID NO: 1391399 - DNA, 15 bp, Homo sapiens
ttgattgaagatgga

SEQ ID NO: 1391400 - DNA, 15 bp, Homo sapiens
gttgattgaagatgg

SEQ ID NO: 1391401 - DNA, 15 bp, Homo sapiens
agttgattgaagatg

SEQ ID NO: 1391402 - DNA, 15 bp, Homo sapiens
aagttgattgaagat

SEQ ID NO: 1391403 - DNA, 15 bp, Homo sapiens
caagttgattgaaga

SEQ ID NO: 1391404 - DNA, 15 bp, Homo sapiens
acaagttgattgaag

SEQ ID NO: 1391405 - DNA, 15 bp, Homo sapiens
tacaagttgattgaa

SEQ ID NO: 1391406 - DNA, 15 bp, Homo sapiens
atacaagttgattga

SEQ ID NO: 1391407 - DNA, 15 bp, Homo sapiens
gatacaagttgattg

SEQ ID NO: 1391408 - DNA, 15 bp, Homo sapiens
agatacaagttgatt

SEQ ID NO: 1391409 - DNA, 15 bp, Homo sapiens
cagatacaagttgat

SEQ ID NO: 1391410 - DNA, 15 bp, Homo sapiens
tcagatacaagttga

SEQ ID NO: 1391411 - DNA, 15 bp, Homo sapiens
atcagatacaagttg

SEQ ID NO: 1391412 - DNA, 15 bp, Homo sapiens
aatcagatacaagtt

SEQ ID NO: 1391413 - DNA, 15 bp, Homo sapiens
aaatcagatacaagt

SEQ ID NO: 1391414 - DNA, 15 bp, Homo sapiens
aaaatcagatacaag

SEQ ID NO: 1391415 - DNA, 15 bp, Homo sapiens
aaaaatcagatacaa

SEQ ID NO: 1391416 - DNA, 15 bp, Homo sapiens
aaaaaatcagataca

SEQ ID NO: 1391417 - DNA, 15 bp, Homo sapiens
aaaaaaatcagatac

SEQ ID NO: 1391418 - DNA, 15 bp, Homo sapiens
taaaaaaatcagata

SEQ ID NO: 1391419 - DNA, 15 bp, Homo sapiens
ttaaaaaaatcagat

SEQ ID NO: 1391420 - DNA, 15 bp, Homo sapiens
attaaaaaaatcaga

SEQ ID NO: 1391421 - DNA, 15 bp, Homo sapiens
gattaaaaaaatcag

SEQ ID NO: 1391422 - DNA, 15 bp, Homo sapiens
tgattaaaaaaatca

SEQ ID NO: 1391423 - DNA, 15 bp, Homo sapiens
gtgattaaaaaaatc

SEQ ID NO: 1391424 - DNA, 15 bp, Homo sapiens
tgtgattaaaaaaat

SEQ ID NO: 1391425 - DNA, 15 bp, Homo sapiens
ttgtgattaaaaaaa

SEQ ID NO: 1391426 - DNA, 15 bp, Homo sapiens
tttgtgattaaaaaa

SEQ ID NO: 1391427 - DNA, 15 bp, Homo sapiens
ctttgtgattaaaaa

SEQ ID NO: 1391428 - DNA, 15 bp, Homo sapiens
cctttgtgattaaaa

SEQ ID NO: 1391429 - DNA, 15 bp, Homo sapiens
ccctttgtgattaaa

SEQ ID NO: 1391430 - DNA, 15 bp, Homo sapiens
cccctttgtgattaa

SEQ ID NO: 1391431 - DNA, 15 bp, Homo sapiens
tcccctttgtgatta

SEQ ID NO: 1391432 - DNA, 15 bp, Homo sapiens
atcccctttgtgatt

SEQ ID NO: 1391433 - DNA, 15 bp, Homo sapiens
aatcccctttgtgat

SEQ ID NO: 1391434 - DNA, 15 bp, Homo sapiens
aaatcccctttgtga

SEQ ID NO: 1391435 - DNA, 15 bp, Homo sapiens
caaatcccctttgtg

SEQ ID NO: 1391436 - DNA, 15 bp, Homo sapiens
tcaaatcccctttgt

SEQ ID NO: 1391437 - DNA, 15 bp, Homo sapiens
atcaaatcccctttg

SEQ ID NO: 1391438 - DNA, 15 bp, Homo sapiens
catcaaatccccttt

SEQ ID NO: 1391439 - DNA, 15 bp, Homo sapiens
acatcaaatcccctt

SEQ ID NO: 1391440 - DNA, 15 bp, Homo sapiens
tacatcaaatcccct

SEQ ID NO: 1391441 - DNA, 15 bp, Homo sapiens
ttacatcaaatcccc

SEQ ID NO: 1391442 - DNA, 15 bp, Homo sapiens
cttacatcaaatccc

SEQ ID NO: 1391443 - DNA, 15 bp, Homo sapiens
tcttacatcaaatcc

SEQ ID NO: 1391444 - DNA, 15 bp, Homo sapiens
atcttacatcaaatc

SEQ ID NO: 1391445 - DNA, 15 bp, Homo sapiens
catcttacatcaaat

SEQ ID NO: 1391446 - DNA, 15 bp, Homo sapiens
acatcttacatcaaa

SEQ ID NO: 1391447 - DNA, 15 bp, Homo sapiens
aacatcttacatcaa

SEQ ID NO: 1391448 - DNA, 15 bp, Homo sapiens
gaacatcttacatca

SEQ ID NO: 1391449 - DNA, 15 bp, Homo sapiens
tgaacatcttacatc

SEQ ID NO: 1391450 - DNA, 15 bp, Homo sapiens
atgaacatcttacat

SEQ ID NO: 1391451 - DNA, 15 bp, Homo sapiens
aatgaacatcttaca

SEQ ID NO: 1391452 - DNA, 15 bp, Homo sapiens
aaatgaacatcttac

SEQ ID NO: 1391453 - DNA, 15 bp, Homo sapiens
taaatgaacatctta

SEQ ID NO: 1391454 - DNA, 15 bp, Homo sapiens
ttaaatgaacatctt

SEQ ID NO: 1391455 - DNA, 15 bp, Homo sapiens
attaaatgaacatct

SEQ ID NO: 1391456 - DNA, 15 bp, Homo sapiens
aattaaatgaacatc

SEQ ID NO: 1391457 - DNA, 15 bp, Homo sapiens
aaattaaatgaacat

SEQ ID NO: 1391458 - DNA, 15 bp, Homo sapiens
caaattaaatgaaca

SEQ ID NO: 1391459 - DNA, 15 bp, Homo sapiens
tcaaattaaatgaac

SEQ ID NO: 1391460 - DNA, 15 bp, Homo sapiens
ctcaaattaaatgaa

SEQ ID NO: 1391461 - DNA, 15 bp, Homo sapiens
tctcaaattaaatga

SEQ ID NO: 1391462 - DNA, 15 bp, Homo sapiens
atctcaaattaaatg

SEQ ID NO: 1391463 - DNA, 15 bp, Homo sapiens
aatctcaaattaaat

SEQ ID NO: 1391464 - DNA, 15 bp, Homo sapiens
aaatctcaaattaaa

SEQ ID NO: 1391465 - DNA, 15 bp, Homo sapiens
taaatctcaaattaa

SEQ ID NO: 1391466 - DNA, 15 bp, Homo sapiens
ataaatctcaaatta

SEQ ID NO: 1391467 - DNA, 15 bp, Homo sapiens
aataaatctcaaatt

SEQ ID NO: 1391468 - DNA, 15 bp, Homo sapiens
aaataaatctcaaat

SEQ ID NO: 1391469 - DNA, 15 bp, Homo sapiens
taaataaatctcaaa

SEQ ID NO: 1391470 - DNA, 15 bp, Homo sapiens
ataaataaatctcaa

SEQ ID NO: 1391471 - DNA, 15 bp, Homo sapiens
gataaataaatctca

SEQ ID NO: 1391472 - DNA, 15 bp, Homo sapiens
agataaataaatctc

SEQ ID NO: 1391473 - DNA, 15 bp, Homo sapiens
aagataaataaatct

SEQ ID NO: 1391474 - DNA, 15 bp, Homo sapiens
aaagataaataaatc

SEQ ID NO: 1391475 - DNA, 15 bp, Homo sapiens
gaaagataaataaat

SEQ ID NO: 1391476 - DNA, 15 bp, Homo sapiens
agaaagataaataaa

SEQ ID NO: 1391477 - DNA, 15 bp, Homo sapiens
gagaaagataaataa

SEQ ID NO: 1391478 - DNA, 15 bp, Homo sapiens
agagaaagataaata

SEQ ID NO: 1391479 - DNA, 15 bp, Homo sapiens
aagagaaagataaat

SEQ ID NO: 1391480 - DNA, 15 bp, Homo sapiens
gaagagaaagataaa

SEQ ID NO: 1391481 - DNA, 15 bp, Homo sapiens
tgaagagaaagataa

SEQ ID NO: 1391482 - DNA, 15 bp, Homo sapiens
ctgaagagaaagata

SEQ ID NO: 1391483 - DNA, 15 bp, Homo sapiens
actgaagagaaagat

SEQ ID NO: 1391484 - DNA, 15 bp, Homo sapiens
gactgaagagaaaga

SEQ ID NO: 1391485 - DNA, 15 bp, Homo sapiens
tgactgaagagaaag

SEQ ID NO: 1391486 - DNA, 15 bp, Homo sapiens
atgactgaagagaaa

SEQ ID NO: 1391487 - DNA, 15 bp, Homo sapiens
tatgactgaagagaa

SEQ ID NO: 1391488 - DNA, 15 bp, Homo sapiens
gtatgactgaagaga

SEQ ID NO: 1391489 - DNA, 15 bp, Homo sapiens
tgtatgactgaagag

SEQ ID NO: 1391490 - DNA, 15 bp, Homo sapiens
atgtatgactgaaga

SEQ ID NO: 1391491 - DNA, 15 bp, Homo sapiens
aatgtatgactgaag

SEQ ID NO: 1391492 - DNA, 15 bp, Homo sapiens
aaatgtatgactgaa

SEQ ID NO: 1391493 - DNA, 15 bp, Homo sapiens
caaatgtatgactga

SEQ ID NO: 1391494 - DNA, 15 bp, Homo sapiens
gcaaatgtatgactg

SEQ ID NO: 1391495 - DNA, 15 bp, Homo sapiens
agcaaatgtatgact

SEQ ID NO: 1391496 - DNA, 15 bp, Homo sapiens
tagcaaatgtatgac

SEQ ID NO: 1391497 - DNA, 15 bp, Homo sapiens
atagcaaatgtatga

SEQ ID NO: 1391498 - DNA, 15 bp, Homo sapiens
tatagcaaatgtatg

SEQ ID NO: 1391499 - DNA, 15 bp, Homo sapiens
ctttatagcaaatgt

SEQ ID NO: 1391500 - DNA, 15 bp, Homo sapiens
tctttatagcaaatg

SEQ ID NO: 1391501 - DNA, 15 bp, Homo sapiens
gtctttatagcaaat

SEQ ID NO: 1391502 - DNA, 15 bp, Homo sapiens
tgtctttatagcaaa

SEQ ID NO: 1391503 - DNA, 15 bp, Homo sapiens
ctgtctttatagcaa

SEQ ID NO: 1391504 - DNA, 15 bp, Homo sapiens
gctgtctttatagca

SEQ ID NO: 1391505 - DNA, 15 bp, Homo sapiens
ggctgtctttatagc

SEQ ID NO: 1391506 - DNA, 15 bp, Homo sapiens
tggctgtctttatag

SEQ ID NO: 1391507 - DNA, 15 bp, Homo sapiens
atggctgtctttata

SEQ ID NO: 1391508 - DNA, 15 bp, Homo sapiens
catggctgtctttat

SEQ ID NO: 1391509 - DNA, 15 bp, Homo sapiens
acatggctgtcttta

SEQ ID NO: 1391510 - DNA, 15 bp, Homo sapiens
aacatggctgtcttt

SEQ ID NO: 1391511 - DNA, 15 bp, Homo sapiens
aaacatggctgtctt

SEQ ID NO: 1391512 - DNA, 15 bp, Homo sapiens
aaaacatggctgtct

SEQ ID NO: 1391513 - DNA, 15 bp, Homo sapiens
gaaaacatggctgtc

SEQ ID NO: 1391514 - DNA, 15 bp, Homo sapiens
tgaaaacatggctgt

SEQ ID NO: 1391515 - DNA, 15 bp, Homo sapiens
ttgaaaacatggctg

SEQ ID NO: 1391516 - DNA, 15 bp, Homo sapiens
cttgaaaacatggct

SEQ ID NO: 1391517 - DNA, 15 bp, Homo sapiens
tcttgaaaacatggc

SEQ ID NO: 1391518 - DNA, 15 bp, Homo sapiens
atcttgaaaacatgg

SEQ ID NO: 1391519 - DNA, 15 bp, Homo sapiens
gatcttgaaaacatg

SEQ ID NO: 1391520 - DNA, 15 bp, Homo sapiens
tgatcttgaaaacat

SEQ ID NO: 1391521 - DNA, 15 bp, Homo sapiens
atgatcttgaaaaca

SEQ ID NO: 1391522 - DNA, 15 bp, Homo sapiens
aatgatcttgaaaac

SEQ ID NO: 1391523 - DNA, 15 bp, Homo sapiens
taatgatcttgaaaa

SEQ ID NO: 1391524 - DNA, 15 bp, Homo sapiens
ttaatgatcttgaaa

SEQ ID NO: 1391525 - DNA, 15 bp, Homo sapiens
cttaatgatcttgaa

SEQ ID NO: 1391526 - DNA, 15 bp, Homo sapiens
acttaatgatcttga

SEQ ID NO: 1391527 - DNA, 15 bp, Homo sapiens
gacttaatgatcttg

SEQ ID NO: 1391528 - DNA, 15 bp, Homo sapiens
tgacttaatgatctt

SEQ ID NO: 1391529 - DNA, 15 bp, Homo sapiens
atgacttaatgatct

SEQ ID NO: 1391530 - DNA, 15 bp, Homo sapiens
catgacttaatgatc

SEQ ID NO: 1391531 - DNA, 15 bp, Homo sapiens
tcatgacttaatgat

SEQ ID NO: 1391532 - DNA, 15 bp, Homo sapiens
ctcatgacttaatga

SEQ ID NO: 1391533 - DNA, 15 bp, Homo sapiens
tctcatgacttaatg

SEQ ID NO: 1391534 - DNA, 15 bp, Homo sapiens
ttctcatgacttaat

SEQ ID NO: 1391535 - DNA, 15 bp, Homo sapiens
gttctcatgacttaa

SEQ ID NO: 1391536 - DNA, 15 bp, Homo sapiens
ggttctcatgactta

SEQ ID NO: 1391537 - DNA, 15 bp, Homo sapiens
aggttctcatgactt

SEQ ID NO: 1391538 - DNA, 15 bp, Homo sapiens
aaggttctcatgact

SEQ ID NO: 1391539 - DNA, 15 bp, Homo sapiens
gaaggttctcatgac

SEQ ID NO: 1391540 - DNA, 15 bp, Homo sapiens
agaaggttctcatga

SEQ ID NO: 1391541 - DNA, 15 bp, Homo sapiens
aagaaggttctcatg

SEQ ID NO: 1391542 - DNA, 15 bp, Homo sapiens
aaagaaggttctcat

SEQ ID NO: 1391543 - DNA, 15 bp, Homo sapiens
aaaagaaggttctca

SEQ ID NO: 1391544 - DNA, 15 bp, Homo sapiens
taaaagaaggttctc

SEQ ID NO: 1391545 - DNA, 15 bp, Homo sapiens
ctaaaagaaggttct

SEQ ID NO: 1391546 - DNA, 15 bp, Homo sapiens
tctaaaagaaggttc

SEQ ID NO: 1391547 - DNA, 15 bp, Homo sapiens
ttctaaaagaaggtt

SEQ ID NO: 1391548 - DNA, 15 bp, Homo sapiens
cttctaaaagaaggt

SEQ ID NO: 1391549 - DNA, 15 bp, Homo sapiens
gcttctaaaagaagg

SEQ ID NO: 1391550 - DNA, 15 bp, Homo sapiens
ggcttctaaaagaag

SEQ ID NO: 1391551 - DNA, 15 bp, Homo sapiens
cggcttctaaaagaa

SEQ ID NO: 1391552 - DNA, 15 bp, Homo sapiens
acggcttctaaaaga

SEQ ID NO: 1391553 - DNA, 15 bp, Homo sapiens
aacggcttctaaaag

SEQ ID NO: 1391554 - DNA, 15 bp, Homo sapiens
caacggcttctaaaa

SEQ ID NO: 1391555 - DNA, 15 bp, Homo sapiens
gcaacggcttctaaa

SEQ ID NO: 1391556 - DNA, 15 bp, Homo sapiens
tgcaacggcttctaa

SEQ ID NO: 1391557 - DNA, 15 bp, Homo sapiens
ttgcaacggcttcta

SEQ ID NO: 1391558 - DNA, 15 bp, Homo sapiens
tttgcaacggcttct

SEQ ID NO: 1391559 - DNA, 15 bp, Homo sapiens
ttttgcaacggcttc

SEQ ID NO: 1391560 - DNA, 15 bp, Homo sapiens
cttttgcaacggctt

SEQ ID NO: 1391561 - DNA, 15 bp, Homo sapiens
acttttgcaacggct

SEQ ID NO: 1391562 - DNA, 15 bp, Homo sapiens
aacttttgcaacggc

SEQ ID NO: 1391563 - DNA, 15 bp, Homo sapiens
gaacttttgcaacgg

SEQ ID NO: 1391564 - DNA, 15 bp, Homo sapiens
agaacttttgcaacg

SEQ ID NO: 1391565 - DNA, 15 bp, Homo sapiens
aagaacttttgcaac

SEQ ID NO: 1391566 - DNA, 15 bp, Homo sapiens
taagaacttttgcaa

SEQ ID NO: 1391567 - DNA, 15 bp, Homo sapiens
gtaagaacttttgca

SEQ ID NO: 1391568 - DNA, 15 bp, Homo sapiens
tgtaagaacttttgc

SEQ ID NO: 1391569 - DNA, 15 bp, Homo sapiens
ttgtaagaacttttg

SEQ ID NO: 1391570 - DNA, 15 bp, Homo sapiens
cttgtaagaactttt

SEQ ID NO: 1391571 - DNA, 15 bp, Homo sapiens
gcttgtaagaacttt

SEQ ID NO: 1391572 - DNA, 15 bp, Homo sapiens
agcttgtaagaactt

SEQ ID NO: 1391573 - DNA, 15 bp, Homo sapiens
aagcttgtaagaact

SEQ ID NO: 1391574 - DNA, 15 bp, Homo sapiens
aaagcttgtaagaac

SEQ ID NO: 1391575 - DNA, 15 bp, Homo sapiens
caaagcttgtaagaa

SEQ ID NO: 1391576 - DNA, 15 bp, Homo sapiens
ccaaagcttgtaaga

SEQ ID NO: 1391577 - DNA, 15 bp, Homo sapiens
tccaaagcttgtaag

SEQ ID NO: 1391578 - DNA, 15 bp, Homo sapiens
atccaaagcttgtaa

SEQ ID NO: 1391579 - DNA, 15 bp, Homo sapiens
aatccaaagcttgta

SEQ ID NO: 1391580 - DNA, 15 bp, Homo sapiens
caatccaaagcttgt

SEQ ID NO: 1391581 - DNA, 15 bp, Homo sapiens
gcaatccaaagcttg

SEQ ID NO: 1391582 - DNA, 15 bp, Homo sapiens
ggcaatccaaagctt

SEQ ID NO: 1391583 - DNA, 15 bp, Homo sapiens
aggcaatccaaagct

SEQ ID NO: 1391584 - DNA, 15 bp, Homo sapiens
aaggcaatccaaagc

SEQ ID NO: 1391585 - DNA, 15 bp, Homo sapiens
aaaggcaatccaaag

SEQ ID NO: 1391586 - DNA, 15 bp, Homo sapiens
gaaaggcaatccaaa

SEQ ID NO: 1391587 - DNA, 15 bp, Homo sapiens
tgaaaggcaatccaa

SEQ ID NO: 1391588 - DNA, 15 bp, Homo sapiens
ttgaaaggcaatcca

SEQ ID NO: 1391589 - DNA, 15 bp, Homo sapiens
tttgaaaggcaatcc

SEQ ID NO: 1391590 - DNA, 15 bp, Homo sapiens
ctttgaaaggcaatc

SEQ ID NO: 1391591 - DNA, 15 bp, Homo sapiens
tctttgaaaggcaat

SEQ ID NO: 1391592 - DNA, 15 bp, Homo sapiens
ttctttgaaaggcaa

SEQ ID NO: 1391593 - DNA, 15 bp, Homo sapiens
cttctttgaaaggca

SEQ ID NO: 1391594 - DNA, 15 bp, Homo sapiens
acttctttgaaaggc

SEQ ID NO: 1391595 - DNA, 15 bp, Homo sapiens
aacttctttgaaagg

SEQ ID NO: 1391596 - DNA, 15 bp, Homo sapiens
aaacttctttgaaag

SEQ ID NO: 1391597 - DNA, 15 bp, Homo sapiens
taaacttctttgaaa

SEQ ID NO: 1391598 - DNA, 15 bp, Homo sapiens
ataaacttctttgaa

SEQ ID NO: 1391599 - DNA, 15 bp, Homo sapiens
tataaacttctttga

SEQ ID NO: 1391600 - DNA, 15 bp, Homo sapiens
ctataaacttctttg

SEQ ID NO: 1391601 - DNA, 15 bp, Homo sapiens
cctataaacttcttt

SEQ ID NO: 1391602 - DNA, 15 bp, Homo sapiens
gcctataaacttctt

SEQ ID NO: 1391603 - DNA, 15 bp, Homo sapiens
ggcctataaacttct

SEQ ID NO: 1391604 - DNA, 15 bp, Homo sapiens
tggcctataaacttc

SEQ ID NO: 1391605 - DNA, 15 bp, Homo sapiens
gtggcctataaactt

SEQ ID NO: 1391606 - DNA, 15 bp, Homo sapiens
ggtggcctataaact

SEQ ID NO: 1391607 - DNA, 15 bp, Homo sapiens
aggtggcctataaac

SEQ ID NO: 1391608 - DNA, 15 bp, Homo sapiens
taggtggcctataaa

SEQ ID NO: 1391609 - DNA, 15 bp, Homo sapiens
gtaggtggcctataa

SEQ ID NO: 1391610 - DNA, 15 bp, Homo sapiens
cgtaggtggcctata

SEQ ID NO: 1391611 - DNA, 15 bp, Homo sapiens
acgtaggtggcctat

SEQ ID NO: 1391612 - DNA, 15 bp, Homo sapiens
cacgtaggtggccta

SEQ ID NO: 1391613 - DNA, 15 bp, Homo sapiens
tcacgtaggtggcct

SEQ ID NO: 1391614 - DNA, 15 bp, Homo sapiens
ttcacgtaggtggcc

SEQ ID NO: 1391615 - DNA, 15 bp, Homo sapiens
tttcacgtaggtggc

SEQ ID NO: 1391616 - DNA, 15 bp, Homo sapiens
ttttcacgtaggtgg

SEQ ID NO: 1391617 - DNA, 15 bp, Homo sapiens
gttttcacgtaggtg

SEQ ID NO: 1391618 - DNA, 15 bp, Homo sapiens
agttttcacgtaggt

SEQ ID NO: 1391619 - DNA, 15 bp, Homo sapiens
aagttttcacgtagg

SEQ ID NO: 1391620 - DNA, 15 bp, Homo sapiens
taagttttcacgtag

SEQ ID NO: 1391621 - DNA, 15 bp, Homo sapiens
ttaagttttcacgta

SEQ ID NO: 1391622 - DNA, 15 bp, Homo sapiens
cttaagttttcacgt

SEQ ID NO: 1391623 - DNA, 15 bp, Homo sapiens
acttaagttttcacg

SEQ ID NO: 1391624 - DNA, 15 bp, Homo sapiens
gacttaagttttcac

SEQ ID NO: 1391625 - DNA, 15 bp, Homo sapiens
ggacttaagttttca

SEQ ID NO: 1391626 - DNA, 15 bp, Homo sapiens
gggacttaagttttc

SEQ ID NO: 1391627 - DNA, 15 bp, Homo sapiens
tgggacttaagtttt

SEQ ID NO: 1391628 - DNA, 15 bp, Homo sapiens
ttgggacttaagttt

SEQ ID NO: 1391629 - DNA, 15 bp, Homo sapiens
tttgggacttaagtt

SEQ ID NO: 1391630 - DNA, 15 bp, Homo sapiens
ctttgggacttaagt

SEQ ID NO: 1391631 - DNA, 15 bp, Homo sapiens
tctttgggacttaag

SEQ ID NO: 1391632 - DNA, 15 bp, Homo sapiens
atctttgggacttaa

SEQ ID NO: 1391633 - DNA, 15 bp, Homo sapiens
aatctttgggactta

SEQ ID NO: 1391634 - DNA, 15 bp, Homo sapiens
taatctttgggactt

SEQ ID NO: 1391635 - DNA, 15 bp, Homo sapiens
ctaatctttgggact

SEQ ID NO: 1391636 - DNA, 15 bp, Homo sapiens
cctaatctttgggac

SEQ ID NO: 1391637 - DNA, 15 bp, Homo sapiens
ccctaatctttggga

SEQ ID NO: 1391638 - DNA, 15 bp, Homo sapiens
accctaatctttggg

SEQ ID NO: 1391639 - DNA, 15 bp, Homo sapiens
caccctaatctttgg

SEQ ID NO: 1391640 - DNA, 15 bp, Homo sapiens
ccaccctaatctttg

SEQ ID NO: 1391641 - DNA, 15 bp, Homo sapiens
cccaccctaatcttt

SEQ ID NO: 1391642 - DNA, 15 bp, Homo sapiens
tcccaccctaatctt

SEQ ID NO: 1391643 - DNA, 15 bp, Homo sapiens
ctcccaccctaatct

SEQ ID NO: 1391644 - DNA, 15 bp, Homo sapiens
actcccaccctaatc

SEQ ID NO: 1391645 - DNA, 15 bp, Homo sapiens
acactcccaccctaa

SEQ ID NO: 1391646 - DNA, 15 bp, Homo sapiens
cacactcccacccta

SEQ ID NO: 1391647 - DNA, 15 bp, Homo sapiens
ccacactcccaccct

SEQ ID NO: 1391648 - DNA, 15 bp, Homo sapiens
tccacactcccaccc

SEQ ID NO: 1391649 - DNA, 15 bp, Homo sapiens
ttccacactcccacc

SEQ ID NO: 1391650 - DNA, 15 bp, Homo sapiens
tttccacactcccac

SEQ ID NO: 1391651 - DNA, 15 bp, Homo sapiens
ttttccacactccca

SEQ ID NO: 1391652 - DNA, 15 bp, Homo sapiens
cttttccacactccc

SEQ ID NO: 1391653 - DNA, 15 bp, Homo sapiens
tcttttccacactcc

SEQ ID NO: 1391654 - DNA, 15 bp, Homo sapiens
ttcttttccacactc

SEQ ID NO: 1391655 - DNA, 15 bp, Homo sapiens
attcttttccacact

SEQ ID NO: 1391656 - DNA, 15 bp, Homo sapiens
aattcttttccacac

SEQ ID NO: 1391657 - DNA, 15 bp, Homo sapiens
gaattcttttccaca

SEQ ID NO: 1391658 - DNA, 15 bp, Homo sapiens
tgaattcttttccac

SEQ ID NO: 1391659 - DNA, 15 bp, Homo sapiens
atgaattcttttcca

SEQ ID NO: 1391660 - DNA, 15 bp, Homo sapiens
tatgaattcttttcc

SEQ ID NO: 1391661 - DNA, 15 bp, Homo sapiens
atatgaattcttttc

SEQ ID NO: 1391662 - DNA, 15 bp, Homo sapiens
catatgaattctttt

SEQ ID NO: 1391663 - DNA, 15 bp, Homo sapiens
acatatgaattcttt

SEQ ID NO: 1391664 - DNA, 15 bp, Homo sapiens
aacatatgaattctt

SEQ ID NO: 1391665 - DNA, 15 bp, Homo sapiens
aaacatatgaattct

SEQ ID NO: 1391666 - DNA, 15 bp, Homo sapiens
gaaacatatgaattc

SEQ ID NO: 1391667 - DNA, 15 bp, Homo sapiens
agaaacatatgaatt

SEQ ID NO: 1391668 - DNA, 15 bp, Homo sapiens
aagaaacatatgaat

SEQ ID NO: 1391669 - DNA, 15 bp, Homo sapiens
taagaaacatatgaa

SEQ ID NO: 1391670 - DNA, 15 bp, Homo sapiens
ataagaaacatatga

SEQ ID NO: 1391671 - DNA, 15 bp, Homo sapiens
aataagaaacatatg

SEQ ID NO: 1391672 - DNA, 15 bp, Homo sapiens
gaataagaaacatat

SEQ ID NO: 1391673 - DNA, 15 bp, Homo sapiens
tgaataagaaacata

SEQ ID NO: 1391674 - DNA, 15 bp, Homo sapiens
atgaataagaaacat

SEQ ID NO: 1391675 - DNA, 15 bp, Homo sapiens
aatgaataagaaaca

SEQ ID NO: 1391676 - DNA, 15 bp, Homo sapiens
caatgaataagaaac

SEQ ID NO: 1391677 - DNA, 15 bp, Homo sapiens
acaatgaataagaaa

SEQ ID NO: 1391678 - DNA, 15 bp, Homo sapiens
gacaatgaataagaa

SEQ ID NO: 1391679 - DNA, 15 bp, Homo sapiens
tgacaatgaataaga

SEQ ID NO: 1391680 - DNA, 15 bp, Homo sapiens
atgacaatgaataag

SEQ ID NO: 1391681 - DNA, 15 bp, Homo sapiens
aatgacaatgaataa

SEQ ID NO: 1391682 - DNA, 15 bp, Homo sapiens
aaatgacaatgaata

SEQ ID NO: 1391683 - DNA, 15 bp, Homo sapiens
caaatgacaatgaat

SEQ ID NO: 1391684 - DNA, 15 bp, Homo sapiens
acaaatgacaatgaa

SEQ ID NO: 1391685 - DNA, 15 bp, Homo sapiens
cacaaatgacaatga

SEQ ID NO: 1391686 - DNA, 15 bp, Homo sapiens
gcacaaatgacaatg

SEQ ID NO: 1391687 - DNA, 15 bp, Homo sapiens
tgcacaaatgacaat

SEQ ID NO: 1391688 - DNA, 15 bp, Homo sapiens
atgcacaaatgacaa

SEQ ID NO: 1391689 - DNA, 15 bp, Homo sapiens
aatgcacaaatgaca

SEQ ID NO: 1391690 - DNA, 15 bp, Homo sapiens
aaatgcacaaatgac

SEQ ID NO: 1391691 - DNA, 15 bp, Homo sapiens
gaaatgcacaaatga

SEQ ID NO: 1391692 - DNA, 15 bp, Homo sapiens
tgaaatgcacaaatg

SEQ ID NO: 1391693 - DNA, 15 bp, Homo sapiens
ttgaaatgcacaaat

SEQ ID NO: 1391694 - DNA, 15 bp, Homo sapiens
attgaaatgcacaaa

SEQ ID NO: 1391695 - DNA, 15 bp, Homo sapiens
aattgaaatgcacaa

SEQ ID NO: 1391696 - DNA, 15 bp, Homo sapiens
aaattgaaatgcaca

SEQ ID NO: 1391697 - DNA, 15 bp, Homo sapiens
aaaattgaaatgcac

SEQ ID NO: 1391698 - DNA, 15 bp, Homo sapiens
taaaattgaaatgca

SEQ ID NO: 1391699 - DNA, 15 bp, Homo sapiens
ctaaaattgaaatgc

SEQ ID NO: 1391700 - DNA, 15 bp, Homo sapiens
cctaaaattgaaatg

SEQ ID NO: 1391701 - DNA, 15 bp, Homo sapiens
tcctaaaattgaaat

SEQ ID NO: 1391702 - DNA, 15 bp, Homo sapiens
ctcctaaaattgaaa

SEQ ID NO: 1391703 - DNA, 15 bp, Homo sapiens
tctcctaaaattgaa

SEQ ID NO: 1391704 - DNA, 15 bp, Homo sapiens
ttctcctaaaattga

SEQ ID NO: 1391705 - DNA, 15 bp, Homo sapiens
attctcctaaaattg

SEQ ID NO: 1391706 - DNA, 15 bp, Homo sapiens
gattctcctaaaatt

SEQ ID NO: 1391707 - DNA, 15 bp, Homo sapiens
agattctcctaaaat

SEQ ID NO: 1391708 - DNA, 15 bp, Homo sapiens
gagattctcctaaaa

SEQ ID NO: 1391709 - DNA, 15 bp, Homo sapiens
cgagattctcctaaa

SEQ ID NO: 1391710 - DNA, 15 bp, Homo sapiens
acgagattctcctaa

SEQ ID NO: 1391711 - DNA, 15 bp, Homo sapiens
tacgagattctccta

SEQ ID NO: 1391712 - DNA, 15 bp, Homo sapiens
gtacgagattctcct

SEQ ID NO: 1391713 - DNA, 15 bp, Homo sapiens
tgtacgagattctcc

SEQ ID NO: 1391714 - DNA, 15 bp, Homo sapiens
ctgtacgagattctc

SEQ ID NO: 1391715 - DNA, 15 bp, Homo sapiens
gctgtacgagattct

SEQ ID NO: 1391716 - DNA, 15 bp, Homo sapiens
tgctgtacgagattc

SEQ ID NO: 1391717 - DNA, 15 bp, Homo sapiens
ttgctgtacgagatt

SEQ ID NO: 1391718 - DNA, 15 bp, Homo sapiens
cttgctgtacgagat

SEQ ID NO: 1391719 - DNA, 15 bp, Homo sapiens
gcttgctgtacgaga

SEQ ID NO: 1391720 - DNA, 15 bp, Homo sapiens
cgcttgctgtacgag

SEQ ID NO: 1391721 - DNA, 15 bp, Homo sapiens
tcgcttgctgtacga

SEQ ID NO: 1391722 - DNA, 15 bp, Homo sapiens
ttcgcttgctgtacg

SEQ ID NO: 1391723 - DNA, 15 bp, Homo sapiens
gttcgcttgctgtac

SEQ ID NO: 1391724 - DNA, 15 bp, Homo sapiens
tgttcgcttgctgta

SEQ ID NO: 1391725 - DNA, 15 bp, Homo sapiens
gtgttcgcttgctgt

SEQ ID NO: 1391726 - DNA, 15 bp, Homo sapiens
tgtgttcgcttgctg

SEQ ID NO: 1391727 - DNA, 15 bp, Homo sapiens
ctgtgttcgcttgct

SEQ ID NO: 1391728 - DNA, 15 bp, Homo sapiens
cctgtgttcgcttgc

SEQ ID NO: 1391729 - DNA, 15 bp, Homo sapiens
acctgtgttcgcttg

SEQ ID NO: 1391730 - DNA, 15 bp, Homo sapiens
gacctgtgttcgctt

SEQ ID NO: 1391731 - DNA, 15 bp, Homo sapiens
agacctgtgttcgct

SEQ ID NO: 1391732 - DNA, 15 bp, Homo sapiens
cagacctgtgttcgc

SEQ ID NO: 1391733 - DNA, 15 bp, Homo sapiens
tcagacctgtgttcg

SEQ ID NO: 1391734 - DNA, 15 bp, Homo sapiens
ctcagacctgtgttc

SEQ ID NO: 1391735 - DNA, 15 bp, Homo sapiens
gctcagacctgtgtt

SEQ ID NO: 1391736 - DNA, 15 bp, Homo sapiens
tgctcagacctgtgt

SEQ ID NO: 1391737 - DNA, 15 bp, Homo sapiens
gtgctcagacctgtg

SEQ ID NO: 1391738 - DNA, 15 bp, Homo sapiens
agtgctcagacctgt

SEQ ID NO: 1391739 - DNA, 15 bp, Homo sapiens
tagtgctcagacctg

SEQ ID NO: 1391740 - DNA, 15 bp, Homo sapiens
atagtgctcagacct

SEQ ID NO: 1391741 - DNA, 15 bp, Homo sapiens
tatagtgctcagacc

SEQ ID NO: 1391742 - DNA, 15 bp, Homo sapiens
ttatagtgctcagac

SEQ ID NO: 1391743 - DNA, 15 bp, Homo sapiens
cttatagtgctcaga

SEQ ID NO: 1391744 - DNA, 15 bp, Homo sapiens
ccttatagtgctcag

SEQ ID NO: 1391745 - DNA, 15 bp, Homo sapiens
accttatagtgctca

SEQ ID NO: 1391746 - DNA, 15 bp, Homo sapiens
taccttatagtgctc

SEQ ID NO: 1391747 - DNA, 15 bp, Homo sapiens
gtaccttatagtgct

SEQ ID NO: 1391748 - DNA, 15 bp, Homo sapiens
ggtaccttatagtgc

SEQ ID NO: 1391749 - DNA, 15 bp, Homo sapiens
aggtaccttatagtg

SEQ ID NO: 1391750 - DNA, 15 bp, Homo sapiens
aaggtaccttatagt

SEQ ID NO: 1391751 - DNA, 15 bp, Homo sapiens
aaaggtaccttatag

SEQ ID NO: 1391752 - DNA, 15 bp, Homo sapiens
caaaggtaccttata

SEQ ID NO: 1391753 - DNA, 15 bp, Homo sapiens
ccaaaggtaccttat

SEQ ID NO: 1391754 - DNA, 15 bp, Homo sapiens
cccaaaggtacctta

SEQ ID NO: 1391755 - DNA, 15 bp, Homo sapiens
tcccaaaggtacctt

SEQ ID NO: 1391756 - DNA, 15 bp, Homo sapiens
ctcccaaaggtacct

SEQ ID NO: 1391757 - DNA, 15 bp, Homo sapiens
gctcccaaaggtacc

SEQ ID NO: 1391758 - DNA, 15 bp, Homo sapiens
tgctcccaaaggtac

SEQ ID NO: 1391759 - DNA, 15 bp, Homo sapiens
atgctcccaaaggta

SEQ ID NO: 1391760 - DNA, 15 bp, Homo sapiens
gatgctcccaaaggt

SEQ ID NO: 1391761 - DNA, 15 bp, Homo sapiens
agatgctcccaaagg

SEQ ID NO: 1391762 - DNA, 15 bp, Homo sapiens
tagatgctcccaaag

SEQ ID NO: 1391763 - DNA, 15 bp, Homo sapiens
ctagatgctcccaaa

SEQ ID NO: 1391764 - DNA, 15 bp, Homo sapiens
actagatgctcccaa

SEQ ID NO: 1391765 - DNA, 15 bp, Homo sapiens
aactagatgctccca

SEQ ID NO: 1391766 - DNA, 15 bp, Homo sapiens
gaactagatgctccc

SEQ ID NO: 1391767 - DNA, 15 bp, Homo sapiens
agaactagatgctcc

SEQ ID NO: 1391768 - DNA, 15 bp, Homo sapiens
cagaactagatgctc

SEQ ID NO: 1391769 - DNA, 15 bp, Homo sapiens
gcagaactagatgct

SEQ ID NO: 1391770 - DNA, 15 bp, Homo sapiens
ggcagaactagatgc

SEQ ID NO: 1391771 - DNA, 15 bp, Homo sapiens
aggcagaactagatg

SEQ ID NO: 1391772 - DNA, 15 bp, Homo sapiens
caggcagaactagat

SEQ ID NO: 1391773 - DNA, 15 bp, Homo sapiens
acaggcagaactaga

SEQ ID NO: 1391774 - DNA, 15 bp, Homo sapiens
gacaggcagaactag

SEQ ID NO: 1391775 - DNA, 15 bp, Homo sapiens
agacaggcagaacta

SEQ ID NO: 1391776 - DNA, 15 bp, Homo sapiens
gagacaggcagaact

SEQ ID NO: 1391777 - DNA, 15 bp, Homo sapiens
agagacaggcagaac

SEQ ID NO: 1391778 - DNA, 15 bp, Homo sapiens
tagagacaggcagaa

SEQ ID NO: 1391779 - DNA, 15 bp, Homo sapiens
ctagagacaggcaga

SEQ ID NO: 1391780 - DNA, 15 bp, Homo sapiens
actagagacaggcag

SEQ ID NO: 1391781 - DNA, 15 bp, Homo sapiens
aactagagacaggca

SEQ ID NO: 1391782 - DNA, 15 bp, Homo sapiens
taactagagacaggc

SEQ ID NO: 1391783 - DNA, 15 bp, Homo sapiens
ctaactagagacagg

SEQ ID NO: 1391784 - DNA, 15 bp, Homo sapiens
actaactagagacag

SEQ ID NO: 1391785 - DNA, 15 bp, Homo sapiens
cactaactagagaca

SEQ ID NO: 1391786 - DNA, 15 bp, Homo sapiens
tcactaactagagac

SEQ ID NO: 1391787 - DNA, 15 bp, Homo sapiens
atcactaactagaga

SEQ ID NO: 1391788 - DNA, 15 bp, Homo sapiens
gatcactaactagag

SEQ ID NO: 1391789 - DNA, 15 bp, Homo sapiens
ggatcactaactaga

SEQ ID NO: 1391790 - DNA, 15 bp, Homo sapiens
aggatcactaactag

SEQ ID NO: 1391791 - DNA, 15 bp, Homo sapiens
aaggatcactaacta

SEQ ID NO: 1391792 - DNA, 15 bp, Homo sapiens
caaggatcactaact

SEQ ID NO: 1391793 - DNA, 15 bp, Homo sapiens
ccaaggatcactaac

SEQ ID NO: 1391794 - DNA, 15 bp, Homo sapiens
cccaaggatcactaa

SEQ ID NO: 1391795 - DNA, 15 bp, Homo sapiens
ccccaaggatcacta

SEQ ID NO: 1391796 - DNA, 15 bp, Homo sapiens
tccccaaggatcact

SEQ ID NO: 1391797 - DNA, 15 bp, Homo sapiens
atccccaaggatcac

SEQ ID NO: 1391798 - DNA, 15 bp, Homo sapiens
tatccccaaggatca

SEQ ID NO: 1391799 - DNA, 15 bp, Homo sapiens
gtatccccaaggatc

SEQ ID NO: 1391800 - DNA, 15 bp, Homo sapiens
ggtatccccaaggat

SEQ ID NO: 1391801 - DNA, 15 bp, Homo sapiens
tggtatccccaagga

SEQ ID NO: 1391802 - DNA, 15 bp, Homo sapiens
ctggtatccccaagg

SEQ ID NO: 1391803 - DNA, 15 bp, Homo sapiens
tctggtatccccaag

SEQ ID NO: 1391804 - DNA, 15 bp, Homo sapiens
ttctggtatccccaa

SEQ ID NO: 1391805 - DNA, 15 bp, Homo sapiens
cttctggtatcccca

SEQ ID NO: 1391806 - DNA, 15 bp, Homo sapiens
ccttctggtatcccc

SEQ ID NO: 1391807 - DNA, 15 bp, Homo sapiens
gccttctggtatccc

SEQ ID NO: 1391808 - DNA, 15 bp, Homo sapiens
tgccttctggtatcc

SEQ ID NO: 1391809 - DNA, 15 bp, Homo sapiens
ctgccttctggtatc

SEQ ID NO: 1391810 - DNA, 15 bp, Homo sapiens
actgccttctggtat

SEQ ID NO: 1391811 - DNA, 15 bp, Homo sapiens
gactgccttctggta

SEQ ID NO: 1391812 - DNA, 15 bp, Homo sapiens
tgactgccttctggt

SEQ ID NO: 1391813 - DNA, 15 bp, Homo sapiens
atgactgccttctgg

SEQ ID NO: 1391814 - DNA, 15 bp, Homo sapiens
catgactgccttctg

SEQ ID NO: 1391815 - DNA, 15 bp, Homo sapiens
ccatgactgccttct

SEQ ID NO: 1391816 - DNA, 15 bp, Homo sapiens
cccatgactgccttc

SEQ ID NO: 1391817 - DNA, 15 bp, Homo sapiens
acccatgactgcctt

SEQ ID NO: 1391818 - DNA, 15 bp, Homo sapiens
cacccatgactgcct

SEQ ID NO: 1391819 - DNA, 15 bp, Homo sapiens
ccacccatgactgcc

SEQ ID NO: 1391820 - DNA, 15 bp, Homo sapiens
accacccatgactgc

SEQ ID NO: 1391821 - DNA, 15 bp, Homo sapiens
caccacccatgactg

SEQ ID NO: 1391822 - DNA, 15 bp, Homo sapiens
ccaccacccatgact

SEQ ID NO: 1391823 - DNA, 15 bp, Homo sapiens
cccaccacccatgac

SEQ ID NO: 1391824 - DNA, 15 bp, Homo sapiens
ccccaccacccatga

SEQ ID NO: 1391825 - DNA, 15 bp, Homo sapiens
tccccaccacccatg

SEQ ID NO: 1391826 - DNA, 15 bp, Homo sapiens
ttccccaccacccat

SEQ ID NO: 1391827 - DNA, 15 bp, Homo sapiens
cttccccaccaccca

SEQ ID NO: 1391828 - DNA, 15 bp, Homo sapiens
tcttccccaccaccc

SEQ ID NO: 1391829 - DNA, 15 bp, Homo sapiens
ctcttccccaccacc

SEQ ID NO: 1391830 - DNA, 15 bp, Homo sapiens
cctcttccccaccac

SEQ ID NO: 1391831 - DNA, 15 bp, Homo sapiens
acctcttccccacca

SEQ ID NO: 1391832 - DNA, 15 bp, Homo sapiens
cacctcttccccacc

SEQ ID NO: 1391833 - DNA, 15 bp, Homo sapiens
ccacctcttccccac

SEQ ID NO: 1391834 - DNA, 15 bp, Homo sapiens
tccacctcttcccca

SEQ ID NO: 1391835 - DNA, 15 bp, Homo sapiens
atccacctcttcccc

SEQ ID NO: 1391836 - DNA, 15 bp, Homo sapiens
gatccacctcttccc

SEQ ID NO: 1391837 - DNA, 15 bp, Homo sapiens
tgatccacctcttcc

SEQ ID NO: 1391838 - DNA, 15 bp, Homo sapiens
ctgatccacctcttc

SEQ ID NO: 1391839 - DNA, 15 bp, Homo sapiens
cctgatccacctctt

SEQ ID NO: 1391840 - DNA, 15 bp, Homo sapiens
acctgatccacctct

SEQ ID NO: 1391841 - DNA, 15 bp, Homo sapiens
gacctgatccacctc

SEQ ID NO: 1391842 - DNA, 15 bp, Homo sapiens
ggacctgatccacct

SEQ ID NO: 1391843 - DNA, 15 bp, Homo sapiens
gggacctgatccacc

SEQ ID NO: 1391844 - DNA, 15 bp, Homo sapiens
tgggacctgatccac

SEQ ID NO: 1391845 - DNA, 15 bp, Homo sapiens
ctgggacctgatcca

SEQ ID NO: 1391846 - DNA, 15 bp, Homo sapiens
gctgggacctgatcc

SEQ ID NO: 1391847 - DNA, 15 bp, Homo sapiens
agctgggacctgatc

SEQ ID NO: 1391848 - DNA, 15 bp, Homo sapiens
gagctgggacctgat

SEQ ID NO: 1391849 - DNA, 15 bp, Homo sapiens
agagctgggacctga

SEQ ID NO: 1391850 - DNA, 15 bp, Homo sapiens
cagagctgggacctg

SEQ ID NO: 1391851 - DNA, 15 bp, Homo sapiens
gcagagctgggacct

SEQ ID NO: 1391852 - DNA, 15 bp, Homo sapiens
ggcagagctgggacc

SEQ ID NO: 1391853 - DNA, 15 bp, Homo sapiens
aggcagagctgggac

SEQ ID NO: 1391854 - DNA, 15 bp, Homo sapiens
aaggcagagctggga

SEQ ID NO: 1391855 - DNA, 15 bp, Homo sapiens
aaaggcagagctggg

SEQ ID NO: 1391856 - DNA, 15 bp, Homo sapiens
gaaaggcagagctgg

SEQ ID NO: 1391857 - DNA, 15 bp, Homo sapiens
tgaaaggcagagctg

SEQ ID NO: 1391858 - DNA, 15 bp, Homo sapiens
gtgaaaggcagagct

SEQ ID NO: 1391859 - DNA, 15 bp, Homo sapiens
ggtgaaaggcagagc

SEQ ID NO: 1391860 - DNA, 15 bp, Homo sapiens
tggtgaaaggcagag

SEQ ID NO: 1391861 - DNA, 15 bp, Homo sapiens
ttggtgaaaggcaga

SEQ ID NO: 1391862 - DNA, 15 bp, Homo sapiens
gttggtgaaaggcag

SEQ ID NO: 1391863 - DNA, 15 bp, Homo sapiens
agttggtgaaaggca

SEQ ID NO: 1391864 - DNA, 15 bp, Homo sapiens
cagttggtgaaaggc

SEQ ID NO: 1391865 - DNA, 15 bp, Homo sapiens
tcagttggtgaaagg

SEQ ID NO: 1391866 - DNA, 15 bp, Homo sapiens
ctcagttggtgaaag

SEQ ID NO: 1391867 - DNA, 15 bp, Homo sapiens
cctcagttggtgaaa

SEQ ID NO: 1391868 - DNA, 15 bp, Homo sapiens
ccctcagttggtgaa

SEQ ID NO: 1391869 - DNA, 15 bp, Homo sapiens
tccctcagttggtga

SEQ ID NO: 1391870 - DNA, 15 bp, Homo sapiens
ctccctcagttggtg

SEQ ID NO: 1391871 - DNA, 15 bp, Homo sapiens
gctccctcagttggt

SEQ ID NO: 1391872 - DNA, 15 bp, Homo sapiens
agctccctcagttgg

SEQ ID NO: 1391873 - DNA, 15 bp, Homo sapiens
aagctccctcagttg

SEQ ID NO: 1391874 - DNA, 15 bp, Homo sapiens
caagctccctcagtt

SEQ ID NO: 1391875 - DNA, 15 bp, Homo sapiens
tcaagctccctcagt

SEQ ID NO: 1391876 - DNA, 15 bp, Homo sapiens
ctcaagctccctcag

SEQ ID NO: 1391877 - DNA, 15 bp, Homo sapiens
gctcaagctccctca

SEQ ID NO: 1391878 - DNA, 15 bp, Homo sapiens
tgctcaagctccctc

SEQ ID NO: 1391879 - DNA, 15 bp, Homo sapiens
ttgctcaagctccct

SEQ ID NO: 1391880 - DNA, 15 bp, Homo sapiens
tttgctcaagctccc

SEQ ID NO: 1391881 - DNA, 15 bp, Homo sapiens
atttgctcaagctcc

SEQ ID NO: 1391882 - DNA, 15 bp, Homo sapiens
aatttgctcaagctc

SEQ ID NO: 1391883 - DNA, 15 bp, Homo sapiens
taatttgctcaagct

SEQ ID NO: 1391884 - DNA, 15 bp, Homo sapiens
gtaatttgctcaagc

SEQ ID NO: 1391885 - DNA, 15 bp, Homo sapiens
agtaatttgctcaag

SEQ ID NO: 1391886 - DNA, 15 bp, Homo sapiens
aagtaatttgctcaa

SEQ ID NO: 1391887 - DNA, 15 bp, Homo sapiens
taagtaatttgctca

SEQ ID NO: 1391888 - DNA, 15 bp, Homo sapiens
ttaagtaatttgctc

SEQ ID NO: 1391889 - DNA, 15 bp, Homo sapiens
gttaagtaatttgct

SEQ ID NO: 1391890 - DNA, 15 bp, Homo sapiens
tgttaagtaatttgc

SEQ ID NO: 1391891 - DNA, 15 bp, Homo sapiens
atgttaagtaatttg

SEQ ID NO: 1391892 - DNA, 15 bp, Homo sapiens
aatgttaagtaattt

SEQ ID NO: 1391893 - DNA, 15 bp, Homo sapiens
gaatgttaagtaatt

SEQ ID NO: 1391894 - DNA, 15 bp, Homo sapiens
ggaatgttaagtaat

SEQ ID NO: 1391895 - DNA, 15 bp, Homo sapiens
tggaatgttaagtaa

SEQ ID NO: 1391896 - DNA, 15 bp, Homo sapiens
ttggaatgttaagta

SEQ ID NO: 1391897 - DNA, 15 bp, Homo sapiens
cttggaatgttaagt

SEQ ID NO: 1391898 - DNA, 15 bp, Homo sapiens
gcttggaatgttaag

SEQ ID NO: 1391899 - DNA, 15 bp, Homo sapiens
ggcttggaatgttaa

SEQ ID NO: 1391900 - DNA, 15 bp, Homo sapiens
aggcttggaatgtta

SEQ ID NO: 1391901 - DNA, 15 bp, Homo sapiens
aaggcttggaatgtt

SEQ ID NO: 1391902 - DNA, 15 bp, Homo sapiens
caaggcttggaatgt

SEQ ID NO: 1391903 - DNA, 15 bp, Homo sapiens
ccaaggcttggaatg

SEQ ID NO: 1391904 - DNA, 15 bp, Homo sapiens
accaaggcttggaat

SEQ ID NO: 1391905 - DNA, 15 bp, Homo sapiens
aaccaaggcttggaa

SEQ ID NO: 1391906 - DNA, 15 bp, Homo sapiens
aaaccaaggcttgga

SEQ ID NO: 1391907 - DNA, 15 bp, Homo sapiens
gaaaccaaggcttgg

SEQ ID NO: 1391908 - DNA, 15 bp, Homo sapiens
agaaaccaaggcttg

SEQ ID NO: 1391909 - DNA, 15 bp, Homo sapiens
aagaaaccaaggctt

SEQ ID NO: 1391910 - DNA, 15 bp, Homo sapiens
aaagaaaccaaggct

SEQ ID NO: 1391911 - DNA, 15 bp, Homo sapiens
gaaagaaaccaaggc

SEQ ID NO: 1391912 - DNA, 15 bp, Homo sapiens
agaaagaaaccaagg

SEQ ID NO: 1391913 - DNA, 15 bp, Homo sapiens
gagaaagaaaccaag

SEQ ID NO: 1391914 - DNA, 15 bp, Homo sapiens
agagaaagaaaccaa

SEQ ID NO: 1391915 - DNA, 15 bp, Homo sapiens
cagagaaagaaacca

SEQ ID NO: 1391916 - DNA, 15 bp, Homo sapiens
ccagagaaagaaacc

SEQ ID NO: 1391917 - DNA, 15 bp, Homo sapiens
tccagagaaagaaac

SEQ ID NO: 1391918 - DNA, 15 bp, Homo sapiens
ttccagagaaagaaa

SEQ ID NO: 1391919 - DNA, 15 bp, Homo sapiens
tttccagagaaagaa

SEQ ID NO: 1391920 - DNA, 15 bp, Homo sapiens
atttccagagaaaga

SEQ ID NO: 1391921 - DNA, 15 bp, Homo sapiens
catttccagagaaag

SEQ ID NO: 1391922 - DNA, 15 bp, Homo sapiens
tcatttccagagaaa

SEQ ID NO: 1391923 - DNA, 15 bp, Homo sapiens
ctcatttccagagaa

SEQ ID NO: 1391924 - DNA, 15 bp, Homo sapiens
tctcatttccagaga

SEQ ID NO: 1391925 - DNA, 15 bp, Homo sapiens
atctcatttccagag

SEQ ID NO: 1391926 - DNA, 15 bp, Homo sapiens
gatctcatttccaga

SEQ ID NO: 1391927 - DNA, 15 bp, Homo sapiens
cgatctcatttccag

SEQ ID NO: 1391928 - DNA, 15 bp, Homo sapiens
tcgatctcatttcca

SEQ ID NO: 1391929 - DNA, 15 bp, Homo sapiens
ctcgatctcatttcc

SEQ ID NO: 1391930 - DNA, 15 bp, Homo sapiens
tctcgatctcatttc

SEQ ID NO: 1391931 - DNA, 15 bp, Homo sapiens
gtctcgatctcattt

SEQ ID NO: 1391932 - DNA, 15 bp, Homo sapiens
agtctcgatctcatt

SEQ ID NO: 1391933 - DNA, 15 bp, Homo sapiens
aagtctcgatctcat

SEQ ID NO: 1391934 - DNA, 15 bp, Homo sapiens
taagtctcgatctca

SEQ ID NO: 1391935 - DNA, 15 bp, Homo sapiens
ctaagtctcgatctc

SEQ ID NO: 1391936 - DNA, 15 bp, Homo sapiens
tctaagtctcgatct

SEQ ID NO: 1391937 - DNA, 15 bp, Homo sapiens
ttctaagtctcgatc

SEQ ID NO: 1391938 - DNA, 15 bp, Homo sapiens
tttctaagtctcgat

SEQ ID NO: 1391939 - DNA, 15 bp, Homo sapiens
ctttctaagtctcga

SEQ ID NO: 1391940 - DNA, 15 bp, Homo sapiens
cctttctaagtctcg

SEQ ID NO: 1391941 - DNA, 15 bp, Homo sapiens
gcctttctaagtctc

SEQ ID NO: 1391942 - DNA, 15 bp, Homo sapiens
agcctttctaagtct

SEQ ID NO: 1391943 - DNA, 15 bp, Homo sapiens
tagcctttctaagtc

SEQ ID NO: 1391944 - DNA, 15 bp, Homo sapiens
ttagcctttctaagt

SEQ ID NO: 1391945 - DNA, 15 bp, Homo sapiens
cttagcctttctaag

SEQ ID NO: 1391946 - DNA, 15 bp, Homo sapiens
acttagcctttctaa

SEQ ID NO: 1391947 - DNA, 15 bp, Homo sapiens
tacttagcctttcta

SEQ ID NO: 1391948 - DNA, 15 bp, Homo sapiens
ttacttagcctttct

SEQ ID NO: 1391949 - DNA, 15 bp, Homo sapiens
gttacttagcctttc

SEQ ID NO: 1391950 - DNA, 15 bp, Homo sapiens
agttacttagccttt

SEQ ID NO: 1391951 - DNA, 15 bp, Homo sapiens
aagttacttagcctt

SEQ ID NO: 1391952 - DNA, 15 bp, Homo sapiens
caagttacttagcct

SEQ ID NO: 1391953 - DNA, 15 bp, Homo sapiens
gcaagttacttagcc

SEQ ID NO: 1391954 - DNA, 15 bp, Homo sapiens
ggcaagttacttagc

SEQ ID NO: 1391955 - DNA, 15 bp, Homo sapiens
gggcaagttacttag

SEQ ID NO: 1391956 - DNA, 15 bp, Homo sapiens
cttgggcaagttact

SEQ ID NO: 1391957 - DNA, 15 bp, Homo sapiens
tcttgggcaagttac

SEQ ID NO: 1391958 - DNA, 15 bp, Homo sapiens
atcttgggcaagtta

SEQ ID NO: 1391959 - DNA, 15 bp, Homo sapiens
gatcttgggcaagtt

SEQ ID NO: 1391960 - DNA, 15 bp, Homo sapiens
tgatcttgggcaagt

SEQ ID NO: 1391961 - DNA, 15 bp, Homo sapiens
gtgatcttgggcaag

SEQ ID NO: 1391962 - DNA, 15 bp, Homo sapiens
tgtgatcttgggcaa

SEQ ID NO: 1391963 - DNA, 15 bp, Homo sapiens
gtgtgatcttgggca

SEQ ID NO: 1391964 - DNA, 15 bp, Homo sapiens
tgtgtgatcttgggc

SEQ ID NO: 1391965 - DNA, 15 bp, Homo sapiens
cgctgtgtgatcttg

SEQ ID NO: 1391966 - DNA, 15 bp, Homo sapiens
ccgctgtgtgatctt

SEQ ID NO: 1391967 - DNA, 15 bp, Homo sapiens
cccgctgtgtgatct

SEQ ID NO: 1391968 - DNA, 15 bp, Homo sapiens
acccgctgtgtgatc

SEQ ID NO: 1391969 - DNA, 15 bp, Homo sapiens
tacccgctgtgtgat

SEQ ID NO: 1391970 - DNA, 15 bp, Homo sapiens
ttacccgctgtgtga

SEQ ID NO: 1391971 - DNA, 15 bp, Homo sapiens
attacccgctgtgtg

SEQ ID NO: 1391972 - DNA, 15 bp, Homo sapiens
aattacccgctgtgt

SEQ ID NO: 1391973 - DNA, 15 bp, Homo sapiens
aaattacccgctgtg

SEQ ID NO: 1391974 - DNA, 15 bp, Homo sapiens
caaattacccgctgt

SEQ ID NO: 1391975 - DNA, 15 bp, Homo sapiens
acaaattacccgctg

SEQ ID NO: 1391976 - DNA, 15 bp, Homo sapiens
aacaaattacccgct

SEQ ID NO: 1391977 - DNA, 15 bp, Homo sapiens
caacaaattacccgc

SEQ ID NO: 1391978 - DNA, 15 bp, Homo sapiens
acaacaaattacccg

SEQ ID NO: 1391979 - DNA, 15 bp, Homo sapiens
cacaacaaattaccc

SEQ ID NO: 1391980 - DNA, 15 bp, Homo sapiens
tcacaacaaattacc

SEQ ID NO: 1391981 - DNA, 15 bp, Homo sapiens
ctcacaacaaattac

SEQ ID NO: 1391982 - DNA, 15 bp, Homo sapiens
cctcacaacaaatta

SEQ ID NO: 1391983 - DNA, 15 bp, Homo sapiens
tcctcacaacaaatt

SEQ ID NO: 1391984 - DNA, 15 bp, Homo sapiens
atcctcacaacaaat

SEQ ID NO: 1391985 - DNA, 15 bp, Homo sapiens
aatcctcacaacaaa

SEQ ID NO: 1391986 - DNA, 15 bp, Homo sapiens
taatcctcacaacaa

SEQ ID NO: 1391987 - DNA, 15 bp, Homo sapiens
ttaatcctcacaaca

SEQ ID NO: 1391988 - DNA, 15 bp, Homo sapiens
tttaatcctcacaac

SEQ ID NO: 1391989 - DNA, 15 bp, Homo sapiens
ctttaatcctcacaa

SEQ ID NO: 1391990 - DNA, 15 bp, Homo sapiens
actttaatcctcaca

SEQ ID NO: 1391991 - DNA, 15 bp, Homo sapiens
tactttaatcctcac

SEQ ID NO: 1391992 - DNA, 15 bp, Homo sapiens
ctactttaatcctca

SEQ ID NO: 1391993 - DNA, 15 bp, Homo sapiens
actactttaatcctc

SEQ ID NO: 1391994 - DNA, 15 bp, Homo sapiens
aactactttaatcct

SEQ ID NO: 1391995 - DNA, 15 bp, Homo sapiens
aaactactttaatcc

SEQ ID NO: 1391996 - DNA, 15 bp, Homo sapiens
taaactactttaatc

SEQ ID NO: 1391997 - DNA, 15 bp, Homo sapiens
ttaaactactttaat

SEQ ID NO: 1391998 - DNA, 15 bp, Homo sapiens
attaaactactttaa

SEQ ID NO: 1391999 - DNA, 15 bp, Homo sapiens
gattaaactacttta

SEQ ID NO: 1392000 - DNA, 15 bp, Homo sapiens
agattaaactacttt

SEQ ID NO: 1392001 - DNA, 15 bp, Homo sapiens
tagattaaactactt

SEQ ID NO: 1392002 - DNA, 15 bp, Homo sapiens
atagattaaactact

SEQ ID NO: 1392003 - DNA, 15 bp, Homo sapiens
catagattaaactac

SEQ ID NO: 1392004 - DNA, 15 bp, Homo sapiens
acatagattaaacta

SEQ ID NO: 1392005 - DNA, 15 bp, Homo sapiens
aacatagattaaact

SEQ ID NO: 1392006 - DNA, 15 bp, Homo sapiens
taacatagattaaac

SEQ ID NO: 1392007 - DNA, 15 bp, Homo sapiens
ttaacatagattaaa

SEQ ID NO: 1392008 - DNA, 15 bp, Homo sapiens
cttaacatagattaa

SEQ ID NO: 1392009 - DNA, 15 bp, Homo sapiens
acttaacatagatta

SEQ ID NO: 1392010 - DNA, 15 bp, Homo sapiens
cacttaacatagatt

SEQ ID NO: 1392011 - DNA, 15 bp, Homo sapiens
acacttaacatagat

SEQ ID NO: 1392012 - DNA, 15 bp, Homo sapiens
gacacttaacataga

SEQ ID NO: 1392013 - DNA, 15 bp, Homo sapiens
tgacacttaacatag

SEQ ID NO: 1392014 - DNA, 15 bp, Homo sapiens
ttgacacttaacata

SEQ ID NO: 1392015 - DNA, 15 bp, Homo sapiens
cttgacacttaacat

SEQ ID NO: 1392016 - DNA, 15 bp, Homo sapiens
tcttgacacttaaca

SEQ ID NO: 1392017 - DNA, 15 bp, Homo sapiens
ttcttgacacttaac

SEQ ID NO: 1392018 - DNA, 15 bp, Homo sapiens
gttcttgacacttaa

SEQ ID NO: 1392019 - DNA, 15 bp, Homo sapiens
tgttcttgacactta

SEQ ID NO: 1392020 - DNA, 15 bp, Homo sapiens
ctgttcttgacactt

SEQ ID NO: 1392021 - DNA, 15 bp, Homo sapiens
actgttcttgacact

SEQ ID NO: 1392022 - DNA, 15 bp, Homo sapiens
cactgttcttgacac

SEQ ID NO: 1392023 - DNA, 15 bp, Homo sapiens
acactgttcttgaca

SEQ ID NO: 1392024 - DNA, 15 bp, Homo sapiens
cacactgttcttgac

SEQ ID NO: 1392025 - DNA, 15 bp, Homo sapiens
ccacactgttcttga

SEQ ID NO: 1392026 - DNA, 15 bp, Homo sapiens
cccacactgttcttg

SEQ ID NO: 1392027 - DNA, 15 bp, Homo sapiens
tcccacactgttctt

SEQ ID NO: 1392028 - DNA, 15 bp, Homo sapiens
gtcccacactgttct

SEQ ID NO: 1392029 - DNA, 15 bp, Homo sapiens
tgtcccacactgttc

SEQ ID NO: 1392030 - DNA, 15 bp, Homo sapiens
gtgtcccacactgtt

SEQ ID NO: 1392031 - DNA, 15 bp, Homo sapiens
tgtgtcccacactgt

SEQ ID NO: 1392032 - DNA, 15 bp, Homo sapiens
gtgtgtcccacactg

SEQ ID NO: 1392033 - DNA, 15 bp, Homo sapiens
tgtgtgtcccacact

SEQ ID NO: 1392034 - DNA, 15 bp, Homo sapiens
ctgtgtgtcccacac

SEQ ID NO: 1392035 - DNA, 15 bp, Homo sapiens
actgtgtgtcccaca

SEQ ID NO: 1392036 - DNA, 15 bp, Homo sapiens
tactgtgtgtcccac

SEQ ID NO: 1392037 - DNA, 15 bp, Homo sapiens
ttactgtgtgtccca

SEQ ID NO: 1392038 - DNA, 15 bp, Homo sapiens
cttactgtgtgtccc

SEQ ID NO: 1392039 - DNA, 15 bp, Homo sapiens
tcttactgtgtgtcc

SEQ ID NO: 1392040 - DNA, 15 bp, Homo sapiens
ctcttactgtgtgtc

SEQ ID NO: 1392041 - DNA, 15 bp, Homo sapiens
actcttactgtgtgt

SEQ ID NO: 1392042 - DNA, 15 bp, Homo sapiens
aactcttactgtgtg

SEQ ID NO: 1392043 - DNA, 15 bp, Homo sapiens
gaactcttactgtgt

SEQ ID NO: 1392044 - DNA, 15 bp, Homo sapiens
tgaactcttactgtg

SEQ ID NO: 1392045 - DNA, 15 bp, Homo sapiens
ctgaactcttactgt

SEQ ID NO: 1392046 - DNA, 15 bp, Homo sapiens
tctgaactcttactg

SEQ ID NO: 1392047 - DNA, 15 bp, Homo sapiens
atctgaactcttact

SEQ ID NO: 1392048 - DNA, 15 bp, Homo sapiens
tatctgaactcttac

SEQ ID NO: 1392049 - DNA, 15 bp, Homo sapiens
atatctgaactctta

SEQ ID NO: 1392050 - DNA, 15 bp, Homo sapiens
aatatctgaactctt

SEQ ID NO: 1392051 - DNA, 15 bp, Homo sapiens
taatatctgaactct

SEQ ID NO: 1392052 - DNA, 15 bp, Homo sapiens
ataatatctgaactc

SEQ ID NO: 1392053 - DNA, 15 bp, Homo sapiens
aataatatctgaact

SEQ ID NO: 1392054 - DNA, 15 bp, Homo sapiens
gaataatatctgaac

SEQ ID NO: 1392055 - DNA, 15 bp, Homo sapiens
cgaataatatctgaa

SEQ ID NO: 1392056 - DNA, 15 bp, Homo sapiens
gcgaataatatctga

SEQ ID NO: 1392057 - DNA, 15 bp, Homo sapiens
agcgaataatatctg

SEQ ID NO: 1392058 - DNA, 15 bp, Homo sapiens
tagcgaataatatct

SEQ ID NO: 1392059 - DNA, 15 bp, Homo sapiens
atagcgaataatatc

SEQ ID NO: 1392060 - DNA, 15 bp, Homo sapiens
aatagcgaataatat

SEQ ID NO: 1392061 - DNA, 15 bp, Homo sapiens
taatagcgaataata

SEQ ID NO: 1392062 - DNA, 15 bp, Homo sapiens
ataatagcgaataat

SEQ ID NO: 1392063 - DNA, 15 bp, Homo sapiens
tataatagcgaataa

SEQ ID NO: 1392064 - DNA, 15 bp, Homo sapiens
ttataatagcgaata

SEQ ID NO: 1392065 - DNA, 15 bp, Homo sapiens
tttataatagcgaat

SEQ ID NO: 1392066 - DNA, 15 bp, Homo sapiens
ctttataatagcgaa

SEQ ID NO: 1392067 - DNA, 15 bp, Homo sapiens
tctttataatagcga

SEQ ID NO: 1392068 - DNA, 15 bp, Homo sapiens
ctctttataatagcg

SEQ ID NO: 1392069 - DNA, 15 bp, Homo sapiens
gctctttataatagc

SEQ ID NO: 1392070 - DNA, 15 bp, Homo sapiens
ggctctttataatag

SEQ ID NO: 1392071 - DNA, 15 bp, Homo sapiens
tggctctttataata

SEQ ID NO: 1392072 - DNA, 15 bp, Homo sapiens
ttggctctttataat

SEQ ID NO: 1392073 - DNA, 15 bp, Homo sapiens
tttggctctttataa

SEQ ID NO: 1392074 - DNA, 15 bp, Homo sapiens
ttttggctctttata

SEQ ID NO: 1392075 - DNA, 15 bp, Homo sapiens
cttttggctctttat

SEQ ID NO: 1392076 - DNA, 15 bp, Homo sapiens
acttttggctcttta

SEQ ID NO: 1392077 - DNA, 15 bp, Homo sapiens
cacttttggctcttt

SEQ ID NO: 1392078 - DNA, 15 bp, Homo sapiens
acacttttggctctt

SEQ ID NO: 1392079 - DNA, 15 bp, Homo sapiens
gacacttttggctct

SEQ ID NO: 1392080 - DNA, 15 bp, Homo sapiens
tgacacttttggctc

SEQ ID NO: 1392081 - DNA, 15 bp, Homo sapiens
gtgacacttttggct

SEQ ID NO: 1392082 - DNA, 15 bp, Homo sapiens
agtgacacttttggc

SEQ ID NO: 1392083 - DNA, 15 bp, Homo sapiens
gagtgacacttttgg

SEQ ID NO: 1392084 - DNA, 15 bp, Homo sapiens
ggagtgacacttttg

SEQ ID NO: 1392085 - DNA, 15 bp, Homo sapiens
aggagtgacactttt

SEQ ID NO: 1392086 - DNA, 15 bp, Homo sapiens
taggagtgacacttt

SEQ ID NO: 1392087 - DNA, 15 bp, Homo sapiens
ttaggagtgacactt

SEQ ID NO: 1392088 - DNA, 15 bp, Homo sapiens
tttaggagtgacact

SEQ ID NO: 1392089 - DNA, 15 bp, Homo sapiens
gtttaggagtgacac

SEQ ID NO: 1392090 - DNA, 15 bp, Homo sapiens
agtttaggagtgaca

SEQ ID NO: 1392091 - DNA, 15 bp, Homo sapiens
aagtttaggagtgac

SEQ ID NO: 1392092 - DNA, 15 bp, Homo sapiens
gaagtttaggagtga

SEQ ID NO: 1392093 - DNA, 15 bp, Homo sapiens
tgaagtttaggagtg

SEQ ID NO: 1392094 - DNA, 15 bp, Homo sapiens
gtgaagtttaggagt

SEQ ID NO: 1392095 - DNA, 15 bp, Homo sapiens
ggtgaagtttaggag

SEQ ID NO: 1392096 - DNA, 15 bp, Homo sapiens
tggtgaagtttagga

SEQ ID NO: 1392097 - DNA, 15 bp, Homo sapiens
gtggtgaagtttagg

SEQ ID NO: 1392098 - DNA, 15 bp, Homo sapiens
agtggtgaagtttag

SEQ ID NO: 1392099 - DNA, 15 bp, Homo sapiens
tagtggtgaagttta

SEQ ID NO: 1392100 - DNA, 15 bp, Homo sapiens
atagtggtgaagttt

SEQ ID NO: 1392101 - DNA, 15 bp, Homo sapiens
aatagtggtgaagtt

SEQ ID NO: 1392102 - DNA, 15 bp, Homo sapiens
gaatagtggtgaagt

SEQ ID NO: 1392103 - DNA, 15 bp, Homo sapiens
agaatagtggtgaag

SEQ ID NO: 1392104 - DNA, 15 bp, Homo sapiens
aagaatagtggtgaa

SEQ ID NO: 1392105 - DNA, 15 bp, Homo sapiens
gaagaatagtggtga

SEQ ID NO: 1392106 - DNA, 15 bp, Homo sapiens
tgaagaatagtggtg

SEQ ID NO: 1392107 - DNA, 15 bp, Homo sapiens
atgaagaatagtggt

SEQ ID NO: 1392108 - DNA, 15 bp, Homo sapiens
aatgaagaatagtgg

SEQ ID NO: 1392109 - DNA, 15 bp, Homo sapiens
taatgaagaatagtg

SEQ ID NO: 1392110 - DNA, 15 bp, Homo sapiens
ctaatgaagaatagt

SEQ ID NO: 1392111 - DNA, 15 bp, Homo sapiens
actaatgaagaatag

SEQ ID NO: 1392112 - DNA, 15 bp, Homo sapiens
gactaatgaagaata

SEQ ID NO: 1392113 - DNA, 15 bp, Homo sapiens
agactaatgaagaat

SEQ ID NO: 1392114 - DNA, 15 bp, Homo sapiens
aagactaatgaagaa

SEQ ID NO: 1392115 - DNA, 15 bp, Homo sapiens
caagactaatgaaga

SEQ ID NO: 1392116 - DNA, 15 bp, Homo sapiens
acaagactaatgaag

SEQ ID NO: 1392117 - DNA, 15 bp, Homo sapiens
aacaagactaatgaa

SEQ ID NO: 1392118 - DNA, 15 bp, Homo sapiens
gaacaagactaatga

SEQ ID NO: 1392119 - DNA, 15 bp, Homo sapiens
tgaacaagactaatg

SEQ ID NO: 1392120 - DNA, 15 bp, Homo sapiens
ttgaacaagactaat

SEQ ID NO: 1392121 - DNA, 15 bp, Homo sapiens
tttgaacaagactaa

SEQ ID NO: 1392122 - DNA, 15 bp, Homo sapiens
atttgaacaagacta

SEQ ID NO: 1392123 - DNA, 15 bp, Homo sapiens
catttgaacaagact

SEQ ID NO: 1392124 - DNA, 15 bp, Homo sapiens
ccatttgaacaagac

SEQ ID NO: 1392125 - DNA, 15 bp, Homo sapiens
tccatttgaacaaga

SEQ ID NO: 1392126 - DNA, 15 bp, Homo sapiens
ttccatttgaacaag

SEQ ID NO: 1392127 - DNA, 15 bp, Homo sapiens
tttccatttgaacaa

SEQ ID NO: 1392128 - DNA, 15 bp, Homo sapiens
ttttccatttgaaca

SEQ ID NO: 1392129 - DNA, 15 bp, Homo sapiens
gttttccatttgaac

SEQ ID NO: 1392130 - DNA, 15 bp, Homo sapiens
agttttccatttgaa

SEQ ID NO: 1392131 - DNA, 15 bp, Homo sapiens
tagttttccatttga

SEQ ID NO: 1392132 - DNA, 15 bp, Homo sapiens
atagttttccatttg

SEQ ID NO: 1392133 - DNA, 15 bp, Homo sapiens
tatagttttccattt

SEQ ID NO: 1392134 - DNA, 15 bp, Homo sapiens
atatagttttccatt

SEQ ID NO: 1392135 - DNA, 15 bp, Homo sapiens
tatatagttttccat

SEQ ID NO: 1392136 - DNA, 15 bp, Homo sapiens
atatatagttttcca

SEQ ID NO: 1392137 - DNA, 15 bp, Homo sapiens
tatatatagttttcc

SEQ ID NO: 1392138 - DNA, 15 bp, Homo sapiens
ttatatatagttttc

SEQ ID NO: 1392139 - DNA, 15 bp, Homo sapiens
tttatatatagtttt

SEQ ID NO: 1392140 - DNA, 15 bp, Homo sapiens
ttttatatatagttt

SEQ ID NO: 1392141 - DNA, 15 bp, Homo sapiens
attttatatatagtt

SEQ ID NO: 1392142 - DNA, 15 bp, Homo sapiens
cattttatatatagt

SEQ ID NO: 1392143 - DNA, 15 bp, Homo sapiens
acattttatatatag

SEQ ID NO: 1392144 - DNA, 15 bp, Homo sapiens
gacattttatatata

SEQ ID NO: 1392145 - DNA, 15 bp, Homo sapiens
cgacattttatatat

SEQ ID NO: 1392146 - DNA, 15 bp, Homo sapiens
gcgacattttatata

SEQ ID NO: 1392147 - DNA, 15 bp, Homo sapiens
tgcgacattttatat

SEQ ID NO: 1392148 - DNA, 15 bp, Homo sapiens
ttgcgacattttata

SEQ ID NO: 1392149 - DNA, 15 bp, Homo sapiens
attgcgacattttat

SEQ ID NO: 1392150 - DNA, 15 bp, Homo sapiens
cattgcgacatttta

SEQ ID NO: 1392151 - DNA, 15 bp, Homo sapiens
tcattgcgacatttt

SEQ ID NO: 1392152 - DNA, 15 bp, Homo sapiens
ctcattgcgacattt

SEQ ID NO: 1392153 - DNA, 15 bp, Homo sapiens
tctcattgcgacatt

SEQ ID NO: 1392154 - DNA, 15 bp, Homo sapiens
ctctcattgcgacat

SEQ ID NO: 1392155 - DNA, 15 bp, Homo sapiens
tctctcattgcgaca

SEQ ID NO: 1392156 - DNA, 15 bp, Homo sapiens
ttctctcattgcgac

SEQ ID NO: 1392157 - DNA, 15 bp, Homo sapiens
attctctcattgcga

SEQ ID NO: 1392158 - DNA, 15 bp, Homo sapiens
tattctctcattgcg

SEQ ID NO: 1392159 - DNA, 15 bp, Homo sapiens
ttattctctcattgc

SEQ ID NO: 1392160 - DNA, 15 bp, Homo sapiens
cttattctctcattg

SEQ ID NO: 1392161 - DNA, 15 bp, Homo sapiens
tcttattctctcatt

SEQ ID NO: 1392162 - DNA, 15 bp, Homo sapiens
ctcttattctctcat

SEQ ID NO: 1392163 - DNA, 15 bp, Homo sapiens
gctcttattctctca

SEQ ID NO: 1392164 - DNA, 15 bp, Homo sapiens
ggctcttattctctc

SEQ ID NO: 1392165 - DNA, 15 bp, Homo sapiens
gggctcttattctct

SEQ ID NO: 1392166 - DNA, 15 bp, Homo sapiens
tgggctcttattctc

SEQ ID NO: 1392167 - DNA, 15 bp, Homo sapiens
ctgggctcttattct

SEQ ID NO: 1392168 - DNA, 15 bp, Homo sapiens
actgggctcttattc

SEQ ID NO: 1392169 - DNA, 15 bp, Homo sapiens
gactgggctcttatt

SEQ ID NO: 1392170 - DNA, 15 bp, Homo sapiens
agactgggctcttat

SEQ ID NO: 1392171 - DNA, 15 bp, Homo sapiens
aagactgggctctta

SEQ ID NO: 1392172 - DNA, 15 bp, Homo sapiens
taagactgggctctt

SEQ ID NO: 1392173 - DNA, 15 bp, Homo sapiens
ataagactgggctct

SEQ ID NO: 1392174 - DNA, 15 bp, Homo sapiens
cataagactgggctc

SEQ ID NO: 1392175 - DNA, 15 bp, Homo sapiens
gcataagactgggct

SEQ ID NO: 1392176 - DNA, 15 bp, Homo sapiens
agcataagactgggc

SEQ ID NO: 1392177 - DNA, 15 bp, Homo sapiens
gagcataagactggg

SEQ ID NO: 1392178 - DNA, 15 bp, Homo sapiens
agagcataagactgg

SEQ ID NO: 1392179 - DNA, 15 bp, Homo sapiens
cagagcataagactg

SEQ ID NO: 1392180 - DNA, 15 bp, Homo sapiens
gcagagcataagact

SEQ ID NO: 1392181 - DNA, 15 bp, Homo sapiens
tgcagagcataagac

SEQ ID NO: 1392182 - DNA, 15 bp, Homo sapiens
ttgcagagcataaga

SEQ ID NO: 1392183 - DNA, 15 bp, Homo sapiens
tttgcagagcataag

SEQ ID NO: 1392184 - DNA, 15 bp, Homo sapiens
ttttgcagagcataa

SEQ ID NO: 1392185 - DNA, 15 bp, Homo sapiens
cactagaaactgaca

SEQ ID NO: 1392186 - DNA, 15 bp, Homo sapiens
tcactagaaactgac

SEQ ID NO: 1392187 - DNA, 15 bp, Homo sapiens
gtcactagaaactga

SEQ ID NO: 1392188 - DNA, 15 bp, Homo sapiens
tgtcactagaaactg

SEQ ID NO: 1392189 - DNA, 15 bp, Homo sapiens
ctgtcactagaaact

SEQ ID NO: 1392190 - DNA, 15 bp, Homo sapiens
tctgtcactagaaac

SEQ ID NO: 1392191 - DNA, 15 bp, Homo sapiens
gtctgtcactagaaa

SEQ ID NO: 1392192 - DNA, 15 bp, Homo sapiens
agtctgtcactagaa

SEQ ID NO: 1392193 - DNA, 15 bp, Homo sapiens
tagtctgtcactaga

SEQ ID NO: 1392194 - DNA, 15 bp, Homo sapiens
atagtctgtcactag

SEQ ID NO: 1392195 - DNA, 15 bp, Homo sapiens
tatagtctgtcacta

SEQ ID NO: 1392196 - DNA, 15 bp, Homo sapiens
ttatagtctgtcact

SEQ ID NO: 1392197 - DNA, 15 bp, Homo sapiens
tttatagtctgtcac

SEQ ID NO: 1392198 - DNA, 15 bp, Homo sapiens
gtttatagtctgtca

SEQ ID NO: 1392199 - DNA, 15 bp, Homo sapiens
ggtttatagtctgtc

SEQ ID NO: 1392200 - DNA, 15 bp, Homo sapiens
aggtttatagtctgt

SEQ ID NO: 1392201 - DNA, 15 bp, Homo sapiens
taggtttatagtctg

SEQ ID NO: 1392202 - DNA, 15 bp, Homo sapiens
ctaggtttatagtct

SEQ ID NO: 1392203 - DNA, 15 bp, Homo sapiens
actaggtttatagtc

SEQ ID NO: 1392204 - DNA, 15 bp, Homo sapiens
gactaggtttatagt

SEQ ID NO: 1392205 - DNA, 15 bp, Homo sapiens
ggactaggtttatag

SEQ ID NO: 1392206 - DNA, 15 bp, Homo sapiens
cggactaggtttata

SEQ ID NO: 1392207 - DNA, 15 bp, Homo sapiens
ccggactaggtttat

SEQ ID NO: 1392208 - DNA, 15 bp, Homo sapiens
gccggactaggttta

SEQ ID NO: 1392209 - DNA, 15 bp, Homo sapiens
agccggactaggttt

SEQ ID NO: 1392210 - DNA, 15 bp, Homo sapiens
gagccggactaggtt

SEQ ID NO: 1392211 - DNA, 15 bp, Homo sapiens
tgagccggactaggt

SEQ ID NO: 1392212 - DNA, 15 bp, Homo sapiens
atgagccggactagg

SEQ ID NO: 1392213 - DNA, 15 bp, Homo sapiens
aatgagccggactag

SEQ ID NO: 1392214 - DNA, 15 bp, Homo sapiens
aaatgagccggacta

SEQ ID NO: 1392215 - DNA, 15 bp, Homo sapiens
gaaatgagccggact

SEQ ID NO: 1392216 - DNA, 15 bp, Homo sapiens
ggaaatgagccggac

SEQ ID NO: 1392217 - DNA, 15 bp, Homo sapiens
gggaaatgagccgga

SEQ ID NO: 1392218 - DNA, 15 bp, Homo sapiens
agggaaatgagccgg

SEQ ID NO: 1392219 - DNA, 15 bp, Homo sapiens
cagggaaatgagccg

SEQ ID NO: 1392220 - DNA, 15 bp, Homo sapiens
ccagggaaatgagcc

SEQ ID NO: 1392221 - DNA, 15 bp, Homo sapiens
cccagggaaatgagc

SEQ ID NO: 1392222 - DNA, 15 bp, Homo sapiens
gcccagggaaatgag

SEQ ID NO: 1392223 - DNA, 15 bp, Homo sapiens
agcccagggaaatga

SEQ ID NO: 1392224 - DNA, 15 bp, Homo sapiens
gagcccagggaaatg

SEQ ID NO: 1392225 - DNA, 15 bp, Homo sapiens
cgagcccagggaaat

SEQ ID NO: 1392226 - DNA, 15 bp, Homo sapiens
gcgagcccagggaaa

SEQ ID NO: 1392227 - DNA, 15 bp, Homo sapiens
agcgagcccagggaa

SEQ ID NO: 1392228 - DNA, 15 bp, Homo sapiens
cagcgagcccaggga

SEQ ID NO: 1392229 - DNA, 15 bp, Homo sapiens
acagcgagcccaggg

SEQ ID NO: 1392230 - DNA, 15 bp, Homo sapiens
aacagcgagcccagg

SEQ ID NO: 1392231 - DNA, 15 bp, Homo sapiens
taacagcgagcccag

SEQ ID NO: 1392232 - DNA, 15 bp, Homo sapiens
gtaacagcgagccca

SEQ ID NO: 1392233 - DNA, 15 bp, Homo sapiens
cgtaacagcgagccc

SEQ ID NO: 1392234 - DNA, 15 bp, Homo sapiens
ccgtaacagcgagcc

SEQ ID NO: 1392235 - DNA, 15 bp, Homo sapiens
tccgtaacagcgagc

SEQ ID NO: 1392236 - DNA, 15 bp, Homo sapiens
ttccgtaacagcgag

SEQ ID NO: 1392237 - DNA, 15 bp, Homo sapiens
tttccgtaacagcga

SEQ ID NO: 1392238 - DNA, 15 bp, Homo sapiens
ttttccgtaacagcg

SEQ ID NO: 1392239 - DNA, 15 bp, Homo sapiens
cttttccgtaacagc

SEQ ID NO: 1392240 - DNA, 15 bp, Homo sapiens
tcttttccgtaacag

SEQ ID NO: 1392241 - DNA, 15 bp, Homo sapiens
atcttttccgtaaca

SEQ ID NO: 1392242 - DNA, 15 bp, Homo sapiens
gatcttttccgtaac

SEQ ID NO: 1392243 - DNA, 15 bp, Homo sapiens
tgatcttttccgtaa

SEQ ID NO: 1392244 - DNA, 15 bp, Homo sapiens
atgatcttttccgta

SEQ ID NO: 1392245 - DNA, 15 bp, Homo sapiens
catgatcttttccgt

SEQ ID NO: 1392246 - DNA, 15 bp, Homo sapiens
ccatgatcttttccg

SEQ ID NO: 1392247 - DNA, 15 bp, Homo sapiens
accatgatcttttcc

SEQ ID NO: 1392248 - DNA, 15 bp, Homo sapiens
aaccatgatcttttc

SEQ ID NO: 1392249 - DNA, 15 bp, Homo sapiens
taaccatgatctttt

SEQ ID NO: 1392250 - DNA, 15 bp, Homo sapiens
gtaaccatgatcttt

SEQ ID NO: 1392251 - DNA, 15 bp, Homo sapiens
ggtaaccatgatctt

SEQ ID NO: 1392252 - DNA, 15 bp, Homo sapiens
tggtaaccatgatct

SEQ ID NO: 1392253 - DNA, 15 bp, Homo sapiens
ctggtaaccatgatc

SEQ ID NO: 1392254 - DNA, 15 bp, Homo sapiens
cctggtaaccatgat

SEQ ID NO: 1392255 - DNA, 15 bp, Homo sapiens
gcctggtaaccatga

SEQ ID NO: 1392256 - DNA, 15 bp, Homo sapiens
tgcctggtaaccatg

SEQ ID NO: 1392257 - DNA, 15 bp, Homo sapiens
ttgcctggtaaccat

SEQ ID NO: 1392258 - DNA, 15 bp, Homo sapiens
cttgcctggtaacca

SEQ ID NO: 1392259 - DNA, 15 bp, Homo sapiens
acttgcctggtaacc

SEQ ID NO: 1392260 - DNA, 15 bp, Homo sapiens
cacttgcctggtaac

SEQ ID NO: 1392261 - DNA, 15 bp, Homo sapiens
gcacttgcctggtaa

SEQ ID NO: 1392262 - DNA, 15 bp, Homo sapiens
agcacttgcctggta

SEQ ID NO: 1392263 - DNA, 15 bp, Homo sapiens
gagcacttgcctggt

SEQ ID NO: 1392264 - DNA, 15 bp, Homo sapiens
tgagcacttgcctgg

SEQ ID NO: 1392265 - DNA, 15 bp, Homo sapiens
ttgagcacttgcctg

SEQ ID NO: 1392266 - DNA, 15 bp, Homo sapiens
tttgagcacttgcct

SEQ ID NO: 1392267 - DNA, 15 bp, Homo sapiens
ctttgagcacttgcc

SEQ ID NO: 1392268 - DNA, 15 bp, Homo sapiens
tctttgagcacttgc

SEQ ID NO: 1392269 - DNA, 15 bp, Homo sapiens
ctctttgagcacttg

SEQ ID NO: 1392270 - DNA, 15 bp, Homo sapiens
tctctttgagcactt

SEQ ID NO: 1392271 - DNA, 15 bp, Homo sapiens
ctctctttgagcact

SEQ ID NO: 1392272 - DNA, 15 bp, Homo sapiens
actctctttgagcac

SEQ ID NO: 1392273 - DNA, 15 bp, Homo sapiens
gactctctttgagca

SEQ ID NO: 1392274 - DNA, 15 bp, Homo sapiens
ggactctctttgagc

SEQ ID NO: 1392275 - DNA, 15 bp, Homo sapiens
aggactctctttgag

SEQ ID NO: 1392276 - DNA, 15 bp, Homo sapiens
aaggactctctttga

SEQ ID NO: 1392277 - DNA, 15 bp, Homo sapiens
caaggactctctttg

SEQ ID NO: 1392278 - DNA, 15 bp, Homo sapiens
acaaggactctcttt

SEQ ID NO: 1392279 - DNA, 15 bp, Homo sapiens
cacaaggactctctt

SEQ ID NO: 1392280 - DNA, 15 bp, Homo sapiens
acacaaggactctct

SEQ ID NO: 1392281 - DNA, 15 bp, Homo sapiens
tacacaaggactctc

SEQ ID NO: 1392282 - DNA, 15 bp, Homo sapiens
ttacacaaggactct

SEQ ID NO: 1392283 - DNA, 15 bp, Homo sapiens
tttacacaaggactc

SEQ ID NO: 1392284 - DNA, 15 bp, Homo sapiens
ttttacacaaggact

SEQ ID NO: 1392285 - DNA, 15 bp, Homo sapiens
cttttacacaaggac

SEQ ID NO: 1392286 - DNA, 15 bp, Homo sapiens
tcttttacacaagga

SEQ ID NO: 1392287 - DNA, 15 bp, Homo sapiens
atcttttacacaagg

SEQ ID NO: 1392288 - DNA, 15 bp, Homo sapiens
catcttttacacaag

SEQ ID NO: 1392289 - DNA, 15 bp, Homo sapiens
ccatcttttacacaa

SEQ ID NO: 1392290 - DNA, 15 bp, Homo sapiens
cccatcttttacaca

SEQ ID NO: 1392291 - DNA, 15 bp, Homo sapiens
gcccatcttttacac

SEQ ID NO: 1392292 - DNA, 15 bp, Homo sapiens
cgcccatcttttaca

SEQ ID NO: 1392293 - DNA, 15 bp, Homo sapiens
tcgcccatcttttac

SEQ ID NO: 1392294 - DNA, 15 bp, Homo sapiens
ttcgcccatctttta

SEQ ID NO: 1392295 - DNA, 15 bp, Homo sapiens
attcgcccatctttt

SEQ ID NO: 1392296 - DNA, 15 bp, Homo sapiens
cattcgcccatcttt

SEQ ID NO: 1392297 - DNA, 15 bp, Homo sapiens
tcattcgcccatctt

SEQ ID NO: 1392298 - DNA, 15 bp, Homo sapiens
ttcattcgcccatct

SEQ ID NO: 1392299 - DNA, 15 bp, Homo sapiens
gttcattcgcccatc

SEQ ID NO: 1392300 - DNA, 15 bp, Homo sapiens
ggttcattcgcccat

SEQ ID NO: 1392301 - DNA, 15 bp, Homo sapiens
tggttcattcgccca

SEQ ID NO: 1392302 - DNA, 15 bp, Homo sapiens
gtggttcattcgccc

SEQ ID NO: 1392303 - DNA, 15 bp, Homo sapiens
tgtggttcattcgcc

SEQ ID NO: 1392304 - DNA, 15 bp, Homo sapiens
atgtggttcattcgc

SEQ ID NO: 1392305 - DNA, 15 bp, Homo sapiens
gatgtggttcattcg

SEQ ID NO: 1392306 - DNA, 15 bp, Homo sapiens
tgatgtggttcattc

SEQ ID NO: 1392307 - DNA, 15 bp, Homo sapiens
ctgatgtggttcatt

SEQ ID NO: 1392308 - DNA, 15 bp, Homo sapiens
actgatgtggttcat

SEQ ID NO: 1392309 - DNA, 15 bp, Homo sapiens
cactgatgtggttca

SEQ ID NO: 1392310 - DNA, 15 bp, Homo sapiens
gcactgatgtggttc

SEQ ID NO: 1392311 - DNA, 15 bp, Homo sapiens
agcactgatgtggtt

SEQ ID NO: 1392312 - DNA, 15 bp, Homo sapiens
aagcactgatgtggt

SEQ ID NO: 1392313 - DNA, 15 bp, Homo sapiens
gaagcactgatgtgg

SEQ ID NO: 1392314 - DNA, 15 bp, Homo sapiens
tgaagcactgatgtg

SEQ ID NO: 1392315 - DNA, 15 bp, Homo sapiens
ttgaagcactgatgt

SEQ ID NO: 1392316 - DNA, 15 bp, Homo sapiens
tttgaagcactgatg

SEQ ID NO: 1392317 - DNA, 15 bp, Homo sapiens
ctttgaagcactgat

SEQ ID NO: 1392318 - DNA, 15 bp, Homo sapiens
tctttgaagcactga

SEQ ID NO: 1392319 - DNA, 15 bp, Homo sapiens
ttctttgaagcactg

SEQ ID NO: 1392320 - DNA, 15 bp, Homo sapiens
cttctttgaagcact

SEQ ID NO: 1392321 - DNA, 15 bp, Homo sapiens
tcttctttgaagcac

SEQ ID NO: 1392322 - DNA, 15 bp, Homo sapiens
ttcttctttgaagca

SEQ ID NO: 1392323 - DNA, 15 bp, Homo sapiens
tttcttctttgaagc

SEQ ID NO: 1392324 - DNA, 15 bp, Homo sapiens
ttttcttctttgaag

SEQ ID NO: 1392325 - DNA, 15 bp, Homo sapiens
attttcttctttgaa

SEQ ID NO: 1392326 - DNA, 15 bp, Homo sapiens
tattttcttctttga

SEQ ID NO: 1392327 - DNA, 15 bp, Homo sapiens
ttattttcttctttg

SEQ ID NO: 1392328 - DNA, 15 bp, Homo sapiens
attattttcttcttt

SEQ ID NO: 1392329 - DNA, 15 bp, Homo sapiens
aattattttcttctt

SEQ ID NO: 1392330 - DNA, 15 bp, Homo sapiens
taattattttcttct

SEQ ID NO: 1392331 - DNA, 15 bp, Homo sapiens
ataattattttcttc

SEQ ID NO: 1392332 - DNA, 15 bp, Homo sapiens
gataattattttctt

SEQ ID NO: 1392333 - DNA, 15 bp, Homo sapiens
tgataattattttct

SEQ ID NO: 1392334 - DNA, 15 bp, Homo sapiens
ctgataattattttc

SEQ ID NO: 1392335 - DNA, 15 bp, Homo sapiens
gctgataattatttt

SEQ ID NO: 1392336 - DNA, 15 bp, Homo sapiens
tgctgataattattt

SEQ ID NO: 1392337 - DNA, 15 bp, Homo sapiens
gtgctgataattatt

SEQ ID NO: 1392338 - DNA, 15 bp, Homo sapiens
agtgctgataattat

SEQ ID NO: 1392339 - DNA, 15 bp, Homo sapiens
cagtgctgataatta

SEQ ID NO: 1392340 - DNA, 15 bp, Homo sapiens
tcagtgctgataatt

SEQ ID NO: 1392341 - DNA, 15 bp, Homo sapiens
atcagtgctgataat

SEQ ID NO: 1392342 - DNA, 15 bp, Homo sapiens
tatcagtgctgataa

SEQ ID NO: 1392343 - DNA, 15 bp, Homo sapiens
gtatcagtgctgata

SEQ ID NO: 1392344 - DNA, 15 bp, Homo sapiens
agtatcagtgctgat

SEQ ID NO: 1392345 - DNA, 15 bp, Homo sapiens
tagtatcagtgctga

SEQ ID NO: 1392346 - DNA, 15 bp, Homo sapiens
atagtatcagtgctg

SEQ ID NO: 1392347 - DNA, 15 bp, Homo sapiens
catagtatcagtgct

SEQ ID NO: 1392348 - DNA, 15 bp, Homo sapiens
ccatagtatcagtgc

SEQ ID NO: 1392349 - DNA, 15 bp, Homo sapiens
gccatagtatcagtg

SEQ ID NO: 1392350 - DNA, 15 bp, Homo sapiens
agccatagtatcagt

SEQ ID NO: 1392351 - DNA, 15 bp, Homo sapiens
cagccatagtatcag

SEQ ID NO: 1392352 - DNA, 15 bp, Homo sapiens
acagccatagtatca

SEQ ID NO: 1392353 - DNA, 15 bp, Homo sapiens
cacagccatagtatc

SEQ ID NO: 1392354 - DNA, 15 bp, Homo sapiens
ccacagccatagtat

SEQ ID NO: 1392355 - DNA, 15 bp, Homo sapiens
gccacagccatagta

SEQ ID NO: 1392356 - DNA, 15 bp, Homo sapiens
agccacagccatagt

SEQ ID NO: 1392357 - DNA, 15 bp, Homo sapiens
aagccacagccatag

SEQ ID NO: 1392358 - DNA, 15 bp, Homo sapiens
gaagccacagccata

SEQ ID NO: 1392359 - DNA, 15 bp, Homo sapiens
tgaagccacagccat

SEQ ID NO: 1392360 - DNA, 15 bp, Homo sapiens
atgaagccacagcca

SEQ ID NO: 1392361 - DNA, 15 bp, Homo sapiens
catgaagccacagcc

SEQ ID NO: 1392362 - DNA, 15 bp, Homo sapiens
gcatgaagccacagc

SEQ ID NO: 1392363 - DNA, 15 bp, Homo sapiens
ggcatgaagccacag

SEQ ID NO: 1392364 - DNA, 15 bp, Homo sapiens
aggcatgaagccaca

SEQ ID NO: 1392365 - DNA, 15 bp, Homo sapiens
caggcatgaagccac

SEQ ID NO: 1392366 - DNA, 15 bp, Homo sapiens
acaggcatgaagcca

SEQ ID NO: 1392367 - DNA, 15 bp, Homo sapiens
tacaggcatgaagcc

SEQ ID NO: 1392368 - DNA, 15 bp, Homo sapiens
ttacaggcatgaagc

SEQ ID NO: 1392369 - DNA, 15 bp, Homo sapiens
cttacaggcatgaag

SEQ ID NO: 1392370 - DNA, 15 bp, Homo sapiens
gcttacaggcatgaa

SEQ ID NO: 1392371 - DNA, 15 bp, Homo sapiens
tgcttacaggcatga

SEQ ID NO: 1392372 - DNA, 15 bp, Homo sapiens
gtgcttacaggcatg

SEQ ID NO: 1392373 - DNA, 15 bp, Homo sapiens
tgtgcttacaggcat

SEQ ID NO: 1392374 - DNA, 15 bp, Homo sapiens
ttgtgcttacaggca

SEQ ID NO: 1392375 - DNA, 15 bp, Homo sapiens
cttgtgcttacaggc

SEQ ID NO: 1392376 - DNA, 15 bp, Homo sapiens
acttgtgcttacagg

SEQ ID NO: 1392377 - DNA, 15 bp, Homo sapiens
gacttgtgcttacag

SEQ ID NO: 1392378 - DNA, 15 bp, Homo sapiens
tgacttgtgcttaca

SEQ ID NO: 1392379 - DNA, 15 bp, Homo sapiens
gtgacttgtgcttac

SEQ ID NO: 1392380 - DNA, 15 bp, Homo sapiens
agtgacttgtgctta

SEQ ID NO: 1392381 - DNA, 15 bp, Homo sapiens
cagtgacttgtgctt

SEQ ID NO: 1392382 - DNA, 15 bp, Homo sapiens
tcagtgacttgtgct

SEQ ID NO: 1392383 - DNA, 15 bp, Homo sapiens
ctcagtgacttgtgc

SEQ ID NO: 1392384 - DNA, 15 bp, Homo sapiens
tctcagtgacttgtg

SEQ ID NO: 1392385 - DNA, 15 bp, Homo sapiens
ttctcagtgacttgt

SEQ ID NO: 1392386 - DNA, 15 bp, Homo sapiens
tttctcagtgacttg

SEQ ID NO: 1392387 - DNA, 15 bp, Homo sapiens
atttctcagtgactt

SEQ ID NO: 1392388 - DNA, 15 bp, Homo sapiens
catttctcagtgact

SEQ ID NO: 1392389 - DNA, 15 bp, Homo sapiens
ccatttctcagtgac

SEQ ID NO: 1392390 - DNA, 15 bp, Homo sapiens
accatttctcagtga

SEQ ID NO: 1392391 - DNA, 15 bp, Homo sapiens
caccatttctcagtg

SEQ ID NO: 1392392 - DNA, 15 bp, Homo sapiens
ccaccatttctcagt

SEQ ID NO: 1392393 - DNA, 15 bp, Homo sapiens
accaccatttctcag

SEQ ID NO: 1392394 - DNA, 15 bp, Homo sapiens
gaccaccatttctca

SEQ ID NO: 1392395 - DNA, 15 bp, Homo sapiens
ggaccaccatttctc

SEQ ID NO: 1392396 - DNA, 15 bp, Homo sapiens
aggaccaccatttct

SEQ ID NO: 1392397 - DNA, 15 bp, Homo sapiens
caggaccaccatttc

SEQ ID NO: 1392398 - DNA, 15 bp, Homo sapiens
gcaggaccaccattt

SEQ ID NO: 1392399 - DNA, 15 bp, Homo sapiens
tgcaggaccaccatt

SEQ ID NO: 1392400 - DNA, 15 bp, Homo sapiens
atgcaggaccaccat

SEQ ID NO: 1392401 - DNA, 15 bp, Homo sapiens
tatgcaggaccacca

SEQ ID NO: 1392402 - DNA, 15 bp, Homo sapiens
ctatgcaggaccacc

SEQ ID NO: 1392403 - DNA, 15 bp, Homo sapiens
gctatgcaggaccac

SEQ ID NO: 1392404 - DNA, 15 bp, Homo sapiens
agctatgcaggacca

SEQ ID NO: 1392405 - DNA, 15 bp, Homo sapiens
aagctatgcaggacc

SEQ ID NO: 1392406 - DNA, 15 bp, Homo sapiens
aaagctatgcaggac

SEQ ID NO: 1392407 - DNA, 15 bp, Homo sapiens
caaagctatgcagga

SEQ ID NO: 1392408 - DNA, 15 bp, Homo sapiens
gcaaagctatgcagg

SEQ ID NO: 1392409 - DNA, 15 bp, Homo sapiens
tgcaaagctatgcag

SEQ ID NO: 1392410 - DNA, 15 bp, Homo sapiens
gtgcaaagctatgca

SEQ ID NO: 1392411 - DNA, 15 bp, Homo sapiens
agtgcaaagctatgc

SEQ ID NO: 1392412 - DNA, 15 bp, Homo sapiens
cagtgcaaagctatg

SEQ ID NO: 1392413 - DNA, 15 bp, Homo sapiens
ccagtgcaaagctat

SEQ ID NO: 1392414 - DNA, 15 bp, Homo sapiens
tccagtgcaaagcta

SEQ ID NO: 1392415 - DNA, 15 bp, Homo sapiens
atccagtgcaaagct

SEQ ID NO: 1392416 - DNA, 15 bp, Homo sapiens
catccagtgcaaagc

SEQ ID NO: 1392417 - DNA, 15 bp, Homo sapiens
gcatccagtgcaaag

SEQ ID NO: 1392418 - DNA, 15 bp, Homo sapiens
agcatccagtgcaaa

SEQ ID NO: 1392419 - DNA, 15 bp, Homo sapiens
gagcatccagtgcaa

SEQ ID NO: 1392420 - DNA, 15 bp, Homo sapiens
agagcatccagtgca

SEQ ID NO: 1392421 - DNA, 15 bp, Homo sapiens
tagagcatccagtgc

SEQ ID NO: 1392422 - DNA, 15 bp, Homo sapiens
gtagagcatccagtg

SEQ ID NO: 1392423 - DNA, 15 bp, Homo sapiens
tgtagagcatccagt

SEQ ID NO: 1392424 - DNA, 15 bp, Homo sapiens
ctgtagagcatccag

SEQ ID NO: 1392425 - DNA, 15 bp, Homo sapiens
tctgtagagcatcca

SEQ ID NO: 1392426 - DNA, 15 bp, Homo sapiens
atctgtagagcatcc

SEQ ID NO: 1392427 - DNA, 15 bp, Homo sapiens
aatctgtagagcatc

SEQ ID NO: 1392428 - DNA, 15 bp, Homo sapiens
aaatctgtagagcat

SEQ ID NO: 1392429 - DNA, 15 bp, Homo sapiens
caaatctgtagagca

SEQ ID NO: 1392430 - DNA, 15 bp, Homo sapiens
ccaaatctgtagagc

SEQ ID NO: 1392431 - DNA, 15 bp, Homo sapiens
tccaaatctgtagag

SEQ ID NO: 1392432 - DNA, 15 bp, Homo sapiens
gtccaaatctgtaga

SEQ ID NO: 1392433 - DNA, 15 bp, Homo sapiens
tgtccaaatctgtag

SEQ ID NO: 1392434 - DNA, 15 bp, Homo sapiens
gtgtccaaatctgta

SEQ ID NO: 1392435 - DNA, 15 bp, Homo sapiens
ggtgtccaaatctgt

SEQ ID NO: 1392436 - DNA, 15 bp, Homo sapiens
tggtgtccaaatctg

SEQ ID NO: 1392437 - DNA, 15 bp, Homo sapiens
ttggtgtccaaatct

SEQ ID NO: 1392438 - DNA, 15 bp, Homo sapiens
cttggtgtccaaatc

SEQ ID NO: 1392439 - DNA, 15 bp, Homo sapiens
tcttggtgtccaaat

SEQ ID NO: 1392440 - DNA, 15 bp, Homo sapiens
ctcttggtgtccaaa

SEQ ID NO: 1392441 - DNA, 15 bp, Homo sapiens
cctcttggtgtccaa

SEQ ID NO: 1392442 - DNA, 15 bp, Homo sapiens
acctcttggtgtcca

SEQ ID NO: 1392443 - DNA, 15 bp, Homo sapiens
tacctcttggtgtcc

SEQ ID NO: 1392444 - DNA, 15 bp, Homo sapiens
ctacctcttggtgtc

SEQ ID NO: 1392445 - DNA, 15 bp, Homo sapiens
tctacctcttggtgt

SEQ ID NO: 1392446 - DNA, 15 bp, Homo sapiens
atctacctcttggtg

SEQ ID NO: 1392447 - DNA, 15 bp, Homo sapiens
gatctacctcttggt

SEQ ID NO: 1392448 - DNA, 15 bp, Homo sapiens
agatctacctcttgg

SEQ ID NO: 1392449 - DNA, 15 bp, Homo sapiens
cagatctacctcttg

SEQ ID NO: 1392450 - DNA, 15 bp, Homo sapiens
gcagatctacctctt

SEQ ID NO: 1392451 - DNA, 15 bp, Homo sapiens
ggcagatctacctct

SEQ ID NO: 1392452 - DNA, 15 bp, Homo sapiens
tggcagatctacctc

SEQ ID NO: 1392453 - DNA, 15 bp, Homo sapiens
ttggcagatctacct

SEQ ID NO: 1392454 - DNA, 15 bp, Homo sapiens
cttggcagatctacc

SEQ ID NO: 1392455 - DNA, 15 bp, Homo sapiens
tcttggcagatctac

SEQ ID NO: 1392456 - DNA, 15 bp, Homo sapiens
ctcttggcagatcta

SEQ ID NO: 1392457 - DNA, 15 bp, Homo sapiens
cctcttggcagatct

SEQ ID NO: 1392458 - DNA, 15 bp, Homo sapiens
tcctcttggcagatc

SEQ ID NO: 1392459 - DNA, 15 bp, Homo sapiens
gtcctcttggcagat

SEQ ID NO: 1392460 - DNA, 15 bp, Homo sapiens
agtcctcttggcaga

SEQ ID NO: 1392461 - DNA, 15 bp, Homo sapiens
tagtcctcttggcag

SEQ ID NO: 1392462 - DNA, 15 bp, Homo sapiens
ctagtcctcttggca

SEQ ID NO: 1392463 - DNA, 15 bp, Homo sapiens
actagtcctcttggc

SEQ ID NO: 1392464 - DNA, 15 bp, Homo sapiens
gactagtcctcttgg

SEQ ID NO: 1392465 - DNA, 15 bp, Homo sapiens
ggactagtcctcttg

SEQ ID NO: 1392466 - DNA, 15 bp, Homo sapiens
aggactagtcctctt

SEQ ID NO: 1392467 - DNA, 15 bp, Homo sapiens
aaggactagtcctct

SEQ ID NO: 1392468 - DNA, 15 bp, Homo sapiens
aaaggactagtcctc

SEQ ID NO: 1392469 - DNA, 15 bp, Homo sapiens
caaaggactagtcct

SEQ ID NO: 1392470 - DNA, 15 bp, Homo sapiens
tcaaaggactagtcc

SEQ ID NO: 1392471 - DNA, 15 bp, Homo sapiens
ctcaaaggactagtc

SEQ ID NO: 1392472 - DNA, 15 bp, Homo sapiens
cctcaaaggactagt

SEQ ID NO: 1392473 - DNA, 15 bp, Homo sapiens
acctcaaaggactag

SEQ ID NO: 1392474 - DNA, 15 bp, Homo sapiens
aacctcaaaggacta

SEQ ID NO: 1392475 - DNA, 15 bp, Homo sapiens
taacctcaaaggact

SEQ ID NO: 1392476 - DNA, 15 bp, Homo sapiens
gtaacctcaaaggac

SEQ ID NO: 1392477 - DNA, 15 bp, Homo sapiens
agtaacctcaaagga

SEQ ID NO: 1392478 - DNA, 15 bp, Homo sapiens
aagtaacctcaaagg

SEQ ID NO: 1392479 - DNA, 15 bp, Homo sapiens
aaagtaacctcaaag

SEQ ID NO: 1392480 - DNA, 15 bp, Homo sapiens
taaagtaacctcaaa

SEQ ID NO: 1392481 - DNA, 15 bp, Homo sapiens
ctaaagtaacctcaa

SEQ ID NO: 1392482 - DNA, 15 bp, Homo sapiens
tctaaagtaacctca

SEQ ID NO: 1392483 - DNA, 15 bp, Homo sapiens
ttctaaagtaacctc

SEQ ID NO: 1392484 - DNA, 15 bp, Homo sapiens
gttctaaagtaacct

SEQ ID NO: 1392485 - DNA, 15 bp, Homo sapiens
tgttctaaagtaacc

SEQ ID NO: 1392486 - DNA, 15 bp, Homo sapiens
ttgttctaaagtaac

SEQ ID NO: 1392487 - DNA, 15 bp, Homo sapiens
tttgttctaaagtaa

SEQ ID NO: 1392488 - DNA, 15 bp, Homo sapiens
atttgttctaaagta

SEQ ID NO: 1392489 - DNA, 15 bp, Homo sapiens
catttgttctaaagt

SEQ ID NO: 1392490 - DNA, 15 bp, Homo sapiens
tcatttgttctaaag

SEQ ID NO: 1392491 - DNA, 15 bp, Homo sapiens
atcatttgttctaaa

SEQ ID NO: 1392492 - DNA, 15 bp, Homo sapiens
tatcatttgttctaa

SEQ ID NO: 1392493 - DNA, 15 bp, Homo sapiens
ctatcatttgttcta

SEQ ID NO: 1392494 - DNA, 15 bp, Homo sapiens
tctatcatttgttct

SEQ ID NO: 1392495 - DNA, 15 bp, Homo sapiens
gtctatcatttgttc

SEQ ID NO: 1392496 - DNA, 15 bp, Homo sapiens
agtctatcatttgtt

SEQ ID NO: 1392497 - DNA, 15 bp, Homo sapiens
cagtctatcatttgt

SEQ ID NO: 1392498 - DNA, 15 bp, Homo sapiens
acagtctatcatttg

SEQ ID NO: 1392499 - DNA, 15 bp, Homo sapiens
gacagtctatcattt

SEQ ID NO: 1392500 - DNA, 15 bp, Homo sapiens
tgacagtctatcatt

SEQ ID NO: 1392501 - DNA, 15 bp, Homo sapiens
ctgacagtctatcat

SEQ ID NO: 1392502 - DNA, 15 bp, Homo sapiens
cctgacagtctatca

SEQ ID NO: 1392503 - DNA, 15 bp, Homo sapiens
ccctgacagtctatc

SEQ ID NO: 1392504 - DNA, 15 bp, Homo sapiens
tccctgacagtctat

SEQ ID NO: 1392505 - DNA, 15 bp, Homo sapiens
atccctgacagtcta

SEQ ID NO: 1392506 - DNA, 15 bp, Homo sapiens
catccctgacagtct

SEQ ID NO: 1392507 - DNA, 15 bp, Homo sapiens
tcatccctgacagtc

SEQ ID NO: 1392508 - DNA, 15 bp, Homo sapiens
ttcatccctgacagt

SEQ ID NO: 1392509 - DNA, 15 bp, Homo sapiens
gttcatccctgacag

SEQ ID NO: 1392510 - DNA, 15 bp, Homo sapiens
agttcatccctgaca

SEQ ID NO: 1392511 - DNA, 15 bp, Homo sapiens
tagttcatccctgac

SEQ ID NO: 1392512 - DNA, 15 bp, Homo sapiens
atagttcatccctga

SEQ ID NO: 1392513 - DNA, 15 bp, Homo sapiens
tatagttcatccctg

SEQ ID NO: 1392514 - DNA, 15 bp, Homo sapiens
atatagttcatccct

SEQ ID NO: 1392515 - DNA, 15 bp, Homo sapiens
tatatagttcatccc

SEQ ID NO: 1392516 - DNA, 15 bp, Homo sapiens
atatatagttcatcc

SEQ ID NO: 1392517 - DNA, 15 bp, Homo sapiens
aatatatagttcatc

SEQ ID NO: 1392518 - DNA, 15 bp, Homo sapiens
caatatatagttcat

SEQ ID NO: 1392519 - DNA, 15 bp, Homo sapiens
gcaatatatagttca

SEQ ID NO: 1392520 - DNA, 15 bp, Homo sapiens
tgcaatatatagttc

SEQ ID NO: 1392521 - DNA, 15 bp, Homo sapiens
atgcaatatatagtt

SEQ ID NO: 1392522 - DNA, 15 bp, Homo sapiens
aatgcaatatatagt

SEQ ID NO: 1392523 - DNA, 15 bp, Homo sapiens
caatgcaatatatag

SEQ ID NO: 1392524 - DNA, 15 bp, Homo sapiens
ctcaatgcaatatat

SEQ ID NO: 1392525 - DNA, 15 bp, Homo sapiens
gctcaatgcaatata

SEQ ID NO: 1392526 - DNA, 15 bp, Homo sapiens
tgctcaatgcaatat

SEQ ID NO: 1392527 - DNA, 15 bp, Homo sapiens
ttgctcaatgcaata

SEQ ID NO: 1392528 - DNA, 15 bp, Homo sapiens
tttgctcaatgcaat

SEQ ID NO: 1392529 - DNA, 15 bp, Homo sapiens
ttttgctcaatgcaa

SEQ ID NO: 1392530 - DNA, 15 bp, Homo sapiens
cttttgctcaatgca

SEQ ID NO: 1392531 - DNA, 15 bp, Homo sapiens
acttttgctcaatgc

SEQ ID NO: 1392532 - DNA, 15 bp, Homo sapiens
aacttttgctcaatg

SEQ ID NO: 1392533 - DNA, 15 bp, Homo sapiens
gaacttttgctcaat

SEQ ID NO: 1392534 - DNA, 15 bp, Homo sapiens
agaacttttgctcaa

SEQ ID NO: 1392535 - DNA, 15 bp, Homo sapiens
cagaacttttgctca

SEQ ID NO: 1392536 - DNA, 15 bp, Homo sapiens
tcagaacttttgctc

SEQ ID NO: 1392537 - DNA, 15 bp, Homo sapiens
atcagaacttttgct

SEQ ID NO: 1392538 - DNA, 15 bp, Homo sapiens
tatcagaacttttgc

SEQ ID NO: 1392539 - DNA, 15 bp, Homo sapiens
ttatcagaacttttg

SEQ ID NO: 1392540 - DNA, 15 bp, Homo sapiens
attatcagaactttt

SEQ ID NO: 1392541 - DNA, 15 bp, Homo sapiens
tattatcagaacttt

SEQ ID NO: 1392542 - DNA, 15 bp, Homo sapiens
ctattatcagaactt

SEQ ID NO: 1392543 - DNA, 15 bp, Homo sapiens
tctattatcagaact

SEQ ID NO: 1392544 - DNA, 15 bp, Homo sapiens
atctattatcagaac

SEQ ID NO: 1392545 - DNA, 15 bp, Homo sapiens
catctattatcagaa

SEQ ID NO: 1392546 - DNA, 15 bp, Homo sapiens
acatctattatcaga

SEQ ID NO: 1392547 - DNA, 15 bp, Homo sapiens
gacatctattatcag

SEQ ID NO: 1392548 - DNA, 15 bp, Homo sapiens
tgacatctattatca

SEQ ID NO: 1392549 - DNA, 15 bp, Homo sapiens
atgacatctattatc

SEQ ID NO: 1392550 - DNA, 15 bp, Homo sapiens
aatgacatctattat

SEQ ID NO: 1392551 - DNA, 15 bp, Homo sapiens
aaatgacatctatta

SEQ ID NO: 1392552 - DNA, 15 bp, Homo sapiens
gaaatgacatctatt

SEQ ID NO: 1392553 - DNA, 15 bp, Homo sapiens
tgaaatgacatctat

SEQ ID NO: 1392554 - DNA, 15 bp, Homo sapiens
ctgaaatgacatcta

SEQ ID NO: 1392555 - DNA, 15 bp, Homo sapiens
actgaaatgacatct

SEQ ID NO: 1392556 - DNA, 15 bp, Homo sapiens
cactgaaatgacatc

SEQ ID NO: 1392557 - DNA, 15 bp, Homo sapiens
tcactgaaatgacat

SEQ ID NO: 1392558 - DNA, 15 bp, Homo sapiens
ctcactgaaatgaca

SEQ ID NO: 1392559 - DNA, 15 bp, Homo sapiens
cctcactgaaatgac

SEQ ID NO: 1392560 - DNA, 15 bp, Homo sapiens
tcctcactgaaatga

SEQ ID NO: 1392561 - DNA, 15 bp, Homo sapiens
gtcctcactgaaatg

SEQ ID NO: 1392562 - DNA, 15 bp, Homo sapiens
agtcctcactgaaat

SEQ ID NO: 1392563 - DNA, 15 bp, Homo sapiens
tagtcctcactgaaa

SEQ ID NO: 1392564 - DNA, 15 bp, Homo sapiens
atagtcctcactgaa

SEQ ID NO: 1392565 - DNA, 15 bp, Homo sapiens
tatagtcctcactga

SEQ ID NO: 1392566 - DNA, 15 bp, Homo sapiens
atatagtcctcactg

SEQ ID NO: 1392567 - DNA, 15 bp, Homo sapiens
catatagtcctcact

SEQ ID NO: 1392568 - DNA, 15 bp, Homo sapiens
gcatatagtcctcac

SEQ ID NO: 1392569 - DNA, 15 bp, Homo sapiens
tgcatatagtcctca

SEQ ID NO: 1392570 - DNA, 15 bp, Homo sapiens
atgcatatagtcctc

SEQ ID NO: 1392571 - DNA, 15 bp, Homo sapiens
catgcatatagtcct

SEQ ID NO: 1392572 - DNA, 15 bp, Homo sapiens
tcatgcatatagtcc

SEQ ID NO: 1392573 - DNA, 15 bp, Homo sapiens
gtcatgcatatagtc

SEQ ID NO: 1392574 - DNA, 15 bp, Homo sapiens
tgtcatgcatatagt

SEQ ID NO: 1392575 - DNA, 15 bp, Homo sapiens
ttgtcatgcatatag

SEQ ID NO: 1392576 - DNA, 15 bp, Homo sapiens
tttgtcatgcatata

SEQ ID NO: 1392577 - DNA, 15 bp, Homo sapiens
gtttgtcatgcatat

SEQ ID NO: 1392578 - DNA, 15 bp, Homo sapiens
agtttgtcatgcata

SEQ ID NO: 1392579 - DNA, 15 bp, Homo sapiens
aagtttgtcatgcat

SEQ ID NO: 1392580 - DNA, 15 bp, Homo sapiens
gaagtttgtcatgca

SEQ ID NO: 1392581 - DNA, 15 bp, Homo sapiens
agaagtttgtcatgc

SEQ ID NO: 1392582 - DNA, 15 bp, Homo sapiens
cagaagtttgtcatg

SEQ ID NO: 1392583 - DNA, 15 bp, Homo sapiens
acagaagtttgtcat

SEQ ID NO: 1392584 - DNA, 15 bp, Homo sapiens
gacagaagtttgtca

SEQ ID NO: 1392585 - DNA, 15 bp, Homo sapiens
agacagaagtttgtc

SEQ ID NO: 1392586 - DNA, 15 bp, Homo sapiens
gagacagaagtttgt

SEQ ID NO: 1392587 - DNA, 15 bp, Homo sapiens
agagacagaagtttg

SEQ ID NO: 1392588 - DNA, 15 bp, Homo sapiens
cagagacagaagttt

SEQ ID NO: 1392589 - DNA, 15 bp, Homo sapiens
tcagagacagaagtt

SEQ ID NO: 1392590 - DNA, 15 bp, Homo sapiens
atcagagacagaagt

SEQ ID NO: 1392591 - DNA, 15 bp, Homo sapiens
catcagagacagaag

SEQ ID NO: 1392592 - DNA, 15 bp, Homo sapiens
tcatcagagacagaa

SEQ ID NO: 1392593 - DNA, 15 bp, Homo sapiens
atcatcagagacaga

SEQ ID NO: 1392594 - DNA, 15 bp, Homo sapiens
tatcatcagagacag

SEQ ID NO: 1392595 - DNA, 15 bp, Homo sapiens
ctatcatcagagaca

SEQ ID NO: 1392596 - DNA, 15 bp, Homo sapiens
tctatcatcagagac

SEQ ID NO: 1392597 - DNA, 15 bp, Homo sapiens
ttctatcatcagaga

SEQ ID NO: 1392598 - DNA, 15 bp, Homo sapiens
cttctatcatcagag

SEQ ID NO: 1392599 - DNA, 15 bp, Homo sapiens
tcttctatcatcaga

SEQ ID NO: 1392600 - DNA, 15 bp, Homo sapiens
gtcttctatcatcag

SEQ ID NO: 1392601 - DNA, 15 bp, Homo sapiens
ggtcttctatcatca

SEQ ID NO: 1392602 - DNA, 15 bp, Homo sapiens
aggtcttctatcatc

SEQ ID NO: 1392603 - DNA, 15 bp, Homo sapiens
aaggtcttctatcat

SEQ ID NO: 1392604 - DNA, 15 bp, Homo sapiens
aaaggtcttctatca

SEQ ID NO: 1392605 - DNA, 15 bp, Homo sapiens
caaaggtcttctatc

SEQ ID NO: 1392606 - DNA, 15 bp, Homo sapiens
ccaaaggtcttctat

SEQ ID NO: 1392607 - DNA, 15 bp, Homo sapiens
accaaaggtcttcta

SEQ ID NO: 1392608 - DNA, 15 bp, Homo sapiens
caccaaaggtcttct

SEQ ID NO: 1392609 - DNA, 15 bp, Homo sapiens
tcaccaaaggtcttc

SEQ ID NO: 1392610 - DNA, 15 bp, Homo sapiens
ttcaccaaaggtctt

SEQ ID NO: 1392611 - DNA, 15 bp, Homo sapiens
attcaccaaaggtct

SEQ ID NO: 1392612 - DNA, 15 bp, Homo sapiens
cattcaccaaaggtc

SEQ ID NO: 1392613 - DNA, 15 bp, Homo sapiens
gcattcaccaaaggt

SEQ ID NO: 1392614 - DNA, 15 bp, Homo sapiens
tgcattcaccaaagg

SEQ ID NO: 1392615 - DNA, 15 bp, Homo sapiens
atgcattcaccaaag

SEQ ID NO: 1392616 - DNA, 15 bp, Homo sapiens
tatgcattcaccaaa

SEQ ID NO: 1392617 - DNA, 15 bp, Homo sapiens
gtatgcattcaccaa

SEQ ID NO: 1392618 - DNA, 15 bp, Homo sapiens
tgtatgcattcacca

SEQ ID NO: 1392619 - DNA, 15 bp, Homo sapiens
atgtatgcattcacc

SEQ ID NO: 1392620 - DNA, 15 bp, Homo sapiens
gatgtatgcattcac

SEQ ID NO: 1392621 - DNA, 15 bp, Homo sapiens
agatgtatgcattca

SEQ ID NO: 1392622 - DNA, 15 bp, Homo sapiens
cagatgtatgcattc

SEQ ID NO: 1392623 - DNA, 15 bp, Homo sapiens
acagatgtatgcatt

SEQ ID NO: 1392624 - DNA, 15 bp, Homo sapiens
tacagatgtatgcat

SEQ ID NO: 1392625 - DNA, 15 bp, Homo sapiens
ttacagatgtatgca

SEQ ID NO: 1392626 - DNA, 15 bp, Homo sapiens
aattacagatgtatg

SEQ ID NO: 1392627 - DNA, 15 bp, Homo sapiens
gaattacagatgtat

SEQ ID NO: 1392628 - DNA, 15 bp, Homo sapiens
tgaattacagatgta

SEQ ID NO: 1392629 - DNA, 15 bp, Homo sapiens
gtgaattacagatgt

SEQ ID NO: 1392630 - DNA, 15 bp, Homo sapiens
tgtgaattacagatg

SEQ ID NO: 1392631 - DNA, 15 bp, Homo sapiens
atgtgaattacagat

SEQ ID NO: 1392632 - DNA, 15 bp, Homo sapiens
tatgtgaattacaga

SEQ ID NO: 1392633 - DNA, 15 bp, Homo sapiens
ctatgtgaattacag

SEQ ID NO: 1392634 - DNA, 15 bp, Homo sapiens
gctatgtgaattaca

SEQ ID NO: 1392635 - DNA, 15 bp, Homo sapiens
agctatgtgaattac

SEQ ID NO: 1392636 - DNA, 15 bp, Homo sapiens
cagctatgtgaatta

SEQ ID NO: 1392637 - DNA, 15 bp, Homo sapiens
ccagctatgtgaatt

SEQ ID NO: 1392638 - DNA, 15 bp, Homo sapiens
gccagctatgtgaat

SEQ ID NO: 1392639 - DNA, 15 bp, Homo sapiens
tgccagctatgtgaa

SEQ ID NO: 1392640 - DNA, 15 bp, Homo sapiens
gtgccagctatgtga

SEQ ID NO: 1392641 - DNA, 15 bp, Homo sapiens
tgtgccagctatgtg

SEQ ID NO: 1392642 - DNA, 15 bp, Homo sapiens
atgtgccagctatgt

SEQ ID NO: 1392643 - DNA, 15 bp, Homo sapiens
catgtgccagctatg

SEQ ID NO: 1392644 - DNA, 15 bp, Homo sapiens
acatgtgccagctat

SEQ ID NO: 1392645 - DNA, 15 bp, Homo sapiens
tacatgtgccagcta

SEQ ID NO: 1392646 - DNA, 15 bp, Homo sapiens
gtacatgtgccagct

SEQ ID NO: 1392647 - DNA, 15 bp, Homo sapiens
tgtacatgtgccagc

SEQ ID NO: 1392648 - DNA, 15 bp, Homo sapiens
ttgtacatgtgccag

SEQ ID NO: 1392649 - DNA, 15 bp, Homo sapiens
tttgtacatgtgcca

SEQ ID NO: 1392650 - DNA, 15 bp, Homo sapiens
gtttgtacatgtgcc

SEQ ID NO: 1392651 - DNA, 15 bp, Homo sapiens
ggtttgtacatgtgc

SEQ ID NO: 1392652 - DNA, 15 bp, Homo sapiens
gggtttgtacatgtg

SEQ ID NO: 1392653 - DNA, 15 bp, Homo sapiens
agggtttgtacatgt

SEQ ID NO: 1392654 - DNA, 15 bp, Homo sapiens
gagggtttgtacatg

SEQ ID NO: 1392655 - DNA, 15 bp, Homo sapiens
ggagggtttgtacat

SEQ ID NO: 1392656 - DNA, 15 bp, Homo sapiens
tggagggtttgtaca

SEQ ID NO: 1392657 - DNA, 15 bp, Homo sapiens
ttggagggtttgtac

SEQ ID NO: 1392658 - DNA, 15 bp, Homo sapiens
tttggagggtttgta

SEQ ID NO: 1392659 - DNA, 15 bp, Homo sapiens
atttggagggtttgt

SEQ ID NO: 1392660 - DNA, 15 bp, Homo sapiens
aatttggagggtttg

SEQ ID NO: 1392661 - DNA, 15 bp, Homo sapiens
aaatttggagggttt

SEQ ID NO: 1392662 - DNA, 15 bp, Homo sapiens
taaatttggagggtt

SEQ ID NO: 1392663 - DNA, 15 bp, Homo sapiens
ataaatttggagggt

SEQ ID NO: 1392664 - DNA, 15 bp, Homo sapiens
cataaatttggaggg

SEQ ID NO: 1392665 - DNA, 15 bp, Homo sapiens
acataaatttggagg

SEQ ID NO: 1392666 - DNA, 15 bp, Homo sapiens
aacataaatttggag

SEQ ID NO: 1392667 - DNA, 15 bp, Homo sapiens
caacataaatttgga

SEQ ID NO: 1392668 - DNA, 15 bp, Homo sapiens
ccaacataaatttgg

SEQ ID NO: 1392669 - DNA, 15 bp, Homo sapiens
cccaacataaatttg

SEQ ID NO: 1392670 - DNA, 15 bp, Homo sapiens
acccaacataaattt

SEQ ID NO: 1392671 - DNA, 15 bp, Homo sapiens
aacccaacataaatt

SEQ ID NO: 1392672 - DNA, 15 bp, Homo sapiens
aaacccaacataaat

SEQ ID NO: 1392673 - DNA, 15 bp, Homo sapiens
caaacccaacataaa

SEQ ID NO: 1392674 - DNA, 15 bp, Homo sapiens
ccaaacccaacataa

SEQ ID NO: 1392675 - DNA, 15 bp, Homo sapiens
accaaacccaacata

SEQ ID NO: 1392676 - DNA, 15 bp, Homo sapiens
taccaaacccaacat

SEQ ID NO: 1392677 - DNA, 15 bp, Homo sapiens
ttaccaaacccaaca

SEQ ID NO: 1392678 - DNA, 15 bp, Homo sapiens
attaccaaacccaac

SEQ ID NO: 1392679 - DNA, 15 bp, Homo sapiens
gattaccaaacccaa

SEQ ID NO: 1392680 - DNA, 15 bp, Homo sapiens
ggattaccaaaccca

SEQ ID NO: 1392681 - DNA, 15 bp, Homo sapiens
aggattaccaaaccc

SEQ ID NO: 1392682 - DNA, 15 bp, Homo sapiens
aaggattaccaaacc

SEQ ID NO: 1392683 - DNA, 15 bp, Homo sapiens
taaggattaccaaac

SEQ ID NO: 1392684 - DNA, 15 bp, Homo sapiens
ataaggattaccaaa

SEQ ID NO: 1392685 - DNA, 15 bp, Homo sapiens
aataaggattaccaa

SEQ ID NO: 1392686 - DNA, 15 bp, Homo sapiens
caataaggattacca

SEQ ID NO: 1392687 - DNA, 15 bp, Homo sapiens
gcaataaggattacc

SEQ ID NO: 1392688 - DNA, 15 bp, Homo sapiens
ggcaataaggattac

SEQ ID NO: 1392689 - DNA, 15 bp, Homo sapiens
gggcaataaggatta

SEQ ID NO: 1392690 - DNA, 15 bp, Homo sapiens
tgggcaataaggatt

SEQ ID NO: 1392691 - DNA, 15 bp, Homo sapiens
ctgggcaataaggat

SEQ ID NO: 1392692 - DNA, 15 bp, Homo sapiens
actgggcaataagga

SEQ ID NO: 1392693 - DNA, 15 bp, Homo sapiens
aactgggcaataagg

SEQ ID NO: 1392694 - DNA, 15 bp, Homo sapiens
taactgggcaataag

SEQ ID NO: 1392695 - DNA, 15 bp, Homo sapiens
ataactgggcaataa

SEQ ID NO: 1392696 - DNA, 15 bp, Homo sapiens
gataactgggcaata

SEQ ID NO: 1392697 - DNA, 15 bp, Homo sapiens
tgataactgggcaat

SEQ ID NO: 1392698 - DNA, 15 bp, Homo sapiens
atgataactgggcaa

SEQ ID NO: 1392699 - DNA, 15 bp, Homo sapiens
tatgataactgggca

SEQ ID NO: 1392700 - DNA, 15 bp, Homo sapiens
ttatgataactgggc

SEQ ID NO: 1392701 - DNA, 15 bp, Homo sapiens
attatgataactggg

SEQ ID NO: 1392702 - DNA, 15 bp, Homo sapiens
aattatgataactgg

SEQ ID NO: 1392703 - DNA, 15 bp, Homo sapiens
aaattatgataactg

SEQ ID NO: 1392704 - DNA, 15 bp, Homo sapiens
taaattatgataact

SEQ ID NO: 1392705 - DNA, 15 bp, Homo sapiens
gtaaattatgataac

SEQ ID NO: 1392706 - DNA, 15 bp, Homo sapiens
ggtaaattatgataa

SEQ ID NO: 1392707 - DNA, 15 bp, Homo sapiens
tggtaaattatgata

SEQ ID NO: 1392708 - DNA, 15 bp, Homo sapiens
ttggtaaattatgat

SEQ ID NO: 1392709 - DNA, 15 bp, Homo sapiens
cttggtaaattatga

SEQ ID NO: 1392710 - DNA, 15 bp, Homo sapiens
ccttggtaaattatg

SEQ ID NO: 1392711 - DNA, 15 bp, Homo sapiens
accttggtaaattat

SEQ ID NO: 1392712 - DNA, 15 bp, Homo sapiens
taccttggtaaatta

SEQ ID NO: 1392713 - DNA, 15 bp, Homo sapiens
ttaccttggtaaatt

SEQ ID NO: 1392714 - DNA, 15 bp, Homo sapiens
gttaccttggtaaat

SEQ ID NO: 1392715 - DNA, 15 bp, Homo sapiens
tgttaccttggtaaa

SEQ ID NO: 1392716 - DNA, 15 bp, Homo sapiens
atgttaccttggtaa

SEQ ID NO: 1392717 - DNA, 15 bp, Homo sapiens
gatgttaccttggta

SEQ ID NO: 1392718 - DNA, 15 bp, Homo sapiens
ggatgttaccttggt

SEQ ID NO: 1392719 - DNA, 15 bp, Homo sapiens
gggatgttaccttgg

SEQ ID NO: 1392720 - DNA, 15 bp, Homo sapiens
agggatgttaccttg

SEQ ID NO: 1392721 - DNA, 15 bp, Homo sapiens
gagggatgttacctt

SEQ ID NO: 1392722 - DNA, 15 bp, Homo sapiens
ggagggatgttacct

SEQ ID NO: 1392723 - DNA, 15 bp, Homo sapiens
gggagggatgttacc

SEQ ID NO: 1392724 - DNA, 15 bp, Homo sapiens
ggggagggatgttac

SEQ ID NO: 1392725 - DNA, 15 bp, Homo sapiens
tggggagggatgtta

SEQ ID NO: 1392726 - DNA, 15 bp, Homo sapiens
ctggggagggatgtt

SEQ ID NO: 1392727 - DNA, 15 bp, Homo sapiens
gctggggagggatgt

SEQ ID NO: 1392728 - DNA, 15 bp, Homo sapiens
ggctggggagggatg

SEQ ID NO: 1392729 - DNA, 15 bp, Homo sapiens
tggctggggagggat

SEQ ID NO: 1392730 - DNA, 15 bp, Homo sapiens
ctggctggggaggga

SEQ ID NO: 1392731 - DNA, 15 bp, Homo sapiens
gctggctggggaggg

SEQ ID NO: 1392732 - DNA, 15 bp, Homo sapiens
ggctggctggggagg

SEQ ID NO: 1392733 - DNA, 15 bp, Homo sapiens
tggctggctggggag

SEQ ID NO: 1392734 - DNA, 15 bp, Homo sapiens
atggctggctgggga

SEQ ID NO: 1392735 - DNA, 15 bp, Homo sapiens
aatggctggctgggg

SEQ ID NO: 1392736 - DNA, 15 bp, Homo sapiens
taatggctggctggg

SEQ ID NO: 1392737 - DNA, 15 bp, Homo sapiens
gtaatggctggctgg

SEQ ID NO: 1392738 - DNA, 15 bp, Homo sapiens
ggtaatggctggctg

SEQ ID NO: 1392739 - DNA, 15 bp, Homo sapiens
tggtaatggctggct

SEQ ID NO: 1392740 - DNA, 15 bp, Homo sapiens
atggtaatggctggc

SEQ ID NO: 1392741 - DNA, 15 bp, Homo sapiens
gatggtaatggctgg

SEQ ID NO: 1392742 - DNA, 15 bp, Homo sapiens
tgatggtaatggctg

SEQ ID NO: 1392743 - DNA, 15 bp, Homo sapiens
ctgatggtaatggct

SEQ ID NO: 1392744 - DNA, 15 bp, Homo sapiens
cctgatggtaatggc

SEQ ID NO: 1392745 - DNA, 15 bp, Homo sapiens
ccctgatggtaatgg

SEQ ID NO: 1392746 - DNA, 15 bp, Homo sapiens
tccctgatggtaatg

SEQ ID NO: 1392747 - DNA, 15 bp, Homo sapiens
ttccctgatggtaat

SEQ ID NO: 1392748 - DNA, 15 bp, Homo sapiens
tttccctgatggtaa

SEQ ID NO: 1392749 - DNA, 15 bp, Homo sapiens
gtttccctgatggta

SEQ ID NO: 1392750 - DNA, 15 bp, Homo sapiens
agtttccctgatggt

SEQ ID NO: 1392751 - DNA, 15 bp, Homo sapiens
cagtttccctgatgg

SEQ ID NO: 1392752 - DNA, 15 bp, Homo sapiens
gcagtttccctgatg

SEQ ID NO: 1392753 - DNA, 15 bp, Homo sapiens
agcagtttccctgat

SEQ ID NO: 1392754 - DNA, 15 bp, Homo sapiens
aagcagtttccctga

SEQ ID NO: 1392755 - DNA, 15 bp, Homo sapiens
aaagcagtttccctg

SEQ ID NO: 1392756 - DNA, 15 bp, Homo sapiens
caaagcagtttccct

SEQ ID NO: 1392757 - DNA, 15 bp, Homo sapiens
acaaagcagtttccc

SEQ ID NO: 1392758 - DNA, 15 bp, Homo sapiens
aacaaagcagtttcc

SEQ ID NO: 1392759 - DNA, 15 bp, Homo sapiens
aaacaaagcagtttc

SEQ ID NO: 1392760 - DNA, 15 bp, Homo sapiens
caaacaaagcagttt

SEQ ID NO: 1392761 - DNA, 15 bp, Homo sapiens
ccaaacaaagcagtt

SEQ ID NO: 1392762 - DNA, 15 bp, Homo sapiens
gccaaacaaagcagt

SEQ ID NO: 1392763 - DNA, 15 bp, Homo sapiens
agccaaacaaagcag

SEQ ID NO: 1392764 - DNA, 15 bp, Homo sapiens
aagccaaacaaagca

SEQ ID NO: 1392765 - DNA, 15 bp, Homo sapiens
gaagccaaacaaagc

SEQ ID NO: 1392766 - DNA, 15 bp, Homo sapiens
tgaagccaaacaaag

SEQ ID NO: 1392767 - DNA, 15 bp, Homo sapiens
ctgaagccaaacaaa

SEQ ID NO: 1392768 - DNA, 15 bp, Homo sapiens
cctgaagccaaacaa

SEQ ID NO: 1392769 - DNA, 15 bp, Homo sapiens
ccctgaagccaaaca

SEQ ID NO: 1392770 - DNA, 15 bp, Homo sapiens
gccctgaagccaaac

SEQ ID NO: 1392771 - DNA, 15 bp, Homo sapiens
tgccctgaagccaaa

SEQ ID NO: 1392772 - DNA, 15 bp, Homo sapiens
gtgccctgaagccaa

SEQ ID NO: 1392773 - DNA, 15 bp, Homo sapiens
ggtgccctgaagcca

SEQ ID NO: 1392774 - DNA, 15 bp, Homo sapiens
tggtgccctgaagcc

SEQ ID NO: 1392775 - DNA, 15 bp, Homo sapiens
ctggtgccctgaagc

SEQ ID NO: 1392776 - DNA, 15 bp, Homo sapiens
gctggtgccctgaag

SEQ ID NO: 1392777 - DNA, 15 bp, Homo sapiens
ggctggtgccctgaa

SEQ ID NO: 1392778 - DNA, 15 bp, Homo sapiens
tggctggtgccctga

SEQ ID NO: 1392779 - DNA, 15 bp, Homo sapiens
gtggctggtgccctg

SEQ ID NO: 1392780 - DNA, 15 bp, Homo sapiens
cgtggctggtgccct

SEQ ID NO: 1392781 - DNA, 15 bp, Homo sapiens
ccgtggctggtgccc

SEQ ID NO: 1392782 - DNA, 15 bp, Homo sapiens
tccgtggctggtgcc

SEQ ID NO: 1392783 - DNA, 15 bp, Homo sapiens
ttccgtggctggtgc

SEQ ID NO: 1392784 - DNA, 15 bp, Homo sapiens
cttccgtggctggtg

SEQ ID NO: 1392785 - DNA, 15 bp, Homo sapiens
ccttccgtggctggt

SEQ ID NO: 1392786 - DNA, 15 bp, Homo sapiens
cccttccgtggctgg

SEQ ID NO: 1392787 - DNA, 15 bp, Homo sapiens
gcccttccgtggctg

SEQ ID NO: 1392788 - DNA, 15 bp, Homo sapiens
ggcccttccgtggct

SEQ ID NO: 1392789 - DNA, 15 bp, Homo sapiens
gggcccttccgtggc

SEQ ID NO: 1392790 - DNA, 15 bp, Homo sapiens
agggcccttccgtgg

SEQ ID NO: 1392791 - DNA, 15 bp, Homo sapiens
gagggcccttccgtg

SEQ ID NO: 1392792 - DNA, 15 bp, Homo sapiens
agagggcccttccgt

SEQ ID NO: 1392793 - DNA, 15 bp, Homo sapiens
cagagggcccttccg

SEQ ID NO: 1392794 - DNA, 15 bp, Homo sapiens
tcagagggcccttcc

SEQ ID NO: 1392795 - DNA, 15 bp, Homo sapiens
gtcagagggcccttc

SEQ ID NO: 1392796 - DNA, 15 bp, Homo sapiens
tgtcagagggccctt

SEQ ID NO: 1392797 - DNA, 15 bp, Homo sapiens
gtgtcagagggccct

SEQ ID NO: 1392798 - DNA, 15 bp, Homo sapiens
tgtgtcagagggccc

SEQ ID NO: 1392799 - DNA, 15 bp, Homo sapiens
ctgtgtcagagggcc

SEQ ID NO: 1392800 - DNA, 15 bp, Homo sapiens
tctgtgtcagagggc

SEQ ID NO: 1392801 - DNA, 15 bp, Homo sapiens
gtctgtgtcagaggg

SEQ ID NO: 1392802 - DNA, 15 bp, Homo sapiens
ggtctgtgtcagagg

SEQ ID NO: 1392803 - DNA, 15 bp, Homo sapiens
aggtctgtgtcagag

SEQ ID NO: 1392804 - DNA, 15 bp, Homo sapiens
aaggtctgtgtcaga

SEQ ID NO: 1392805 - DNA, 15 bp, Homo sapiens
gaaggtctgtgtcag

SEQ ID NO: 1392806 - DNA, 15 bp, Homo sapiens
agaaggtctgtgtca

SEQ ID NO: 1392807 - DNA, 15 bp, Homo sapiens
cagaaggtctgtgtc

SEQ ID NO: 1392808 - DNA, 15 bp, Homo sapiens
ccagaaggtctgtgt

SEQ ID NO: 1392809 - DNA, 15 bp, Homo sapiens
cccagaaggtctgtg

SEQ ID NO: 1392810 - DNA, 15 bp, Homo sapiens
ccccagaaggtctgt

SEQ ID NO: 1392811 - DNA, 15 bp, Homo sapiens
accccagaaggtctg

SEQ ID NO: 1392812 - DNA, 15 bp, Homo sapiens
taccccagaaggtct

SEQ ID NO: 1392813 - DNA, 15 bp, Homo sapiens
ttaccccagaaggtc

SEQ ID NO: 1392814 - DNA, 15 bp, Homo sapiens
attaccccagaaggt

SEQ ID NO: 1392815 - DNA, 15 bp, Homo sapiens
gattaccccagaagg

SEQ ID NO: 1392816 - DNA, 15 bp, Homo sapiens
ggattaccccagaag

SEQ ID NO: 1392817 - DNA, 15 bp, Homo sapiens
tggattaccccagaa

SEQ ID NO: 1392818 - DNA, 15 bp, Homo sapiens
ctggattaccccaga

SEQ ID NO: 1392819 - DNA, 15 bp, Homo sapiens
actggattaccccag

SEQ ID NO: 1392820 - DNA, 15 bp, Homo sapiens
gactggattacccca

SEQ ID NO: 1392821 - DNA, 15 bp, Homo sapiens
ggactggattacccc

SEQ ID NO: 1392822 - DNA, 15 bp, Homo sapiens
tggactggattaccc

SEQ ID NO: 1392823 - DNA, 15 bp, Homo sapiens
ttggactggattacc

SEQ ID NO: 1392824 - DNA, 15 bp, Homo sapiens
tttggactggattac

SEQ ID NO: 1392825 - DNA, 15 bp, Homo sapiens
ttttggactggatta

SEQ ID NO: 1392826 - DNA, 15 bp, Homo sapiens
cttttggactggatt

SEQ ID NO: 1392827 - DNA, 15 bp, Homo sapiens
acttttggactggat

SEQ ID NO: 1392828 - DNA, 15 bp, Homo sapiens
aacttttggactgga

SEQ ID NO: 1392829 - DNA, 15 bp, Homo sapiens
caacttttggactgg

SEQ ID NO: 1392830 - DNA, 15 bp, Homo sapiens
tcaacttttggactg

SEQ ID NO: 1392831 - DNA, 15 bp, Homo sapiens
ttcaacttttggact

SEQ ID NO: 1392832 - DNA, 15 bp, Homo sapiens
tttcaacttttggac

SEQ ID NO: 1392833 - DNA, 15 bp, Homo sapiens
ttttcaacttttgga

SEQ ID NO: 1392834 - DNA, 15 bp, Homo sapiens
attttcaacttttgg

SEQ ID NO: 1392835 - DNA, 15 bp, Homo sapiens
tattttcaacttttg

SEQ ID NO: 1392836 - DNA, 15 bp, Homo sapiens
ttattttcaactttt

SEQ ID NO: 1392837 - DNA, 15 bp, Homo sapiens
gttattttcaacttt

SEQ ID NO: 1392838 - DNA, 15 bp, Homo sapiens
tgttattttcaactt

SEQ ID NO: 1392839 - DNA, 15 bp, Homo sapiens
ttgttattttcaact

SEQ ID NO: 1392840 - DNA, 15 bp, Homo sapiens
gttgttattttcaac

SEQ ID NO: 1392841 - DNA, 15 bp, Homo sapiens
agttgttattttcaa

SEQ ID NO: 1392842 - DNA, 15 bp, Homo sapiens
cagttgttattttca

SEQ ID NO: 1392843 - DNA, 15 bp, Homo sapiens
ccagttgttattttc

SEQ ID NO: 1392844 - DNA, 15 bp, Homo sapiens
accagttgttatttt

SEQ ID NO: 1392845 - DNA, 15 bp, Homo sapiens
caccagttgttattt

SEQ ID NO: 1392846 - DNA, 15 bp, Homo sapiens
acaccagttgttatt

SEQ ID NO: 1392847 - DNA, 15 bp, Homo sapiens
aacaccagttgttat

SEQ ID NO: 1392848 - DNA, 15 bp, Homo sapiens
aaacaccagttgtta

SEQ ID NO: 1392849 - DNA, 15 bp, Homo sapiens
caaacaccagttgtt

SEQ ID NO: 1392850 - DNA, 15 bp, Homo sapiens
ccaaacaccagttgt

SEQ ID NO: 1392851 - DNA, 15 bp, Homo sapiens
gccaaacaccagttg

SEQ ID NO: 1392852 - DNA, 15 bp, Homo sapiens
agccaaacaccagtt

SEQ ID NO: 1392853 - DNA, 15 bp, Homo sapiens
aagccaaacaccagt

SEQ ID NO: 1392854 - DNA, 15 bp, Homo sapiens
aaagccaaacaccag

SEQ ID NO: 1392855 - DNA, 15 bp, Homo sapiens
caaagccaaacacca

SEQ ID NO: 1392856 - DNA, 15 bp, Homo sapiens
acaaagccaaacacc

SEQ ID NO: 1392857 - DNA, 15 bp, Homo sapiens
tacaaagccaaacac

SEQ ID NO: 1392858 - DNA, 15 bp, Homo sapiens
ctacaaagccaaaca

SEQ ID NO: 1392859 - DNA, 15 bp, Homo sapiens
gctacaaagccaaac

SEQ ID NO: 1392860 - DNA, 15 bp, Homo sapiens
cgctacaaagccaaa

SEQ ID NO: 1392861 - DNA, 15 bp, Homo sapiens
acgctacaaagccaa

SEQ ID NO: 1392862 - DNA, 15 bp, Homo sapiens
tacgctacaaagcca

SEQ ID NO: 1392863 - DNA, 15 bp, Homo sapiens
ttacgctacaaagcc

SEQ ID NO: 1392864 - DNA, 15 bp, Homo sapiens
cttacgctacaaagc

SEQ ID NO: 1392865 - DNA, 15 bp, Homo sapiens
tcttacgctacaaag

SEQ ID NO: 1392866 - DNA, 15 bp, Homo sapiens
gtcttacgctacaaa

SEQ ID NO: 1392867 - DNA, 15 bp, Homo sapiens
cgtcttacgctacaa

SEQ ID NO: 1392868 - DNA, 15 bp, Homo sapiens
tcgtcttacgctaca

SEQ ID NO: 1392869 - DNA, 15 bp, Homo sapiens
ttcgtcttacgctac

SEQ ID NO: 1392870 - DNA, 15 bp, Homo sapiens
attcgtcttacgcta

SEQ ID NO: 1392871 - DNA, 15 bp, Homo sapiens
aattcgtcttacgct

SEQ ID NO: 1392872 - DNA, 15 bp, Homo sapiens
aaattcgtcttacgc

SEQ ID NO: 1392873 - DNA, 15 bp, Homo sapiens
aaaattcgtcttacg

SEQ ID NO: 1392874 - DNA, 15 bp, Homo sapiens
aaaaattcgtcttac

SEQ ID NO: 1392875 - DNA, 15 bp, Homo sapiens
gaaaaattcgtctta

SEQ ID NO: 1392876 - DNA, 15 bp, Homo sapiens
agaaaaattcgtctt

SEQ ID NO: 1392877 - DNA, 15 bp, Homo sapiens
cagaaaaattcgtct

SEQ ID NO: 1392878 - DNA, 15 bp, Homo sapiens
ccagaaaaattcgtc

SEQ ID NO: 1392879 - DNA, 15 bp, Homo sapiens
cccagaaaaattcgt

SEQ ID NO: 1392880 - DNA, 15 bp, Homo sapiens
acccagaaaaattcg

SEQ ID NO: 1392881 - DNA, 15 bp, Homo sapiens
cacccagaaaaattc

SEQ ID NO: 1392882 - DNA, 15 bp, Homo sapiens
acacccagaaaaatt

SEQ ID NO: 1392883 - DNA, 15 bp, Homo sapiens
tacacccagaaaaat

SEQ ID NO: 1392884 - DNA, 15 bp, Homo sapiens
ctacacccagaaaaa

SEQ ID NO: 1392885 - DNA, 15 bp, Homo sapiens
actacacccagaaaa

SEQ ID NO: 1392886 - DNA, 15 bp, Homo sapiens
aactacacccagaaa

SEQ ID NO: 1392887 - DNA, 15 bp, Homo sapiens
caactacacccagaa

SEQ ID NO: 1392888 - DNA, 15 bp, Homo sapiens
tcaactacacccaga

SEQ ID NO: 1392889 - DNA, 15 bp, Homo sapiens
ttcaactacacccag

SEQ ID NO: 1392890 - DNA, 15 bp, Homo sapiens
attcaactacaccca

SEQ ID NO: 1392891 - DNA, 15 bp, Homo sapiens
cattcaactacaccc

SEQ ID NO: 1392892 - DNA, 15 bp, Homo sapiens
gcattcaactacacc

SEQ ID NO: 1392893 - DNA, 15 bp, Homo sapiens
agcattcaactacac

SEQ ID NO: 1392894 - DNA, 15 bp, Homo sapiens
aagcattcaactaca

SEQ ID NO: 1392895 - DNA, 15 bp, Homo sapiens
taagcattcaactac

SEQ ID NO: 1392896 - DNA, 15 bp, Homo sapiens
ctaagcattcaacta

SEQ ID NO: 1392897 - DNA, 15 bp, Homo sapiens
actaagcattcaact

SEQ ID NO: 1392898 - DNA, 15 bp, Homo sapiens
cactaagcattcaac

SEQ ID NO: 1392899 - DNA, 15 bp, Homo sapiens
gcactaagcattcaa

SEQ ID NO: 1392900 - DNA, 15 bp, Homo sapiens
agcactaagcattca

SEQ ID NO: 1392901 - DNA, 15 bp, Homo sapiens
aagcactaagcattc

SEQ ID NO: 1392902 - DNA, 15 bp, Homo sapiens
caagcactaagcatt

SEQ ID NO: 1392903 - DNA, 15 bp, Homo sapiens
acaagcactaagcat

SEQ ID NO: 1392904 - DNA, 15 bp, Homo sapiens
gacaagcactaagca

SEQ ID NO: 1392905 - DNA, 15 bp, Homo sapiens
agacaagcactaagc

SEQ ID NO: 1392906 - DNA, 15 bp, Homo sapiens
aagacaagcactaag

SEQ ID NO: 1392907 - DNA, 15 bp, Homo sapiens
aaagacaagcactaa

SEQ ID NO: 1392908 - DNA, 15 bp, Homo sapiens
gaaagacaagcacta

SEQ ID NO: 1392909 - DNA, 15 bp, Homo sapiens
ggaaagacaagcact

SEQ ID NO: 1392910 - DNA, 15 bp, Homo sapiens
gggaaagacaagcac

SEQ ID NO: 1392911 - DNA, 15 bp, Homo sapiens
ggggaaagacaagca

SEQ ID NO: 1392912 - DNA, 15 bp, Homo sapiens
gggggaaagacaagc

SEQ ID NO: 1392913 - DNA, 15 bp, Homo sapiens
agggggaaagacaag

SEQ ID NO: 1392914 - DNA, 15 bp, Homo sapiens
cagggggaaagacaa

SEQ ID NO: 1392915 - DNA, 15 bp, Homo sapiens
gcagggggaaagaca

SEQ ID NO: 1392916 - DNA, 15 bp, Homo sapiens
ggcagggggaaagac

SEQ ID NO: 1392917 - DNA, 15 bp, Homo sapiens
gggcagggggaaaga

SEQ ID NO: 1392918 - DNA, 15 bp, Homo sapiens
ggggcagggggaaag

SEQ ID NO: 1392919 - DNA, 15 bp, Homo sapiens
tggggcagggggaaa

SEQ ID NO: 1392920 - DNA, 15 bp, Homo sapiens
ttggggcagggggaa

SEQ ID NO: 1392921 - DNA, 15 bp, Homo sapiens
tttggggcaggggga

SEQ ID NO: 1392922 - DNA, 15 bp, Homo sapiens
atttggggcaggggg

SEQ ID NO: 1392923 - DNA, 15 bp, Homo sapiens
aatttggggcagggg

SEQ ID NO: 1392924 - DNA, 15 bp, Homo sapiens
taatttggggcaggg

SEQ ID NO: 1392925 - DNA, 15 bp, Homo sapiens
gtaatttggggcagg

SEQ ID NO: 1392926 - DNA, 15 bp, Homo sapiens
agtaatttggggcag

SEQ ID NO: 1392927 - DNA, 15 bp, Homo sapiens
tagtaatttggggca

SEQ ID NO: 1392928 - DNA, 15 bp, Homo sapiens
ttagtaatttggggc

SEQ ID NO: 1392929 - DNA, 15 bp, Homo sapiens
cttagtaatttgggg

SEQ ID NO: 1392930 - DNA, 15 bp, Homo sapiens
ccttagtaatttggg

SEQ ID NO: 1392931 - DNA, 15 bp, Homo sapiens
accttagtaatttgg

SEQ ID NO: 1392932 - DNA, 15 bp, Homo sapiens
gaccttagtaatttg

SEQ ID NO: 1392933 - DNA, 15 bp, Homo sapiens
tgaccttagtaattt

SEQ ID NO: 1392934 - DNA, 15 bp, Homo sapiens
atgaccttagtaatt

SEQ ID NO: 1392935 - DNA, 15 bp, Homo sapiens
catgaccttagtaat

SEQ ID NO: 1392936 - DNA, 15 bp, Homo sapiens
acatgaccttagtaa

SEQ ID NO: 1392937 - DNA, 15 bp, Homo sapiens
tacatgaccttagta

SEQ ID NO: 1392938 - DNA, 15 bp, Homo sapiens
ctacatgaccttagt

SEQ ID NO: 1392939 - DNA, 15 bp, Homo sapiens
tctacatgaccttag

SEQ ID NO: 1392940 - DNA, 15 bp, Homo sapiens
ttctacatgacctta

SEQ ID NO: 1392941 - DNA, 15 bp, Homo sapiens
gttctacatgacctt

SEQ ID NO: 1392942 - DNA, 15 bp, Homo sapiens
agttctacatgacct

SEQ ID NO: 1392943 - DNA, 15 bp, Homo sapiens
aagttctacatgacc

SEQ ID NO: 1392944 - DNA, 15 bp, Homo sapiens
gaagttctacatgac

SEQ ID NO: 1392945 - DNA, 15 bp, Homo sapiens
ggaagttctacatga

SEQ ID NO: 1392946 - DNA, 15 bp, Homo sapiens
gggaagttctacatg

SEQ ID NO: 1392947 - DNA, 15 bp, Homo sapiens
tgggaagttctacat

SEQ ID NO: 1392948 - DNA, 15 bp, Homo sapiens
ctgggaagttctaca

SEQ ID NO: 1392949 - DNA, 15 bp, Homo sapiens
actgggaagttctac

SEQ ID NO: 1392950 - DNA, 15 bp, Homo sapiens
aactgggaagttcta

SEQ ID NO: 1392951 - DNA, 15 bp, Homo sapiens
caactgggaagttct

SEQ ID NO: 1392952 - DNA, 15 bp, Homo sapiens
tcaactgggaagttc

SEQ ID NO: 1392953 - DNA, 15 bp, Homo sapiens
ttcaactgggaagtt

SEQ ID NO: 1392954 - DNA, 15 bp, Homo sapiens
attcaactgggaagt

SEQ ID NO: 1392955 - DNA, 15 bp, Homo sapiens
gattcaactgggaag

SEQ ID NO: 1392956 - DNA, 15 bp, Homo sapiens
tgattcaactgggaa

SEQ ID NO: 1392957 - DNA, 15 bp, Homo sapiens
atgattcaactggga

SEQ ID NO: 1392958 - DNA, 15 bp, Homo sapiens
aatgattcaactggg

SEQ ID NO: 1392959 - DNA, 15 bp, Homo sapiens
caatgattcaactgg

SEQ ID NO: 1392960 - DNA, 15 bp, Homo sapiens
tcaatgattcaactg

SEQ ID NO: 1392961 - DNA, 15 bp, Homo sapiens
ttcaatgattcaact

SEQ ID NO: 1392962 - DNA, 15 bp, Homo sapiens
gttcaatgattcaac

SEQ ID NO: 1392963 - DNA, 15 bp, Homo sapiens
agttcaatgattcaa

SEQ ID NO: 1392964 - DNA, 15 bp, Homo sapiens
gagttcaatgattca

SEQ ID NO: 1392965 - DNA, 15 bp, Homo sapiens
ggagttcaatgattc

SEQ ID NO: 1392966 - DNA, 15 bp, Homo sapiens
gggagttcaatgatt

SEQ ID NO: 1392967 - DNA, 15 bp, Homo sapiens
tgggagttcaatgat

SEQ ID NO: 1392968 - DNA, 15 bp, Homo sapiens
ttgggagttcaatga

SEQ ID NO: 1392969 - DNA, 15 bp, Homo sapiens
cttgggagttcaatg

SEQ ID NO: 1392970 - DNA, 15 bp, Homo sapiens
acttgggagttcaat

SEQ ID NO: 1392971 - DNA, 15 bp, Homo sapiens
cacttgggagttcaa

SEQ ID NO: 1392972 - DNA, 15 bp, Homo sapiens
ccacttgggagttca

SEQ ID NO: 1392973 - DNA, 15 bp, Homo sapiens
gccacttgggagttc

SEQ ID NO: 1392974 - DNA, 15 bp, Homo sapiens
tgccacttgggagtt

SEQ ID NO: 1392975 - DNA, 15 bp, Homo sapiens
gtgccacttgggagt

SEQ ID NO: 1392976 - DNA, 15 bp, Homo sapiens
tgtgccacttgggag

SEQ ID NO: 1392977 - DNA, 15 bp, Homo sapiens
atgtgccacttggga

SEQ ID NO: 1392978 - DNA, 15 bp, Homo sapiens
gatgtgccacttggg

SEQ ID NO: 1392979 - DNA, 15 bp, Homo sapiens
agatgtgccacttgg

SEQ ID NO: 1392980 - DNA, 15 bp, Homo sapiens
aagatgtgccacttg

SEQ ID NO: 1392981 - DNA, 15 bp, Homo sapiens
aaagatgtgccactt

SEQ ID NO: 1392982 - DNA, 15 bp, Homo sapiens
aaaagatgtgccact

SEQ ID NO: 1392983 - DNA, 15 bp, Homo sapiens
aaaaagatgtgccac

SEQ ID NO: 1392984 - DNA, 15 bp, Homo sapiens
caaaaagatgtgcca

SEQ ID NO: 1392985 - DNA, 15 bp, Homo sapiens
tcaaaaagatgtgcc

SEQ ID NO: 1392986 - DNA, 15 bp, Homo sapiens
ctcaaaaagatgtgc

SEQ ID NO: 1392987 - DNA, 15 bp, Homo sapiens
tctcaaaaagatgtg

SEQ ID NO: 1392988 - DNA, 15 bp, Homo sapiens
atctcaaaaagatgt

SEQ ID NO: 1392989 - DNA, 15 bp, Homo sapiens
aatctcaaaaagatg

SEQ ID NO: 1392990 - DNA, 15 bp, Homo sapiens
gaatctcaaaaagat

SEQ ID NO: 1392991 - DNA, 15 bp, Homo sapiens
agaatctcaaaaaga

SEQ ID NO: 1392992 - DNA, 15 bp, Homo sapiens
aagaatctcaaaaag

SEQ ID NO: 1392993 - DNA, 15 bp, Homo sapiens
caagaatctcaaaaa

SEQ ID NO: 1392994 - DNA, 15 bp, Homo sapiens
acaagaatctcaaaa

SEQ ID NO: 1392995 - DNA, 15 bp, Homo sapiens
tacaagaatctcaaa

SEQ ID NO: 1392996 - DNA, 15 bp, Homo sapiens
atacaagaatctcaa

SEQ ID NO: 1392997 - DNA, 15 bp, Homo sapiens
tatacaagaatctca

SEQ ID NO: 1392998 - DNA, 15 bp, Homo sapiens
atatacaagaatctc

SEQ ID NO: 1392999 - DNA, 15 bp, Homo sapiens
gatatacaagaatct

SEQ ID NO: 1393000 - DNA, 15 bp, Homo sapiens
tgatatacaagaatc

SEQ ID NO: 1393001 - DNA, 15 bp, Homo sapiens
ttgatatacaagaat

SEQ ID NO: 1393002 - DNA, 15 bp, Homo sapiens
attgatatacaagaa

SEQ ID NO: 1393003 - DNA, 15 bp, Homo sapiens
gattgatatacaaga

SEQ ID NO: 1393004 - DNA, 15 bp, Homo sapiens
ggattgatatacaag

SEQ ID NO: 1393005 - DNA, 15 bp, Homo sapiens
gggattgatatacaa

SEQ ID NO: 1393006 - DNA, 15 bp, Homo sapiens
agggattgatataca

SEQ ID NO: 1393007 - DNA, 15 bp, Homo sapiens
aagggattgatatac

SEQ ID NO: 1393008 - DNA, 15 bp, Homo sapiens
aaagggattgatata

SEQ ID NO: 1393009 - DNA, 15 bp, Homo sapiens
aaaagggattgatat

SEQ ID NO: 1393010 - DNA, 15 bp, Homo sapiens
taaaagggattgata

SEQ ID NO: 1393011 - DNA, 15 bp, Homo sapiens
ataaaagggattgat

SEQ ID NO: 1393012 - DNA, 15 bp, Homo sapiens
aataaaagggattga

SEQ ID NO: 1393013 - DNA, 15 bp, Homo sapiens
aaataaaagggattg

SEQ ID NO: 1393014 - DNA, 15 bp, Homo sapiens
gaaataaaagggatt

SEQ ID NO: 1393015 - DNA, 15 bp, Homo sapiens
agaaataaaagggat

SEQ ID NO: 1393016 - DNA, 15 bp, Homo sapiens
aagaaataaaaggga

SEQ ID NO: 1393017 - DNA, 15 bp, Homo sapiens
gaagaaataaaaggg

SEQ ID NO: 1393018 - DNA, 15 bp, Homo sapiens
tgaagaaataaaagg

SEQ ID NO: 1393019 - DNA, 15 bp, Homo sapiens
ctgaagaaataaaag

SEQ ID NO: 1393020 - DNA, 15 bp, Homo sapiens
actgaagaaataaaa

SEQ ID NO: 1393021 - DNA, 15 bp, Homo sapiens
cactgaagaaataaa

SEQ ID NO: 1393022 - DNA, 15 bp, Homo sapiens
tcactgaagaaataa

SEQ ID NO: 1393023 - DNA, 15 bp, Homo sapiens
ttcactgaagaaata

SEQ ID NO: 1393024 - DNA, 15 bp, Homo sapiens
tttcactgaagaaat

SEQ ID NO: 1393025 - DNA, 15 bp, Homo sapiens
atttcactgaagaaa

SEQ ID NO: 1393026 - DNA, 15 bp, Homo sapiens
aatttcactgaagaa

SEQ ID NO: 1393027 - DNA, 15 bp, Homo sapiens
aaatttcactgaaga

SEQ ID NO: 1393028 - DNA, 15 bp, Homo sapiens
aaaatttcactgaag

SEQ ID NO: 1393029 - DNA, 15 bp, Homo sapiens
aaaaatttcactgaa

SEQ ID NO: 1393030 - DNA, 15 bp, Homo sapiens
gaaaaatttcactga

SEQ ID NO: 1393031 - DNA, 15 bp, Homo sapiens
ggaaaaatttcactg

SEQ ID NO: 1393032 - DNA, 15 bp, Homo sapiens
gggaaaaatttcact

SEQ ID NO: 1393033 - DNA, 15 bp, Homo sapiens
agggaaaaatttcac

SEQ ID NO: 1393034 - DNA, 15 bp, Homo sapiens
aagggaaaaatttca

SEQ ID NO: 1393035 - DNA, 15 bp, Homo sapiens
aaagggaaaaatttc

SEQ ID NO: 1393036 - DNA, 15 bp, Homo sapiens
caaagggaaaaattt

SEQ ID NO: 1393037 - DNA, 15 bp, Homo sapiens
ccaaagggaaaaatt

SEQ ID NO: 1393038 - DNA, 15 bp, Homo sapiens
accaaagggaaaaat

SEQ ID NO: 1393039 - DNA, 15 bp, Homo sapiens
aaccaaagggaaaaa

SEQ ID NO: 1393040 - DNA, 15 bp, Homo sapiens
caaccaaagggaaaa

SEQ ID NO: 1393041 - DNA, 15 bp, Homo sapiens
ccaaccaaagggaaa

SEQ ID NO: 1393042 - DNA, 15 bp, Homo sapiens
tccaaccaaagggaa

SEQ ID NO: 1393043 - DNA, 15 bp, Homo sapiens
ttccaaccaaaggga

SEQ ID NO: 1393044 - DNA, 15 bp, Homo sapiens
cttccaaccaaaggg

SEQ ID NO: 1393045 - DNA, 15 bp, Homo sapiens
ccttccaaccaaagg

SEQ ID NO: 1393046 - DNA, 15 bp, Homo sapiens
cccttccaaccaaag

SEQ ID NO: 1393047 - DNA, 15 bp, Homo sapiens
ccccttccaaccaaa

SEQ ID NO: 1393048 - DNA, 15 bp, Homo sapiens
tccccttccaaccaa

SEQ ID NO: 1393049 - DNA, 15 bp, Homo sapiens
gtccccttccaacca

SEQ ID NO: 1393050 - DNA, 15 bp, Homo sapiens
ggtccccttccaacc

SEQ ID NO: 1393051 - DNA, 15 bp, Homo sapiens
aggtccccttccaac

SEQ ID NO: 1393052 - DNA, 15 bp, Homo sapiens
gaggtccccttccaa

SEQ ID NO: 1393053 - DNA, 15 bp, Homo sapiens
cgaggtccccttcca

SEQ ID NO: 1393054 - DNA, 15 bp, Homo sapiens
ccgaggtccccttcc

SEQ ID NO: 1393055 - DNA, 15 bp, Homo sapiens
tccgaggtccccttc

SEQ ID NO: 1393056 - DNA, 15 bp, Homo sapiens
atccgaggtcccctt

SEQ ID NO: 1393057 - DNA, 15 bp, Homo sapiens
aatccgaggtcccct

SEQ ID NO: 1393058 - DNA, 15 bp, Homo sapiens
caatccgaggtcccc

SEQ ID NO: 1393059 - DNA, 15 bp, Homo sapiens
ccaatccgaggtccc

SEQ ID NO: 1393060 - DNA, 15 bp, Homo sapiens
gccaatccgaggtcc

SEQ ID NO: 1393061 - DNA, 15 bp, Homo sapiens
agccaatccgaggtc

SEQ ID NO: 1393062 - DNA, 15 bp, Homo sapiens
aagccaatccgaggt

SEQ ID NO: 1393063 - DNA, 15 bp, Homo sapiens
aaagccaatccgagg

SEQ ID NO: 1393064 - DNA, 15 bp, Homo sapiens
aaaagccaatccgag

SEQ ID NO: 1393065 - DNA, 15 bp, Homo sapiens
aaaaagccaatccga

SEQ ID NO: 1393066 - DNA, 15 bp, Homo sapiens
caaaaagccaatccg

SEQ ID NO: 1393067 - DNA, 15 bp, Homo sapiens
tcaaaaagccaatcc

SEQ ID NO: 1393068 - DNA, 15 bp, Homo sapiens
ttcaaaaagccaatc

SEQ ID NO: 1393069 - DNA, 15 bp, Homo sapiens
cttcaaaaagccaat

SEQ ID NO: 1393070 - DNA, 15 bp, Homo sapiens
ccttcaaaaagccaa

SEQ ID NO: 1393071 - DNA, 15 bp, Homo sapiens
accttcaaaaagcca

SEQ ID NO: 1393072 - DNA, 15 bp, Homo sapiens
caccttcaaaaagcc

SEQ ID NO: 1393073 - DNA, 15 bp, Homo sapiens
ccaccttcaaaaagc

SEQ ID NO: 1393074 - DNA, 15 bp, Homo sapiens
cccaccttcaaaaag

SEQ ID NO: 1393075 - DNA, 15 bp, Homo sapiens
ccccaccttcaaaaa

SEQ ID NO: 1393076 - DNA, 15 bp, Homo sapiens
gccccaccttcaaaa

SEQ ID NO: 1393077 - DNA, 15 bp, Homo sapiens
tgccccaccttcaaa

SEQ ID NO: 1393078 - DNA, 15 bp, Homo sapiens
ttgccccaccttcaa

SEQ ID NO: 1393079 - DNA, 15 bp, Homo sapiens
tttgccccaccttca

SEQ ID NO: 1393080 - DNA, 15 bp, Homo sapiens
ttttgccccaccttc

SEQ ID NO: 1393081 - DNA, 15 bp, Homo sapiens
tttttgccccacctt

SEQ ID NO: 1393082 - DNA, 15 bp, Homo sapiens
ctttttgccccacct

SEQ ID NO: 1393083 - DNA, 15 bp, Homo sapiens
tctttttgccccacc

SEQ ID NO: 1393084 - DNA, 15 bp, Homo sapiens
gtctttttgccccac

SEQ ID NO: 1393085 - DNA, 15 bp, Homo sapiens
ggtctttttgcccca

SEQ ID NO: 1393086 - DNA, 15 bp, Homo sapiens
aggtctttttgcccc

SEQ ID NO: 1393087 - DNA, 15 bp, Homo sapiens
gaggtctttttgccc

SEQ ID NO: 1393088 - DNA, 15 bp, Homo sapiens
tgaggtctttttgcc

SEQ ID NO: 1393089 - DNA, 15 bp, Homo sapiens
atgaggtctttttgc

SEQ ID NO: 1393090 - DNA, 15 bp, Homo sapiens
tatgaggtctttttg

SEQ ID NO: 1393091 - DNA, 15 bp, Homo sapiens
gtatgaggtcttttt

SEQ ID NO: 1393092 - DNA, 15 bp, Homo sapiens
agtatgaggtctttt

SEQ ID NO: 1393093 - DNA, 15 bp, Homo sapiens
cagtatgaggtcttt

SEQ ID NO: 1393094 - DNA, 15 bp, Homo sapiens
gcagtatgaggtctt

SEQ ID NO: 1393095 - DNA, 15 bp, Homo sapiens
ggcagtatgaggtct

SEQ ID NO: 1393096 - DNA, 15 bp, Homo sapiens
aggcagtatgaggtc

SEQ ID NO: 1393097 - DNA, 15 bp, Homo sapiens
caggcagtatgaggt

SEQ ID NO: 1393098 - DNA, 15 bp, Homo sapiens
ccaggcagtatgagg

SEQ ID NO: 1393099 - DNA, 15 bp, Homo sapiens
cccaggcagtatgag

SEQ ID NO: 1393100 - DNA, 15 bp, Homo sapiens
tcccaggcagtatga

SEQ ID NO: 1393101 - DNA, 15 bp, Homo sapiens
atcccaggcagtatg

SEQ ID NO: 1393102 - DNA, 15 bp, Homo sapiens
gatcccaggcagtat

SEQ ID NO: 1393103 - DNA, 15 bp, Homo sapiens
tgatcccaggcagta

SEQ ID NO: 1393104 - DNA, 15 bp, Homo sapiens
ttgatcccaggcagt

SEQ ID NO: 1393105 - DNA, 15 bp, Homo sapiens
gttgatcccaggcag

SEQ ID NO: 1393106 - DNA, 15 bp, Homo sapiens
tgttgatcccaggca

SEQ ID NO: 1393107 - DNA, 15 bp, Homo sapiens
ctgttgatcccaggc

SEQ ID NO: 1393108 - DNA, 15 bp, Homo sapiens
actgttgatcccagg

SEQ ID NO: 1393109 - DNA, 15 bp, Homo sapiens
tactgttgatcccag

SEQ ID NO: 1393110 - DNA, 15 bp, Homo sapiens
ttactgttgatccca

SEQ ID NO: 1393111 - DNA, 15 bp, Homo sapiens
gttactgttgatccc

SEQ ID NO: 1393112 - DNA, 15 bp, Homo sapiens
tgttactgttgatcc

SEQ ID NO: 1393113 - DNA, 15 bp, Homo sapiens
ttgttactgttgatc

SEQ ID NO: 1393114 - DNA, 15 bp, Homo sapiens
tttgttactgttgat

SEQ ID NO: 1393115 - DNA, 15 bp, Homo sapiens
ttttgttactgttga

SEQ ID NO: 1393116 - DNA, 15 bp, Homo sapiens
tttttgttactgttg

SEQ ID NO: 1393117 - DNA, 15 bp, Homo sapiens
atttttgttactgtt

SEQ ID NO: 1393118 - DNA, 15 bp, Homo sapiens
aatttttgttactgt

SEQ ID NO: 1393119 - DNA, 15 bp, Homo sapiens
aaatttttgttactg

SEQ ID NO: 1393120 - DNA, 15 bp, Homo sapiens
taaatttttgttact

SEQ ID NO: 1393121 - DNA, 15 bp, Homo sapiens
ttaaatttttgttac

SEQ ID NO: 1393122 - DNA, 15 bp, Homo sapiens
cttaaatttttgtta

SEQ ID NO: 1393123 - DNA, 15 bp, Homo sapiens
ccttaaatttttgtt

SEQ ID NO: 1393124 - DNA, 15 bp, Homo sapiens
tccttaaatttttgt

SEQ ID NO: 1393125 - DNA, 15 bp, Homo sapiens
ctccttaaatttttg

SEQ ID NO: 1393126 - DNA, 15 bp, Homo sapiens
tctccttaaattttt

SEQ ID NO: 1393127 - DNA, 15 bp, Homo sapiens
ttctccttaaatttt

SEQ ID NO: 1393128 - DNA, 15 bp, Homo sapiens
attctccttaaattt

SEQ ID NO: 1393129 - DNA, 15 bp, Homo sapiens
gattctccttaaatt

SEQ ID NO: 1393130 - DNA, 15 bp, Homo sapiens
ggattctccttaaat

SEQ ID NO: 1393131 - DNA, 15 bp, Homo sapiens
aggattctccttaaa

SEQ ID NO: 1393132 - DNA, 15 bp, Homo sapiens
caggattctccttaa

SEQ ID NO: 1393133 - DNA, 15 bp, Homo sapiens
acaggattctcctta

SEQ ID NO: 1393134 - DNA, 15 bp, Homo sapiens
tacaggattctcctt

SEQ ID NO: 1393135 - DNA, 15 bp, Homo sapiens
atacaggattctcct

SEQ ID NO: 1393136 - DNA, 15 bp, Homo sapiens
catacaggattctcc

SEQ ID NO: 1393137 - DNA, 15 bp, Homo sapiens
acatacaggattctc

SEQ ID NO: 1393138 - DNA, 15 bp, Homo sapiens
gacatacaggattct

SEQ ID NO: 1393139 - DNA, 15 bp, Homo sapiens
agacatacaggattc

SEQ ID NO: 1393140 - DNA, 15 bp, Homo sapiens
tagacatacaggatt

SEQ ID NO: 1393141 - DNA, 15 bp, Homo sapiens
atagacatacaggat

SEQ ID NO: 1393142 - DNA, 15 bp, Homo sapiens
aatagacatacagga

SEQ ID NO: 1393143 - DNA, 15 bp, Homo sapiens
caatagacatacagg

SEQ ID NO: 1393144 - DNA, 15 bp, Homo sapiens
acaatagacatacag

SEQ ID NO: 1393145 - DNA, 15 bp, Homo sapiens
aacaatagacataca

SEQ ID NO: 1393146 - DNA, 15 bp, Homo sapiens
aaacaatagacatac

SEQ ID NO: 1393147 - DNA, 15 bp, Homo sapiens
aaaacaatagacata

SEQ ID NO: 1393148 - DNA, 15 bp, Homo sapiens
gaaaacaatagacat

SEQ ID NO: 1393149 - DNA, 15 bp, Homo sapiens
agaaaacaatagaca

SEQ ID NO: 1393150 - DNA, 15 bp, Homo sapiens
aagaaaacaatagac

SEQ ID NO: 1393151 - DNA, 15 bp, Homo sapiens
aaagaaaacaataga

SEQ ID NO: 1393152 - DNA, 15 bp, Homo sapiens
taaagaaaacaatag

SEQ ID NO: 1393153 - DNA, 15 bp, Homo sapiens
gtaaagaaaacaata

SEQ ID NO: 1393154 - DNA, 15 bp, Homo sapiens
tgtaaagaaaacaat

SEQ ID NO: 1393155 - DNA, 15 bp, Homo sapiens
atgtaaagaaaacaa

SEQ ID NO: 1393156 - DNA, 15 bp, Homo sapiens
gatgtaaagaaaaca

SEQ ID NO: 1393157 - DNA, 15 bp, Homo sapiens
tgatgtaaagaaaac

SEQ ID NO: 1393158 - DNA, 15 bp, Homo sapiens
atgatgtaaagaaaa

SEQ ID NO: 1393159 - DNA, 15 bp, Homo sapiens
tatgatgtaaagaaa

SEQ ID NO: 1393160 - DNA, 15 bp, Homo sapiens
atatgatgtaaagaa

SEQ ID NO: 1393161 - DNA, 15 bp, Homo sapiens
gatatgatgtaaaga

SEQ ID NO: 1393162 - DNA, 15 bp, Homo sapiens
tgatatgatgtaaag

SEQ ID NO: 1393163 - DNA, 15 bp, Homo sapiens
atgatatgatgtaaa

SEQ ID NO: 1393164 - DNA, 15 bp, Homo sapiens
ttatgatatgatgta

SEQ ID NO: 1393165 - DNA, 15 bp, Homo sapiens
tttatgatatgatgt

SEQ ID NO: 1393166 - DNA, 15 bp, Homo sapiens
gtttatgatatgatg

SEQ ID NO: 1393167 - DNA, 15 bp, Homo sapiens
tgtttatgatatgat

SEQ ID NO: 1393168 - DNA, 15 bp, Homo sapiens
ttgtttatgatatga

SEQ ID NO: 1393169 - DNA, 15 bp, Homo sapiens
cttgtttatgatatg

SEQ ID NO: 1393170 - DNA, 15 bp, Homo sapiens
acttgtttatgatat

SEQ ID NO: 1393171 - DNA, 15 bp, Homo sapiens
tacttgtttatgata

SEQ ID NO: 1393172 - DNA, 15 bp, Homo sapiens
ttacttgtttatgat

SEQ ID NO: 1393173 - DNA, 15 bp, Homo sapiens
tttacttgtttatga

SEQ ID NO: 1393174 - DNA, 15 bp, Homo sapiens
atttacttgtttatg

SEQ ID NO: 1393175 - DNA, 15 bp, Homo sapiens
aatttacttgtttat

SEQ ID NO: 1393176 - DNA, 15 bp, Homo sapiens
caatttacttgttta

SEQ ID NO: 1393177 - DNA, 15 bp, Homo sapiens
tcaatttacttgttt

SEQ ID NO: 1393178 - DNA, 15 bp, Homo sapiens
ctcaatttacttgtt

SEQ ID NO: 1393179 - DNA, 15 bp, Homo sapiens
tctcaatttacttgt

SEQ ID NO: 1393180 - DNA, 15 bp, Homo sapiens
ttctcaatttacttg

SEQ ID NO: 1393181 - DNA, 15 bp, Homo sapiens
tttctcaatttactt

SEQ ID NO: 1393182 - DNA, 15 bp, Homo sapiens
atttctcaatttact

SEQ ID NO: 1393183 - DNA, 15 bp, Homo sapiens
aatttctcaatttac

SEQ ID NO: 1393184 - DNA, 15 bp, Homo sapiens
taatttctcaattta

SEQ ID NO: 1393185 - DNA, 15 bp, Homo sapiens
ttaatttctcaattt

SEQ ID NO: 1393186 - DNA, 15 bp, Homo sapiens
attaatttctcaatt

SEQ ID NO: 1393187 - DNA, 15 bp, Homo sapiens
gattaatttctcaat

SEQ ID NO: 1393188 - DNA, 15 bp, Homo sapiens
tgattaatttctcaa

SEQ ID NO: 1393189 - DNA, 15 bp, Homo sapiens
gtgattaatttctca

SEQ ID NO: 1393190 - DNA, 15 bp, Homo sapiens
tgtgattaatttctc

SEQ ID NO: 1393191 - DNA, 15 bp, Homo sapiens
atgtgattaatttct

SEQ ID NO: 1393192 - DNA, 15 bp, Homo sapiens
tatgtgattaatttc

SEQ ID NO: 1393193 - DNA, 15 bp, Homo sapiens
ttatgtgattaattt

SEQ ID NO: 1393194 - DNA, 15 bp, Homo sapiens
attatgtgattaatt

SEQ ID NO: 1393195 - DNA, 15 bp, Homo sapiens
cattatgtgattaat

SEQ ID NO: 1393196 - DNA, 15 bp, Homo sapiens
ccattatgtgattaa

SEQ ID NO: 1393197 - DNA, 15 bp, Homo sapiens
cccattatgtgatta

SEQ ID NO: 1393198 - DNA, 15 bp, Homo sapiens
tcccattatgtgatt

SEQ ID NO: 1393199 - DNA, 15 bp, Homo sapiens
gtcccattatgtgat

SEQ ID NO: 1393200 - DNA, 15 bp, Homo sapiens
tgtcccattatgtga

SEQ ID NO: 1393201 - DNA, 15 bp, Homo sapiens
ctgtcccattatgtg

SEQ ID NO: 1393202 - DNA, 15 bp, Homo sapiens
actgtcccattatgt

SEQ ID NO: 1393203 - DNA, 15 bp, Homo sapiens
tactgtcccattatg

SEQ ID NO: 1393204 - DNA, 15 bp, Homo sapiens
ttactgtcccattat

SEQ ID NO: 1393205 - DNA, 15 bp, Homo sapiens
cttactgtcccatta

SEQ ID NO: 1393206 - DNA, 15 bp, Homo sapiens
tcttactgtcccatt

SEQ ID NO: 1393207 - DNA, 15 bp, Homo sapiens
ttcttactgtcccat

SEQ ID NO: 1393208 - DNA, 15 bp, Homo sapiens
gttcttactgtccca

SEQ ID NO: 1393209 - DNA, 15 bp, Homo sapiens
tgttcttactgtccc

SEQ ID NO: 1393210 - DNA, 15 bp, Homo sapiens
gtgttcttactgtcc

SEQ ID NO: 1393211 - DNA, 15 bp, Homo sapiens
tgtgttcttactgtc

SEQ ID NO: 1393212 - DNA, 15 bp, Homo sapiens
atgtgttcttactgt

SEQ ID NO: 1393213 - DNA, 15 bp, Homo sapiens
gatgtgttcttactg

SEQ ID NO: 1393214 - DNA, 15 bp, Homo sapiens
tgatgtgttcttact

SEQ ID NO: 1393215 - DNA, 15 bp, Homo sapiens
gtgatgtgttcttac

SEQ ID NO: 1393216 - DNA, 15 bp, Homo sapiens
tgtgatgtgttctta

SEQ ID NO: 1393217 - DNA, 15 bp, Homo sapiens
ttgtgatgtgttctt

SEQ ID NO: 1393218 - DNA, 15 bp, Homo sapiens
attgtgatgtgttct

SEQ ID NO: 1393219 - DNA, 15 bp, Homo sapiens
gattgtgatgtgttc

SEQ ID NO: 1393220 - DNA, 15 bp, Homo sapiens
ggattgtgatgtgtt

SEQ ID NO: 1393221 - DNA, 15 bp, Homo sapiens
tggattgtgatgtgt

SEQ ID NO: 1393222 - DNA, 15 bp, Homo sapiens
gtggattgtgatgtg

SEQ ID NO: 1393223 - DNA, 15 bp, Homo sapiens
tgtggattgtgatgt

SEQ ID NO: 1393224 - DNA, 15 bp, Homo sapiens
ttgtggattgtgatg

SEQ ID NO: 1393225 - DNA, 15 bp, Homo sapiens
tttgtggattgtgat

SEQ ID NO: 1393226 - DNA, 15 bp, Homo sapiens
gtttgtggattgtga

SEQ ID NO: 1393227 - DNA, 15 bp, Homo sapiens
tgtttgtggattgtg

SEQ ID NO: 1393228 - DNA, 15 bp, Homo sapiens
ctgtttgtggattgt

SEQ ID NO: 1393229 - DNA, 15 bp, Homo sapiens
cctgtttgtggattg

SEQ ID NO: 1393230 - DNA, 15 bp, Homo sapiens
acctgtttgtggatt

SEQ ID NO: 1393231 - DNA, 15 bp, Homo sapiens
aacctgtttgtggat

SEQ ID NO: 1393232 - DNA, 15 bp, Homo sapiens
taacctgtttgtgga

SEQ ID NO: 1393233 - DNA, 15 bp, Homo sapiens
gtaacctgtttgtgg

SEQ ID NO: 1393234 - DNA, 15 bp, Homo sapiens
cgtaacctgtttgtg

SEQ ID NO: 1393235 - DNA, 15 bp, Homo sapiens
tcgtaacctgtttgt

SEQ ID NO: 1393236 - DNA, 15 bp, Homo sapiens
ttcgtaacctgtttg

SEQ ID NO: 1393237 - DNA, 15 bp, Homo sapiens
cttcgtaacctgttt

SEQ ID NO: 1393238 - DNA, 15 bp, Homo sapiens
ccttcgtaacctgtt

SEQ ID NO: 1393239 - DNA, 15 bp, Homo sapiens
tccttcgtaacctgt

SEQ ID NO: 1393240 - DNA, 15 bp, Homo sapiens
ctccttcgtaacctg

SEQ ID NO: 1393241 - DNA, 15 bp, Homo sapiens
tctccttcgtaacct

SEQ ID NO: 1393242 - DNA, 15 bp, Homo sapiens
ttctccttcgtaacc

SEQ ID NO: 1393243 - DNA, 15 bp, Homo sapiens
tttctccttcgtaac

SEQ ID NO: 1393244 - DNA, 15 bp, Homo sapiens
atttctccttcgtaa

SEQ ID NO: 1393245 - DNA, 15 bp, Homo sapiens
catttctccttcgta

SEQ ID NO: 1393246 - DNA, 15 bp, Homo sapiens
ccatttctccttcgt

SEQ ID NO: 1393247 - DNA, 15 bp, Homo sapiens
tccatttctccttcg

SEQ ID NO: 1393248 - DNA, 15 bp, Homo sapiens
gtccatttctccttc

SEQ ID NO: 1393249 - DNA, 15 bp, Homo sapiens
agtccatttctcctt

SEQ ID NO: 1393250 - DNA, 15 bp, Homo sapiens
cagtccatttctcct

SEQ ID NO: 1393251 - DNA, 15 bp, Homo sapiens
gcagtccatttctcc

SEQ ID NO: 1393252 - DNA, 15 bp, Homo sapiens
agcagtccatttctc

SEQ ID NO: 1393253 - DNA, 15 bp, Homo sapiens
aagcagtccatttct

SEQ ID NO: 1393254 - DNA, 15 bp, Homo sapiens
aaagcagtccatttc

SEQ ID NO: 1393255 - DNA, 15 bp, Homo sapiens
aaaagcagtccattt

SEQ ID NO: 1393256 - DNA, 15 bp, Homo sapiens
aaaaagcagtccatt

SEQ ID NO: 1393257 - DNA, 15 bp, Homo sapiens
taaaaagcagtccat

SEQ ID NO: 1393258 - DNA, 15 bp, Homo sapiens
ttaaaaagcagtcca

SEQ ID NO: 1393259 - DNA, 15 bp, Homo sapiens
tttaaaaagcagtcc

SEQ ID NO: 1393260 - DNA, 15 bp, Homo sapiens
atttaaaaagcagtc

SEQ ID NO: 1393261 - DNA, 15 bp, Homo sapiens
aatttaaaaagcagt

SEQ ID NO: 1393262 - DNA, 15 bp, Homo sapiens
aaatttaaaaagcag

SEQ ID NO: 1393263 - DNA, 15 bp, Homo sapiens
gaaatttaaaaagca

SEQ ID NO: 1393264 - DNA, 15 bp, Homo sapiens
gaaaagaaatttaaa

SEQ ID NO: 1393265 - DNA, 15 bp, Homo sapiens
ggaaaagaaatttaa

SEQ ID NO: 1393266 - DNA, 15 bp, Homo sapiens
tggaaaagaaattta

SEQ ID NO: 1393267 - DNA, 15 bp, Homo sapiens
atggaaaagaaattt

SEQ ID NO: 1393268 - DNA, 15 bp, Homo sapiens
aatggaaaagaaatt

SEQ ID NO: 1393269 - DNA, 15 bp, Homo sapiens
aaatggaaaagaaat

SEQ ID NO: 1393270 - DNA, 15 bp, Homo sapiens
aaaatggaaaagaaa

SEQ ID NO: 1393271 - DNA, 15 bp, Homo sapiens
aaaaatggaaaagaa

SEQ ID NO: 1393272 - DNA, 15 bp, Homo sapiens
caaaaatggaaaaga

SEQ ID NO: 1393273 - DNA, 15 bp, Homo sapiens
acaaaaatggaaaag

SEQ ID NO: 1393274 - DNA, 15 bp, Homo sapiens
aacaaaaatggaaaa

SEQ ID NO: 1393275 - DNA, 15 bp, Homo sapiens
aaacaaaaatggaaa

SEQ ID NO: 1393276 - DNA, 15 bp, Homo sapiens
caaacaaaaatggaa

SEQ ID NO: 1393277 - DNA, 15 bp, Homo sapiens
acaaacaaaaatgga

SEQ ID NO: 1393278 - DNA, 15 bp, Homo sapiens
aacaaacaaaaatgg

SEQ ID NO: 1393279 - DNA, 15 bp, Homo sapiens
ccaaacaaacaaaca

SEQ ID NO: 1393280 - DNA, 15 bp, Homo sapiens
cccaaacaaacaaac

SEQ ID NO: 1393281 - DNA, 15 bp, Homo sapiens
acccaaacaaacaaa

SEQ ID NO: 1393282 - DNA, 15 bp, Homo sapiens
gacccaaacaaacaa

SEQ ID NO: 1393283 - DNA, 15 bp, Homo sapiens
tgacccaaacaaaca

SEQ ID NO: 1393284 - DNA, 15 bp, Homo sapiens
atgacccaaacaaac

SEQ ID NO: 1393285 - DNA, 15 bp, Homo sapiens
catgacccaaacaaa

SEQ ID NO: 1393286 - DNA, 15 bp, Homo sapiens
aagcatgacccaaac

SEQ ID NO: 1393287 - DNA, 15 bp, Homo sapiens
gaagcatgacccaaa

SEQ ID NO: 1393288 - DNA, 15 bp, Homo sapiens
ggaagcatgacccaa

SEQ ID NO: 1393289 - DNA, 15 bp, Homo sapiens
tggaagcatgaccca

SEQ ID NO: 1393290 - DNA, 15 bp, Homo sapiens
ttggaagcatgaccc

SEQ ID NO: 1393291 - DNA, 15 bp, Homo sapiens
cttggaagcatgacc

SEQ ID NO: 1393292 - DNA, 15 bp, Homo sapiens
tcttggaagcatgac

SEQ ID NO: 1393293 - DNA, 15 bp, Homo sapiens
ctcttggaagcatga

SEQ ID NO: 1393294 - DNA, 15 bp, Homo sapiens
gctcttggaagcatg

SEQ ID NO: 1393295 - DNA, 15 bp, Homo sapiens
tgctcttggaagcat

SEQ ID NO: 1393296 - DNA, 15 bp, Homo sapiens
atgctcttggaagca

SEQ ID NO: 1393297 - DNA, 15 bp, Homo sapiens
gatgctcttggaagc

SEQ ID NO: 1393298 - DNA, 15 bp, Homo sapiens
agatgctcttggaag

SEQ ID NO: 1393299 - DNA, 15 bp, Homo sapiens
cagatgctcttggaa

SEQ ID NO: 1393300 - DNA, 15 bp, Homo sapiens
acagatgctcttgga

SEQ ID NO: 1393301 - DNA, 15 bp, Homo sapiens
cacagatgctcttgg

SEQ ID NO: 1393302 - DNA, 15 bp, Homo sapiens
tcacagatgctcttg

SEQ ID NO: 1393303 - DNA, 15 bp, Homo sapiens
ttcacagatgctctt

SEQ ID NO: 1393304 - DNA, 15 bp, Homo sapiens
cttcacagatgctct

SEQ ID NO: 1393305 - DNA, 15 bp, Homo sapiens
ccttcacagatgctc

SEQ ID NO: 1393306 - DNA, 15 bp, Homo sapiens
gccttcacagatgct

SEQ ID NO: 1393307 - DNA, 15 bp, Homo sapiens
ggccttcacagatgc

SEQ ID NO: 1393308 - DNA, 15 bp, Homo sapiens
tggccttcacagatg

SEQ ID NO: 1393309 - DNA, 15 bp, Homo sapiens
ttggccttcacagat

SEQ ID NO: 1393310 - DNA, 15 bp, Homo sapiens
tttggccttcacaga

SEQ ID NO: 1393311 - DNA, 15 bp, Homo sapiens
atttggccttcacag

SEQ ID NO: 1393312 - DNA, 15 bp, Homo sapiens
tatttggccttcaca

SEQ ID NO: 1393313 - DNA, 15 bp, Homo sapiens
atatttggccttcac

SEQ ID NO: 1393314 - DNA, 15 bp, Homo sapiens
catatttggccttca

SEQ ID NO: 1393315 - DNA, 15 bp, Homo sapiens
gcatatttggccttc

SEQ ID NO: 1393316 - DNA, 15 bp, Homo sapiens
agcatatttggcctt

SEQ ID NO: 1393317 - DNA, 15 bp, Homo sapiens
cagcatatttggcct

SEQ ID NO: 1393318 - DNA, 15 bp, Homo sapiens
ccagcatatttggcc

SEQ ID NO: 1393319 - DNA, 15 bp, Homo sapiens
tccagcatatttggc

SEQ ID NO: 1393320 - DNA, 15 bp, Homo sapiens
atccagcatatttgg

SEQ ID NO: 1393321 - DNA, 15 bp, Homo sapiens
aatccagcatatttg

SEQ ID NO: 1393322 - DNA, 15 bp, Homo sapiens
taatccagcatattt

SEQ ID NO: 1393323 - DNA, 15 bp, Homo sapiens
ataatccagcatatt

SEQ ID NO: 1393324 - DNA, 15 bp, Homo sapiens
tataatccagcatat

SEQ ID NO: 1393325 - DNA, 15 bp, Homo sapiens
ctataatccagcata

SEQ ID NO: 1393326 - DNA, 15 bp, Homo sapiens
cctataatccagcat

SEQ ID NO: 1393327 - DNA, 15 bp, Homo sapiens
tcctataatccagca

SEQ ID NO: 1393328 - DNA, 15 bp, Homo sapiens
ctcctataatccagc

SEQ ID NO: 1393329 - DNA, 15 bp, Homo sapiens
gctcctataatccag

SEQ ID NO: 1393330 - DNA, 15 bp, Homo sapiens
agctcctataatcca

SEQ ID NO: 1393331 - DNA, 15 bp, Homo sapiens
aagctcctataatcc

SEQ ID NO: 1393332 - DNA, 15 bp, Homo sapiens
gaagctcctataatc

SEQ ID NO: 1393333 - DNA, 15 bp, Homo sapiens
tgaagctcctataat

SEQ ID NO: 1393334 - DNA, 15 bp, Homo sapiens
ttgaagctcctataa

SEQ ID NO: 1393335 - DNA, 15 bp, Homo sapiens
cttgaagctcctata

SEQ ID NO: 1393336 - DNA, 15 bp, Homo sapiens
acttgaagctcctat

SEQ ID NO: 1393337 - DNA, 15 bp, Homo sapiens
cacttgaagctccta

SEQ ID NO: 1393338 - DNA, 15 bp, Homo sapiens
acacttgaagctcct

SEQ ID NO: 1393339 - DNA, 15 bp, Homo sapiens
tacacttgaagctcc

SEQ ID NO: 1393340 - DNA, 15 bp, Homo sapiens
atacacttgaagctc

SEQ ID NO: 1393341 - DNA, 15 bp, Homo sapiens
gatacacttgaagct

SEQ ID NO: 1393342 - DNA, 15 bp, Homo sapiens
agatacacttgaagc

SEQ ID NO: 1393343 - DNA, 15 bp, Homo sapiens
cagatacacttgaag

SEQ ID NO: 1393344 - DNA, 15 bp, Homo sapiens
ccagatacacttgaa

SEQ ID NO: 1393345 - DNA, 15 bp, Homo sapiens
accagatacacttga

SEQ ID NO: 1393346 - DNA, 15 bp, Homo sapiens
taccagatacacttg

SEQ ID NO: 1393347 - DNA, 15 bp, Homo sapiens
ctaccagatacactt

SEQ ID NO: 1393348 - DNA, 15 bp, Homo sapiens
tctaccagatacact

SEQ ID NO: 1393349 - DNA, 15 bp, Homo sapiens
ttctaccagatacac

SEQ ID NO: 1393350 - DNA, 15 bp, Homo sapiens
tttctaccagataca

SEQ ID NO: 1393351 - DNA, 15 bp, Homo sapiens
atttctaccagatac

SEQ ID NO: 1393352 - DNA, 15 bp, Homo sapiens
catttctaccagata

SEQ ID NO: 1393353 - DNA, 15 bp, Homo sapiens
tcatttctaccagat

SEQ ID NO: 1393354 - DNA, 15 bp, Homo sapiens
atcatttctaccaga

SEQ ID NO: 1393355 - DNA, 15 bp, Homo sapiens
tatcatttctaccag

SEQ ID NO: 1393356 - DNA, 15 bp, Homo sapiens
atatcatttctacca

SEQ ID NO: 1393357 - DNA, 15 bp, Homo sapiens
gatatcatttctacc

SEQ ID NO: 1393358 - DNA, 15 bp, Homo sapiens
tgatatcatttctac

SEQ ID NO: 1393359 - DNA, 15 bp, Homo sapiens
atgatatcatttcta

SEQ ID NO: 1393360 - DNA, 15 bp, Homo sapiens
aatgatatcatttct

SEQ ID NO: 1393361 - DNA, 15 bp, Homo sapiens
aaatgatatcatttc

SEQ ID NO: 1393362 - DNA, 15 bp, Homo sapiens
caaatgatatcattt

SEQ ID NO: 1393363 - DNA, 15 bp, Homo sapiens
acaaatgatatcatt

SEQ ID NO: 1393364 - DNA, 15 bp, Homo sapiens
aacaaatgatatcat

SEQ ID NO: 1393365 - DNA, 15 bp, Homo sapiens
caacaaatgatatca

SEQ ID NO: 1393366 - DNA, 15 bp, Homo sapiens
gcaacaaatgatatc

SEQ ID NO: 1393367 - DNA, 15 bp, Homo sapiens
ggcaacaaatgatat

SEQ ID NO: 1393368 - DNA, 15 bp, Homo sapiens
aggcaacaaatgata

SEQ ID NO: 1393369 - DNA, 15 bp, Homo sapiens
caggcaacaaatgat

SEQ ID NO: 1393370 - DNA, 15 bp, Homo sapiens
tcaggcaacaaatga

SEQ ID NO: 1393371 - DNA, 15 bp, Homo sapiens
atcaggcaacaaatg

SEQ ID NO: 1393372 - DNA, 15 bp, Homo sapiens
tatcaggcaacaaat

SEQ ID NO: 1393373 - DNA, 15 bp, Homo sapiens
atatcaggcaacaaa

SEQ ID NO: 1393374 - DNA, 15 bp, Homo sapiens
tatatcaggcaacaa

SEQ ID NO: 1393375 - DNA, 15 bp, Homo sapiens
ttatatcaggcaaca

SEQ ID NO: 1393376 - DNA, 15 bp, Homo sapiens
attatatcaggcaac

SEQ ID NO: 1393377 - DNA, 15 bp, Homo sapiens
aattatatcaggcaa

SEQ ID NO: 1393378 - DNA, 15 bp, Homo sapiens
aaattatatcaggca

SEQ ID NO: 1393379 - DNA, 15 bp, Homo sapiens
caaattatatcaggc

SEQ ID NO: 1393380 - DNA, 15 bp, Homo sapiens
acaaattatatcagg

SEQ ID NO: 1393381 - DNA, 15 bp, Homo sapiens
aacaaattatatcag

SEQ ID NO: 1393382 - DNA, 15 bp, Homo sapiens
caacaaattatatca

SEQ ID NO: 1393383 - DNA, 15 bp, Homo sapiens
gcaacaaattatatc

SEQ ID NO: 1393384 - DNA, 15 bp, Homo sapiens
ggcaacaaattatat

SEQ ID NO: 1393385 - DNA, 15 bp, Homo sapiens
aggcaacaaattata

SEQ ID NO: 1393386 - DNA, 15 bp, Homo sapiens
caggcaacaaattat

SEQ ID NO: 1393387 - DNA, 15 bp, Homo sapiens
tcaggcaacaaatta

SEQ ID NO: 1393388 - DNA, 15 bp, Homo sapiens
gtcaggcaacaaatt

SEQ ID NO: 1393389 - DNA, 15 bp, Homo sapiens
ggtcaggcaacaaat

SEQ ID NO: 1393390 - DNA, 15 bp, Homo sapiens
tggtcaggcaacaaa

SEQ ID NO: 1393391 - DNA, 15 bp, Homo sapiens
ttggtcaggcaacaa

SEQ ID NO: 1393392 - DNA, 15 bp, Homo sapiens
cttggtcaggcaaca

SEQ ID NO: 1393393 - DNA, 15 bp, Homo sapiens
tcttggtcaggcaac

SEQ ID NO: 1393394 - DNA, 15 bp, Homo sapiens
ttcttggtcaggcaa

SEQ ID NO: 1393395 - DNA, 15 bp, Homo sapiens
tttcttggtcaggca

SEQ ID NO: 1393396 - DNA, 15 bp, Homo sapiens
ttttcttggtcaggc

SEQ ID NO: 1393397 - DNA, 15 bp, Homo sapiens
cttttcttggtcagg

SEQ ID NO: 1393398 - DNA, 15 bp, Homo sapiens
ccttttcttggtcag

SEQ ID NO: 1393399 - DNA, 15 bp, Homo sapiens
cccttttcttggtca

SEQ ID NO: 1393400 - DNA, 15 bp, Homo sapiens
tcccttttcttggtc

SEQ ID NO: 1393401 - DNA, 15 bp, Homo sapiens
atcccttttcttggt

SEQ ID NO: 1393402 - DNA, 15 bp, Homo sapiens
aatcccttttcttgg

SEQ ID NO: 1393403 - DNA, 15 bp, Homo sapiens
gaatcccttttcttg

SEQ ID NO: 1393404 - DNA, 15 bp, Homo sapiens
agaatcccttttctt

SEQ ID NO: 1393405 - DNA, 15 bp, Homo sapiens
aagaatcccttttct

SEQ ID NO: 1393406 - DNA, 15 bp, Homo sapiens
caagaatcccttttc

SEQ ID NO: 1393407 - DNA, 15 bp, Homo sapiens
ccaagaatccctttt

SEQ ID NO: 1393408 - DNA, 15 bp, Homo sapiens
accaagaatcccttt

SEQ ID NO: 1393409 - DNA, 15 bp, Homo sapiens
taccaagaatccctt

SEQ ID NO: 1393410 - DNA, 15 bp, Homo sapiens
gtaccaagaatccct

SEQ ID NO: 1393411 - DNA, 15 bp, Homo sapiens
agtaccaagaatccc

SEQ ID NO: 1393412 - DNA, 15 bp, Homo sapiens
aagtaccaagaatcc

SEQ ID NO: 1393413 - DNA, 15 bp, Homo sapiens
gaagtaccaagaatc

SEQ ID NO: 1393414 - DNA, 15 bp, Homo sapiens
tgaagtaccaagaat

SEQ ID NO: 1393415 - DNA, 15 bp, Homo sapiens
atgaagtaccaagaa

SEQ ID NO: 1393416 - DNA, 15 bp, Homo sapiens
tatgaagtaccaaga

SEQ ID NO: 1393417 - DNA, 15 bp, Homo sapiens
ttatgaagtaccaag

SEQ ID NO: 1393418 - DNA, 15 bp, Homo sapiens
attatgaagtaccaa

SEQ ID NO: 1393419 - DNA, 15 bp, Homo sapiens
aattatgaagtacca

SEQ ID NO: 1393420 - DNA, 15 bp, Homo sapiens
aaattatgaagtacc

SEQ ID NO: 1393421 - DNA, 15 bp, Homo sapiens
aaaattatgaagtac

SEQ ID NO: 1393422 - DNA, 15 bp, Homo sapiens
taaaattatgaagta

SEQ ID NO: 1393423 - DNA, 15 bp, Homo sapiens
ttaaaattatgaagt

SEQ ID NO: 1393424 - DNA, 15 bp, Homo sapiens
tttaaaattatgaag

SEQ ID NO: 1393425 - DNA, 15 bp, Homo sapiens
ctttaaaattatgaa

SEQ ID NO: 1393426 - DNA, 15 bp, Homo sapiens
cctttaaaattatga

SEQ ID NO: 1393427 - DNA, 15 bp, Homo sapiens
tcctttaaaattatg

SEQ ID NO: 1393428 - DNA, 15 bp, Homo sapiens
atcctttaaaattat

SEQ ID NO: 1393429 - DNA, 15 bp, Homo sapiens
tatcctttaaaatta

SEQ ID NO: 1393430 - DNA, 15 bp, Homo sapiens
ttatcctttaaaatt

SEQ ID NO: 1393431 - DNA, 15 bp, Homo sapiens
gttatcctttaaaat

SEQ ID NO: 1393432 - DNA, 15 bp, Homo sapiens
tgttatcctttaaaa

SEQ ID NO: 1393433 - DNA, 15 bp, Homo sapiens
ctgttatcctttaaa

SEQ ID NO: 1393434 - DNA, 15 bp, Homo sapiens
tctgttatcctttaa

SEQ ID NO: 1393435 - DNA, 15 bp, Homo sapiens
ctctgttatccttta

SEQ ID NO: 1393436 - DNA, 15 bp, Homo sapiens
tctctgttatccttt

SEQ ID NO: 1393437 - DNA, 15 bp, Homo sapiens
ctctctgttatcctt

SEQ ID NO: 1393438 - DNA, 15 bp, Homo sapiens
actctctgttatcct

SEQ ID NO: 1393439 - DNA, 15 bp, Homo sapiens
tactctctgttatcc

SEQ ID NO: 1393440 - DNA, 15 bp, Homo sapiens
ttactctctgttatc

SEQ ID NO: 1393441 - DNA, 15 bp, Homo sapiens
tttactctctgttat

SEQ ID NO: 1393442 - DNA, 15 bp, Homo sapiens
atttactctctgtta

SEQ ID NO: 1393443 - DNA, 15 bp, Homo sapiens
tatttactctctgtt

SEQ ID NO: 1393444 - DNA, 15 bp, Homo sapiens
ctatttactctctgt

SEQ ID NO: 1393445 - DNA, 15 bp, Homo sapiens
cctatttactctctg

SEQ ID NO: 1393446 - DNA, 15 bp, Homo sapiens
acctatttactctct

SEQ ID NO: 1393447 - DNA, 15 bp, Homo sapiens
aacctatttactctc

SEQ ID NO: 1393448 - DNA, 15 bp, Homo sapiens
taacctatttactct

SEQ ID NO: 1393449 - DNA, 15 bp, Homo sapiens
ttaacctatttactc

SEQ ID NO: 1393450 - DNA, 15 bp, Homo sapiens
attaacctatttact

SEQ ID NO: 1393451 - DNA, 15 bp, Homo sapiens
aattaacctatttac

SEQ ID NO: 1393452 - DNA, 15 bp, Homo sapiens
aaattaacctattta

SEQ ID NO: 1393453 - DNA, 15 bp, Homo sapiens
aaaattaacctattt

SEQ ID NO: 1393454 - DNA, 15 bp, Homo sapiens
aaaaattaacctatt

SEQ ID NO: 1393455 - DNA, 15 bp, Homo sapiens
aaaaaattaacctat

SEQ ID NO: 1393456 - DNA, 15 bp, Homo sapiens
aaaaaaattaaccta

SEQ ID NO: 1393457 - DNA, 15 bp, Homo sapiens
gaaaaaaattaacct

SEQ ID NO: 1393458 - DNA, 15 bp, Homo sapiens
tgaaaaaaattaacc

SEQ ID NO: 1393459 - DNA, 15 bp, Homo sapiens
ttgaaaaaaattaac

SEQ ID NO: 1393460 - DNA, 15 bp, Homo sapiens
tttgaaaaaaattaa

SEQ ID NO: 1393461 - DNA, 15 bp, Homo sapiens
atttgaaaaaaatta

SEQ ID NO: 1393462 - DNA, 15 bp, Homo sapiens
aatttgaaaaaaatt

SEQ ID NO: 1393463 - DNA, 15 bp, Homo sapiens
taatttgaaaaaaat

SEQ ID NO: 1393464 - DNA, 15 bp, Homo sapiens
ataatttgaaaaaaa

SEQ ID NO: 1393465 - DNA, 15 bp, Homo sapiens
aataatttgaaaaaa

SEQ ID NO: 1393466 - DNA, 15 bp, Homo sapiens
aaataatttgaaaaa

SEQ ID NO: 1393467 - DNA, 15 bp, Homo sapiens
tgaaataatttgaaa

SEQ ID NO: 1393468 - DNA, 15 bp, Homo sapiens
ctgaaataatttgaa

SEQ ID NO: 1393469 - DNA, 15 bp, Homo sapiens
gctgaaataatttga

SEQ ID NO: 1393470 - DNA, 15 bp, Homo sapiens
tgctgaaataatttg

SEQ ID NO: 1393471 - DNA, 15 bp, Homo sapiens
ttgctgaaataattt

SEQ ID NO: 1393472 - DNA, 15 bp, Homo sapiens
cttgctgaaataatt

SEQ ID NO: 1393473 - DNA, 15 bp, Homo sapiens
ccttgctgaaataat

SEQ ID NO: 1393474 - DNA, 15 bp, Homo sapiens
tccttgctgaaataa

SEQ ID NO: 1393475 - DNA, 15 bp, Homo sapiens
atccttgctgaaata

SEQ ID NO: 1393476 - DNA, 15 bp, Homo sapiens
gatccttgctgaaat

SEQ ID NO: 1393477 - DNA, 15 bp, Homo sapiens
agatccttgctgaaa

SEQ ID NO: 1393478 - DNA, 15 bp, Homo sapiens
cagatccttgctgaa

SEQ ID NO: 1393479 - DNA, 15 bp, Homo sapiens
acagatccttgctga

SEQ ID NO: 1393480 - DNA, 15 bp, Homo sapiens
aacagatccttgctg

SEQ ID NO: 1393481 - DNA, 15 bp, Homo sapiens
caacagatccttgct

SEQ ID NO: 1393482 - DNA, 15 bp, Homo sapiens
tcaacagatccttgc

SEQ ID NO: 1393483 - DNA, 15 bp, Homo sapiens
ctcaacagatccttg

SEQ ID NO: 1393484 - DNA, 15 bp, Homo sapiens
actcaacagatcctt

SEQ ID NO: 1393485 - DNA, 15 bp, Homo sapiens
gactcaacagatcct

SEQ ID NO: 1393486 - DNA, 15 bp, Homo sapiens
ggactcaacagatcc

SEQ ID NO: 1393487 - DNA, 15 bp, Homo sapiens
aggactcaacagatc

SEQ ID NO: 1393488 - DNA, 15 bp, Homo sapiens
aaggactcaacagat

SEQ ID NO: 1393489 - DNA, 15 bp, Homo sapiens
taaggactcaacaga

SEQ ID NO: 1393490 - DNA, 15 bp, Homo sapiens
ataaggactcaacag

SEQ ID NO: 1393491 - DNA, 15 bp, Homo sapiens
aataaggactcaaca

SEQ ID NO: 1393492 - DNA, 15 bp, Homo sapiens
taataaggactcaac

SEQ ID NO: 1393493 - DNA, 15 bp, Homo sapiens
ataataaggactcaa

SEQ ID NO: 1393494 - DNA, 15 bp, Homo sapiens
cataataaggactca

SEQ ID NO: 1393495 - DNA, 15 bp, Homo sapiens
acataataaggactc

SEQ ID NO: 1393496 - DNA, 15 bp, Homo sapiens
aacataataaggact

SEQ ID NO: 1393497 - DNA, 15 bp, Homo sapiens
caacataataaggac

SEQ ID NO: 1393498 - DNA, 15 bp, Homo sapiens
tcaacataataagga

SEQ ID NO: 1393499 - DNA, 15 bp, Homo sapiens
ttcaacataataagg

SEQ ID NO: 1393500 - DNA, 15 bp, Homo sapiens
cttcaacataataag

SEQ ID NO: 1393501 - DNA, 15 bp, Homo sapiens
acttcaacataataa

SEQ ID NO: 1393502 - DNA, 15 bp, Homo sapiens
tacttcaacataata

SEQ ID NO: 1393503 - DNA, 15 bp, Homo sapiens
gtacttcaacataat

SEQ ID NO: 1393504 - DNA, 15 bp, Homo sapiens
cgtacttcaacataa

SEQ ID NO: 1393505 - DNA, 15 bp, Homo sapiens
tcgtacttcaacata

SEQ ID NO: 1393506 - DNA, 15 bp, Homo sapiens
ttcgtacttcaacat

SEQ ID NO: 1393507 - DNA, 15 bp, Homo sapiens
gttcgtacttcaaca

SEQ ID NO: 1393508 - DNA, 15 bp, Homo sapiens
agttcgtacttcaac

SEQ ID NO: 1393509 - DNA, 15 bp, Homo sapiens
aagttcgtacttcaa

SEQ ID NO: 1393510 - DNA, 15 bp, Homo sapiens
aaagttcgtacttca

SEQ ID NO: 1393511 - DNA, 15 bp, Homo sapiens
aaaagttcgtacttc

SEQ ID NO: 1393512 - DNA, 15 bp, Homo sapiens
taaaagttcgtactt

SEQ ID NO: 1393513 - DNA, 15 bp, Homo sapiens
ctaaaagttcgtact

SEQ ID NO: 1393514 - DNA, 15 bp, Homo sapiens
cctaaaagttcgtac

SEQ ID NO: 1393515 - DNA, 15 bp, Homo sapiens
acctaaaagttcgta

SEQ ID NO: 1393516 - DNA, 15 bp, Homo sapiens
cacctaaaagttcgt

SEQ ID NO: 1393517 - DNA, 15 bp, Homo sapiens
gcacctaaaagttcg

SEQ ID NO: 1393518 - DNA, 15 bp, Homo sapiens
agcacctaaaagttc

SEQ ID NO: 1393519 - DNA, 15 bp, Homo sapiens
aagcacctaaaagtt

SEQ ID NO: 1393520 - DNA, 15 bp, Homo sapiens
aaagcacctaaaagt

SEQ ID NO: 1393521 - DNA, 15 bp, Homo sapiens
taaagcacctaaaag

SEQ ID NO: 1393522 - DNA, 15 bp, Homo sapiens
ctaaagcacctaaaa

SEQ ID NO: 1393523 - DNA, 15 bp, Homo sapiens
tctaaagcacctaaa

SEQ ID NO: 1393524 - DNA, 15 bp, Homo sapiens
atctaaagcacctaa

SEQ ID NO: 1393525 - DNA, 15 bp, Homo sapiens
aatctaaagcaccta

SEQ ID NO: 1393526 - DNA, 15 bp, Homo sapiens
gaatctaaagcacct

SEQ ID NO: 1393527 - DNA, 15 bp, Homo sapiens
tgaatctaaagcacc

SEQ ID NO: 1393528 - DNA, 15 bp, Homo sapiens
ctgaatctaaagcac

SEQ ID NO: 1393529 - DNA, 15 bp, Homo sapiens
tctgaatctaaagca

SEQ ID NO: 1393530 - DNA, 15 bp, Homo sapiens
ctctgaatctaaagc

SEQ ID NO: 1393531 - DNA, 15 bp, Homo sapiens
tctctgaatctaaag

SEQ ID NO: 1393532 - DNA, 15 bp, Homo sapiens
atctctgaatctaaa

SEQ ID NO: 1393533 - DNA, 15 bp, Homo sapiens
tatctctgaatctaa

SEQ ID NO: 1393534 - DNA, 15 bp, Homo sapiens
ttatctctgaatcta

SEQ ID NO: 1393535 - DNA, 15 bp, Homo sapiens
tttatctctgaatct

SEQ ID NO: 1393536 - DNA, 15 bp, Homo sapiens
atttatctctgaatc

SEQ ID NO: 1393537 - DNA, 15 bp, Homo sapiens
tatttatctctgaat

SEQ ID NO: 1393538 - DNA, 15 bp, Homo sapiens
atatttatctctgaa

SEQ ID NO: 1393539 - DNA, 15 bp, Homo sapiens
tatatttatctctga

SEQ ID NO: 1393540 - DNA, 15 bp, Homo sapiens
ttatatttatctctg

SEQ ID NO: 1393541 - DNA, 15 bp, Homo sapiens
gttatatttatctct

SEQ ID NO: 1393542 - DNA, 15 bp, Homo sapiens
ggttatatttatctc

SEQ ID NO: 1393543 - DNA, 15 bp, Homo sapiens
aggttatatttatct

SEQ ID NO: 1393544 - DNA, 15 bp, Homo sapiens
taggttatatttatc

SEQ ID NO: 1393545 - DNA, 15 bp, Homo sapiens
ataggttatatttat

SEQ ID NO: 1393546 - DNA, 15 bp, Homo sapiens
aataggttatattta

SEQ ID NO: 1393547 - DNA, 15 bp, Homo sapiens
gaataggttatattt

SEQ ID NO: 1393548 - DNA, 15 bp, Homo sapiens
agaataggttatatt

SEQ ID NO: 1393549 - DNA, 15 bp, Homo sapiens
gagaataggttatat

SEQ ID NO: 1393550 - DNA, 15 bp, Homo sapiens
agagaataggttata

SEQ ID NO: 1393551 - DNA, 15 bp, Homo sapiens
cagagaataggttat

SEQ ID NO: 1393552 - DNA, 15 bp, Homo sapiens
acagagaataggtta

SEQ ID NO: 1393553 - DNA, 15 bp, Homo sapiens
gacagagaataggtt

SEQ ID NO: 1393554 - DNA, 15 bp, Homo sapiens
tgacagagaataggt

SEQ ID NO: 1393555 - DNA, 15 bp, Homo sapiens
gtgacagagaatagg

SEQ ID NO: 1393556 - DNA, 15 bp, Homo sapiens
ggtgacagagaatag

SEQ ID NO: 1393557 - DNA, 15 bp, Homo sapiens
tggtgacagagaata

SEQ ID NO: 1393558 - DNA, 15 bp, Homo sapiens
ttggtgacagagaat

SEQ ID NO: 1393559 - DNA, 15 bp, Homo sapiens
cttggtgacagagaa

SEQ ID NO: 1393560 - DNA, 15 bp, Homo sapiens
tcttggtgacagaga

SEQ ID NO: 1393561 - DNA, 15 bp, Homo sapiens
atcttggtgacagag

SEQ ID NO: 1393562 - DNA, 15 bp, Homo sapiens
agaaaatatcagcac

SEQ ID NO: 1393563 - DNA, 15 bp, Homo sapiens
tagaaaatatcagca

SEQ ID NO: 1393564 - DNA, 15 bp, Homo sapiens
atagaaaatatcagc

SEQ ID NO: 1393565 - DNA, 15 bp, Homo sapiens
catagaaaatatcag

SEQ ID NO: 1393566 - DNA, 15 bp, Homo sapiens
tcatagaaaatatca

SEQ ID NO: 1393567 - DNA, 15 bp, Homo sapiens
atcatagaaaatatc

SEQ ID NO: 1393568 - DNA, 15 bp, Homo sapiens
aatcatagaaaatat

SEQ ID NO: 1393569 - DNA, 15 bp, Homo sapiens
caatcatagaaaata

SEQ ID NO: 1393570 - DNA, 15 bp, Homo sapiens
acaatcatagaaaat

SEQ ID NO: 1393571 - DNA, 15 bp, Homo sapiens
cacaatcatagaaaa

SEQ ID NO: 1393572 - DNA, 15 bp, Homo sapiens
acacaatcatagaaa

SEQ ID NO: 1393573 - DNA, 15 bp, Homo sapiens
aacacaatcatagaa

SEQ ID NO: 1393574 - DNA, 15 bp, Homo sapiens
aaacacaatcataga

SEQ ID NO: 1393575 - DNA, 15 bp, Homo sapiens
aaaacacaatcatag

SEQ ID NO: 1393576 - DNA, 15 bp, Homo sapiens
taaaacacaatcata

SEQ ID NO: 1393577 - DNA, 15 bp, Homo sapiens
ataaaacacaatcat

SEQ ID NO: 1393578 - DNA, 15 bp, Homo sapiens
gataaaacacaatca

SEQ ID NO: 1393579 - DNA, 15 bp, Homo sapiens
tgataaaacacaatc

SEQ ID NO: 1393580 - DNA, 15 bp, Homo sapiens
ttgataaaacacaat

SEQ ID NO: 1393581 - DNA, 15 bp, Homo sapiens
attgataaaacacaa

SEQ ID NO: 1393582 - DNA, 15 bp, Homo sapiens
cattgataaaacaca

SEQ ID NO: 1393583 - DNA, 15 bp, Homo sapiens
acattgataaaacac

SEQ ID NO: 1393584 - DNA, 15 bp, Homo sapiens
gacattgataaaaca

SEQ ID NO: 1393585 - DNA, 15 bp, Homo sapiens
tgacattgataaaac

SEQ ID NO: 1393586 - DNA, 15 bp, Homo sapiens
atgacattgataaaa

SEQ ID NO: 1393587 - DNA, 15 bp, Homo sapiens
aatgacattgataaa

SEQ ID NO: 1393588 - DNA, 15 bp, Homo sapiens
caatgacattgataa

SEQ ID NO: 1393589 - DNA, 15 bp, Homo sapiens
tcaatgacattgata

SEQ ID NO: 1393590 - DNA, 15 bp, Homo sapiens
ttcaatgacattgat

SEQ ID NO: 1393591 - DNA, 15 bp, Homo sapiens
tttcaatgacattga

SEQ ID NO: 1393592 - DNA, 15 bp, Homo sapiens
atttcaatgacattg

SEQ ID NO: 1393593 - DNA, 15 bp, Homo sapiens
aatttcaatgacatt

SEQ ID NO: 1393594 - DNA, 15 bp, Homo sapiens
aaatttcaatgacat

SEQ ID NO: 1393595 - DNA, 15 bp, Homo sapiens
gaaatttcaatgaca

SEQ ID NO: 1393596 - DNA, 15 bp, Homo sapiens
ggaaatttcaatgac

SEQ ID NO: 1393597 - DNA, 15 bp, Homo sapiens
gggaaatttcaatga

SEQ ID NO: 1393598 - DNA, 15 bp, Homo sapiens
agggaaatttcaatg

SEQ ID NO: 1393599 - DNA, 15 bp, Homo sapiens
gagggaaatttcaat

SEQ ID NO: 1393600 - DNA, 15 bp, Homo sapiens
tgagggaaatttcaa

SEQ ID NO: 1393601 - DNA, 15 bp, Homo sapiens
ttgagggaaatttca

SEQ ID NO: 1393602 - DNA, 15 bp, Homo sapiens
tttgagggaaatttc

SEQ ID NO: 1393603 - DNA, 15 bp, Homo sapiens
ctttgagggaaattt

SEQ ID NO: 1393604 - DNA, 15 bp, Homo sapiens
tctttgagggaaatt

SEQ ID NO: 1393605 - DNA, 15 bp, Homo sapiens
ctctttgagggaaat

SEQ ID NO: 1393606 - DNA, 15 bp, Homo sapiens
tctctttgagggaaa

SEQ ID NO: 1393607 - DNA, 15 bp, Homo sapiens
ttctctttgagggaa

SEQ ID NO: 1393608 - DNA, 15 bp, Homo sapiens
tttctctttgaggga

SEQ ID NO: 1393609 - DNA, 15 bp, Homo sapiens
atttctctttgaggg

SEQ ID NO: 1393610 - DNA, 15 bp, Homo sapiens
aatttctctttgagg

SEQ ID NO: 1393611 - DNA, 15 bp, Homo sapiens
gaatttctctttgag

SEQ ID NO: 1393612 - DNA, 15 bp, Homo sapiens
ggaatttctctttga

SEQ ID NO: 1393613 - DNA, 15 bp, Homo sapiens
aggaatttctctttg

SEQ ID NO: 1393614 - DNA, 15 bp, Homo sapiens
aaggaatttctcttt

SEQ ID NO: 1393615 - DNA, 15 bp, Homo sapiens
taaggaatttctctt

SEQ ID NO: 1393616 - DNA, 15 bp, Homo sapiens
ctaaggaatttctct

SEQ ID NO: 1393617 - DNA, 15 bp, Homo sapiens
cctaaggaatttctc

SEQ ID NO: 1393618 - DNA, 15 bp, Homo sapiens
tcctaaggaatttct

SEQ ID NO: 1393619 - DNA, 15 bp, Homo sapiens
ttcctaaggaatttc

SEQ ID NO: 1393620 - DNA, 15 bp, Homo sapiens
attcctaaggaattt

SEQ ID NO: 1393621 - DNA, 15 bp, Homo sapiens
gattcctaaggaatt

SEQ ID NO: 1393622 - DNA, 15 bp, Homo sapiens
agattcctaaggaat

SEQ ID NO: 1393623 - DNA, 15 bp, Homo sapiens
gagattcctaaggaa

SEQ ID NO: 1393624 - DNA, 15 bp, Homo sapiens
ggagattcctaagga

SEQ ID NO: 1393625 - DNA, 15 bp, Homo sapiens
aggagattcctaagg

SEQ ID NO: 1393626 - DNA, 15 bp, Homo sapiens
aaggagattcctaag

SEQ ID NO: 1393627 - DNA, 15 bp, Homo sapiens
caaggagattcctaa

SEQ ID NO: 1393628 - DNA, 15 bp, Homo sapiens
ccaaggagattccta

SEQ ID NO: 1393629 - DNA, 15 bp, Homo sapiens
tccaaggagattcct

SEQ ID NO: 1393630 - DNA, 15 bp, Homo sapiens
ttccaaggagattcc

SEQ ID NO: 1393631 - DNA, 15 bp, Homo sapiens
attccaaggagattc

SEQ ID NO: 1393632 - DNA, 15 bp, Homo sapiens
aattccaaggagatt

SEQ ID NO: 1393633 - DNA, 15 bp, Homo sapiens
caattccaaggagat

SEQ ID NO: 1393634 - DNA, 15 bp, Homo sapiens
ccaattccaaggaga

SEQ ID NO: 1393635 - DNA, 15 bp, Homo sapiens
gccaattccaaggag

SEQ ID NO: 1393636 - DNA, 15 bp, Homo sapiens
tgccaattccaagga

SEQ ID NO: 1393637 - DNA, 15 bp, Homo sapiens
atgccaattccaagg

SEQ ID NO: 1393638 - DNA, 15 bp, Homo sapiens
aatgccaattccaag

SEQ ID NO: 1393639 - DNA, 15 bp, Homo sapiens
taatgccaattccaa

SEQ ID NO: 1393640 - DNA, 15 bp, Homo sapiens
ttaatgccaattcca

SEQ ID NO: 1393641 - DNA, 15 bp, Homo sapiens
tttaatgccaattcc

SEQ ID NO: 1393642 - DNA, 15 bp, Homo sapiens
atttaatgccaattc

SEQ ID NO: 1393643 - DNA, 15 bp, Homo sapiens
tatttaatgccaatt

SEQ ID NO: 1393644 - DNA, 15 bp, Homo sapiens
gtatttaatgccaat

SEQ ID NO: 1393645 - DNA, 15 bp, Homo sapiens
agtatttaatgccaa

SEQ ID NO: 1393646 - DNA, 15 bp, Homo sapiens
gagtatttaatgcca

SEQ ID NO: 1393647 - DNA, 15 bp, Homo sapiens
agagtatttaatgcc

SEQ ID NO: 1393648 - DNA, 15 bp, Homo sapiens
aagagtatttaatgc

SEQ ID NO: 1393649 - DNA, 15 bp, Homo sapiens
aaagagtatttaatg

SEQ ID NO: 1393650 - DNA, 15 bp, Homo sapiens
taaagagtatttaat

SEQ ID NO: 1393651 - DNA, 15 bp, Homo sapiens
ataaagagtatttaa

SEQ ID NO: 1393652 - DNA, 15 bp, Homo sapiens
aataaagagtattta

SEQ ID NO: 1393653 - DNA, 15 bp, Homo sapiens
caataaagagtattt

SEQ ID NO: 1393654 - DNA, 15 bp, Homo sapiens
tcaataaagagtatt

SEQ ID NO: 1393655 - DNA, 15 bp, Homo sapiens
ttcaataaagagtat

SEQ ID NO: 1393656 - DNA, 15 bp, Homo sapiens
tttcaataaagagta

SEQ ID NO: 1393657 - DNA, 15 bp, Homo sapiens
ctttcaataaagagt

SEQ ID NO: 1393658 - DNA, 15 bp, Homo sapiens
tctttcaataaagag

SEQ ID NO: 1393659 - DNA, 15 bp, Homo sapiens
ctctttcaataaaga

SEQ ID NO: 1393660 - DNA, 15 bp, Homo sapiens
tctctttcaataaag

SEQ ID NO: 1393661 - DNA, 15 bp, Homo sapiens
ctctctttcaataaa

SEQ ID NO: 1393662 - DNA, 15 bp, Homo sapiens
tctctctttcaataa

SEQ ID NO: 1393663 - DNA, 15 bp, Homo sapiens
atctctctttcaata

SEQ ID NO: 1393664 - DNA, 15 bp, Homo sapiens
aatctctctttcaat

SEQ ID NO: 1393665 - DNA, 15 bp, Homo sapiens
caatctctctttcaa

SEQ ID NO: 1393666 - DNA, 15 bp, Homo sapiens
ccaatctctctttca

SEQ ID NO: 1393667 - DNA, 15 bp, Homo sapiens
accaatctctctttc

SEQ ID NO: 1393668 - DNA, 15 bp, Homo sapiens
aaccaatctctcttt

SEQ ID NO: 1393669 - DNA, 15 bp, Homo sapiens
aaaccaatctctctt

SEQ ID NO: 1393670 - DNA, 15 bp, Homo sapiens
aaaaccaatctctct

SEQ ID NO: 1393671 - DNA, 15 bp, Homo sapiens
gaaaaccaatctctc

SEQ ID NO: 1393672 - DNA, 15 bp, Homo sapiens
agaaaaccaatctct

SEQ ID NO: 1393673 - DNA, 15 bp, Homo sapiens
aagaaaaccaatctc

SEQ ID NO: 1393674 - DNA, 15 bp, Homo sapiens
aaagaaaaccaatct

SEQ ID NO: 1393675 - DNA, 15 bp, Homo sapiens
taaagaaaaccaatc

SEQ ID NO: 1393676 - DNA, 15 bp, Homo sapiens
ataaagaaaaccaat

SEQ ID NO: 1393677 - DNA, 15 bp, Homo sapiens
cataaagaaaaccaa

SEQ ID NO: 1393678 - DNA, 15 bp, Homo sapiens
tcataaagaaaacca

SEQ ID NO: 1393679 - DNA, 15 bp, Homo sapiens
ttcataaagaaaacc

SEQ ID NO: 1393680 - DNA, 15 bp, Homo sapiens
tttcataaagaaaac

SEQ ID NO: 1393681 - DNA, 15 bp, Homo sapiens
atttcataaagaaaa

SEQ ID NO: 1393682 - DNA, 15 bp, Homo sapiens
aatttcataaagaaa

SEQ ID NO: 1393683 - DNA, 15 bp, Homo sapiens
caatttcataaagaa

SEQ ID NO: 1393684 - DNA, 15 bp, Homo sapiens
acaatttcataaaga

SEQ ID NO: 1393685 - DNA, 15 bp, Homo sapiens
aacaatttcataaag

SEQ ID NO: 1393686 - DNA, 15 bp, Homo sapiens
aaacaatttcataaa

SEQ ID NO: 1393687 - DNA, 15 bp, Homo sapiens
aaaacaatttcataa

SEQ ID NO: 1393688 - DNA, 15 bp, Homo sapiens
gaaaacaatttcata

SEQ ID NO: 1393689 - DNA, 15 bp, Homo sapiens
agaaaacaatttcat

SEQ ID NO: 1393690 - DNA, 15 bp, Homo sapiens
aagaaaacaatttca

SEQ ID NO: 1393691 - DNA, 15 bp, Homo sapiens
gaagaaaacaatttc

SEQ ID NO: 1393692 - DNA, 15 bp, Homo sapiens
agaagaaaacaattt

SEQ ID NO: 1393693 - DNA, 15 bp, Homo sapiens
cagaagaaaacaatt

SEQ ID NO: 1393694 - DNA, 15 bp, Homo sapiens
gcagaagaaaacaat

SEQ ID NO: 1393695 - DNA, 15 bp, Homo sapiens
ggcagaagaaaacaa

SEQ ID NO: 1393696 - DNA, 15 bp, Homo sapiens
aggcagaagaaaaca

SEQ ID NO: 1393697 - DNA, 15 bp, Homo sapiens
gaggcagaagaaaac

SEQ ID NO: 1393698 - DNA, 15 bp, Homo sapiens
agaggcagaagaaaa

SEQ ID NO: 1393699 - DNA, 15 bp, Homo sapiens
cagaggcagaagaaa

SEQ ID NO: 1393700 - DNA, 15 bp, Homo sapiens
acagaggcagaagaa

SEQ ID NO: 1393701 - DNA, 15 bp, Homo sapiens
gacagaggcagaaga

SEQ ID NO: 1393702 - DNA, 15 bp, Homo sapiens
agacagaggcagaag

SEQ ID NO: 1393703 - DNA, 15 bp, Homo sapiens
tagacagaggcagaa

SEQ ID NO: 1393704 - DNA, 15 bp, Homo sapiens
atagacagaggcaga

SEQ ID NO: 1393705 - DNA, 15 bp, Homo sapiens
caatagacagaggca

SEQ ID NO: 1393706 - DNA, 15 bp, Homo sapiens
ccaatagacagaggc

SEQ ID NO: 1393707 - DNA, 15 bp, Homo sapiens
gccaatagacagagg

SEQ ID NO: 1393708 - DNA, 15 bp, Homo sapiens
agccaatagacagag

SEQ ID NO: 1393709 - DNA, 15 bp, Homo sapiens
tagccaatagacaga

SEQ ID NO: 1393710 - DNA, 15 bp, Homo sapiens
ttagccaatagacag

SEQ ID NO: 1393711 - DNA, 15 bp, Homo sapiens
attagccaatagaca

SEQ ID NO: 1393712 - DNA, 15 bp, Homo sapiens
aattagccaatagac

SEQ ID NO: 1393713 - DNA, 15 bp, Homo sapiens
taattagccaataga

SEQ ID NO: 1393714 - DNA, 15 bp, Homo sapiens
ataattagccaatag

SEQ ID NO: 1393715 - DNA, 15 bp, Homo sapiens
cataattagccaata

SEQ ID NO: 1393716 - DNA, 15 bp, Homo sapiens
ccataattagccaat

SEQ ID NO: 1393717 - DNA, 15 bp, Homo sapiens
cccataattagccaa

SEQ ID NO: 1393718 - DNA, 15 bp, Homo sapiens
tcccataattagcca

SEQ ID NO: 1393719 - DNA, 15 bp, Homo sapiens
gtcccataattagcc

SEQ ID NO: 1393720 - DNA, 15 bp, Homo sapiens
agtcccataattagc

SEQ ID NO: 1393721 - DNA, 15 bp, Homo sapiens
aagtcccataattag

SEQ ID NO: 1393722 - DNA, 15 bp, Homo sapiens
gaagtcccataatta

SEQ ID NO: 1393723 - DNA, 15 bp, Homo sapiens
agaagtcccataatt

SEQ ID NO: 1393724 - DNA, 15 bp, Homo sapiens
tagaagtcccataat

SEQ ID NO: 1393725 - DNA, 15 bp, Homo sapiens
atagaagtcccataa

SEQ ID NO: 1393726 - DNA, 15 bp, Homo sapiens
aatagaagtcccata

SEQ ID NO: 1393727 - DNA, 15 bp, Homo sapiens
aaatagaagtcccat

SEQ ID NO: 1393728 - DNA, 15 bp, Homo sapiens
aaaatagaagtccca

SEQ ID NO: 1393729 - DNA, 15 bp, Homo sapiens
aaaaatagaagtccc

SEQ ID NO: 1393730 - DNA, 15 bp, Homo sapiens
gaaaaatagaagtcc

SEQ ID NO: 1393731 - DNA, 15 bp, Homo sapiens
tgaaaaatagaagtc

SEQ ID NO: 1393732 - DNA, 15 bp, Homo sapiens
atgaaaaatagaagt

SEQ ID NO: 1393733 - DNA, 15 bp, Homo sapiens
aatgaaaaatagaag

SEQ ID NO: 1393734 - DNA, 15 bp, Homo sapiens
aaatgaaaaatagaa

SEQ ID NO: 1393735 - DNA, 15 bp, Homo sapiens
gaaatgaaaaataga

SEQ ID NO: 1393736 - DNA, 15 bp, Homo sapiens
agaaatgaaaaatag

SEQ ID NO: 1393737 - DNA, 15 bp, Homo sapiens
tagaaatgaaaaata

SEQ ID NO: 1393738 - DNA, 15 bp, Homo sapiens
gtagaaatgaaaaat

SEQ ID NO: 1393739 - DNA, 15 bp, Homo sapiens
agtagaaatgaaaaa

SEQ ID NO: 1393740 - DNA, 15 bp, Homo sapiens
aagtagaaatgaaaa

SEQ ID NO: 1393741 - DNA, 15 bp, Homo sapiens
aaagtagaaatgaaa

SEQ ID NO: 1393742 - DNA, 15 bp, Homo sapiens
taaagtagaaatgaa

SEQ ID NO: 1393743 - DNA, 15 bp, Homo sapiens
gtaaagtagaaatga

SEQ ID NO: 1393744 - DNA, 15 bp, Homo sapiens
agtaaagtagaaatg

SEQ ID NO: 1393745 - DNA, 15 bp, Homo sapiens
cagtaaagtagaaat

SEQ ID NO: 1393746 - DNA, 15 bp, Homo sapiens
acagtaaagtagaaa

SEQ ID NO: 1393747 - DNA, 15 bp, Homo sapiens
tacagtaaagtagaa

SEQ ID NO: 1393748 - DNA, 15 bp, Homo sapiens
ttacagtaaagtaga

SEQ ID NO: 1393749 - DNA, 15 bp, Homo sapiens
attacagtaaagtag

SEQ ID NO: 1393750 - DNA, 15 bp, Homo sapiens
gattacagtaaagta

SEQ ID NO: 1393751 - DNA, 15 bp, Homo sapiens
ggattacagtaaagt

SEQ ID NO: 1393752 - DNA, 15 bp, Homo sapiens
aggattacagtaaag

SEQ ID NO: 1393753 - DNA, 15 bp, Homo sapiens
aaggattacagtaaa

SEQ ID NO: 1393754 - DNA, 15 bp, Homo sapiens
aaaggattacagtaa

SEQ ID NO: 1393755 - DNA, 15 bp, Homo sapiens
gaaaggattacagta

SEQ ID NO: 1393756 - DNA, 15 bp, Homo sapiens
agaaaggattacagt

SEQ ID NO: 1393757 - DNA, 15 bp, Homo sapiens
tagaaaggattacag

SEQ ID NO: 1393758 - DNA, 15 bp, Homo sapiens
ttagaaaggattaca

SEQ ID NO: 1393759 - DNA, 15 bp, Homo sapiens
cttagaaaggattac

SEQ ID NO: 1393760 - DNA, 15 bp, Homo sapiens
acttagaaaggatta

SEQ ID NO: 1393761 - DNA, 15 bp, Homo sapiens
aacttagaaaggatt

SEQ ID NO: 1393762 - DNA, 15 bp, Homo sapiens
caacttagaaaggat

SEQ ID NO: 1393763 - DNA, 15 bp, Homo sapiens
tcaacttagaaagga

SEQ ID NO: 1393764 - DNA, 15 bp, Homo sapiens
ttcaacttagaaagg

SEQ ID NO: 1393765 - DNA, 15 bp, Homo sapiens
tttcaacttagaaag

SEQ ID NO: 1393766 - DNA, 15 bp, Homo sapiens
ttttcaacttagaaa

SEQ ID NO: 1393767 - DNA, 15 bp, Homo sapiens
gttttcaacttagaa

SEQ ID NO: 1393768 - DNA, 15 bp, Homo sapiens
tgttttcaacttaga

SEQ ID NO: 1393769 - DNA, 15 bp, Homo sapiens
ctgttttcaacttag

SEQ ID NO: 1393770 - DNA, 15 bp, Homo sapiens
gctgttttcaactta

SEQ ID NO: 1393771 - DNA, 15 bp, Homo sapiens
ggctgttttcaactt

SEQ ID NO: 1393772 - DNA, 15 bp, Homo sapiens
aggctgttttcaact

SEQ ID NO: 1393773 - DNA, 15 bp, Homo sapiens
aaggctgttttcaac

SEQ ID NO: 1393774 - DNA, 15 bp, Homo sapiens
caaggctgttttcaa

SEQ ID NO: 1393775 - DNA, 15 bp, Homo sapiens
gcaaggctgttttca

SEQ ID NO: 1393776 - DNA, 15 bp, Homo sapiens
tgcaaggctgttttc

SEQ ID NO: 1393777 - DNA, 15 bp, Homo sapiens
ttgcaaggctgtttt

SEQ ID NO: 1393778 - DNA, 15 bp, Homo sapiens
tttgcaaggctgttt

SEQ ID NO: 1393779 - DNA, 15 bp, Homo sapiens
tctttgcaaggctgt

SEQ ID NO: 1393780 - DNA, 15 bp, Homo sapiens
ttctttgcaaggctg

SEQ ID NO: 1393781 - DNA, 15 bp, Homo sapiens
tttctttgcaaggct

SEQ ID NO: 1393782 - DNA, 15 bp, Homo sapiens
gtttctttgcaaggc

SEQ ID NO: 1393783 - DNA, 15 bp, Homo sapiens
agtttctttgcaagg

SEQ ID NO: 1393784 - DNA, 15 bp, Homo sapiens
gagtttctttgcaag

SEQ ID NO: 1393785 - DNA, 15 bp, Homo sapiens
cgagtttctttgcaa

SEQ ID NO: 1393786 - DNA, 15 bp, Homo sapiens
gcgagtttctttgca

SEQ ID NO: 1393787 - DNA, 15 bp, Homo sapiens
tgcgagtttctttgc

SEQ ID NO: 1393788 - DNA, 15 bp, Homo sapiens
ctgcgagtttctttg

SEQ ID NO: 1393789 - DNA, 15 bp, Homo sapiens
cctgcgagtttcttt

SEQ ID NO: 1393790 - DNA, 15 bp, Homo sapiens
ccctgcgagtttctt

SEQ ID NO: 1393791 - DNA, 15 bp, Homo sapiens
gccctgcgagtttct

SEQ ID NO: 1393792 - DNA, 15 bp, Homo sapiens
tgccctgcgagtttc

SEQ ID NO: 1393793 - DNA, 15 bp, Homo sapiens
atgccctgcgagttt

SEQ ID NO: 1393794 - DNA, 15 bp, Homo sapiens
aatgccctgcgagtt

SEQ ID NO: 1393795 - DNA, 15 bp, Homo sapiens
gaatgccctgcgagt

SEQ ID NO: 1393796 - DNA, 15 bp, Homo sapiens
ggaatgccctgcgag

SEQ ID NO: 1393797 - DNA, 15 bp, Homo sapiens
tggaatgccctgcga

SEQ ID NO: 1393798 - DNA, 15 bp, Homo sapiens
ctggaatgccctgcg

SEQ ID NO: 1393799 - DNA, 15 bp, Homo sapiens
cctggaatgccctgc

SEQ ID NO: 1393800 - DNA, 15 bp, Homo sapiens
ccctggaatgccctg

SEQ ID NO: 1393801 - DNA, 15 bp, Homo sapiens
cccctggaatgccct

SEQ ID NO: 1393802 - DNA, 15 bp, Homo sapiens
gcccctggaatgccc

SEQ ID NO: 1393803 - DNA, 15 bp, Homo sapiens
tgcccctggaatgcc

SEQ ID NO: 1393804 - DNA, 15 bp, Homo sapiens
ttgcccctggaatgc

SEQ ID NO: 1393805 - DNA, 15 bp, Homo sapiens
tttgcccctggaatg

SEQ ID NO: 1393806 - DNA, 15 bp, Homo sapiens
ctttgcccctggaat

SEQ ID NO: 1393807 - DNA, 15 bp, Homo sapiens
tctttgcccctggaa

SEQ ID NO: 1393808 - DNA, 15 bp, Homo sapiens
ctctttgcccctgga

SEQ ID NO: 1393809 - DNA, 15 bp, Homo sapiens
actctttgcccctgg

SEQ ID NO: 1393810 - DNA, 15 bp, Homo sapiens
aactctttgcccctg

SEQ ID NO: 1393811 - DNA, 15 bp, Homo sapiens
gaactctttgcccct

SEQ ID NO: 1393812 - DNA, 15 bp, Homo sapiens
ggaactctttgcccc

SEQ ID NO: 1393813 - DNA, 15 bp, Homo sapiens
aggaactctttgccc

SEQ ID NO: 1393814 - DNA, 15 bp, Homo sapiens
gaggaactctttgcc

SEQ ID NO: 1393815 - DNA, 15 bp, Homo sapiens
agaggaactctttgc

SEQ ID NO: 1393816 - DNA, 15 bp, Homo sapiens
tagaggaactctttg

SEQ ID NO: 1393817 - DNA, 15 bp, Homo sapiens
ttagaggaactcttt

SEQ ID NO: 1393818 - DNA, 15 bp, Homo sapiens
gttagaggaactctt

SEQ ID NO: 1393819 - DNA, 15 bp, Homo sapiens
ggttagaggaactct

SEQ ID NO: 1393820 - DNA, 15 bp, Homo sapiens
aggttagaggaactc

SEQ ID NO: 1393821 - DNA, 15 bp, Homo sapiens
taggttagaggaact

SEQ ID NO: 1393822 - DNA, 15 bp, Homo sapiens
ctaggttagaggaac

SEQ ID NO: 1393823 - DNA, 15 bp, Homo sapiens
tctaggttagaggaa

SEQ ID NO: 1393824 - DNA, 15 bp, Homo sapiens
ttctaggttagagga

SEQ ID NO: 1393825 - DNA, 15 bp, Homo sapiens
attctaggttagagg

SEQ ID NO: 1393826 - DNA, 15 bp, Homo sapiens
cattctaggttagag

SEQ ID NO: 1393827 - DNA, 15 bp, Homo sapiens
tcattctaggttaga

SEQ ID NO: 1393828 - DNA, 15 bp, Homo sapiens
ttcattctaggttag

SEQ ID NO: 1393829 - DNA, 15 bp, Homo sapiens
attcattctaggtta

SEQ ID NO: 1393830 - DNA, 15 bp, Homo sapiens
aattcattctaggtt

SEQ ID NO: 1393831 - DNA, 15 bp, Homo sapiens
aaattcattctaggt

SEQ ID NO: 1393832 - DNA, 15 bp, Homo sapiens
aaaattcattctagg

SEQ ID NO: 1393833 - DNA, 15 bp, Homo sapiens
caaaattcattctag

SEQ ID NO: 1393834 - DNA, 15 bp, Homo sapiens
gcaaaattcattcta

SEQ ID NO: 1393835 - DNA, 15 bp, Homo sapiens
tgcaaaattcattct

SEQ ID NO: 1393836 - DNA, 15 bp, Homo sapiens
ctgcaaaattcattc

SEQ ID NO: 1393837 - DNA, 15 bp, Homo sapiens
gctgcaaaattcatt

SEQ ID NO: 1393838 - DNA, 15 bp, Homo sapiens
tgctgcaaaattcat

SEQ ID NO: 1393839 - DNA, 15 bp, Homo sapiens
atgctgcaaaattca

SEQ ID NO: 1393840 - DNA, 15 bp, Homo sapiens
gatgctgcaaaattc

SEQ ID NO: 1393841 - DNA, 15 bp, Homo sapiens
agatgctgcaaaatt

SEQ ID NO: 1393842 - DNA, 15 bp, Homo sapiens
cagatgctgcaaaat

SEQ ID NO: 1393843 - DNA, 15 bp, Homo sapiens
ccagatgctgcaaaa

SEQ ID NO: 1393844 - DNA, 15 bp, Homo sapiens
cccagatgctgcaaa

SEQ ID NO: 1393845 - DNA, 15 bp, Homo sapiens
tcccagatgctgcaa

SEQ ID NO: 1393846 - DNA, 15 bp, Homo sapiens
ttcccagatgctgca

SEQ ID NO: 1393847 - DNA, 15 bp, Homo sapiens
attcccagatgctgc

SEQ ID NO: 1393848 - DNA, 15 bp, Homo sapiens
cattcccagatgctg

SEQ ID NO: 1393849 - DNA, 15 bp, Homo sapiens
ccattcccagatgct

SEQ ID NO: 1393850 - DNA, 15 bp, Homo sapiens
gccattcccagatgc

SEQ ID NO: 1393851 - DNA, 15 bp, Homo sapiens
tgccattcccagatg

SEQ ID NO: 1393852 - DNA, 15 bp, Homo sapiens
atgccattcccagat

SEQ ID NO: 1393853 - DNA, 15 bp, Homo sapiens
tatgccattcccaga

SEQ ID NO: 1393854 - DNA, 15 bp, Homo sapiens
atatgccattcccag

SEQ ID NO: 1393855 - DNA, 15 bp, Homo sapiens
aatatgccattccca

SEQ ID NO: 1393856 - DNA, 15 bp, Homo sapiens
aaatatgccattccc

SEQ ID NO: 1393857 - DNA, 15 bp, Homo sapiens
aaaatatgccattcc

SEQ ID NO: 1393858 - DNA, 15 bp, Homo sapiens
aaaaatatgccattc

SEQ ID NO: 1393859 - DNA, 15 bp, Homo sapiens
taaaaatatgccatt

SEQ ID NO: 1393860 - DNA, 15 bp, Homo sapiens
gtaaaaatatgccat

SEQ ID NO: 1393861 - DNA, 15 bp, Homo sapiens
ggtaaaaatatgcca

SEQ ID NO: 1393862 - DNA, 15 bp, Homo sapiens
aggtaaaaatatgcc

SEQ ID NO: 1393863 - DNA, 15 bp, Homo sapiens
caggtaaaaatatgc

SEQ ID NO: 1393864 - DNA, 15 bp, Homo sapiens
acaggtaaaaatatg

SEQ ID NO: 1393865 - DNA, 15 bp, Homo sapiens
aacaggtaaaaatat

SEQ ID NO: 1393866 - DNA, 15 bp, Homo sapiens
gaacaggtaaaaata

SEQ ID NO: 1393867 - DNA, 15 bp, Homo sapiens
agaacaggtaaaaat

SEQ ID NO: 1393868 - DNA, 15 bp, Homo sapiens
cagaacaggtaaaaa

SEQ ID NO: 1393869 - DNA, 15 bp, Homo sapiens
tcagaacaggtaaaa

SEQ ID NO: 1393870 - DNA, 15 bp, Homo sapiens
ttcagaacaggtaaa

SEQ ID NO: 1393871 - DNA, 15 bp, Homo sapiens
attcagaacaggtaa

SEQ ID NO: 1393872 - DNA, 15 bp, Homo sapiens
aattcagaacaggta

SEQ ID NO: 1393873 - DNA, 15 bp, Homo sapiens
taattcagaacaggt

SEQ ID NO: 1393874 - DNA, 15 bp, Homo sapiens
ttaattcagaacagg

SEQ ID NO: 1393875 - DNA, 15 bp, Homo sapiens
cttaattcagaacag

SEQ ID NO: 1393876 - DNA, 15 bp, Homo sapiens
ccttaattcagaaca

SEQ ID NO: 1393877 - DNA, 15 bp, Homo sapiens
accttaattcagaac

SEQ ID NO: 1393878 - DNA, 15 bp, Homo sapiens
taccttaattcagaa

SEQ ID NO: 1393879 - DNA, 15 bp, Homo sapiens
ataccttaattcaga

SEQ ID NO: 1393880 - DNA, 15 bp, Homo sapiens
aataccttaattcag

SEQ ID NO: 1393881 - DNA, 15 bp, Homo sapiens
aaataccttaattca

SEQ ID NO: 1393882 - DNA, 15 bp, Homo sapiens
gaaataccttaattc

SEQ ID NO: 1393883 - DNA, 15 bp, Homo sapiens
agaaataccttaatt

SEQ ID NO: 1393884 - DNA, 15 bp, Homo sapiens
cagaaataccttaat

SEQ ID NO: 1393885 - DNA, 15 bp, Homo sapiens
acagaaataccttaa

SEQ ID NO: 1393886 - DNA, 15 bp, Homo sapiens
cacagaaatacctta

SEQ ID NO: 1393887 - DNA, 15 bp, Homo sapiens
acacagaaatacctt

SEQ ID NO: 1393888 - DNA, 15 bp, Homo sapiens
gacacagaaatacct

SEQ ID NO: 1393889 - DNA, 15 bp, Homo sapiens
tgacacagaaatacc

SEQ ID NO: 1393890 - DNA, 15 bp, Homo sapiens
atgacacagaaatac

SEQ ID NO: 1393891 - DNA, 15 bp, Homo sapiens
tatgacacagaaata

SEQ ID NO: 1393892 - DNA, 15 bp, Homo sapiens
ctatgacacagaaat

SEQ ID NO: 1393893 - DNA, 15 bp, Homo sapiens
actatgacacagaaa

SEQ ID NO: 1393894 - DNA, 15 bp, Homo sapiens
cactatgacacagaa

SEQ ID NO: 1393895 - DNA, 15 bp, Homo sapiens
acactatgacacaga

SEQ ID NO: 1393896 - DNA, 15 bp, Homo sapiens
tacactatgacacag

SEQ ID NO: 1393897 - DNA, 15 bp, Homo sapiens
ttacactatgacaca

SEQ ID NO: 1393898 - DNA, 15 bp, Homo sapiens
tttacactatgacac

SEQ ID NO: 1393899 - DNA, 15 bp, Homo sapiens
atttacactatgaca

SEQ ID NO: 1393900 - DNA, 15 bp, Homo sapiens
aatttacactatgac

SEQ ID NO: 1393901 - DNA, 15 bp, Homo sapiens
aaatttacactatga

SEQ ID NO: 1393902 - DNA, 15 bp, Homo sapiens
caaatttacactatg

SEQ ID NO: 1393903 - DNA, 15 bp, Homo sapiens
ccaaatttacactat

SEQ ID NO: 1393904 - DNA, 15 bp, Homo sapiens
accaaatttacacta

SEQ ID NO: 1393905 - DNA, 15 bp, Homo sapiens
aaccaaatttacact

SEQ ID NO: 1393906 - DNA, 15 bp, Homo sapiens
caaccaaatttacac

SEQ ID NO: 1393907 - DNA, 15 bp, Homo sapiens
gcaaccaaatttaca

SEQ ID NO: 1393908 - DNA, 15 bp, Homo sapiens
tgcaaccaaatttac

SEQ ID NO: 1393909 - DNA, 15 bp, Homo sapiens
ttgcaaccaaattta

SEQ ID NO: 1393910 - DNA, 15 bp, Homo sapiens
cttgcaaccaaattt

SEQ ID NO: 1393911 - DNA, 15 bp, Homo sapiens
acttgcaaccaaatt

SEQ ID NO: 1393912 - DNA, 15 bp, Homo sapiens
tacttgcaaccaaat

SEQ ID NO: 1393913 - DNA, 15 bp, Homo sapiens
atacttgcaaccaaa

SEQ ID NO: 1393914 - DNA, 15 bp, Homo sapiens
aatacttgcaaccaa

SEQ ID NO: 1393915 - DNA, 15 bp, Homo sapiens
taatacttgcaacca

SEQ ID NO: 1393916 - DNA, 15 bp, Homo sapiens
ttaatacttgcaacc

SEQ ID NO: 1393917 - DNA, 15 bp, Homo sapiens
tttaatacttgcaac

SEQ ID NO: 1393918 - DNA, 15 bp, Homo sapiens
atttaatacttgcaa

SEQ ID NO: 1393919 - DNA, 15 bp, Homo sapiens
tatttaatacttgca

SEQ ID NO: 1393920 - DNA, 15 bp, Homo sapiens
gtatttaatacttgc

SEQ ID NO: 1393921 - DNA, 15 bp, Homo sapiens
agtatttaatacttg

SEQ ID NO: 1393922 - DNA, 15 bp, Homo sapiens
tagtatttaatactt

SEQ ID NO: 1393923 - DNA, 15 bp, Homo sapiens
ttagtatttaatact

SEQ ID NO: 1393924 - DNA, 15 bp, Homo sapiens
gttagtatttaatac

SEQ ID NO: 1393925 - DNA, 15 bp, Homo sapiens
agttagtatttaata

SEQ ID NO: 1393926 - DNA, 15 bp, Homo sapiens
gagttagtatttaat

SEQ ID NO: 1393927 - DNA, 15 bp, Homo sapiens
ggagttagtatttaa

SEQ ID NO: 1393928 - DNA, 15 bp, Homo sapiens
aggagttagtattta

SEQ ID NO: 1393929 - DNA, 15 bp, Homo sapiens
taggagttagtattt

SEQ ID NO: 1393930 - DNA, 15 bp, Homo sapiens
ataggagttagtatt

SEQ ID NO: 1393931 - DNA, 15 bp, Homo sapiens
aataggagttagtat

SEQ ID NO: 1393932 - DNA, 15 bp, Homo sapiens
gaataggagttagta

SEQ ID NO: 1393933 - DNA, 15 bp, Homo sapiens
agaataggagttagt

SEQ ID NO: 1393934 - DNA, 15 bp, Homo sapiens
cagaataggagttag

SEQ ID NO: 1393935 - DNA, 15 bp, Homo sapiens
ccagaataggagtta

SEQ ID NO: 1393936 - DNA, 15 bp, Homo sapiens
tccagaataggagtt

SEQ ID NO: 1393937 - DNA, 15 bp, Homo sapiens
ttccagaataggagt

SEQ ID NO: 1393938 - DNA, 15 bp, Homo sapiens
tttccagaataggag

SEQ ID NO: 1393939 - DNA, 15 bp, Homo sapiens
ctttccagaatagga

SEQ ID NO: 1393940 - DNA, 15 bp, Homo sapiens
tctttccagaatagg

SEQ ID NO: 1393941 - DNA, 15 bp, Homo sapiens
ttctttccagaatag

SEQ ID NO: 1393942 - DNA, 15 bp, Homo sapiens
attctttccagaata

SEQ ID NO: 1393943 - DNA, 15 bp, Homo sapiens
cattctttccagaat

SEQ ID NO: 1393944 - DNA, 15 bp, Homo sapiens
gcattctttccagaa

SEQ ID NO: 1393945 - DNA, 15 bp, Homo sapiens
tgcattctttccaga

SEQ ID NO: 1393946 - DNA, 15 bp, Homo sapiens
ttgcattctttccag

SEQ ID NO: 1393947 - DNA, 15 bp, Homo sapiens
attgcattctttcca

SEQ ID NO: 1393948 - DNA, 15 bp, Homo sapiens
gattgcattctttcc

SEQ ID NO: 1393949 - DNA, 15 bp, Homo sapiens
tgattgcattctttc

SEQ ID NO: 1393950 - DNA, 15 bp, Homo sapiens
atgattgcattcttt

SEQ ID NO: 1393951 - DNA, 15 bp, Homo sapiens
tatgattgcattctt

SEQ ID NO: 1393952 - DNA, 15 bp, Homo sapiens
ttatgattgcattct

SEQ ID NO: 1393953 - DNA, 15 bp, Homo sapiens
attatgattgcattc

SEQ ID NO: 1393954 - DNA, 15 bp, Homo sapiens
aattatgattgcatt

SEQ ID NO: 1393955 - DNA, 15 bp, Homo sapiens
aaattatgattgcat

SEQ ID NO: 1393956 - DNA, 15 bp, Homo sapiens
taaattatgattgca

SEQ ID NO: 1393957 - DNA, 15 bp, Homo sapiens
ttaaattatgattgc

SEQ ID NO: 1393958 - DNA, 15 bp, Homo sapiens
cttaaattatgattg

SEQ ID NO: 1393959 - DNA, 15 bp, Homo sapiens
tcttaaattatgatt

SEQ ID NO: 1393960 - DNA, 15 bp, Homo sapiens
ttcttaaattatgat

SEQ ID NO: 1393961 - DNA, 15 bp, Homo sapiens
gttcttaaattatga

SEQ ID NO: 1393962 - DNA, 15 bp, Homo sapiens
tgttcttaaattatg

SEQ ID NO: 1393963 - DNA, 15 bp, Homo sapiens
gtgttcttaaattat

SEQ ID NO: 1393964 - DNA, 15 bp, Homo sapiens
tgtgttcttaaatta

SEQ ID NO: 1393965 - DNA, 15 bp, Homo sapiens
atgtgttcttaaatt

SEQ ID NO: 1393966 - DNA, 15 bp, Homo sapiens
aatgtgttcttaaat

SEQ ID NO: 1393967 - DNA, 15 bp, Homo sapiens
aaatgtgttcttaaa

SEQ ID NO: 1393968 - DNA, 15 bp, Homo sapiens
aaaatgtgttcttaa

SEQ ID NO: 1393969 - DNA, 15 bp, Homo sapiens
aaaaatgtgttctta

SEQ ID NO: 1393970 - DNA, 15 bp, Homo sapiens
gaaaaatgtgttctt

SEQ ID NO: 1393971 - DNA, 15 bp, Homo sapiens
tgaaaaatgtgttct

SEQ ID NO: 1393972 - DNA, 15 bp, Homo sapiens
gtgaaaaatgtgttc

SEQ ID NO: 1393973 - DNA, 15 bp, Homo sapiens
ggtgaaaaatgtgtt

SEQ ID NO: 1393974 - DNA, 15 bp, Homo sapiens
gggtgaaaaatgtgt

SEQ ID NO: 1393975 - DNA, 15 bp, Homo sapiens
tgggtgaaaaatgtg

SEQ ID NO: 1393976 - DNA, 15 bp, Homo sapiens
ttgggtgaaaaatgt

SEQ ID NO: 1393977 - DNA, 15 bp, Homo sapiens
tttgggtgaaaaatg

SEQ ID NO: 1393978 - DNA, 15 bp, Homo sapiens
ctttgggtgaaaaat

SEQ ID NO: 1393979 - DNA, 15 bp, Homo sapiens
cctttgggtgaaaaa

SEQ ID NO: 1393980 - DNA, 15 bp, Homo sapiens
ccctttgggtgaaaa

SEQ ID NO: 1393981 - DNA, 15 bp, Homo sapiens
cccctttgggtgaaa

SEQ ID NO: 1393982 - DNA, 15 bp, Homo sapiens
acccctttgggtgaa

SEQ ID NO: 1393983 - DNA, 15 bp, Homo sapiens
cacccctttgggtga

SEQ ID NO: 1393984 - DNA, 15 bp, Homo sapiens
gcacccctttgggtg

SEQ ID NO: 1393985 - DNA, 15 bp, Homo sapiens
ggcacccctttgggt

SEQ ID NO: 1393986 - DNA, 15 bp, Homo sapiens
gggcacccctttggg

SEQ ID NO: 1393987 - DNA, 15 bp, Homo sapiens
agggcacccctttgg

SEQ ID NO: 1393988 - DNA, 15 bp, Homo sapiens
gagggcacccctttg

SEQ ID NO: 1393989 - DNA, 15 bp, Homo sapiens
agagggcaccccttt

SEQ ID NO: 1393990 - DNA, 15 bp, Homo sapiens
aagagggcacccctt

SEQ ID NO: 1393991 - DNA, 15 bp, Homo sapiens
aaagagggcacccct

SEQ ID NO: 1393992 - DNA, 15 bp, Homo sapiens
caaagagggcacccc

SEQ ID NO: 1393993 - DNA, 15 bp, Homo sapiens
tcaaagagggcaccc

SEQ ID NO: 1393994 - DNA, 15 bp, Homo sapiens
ctcaaagagggcacc

SEQ ID NO: 1393995 - DNA, 15 bp, Homo sapiens
actcaaagagggcac

SEQ ID NO: 1393996 - DNA, 15 bp, Homo sapiens
aactcaaagagggca

SEQ ID NO: 1393997 - DNA, 15 bp, Homo sapiens
aaactcaaagagggc

SEQ ID NO: 1393998 - DNA, 15 bp, Homo sapiens
taaactcaaagaggg

SEQ ID NO: 1393999 - DNA, 15 bp, Homo sapiens
ataaactcaaagagg

SEQ ID NO: 1394000 - DNA, 15 bp, Homo sapiens
gataaactcaaagag

SEQ ID NO: 1394001 - DNA, 15 bp, Homo sapiens
agataaactcaaaga

SEQ ID NO: 1394002 - DNA, 15 bp, Homo sapiens
tagataaactcaaag

SEQ ID NO: 1394003 - DNA, 15 bp, Homo sapiens
gtagataaactcaaa

SEQ ID NO: 1394004 - DNA, 15 bp, Homo sapiens
agtagataaactcaa

SEQ ID NO: 1394005 - DNA, 15 bp, Homo sapiens
gagtagataaactca

SEQ ID NO: 1394006 - DNA, 15 bp, Homo sapiens
agagtagataaactc

SEQ ID NO: 1394007 - DNA, 15 bp, Homo sapiens
gagagtagataaact

SEQ ID NO: 1394008 - DNA, 15 bp, Homo sapiens
tgagagtagataaac

SEQ ID NO: 1394009 - DNA, 15 bp, Homo sapiens
gtgagagtagataaa

SEQ ID NO: 1394010 - DNA, 15 bp, Homo sapiens
agtgagagtagataa

SEQ ID NO: 1394011 - DNA, 15 bp, Homo sapiens
aagtgagagtagata

SEQ ID NO: 1394012 - DNA, 15 bp, Homo sapiens
caagtgagagtagat

SEQ ID NO: 1394013 - DNA, 15 bp, Homo sapiens
acaagtgagagtaga

SEQ ID NO: 1394014 - DNA, 15 bp, Homo sapiens
tacaagtgagagtag

SEQ ID NO: 1394015 - DNA, 15 bp, Homo sapiens
gtacaagtgagagta

SEQ ID NO: 1394016 - DNA, 15 bp, Homo sapiens
ggtacaagtgagagt

SEQ ID NO: 1394017 - DNA, 15 bp, Homo sapiens
gggtacaagtgagag

SEQ ID NO: 1394018 - DNA, 15 bp, Homo sapiens
agggtacaagtgaga

SEQ ID NO: 1394019 - DNA, 15 bp, Homo sapiens
cagggtacaagtgag

SEQ ID NO: 1394020 - DNA, 15 bp, Homo sapiens
acagggtacaagtga

SEQ ID NO: 1394021 - DNA, 15 bp, Homo sapiens
cacagggtacaagtg

SEQ ID NO: 1394022 - DNA, 15 bp, Homo sapiens
gcacagggtacaagt

SEQ ID NO: 1394023 - DNA, 15 bp, Homo sapiens
agcacagggtacaag

SEQ ID NO: 1394024 - DNA, 15 bp, Homo sapiens
aagcacagggtacaa

SEQ ID NO: 1394025 - DNA, 15 bp, Homo sapiens
aaagcacagggtaca

SEQ ID NO: 1394026 - DNA, 15 bp, Homo sapiens
gaaagcacagggtac

SEQ ID NO: 1394027 - DNA, 15 bp, Homo sapiens
tgaaagcacagggta

SEQ ID NO: 1394028 - DNA, 15 bp, Homo sapiens
gtgaaagcacagggt

SEQ ID NO: 1394029 - DNA, 15 bp, Homo sapiens
agtgaaagcacaggg

SEQ ID NO: 1394030 - DNA, 15 bp, Homo sapiens
aagtgaaagcacagg

SEQ ID NO: 1394031 - DNA, 15 bp, Homo sapiens
aaagtgaaagcacag

SEQ ID NO: 1394032 - DNA, 15 bp, Homo sapiens
gaaagtgaaagcaca

SEQ ID NO: 1394033 - DNA, 15 bp, Homo sapiens
ggaaagtgaaagcac

SEQ ID NO: 1394034 - DNA, 15 bp, Homo sapiens
aggaaagtgaaagca

SEQ ID NO: 1394035 - DNA, 15 bp, Homo sapiens
caggaaagtgaaagc

SEQ ID NO: 1394036 - DNA, 15 bp, Homo sapiens
acaggaaagtgaaag

SEQ ID NO: 1394037 - DNA, 15 bp, Homo sapiens
tacaggaaagtgaaa

SEQ ID NO: 1394038 - DNA, 15 bp, Homo sapiens
ttacaggaaagtgaa

SEQ ID NO: 1394039 - DNA, 15 bp, Homo sapiens
tttacaggaaagtga

SEQ ID NO: 1394040 - DNA, 15 bp, Homo sapiens
gtttacaggaaagtg

SEQ ID NO: 1394041 - DNA, 15 bp, Homo sapiens
agtttacaggaaagt

SEQ ID NO: 1394042 - DNA, 15 bp, Homo sapiens
gagtttacaggaaag

SEQ ID NO: 1394043 - DNA, 15 bp, Homo sapiens
tgagtttacaggaaa

SEQ ID NO: 1394044 - DNA, 15 bp, Homo sapiens
atgagtttacaggaa

SEQ ID NO: 1394045 - DNA, 15 bp, Homo sapiens
aatgagtttacagga

SEQ ID NO: 1394046 - DNA, 15 bp, Homo sapiens
taatgagtttacagg

SEQ ID NO: 1394047 - DNA, 15 bp, Homo sapiens
ataatgagtttacag

SEQ ID NO: 1394048 - DNA, 15 bp, Homo sapiens
gataatgagtttaca

SEQ ID NO: 1394049 - DNA, 15 bp, Homo sapiens
agataatgagtttac

SEQ ID NO: 1394050 - DNA, 15 bp, Homo sapiens
cagataatgagttta

SEQ ID NO: 1394051 - DNA, 15 bp, Homo sapiens
tcagataatgagttt

SEQ ID NO: 1394052 - DNA, 15 bp, Homo sapiens
ttcagataatgagtt

SEQ ID NO: 1394053 - DNA, 15 bp, Homo sapiens
gttcagataatgagt

SEQ ID NO: 1394054 - DNA, 15 bp, Homo sapiens
ggttcagataatgag

SEQ ID NO: 1394055 - DNA, 15 bp, Homo sapiens
gggttcagataatga

SEQ ID NO: 1394056 - DNA, 15 bp, Homo sapiens
ggggttcagataatg

SEQ ID NO: 1394057 - DNA, 15 bp, Homo sapiens
tggggttcagataat

SEQ ID NO: 1394058 - DNA, 15 bp, Homo sapiens
gtggggttcagataa

SEQ ID NO: 1394059 - DNA, 15 bp, Homo sapiens
tgtggggttcagata

SEQ ID NO: 1394060 - DNA, 15 bp, Homo sapiens
gtgtggggttcagat

SEQ ID NO: 1394061 - DNA, 15 bp, Homo sapiens
ggtgtggggttcaga

SEQ ID NO: 1394062 - DNA, 15 bp, Homo sapiens
gggtgtggggttcag

SEQ ID NO: 1394063 - DNA, 15 bp, Homo sapiens
tgggtgtggggttca

SEQ ID NO: 1394064 - DNA, 15 bp, Homo sapiens
gtgggtgtggggttc

SEQ ID NO: 1394065 - DNA, 15 bp, Homo sapiens
ggtgggtgtggggtt

SEQ ID NO: 1394066 - DNA, 15 bp, Homo sapiens
gggtgggtgtggggt

SEQ ID NO: 1394067 - DNA, 15 bp, Homo sapiens
agggtgggtgtgggg

SEQ ID NO: 1394068 - DNA, 15 bp, Homo sapiens
cagggtgggtgtggg

SEQ ID NO: 1394069 - DNA, 15 bp, Homo sapiens
ccagggtgggtgtgg

SEQ ID NO: 1394070 - DNA, 15 bp, Homo sapiens
gccagggtgggtgtg

SEQ ID NO: 1394071 - DNA, 15 bp, Homo sapiens
ggccagggtgggtgt

SEQ ID NO: 1394072 - DNA, 15 bp, Homo sapiens
gggccagggtgggtg

SEQ ID NO: 1394073 - DNA, 15 bp, Homo sapiens
agggccagggtgggt

SEQ ID NO: 1394074 - DNA, 15 bp, Homo sapiens
aagggccagggtggg

SEQ ID NO: 1394075 - DNA, 15 bp, Homo sapiens
gaagggccagggtgg

SEQ ID NO: 1394076 - DNA, 15 bp, Homo sapiens
agaagggccagggtg

SEQ ID NO: 1394077 - DNA, 15 bp, Homo sapiens
cagaagggccagggt

SEQ ID NO: 1394078 - DNA, 15 bp, Homo sapiens
tcagaagggccaggg

SEQ ID NO: 1394079 - DNA, 15 bp, Homo sapiens
ttcagaagggccagg

SEQ ID NO: 1394080 - DNA, 15 bp, Homo sapiens
tttcagaagggccag

SEQ ID NO: 1394081 - DNA, 15 bp, Homo sapiens
atttcagaagggcca

SEQ ID NO: 1394082 - DNA, 15 bp, Homo sapiens
aatttcagaagggcc

SEQ ID NO: 1394083 - DNA, 15 bp, Homo sapiens
aaatttcagaagggc

SEQ ID NO: 1394084 - DNA, 15 bp, Homo sapiens
aaaatttcagaaggg

SEQ ID NO: 1394085 - DNA, 15 bp, Homo sapiens
aaaaatttcagaagg

SEQ ID NO: 1394086 - DNA, 15 bp, Homo sapiens
caaaaatttcagaag

SEQ ID NO: 1394087 - DNA, 15 bp, Homo sapiens
acaaaaatttcagaa

SEQ ID NO: 1394088 - DNA, 15 bp, Homo sapiens
tacaaaaatttcaga

SEQ ID NO: 1394089 - DNA, 15 bp, Homo sapiens
ttacaaaaatttcag

SEQ ID NO: 1394090 - DNA, 15 bp, Homo sapiens
tttacaaaaatttca

SEQ ID NO: 1394091 - DNA, 15 bp, Homo sapiens
ttttacaaaaatttc

SEQ ID NO: 1394092 - DNA, 15 bp, Homo sapiens
attttacaaaaattt

SEQ ID NO: 1394093 - DNA, 15 bp, Homo sapiens
aattttacaaaaatt

SEQ ID NO: 1394094 - DNA, 15 bp, Homo sapiens
caattttacaaaaat

SEQ ID NO: 1394095 - DNA, 15 bp, Homo sapiens
tcaattttacaaaaa

SEQ ID NO: 1394096 - DNA, 15 bp, Homo sapiens
ttcaattttacaaaa

SEQ ID NO: 1394097 - DNA, 15 bp, Homo sapiens
tttcaattttacaaa

SEQ ID NO: 1394098 - DNA, 15 bp, Homo sapiens
ctttcaattttacaa

SEQ ID NO: 1394099 - DNA, 15 bp, Homo sapiens
cctttcaattttaca

SEQ ID NO: 1394100 - DNA, 15 bp, Homo sapiens
tcctttcaattttac

SEQ ID NO: 1394101 - DNA, 15 bp, Homo sapiens
ttcctttcaatttta

SEQ ID NO: 1394102 - DNA, 15 bp, Homo sapiens
gttcctttcaatttt

SEQ ID NO: 1394103 - DNA, 15 bp, Homo sapiens
agttcctttcaattt

SEQ ID NO: 1394104 - DNA, 15 bp, Homo sapiens
cagttcctttcaatt

SEQ ID NO: 1394105 - DNA, 15 bp, Homo sapiens
acagttcctttcaat

SEQ ID NO: 1394106 - DNA, 15 bp, Homo sapiens
aacagttcctttcaa

SEQ ID NO: 1394107 - DNA, 15 bp, Homo sapiens
aaacagttcctttca

SEQ ID NO: 1394108 - DNA, 15 bp, Homo sapiens
aaaacagttcctttc

SEQ ID NO: 1394109 - DNA, 15 bp, Homo sapiens
aaaaacagttccttt

SEQ ID NO: 1394110 - DNA, 15 bp, Homo sapiens
gaaaaacagttcctt

SEQ ID NO: 1394111 - DNA, 15 bp, Homo sapiens
ggaaaaacagttcct

SEQ ID NO: 1394112 - DNA, 15 bp, Homo sapiens
aggaaaaacagttcc

SEQ ID NO: 1394113 - DNA, 15 bp, Homo sapiens
caggaaaaacagttc

SEQ ID NO: 1394114 - DNA, 15 bp, Homo sapiens
tcaggaaaaacagtt

SEQ ID NO: 1394115 - DNA, 15 bp, Homo sapiens
atcaggaaaaacagt

SEQ ID NO: 1394116 - DNA, 15 bp, Homo sapiens
catcaggaaaaacag

SEQ ID NO: 1394117 - DNA, 15 bp, Homo sapiens
tcatcaggaaaaaca

SEQ ID NO: 1394118 - DNA, 15 bp, Homo sapiens
gtcatcaggaaaaac

SEQ ID NO: 1394119 - DNA, 15 bp, Homo sapiens
tgtcatcaggaaaaa

SEQ ID NO: 1394120 - DNA, 15 bp, Homo sapiens
ttgtcatcaggaaaa

SEQ ID NO: 1394121 - DNA, 15 bp, Homo sapiens
cttgtcatcaggaaa

SEQ ID NO: 1394122 - DNA, 15 bp, Homo sapiens
acttgtcatcaggaa

SEQ ID NO: 1394123 - DNA, 15 bp, Homo sapiens
cacttgtcatcagga

SEQ ID NO: 1394124 - DNA, 15 bp, Homo sapiens
tcacttgtcatcagg

SEQ ID NO: 1394125 - DNA, 15 bp, Homo sapiens
ctcacttgtcatcag

SEQ ID NO: 1394126 - DNA, 15 bp, Homo sapiens
cctcacttgtcatca

SEQ ID NO: 1394127 - DNA, 15 bp, Homo sapiens
gcctcacttgtcatc

SEQ ID NO: 1394128 - DNA, 15 bp, Homo sapiens
agcctcacttgtcat

SEQ ID NO: 1394129 - DNA, 15 bp, Homo sapiens
aagcctcacttgtca

SEQ ID NO: 1394130 - DNA, 15 bp, Homo sapiens
gaagcctcacttgtc

SEQ ID NO: 1394131 - DNA, 15 bp, Homo sapiens
tgaagcctcacttgt

SEQ ID NO: 1394132 - DNA, 15 bp, Homo sapiens
atgaagcctcacttg

SEQ ID NO: 1394133 - DNA, 15 bp, Homo sapiens
tatgaagcctcactt

SEQ ID NO: 1394134 - DNA, 15 bp, Homo sapiens
atatgaagcctcact

SEQ ID NO: 1394135 - DNA, 15 bp, Homo sapiens
catatgaagcctcac

SEQ ID NO: 1394136 - DNA, 15 bp, Homo sapiens
tcatatgaagcctca

SEQ ID NO: 1394137 - DNA, 15 bp, Homo sapiens
ttcatatgaagcctc

SEQ ID NO: 1394138 - DNA, 15 bp, Homo sapiens
tttcatatgaagcct

SEQ ID NO: 1394139 - DNA, 15 bp, Homo sapiens
ctttcatatgaagcc

SEQ ID NO: 1394140 - DNA, 15 bp, Homo sapiens
cctttcatatgaagc

SEQ ID NO: 1394141 - DNA, 15 bp, Homo sapiens
tcctttcatatgaag

SEQ ID NO: 1394142 - DNA, 15 bp, Homo sapiens
ctcctttcatatgaa

SEQ ID NO: 1394143 - DNA, 15 bp, Homo sapiens
tctcctttcatatga

SEQ ID NO: 1394144 - DNA, 15 bp, Homo sapiens
atctcctttcatatg

SEQ ID NO: 1394145 - DNA, 15 bp, Homo sapiens
aatctcctttcatat

SEQ ID NO: 1394146 - DNA, 15 bp, Homo sapiens
aaatctcctttcata

SEQ ID NO: 1394147 - DNA, 15 bp, Homo sapiens
taaatctcctttcat

SEQ ID NO: 1394148 - DNA, 15 bp, Homo sapiens
ataaatctcctttca

SEQ ID NO: 1394149 - DNA, 15 bp, Homo sapiens
cataaatctcctttc

SEQ ID NO: 1394150 - DNA, 15 bp, Homo sapiens
tcataaatctccttt

SEQ ID NO: 1394151 - DNA, 15 bp, Homo sapiens
atcataaatctcctt

SEQ ID NO: 1394152 - DNA, 15 bp, Homo sapiens
tatcataaatctcct

SEQ ID NO: 1394153 - DNA, 15 bp, Homo sapiens
ctatcataaatctcc

SEQ ID NO: 1394154 - DNA, 15 bp, Homo sapiens
cctatcataaatctc

SEQ ID NO: 1394155 - DNA, 15 bp, Homo sapiens
acctatcataaatct

SEQ ID NO: 1394156 - DNA, 15 bp, Homo sapiens
aacctatcataaatc

SEQ ID NO: 1394157 - DNA, 15 bp, Homo sapiens
aaacctatcataaat

SEQ ID NO: 1394158 - DNA, 15 bp, Homo sapiens
aaaacctatcataaa

SEQ ID NO: 1394159 - DNA, 15 bp, Homo sapiens
gaaaacctatcataa

SEQ ID NO: 1394160 - DNA, 15 bp, Homo sapiens
tgaaaacctatcata

SEQ ID NO: 1394161 - DNA, 15 bp, Homo sapiens
atgaaaacctatcat

SEQ ID NO: 1394162 - DNA, 15 bp, Homo sapiens
catgaaaacctatca

SEQ ID NO: 1394163 - DNA, 15 bp, Homo sapiens
tcatgaaaacctatc

SEQ ID NO: 1394164 - DNA, 15 bp, Homo sapiens
ctcatgaaaacctat

SEQ ID NO: 1394165 - DNA, 15 bp, Homo sapiens
gctcatgaaaaccta

SEQ ID NO: 1394166 - DNA, 15 bp, Homo sapiens
tgctcatgaaaacct

SEQ ID NO: 1394167 - DNA, 15 bp, Homo sapiens
ttgctcatgaaaacc

SEQ ID NO: 1394168 - DNA, 15 bp, Homo sapiens
tttgctcatgaaaac

SEQ ID NO: 1394169 - DNA, 15 bp, Homo sapiens
ttttgctcatgaaaa

SEQ ID NO: 1394170 - DNA, 15 bp, Homo sapiens
tttttgctcatgaaa

SEQ ID NO: 1394171 - DNA, 15 bp, Homo sapiens
atttttgctcatgaa

SEQ ID NO: 1394172 - DNA, 15 bp, Homo sapiens
aatttttgctcatga

SEQ ID NO: 1394173 - DNA, 15 bp, Homo sapiens
caatttttgctcatg

SEQ ID NO: 1394174 - DNA, 15 bp, Homo sapiens
acaatttttgctcat

SEQ ID NO: 1394175 - DNA, 15 bp, Homo sapiens
cacaatttttgctca

SEQ ID NO: 1394176 - DNA, 15 bp, Homo sapiens
acacaatttttgctc

SEQ ID NO: 1394177 - DNA, 15 bp, Homo sapiens
tacacaatttttgct

SEQ ID NO: 1394178 - DNA, 15 bp, Homo sapiens
ctacacaatttttgc

SEQ ID NO: 1394179 - DNA, 15 bp, Homo sapiens
actacacaatttttg

SEQ ID NO: 1394180 - DNA, 15 bp, Homo sapiens
aactacacaattttt

SEQ ID NO: 1394181 - DNA, 15 bp, Homo sapiens
aaactacacaatttt

SEQ ID NO: 1394182 - DNA, 15 bp, Homo sapiens
aaaactacacaattt

SEQ ID NO: 1394183 - DNA, 15 bp, Homo sapiens
gaaaactacacaatt

SEQ ID NO: 1394184 - DNA, 15 bp, Homo sapiens
agaaaactacacaat

SEQ ID NO: 1394185 - DNA, 15 bp, Homo sapiens
tagaaaactacacaa

SEQ ID NO: 1394186 - DNA, 15 bp, Homo sapiens
ttagaaaactacaca

SEQ ID NO: 1394187 - DNA, 15 bp, Homo sapiens
tttagaaaactacac

SEQ ID NO: 1394188 - DNA, 15 bp, Homo sapiens
ctttagaaaactaca

SEQ ID NO: 1394189 - DNA, 15 bp, Homo sapiens
tctttagaaaactac

SEQ ID NO: 1394190 - DNA, 15 bp, Homo sapiens
atctttagaaaacta

SEQ ID NO: 1394191 - DNA, 15 bp, Homo sapiens
aatctttagaaaact

SEQ ID NO: 1394192 - DNA, 15 bp, Homo sapiens
aaatctttagaaaac

SEQ ID NO: 1394193 - DNA, 15 bp, Homo sapiens
gaaatctttagaaaa

SEQ ID NO: 1394194 - DNA, 15 bp, Homo sapiens
tgaaatctttagaaa

SEQ ID NO: 1394195 - DNA, 15 bp, Homo sapiens
atgaaatctttagaa

SEQ ID NO: 1394196 - DNA, 15 bp, Homo sapiens
tatgaaatctttaga

SEQ ID NO: 1394197 - DNA, 15 bp, Homo sapiens
gtatgaaatctttag

SEQ ID NO: 1394198 - DNA, 15 bp, Homo sapiens
tgtatgaaatcttta

SEQ ID NO: 1394199 - DNA, 15 bp, Homo sapiens
atgtatgaaatcttt

SEQ ID NO: 1394200 - DNA, 15 bp, Homo sapiens
tatgtatgaaatctt

SEQ ID NO: 1394201 - DNA, 15 bp, Homo sapiens
atatgtatgaaatct

SEQ ID NO: 1394202 - DNA, 15 bp, Homo sapiens
tatatgtatgaaatc

SEQ ID NO: 1394203 - DNA, 15 bp, Homo sapiens
gtatatgtatgaaat

SEQ ID NO: 1394204 - DNA, 15 bp, Homo sapiens
ggtatatgtatgaaa

SEQ ID NO: 1394205 - DNA, 15 bp, Homo sapiens
gggtatatgtatgaa

SEQ ID NO: 1394206 - DNA, 15 bp, Homo sapiens
agggtatatgtatga

SEQ ID NO: 1394207 - DNA, 15 bp, Homo sapiens
aagggtatatgtatg

SEQ ID NO: 1394208 - DNA, 15 bp, Homo sapiens
taaagggtatatgta

SEQ ID NO: 1394209 - DNA, 15 bp, Homo sapiens
ttaaagggtatatgt

SEQ ID NO: 1394210 - DNA, 15 bp, Homo sapiens
tttaaagggtatatg

SEQ ID NO: 1394211 - DNA, 15 bp, Homo sapiens
ttttaaagggtatat

SEQ ID NO: 1394212 - DNA, 15 bp, Homo sapiens
cttttaaagggtata

SEQ ID NO: 1394213 - DNA, 15 bp, Homo sapiens
acttttaaagggtat

SEQ ID NO: 1394214 - DNA, 15 bp, Homo sapiens
aacttttaaagggta

SEQ ID NO: 1394215 - DNA, 15 bp, Homo sapiens
taacttttaaagggt

SEQ ID NO: 1394216 - DNA, 15 bp, Homo sapiens
ataacttttaaaggg

SEQ ID NO: 1394217 - DNA, 15 bp, Homo sapiens
tataacttttaaagg

SEQ ID NO: 1394218 - DNA, 15 bp, Homo sapiens
atataacttttaaag

SEQ ID NO: 1394219 - DNA, 15 bp, Homo sapiens
tatataacttttaaa

SEQ ID NO: 1394220 - DNA, 15 bp, Homo sapiens
atatataacttttaa

SEQ ID NO: 1394221 - DNA, 15 bp, Homo sapiens
catatataactttta

SEQ ID NO: 1394222 - DNA, 15 bp, Homo sapiens
acatatataactttt

SEQ ID NO: 1394223 - DNA, 15 bp, Homo sapiens
aacatatataacttt

SEQ ID NO: 1394224 - DNA, 15 bp, Homo sapiens
aaacatatataactt

SEQ ID NO: 1394225 - DNA, 15 bp, Homo sapiens
taaacatatataact

SEQ ID NO: 1394226 - DNA, 15 bp, Homo sapiens
ataaacatatataac

SEQ ID NO: 1394227 - DNA, 15 bp, Homo sapiens
aataaacatatataa

SEQ ID NO: 1394228 - DNA, 15 bp, Homo sapiens
aaataaacatatata

SEQ ID NO: 1394229 - DNA, 15 bp, Homo sapiens
ataaataaacatata

SEQ ID NO: 1394230 - DNA, 15 bp, Homo sapiens
tataaataaacatat

SEQ ID NO: 1394231 - DNA, 15 bp, Homo sapiens
atataaataaacata

SEQ ID NO: 1394232 - DNA, 15 bp, Homo sapiens
tatataaataaacat

SEQ ID NO: 1394233 - DNA, 15 bp, Homo sapiens
atatataaataaaca

SEQ ID NO: 1394234 - DNA, 15 bp, Homo sapiens
aatatataaataaac

SEQ ID NO: 1394235 - DNA, 15 bp, Homo sapiens
taatatataaataaa

SEQ ID NO: 1394236 - DNA, 15 bp, Homo sapiens
ctaatatataaataa

SEQ ID NO: 1394237 - DNA, 15 bp, Homo sapiens
tctaatatataaata

SEQ ID NO: 1394238 - DNA, 15 bp, Homo sapiens
gtctaatatataaat

SEQ ID NO: 1394239 - DNA, 15 bp, Homo sapiens
tgtctaatatataaa

SEQ ID NO: 1394240 - DNA, 15 bp, Homo sapiens
atgtctaatatataa

SEQ ID NO: 1394241 - DNA, 15 bp, Homo sapiens
tatgtctaatatata

SEQ ID NO: 1394242 - DNA, 15 bp, Homo sapiens
atatgtctaatatat

SEQ ID NO: 1394243 - DNA, 15 bp, Homo sapiens
tatatgtctaatata

SEQ ID NO: 1394244 - DNA, 15 bp, Homo sapiens
atatatgtctaatat

SEQ ID NO: 1394245 - DNA, 15 bp, Homo sapiens
tatatatgtctaata

SEQ ID NO: 1394246 - DNA, 15 bp, Homo sapiens
atatatatgtctaat

SEQ ID NO: 1394247 - DNA, 15 bp, Homo sapiens
tatatatatgtctaa

SEQ ID NO: 1394248 - DNA, 15 bp, Homo sapiens
ttatatatatgtcta

SEQ ID NO: 1394249 - DNA, 15 bp, Homo sapiens
gttatatatatgtct

SEQ ID NO: 1394250 - DNA, 15 bp, Homo sapiens
agttatatatatgtc

SEQ ID NO: 1394251 - DNA, 15 bp, Homo sapiens
aagttatatatatgt

SEQ ID NO: 1394252 - DNA, 15 bp, Homo sapiens
caagttatatatatg

SEQ ID NO: 1394253 - DNA, 15 bp, Homo sapiens
ccaagttatatatat

SEQ ID NO: 1394254 - DNA, 15 bp, Homo sapiens
tccaagttatatata

SEQ ID NO: 1394255 - DNA, 15 bp, Homo sapiens
gtccaagttatatat

SEQ ID NO: 1394256 - DNA, 15 bp, Homo sapiens
agtccaagttatata

SEQ ID NO: 1394257 - DNA, 15 bp, Homo sapiens
aagtccaagttatat

SEQ ID NO: 1394258 - DNA, 15 bp, Homo sapiens
aaagtccaagttata

SEQ ID NO: 1394259 - DNA, 15 bp, Homo sapiens
aaaagtccaagttat

SEQ ID NO: 1394260 - DNA, 15 bp, Homo sapiens
taaaagtccaagtta

SEQ ID NO: 1394261 - DNA, 15 bp, Homo sapiens
gtaaaagtccaagtt

SEQ ID NO: 1394262 - DNA, 15 bp, Homo sapiens
tgtaaaagtccaagt

SEQ ID NO: 1394263 - DNA, 15 bp, Homo sapiens
atgtaaaagtccaag

SEQ ID NO: 1394264 - DNA, 15 bp, Homo sapiens
aatgtaaaagtccaa

SEQ ID NO: 1394265 - DNA, 15 bp, Homo sapiens
aaatgtaaaagtcca

SEQ ID NO: 1394266 - DNA, 15 bp, Homo sapiens
aaaatgtaaaagtcc

SEQ ID NO: 1394267 - DNA, 15 bp, Homo sapiens
aaaaatgtaaaagtc

SEQ ID NO: 1394268 - DNA, 15 bp, Homo sapiens
taaaaatgtaaaagt

SEQ ID NO: 1394269 - DNA, 15 bp, Homo sapiens
ttaaaaatgtaaaag

SEQ ID NO: 1394270 - DNA, 15 bp, Homo sapiens
gttaaaaatgtaaaa

SEQ ID NO: 1394271 - DNA, 15 bp, Homo sapiens
tgttaaaaatgtaaa

SEQ ID NO: 1394272 - DNA, 15 bp, Homo sapiens
ttgttaaaaatgtaa

SEQ ID NO: 1394273 - DNA, 15 bp, Homo sapiens
cttgttaaaaatgta

SEQ ID NO: 1394274 - DNA, 15 bp, Homo sapiens
gcttgttaaaaatgt

SEQ ID NO: 1394275 - DNA, 15 bp, Homo sapiens
tgcttgttaaaaatg

SEQ ID NO: 1394276 - DNA, 15 bp, Homo sapiens
gtgcttgttaaaaat

SEQ ID NO: 1394277 - DNA, 15 bp, Homo sapiens
agtgcttgttaaaaa

SEQ ID NO: 1394278 - DNA, 15 bp, Homo sapiens
tagtgcttgttaaaa

SEQ ID NO: 1394279 - DNA, 15 bp, Homo sapiens
atagtgcttgttaaa

SEQ ID NO: 1394280 - DNA, 15 bp, Homo sapiens
aatagtgcttgttaa

SEQ ID NO: 1394281 - DNA, 15 bp, Homo sapiens
taatagtgcttgtta

SEQ ID NO: 1394282 - DNA, 15 bp, Homo sapiens
ttaatagtgcttgtt

SEQ ID NO: 1394283 - DNA, 15 bp, Homo sapiens
tttaatagtgcttgt

SEQ ID NO: 1394284 - DNA, 15 bp, Homo sapiens
ttttaatagtgcttg

SEQ ID NO: 1394285 - DNA, 15 bp, Homo sapiens
tttttaatagtgctt

SEQ ID NO: 1394286 - DNA, 15 bp, Homo sapiens
atttttaatagtgct

SEQ ID NO: 1394287 - DNA, 15 bp, Homo sapiens
aatttttaatagtgc

SEQ ID NO: 1394288 - DNA, 15 bp, Homo sapiens
caatttttaatagtg

SEQ ID NO: 1394289 - DNA, 15 bp, Homo sapiens
tcaatttttaatagt

SEQ ID NO: 1394290 - DNA, 15 bp, Homo sapiens
ttcaatttttaatag

SEQ ID NO: 1394291 - DNA, 15 bp, Homo sapiens
attcaatttttaata

SEQ ID NO: 1394292 - DNA, 15 bp, Homo sapiens
cattcaatttttaat

SEQ ID NO: 1394293 - DNA, 15 bp, Homo sapiens
acattcaatttttaa

SEQ ID NO: 1394294 - DNA, 15 bp, Homo sapiens
tacattcaattttta

SEQ ID NO: 1394295 - DNA, 15 bp, Homo sapiens
ttacattcaattttt

SEQ ID NO: 1394296 - DNA, 15 bp, Homo sapiens
tttacattcaatttt

SEQ ID NO: 1394297 - DNA, 15 bp, Homo sapiens
gtttacattcaattt

SEQ ID NO: 1394298 - DNA, 15 bp, Homo sapiens
agtttacattcaatt

SEQ ID NO: 1394299 - DNA, 15 bp, Homo sapiens
aagtttacattcaat

SEQ ID NO: 1394300 - DNA, 15 bp, Homo sapiens
caagtttacattcaa

SEQ ID NO: 1394301 - DNA, 15 bp, Homo sapiens
tcaagtttacattca

SEQ ID NO: 1394302 - DNA, 15 bp, Homo sapiens
ttcaagtttacattc

SEQ ID NO: 1394303 - DNA, 15 bp, Homo sapiens
tttcaagtttacatt

SEQ ID NO: 1394304 - DNA, 15 bp, Homo sapiens
atttcaagtttacat

SEQ ID NO: 1394305 - DNA, 15 bp, Homo sapiens
aatttcaagtttaca

SEQ ID NO: 1394306 - DNA, 15 bp, Homo sapiens
aaatttcaagtttac

SEQ ID NO: 1394307 - DNA, 15 bp, Homo sapiens
taaatttcaagttta

SEQ ID NO: 1394308 - DNA, 15 bp, Homo sapiens
ttaaatttcaagttt

SEQ ID NO: 1394309 - DNA, 15 bp, Homo sapiens
attaaatttcaagtt

SEQ ID NO: 1394310 - DNA, 15 bp, Homo sapiens
cattaaatttcaagt

SEQ ID NO: 1394311 - DNA, 15 bp, Homo sapiens
gcattaaatttcaag

SEQ ID NO: 1394312 - DNA, 15 bp, Homo sapiens
tgcattaaatttcaa

SEQ ID NO: 1394313 - DNA, 15 bp, Homo sapiens
ttgcattaaatttca

SEQ ID NO: 1394314 - DNA, 15 bp, Homo sapiens
tttgcattaaatttc

SEQ ID NO: 1394315 - DNA, 15 bp, Homo sapiens
ctttgcattaaattt

SEQ ID NO: 1394316 - DNA, 15 bp, Homo sapiens
cctttgcattaaatt

SEQ ID NO: 1394317 - DNA, 15 bp, Homo sapiens
tcctttgcattaaat

SEQ ID NO: 1394318 - DNA, 15 bp, Homo sapiens
ttcctttgcattaaa

SEQ ID NO: 1394319 - DNA, 15 bp, Homo sapiens
tttcctttgcattaa

SEQ ID NO: 1394320 - DNA, 15 bp, Homo sapiens
atttcctttgcatta

SEQ ID NO: 1394321 - DNA, 15 bp, Homo sapiens
aatttcctttgcatt

SEQ ID NO: 1394322 - DNA, 15 bp, Homo sapiens
aaatttcctttgcat

SEQ ID NO: 1394323 - DNA, 15 bp, Homo sapiens
taaatttcctttgca

SEQ ID NO: 1394324 - DNA, 15 bp, Homo sapiens
ctaaatttcctttgc

SEQ ID NO: 1394325 - DNA, 15 bp, Homo sapiens
actaaatttcctttg

SEQ ID NO: 1394326 - DNA, 15 bp, Homo sapiens
aactaaatttccttt

SEQ ID NO: 1394327 - DNA, 15 bp, Homo sapiens
aaactaaatttcctt

SEQ ID NO: 1394328 - DNA, 15 bp, Homo sapiens
taaactaaatttcct

SEQ ID NO: 1394329 - DNA, 15 bp, Homo sapiens
ttaaactaaatttcc

SEQ ID NO: 1394330 - DNA, 15 bp, Homo sapiens
tttaaactaaatttc

SEQ ID NO: 1394331 - DNA, 15 bp, Homo sapiens
atttaaactaaattt

SEQ ID NO: 1394332 - DNA, 15 bp, Homo sapiens
gatttaaactaaatt

SEQ ID NO: 1394333 - DNA, 15 bp, Homo sapiens
agatttaaactaaat

SEQ ID NO: 1394334 - DNA, 15 bp, Homo sapiens
cagatttaaactaaa

SEQ ID NO: 1394335 - DNA, 15 bp, Homo sapiens
acagatttaaactaa

SEQ ID NO: 1394336 - DNA, 15 bp, Homo sapiens
gacagatttaaacta

SEQ ID NO: 1394337 - DNA, 15 bp, Homo sapiens
ggacagatttaaact

SEQ ID NO: 1394338 - DNA, 15 bp, Homo sapiens
tggacagatttaaac

SEQ ID NO: 1394339 - DNA, 15 bp, Homo sapiens
gtggacagatttaaa

SEQ ID NO: 1394340 - DNA, 15 bp, Homo sapiens
agtggacagatttaa

SEQ ID NO: 1394341 - DNA, 15 bp, Homo sapiens
tagtggacagattta

SEQ ID NO: 1394342 - DNA, 15 bp, Homo sapiens
ttagtggacagattt

SEQ ID NO: 1394343 - DNA, 15 bp, Homo sapiens
tttagtggacagatt

SEQ ID NO: 1394344 - DNA, 15 bp, Homo sapiens
ctttagtggacagat

SEQ ID NO: 1394345 - DNA, 15 bp, Homo sapiens
tctttagtggacaga

SEQ ID NO: 1394346 - DNA, 15 bp, Homo sapiens
ttctttagtggacag

SEQ ID NO: 1394347 - DNA, 15 bp, Homo sapiens
attctttagtggaca

SEQ ID NO: 1394348 - DNA, 15 bp, Homo sapiens
gattctttagtggac

SEQ ID NO: 1394349 - DNA, 15 bp, Homo sapiens
tgattctttagtgga

SEQ ID NO: 1394350 - DNA, 15 bp, Homo sapiens
atgattctttagtgg

SEQ ID NO: 1394351 - DNA, 15 bp, Homo sapiens
aatgattctttagtg

SEQ ID NO: 1394352 - DNA, 15 bp, Homo sapiens
gaatgattctttagt

SEQ ID NO: 1394353 - DNA, 15 bp, Homo sapiens
tgaatgattctttag

SEQ ID NO: 1394354 - DNA, 15 bp, Homo sapiens
atgaatgattcttta

SEQ ID NO: 1394355 - DNA, 15 bp, Homo sapiens
aatgaatgattcttt

SEQ ID NO: 1394356 - DNA, 15 bp, Homo sapiens
aaatgaatgattctt

SEQ ID NO: 1394357 - DNA, 15 bp, Homo sapiens
caaatgaatgattct

SEQ ID NO: 1394358 - DNA, 15 bp, Homo sapiens
ccaaatgaatgattc

SEQ ID NO: 1394359 - DNA, 15 bp, Homo sapiens
gccaaatgaatgatt

SEQ ID NO: 1394360 - DNA, 15 bp, Homo sapiens
agccaaatgaatgat

SEQ ID NO: 1394361 - DNA, 15 bp, Homo sapiens
tagccaaatgaatga

SEQ ID NO: 1394362 - DNA, 15 bp, Homo sapiens
ttagccaaatgaatg

SEQ ID NO: 1394363 - DNA, 15 bp, Homo sapiens
cttagccaaatgaat

SEQ ID NO: 1394364 - DNA, 15 bp, Homo sapiens
acttagccaaatgaa

SEQ ID NO: 1394365 - DNA, 15 bp, Homo sapiens
gacttagccaaatga

SEQ ID NO: 1394366 - DNA, 15 bp, Homo sapiens
agacttagccaaatg

SEQ ID NO: 1394367 - DNA, 15 bp, Homo sapiens
aagacttagccaaat

SEQ ID NO: 1394368 - DNA, 15 bp, Homo sapiens
gaagacttagccaaa

SEQ ID NO: 1394369 - DNA, 15 bp, Homo sapiens
agaagacttagccaa

SEQ ID NO: 1394370 - DNA, 15 bp, Homo sapiens
aagaagacttagcca

SEQ ID NO: 1394371 - DNA, 15 bp, Homo sapiens
aaagaagacttagcc

SEQ ID NO: 1394372 - DNA, 15 bp, Homo sapiens
aaaagaagacttagc

SEQ ID NO: 1394373 - DNA, 15 bp, Homo sapiens
taaaagaagacttag

SEQ ID NO: 1394374 - DNA, 15 bp, Homo sapiens
ttaaaagaagactta

SEQ ID NO: 1394375 - DNA, 15 bp, Homo sapiens
attaaaagaagactt

SEQ ID NO: 1394376 - DNA, 15 bp, Homo sapiens
gattaaaagaagact

SEQ ID NO: 1394377 - DNA, 15 bp, Homo sapiens
agattaaaagaagac

SEQ ID NO: 1394378 - DNA, 15 bp, Homo sapiens
tagattaaaagaaga

SEQ ID NO: 1394379 - DNA, 15 bp, Homo sapiens
ctagattaaaagaag

SEQ ID NO: 1394380 - DNA, 15 bp, Homo sapiens
tctagattaaaagaa

SEQ ID NO: 1394381 - DNA, 15 bp, Homo sapiens
atctagattaaaaga

SEQ ID NO: 1394382 - DNA, 15 bp, Homo sapiens
aatctagattaaaag

SEQ ID NO: 1394383 - DNA, 15 bp, Homo sapiens
aaatctagattaaaa

SEQ ID NO: 1394384 - DNA, 15 bp, Homo sapiens
aaaatctagattaaa

SEQ ID NO: 1394385 - DNA, 15 bp, Homo sapiens
aaaaatctagattaa

SEQ ID NO: 1394386 - DNA, 15 bp, Homo sapiens
aaaaaatctagatta

SEQ ID NO: 1394387 - DNA, 15 bp, Homo sapiens
aaaaaaatctagatt

SEQ ID NO: 1394388 - DNA, 15 bp, Homo sapiens
gaaaaaaatctagat

SEQ ID NO: 1394389 - DNA, 15 bp, Homo sapiens
agaaaaaaatctaga

SEQ ID NO: 1394390 - DNA, 15 bp, Homo sapiens
aagaaaaaaatctag

SEQ ID NO: 1394391 - DNA, 15 bp, Homo sapiens
gaagaaaaaaatcta

SEQ ID NO: 1394392 - DNA, 15 bp, Homo sapiens
tgaagaaaaaaatct

SEQ ID NO: 1394393 - DNA, 15 bp, Homo sapiens
ttgaagaaaaaaatc

SEQ ID NO: 1394394 - DNA, 15 bp, Homo sapiens
attgaagaaaaaaat

SEQ ID NO: 1394395 - DNA, 15 bp, Homo sapiens
aattgaagaaaaaaa

SEQ ID NO: 1394396 - DNA, 15 bp, Homo sapiens
taattgaagaaaaaa

SEQ ID NO: 1394397 - DNA, 15 bp, Homo sapiens
ctaattgaagaaaaa

SEQ ID NO: 1394398 - DNA, 15 bp, Homo sapiens
gctaattgaagaaaa

SEQ ID NO: 1394399 - DNA, 15 bp, Homo sapiens
tgctaattgaagaaa

SEQ ID NO: 1394400 - DNA, 15 bp, Homo sapiens
atgctaattgaagaa

SEQ ID NO: 1394401 - DNA, 15 bp, Homo sapiens
aatgctaattgaaga

SEQ ID NO: 1394402 - DNA, 15 bp, Homo sapiens
aaatgctaattgaag

SEQ ID NO: 1394403 - DNA, 15 bp, Homo sapiens
gaaatgctaattgaa

SEQ ID NO: 1394404 - DNA, 15 bp, Homo sapiens
tgaaatgctaattga

SEQ ID NO: 1394405 - DNA, 15 bp, Homo sapiens
atgaaatgctaattg

SEQ ID NO: 1394406 - DNA, 15 bp, Homo sapiens
tatgaaatgctaatt

SEQ ID NO: 1394407 - DNA, 15 bp, Homo sapiens
atatgaaatgctaat

SEQ ID NO: 1394408 - DNA, 15 bp, Homo sapiens
tatatgaaatgctaa

SEQ ID NO: 1394409 - DNA, 15 bp, Homo sapiens
gtatatgaaatgcta

SEQ ID NO: 1394410 - DNA, 15 bp, Homo sapiens
ggtatatgaaatgct

SEQ ID NO: 1394411 - DNA, 15 bp, Homo sapiens
aggtatatgaaatgc

SEQ ID NO: 1394412 - DNA, 15 bp, Homo sapiens
caggtatatgaaatg

SEQ ID NO: 1394413 - DNA, 15 bp, Homo sapiens
acaggtatatgaaat

SEQ ID NO: 1394414 - DNA, 15 bp, Homo sapiens
aacaggtatatgaaa

SEQ ID NO: 1394415 - DNA, 15 bp, Homo sapiens
caacaggtatatgaa

SEQ ID NO: 1394416 - DNA, 15 bp, Homo sapiens
tcaacaggtatatga

SEQ ID NO: 1394417 - DNA, 15 bp, Homo sapiens
ctcaacaggtatatg

SEQ ID NO: 1394418 - DNA, 15 bp, Homo sapiens
tctcaacaggtatat

SEQ ID NO: 1394419 - DNA, 15 bp, Homo sapiens
ttctcaacaggtata

SEQ ID NO: 1394420 - DNA, 15 bp, Homo sapiens
tttctcaacaggtat

SEQ ID NO: 1394421 - DNA, 15 bp, Homo sapiens
atttctcaacaggta

SEQ ID NO: 1394422 - DNA, 15 bp, Homo sapiens
aatttctcaacaggt

SEQ ID NO: 1394423 - DNA, 15 bp, Homo sapiens
aaatttctcaacagg

SEQ ID NO: 1394424 - DNA, 15 bp, Homo sapiens
aaaatttctcaacag

SEQ ID NO: 1394425 - DNA, 15 bp, Homo sapiens
aaaaatttctcaaca

SEQ ID NO: 1394426 - DNA, 15 bp, Homo sapiens
caaaaatttctcaac

SEQ ID NO: 1394427 - DNA, 15 bp, Homo sapiens
acaaaaatttctcaa

SEQ ID NO: 1394428 - DNA, 15 bp, Homo sapiens
tacaaaaatttctca

SEQ ID NO: 1394429 - DNA, 15 bp, Homo sapiens
ttacaaaaatttctc

SEQ ID NO: 1394430 - DNA, 15 bp, Homo sapiens
cttacaaaaatttct

SEQ ID NO: 1394431 - DNA, 15 bp, Homo sapiens
acttacaaaaatttc

SEQ ID NO: 1394432 - DNA, 15 bp, Homo sapiens
cacttacaaaaattt

SEQ ID NO: 1394433 - DNA, 15 bp, Homo sapiens
tcacttacaaaaatt

SEQ ID NO: 1394434 - DNA, 15 bp, Homo sapiens
gtcacttacaaaaat

SEQ ID NO: 1394435 - DNA, 15 bp, Homo sapiens
tgtcacttacaaaaa

SEQ ID NO: 1394436 - DNA, 15 bp, Homo sapiens
ttgtcacttacaaaa

SEQ ID NO: 1394437 - DNA, 15 bp, Homo sapiens
tttgtcacttacaaa

SEQ ID NO: 1394438 - DNA, 15 bp, Homo sapiens
ctttgtcacttacaa

SEQ ID NO: 1394439 - DNA, 15 bp, Homo sapiens
tctttgtcacttaca

SEQ ID NO: 1394440 - DNA, 15 bp, Homo sapiens
gtctttgtcacttac

SEQ ID NO: 1394441 - DNA, 15 bp, Homo sapiens
tgtctttgtcactta

SEQ ID NO: 1394442 - DNA, 15 bp, Homo sapiens
gtgtctttgtcactt

SEQ ID NO: 1394443 - DNA, 15 bp, Homo sapiens
agtgtctttgtcact

SEQ ID NO: 1394444 - DNA, 15 bp, Homo sapiens
aagtgtctttgtcac

SEQ ID NO: 1394445 - DNA, 15 bp, Homo sapiens
aaagtgtctttgtca

SEQ ID NO: 1394446 - DNA, 15 bp, Homo sapiens
gaaagtgtctttgtc

SEQ ID NO: 1394447 - DNA, 15 bp, Homo sapiens
tgaaagtgtctttgt

SEQ ID NO: 1394448 - DNA, 15 bp, Homo sapiens
atgaaagtgtctttg

SEQ ID NO: 1394449 - DNA, 15 bp, Homo sapiens
catgaaagtgtcttt

SEQ ID NO: 1394450 - DNA, 15 bp, Homo sapiens
acatgaaagtgtctt

SEQ ID NO: 1394451 - DNA, 15 bp, Homo sapiens
gacatgaaagtgtct

SEQ ID NO: 1394452 - DNA, 15 bp, Homo sapiens
agacatgaaagtgtc

SEQ ID NO: 1394453 - DNA, 15 bp, Homo sapiens
aagacatgaaagtgt

SEQ ID NO: 1394454 - DNA, 15 bp, Homo sapiens
aaagacatgaaagtg

SEQ ID NO: 1394455 - DNA, 15 bp, Homo sapiens
gaaagacatgaaagt

SEQ ID NO: 1394456 - DNA, 15 bp, Homo sapiens
tgaaagacatgaaag

SEQ ID NO: 1394457 - DNA, 15 bp, Homo sapiens
gtgaaagacatgaaa

SEQ ID NO: 1394458 - DNA, 15 bp, Homo sapiens
tgtgaaagacatgaa

SEQ ID NO: 1394459 - DNA, 15 bp, Homo sapiens
atgtgaaagacatga

SEQ ID NO: 1394460 - DNA, 15 bp, Homo sapiens
gatgtgaaagacatg

SEQ ID NO: 1394461 - DNA, 15 bp, Homo sapiens
tgatgtgaaagacat

SEQ ID NO: 1394462 - DNA, 15 bp, Homo sapiens
ttgatgtgaaagaca

SEQ ID NO: 1394463 - DNA, 15 bp, Homo sapiens
cttgatgtgaaagac

SEQ ID NO: 1394464 - DNA, 15 bp, Homo sapiens
ccttgatgtgaaaga

SEQ ID NO: 1394465 - DNA, 15 bp, Homo sapiens
tccttgatgtgaaag

SEQ ID NO: 1394466 - DNA, 15 bp, Homo sapiens
atccttgatgtgaaa

SEQ ID NO: 1394467 - DNA, 15 bp, Homo sapiens
tatccttgatgtgaa

SEQ ID NO: 1394468 - DNA, 15 bp, Homo sapiens
atatccttgatgtga

SEQ ID NO: 1394469 - DNA, 15 bp, Homo sapiens
aatatccttgatgtg

SEQ ID NO: 1394470 - DNA, 15 bp, Homo sapiens
gaatatccttgatgt

SEQ ID NO: 1394471 - DNA, 15 bp, Homo sapiens
tgaatatccttgatg

SEQ ID NO: 1394472 - DNA, 15 bp, Homo sapiens
atgaatatccttgat

SEQ ID NO: 1394473 - DNA, 15 bp, Homo sapiens
catgaatatccttga

SEQ ID NO: 1394474 - DNA, 15 bp, Homo sapiens
acatgaatatccttg

SEQ ID NO: 1394475 - DNA, 15 bp, Homo sapiens
cacatgaatatcctt

SEQ ID NO: 1394476 - DNA, 15 bp, Homo sapiens
tcacatgaatatcct

SEQ ID NO: 1394477 - DNA, 15 bp, Homo sapiens
atcacatgaatatcc

SEQ ID NO: 1394478 - DNA, 15 bp, Homo sapiens
tatcacatgaatatc

SEQ ID NO: 1394479 - DNA, 15 bp, Homo sapiens
atatcacatgaatat

SEQ ID NO: 1394480 - DNA, 15 bp, Homo sapiens
gatatcacatgaata

SEQ ID NO: 1394481 - DNA, 15 bp, Homo sapiens
agatatcacatgaat

SEQ ID NO: 1394482 - DNA, 15 bp, Homo sapiens
tagatatcacatgaa

SEQ ID NO: 1394483 - DNA, 15 bp, Homo sapiens
ttagatatcacatga

SEQ ID NO: 1394484 - DNA, 15 bp, Homo sapiens
tttagatatcacatg

SEQ ID NO: 1394485 - DNA, 15 bp, Homo sapiens
atttagatatcacat

SEQ ID NO: 1394486 - DNA, 15 bp, Homo sapiens
catttagatatcaca

SEQ ID NO: 1394487 - DNA, 15 bp, Homo sapiens
acatttagatatcac

SEQ ID NO: 1394488 - DNA, 15 bp, Homo sapiens
tacatttagatatca

SEQ ID NO: 1394489 - DNA, 15 bp, Homo sapiens
atacatttagatatc

SEQ ID NO: 1394490 - DNA, 15 bp, Homo sapiens
tatacatttagatat

SEQ ID NO: 1394491 - DNA, 15 bp, Homo sapiens
atatacatttagata

SEQ ID NO: 1394492 - DNA, 15 bp, Homo sapiens
tatatacatttagat

SEQ ID NO: 1394493 - DNA, 15 bp, Homo sapiens
atatatacatttaga

SEQ ID NO: 1394494 - DNA, 15 bp, Homo sapiens
aatatatacatttag

SEQ ID NO: 1394495 - DNA, 15 bp, Homo sapiens
aaatatatacattta

SEQ ID NO: 1394496 - DNA, 15 bp, Homo sapiens
taaatatatacattt

SEQ ID NO: 1394497 - DNA, 15 bp, Homo sapiens
ataaatatatacatt

SEQ ID NO: 1394498 - DNA, 15 bp, Homo sapiens
tataaatatatacat

SEQ ID NO: 1394499 - DNA, 15 bp, Homo sapiens
ctataaatatataca

SEQ ID NO: 1394500 - DNA, 15 bp, Homo sapiens
gctataaatatatac

SEQ ID NO: 1394501 - DNA, 15 bp, Homo sapiens
agctataaatatata

SEQ ID NO: 1394502 - DNA, 15 bp, Homo sapiens
tagctataaatatat

SEQ ID NO: 1394503 - DNA, 15 bp, Homo sapiens
atagctataaatata

SEQ ID NO: 1394504 - DNA, 15 bp, Homo sapiens
tatagctataaatat

SEQ ID NO: 1394505 - DNA, 15 bp, Homo sapiens
gtatagctataaata

SEQ ID NO: 1394506 - DNA, 15 bp, Homo sapiens
agtatagctataaat

SEQ ID NO: 1394507 - DNA, 15 bp, Homo sapiens
gagtatagctataaa

SEQ ID NO: 1394508 - DNA, 15 bp, Homo sapiens
agagtatagctataa

SEQ ID NO: 1394509 - DNA, 15 bp, Homo sapiens
cagagtatagctata

SEQ ID NO: 1394510 - DNA, 15 bp, Homo sapiens
gcagagtatagctat

SEQ ID NO: 1394511 - DNA, 15 bp, Homo sapiens
agcagagtatagcta

SEQ ID NO: 1394512 - DNA, 15 bp, Homo sapiens
aagcagagtatagct

SEQ ID NO: 1394513 - DNA, 15 bp, Homo sapiens
taagcagagtatagc

SEQ ID NO: 1394514 - DNA, 15 bp, Homo sapiens
ttaagcagagtatag

SEQ ID NO: 1394515 - DNA, 15 bp, Homo sapiens
tttaagcagagtata

SEQ ID NO: 1394516 - DNA, 15 bp, Homo sapiens
gtttaagcagagtat

SEQ ID NO: 1394517 - DNA, 15 bp, Homo sapiens
agtttaagcagagta

SEQ ID NO: 1394518 - DNA, 15 bp, Homo sapiens
gagtttaagcagagt

SEQ ID NO: 1394519 - DNA, 15 bp, Homo sapiens
tgagtttaagcagag

SEQ ID NO: 1394520 - DNA, 15 bp, Homo sapiens
ttgagtttaagcaga

SEQ ID NO: 1394521 - DNA, 15 bp, Homo sapiens
gttgagtttaagcag

SEQ ID NO: 1394522 - DNA, 15 bp, Homo sapiens
tgttgagtttaagca

SEQ ID NO: 1394523 - DNA, 15 bp, Homo sapiens
atgttgagtttaagc

SEQ ID NO: 1394524 - DNA, 15 bp, Homo sapiens
tatgttgagtttaag

SEQ ID NO: 1394525 - DNA, 15 bp, Homo sapiens
atatgttgagtttaa

SEQ ID NO: 1394526 - DNA, 15 bp, Homo sapiens
catatgttgagttta

SEQ ID NO: 1394527 - DNA, 15 bp, Homo sapiens
tcatatgttgagttt

SEQ ID NO: 1394528 - DNA, 15 bp, Homo sapiens
ttcatatgttgagtt

SEQ ID NO: 1394529 - DNA, 15 bp, Homo sapiens
tttcatatgttgagt

SEQ ID NO: 1394530 - DNA, 15 bp, Homo sapiens
ttttcatatgttgag

SEQ ID NO: 1394531 - DNA, 15 bp, Homo sapiens
attttcatatgttga

SEQ ID NO: 1394532 - DNA, 15 bp, Homo sapiens
aattttcatatgttg

SEQ ID NO: 1394533 - DNA, 15 bp, Homo sapiens
gaattttcatatgtt

SEQ ID NO: 1394534 - DNA, 15 bp, Homo sapiens
tgaattttcatatgt

SEQ ID NO: 1394535 - DNA, 15 bp, Homo sapiens
atgaattttcatatg

SEQ ID NO: 1394536 - DNA, 15 bp, Homo sapiens
tatgaattttcatat

SEQ ID NO: 1394537 - DNA, 15 bp, Homo sapiens
atatgaattttcata

SEQ ID NO: 1394538 - DNA, 15 bp, Homo sapiens
aatatgaattttcat

SEQ ID NO: 1394539 - DNA, 15 bp, Homo sapiens
aaatatgaattttca

SEQ ID NO: 1394540 - DNA, 15 bp, Homo sapiens
aaaatatgaattttc

SEQ ID NO: 1394541 - DNA, 15 bp, Homo sapiens
taaaatatgaatttt

SEQ ID NO: 1394542 - DNA, 15 bp, Homo sapiens
ttaaaatatgaattt

SEQ ID NO: 1394543 - DNA, 15 bp, Homo sapiens
tttaaaatatgaatt

SEQ ID NO: 1394544 - DNA, 15 bp, Homo sapiens
ttttaaaatatgaat

SEQ ID NO: 1394545 - DNA, 15 bp, Homo sapiens
attttaaaatatgaa

SEQ ID NO: 1394546 - DNA, 15 bp, Homo sapiens
tattttaaaatatga

SEQ ID NO: 1394547 - DNA, 15 bp, Homo sapiens
ctattttaaaatatg

SEQ ID NO: 1394548 - DNA, 15 bp, Homo sapiens
tctattttaaaatat

SEQ ID NO: 1394549 - DNA, 15 bp, Homo sapiens
ttctattttaaaata

SEQ ID NO: 1394550 - DNA, 15 bp, Homo sapiens
cttctattttaaaat

SEQ ID NO: 1394551 - DNA, 15 bp, Homo sapiens
ccttctattttaaaa

SEQ ID NO: 1394552 - DNA, 15 bp, Homo sapiens
accttctattttaaa

SEQ ID NO: 1394553 - DNA, 15 bp, Homo sapiens
caccttctattttaa

SEQ ID NO: 1394554 - DNA, 15 bp, Homo sapiens
tcaccttctatttta

SEQ ID NO: 1394555 - DNA, 15 bp, Homo sapiens
atcaccttctatttt

SEQ ID NO: 1394556 - DNA, 15 bp, Homo sapiens
aatcaccttctattt

SEQ ID NO: 1394557 - DNA, 15 bp, Homo sapiens
caatcaccttctatt

SEQ ID NO: 1394558 - DNA, 15 bp, Homo sapiens
gcaatcaccttctat

SEQ ID NO: 1394559 - DNA, 15 bp, Homo sapiens
agcaatcaccttcta

SEQ ID NO: 1394560 - DNA, 15 bp, Homo sapiens
aagcaatcaccttct

SEQ ID NO: 1394561 - DNA, 15 bp, Homo sapiens
taagcaatcaccttc

SEQ ID NO: 1394562 - DNA, 15 bp, Homo sapiens
ttaagcaatcacctt

SEQ ID NO: 1394563 - DNA, 15 bp, Homo sapiens
cttaagcaatcacct

SEQ ID NO: 1394564 - DNA, 15 bp, Homo sapiens
tcttaagcaatcacc

SEQ ID NO: 1394565 - DNA, 15 bp, Homo sapiens
ctcttaagcaatcac

SEQ ID NO: 1394566 - DNA, 15 bp, Homo sapiens
actcttaagcaatca

SEQ ID NO: 1394567 - DNA, 15 bp, Homo sapiens
gactcttaagcaatc

SEQ ID NO: 1394568 - DNA, 15 bp, Homo sapiens
tgactcttaagcaat

SEQ ID NO: 1394569 - DNA, 15 bp, Homo sapiens
ctgactcttaagcaa

SEQ ID NO: 1394570 - DNA, 15 bp, Homo sapiens
gctgactcttaagca

SEQ ID NO: 1394571 - DNA, 15 bp, Homo sapiens
ggctgactcttaagc

SEQ ID NO: 1394572 - DNA, 15 bp, Homo sapiens
aggctgactcttaag

SEQ ID NO: 1394573 - DNA, 15 bp, Homo sapiens
caggctgactcttaa

SEQ ID NO: 1394574 - DNA, 15 bp, Homo sapiens
acaggctgactctta

SEQ ID NO: 1394575 - DNA, 15 bp, Homo sapiens
aacaggctgactctt

SEQ ID NO: 1394576 - DNA, 15 bp, Homo sapiens
caacaggctgactct

SEQ ID NO: 1394577 - DNA, 15 bp, Homo sapiens
ccaacaggctgactc

SEQ ID NO: 1394578 - DNA, 15 bp, Homo sapiens
tccaacaggctgact

SEQ ID NO: 1394579 - DNA, 15 bp, Homo sapiens
gtccaacaggctgac

SEQ ID NO: 1394580 - DNA, 15 bp, Homo sapiens
tgtccaacaggctga

SEQ ID NO: 1394581 - DNA, 15 bp, Homo sapiens
atgtccaacaggctg

SEQ ID NO: 1394582 - DNA, 15 bp, Homo sapiens
catgtccaacaggct

SEQ ID NO: 1394583 - DNA, 15 bp, Homo sapiens
tcatgtccaacaggc

SEQ ID NO: 1394584 - DNA, 15 bp, Homo sapiens
ttcatgtccaacagg

SEQ ID NO: 1394585 - DNA, 15 bp, Homo sapiens
attcatgtccaacag

SEQ ID NO: 1394586 - DNA, 15 bp, Homo sapiens
aattcatgtccaaca

SEQ ID NO: 1394587 - DNA, 15 bp, Homo sapiens
taattcatgtccaac

SEQ ID NO: 1394588 - DNA, 15 bp, Homo sapiens
ataattcatgtccaa

SEQ ID NO: 1394589 - DNA, 15 bp, Homo sapiens
aataattcatgtcca

SEQ ID NO: 1394590 - DNA, 15 bp, Homo sapiens
gaataattcatgtcc

SEQ ID NO: 1394591 - DNA, 15 bp, Homo sapiens
tgaataattcatgtc

SEQ ID NO: 1394592 - DNA, 15 bp, Homo sapiens
gtgaataattcatgt

SEQ ID NO: 1394593 - DNA, 15 bp, Homo sapiens
tgtgaataattcatg

SEQ ID NO: 1394594 - DNA, 15 bp, Homo sapiens
ttgtgaataattcat

SEQ ID NO: 1394595 - DNA, 15 bp, Homo sapiens
tttgtgaataattca

SEQ ID NO: 1394596 - DNA, 15 bp, Homo sapiens
ttttgtgaataattc

SEQ ID NO: 1394597 - DNA, 15 bp, Homo sapiens
tttttgtgaataatt

SEQ ID NO: 1394598 - DNA, 15 bp, Homo sapiens
atttttgtgaataat

SEQ ID NO: 1394599 - DNA, 15 bp, Homo sapiens
tatttttgtgaataa

SEQ ID NO: 1394600 - DNA, 15 bp, Homo sapiens
gtatttttgtgaata

SEQ ID NO: 1394601 - DNA, 15 bp, Homo sapiens
tgtatttttgtgaat

SEQ ID NO: 1394602 - DNA, 15 bp, Homo sapiens
ttgtatttttgtgaa

SEQ ID NO: 1394603 - DNA, 15 bp, Homo sapiens
tttgtatttttgtga

SEQ ID NO: 1394604 - DNA, 15 bp, Homo sapiens
gtttgtatttttgtg

SEQ ID NO: 1394605 - DNA, 15 bp, Homo sapiens
agtttgtatttttgt

SEQ ID NO: 1394606 - DNA, 15 bp, Homo sapiens
tagtttgtatttttg

SEQ ID NO: 1394607 - DNA, 15 bp, Homo sapiens
gtagtttgtattttt

SEQ ID NO: 1394608 - DNA, 15 bp, Homo sapiens
ggtagtttgtatttt

SEQ ID NO: 1394609 - DNA, 15 bp, Homo sapiens
gggtagtttgtattt

SEQ ID NO: 1394610 - DNA, 15 bp, Homo sapiens
agggtagtttgtatt

SEQ ID NO: 1394611 - DNA, 15 bp, Homo sapiens
aagggtagtttgtat

SEQ ID NO: 1394612 - DNA, 15 bp, Homo sapiens
taagggtagtttgta

SEQ ID NO: 1394613 - DNA, 15 bp, Homo sapiens
ctaagggtagtttgt

SEQ ID NO: 1394614 - DNA, 15 bp, Homo sapiens
actaagggtagtttg

SEQ ID NO: 1394615 - DNA, 15 bp, Homo sapiens
aactaagggtagttt

SEQ ID NO: 1394616 - DNA, 15 bp, Homo sapiens
aaactaagggtagtt

SEQ ID NO: 1394617 - DNA, 15 bp, Homo sapiens
gaaactaagggtagt

SEQ ID NO: 1394618 - DNA, 15 bp, Homo sapiens
tgaaactaagggtag

SEQ ID NO: 1394619 - DNA, 15 bp, Homo sapiens
gtgaaactaagggta

SEQ ID NO: 1394620 - DNA, 15 bp, Homo sapiens
tgtgaaactaagggt

SEQ ID NO: 1394621 - DNA, 15 bp, Homo sapiens
atgtgaaactaaggg

SEQ ID NO: 1394622 - DNA, 15 bp, Homo sapiens
tatgtgaaactaagg

SEQ ID NO: 1394623 - DNA, 15 bp, Homo sapiens
gtatgtgaaactaag

SEQ ID NO: 1394624 - DNA, 15 bp, Homo sapiens
ggtatgtgaaactaa

SEQ ID NO: 1394625 - DNA, 15 bp, Homo sapiens
tggtatgtgaaacta

SEQ ID NO: 1394626 - DNA, 15 bp, Homo sapiens
gtggtatgtgaaact

SEQ ID NO: 1394627 - DNA, 15 bp, Homo sapiens
cgtggtatgtgaaac

SEQ ID NO: 1394628 - DNA, 15 bp, Homo sapiens
acgtggtatgtgaaa

SEQ ID NO: 1394629 - DNA, 15 bp, Homo sapiens
aacgtggtatgtgaa

SEQ ID NO: 1394630 - DNA, 15 bp, Homo sapiens
caacgtggtatgtga

SEQ ID NO: 1394631 - DNA, 15 bp, Homo sapiens
tcaacgtggtatgtg

SEQ ID NO: 1394632 - DNA, 15 bp, Homo sapiens
atcaacgtggtatgt

SEQ ID NO: 1394633 - DNA, 15 bp, Homo sapiens
tatcaacgtggtatg

SEQ ID NO: 1394634 - DNA, 15 bp, Homo sapiens
gtatcaacgtggtat

SEQ ID NO: 1394635 - DNA, 15 bp, Homo sapiens
tgtatcaacgtggta

SEQ ID NO: 1394636 - DNA, 15 bp, Homo sapiens
ctgtatcaacgtggt

SEQ ID NO: 1394637 - DNA, 15 bp, Homo sapiens
actgtatcaacgtgg

SEQ ID NO: 1394638 - DNA, 15 bp, Homo sapiens
tactgtatcaacgtg

SEQ ID NO: 1394639 - DNA, 15 bp, Homo sapiens
ttactgtatcaacgt

SEQ ID NO: 1394640 - DNA, 15 bp, Homo sapiens
cttactgtatcaacg

SEQ ID NO: 1394641 - DNA, 15 bp, Homo sapiens
ccttactgtatcaac

SEQ ID NO: 1394642 - DNA, 15 bp, Homo sapiens
tccttactgtatcaa

SEQ ID NO: 1394643 - DNA, 15 bp, Homo sapiens
ttccttactgtatca

SEQ ID NO: 1394644 - DNA, 15 bp, Homo sapiens
attccttactgtatc

SEQ ID NO: 1394645 - DNA, 15 bp, Homo sapiens
tattccttactgtat

SEQ ID NO: 1394646 - DNA, 15 bp, Homo sapiens
ctattccttactgta

SEQ ID NO: 1394647 - DNA, 15 bp, Homo sapiens
gctattccttactgt

SEQ ID NO: 1394648 - DNA, 15 bp, Homo sapiens
agctattccttactg

SEQ ID NO: 1394649 - DNA, 15 bp, Homo sapiens
cagctattccttact

SEQ ID NO: 1394650 - DNA, 15 bp, Homo sapiens
tcagctattccttac

SEQ ID NO: 1394651 - DNA, 15 bp, Homo sapiens
ttcagctattcctta

SEQ ID NO: 1394652 - DNA, 15 bp, Homo sapiens
tttcagctattcctt

SEQ ID NO: 1394653 - DNA, 15 bp, Homo sapiens
atttcagctattcct

SEQ ID NO: 1394654 - DNA, 15 bp, Homo sapiens
aatttcagctattcc

SEQ ID NO: 1394655 - DNA, 15 bp, Homo sapiens
gaatttcagctattc

SEQ ID NO: 1394656 - DNA, 15 bp, Homo sapiens
agaatttcagctatt

SEQ ID NO: 1394657 - DNA, 15 bp, Homo sapiens
aagaatttcagctat

SEQ ID NO: 1394658 - DNA, 15 bp, Homo sapiens
caagaatttcagcta

SEQ ID NO: 1394659 - DNA, 15 bp, Homo sapiens
acaagaatttcagct

SEQ ID NO: 1394660 - DNA, 15 bp, Homo sapiens
cacaagaatttcagc

SEQ ID NO: 1394661 - DNA, 15 bp, Homo sapiens
acacaagaatttcag

SEQ ID NO: 1394662 - DNA, 15 bp, Homo sapiens
tacacaagaatttca

SEQ ID NO: 1394663 - DNA, 15 bp, Homo sapiens
ttacacaagaatttc

SEQ ID NO: 1394664 - DNA, 15 bp, Homo sapiens
attacacaagaattt

SEQ ID NO: 1394665 - DNA, 15 bp, Homo sapiens
cattacacaagaatt

SEQ ID NO: 1394666 - DNA, 15 bp, Homo sapiens
acattacacaagaat

SEQ ID NO: 1394667 - DNA, 15 bp, Homo sapiens
gacattacacaagaa

SEQ ID NO: 1394668 - DNA, 15 bp, Homo sapiens
agacattacacaaga

SEQ ID NO: 1394669 - DNA, 15 bp, Homo sapiens
cagacattacacaag

SEQ ID NO: 1394670 - DNA, 15 bp, Homo sapiens
acagacattacacaa

SEQ ID NO: 1394671 - DNA, 15 bp, Homo sapiens
tacagacattacaca

SEQ ID NO: 1394672 - DNA, 15 bp, Homo sapiens
atacagacattacac

SEQ ID NO: 1394673 - DNA, 15 bp, Homo sapiens
aatacagacattaca

SEQ ID NO: 1394674 - DNA, 15 bp, Homo sapiens
taatacagacattac

SEQ ID NO: 1394675 - DNA, 15 bp, Homo sapiens
ttaatacagacatta

SEQ ID NO: 1394676 - DNA, 15 bp, Homo sapiens
tttaatacagacatt

SEQ ID NO: 1394677 - DNA, 15 bp, Homo sapiens
ttttaatacagacat

SEQ ID NO: 1394678 - DNA, 15 bp, Homo sapiens
attttaatacagaca

SEQ ID NO: 1394679 - DNA, 15 bp, Homo sapiens
tattttaatacagac

SEQ ID NO: 1394680 - DNA, 15 bp, Homo sapiens
atattttaatacaga

SEQ ID NO: 1394681 - DNA, 15 bp, Homo sapiens
aatattttaatacag

SEQ ID NO: 1394682 - DNA, 15 bp, Homo sapiens
gaatattttaataca

SEQ ID NO: 1394683 - DNA, 15 bp, Homo sapiens
agaatattttaatac

SEQ ID NO: 1394684 - DNA, 15 bp, Homo sapiens
aagaatattttaata

SEQ ID NO: 1394685 - DNA, 15 bp, Homo sapiens
gaagaatattttaat

SEQ ID NO: 1394686 - DNA, 15 bp, Homo sapiens
tgaagaatattttaa

SEQ ID NO: 1394687 - DNA, 15 bp, Homo sapiens
atgaagaatatttta

SEQ ID NO: 1394688 - DNA, 15 bp, Homo sapiens
aatgaagaatatttt

SEQ ID NO: 1394689 - DNA, 15 bp, Homo sapiens
aaatgaagaatattt

SEQ ID NO: 1394690 - DNA, 15 bp, Homo sapiens
taaatgaagaatatt

SEQ ID NO: 1394691 - DNA, 15 bp, Homo sapiens
ataaatgaagaatat

SEQ ID NO: 1394692 - DNA, 15 bp, Homo sapiens
cataaatgaagaata

SEQ ID NO: 1394693 - DNA, 15 bp, Homo sapiens
gcataaatgaagaat

SEQ ID NO: 1394694 - DNA, 15 bp, Homo sapiens
agcataaatgaagaa

SEQ ID NO: 1394695 - DNA, 15 bp, Homo sapiens
aagcataaatgaaga

SEQ ID NO: 1394696 - DNA, 15 bp, Homo sapiens
aaagcataaatgaag

SEQ ID NO: 1394697 - DNA, 15 bp, Homo sapiens
taaagcataaatgaa

SEQ ID NO: 1394698 - DNA, 15 bp, Homo sapiens
ataaagcataaatga

SEQ ID NO: 1394699 - DNA, 15 bp, Homo sapiens
aataaagcataaatg

SEQ ID NO: 1394700 - DNA, 15 bp, Homo sapiens
caataaagcataaat

SEQ ID NO: 1394701 - DNA, 15 bp, Homo sapiens
gcaataaagcataaa

SEQ ID NO: 1394702 - DNA, 15 bp, Homo sapiens
tgcaataaagcataa

SEQ ID NO: 1394703 - DNA, 15 bp, Homo sapiens
gtgcaataaagcata

SEQ ID NO: 1394704 - DNA, 15 bp, Homo sapiens
agtgcaataaagcat

SEQ ID NO: 1394705 - DNA, 15 bp, Homo sapiens
aagtgcaataaagca

SEQ ID NO: 1394706 - DNA, 15 bp, Homo sapiens
taagtgcaataaagc

SEQ ID NO: 1394707 - DNA, 15 bp, Homo sapiens
ttaagtgcaataaag

SEQ ID NO: 1394708 - DNA, 15 bp, Homo sapiens
tttaagtgcaataaa

SEQ ID NO: 1394709 - DNA, 15 bp, Homo sapiens
gtttaagtgcaataa

SEQ ID NO: 1394710 - DNA, 15 bp, Homo sapiens
cgtttaagtgcaata

SEQ ID NO: 1394711 - DNA, 15 bp, Homo sapiens
acgtttaagtgcaat

SEQ ID NO: 1394712 - DNA, 15 bp, Homo sapiens
cacgtttaagtgcaa

SEQ ID NO: 1394713 - DNA, 15 bp, Homo sapiens
tcacgtttaagtgca

SEQ ID NO: 1394714 - DNA, 15 bp, Homo sapiens
atcacgtttaagtgc

SEQ ID NO: 1394715 - DNA, 15 bp, Homo sapiens
aatcacgtttaagtg

SEQ ID NO: 1394716 - DNA, 15 bp, Homo sapiens
taatcacgtttaagt

SEQ ID NO: 1394717 - DNA, 15 bp, Homo sapiens
ttaatcacgtttaag

SEQ ID NO: 1394718 - DNA, 15 bp, Homo sapiens
tttaatcacgtttaa

SEQ ID NO: 1394719 - DNA, 15 bp, Homo sapiens
ttttaatcacgttta

SEQ ID NO: 1394720 - DNA, 15 bp, Homo sapiens
attttaatcacgttt

SEQ ID NO: 1394721 - DNA, 15 bp, Homo sapiens
cattttaatcacgtt

SEQ ID NO: 1394722 - DNA, 15 bp, Homo sapiens
gcattttaatcacgt

SEQ ID NO: 1394723 - DNA, 15 bp, Homo sapiens
agcattttaatcacg

SEQ ID NO: 1394724 - DNA, 15 bp, Homo sapiens
tagcattttaatcac

SEQ ID NO: 1394725 - DNA, 15 bp, Homo sapiens
ctagcattttaatca

SEQ ID NO: 1394726 - DNA, 15 bp, Homo sapiens
actagcattttaatc

SEQ ID NO: 1394727 - DNA, 15 bp, Homo sapiens
cactagcattttaat

SEQ ID NO: 1394728 - DNA, 15 bp, Homo sapiens
acactagcattttaa

SEQ ID NO: 1394729 - DNA, 15 bp, Homo sapiens
tacactagcatttta

SEQ ID NO: 1394730 - DNA, 15 bp, Homo sapiens
atacactagcatttt

SEQ ID NO: 1394731 - DNA, 15 bp, Homo sapiens
aatacactagcattt

SEQ ID NO: 1394732 - DNA, 15 bp, Homo sapiens
caatacactagcatt

SEQ ID NO: 1394733 - DNA, 15 bp, Homo sapiens
tcaatacactagcat

SEQ ID NO: 1394734 - DNA, 15 bp, Homo sapiens
ttcaatacactagca

SEQ ID NO: 1394735 - DNA, 15 bp, Homo sapiens
tttcaatacactagc

SEQ ID NO: 1394736 - DNA, 15 bp, Homo sapiens
ttttcaatacactag

SEQ ID NO: 1394737 - DNA, 15 bp, Homo sapiens
attttcaatacacta

SEQ ID NO: 1394738 - DNA, 15 bp, Homo sapiens
cattttcaatacact

SEQ ID NO: 1394739 - DNA, 15 bp, Homo sapiens
tcattttcaatacac

SEQ ID NO: 1394740 - DNA, 15 bp, Homo sapiens
atcattttcaataca

SEQ ID NO: 1394741 - DNA, 15 bp, Homo sapiens
aatcattttcaatac

SEQ ID NO: 1394742 - DNA, 15 bp, Homo sapiens
caatcattttcaata

SEQ ID NO: 1394743 - DNA, 15 bp, Homo sapiens
gcaatcattttcaat

SEQ ID NO: 1394744 - DNA, 15 bp, Homo sapiens
agcaatcattttcaa

SEQ ID NO: 1394745 - DNA, 15 bp, Homo sapiens
gagcaatcattttca

SEQ ID NO: 1394746 - DNA, 15 bp, Homo sapiens
agagcaatcattttc

SEQ ID NO: 1394747 - DNA, 15 bp, Homo sapiens
aagagcaatcatttt

SEQ ID NO: 1394748 - DNA, 15 bp, Homo sapiens
aaagagcaatcattt

SEQ ID NO: 1394749 - DNA, 15 bp, Homo sapiens
caaagagcaatcatt

SEQ ID NO: 1394750 - DNA, 15 bp, Homo sapiens
acaaagagcaatcat

SEQ ID NO: 1394751 - DNA, 15 bp, Homo sapiens
aacaaagagcaatca

SEQ ID NO: 1394752 - DNA, 15 bp, Homo sapiens
taacaaagagcaatc

SEQ ID NO: 1394753 - DNA, 15 bp, Homo sapiens
gtaacaaagagcaat

SEQ ID NO: 1394754 - DNA, 15 bp, Homo sapiens
ggtaacaaagagcaa

SEQ ID NO: 1394755 - DNA, 15 bp, Homo sapiens
aggtaacaaagagca

SEQ ID NO: 1394756 - DNA, 15 bp, Homo sapiens
caggtaacaaagagc

SEQ ID NO: 1394757 - DNA, 15 bp, Homo sapiens
gcaggtaacaaagag

SEQ ID NO: 1394758 - DNA, 15 bp, Homo sapiens
tgcaggtaacaaaga

SEQ ID NO: 1394759 - DNA, 15 bp, Homo sapiens
ttgcaggtaacaaag

SEQ ID NO: 1394760 - DNA, 15 bp, Homo sapiens
tttgcaggtaacaaa

SEQ ID NO: 1394761 - DNA, 15 bp, Homo sapiens
gtttgcaggtaacaa

SEQ ID NO: 1394762 - DNA, 15 bp, Homo sapiens
agtttgcaggtaaca

SEQ ID NO: 1394763 - DNA, 15 bp, Homo sapiens
aagtttgcaggtaac

SEQ ID NO: 1394764 - DNA, 15 bp, Homo sapiens
taagtttgcaggtaa

SEQ ID NO: 1394765 - DNA, 15 bp, Homo sapiens
ataagtttgcaggta

SEQ ID NO: 1394766 - DNA, 15 bp, Homo sapiens
cataagtttgcaggt

SEQ ID NO: 1394767 - DNA, 15 bp, Homo sapiens
acataagtttgcagg

SEQ ID NO: 1394768 - DNA, 15 bp, Homo sapiens
cacataagtttgcag

SEQ ID NO: 1394769 - DNA, 15 bp, Homo sapiens
acacataagtttgca

SEQ ID NO: 1394770 - DNA, 15 bp, Homo sapiens
aacacataagtttgc

SEQ ID NO: 1394771 - DNA, 15 bp, Homo sapiens
gaacacataagtttg

SEQ ID NO: 1394772 - DNA, 15 bp, Homo sapiens
ggaacacataagttt

SEQ ID NO: 1394773 - DNA, 15 bp, Homo sapiens
aggaacacataagtt

SEQ ID NO: 1394774 - DNA, 15 bp, Homo sapiens
taggaacacataagt

SEQ ID NO: 1394775 - DNA, 15 bp, Homo sapiens
gtaggaacacataag

SEQ ID NO: 1394776 - DNA, 15 bp, Homo sapiens
agtaggaacacataa

SEQ ID NO: 1394777 - DNA, 15 bp, Homo sapiens
aagtaggaacacata

SEQ ID NO: 1394778 - DNA, 15 bp, Homo sapiens
aaagtaggaacacat

SEQ ID NO: 1394779 - DNA, 15 bp, Homo sapiens
gaaagtaggaacaca

SEQ ID NO: 1394780 - DNA, 15 bp, Homo sapiens
agaaagtaggaacac

SEQ ID NO: 1394781 - DNA, 15 bp, Homo sapiens
aagaaagtaggaaca

SEQ ID NO: 1394782 - DNA, 15 bp, Homo sapiens
aaagaaagtaggaac

SEQ ID NO: 1394783 - DNA, 15 bp, Homo sapiens
aaaagaaagtaggaa

SEQ ID NO: 1394784 - DNA, 15 bp, Homo sapiens
aaaaagaaagtagga

SEQ ID NO: 1394785 - DNA, 15 bp, Homo sapiens
gaaaaagaaagtagg

SEQ ID NO: 1394786 - DNA, 15 bp, Homo sapiens
agaaaaagaaagtag

SEQ ID NO: 1394787 - DNA, 15 bp, Homo sapiens
gagaaaaagaaagta

SEQ ID NO: 1394788 - DNA, 15 bp, Homo sapiens
ggagaaaaagaaagt

SEQ ID NO: 1394789 - DNA, 15 bp, Homo sapiens
tggagaaaaagaaag

SEQ ID NO: 1394790 - DNA, 15 bp, Homo sapiens
ttggagaaaaagaaa

SEQ ID NO: 1394791 - DNA, 15 bp, Homo sapiens
gttggagaaaaagaa

SEQ ID NO: 1394792 - DNA, 15 bp, Homo sapiens
tgttggagaaaaaga

SEQ ID NO: 1394793 - DNA, 15 bp, Homo sapiens
ctgttggagaaaaag

SEQ ID NO: 1394794 - DNA, 15 bp, Homo sapiens
tctgttggagaaaaa

SEQ ID NO: 1394795 - DNA, 15 bp, Homo sapiens
atctgttggagaaaa

SEQ ID NO: 1394796 - DNA, 15 bp, Homo sapiens
tatctgttggagaaa

SEQ ID NO: 1394797 - DNA, 15 bp, Homo sapiens
atatctgttggagaa

SEQ ID NO: 1394798 - DNA, 15 bp, Homo sapiens
tatatctgttggaga

SEQ ID NO: 1394799 - DNA, 15 bp, Homo sapiens
ttatatctgttggag

SEQ ID NO: 1394800 - DNA, 15 bp, Homo sapiens
cttatatctgttgga

SEQ ID NO: 1394801 - DNA, 15 bp, Homo sapiens
gcttatatctgttgg

SEQ ID NO: 1394802 - DNA, 15 bp, Homo sapiens
agcttatatctgttg

SEQ ID NO: 1394803 - DNA, 15 bp, Homo sapiens
aagcttatatctgtt

SEQ ID NO: 1394804 - DNA, 15 bp, Homo sapiens
taagcttatatctgt

SEQ ID NO: 1394805 - DNA, 15 bp, Homo sapiens
gtaagcttatatctg

SEQ ID NO: 1394806 - DNA, 15 bp, Homo sapiens
ggtaagcttatatct

SEQ ID NO: 1394807 - DNA, 15 bp, Homo sapiens
tggtaagcttatatc

SEQ ID NO: 1394808 - DNA, 15 bp, Homo sapiens
ttggtaagcttatat

SEQ ID NO: 1394809 - DNA, 15 bp, Homo sapiens
tttggtaagcttata

SEQ ID NO: 1394810 - DNA, 15 bp, Homo sapiens
ctttggtaagcttat

SEQ ID NO: 1394811 - DNA, 15 bp, Homo sapiens
actttggtaagctta

SEQ ID NO: 1394812 - DNA, 15 bp, Homo sapiens
gactttggtaagctt

SEQ ID NO: 1394813 - DNA, 15 bp, Homo sapiens
tgactttggtaagct

SEQ ID NO: 1394814 - DNA, 15 bp, Homo sapiens
ctgactttggtaagc

SEQ ID NO: 1394815 - DNA, 15 bp, Homo sapiens
gctgactttggtaag

SEQ ID NO: 1394816 - DNA, 15 bp, Homo sapiens
tgctgactttggtaa

SEQ ID NO: 1394817 - DNA, 15 bp, Homo sapiens
ttgctgactttggta

SEQ ID NO: 1394818 - DNA, 15 bp, Homo sapiens
gttgctgactttggt

SEQ ID NO: 1394819 - DNA, 15 bp, Homo sapiens
tgttgctgactttgg

SEQ ID NO: 1394820 - DNA, 15 bp, Homo sapiens
ttgttgctgactttg

SEQ ID NO: 1394821 - DNA, 15 bp, Homo sapiens
attgttgctgacttt

SEQ ID NO: 1394822 - DNA, 15 bp, Homo sapiens
tattgttgctgactt

SEQ ID NO: 1394823 - DNA, 15 bp, Homo sapiens
atattgttgctgact

SEQ ID NO: 1394824 - DNA, 15 bp, Homo sapiens
catattgttgctgac

SEQ ID NO: 1394825 - DNA, 15 bp, Homo sapiens
gcatattgttgctga

SEQ ID NO: 1394826 - DNA, 15 bp, Homo sapiens
agcatattgttgctg

SEQ ID NO: 1394827 - DNA, 15 bp, Homo sapiens
tagcatattgttgct

SEQ ID NO: 1394828 - DNA, 15 bp, Homo sapiens
gtagcatattgttgc

SEQ ID NO: 1394829 - DNA, 15 bp, Homo sapiens
tgtagcatattgttg

SEQ ID NO: 1394830 - DNA, 15 bp, Homo sapiens
gtgtagcatattgtt

SEQ ID NO: 1394831 - DNA, 15 bp, Homo sapiens
tgtgtagcatattgt

SEQ ID NO: 1394832 - DNA, 15 bp, Homo sapiens
ctgtgtagcatattg

SEQ ID NO: 1394833 - DNA, 15 bp, Homo sapiens
gctgtgtagcatatt

SEQ ID NO: 1394834 - DNA, 15 bp, Homo sapiens
agctgtgtagcatat

SEQ ID NO: 1394835 - DNA, 15 bp, Homo sapiens
cagctgtgtagcata

SEQ ID NO: 1394836 - DNA, 15 bp, Homo sapiens
gcagctgtgtagcat

SEQ ID NO: 1394837 - DNA, 15 bp, Homo sapiens
agcagctgtgtagca

SEQ ID NO: 1394838 - DNA, 15 bp, Homo sapiens
aagcagctgtgtagc

SEQ ID NO: 1394839 - DNA, 15 bp, Homo sapiens
aaagcagctgtgtag

SEQ ID NO: 1394840 - DNA, 15 bp, Homo sapiens
caaagcagctgtgta

SEQ ID NO: 1394841 - DNA, 15 bp, Homo sapiens
gcaaagcagctgtgt

SEQ ID NO: 1394842 - DNA, 15 bp, Homo sapiens
agcaaagcagctgtg

SEQ ID NO: 1394843 - DNA, 15 bp, Homo sapiens
gagcaaagcagctgt

SEQ ID NO: 1394844 - DNA, 15 bp, Homo sapiens
tgagcaaagcagctg

SEQ ID NO: 1394845 - DNA, 15 bp, Homo sapiens
ttgagcaaagcagct

SEQ ID NO: 1394846 - DNA, 15 bp, Homo sapiens
tttgagcaaagcagc

SEQ ID NO: 1394847 - DNA, 15 bp, Homo sapiens
ctttgagcaaagcag

SEQ ID NO: 1394848 - DNA, 15 bp, Homo sapiens
gctttgagcaaagca

SEQ ID NO: 1394849 - DNA, 15 bp, Homo sapiens
tgctttgagcaaagc

SEQ ID NO: 1394850 - DNA, 15 bp, Homo sapiens
ttgctttgagcaaag

SEQ ID NO: 1394851 - DNA, 15 bp, Homo sapiens
cttgctttgagcaaa

SEQ ID NO: 1394852 - DNA, 15 bp, Homo sapiens
tcttgctttgagcaa

SEQ ID NO: 1394853 - DNA, 15 bp, Homo sapiens
ctcttgctttgagca

SEQ ID NO: 1394854 - DNA, 15 bp, Homo sapiens
gctcttgctttgagc

SEQ ID NO: 1394855 - DNA, 15 bp, Homo sapiens
agctcttgctttgag

SEQ ID NO: 1394856 - DNA, 15 bp, Homo sapiens
cagctcttgctttga

SEQ ID NO: 1394857 - DNA, 15 bp, Homo sapiens
acagctcttgctttg

SEQ ID NO: 1394858 - DNA, 15 bp, Homo sapiens
gacagctcttgcttt

SEQ ID NO: 1394859 - DNA, 15 bp, Homo sapiens
agacagctcttgctt

SEQ ID NO: 1394860 - DNA, 15 bp, Homo sapiens
gagacagctcttgct

SEQ ID NO: 1394861 - DNA, 15 bp, Homo sapiens
agagacagctcttgc

SEQ ID NO: 1394862 - DNA, 15 bp, Homo sapiens
cagagacagctcttg

SEQ ID NO: 1394863 - DNA, 15 bp, Homo sapiens
tcagagacagctctt

SEQ ID NO: 1394864 - DNA, 15 bp, Homo sapiens
gtcagagacagctct

SEQ ID NO: 1394865 - DNA, 15 bp, Homo sapiens
tgtcagagacagctc

SEQ ID NO: 1394866 - DNA, 15 bp, Homo sapiens
ttgtcagagacagct

SEQ ID NO: 1394867 - DNA, 15 bp, Homo sapiens
cttgtcagagacagc

SEQ ID NO: 1394868 - DNA, 15 bp, Homo sapiens
acttgtcagagacag

SEQ ID NO: 1394869 - DNA, 15 bp, Homo sapiens
tacttgtcagagaca

SEQ ID NO: 1394870 - DNA, 15 bp, Homo sapiens
ttacttgtcagagac

SEQ ID NO: 1394871 - DNA, 15 bp, Homo sapiens
cttacttgtcagaga

SEQ ID NO: 1394872 - DNA, 15 bp, Homo sapiens
acttacttgtcagag

SEQ ID NO: 1394873 - DNA, 15 bp, Homo sapiens
cacttacttgtcaga

SEQ ID NO: 1394874 - DNA, 15 bp, Homo sapiens
tcacttacttgtcag

SEQ ID NO: 1394875 - DNA, 15 bp, Homo sapiens
ttcacttacttgtca

SEQ ID NO: 1394876 - DNA, 15 bp, Homo sapiens
attcacttacttgtc

SEQ ID NO: 1394877 - DNA, 15 bp, Homo sapiens
tattcacttacttgt

SEQ ID NO: 1394878 - DNA, 15 bp, Homo sapiens
ttattcacttacttg

SEQ ID NO: 1394879 - DNA, 15 bp, Homo sapiens
attattcacttactt

SEQ ID NO: 1394880 - DNA, 15 bp, Homo sapiens
tattattcacttact

SEQ ID NO: 1394881 - DNA, 15 bp, Homo sapiens
ctattattcacttac

SEQ ID NO: 1394882 - DNA, 15 bp, Homo sapiens
actattattcactta

SEQ ID NO: 1394883 - DNA, 15 bp, Homo sapiens
aactattattcactt

SEQ ID NO: 1394884 - DNA, 15 bp, Homo sapiens
aaactattattcact

SEQ ID NO: 1394885 - DNA, 15 bp, Homo sapiens
caaactattattcac

SEQ ID NO: 1394886 - DNA, 15 bp, Homo sapiens
gcaaactattattca

SEQ ID NO: 1394887 - DNA, 15 bp, Homo sapiens
cgcaaactattattc

SEQ ID NO: 1394888 - DNA, 15 bp, Homo sapiens
gcgcaaactattatt

SEQ ID NO: 1394889 - DNA, 15 bp, Homo sapiens
cgcgcaaactattat

SEQ ID NO: 1394890 - DNA, 15 bp, Homo sapiens
ccgcgcaaactatta

SEQ ID NO: 1394891 - DNA, 15 bp, Homo sapiens
accgcgcaaactatt

SEQ ID NO: 1394892 - DNA, 15 bp, Homo sapiens
taccgcgcaaactat

SEQ ID NO: 1394893 - DNA, 15 bp, Homo sapiens
gtaccgcgcaaacta

SEQ ID NO: 1394894 - DNA, 15 bp, Homo sapiens
agtaccgcgcaaact

SEQ ID NO: 1394895 - DNA, 15 bp, Homo sapiens
tagtaccgcgcaaac

SEQ ID NO: 1394896 - DNA, 15 bp, Homo sapiens
ttagtaccgcgcaaa

SEQ ID NO: 1394897 - DNA, 15 bp, Homo sapiens
attagtaccgcgcaa

SEQ ID NO: 1394898 - DNA, 15 bp, Homo sapiens
cattagtaccgcgca

SEQ ID NO: 1394899 - DNA, 15 bp, Homo sapiens
gcattagtaccgcgc

SEQ ID NO: 1394900 - DNA, 15 bp, Homo sapiens
ggcattagtaccgcg

SEQ ID NO: 1394901 - DNA, 15 bp, Homo sapiens
aggcattagtaccgc

SEQ ID NO: 1394902 - DNA, 15 bp, Homo sapiens
caggcattagtaccg

SEQ ID NO: 1394903 - DNA, 15 bp, Homo sapiens
tcaggcattagtacc

SEQ ID NO: 1394904 - DNA, 15 bp, Homo sapiens
gtcaggcattagtac

SEQ ID NO: 1394905 - DNA, 15 bp, Homo sapiens
ggtcaggcattagta

SEQ ID NO: 1394906 - DNA, 15 bp, Homo sapiens
cggtcaggcattagt

SEQ ID NO: 1394907 - DNA, 15 bp, Homo sapiens
ccggtcaggcattag

SEQ ID NO: 1394908 - DNA, 15 bp, Homo sapiens
tccggtcaggcatta

SEQ ID NO: 1394909 - DNA, 15 bp, Homo sapiens
ttccggtcaggcatt

SEQ ID NO: 1394910 - DNA, 15 bp, Homo sapiens
attccggtcaggcat

SEQ ID NO: 1394911 - DNA, 15 bp, Homo sapiens
aattccggtcaggca

SEQ ID NO: 1394912 - DNA, 15 bp, Homo sapiens
caattccggtcaggc

SEQ ID NO: 1394913 - DNA, 15 bp, Homo sapiens
tcaattccggtcagg

SEQ ID NO: 1394914 - DNA, 15 bp, Homo sapiens
ctcaattccggtcag

SEQ ID NO: 1394915 - DNA, 15 bp, Homo sapiens
tctcaattccggtca

SEQ ID NO: 1394916 - DNA, 15 bp, Homo sapiens
atctcaattccggtc

SEQ ID NO: 1394917 - DNA, 15 bp, Homo sapiens
catctcaattccggt

SEQ ID NO: 1394918 - DNA, 15 bp, Homo sapiens
acatctcaattccgg

SEQ ID NO: 1394919 - DNA, 15 bp, Homo sapiens
cacatctcaattccg

SEQ ID NO: 1394920 - DNA, 15 bp, Homo sapiens
acacatctcaattcc

SEQ ID NO: 1394921 - DNA, 15 bp, Homo sapiens
aacacatctcaattc

SEQ ID NO: 1394922 - DNA, 15 bp, Homo sapiens
caacacatctcaatt

SEQ ID NO: 1394923 - DNA, 15 bp, Homo sapiens
gcaacacatctcaat

SEQ ID NO: 1394924 - DNA, 15 bp, Homo sapiens
ggcaacacatctcaa

SEQ ID NO: 1394925 - DNA, 15 bp, Homo sapiens
aggcaacacatctca

SEQ ID NO: 1394926 - DNA, 15 bp, Homo sapiens
gaggcaacacatctc

SEQ ID NO: 1394927 - DNA, 15 bp, Homo sapiens
agaggcaacacatct

SEQ ID NO: 1394928 - DNA, 15 bp, Homo sapiens
cagaggcaacacatc

SEQ ID NO: 1394929 - DNA, 15 bp, Homo sapiens
tcagaggcaacacat

SEQ ID NO: 1394930 - DNA, 15 bp, Homo sapiens
ctcagaggcaacaca

SEQ ID NO: 1394931 - DNA, 15 bp, Homo sapiens
cctcagaggcaacac

SEQ ID NO: 1394932 - DNA, 15 bp, Homo sapiens
ccctcagaggcaaca

SEQ ID NO: 1394933 - DNA, 15 bp, Homo sapiens
gccctcagaggcaac

SEQ ID NO: 1394934 - DNA, 15 bp, Homo sapiens
agccctcagaggcaa

SEQ ID NO: 1394935 - DNA, 15 bp, Homo sapiens
aagccctcagaggca

SEQ ID NO: 1394936 - DNA, 15 bp, Homo sapiens
aaagccctcagaggc

SEQ ID NO: 1394937 - DNA, 15 bp, Homo sapiens
gaaagccctcagagg

SEQ ID NO: 1394938 - DNA, 15 bp, Homo sapiens
agaaagccctcagag

SEQ ID NO: 1394939 - DNA, 15 bp, Homo sapiens
gagaaagccctcaga

SEQ ID NO: 1394940 - DNA, 15 bp, Homo sapiens
agagaaagccctcag

SEQ ID NO: 1394941 - DNA, 15 bp, Homo sapiens
cagagaaagccctca

SEQ ID NO: 1394942 - DNA, 15 bp, Homo sapiens
ccagagaaagccctc

SEQ ID NO: 1394943 - DNA, 15 bp, Homo sapiens
tccagagaaagccct

SEQ ID NO: 1394944 - DNA, 15 bp, Homo sapiens
ttccagagaaagccc

SEQ ID NO: 1394945 - DNA, 15 bp, Homo sapiens
cttccagagaaagcc

SEQ ID NO: 1394946 - DNA, 15 bp, Homo sapiens
acttccagagaaagc

SEQ ID NO: 1394947 - DNA, 15 bp, Homo sapiens
aacttccagagaaag

SEQ ID NO: 1394948 - DNA, 15 bp, Homo sapiens
aaacttccagagaaa

SEQ ID NO: 1394949 - DNA, 15 bp, Homo sapiens
gaaacttccagagaa

SEQ ID NO: 1394950 - DNA, 15 bp, Homo sapiens
agaaacttccagaga

SEQ ID NO: 1394951 - DNA, 15 bp, Homo sapiens
gagaaacttccagag

SEQ ID NO: 1394952 - DNA, 15 bp, Homo sapiens
agagaaacttccaga

SEQ ID NO: 1394953 - DNA, 15 bp, Homo sapiens
aagagaaacttccag

SEQ ID NO: 1394954 - DNA, 15 bp, Homo sapiens
taagagaaacttcca

SEQ ID NO: 1394955 - DNA, 15 bp, Homo sapiens
ctaagagaaacttcc

SEQ ID NO: 1394956 - DNA, 15 bp, Homo sapiens
cctaagagaaacttc

SEQ ID NO: 1394957 - DNA, 15 bp, Homo sapiens
gcctaagagaaactt

SEQ ID NO: 1394958 - DNA, 15 bp, Homo sapiens
agcctaagagaaact

SEQ ID NO: 1394959 - DNA, 15 bp, Homo sapiens
tagcctaagagaaac

SEQ ID NO: 1394960 - DNA, 15 bp, Homo sapiens
atagcctaagagaaa

SEQ ID NO: 1394961 - DNA, 15 bp, Homo sapiens
catagcctaagagaa

SEQ ID NO: 1394962 - DNA, 15 bp, Homo sapiens
tcatagcctaagaga

SEQ ID NO: 1394963 - DNA, 15 bp, Homo sapiens
ctcatagcctaagag

SEQ ID NO: 1394964 - DNA, 15 bp, Homo sapiens
tctcatagcctaaga

SEQ ID NO: 1394965 - DNA, 15 bp, Homo sapiens
gtctcatagcctaag

SEQ ID NO: 1394966 - DNA, 15 bp, Homo sapiens
ggtctcatagcctaa

SEQ ID NO: 1394967 - DNA, 15 bp, Homo sapiens
gggtctcatagccta

SEQ ID NO: 1394968 - DNA, 15 bp, Homo sapiens
ggggtctcatagcct

SEQ ID NO: 1394969 - DNA, 15 bp, Homo sapiens
aggggtctcatagcc

SEQ ID NO: 1394970 - DNA, 15 bp, Homo sapiens
caggggtctcatagc

SEQ ID NO: 1394971 - DNA, 15 bp, Homo sapiens
gcaggggtctcatag

SEQ ID NO: 1394972 - DNA, 15 bp, Homo sapiens
agcaggggtctcata

SEQ ID NO: 1394973 - DNA, 15 bp, Homo sapiens
aagcaggggtctcat

SEQ ID NO: 1394974 - DNA, 15 bp, Homo sapiens
taagcaggggtctca

SEQ ID NO: 1394975 - DNA, 15 bp, Homo sapiens
ataagcaggggtctc

SEQ ID NO: 1394976 - DNA, 15 bp, Homo sapiens
tataagcaggggtct

SEQ ID NO: 1394977 - DNA, 15 bp, Homo sapiens
ttataagcaggggtc

SEQ ID NO: 1394978 - DNA, 15 bp, Homo sapiens
cttataagcaggggt

SEQ ID NO: 1394979 - DNA, 15 bp, Homo sapiens
gcttataagcagggg

SEQ ID NO: 1394980 - DNA, 15 bp, Homo sapiens
tgcttataagcaggg

SEQ ID NO: 1394981 - DNA, 15 bp, Homo sapiens
atgcttataagcagg

SEQ ID NO: 1394982 - DNA, 15 bp, Homo sapiens
catgcttataagcag

SEQ ID NO: 1394983 - DNA, 15 bp, Homo sapiens
gcatgcttataagca

SEQ ID NO: 1394984 - DNA, 15 bp, Homo sapiens
tgcatgcttataagc

SEQ ID NO: 1394985 - DNA, 15 bp, Homo sapiens
atgcatgcttataag

SEQ ID NO: 1394986 - DNA, 15 bp, Homo sapiens
aatgcatgcttataa

SEQ ID NO: 1394987 - DNA, 15 bp, Homo sapiens
aaatgcatgcttata

SEQ ID NO: 1394988 - DNA, 15 bp, Homo sapiens
aaaatgcatgcttat

SEQ ID NO: 1394989 - DNA, 15 bp, Homo sapiens
gaaaatgcatgctta

SEQ ID NO: 1394990 - DNA, 15 bp, Homo sapiens
ggaaaatgcatgctt

SEQ ID NO: 1394991 - DNA, 15 bp, Homo sapiens
tggaaaatgcatgct

SEQ ID NO: 1394992 - DNA, 15 bp, Homo sapiens
ttggaaaatgcatgc

SEQ ID NO: 1394993 - DNA, 15 bp, Homo sapiens
tttggaaaatgcatg

SEQ ID NO: 1394994 - DNA, 15 bp, Homo sapiens
ttttggaaaatgcat

SEQ ID NO: 1394995 - DNA, 15 bp, Homo sapiens
gttttggaaaatgca

SEQ ID NO: 1394996 - DNA, 15 bp, Homo sapiens
ggttttggaaaatgc

SEQ ID NO: 1394997 - DNA, 15 bp, Homo sapiens
aggttttggaaaatg

SEQ ID NO: 1394998 - DNA, 15 bp, Homo sapiens
caggttttggaaaat

SEQ ID NO: 1394999 - DNA, 15 bp, Homo sapiens
gcaggttttggaaaa

SEQ ID NO: 1395000 - DNA, 15 bp, Homo sapiens
agcaggttttggaaa

SEQ ID NO: 1395001 - DNA, 15 bp, Homo sapiens
cagcaggttttggaa

SEQ ID NO: 1395002 - DNA, 15 bp, Homo sapiens
acagcaggttttgga

SEQ ID NO: 1395003 - DNA, 15 bp, Homo sapiens
aacagcaggttttgg

SEQ ID NO: 1395004 - DNA, 15 bp, Homo sapiens
gaacagcaggttttg

SEQ ID NO: 1395005 - DNA, 15 bp, Homo sapiens
agaacagcaggtttt

SEQ ID NO: 1395006 - DNA, 15 bp, Homo sapiens
aagaacagcaggttt

SEQ ID NO: 1395007 - DNA, 15 bp, Homo sapiens
aaagaacagcaggtt

SEQ ID NO: 1395008 - DNA, 15 bp, Homo sapiens
aaaagaacagcaggt

SEQ ID NO: 1395009 - DNA, 15 bp, Homo sapiens
gaaaagaacagcagg

SEQ ID NO: 1395010 - DNA, 15 bp, Homo sapiens
agaaaagaacagcag

SEQ ID NO: 1395011 - DNA, 15 bp, Homo sapiens
aagaaaagaacagca

SEQ ID NO: 1395012 - DNA, 15 bp, Homo sapiens
aaagaaaagaacagc

SEQ ID NO: 1395013 - DNA, 15 bp, Homo sapiens
gaaagaaaagaacag

SEQ ID NO: 1395014 - DNA, 15 bp, Homo sapiens
tgaaagaaaagaaca

SEQ ID NO: 1395015 - DNA, 15 bp, Homo sapiens
gtgaaagaaaagaac

SEQ ID NO: 1395016 - DNA, 15 bp, Homo sapiens
agtgaaagaaaagaa

SEQ ID NO: 1395017 - DNA, 15 bp, Homo sapiens
tagtgaaagaaaaga

SEQ ID NO: 1395018 - DNA, 15 bp, Homo sapiens
atagtgaaagaaaag

SEQ ID NO: 1395019 - DNA, 15 bp, Homo sapiens
aatagtgaaagaaaa

SEQ ID NO: 1395020 - DNA, 15 bp, Homo sapiens
caatagtgaaagaaa

SEQ ID NO: 1395021 - DNA, 15 bp, Homo sapiens
ccaatagtgaaagaa

SEQ ID NO: 1395022 - DNA, 15 bp, Homo sapiens
tccaatagtgaaaga

SEQ ID NO: 1395023 - DNA, 15 bp, Homo sapiens
ttccaatagtgaaag

SEQ ID NO: 1395024 - DNA, 15 bp, Homo sapiens
cttccaatagtgaaa

SEQ ID NO: 1395025 - DNA, 15 bp, Homo sapiens
ccttccaatagtgaa

SEQ ID NO: 1395026 - DNA, 15 bp, Homo sapiens
tccttccaatagtga

SEQ ID NO: 1395027 - DNA, 15 bp, Homo sapiens
ctccttccaatagtg

SEQ ID NO: 1395028 - DNA, 15 bp, Homo sapiens
cctccttccaatagt

SEQ ID NO: 1395029 - DNA, 15 bp, Homo sapiens
ccctccttccaatag

SEQ ID NO: 1395030 - DNA, 15 bp, Homo sapiens
tccctccttccaata

SEQ ID NO: 1395031 - DNA, 15 bp, Homo sapiens
ttccctccttccaat

SEQ ID NO: 1395032 - DNA, 15 bp, Homo sapiens
attccctccttccaa

SEQ ID NO: 1395033 - DNA, 15 bp, Homo sapiens
cattccctccttcca

SEQ ID NO: 1395034 - DNA, 15 bp, Homo sapiens
acattccctccttcc

SEQ ID NO: 1395035 - DNA, 15 bp, Homo sapiens
tacattccctccttc

SEQ ID NO: 1395036 - DNA, 15 bp, Homo sapiens
atacattccctcctt

SEQ ID NO: 1395037 - DNA, 15 bp, Homo sapiens
tatacattccctcct

SEQ ID NO: 1395038 - DNA, 15 bp, Homo sapiens
atatacattccctcc

SEQ ID NO: 1395039 - DNA, 15 bp, Homo sapiens
gatatacattccctc

SEQ ID NO: 1395040 - DNA, 15 bp, Homo sapiens
ggatatacattccct

SEQ ID NO: 1395041 - DNA, 15 bp, Homo sapiens
aggatatacattccc

SEQ ID NO: 1395042 - DNA, 15 bp, Homo sapiens
gaggatatacattcc

SEQ ID NO: 1395043 - DNA, 15 bp, Homo sapiens
tgaggatatacattc

SEQ ID NO: 1395044 - DNA, 15 bp, Homo sapiens
ctgaggatatacatt

SEQ ID NO: 1395045 - DNA, 15 bp, Homo sapiens
cctgaggatatacat

SEQ ID NO: 1395046 - DNA, 15 bp, Homo sapiens
acctgaggatataca

SEQ ID NO: 1395047 - DNA, 15 bp, Homo sapiens
tacctgaggatatac

SEQ ID NO: 1395048 - DNA, 15 bp, Homo sapiens
ttacctgaggatata

SEQ ID NO: 1395049 - DNA, 15 bp, Homo sapiens
attacctgaggatat

SEQ ID NO: 1395050 - DNA, 15 bp, Homo sapiens
cattacctgaggata

SEQ ID NO: 1395051 - DNA, 15 bp, Homo sapiens
acattacctgaggat

SEQ ID NO: 1395052 - DNA, 15 bp, Homo sapiens
tacattacctgagga

SEQ ID NO: 1395053 - DNA, 15 bp, Homo sapiens
ttacattacctgagg

SEQ ID NO: 1395054 - DNA, 15 bp, Homo sapiens
cttacattacctgag

SEQ ID NO: 1395055 - DNA, 15 bp, Homo sapiens
ccttacattacctga

SEQ ID NO: 1395056 - DNA, 15 bp, Homo sapiens
cccttacattacctg

SEQ ID NO: 1395057 - DNA, 15 bp, Homo sapiens
acccttacattacct

SEQ ID NO: 1395058 - DNA, 15 bp, Homo sapiens
cacccttacattacc

SEQ ID NO: 1395059 - DNA, 15 bp, Homo sapiens
acacccttacattac

SEQ ID NO: 1395060 - DNA, 15 bp, Homo sapiens
cacacccttacatta

SEQ ID NO: 1395061 - DNA, 15 bp, Homo sapiens
acacacccttacatt

SEQ ID NO: 1395062 - DNA, 15 bp, Homo sapiens
tacacacccttacat

SEQ ID NO: 1395063 - DNA, 15 bp, Homo sapiens
ttacacacccttaca

SEQ ID NO: 1395064 - DNA, 15 bp, Homo sapiens
tttacacacccttac

SEQ ID NO: 1395065 - DNA, 15 bp, Homo sapiens
ctttacacaccctta

SEQ ID NO: 1395066 - DNA, 15 bp, Homo sapiens
cctttacacaccctt

SEQ ID NO: 1395067 - DNA, 15 bp, Homo sapiens
acctttacacaccct

SEQ ID NO: 1395068 - DNA, 15 bp, Homo sapiens
tacctttacacaccc

SEQ ID NO: 1395069 - DNA, 15 bp, Homo sapiens
atacctttacacacc

SEQ ID NO: 1395070 - DNA, 15 bp, Homo sapiens
gatacctttacacac

SEQ ID NO: 1395071 - DNA, 15 bp, Homo sapiens
ggatacctttacaca

SEQ ID NO: 1395072 - DNA, 15 bp, Homo sapiens
aggatacctttacac

SEQ ID NO: 1395073 - DNA, 15 bp, Homo sapiens
taggatacctttaca

SEQ ID NO: 1395074 - DNA, 15 bp, Homo sapiens
ttaggatacctttac

SEQ ID NO: 1395075 - DNA, 15 bp, Homo sapiens
tttaggataccttta

SEQ ID NO: 1395076 - DNA, 15 bp, Homo sapiens
ctttaggataccttt

SEQ ID NO: 1395077 - DNA, 15 bp, Homo sapiens
gctttaggatacctt

SEQ ID NO: 1395078 - DNA, 15 bp, Homo sapiens
tgctttaggatacct

SEQ ID NO: 1395079 - DNA, 15 bp, Homo sapiens
ctgctttaggatacc

SEQ ID NO: 1395080 - DNA, 15 bp, Homo sapiens
cctgctttaggatac

SEQ ID NO: 1395081 - DNA, 15 bp, Homo sapiens
tcctgctttaggata

SEQ ID NO: 1395082 - DNA, 15 bp, Homo sapiens
atcctgctttaggat

SEQ ID NO: 1395083 - DNA, 15 bp, Homo sapiens
aatcctgctttagga

SEQ ID NO: 1395084 - DNA, 15 bp, Homo sapiens
aaatcctgctttagg

SEQ ID NO: 1395085 - DNA, 15 bp, Homo sapiens
taaatcctgctttag

SEQ ID NO: 1395086 - DNA, 15 bp, Homo sapiens
ataaatcctgcttta

SEQ ID NO: 1395087 - DNA, 15 bp, Homo sapiens
aataaatcctgcttt

SEQ ID NO: 1395088 - DNA, 15 bp, Homo sapiens
aaataaatcctgctt

SEQ ID NO: 1395089 - DNA, 15 bp, Homo sapiens
caaataaatcctgct

SEQ ID NO: 1395090 - DNA, 15 bp, Homo sapiens
tcaaataaatcctgc

SEQ ID NO: 1395091 - DNA, 15 bp, Homo sapiens
ttcaaataaatcctg

SEQ ID NO: 1395092 - DNA, 15 bp, Homo sapiens
tttcaaataaatcct

SEQ ID NO: 1395093 - DNA, 15 bp, Homo sapiens
atttcaaataaatcc

SEQ ID NO: 1395094 - DNA, 15 bp, Homo sapiens
aatttcaaataaatc

SEQ ID NO: 1395095 - DNA, 15 bp, Homo sapiens
gaatttcaaataaat

SEQ ID NO: 1395096 - DNA, 15 bp, Homo sapiens
ggaatttcaaataaa

SEQ ID NO: 1395097 - DNA, 15 bp, Homo sapiens
tggaatttcaaataa

SEQ ID NO: 1395098 - DNA, 15 bp, Homo sapiens
atggaatttcaaata

SEQ ID NO: 1395099 - DNA, 15 bp, Homo sapiens
catggaatttcaaat

SEQ ID NO: 1395100 - DNA, 15 bp, Homo sapiens
gcatggaatttcaaa

SEQ ID NO: 1395101 - DNA, 15 bp, Homo sapiens
agcatggaatttcaa

SEQ ID NO: 1395102 - DNA, 15 bp, Homo sapiens
aagcatggaatttca

SEQ ID NO: 1395103 - DNA, 15 bp, Homo sapiens
gaagcatggaatttc

SEQ ID NO: 1395104 - DNA, 15 bp, Homo sapiens
agaagcatggaattt

SEQ ID NO: 1395105 - DNA, 15 bp, Homo sapiens
cagaagcatggaatt

SEQ ID NO: 1395106 - DNA, 15 bp, Homo sapiens
tcagaagcatggaat

SEQ ID NO: 1395107 - DNA, 15 bp, Homo sapiens
ctcagaagcatggaa

SEQ ID NO: 1395108 - DNA, 15 bp, Homo sapiens
tctcagaagcatgga

SEQ ID NO: 1395109 - DNA, 15 bp, Homo sapiens
atctcagaagcatgg

SEQ ID NO: 1395110 - DNA, 15 bp, Homo sapiens
catctcagaagcatg

SEQ ID NO: 1395111 - DNA, 15 bp, Homo sapiens
tcatctcagaagcat

SEQ ID NO: 1395112 - DNA, 15 bp, Homo sapiens
ctcatctcagaagca

SEQ ID NO: 1395113 - DNA, 15 bp, Homo sapiens
actcatctcagaagc

SEQ ID NO: 1395114 - DNA, 15 bp, Homo sapiens
aactcatctcagaag

SEQ ID NO: 1395115 - DNA, 15 bp, Homo sapiens
aaactcatctcagaa

SEQ ID NO: 1395116 - DNA, 15 bp, Homo sapiens
aaaactcatctcaga

SEQ ID NO: 1395117 - DNA, 15 bp, Homo sapiens
aaaaactcatctcag

SEQ ID NO: 1395118 - DNA, 15 bp, Homo sapiens
aaaaaactcatctca

SEQ ID NO: 1395119 - DNA, 15 bp, Homo sapiens
caaaaaactcatctc

SEQ ID NO: 1395120 - DNA, 15 bp, Homo sapiens
ccaaaaaactcatct

SEQ ID NO: 1395121 - DNA, 15 bp, Homo sapiens
accaaaaaactcatc

SEQ ID NO: 1395122 - DNA, 15 bp, Homo sapiens
caccaaaaaactcat

SEQ ID NO: 1395123 - DNA, 15 bp, Homo sapiens
acaccaaaaaactca

SEQ ID NO: 1395124 - DNA, 15 bp, Homo sapiens
cacaccaaaaaactc

SEQ ID NO: 1395125 - DNA, 15 bp, Homo sapiens
tcacaccaaaaaact

SEQ ID NO: 1395126 - DNA, 15 bp, Homo sapiens
ctcacaccaaaaaac

SEQ ID NO: 1395127 - DNA, 15 bp, Homo sapiens
tctcacaccaaaaaa

SEQ ID NO: 1395128 - DNA, 15 bp, Homo sapiens
gtctcacaccaaaaa

SEQ ID NO: 1395129 - DNA, 15 bp, Homo sapiens
tgtctcacaccaaaa

SEQ ID NO: 1395130 - DNA, 15 bp, Homo sapiens
ctgtctcacaccaaa

SEQ ID NO: 1395131 - DNA, 15 bp, Homo sapiens
actgtctcacaccaa

SEQ ID NO: 1395132 - DNA, 15 bp, Homo sapiens
tactgtctcacacca

SEQ ID NO: 1395133 - DNA, 15 bp, Homo sapiens
ctactgtctcacacc

SEQ ID NO: 1395134 - DNA, 15 bp, Homo sapiens
tctactgtctcacac

SEQ ID NO: 1395135 - DNA, 15 bp, Homo sapiens
atctactgtctcaca

SEQ ID NO: 1395136 - DNA, 15 bp, Homo sapiens
tatctactgtctcac

SEQ ID NO: 1395137 - DNA, 15 bp, Homo sapiens
gtatctactgtctca

SEQ ID NO: 1395138 - DNA, 15 bp, Homo sapiens
ggtatctactgtctc

SEQ ID NO: 1395139 - DNA, 15 bp, Homo sapiens
tggtatctactgtct

SEQ ID NO: 1395140 - DNA, 15 bp, Homo sapiens
ttggtatctactgtc

SEQ ID NO: 1395141 - DNA, 15 bp, Homo sapiens
tttggtatctactgt

SEQ ID NO: 1395142 - DNA, 15 bp, Homo sapiens
ttttggtatctactg

SEQ ID NO: 1395143 - DNA, 15 bp, Homo sapiens
gttttggtatctact

SEQ ID NO: 1395144 - DNA, 15 bp, Homo sapiens
tgttttggtatctac

SEQ ID NO: 1395145 - DNA, 15 bp, Homo sapiens
gtgttttggtatcta

SEQ ID NO: 1395146 - DNA, 15 bp, Homo sapiens
ggtgttttggtatct

SEQ ID NO: 1395147 - DNA, 15 bp, Homo sapiens
aggtgttttggtatc

SEQ ID NO: 1395148 - DNA, 15 bp, Homo sapiens
caggtgttttggtat

SEQ ID NO: 1395149 - DNA, 15 bp, Homo sapiens
gcaggtgttttggta

SEQ ID NO: 1395150 - DNA, 15 bp, Homo sapiens
agcaggtgttttggt

SEQ ID NO: 1395151 - DNA, 15 bp, Homo sapiens
aagcaggtgttttgg

SEQ ID NO: 1395152 - DNA, 15 bp, Homo sapiens
caagcaggtgttttg

SEQ ID NO: 1395153 - DNA, 15 bp, Homo sapiens
ccaagcaggtgtttt

SEQ ID NO: 1395154 - DNA, 15 bp, Homo sapiens
cccaagcaggtgttt

SEQ ID NO: 1395155 - DNA, 15 bp, Homo sapiens
tcccaagcaggtgtt

SEQ ID NO: 1395156 - DNA, 15 bp, Homo sapiens
gtcccaagcaggtgt

SEQ ID NO: 1395157 - DNA, 15 bp, Homo sapiens
agtcccaagcaggtg

SEQ ID NO: 1395158 - DNA, 15 bp, Homo sapiens
aagtcccaagcaggt

SEQ ID NO: 1395159 - DNA, 15 bp, Homo sapiens
taagtcccaagcagg

SEQ ID NO: 1395160 - DNA, 15 bp, Homo sapiens
ttaagtcccaagcag

SEQ ID NO: 1395161 - DNA, 15 bp, Homo sapiens
gttaagtcccaagca

SEQ ID NO: 1395162 - DNA, 15 bp, Homo sapiens
tgttaagtcccaagc

SEQ ID NO: 1395163 - DNA, 15 bp, Homo sapiens
gtgttaagtcccaag

SEQ ID NO: 1395164 - DNA, 15 bp, Homo sapiens
tgtgttaagtcccaa

SEQ ID NO: 1395165 - DNA, 15 bp, Homo sapiens
ctgtgttaagtccca

SEQ ID NO: 1395166 - DNA, 15 bp, Homo sapiens
tctgtgttaagtccc

SEQ ID NO: 1395167 - DNA, 15 bp, Homo sapiens
ttctgtgttaagtcc

SEQ ID NO: 1395168 - DNA, 15 bp, Homo sapiens
attctgtgttaagtc

SEQ ID NO: 1395169 - DNA, 15 bp, Homo sapiens
tattctgtgttaagt

SEQ ID NO: 1395170 - DNA, 15 bp, Homo sapiens
gtattctgtgttaag

SEQ ID NO: 1395171 - DNA, 15 bp, Homo sapiens
ggtattctgtgttaa

SEQ ID NO: 1395172 - DNA, 15 bp, Homo sapiens
tggtattctgtgtta

SEQ ID NO: 1395173 - DNA, 15 bp, Homo sapiens
atggtattctgtgtt

SEQ ID NO: 1395174 - DNA, 15 bp, Homo sapiens
gatggtattctgtgt

SEQ ID NO: 1395175 - DNA, 15 bp, Homo sapiens
ggatggtattctgtg

SEQ ID NO: 1395176 - DNA, 15 bp, Homo sapiens
aggatggtattctgt

SEQ ID NO: 1395177 - DNA, 15 bp, Homo sapiens
aaggatggtattctg

SEQ ID NO: 1395178 - DNA, 15 bp, Homo sapiens
gaaggatggtattct

SEQ ID NO: 1395179 - DNA, 15 bp, Homo sapiens
agaaggatggtattc

SEQ ID NO: 1395180 - DNA, 15 bp, Homo sapiens
tagaaggatggtatt

SEQ ID NO: 1395181 - DNA, 15 bp, Homo sapiens
atagaaggatggtat

SEQ ID NO: 1395182 - DNA, 15 bp, Homo sapiens
aatagaaggatggta

SEQ ID NO: 1395183 - DNA, 15 bp, Homo sapiens
aaatagaaggatggt

SEQ ID NO: 1395184 - DNA, 15 bp, Homo sapiens
caaatagaaggatgg

SEQ ID NO: 1395185 - DNA, 15 bp, Homo sapiens
acaaatagaaggatg

SEQ ID NO: 1395186 - DNA, 15 bp, Homo sapiens
aacaaatagaaggat

SEQ ID NO: 1395187 - DNA, 15 bp, Homo sapiens
aaacaaatagaagga

SEQ ID NO: 1395188 - DNA, 15 bp, Homo sapiens
aaaacaaatagaagg

SEQ ID NO: 1395189 - DNA, 15 bp, Homo sapiens
aaaaacaaatagaag

SEQ ID NO: 1395190 - DNA, 15 bp, Homo sapiens
aaaaaacaaatagaa

SEQ ID NO: 1395191 - DNA, 15 bp, Homo sapiens
caaaaaacaaataga

SEQ ID NO: 1395192 - DNA, 15 bp, Homo sapiens
gcaaaaaacaaatag

SEQ ID NO: 1395193 - DNA, 15 bp, Homo sapiens
tgcaaaaaacaaata

SEQ ID NO: 1395194 - DNA, 15 bp, Homo sapiens
gtgcaaaaaacaaat

SEQ ID NO: 1395195 - DNA, 15 bp, Homo sapiens
tgtgcaaaaaacaaa

SEQ ID NO: 1395196 - DNA, 15 bp, Homo sapiens
atgtgcaaaaaacaa

SEQ ID NO: 1395197 - DNA, 15 bp, Homo sapiens
aatgtgcaaaaaaca

SEQ ID NO: 1395198 - DNA, 15 bp, Homo sapiens
gaatgtgcaaaaaac

SEQ ID NO: 1395199 - DNA, 15 bp, Homo sapiens
ggaatgtgcaaaaaa

SEQ ID NO: 1395200 - DNA, 15 bp, Homo sapiens
aggaatgtgcaaaaa

SEQ ID NO: 1395201 - DNA, 15 bp, Homo sapiens
gaggaatgtgcaaaa

SEQ ID NO: 1395202 - DNA, 15 bp, Homo sapiens
agaggaatgtgcaaa

SEQ ID NO: 1395203 - DNA, 15 bp, Homo sapiens
gagaggaatgtgcaa

SEQ ID NO: 1395204 - DNA, 15 bp, Homo sapiens
ggagaggaatgtgca

SEQ ID NO: 1395205 - DNA, 15 bp, Homo sapiens
gggagaggaatgtgc

SEQ ID NO: 1395206 - DNA, 15 bp, Homo sapiens
agggagaggaatgtg

SEQ ID NO: 1395207 - DNA, 15 bp, Homo sapiens
aagggagaggaatgt

SEQ ID NO: 1395208 - DNA, 15 bp, Homo sapiens
gaagggagaggaatg

SEQ ID NO: 1395209 - DNA, 15 bp, Homo sapiens
tgaagggagaggaat

SEQ ID NO: 1395210 - DNA, 15 bp, Homo sapiens
ctgaagggagaggaa

SEQ ID NO: 1395211 - DNA, 15 bp, Homo sapiens
gctgaagggagagga

SEQ ID NO: 1395212 - DNA, 15 bp, Homo sapiens
cgctgaagggagagg

SEQ ID NO: 1395213 - DNA, 15 bp, Homo sapiens
ccgctgaagggagag

SEQ ID NO: 1395214 - DNA, 15 bp, Homo sapiens
accgctgaagggaga

SEQ ID NO: 1395215 - DNA, 15 bp, Homo sapiens
gaccgctgaagggag

SEQ ID NO: 1395216 - DNA, 15 bp, Homo sapiens
ggaccgctgaaggga

SEQ ID NO: 1395217 - DNA, 15 bp, Homo sapiens
tggaccgctgaaggg

SEQ ID NO: 1395218 - DNA, 15 bp, Homo sapiens
atggaccgctgaagg

SEQ ID NO: 1395219 - DNA, 15 bp, Homo sapiens
tatggaccgctgaag

SEQ ID NO: 1395220 - DNA, 15 bp, Homo sapiens
ttatggaccgctgaa

SEQ ID NO: 1395221 - DNA, 15 bp, Homo sapiens
gttatggaccgctga

SEQ ID NO: 1395222 - DNA, 15 bp, Homo sapiens
agttatggaccgctg

SEQ ID NO: 1395223 - DNA, 15 bp, Homo sapiens
cagttatggaccgct

SEQ ID NO: 1395224 - DNA, 15 bp, Homo sapiens
ccagttatggaccgc

SEQ ID NO: 1395225 - DNA, 15 bp, Homo sapiens
cccagttatggaccg

SEQ ID NO: 1395226 - DNA, 15 bp, Homo sapiens
acccagttatggacc

SEQ ID NO: 1395227 - DNA, 15 bp, Homo sapiens
tacccagttatggac

SEQ ID NO: 1395228 - DNA, 15 bp, Homo sapiens
ctacccagttatgga

SEQ ID NO: 1395229 - DNA, 15 bp, Homo sapiens
actacccagttatgg

SEQ ID NO: 1395230 - DNA, 15 bp, Homo sapiens
cactacccagttatg

SEQ ID NO: 1395231 - DNA, 15 bp, Homo sapiens
acactacccagttat

SEQ ID NO: 1395232 - DNA, 15 bp, Homo sapiens
gacactacccagtta

SEQ ID NO: 1395233 - DNA, 15 bp, Homo sapiens
tgacactacccagtt

SEQ ID NO: 1395234 - DNA, 15 bp, Homo sapiens
atgacactacccagt

SEQ ID NO: 1395235 - DNA, 15 bp, Homo sapiens
tatgacactacccag

SEQ ID NO: 1395236 - DNA, 15 bp, Homo sapiens
gtatgacactaccca

SEQ ID NO: 1395237 - DNA, 15 bp, Homo sapiens
tgtatgacactaccc

SEQ ID NO: 1395238 - DNA, 15 bp, Homo sapiens
gtgtatgacactacc

SEQ ID NO: 1395239 - DNA, 15 bp, Homo sapiens
tgtgtatgacactac

SEQ ID NO: 1395240 - DNA, 15 bp, Homo sapiens
gtgtgtatgacacta

SEQ ID NO: 1395241 - DNA, 15 bp, Homo sapiens
cgtgtgtatgacact

SEQ ID NO: 1395242 - DNA, 15 bp, Homo sapiens
acgtgtgtatgacac

SEQ ID NO: 1395243 - DNA, 15 bp, Homo sapiens
cacgtgtgtatgaca

SEQ ID NO: 1395244 - DNA, 15 bp, Homo sapiens
ccacgtgtgtatgac

SEQ ID NO: 1395245 - DNA, 15 bp, Homo sapiens
tccacgtgtgtatga

SEQ ID NO: 1395246 - DNA, 15 bp, Homo sapiens
ttccacgtgtgtatg

SEQ ID NO: 1395247 - DNA, 15 bp, Homo sapiens
attccacgtgtgtat

SEQ ID NO: 1395248 - DNA, 15 bp, Homo sapiens
cattccacgtgtgta

SEQ ID NO: 1395249 - DNA, 15 bp, Homo sapiens
acattccacgtgtgt

SEQ ID NO: 1395250 - DNA, 15 bp, Homo sapiens
cacattccacgtgtg

SEQ ID NO: 1395251 - DNA, 15 bp, Homo sapiens
ccacattccacgtgt

SEQ ID NO: 1395252 - DNA, 15 bp, Homo sapiens
gccacattccacgtg

SEQ ID NO: 1395253 - DNA, 15 bp, Homo sapiens
tgccacattccacgt

SEQ ID NO: 1395254 - DNA, 15 bp, Homo sapiens
ctgccacattccacg

SEQ ID NO: 1395255 - DNA, 15 bp, Homo sapiens
tctgccacattccac

SEQ ID NO: 1395256 - DNA, 15 bp, Homo sapiens
gtctgccacattcca

SEQ ID NO: 1395257 - DNA, 15 bp, Homo sapiens
tgtctgccacattcc

SEQ ID NO: 1395258 - DNA, 15 bp, Homo sapiens
ctgtctgccacattc

SEQ ID NO: 1395259 - DNA, 15 bp, Homo sapiens
cctgtctgccacatt

SEQ ID NO: 1395260 - DNA, 15 bp, Homo sapiens
tcctgtctgccacat

SEQ ID NO: 1395261 - DNA, 15 bp, Homo sapiens
atcctgtctgccaca

SEQ ID NO: 1395262 - DNA, 15 bp, Homo sapiens
catcctgtctgccac

SEQ ID NO: 1395263 - DNA, 15 bp, Homo sapiens
ccatcctgtctgcca

SEQ ID NO: 1395264 - DNA, 15 bp, Homo sapiens
accatcctgtctgcc

SEQ ID NO: 1395265 - DNA, 15 bp, Homo sapiens
gaccatcctgtctgc

SEQ ID NO: 1395266 - DNA, 15 bp, Homo sapiens
tgaccatcctgtctg

SEQ ID NO: 1395267 - DNA, 15 bp, Homo sapiens
atgaccatcctgtct

SEQ ID NO: 1395268 - DNA, 15 bp, Homo sapiens
gatgaccatcctgtc

SEQ ID NO: 1395269 - DNA, 15 bp, Homo sapiens
agatgaccatcctgt

SEQ ID NO: 1395270 - DNA, 15 bp, Homo sapiens
gagatgaccatcctg

SEQ ID NO: 1395271 - DNA, 15 bp, Homo sapiens
agagatgaccatcct

SEQ ID NO: 1395272 - DNA, 15 bp, Homo sapiens
gagagatgaccatcc

SEQ ID NO: 1395273 - DNA, 15 bp, Homo sapiens
tgagagatgaccatc

SEQ ID NO: 1395274 - DNA, 15 bp, Homo sapiens
atgagagatgaccat

SEQ ID NO: 1395275 - DNA, 15 bp, Homo sapiens
aatgagagatgacca

SEQ ID NO: 1395276 - DNA, 15 bp, Homo sapiens
gaatgagagatgacc

SEQ ID NO: 1395277 - DNA, 15 bp, Homo sapiens
agaatgagagatgac

SEQ ID NO: 1395278 - DNA, 15 bp, Homo sapiens
aagaatgagagatga

SEQ ID NO: 1395279 - DNA, 15 bp, Homo sapiens
aaagaatgagagatg

SEQ ID NO: 1395280 - DNA, 15 bp, Homo sapiens
caaagaatgagagat

SEQ ID NO: 1395281 - DNA, 15 bp, Homo sapiens
gcaaagaatgagaga

SEQ ID NO: 1395282 - DNA, 15 bp, Homo sapiens
ggcaaagaatgagag

SEQ ID NO: 1395283 - DNA, 15 bp, Homo sapiens
aggcaaagaatgaga

SEQ ID NO: 1395284 - DNA, 15 bp, Homo sapiens
gaggcaaagaatgag

SEQ ID NO: 1395285 - DNA, 15 bp, Homo sapiens
tgaggcaaagaatga

SEQ ID NO: 1395286 - DNA, 15 bp, Homo sapiens
atgaggcaaagaatg

SEQ ID NO: 1395287 - DNA, 15 bp, Homo sapiens
gatgaggcaaagaat

SEQ ID NO: 1395288 - DNA, 15 bp, Homo sapiens
tgatgaggcaaagaa

SEQ ID NO: 1395289 - DNA, 15 bp, Homo sapiens
ttgatgaggcaaaga

SEQ ID NO: 1395290 - DNA, 15 bp, Homo sapiens
gttgatgaggcaaag

SEQ ID NO: 1395291 - DNA, 15 bp, Homo sapiens
agttgatgaggcaaa

SEQ ID NO: 1395292 - DNA, 15 bp, Homo sapiens
aagttgatgaggcaa

SEQ ID NO: 1395293 - DNA, 15 bp, Homo sapiens
gaagttgatgaggca

SEQ ID NO: 1395294 - DNA, 15 bp, Homo sapiens
tgaagttgatgaggc

SEQ ID NO: 1395295 - DNA, 15 bp, Homo sapiens
ttgaagttgatgagg

SEQ ID NO: 1395296 - DNA, 15 bp, Homo sapiens
tttgaagttgatgag

SEQ ID NO: 1395297 - DNA, 15 bp, Homo sapiens
atttgaagttgatga

SEQ ID NO: 1395298 - DNA, 15 bp, Homo sapiens
aatttgaagttgatg

SEQ ID NO: 1395299 - DNA, 15 bp, Homo sapiens
taatttgaagttgat

SEQ ID NO: 1395300 - DNA, 15 bp, Homo sapiens
ctaatttgaagttga

SEQ ID NO: 1395301 - DNA, 15 bp, Homo sapiens
gctaatttgaagttg

SEQ ID NO: 1395302 - DNA, 15 bp, Homo sapiens
ggctaatttgaagtt

SEQ ID NO: 1395303 - DNA, 15 bp, Homo sapiens
gggctaatttgaagt

SEQ ID NO: 1395304 - DNA, 15 bp, Homo sapiens
ggggctaatttgaag

SEQ ID NO: 1395305 - DNA, 15 bp, Homo sapiens
gggggctaatttgaa

SEQ ID NO: 1395306 - DNA, 15 bp, Homo sapiens
ggggggctaatttga

SEQ ID NO: 1395307 - DNA, 15 bp, Homo sapiens
tggggggctaatttg

SEQ ID NO: 1395308 - DNA, 15 bp, Homo sapiens
gtggggggctaattt

SEQ ID NO: 1395309 - DNA, 15 bp, Homo sapiens
agtggggggctaatt

SEQ ID NO: 1395310 - DNA, 15 bp, Homo sapiens
cagtggggggctaat

SEQ ID NO: 1395311 - DNA, 15 bp, Homo sapiens
ccagtggggggctaa

SEQ ID NO: 1395312 - DNA, 15 bp, Homo sapiens
accagtggggggcta

SEQ ID NO: 1395313 - DNA, 15 bp, Homo sapiens
gaccagtggggggct

SEQ ID NO: 1395314 - DNA, 15 bp, Homo sapiens
agaccagtggggggc

SEQ ID NO: 1395315 - DNA, 15 bp, Homo sapiens
tagaccagtgggggg

SEQ ID NO: 1395316 - DNA, 15 bp, Homo sapiens
atagaccagtggggg

SEQ ID NO: 1395317 - DNA, 15 bp, Homo sapiens
aatagaccagtgggg

SEQ ID NO: 1395318 - DNA, 15 bp, Homo sapiens
taatagaccagtggg

SEQ ID NO: 1395319 - DNA, 15 bp, Homo sapiens
ttaatagaccagtgg

SEQ ID NO: 1395320 - DNA, 15 bp, Homo sapiens
gttaatagaccagtg

SEQ ID NO: 1395321 - DNA, 15 bp, Homo sapiens
agttaatagaccagt

SEQ ID NO: 1395322 - DNA, 15 bp, Homo sapiens
aagttaatagaccag

SEQ ID NO: 1395323 - DNA, 15 bp, Homo sapiens
aaagttaatagacca

SEQ ID NO: 1395324 - DNA, 15 bp, Homo sapiens
caaagttaatagacc

SEQ ID NO: 1395325 - DNA, 15 bp, Homo sapiens
tcaaagttaatagac

SEQ ID NO: 1395326 - DNA, 15 bp, Homo sapiens
ctcaaagttaataga

SEQ ID NO: 1395327 - DNA, 15 bp, Homo sapiens
actcaaagttaatag

SEQ ID NO: 1395328 - DNA, 15 bp, Homo sapiens
aactcaaagttaata

SEQ ID NO: 1395329 - DNA, 15 bp, Homo sapiens
caactcaaagttaat

SEQ ID NO: 1395330 - DNA, 15 bp, Homo sapiens
gcaactcaaagttaa

SEQ ID NO: 1395331 - DNA, 15 bp, Homo sapiens
ggcaactcaaagtta

SEQ ID NO: 1395332 - DNA, 15 bp, Homo sapiens
tggcaactcaaagtt

SEQ ID NO: 1395333 - DNA, 15 bp, Homo sapiens
atggcaactcaaagt

SEQ ID NO: 1395334 - DNA, 15 bp, Homo sapiens
gatggcaactcaaag

SEQ ID NO: 1395335 - DNA, 15 bp, Homo sapiens
agatggcaactcaaa

SEQ ID NO: 1395336 - DNA, 15 bp, Homo sapiens
gagatggcaactcaa

SEQ ID NO: 1395337 - DNA, 15 bp, Homo sapiens
tgagatggcaactca

SEQ ID NO: 1395338 - DNA, 15 bp, Homo sapiens
ttgagatggcaactc

SEQ ID NO: 1395339 - DNA, 15 bp, Homo sapiens
attgagatggcaact

SEQ ID NO: 1395340 - DNA, 15 bp, Homo sapiens
cattgagatggcaac

SEQ ID NO: 1395341 - DNA, 15 bp, Homo sapiens
ccattgagatggcaa

SEQ ID NO: 1395342 - DNA, 15 bp, Homo sapiens
accattgagatggca

SEQ ID NO: 1395343 - DNA, 15 bp, Homo sapiens
taccattgagatggc

SEQ ID NO: 1395344 - DNA, 15 bp, Homo sapiens
gtaccattgagatgg

SEQ ID NO: 1395345 - DNA, 15 bp, Homo sapiens
cgtaccattgagatg

SEQ ID NO: 1395346 - DNA, 15 bp, Homo sapiens
acgtaccattgagat

SEQ ID NO: 1395347 - DNA, 15 bp, Homo sapiens
aacgtaccattgaga

SEQ ID NO: 1395348 - DNA, 15 bp, Homo sapiens
aaacgtaccattgag

SEQ ID NO: 1395349 - DNA, 15 bp, Homo sapiens
caaacgtaccattga

SEQ ID NO: 1395350 - DNA, 15 bp, Homo sapiens
gcaaacgtaccattg

SEQ ID NO: 1395351 - DNA, 15 bp, Homo sapiens
ggcaaacgtaccatt

SEQ ID NO: 1395352 - DNA, 15 bp, Homo sapiens
aggcaaacgtaccat

SEQ ID NO: 1395353 - DNA, 15 bp, Homo sapiens
taggcaaacgtacca

SEQ ID NO: 1395354 - DNA, 15 bp, Homo sapiens
ataggcaaacgtacc

SEQ ID NO: 1395355 - DNA, 15 bp, Homo sapiens
aataggcaaacgtac

SEQ ID NO: 1395356 - DNA, 15 bp, Homo sapiens
aaataggcaaacgta

SEQ ID NO: 1395357 - DNA, 15 bp, Homo sapiens
aaaataggcaaacgt

SEQ ID NO: 1395358 - DNA, 15 bp, Homo sapiens
caaaataggcaaacg

SEQ ID NO: 1395359 - DNA, 15 bp, Homo sapiens
acaaaataggcaaac

SEQ ID NO: 1395360 - DNA, 15 bp, Homo sapiens
aacaaaataggcaaa

SEQ ID NO: 1395361 - DNA, 15 bp, Homo sapiens
gaacaaaataggcaa

SEQ ID NO: 1395362 - DNA, 15 bp, Homo sapiens
tgaacaaaataggca

SEQ ID NO: 1395363 - DNA, 15 bp, Homo sapiens
ctgaacaaaataggc

SEQ ID NO: 1395364 - DNA, 15 bp, Homo sapiens
cctgaacaaaatagg

SEQ ID NO: 1395365 - DNA, 15 bp, Homo sapiens
gcctgaacaaaatag

SEQ ID NO: 1395366 - DNA, 15 bp, Homo sapiens
tgcctgaacaaaata

SEQ ID NO: 1395367 - DNA, 15 bp, Homo sapiens
ctgcctgaacaaaat

SEQ ID NO: 1395368 - DNA, 15 bp, Homo sapiens
cctgcctgaacaaaa

SEQ ID NO: 1395369 - DNA, 15 bp, Homo sapiens
acctgcctgaacaaa

SEQ ID NO: 1395370 - DNA, 15 bp, Homo sapiens
cacctgcctgaacaa

SEQ ID NO: 1395371 - DNA, 15 bp, Homo sapiens
tcacctgcctgaaca

SEQ ID NO: 1395372 - DNA, 15 bp, Homo sapiens
gtcacctgcctgaac

SEQ ID NO: 1395373 - DNA, 15 bp, Homo sapiens
agtcacctgcctgaa

SEQ ID NO: 1395374 - DNA, 15 bp, Homo sapiens
tagtcacctgcctga

SEQ ID NO: 1395375 - DNA, 15 bp, Homo sapiens
atagtcacctgcctg

SEQ ID NO: 1395376 - DNA, 15 bp, Homo sapiens
catagtcacctgcct

SEQ ID NO: 1395377 - DNA, 15 bp, Homo sapiens
tcatagtcacctgcc

SEQ ID NO: 1395378 - DNA, 15 bp, Homo sapiens
gtcatagtcacctgc

SEQ ID NO: 1395379 - DNA, 15 bp, Homo sapiens
tgtcatagtcacctg

SEQ ID NO: 1395380 - DNA, 15 bp, Homo sapiens
atgtcatagtcacct

SEQ ID NO: 1395381 - DNA, 15 bp, Homo sapiens
tatgtcatagtcacc

SEQ ID NO: 1395382 - DNA, 15 bp, Homo sapiens
atatgtcatagtcac

SEQ ID NO: 1395383 - DNA, 15 bp, Homo sapiens
tatatgtcatagtca

SEQ ID NO: 1395384 - DNA, 15 bp, Homo sapiens
ctatatgtcatagtc

SEQ ID NO: 1395385 - DNA, 15 bp, Homo sapiens
tctatatgtcatagt

SEQ ID NO: 1395386 - DNA, 15 bp, Homo sapiens
gtctatatgtcatag

SEQ ID NO: 1395387 - DNA, 15 bp, Homo sapiens
agtctatatgtcata

SEQ ID NO: 1395388 - DNA, 15 bp, Homo sapiens
aagtctatatgtcat

SEQ ID NO: 1395389 - DNA, 15 bp, Homo sapiens
aaagtctatatgtca

SEQ ID NO: 1395390 - DNA, 15 bp, Homo sapiens
aaaagtctatatgtc

SEQ ID NO: 1395391 - DNA, 15 bp, Homo sapiens
gaaaagtctatatgt

SEQ ID NO: 1395392 - DNA, 15 bp, Homo sapiens
tgaaaagtctatatg

SEQ ID NO: 1395393 - DNA, 15 bp, Homo sapiens
atgaaaagtctatat

SEQ ID NO: 1395394 - DNA, 15 bp, Homo sapiens
tatgaaaagtctata

SEQ ID NO: 1395395 - DNA, 15 bp, Homo sapiens
ttatgaaaagtctat

SEQ ID NO: 1395396 - DNA, 15 bp, Homo sapiens
cttatgaaaagtcta

SEQ ID NO: 1395397 - DNA, 15 bp, Homo sapiens
gcttatgaaaagtct

SEQ ID NO: 1395398 - DNA, 15 bp, Homo sapiens
tgcttatgaaaagtc

SEQ ID NO: 1395399 - DNA, 15 bp, Homo sapiens
atgcttatgaaaagt

SEQ ID NO: 1395400 - DNA, 15 bp, Homo sapiens
gatgcttatgaaaag

SEQ ID NO: 1395401 - DNA, 15 bp, Homo sapiens
ggatgcttatgaaaa

SEQ ID NO: 1395402 - DNA, 15 bp, Homo sapiens
tggatgcttatgaaa

SEQ ID NO: 1395403 - DNA, 15 bp, Homo sapiens
ttggatgcttatgaa

SEQ ID NO: 1395404 - DNA, 15 bp, Homo sapiens
cttggatgcttatga

SEQ ID NO: 1395405 - DNA, 15 bp, Homo sapiens
ccttggatgcttatg

SEQ ID NO: 1395406 - DNA, 15 bp, Homo sapiens
tccttggatgcttat

SEQ ID NO: 1395407 - DNA, 15 bp, Homo sapiens
atccttggatgctta

SEQ ID NO: 1395408 - DNA, 15 bp, Homo sapiens
catccttggatgctt

SEQ ID NO: 1395409 - DNA, 15 bp, Homo sapiens
gcatccttggatgct

SEQ ID NO: 1395410 - DNA, 15 bp, Homo sapiens
ggcatccttggatgc

SEQ ID NO: 1395411 - DNA, 15 bp, Homo sapiens
aggcatccttggatg

SEQ ID NO: 1395412 - DNA, 15 bp, Homo sapiens
caggcatccttggat

SEQ ID NO: 1395413 - DNA, 15 bp, Homo sapiens
acaggcatccttgga

SEQ ID NO: 1395414 - DNA, 15 bp, Homo sapiens
gacaggcatccttgg

SEQ ID NO: 1395415 - DNA, 15 bp, Homo sapiens
tgacaggcatccttg

SEQ ID NO: 1395416 - DNA, 15 bp, Homo sapiens
ctgacaggcatcctt

SEQ ID NO: 1395417 - DNA, 15 bp, Homo sapiens
tctgacaggcatcct

SEQ ID NO: 1395418 - DNA, 15 bp, Homo sapiens
atctgacaggcatcc

SEQ ID NO: 1395419 - DNA, 15 bp, Homo sapiens
catctgacaggcatc

SEQ ID NO: 1395420 - DNA, 15 bp, Homo sapiens
tcatctgacaggcat

SEQ ID NO: 1395421 - DNA, 15 bp, Homo sapiens
ttcatctgacaggca

SEQ ID NO: 1395422 - DNA, 15 bp, Homo sapiens
tttcatctgacaggc

SEQ ID NO: 1395423 - DNA, 15 bp, Homo sapiens
ctttcatctgacagg

SEQ ID NO: 1395424 - DNA, 15 bp, Homo sapiens
tctttcatctgacag

SEQ ID NO: 1395425 - DNA, 15 bp, Homo sapiens
ctctttcatctgaca

SEQ ID NO: 1395426 - DNA, 15 bp, Homo sapiens
gctctttcatctgac

SEQ ID NO: 1395427 - DNA, 15 bp, Homo sapiens
tgctctttcatctga

SEQ ID NO: 1395428 - DNA, 15 bp, Homo sapiens
atgctctttcatctg

SEQ ID NO: 1395429 - DNA, 15 bp, Homo sapiens
tatgctctttcatct

SEQ ID NO: 1395430 - DNA, 15 bp, Homo sapiens
ctatgctctttcatc

SEQ ID NO: 1395431 - DNA, 15 bp, Homo sapiens
tctatgctctttcat

SEQ ID NO: 1395432 - DNA, 15 bp, Homo sapiens
atctatgctctttca

SEQ ID NO: 1395433 - DNA, 15 bp, Homo sapiens
catctatgctctttc

SEQ ID NO: 1395434 - DNA, 15 bp, Homo sapiens
ccatctatgctcttt

SEQ ID NO: 1395435 - DNA, 15 bp, Homo sapiens
gccatctatgctctt

SEQ ID NO: 1395436 - DNA, 15 bp, Homo sapiens
agccatctatgctct

SEQ ID NO: 1395437 - DNA, 15 bp, Homo sapiens
aagccatctatgctc

SEQ ID NO: 1395438 - DNA, 15 bp, Homo sapiens
taagccatctatgct

SEQ ID NO: 1395439 - DNA, 15 bp, Homo sapiens
ttaagccatctatgc

SEQ ID NO: 1395440 - DNA, 15 bp, Homo sapiens
gttaagccatctatg

SEQ ID NO: 1395441 - DNA, 15 bp, Homo sapiens
agttaagccatctat

SEQ ID NO: 1395442 - DNA, 15 bp, Homo sapiens
cagttaagccatcta

SEQ ID NO: 1395443 - DNA, 15 bp, Homo sapiens
gcagttaagccatct

SEQ ID NO: 1395444 - DNA, 15 bp, Homo sapiens
agcagttaagccatc

SEQ ID NO: 1395445 - DNA, 15 bp, Homo sapiens
aagcagttaagccat

SEQ ID NO: 1395446 - DNA, 15 bp, Homo sapiens
aaagcagttaagcca

SEQ ID NO: 1395447 - DNA, 15 bp, Homo sapiens
aaaagcagttaagcc

SEQ ID NO: 1395448 - DNA, 15 bp, Homo sapiens
caaaagcagttaagc

SEQ ID NO: 1395449 - DNA, 15 bp, Homo sapiens
tcaaaagcagttaag

SEQ ID NO: 1395450 - DNA, 15 bp, Homo sapiens
ctcaaaagcagttaa

SEQ ID NO: 1395451 - DNA, 15 bp, Homo sapiens
actcaaaagcagtta

SEQ ID NO: 1395452 - DNA, 15 bp, Homo sapiens
aactcaaaagcagtt

SEQ ID NO: 1395453 - DNA, 15 bp, Homo sapiens
gaactcaaaagcagt

SEQ ID NO: 1395454 - DNA, 15 bp, Homo sapiens
tgaactcaaaagcag

SEQ ID NO: 1395455 - DNA, 15 bp, Homo sapiens
atgaactcaaaagca

SEQ ID NO: 1395456 - DNA, 15 bp, Homo sapiens
tatgaactcaaaagc

SEQ ID NO: 1395457 - DNA, 15 bp, Homo sapiens
ttatgaactcaaaag

SEQ ID NO: 1395458 - DNA, 15 bp, Homo sapiens
tttatgaactcaaaa

SEQ ID NO: 1395459 - DNA, 15 bp, Homo sapiens
gtttatgaactcaaa

SEQ ID NO: 1395460 - DNA, 15 bp, Homo sapiens
agtttatgaactcaa

SEQ ID NO: 1395461 - DNA, 15 bp, Homo sapiens
gagtttatgaactca

SEQ ID NO: 1395462 - DNA, 15 bp, Homo sapiens
agagtttatgaactc

SEQ ID NO: 1395463 - DNA, 15 bp, Homo sapiens
aagagtttatgaact

SEQ ID NO: 1395464 - DNA, 15 bp, Homo sapiens
taagagtttatgaac

SEQ ID NO: 1395465 - DNA, 15 bp, Homo sapiens
gtaagagtttatgaa

SEQ ID NO: 1395466 - DNA, 15 bp, Homo sapiens
cgtaagagtttatga

SEQ ID NO: 1395467 - DNA, 15 bp, Homo sapiens
gcgtaagagtttatg

SEQ ID NO: 1395468 - DNA, 15 bp, Homo sapiens
agcgtaagagtttat

SEQ ID NO: 1395469 - DNA, 15 bp, Homo sapiens
aagcgtaagagttta

SEQ ID NO: 1395470 - DNA, 15 bp, Homo sapiens
gaagcgtaagagttt

SEQ ID NO: 1395471 - DNA, 15 bp, Homo sapiens
ggaagcgtaagagtt

SEQ ID NO: 1395472 - DNA, 15 bp, Homo sapiens
gggaagcgtaagagt

SEQ ID NO: 1395473 - DNA, 15 bp, Homo sapiens
ggggaagcgtaagag

SEQ ID NO: 1395474 - DNA, 15 bp, Homo sapiens
tggggaagcgtaaga

SEQ ID NO: 1395475 - DNA, 15 bp, Homo sapiens
ttggggaagcgtaag

SEQ ID NO: 1395476 - DNA, 15 bp, Homo sapiens
attggggaagcgtaa

SEQ ID NO: 1395477 - DNA, 15 bp, Homo sapiens
tattggggaagcgta

SEQ ID NO: 1395478 - DNA, 15 bp, Homo sapiens
atattggggaagcgt

SEQ ID NO: 1395479 - DNA, 15 bp, Homo sapiens
tatattggggaagcg

SEQ ID NO: 1395480 - DNA, 15 bp, Homo sapiens
ttatattggggaagc

SEQ ID NO: 1395481 - DNA, 15 bp, Homo sapiens
attatattggggaag

SEQ ID NO: 1395482 - DNA, 15 bp, Homo sapiens
gattatattggggaa

SEQ ID NO: 1395483 - DNA, 15 bp, Homo sapiens
ggattatattgggga

SEQ ID NO: 1395484 - DNA, 15 bp, Homo sapiens
gggattatattgggg

SEQ ID NO: 1395485 - DNA, 15 bp, Homo sapiens
agggattatattggg

SEQ ID NO: 1395486 - DNA, 15 bp, Homo sapiens
gagggattatattgg

SEQ ID NO: 1395487 - DNA, 15 bp, Homo sapiens
agagggattatattg

SEQ ID NO: 1395488 - DNA, 15 bp, Homo sapiens
cagagggattatatt

SEQ ID NO: 1395489 - DNA, 15 bp, Homo sapiens
acagagggattatat

SEQ ID NO: 1395490 - DNA, 15 bp, Homo sapiens
tacagagggattata

SEQ ID NO: 1395491 - DNA, 15 bp, Homo sapiens
ctacagagggattat

SEQ ID NO: 1395492 - DNA, 15 bp, Homo sapiens
gctacagagggatta

SEQ ID NO: 1395493 - DNA, 15 bp, Homo sapiens
tgctacagagggatt

SEQ ID NO: 1395494 - DNA, 15 bp, Homo sapiens
atgctacagagggat

SEQ ID NO: 1395495 - DNA, 15 bp, Homo sapiens
gatgctacagaggga

SEQ ID NO: 1395496 - DNA, 15 bp, Homo sapiens
cgatgctacagaggg

SEQ ID NO: 1395497 - DNA, 15 bp, Homo sapiens
tcgatgctacagagg

SEQ ID NO: 1395498 - DNA, 15 bp, Homo sapiens
ttcgatgctacagag

SEQ ID NO: 1395499 - DNA, 15 bp, Homo sapiens
tttcgatgctacaga

SEQ ID NO: 1395500 - DNA, 15 bp, Homo sapiens
ctttcgatgctacag

SEQ ID NO: 1395501 - DNA, 15 bp, Homo sapiens
gctttcgatgctaca

SEQ ID NO: 1395502 - DNA, 15 bp, Homo sapiens
tgctttcgatgctac

SEQ ID NO: 1395503 - DNA, 15 bp, Homo sapiens
ctgctttcgatgcta

SEQ ID NO: 1395504 - DNA, 15 bp, Homo sapiens
tctgctttcgatgct

SEQ ID NO: 1395505 - DNA, 15 bp, Homo sapiens
ctctgctttcgatgc

SEQ ID NO: 1395506 - DNA, 15 bp, Homo sapiens
tctctgctttcgatg

SEQ ID NO: 1395507 - DNA, 15 bp, Homo sapiens
ttctctgctttcgat

SEQ ID NO: 1395508 - DNA, 15 bp, Homo sapiens
gttctctgctttcga

SEQ ID NO: 1395509 - DNA, 15 bp, Homo sapiens
tgttctctgctttcg

SEQ ID NO: 1395510 - DNA, 15 bp, Homo sapiens
ctgttctctgctttc

SEQ ID NO: 1395511 - DNA, 15 bp, Homo sapiens
cctgttctctgcttt

SEQ ID NO: 1395512 - DNA, 15 bp, Homo sapiens
aagaattaactcata

SEQ ID NO: 1395513 - DNA, 15 bp, Homo sapiens
aaagaattaactcat

SEQ ID NO: 1395514 - DNA, 15 bp, Homo sapiens
caaagaattaactca

SEQ ID NO: 1395515 - DNA, 15 bp, Homo sapiens
ccaaagaattaactc

SEQ ID NO: 1395516 - DNA, 15 bp, Homo sapiens
accaaagaattaact

SEQ ID NO: 1395517 - DNA, 15 bp, Homo sapiens
taccaaagaattaac

SEQ ID NO: 1395518 - DNA, 15 bp, Homo sapiens
ataccaaagaattaa

SEQ ID NO: 1395519 - DNA, 15 bp, Homo sapiens
aataccaaagaatta

SEQ ID NO: 1395520 - DNA, 15 bp, Homo sapiens
taataccaaagaatt

SEQ ID NO: 1395521 - DNA, 15 bp, Homo sapiens
ttaataccaaagaat

SEQ ID NO: 1395522 - DNA, 15 bp, Homo sapiens
gttaataccaaagaa

SEQ ID NO: 1395523 - DNA, 15 bp, Homo sapiens
tgttaataccaaaga

SEQ ID NO: 1395524 - DNA, 15 bp, Homo sapiens
atgttaataccaaag

SEQ ID NO: 1395525 - DNA, 15 bp, Homo sapiens
aatgttaataccaaa

SEQ ID NO: 1395526 - DNA, 15 bp, Homo sapiens
aaatgttaataccaa

SEQ ID NO: 1395527 - DNA, 15 bp, Homo sapiens
taaatgttaatacca

SEQ ID NO: 1395528 - DNA, 15 bp, Homo sapiens
ataaatgttaatacc

SEQ ID NO: 1395529 - DNA, 15 bp, Homo sapiens
cataaatgttaatac

SEQ ID NO: 1395530 - DNA, 15 bp, Homo sapiens
acataaatgttaata

SEQ ID NO: 1395531 - DNA, 15 bp, Homo sapiens
cacataaatgttaat

SEQ ID NO: 1395532 - DNA, 15 bp, Homo sapiens
tcacataaatgttaa

SEQ ID NO: 1395533 - DNA, 15 bp, Homo sapiens
ttcacataaatgtta

SEQ ID NO: 1395534 - DNA, 15 bp, Homo sapiens
attcacataaatgtt

SEQ ID NO: 1395535 - DNA, 15 bp, Homo sapiens
cattcacataaatgt

SEQ ID NO: 1395536 - DNA, 15 bp, Homo sapiens
tcattcacataaatg

SEQ ID NO: 1395537 - DNA, 15 bp, Homo sapiens
atcattcacataaat

SEQ ID NO: 1395538 - DNA, 15 bp, Homo sapiens
tatcattcacataaa

SEQ ID NO: 1395539 - DNA, 15 bp, Homo sapiens
ttatcattcacataa

SEQ ID NO: 1395540 - DNA, 15 bp, Homo sapiens
gttatcattcacata

SEQ ID NO: 1395541 - DNA, 15 bp, Homo sapiens
agttatcattcacat

SEQ ID NO: 1395542 - DNA, 15 bp, Homo sapiens
tagttatcattcaca

SEQ ID NO: 1395543 - DNA, 15 bp, Homo sapiens
atagttatcattcac

SEQ ID NO: 1395544 - DNA, 15 bp, Homo sapiens
catagttatcattca

SEQ ID NO: 1395545 - DNA, 15 bp, Homo sapiens
ccatagttatcattc

SEQ ID NO: 1395546 - DNA, 15 bp, Homo sapiens
cccatagttatcatt

SEQ ID NO: 1395547 - DNA, 15 bp, Homo sapiens
tcccatagttatcat

SEQ ID NO: 1395548 - DNA, 15 bp, Homo sapiens
atcccatagttatca

SEQ ID NO: 1395549 - DNA, 15 bp, Homo sapiens
gatcccatagttatc

SEQ ID NO: 1395550 - DNA, 15 bp, Homo sapiens
tgatcccatagttat

SEQ ID NO: 1395551 - DNA, 15 bp, Homo sapiens
atgatcccatagtta

SEQ ID NO: 1395552 - DNA, 15 bp, Homo sapiens
aatgatcccatagtt

SEQ ID NO: 1395553 - DNA, 15 bp, Homo sapiens
aaatgatcccatagt

SEQ ID NO: 1395554 - DNA, 15 bp, Homo sapiens
aaaatgatcccatag

SEQ ID NO: 1395555 - DNA, 15 bp, Homo sapiens
gaaaatgatcccata

SEQ ID NO: 1395556 - DNA, 15 bp, Homo sapiens
tgaaaatgatcccat

SEQ ID NO: 1395557 - DNA, 15 bp, Homo sapiens
atgaaaatgatccca

SEQ ID NO: 1395558 - DNA, 15 bp, Homo sapiens
aatgaaaatgatccc

SEQ ID NO: 1395559 - DNA, 15 bp, Homo sapiens
gaatgaaaatgatcc

SEQ ID NO: 1395560 - DNA, 15 bp, Homo sapiens
tgaatgaaaatgatc

SEQ ID NO: 1395561 - DNA, 15 bp, Homo sapiens
ttgaatgaaaatgat

SEQ ID NO: 1395562 - DNA, 15 bp, Homo sapiens
tttgaatgaaaatga

SEQ ID NO: 1395563 - DNA, 15 bp, Homo sapiens
atttgaatgaaaatg

SEQ ID NO: 1395564 - DNA, 15 bp, Homo sapiens
aatttgaatgaaaat

SEQ ID NO: 1395565 - DNA, 15 bp, Homo sapiens
taatttgaatgaaaa

SEQ ID NO: 1395566 - DNA, 15 bp, Homo sapiens
ataatttgaatgaaa

SEQ ID NO: 1395567 - DNA, 15 bp, Homo sapiens
cataatttgaatgaa

SEQ ID NO: 1395568 - DNA, 15 bp, Homo sapiens
tcataatttgaatga

SEQ ID NO: 1395569 - DNA, 15 bp, Homo sapiens
atcataatttgaatg

SEQ ID NO: 1395570 - DNA, 15 bp, Homo sapiens
tatcataatttgaat

SEQ ID NO: 1395571 - DNA, 15 bp, Homo sapiens
ctatcataatttgaa

SEQ ID NO: 1395572 - DNA, 15 bp, Homo sapiens
tctatcataatttga

SEQ ID NO: 1395573 - DNA, 15 bp, Homo sapiens
ttctatcataatttg

SEQ ID NO: 1395574 - DNA, 15 bp, Homo sapiens
attctatcataattt

SEQ ID NO: 1395575 - DNA, 15 bp, Homo sapiens
aattctatcataatt

SEQ ID NO: 1395576 - DNA, 15 bp, Homo sapiens
aaattctatcataat

SEQ ID NO: 1395577 - DNA, 15 bp, Homo sapiens
aaaattctatcataa

SEQ ID NO: 1395578 - DNA, 15 bp, Homo sapiens
taaaattctatcata

SEQ ID NO: 1395579 - DNA, 15 bp, Homo sapiens
ttaaaattctatcat

SEQ ID NO: 1395580 - DNA, 15 bp, Homo sapiens
cttaaaattctatca

SEQ ID NO: 1395581 - DNA, 15 bp, Homo sapiens
tcttaaaattctatc

SEQ ID NO: 1395582 - DNA, 15 bp, Homo sapiens
atcttaaaattctat

SEQ ID NO: 1395583 - DNA, 15 bp, Homo sapiens
gatcttaaaattcta

SEQ ID NO: 1395584 - DNA, 15 bp, Homo sapiens
agatcttaaaattct

SEQ ID NO: 1395585 - DNA, 15 bp, Homo sapiens
aagatcttaaaattc

SEQ ID NO: 1395586 - DNA, 15 bp, Homo sapiens
taagatcttaaaatt

SEQ ID NO: 1395587 - DNA, 15 bp, Homo sapiens
ctaagatcttaaaat

SEQ ID NO: 1395588 - DNA, 15 bp, Homo sapiens
gctaagatcttaaaa

SEQ ID NO: 1395589 - DNA, 15 bp, Homo sapiens
tgctaagatcttaaa

SEQ ID NO: 1395590 - DNA, 15 bp, Homo sapiens
ttgctaagatcttaa

SEQ ID NO: 1395591 - DNA, 15 bp, Homo sapiens
tttgctaagatctta

SEQ ID NO: 1395592 - DNA, 15 bp, Homo sapiens
ttttgctaagatctt

SEQ ID NO: 1395593 - DNA, 15 bp, Homo sapiens
tttttgctaagatct

SEQ ID NO: 1395594 - DNA, 15 bp, Homo sapiens
ctttttgctaagatc

SEQ ID NO: 1395595 - DNA, 15 bp, Homo sapiens
gctttttgctaagat

SEQ ID NO: 1395596 - DNA, 15 bp, Homo sapiens
tgctttttgctaaga

SEQ ID NO: 1395597 - DNA, 15 bp, Homo sapiens
gtgctttttgctaag

SEQ ID NO: 1395598 - DNA, 15 bp, Homo sapiens
agtgctttttgctaa

SEQ ID NO: 1395599 - DNA, 15 bp, Homo sapiens
aagtgctttttgcta

SEQ ID NO: 1395600 - DNA, 15 bp, Homo sapiens
aaagtgctttttgct

SEQ ID NO: 1395601 - DNA, 15 bp, Homo sapiens
taaagtgctttttgc

SEQ ID NO: 1395602 - DNA, 15 bp, Homo sapiens
ctaaagtgctttttg

SEQ ID NO: 1395603 - DNA, 15 bp, Homo sapiens
gctaaagtgcttttt

SEQ ID NO: 1395604 - DNA, 15 bp, Homo sapiens
tgctaaagtgctttt

SEQ ID NO: 1395605 - DNA, 15 bp, Homo sapiens
ctgctaaagtgcttt

SEQ ID NO: 1395606 - DNA, 15 bp, Homo sapiens
gctgctaaagtgctt

SEQ ID NO: 1395607 - DNA, 15 bp, Homo sapiens
ggctgctaaagtgct

SEQ ID NO: 1395608 - DNA, 15 bp, Homo sapiens
tggctgctaaagtgc

SEQ ID NO: 1395609 - DNA, 15 bp, Homo sapiens
gtggctgctaaagtg

SEQ ID NO: 1395610 - DNA, 15 bp, Homo sapiens
ggtggctgctaaagt

SEQ ID NO: 1395611 - DNA, 15 bp, Homo sapiens
gggtggctgctaaag

SEQ ID NO: 1395612 - DNA, 15 bp, Homo sapiens
tgggtggctgctaaa

SEQ ID NO: 1395613 - DNA, 15 bp, Homo sapiens
ttgggtggctgctaa

SEQ ID NO: 1395614 - DNA, 15 bp, Homo sapiens
cttgggtggctgcta

SEQ ID NO: 1395615 - DNA, 15 bp, Homo sapiens
ccttgggtggctgct

SEQ ID NO: 1395616 - DNA, 15 bp, Homo sapiens
accttgggtggctgc

SEQ ID NO: 1395617 - DNA, 15 bp, Homo sapiens
taccttgggtggctg

SEQ ID NO: 1395618 - DNA, 15 bp, Homo sapiens
ctaccttgggtggct

SEQ ID NO: 1395619 - DNA, 15 bp, Homo sapiens
gctaccttgggtggc

SEQ ID NO: 1395620 - DNA, 15 bp, Homo sapiens
ggctaccttgggtgg

SEQ ID NO: 1395621 - DNA, 15 bp, Homo sapiens
aggctaccttgggtg

SEQ ID NO: 1395622 - DNA, 15 bp, Homo sapiens
gaggctaccttgggt

SEQ ID NO: 1395623 - DNA, 15 bp, Homo sapiens
agaggctaccttggg

SEQ ID NO: 1395624 - DNA, 15 bp, Homo sapiens
tagaggctaccttgg

SEQ ID NO: 1395625 - DNA, 15 bp, Homo sapiens
ttagaggctaccttg

SEQ ID NO: 1395626 - DNA, 15 bp, Homo sapiens
attagaggctacctt

SEQ ID NO: 1395627 - DNA, 15 bp, Homo sapiens
tattagaggctacct

SEQ ID NO: 1395628 - DNA, 15 bp, Homo sapiens
ctattagaggctacc

SEQ ID NO: 1395629 - DNA, 15 bp, Homo sapiens
cctattagaggctac

SEQ ID NO: 1395630 - DNA, 15 bp, Homo sapiens
gcctattagaggcta

SEQ ID NO: 1395631 - DNA, 15 bp, Homo sapiens
ggcctattagaggct

SEQ ID NO: 1395632 - DNA, 15 bp, Homo sapiens
tggcctattagaggc

SEQ ID NO: 1395633 - DNA, 15 bp, Homo sapiens
gtggcctattagagg

SEQ ID NO: 1395634 - DNA, 15 bp, Homo sapiens
tgtggcctattagag

SEQ ID NO: 1395635 - DNA, 15 bp, Homo sapiens
atgtggcctattaga

SEQ ID NO: 1395636 - DNA, 15 bp, Homo sapiens
gatgtggcctattag

SEQ ID NO: 1395637 - DNA, 15 bp, Homo sapiens
agatgtggcctatta

SEQ ID NO: 1395638 - DNA, 15 bp, Homo sapiens
gagatgtggcctatt

SEQ ID NO: 1395639 - DNA, 15 bp, Homo sapiens
agagatgtggcctat

SEQ ID NO: 1395640 - DNA, 15 bp, Homo sapiens
aagagatgtggccta

SEQ ID NO: 1395641 - DNA, 15 bp, Homo sapiens
gaagagatgtggcct

SEQ ID NO: 1395642 - DNA, 15 bp, Homo sapiens
tgaagagatgtggcc

SEQ ID NO: 1395643 - DNA, 15 bp, Homo sapiens
ctgaagagatgtggc

SEQ ID NO: 1395644 - DNA, 15 bp, Homo sapiens
gctgaagagatgtgg

SEQ ID NO: 1395645 - DNA, 15 bp, Homo sapiens
tgctgaagagatgtg

SEQ ID NO: 1395646 - DNA, 15 bp, Homo sapiens
ctgctgaagagatgt

SEQ ID NO: 1395647 - DNA, 15 bp, Homo sapiens
actgctgaagagatg

SEQ ID NO: 1395648 - DNA, 15 bp, Homo sapiens
aactgctgaagagat

SEQ ID NO: 1395649 - DNA, 15 bp, Homo sapiens
aaactgctgaagaga

SEQ ID NO: 1395650 - DNA, 15 bp, Homo sapiens
gaaactgctgaagag

SEQ ID NO: 1395651 - DNA, 15 bp, Homo sapiens
ggaaactgctgaaga

SEQ ID NO: 1395652 - DNA, 15 bp, Homo sapiens
gggaaactgctgaag

SEQ ID NO: 1395653 - DNA, 15 bp, Homo sapiens
agggaaactgctgaa

SEQ ID NO: 1395654 - DNA, 15 bp, Homo sapiens
cagggaaactgctga

SEQ ID NO: 1395655 - DNA, 15 bp, Homo sapiens
tcagggaaactgctg

SEQ ID NO: 1395656 - DNA, 15 bp, Homo sapiens
gtcagggaaactgct

SEQ ID NO: 1395657 - DNA, 15 bp, Homo sapiens
tgtcagggaaactgc

SEQ ID NO: 1395658 - DNA, 15 bp, Homo sapiens
ctgtcagggaaactg

SEQ ID NO: 1395659 - DNA, 15 bp, Homo sapiens
cctgtcagggaaact

SEQ ID NO: 1395660 - DNA, 15 bp, Homo sapiens
acctgtcagggaaac

SEQ ID NO: 1395661 - DNA, 15 bp, Homo sapiens
cacctgtcagggaaa

SEQ ID NO: 1395662 - DNA, 15 bp, Homo sapiens
tcacctgtcagggaa

SEQ ID NO: 1395663 - DNA, 15 bp, Homo sapiens
ctcacctgtcaggga

SEQ ID NO: 1395664 - DNA, 15 bp, Homo sapiens
gctcacctgtcaggg

SEQ ID NO: 1395665 - DNA, 15 bp, Homo sapiens
ggctcacctgtcagg

SEQ ID NO: 1395666 - DNA, 15 bp, Homo sapiens
tggctcacctgtcag

SEQ ID NO: 1395667 - DNA, 15 bp, Homo sapiens
ctggctcacctgtca

SEQ ID NO: 1395668 - DNA, 15 bp, Homo sapiens
actggctcacctgtc

SEQ ID NO: 1395669 - DNA, 15 bp, Homo sapiens
gactggctcacctgt

SEQ ID NO: 1395670 - DNA, 15 bp, Homo sapiens
agactggctcacctg

SEQ ID NO: 1395671 - DNA, 15 bp, Homo sapiens
gagactggctcacct

SEQ ID NO: 1395672 - DNA, 15 bp, Homo sapiens
ggagactggctcacc

SEQ ID NO: 1395673 - DNA, 15 bp, Homo sapiens
tggagactggctcac

SEQ ID NO: 1395674 - DNA, 15 bp, Homo sapiens
gtggagactggctca

SEQ ID NO: 1395675 - DNA, 15 bp, Homo sapiens
agtggagactggctc

SEQ ID NO: 1395676 - DNA, 15 bp, Homo sapiens
gagtggagactggct

SEQ ID NO: 1395677 - DNA, 15 bp, Homo sapiens
tgagtggagactggc

SEQ ID NO: 1395678 - DNA, 15 bp, Homo sapiens
ctgagtggagactgg

SEQ ID NO: 1395679 - DNA, 15 bp, Homo sapiens
tctgagtggagactg

SEQ ID NO: 1395680 - DNA, 15 bp, Homo sapiens
ctctgagtggagact

SEQ ID NO: 1395681 - DNA, 15 bp, Homo sapiens
tctctgagtggagac

SEQ ID NO: 1395682 - DNA, 15 bp, Homo sapiens
gtctctgagtggaga

SEQ ID NO: 1395683 - DNA, 15 bp, Homo sapiens
ggtctctgagtggag

SEQ ID NO: 1395684 - DNA, 15 bp, Homo sapiens
aggtctctgagtgga

SEQ ID NO: 1395685 - DNA, 15 bp, Homo sapiens
ggaggtctctgagtg

SEQ ID NO: 1395686 - DNA, 15 bp, Homo sapiens
tggaggtctctgagt

SEQ ID NO: 1395687 - DNA, 15 bp, Homo sapiens
atggaggtctctgag

SEQ ID NO: 1395688 - DNA, 15 bp, Homo sapiens
catggaggtctctga

SEQ ID NO: 1395689 - DNA, 15 bp, Homo sapiens
tcatggaggtctctg

SEQ ID NO: 1395690 - DNA, 15 bp, Homo sapiens
ctcatggaggtctct

SEQ ID NO: 1395691 - DNA, 15 bp, Homo sapiens
actcatggaggtctc

SEQ ID NO: 1395692 - DNA, 15 bp, Homo sapiens
tactcatggaggtct

SEQ ID NO: 1395693 - DNA, 15 bp, Homo sapiens
ctactcatggaggtc

SEQ ID NO: 1395694 - DNA, 15 bp, Homo sapiens
cctactcatggaggt

SEQ ID NO: 1395695 - DNA, 15 bp, Homo sapiens
gcctactcatggagg

SEQ ID NO: 1395696 - DNA, 15 bp, Homo sapiens
cgcctactcatggag

SEQ ID NO: 1395697 - DNA, 15 bp, Homo sapiens
gcgcctactcatgga

SEQ ID NO: 1395698 - DNA, 15 bp, Homo sapiens
agcgcctactcatgg

SEQ ID NO: 1395699 - DNA, 15 bp, Homo sapiens
cagcgcctactcatg

SEQ ID NO: 1395700 - DNA, 15 bp, Homo sapiens
gcagcgcctactcat

SEQ ID NO: 1395701 - DNA, 15 bp, Homo sapiens
agcagcgcctactca

SEQ ID NO: 1395702 - DNA, 15 bp, Homo sapiens
gagcagcgcctactc

SEQ ID NO: 1395703 - DNA, 15 bp, Homo sapiens
tgagcagcgcctact

SEQ ID NO: 1395704 - DNA, 15 bp, Homo sapiens
gtgagcagcgcctac

SEQ ID NO: 1395705 - DNA, 15 bp, Homo sapiens
tgtgagcagcgccta

SEQ ID NO: 1395706 - DNA, 15 bp, Homo sapiens
gtgtgagcagcgcct

SEQ ID NO: 1395707 - DNA, 15 bp, Homo sapiens
ggtgtgagcagcgcc

SEQ ID NO: 1395708 - DNA, 15 bp, Homo sapiens
aggtgtgagcagcgc

SEQ ID NO: 1395709 - DNA, 15 bp, Homo sapiens
taggtgtgagcagcg

SEQ ID NO: 1395710 - DNA, 15 bp, Homo sapiens
ttaggtgtgagcagc

SEQ ID NO: 1395711 - DNA, 15 bp, Homo sapiens
tttaggtgtgagcag

SEQ ID NO: 1395712 - DNA, 15 bp, Homo sapiens
ctttaggtgtgagca

SEQ ID NO: 1395713 - DNA, 15 bp, Homo sapiens
tctttaggtgtgagc

SEQ ID NO: 1395714 - DNA, 15 bp, Homo sapiens
gtctttaggtgtgag

SEQ ID NO: 1395715 - DNA, 15 bp, Homo sapiens
ggtctttaggtgtga

SEQ ID NO: 1395716 - DNA, 15 bp, Homo sapiens
tggtctttaggtgtg

SEQ ID NO: 1395717 - DNA, 15 bp, Homo sapiens
gtggtctttaggtgt

SEQ ID NO: 1395718 - DNA, 15 bp, Homo sapiens
tgtggtctttaggtg

SEQ ID NO: 1395719 - DNA, 15 bp, Homo sapiens
ctgtggtctttaggt

SEQ ID NO: 1395720 - DNA, 15 bp, Homo sapiens
gctgtggtctttagg

SEQ ID NO: 1395721 - DNA, 15 bp, Homo sapiens
agctgtggtctttag

SEQ ID NO: 1395722 - DNA, 15 bp, Homo sapiens
gagctgtggtcttta

SEQ ID NO: 1395723 - DNA, 15 bp, Homo sapiens
agagctgtggtcttt

SEQ ID NO: 1395724 - DNA, 15 bp, Homo sapiens
gagagctgtggtctt

SEQ ID NO: 1395725 - DNA, 15 bp, Homo sapiens
agagagctgtggtct

SEQ ID NO: 1395726 - DNA, 15 bp, Homo sapiens
cagagagctgtggtc

SEQ ID NO: 1395727 - DNA, 15 bp, Homo sapiens
gcagagagctgtggt

SEQ ID NO: 1395728 - DNA, 15 bp, Homo sapiens
agcagagagctgtgg

SEQ ID NO: 1395729 - DNA, 15 bp, Homo sapiens
aagcagagagctgtg

SEQ ID NO: 1395730 - DNA, 15 bp, Homo sapiens
gaagcagagagctgt

SEQ ID NO: 1395731 - DNA, 15 bp, Homo sapiens
agaagcagagagctg

SEQ ID NO: 1395732 - DNA, 15 bp, Homo sapiens
gagaagcagagagct

SEQ ID NO: 1395733 - DNA, 15 bp, Homo sapiens
agagaagcagagagc

SEQ ID NO: 1395734 - DNA, 15 bp, Homo sapiens
aagagaagcagagag

SEQ ID NO: 1395735 - DNA, 15 bp, Homo sapiens
gaagagaagcagaga

SEQ ID NO: 1395736 - DNA, 15 bp, Homo sapiens
tgaagagaagcagag

SEQ ID NO: 1395737 - DNA, 15 bp, Homo sapiens
atgaagagaagcaga

SEQ ID NO: 1395738 - DNA, 15 bp, Homo sapiens
tatgaagagaagcag

SEQ ID NO: 1395739 - DNA, 15 bp, Homo sapiens
atatgaagagaagca

SEQ ID NO: 1395740 - DNA, 15 bp, Homo sapiens
catatgaagagaagc

SEQ ID NO: 1395741 - DNA, 15 bp, Homo sapiens
gcatatgaagagaag

SEQ ID NO: 1395742 - DNA, 15 bp, Homo sapiens
ggcatatgaagagaa

SEQ ID NO: 1395743 - DNA, 15 bp, Homo sapiens
gggcatatgaagaga

SEQ ID NO: 1395744 - DNA, 15 bp, Homo sapiens
agggcatatgaagag

SEQ ID NO: 1395745 - DNA, 15 bp, Homo sapiens
cagggcatatgaaga

SEQ ID NO: 1395746 - DNA, 15 bp, Homo sapiens
tcagggcatatgaag

SEQ ID NO: 1395747 - DNA, 15 bp, Homo sapiens
gtcagggcatatgaa

SEQ ID NO: 1395748 - DNA, 15 bp, Homo sapiens
agtcagggcatatga

SEQ ID NO: 1395749 - DNA, 15 bp, Homo sapiens
aagtcagggcatatg

SEQ ID NO: 1395750 - DNA, 15 bp, Homo sapiens
aaagtcagggcatat

SEQ ID NO: 1395751 - DNA, 15 bp, Homo sapiens
caaagtcagggcata

SEQ ID NO: 1395752 - DNA, 15 bp, Homo sapiens
ccaaagtcagggcat

SEQ ID NO: 1395753 - DNA, 15 bp, Homo sapiens
tccaaagtcagggca

SEQ ID NO: 1395754 - DNA, 15 bp, Homo sapiens
atccaaagtcagggc

SEQ ID NO: 1395755 - DNA, 15 bp, Homo sapiens
catccaaagtcaggg

SEQ ID NO: 1395756 - DNA, 15 bp, Homo sapiens
gcatccaaagtcagg

SEQ ID NO: 1395757 - DNA, 15 bp, Homo sapiens
agcatccaaagtcag

SEQ ID NO: 1395758 - DNA, 15 bp, Homo sapiens
gagcatccaaagtca

SEQ ID NO: 1395759 - DNA, 15 bp, Homo sapiens
ggagcatccaaagtc

SEQ ID NO: 1395760 - DNA, 15 bp, Homo sapiens
aggagcatccaaagt

SEQ ID NO: 1395761 - DNA, 15 bp, Homo sapiens
caggagcatccaaag

SEQ ID NO: 1395762 - DNA, 15 bp, Homo sapiens
gcaggagcatccaaa

SEQ ID NO: 1395763 - DNA, 15 bp, Homo sapiens
tgcaggagcatccaa

SEQ ID NO: 1395764 - DNA, 15 bp, Homo sapiens
ctgcaggagcatcca

SEQ ID NO: 1395765 - DNA, 15 bp, Homo sapiens
actgcaggagcatcc

SEQ ID NO: 1395766 - DNA, 15 bp, Homo sapiens
cactgcaggagcatc

SEQ ID NO: 1395767 - DNA, 15 bp, Homo sapiens
ccactgcaggagcat

SEQ ID NO: 1395768 - DNA, 15 bp, Homo sapiens
tccactgcaggagca

SEQ ID NO: 1395769 - DNA, 15 bp, Homo sapiens
ctccactgcaggagc

SEQ ID NO: 1395770 - DNA, 15 bp, Homo sapiens
cctccactgcaggag

SEQ ID NO: 1395771 - DNA, 15 bp, Homo sapiens
gcctccactgcagga

SEQ ID NO: 1395772 - DNA, 15 bp, Homo sapiens
agcctccactgcagg

SEQ ID NO: 1395773 - DNA, 15 bp, Homo sapiens
cagcctccactgcag

SEQ ID NO: 1395774 - DNA, 15 bp, Homo sapiens
tcagcctccactgca

SEQ ID NO: 1395775 - DNA, 15 bp, Homo sapiens
gtcagcctccactgc

SEQ ID NO: 1395776 - DNA, 15 bp, Homo sapiens
tgtcagcctccactg

SEQ ID NO: 1395777 - DNA, 15 bp, Homo sapiens
gtgtcagcctccact

SEQ ID NO: 1395778 - DNA, 15 bp, Homo sapiens
tgtgtcagcctccac

SEQ ID NO: 1395779 - DNA, 15 bp, Homo sapiens
ttgtgtcagcctcca

SEQ ID NO: 1395780 - DNA, 15 bp, Homo sapiens
tttgtgtcagcctcc

SEQ ID NO: 1395781 - DNA, 15 bp, Homo sapiens
atttgtgtcagcctc

SEQ ID NO: 1395782 - DNA, 15 bp, Homo sapiens
tatttgtgtcagcct

SEQ ID NO: 1395783 - DNA, 15 bp, Homo sapiens
ctatttgtgtcagcc

SEQ ID NO: 1395784 - DNA, 15 bp, Homo sapiens
tctatttgtgtcagc

SEQ ID NO: 1395785 - DNA, 15 bp, Homo sapiens
atctatttgtgtcag

SEQ ID NO: 1395786 - DNA, 15 bp, Homo sapiens
aatctatttgtgtca

SEQ ID NO: 1395787 - DNA, 15 bp, Homo sapiens
aaatctatttgtgtc

SEQ ID NO: 1395788 - DNA, 15 bp, Homo sapiens
aaaatctatttgtgt

SEQ ID NO: 1395789 - DNA, 15 bp, Homo sapiens
caaaatctatttgtg

SEQ ID NO: 1395790 - DNA, 15 bp, Homo sapiens
tcaaaatctatttgt

SEQ ID NO: 1395791 - DNA, 15 bp, Homo sapiens
ttcaaaatctatttg

SEQ ID NO: 1395792 - DNA, 15 bp, Homo sapiens
tttcaaaatctattt

SEQ ID NO: 1395793 - DNA, 15 bp, Homo sapiens
ttttcaaaatctatt

SEQ ID NO: 1395794 - DNA, 15 bp, Homo sapiens
cttttcaaaatctat

SEQ ID NO: 1395795 - DNA, 15 bp, Homo sapiens
acttttcaaaatcta

SEQ ID NO: 1395796 - DNA, 15 bp, Homo sapiens
aacttttcaaaatct

SEQ ID NO: 1395797 - DNA, 15 bp, Homo sapiens
caacttttcaaaatc

SEQ ID NO: 1395798 - DNA, 15 bp, Homo sapiens
gcaacttttcaaaat

SEQ ID NO: 1395799 - DNA, 15 bp, Homo sapiens
agcaacttttcaaaa

SEQ ID NO: 1395800 - DNA, 15 bp, Homo sapiens
aagcaacttttcaaa

SEQ ID NO: 1395801 - DNA, 15 bp, Homo sapiens
gaagcaacttttcaa

SEQ ID NO: 1395802 - DNA, 15 bp, Homo sapiens
ggaagcaacttttca

SEQ ID NO: 1395803 - DNA, 15 bp, Homo sapiens
tggaagcaacttttc

SEQ ID NO: 1395804 - DNA, 15 bp, Homo sapiens
ttggaagcaactttt

SEQ ID NO: 1395805 - DNA, 15 bp, Homo sapiens
tttggaagcaacttt

SEQ ID NO: 1395806 - DNA, 15 bp, Homo sapiens
ttttggaagcaactt

SEQ ID NO: 1395807 - DNA, 15 bp, Homo sapiens
attttggaagcaact

SEQ ID NO: 1395808 - DNA, 15 bp, Homo sapiens
aattttggaagcaac

SEQ ID NO: 1395809 - DNA, 15 bp, Homo sapiens
aaattttggaagcaa

SEQ ID NO: 1395810 - DNA, 15 bp, Homo sapiens
aaaattttggaagca

SEQ ID NO: 1395811 - DNA, 15 bp, Homo sapiens
aaaaattttggaagc

SEQ ID NO: 1395812 - DNA, 15 bp, Homo sapiens
taaaaattttggaag

SEQ ID NO: 1395813 - DNA, 15 bp, Homo sapiens
ctaaaaattttggaa

SEQ ID NO: 1395814 - DNA, 15 bp, Homo sapiens
tctaaaaattttgga

SEQ ID NO: 1395815 - DNA, 15 bp, Homo sapiens
ttctaaaaattttgg

SEQ ID NO: 1395816 - DNA, 15 bp, Homo sapiens
cttctaaaaattttg

SEQ ID NO: 1395817 - DNA, 15 bp, Homo sapiens
gcttctaaaaatttt

SEQ ID NO: 1395818 - DNA, 15 bp, Homo sapiens
tgcttctaaaaattt

SEQ ID NO: 1395819 - DNA, 15 bp, Homo sapiens
gtgcttctaaaaatt

SEQ ID NO: 1395820 - DNA, 15 bp, Homo sapiens
agtgcttctaaaaat

SEQ ID NO: 1395821 - DNA, 15 bp, Homo sapiens
cagtgcttctaaaaa

SEQ ID NO: 1395822 - DNA, 15 bp, Homo sapiens
gcagtgcttctaaaa

SEQ ID NO: 1395823 - DNA, 15 bp, Homo sapiens
tgcagtgcttctaaa

SEQ ID NO: 1395824 - DNA, 15 bp, Homo sapiens
atgcagtgcttctaa

SEQ ID NO: 1395825 - DNA, 15 bp, Homo sapiens
aatgcagtgcttcta

SEQ ID NO: 1395826 - DNA, 15 bp, Homo sapiens
aaatgcagtgcttct

SEQ ID NO: 1395827 - DNA, 15 bp, Homo sapiens
gaaatgcagtgcttc

SEQ ID NO: 1395828 - DNA, 15 bp, Homo sapiens
tgaaatgcagtgctt

SEQ ID NO: 1395829 - DNA, 15 bp, Homo sapiens
ttgaaatgcagtgct

SEQ ID NO: 1395830 - DNA, 15 bp, Homo sapiens
cttgaaatgcagtgc

SEQ ID NO: 1395831 - DNA, 15 bp, Homo sapiens
tcttgaaatgcagtg

SEQ ID NO: 1395832 - DNA, 15 bp, Homo sapiens
atcttgaaatgcagt

SEQ ID NO: 1395833 - DNA, 15 bp, Homo sapiens
gatcttgaaatgcag

SEQ ID NO: 1395834 - DNA, 15 bp, Homo sapiens
tgatcttgaaatgca

SEQ ID NO: 1395835 - DNA, 15 bp, Homo sapiens
ctgatcttgaaatgc

SEQ ID NO: 1395836 - DNA, 15 bp, Homo sapiens
actgatcttgaaatg

SEQ ID NO: 1395837 - DNA, 15 bp, Homo sapiens
cactgatcttgaaat

SEQ ID NO: 1395838 - DNA, 15 bp, Homo sapiens
acactgatcttgaaa

SEQ ID NO: 1395839 - DNA, 15 bp, Homo sapiens
cacactgatcttgaa

SEQ ID NO: 1395840 - DNA, 15 bp, Homo sapiens
tcacactgatcttga

SEQ ID NO: 1395841 - DNA, 15 bp, Homo sapiens
atcacactgatcttg

SEQ ID NO: 1395842 - DNA, 15 bp, Homo sapiens
aatcacactgatctt

SEQ ID NO: 1395843 - DNA, 15 bp, Homo sapiens
aaatcacactgatct

SEQ ID NO: 1395844 - DNA, 15 bp, Homo sapiens
aaaatcacactgatc

SEQ ID NO: 1395845 - DNA, 15 bp, Homo sapiens
taaaatcacactgat

SEQ ID NO: 1395846 - DNA, 15 bp, Homo sapiens
ataaaatcacactga

SEQ ID NO: 1395847 - DNA, 15 bp, Homo sapiens
gataaaatcacactg

SEQ ID NO: 1395848 - DNA, 15 bp, Homo sapiens
agataaaatcacact

SEQ ID NO: 1395849 - DNA, 15 bp, Homo sapiens
cagataaaatcacac

SEQ ID NO: 1395850 - DNA, 15 bp, Homo sapiens
ccagataaaatcaca

SEQ ID NO: 1395851 - DNA, 15 bp, Homo sapiens
cccagataaaatcac

SEQ ID NO: 1395852 - DNA, 15 bp, Homo sapiens
tcccagataaaatca

SEQ ID NO: 1395853 - DNA, 15 bp, Homo sapiens
ttcccagataaaatc

SEQ ID NO: 1395854 - DNA, 15 bp, Homo sapiens
cttcccagataaaat

SEQ ID NO: 1395855 - DNA, 15 bp, Homo sapiens
ccttcccagataaaa

SEQ ID NO: 1395856 - DNA, 15 bp, Homo sapiens
tccttcccagataaa

SEQ ID NO: 1395857 - DNA, 15 bp, Homo sapiens
ttccttcccagataa

SEQ ID NO: 1395858 - DNA, 15 bp, Homo sapiens
cttccttcccagata

SEQ ID NO: 1395859 - DNA, 15 bp, Homo sapiens
acttccttcccagat

SEQ ID NO: 1395860 - DNA, 15 bp, Homo sapiens
aacttccttcccaga

SEQ ID NO: 1395861 - DNA, 15 bp, Homo sapiens
taacttccttcccag

SEQ ID NO: 1395862 - DNA, 15 bp, Homo sapiens
ctaacttccttccca

SEQ ID NO: 1395863 - DNA, 15 bp, Homo sapiens
tctaacttccttccc

SEQ ID NO: 1395864 - DNA, 15 bp, Homo sapiens
ctctaacttccttcc

SEQ ID NO: 1395865 - DNA, 15 bp, Homo sapiens
cctctaacttccttc

SEQ ID NO: 1395866 - DNA, 15 bp, Homo sapiens
gcctctaacttcctt

SEQ ID NO: 1395867 - DNA, 15 bp, Homo sapiens
tgcctctaacttcct

SEQ ID NO: 1395868 - DNA, 15 bp, Homo sapiens
ctgcctctaacttcc

SEQ ID NO: 1395869 - DNA, 15 bp, Homo sapiens
cctgcctctaacttc

SEQ ID NO: 1395870 - DNA, 15 bp, Homo sapiens
tcctgcctctaactt

SEQ ID NO: 1395871 - DNA, 15 bp, Homo sapiens
atcctgcctctaact

SEQ ID NO: 1395872 - DNA, 15 bp, Homo sapiens
catcctgcctctaac

SEQ ID NO: 1395873 - DNA, 15 bp, Homo sapiens
ccatcctgcctctaa

SEQ ID NO: 1395874 - DNA, 15 bp, Homo sapiens
gccatcctgcctcta

SEQ ID NO: 1395875 - DNA, 15 bp, Homo sapiens
cgccatcctgcctct

SEQ ID NO: 1395876 - DNA, 15 bp, Homo sapiens
ccgccatcctgcctc

SEQ ID NO: 1395877 - DNA, 15 bp, Homo sapiens
cccgccatcctgcct

SEQ ID NO: 1395878 - DNA, 15 bp, Homo sapiens
gcccgccatcctgcc

SEQ ID NO: 1395879 - DNA, 15 bp, Homo sapiens
tgcccgccatcctgc

SEQ ID NO: 1395880 - DNA, 15 bp, Homo sapiens
ttgcccgccatcctg

SEQ ID NO: 1395881 - DNA, 15 bp, Homo sapiens
tttgcccgccatcct

SEQ ID NO: 1395882 - DNA, 15 bp, Homo sapiens
ttttgcccgccatcc

SEQ ID NO: 1395883 - DNA, 15 bp, Homo sapiens
attttgcccgccatc

SEQ ID NO: 1395884 - DNA, 15 bp, Homo sapiens
tattttgcccgccat

SEQ ID NO: 1395885 - DNA, 15 bp, Homo sapiens
ctattttgcccgcca

SEQ ID NO: 1395886 - DNA, 15 bp, Homo sapiens
gctattttgcccgcc

SEQ ID NO: 1395887 - DNA, 15 bp, Homo sapiens
tgctattttgcccgc

SEQ ID NO: 1395888 - DNA, 15 bp, Homo sapiens
gtgctattttgcccg

SEQ ID NO: 1395889 - DNA, 15 bp, Homo sapiens
tgtgctattttgccc

SEQ ID NO: 1395890 - DNA, 15 bp, Homo sapiens
ctgtgctattttgcc

SEQ ID NO: 1395891 - DNA, 15 bp, Homo sapiens
tctgtgctattttgc

SEQ ID NO: 1395892 - DNA, 15 bp, Homo sapiens
ttctgtgctattttg

SEQ ID NO: 1395893 - DNA, 15 bp, Homo sapiens
gttctgtgctatttt

SEQ ID NO: 1395894 - DNA, 15 bp, Homo sapiens
tggttctgtgctatt

SEQ ID NO: 1395895 - DNA, 15 bp, Homo sapiens
ttggttctgtgctat

SEQ ID NO: 1395896 - DNA, 15 bp, Homo sapiens
cttggttctgtgcta

SEQ ID NO: 1395897 - DNA, 15 bp, Homo sapiens
gcttggttctgtgct

SEQ ID NO: 1395898 - DNA, 15 bp, Homo sapiens
ggcttggttctgtgc

SEQ ID NO: 1395899 - DNA, 15 bp, Homo sapiens
tggcttggttctgtg

SEQ ID NO: 1395900 - DNA, 15 bp, Homo sapiens
atggcttggttctgt

SEQ ID NO: 1395901 - DNA, 15 bp, Homo sapiens
aatggcttggttctg

SEQ ID NO: 1395902 - DNA, 15 bp, Homo sapiens
taatggcttggttct

SEQ ID NO: 1395903 - DNA, 15 bp, Homo sapiens
ataatggcttggttc

SEQ ID NO: 1395904 - DNA, 15 bp, Homo sapiens
aataatggcttggtt

SEQ ID NO: 1395905 - DNA, 15 bp, Homo sapiens
taataatggcttggt

SEQ ID NO: 1395906 - DNA, 15 bp, Homo sapiens
ataataatggcttgg

SEQ ID NO: 1395907 - DNA, 15 bp, Homo sapiens
tataataatggcttg

SEQ ID NO: 1395908 - DNA, 15 bp, Homo sapiens
ctataataatggctt

SEQ ID NO: 1395909 - DNA, 15 bp, Homo sapiens
tctataataatggct

SEQ ID NO: 1395910 - DNA, 15 bp, Homo sapiens
atctataataatggc

SEQ ID NO: 1395911 - DNA, 15 bp, Homo sapiens
catctataataatgg

SEQ ID NO: 1395912 - DNA, 15 bp, Homo sapiens
ccatctataataatg

SEQ ID NO: 1395913 - DNA, 15 bp, Homo sapiens
tccatctataataat

SEQ ID NO: 1395914 - DNA, 15 bp, Homo sapiens
gtccatctataataa

SEQ ID NO: 1395915 - DNA, 15 bp, Homo sapiens
tgtccatctataata

SEQ ID NO: 1395916 - DNA, 15 bp, Homo sapiens
ttgtccatctataat

SEQ ID NO: 1395917 - DNA, 15 bp, Homo sapiens
tttgtccatctataa

SEQ ID NO: 1395918 - DNA, 15 bp, Homo sapiens
ctttgtccatctata

SEQ ID NO: 1395919 - DNA, 15 bp, Homo sapiens
gctttgtccatctat

SEQ ID NO: 1395920 - DNA, 15 bp, Homo sapiens
cgctttgtccatcta

SEQ ID NO: 1395921 - DNA, 15 bp, Homo sapiens
acgctttgtccatct

SEQ ID NO: 1395922 - DNA, 15 bp, Homo sapiens
cacgctttgtccatc

SEQ ID NO: 1395923 - DNA, 15 bp, Homo sapiens
acacgctttgtccat

SEQ ID NO: 1395924 - DNA, 15 bp, Homo sapiens
aacacgctttgtcca

SEQ ID NO: 1395925 - DNA, 15 bp, Homo sapiens
gaacacgctttgtcc

SEQ ID NO: 1395926 - DNA, 15 bp, Homo sapiens
agaacacgctttgtc

SEQ ID NO: 1395927 - DNA, 15 bp, Homo sapiens
aagaacacgctttgt

SEQ ID NO: 1395928 - DNA, 15 bp, Homo sapiens
aaagaacacgctttg

SEQ ID NO: 1395929 - DNA, 15 bp, Homo sapiens
caaagaacacgcttt

SEQ ID NO: 1395930 - DNA, 15 bp, Homo sapiens
tcaaagaacacgctt

SEQ ID NO: 1395931 - DNA, 15 bp, Homo sapiens
atcaaagaacacgct

SEQ ID NO: 1395932 - DNA, 15 bp, Homo sapiens
aatcaaagaacacgc

SEQ ID NO: 1395933 - DNA, 15 bp, Homo sapiens
aaatcaaagaacacg

SEQ ID NO: 1395934 - DNA, 15 bp, Homo sapiens
caaatcaaagaacac

SEQ ID NO: 1395935 - DNA, 15 bp, Homo sapiens
acaaatcaaagaaca

SEQ ID NO: 1395936 - DNA, 15 bp, Homo sapiens
cacaaatcaaagaac

SEQ ID NO: 1395937 - DNA, 15 bp, Homo sapiens
tcacaaatcaaagaa

SEQ ID NO: 1395938 - DNA, 15 bp, Homo sapiens
ctcacaaatcaaaga

SEQ ID NO: 1395939 - DNA, 15 bp, Homo sapiens
gctcacaaatcaaag

SEQ ID NO: 1395940 - DNA, 15 bp, Homo sapiens
agctcacaaatcaaa

SEQ ID NO: 1395941 - DNA, 15 bp, Homo sapiens
tagctcacaaatcaa

SEQ ID NO: 1395942 - DNA, 15 bp, Homo sapiens
gtagctcacaaatca

SEQ ID NO: 1395943 - DNA, 15 bp, Homo sapiens
tgtagctcacaaatc

SEQ ID NO: 1395944 - DNA, 15 bp, Homo sapiens
ctgtagctcacaaat

SEQ ID NO: 1395945 - DNA, 15 bp, Homo sapiens
actgtagctcacaaa

SEQ ID NO: 1395946 - DNA, 15 bp, Homo sapiens
aactgtagctcacaa

SEQ ID NO: 1395947 - DNA, 15 bp, Homo sapiens
taactgtagctcaca

SEQ ID NO: 1395948 - DNA, 15 bp, Homo sapiens
ataactgtagctcac

SEQ ID NO: 1395949 - DNA, 15 bp, Homo sapiens
aataactgtagctca

SEQ ID NO: 1395950 - DNA, 15 bp, Homo sapiens
gaataactgtagctc

SEQ ID NO: 1395951 - DNA, 15 bp, Homo sapiens
agaataactgtagct

SEQ ID NO: 1395952 - DNA, 15 bp, Homo sapiens
tagaataactgtagc

SEQ ID NO: 1395953 - DNA, 15 bp, Homo sapiens
ttagaataactgtag

SEQ ID NO: 1395954 - DNA, 15 bp, Homo sapiens
attagaataactgta

SEQ ID NO: 1395955 - DNA, 15 bp, Homo sapiens
aattagaataactgt

SEQ ID NO: 1395956 - DNA, 15 bp, Homo sapiens
caattagaataactg

SEQ ID NO: 1395957 - DNA, 15 bp, Homo sapiens
tcaattagaataact

SEQ ID NO: 1395958 - DNA, 15 bp, Homo sapiens
atcaattagaataac

SEQ ID NO: 1395959 - DNA, 15 bp, Homo sapiens
aatcaattagaataa

SEQ ID NO: 1395960 - DNA, 15 bp, Homo sapiens
aaatcaattagaata

SEQ ID NO: 1395961 - DNA, 15 bp, Homo sapiens
gaaatcaattagaat

SEQ ID NO: 1395962 - DNA, 15 bp, Homo sapiens
agaaatcaattagaa

SEQ ID NO: 1395963 - DNA, 15 bp, Homo sapiens
cagaaatcaattaga

SEQ ID NO: 1395964 - DNA, 15 bp, Homo sapiens
gcagaaatcaattag

SEQ ID NO: 1395965 - DNA, 15 bp, Homo sapiens
tgcagaaatcaatta

SEQ ID NO: 1395966 - DNA, 15 bp, Homo sapiens
atgcagaaatcaatt

SEQ ID NO: 1395967 - DNA, 15 bp, Homo sapiens
tatgcagaaatcaat

SEQ ID NO: 1395968 - DNA, 15 bp, Homo sapiens
gtatgcagaaatcaa

SEQ ID NO: 1395969 - DNA, 15 bp, Homo sapiens
agtatgcagaaatca

SEQ ID NO: 1395970 - DNA, 15 bp, Homo sapiens
aagtatgcagaaatc

SEQ ID NO: 1395971 - DNA, 15 bp, Homo sapiens
caagtatgcagaaat

SEQ ID NO: 1395972 - DNA, 15 bp, Homo sapiens
acaagtatgcagaaa

SEQ ID NO: 1395973 - DNA, 15 bp, Homo sapiens
cacaagtatgcagaa

SEQ ID NO: 1395974 - DNA, 15 bp, Homo sapiens
ccacaagtatgcaga

SEQ ID NO: 1395975 - DNA, 15 bp, Homo sapiens
tccacaagtatgcag

SEQ ID NO: 1395976 - DNA, 15 bp, Homo sapiens
atccacaagtatgca

SEQ ID NO: 1395977 - DNA, 15 bp, Homo sapiens
tatccacaagtatgc

SEQ ID NO: 1395978 - DNA, 15 bp, Homo sapiens
ctatccacaagtatg

SEQ ID NO: 1395979 - DNA, 15 bp, Homo sapiens
cctatccacaagtat

SEQ ID NO: 1395980 - DNA, 15 bp, Homo sapiens
ccctatccacaagta

SEQ ID NO: 1395981 - DNA, 15 bp, Homo sapiens
tccctatccacaagt

SEQ ID NO: 1395982 - DNA, 15 bp, Homo sapiens
atccctatccacaag

SEQ ID NO: 1395983 - DNA, 15 bp, Homo sapiens
agatccctatccaca

SEQ ID NO: 1395984 - DNA, 15 bp, Homo sapiens
cagatccctatccac

SEQ ID NO: 1395985 - DNA, 15 bp, Homo sapiens
gcagatccctatcca

SEQ ID NO: 1395986 - DNA, 15 bp, Homo sapiens
ggcagatccctatcc

SEQ ID NO: 1395987 - DNA, 15 bp, Homo sapiens
gggcagatccctatc

SEQ ID NO: 1395988 - DNA, 15 bp, Homo sapiens
agggcagatccctat

SEQ ID NO: 1395989 - DNA, 15 bp, Homo sapiens
cagggcagatcccta

SEQ ID NO: 1395990 - DNA, 15 bp, Homo sapiens
acagggcagatccct

SEQ ID NO: 1395991 - DNA, 15 bp, Homo sapiens
aacagggcagatccc

SEQ ID NO: 1395992 - DNA, 15 bp, Homo sapiens
gaacagggcagatcc

SEQ ID NO: 1395993 - DNA, 15 bp, Homo sapiens
ggaacagggcagatc

SEQ ID NO: 1395994 - DNA, 15 bp, Homo sapiens
tggaacagggcagat

SEQ ID NO: 1395995 - DNA, 15 bp, Homo sapiens
atggaacagggcaga

SEQ ID NO: 1395996 - DNA, 15 bp, Homo sapiens
aatggaacagggcag

SEQ ID NO: 1395997 - DNA, 15 bp, Homo sapiens
aaatggaacagggca

SEQ ID NO: 1395998 - DNA, 15 bp, Homo sapiens
taaatggaacagggc

SEQ ID NO: 1395999 - DNA, 15 bp, Homo sapiens
ataaatggaacaggg

SEQ ID NO: 1396000 - DNA, 15 bp, Homo sapiens
aataaatggaacagg

SEQ ID NO: 1396001 - DNA, 15 bp, Homo sapiens
aaataaatggaacag

SEQ ID NO: 1396002 - DNA, 15 bp, Homo sapiens
aaaataaatggaaca

SEQ ID NO: 1396003 - DNA, 15 bp, Homo sapiens
gaaaaataaatggaa

SEQ ID NO: 1396004 - DNA, 15 bp, Homo sapiens
agaaaaataaatgga

SEQ ID NO: 1396005 - DNA, 15 bp, Homo sapiens
gagaaaaataaatgg

SEQ ID NO: 1396006 - DNA, 15 bp, Homo sapiens
agagaaaaataaatg

SEQ ID NO: 1396007 - DNA, 15 bp, Homo sapiens
aagagaaaaataaat

SEQ ID NO: 1396008 - DNA, 15 bp, Homo sapiens
caagagaaaaataaa

SEQ ID NO: 1396009 - DNA, 15 bp, Homo sapiens
tcaagagaaaaataa

SEQ ID NO: 1396010 - DNA, 15 bp, Homo sapiens
gtcaagagaaaaata

SEQ ID NO: 1396011 - DNA, 15 bp, Homo sapiens
tgtcaagagaaaaat

SEQ ID NO: 1396012 - DNA, 15 bp, Homo sapiens
ttgtcaagagaaaaa

SEQ ID NO: 1396013 - DNA, 15 bp, Homo sapiens
cttgtcaagagaaaa

SEQ ID NO: 1396014 - DNA, 15 bp, Homo sapiens
acttgtcaagagaaa

SEQ ID NO: 1396015 - DNA, 15 bp, Homo sapiens
tacttgtcaagagaa

SEQ ID NO: 1396016 - DNA, 15 bp, Homo sapiens
ttacttgtcaagaga

SEQ ID NO: 1396017 - DNA, 15 bp, Homo sapiens
cttacttgtcaagag

SEQ ID NO: 1396018 - DNA, 15 bp, Homo sapiens
tcttacttgtcaaga

SEQ ID NO: 1396019 - DNA, 15 bp, Homo sapiens
atcttacttgtcaag

SEQ ID NO: 1396020 - DNA, 15 bp, Homo sapiens
catcttacttgtcaa

SEQ ID NO: 1396021 - DNA, 15 bp, Homo sapiens
acatcttacttgtca

SEQ ID NO: 1396022 - DNA, 15 bp, Homo sapiens
cacatcttacttgtc

SEQ ID NO: 1396023 - DNA, 15 bp, Homo sapiens
tcacatcttacttgt

SEQ ID NO: 1396024 - DNA, 15 bp, Homo sapiens
ttcacatcttacttg

SEQ ID NO: 1396025 - DNA, 15 bp, Homo sapiens
tttcacatcttactt

SEQ ID NO: 1396026 - DNA, 15 bp, Homo sapiens
atttcacatcttact

SEQ ID NO: 1396027 - DNA, 15 bp, Homo sapiens
catttcacatcttac

SEQ ID NO: 1396028 - DNA, 15 bp, Homo sapiens
acatttcacatctta

SEQ ID NO: 1396029 - DNA, 15 bp, Homo sapiens
aacatttcacatctt

SEQ ID NO: 1396030 - DNA, 15 bp, Homo sapiens
caacatttcacatct

SEQ ID NO: 1396031 - DNA, 15 bp, Homo sapiens
acaacatttcacatc

SEQ ID NO: 1396032 - DNA, 15 bp, Homo sapiens
aacaacatttcacat

SEQ ID NO: 1396033 - DNA, 15 bp, Homo sapiens
gaacaacatttcaca

SEQ ID NO: 1396034 - DNA, 15 bp, Homo sapiens
tgttacagctataag

SEQ ID NO: 1396035 - DNA, 15 bp, Homo sapiens
atgttacagctataa

SEQ ID NO: 1396036 - DNA, 15 bp, Homo sapiens
tatgttacagctata

SEQ ID NO: 1396037 - DNA, 15 bp, Homo sapiens
atatgttacagctat

SEQ ID NO: 1396038 - DNA, 15 bp, Homo sapiens
tatatgttacagcta

SEQ ID NO: 1396039 - DNA, 15 bp, Homo sapiens
ttatatgttacagct

SEQ ID NO: 1396040 - DNA, 15 bp, Homo sapiens
cttatatgttacagc

SEQ ID NO: 1396041 - DNA, 15 bp, Homo sapiens
acttatatgttacag

SEQ ID NO: 1396042 - DNA, 15 bp, Homo sapiens
tacttatatgttaca

SEQ ID NO: 1396043 - DNA, 15 bp, Homo sapiens
gtacttatatgttac

SEQ ID NO: 1396044 - DNA, 15 bp, Homo sapiens
agtacttatatgtta

SEQ ID NO: 1396045 - DNA, 15 bp, Homo sapiens
aagtacttatatgtt

SEQ ID NO: 1396046 - DNA, 15 bp, Homo sapiens
aaagtacttatatgt

SEQ ID NO: 1396047 - DNA, 15 bp, Homo sapiens
gaaagtacttatatg

SEQ ID NO: 1396048 - DNA, 15 bp, Homo sapiens
ggaaagtacttatat

SEQ ID NO: 1396049 - DNA, 15 bp, Homo sapiens
gggaaagtacttata

SEQ ID NO: 1396050 - DNA, 15 bp, Homo sapiens
ggggaaagtacttat

SEQ ID NO: 1396051 - DNA, 15 bp, Homo sapiens
tggggaaagtactta

SEQ ID NO: 1396052 - DNA, 15 bp, Homo sapiens
ctggggaaagtactt

SEQ ID NO: 1396053 - DNA, 15 bp, Homo sapiens
tctggggaaagtact

SEQ ID NO: 1396054 - DNA, 15 bp, Homo sapiens
ctctggggaaagtac

SEQ ID NO: 1396055 - DNA, 15 bp, Homo sapiens
cctctggggaaagta

SEQ ID NO: 1396056 - DNA, 15 bp, Homo sapiens
tcctctggggaaagt

SEQ ID NO: 1396057 - DNA, 15 bp, Homo sapiens
ttcctctggggaaag

SEQ ID NO: 1396058 - DNA, 15 bp, Homo sapiens
gttcctctggggaaa

SEQ ID NO: 1396059 - DNA, 15 bp, Homo sapiens
tgttcctctggggaa

SEQ ID NO: 1396060 - DNA, 15 bp, Homo sapiens
ctgttcctctgggga

SEQ ID NO: 1396061 - DNA, 15 bp, Homo sapiens
actgttcctctgggg

SEQ ID NO: 1396062 - DNA, 15 bp, Homo sapiens
cactgttcctctggg

SEQ ID NO: 1396063 - DNA, 15 bp, Homo sapiens
acactgttcctctgg

SEQ ID NO: 1396064 - DNA, 15 bp, Homo sapiens
tacactgttcctctg

SEQ ID NO: 1396065 - DNA, 15 bp, Homo sapiens
ttacactgttcctct

SEQ ID NO: 1396066 - DNA, 15 bp, Homo sapiens
gttacactgttcctc

SEQ ID NO: 1396067 - DNA, 15 bp, Homo sapiens
ggttacactgttcct

SEQ ID NO: 1396068 - DNA, 15 bp, Homo sapiens
aggttacactgttcc

SEQ ID NO: 1396069 - DNA, 15 bp, Homo sapiens
aaggttacactgttc

SEQ ID NO: 1396070 - DNA, 15 bp, Homo sapiens
taaggttacactgtt

SEQ ID NO: 1396071 - DNA, 15 bp, Homo sapiens
ctaaggttacactgt

SEQ ID NO: 1396072 - DNA, 15 bp, Homo sapiens
tctaaggttacactg

SEQ ID NO: 1396073 - DNA, 15 bp, Homo sapiens
ctctaaggttacact

SEQ ID NO: 1396074 - DNA, 15 bp, Homo sapiens
gctctaaggttacac

SEQ ID NO: 1396075 - DNA, 15 bp, Homo sapiens
ggctctaaggttaca

SEQ ID NO: 1396076 - DNA, 15 bp, Homo sapiens
gggctctaaggttac

SEQ ID NO: 1396077 - DNA, 15 bp, Homo sapiens
cagggctctaaggtt

SEQ ID NO: 1396078 - DNA, 15 bp, Homo sapiens
ccagggctctaaggt

SEQ ID NO: 1396079 - DNA, 15 bp, Homo sapiens
cccagggctctaagg

SEQ ID NO: 1396080 - DNA, 15 bp, Homo sapiens
acccagggctctaag

SEQ ID NO: 1396081 - DNA, 15 bp, Homo sapiens
cacccagggctctaa

SEQ ID NO: 1396082 - DNA, 15 bp, Homo sapiens
gcacccagggctcta

SEQ ID NO: 1396083 - DNA, 15 bp, Homo sapiens
tgcacccagggctct

SEQ ID NO: 1396084 - DNA, 15 bp, Homo sapiens
atgcacccagggctc

SEQ ID NO: 1396085 - DNA, 15 bp, Homo sapiens
tatgcacccagggct

SEQ ID NO: 1396086 - DNA, 15 bp, Homo sapiens
ctatgcacccagggc

SEQ ID NO: 1396087 - DNA, 15 bp, Homo sapiens
actatgcacccaggg

SEQ ID NO: 1396088 - DNA, 15 bp, Homo sapiens
tactatgcacccagg

SEQ ID NO: 1396089 - DNA, 15 bp, Homo sapiens
ttactatgcacccag

SEQ ID NO: 1396090 - DNA, 15 bp, Homo sapiens
tttactatgcaccca

SEQ ID NO: 1396091 - DNA, 15 bp, Homo sapiens
atttactatgcaccc

SEQ ID NO: 1396092 - DNA, 15 bp, Homo sapiens
aatttactatgcacc

SEQ ID NO: 1396093 - DNA, 15 bp, Homo sapiens
aaatttactatgcac

SEQ ID NO: 1396094 - DNA, 15 bp, Homo sapiens
gaaatttactatgca

SEQ ID NO: 1396095 - DNA, 15 bp, Homo sapiens
ggaaatttactatgc

SEQ ID NO: 1396096 - DNA, 15 bp, Homo sapiens
tggaaatttactatg

SEQ ID NO: 1396097 - DNA, 15 bp, Homo sapiens
ttggaaatttactat

SEQ ID NO: 1396098 - DNA, 15 bp, Homo sapiens
tttggaaatttacta

SEQ ID NO: 1396099 - DNA, 15 bp, Homo sapiens
gtttggaaatttact

SEQ ID NO: 1396100 - DNA, 15 bp, Homo sapiens
tgtttggaaatttac

SEQ ID NO: 1396101 - DNA, 15 bp, Homo sapiens
gtgtttggaaattta

SEQ ID NO: 1396102 - DNA, 15 bp, Homo sapiens
ggtgtttggaaattt

SEQ ID NO: 1396103 - DNA, 15 bp, Homo sapiens
tggtgtttggaaatt

SEQ ID NO: 1396104 - DNA, 15 bp, Homo sapiens
ctggtgtttggaaat

SEQ ID NO: 1396105 - DNA, 15 bp, Homo sapiens
gctggtgtttggaaa

SEQ ID NO: 1396106 - DNA, 15 bp, Homo sapiens
tgctggtgtttggaa

SEQ ID NO: 1396107 - DNA, 15 bp, Homo sapiens
atgctggtgtttgga

SEQ ID NO: 1396108 - DNA, 15 bp, Homo sapiens
gatgctggtgtttgg

SEQ ID NO: 1396109 - DNA, 15 bp, Homo sapiens
tgatgctggtgtttg

SEQ ID NO: 1396110 - DNA, 15 bp, Homo sapiens
atgatgctggtgttt

SEQ ID NO: 1396111 - DNA, 15 bp, Homo sapiens
gatgatgctggtgtt

SEQ ID NO: 1396112 - DNA, 15 bp, Homo sapiens
tgatgatgctggtgt

SEQ ID NO: 1396113 - DNA, 15 bp, Homo sapiens
ttgatgatgctggtg

SEQ ID NO: 1396114 - DNA, 15 bp, Homo sapiens
cttgatgatgctggt

SEQ ID NO: 1396115 - DNA, 15 bp, Homo sapiens
gcttgatgatgctgg

SEQ ID NO: 1396116 - DNA, 15 bp, Homo sapiens
ggcttgatgatgctg

SEQ ID NO: 1396117 - DNA, 15 bp, Homo sapiens
tggcttgatgatgct

SEQ ID NO: 1396118 - DNA, 15 bp, Homo sapiens
ctggcttgatgatgc

SEQ ID NO: 1396119 - DNA, 15 bp, Homo sapiens
actggcttgatgatg

SEQ ID NO: 1396120 - DNA, 15 bp, Homo sapiens
gactggcttgatgat

SEQ ID NO: 1396121 - DNA, 15 bp, Homo sapiens
tgactggcttgatga

SEQ ID NO: 1396122 - DNA, 15 bp, Homo sapiens
atgactggcttgatg

SEQ ID NO: 1396123 - DNA, 15 bp, Homo sapiens
catgactggcttgat

SEQ ID NO: 1396124 - DNA, 15 bp, Homo sapiens
tcatgactggcttga

SEQ ID NO: 1396125 - DNA, 15 bp, Homo sapiens
ttcatgactggcttg

SEQ ID NO: 1396126 - DNA, 15 bp, Homo sapiens
attcatgactggctt

SEQ ID NO: 1396127 - DNA, 15 bp, Homo sapiens
gattcatgactggct

SEQ ID NO: 1396128 - DNA, 15 bp, Homo sapiens
agattcatgactggc

SEQ ID NO: 1396129 - DNA, 15 bp, Homo sapiens
gagattcatgactgg

SEQ ID NO: 1396130 - DNA, 15 bp, Homo sapiens
ggagattcatgactg

SEQ ID NO: 1396131 - DNA, 15 bp, Homo sapiens
tggagattcatgact

SEQ ID NO: 1396132 - DNA, 15 bp, Homo sapiens
ctggagattcatgac

SEQ ID NO: 1396133 - DNA, 15 bp, Homo sapiens
gctggagattcatga

SEQ ID NO: 1396134 - DNA, 15 bp, Homo sapiens
tgctggagattcatg

SEQ ID NO: 1396135 - DNA, 15 bp, Homo sapiens
atgctggagattcat

SEQ ID NO: 1396136 - DNA, 15 bp, Homo sapiens
catgctggagattca

SEQ ID NO: 1396137 - DNA, 15 bp, Homo sapiens
ccatgctggagattc

SEQ ID NO: 1396138 - DNA, 15 bp, Homo sapiens
accatgctggagatt

SEQ ID NO: 1396139 - DNA, 15 bp, Homo sapiens
caccatgctggagat

SEQ ID NO: 1396140 - DNA, 15 bp, Homo sapiens
ccaccatgctggaga

SEQ ID NO: 1396141 - DNA, 15 bp, Homo sapiens
cccaccatgctggag

SEQ ID NO: 1396142 - DNA, 15 bp, Homo sapiens
tcccaccatgctgga

SEQ ID NO: 1396143 - DNA, 15 bp, Homo sapiens
atcccaccatgctgg

SEQ ID NO: 1396144 - DNA, 15 bp, Homo sapiens
gatcccaccatgctg

SEQ ID NO: 1396145 - DNA, 15 bp, Homo sapiens
agatcccaccatgct

SEQ ID NO: 1396146 - DNA, 15 bp, Homo sapiens
cagatcccaccatgc

SEQ ID NO: 1396147 - DNA, 15 bp, Homo sapiens
ccagatcccaccatg

SEQ ID NO: 1396148 - DNA, 15 bp, Homo sapiens
cccagatcccaccat

SEQ ID NO: 1396149 - DNA, 15 bp, Homo sapiens
acccagatcccacca

SEQ ID NO: 1396150 - DNA, 15 bp, Homo sapiens
cacccagatcccacc

SEQ ID NO: 1396151 - DNA, 15 bp, Homo sapiens
gcacccagatcccac

SEQ ID NO: 1396152 - DNA, 15 bp, Homo sapiens
tgcacccagatccca

SEQ ID NO: 1396153 - DNA, 15 bp, Homo sapiens
ctgcacccagatccc

SEQ ID NO: 1396154 - DNA, 15 bp, Homo sapiens
tctgcacccagatcc

SEQ ID NO: 1396155 - DNA, 15 bp, Homo sapiens
ttctgcacccagatc

SEQ ID NO: 1396156 - DNA, 15 bp, Homo sapiens
gttctgcacccagat

SEQ ID NO: 1396157 - DNA, 15 bp, Homo sapiens
agttctgcacccaga

SEQ ID NO: 1396158 - DNA, 15 bp, Homo sapiens
gagttctgcacccag

SEQ ID NO: 1396159 - DNA, 15 bp, Homo sapiens
tgagttctgcaccca

SEQ ID NO: 1396160 - DNA, 15 bp, Homo sapiens
ttgagttctgcaccc

SEQ ID NO: 1396161 - DNA, 15 bp, Homo sapiens
attgagttctgcacc

SEQ ID NO: 1396162 - DNA, 15 bp, Homo sapiens
cattgagttctgcac

SEQ ID NO: 1396163 - DNA, 15 bp, Homo sapiens
ccattgagttctgca

SEQ ID NO: 1396164 - DNA, 15 bp, Homo sapiens
gccattgagttctgc

SEQ ID NO: 1396165 - DNA, 15 bp, Homo sapiens
agccattgagttctg

SEQ ID NO: 1396166 - DNA, 15 bp, Homo sapiens
cagccattgagttct

SEQ ID NO: 1396167 - DNA, 15 bp, Homo sapiens
acagccattgagttc

SEQ ID NO: 1396168 - DNA, 15 bp, Homo sapiens
gacagccattgagtt

SEQ ID NO: 1396169 - DNA, 15 bp, Homo sapiens
tgacagccattgagt

SEQ ID NO: 1396170 - DNA, 15 bp, Homo sapiens
atgacagccattgag

SEQ ID NO: 1396171 - DNA, 15 bp, Homo sapiens
gatgacagccattga

SEQ ID NO: 1396172 - DNA, 15 bp, Homo sapiens
tgatgacagccattg

SEQ ID NO: 1396173 - DNA, 15 bp, Homo sapiens
ctgatgacagccatt

SEQ ID NO: 1396174 - DNA, 15 bp, Homo sapiens
tctgatgacagccat

SEQ ID NO: 1396175 - DNA, 15 bp, Homo sapiens
atctgatgacagcca

SEQ ID NO: 1396176 - DNA, 15 bp, Homo sapiens
aatctgatgacagcc

SEQ ID NO: 1396177 - DNA, 15 bp, Homo sapiens
caatctgatgacagc

SEQ ID NO: 1396178 - DNA, 15 bp, Homo sapiens
tcaatctgatgacag

SEQ ID NO: 1396179 - DNA, 15 bp, Homo sapiens
ctcaatctgatgaca

SEQ ID NO: 1396180 - DNA, 15 bp, Homo sapiens
cctcaatctgatgac

SEQ ID NO: 1396181 - DNA, 15 bp, Homo sapiens
acctcaatctgatga

SEQ ID NO: 1396182 - DNA, 15 bp, Homo sapiens
tacctcaatctgatg

SEQ ID NO: 1396183 - DNA, 15 bp, Homo sapiens
ctacctcaatctgat

SEQ ID NO: 1396184 - DNA, 15 bp, Homo sapiens
gctacctcaatctga

SEQ ID NO: 1396185 - DNA, 15 bp, Homo sapiens
tgctacctcaatctg

SEQ ID NO: 1396186 - DNA, 15 bp, Homo sapiens
ctgctacctcaatct

SEQ ID NO: 1396187 - DNA, 15 bp, Homo sapiens
cctgctacctcaatc

SEQ ID NO: 1396188 - DNA, 15 bp, Homo sapiens
tcctgctacctcaat

SEQ ID NO: 1396189 - DNA, 15 bp, Homo sapiens
ctcctgctacctcaa

SEQ ID NO: 1396190 - DNA, 15 bp, Homo sapiens
actcctgctacctca

SEQ ID NO: 1396191 - DNA, 15 bp, Homo sapiens
aactcctgctacctc

SEQ ID NO: 1396192 - DNA, 15 bp, Homo sapiens
caactcctgctacct

SEQ ID NO: 1396193 - DNA, 15 bp, Homo sapiens
gcaactcctgctacc

SEQ ID NO: 1396194 - DNA, 15 bp, Homo sapiens
agcaactcctgctac

SEQ ID NO: 1396195 - DNA, 15 bp, Homo sapiens
gagcaactcctgcta

SEQ ID NO: 1396196 - DNA, 15 bp, Homo sapiens
tgagcaactcctgct

SEQ ID NO: 1396197 - DNA, 15 bp, Homo sapiens
gtgagcaactcctgc

SEQ ID NO: 1396198 - DNA, 15 bp, Homo sapiens
agtgagcaactcctg

SEQ ID NO: 1396199 - DNA, 15 bp, Homo sapiens
aagtgagcaactcct

SEQ ID NO: 1396200 - DNA, 15 bp, Homo sapiens
caagtgagcaactcc

SEQ ID NO: 1396201 - DNA, 15 bp, Homo sapiens
gcaagtgagcaactc

SEQ ID NO: 1396202 - DNA, 15 bp, Homo sapiens
ggcaagtgagcaact

SEQ ID NO: 1396203 - DNA, 15 bp, Homo sapiens
aggcaagtgagcaac

SEQ ID NO: 1396204 - DNA, 15 bp, Homo sapiens
aaggcaagtgagcaa

SEQ ID NO: 1396205 - DNA, 15 bp, Homo sapiens
gaaggcaagtgagca

SEQ ID NO: 1396206 - DNA, 15 bp, Homo sapiens
ggaaggcaagtgagc

SEQ ID NO: 1396207 - DNA, 15 bp, Homo sapiens
aggaaggcaagtgag

SEQ ID NO: 1396208 - DNA, 15 bp, Homo sapiens
caggaaggcaagtga

SEQ ID NO: 1396209 - DNA, 15 bp, Homo sapiens
gcaggaaggcaagtg

SEQ ID NO: 1396210 - DNA, 15 bp, Homo sapiens
ggcaggaaggcaagt

SEQ ID NO: 1396211 - DNA, 15 bp, Homo sapiens
tggcaggaaggcaag

SEQ ID NO: 1396212 - DNA, 15 bp, Homo sapiens
ctggcaggaaggcaa

SEQ ID NO: 1396213 - DNA, 15 bp, Homo sapiens
gctggcaggaaggca

SEQ ID NO: 1396214 - DNA, 15 bp, Homo sapiens
ggctggcaggaaggc

SEQ ID NO: 1396215 - DNA, 15 bp, Homo sapiens
tggctggcaggaagg

SEQ ID NO: 1396216 - DNA, 15 bp, Homo sapiens
ctggctggcaggaag

SEQ ID NO: 1396217 - DNA, 15 bp, Homo sapiens
tctggctggcaggaa

SEQ ID NO: 1396218 - DNA, 15 bp, Homo sapiens
gtctggctggcagga

SEQ ID NO: 1396219 - DNA, 15 bp, Homo sapiens
ggtctggctggcagg

SEQ ID NO: 1396220 - DNA, 15 bp, Homo sapiens
gggtctggctggcag

SEQ ID NO: 1396221 - DNA, 15 bp, Homo sapiens
tgggtctggctggca

SEQ ID NO: 1396222 - DNA, 15 bp, Homo sapiens
ctgggtctggctggc

SEQ ID NO: 1396223 - DNA, 15 bp, Homo sapiens
actgggtctggctgg

SEQ ID NO: 1396224 - DNA, 15 bp, Homo sapiens
cactgggtctggctg

SEQ ID NO: 1396225 - DNA, 15 bp, Homo sapiens
gcactgggtctggct

SEQ ID NO: 1396226 - DNA, 15 bp, Homo sapiens
cgcactgggtctggc

SEQ ID NO: 1396227 - DNA, 15 bp, Homo sapiens
tcgcactgggtctgg

SEQ ID NO: 1396228 - DNA, 15 bp, Homo sapiens
ctcgcactgggtctg

SEQ ID NO: 1396229 - DNA, 15 bp, Homo sapiens
tctcgcactgggtct

SEQ ID NO: 1396230 - DNA, 15 bp, Homo sapiens
atctcgcactgggtc

SEQ ID NO: 1396231 - DNA, 15 bp, Homo sapiens
aatctcgcactgggt

SEQ ID NO: 1396232 - DNA, 15 bp, Homo sapiens
aaatctcgcactggg

SEQ ID NO: 1396233 - DNA, 15 bp, Homo sapiens
caaatctcgcactgg

SEQ ID NO: 1396234 - DNA, 15 bp, Homo sapiens
acaaatctcgcactg

SEQ ID NO: 1396235 - DNA, 15 bp, Homo sapiens
aacaaatctcgcact

SEQ ID NO: 1396236 - DNA, 15 bp, Homo sapiens
taacaaatctcgcac

SEQ ID NO: 1396237 - DNA, 15 bp, Homo sapiens
gtaacaaatctcgca

SEQ ID NO: 1396238 - DNA, 15 bp, Homo sapiens
agtaacaaatctcgc

SEQ ID NO: 1396239 - DNA, 15 bp, Homo sapiens
gagtaacaaatctcg

SEQ ID NO: 1396240 - DNA, 15 bp, Homo sapiens
tgagtaacaaatctc

SEQ ID NO: 1396241 - DNA, 15 bp, Homo sapiens
ctgagtaacaaatct

SEQ ID NO: 1396242 - DNA, 15 bp, Homo sapiens
cctgagtaacaaatc

SEQ ID NO: 1396243 - DNA, 15 bp, Homo sapiens
ccctgagtaacaaat

SEQ ID NO: 1396244 - DNA, 15 bp, Homo sapiens
tccctgagtaacaaa

SEQ ID NO: 1396245 - DNA, 15 bp, Homo sapiens
ttccctgagtaacaa

SEQ ID NO: 1396246 - DNA, 15 bp, Homo sapiens
gttccctgagtaaca

SEQ ID NO: 1396247 - DNA, 15 bp, Homo sapiens
agttccctgagtaac

SEQ ID NO: 1396248 - DNA, 15 bp, Homo sapiens
cagttccctgagtaa

SEQ ID NO: 1396249 - DNA, 15 bp, Homo sapiens
ccagttccctgagta

SEQ ID NO: 1396250 - DNA, 15 bp, Homo sapiens
cccagttccctgagt

SEQ ID NO: 1396251 - DNA, 15 bp, Homo sapiens
tcccagttccctgag

SEQ ID NO: 1396252 - DNA, 15 bp, Homo sapiens
ctcccagttccctga

SEQ ID NO: 1396253 - DNA, 15 bp, Homo sapiens
tctcccagttccctg

SEQ ID NO: 1396254 - DNA, 15 bp, Homo sapiens
atctcccagttccct

SEQ ID NO: 1396255 - DNA, 15 bp, Homo sapiens
gatctcccagttccc

SEQ ID NO: 1396256 - DNA, 15 bp, Homo sapiens
ggatctcccagttcc

SEQ ID NO: 1396257 - DNA, 15 bp, Homo sapiens
gggatctcccagttc

SEQ ID NO: 1396258 - DNA, 15 bp, Homo sapiens
ggggatctcccagtt

SEQ ID NO: 1396259 - DNA, 15 bp, Homo sapiens
cggggatctcccagt

SEQ ID NO: 1396260 - DNA, 15 bp, Homo sapiens
acggggatctcccag

SEQ ID NO: 1396261 - DNA, 15 bp, Homo sapiens
cacggggatctccca

SEQ ID NO: 1396262 - DNA, 15 bp, Homo sapiens
tcacggggatctccc

SEQ ID NO: 1396263 - DNA, 15 bp, Homo sapiens
atcacggggatctcc

SEQ ID NO: 1396264 - DNA, 15 bp, Homo sapiens
catcacggggatctc

SEQ ID NO: 1396265 - DNA, 15 bp, Homo sapiens
acatcacggggatct

SEQ ID NO: 1396266 - DNA, 15 bp, Homo sapiens
cacatcacggggatc

SEQ ID NO: 1396267 - DNA, 15 bp, Homo sapiens
acacatcacggggat

SEQ ID NO: 1396268 - DNA, 15 bp, Homo sapiens
aacacatcacgggga

SEQ ID NO: 1396269 - DNA, 15 bp, Homo sapiens
aaacacatcacgggg

SEQ ID NO: 1396270 - DNA, 15 bp, Homo sapiens
gaaacacatcacggg

SEQ ID NO: 1396271 - DNA, 15 bp, Homo sapiens
agaaacacatcacgg

SEQ ID NO: 1396272 - DNA, 15 bp, Homo sapiens
gagaaacacatcacg

SEQ ID NO: 1396273 - DNA, 15 bp, Homo sapiens
tgagaaacacatcac

SEQ ID NO: 1396274 - DNA, 15 bp, Homo sapiens
gtgagaaacacatca

SEQ ID NO: 1396275 - DNA, 15 bp, Homo sapiens
ggtgagaaacacatc

SEQ ID NO: 1396276 - DNA, 15 bp, Homo sapiens
cggtgagaaacacat

SEQ ID NO: 1396277 - DNA, 15 bp, Homo sapiens
acggtgagaaacaca

SEQ ID NO: 1396278 - DNA, 15 bp, Homo sapiens
aacggtgagaaacac

SEQ ID NO: 1396279 - DNA, 15 bp, Homo sapiens
gaacggtgagaaaca

SEQ ID NO: 1396280 - DNA, 15 bp, Homo sapiens
cgaacggtgagaaac

SEQ ID NO: 1396281 - DNA, 15 bp, Homo sapiens
tcgaacggtgagaaa

SEQ ID NO: 1396282 - DNA, 15 bp, Homo sapiens
ctcgaacggtgagaa

SEQ ID NO: 1396283 - DNA, 15 bp, Homo sapiens
actcgaacggtgaga

SEQ ID NO: 1396284 - DNA, 15 bp, Homo sapiens
aactcgaacggtgag

SEQ ID NO: 1396285 - DNA, 15 bp, Homo sapiens
aaactcgaacggtga

SEQ ID NO: 1396286 - DNA, 15 bp, Homo sapiens
caaactcgaacggtg

SEQ ID NO: 1396287 - DNA, 15 bp, Homo sapiens
tcaaactcgaacggt

SEQ ID NO: 1396288 - DNA, 15 bp, Homo sapiens
atcaaactcgaacgg

SEQ ID NO: 1396289 - DNA, 15 bp, Homo sapiens
aatcaaactcgaacg

SEQ ID NO: 1396290 - DNA, 15 bp, Homo sapiens
caatcaaactcgaac

SEQ ID NO: 1396291 - DNA, 15 bp, Homo sapiens
acaatcaaactcgaa

SEQ ID NO: 1396292 - DNA, 15 bp, Homo sapiens
cacaatcaaactcga

SEQ ID NO: 1396293 - DNA, 15 bp, Homo sapiens
tcacaatcaaactcg

SEQ ID NO: 1396294 - DNA, 15 bp, Homo sapiens
ttcacaatcaaactc

SEQ ID NO: 1396295 - DNA, 15 bp, Homo sapiens
tttcacaatcaaact

SEQ ID NO: 1396296 - DNA, 15 bp, Homo sapiens
ttttcacaatcaaac

SEQ ID NO: 1396297 - DNA, 15 bp, Homo sapiens
cttttcacaatcaaa

SEQ ID NO: 1396298 - DNA, 15 bp, Homo sapiens
tcttttcacaatcaa

SEQ ID NO: 1396299 - DNA, 15 bp, Homo sapiens
ctcttttcacaatca

SEQ ID NO: 1396300 - DNA, 15 bp, Homo sapiens
actcttttcacaatc

SEQ ID NO: 1396301 - DNA, 15 bp, Homo sapiens
gactcttttcacaat

SEQ ID NO: 1396302 - DNA, 15 bp, Homo sapiens
agactcttttcacaa

SEQ ID NO: 1396303 - DNA, 15 bp, Homo sapiens
cagactcttttcaca

SEQ ID NO: 1396304 - DNA, 15 bp, Homo sapiens
ccagactcttttcac

SEQ ID NO: 1396305 - DNA, 15 bp, Homo sapiens
accagactcttttca

SEQ ID NO: 1396306 - DNA, 15 bp, Homo sapiens
taccagactcttttc

SEQ ID NO: 1396307 - DNA, 15 bp, Homo sapiens
gtaccagactctttt

SEQ ID NO: 1396308 - DNA, 15 bp, Homo sapiens
ggtaccagactcttt

SEQ ID NO: 1396309 - DNA, 15 bp, Homo sapiens
aggtaccagactctt

SEQ ID NO: 1396310 - DNA, 15 bp, Homo sapiens
gaggtaccagactct

SEQ ID NO: 1396311 - DNA, 15 bp, Homo sapiens
tgaggtaccagactc

SEQ ID NO: 1396312 - DNA, 15 bp, Homo sapiens
gtgaggtaccagact

SEQ ID NO: 1396313 - DNA, 15 bp, Homo sapiens
tgtgaggtaccagac

SEQ ID NO: 1396314 - DNA, 15 bp, Homo sapiens
gtgtgaggtaccaga

SEQ ID NO: 1396315 - DNA, 15 bp, Homo sapiens
tgtgtgaggtaccag

SEQ ID NO: 1396316 - DNA, 15 bp, Homo sapiens
atgtgtgaggtacca

SEQ ID NO: 1396317 - DNA, 15 bp, Homo sapiens
aatgtgtgaggtacc

SEQ ID NO: 1396318 - DNA, 15 bp, Homo sapiens
taatgtgtgaggtac

SEQ ID NO: 1396319 - DNA, 15 bp, Homo sapiens
ctaatgtgtgaggta

SEQ ID NO: 1396320 - DNA, 15 bp, Homo sapiens
tctaatgtgtgaggt

SEQ ID NO: 1396321 - DNA, 15 bp, Homo sapiens
atctaatgtgtgagg

SEQ ID NO: 1396322 - DNA, 15 bp, Homo sapiens
aatctaatgtgtgag

SEQ ID NO: 1396323 - DNA, 15 bp, Homo sapiens
aaatctaatgtgtga

SEQ ID NO: 1396324 - DNA, 15 bp, Homo sapiens
caaatctaatgtgtg

SEQ ID NO: 1396325 - DNA, 15 bp, Homo sapiens
tcaaatctaatgtgt

SEQ ID NO: 1396326 - DNA, 15 bp, Homo sapiens
atcaaatctaatgtg

SEQ ID NO: 1396327 - DNA, 15 bp, Homo sapiens
aatcaaatctaatgt

SEQ ID NO: 1396328 - DNA, 15 bp, Homo sapiens
aaatcaaatctaatg

SEQ ID NO: 1396329 - DNA, 15 bp, Homo sapiens
gaaatcaaatctaat

SEQ ID NO: 1396330 - DNA, 15 bp, Homo sapiens
tgaaatcaaatctaa

SEQ ID NO: 1396331 - DNA, 15 bp, Homo sapiens
ctgaaatcaaatcta

SEQ ID NO: 1396332 - DNA, 15 bp, Homo sapiens
tctgaaatcaaatct

SEQ ID NO: 1396333 - DNA, 15 bp, Homo sapiens
ttctgaaatcaaatc

SEQ ID NO: 1396334 - DNA, 15 bp, Homo sapiens
tttctgaaatcaaat

SEQ ID NO: 1396335 - DNA, 15 bp, Homo sapiens
atttctgaaatcaaa

SEQ ID NO: 1396336 - DNA, 15 bp, Homo sapiens
gatttctgaaatcaa

SEQ ID NO: 1396337 - DNA, 15 bp, Homo sapiens
ggatttctgaaatca

SEQ ID NO: 1396338 - DNA, 15 bp, Homo sapiens
aggatttctgaaatc

SEQ ID NO: 1396339 - DNA, 15 bp, Homo sapiens
gaggatttctgaaat

SEQ ID NO: 1396340 - DNA, 15 bp, Homo sapiens
tgaggatttctgaaa

SEQ ID NO: 1396341 - DNA, 15 bp, Homo sapiens
gtgaggatttctgaa

SEQ ID NO: 1396342 - DNA, 15 bp, Homo sapiens
ggtgaggatttctga

SEQ ID NO: 1396343 - DNA, 15 bp, Homo sapiens
cggtgaggatttctg

SEQ ID NO: 1396344 - DNA, 15 bp, Homo sapiens
acggtgaggatttct

SEQ ID NO: 1396345 - DNA, 15 bp, Homo sapiens
cacggtgaggatttc

SEQ ID NO: 1396346 - DNA, 15 bp, Homo sapiens
ccacggtgaggattt

SEQ ID NO: 1396347 - DNA, 15 bp, Homo sapiens
cccacggtgaggatt

SEQ ID NO: 1396348 - DNA, 15 bp, Homo sapiens
gcccacggtgaggat

SEQ ID NO: 1396349 - DNA, 15 bp, Homo sapiens
ggcccacggtgagga

SEQ ID NO: 1396350 - DNA, 15 bp, Homo sapiens
gggcccacggtgagg

SEQ ID NO: 1396351 - DNA, 15 bp, Homo sapiens
tgggcccacggtgag

SEQ ID NO: 1396352 - DNA, 15 bp, Homo sapiens
atgggcccacggtga

SEQ ID NO: 1396353 - DNA, 15 bp, Homo sapiens
tatgggcccacggtg

SEQ ID NO: 1396354 - DNA, 15 bp, Homo sapiens
ctatgggcccacggt

SEQ ID NO: 1396355 - DNA, 15 bp, Homo sapiens
actatgggcccacgg

SEQ ID NO: 1396356 - DNA, 15 bp, Homo sapiens
aactatgggcccacg

SEQ ID NO: 1396357 - DNA, 15 bp, Homo sapiens
aaactatgggcccac

SEQ ID NO: 1396358 - DNA, 15 bp, Homo sapiens
taaactatgggccca

SEQ ID NO: 1396359 - DNA, 15 bp, Homo sapiens
gtaaactatgggccc

SEQ ID NO: 1396360 - DNA, 15 bp, Homo sapiens
ggtaaactatgggcc

SEQ ID NO: 1396361 - DNA, 15 bp, Homo sapiens
aggtaaactatgggc

SEQ ID NO: 1396362 - DNA, 15 bp, Homo sapiens
aaggtaaactatggg

SEQ ID NO: 1396363 - DNA, 15 bp, Homo sapiens
aaaggtaaactatgg

SEQ ID NO: 1396364 - DNA, 15 bp, Homo sapiens
gaaaggtaaactatg

SEQ ID NO: 1396365 - DNA, 15 bp, Homo sapiens
tgaaaggtaaactat

SEQ ID NO: 1396366 - DNA, 15 bp, Homo sapiens
ttgaaaggtaaacta

SEQ ID NO: 1396367 - DNA, 15 bp, Homo sapiens
gttgaaaggtaaact

SEQ ID NO: 1396368 - DNA, 15 bp, Homo sapiens
agttgaaaggtaaac

SEQ ID NO: 1396369 - DNA, 15 bp, Homo sapiens
gagttgaaaggtaaa

SEQ ID NO: 1396370 - DNA, 15 bp, Homo sapiens
ggagttgaaaggtaa

SEQ ID NO: 1396371 - DNA, 15 bp, Homo sapiens
gggagttgaaaggta

SEQ ID NO: 1396372 - DNA, 15 bp, Homo sapiens
ggggagttgaaaggt

SEQ ID NO: 1396373 - DNA, 15 bp, Homo sapiens
gggggagttgaaagg

SEQ ID NO: 1396374 - DNA, 15 bp, Homo sapiens
agggggagttgaaag

SEQ ID NO: 1396375 - DNA, 15 bp, Homo sapiens
aagggggagttgaaa

SEQ ID NO: 1396376 - DNA, 15 bp, Homo sapiens
gaagggggagttgaa

SEQ ID NO: 1396377 - DNA, 15 bp, Homo sapiens
tgaagggggagttga

SEQ ID NO: 1396378 - DNA, 15 bp, Homo sapiens
ctgaagggggagttg

SEQ ID NO: 1396379 - DNA, 15 bp, Homo sapiens
cctgaagggggagtt

SEQ ID NO: 1396380 - DNA, 15 bp, Homo sapiens
ccctgaagggggagt

SEQ ID NO: 1396381 - DNA, 15 bp, Homo sapiens
tccctgaagggggag

SEQ ID NO: 1396382 - DNA, 15 bp, Homo sapiens
ctccctgaaggggga

SEQ ID NO: 1396383 - DNA, 15 bp, Homo sapiens
tctccctgaaggggg

SEQ ID NO: 1396384 - DNA, 15 bp, Homo sapiens
atctccctgaagggg

SEQ ID NO: 1396385 - DNA, 15 bp, Homo sapiens
gatctccctgaaggg

SEQ ID NO: 1396386 - DNA, 15 bp, Homo sapiens
ggatctccctgaagg

SEQ ID NO: 1396387 - DNA, 15 bp, Homo sapiens
aggatctccctgaag

SEQ ID NO: 1396388 - DNA, 15 bp, Homo sapiens
aaggatctccctgaa

SEQ ID NO: 1396389 - DNA, 15 bp, Homo sapiens
caaggatctccctga

SEQ ID NO: 1396390 - DNA, 15 bp, Homo sapiens
acaaggatctccctg

SEQ ID NO: 1396391 - DNA, 15 bp, Homo sapiens
aacaaggatctccct

SEQ ID NO: 1396392 - DNA, 15 bp, Homo sapiens
taacaaggatctccc

SEQ ID NO: 1396393 - DNA, 15 bp, Homo sapiens
ttaacaaggatctcc

SEQ ID NO: 1396394 - DNA, 15 bp, Homo sapiens
cttaacaaggatctc

SEQ ID NO: 1396395 - DNA, 15 bp, Homo sapiens
acttaacaaggatct

SEQ ID NO: 1396396 - DNA, 15 bp, Homo sapiens
aacttaacaaggatc

SEQ ID NO: 1396397 - DNA, 15 bp, Homo sapiens
aaacttaacaaggat

SEQ ID NO: 1396398 - DNA, 15 bp, Homo sapiens
gaaacttaacaagga

SEQ ID NO: 1396399 - DNA, 15 bp, Homo sapiens
cgaaacttaacaagg

SEQ ID NO: 1396400 - DNA, 15 bp, Homo sapiens
ccgaaacttaacaag

SEQ ID NO: 1396401 - DNA, 15 bp, Homo sapiens
accgaaacttaacaa

SEQ ID NO: 1396402 - DNA, 15 bp, Homo sapiens
aaccgaaacttaaca

SEQ ID NO: 1396403 - DNA, 15 bp, Homo sapiens
aaaccgaaacttaac

SEQ ID NO: 1396404 - DNA, 15 bp, Homo sapiens
aaaaccgaaacttaa

SEQ ID NO: 1396405 - DNA, 15 bp, Homo sapiens
gaaaaccgaaactta

SEQ ID NO: 1396406 - DNA, 15 bp, Homo sapiens
agaaaaccgaaactt

SEQ ID NO: 1396407 - DNA, 15 bp, Homo sapiens
cagaaaaccgaaact

SEQ ID NO: 1396408 - DNA, 15 bp, Homo sapiens
ccagaaaaccgaaac

SEQ ID NO: 1396409 - DNA, 15 bp, Homo sapiens
accagaaaaccgaaa

SEQ ID NO: 1396410 - DNA, 15 bp, Homo sapiens
taccagaaaaccgaa

SEQ ID NO: 1396411 - DNA, 15 bp, Homo sapiens
ttaccagaaaaccga

SEQ ID NO: 1396412 - DNA, 15 bp, Homo sapiens
cttaccagaaaaccg

SEQ ID NO: 1396413 - DNA, 15 bp, Homo sapiens
tcttaccagaaaacc

SEQ ID NO: 1396414 - DNA, 15 bp, Homo sapiens
ttcttaccagaaaac

SEQ ID NO: 1396415 - DNA, 15 bp, Homo sapiens
tttcttaccagaaaa

SEQ ID NO: 1396416 - DNA, 15 bp, Homo sapiens
ctttcttaccagaaa

SEQ ID NO: 1396417 - DNA, 15 bp, Homo sapiens
cctttcttaccagaa

SEQ ID NO: 1396418 - DNA, 15 bp, Homo sapiens
gcctttcttaccaga

SEQ ID NO: 1396419 - DNA, 15 bp, Homo sapiens
tgcctttcttaccag

SEQ ID NO: 1396420 - DNA, 15 bp, Homo sapiens
aactgcctttcttac

SEQ ID NO: 1396421 - DNA, 15 bp, Homo sapiens
aaactgcctttctta

SEQ ID NO: 1396422 - DNA, 15 bp, Homo sapiens
aaaactgcctttctt

SEQ ID NO: 1396423 - DNA, 15 bp, Homo sapiens
gaaaactgcctttct

SEQ ID NO: 1396424 - DNA, 15 bp, Homo sapiens
agaaaactgcctttc

SEQ ID NO: 1396425 - DNA, 15 bp, Homo sapiens
cagaaaactgccttt

SEQ ID NO: 1396426 - DNA, 15 bp, Homo sapiens
tcagaaaactgcctt

SEQ ID NO: 1396427 - DNA, 15 bp, Homo sapiens
ttcagaaaactgcct

SEQ ID NO: 1396428 - DNA, 15 bp, Homo sapiens
tttcagaaaactgcc

SEQ ID NO: 1396429 - DNA, 15 bp, Homo sapiens
ttttcagaaaactgc

SEQ ID NO: 1396430 - DNA, 15 bp, Homo sapiens
cttttcagaaaactg

SEQ ID NO: 1396431 - DNA, 15 bp, Homo sapiens
acttttcagaaaact

SEQ ID NO: 1396432 - DNA, 15 bp, Homo sapiens
tacttttcagaaaac

SEQ ID NO: 1396433 - DNA, 15 bp, Homo sapiens
gtacttttcagaaaa

SEQ ID NO: 1396434 - DNA, 15 bp, Homo sapiens
tgtacttttcagaaa

SEQ ID NO: 1396435 - DNA, 15 bp, Homo sapiens
ctgtacttttcagaa

SEQ ID NO: 1396436 - DNA, 15 bp, Homo sapiens
actgtacttttcaga

SEQ ID NO: 1396437 - DNA, 15 bp, Homo sapiens
tactgtacttttcag

SEQ ID NO: 1396438 - DNA, 15 bp, Homo sapiens
atactgtacttttca

SEQ ID NO: 1396439 - DNA, 15 bp, Homo sapiens
aatactgtacttttc

SEQ ID NO: 1396440 - DNA, 15 bp, Homo sapiens
aaatactgtactttt

SEQ ID NO: 1396441 - DNA, 15 bp, Homo sapiens
aaaatactgtacttt

SEQ ID NO: 1396442 - DNA, 15 bp, Homo sapiens
aaaaatactgtactt

SEQ ID NO: 1396443 - DNA, 15 bp, Homo sapiens
taaaaatactgtact

SEQ ID NO: 1396444 - DNA, 15 bp, Homo sapiens
ttaaaaatactgtac

SEQ ID NO: 1396445 - DNA, 15 bp, Homo sapiens
tttaaaaatactgta

SEQ ID NO: 1396446 - DNA, 15 bp, Homo sapiens
atttaaaaatactgt

SEQ ID NO: 1396447 - DNA, 15 bp, Homo sapiens
catttaaaaatactg

SEQ ID NO: 1396448 - DNA, 15 bp, Homo sapiens
acatttaaaaatact

SEQ ID NO: 1396449 - DNA, 15 bp, Homo sapiens
aacatttaaaaatac

SEQ ID NO: 1396450 - DNA, 15 bp, Homo sapiens
aaacatttaaaaata

SEQ ID NO: 1396451 - DNA, 15 bp, Homo sapiens
aaaacatttaaaaat

SEQ ID NO: 1396452 - DNA, 15 bp, Homo sapiens
taaaacatttaaaaa

SEQ ID NO: 1396453 - DNA, 15 bp, Homo sapiens
ttaaaacatttaaaa

SEQ ID NO: 1396454 - DNA, 15 bp, Homo sapiens
attaaaacatttaaa

SEQ ID NO: 1396455 - DNA, 15 bp, Homo sapiens
gattaaaacatttaa

SEQ ID NO: 1396456 - DNA, 15 bp, Homo sapiens
cgattaaaacattta

SEQ ID NO: 1396457 - DNA, 15 bp, Homo sapiens
tcgattaaaacattt

SEQ ID NO: 1396458 - DNA, 15 bp, Homo sapiens
ctcgattaaaacatt

SEQ ID NO: 1396459 - DNA, 15 bp, Homo sapiens
actcgattaaaacat

SEQ ID NO: 1396460 - DNA, 15 bp, Homo sapiens
gactcgattaaaaca

SEQ ID NO: 1396461 - DNA, 15 bp, Homo sapiens
ggactcgattaaaac

SEQ ID NO: 1396462 - DNA, 15 bp, Homo sapiens
tggactcgattaaaa

SEQ ID NO: 1396463 - DNA, 15 bp, Homo sapiens
ttggactcgattaaa

SEQ ID NO: 1396464 - DNA, 15 bp, Homo sapiens
attggactcgattaa

SEQ ID NO: 1396465 - DNA, 15 bp, Homo sapiens
aattggactcgatta

SEQ ID NO: 1396466 - DNA, 15 bp, Homo sapiens
taattggactcgatt

SEQ ID NO: 1396467 - DNA, 15 bp, Homo sapiens
ttaattggactcgat

SEQ ID NO: 1396468 - DNA, 15 bp, Homo sapiens
cttaattggactcga

SEQ ID NO: 1396469 - DNA, 15 bp, Homo sapiens
acttaattggactcg

SEQ ID NO: 1396470 - DNA, 15 bp, Homo sapiens
aacttaattggactc

SEQ ID NO: 1396471 - DNA, 15 bp, Homo sapiens
aaacttaattggact

SEQ ID NO: 1396472 - DNA, 15 bp, Homo sapiens
gaaacttaattggac

SEQ ID NO: 1396473 - DNA, 15 bp, Homo sapiens
ggaaacttaattgga

SEQ ID NO: 1396474 - DNA, 15 bp, Homo sapiens
tggaaacttaattgg

SEQ ID NO: 1396475 - DNA, 15 bp, Homo sapiens
atggaaacttaattg

SEQ ID NO: 1396476 - DNA, 15 bp, Homo sapiens
catggaaacttaatt

SEQ ID NO: 1396477 - DNA, 15 bp, Homo sapiens
ccatggaaacttaat

SEQ ID NO: 1396478 - DNA, 15 bp, Homo sapiens
cccatggaaacttaa

SEQ ID NO: 1396479 - DNA, 15 bp, Homo sapiens
ccccatggaaactta

SEQ ID NO: 1396480 - DNA, 15 bp, Homo sapiens
tccccatggaaactt

SEQ ID NO: 1396481 - DNA, 15 bp, Homo sapiens
atccccatggaaact

SEQ ID NO: 1396482 - DNA, 15 bp, Homo sapiens
tatccccatggaaac

SEQ ID NO: 1396483 - DNA, 15 bp, Homo sapiens
ctatccccatggaaa

SEQ ID NO: 1396484 - DNA, 15 bp, Homo sapiens
tctatccccatggaa

SEQ ID NO: 1396485 - DNA, 15 bp, Homo sapiens
atctatccccatgga

SEQ ID NO: 1396486 - DNA, 15 bp, Homo sapiens
aatctatccccatgg

SEQ ID NO: 1396487 - DNA, 15 bp, Homo sapiens
taatctatccccatg

SEQ ID NO: 1396488 - DNA, 15 bp, Homo sapiens
ctaatctatccccat

SEQ ID NO: 1396489 - DNA, 15 bp, Homo sapiens
actaatctatcccca

SEQ ID NO: 1396490 - DNA, 15 bp, Homo sapiens
aactaatctatcccc

SEQ ID NO: 1396491 - DNA, 15 bp, Homo sapiens
taactaatctatccc

SEQ ID NO: 1396492 - DNA, 15 bp, Homo sapiens
ataactaatctatcc

SEQ ID NO: 1396493 - DNA, 15 bp, Homo sapiens
aataactaatctatc

SEQ ID NO: 1396494 - DNA, 15 bp, Homo sapiens
taataactaatctat

SEQ ID NO: 1396495 - DNA, 15 bp, Homo sapiens
ctaataactaatcta

SEQ ID NO: 1396496 - DNA, 15 bp, Homo sapiens
tctaataactaatct

SEQ ID NO: 1396497 - DNA, 15 bp, Homo sapiens
ttctaataactaatc

SEQ ID NO: 1396498 - DNA, 15 bp, Homo sapiens
gttctaataactaat

SEQ ID NO: 1396499 - DNA, 15 bp, Homo sapiens
tgttctaataactaa

SEQ ID NO: 1396500 - DNA, 15 bp, Homo sapiens
ttgttctaataacta

SEQ ID NO: 1396501 - DNA, 15 bp, Homo sapiens
cttgttctaataact

SEQ ID NO: 1396502 - DNA, 15 bp, Homo sapiens
tcttgttctaataac

SEQ ID NO: 1396503 - DNA, 15 bp, Homo sapiens
atcttgttctaataa

SEQ ID NO: 1396504 - DNA, 15 bp, Homo sapiens
aatcttgttctaata

SEQ ID NO: 1396505 - DNA, 15 bp, Homo sapiens
taatcttgttctaat

SEQ ID NO: 1396506 - DNA, 15 bp, Homo sapiens
gtaatcttgttctaa

SEQ ID NO: 1396507 - DNA, 15 bp, Homo sapiens
tgtaatcttgttcta

SEQ ID NO: 1396508 - DNA, 15 bp, Homo sapiens
ctgtaatcttgttct

SEQ ID NO: 1396509 - DNA, 15 bp, Homo sapiens
actgtaatcttgttc

SEQ ID NO: 1396510 - DNA, 15 bp, Homo sapiens
aactgtaatcttgtt

SEQ ID NO: 1396511 - DNA, 15 bp, Homo sapiens
gaactgtaatcttgt

SEQ ID NO: 1396512 - DNA, 15 bp, Homo sapiens
agaactgtaatcttg

SEQ ID NO: 1396513 - DNA, 15 bp, Homo sapiens
aagaactgtaatctt

SEQ ID NO: 1396514 - DNA, 15 bp, Homo sapiens
taagaactgtaatct

SEQ ID NO: 1396515 - DNA, 15 bp, Homo sapiens
ttaagaactgtaatc

SEQ ID NO: 1396516 - DNA, 15 bp, Homo sapiens
cttaagaactgtaat

SEQ ID NO: 1396517 - DNA, 15 bp, Homo sapiens
tcttaagaactgtaa

SEQ ID NO: 1396518 - DNA, 15 bp, Homo sapiens
ctcttaagaactgta

SEQ ID NO: 1396519 - DNA, 15 bp, Homo sapiens
tctcttaagaactgt

SEQ ID NO: 1396520 - DNA, 15 bp, Homo sapiens
ttctcttaagaactg

SEQ ID NO: 1396521 - DNA, 15 bp, Homo sapiens
tttctcttaagaact

SEQ ID NO: 1396522 - DNA, 15 bp, Homo sapiens
gtttctcttaagaac

SEQ ID NO: 1396523 - DNA, 15 bp, Homo sapiens
ggtttctcttaagaa

SEQ ID NO: 1396524 - DNA, 15 bp, Homo sapiens
aggtttctcttaaga

SEQ ID NO: 1396525 - DNA, 15 bp, Homo sapiens
aaggtttctcttaag

SEQ ID NO: 1396526 - DNA, 15 bp, Homo sapiens
taaggtttctcttaa

SEQ ID NO: 1396527 - DNA, 15 bp, Homo sapiens
ataaggtttctctta

SEQ ID NO: 1396528 - DNA, 15 bp, Homo sapiens
tataaggtttctctt

SEQ ID NO: 1396529 - DNA, 15 bp, Homo sapiens
ctataaggtttctct

SEQ ID NO: 1396530 - DNA, 15 bp, Homo sapiens
cctataaggtttctc

SEQ ID NO: 1396531 - DNA, 15 bp, Homo sapiens
ccctataaggtttct

SEQ ID NO: 1396532 - DNA, 15 bp, Homo sapiens
tccctataaggtttc

SEQ ID NO: 1396533 - DNA, 15 bp, Homo sapiens
atccctataaggttt

SEQ ID NO: 1396534 - DNA, 15 bp, Homo sapiens
tatccctataaggtt

SEQ ID NO: 1396535 - DNA, 15 bp, Homo sapiens
ttatccctataaggt

SEQ ID NO: 1396536 - DNA, 15 bp, Homo sapiens
attatccctataagg

SEQ ID NO: 1396537 - DNA, 15 bp, Homo sapiens
gattatccctataag

SEQ ID NO: 1396538 - DNA, 15 bp, Homo sapiens
agattatccctataa

SEQ ID NO: 1396539 - DNA, 15 bp, Homo sapiens
aagattatccctata

SEQ ID NO: 1396540 - DNA, 15 bp, Homo sapiens
aaagattatccctat

SEQ ID NO: 1396541 - DNA, 15 bp, Homo sapiens
taaagattatcccta

SEQ ID NO: 1396542 - DNA, 15 bp, Homo sapiens
ataaagattatccct

SEQ ID NO: 1396543 - DNA, 15 bp, Homo sapiens
tataaagattatccc

SEQ ID NO: 1396544 - DNA, 15 bp, Homo sapiens
ttataaagattatcc

SEQ ID NO: 1396545 - DNA, 15 bp, Homo sapiens
cttataaagattatc

SEQ ID NO: 1396546 - DNA, 15 bp, Homo sapiens
gcttataaagattat

SEQ ID NO: 1396547 - DNA, 15 bp, Homo sapiens
ggcttataaagatta

SEQ ID NO: 1396548 - DNA, 15 bp, Homo sapiens
aggcttataaagatt

SEQ ID NO: 1396549 - DNA, 15 bp, Homo sapiens
caggcttataaagat

SEQ ID NO: 1396550 - DNA, 15 bp, Homo sapiens
tcaggcttataaaga

SEQ ID NO: 1396551 - DNA, 15 bp, Homo sapiens
ttcaggcttataaag

SEQ ID NO: 1396552 - DNA, 15 bp, Homo sapiens
tttcaggcttataaa

SEQ ID NO: 1396553 - DNA, 15 bp, Homo sapiens
atttcaggcttataa

SEQ ID NO: 1396554 - DNA, 15 bp, Homo sapiens
tatttcaggcttata

SEQ ID NO: 1396555 - DNA, 15 bp, Homo sapiens
ctatttcaggcttat

SEQ ID NO: 1396556 - DNA, 15 bp, Homo sapiens
cctatttcaggctta

SEQ ID NO: 1396557 - DNA, 15 bp, Homo sapiens
tcctatttcaggctt

SEQ ID NO: 1396558 - DNA, 15 bp, Homo sapiens
ttcctatttcaggct

SEQ ID NO: 1396559 - DNA, 15 bp, Homo sapiens
tttcctatttcaggc

SEQ ID NO: 1396560 - DNA, 15 bp, Homo sapiens
atttcctatttcagg

SEQ ID NO: 1396561 - DNA, 15 bp, Homo sapiens
aatttcctatttcag

SEQ ID NO: 1396562 - DNA, 15 bp, Homo sapiens
taatttcctatttca

SEQ ID NO: 1396563 - DNA, 15 bp, Homo sapiens
ataatttcctatttc

SEQ ID NO: 1396564 - DNA, 15 bp, Homo sapiens
cataatttcctattt

SEQ ID NO: 1396565 - DNA, 15 bp, Homo sapiens
ccataatttcctatt

SEQ ID NO: 1396566 - DNA, 15 bp, Homo sapiens
gccataatttcctat

SEQ ID NO: 1396567 - DNA, 15 bp, Homo sapiens
agccataatttccta

SEQ ID NO: 1396568 - DNA, 15 bp, Homo sapiens
gagccataatttcct

SEQ ID NO: 1396569 - DNA, 15 bp, Homo sapiens
tgagccataatttcc

SEQ ID NO: 1396570 - DNA, 15 bp, Homo sapiens
gtgagccataatttc

SEQ ID NO: 1396571 - DNA, 15 bp, Homo sapiens
tgtgagccataattt

SEQ ID NO: 1396572 - DNA, 15 bp, Homo sapiens
atgtgagccataatt

SEQ ID NO: 1396573 - DNA, 15 bp, Homo sapiens
aatgtgagccataat

SEQ ID NO: 1396574 - DNA, 15 bp, Homo sapiens
taatgtgagccataa

SEQ ID NO: 1396575 - DNA, 15 bp, Homo sapiens
ttaatgtgagccata

SEQ ID NO: 1396576 - DNA, 15 bp, Homo sapiens
attaatgtgagccat

SEQ ID NO: 1396577 - DNA, 15 bp, Homo sapiens
aattaatgtgagcca

SEQ ID NO: 1396578 - DNA, 15 bp, Homo sapiens
caattaatgtgagcc

SEQ ID NO: 1396579 - DNA, 15 bp, Homo sapiens
tcaattaatgtgagc

SEQ ID NO: 1396580 - DNA, 15 bp, Homo sapiens
ttcaattaatgtgag

SEQ ID NO: 1396581 - DNA, 15 bp, Homo sapiens
attcaattaatgtga

SEQ ID NO: 1396582 - DNA, 15 bp, Homo sapiens
cattcaattaatgtg

SEQ ID NO: 1396583 - DNA, 15 bp, Homo sapiens
gcattcaattaatgt

SEQ ID NO: 1396584 - DNA, 15 bp, Homo sapiens
tgcattcaattaatg

SEQ ID NO: 1396585 - DNA, 15 bp, Homo sapiens
ctgcattcaattaat

SEQ ID NO: 1396586 - DNA, 15 bp, Homo sapiens
actgcattcaattaa

SEQ ID NO: 1396587 - DNA, 15 bp, Homo sapiens
cactgcattcaatta

SEQ ID NO: 1396588 - DNA, 15 bp, Homo sapiens
gcactgcattcaatt

SEQ ID NO: 1396589 - DNA, 15 bp, Homo sapiens
agcactgcattcaat

SEQ ID NO: 1396590 - DNA, 15 bp, Homo sapiens
gagcactgcattcaa

SEQ ID NO: 1396591 - DNA, 15 bp, Homo sapiens
ggagcactgcattca

SEQ ID NO: 1396592 - DNA, 15 bp, Homo sapiens
tggagcactgcattc

SEQ ID NO: 1396593 - DNA, 15 bp, Homo sapiens
ttggagcactgcatt

SEQ ID NO: 1396594 - DNA, 15 bp, Homo sapiens
cttggagcactgcat

SEQ ID NO: 1396595 - DNA, 15 bp, Homo sapiens
acttggagcactgca

SEQ ID NO: 1396596 - DNA, 15 bp, Homo sapiens
gacttggagcactgc

SEQ ID NO: 1396597 - DNA, 15 bp, Homo sapiens
agacttggagcactg

SEQ ID NO: 1396598 - DNA, 15 bp, Homo sapiens
cagacttggagcact

SEQ ID NO: 1396599 - DNA, 15 bp, Homo sapiens
ccagacttggagcac

SEQ ID NO: 1396600 - DNA, 15 bp, Homo sapiens
accagacttggagca

SEQ ID NO: 1396601 - DNA, 15 bp, Homo sapiens
gaccagacttggagc

SEQ ID NO: 1396602 - DNA, 15 bp, Homo sapiens
agaccagacttggag

SEQ ID NO: 1396603 - DNA, 15 bp, Homo sapiens
gagaccagacttgga

SEQ ID NO: 1396604 - DNA, 15 bp, Homo sapiens
ggagaccagacttgg

SEQ ID NO: 1396605 - DNA, 15 bp, Homo sapiens
gggagaccagacttg

SEQ ID NO: 1396606 - DNA, 15 bp, Homo sapiens
agggagaccagactt

SEQ ID NO: 1396607 - DNA, 15 bp, Homo sapiens
gagggagaccagact

SEQ ID NO: 1396608 - DNA, 15 bp, Homo sapiens
ggagggagaccagac

SEQ ID NO: 1396609 - DNA, 15 bp, Homo sapiens
tggagggagaccaga

SEQ ID NO: 1396610 - DNA, 15 bp, Homo sapiens
ttggagggagaccag

SEQ ID NO: 1396611 - DNA, 15 bp, Homo sapiens
tttggagggagacca

SEQ ID NO: 1396612 - DNA, 15 bp, Homo sapiens
ttttggagggagacc

SEQ ID NO: 1396613 - DNA, 15 bp, Homo sapiens
attttggagggagac

SEQ ID NO: 1396614 - DNA, 15 bp, Homo sapiens
gattttggagggaga

SEQ ID NO: 1396615 - DNA, 15 bp, Homo sapiens
agattttggagggag

SEQ ID NO: 1396616 - DNA, 15 bp, Homo sapiens
aagattttggaggga

SEQ ID NO: 1396617 - DNA, 15 bp, Homo sapiens
aaagattttggaggg

SEQ ID NO: 1396618 - DNA, 15 bp, Homo sapiens
aaaagattttggagg

SEQ ID NO: 1396619 - DNA, 15 bp, Homo sapiens
aaaaagattttggag

SEQ ID NO: 1396620 - DNA, 15 bp, Homo sapiens
aaaaaagattttgga

SEQ ID NO: 1396621 - DNA, 15 bp, Homo sapiens
caaaaaagattttgg

SEQ ID NO: 1396622 - DNA, 15 bp, Homo sapiens
ccaaaaaagattttg

SEQ ID NO: 1396623 - DNA, 15 bp, Homo sapiens
accaaaaaagatttt

SEQ ID NO: 1396624 - DNA, 15 bp, Homo sapiens
aaccaaaaaagattt

SEQ ID NO: 1396625 - DNA, 15 bp, Homo sapiens
caaccaaaaaagatt

SEQ ID NO: 1396626 - DNA, 15 bp, Homo sapiens
ccaaccaaaaaagat

SEQ ID NO: 1396627 - DNA, 15 bp, Homo sapiens
tccaaccaaaaaaga

SEQ ID NO: 1396628 - DNA, 15 bp, Homo sapiens
atccaaccaaaaaag

SEQ ID NO: 1396629 - DNA, 15 bp, Homo sapiens
catccaaccaaaaaa

SEQ ID NO: 1396630 - DNA, 15 bp, Homo sapiens
acatccaaccaaaaa

SEQ ID NO: 1396631 - DNA, 15 bp, Homo sapiens
aacatccaaccaaaa

SEQ ID NO: 1396632 - DNA, 15 bp, Homo sapiens
taacatccaaccaaa

SEQ ID NO: 1396633 - DNA, 15 bp, Homo sapiens
ttaacatccaaccaa

SEQ ID NO: 1396634 - DNA, 15 bp, Homo sapiens
cttaacatccaacca

SEQ ID NO: 1396635 - DNA, 15 bp, Homo sapiens
ccttaacatccaacc

SEQ ID NO: 1396636 - DNA, 15 bp, Homo sapiens
cccttaacatccaac

SEQ ID NO: 1396637 - DNA, 15 bp, Homo sapiens
acccttaacatccaa

SEQ ID NO: 1396638 - DNA, 15 bp, Homo sapiens
cacccttaacatcca

SEQ ID NO: 1396639 - DNA, 15 bp, Homo sapiens
tcacccttaacatcc

SEQ ID NO: 1396640 - DNA, 15 bp, Homo sapiens
ctcacccttaacatc

SEQ ID NO: 1396641 - DNA, 15 bp, Homo sapiens
cctcacccttaacat

SEQ ID NO: 1396642 - DNA, 15 bp, Homo sapiens
tcctcacccttaaca

SEQ ID NO: 1396643 - DNA, 15 bp, Homo sapiens
atcctcacccttaac

SEQ ID NO: 1396644 - DNA, 15 bp, Homo sapiens
tatcctcacccttaa

SEQ ID NO: 1396645 - DNA, 15 bp, Homo sapiens
atatcctcaccctta

SEQ ID NO: 1396646 - DNA, 15 bp, Homo sapiens
catatcctcaccctt

SEQ ID NO: 1396647 - DNA, 15 bp, Homo sapiens
tcatatcctcaccct

SEQ ID NO: 1396648 - DNA, 15 bp, Homo sapiens
ttcatatcctcaccc

SEQ ID NO: 1396649 - DNA, 15 bp, Homo sapiens
cttcatatcctcacc

SEQ ID NO: 1396650 - DNA, 15 bp, Homo sapiens
tcttcatatcctcac

SEQ ID NO: 1396651 - DNA, 15 bp, Homo sapiens
ttcttcatatcctca

SEQ ID NO: 1396652 - DNA, 15 bp, Homo sapiens
cttcttcatatcctc

SEQ ID NO: 1396653 - DNA, 15 bp, Homo sapiens
ccttcttcatatcct

SEQ ID NO: 1396654 - DNA, 15 bp, Homo sapiens
accttcttcatatcc

SEQ ID NO: 1396655 - DNA, 15 bp, Homo sapiens
taccttcttcatatc

SEQ ID NO: 1396656 - DNA, 15 bp, Homo sapiens
ctaccttcttcatat

SEQ ID NO: 1396657 - DNA, 15 bp, Homo sapiens
cctaccttcttcata

SEQ ID NO: 1396658 - DNA, 15 bp, Homo sapiens
acctaccttcttcat

SEQ ID NO: 1396659 - DNA, 15 bp, Homo sapiens
aacctaccttcttca

SEQ ID NO: 1396660 - DNA, 15 bp, Homo sapiens
caacctaccttcttc

SEQ ID NO: 1396661 - DNA, 15 bp, Homo sapiens
acaacctaccttctt

SEQ ID NO: 1396662 - DNA, 15 bp, Homo sapiens
aacaacctaccttct

SEQ ID NO: 1396663 - DNA, 15 bp, Homo sapiens
aaacaacctaccttc

SEQ ID NO: 1396664 - DNA, 15 bp, Homo sapiens
aaaacaacctacctt

SEQ ID NO: 1396665 - DNA, 15 bp, Homo sapiens
taaaacaacctacct

SEQ ID NO: 1396666 - DNA, 15 bp, Homo sapiens
ttaaaacaacctacc

SEQ ID NO: 1396667 - DNA, 15 bp, Homo sapiens
cttaaaacaacctac

SEQ ID NO: 1396668 - DNA, 15 bp, Homo sapiens
acttaaaacaaccta

SEQ ID NO: 1396669 - DNA, 15 bp, Homo sapiens
cacttaaaacaacct

SEQ ID NO: 1396670 - DNA, 15 bp, Homo sapiens
gcacttaaaacaacc

SEQ ID NO: 1396671 - DNA, 15 bp, Homo sapiens
agcacttaaaacaac

SEQ ID NO: 1396672 - DNA, 15 bp, Homo sapiens
tagcacttaaaacaa

SEQ ID NO: 1396673 - DNA, 15 bp, Homo sapiens
gtagcacttaaaaca

SEQ ID NO: 1396674 - DNA, 15 bp, Homo sapiens
ggtagcacttaaaac

SEQ ID NO: 1396675 - DNA, 15 bp, Homo sapiens
gggtagcacttaaaa

SEQ ID NO: 1396676 - DNA, 15 bp, Homo sapiens
tgggtagcacttaaa

SEQ ID NO: 1396677 - DNA, 15 bp, Homo sapiens
atgggtagcacttaa

SEQ ID NO: 1396678 - DNA, 15 bp, Homo sapiens
tatgggtagcactta

SEQ ID NO: 1396679 - DNA, 15 bp, Homo sapiens
ttatgggtagcactt

SEQ ID NO: 1396680 - DNA, 15 bp, Homo sapiens
attatgggtagcact

SEQ ID NO: 1396681 - DNA, 15 bp, Homo sapiens
aattatgggtagcac

SEQ ID NO: 1396682 - DNA, 15 bp, Homo sapiens
aaattatgggtagca

SEQ ID NO: 1396683 - DNA, 15 bp, Homo sapiens
caaattatgggtagc

SEQ ID NO: 1396684 - DNA, 15 bp, Homo sapiens
gcaaattatgggtag

SEQ ID NO: 1396685 - DNA, 15 bp, Homo sapiens
tgcaaattatgggta

SEQ ID NO: 1396686 - DNA, 15 bp, Homo sapiens
gtgcaaattatgggt

SEQ ID NO: 1396687 - DNA, 15 bp, Homo sapiens
tgtgcaaattatggg

SEQ ID NO: 1396688 - DNA, 15 bp, Homo sapiens
atgtgcaaattatgg

SEQ ID NO: 1396689 - DNA, 15 bp, Homo sapiens
aatgtgcaaattatg

SEQ ID NO: 1396690 - DNA, 15 bp, Homo sapiens
taatgtgcaaattat

SEQ ID NO: 1396691 - DNA, 15 bp, Homo sapiens
ttaatgtgcaaatta

SEQ ID NO: 1396692 - DNA, 15 bp, Homo sapiens
tttaatgtgcaaatt

SEQ ID NO: 1396693 - DNA, 15 bp, Homo sapiens
ttttaatgtgcaaat

SEQ ID NO: 1396694 - DNA, 15 bp, Homo sapiens
cttttaatgtgcaaa

SEQ ID NO: 1396695 - DNA, 15 bp, Homo sapiens
acttttaatgtgcaa

SEQ ID NO: 1396696 - DNA, 15 bp, Homo sapiens
tacttttaatgtgca

SEQ ID NO: 1396697 - DNA, 15 bp, Homo sapiens
atacttttaatgtgc

SEQ ID NO: 1396698 - DNA, 15 bp, Homo sapiens
tatacttttaatgtg

SEQ ID NO: 1396699 - DNA, 15 bp, Homo sapiens
ttatacttttaatgt

SEQ ID NO: 1396700 - DNA, 15 bp, Homo sapiens
attatacttttaatg

SEQ ID NO: 1396701 - DNA, 15 bp, Homo sapiens
aattatacttttaat

SEQ ID NO: 1396702 - DNA, 15 bp, Homo sapiens
taattatacttttaa

SEQ ID NO: 1396703 - DNA, 15 bp, Homo sapiens
ataattatactttta

SEQ ID NO: 1396704 - DNA, 15 bp, Homo sapiens
tataattatactttt

SEQ ID NO: 1396705 - DNA, 15 bp, Homo sapiens
ctataattatacttt

SEQ ID NO: 1396706 - DNA, 15 bp, Homo sapiens
gctataattatactt

SEQ ID NO: 1396707 - DNA, 15 bp, Homo sapiens
ggctataattatact

SEQ ID NO: 1396708 - DNA, 15 bp, Homo sapiens
tggctataattatac

SEQ ID NO: 1396709 - DNA, 15 bp, Homo sapiens
gtggctataattata

SEQ ID NO: 1396710 - DNA, 15 bp, Homo sapiens
tgtggctataattat

SEQ ID NO: 1396711 - DNA, 15 bp, Homo sapiens
gtgtggctataatta

SEQ ID NO: 1396712 - DNA, 15 bp, Homo sapiens
cgtgtggctataatt

SEQ ID NO: 1396713 - DNA, 15 bp, Homo sapiens
tcgtgtggctataat

SEQ ID NO: 1396714 - DNA, 15 bp, Homo sapiens
ctcgtgtggctataa

SEQ ID NO: 1396715 - DNA, 15 bp, Homo sapiens
cctcgtgtggctata

SEQ ID NO: 1396716 - DNA, 15 bp, Homo sapiens
gcctcgtgtggctat

SEQ ID NO: 1396717 - DNA, 15 bp, Homo sapiens
ggcctcgtgtggcta

SEQ ID NO: 1396718 - DNA, 15 bp, Homo sapiens
gggcctcgtgtggct

SEQ ID NO: 1396719 - DNA, 15 bp, Homo sapiens
agggcctcgtgtggc

SEQ ID NO: 1396720 - DNA, 15 bp, Homo sapiens
cagggcctcgtgtgg

SEQ ID NO: 1396721 - DNA, 15 bp, Homo sapiens
tcagggcctcgtgtg

SEQ ID NO: 1396722 - DNA, 15 bp, Homo sapiens
ctcagggcctcgtgt

SEQ ID NO: 1396723 - DNA, 15 bp, Homo sapiens
gctcagggcctcgtg

SEQ ID NO: 1396724 - DNA, 15 bp, Homo sapiens
tgctcagggcctcgt

SEQ ID NO: 1396725 - DNA, 15 bp, Homo sapiens
gtgctcagggcctcg

SEQ ID NO: 1396726 - DNA, 15 bp, Homo sapiens
tgtgctcagggcctc

SEQ ID NO: 1396727 - DNA, 15 bp, Homo sapiens
gtgtgctcagggcct

SEQ ID NO: 1396728 - DNA, 15 bp, Homo sapiens
agtgtgctcagggcc

SEQ ID NO: 1396729 - DNA, 15 bp, Homo sapiens
aagtgtgctcagggc

SEQ ID NO: 1396730 - DNA, 15 bp, Homo sapiens
caagtgtgctcaggg

SEQ ID NO: 1396731 - DNA, 15 bp, Homo sapiens
acaagtgtgctcagg

SEQ ID NO: 1396732 - DNA, 15 bp, Homo sapiens
aacaagtgtgctcag

SEQ ID NO: 1396733 - DNA, 15 bp, Homo sapiens
gaacaagtgtgctca

SEQ ID NO: 1396734 - DNA, 15 bp, Homo sapiens
ggaacaagtgtgctc

SEQ ID NO: 1396735 - DNA, 15 bp, Homo sapiens
cggaacaagtgtgct

SEQ ID NO: 1396736 - DNA, 15 bp, Homo sapiens
acggaacaagtgtgc

SEQ ID NO: 1396737 - DNA, 15 bp, Homo sapiens
cacggaacaagtgtg

SEQ ID NO: 1396738 - DNA, 15 bp, Homo sapiens
acacggaacaagtgt

SEQ ID NO: 1396739 - DNA, 15 bp, Homo sapiens
cacacggaacaagtg

SEQ ID NO: 1396740 - DNA, 15 bp, Homo sapiens
acacacggaacaagt

SEQ ID NO: 1396741 - DNA, 15 bp, Homo sapiens
aacacacggaacaag

SEQ ID NO: 1396742 - DNA, 15 bp, Homo sapiens
aaacacacggaacaa

SEQ ID NO: 1396743 - DNA, 15 bp, Homo sapiens
caaacacacggaaca

SEQ ID NO: 1396744 - DNA, 15 bp, Homo sapiens
tcaaacacacggaac

SEQ ID NO: 1396745 - DNA, 15 bp, Homo sapiens
ttcaaacacacggaa

SEQ ID NO: 1396746 - DNA, 15 bp, Homo sapiens
attcaaacacacgga

SEQ ID NO: 1396747 - DNA, 15 bp, Homo sapiens
gattcaaacacacgg

SEQ ID NO: 1396748 - DNA, 15 bp, Homo sapiens
ggattcaaacacacg

SEQ ID NO: 1396749 - DNA, 15 bp, Homo sapiens
gggattcaaacacac

SEQ ID NO: 1396750 - DNA, 15 bp, Homo sapiens
tgggattcaaacaca

SEQ ID NO: 1396751 - DNA, 15 bp, Homo sapiens
ctgggattcaaacac

SEQ ID NO: 1396752 - DNA, 15 bp, Homo sapiens
gctgggattcaaaca

SEQ ID NO: 1396753 - DNA, 15 bp, Homo sapiens
tgctgggattcaaac

SEQ ID NO: 1396754 - DNA, 15 bp, Homo sapiens
ctgctgggattcaaa

SEQ ID NO: 1396755 - DNA, 15 bp, Homo sapiens
cctgctgggattcaa

SEQ ID NO: 1396756 - DNA, 15 bp, Homo sapiens
gcctgctgggattca

SEQ ID NO: 1396757 - DNA, 15 bp, Homo sapiens
agcctgctgggattc

SEQ ID NO: 1396758 - DNA, 15 bp, Homo sapiens
cagcctgctgggatt

SEQ ID NO: 1396759 - DNA, 15 bp, Homo sapiens
tcagcctgctgggat

SEQ ID NO: 1396760 - DNA, 15 bp, Homo sapiens
gtcagcctgctggga

SEQ ID NO: 1396761 - DNA, 15 bp, Homo sapiens
ggtcagcctgctggg

SEQ ID NO: 1396762 - DNA, 15 bp, Homo sapiens
aggtcagcctgctgg

SEQ ID NO: 1396763 - DNA, 15 bp, Homo sapiens
taggtcagcctgctg

SEQ ID NO: 1396764 - DNA, 15 bp, Homo sapiens
gtaggtcagcctgct

SEQ ID NO: 1396765 - DNA, 15 bp, Homo sapiens
ggtaggtcagcctgc

SEQ ID NO: 1396766 - DNA, 15 bp, Homo sapiens
aggtaggtcagcctg

SEQ ID NO: 1396767 - DNA, 15 bp, Homo sapiens
caggtaggtcagcct

SEQ ID NO: 1396768 - DNA, 15 bp, Homo sapiens
ccaggtaggtcagcc

SEQ ID NO: 1396769 - DNA, 15 bp, Homo sapiens
tccaggtaggtcagc

SEQ ID NO: 1396770 - DNA, 15 bp, Homo sapiens
atccaggtaggtcag

SEQ ID NO: 1396771 - DNA, 15 bp, Homo sapiens
catccaggtaggtca

SEQ ID NO: 1396772 - DNA, 15 bp, Homo sapiens
acatccaggtaggtc

SEQ ID NO: 1396773 - DNA, 15 bp, Homo sapiens
tacatccaggtaggt

SEQ ID NO: 1396774 - DNA, 15 bp, Homo sapiens
ctacatccaggtagg

SEQ ID NO: 1396775 - DNA, 15 bp, Homo sapiens
actacatccaggtag

SEQ ID NO: 1396776 - DNA, 15 bp, Homo sapiens
tactacatccaggta

SEQ ID NO: 1396777 - DNA, 15 bp, Homo sapiens
ctactacatccaggt

SEQ ID NO: 1396778 - DNA, 15 bp, Homo sapiens
cctactacatccagg

SEQ ID NO: 1396779 - DNA, 15 bp, Homo sapiens
gcctactacatccag

SEQ ID NO: 1396780 - DNA, 15 bp, Homo sapiens
tgcctactacatcca

SEQ ID NO: 1396781 - DNA, 15 bp, Homo sapiens
atgcctactacatcc

SEQ ID NO: 1396782 - DNA, 15 bp, Homo sapiens
tatgcctactacatc

SEQ ID NO: 1396783 - DNA, 15 bp, Homo sapiens
atatgcctactacat

SEQ ID NO: 1396784 - DNA, 15 bp, Homo sapiens
aatatgcctactaca

SEQ ID NO: 1396785 - DNA, 15 bp, Homo sapiens
gaatatgcctactac

SEQ ID NO: 1396786 - DNA, 15 bp, Homo sapiens
cgaatatgcctacta

SEQ ID NO: 1396787 - DNA, 15 bp, Homo sapiens
acgaatatgcctact

SEQ ID NO: 1396788 - DNA, 15 bp, Homo sapiens
gacgaatatgcctac

SEQ ID NO: 1396789 - DNA, 15 bp, Homo sapiens
agacgaatatgccta

SEQ ID NO: 1396790 - DNA, 15 bp, Homo sapiens
cagacgaatatgcct

SEQ ID NO: 1396791 - DNA, 15 bp, Homo sapiens
gcagacgaatatgcc

SEQ ID NO: 1396792 - DNA, 15 bp, Homo sapiens
tgcagacgaatatgc

SEQ ID NO: 1396793 - DNA, 15 bp, Homo sapiens
atgcagacgaatatg

SEQ ID NO: 1396794 - DNA, 15 bp, Homo sapiens
catgcagacgaatat

SEQ ID NO: 1396795 - DNA, 15 bp, Homo sapiens
ccatgcagacgaata

SEQ ID NO: 1396796 - DNA, 15 bp, Homo sapiens
tccatgcagacgaat

SEQ ID NO: 1396797 - DNA, 15 bp, Homo sapiens
ctccatgcagacgaa

SEQ ID NO: 1396798 - DNA, 15 bp, Homo sapiens
actccatgcagacga

SEQ ID NO: 1396799 - DNA, 15 bp, Homo sapiens
aactccatgcagacg

SEQ ID NO: 1396800 - DNA, 15 bp, Homo sapiens
gaactccatgcagac

SEQ ID NO: 1396801 - DNA, 15 bp, Homo sapiens
ggaactccatgcaga

SEQ ID NO: 1396802 - DNA, 15 bp, Homo sapiens
aggaactccatgcag

SEQ ID NO: 1396803 - DNA, 15 bp, Homo sapiens
gaggaactccatgca

SEQ ID NO: 1396804 - DNA, 15 bp, Homo sapiens
ggaggaactccatgc

SEQ ID NO: 1396805 - DNA, 15 bp, Homo sapiens
aggaggaactccatg

SEQ ID NO: 1396806 - DNA, 15 bp, Homo sapiens
caggaggaactccat

SEQ ID NO: 1396807 - DNA, 15 bp, Homo sapiens
ccaggaggaactcca

SEQ ID NO: 1396808 - DNA, 15 bp, Homo sapiens
tccaggaggaactcc

SEQ ID NO: 1396809 - DNA, 15 bp, Homo sapiens
atccaggaggaactc

SEQ ID NO: 1396810 - DNA, 15 bp, Homo sapiens
aatccaggaggaact

SEQ ID NO: 1396811 - DNA, 15 bp, Homo sapiens
gaatccaggaggaac

SEQ ID NO: 1396812 - DNA, 15 bp, Homo sapiens
ggaatccaggaggaa

SEQ ID NO: 1396813 - DNA, 15 bp, Homo sapiens
gggaatccaggagga

SEQ ID NO: 1396814 - DNA, 15 bp, Homo sapiens
agggaatccaggagg

SEQ ID NO: 1396815 - DNA, 15 bp, Homo sapiens
gagggaatccaggag

SEQ ID NO: 1396816 - DNA, 15 bp, Homo sapiens
ggagggaatccagga

SEQ ID NO: 1396817 - DNA, 15 bp, Homo sapiens
tggagggaatccagg

SEQ ID NO: 1396818 - DNA, 15 bp, Homo sapiens
gtggagggaatccag

SEQ ID NO: 1396819 - DNA, 15 bp, Homo sapiens
ggtggagggaatcca

SEQ ID NO: 1396820 - DNA, 15 bp, Homo sapiens
gggtggagggaatcc

SEQ ID NO: 1396821 - DNA, 15 bp, Homo sapiens
agggtggagggaatc

SEQ ID NO: 1396822 - DNA, 15 bp, Homo sapiens
gagggtggagggaat

SEQ ID NO: 1396823 - DNA, 15 bp, Homo sapiens
tgagggtggagggaa

SEQ ID NO: 1396824 - DNA, 15 bp, Homo sapiens
ctgagggtggaggga

SEQ ID NO: 1396825 - DNA, 15 bp, Homo sapiens
actgagggtggaggg

SEQ ID NO: 1396826 - DNA, 15 bp, Homo sapiens
tactgagggtggagg

SEQ ID NO: 1396827 - DNA, 15 bp, Homo sapiens
atactgagggtggag

SEQ ID NO: 1396828 - DNA, 15 bp, Homo sapiens
aatactgagggtgga

SEQ ID NO: 1396829 - DNA, 15 bp, Homo sapiens
taatactgagggtgg

SEQ ID NO: 1396830 - DNA, 15 bp, Homo sapiens
ctaatactgagggtg

SEQ ID NO: 1396831 - DNA, 15 bp, Homo sapiens
gctaatactgagggt

SEQ ID NO: 1396832 - DNA, 15 bp, Homo sapiens
ggctaatactgaggg

SEQ ID NO: 1396833 - DNA, 15 bp, Homo sapiens
aggctaatactgagg

SEQ ID NO: 1396834 - DNA, 15 bp, Homo sapiens
aaggctaatactgag

SEQ ID NO: 1396835 - DNA, 15 bp, Homo sapiens
caaggctaatactga

SEQ ID NO: 1396836 - DNA, 15 bp, Homo sapiens
acaaggctaatactg

SEQ ID NO: 1396837 - DNA, 15 bp, Homo sapiens
cacaaggctaatact

SEQ ID NO: 1396838 - DNA, 15 bp, Homo sapiens
ccacaaggctaatac

SEQ ID NO: 1396839 - DNA, 15 bp, Homo sapiens
tccacaaggctaata

SEQ ID NO: 1396840 - DNA, 15 bp, Homo sapiens
atccacaaggctaat

SEQ ID NO: 1396841 - DNA, 15 bp, Homo sapiens
aatccacaaggctaa

SEQ ID NO: 1396842 - DNA, 15 bp, Homo sapiens
taatccacaaggcta

SEQ ID NO: 1396843 - DNA, 15 bp, Homo sapiens
gtaatccacaaggct

SEQ ID NO: 1396844 - DNA, 15 bp, Homo sapiens
agtaatccacaaggc

SEQ ID NO: 1396845 - DNA, 15 bp, Homo sapiens
cagtaatccacaagg

SEQ ID NO: 1396846 - DNA, 15 bp, Homo sapiens
acagtaatccacaag

SEQ ID NO: 1396847 - DNA, 15 bp, Homo sapiens
aacagtaatccacaa

SEQ ID NO: 1396848 - DNA, 15 bp, Homo sapiens
caacagtaatccaca

SEQ ID NO: 1396849 - DNA, 15 bp, Homo sapiens
tcaacagtaatccac

SEQ ID NO: 1396850 - DNA, 15 bp, Homo sapiens
ttcaacagtaatcca

SEQ ID NO: 1396851 - DNA, 15 bp, Homo sapiens
cttcaacagtaatcc

SEQ ID NO: 1396852 - DNA, 15 bp, Homo sapiens
tcttcaacagtaatc

SEQ ID NO: 1396853 - DNA, 15 bp, Homo sapiens
gtcttcaacagtaat

SEQ ID NO: 1396854 - DNA, 15 bp, Homo sapiens
agtcttcaacagtaa

SEQ ID NO: 1396855 - DNA, 15 bp, Homo sapiens
gagtcttcaacagta

SEQ ID NO: 1396856 - DNA, 15 bp, Homo sapiens
agagtcttcaacagt

SEQ ID NO: 1396857 - DNA, 15 bp, Homo sapiens
cagagtcttcaacag

SEQ ID NO: 1396858 - DNA, 15 bp, Homo sapiens
tcagagtcttcaaca

SEQ ID NO: 1396859 - DNA, 15 bp, Homo sapiens
ctcagagtcttcaac

SEQ ID NO: 1396860 - DNA, 15 bp, Homo sapiens
cctcagagtcttcaa

SEQ ID NO: 1396861 - DNA, 15 bp, Homo sapiens
tcctcagagtcttca

SEQ ID NO: 1396862 - DNA, 15 bp, Homo sapiens
ttcctcagagtcttc

SEQ ID NO: 1396863 - DNA, 15 bp, Homo sapiens
attcctcagagtctt

SEQ ID NO: 1396864 - DNA, 15 bp, Homo sapiens
tattcctcagagtct

SEQ ID NO: 1396865 - DNA, 15 bp, Homo sapiens
ctattcctcagagtc

SEQ ID NO: 1396866 - DNA, 15 bp, Homo sapiens
cctattcctcagagt

SEQ ID NO: 1396867 - DNA, 15 bp, Homo sapiens
tcctattcctcagag

SEQ ID NO: 1396868 - DNA, 15 bp, Homo sapiens
ctcctattcctcaga

SEQ ID NO: 1396869 - DNA, 15 bp, Homo sapiens
gctcctattcctcag

SEQ ID NO: 1396870 - DNA, 15 bp, Homo sapiens
agctcctattcctca

SEQ ID NO: 1396871 - DNA, 15 bp, Homo sapiens
cagctcctattcctc

SEQ ID NO: 1396872 - DNA, 15 bp, Homo sapiens
tcagctcctattcct

SEQ ID NO: 1396873 - DNA, 15 bp, Homo sapiens
ttcagctcctattcc

SEQ ID NO: 1396874 - DNA, 15 bp, Homo sapiens
attcagctcctattc

SEQ ID NO: 1396875 - DNA, 15 bp, Homo sapiens
cattcagctcctatt

SEQ ID NO: 1396876 - DNA, 15 bp, Homo sapiens
ccattcagctcctat

SEQ ID NO: 1396877 - DNA, 15 bp, Homo sapiens
accattcagctccta

SEQ ID NO: 1396878 - DNA, 15 bp, Homo sapiens
taccattcagctcct

SEQ ID NO: 1396879 - DNA, 15 bp, Homo sapiens
ctaccattcagctcc

SEQ ID NO: 1396880 - DNA, 15 bp, Homo sapiens
tctaccattcagctc

SEQ ID NO: 1396881 - DNA, 15 bp, Homo sapiens
ctctaccattcagct

SEQ ID NO: 1396882 - DNA, 15 bp, Homo sapiens
cctctaccattcagc

SEQ ID NO: 1396883 - DNA, 15 bp, Homo sapiens
tcctctaccattcag

SEQ ID NO: 1396884 - DNA, 15 bp, Homo sapiens
ttcctctaccattca

SEQ ID NO: 1396885 - DNA, 15 bp, Homo sapiens
tttcctctaccattc

SEQ ID NO: 1396886 - DNA, 15 bp, Homo sapiens
ctttcctctaccatt

SEQ ID NO: 1396887 - DNA, 15 bp, Homo sapiens
cctttcctctaccat

SEQ ID NO: 1396888 - DNA, 15 bp, Homo sapiens
gcctttcctctacca

SEQ ID NO: 1396889 - DNA, 15 bp, Homo sapiens
ggcctttcctctacc

SEQ ID NO: 1396890 - DNA, 15 bp, Homo sapiens
aggcctttcctctac

SEQ ID NO: 1396891 - DNA, 15 bp, Homo sapiens
gaggcctttcctcta

SEQ ID NO: 1396892 - DNA, 15 bp, Homo sapiens
agaggcctttcctct

SEQ ID NO: 1396893 - DNA, 15 bp, Homo sapiens
tagaggcctttcctc

SEQ ID NO: 1396894 - DNA, 15 bp, Homo sapiens
ctagaggcctttcct

SEQ ID NO: 1396895 - DNA, 15 bp, Homo sapiens
tctagaggcctttcc

SEQ ID NO: 1396896 - DNA, 15 bp, Homo sapiens
atctagaggcctttc

SEQ ID NO: 1396897 - DNA, 15 bp, Homo sapiens
gatctagaggccttt

SEQ ID NO: 1396898 - DNA, 15 bp, Homo sapiens
agatctagaggcctt

SEQ ID NO: 1396899 - DNA, 15 bp, Homo sapiens
aagatctagaggcct

SEQ ID NO: 1396900 - DNA, 15 bp, Homo sapiens
caagatctagaggcc

SEQ ID NO: 1396901 - DNA, 15 bp, Homo sapiens
acaagatctagaggc

SEQ ID NO: 1396902 - DNA, 15 bp, Homo sapiens
tacaagatctagagg

SEQ ID NO: 1396903 - DNA, 15 bp, Homo sapiens
atacaagatctagag

SEQ ID NO: 1396904 - DNA, 15 bp, Homo sapiens
aatacaagatctaga

SEQ ID NO: 1396905 - DNA, 15 bp, Homo sapiens
gaatacaagatctag

SEQ ID NO: 1396906 - DNA, 15 bp, Homo sapiens
ggaatacaagatcta

SEQ ID NO: 1396907 - DNA, 15 bp, Homo sapiens
gggaatacaagatct

SEQ ID NO: 1396908 - DNA, 15 bp, Homo sapiens
agggaatacaagatc

SEQ ID NO: 1396909 - DNA, 15 bp, Homo sapiens
cagggaatacaagat

SEQ ID NO: 1396910 - DNA, 15 bp, Homo sapiens
tcagggaatacaaga

SEQ ID NO: 1396911 - DNA, 15 bp, Homo sapiens
ctcagggaatacaag

SEQ ID NO: 1396912 - DNA, 15 bp, Homo sapiens
cctcagggaatacaa

SEQ ID NO: 1396913 - DNA, 15 bp, Homo sapiens
tcctcagggaataca

SEQ ID NO: 1396914 - DNA, 15 bp, Homo sapiens
gtcctcagggaatac

SEQ ID NO: 1396915 - DNA, 15 bp, Homo sapiens
ggtcctcagggaata

SEQ ID NO: 1396916 - DNA, 15 bp, Homo sapiens
tggtcctcagggaat

SEQ ID NO: 1396917 - DNA, 15 bp, Homo sapiens
atggtcctcagggaa

SEQ ID NO: 1396918 - DNA, 15 bp, Homo sapiens
catggtcctcaggga

SEQ ID NO: 1396919 - DNA, 15 bp, Homo sapiens
ccatggtcctcaggg

SEQ ID NO: 1396920 - DNA, 15 bp, Homo sapiens
tccatggtcctcagg

SEQ ID NO: 1396921 - DNA, 15 bp, Homo sapiens
ctccatggtcctcag

SEQ ID NO: 1396922 - DNA, 15 bp, Homo sapiens
gctccatggtcctca

SEQ ID NO: 1396923 - DNA, 15 bp, Homo sapiens
ggctccatggtcctc

SEQ ID NO: 1396924 - DNA, 15 bp, Homo sapiens
gggctccatggtcct

SEQ ID NO: 1396925 - DNA, 15 bp, Homo sapiens
agggctccatggtcc

SEQ ID NO: 1396926 - DNA, 15 bp, Homo sapiens
gagggctccatggtc

SEQ ID NO: 1396927 - DNA, 15 bp, Homo sapiens
agagggctccatggt

SEQ ID NO: 1396928 - DNA, 15 bp, Homo sapiens
cagagggctccatgg

SEQ ID NO: 1396929 - DNA, 15 bp, Homo sapiens
ccagagggctccatg

SEQ ID NO: 1396930 - DNA, 15 bp, Homo sapiens
accagagggctccat

SEQ ID NO: 1396931 - DNA, 15 bp, Homo sapiens
gaccagagggctcca

SEQ ID NO: 1396932 - DNA, 15 bp, Homo sapiens
ggaccagagggctcc

SEQ ID NO: 1396933 - DNA, 15 bp, Homo sapiens
aggaccagagggctc

SEQ ID NO: 1396934 - DNA, 15 bp, Homo sapiens
gaggaccagagggct

SEQ ID NO: 1396935 - DNA, 15 bp, Homo sapiens
agaggaccagagggc

SEQ ID NO: 1396936 - DNA, 15 bp, Homo sapiens
aagaggaccagaggg

SEQ ID NO: 1396937 - DNA, 15 bp, Homo sapiens
caagaggaccagagg

SEQ ID NO: 1396938 - DNA, 15 bp, Homo sapiens
ccaagaggaccagag

SEQ ID NO: 1396939 - DNA, 15 bp, Homo sapiens
accaagaggaccaga

SEQ ID NO: 1396940 - DNA, 15 bp, Homo sapiens
aaccaagaggaccag

SEQ ID NO: 1396941 - DNA, 15 bp, Homo sapiens
taaccaagaggacca

SEQ ID NO: 1396942 - DNA, 15 bp, Homo sapiens
ctaaccaagaggacc

SEQ ID NO: 1396943 - DNA, 15 bp, Homo sapiens
tctaaccaagaggac

SEQ ID NO: 1396944 - DNA, 15 bp, Homo sapiens
ctctaaccaagagga

SEQ ID NO: 1396945 - DNA, 15 bp, Homo sapiens
actctaaccaagagg

SEQ ID NO: 1396946 - DNA, 15 bp, Homo sapiens
cactctaaccaagag

SEQ ID NO: 1396947 - DNA, 15 bp, Homo sapiens
ccactctaaccaaga

SEQ ID NO: 1396948 - DNA, 15 bp, Homo sapiens
cccactctaaccaag

SEQ ID NO: 1396949 - DNA, 15 bp, Homo sapiens
gcccactctaaccaa

SEQ ID NO: 1396950 - DNA, 15 bp, Homo sapiens
agcccactctaacca

SEQ ID NO: 1396951 - DNA, 15 bp, Homo sapiens
cagcccactctaacc

SEQ ID NO: 1396952 - DNA, 15 bp, Homo sapiens
acagcccactctaac

SEQ ID NO: 1396953 - DNA, 15 bp, Homo sapiens
aacagcccactctaa

SEQ ID NO: 1396954 - DNA, 15 bp, Homo sapiens
aaacagcccactcta

SEQ ID NO: 1396955 - DNA, 15 bp, Homo sapiens
gaaacagcccactct

SEQ ID NO: 1396956 - DNA, 15 bp, Homo sapiens
agaaacagcccactc

SEQ ID NO: 1396957 - DNA, 15 bp, Homo sapiens
gagaaacagcccact

SEQ ID NO: 1396958 - DNA, 15 bp, Homo sapiens
tgagaaacagcccac

SEQ ID NO: 1396959 - DNA, 15 bp, Homo sapiens
gtgagaaacagccca

SEQ ID NO: 1396960 - DNA, 15 bp, Homo sapiens
cgtgagaaacagccc

SEQ ID NO: 1396961 - DNA, 15 bp, Homo sapiens
acgtgagaaacagcc

SEQ ID NO: 1396962 - DNA, 15 bp, Homo sapiens
cacgtgagaaacagc

SEQ ID NO: 1396963 - DNA, 15 bp, Homo sapiens
gcacgtgagaaacag

SEQ ID NO: 1396964 - DNA, 15 bp, Homo sapiens
tgcacgtgagaaaca

SEQ ID NO: 1396965 - DNA, 15 bp, Homo sapiens
ctgcacgtgagaaac

SEQ ID NO: 1396966 - DNA, 15 bp, Homo sapiens
actgcacgtgagaaa

SEQ ID NO: 1396967 - DNA, 15 bp, Homo sapiens
aactgcacgtgagaa

SEQ ID NO: 1396968 - DNA, 15 bp, Homo sapiens
aaactgcacgtgaga

SEQ ID NO: 1396969 - DNA, 15 bp, Homo sapiens
gaaactgcacgtgag

SEQ ID NO: 1396970 - DNA, 15 bp, Homo sapiens
tgaaactgcacgtga

SEQ ID NO: 1396971 - DNA, 15 bp, Homo sapiens
gtgaaactgcacgtg

SEQ ID NO: 1396972 - DNA, 15 bp, Homo sapiens
tgtgaaactgcacgt

SEQ ID NO: 1396973 - DNA, 15 bp, Homo sapiens
ctgtgaaactgcacg

SEQ ID NO: 1396974 - DNA, 15 bp, Homo sapiens
gctgtgaaactgcac

SEQ ID NO: 1396975 - DNA, 15 bp, Homo sapiens
ggctgtgaaactgca

SEQ ID NO: 1396976 - DNA, 15 bp, Homo sapiens
aggctgtgaaactgc

SEQ ID NO: 1396977 - DNA, 15 bp, Homo sapiens
gaggctgtgaaactg

SEQ ID NO: 1396978 - DNA, 15 bp, Homo sapiens
agaggctgtgaaact

SEQ ID NO: 1396979 - DNA, 15 bp, Homo sapiens
gagaggctgtgaaac

SEQ ID NO: 1396980 - DNA, 15 bp, Homo sapiens
ggagaggctgtgaaa

SEQ ID NO: 1396981 - DNA, 15 bp, Homo sapiens
gggagaggctgtgaa

SEQ ID NO: 1396982 - DNA, 15 bp, Homo sapiens
ggggagaggctgtga

SEQ ID NO: 1396983 - DNA, 15 bp, Homo sapiens
gggggagaggctgtg

SEQ ID NO: 1396984 - DNA, 15 bp, Homo sapiens
tgggggagaggctgt

SEQ ID NO: 1396985 - DNA, 15 bp, Homo sapiens
ctgggggagaggctg

SEQ ID NO: 1396986 - DNA, 15 bp, Homo sapiens
gctgggggagaggct

SEQ ID NO: 1396987 - DNA, 15 bp, Homo sapiens
tgctgggggagaggc

SEQ ID NO: 1396988 - DNA, 15 bp, Homo sapiens
gtgctgggggagagg

SEQ ID NO: 1396989 - DNA, 15 bp, Homo sapiens
ggtgctgggggagag

SEQ ID NO: 1396990 - DNA, 15 bp, Homo sapiens
gggtgctgggggaga

SEQ ID NO: 1396991 - DNA, 15 bp, Homo sapiens
gggggtgctggggga

SEQ ID NO: 1396992 - DNA, 15 bp, Homo sapiens
tgggggtgctggggg

SEQ ID NO: 1396993 - DNA, 15 bp, Homo sapiens
ctgggggtgctgggg

SEQ ID NO: 1396994 - DNA, 15 bp, Homo sapiens
gctgggggtgctggg

SEQ ID NO: 1396995 - DNA, 15 bp, Homo sapiens
tgctgggggtgctgg

SEQ ID NO: 1396996 - DNA, 15 bp, Homo sapiens
ctgctgggggtgctg

SEQ ID NO: 1396997 - DNA, 15 bp, Homo sapiens
cctgctgggggtgct

SEQ ID NO: 1396998 - DNA, 15 bp, Homo sapiens
acctgctgggggtgc

SEQ ID NO: 1396999 - DNA, 15 bp, Homo sapiens
cacctgctgggggtg

SEQ ID NO: 1397000 - DNA, 15 bp, Homo sapiens
ccacctgctgggggt

SEQ ID NO: 1397001 - DNA, 15 bp, Homo sapiens
gccacctgctggggg

SEQ ID NO: 1397002 - DNA, 15 bp, Homo sapiens
agccacctgctgggg

SEQ ID NO: 1397003 - DNA, 15 bp, Homo sapiens
gagccacctgctggg

SEQ ID NO: 1397004 - DNA, 15 bp, Homo sapiens
agagccacctgctgg

SEQ ID NO: 1397005 - DNA, 15 bp, Homo sapiens
aagagccacctgctg

SEQ ID NO: 1397006 - DNA, 15 bp, Homo sapiens
aaagagccacctgct

SEQ ID NO: 1397007 - DNA, 15 bp, Homo sapiens
gaaagagccacctgc

SEQ ID NO: 1397008 - DNA, 15 bp, Homo sapiens
agaaagagccacctg

SEQ ID NO: 1397009 - DNA, 15 bp, Homo sapiens
gagaaagagccacct

SEQ ID NO: 1397010 - DNA, 15 bp, Homo sapiens
ggagaaagagccacc

SEQ ID NO: 1397011 - DNA, 15 bp, Homo sapiens
aggagaaagagccac

SEQ ID NO: 1397012 - DNA, 15 bp, Homo sapiens
gaggagaaagagcca

SEQ ID NO: 1397013 - DNA, 15 bp, Homo sapiens
ggaggagaaagagcc

SEQ ID NO: 1397014 - DNA, 15 bp, Homo sapiens
aggaggagaaagagc

SEQ ID NO: 1397015 - DNA, 15 bp, Homo sapiens
caggaggagaaagag

SEQ ID NO: 1397016 - DNA, 15 bp, Homo sapiens
gcaggaggagaaaga

SEQ ID NO: 1397017 - DNA, 15 bp, Homo sapiens
tgcaggaggagaaag

SEQ ID NO: 1397018 - DNA, 15 bp, Homo sapiens
ctgcaggaggagaaa

SEQ ID NO: 1397019 - DNA, 15 bp, Homo sapiens
cctgcaggaggagaa

SEQ ID NO: 1397020 - DNA, 15 bp, Homo sapiens
gcctgcaggaggaga

SEQ ID NO: 1397021 - DNA, 15 bp, Homo sapiens
ggcctgcaggaggag

SEQ ID NO: 1397022 - DNA, 15 bp, Homo sapiens
gggcctgcaggagga

SEQ ID NO: 1397023 - DNA, 15 bp, Homo sapiens
cgggcctgcaggagg

SEQ ID NO: 1397024 - DNA, 15 bp, Homo sapiens
gcgggcctgcaggag

SEQ ID NO: 1397025 - DNA, 15 bp, Homo sapiens
ggcgggcctgcagga

SEQ ID NO: 1397026 - DNA, 15 bp, Homo sapiens
gggcgggcctgcagg

SEQ ID NO: 1397027 - DNA, 15 bp, Homo sapiens
ggggcgggcctgcag

SEQ ID NO: 1397028 - DNA, 15 bp, Homo sapiens
tggggcgggcctgca

SEQ ID NO: 1397029 - DNA, 15 bp, Homo sapiens
atggggcgggcctgc

SEQ ID NO: 1397030 - DNA, 15 bp, Homo sapiens
gatggggcgggcctg

SEQ ID NO: 1397031 - DNA, 15 bp, Homo sapiens
cgatggggcgggcct

SEQ ID NO: 1397032 - DNA, 15 bp, Homo sapiens
tcgatggggcgggcc

SEQ ID NO: 1397033 - DNA, 15 bp, Homo sapiens
gtcgatggggcgggc

SEQ ID NO: 1397034 - DNA, 15 bp, Homo sapiens
ggtcgatggggcggg

SEQ ID NO: 1397035 - DNA, 15 bp, Homo sapiens
gggtcgatggggcgg

SEQ ID NO: 1397036 - DNA, 15 bp, Homo sapiens
tgggtcgatggggcg

SEQ ID NO: 1397037 - DNA, 15 bp, Homo sapiens
ctgggtcgatggggc

SEQ ID NO: 1397038 - DNA, 15 bp, Homo sapiens
cctgggtcgatgggg

SEQ ID NO: 1397039 - DNA, 15 bp, Homo sapiens
gcctgggtcgatggg

SEQ ID NO: 1397040 - DNA, 15 bp, Homo sapiens
tgcctgggtcgatgg

SEQ ID NO: 1397041 - DNA, 15 bp, Homo sapiens
ctgcctgggtcgatg

SEQ ID NO: 1397042 - DNA, 15 bp, Homo sapiens
actgcctgggtcgat

SEQ ID NO: 1397043 - DNA, 15 bp, Homo sapiens
gactgcctgggtcga

SEQ ID NO: 1397044 - DNA, 15 bp, Homo sapiens
agactgcctgggtcg

SEQ ID NO: 1397045 - DNA, 15 bp, Homo sapiens
gagactgcctgggtc

SEQ ID NO: 1397046 - DNA, 15 bp, Homo sapiens
agagactgcctgggt

SEQ ID NO: 1397047 - DNA, 15 bp, Homo sapiens
gagagactgcctggg

SEQ ID NO: 1397048 - DNA, 15 bp, Homo sapiens
tgagagactgcctgg

SEQ ID NO: 1397049 - DNA, 15 bp, Homo sapiens
ctgagagactgcctg

SEQ ID NO: 1397050 - DNA, 15 bp, Homo sapiens
cctgagagactgcct

SEQ ID NO: 1397051 - DNA, 15 bp, Homo sapiens
gcctgagagactgcc

SEQ ID NO: 1397052 - DNA, 15 bp, Homo sapiens
tgcctgagagactgc

SEQ ID NO: 1397053 - DNA, 15 bp, Homo sapiens
ctgcctgagagactg

SEQ ID NO: 1397054 - DNA, 15 bp, Homo sapiens
gctgcctgagagact

SEQ ID NO: 1397055 - DNA, 15 bp, Homo sapiens
ggctgcctgagagac

SEQ ID NO: 1397056 - DNA, 15 bp, Homo sapiens
aggctgcctgagaga

SEQ ID NO: 1397057 - DNA, 15 bp, Homo sapiens
gaggctgcctgagag

SEQ ID NO: 1397058 - DNA, 15 bp, Homo sapiens
tgaggctgcctgaga

SEQ ID NO: 1397059 - DNA, 15 bp, Homo sapiens
atgaggctgcctgag

SEQ ID NO: 1397060 - DNA, 15 bp, Homo sapiens
gatgaggctgcctga

SEQ ID NO: 1397061 - DNA, 15 bp, Homo sapiens
tgatgaggctgcctg

SEQ ID NO: 1397062 - DNA, 15 bp, Homo sapiens
atgatgaggctgcct

SEQ ID NO: 1397063 - DNA, 15 bp, Homo sapiens
catgatgaggctgcc

SEQ ID NO: 1397064 - DNA, 15 bp, Homo sapiens
tcatgatgaggctgc

SEQ ID NO: 1397065 - DNA, 15 bp, Homo sapiens
ctcatgatgaggctg

SEQ ID NO: 1397066 - DNA, 15 bp, Homo sapiens
gctcatgatgaggct

SEQ ID NO: 1397067 - DNA, 15 bp, Homo sapiens
tgctcatgatgaggc

SEQ ID NO: 1397068 - DNA, 15 bp, Homo sapiens
gtgctcatgatgagg

SEQ ID NO: 1397069 - DNA, 15 bp, Homo sapiens
tgtgctcatgatgag

SEQ ID NO: 1397070 - DNA, 15 bp, Homo sapiens
ctgtgctcatgatga

SEQ ID NO: 1397071 - DNA, 15 bp, Homo sapiens
tctgtgctcatgatg

SEQ ID NO: 1397072 - DNA, 15 bp, Homo sapiens
ctctgtgctcatgat

SEQ ID NO: 1397073 - DNA, 15 bp, Homo sapiens
tctctgtgctcatga

SEQ ID NO: 1397074 - DNA, 15 bp, Homo sapiens
ttctctgtgctcatg

SEQ ID NO: 1397075 - DNA, 15 bp, Homo sapiens
cttctctgtgctcat

SEQ ID NO: 1397076 - DNA, 15 bp, Homo sapiens
ccttctctgtgctca

SEQ ID NO: 1397077 - DNA, 15 bp, Homo sapiens
tccttctctgtgctc

SEQ ID NO: 1397078 - DNA, 15 bp, Homo sapiens
ctccttctctgtgct

SEQ ID NO: 1397079 - DNA, 15 bp, Homo sapiens
cctccttctctgtgc

SEQ ID NO: 1397080 - DNA, 15 bp, Homo sapiens
gcctccttctctgtg

SEQ ID NO: 1397081 - DNA, 15 bp, Homo sapiens
cgcctccttctctgt

SEQ ID NO: 1397082 - DNA, 15 bp, Homo sapiens
tcgcctccttctctg

SEQ ID NO: 1397083 - DNA, 15 bp, Homo sapiens
atcgcctccttctct

SEQ ID NO: 1397084 - DNA, 15 bp, Homo sapiens
aatcgcctccttctc

SEQ ID NO: 1397085 - DNA, 15 bp, Homo sapiens
gaatcgcctccttct

SEQ ID NO: 1397086 - DNA, 15 bp, Homo sapiens
agaatcgcctccttc

SEQ ID NO: 1397087 - DNA, 15 bp, Homo sapiens
gagaatcgcctcctt

SEQ ID NO: 1397088 - DNA, 15 bp, Homo sapiens
agagaatcgcctcct

SEQ ID NO: 1397089 - DNA, 15 bp, Homo sapiens
aagagaatcgcctcc

SEQ ID NO: 1397090 - DNA, 15 bp, Homo sapiens
caagagaatcgcctc

SEQ ID NO: 1397091 - DNA, 15 bp, Homo sapiens
tcaagagaatcgcct

SEQ ID NO: 1397092 - DNA, 15 bp, Homo sapiens
gtcaagagaatcgcc

SEQ ID NO: 1397093 - DNA, 15 bp, Homo sapiens
ggtcaagagaatcgc

SEQ ID NO: 1397094 - DNA, 15 bp, Homo sapiens
aggtcaagagaatcg

SEQ ID NO: 1397095 - DNA, 15 bp, Homo sapiens
gaggtcaagagaatc

SEQ ID NO: 1397096 - DNA, 15 bp, Homo sapiens
agaggtcaagagaat

SEQ ID NO: 1397097 - DNA, 15 bp, Homo sapiens
cagaggtcaagagaa

SEQ ID NO: 1397098 - DNA, 15 bp, Homo sapiens
acagaggtcaagaga

SEQ ID NO: 1397099 - DNA, 15 bp, Homo sapiens
tacagaggtcaagag

SEQ ID NO: 1397100 - DNA, 15 bp, Homo sapiens
gtacagaggtcaaga

SEQ ID NO: 1397101 - DNA, 15 bp, Homo sapiens
ggtacagaggtcaag

SEQ ID NO: 1397102 - DNA, 15 bp, Homo sapiens
tggtacagaggtcaa

SEQ ID NO: 1397103 - DNA, 15 bp, Homo sapiens
gtggtacagaggtca

SEQ ID NO: 1397104 - DNA, 15 bp, Homo sapiens
tgtggtacagaggtc

SEQ ID NO: 1397105 - DNA, 15 bp, Homo sapiens
ctgtggtacagaggt

SEQ ID NO: 1397106 - DNA, 15 bp, Homo sapiens
gctgtggtacagagg

SEQ ID NO: 1397107 - DNA, 15 bp, Homo sapiens
agctgtggtacagag

SEQ ID NO: 1397108 - DNA, 15 bp, Homo sapiens
aagctgtggtacaga

SEQ ID NO: 1397109 - DNA, 15 bp, Homo sapiens
aaagctgtggtacag

SEQ ID NO: 1397110 - DNA, 15 bp, Homo sapiens
aaaagctgtggtaca

SEQ ID NO: 1397111 - DNA, 15 bp, Homo sapiens
aaaaagctgtggtac

SEQ ID NO: 1397112 - DNA, 15 bp, Homo sapiens
caaaaagctgtggta

SEQ ID NO: 1397113 - DNA, 15 bp, Homo sapiens
ccaaaaagctgtggt

SEQ ID NO: 1397114 - DNA, 15 bp, Homo sapiens
accaaaaagctgtgg

SEQ ID NO: 1397115 - DNA, 15 bp, Homo sapiens
aaccaaaaagctgtg

SEQ ID NO: 1397116 - DNA, 15 bp, Homo sapiens
aaaccaaaaagctgt

SEQ ID NO: 1397117 - DNA, 15 bp, Homo sapiens
aaaaccaaaaagctg

SEQ ID NO: 1397118 - DNA, 15 bp, Homo sapiens
gaaaaccaaaaagct

SEQ ID NO: 1397119 - DNA, 15 bp, Homo sapiens
ggaaaaccaaaaagc

SEQ ID NO: 1397120 - DNA, 15 bp, Homo sapiens
gggaaaaccaaaaag

SEQ ID NO: 1397121 - DNA, 15 bp, Homo sapiens
tgggaaaaccaaaaa

SEQ ID NO: 1397122 - DNA, 15 bp, Homo sapiens
ttgggaaaaccaaaa

SEQ ID NO: 1397123 - DNA, 15 bp, Homo sapiens
tttgggaaaaccaaa

SEQ ID NO: 1397124 - DNA, 15 bp, Homo sapiens
gtttgggaaaaccaa

SEQ ID NO: 1397125 - DNA, 15 bp, Homo sapiens
ggtttgggaaaacca

SEQ ID NO: 1397126 - DNA, 15 bp, Homo sapiens
gggtttgggaaaacc

SEQ ID NO: 1397127 - DNA, 15 bp, Homo sapiens
tgggtttgggaaaac

SEQ ID NO: 1397128 - DNA, 15 bp, Homo sapiens
ttgggtttgggaaaa

SEQ ID NO: 1397129 - DNA, 15 bp, Homo sapiens
attgggtttgggaaa

SEQ ID NO: 1397130 - DNA, 15 bp, Homo sapiens
cattgggtttgggaa

SEQ ID NO: 1397131 - DNA, 15 bp, Homo sapiens
acattgggtttggga

SEQ ID NO: 1397132 - DNA, 15 bp, Homo sapiens
aacattgggtttggg

SEQ ID NO: 1397133 - DNA, 15 bp, Homo sapiens
aaacattgggtttgg

SEQ ID NO: 1397134 - DNA, 15 bp, Homo sapiens
caaacattgggtttg

SEQ ID NO: 1397135 - DNA, 15 bp, Homo sapiens
tcaaacattgggttt

SEQ ID NO: 1397136 - DNA, 15 bp, Homo sapiens
ttcaaacattgggtt

SEQ ID NO: 1397137 - DNA, 15 bp, Homo sapiens
tttcaaacattgggt

SEQ ID NO: 1397138 - DNA, 15 bp, Homo sapiens
atttcaaacattggg

SEQ ID NO: 1397139 - DNA, 15 bp, Homo sapiens
tatttcaaacattgg

SEQ ID NO: 1397140 - DNA, 15 bp, Homo sapiens
atatttcaaacattg

SEQ ID NO: 1397141 - DNA, 15 bp, Homo sapiens
tatatttcaaacatt

SEQ ID NO: 1397142 - DNA, 15 bp, Homo sapiens
ttatatttcaaacat

SEQ ID NO: 1397143 - DNA, 15 bp, Homo sapiens
attatatttcaaaca

SEQ ID NO: 1397144 - DNA, 15 bp, Homo sapiens
tattatatttcaaac

SEQ ID NO: 1397145 - DNA, 15 bp, Homo sapiens
atattatatttcaaa

SEQ ID NO: 1397146 - DNA, 15 bp, Homo sapiens
tatattatatttcaa

SEQ ID NO: 1397147 - DNA, 15 bp, Homo sapiens
ttatattatatttca

SEQ ID NO: 1397148 - DNA, 15 bp, Homo sapiens
tttatattatatttc

SEQ ID NO: 1397149 - DNA, 15 bp, Homo sapiens
ttttatattatattt

SEQ ID NO: 1397150 - DNA, 15 bp, Homo sapiens
tttttatattatatt

SEQ ID NO: 1397151 - DNA, 15 bp, Homo sapiens
atttttatattatat

SEQ ID NO: 1397152 - DNA, 15 bp, Homo sapiens
aatttttatattata

SEQ ID NO: 1397153 - DNA, 15 bp, Homo sapiens
taatttttatattat

SEQ ID NO: 1397154 - DNA, 15 bp, Homo sapiens
ataatttttatatta

SEQ ID NO: 1397155 - DNA, 15 bp, Homo sapiens
tataatttttatatt

SEQ ID NO: 1397156 - DNA, 15 bp, Homo sapiens
ctataatttttatat

SEQ ID NO: 1397157 - DNA, 15 bp, Homo sapiens
tctataatttttata

SEQ ID NO: 1397158 - DNA, 15 bp, Homo sapiens
ctctataatttttat

SEQ ID NO: 1397159 - DNA, 15 bp, Homo sapiens
cctctataattttta

SEQ ID NO: 1397160 - DNA, 15 bp, Homo sapiens
ccctctataattttt

SEQ ID NO: 1397161 - DNA, 15 bp, Homo sapiens
gccctctataatttt

SEQ ID NO: 1397162 - DNA, 15 bp, Homo sapiens
tgccctctataattt

SEQ ID NO: 1397163 - DNA, 15 bp, Homo sapiens
gtgccctctataatt

SEQ ID NO: 1397164 - DNA, 15 bp, Homo sapiens
agtgccctctataat

SEQ ID NO: 1397165 - DNA, 15 bp, Homo sapiens
gagtgccctctataa

SEQ ID NO: 1397166 - DNA, 15 bp, Homo sapiens
agagtgccctctata

SEQ ID NO: 1397167 - DNA, 15 bp, Homo sapiens
tagagtgccctctat

SEQ ID NO: 1397168 - DNA, 15 bp, Homo sapiens
ttagagtgccctcta

SEQ ID NO: 1397169 - DNA, 15 bp, Homo sapiens
tttagagtgccctct

SEQ ID NO: 1397170 - DNA, 15 bp, Homo sapiens
ctttagagtgccctc

SEQ ID NO: 1397171 - DNA, 15 bp, Homo sapiens
tctttagagtgccct

SEQ ID NO: 1397172 - DNA, 15 bp, Homo sapiens
ctctttagagtgccc

SEQ ID NO: 1397173 - DNA, 15 bp, Homo sapiens
gctctttagagtgcc

SEQ ID NO: 1397174 - DNA, 15 bp, Homo sapiens
tgctctttagagtgc

SEQ ID NO: 1397175 - DNA, 15 bp, Homo sapiens
gtgctctttagagtg

SEQ ID NO: 1397176 - DNA, 15 bp, Homo sapiens
ggtgctctttagagt

SEQ ID NO: 1397177 - DNA, 15 bp, Homo sapiens
tggtgctctttagag

SEQ ID NO: 1397178 - DNA, 15 bp, Homo sapiens
ctggtgctctttaga

SEQ ID NO: 1397179 - DNA, 15 bp, Homo sapiens
gctggtgctctttag

SEQ ID NO: 1397180 - DNA, 15 bp, Homo sapiens
agctggtgctcttta

SEQ ID NO: 1397181 - DNA, 15 bp, Homo sapiens
aagctggtgctcttt

SEQ ID NO: 1397182 - DNA, 15 bp, Homo sapiens
aaagctggtgctctt

SEQ ID NO: 1397183 - DNA, 15 bp, Homo sapiens
aaaagctggtgctct

SEQ ID NO: 1397184 - DNA, 15 bp, Homo sapiens
gaaaagctggtgctc

SEQ ID NO: 1397185 - DNA, 15 bp, Homo sapiens
agaaaagctggtgct

SEQ ID NO: 1397186 - DNA, 15 bp, Homo sapiens
aagaaaagctggtgc

SEQ ID NO: 1397187 - DNA, 15 bp, Homo sapiens
caagaaaagctggtg

SEQ ID NO: 1397188 - DNA, 15 bp, Homo sapiens
acaagaaaagctggt

SEQ ID NO: 1397189 - DNA, 15 bp, Homo sapiens
aacaagaaaagctgg

SEQ ID NO: 1397190 - DNA, 15 bp, Homo sapiens
aaacaagaaaagctg

SEQ ID NO: 1397191 - DNA, 15 bp, Homo sapiens
aaaacaagaaaagct

SEQ ID NO: 1397192 - DNA, 15 bp, Homo sapiens
aaaaaacaagaaaag

SEQ ID NO: 1397193 - DNA, 15 bp, Homo sapiens
aaaaaaacaagaaaa

SEQ ID NO: 1397194 - DNA, 15 bp, Homo sapiens
caaaaaaacaagaaa

SEQ ID NO: 1397195 - DNA, 15 bp, Homo sapiens
tcaaaaaaacaagaa

SEQ ID NO: 1397196 - DNA, 15 bp, Homo sapiens
atcaaaaaaacaaga

SEQ ID NO: 1397197 - DNA, 15 bp, Homo sapiens
catcaaaaaaacaag

SEQ ID NO: 1397198 - DNA, 15 bp, Homo sapiens
aatcatcaaaaaaac

SEQ ID NO: 1397199 - DNA, 15 bp, Homo sapiens
caatcatcaaaaaaa

SEQ ID NO: 1397200 - DNA, 15 bp, Homo sapiens
acaatcatcaaaaaa

SEQ ID NO: 1397201 - DNA, 15 bp, Homo sapiens
aacaatcatcaaaaa

SEQ ID NO: 1397202 - DNA, 15 bp, Homo sapiens
caacaatcatcaaaa

SEQ ID NO: 1397203 - DNA, 15 bp, Homo sapiens
ccaacaatcatcaaa

SEQ ID NO: 1397204 - DNA, 15 bp, Homo sapiens
tccaacaatcatcaa

SEQ ID NO: 1397205 - DNA, 15 bp, Homo sapiens
ttccaacaatcatca

SEQ ID NO: 1397206 - DNA, 15 bp, Homo sapiens
cttccaacaatcatc

SEQ ID NO: 1397207 - DNA, 15 bp, Homo sapiens
acttccaacaatcat

SEQ ID NO: 1397208 - DNA, 15 bp, Homo sapiens
cacttccaacaatca

SEQ ID NO: 1397209 - DNA, 15 bp, Homo sapiens
acacttccaacaatc

SEQ ID NO: 1397210 - DNA, 15 bp, Homo sapiens
tacacttccaacaat

SEQ ID NO: 1397211 - DNA, 15 bp, Homo sapiens
atacacttccaacaa

SEQ ID NO: 1397212 - DNA, 15 bp, Homo sapiens
aatacacttccaaca

SEQ ID NO: 1397213 - DNA, 15 bp, Homo sapiens
aaatacacttccaac

SEQ ID NO: 1397214 - DNA, 15 bp, Homo sapiens
caaatacacttccaa

SEQ ID NO: 1397215 - DNA, 15 bp, Homo sapiens
acaaatacacttcca

SEQ ID NO: 1397216 - DNA, 15 bp, Homo sapiens
gacaaatacacttcc

SEQ ID NO: 1397217 - DNA, 15 bp, Homo sapiens
tgacaaatacacttc

SEQ ID NO: 1397218 - DNA, 15 bp, Homo sapiens
atgacaaatacactt

SEQ ID NO: 1397219 - DNA, 15 bp, Homo sapiens
gatgacaaatacact

SEQ ID NO: 1397220 - DNA, 15 bp, Homo sapiens
tgatgacaaatacac

SEQ ID NO: 1397221 - DNA, 15 bp, Homo sapiens
ttgatgacaaataca

SEQ ID NO: 1397222 - DNA, 15 bp, Homo sapiens
cttgatgacaaatac

SEQ ID NO: 1397223 - DNA, 15 bp, Homo sapiens
tcttgatgacaaata

SEQ ID NO: 1397224 - DNA, 15 bp, Homo sapiens
ctcttgatgacaaat

SEQ ID NO: 1397225 - DNA, 15 bp, Homo sapiens
actcttgatgacaaa

SEQ ID NO: 1397226 - DNA, 15 bp, Homo sapiens
gactcttgatgacaa

SEQ ID NO: 1397227 - DNA, 15 bp, Homo sapiens
agactcttgatgaca

SEQ ID NO: 1397228 - DNA, 15 bp, Homo sapiens
gagactcttgatgac

SEQ ID NO: 1397229 - DNA, 15 bp, Homo sapiens
agagactcttgatga

SEQ ID NO: 1397230 - DNA, 15 bp, Homo sapiens
aagagactcttgatg

SEQ ID NO: 1397231 - DNA, 15 bp, Homo sapiens
taagagactcttgat

SEQ ID NO: 1397232 - DNA, 15 bp, Homo sapiens
gtaagagactcttga

SEQ ID NO: 1397233 - DNA, 15 bp, Homo sapiens
tgtaagagactcttg

SEQ ID NO: 1397234 - DNA, 15 bp, Homo sapiens
ttgtaagagactctt

SEQ ID NO: 1397235 - DNA, 15 bp, Homo sapiens
attgtaagagactct

SEQ ID NO: 1397236 - DNA, 15 bp, Homo sapiens
aattgtaagagactc

SEQ ID NO: 1397237 - DNA, 15 bp, Homo sapiens
caattgtaagagact

SEQ ID NO: 1397238 - DNA, 15 bp, Homo sapiens
acaattgtaagagac

SEQ ID NO: 1397239 - DNA, 15 bp, Homo sapiens
cacaattgtaagaga

SEQ ID NO: 1397240 - DNA, 15 bp, Homo sapiens
gcacaattgtaagag

SEQ ID NO: 1397241 - DNA, 15 bp, Homo sapiens
ggcacaattgtaaga

SEQ ID NO: 1397242 - DNA, 15 bp, Homo sapiens
tggcacaattgtaag

SEQ ID NO: 1397243 - DNA, 15 bp, Homo sapiens
ctggcacaattgtaa

SEQ ID NO: 1397244 - DNA, 15 bp, Homo sapiens
tctggcacaattgta

SEQ ID NO: 1397245 - DNA, 15 bp, Homo sapiens
atctggcacaattgt

SEQ ID NO: 1397246 - DNA, 15 bp, Homo sapiens
tatctggcacaattg

SEQ ID NO: 1397247 - DNA, 15 bp, Homo sapiens
ttatctggcacaatt

SEQ ID NO: 1397248 - DNA, 15 bp, Homo sapiens
gttatctggcacaat

SEQ ID NO: 1397249 - DNA, 15 bp, Homo sapiens
ggttatctggcacaa

SEQ ID NO: 1397250 - DNA, 15 bp, Homo sapiens
gggttatctggcaca

SEQ ID NO: 1397251 - DNA, 15 bp, Homo sapiens
agggttatctggcac

SEQ ID NO: 1397252 - DNA, 15 bp, Homo sapiens
tagggttatctggca

SEQ ID NO: 1397253 - DNA, 15 bp, Homo sapiens
ctagggttatctggc

SEQ ID NO: 1397254 - DNA, 15 bp, Homo sapiens
gctagggttatctgg

SEQ ID NO: 1397255 - DNA, 15 bp, Homo sapiens
tgctagggttatctg

SEQ ID NO: 1397256 - DNA, 15 bp, Homo sapiens
ctgctagggttatct

SEQ ID NO: 1397257 - DNA, 15 bp, Homo sapiens
actgctagggttatc

SEQ ID NO: 1397258 - DNA, 15 bp, Homo sapiens
gactgctagggttat

SEQ ID NO: 1397259 - DNA, 15 bp, Homo sapiens
agactgctagggtta

SEQ ID NO: 1397260 - DNA, 15 bp, Homo sapiens
aagactgctagggtt

SEQ ID NO: 1397261 - DNA, 15 bp, Homo sapiens
caagactgctagggt

SEQ ID NO: 1397262 - DNA, 15 bp, Homo sapiens
tcaagactgctaggg

SEQ ID NO: 1397263 - DNA, 15 bp, Homo sapiens
gtcaagactgctagg

SEQ ID NO: 1397264 - DNA, 15 bp, Homo sapiens
ggtcaagactgctag

SEQ ID NO: 1397265 - DNA, 15 bp, Homo sapiens
aggtcaagactgcta

SEQ ID NO: 1397266 - DNA, 15 bp, Homo sapiens
aaggtcaagactgct

SEQ ID NO: 1397267 - DNA, 15 bp, Homo sapiens
gaaggtcaagactgc

SEQ ID NO: 1397268 - DNA, 15 bp, Homo sapiens
ggaaggtcaagactg

SEQ ID NO: 1397269 - DNA, 15 bp, Homo sapiens
gggaaggtcaagact

SEQ ID NO: 1397270 - DNA, 15 bp, Homo sapiens
agggaaggtcaagac

SEQ ID NO: 1397271 - DNA, 15 bp, Homo sapiens
gagggaaggtcaaga

SEQ ID NO: 1397272 - DNA, 15 bp, Homo sapiens
ggagggaaggtcaag

SEQ ID NO: 1397273 - DNA, 15 bp, Homo sapiens
aggagggaaggtcaa

SEQ ID NO: 1397274 - DNA, 15 bp, Homo sapiens
aaggagggaaggtca

SEQ ID NO: 1397275 - DNA, 15 bp, Homo sapiens
caaggagggaaggtc

SEQ ID NO: 1397276 - DNA, 15 bp, Homo sapiens
gcaaggagggaaggt

SEQ ID NO: 1397277 - DNA, 15 bp, Homo sapiens
tgcaaggagggaagg

SEQ ID NO: 1397278 - DNA, 15 bp, Homo sapiens
ctgcaaggagggaag

SEQ ID NO: 1397279 - DNA, 15 bp, Homo sapiens
actgcaaggagggaa

SEQ ID NO: 1397280 - DNA, 15 bp, Homo sapiens
aactgcaaggaggga

SEQ ID NO: 1397281 - DNA, 15 bp, Homo sapiens
aaactgcaaggaggg

SEQ ID NO: 1397282 - DNA, 15 bp, Homo sapiens
caaactgcaaggagg

SEQ ID NO: 1397283 - DNA, 15 bp, Homo sapiens
tcaaactgcaaggag

SEQ ID NO: 1397284 - DNA, 15 bp, Homo sapiens
ttcaaactgcaagga

SEQ ID NO: 1397285 - DNA, 15 bp, Homo sapiens
attcaaactgcaagg

SEQ ID NO: 1397286 - DNA, 15 bp, Homo sapiens
tattcaaactgcaag

SEQ ID NO: 1397287 - DNA, 15 bp, Homo sapiens
ctattcaaactgcaa

SEQ ID NO: 1397288 - DNA, 15 bp, Homo sapiens
tctattcaaactgca

SEQ ID NO: 1397289 - DNA, 15 bp, Homo sapiens
gtctattcaaactgc

SEQ ID NO: 1397290 - DNA, 15 bp, Homo sapiens
ggtctattcaaactg

SEQ ID NO: 1397291 - DNA, 15 bp, Homo sapiens
aggtctattcaaact

SEQ ID NO: 1397292 - DNA, 15 bp, Homo sapiens
taggtctattcaaac

SEQ ID NO: 1397293 - DNA, 15 bp, Homo sapiens
gtaggtctattcaaa

SEQ ID NO: 1397294 - DNA, 15 bp, Homo sapiens
tgtaggtctattcaa

SEQ ID NO: 1397295 - DNA, 15 bp, Homo sapiens
atgtaggtctattca

SEQ ID NO: 1397296 - DNA, 15 bp, Homo sapiens
catgtaggtctattc

SEQ ID NO: 1397297 - DNA, 15 bp, Homo sapiens
acatgtaggtctatt

SEQ ID NO: 1397298 - DNA, 15 bp, Homo sapiens
cacatgtaggtctat

SEQ ID NO: 1397299 - DNA, 15 bp, Homo sapiens
tcacatgtaggtcta

SEQ ID NO: 1397300 - DNA, 15 bp, Homo sapiens
ctcacatgtaggtct

SEQ ID NO: 1397301 - DNA, 15 bp, Homo sapiens
cctcacatgtaggtc

SEQ ID NO: 1397302 - DNA, 15 bp, Homo sapiens
acctcacatgtaggt

SEQ ID NO: 1397303 - DNA, 15 bp, Homo sapiens
gacctcacatgtagg

SEQ ID NO: 1397304 - DNA, 15 bp, Homo sapiens
ggacctcacatgtag

SEQ ID NO: 1397305 - DNA, 15 bp, Homo sapiens
aggacctcacatgta

SEQ ID NO: 1397306 - DNA, 15 bp, Homo sapiens
aaggacctcacatgt

SEQ ID NO: 1397307 - DNA, 15 bp, Homo sapiens
caaggacctcacatg

SEQ ID NO: 1397308 - DNA, 15 bp, Homo sapiens
gcaaggacctcacat

SEQ ID NO: 1397309 - DNA, 15 bp, Homo sapiens
agcaaggacctcaca

SEQ ID NO: 1397310 - DNA, 15 bp, Homo sapiens
cagcaaggacctcac

SEQ ID NO: 1397311 - DNA, 15 bp, Homo sapiens
ccagcaaggacctca

SEQ ID NO: 1397312 - DNA, 15 bp, Homo sapiens
tccagcaaggacctc

SEQ ID NO: 1397313 - DNA, 15 bp, Homo sapiens
atccagcaaggacct

SEQ ID NO: 1397314 - DNA, 15 bp, Homo sapiens
tatccagcaaggacc

SEQ ID NO: 1397315 - DNA, 15 bp, Homo sapiens
atatccagcaaggac

SEQ ID NO: 1397316 - DNA, 15 bp, Homo sapiens
gatatccagcaagga

SEQ ID NO: 1397317 - DNA, 15 bp, Homo sapiens
agatatccagcaagg

SEQ ID NO: 1397318 - DNA, 15 bp, Homo sapiens
gagatatccagcaag

SEQ ID NO: 1397319 - DNA, 15 bp, Homo sapiens
agagatatccagcaa

SEQ ID NO: 1397320 - DNA, 15 bp, Homo sapiens
gagagatatccagca

SEQ ID NO: 1397321 - DNA, 15 bp, Homo sapiens
agagagatatccagc

SEQ ID NO: 1397322 - DNA, 15 bp, Homo sapiens
tagagagatatccag

SEQ ID NO: 1397323 - DNA, 15 bp, Homo sapiens
atagagagatatcca

SEQ ID NO: 1397324 - DNA, 15 bp, Homo sapiens
catagagagatatcc

SEQ ID NO: 1397325 - DNA, 15 bp, Homo sapiens
tcatagagagatatc

SEQ ID NO: 1397326 - DNA, 15 bp, Homo sapiens
ctcatagagagatat

SEQ ID NO: 1397327 - DNA, 15 bp, Homo sapiens
cctcatagagagata

SEQ ID NO: 1397328 - DNA, 15 bp, Homo sapiens
ccctcatagagagat

SEQ ID NO: 1397329 - DNA, 15 bp, Homo sapiens
accctcatagagaga

SEQ ID NO: 1397330 - DNA, 15 bp, Homo sapiens
caccctcatagagag

SEQ ID NO: 1397331 - DNA, 15 bp, Homo sapiens
ccaccctcatagaga

SEQ ID NO: 1397332 - DNA, 15 bp, Homo sapiens
gccaccctcatagag

SEQ ID NO: 1397333 - DNA, 15 bp, Homo sapiens
tgccaccctcataga

SEQ ID NO: 1397334 - DNA, 15 bp, Homo sapiens
gtgccaccctcatag

SEQ ID NO: 1397335 - DNA, 15 bp, Homo sapiens
ggtgccaccctcata

SEQ ID NO: 1397336 - DNA, 15 bp, Homo sapiens
gggtgccaccctcat

SEQ ID NO: 1397337 - DNA, 15 bp, Homo sapiens
agggtgccaccctca

SEQ ID NO: 1397338 - DNA, 15 bp, Homo sapiens
gagggtgccaccctc

SEQ ID NO: 1397339 - DNA, 15 bp, Homo sapiens
ggagggtgccaccct

SEQ ID NO: 1397340 - DNA, 15 bp, Homo sapiens
tggagggtgccaccc

SEQ ID NO: 1397341 - DNA, 15 bp, Homo sapiens
gtggagggtgccacc

SEQ ID NO: 1397342 - DNA, 15 bp, Homo sapiens
agtggagggtgccac

SEQ ID NO: 1397343 - DNA, 15 bp, Homo sapiens
cagtggagggtgcca

SEQ ID NO: 1397344 - DNA, 15 bp, Homo sapiens
tcagtggagggtgcc

SEQ ID NO: 1397345 - DNA, 15 bp, Homo sapiens
atcagtggagggtgc

SEQ ID NO: 1397346 - DNA, 15 bp, Homo sapiens
tatcagtggagggtg

SEQ ID NO: 1397347 - DNA, 15 bp, Homo sapiens
atatcagtggagggt

SEQ ID NO: 1397348 - DNA, 15 bp, Homo sapiens
tatatcagtggaggg

SEQ ID NO: 1397349 - DNA, 15 bp, Homo sapiens
gtatatcagtggagg

SEQ ID NO: 1397350 - DNA, 15 bp, Homo sapiens
agtatatcagtggag

SEQ ID NO: 1397351 - DNA, 15 bp, Homo sapiens
aagtatatcagtgga

SEQ ID NO: 1397352 - DNA, 15 bp, Homo sapiens
taagtatatcagtgg

SEQ ID NO: 1397353 - DNA, 15 bp, Homo sapiens
ctaagtatatcagtg

SEQ ID NO: 1397354 - DNA, 15 bp, Homo sapiens
tctaagtatatcagt

SEQ ID NO: 1397355 - DNA, 15 bp, Homo sapiens
ctctaagtatatcag

SEQ ID NO: 1397356 - DNA, 15 bp, Homo sapiens
cctctaagtatatca

SEQ ID NO: 1397357 - DNA, 15 bp, Homo sapiens
ccctctaagtatatc

SEQ ID NO: 1397358 - DNA, 15 bp, Homo sapiens
accctctaagtatat

SEQ ID NO: 1397359 - DNA, 15 bp, Homo sapiens
caccctctaagtata

SEQ ID NO: 1397360 - DNA, 15 bp, Homo sapiens
gcaccctctaagtat

SEQ ID NO: 1397361 - DNA, 15 bp, Homo sapiens
ggcaccctctaagta

SEQ ID NO: 1397362 - DNA, 15 bp, Homo sapiens
tggcaccctctaagt

SEQ ID NO: 1397363 - DNA, 15 bp, Homo sapiens
ctggcaccctctaag

SEQ ID NO: 1397364 - DNA, 15 bp, Homo sapiens
cctggcaccctctaa

SEQ ID NO: 1397365 - DNA, 15 bp, Homo sapiens
tcctggcaccctcta

SEQ ID NO: 1397366 - DNA, 15 bp, Homo sapiens
ttcctggcaccctct

SEQ ID NO: 1397367 - DNA, 15 bp, Homo sapiens
tttcctggcaccctc

SEQ ID NO: 1397368 - DNA, 15 bp, Homo sapiens
ttttcctggcaccct

SEQ ID NO: 1397369 - DNA, 15 bp, Homo sapiens
tttttcctggcaccc

SEQ ID NO: 1397370 - DNA, 15 bp, Homo sapiens
ttttttcctggcacc

SEQ ID NO: 1397371 - DNA, 15 bp, Homo sapiens
attttttcctggcac

SEQ ID NO: 1397372 - DNA, 15 bp, Homo sapiens
tattttttcctggca

SEQ ID NO: 1397373 - DNA, 15 bp, Homo sapiens
gtattttttcctggc

SEQ ID NO: 1397374 - DNA, 15 bp, Homo sapiens
tgtattttttcctgg

SEQ ID NO: 1397375 - DNA, 15 bp, Homo sapiens
ctgtattttttcctg

SEQ ID NO: 1397376 - DNA, 15 bp, Homo sapiens
cctgtattttttcct

SEQ ID NO: 1397377 - DNA, 15 bp, Homo sapiens
tcctgtattttttcc

SEQ ID NO: 1397378 - DNA, 15 bp, Homo sapiens
ctcctgtattttttc

SEQ ID NO: 1397379 - DNA, 15 bp, Homo sapiens
tctcctgtatttttt

SEQ ID NO: 1397380 - DNA, 15 bp, Homo sapiens
ttctcctgtattttt

SEQ ID NO: 1397381 - DNA, 15 bp, Homo sapiens
tttctcctgtatttt

SEQ ID NO: 1397382 - DNA, 15 bp, Homo sapiens
gtttctcctgtattt

SEQ ID NO: 1397383 - DNA, 15 bp, Homo sapiens
agtttctcctgtatt

SEQ ID NO: 1397384 - DNA, 15 bp, Homo sapiens
tagtttctcctgtat

SEQ ID NO: 1397385 - DNA, 15 bp, Homo sapiens
ctagtttctcctgta

SEQ ID NO: 1397386 - DNA, 15 bp, Homo sapiens
actagtttctcctgt

SEQ ID NO: 1397387 - DNA, 15 bp, Homo sapiens
tactagtttctcctg

SEQ ID NO: 1397388 - DNA, 15 bp, Homo sapiens
atactagtttctcct

SEQ ID NO: 1397389 - DNA, 15 bp, Homo sapiens
gatactagtttctcc

SEQ ID NO: 1397390 - DNA, 15 bp, Homo sapiens
tgatactagtttctc

SEQ ID NO: 1397391 - DNA, 15 bp, Homo sapiens
atgatactagtttct

SEQ ID NO: 1397392 - DNA, 15 bp, Homo sapiens
gatgatactagtttc

SEQ ID NO: 1397393 - DNA, 15 bp, Homo sapiens
agatgatactagttt

SEQ ID NO: 1397394 - DNA, 15 bp, Homo sapiens
gagatgatactagtt

SEQ ID NO: 1397395 - DNA, 15 bp, Homo sapiens
tgagatgatactagt

SEQ ID NO: 1397396 - DNA, 15 bp, Homo sapiens
atgagatgatactag

SEQ ID NO: 1397397 - DNA, 15 bp, Homo sapiens
aatgagatgatacta

SEQ ID NO: 1397398 - DNA, 15 bp, Homo sapiens
taatgagatgatact

SEQ ID NO: 1397399 - DNA, 15 bp, Homo sapiens
ataatgagatgatac

SEQ ID NO: 1397400 - DNA, 15 bp, Homo sapiens
tataatgagatgata

SEQ ID NO: 1397401 - DNA, 15 bp, Homo sapiens
ttataatgagatgat

SEQ ID NO: 1397402 - DNA, 15 bp, Homo sapiens
attataatgagatga

SEQ ID NO: 1397403 - DNA, 15 bp, Homo sapiens
cattataatgagatg

SEQ ID NO: 1397404 - DNA, 15 bp, Homo sapiens
tcattataatgagat

SEQ ID NO: 1397405 - DNA, 15 bp, Homo sapiens
atcattataatgaga

SEQ ID NO: 1397406 - DNA, 15 bp, Homo sapiens
aatcattataatgag

SEQ ID NO: 1397407 - DNA, 15 bp, Homo sapiens
aaatcattataatga

SEQ ID NO: 1397408 - DNA, 15 bp, Homo sapiens
aaaatcattataatg

SEQ ID NO: 1397409 - DNA, 15 bp, Homo sapiens
aaaaatcattataat

SEQ ID NO: 1397410 - DNA, 15 bp, Homo sapiens
aaaaaatcattataa

SEQ ID NO: 1397411 - DNA, 15 bp, Homo sapiens
taaaaaatcattata

SEQ ID NO: 1397412 - DNA, 15 bp, Homo sapiens
tttaaaaaatcatta

SEQ ID NO: 1397413 - DNA, 15 bp, Homo sapiens
atttaaaaaatcatt

SEQ ID NO: 1397414 - DNA, 15 bp, Homo sapiens
tatttaaaaaatcat

SEQ ID NO: 1397415 - DNA, 15 bp, Homo sapiens
gtatttaaaaaatca

SEQ ID NO: 1397416 - DNA, 15 bp, Homo sapiens
tgtatttaaaaaatc

SEQ ID NO: 1397417 - DNA, 15 bp, Homo sapiens
ctgtatttaaaaaat

SEQ ID NO: 1397418 - DNA, 15 bp, Homo sapiens
cctgtatttaaaaaa

SEQ ID NO: 1397419 - DNA, 15 bp, Homo sapiens
tcctgtatttaaaaa

SEQ ID NO: 1397420 - DNA, 15 bp, Homo sapiens
ttcctgtatttaaaa

SEQ ID NO: 1397421 - DNA, 15 bp, Homo sapiens
cttcctgtatttaaa

SEQ ID NO: 1397422 - DNA, 15 bp, Homo sapiens
ccttcctgtatttaa

SEQ ID NO: 1397423 - DNA, 15 bp, Homo sapiens
tccttcctgtattta

SEQ ID NO: 1397424 - DNA, 15 bp, Homo sapiens
ttccttcctgtattt

SEQ ID NO: 1397425 - DNA, 15 bp, Homo sapiens
tttccttcctgtatt

SEQ ID NO: 1397426 - DNA, 15 bp, Homo sapiens
ttttccttcctgtat

SEQ ID NO: 1397427 - DNA, 15 bp, Homo sapiens
tttttccttcctgta

SEQ ID NO: 1397428 - DNA, 15 bp, Homo sapiens
ttttttccttcctgt

SEQ ID NO: 1397429 - DNA, 15 bp, Homo sapiens
attttttccttcctg

SEQ ID NO: 1397430 - DNA, 15 bp, Homo sapiens
tattttttccttcct

SEQ ID NO: 1397431 - DNA, 15 bp, Homo sapiens
atattttttccttcc

SEQ ID NO: 1397432 - DNA, 15 bp, Homo sapiens
tatattttttccttc

SEQ ID NO: 1397433 - DNA, 15 bp, Homo sapiens
ctatattttttcctt

SEQ ID NO: 1397434 - DNA, 15 bp, Homo sapiens
tctatattttttcct

SEQ ID NO: 1397435 - DNA, 15 bp, Homo sapiens
gtctatattttttcc

SEQ ID NO: 1397436 - DNA, 15 bp, Homo sapiens
cgtctatattttttc

SEQ ID NO: 1397437 - DNA, 15 bp, Homo sapiens
ccgtctatatttttt

SEQ ID NO: 1397438 - DNA, 15 bp, Homo sapiens
cccgtctatattttt

SEQ ID NO: 1397439 - DNA, 15 bp, Homo sapiens
tcccgtctatatttt

SEQ ID NO: 1397440 - DNA, 15 bp, Homo sapiens
atcccgtctatattt

SEQ ID NO: 1397441 - DNA, 15 bp, Homo sapiens
tatcccgtctatatt

SEQ ID NO: 1397442 - DNA, 15 bp, Homo sapiens
gtatcccgtctatat

SEQ ID NO: 1397443 - DNA, 15 bp, Homo sapiens
ggtatcccgtctata

SEQ ID NO: 1397444 - DNA, 15 bp, Homo sapiens
aggtatcccgtctat

SEQ ID NO: 1397445 - DNA, 15 bp, Homo sapiens
aaggtatcccgtcta

SEQ ID NO: 1397446 - DNA, 15 bp, Homo sapiens
aaaggtatcccgtct

SEQ ID NO: 1397447 - DNA, 15 bp, Homo sapiens
aaaaggtatcccgtc

SEQ ID NO: 1397448 - DNA, 15 bp, Homo sapiens
aaaaaggtatcccgt

SEQ ID NO: 1397449 - DNA, 15 bp, Homo sapiens
aaaaaaggtatcccg

SEQ ID NO: 1397450 - DNA, 15 bp, Homo sapiens
gaaaaaaggtatccc

SEQ ID NO: 1397451 - DNA, 15 bp, Homo sapiens
ggaaaaaaggtatcc

SEQ ID NO: 1397452 - DNA, 15 bp, Homo sapiens
gggaaaaaaggtatc

SEQ ID NO: 1397453 - DNA, 15 bp, Homo sapiens
agggaaaaaaggtat

SEQ ID NO: 1397454 - DNA, 15 bp, Homo sapiens
cagggaaaaaaggta

SEQ ID NO: 1397455 - DNA, 15 bp, Homo sapiens
acagggaaaaaaggt

SEQ ID NO: 1397456 - DNA, 15 bp, Homo sapiens
tacagggaaaaaagg

SEQ ID NO: 1397457 - DNA, 15 bp, Homo sapiens
atacagggaaaaaag

SEQ ID NO: 1397458 - DNA, 15 bp, Homo sapiens
tatacagggaaaaaa

SEQ ID NO: 1397459 - DNA, 15 bp, Homo sapiens
gtatacagggaaaaa

SEQ ID NO: 1397460 - DNA, 15 bp, Homo sapiens
agtatacagggaaaa

SEQ ID NO: 1397461 - DNA, 15 bp, Homo sapiens
gagtatacagggaaa

SEQ ID NO: 1397462 - DNA, 15 bp, Homo sapiens
cgagtatacagggaa

SEQ ID NO: 1397463 - DNA, 15 bp, Homo sapiens
ccgagtatacaggga

SEQ ID NO: 1397464 - DNA, 15 bp, Homo sapiens
accgagtatacaggg

SEQ ID NO: 1397465 - DNA, 15 bp, Homo sapiens
aaccgagtatacagg

SEQ ID NO: 1397466 - DNA, 15 bp, Homo sapiens
aaaccgagtatacag

SEQ ID NO: 1397467 - DNA, 15 bp, Homo sapiens
aaaaccgagtataca

SEQ ID NO: 1397468 - DNA, 15 bp, Homo sapiens
caaaaccgagtatac

SEQ ID NO: 1397469 - DNA, 15 bp, Homo sapiens
ccaaaaccgagtata

SEQ ID NO: 1397470 - DNA, 15 bp, Homo sapiens
tccaaaaccgagtat

SEQ ID NO: 1397471 - DNA, 15 bp, Homo sapiens
atccaaaaccgagta

SEQ ID NO: 1397472 - DNA, 15 bp, Homo sapiens
aatccaaaaccgagt

SEQ ID NO: 1397473 - DNA, 15 bp, Homo sapiens
aaatccaaaaccgag

SEQ ID NO: 1397474 - DNA, 15 bp, Homo sapiens
aaaatccaaaaccga

SEQ ID NO: 1397475 - DNA, 15 bp, Homo sapiens
gaaaatccaaaaccg

SEQ ID NO: 1397476 - DNA, 15 bp, Homo sapiens
ggaaaatccaaaacc

SEQ ID NO: 1397477 - DNA, 15 bp, Homo sapiens
tggaaaatccaaaac

SEQ ID NO: 1397478 - DNA, 15 bp, Homo sapiens
ctggaaaatccaaaa

SEQ ID NO: 1397479 - DNA, 15 bp, Homo sapiens
cctggaaaatccaaa

SEQ ID NO: 1397480 - DNA, 15 bp, Homo sapiens
acctggaaaatccaa

SEQ ID NO: 1397481 - DNA, 15 bp, Homo sapiens
aacctggaaaatcca

SEQ ID NO: 1397482 - DNA, 15 bp, Homo sapiens
aaacctggaaaatcc

SEQ ID NO: 1397483 - DNA, 15 bp, Homo sapiens
aaaacctggaaaatc

SEQ ID NO: 1397484 - DNA, 15 bp, Homo sapiens
caaaacctggaaaat

SEQ ID NO: 1397485 - DNA, 15 bp, Homo sapiens
acaaaacctggaaaa

SEQ ID NO: 1397486 - DNA, 15 bp, Homo sapiens
tacaaaacctggaaa

SEQ ID NO: 1397487 - DNA, 15 bp, Homo sapiens
gtacaaaacctggaa

SEQ ID NO: 1397488 - DNA, 15 bp, Homo sapiens
tgtacaaaacctgga

SEQ ID NO: 1397489 - DNA, 15 bp, Homo sapiens
ttgtacaaaacctgg

SEQ ID NO: 1397490 - DNA, 15 bp, Homo sapiens
attgtacaaaacctg

SEQ ID NO: 1397491 - DNA, 15 bp, Homo sapiens
cattgtacaaaacct

SEQ ID NO: 1397492 - DNA, 15 bp, Homo sapiens
tcattgtacaaaacc

SEQ ID NO: 1397493 - DNA, 15 bp, Homo sapiens
ttcattgtacaaaac

SEQ ID NO: 1397494 - DNA, 15 bp, Homo sapiens
gttcattgtacaaaa

SEQ ID NO: 1397495 - DNA, 15 bp, Homo sapiens
tgttcattgtacaaa

SEQ ID NO: 1397496 - DNA, 15 bp, Homo sapiens
gtgttcattgtacaa

SEQ ID NO: 1397497 - DNA, 15 bp, Homo sapiens
cgtgttcattgtaca

SEQ ID NO: 1397498 - DNA, 15 bp, Homo sapiens
acgtgttcattgtac

SEQ ID NO: 1397499 - DNA, 15 bp, Homo sapiens
cacgtgttcattgta

SEQ ID NO: 1397500 - DNA, 15 bp, Homo sapiens
acacgtgttcattgt

SEQ ID NO: 1397501 - DNA, 15 bp, Homo sapiens
aacacgtgttcattg

SEQ ID NO: 1397502 - DNA, 15 bp, Homo sapiens
aaacacgtgttcatt

SEQ ID NO: 1397503 - DNA, 15 bp, Homo sapiens
aaaacacgtgttcat

SEQ ID NO: 1397504 - DNA, 15 bp, Homo sapiens
caaaacacgtgttca

SEQ ID NO: 1397505 - DNA, 15 bp, Homo sapiens
acaaaacacgtgttc

SEQ ID NO: 1397506 - DNA, 15 bp, Homo sapiens
tacaaaacacgtgtt

SEQ ID NO: 1397507 - DNA, 15 bp, Homo sapiens
ttacaaaacacgtgt

SEQ ID NO: 1397508 - DNA, 15 bp, Homo sapiens
attacaaaacacgtg

SEQ ID NO: 1397509 - DNA, 15 bp, Homo sapiens
aattacaaaacacgt

SEQ ID NO: 1397510 - DNA, 15 bp, Homo sapiens
aaattacaaaacacg

SEQ ID NO: 1397511 - DNA, 15 bp, Homo sapiens
caaattacaaaacac

SEQ ID NO: 1397512 - DNA, 15 bp, Homo sapiens
tcaaattacaaaaca

SEQ ID NO: 1397513 - DNA, 15 bp, Homo sapiens
ctcaaattacaaaac

SEQ ID NO: 1397514 - DNA, 15 bp, Homo sapiens
actcaaattacaaaa

SEQ ID NO: 1397515 - DNA, 15 bp, Homo sapiens
tactcaaattacaaa

SEQ ID NO: 1397516 - DNA, 15 bp, Homo sapiens
ttactcaaattacaa

SEQ ID NO: 1397517 - DNA, 15 bp, Homo sapiens
tttactcaaattaca

SEQ ID NO: 1397518 - DNA, 15 bp, Homo sapiens
atttactcaaattac

SEQ ID NO: 1397519 - DNA, 15 bp, Homo sapiens
aatttactcaaatta

SEQ ID NO: 1397520 - DNA, 15 bp, Homo sapiens
taatttactcaaatt

SEQ ID NO: 1397521 - DNA, 15 bp, Homo sapiens
gtaatttactcaaat

SEQ ID NO: 1397522 - DNA, 15 bp, Homo sapiens
tgtaatttactcaaa

SEQ ID NO: 1397523 - DNA, 15 bp, Homo sapiens
ttgtaatttactcaa

SEQ ID NO: 1397524 - DNA, 15 bp, Homo sapiens
tttgtaatttactca

SEQ ID NO: 1397525 - DNA, 15 bp, Homo sapiens
atttgtaatttactc

SEQ ID NO: 1397526 - DNA, 15 bp, Homo sapiens
aatttgtaatttact

SEQ ID NO: 1397527 - DNA, 15 bp, Homo sapiens
caatttgtaatttac

SEQ ID NO: 1397528 - DNA, 15 bp, Homo sapiens
acaatttgtaattta

SEQ ID NO: 1397529 - DNA, 15 bp, Homo sapiens
aacaatttgtaattt

SEQ ID NO: 1397530 - DNA, 15 bp, Homo sapiens
aaacaatttgtaatt

SEQ ID NO: 1397531 - DNA, 15 bp, Homo sapiens
gaaacaatttgtaat

SEQ ID NO: 1397532 - DNA, 15 bp, Homo sapiens
tgaaacaatttgtaa

SEQ ID NO: 1397533 - DNA, 15 bp, Homo sapiens
ctgaaacaatttgta

SEQ ID NO: 1397534 - DNA, 15 bp, Homo sapiens
gctgaaacaatttgt

SEQ ID NO: 1397535 - DNA, 15 bp, Homo sapiens
agctgaaacaatttg

SEQ ID NO: 1397536 - DNA, 15 bp, Homo sapiens
cagctgaaacaattt

SEQ ID NO: 1397537 - DNA, 15 bp, Homo sapiens
acagctgaaacaatt

SEQ ID NO: 1397538 - DNA, 15 bp, Homo sapiens
cacagctgaaacaat

SEQ ID NO: 1397539 - DNA, 15 bp, Homo sapiens
acacagctgaaacaa

SEQ ID NO: 1397540 - DNA, 15 bp, Homo sapiens
aacacagctgaaaca

SEQ ID NO: 1397541 - DNA, 15 bp, Homo sapiens
aaacacagctgaaac

SEQ ID NO: 1397542 - DNA, 15 bp, Homo sapiens
caaacacagctgaaa

SEQ ID NO: 1397543 - DNA, 15 bp, Homo sapiens
gcaaacacagctgaa

SEQ ID NO: 1397544 - DNA, 15 bp, Homo sapiens
agcaaacacagctga

SEQ ID NO: 1397545 - DNA, 15 bp, Homo sapiens
aagcaaacacagctg

SEQ ID NO: 1397546 - DNA, 15 bp, Homo sapiens
aaagcaaacacagct

SEQ ID NO: 1397547 - DNA, 15 bp, Homo sapiens
aaaagcaaacacagc

SEQ ID NO: 1397548 - DNA, 15 bp, Homo sapiens
caaaagcaaacacag

SEQ ID NO: 1397549 - DNA, 15 bp, Homo sapiens
tcaaaagcaaacaca

SEQ ID NO: 1397550 - DNA, 15 bp, Homo sapiens
ctcaaaagcaaacac

SEQ ID NO: 1397551 - DNA, 15 bp, Homo sapiens
tctcaaaagcaaaca

SEQ ID NO: 1397552 - DNA, 15 bp, Homo sapiens
ttctcaaaagcaaac

SEQ ID NO: 1397553 - DNA, 15 bp, Homo sapiens
tttctcaaaagcaaa

SEQ ID NO: 1397554 - DNA, 15 bp, Homo sapiens
ttttctcaaaagcaa

SEQ ID NO: 1397555 - DNA, 15 bp, Homo sapiens
tttttctcaaaagca

SEQ ID NO: 1397556 - DNA, 15 bp, Homo sapiens
ttttttctcaaaagc

SEQ ID NO: 1397557 - DNA, 15 bp, Homo sapiens
tttttttctcaaaag

SEQ ID NO: 1397558 - DNA, 15 bp, Homo sapiens
atttttttctcaaaa

SEQ ID NO: 1397559 - DNA, 15 bp, Homo sapiens
tatttttttctcaaa

SEQ ID NO: 1397560 - DNA, 15 bp, Homo sapiens
gtatttttttctcaa

SEQ ID NO: 1397561 - DNA, 15 bp, Homo sapiens
agtatttttttctca

SEQ ID NO: 1397562 - DNA, 15 bp, Homo sapiens
tagtatttttttctc

SEQ ID NO: 1397563 - DNA, 15 bp, Homo sapiens
atagtatttttttct

SEQ ID NO: 1397564 - DNA, 15 bp, Homo sapiens
tatagtatttttttc

SEQ ID NO: 1397565 - DNA, 15 bp, Homo sapiens
gtatagtattttttt

SEQ ID NO: 1397566 - DNA, 15 bp, Homo sapiens
tgtatagtatttttt

SEQ ID NO: 1397567 - DNA, 15 bp, Homo sapiens
atgtatagtattttt

SEQ ID NO: 1397568 - DNA, 15 bp, Homo sapiens
aatgtatagtatttt

SEQ ID NO: 1397569 - DNA, 15 bp, Homo sapiens
taatgtatagtattt

SEQ ID NO: 1397570 - DNA, 15 bp, Homo sapiens
ctaatgtatagtatt

SEQ ID NO: 1397571 - DNA, 15 bp, Homo sapiens
cctaatgtatagtat

SEQ ID NO: 1397572 - DNA, 15 bp, Homo sapiens
gcctaatgtatagta

SEQ ID NO: 1397573 - DNA, 15 bp, Homo sapiens
tgcctaatgtatagt

SEQ ID NO: 1397574 - DNA, 15 bp, Homo sapiens
atgcctaatgtatag

SEQ ID NO: 1397575 - DNA, 15 bp, Homo sapiens
tatgcctaatgtata

SEQ ID NO: 1397576 - DNA, 15 bp, Homo sapiens
ctatgcctaatgtat

SEQ ID NO: 1397577 - DNA, 15 bp, Homo sapiens
cctatgcctaatgta

SEQ ID NO: 1397578 - DNA, 15 bp, Homo sapiens
gcctatgcctaatgt

SEQ ID NO: 1397579 - DNA, 15 bp, Homo sapiens
cgcctatgcctaatg

SEQ ID NO: 1397580 - DNA, 15 bp, Homo sapiens
ccgcctatgcctaat

SEQ ID NO: 1397581 - DNA, 15 bp, Homo sapiens
accgcctatgcctaa

SEQ ID NO: 1397582 - DNA, 15 bp, Homo sapiens
caccgcctatgccta

SEQ ID NO: 1397583 - DNA, 15 bp, Homo sapiens
gcaccgcctatgcct

SEQ ID NO: 1397584 - DNA, 15 bp, Homo sapiens
agcaccgcctatgcc

SEQ ID NO: 1397585 - DNA, 15 bp, Homo sapiens
gagcaccgcctatgc

SEQ ID NO: 1397586 - DNA, 15 bp, Homo sapiens
ggagcaccgcctatg

SEQ ID NO: 1397587 - DNA, 15 bp, Homo sapiens
aggagcaccgcctat

SEQ ID NO: 1397588 - DNA, 15 bp, Homo sapiens
gaggagcaccgccta

SEQ ID NO: 1397589 - DNA, 15 bp, Homo sapiens
agaggagcaccgcct

SEQ ID NO: 1397590 - DNA, 15 bp, Homo sapiens
aagaggagcaccgcc

SEQ ID NO: 1397591 - DNA, 15 bp, Homo sapiens
gaagaggagcaccgc

SEQ ID NO: 1397592 - DNA, 15 bp, Homo sapiens
ggaagaggagcaccg

SEQ ID NO: 1397593 - DNA, 15 bp, Homo sapiens
gggaagaggagcacc

SEQ ID NO: 1397594 - DNA, 15 bp, Homo sapiens
agggaagaggagcac

SEQ ID NO: 1397595 - DNA, 15 bp, Homo sapiens
gagggaagaggagca

SEQ ID NO: 1397596 - DNA, 15 bp, Homo sapiens
ggagggaagaggagc

SEQ ID NO: 1397597 - DNA, 15 bp, Homo sapiens
gggagggaagaggag

SEQ ID NO: 1397598 - DNA, 15 bp, Homo sapiens
tgggagggaagagga

SEQ ID NO: 1397599 - DNA, 15 bp, Homo sapiens
atgggagggaagagg

SEQ ID NO: 1397600 - DNA, 15 bp, Homo sapiens
catgggagggaagag

SEQ ID NO: 1397601 - DNA, 15 bp, Homo sapiens
tcatgggagggaaga

SEQ ID NO: 1397602 - DNA, 15 bp, Homo sapiens
ttcatgggagggaag

SEQ ID NO: 1397603 - DNA, 15 bp, Homo sapiens
cttcatgggagggaa

SEQ ID NO: 1397604 - DNA, 15 bp, Homo sapiens
ccttcatgggaggga

SEQ ID NO: 1397605 - DNA, 15 bp, Homo sapiens
gccttcatgggaggg

SEQ ID NO: 1397606 - DNA, 15 bp, Homo sapiens
cgccttcatgggagg

SEQ ID NO: 1397607 - DNA, 15 bp, Homo sapiens
acgccttcatgggag

SEQ ID NO: 1397608 - DNA, 15 bp, Homo sapiens
cacgccttcatggga

SEQ ID NO: 1397609 - DNA, 15 bp, Homo sapiens
tcacgccttcatggg

SEQ ID NO: 1397610 - DNA, 15 bp, Homo sapiens
gtcacgccttcatgg

SEQ ID NO: 1397611 - DNA, 15 bp, Homo sapiens
tgtcacgccttcatg

SEQ ID NO: 1397612 - DNA, 15 bp, Homo sapiens
gtgtcacgccttcat

SEQ ID NO: 1397613 - DNA, 15 bp, Homo sapiens
ggtgtcacgccttca

SEQ ID NO: 1397614 - DNA, 15 bp, Homo sapiens
gggtgtcacgccttc

SEQ ID NO: 1397615 - DNA, 15 bp, Homo sapiens
agggtgtcacgcctt

SEQ ID NO: 1397616 - DNA, 15 bp, Homo sapiens
gagggtgtcacgcct

SEQ ID NO: 1397617 - DNA, 15 bp, Homo sapiens
tgagggtgtcacgcc

SEQ ID NO: 1397618 - DNA, 15 bp, Homo sapiens
ttgagggtgtcacgc

SEQ ID NO: 1397619 - DNA, 15 bp, Homo sapiens
tttgagggtgtcacg

SEQ ID NO: 1397620 - DNA, 15 bp, Homo sapiens
atttgagggtgtcac

SEQ ID NO: 1397621 - DNA, 15 bp, Homo sapiens
gatttgagggtgtca

SEQ ID NO: 1397622 - DNA, 15 bp, Homo sapiens
tgatttgagggtgtc

SEQ ID NO: 1397623 - DNA, 15 bp, Homo sapiens
ctgatttgagggtgt

SEQ ID NO: 1397624 - DNA, 15 bp, Homo sapiens
gctgatttgagggtg

SEQ ID NO: 1397625 - DNA, 15 bp, Homo sapiens
ggctgatttgagggt

SEQ ID NO: 1397626 - DNA, 15 bp, Homo sapiens
gggctgatttgaggg

SEQ ID NO: 1397627 - DNA, 15 bp, Homo sapiens
ggggctgatttgagg

SEQ ID NO: 1397628 - DNA, 15 bp, Homo sapiens
gggggctgatttgag

SEQ ID NO: 1397629 - DNA, 15 bp, Homo sapiens
agggggctgatttga

SEQ ID NO: 1397630 - DNA, 15 bp, Homo sapiens
gagggggctgatttg

SEQ ID NO: 1397631 - DNA, 15 bp, Homo sapiens
ggagggggctgattt

SEQ ID NO: 1397632 - DNA, 15 bp, Homo sapiens
aggagggggctgatt

SEQ ID NO: 1397633 - DNA, 15 bp, Homo sapiens
caggagggggctgat

SEQ ID NO: 1397634 - DNA, 15 bp, Homo sapiens
gcaggagggggctga

SEQ ID NO: 1397635 - DNA, 15 bp, Homo sapiens
ggcaggagggggctg

SEQ ID NO: 1397636 - DNA, 15 bp, Homo sapiens
aggcaggagggggct

SEQ ID NO: 1397637 - DNA, 15 bp, Homo sapiens
gaggcaggagggggc

SEQ ID NO: 1397638 - DNA, 15 bp, Homo sapiens
tgaggcaggaggggg

SEQ ID NO: 1397639 - DNA, 15 bp, Homo sapiens
ttgaggcaggagggg

SEQ ID NO: 1397640 - DNA, 15 bp, Homo sapiens
attgaggcaggaggg

SEQ ID NO: 1397641 - DNA, 15 bp, Homo sapiens
aattgaggcaggagg

SEQ ID NO: 1397642 - DNA, 15 bp, Homo sapiens
aaattgaggcaggag

SEQ ID NO: 1397643 - DNA, 15 bp, Homo sapiens
taaattgaggcagga

SEQ ID NO: 1397644 - DNA, 15 bp, Homo sapiens
ctaaattgaggcagg

SEQ ID NO: 1397645 - DNA, 15 bp, Homo sapiens
tctaaattgaggcag

SEQ ID NO: 1397646 - DNA, 15 bp, Homo sapiens
ctctaaattgaggca

SEQ ID NO: 1397647 - DNA, 15 bp, Homo sapiens
actctaaattgaggc

SEQ ID NO: 1397648 - DNA, 15 bp, Homo sapiens
cactctaaattgagg

SEQ ID NO: 1397649 - DNA, 15 bp, Homo sapiens
gcactctaaattgag

SEQ ID NO: 1397650 - DNA, 15 bp, Homo sapiens
agcactctaaattga

SEQ ID NO: 1397651 - DNA, 15 bp, Homo sapiens
cagcactctaaattg

SEQ ID NO: 1397652 - DNA, 15 bp, Homo sapiens
tcagcactctaaatt

SEQ ID NO: 1397653 - DNA, 15 bp, Homo sapiens
ttcagcactctaaat

SEQ ID NO: 1397654 - DNA, 15 bp, Homo sapiens
cttcagcactctaaa

SEQ ID NO: 1397655 - DNA, 15 bp, Homo sapiens
ccttcagcactctaa

SEQ ID NO: 1397656 - DNA, 15 bp, Homo sapiens
gccttcagcactcta

SEQ ID NO: 1397657 - DNA, 15 bp, Homo sapiens
agccttcagcactct

SEQ ID NO: 1397658 - DNA, 15 bp, Homo sapiens
cagccttcagcactc

SEQ ID NO: 1397659 - DNA, 15 bp, Homo sapiens
ccagccttcagcact

SEQ ID NO: 1397660 - DNA, 15 bp, Homo sapiens
aagtaaacatgctgg

SEQ ID NO: 1397661 - DNA, 15 bp, Homo sapiens
caagtaaacatgctg

SEQ ID NO: 1397662 - DNA, 15 bp, Homo sapiens
ccaagtaaacatgct

SEQ ID NO: 1397663 - DNA, 15 bp, Homo sapiens
accaagtaaacatgc

SEQ ID NO: 1397664 - DNA, 15 bp, Homo sapiens
caccaagtaaacatg

SEQ ID NO: 1397665 - DNA, 15 bp, Homo sapiens
tcaccaagtaaacat

SEQ ID NO: 1397666 - DNA, 15 bp, Homo sapiens
gtcaccaagtaaaca

SEQ ID NO: 1397667 - DNA, 15 bp, Homo sapiens
ggtcaccaagtaaac

SEQ ID NO: 1397668 - DNA, 15 bp, Homo sapiens
tggtcaccaagtaaa

SEQ ID NO: 1397669 - DNA, 15 bp, Homo sapiens
atggtcaccaagtaa

SEQ ID NO: 1397670 - DNA, 15 bp, Homo sapiens
catggtcaccaagta

SEQ ID NO: 1397671 - DNA, 15 bp, Homo sapiens
tcatggtcaccaagt

SEQ ID NO: 1397672 - DNA, 15 bp, Homo sapiens
atcatggtcaccaag

SEQ ID NO: 1397673 - DNA, 15 bp, Homo sapiens
catcatggtcaccaa

SEQ ID NO: 1397674 - DNA, 15 bp, Homo sapiens
acatcatggtcacca

SEQ ID NO: 1397675 - DNA, 15 bp, Homo sapiens
cacatcatggtcacc

SEQ ID NO: 1397676 - DNA, 15 bp, Homo sapiens
gcacatcatggtcac

SEQ ID NO: 1397677 - DNA, 15 bp, Homo sapiens
tgcacatcatggtca

SEQ ID NO: 1397678 - DNA, 15 bp, Homo sapiens
ctgcacatcatggtc

SEQ ID NO: 1397679 - DNA, 15 bp, Homo sapiens
actgcacatcatggt

SEQ ID NO: 1397680 - DNA, 15 bp, Homo sapiens
gactgcacatcatgg

SEQ ID NO: 1397681 - DNA, 15 bp, Homo sapiens
ggactgcacatcatg

SEQ ID NO: 1397682 - DNA, 15 bp, Homo sapiens
tggactgcacatcat

SEQ ID NO: 1397683 - DNA, 15 bp, Homo sapiens
atggactgcacatca

SEQ ID NO: 1397684 - DNA, 15 bp, Homo sapiens
tatggactgcacatc

SEQ ID NO: 1397685 - DNA, 15 bp, Homo sapiens
ttatggactgcacat

SEQ ID NO: 1397686 - DNA, 15 bp, Homo sapiens
cttatggactgcaca

SEQ ID NO: 1397687 - DNA, 15 bp, Homo sapiens
ccttatggactgcac

SEQ ID NO: 1397688 - DNA, 15 bp, Homo sapiens
tccttatggactgca

SEQ ID NO: 1397689 - DNA, 15 bp, Homo sapiens
ttccttatggactgc

SEQ ID NO: 1397690 - DNA, 15 bp, Homo sapiens
cttccttatggactg

SEQ ID NO: 1397691 - DNA, 15 bp, Homo sapiens
gcttccttatggact

SEQ ID NO: 1397692 - DNA, 15 bp, Homo sapiens
ggcttccttatggac

SEQ ID NO: 1397693 - DNA, 15 bp, Homo sapiens
gggcttccttatgga

SEQ ID NO: 1397694 - DNA, 15 bp, Homo sapiens
tgggcttccttatgg

SEQ ID NO: 1397695 - DNA, 15 bp, Homo sapiens
gtgggcttccttatg

SEQ ID NO: 1397696 - DNA, 15 bp, Homo sapiens
tgtgggcttccttat

SEQ ID NO: 1397697 - DNA, 15 bp, Homo sapiens
ctgtgggcttcctta

SEQ ID NO: 1397698 - DNA, 15 bp, Homo sapiens
cctgtgggcttcctt

SEQ ID NO: 1397699 - DNA, 15 bp, Homo sapiens
ccctgtgggcttcct

SEQ ID NO: 1397700 - DNA, 15 bp, Homo sapiens
tccctgtgggcttcc

SEQ ID NO: 1397701 - DNA, 15 bp, Homo sapiens
ttccctgtgggcttc

SEQ ID NO: 1397702 - DNA, 15 bp, Homo sapiens
cttccctgtgggctt

SEQ ID NO: 1397703 - DNA, 15 bp, Homo sapiens
gcttccctgtgggct

SEQ ID NO: 1397704 - DNA, 15 bp, Homo sapiens
cgcttccctgtgggc

SEQ ID NO: 1397705 - DNA, 15 bp, Homo sapiens
acgcttccctgtggg

SEQ ID NO: 1397706 - DNA, 15 bp, Homo sapiens
cacgcttccctgtgg

SEQ ID NO: 1397707 - DNA, 15 bp, Homo sapiens
tcacgcttccctgtg

SEQ ID NO: 1397708 - DNA, 15 bp, Homo sapiens
ttcacgcttccctgt

SEQ ID NO: 1397709 - DNA, 15 bp, Homo sapiens
gttcacgcttccctg

SEQ ID NO: 1397710 - DNA, 15 bp, Homo sapiens
ggttcacgcttccct

SEQ ID NO: 1397711 - DNA, 15 bp, Homo sapiens
tggttcacgcttccc

SEQ ID NO: 1397712 - DNA, 15 bp, Homo sapiens
gtggttcacgcttcc

SEQ ID NO: 1397713 - DNA, 15 bp, Homo sapiens
agtggttcacgcttc

SEQ ID NO: 1397714 - DNA, 15 bp, Homo sapiens
cagtggttcacgctt

SEQ ID NO: 1397715 - DNA, 15 bp, Homo sapiens
ccagtggttcacgct

SEQ ID NO: 1397716 - DNA, 15 bp, Homo sapiens
cccagtggttcacgc

SEQ ID NO: 1397717 - DNA, 15 bp, Homo sapiens
tcccagtggttcacg

SEQ ID NO: 1397718 - DNA, 15 bp, Homo sapiens
ttcccagtggttcac

SEQ ID NO: 1397719 - DNA, 15 bp, Homo sapiens
tttcccagtggttca

SEQ ID NO: 1397720 - DNA, 15 bp, Homo sapiens
atttcccagtggttc

SEQ ID NO: 1397721 - DNA, 15 bp, Homo sapiens
tatttcccagtggtt

SEQ ID NO: 1397722 - DNA, 15 bp, Homo sapiens
ctatttcccagtggt

SEQ ID NO: 1397723 - DNA, 15 bp, Homo sapiens
actatttcccagtgg

SEQ ID NO: 1397724 - DNA, 15 bp, Homo sapiens
cactatttcccagtg

SEQ ID NO: 1397725 - DNA, 15 bp, Homo sapiens
ccactatttcccagt

SEQ ID NO: 1397726 - DNA, 15 bp, Homo sapiens
tccactatttcccag

SEQ ID NO: 1397727 - DNA, 15 bp, Homo sapiens
ttccactatttccca

SEQ ID NO: 1397728 - DNA, 15 bp, Homo sapiens
tttccactatttccc

SEQ ID NO: 1397729 - DNA, 15 bp, Homo sapiens
ctttccactatttcc

SEQ ID NO: 1397730 - DNA, 15 bp, Homo sapiens
tctttccactatttc

SEQ ID NO: 1397731 - DNA, 15 bp, Homo sapiens
ctctttccactattt

SEQ ID NO: 1397732 - DNA, 15 bp, Homo sapiens
gctctttccactatt

SEQ ID NO: 1397733 - DNA, 15 bp, Homo sapiens
tgctctttccactat

SEQ ID NO: 1397734 - DNA, 15 bp, Homo sapiens
ctgctctttccacta

SEQ ID NO: 1397735 - DNA, 15 bp, Homo sapiens
aagctgctctttcca

SEQ ID NO: 1397736 - DNA, 15 bp, Homo sapiens
gaagctgctctttcc

SEQ ID NO: 1397737 - DNA, 15 bp, Homo sapiens
ggaagctgctctttc

SEQ ID NO: 1397738 - DNA, 15 bp, Homo sapiens
tggaagctgctcttt

SEQ ID NO: 1397739 - DNA, 15 bp, Homo sapiens
gtggaagctgctctt

SEQ ID NO: 1397740 - DNA, 15 bp, Homo sapiens
agtggaagctgctct

SEQ ID NO: 1397741 - DNA, 15 bp, Homo sapiens
cagtggaagctgctc

SEQ ID NO: 1397742 - DNA, 15 bp, Homo sapiens
ccagtggaagctgct

SEQ ID NO: 1397743 - DNA, 15 bp, Homo sapiens
gccagtggaagctgc

SEQ ID NO: 1397744 - DNA, 15 bp, Homo sapiens
tgccagtggaagctg

SEQ ID NO: 1397745 - DNA, 15 bp, Homo sapiens
atgccagtggaagct

SEQ ID NO: 1397746 - DNA, 15 bp, Homo sapiens
aatgccagtggaagc

SEQ ID NO: 1397747 - DNA, 15 bp, Homo sapiens
aaatgccagtggaag

SEQ ID NO: 1397748 - DNA, 15 bp, Homo sapiens
gaaatgccagtggaa

SEQ ID NO: 1397749 - DNA, 15 bp, Homo sapiens
ggaaatgccagtgga

SEQ ID NO: 1397750 - DNA, 15 bp, Homo sapiens
gggaaatgccagtgg

SEQ ID NO: 1397751 - DNA, 15 bp, Homo sapiens
ggggaaatgccagtg

SEQ ID NO: 1397752 - DNA, 15 bp, Homo sapiens
gggggaaatgccagt

SEQ ID NO: 1397753 - DNA, 15 bp, Homo sapiens
agggggaaatgccag

SEQ ID NO: 1397754 - DNA, 15 bp, Homo sapiens
tagggggaaatgcca

SEQ ID NO: 1397755 - DNA, 15 bp, Homo sapiens
ttagggggaaatgcc

SEQ ID NO: 1397756 - DNA, 15 bp, Homo sapiens
attagggggaaatgc

SEQ ID NO: 1397757 - DNA, 15 bp, Homo sapiens
gattagggggaaatg

SEQ ID NO: 1397758 - DNA, 15 bp, Homo sapiens
agattagggggaaat

SEQ ID NO: 1397759 - DNA, 15 bp, Homo sapiens
tagattagggggaaa

SEQ ID NO: 1397760 - DNA, 15 bp, Homo sapiens
ttagattagggggaa

SEQ ID NO: 1397761 - DNA, 15 bp, Homo sapiens
attagattaggggga

SEQ ID NO: 1397762 - DNA, 15 bp, Homo sapiens
gattagattaggggg

SEQ ID NO: 1397763 - DNA, 15 bp, Homo sapiens
agattagattagggg

SEQ ID NO: 1397764 - DNA, 15 bp, Homo sapiens
tagattagattaggg

SEQ ID NO: 1397765 - DNA, 15 bp, Homo sapiens
gtagattagattagg

SEQ ID NO: 1397766 - DNA, 15 bp, Homo sapiens
ggtagattagattag

SEQ ID NO: 1397767 - DNA, 15 bp, Homo sapiens
aggtagattagatta

SEQ ID NO: 1397768 - DNA, 15 bp, Homo sapiens
gaggtagattagatt

SEQ ID NO: 1397769 - DNA, 15 bp, Homo sapiens
tgaggtagattagat

SEQ ID NO: 1397770 - DNA, 15 bp, Homo sapiens
ctgaggtagattaga

SEQ ID NO: 1397771 - DNA, 15 bp, Homo sapiens
actgaggtagattag

SEQ ID NO: 1397772 - DNA, 15 bp, Homo sapiens
cactgaggtagatta

SEQ ID NO: 1397773 - DNA, 15 bp, Homo sapiens
tcactgaggtagatt

SEQ ID NO: 1397774 - DNA, 15 bp, Homo sapiens
atcactgaggtagat

SEQ ID NO: 1397775 - DNA, 15 bp, Homo sapiens
aatcactgaggtaga

SEQ ID NO: 1397776 - DNA, 15 bp, Homo sapiens
aaatcactgaggtag

SEQ ID NO: 1397777 - DNA, 15 bp, Homo sapiens
taaatcactgaggta

SEQ ID NO: 1397778 - DNA, 15 bp, Homo sapiens
ctaaatcactgaggt

SEQ ID NO: 1397779 - DNA, 15 bp, Homo sapiens
cctaaatcactgagg

SEQ ID NO: 1397780 - DNA, 15 bp, Homo sapiens
tcctaaatcactgag

SEQ ID NO: 1397781 - DNA, 15 bp, Homo sapiens
gtcctaaatcactga

SEQ ID NO: 1397782 - DNA, 15 bp, Homo sapiens
agtcctaaatcactg

SEQ ID NO: 1397783 - DNA, 15 bp, Homo sapiens
tagtcctaaatcact

SEQ ID NO: 1397784 - DNA, 15 bp, Homo sapiens
ttagtcctaaatcac

SEQ ID NO: 1397785 - DNA, 15 bp, Homo sapiens
gttagtcctaaatca

SEQ ID NO: 1397786 - DNA, 15 bp, Homo sapiens
agttagtcctaaatc

SEQ ID NO: 1397787 - DNA, 15 bp, Homo sapiens
gagttagtcctaaat

SEQ ID NO: 1397788 - DNA, 15 bp, Homo sapiens
agagttagtcctaaa

SEQ ID NO: 1397789 - DNA, 15 bp, Homo sapiens
aagagttagtcctaa

SEQ ID NO: 1397790 - DNA, 15 bp, Homo sapiens
gaagagttagtccta

SEQ ID NO: 1397791 - DNA, 15 bp, Homo sapiens
ggaagagttagtcct

SEQ ID NO: 1397792 - DNA, 15 bp, Homo sapiens
aggaagagttagtcc

SEQ ID NO: 1397793 - DNA, 15 bp, Homo sapiens
taggaagagttagtc

SEQ ID NO: 1397794 - DNA, 15 bp, Homo sapiens
ctaggaagagttagt

SEQ ID NO: 1397795 - DNA, 15 bp, Homo sapiens
tctaggaagagttag

SEQ ID NO: 1397796 - DNA, 15 bp, Homo sapiens
ttctaggaagagtta

SEQ ID NO: 1397797 - DNA, 15 bp, Homo sapiens
attctaggaagagtt

SEQ ID NO: 1397798 - DNA, 15 bp, Homo sapiens
cattctaggaagagt

SEQ ID NO: 1397799 - DNA, 15 bp, Homo sapiens
acattctaggaagag

SEQ ID NO: 1397800 - DNA, 15 bp, Homo sapiens
aacattctaggaaga

SEQ ID NO: 1397801 - DNA, 15 bp, Homo sapiens
aaacattctaggaag

SEQ ID NO: 1397802 - DNA, 15 bp, Homo sapiens
taaacattctaggaa

SEQ ID NO: 1397803 - DNA, 15 bp, Homo sapiens
ctaaacattctagga

SEQ ID NO: 1397804 - DNA, 15 bp, Homo sapiens
actaaacattctagg

SEQ ID NO: 1397805 - DNA, 15 bp, Homo sapiens
aactaaacattctag

SEQ ID NO: 1397806 - DNA, 15 bp, Homo sapiens
taactaaacattcta

SEQ ID NO: 1397807 - DNA, 15 bp, Homo sapiens
gtaactaaacattct

SEQ ID NO: 1397808 - DNA, 15 bp, Homo sapiens
tgtaactaaacattc

SEQ ID NO: 1397809 - DNA, 15 bp, Homo sapiens
ttgtaactaaacatt

SEQ ID NO: 1397810 - DNA, 15 bp, Homo sapiens
tttgtaactaaacat

SEQ ID NO: 1397811 - DNA, 15 bp, Homo sapiens
ctttgtaactaaaca

SEQ ID NO: 1397812 - DNA, 15 bp, Homo sapiens
tctttgtaactaaac

SEQ ID NO: 1397813 - DNA, 15 bp, Homo sapiens
atctttgtaactaaa

SEQ ID NO: 1397814 - DNA, 15 bp, Homo sapiens
tatctttgtaactaa

SEQ ID NO: 1397815 - DNA, 15 bp, Homo sapiens
ttatctttgtaacta

SEQ ID NO: 1397816 - DNA, 15 bp, Homo sapiens
cttatctttgtaact

SEQ ID NO: 1397817 - DNA, 15 bp, Homo sapiens
gcttatctttgtaac

SEQ ID NO: 1397818 - DNA, 15 bp, Homo sapiens
agcttatctttgtaa

SEQ ID NO: 1397819 - DNA, 15 bp, Homo sapiens
aagcttatctttgta

SEQ ID NO: 1397820 - DNA, 15 bp, Homo sapiens
caagcttatctttgt

SEQ ID NO: 1397821 - DNA, 15 bp, Homo sapiens
gcaagcttatctttg

SEQ ID NO: 1397822 - DNA, 15 bp, Homo sapiens
tgcaagcttatcttt

SEQ ID NO: 1397823 - DNA, 15 bp, Homo sapiens
gtgcaagcttatctt

SEQ ID NO: 1397824 - DNA, 15 bp, Homo sapiens
tatgtgcaagcttat

SEQ ID NO: 1397825 - DNA, 15 bp, Homo sapiens
atatgtgcaagctta

SEQ ID NO: 1397826 - DNA, 15 bp, Homo sapiens
tatatgtgcaagctt

SEQ ID NO: 1397827 - DNA, 15 bp, Homo sapiens
ttatatgtgcaagct

SEQ ID NO: 1397828 - DNA, 15 bp, Homo sapiens
tttatatgtgcaagc

SEQ ID NO: 1397829 - DNA, 15 bp, Homo sapiens
atttatatgtgcaag

SEQ ID NO: 1397830 - DNA, 15 bp, Homo sapiens
tatttatatgtgcaa

SEQ ID NO: 1397831 - DNA, 15 bp, Homo sapiens
gtatttatatgtgca

SEQ ID NO: 1397832 - DNA, 15 bp, Homo sapiens
cgtatttatatgtgc

SEQ ID NO: 1397833 - DNA, 15 bp, Homo sapiens
acgtatttatatgtg

SEQ ID NO: 1397834 - DNA, 15 bp, Homo sapiens
aacgtatttatatgt

SEQ ID NO: 1397835 - DNA, 15 bp, Homo sapiens
taacgtatttatatg

SEQ ID NO: 1397836 - DNA, 15 bp, Homo sapiens
ataacgtatttatat

SEQ ID NO: 1397837 - DNA, 15 bp, Homo sapiens
gataacgtatttata

SEQ ID NO: 1397838 - DNA, 15 bp, Homo sapiens
tgataacgtatttat

SEQ ID NO: 1397839 - DNA, 15 bp, Homo sapiens
atgataacgtattta

SEQ ID NO: 1397840 - DNA, 15 bp, Homo sapiens
aatgataacgtattt

SEQ ID NO: 1397841 - DNA, 15 bp, Homo sapiens
gaatgataacgtatt

SEQ ID NO: 1397842 - DNA, 15 bp, Homo sapiens
ggaatgataacgtat

SEQ ID NO: 1397843 - DNA, 15 bp, Homo sapiens
tggaatgataacgta

SEQ ID NO: 1397844 - DNA, 15 bp, Homo sapiens
ttggaatgataacgt

SEQ ID NO: 1397845 - DNA, 15 bp, Homo sapiens
tttggaatgataacg

SEQ ID NO: 1397846 - DNA, 15 bp, Homo sapiens
gtttggaatgataac

SEQ ID NO: 1397847 - DNA, 15 bp, Homo sapiens
ggtttggaatgataa

SEQ ID NO: 1397848 - DNA, 15 bp, Homo sapiens
gggtttggaatgata

SEQ ID NO: 1397849 - DNA, 15 bp, Homo sapiens
tgggtttggaatgat

SEQ ID NO: 1397850 - DNA, 15 bp, Homo sapiens
gtgggtttggaatga

SEQ ID NO: 1397851 - DNA, 15 bp, Homo sapiens
ggtgggtttggaatg

SEQ ID NO: 1397852 - DNA, 15 bp, Homo sapiens
aggtgggtttggaat

SEQ ID NO: 1397853 - DNA, 15 bp, Homo sapiens
gaggtgggtttggaa

SEQ ID NO: 1397854 - DNA, 15 bp, Homo sapiens
ggaggtgggtttgga

SEQ ID NO: 1397855 - DNA, 15 bp, Homo sapiens
aggaggtgggtttgg

SEQ ID NO: 1397856 - DNA, 15 bp, Homo sapiens
gaggaggtgggtttg

SEQ ID NO: 1397857 - DNA, 15 bp, Homo sapiens
tgaggaggtgggttt

SEQ ID NO: 1397858 - DNA, 15 bp, Homo sapiens
gtgaggaggtgggtt

SEQ ID NO: 1397859 - DNA, 15 bp, Homo sapiens
tgtgaggaggtgggt

SEQ ID NO: 1397860 - DNA, 15 bp, Homo sapiens
ctgtgaggaggtggg

SEQ ID NO: 1397861 - DNA, 15 bp, Homo sapiens
tctgtgaggaggtgg

SEQ ID NO: 1397862 - DNA, 15 bp, Homo sapiens
ttctgtgaggaggtg

SEQ ID NO: 1397863 - DNA, 15 bp, Homo sapiens
attctgtgaggaggt

SEQ ID NO: 1397864 - DNA, 15 bp, Homo sapiens
cattctgtgaggagg

SEQ ID NO: 1397865 - DNA, 15 bp, Homo sapiens
acattctgtgaggag

SEQ ID NO: 1397866 - DNA, 15 bp, Homo sapiens
cacattctgtgagga

SEQ ID NO: 1397867 - DNA, 15 bp, Homo sapiens
ccacattctgtgagg

SEQ ID NO: 1397868 - DNA, 15 bp, Homo sapiens
cccacattctgtgag

SEQ ID NO: 1397869 - DNA, 15 bp, Homo sapiens
tcccacattctgtga

SEQ ID NO: 1397870 - DNA, 15 bp, Homo sapiens
ttcccacattctgtg

SEQ ID NO: 1397871 - DNA, 15 bp, Homo sapiens
cttcccacattctgt

SEQ ID NO: 1397872 - DNA, 15 bp, Homo sapiens
ccttcccacattctg

SEQ ID NO: 1397873 - DNA, 15 bp, Homo sapiens
accttcccacattct

SEQ ID NO: 1397874 - DNA, 15 bp, Homo sapiens
gaccttcccacattc

SEQ ID NO: 1397875 - DNA, 15 bp, Homo sapiens
tgaccttcccacatt

SEQ ID NO: 1397876 - DNA, 15 bp, Homo sapiens
ctgaccttcccacat

SEQ ID NO: 1397877 - DNA, 15 bp, Homo sapiens
cctgaccttcccaca

SEQ ID NO: 1397878 - DNA, 15 bp, Homo sapiens
tcctgaccttcccac

SEQ ID NO: 1397879 - DNA, 15 bp, Homo sapiens
atcctgaccttccca

SEQ ID NO: 1397880 - DNA, 15 bp, Homo sapiens
aatcctgaccttccc

SEQ ID NO: 1397881 - DNA, 15 bp, Homo sapiens
gaatcctgaccttcc

SEQ ID NO: 1397882 - DNA, 15 bp, Homo sapiens
agaatcctgaccttc

SEQ ID NO: 1397883 - DNA, 15 bp, Homo sapiens
cagaatcctgacctt

SEQ ID NO: 1397884 - DNA, 15 bp, Homo sapiens
tcagaatcctgacct

SEQ ID NO: 1397885 - DNA, 15 bp, Homo sapiens
gtcagaatcctgacc

SEQ ID NO: 1397886 - DNA, 15 bp, Homo sapiens
ggtcagaatcctgac

SEQ ID NO: 1397887 - DNA, 15 bp, Homo sapiens
gggtcagaatcctga

SEQ ID NO: 1397888 - DNA, 15 bp, Homo sapiens
ggggtcagaatcctg

SEQ ID NO: 1397889 - DNA, 15 bp, Homo sapiens
aggggtcagaatcct

SEQ ID NO: 1397890 - DNA, 15 bp, Homo sapiens
gaggggtcagaatcc

SEQ ID NO: 1397891 - DNA, 15 bp, Homo sapiens
agaggggtcagaatc

SEQ ID NO: 1397892 - DNA, 15 bp, Homo sapiens
cagaggggtcagaat

SEQ ID NO: 1397893 - DNA, 15 bp, Homo sapiens
acagaggggtcagaa

SEQ ID NO: 1397894 - DNA, 15 bp, Homo sapiens
gacagaggggtcaga

SEQ ID NO: 1397895 - DNA, 15 bp, Homo sapiens
agacagaggggtcag

SEQ ID NO: 1397896 - DNA, 15 bp, Homo sapiens
aagacagaggggtca

SEQ ID NO: 1397897 - DNA, 15 bp, Homo sapiens
aaagacagaggggtc

SEQ ID NO: 1397898 - DNA, 15 bp, Homo sapiens
gaaagacagaggggt

SEQ ID NO: 1397899 - DNA, 15 bp, Homo sapiens
ggaaagacagagggg

SEQ ID NO: 1397900 - DNA, 15 bp, Homo sapiens
aggaaagacagaggg

SEQ ID NO: 1397901 - DNA, 15 bp, Homo sapiens
aaggaaagacagagg

SEQ ID NO: 1397902 - DNA, 15 bp, Homo sapiens
gaaggaaagacagag

SEQ ID NO: 1397903 - DNA, 15 bp, Homo sapiens
agaaggaaagacaga

SEQ ID NO: 1397904 - DNA, 15 bp, Homo sapiens
gagaaggaaagacag

SEQ ID NO: 1397905 - DNA, 15 bp, Homo sapiens
agagaaggaaagaca

SEQ ID NO: 1397906 - DNA, 15 bp, Homo sapiens
aagagaaggaaagac

SEQ ID NO: 1397907 - DNA, 15 bp, Homo sapiens
caagagaaggaaaga

SEQ ID NO: 1397908 - DNA, 15 bp, Homo sapiens
acaagagaaggaaag

SEQ ID NO: 1397909 - DNA, 15 bp, Homo sapiens
gacaagagaaggaaa

SEQ ID NO: 1397910 - DNA, 15 bp, Homo sapiens
agacaagagaaggaa

SEQ ID NO: 1397911 - DNA, 15 bp, Homo sapiens
gagacaagagaagga

SEQ ID NO: 1397912 - DNA, 15 bp, Homo sapiens
agagacaagagaagg

SEQ ID NO: 1397913 - DNA, 15 bp, Homo sapiens
gagagacaagagaag

SEQ ID NO: 1397914 - DNA, 15 bp, Homo sapiens
agagagacaagagaa

SEQ ID NO: 1397915 - DNA, 15 bp, Homo sapiens
gagagagacaagaga

SEQ ID NO: 1397916 - DNA, 15 bp, Homo sapiens
ggagagagacaagag

SEQ ID NO: 1397917 - DNA, 15 bp, Homo sapiens
aggagagagacaaga

SEQ ID NO: 1397918 - DNA, 15 bp, Homo sapiens
aaggagagagacaag

SEQ ID NO: 1397919 - DNA, 15 bp, Homo sapiens
gaaggagagagacaa

SEQ ID NO: 1397920 - DNA, 15 bp, Homo sapiens
agaaggagagagaca

SEQ ID NO: 1397921 - DNA, 15 bp, Homo sapiens
gagaaggagagagac

SEQ ID NO: 1397922 - DNA, 15 bp, Homo sapiens
ggagaaggagagaga

SEQ ID NO: 1397923 - DNA, 15 bp, Homo sapiens
cggagaaggagagag

SEQ ID NO: 1397924 - DNA, 15 bp, Homo sapiens
tcggagaaggagaga

SEQ ID NO: 1397925 - DNA, 15 bp, Homo sapiens
ctcggagaaggagag

SEQ ID NO: 1397926 - DNA, 15 bp, Homo sapiens
tctcggagaaggaga

SEQ ID NO: 1397927 - DNA, 15 bp, Homo sapiens
gtctcggagaaggag

SEQ ID NO: 1397928 - DNA, 15 bp, Homo sapiens
agtctcggagaagga

SEQ ID NO: 1397929 - DNA, 15 bp, Homo sapiens
cagtctcggagaagg

SEQ ID NO: 1397930 - DNA, 15 bp, Homo sapiens
tcagtctcggagaag

SEQ ID NO: 1397931 - DNA, 15 bp, Homo sapiens
ctcagtctcggagaa

SEQ ID NO: 1397932 - DNA, 15 bp, Homo sapiens
gctcagtctcggaga

SEQ ID NO: 1397933 - DNA, 15 bp, Homo sapiens
ggctcagtctcggag

SEQ ID NO: 1397934 - DNA, 15 bp, Homo sapiens
aggctcagtctcgga

SEQ ID NO: 1397935 - DNA, 15 bp, Homo sapiens
gaggctcagtctcgg

SEQ ID NO: 1397936 - DNA, 15 bp, Homo sapiens
agaggctcagtctcg

SEQ ID NO: 1397937 - DNA, 15 bp, Homo sapiens
aagaggctcagtctc

SEQ ID NO: 1397938 - DNA, 15 bp, Homo sapiens
caagaggctcagtct

SEQ ID NO: 1397939 - DNA, 15 bp, Homo sapiens
tcaagaggctcagtc

SEQ ID NO: 1397940 - DNA, 15 bp, Homo sapiens
atcaagaggctcagt

SEQ ID NO: 1397941 - DNA, 15 bp, Homo sapiens
aatcaagaggctcag

SEQ ID NO: 1397942 - DNA, 15 bp, Homo sapiens
aaatcaagaggctca

SEQ ID NO: 1397943 - DNA, 15 bp, Homo sapiens
gaaatcaagaggctc

SEQ ID NO: 1397944 - DNA, 15 bp, Homo sapiens
agaaatcaagaggct

SEQ ID NO: 1397945 - DNA, 15 bp, Homo sapiens
cagaaatcaagaggc

SEQ ID NO: 1397946 - DNA, 15 bp, Homo sapiens
tcagaaatcaagagg

SEQ ID NO: 1397947 - DNA, 15 bp, Homo sapiens
gtcagaaatcaagag

SEQ ID NO: 1397948 - DNA, 15 bp, Homo sapiens
agtcagaaatcaaga

SEQ ID NO: 1397949 - DNA, 15 bp, Homo sapiens
gagtcagaaatcaag

SEQ ID NO: 1397950 - DNA, 15 bp, Homo sapiens
agagtcagaaatcaa

SEQ ID NO: 1397951 - DNA, 15 bp, Homo sapiens
gagagtcagaaatca

SEQ ID NO: 1397952 - DNA, 15 bp, Homo sapiens
tgagagtcagaaatc

SEQ ID NO: 1397953 - DNA, 15 bp, Homo sapiens
atgagagtcagaaat

SEQ ID NO: 1397954 - DNA, 15 bp, Homo sapiens
catgagagtcagaaa

SEQ ID NO: 1397955 - DNA, 15 bp, Homo sapiens
acatgagagtcagaa

SEQ ID NO: 1397956 - DNA, 15 bp, Homo sapiens
aacatgagagtcaga

SEQ ID NO: 1397957 - DNA, 15 bp, Homo sapiens
gaacatgagagtcag

SEQ ID NO: 1397958 - DNA, 15 bp, Homo sapiens
tgaacatgagagtca

SEQ ID NO: 1397959 - DNA, 15 bp, Homo sapiens
gtgaacatgagagtc

SEQ ID NO: 1397960 - DNA, 15 bp, Homo sapiens
agtgaacatgagagt

SEQ ID NO: 1397961 - DNA, 15 bp, Homo sapiens
aagtgaacatgagag

SEQ ID NO: 1397962 - DNA, 15 bp, Homo sapiens
taagtgaacatgaga

SEQ ID NO: 1397963 - DNA, 15 bp, Homo sapiens
ataagtgaacatgag

SEQ ID NO: 1397964 - DNA, 15 bp, Homo sapiens
tataagtgaacatga

SEQ ID NO: 1397965 - DNA, 15 bp, Homo sapiens
ctataagtgaacatg

SEQ ID NO: 1397966 - DNA, 15 bp, Homo sapiens
actataagtgaacat

SEQ ID NO: 1397967 - DNA, 15 bp, Homo sapiens
gactataagtgaaca

SEQ ID NO: 1397968 - DNA, 15 bp, Homo sapiens
ggactataagtgaac

SEQ ID NO: 1397969 - DNA, 15 bp, Homo sapiens
aggactataagtgaa

SEQ ID NO: 1397970 - DNA, 15 bp, Homo sapiens
gaggactataagtga

SEQ ID NO: 1397971 - DNA, 15 bp, Homo sapiens
cgaggactataagtg

SEQ ID NO: 1397972 - DNA, 15 bp, Homo sapiens
tcgaggactataagt

SEQ ID NO: 1397973 - DNA, 15 bp, Homo sapiens
gtcgaggactataag

SEQ ID NO: 1397974 - DNA, 15 bp, Homo sapiens
ggtcgaggactataa

SEQ ID NO: 1397975 - DNA, 15 bp, Homo sapiens
aggtcgaggactata

SEQ ID NO: 1397976 - DNA, 15 bp, Homo sapiens
gaggtcgaggactat

SEQ ID NO: 1397977 - DNA, 15 bp, Homo sapiens
agaggtcgaggacta

SEQ ID NO: 1397978 - DNA, 15 bp, Homo sapiens
aagaggtcgaggact

SEQ ID NO: 1397979 - DNA, 15 bp, Homo sapiens
aaagaggtcgaggac

SEQ ID NO: 1397980 - DNA, 15 bp, Homo sapiens
caaagaggtcgagga

SEQ ID NO: 1397981 - DNA, 15 bp, Homo sapiens
tcaaagaggtcgagg

SEQ ID NO: 1397982 - DNA, 15 bp, Homo sapiens
ttcaaagaggtcgag

SEQ ID NO: 1397983 - DNA, 15 bp, Homo sapiens
cttcaaagaggtcga

SEQ ID NO: 1397984 - DNA, 15 bp, Homo sapiens
gcttcaaagaggtcg

SEQ ID NO: 1397985 - DNA, 15 bp, Homo sapiens
ggcttcaaagaggtc

SEQ ID NO: 1397986 - DNA, 15 bp, Homo sapiens
aggcttcaaagaggt

SEQ ID NO: 1397987 - DNA, 15 bp, Homo sapiens
caggcttcaaagagg

SEQ ID NO: 1397988 - DNA, 15 bp, Homo sapiens
tcaggcttcaaagag

SEQ ID NO: 1397989 - DNA, 15 bp, Homo sapiens
atcaggcttcaaaga

SEQ ID NO: 1397990 - DNA, 15 bp, Homo sapiens
tatcaggcttcaaag

SEQ ID NO: 1397991 - DNA, 15 bp, Homo sapiens
atatcaggcttcaaa

SEQ ID NO: 1397992 - DNA, 15 bp, Homo sapiens
aatatcaggcttcaa

SEQ ID NO: 1397993 - DNA, 15 bp, Homo sapiens
caatatcaggcttca

SEQ ID NO: 1397994 - DNA, 15 bp, Homo sapiens
tcaatatcaggcttc

SEQ ID NO: 1397995 - DNA, 15 bp, Homo sapiens
atcaatatcaggctt

SEQ ID NO: 1397996 - DNA, 15 bp, Homo sapiens
aatcaatatcaggct

SEQ ID NO: 1397997 - DNA, 15 bp, Homo sapiens
taatcaatatcaggc

SEQ ID NO: 1397998 - DNA, 15 bp, Homo sapiens
gtaatcaatatcagg

SEQ ID NO: 1397999 - DNA, 15 bp, Homo sapiens
ggtaatcaatatcag

SEQ ID NO: 1398000 - DNA, 15 bp, Homo sapiens
cggtaatcaatatca

SEQ ID NO: 1398001 - DNA, 15 bp, Homo sapiens
acggtaatcaatatc

SEQ ID NO: 1398002 - DNA, 15 bp, Homo sapiens
cacggtaatcaatat

SEQ ID NO: 1398003 - DNA, 15 bp, Homo sapiens
tcacggtaatcaata

SEQ ID NO: 1398004 - DNA, 15 bp, Homo sapiens
ttcacggtaatcaat

SEQ ID NO: 1398005 - DNA, 15 bp, Homo sapiens
tttcacggtaatcaa

SEQ ID NO: 1398006 - DNA, 15 bp, Homo sapiens
atttcacggtaatca

SEQ ID NO: 1398007 - DNA, 15 bp, Homo sapiens
catttcacggtaatc

SEQ ID NO: 1398008 - DNA, 15 bp, Homo sapiens
acatttcacggtaat

SEQ ID NO: 1398009 - DNA, 15 bp, Homo sapiens
gacatttcacggtaa

SEQ ID NO: 1398010 - DNA, 15 bp, Homo sapiens
tgacatttcacggta

SEQ ID NO: 1398011 - DNA, 15 bp, Homo sapiens
ttgacatttcacggt

SEQ ID NO: 1398012 - DNA, 15 bp, Homo sapiens
attgacatttcacgg

SEQ ID NO: 1398013 - DNA, 15 bp, Homo sapiens
aattgacatttcacg

SEQ ID NO: 1398014 - DNA, 15 bp, Homo sapiens
caattgacatttcac
